United States Patent Application Publication US 2015/0141320 A1 - sequence listing, part 41

SEQ ID NO: 1583958 - DNA, 15 bp, Homo sapiens
acaagaacagagggc

SEQ ID NO: 1583959 - DNA, 15 bp, Homo sapiens
gacaagaacagaggg

SEQ ID NO: 1583960 - DNA, 15 bp, Homo sapiens
agacaagaacagagg

SEQ ID NO: 1583961 - DNA, 15 bp, Homo sapiens
gagacaagaacagag

SEQ ID NO: 1583962 - DNA, 15 bp, Homo sapiens
cgagacaagaacaga

SEQ ID NO: 1583963 - DNA, 15 bp, Homo sapiens
gcgagacaagaacag

SEQ ID NO: 1583964 - DNA, 15 bp, Homo sapiens
tgcgagacaagaaca

SEQ ID NO: 1583965 - DNA, 15 bp, Homo sapiens
ttgcgagacaagaac

SEQ ID NO: 1583966 - DNA, 15 bp, Homo sapiens
tttgcgagacaagaa

SEQ ID NO: 1583967 - DNA, 15 bp, Homo sapiens
ctttgcgagacaaga

SEQ ID NO: 1583968 - DNA, 15 bp, Homo sapiens
actttgcgagacaag

SEQ ID NO: 1583969 - DNA, 15 bp, Homo sapiens
cactttgcgagacaa

SEQ ID NO: 1583970 - DNA, 15 bp, Homo sapiens
tcactttgcgagaca

SEQ ID NO: 1583971 - DNA, 15 bp, Homo sapiens
gtcactttgcgagac

SEQ ID NO: 1583972 - DNA, 15 bp, Homo sapiens
tgtcactttgcgaga

SEQ ID NO: 1583973 - DNA, 15 bp, Homo sapiens
gtgtcactttgcgag

SEQ ID NO: 1583974 - DNA, 15 bp, Homo sapiens
agtgtcactttgcga

SEQ ID NO: 1583975 - DNA, 15 bp, Homo sapiens
cagtgtcactttgcg

SEQ ID NO: 1583976 - DNA, 15 bp, Homo sapiens
ccagtgtcactttgc

SEQ ID NO: 1583977 - DNA, 15 bp, Homo sapiens
tccagtgtcactttg

SEQ ID NO: 1583978 - DNA, 15 bp, Homo sapiens
ctccagtgtcacttt

SEQ ID NO: 1583979 - DNA, 15 bp, Homo sapiens
cctccagtgtcactt

SEQ ID NO: 1583980 - DNA, 15 bp, Homo sapiens
ccctccagtgtcact

SEQ ID NO: 1583981 - DNA, 15 bp, Homo sapiens
tccctccagtgtcac

SEQ ID NO: 1583982 - DNA, 15 bp, Homo sapiens
ctccctccagtgtca

SEQ ID NO: 1583983 - DNA, 15 bp, Homo sapiens
tctccctccagtgtc

SEQ ID NO: 1583984 - DNA, 15 bp, Homo sapiens
ctctccctccagtgt

SEQ ID NO: 1583985 - DNA, 15 bp, Homo sapiens
tctctccctccagtg

SEQ ID NO: 1583986 - DNA, 15 bp, Homo sapiens
ttctctccctccagt

SEQ ID NO: 1583987 - DNA, 15 bp, Homo sapiens
tttctctccctccag

SEQ ID NO: 1583988 - DNA, 15 bp, Homo sapiens
ctttctctccctcca

SEQ ID NO: 1583989 - DNA, 15 bp, Homo sapiens
cctttctctccctcc

SEQ ID NO: 1583990 - DNA, 15 bp, Homo sapiens
tcctttctctccctc

SEQ ID NO: 1583991 - DNA, 15 bp, Homo sapiens
ctcctttctctccct

SEQ ID NO: 1583992 - DNA, 15 bp, Homo sapiens
actcctttctctccc

SEQ ID NO: 1583993 - DNA, 15 bp, Homo sapiens
aactcctttctctcc

SEQ ID NO: 1583994 - DNA, 15 bp, Homo sapiens
aaactcctttctctc

SEQ ID NO: 1583995 - DNA, 15 bp, Homo sapiens
gaaactcctttctct

SEQ ID NO: 1583996 - DNA, 15 bp, Homo sapiens
ggaaactcctttctc

SEQ ID NO: 1583997 - DNA, 15 bp, Homo sapiens
gggaaactcctttct

SEQ ID NO: 1583998 - DNA, 15 bp, Homo sapiens
agggaaactcctttc

SEQ ID NO: 1583999 - DNA, 15 bp, Homo sapiens
cagggaaactccttt

SEQ ID NO: 1584000 - DNA, 15 bp, Homo sapiens
gcagggaaactcctt

SEQ ID NO: 1584001 - DNA, 15 bp, Homo sapiens
cgcagggaaactcct

SEQ ID NO: 1584002 - DNA, 15 bp, Homo sapiens
ccgcagggaaactcc

SEQ ID NO: 1584003 - DNA, 15 bp, Homo sapiens
gccgcagggaaactc

SEQ ID NO: 1584004 - DNA, 15 bp, Homo sapiens
ggccgcagggaaact

SEQ ID NO: 1584005 - DNA, 15 bp, Homo sapiens
tggccgcagggaaac

SEQ ID NO: 1584006 - DNA, 15 bp, Homo sapiens
gtggccgcagggaaa

SEQ ID NO: 1584007 - DNA, 15 bp, Homo sapiens
cgtggccgcagggaa

SEQ ID NO: 1584008 - DNA, 15 bp, Homo sapiens
gcgtggccgcaggga

SEQ ID NO: 1584009 - DNA, 15 bp, Homo sapiens
agcgtggccgcaggg

SEQ ID NO: 1584010 - DNA, 15 bp, Homo sapiens
cagcgtggccgcagg

SEQ ID NO: 1584011 - DNA, 15 bp, Homo sapiens
ccagcgtggccgcag

SEQ ID NO: 1584012 - DNA, 15 bp, Homo sapiens
accagcgtggccgca

SEQ ID NO: 1584013 - DNA, 15 bp, Homo sapiens
caccagcgtggccgc

SEQ ID NO: 1584014 - DNA, 15 bp, Homo sapiens
acaccagcgtggccg

SEQ ID NO: 1584015 - DNA, 15 bp, Homo sapiens
tacaccagcgtggcc

SEQ ID NO: 1584016 - DNA, 15 bp, Homo sapiens
ttacaccagcgtggc

SEQ ID NO: 1584017 - DNA, 15 bp, Homo sapiens
cttacaccagcgtgg

SEQ ID NO: 1584018 - DNA, 15 bp, Homo sapiens
gcttacaccagcgtg

SEQ ID NO: 1584019 - DNA, 15 bp, Homo sapiens
tgcttacaccagcgt

SEQ ID NO: 1584020 - DNA, 15 bp, Homo sapiens
ttgcttacaccagcg

SEQ ID NO: 1584021 - DNA, 15 bp, Homo sapiens
tttgcttacaccagc

SEQ ID NO: 1584022 - DNA, 15 bp, Homo sapiens
ctttgcttacaccag

SEQ ID NO: 1584023 - DNA, 15 bp, Homo sapiens
cctttgcttacacca

SEQ ID NO: 1584024 - DNA, 15 bp, Homo sapiens
gcctttgcttacacc

SEQ ID NO: 1584025 - DNA, 15 bp, Homo sapiens
tcagcctttgcttac

SEQ ID NO: 1584026 - DNA, 15 bp, Homo sapiens
atcagcctttgctta

SEQ ID NO: 1584027 - DNA, 15 bp, Homo sapiens
catcagcctttgctt

SEQ ID NO: 1584028 - DNA, 15 bp, Homo sapiens
ccatcagcctttgct

SEQ ID NO: 1584029 - DNA, 15 bp, Homo sapiens
gccatcagcctttgc

SEQ ID NO: 1584030 - DNA, 15 bp, Homo sapiens
cgccatcagcctttg

SEQ ID NO: 1584031 - DNA, 15 bp, Homo sapiens
tcgccatcagccttt

SEQ ID NO: 1584032 - DNA, 15 bp, Homo sapiens
atcgccatcagcctt

SEQ ID NO: 1584033 - DNA, 15 bp, Homo sapiens
aatcgccatcagcct

SEQ ID NO: 1584034 - DNA, 15 bp, Homo sapiens
gaatcgccatcagcc

SEQ ID NO: 1584035 - DNA, 15 bp, Homo sapiens
ggaatcgccatcagc

SEQ ID NO: 1584036 - DNA, 15 bp, Homo sapiens
cggaatcgccatcag

SEQ ID NO: 1584037 - DNA, 15 bp, Homo sapiens
gcggaatcgccatca

SEQ ID NO: 1584038 - DNA, 15 bp, Homo sapiens
cgcggaatcgccatc

SEQ ID NO: 1584039 - DNA, 15 bp, Homo sapiens
gcgcggaatcgccat

SEQ ID NO: 1584040 - DNA, 15 bp, Homo sapiens
tgcgcggaatcgcca

SEQ ID NO: 1584041 - DNA, 15 bp, Homo sapiens
atgcgcggaatcgcc

SEQ ID NO: 1584042 - DNA, 15 bp, Homo sapiens
gatgcgcggaatcgc

SEQ ID NO: 1584043 - DNA, 15 bp, Homo sapiens
agatgcgcggaatcg

SEQ ID NO: 1584044 - DNA, 15 bp, Homo sapiens
tagatgcgcggaatc

SEQ ID NO: 1584045 - DNA, 15 bp, Homo sapiens
ctagatgcgcggaat

SEQ ID NO: 1584046 - DNA, 15 bp, Homo sapiens
cctagatgcgcggaa

SEQ ID NO: 1584047 - DNA, 15 bp, Homo sapiens
ccctagatgcgcgga

SEQ ID NO: 1584048 - DNA, 15 bp, Homo sapiens
gccctagatgcgcgg

SEQ ID NO: 1584049 - DNA, 15 bp, Homo sapiens
ggccctagatgcgcg

SEQ ID NO: 1584050 - DNA, 15 bp, Homo sapiens
cggccctagatgcgc

SEQ ID NO: 1584051 - DNA, 15 bp, Homo sapiens
tcggccctagatgcg

SEQ ID NO: 1584052 - DNA, 15 bp, Homo sapiens
ctcggccctagatgc

SEQ ID NO: 1584053 - DNA, 15 bp, Homo sapiens
gctcggccctagatg

SEQ ID NO: 1584054 - DNA, 15 bp, Homo sapiens
ggctcggccctagat

SEQ ID NO: 1584055 - DNA, 15 bp, Homo sapiens
aggctcggccctaga

SEQ ID NO: 1584056 - DNA, 15 bp, Homo sapiens
caggctcggccctag

SEQ ID NO: 1584057 - DNA, 15 bp, Homo sapiens
ccaggctcggcccta

SEQ ID NO: 1584058 - DNA, 15 bp, Homo sapiens
cccaggctcggccct

SEQ ID NO: 1584059 - DNA, 15 bp, Homo sapiens
gcccaggctcggccc

SEQ ID NO: 1584060 - DNA, 15 bp, Homo sapiens
ggcccaggctcggcc

SEQ ID NO: 1584061 - DNA, 15 bp, Homo sapiens
aggcccaggctcggc

SEQ ID NO: 1584062 - DNA, 15 bp, Homo sapiens
caggcccaggctcgg

SEQ ID NO: 1584063 - DNA, 15 bp, Homo sapiens
gcaggcccaggctcg

SEQ ID NO: 1584064 - DNA, 15 bp, Homo sapiens
cgcaggcccaggctc

SEQ ID NO: 1584065 - DNA, 15 bp, Homo sapiens
gcgcaggcccaggct

SEQ ID NO: 1584066 - DNA, 15 bp, Homo sapiens
ggcgcaggcccaggc

SEQ ID NO: 1584067 - DNA, 15 bp, Homo sapiens
gggcgcaggcccagg

SEQ ID NO: 1584068 - DNA, 15 bp, Homo sapiens
ggggcgcaggcccag

SEQ ID NO: 1584069 - DNA, 15 bp, Homo sapiens
gggggcgcaggccca

SEQ ID NO: 1584070 - DNA, 15 bp, Homo sapiens
agggggcgcaggccc

SEQ ID NO: 1584071 - DNA, 15 bp, Homo sapiens
gagggggcgcaggcc

SEQ ID NO: 1584072 - DNA, 15 bp, Homo sapiens
cgagggggcgcaggc

SEQ ID NO: 1584073 - DNA, 15 bp, Homo sapiens
ccgagggggcgcagg

SEQ ID NO: 1584074 - DNA, 15 bp, Homo sapiens
tccgagggggcgcag

SEQ ID NO: 1584075 - DNA, 15 bp, Homo sapiens
atccgagggggcgca

SEQ ID NO: 1584076 - DNA, 15 bp, Homo sapiens
aatccgagggggcgc

SEQ ID NO: 1584077 - DNA, 15 bp, Homo sapiens
gaatccgagggggcg

SEQ ID NO: 1584078 - DNA, 15 bp, Homo sapiens
ggaatccgagggggc

SEQ ID NO: 1584079 - DNA, 15 bp, Homo sapiens
aggaatccgaggggg

SEQ ID NO: 1584080 - DNA, 15 bp, Homo sapiens
caggaatccgagggg

SEQ ID NO: 1584081 - DNA, 15 bp, Homo sapiens
ccaggaatccgaggg

SEQ ID NO: 1584082 - DNA, 15 bp, Homo sapiens
gccaggaatccgagg

SEQ ID NO: 1584083 - DNA, 15 bp, Homo sapiens
cgccaggaatccgag

SEQ ID NO: 1584084 - DNA, 15 bp, Homo sapiens
ccgccaggaatccga

SEQ ID NO: 1584085 - DNA, 15 bp, Homo sapiens
tccgccaggaatccg

SEQ ID NO: 1584086 - DNA, 15 bp, Homo sapiens
ctccgccaggaatcc

SEQ ID NO: 1584087 - DNA, 15 bp, Homo sapiens
gctccgccaggaatc

SEQ ID NO: 1584088 - DNA, 15 bp, Homo sapiens
ggctccgccaggaat

SEQ ID NO: 1584089 - DNA, 15 bp, Homo sapiens
cggctccgccaggaa

SEQ ID NO: 1584090 - DNA, 15 bp, Homo sapiens
gcggctccgccagga

SEQ ID NO: 1584091 - DNA, 15 bp, Homo sapiens
tgcggctccgccagg

SEQ ID NO: 1584092 - DNA, 15 bp, Homo sapiens
ctgcggctccgccag

SEQ ID NO: 1584093 - DNA, 15 bp, Homo sapiens
gctgcggctccgcca

SEQ ID NO: 1584094 - DNA, 15 bp, Homo sapiens
ggctgcggctccgcc

SEQ ID NO: 1584095 - DNA, 15 bp, Homo sapiens
tggctgcggctccgc

SEQ ID NO: 1584096 - DNA, 15 bp, Homo sapiens
ctggctgcggctccg

SEQ ID NO: 1584097 - DNA, 15 bp, Homo sapiens
gctggctgcggctcc

SEQ ID NO: 1584098 - DNA, 15 bp, Homo sapiens
cgctggctgcggctc

SEQ ID NO: 1584099 - DNA, 15 bp, Homo sapiens
tcgctggctgcggct

SEQ ID NO: 1584100 - DNA, 15 bp, Homo sapiens
ttcgctggctgcggc

SEQ ID NO: 1584101 - DNA, 15 bp, Homo sapiens
cttcgctggctgcgg

SEQ ID NO: 1584102 - DNA, 15 bp, Homo sapiens
gcttcgctggctgcg

SEQ ID NO: 1584103 - DNA, 15 bp, Homo sapiens
tgcttcgctggctgc

SEQ ID NO: 1584104 - DNA, 15 bp, Homo sapiens
ctgcttcgctggctg

SEQ ID NO: 1584105 - DNA, 15 bp, Homo sapiens
tctgcttcgctggct

SEQ ID NO: 1584106 - DNA, 15 bp, Homo sapiens
ctctgcttcgctggc

SEQ ID NO: 1584107 - DNA, 15 bp, Homo sapiens
gctctgcttcgctgg

SEQ ID NO: 1584108 - DNA, 15 bp, Homo sapiens
cgctctgcttcgctg

SEQ ID NO: 1584109 - DNA, 15 bp, Homo sapiens
acgctctgcttcgct

SEQ ID NO: 1584110 - DNA, 15 bp, Homo sapiens
cacgctctgcttcgc

SEQ ID NO: 1584111 - DNA, 15 bp, Homo sapiens
ccacgctctgcttcg

SEQ ID NO: 1584112 - DNA, 15 bp, Homo sapiens
accacgctctgcttc

SEQ ID NO: 1584113 - DNA, 15 bp, Homo sapiens
gaccacgctctgctt

SEQ ID NO: 1584114 - DNA, 15 bp, Homo sapiens
cgaccacgctctgct

SEQ ID NO: 1584115 - DNA, 15 bp, Homo sapiens
ccgaccacgctctgc

SEQ ID NO: 1584116 - DNA, 15 bp, Homo sapiens
tccgaccacgctctg

SEQ ID NO: 1584117 - DNA, 15 bp, Homo sapiens
ttccgaccacgctct

SEQ ID NO: 1584118 - DNA, 15 bp, Homo sapiens
attccgaccacgctc

SEQ ID NO: 1584119 - DNA, 15 bp, Homo sapiens
tattccgaccacgct

SEQ ID NO: 1584120 - DNA, 15 bp, Homo sapiens
ctattccgaccacgc

SEQ ID NO: 1584121 - DNA, 15 bp, Homo sapiens
tctattccgaccacg

SEQ ID NO: 1584122 - DNA, 15 bp, Homo sapiens
ctctattccgaccac

SEQ ID NO: 1584123 - DNA, 15 bp, Homo sapiens
cctctattccgacca

SEQ ID NO: 1584124 - DNA, 15 bp, Homo sapiens
gcctctattccgacc

SEQ ID NO: 1584125 - DNA, 15 bp, Homo sapiens
tgcctctattccgac

SEQ ID NO: 1584126 - DNA, 15 bp, Homo sapiens
ctgcctctattccga

SEQ ID NO: 1584127 - DNA, 15 bp, Homo sapiens
gctgcctctattccg

SEQ ID NO: 1584128 - DNA, 15 bp, Homo sapiens
cgctgcctctattcc

SEQ ID NO: 1584129 - DNA, 15 bp, Homo sapiens
tcgctgcctctattc

SEQ ID NO: 1584130 - DNA, 15 bp, Homo sapiens
gtcgctgcctctatt

SEQ ID NO: 1584131 - DNA, 15 bp, Homo sapiens
ggtcgctgcctctat

SEQ ID NO: 1584132 - DNA, 15 bp, Homo sapiens
cggtcgctgcctcta

SEQ ID NO: 1584133 - DNA, 15 bp, Homo sapiens
acggtcgctgcctct

SEQ ID NO: 1584134 - DNA, 15 bp, Homo sapiens
cacggtcgctgcctc

SEQ ID NO: 1584135 - DNA, 15 bp, Homo sapiens
acacggtcgctgcct

SEQ ID NO: 1584136 - DNA, 15 bp, Homo sapiens
cacacggtcgctgcc

SEQ ID NO: 1584137 - DNA, 15 bp, Homo sapiens
tcacacggtcgctgc

SEQ ID NO: 1584138 - DNA, 15 bp, Homo sapiens
ctcacacggtcgctg

SEQ ID NO: 1584139 - DNA, 15 bp, Homo sapiens
cctcacacggtcgct

SEQ ID NO: 1584140 - DNA, 15 bp, Homo sapiens
acctcacacggtcgc

SEQ ID NO: 1584141 - DNA, 15 bp, Homo sapiens
gacctcacacggtcg

SEQ ID NO: 1584142 - DNA, 15 bp, Homo sapiens
cgacctcacacggtc

SEQ ID NO: 1584143 - DNA, 15 bp, Homo sapiens
gcgacctcacacggt

SEQ ID NO: 1584144 - DNA, 15 bp, Homo sapiens
cgcgacctcacacgg

SEQ ID NO: 1584145 - DNA, 15 bp, Homo sapiens
gcgcgacctcacacg

SEQ ID NO: 1584146 - DNA, 15 bp, Homo sapiens
ggcgcgacctcacac

SEQ ID NO: 1584147 - DNA, 15 bp, Homo sapiens
tggcgcgacctcaca

SEQ ID NO: 1584148 - DNA, 15 bp, Homo sapiens
ctggcgcgacctcac

SEQ ID NO: 1584149 - DNA, 15 bp, Homo sapiens
cctggcgcgacctca

SEQ ID NO: 1584150 - DNA, 15 bp, Homo sapiens
ccctggcgcgacctc

SEQ ID NO: 1584151 - DNA, 15 bp, Homo sapiens
tccctggcgcgacct

SEQ ID NO: 1584152 - DNA, 15 bp, Homo sapiens
ttccctggcgcgacc

SEQ ID NO: 1584153 - DNA, 15 bp, Homo sapiens
tttccctggcgcgac

SEQ ID NO: 1584154 - DNA, 15 bp, Homo sapiens
ctttccctggcgcga

SEQ ID NO: 1584155 - DNA, 15 bp, Homo sapiens
gctttccctggcgcg

SEQ ID NO: 1584156 - DNA, 15 bp, Homo sapiens
agctttccctggcgc

SEQ ID NO: 1584157 - DNA, 15 bp, Homo sapiens
gagctttccctggcg

SEQ ID NO: 1584158 - DNA, 15 bp, Homo sapiens
ggagctttccctggc

SEQ ID NO: 1584159 - DNA, 15 bp, Homo sapiens
cggagctttccctgg

SEQ ID NO: 1584160 - DNA, 15 bp, Homo sapiens
gcggagctttccctg

SEQ ID NO: 1584161 - DNA, 15 bp, Homo sapiens
cgcggagctttccct

SEQ ID NO: 1584162 - DNA, 15 bp, Homo sapiens
tcgcggagctttccc

SEQ ID NO: 1584163 - DNA, 15 bp, Homo sapiens
ctcgcggagctttcc

SEQ ID NO: 1584164 - DNA, 15 bp, Homo sapiens
cctcgcggagctttc

SEQ ID NO: 1584165 - DNA, 15 bp, Homo sapiens
ccctcgcggagcttt

SEQ ID NO: 1584166 - DNA, 15 bp, Homo sapiens
cccctcgcggagctt

SEQ ID NO: 1584167 - DNA, 15 bp, Homo sapiens
gcccctcgcggagct

SEQ ID NO: 1584168 - DNA, 15 bp, Homo sapiens
ggcccctcgcggagc

SEQ ID NO: 1584169 - DNA, 15 bp, Homo sapiens
tggcccctcgcggag

SEQ ID NO: 1584170 - DNA, 15 bp, Homo sapiens
ctggcccctcgcgga

SEQ ID NO: 1584171 - DNA, 15 bp, Homo sapiens
gctggcccctcgcgg

SEQ ID NO: 1584172 - DNA, 15 bp, Homo sapiens
cgctggcccctcgcg

SEQ ID NO: 1584173 - DNA, 15 bp, Homo sapiens
acgctggcccctcgc

SEQ ID NO: 1584174 - DNA, 15 bp, Homo sapiens
aacgctggcccctcg

SEQ ID NO: 1584175 - DNA, 15 bp, Homo sapiens
caacgctggcccctc

SEQ ID NO: 1584176 - DNA, 15 bp, Homo sapiens
ccaacgctggcccct

SEQ ID NO: 1584177 - DNA, 15 bp, Homo sapiens
cccaacgctggcccc

SEQ ID NO: 1584178 - DNA, 15 bp, Homo sapiens
gcccaacgctggccc

SEQ ID NO: 1584179 - DNA, 15 bp, Homo sapiens
ggcccaacgctggcc

SEQ ID NO: 1584180 - DNA, 15 bp, Homo sapiens
gggcccaacgctggc

SEQ ID NO: 1584181 - DNA, 15 bp, Homo sapiens
agggcccaacgctgg

SEQ ID NO: 1584182 - DNA, 15 bp, Homo sapiens
cagggcccaacgctg

SEQ ID NO: 1584183 - DNA, 15 bp, Homo sapiens
gcagggcccaacgct

SEQ ID NO: 1584184 - DNA, 15 bp, Homo sapiens
ggcagggcccaacgc

SEQ ID NO: 1584185 - DNA, 15 bp, Homo sapiens
gggcagggcccaacg

SEQ ID NO: 1584186 - DNA, 15 bp, Homo sapiens
agggcagggcccaac

SEQ ID NO: 1584187 - DNA, 15 bp, Homo sapiens
cagggcagggcccaa

SEQ ID NO: 1584188 - DNA, 15 bp, Homo sapiens
gcagggcagggccca

SEQ ID NO: 1584189 - DNA, 15 bp, Homo sapiens
ggcagggcagggccc

SEQ ID NO: 1584190 - DNA, 15 bp, Homo sapiens
gggcagggcagggcc

SEQ ID NO: 1584191 - DNA, 15 bp, Homo sapiens
agggcagggcagggc

SEQ ID NO: 1584192 - DNA, 15 bp, Homo sapiens
cagggcagggcaggg

SEQ ID NO: 1584193 - DNA, 15 bp, Homo sapiens
tcagggcagggcagg

SEQ ID NO: 1584194 - DNA, 15 bp, Homo sapiens
gtcagggcagggcag

SEQ ID NO: 1584195 - DNA, 15 bp, Homo sapiens
ggtcagggcagggca

SEQ ID NO: 1584196 - DNA, 15 bp, Homo sapiens
cggtcagggcagggc

SEQ ID NO: 1584197 - DNA, 15 bp, Homo sapiens
gcggtcagggcaggg

SEQ ID NO: 1584198 - DNA, 15 bp, Homo sapiens
agcggtcagggcagg

SEQ ID NO: 1584199 - DNA, 15 bp, Homo sapiens
gagcggtcagggcag

SEQ ID NO: 1584200 - DNA, 15 bp, Homo sapiens
ggagcggtcagggca

SEQ ID NO: 1584201 - DNA, 15 bp, Homo sapiens
gggagcggtcagggc

SEQ ID NO: 1584202 - DNA, 15 bp, Homo sapiens
ggggagcggtcaggg

SEQ ID NO: 1584203 - DNA, 15 bp, Homo sapiens
tggggagcggtcagg

SEQ ID NO: 1584204 - DNA, 15 bp, Homo sapiens
gtggggagcggtcag

SEQ ID NO: 1584205 - DNA, 15 bp, Homo sapiens
agtggggagcggtca

SEQ ID NO: 1584206 - DNA, 15 bp, Homo sapiens
cagtggggagcggtc

SEQ ID NO: 1584207 - DNA, 15 bp, Homo sapiens
acagtggggagcggt

SEQ ID NO: 1584208 - DNA, 15 bp, Homo sapiens
cacagtggggagcgg

SEQ ID NO: 1584209 - DNA, 15 bp, Homo sapiens
gcacagtggggagcg

SEQ ID NO: 1584210 - DNA, 15 bp, Homo sapiens
ggcacagtggggagc

SEQ ID NO: 1584211 - DNA, 15 bp, Homo sapiens
tgggcacagtgggga

SEQ ID NO: 1584212 - DNA, 15 bp, Homo sapiens
gtgggcacagtgggg

SEQ ID NO: 1584213 - DNA, 15 bp, Homo sapiens
agtgggcacagtggg

SEQ ID NO: 1584214 - DNA, 15 bp, Homo sapiens
gagtgggcacagtgg

SEQ ID NO: 1584215 - DNA, 15 bp, Homo sapiens
ggagtgggcacagtg

SEQ ID NO: 1584216 - DNA, 15 bp, Homo sapiens
tggagtgggcacagt

SEQ ID NO: 1584217 - DNA, 15 bp, Homo sapiens
gtggagtgggcacag

SEQ ID NO: 1584218 - DNA, 15 bp, Homo sapiens
ggtggagtgggcaca

SEQ ID NO: 1584219 - DNA, 15 bp, Homo sapiens
gggtggagtgggcac

SEQ ID NO: 1584220 - DNA, 15 bp, Homo sapiens
cgggtggagtgggca

SEQ ID NO: 1584221 - DNA, 15 bp, Homo sapiens
ccgggtggagtgggc

SEQ ID NO: 1584222 - DNA, 15 bp, Homo sapiens
cccgggtggagtggg

SEQ ID NO: 1584223 - DNA, 15 bp, Homo sapiens
tcccgggtggagtgg

SEQ ID NO: 1584224 - DNA, 15 bp, Homo sapiens
ctcccgggtggagtg

SEQ ID NO: 1584225 - DNA, 15 bp, Homo sapiens
gctcccgggtggagt

SEQ ID NO: 1584226 - DNA, 15 bp, Homo sapiens
tgctcccgggtggag

SEQ ID NO: 1584227 - DNA, 15 bp, Homo sapiens
ttgctcccgggtgga

SEQ ID NO: 1584228 - DNA, 15 bp, Homo sapiens
cttgctcccgggtgg

SEQ ID NO: 1584229 - DNA, 15 bp, Homo sapiens
gcttgctcccgggtg

SEQ ID NO: 1584230 - DNA, 15 bp, Homo sapiens
agcttgctcccgggt

SEQ ID NO: 1584231 - DNA, 15 bp, Homo sapiens
tagcttgctcccggg

SEQ ID NO: 1584232 - DNA, 15 bp, Homo sapiens
ctagcttgctcccgg

SEQ ID NO: 1584233 - DNA, 15 bp, Homo sapiens
actagcttgctcccg

SEQ ID NO: 1584234 - DNA, 15 bp, Homo sapiens
aactagcttgctccc

SEQ ID NO: 1584235 - DNA, 15 bp, Homo sapiens
caactagcttgctcc

SEQ ID NO: 1584236 - DNA, 15 bp, Homo sapiens
gcaactagcttgctc

SEQ ID NO: 1584237 - DNA, 15 bp, Homo sapiens
cgcaactagcttgct

SEQ ID NO: 1584238 - DNA, 15 bp, Homo sapiens
ccgcaactagcttgc

SEQ ID NO: 1584239 - DNA, 15 bp, Homo sapiens
cccgcaactagcttg

SEQ ID NO: 1584240 - DNA, 15 bp, Homo sapiens
tcccgcaactagctt

SEQ ID NO: 1584241 - DNA, 15 bp, Homo sapiens
atcccgcaactagct

SEQ ID NO: 1584242 - DNA, 15 bp, Homo sapiens
tatcccgcaactagc

SEQ ID NO: 1584243 - DNA, 15 bp, Homo sapiens
ttatcccgcaactag

SEQ ID NO: 1584244 - DNA, 15 bp, Homo sapiens
tttatcccgcaacta

SEQ ID NO: 1584245 - DNA, 15 bp, Homo sapiens
ctttatcccgcaact

SEQ ID NO: 1584246 - DNA, 15 bp, Homo sapiens
cctttatcccgcaac

SEQ ID NO: 1584247 - DNA, 15 bp, Homo sapiens
tcctttatcccgcaa

SEQ ID NO: 1584248 - DNA, 15 bp, Homo sapiens
ttcctttatcccgca

SEQ ID NO: 1584249 - DNA, 15 bp, Homo sapiens
attcctttatcccgc

SEQ ID NO: 1584250 - DNA, 15 bp, Homo sapiens
tattcctttatcccg

SEQ ID NO: 1584251 - DNA, 15 bp, Homo sapiens
gtattcctttatccc

SEQ ID NO: 1584252 - DNA, 15 bp, Homo sapiens
cgtattcctttatcc

SEQ ID NO: 1584253 - DNA, 15 bp, Homo sapiens
gcgtattcctttatc

SEQ ID NO: 1584254 - DNA, 15 bp, Homo sapiens
cgcgtattcctttat

SEQ ID NO: 1584255 - DNA, 15 bp, Homo sapiens
gcgcgtattccttta

SEQ ID NO: 1584256 - DNA, 15 bp, Homo sapiens
tgcgcgtattccttt

SEQ ID NO: 1584257 - DNA, 15 bp, Homo sapiens
ctgcgcgtattcctt

SEQ ID NO: 1584258 - DNA, 15 bp, Homo sapiens
tctgcgcgtattcct

SEQ ID NO: 1584259 - DNA, 15 bp, Homo sapiens
gtctgcgcgtattcc

SEQ ID NO: 1584260 - DNA, 15 bp, Homo sapiens
agtctgcgcgtattc

SEQ ID NO: 1584261 - DNA, 15 bp, Homo sapiens
aagtctgcgcgtatt

SEQ ID NO: 1584262 - DNA, 15 bp, Homo sapiens
gaagtctgcgcgtat

SEQ ID NO: 1584263 - DNA, 15 bp, Homo sapiens
cgaagtctgcgcgta

SEQ ID NO: 1584264 - DNA, 15 bp, Homo sapiens
gcgaagtctgcgcgt

SEQ ID NO: 1584265 - DNA, 15 bp, Homo sapiens
tgcgaagtctgcgcg

SEQ ID NO: 1584266 - DNA, 15 bp, Homo sapiens
ttgcgaagtctgcgc

SEQ ID NO: 1584267 - DNA, 15 bp, Homo sapiens
tttgcgaagtctgcg

SEQ ID NO: 1584268 - DNA, 15 bp, Homo sapiens
ctttgcgaagtctgc

SEQ ID NO: 1584269 - DNA, 15 bp, Homo sapiens
actttgcgaagtctg

SEQ ID NO: 1584270 - DNA, 15 bp, Homo sapiens
cactttgcgaagtct

SEQ ID NO: 1584271 - DNA, 15 bp, Homo sapiens
gcactttgcgaagtc

SEQ ID NO: 1584272 - DNA, 15 bp, Homo sapiens
tgcactttgcgaagt

SEQ ID NO: 1584273 - DNA, 15 bp, Homo sapiens
ttgcactttgcgaag

SEQ ID NO: 1584274 - DNA, 15 bp, Homo sapiens
attgcactttgcgaa

SEQ ID NO: 1584275 - DNA, 15 bp, Homo sapiens
gattgcactttgcga

SEQ ID NO: 1584276 - DNA, 15 bp, Homo sapiens
cgattgcactttgcg

SEQ ID NO: 1584277 - DNA, 15 bp, Homo sapiens
ccgattgcactttgc

SEQ ID NO: 1584278 - DNA, 15 bp, Homo sapiens
cccgattgcactttg

SEQ ID NO: 1584279 - DNA, 15 bp, Homo sapiens
ccccgattgcacttt

SEQ ID NO: 1584280 - DNA, 15 bp, Homo sapiens
accccgattgcactt

SEQ ID NO: 1584281 - DNA, 15 bp, Homo sapiens
aaccccgattgcact

SEQ ID NO: 1584282 - DNA, 15 bp, Homo sapiens
gaaccccgattgcac

SEQ ID NO: 1584283 - DNA, 15 bp, Homo sapiens
agaaccccgattgca

SEQ ID NO: 1584284 - DNA, 15 bp, Homo sapiens
aagaaccccgattgc

SEQ ID NO: 1584285 - DNA, 15 bp, Homo sapiens
gaagaaccccgattg

SEQ ID NO: 1584286 - DNA, 15 bp, Homo sapiens
cgaagaaccccgatt

SEQ ID NO: 1584287 - DNA, 15 bp, Homo sapiens
acgaagaaccccgat

SEQ ID NO: 1584288 - DNA, 15 bp, Homo sapiens
tacgaagaaccccga

SEQ ID NO: 1584289 - DNA, 15 bp, Homo sapiens
atacgaagaaccccg

SEQ ID NO: 1584290 - DNA, 15 bp, Homo sapiens
aatacgaagaacccc

SEQ ID NO: 1584291 - DNA, 15 bp, Homo sapiens
gaatacgaagaaccc

SEQ ID NO: 1584292 - DNA, 15 bp, Homo sapiens
tgaatacgaagaacc

SEQ ID NO: 1584293 - DNA, 15 bp, Homo sapiens
atgaatacgaagaac

SEQ ID NO: 1584294 - DNA, 15 bp, Homo sapiens
catgaatacgaagaa

SEQ ID NO: 1584295 - DNA, 15 bp, Homo sapiens
ccatgaatacgaaga

SEQ ID NO: 1584296 - DNA, 15 bp, Homo sapiens
tccatgaatacgaag

SEQ ID NO: 1584297 - DNA, 15 bp, Homo sapiens
ttccatgaatacgaa

SEQ ID NO: 1584298 - DNA, 15 bp, Homo sapiens
tttccatgaatacga

SEQ ID NO: 1584299 - DNA, 15 bp, Homo sapiens
ttttccatgaatacg

SEQ ID NO: 1584300 - DNA, 15 bp, Homo sapiens
tttttccatgaatac

SEQ ID NO: 1584301 - DNA, 15 bp, Homo sapiens
ttttttccatgaata

SEQ ID NO: 1584302 - DNA, 15 bp, Homo sapiens
tttttttccatgaat

SEQ ID NO: 1584303 - DNA, 15 bp, Homo sapiens
ttttttttccatgaa

SEQ ID NO: 1584304 - DNA, 15 bp, Homo sapiens
tttttttttccatga

SEQ ID NO: 1584305 - DNA, 15 bp, Homo sapiens
atttttttttccatg

SEQ ID NO: 1584306 - DNA, 15 bp, Homo sapiens
gatttttttttccat

SEQ ID NO: 1584307 - DNA, 15 bp, Homo sapiens
tgatttttttttcca

SEQ ID NO: 1584308 - DNA, 15 bp, Homo sapiens
gtgatttttttttcc

SEQ ID NO: 1584309 - DNA, 15 bp, Homo sapiens
agtgatttttttttc

SEQ ID NO: 1584310 - DNA, 15 bp, Homo sapiens
cagtgattttttttt

SEQ ID NO: 1584311 - DNA, 15 bp, Homo sapiens
ccagtgatttttttt

SEQ ID NO: 1584312 - DNA, 15 bp, Homo sapiens
accagtgattttttt

SEQ ID NO: 1584313 - DNA, 15 bp, Homo sapiens
aaccagtgatttttt

SEQ ID NO: 1584314 - DNA, 15 bp, Homo sapiens
aaaccagtgattttt

SEQ ID NO: 1584315 - DNA, 15 bp, Homo sapiens
taaaccagtgatttt

SEQ ID NO: 1584316 - DNA, 15 bp, Homo sapiens
ctaaaccagtgattt

SEQ ID NO: 1584317 - DNA, 15 bp, Homo sapiens
gctaaaccagtgatt

SEQ ID NO: 1584318 - DNA, 15 bp, Homo sapiens
ggctaaaccagtgat

SEQ ID NO: 1584319 - DNA, 15 bp, Homo sapiens
gggctaaaccagtga

SEQ ID NO: 1584320 - DNA, 15 bp, Homo sapiens
cgggctaaaccagtg

SEQ ID NO: 1584321 - DNA, 15 bp, Homo sapiens
ccgggctaaaccagt

SEQ ID NO: 1584322 - DNA, 15 bp, Homo sapiens
cccgggctaaaccag

SEQ ID NO: 1584323 - DNA, 15 bp, Homo sapiens
acccgggctaaacca

SEQ ID NO: 1584324 - DNA, 15 bp, Homo sapiens
gacccgggctaaacc

SEQ ID NO: 1584325 - DNA, 15 bp, Homo sapiens
agacccgggctaaac

SEQ ID NO: 1584326 - DNA, 15 bp, Homo sapiens
cagacccgggctaaa

SEQ ID NO: 1584327 - DNA, 15 bp, Homo sapiens
gcagacccgggctaa

SEQ ID NO: 1584328 - DNA, 15 bp, Homo sapiens
ggcagacccgggcta

SEQ ID NO: 1584329 - DNA, 15 bp, Homo sapiens
gggcagacccgggct

SEQ ID NO: 1584330 - DNA, 15 bp, Homo sapiens
agggcagacccgggc

SEQ ID NO: 1584331 - DNA, 15 bp, Homo sapiens
tagggcagacccggg

SEQ ID NO: 1584332 - DNA, 15 bp, Homo sapiens
atagggcagacccgg

SEQ ID NO: 1584333 - DNA, 15 bp, Homo sapiens
aatagggcagacccg

SEQ ID NO: 1584334 - DNA, 15 bp, Homo sapiens
aaatagggcagaccc

SEQ ID NO: 1584335 - DNA, 15 bp, Homo sapiens
taaatagggcagacc

SEQ ID NO: 1584336 - DNA, 15 bp, Homo sapiens
ctaaatagggcagac

SEQ ID NO: 1584337 - DNA, 15 bp, Homo sapiens
cctaaatagggcaga

SEQ ID NO: 1584338 - DNA, 15 bp, Homo sapiens
tcctaaatagggcag

SEQ ID NO: 1584339 - DNA, 15 bp, Homo sapiens
atcctaaatagggca

SEQ ID NO: 1584340 - DNA, 15 bp, Homo sapiens
catcctaaatagggc

SEQ ID NO: 1584341 - DNA, 15 bp, Homo sapiens
tcatcctaaataggg

SEQ ID NO: 1584342 - DNA, 15 bp, Homo sapiens
ctcatcctaaatagg

SEQ ID NO: 1584343 - DNA, 15 bp, Homo sapiens
actcatcctaaatag

SEQ ID NO: 1584344 - DNA, 15 bp, Homo sapiens
gactcatcctaaata

SEQ ID NO: 1584345 - DNA, 15 bp, Homo sapiens
ggactcatcctaaat

SEQ ID NO: 1584346 - DNA, 15 bp, Homo sapiens
tggactcatcctaaa

SEQ ID NO: 1584347 - DNA, 15 bp, Homo sapiens
ctggactcatcctaa

SEQ ID NO: 1584348 - DNA, 15 bp, Homo sapiens
cctggactcatccta

SEQ ID NO: 1584349 - DNA, 15 bp, Homo sapiens
tcctggactcatcct

SEQ ID NO: 1584350 - DNA, 15 bp, Homo sapiens
ctcctggactcatcc

SEQ ID NO: 1584351 - DNA, 15 bp, Homo sapiens
cctcctggactcatc

SEQ ID NO: 1584352 - DNA, 15 bp, Homo sapiens
gcctcctggactcat

SEQ ID NO: 1584353 - DNA, 15 bp, Homo sapiens
cgcctcctggactca

SEQ ID NO: 1584354 - DNA, 15 bp, Homo sapiens
ccgcctcctggactc

SEQ ID NO: 1584355 - DNA, 15 bp, Homo sapiens
gccgcctcctggact

SEQ ID NO: 1584356 - DNA, 15 bp, Homo sapiens
cgccgcctcctggac

SEQ ID NO: 1584357 - DNA, 15 bp, Homo sapiens
ccgccgcctcctgga

SEQ ID NO: 1584358 - DNA, 15 bp, Homo sapiens
tccgccgcctcctgg

SEQ ID NO: 1584359 - DNA, 15 bp, Homo sapiens
ttccgccgcctcctg

SEQ ID NO: 1584360 - DNA, 15 bp, Homo sapiens
tttccgccgcctcct

SEQ ID NO: 1584361 - DNA, 15 bp, Homo sapiens
ctttccgccgcctcc

SEQ ID NO: 1584362 - DNA, 15 bp, Homo sapiens
tctttccgccgcctc

SEQ ID NO: 1584363 - DNA, 15 bp, Homo sapiens
ttctttccgccgcct

SEQ ID NO: 1584364 - DNA, 15 bp, Homo sapiens
tttctttccgccgcc

SEQ ID NO: 1584365 - DNA, 15 bp, Homo sapiens
ctttctttccgccgc

SEQ ID NO: 1584366 - DNA, 15 bp, Homo sapiens
cctttctttccgccg

SEQ ID NO: 1584367 - DNA, 15 bp, Homo sapiens
tcctttctttccgcc

SEQ ID NO: 1584368 - DNA, 15 bp, Homo sapiens
gtcctttctttccgc

SEQ ID NO: 1584369 - DNA, 15 bp, Homo sapiens
cgtcctttctttccg

SEQ ID NO: 1584370 - DNA, 15 bp, Homo sapiens
gcgtcctttctttcc

SEQ ID NO: 1584371 - DNA, 15 bp, Homo sapiens
agcgtcctttctttc

SEQ ID NO: 1584372 - DNA, 15 bp, Homo sapiens
gagcgtcctttcttt

SEQ ID NO: 1584373 - DNA, 15 bp, Homo sapiens
agagcgtcctttctt

SEQ ID NO: 1584374 - DNA, 15 bp, Homo sapiens
aagagcgtcctttct

SEQ ID NO: 1584375 - DNA, 15 bp, Homo sapiens
gaagagcgtcctttc

SEQ ID NO: 1584376 - DNA, 15 bp, Homo sapiens
cgaagagcgtccttt

SEQ ID NO: 1584377 - DNA, 15 bp, Homo sapiens
ccgaagagcgtcctt

SEQ ID NO: 1584378 - DNA, 15 bp, Homo sapiens
accgaagagcgtcct

SEQ ID NO: 1584379 - DNA, 15 bp, Homo sapiens
gaccgaagagcgtcc

SEQ ID NO: 1584380 - DNA, 15 bp, Homo sapiens
tgaccgaagagcgtc

SEQ ID NO: 1584381 - DNA, 15 bp, Homo sapiens
ctgaccgaagagcgt

SEQ ID NO: 1584382 - DNA, 15 bp, Homo sapiens
tctgaccgaagagcg

SEQ ID NO: 1584383 - DNA, 15 bp, Homo sapiens
ctctgaccgaagagc

SEQ ID NO: 1584384 - DNA, 15 bp, Homo sapiens
cctctgaccgaagag

SEQ ID NO: 1584385 - DNA, 15 bp, Homo sapiens
ccctctgaccgaaga

SEQ ID NO: 1584386 - DNA, 15 bp, Homo sapiens
tccctctgaccgaag

SEQ ID NO: 1584387 - DNA, 15 bp, Homo sapiens
ctccctctgaccgaa

SEQ ID NO: 1584388 - DNA, 15 bp, Homo sapiens
cctccctctgaccga

SEQ ID NO: 1584389 - DNA, 15 bp, Homo sapiens
acctccctctgaccg

SEQ ID NO: 1584390 - DNA, 15 bp, Homo sapiens
cacctccctctgacc

SEQ ID NO: 1584391 - DNA, 15 bp, Homo sapiens
acacctccctctgac

SEQ ID NO: 1584392 - DNA, 15 bp, Homo sapiens
aacacctccctctga

SEQ ID NO: 1584393 - DNA, 15 bp, Homo sapiens
aaacacctccctctg

SEQ ID NO: 1584394 - DNA, 15 bp, Homo sapiens
gaaacacctccctct

SEQ ID NO: 1584395 - DNA, 15 bp, Homo sapiens
cgaaacacctccctc

SEQ ID NO: 1584396 - DNA, 15 bp, Homo sapiens
ccgaaacacctccct

SEQ ID NO: 1584397 - DNA, 15 bp, Homo sapiens
cccgaaacacctccc

SEQ ID NO: 1584398 - DNA, 15 bp, Homo sapiens
gcccgaaacacctcc

SEQ ID NO: 1584399 - DNA, 15 bp, Homo sapiens
ggcccgaaacacctc

SEQ ID NO: 1584400 - DNA, 15 bp, Homo sapiens
tggcccgaaacacct

SEQ ID NO: 1584401 - DNA, 15 bp, Homo sapiens
atggcccgaaacacc

SEQ ID NO: 1584402 - DNA, 15 bp, Homo sapiens
catggcccgaaacac

SEQ ID NO: 1584403 - DNA, 15 bp, Homo sapiens
ccatggcccgaaaca

SEQ ID NO: 1584404 - DNA, 15 bp, Homo sapiens
cccatggcccgaaac

SEQ ID NO: 1584405 - DNA, 15 bp, Homo sapiens
tcccatggcccgaaa

SEQ ID NO: 1584406 - DNA, 15 bp, Homo sapiens
ctcccatggcccgaa

SEQ ID NO: 1584407 - DNA, 15 bp, Homo sapiens
cctcccatggcccga

SEQ ID NO: 1584408 - DNA, 15 bp, Homo sapiens
ccctcccatggcccg

SEQ ID NO: 1584409 - DNA, 15 bp, Homo sapiens
tccctcccatggccc

SEQ ID NO: 1584410 - DNA, 15 bp, Homo sapiens
gtccctcccatggcc

SEQ ID NO: 1584411 - DNA, 15 bp, Homo sapiens
agtccctcccatggc

SEQ ID NO: 1584412 - DNA, 15 bp, Homo sapiens
gagtccctcccatgg

SEQ ID NO: 1584413 - DNA, 15 bp, Homo sapiens
agagtccctcccatg

SEQ ID NO: 1584414 - DNA, 15 bp, Homo sapiens
cagagtccctcccat

SEQ ID NO: 1584415 - DNA, 15 bp, Homo sapiens
ccagagtccctccca

SEQ ID NO: 1584416 - DNA, 15 bp, Homo sapiens
tccagagtccctccc

SEQ ID NO: 1584417 - DNA, 15 bp, Homo sapiens
ctccagagtccctcc

SEQ ID NO: 1584418 - DNA, 15 bp, Homo sapiens
cctccagagtccctc

SEQ ID NO: 1584419 - DNA, 15 bp, Homo sapiens
gcctccagagtccct

SEQ ID NO: 1584420 - DNA, 15 bp, Homo sapiens
ggcctccagagtccc

SEQ ID NO: 1584421 - DNA, 15 bp, Homo sapiens
aggcctccagagtcc

SEQ ID NO: 1584422 - DNA, 15 bp, Homo sapiens
aaggcctccagagtc

SEQ ID NO: 1584423 - DNA, 15 bp, Homo sapiens
aaaggcctccagagt

SEQ ID NO: 1584424 - DNA, 15 bp, Homo sapiens
caaaggcctccagag

SEQ ID NO: 1584425 - DNA, 15 bp, Homo sapiens
gcaaaggcctccaga

SEQ ID NO: 1584426 - DNA, 15 bp, Homo sapiens
agcaaaggcctccag

SEQ ID NO: 1584427 - DNA, 15 bp, Homo sapiens
aagcaaaggcctcca

SEQ ID NO: 1584428 - DNA, 15 bp, Homo sapiens
caagcaaaggcctcc

SEQ ID NO: 1584429 - DNA, 15 bp, Homo sapiens
ccaagcaaaggcctc

SEQ ID NO: 1584430 - DNA, 15 bp, Homo sapiens
tccaagcaaaggcct

SEQ ID NO: 1584431 - DNA, 15 bp, Homo sapiens
atccaagcaaaggcc

SEQ ID NO: 1584432 - DNA, 15 bp, Homo sapiens
tatccaagcaaaggc

SEQ ID NO: 1584433 - DNA, 15 bp, Homo sapiens
ttatccaagcaaagg

SEQ ID NO: 1584434 - DNA, 15 bp, Homo sapiens
cttatccaagcaaag

SEQ ID NO: 1584435 - DNA, 15 bp, Homo sapiens
gcttatccaagcaaa

SEQ ID NO: 1584436 - DNA, 15 bp, Homo sapiens
agcttatccaagcaa

SEQ ID NO: 1584437 - DNA, 15 bp, Homo sapiens
aagcttatccaagca

SEQ ID NO: 1584438 - DNA, 15 bp, Homo sapiens
caagcttatccaagc

SEQ ID NO: 1584439 - DNA, 15 bp, Homo sapiens
ccaagcttatccaag

SEQ ID NO: 1584440 - DNA, 15 bp, Homo sapiens
tccaagcttatccaa

SEQ ID NO: 1584441 - DNA, 15 bp, Homo sapiens
ctccaagcttatcca

SEQ ID NO: 1584442 - DNA, 15 bp, Homo sapiens
tctccaagcttatcc

SEQ ID NO: 1584443 - DNA, 15 bp, Homo sapiens
atctccaagcttatc

SEQ ID NO: 1584444 - DNA, 15 bp, Homo sapiens
tatctccaagcttat

SEQ ID NO: 1584445 - DNA, 15 bp, Homo sapiens
gtatctccaagctta

SEQ ID NO: 1584446 - DNA, 15 bp, Homo sapiens
tgtatctccaagctt

SEQ ID NO: 1584447 - DNA, 15 bp, Homo sapiens
ctgtatctccaagct

SEQ ID NO: 1584448 - DNA, 15 bp, Homo sapiens
tctgtatctccaagc

SEQ ID NO: 1584449 - DNA, 15 bp, Homo sapiens
atctgtatctccaag

SEQ ID NO: 1584450 - DNA, 15 bp, Homo sapiens
catctgtatctccaa

SEQ ID NO: 1584451 - DNA, 15 bp, Homo sapiens
acatctgtatctcca

SEQ ID NO: 1584452 - DNA, 15 bp, Homo sapiens
gacatctgtatctcc

SEQ ID NO: 1584453 - DNA, 15 bp, Homo sapiens
ggacatctgtatctc

SEQ ID NO: 1584454 - DNA, 15 bp, Homo sapiens
aggacatctgtatct

SEQ ID NO: 1584455 - DNA, 15 bp, Homo sapiens
aaggacatctgtatc

SEQ ID NO: 1584456 - DNA, 15 bp, Homo sapiens
gaaggacatctgtat

SEQ ID NO: 1584457 - DNA, 15 bp, Homo sapiens
agaaggacatctgta

SEQ ID NO: 1584458 - DNA, 15 bp, Homo sapiens
gagaaggacatctgt

SEQ ID NO: 1584459 - DNA, 15 bp, Homo sapiens
agagaaggacatctg

SEQ ID NO: 1584460 - DNA, 15 bp, Homo sapiens
aagagaaggacatct

SEQ ID NO: 1584461 - DNA, 15 bp, Homo sapiens
gaagagaaggacatc

SEQ ID NO: 1584462 - DNA, 15 bp, Homo sapiens
ggaagagaaggacat

SEQ ID NO: 1584463 - DNA, 15 bp, Homo sapiens
gggaagagaaggaca

SEQ ID NO: 1584464 - DNA, 15 bp, Homo sapiens
agggaagagaaggac

SEQ ID NO: 1584465 - DNA, 15 bp, Homo sapiens
tagggaagagaagga

SEQ ID NO: 1584466 - DNA, 15 bp, Homo sapiens
gtagggaagagaagg

SEQ ID NO: 1584467 - DNA, 15 bp, Homo sapiens
tgtagggaagagaag

SEQ ID NO: 1584468 - DNA, 15 bp, Homo sapiens
ttgtagggaagagaa

SEQ ID NO: 1584469 - DNA, 15 bp, Homo sapiens
cttgtagggaagaga

SEQ ID NO: 1584470 - DNA, 15 bp, Homo sapiens
ccttgtagggaagag

SEQ ID NO: 1584471 - DNA, 15 bp, Homo sapiens
accttgtagggaaga

SEQ ID NO: 1584472 - DNA, 15 bp, Homo sapiens
caccttgtagggaag

SEQ ID NO: 1584473 - DNA, 15 bp, Homo sapiens
gcaccttgtagggaa

SEQ ID NO: 1584474 - DNA, 15 bp, Homo sapiens
cgcaccttgtaggga

SEQ ID NO: 1584475 - DNA, 15 bp, Homo sapiens
acgcaccttgtaggg

SEQ ID NO: 1584476 - DNA, 15 bp, Homo sapiens
aacgcaccttgtagg

SEQ ID NO: 1584477 - DNA, 15 bp, Homo sapiens
taacgcaccttgtag

SEQ ID NO: 1584478 - DNA, 15 bp, Homo sapiens
ctaacgcaccttgta

SEQ ID NO: 1584479 - DNA, 15 bp, Homo sapiens
actaacgcaccttgt

SEQ ID NO: 1584480 - DNA, 15 bp, Homo sapiens
gactaacgcaccttg

SEQ ID NO: 1584481 - DNA, 15 bp, Homo sapiens
agactaacgcacctt

SEQ ID NO: 1584482 - DNA, 15 bp, Homo sapiens
gagactaacgcacct

SEQ ID NO: 1584483 - DNA, 15 bp, Homo sapiens
ggagactaacgcacc

SEQ ID NO: 1584484 - DNA, 15 bp, Homo sapiens
cggagactaacgcac

SEQ ID NO: 1584485 - DNA, 15 bp, Homo sapiens
ccggagactaacgca

SEQ ID NO: 1584486 - DNA, 15 bp, Homo sapiens
cccggagactaacgc

SEQ ID NO: 1584487 - DNA, 15 bp, Homo sapiens
gcccggagactaacg

SEQ ID NO: 1584488 - DNA, 15 bp, Homo sapiens
agcccggagactaac

SEQ ID NO: 1584489 - DNA, 15 bp, Homo sapiens
aagcccggagactaa

SEQ ID NO: 1584490 - DNA, 15 bp, Homo sapiens
taagcccggagacta

SEQ ID NO: 1584491 - DNA, 15 bp, Homo sapiens
ataagcccggagact

SEQ ID NO: 1584492 - DNA, 15 bp, Homo sapiens
aataagcccggagac

SEQ ID NO: 1584493 - DNA, 15 bp, Homo sapiens
aaataagcccggaga

SEQ ID NO: 1584494 - DNA, 15 bp, Homo sapiens
aaaataagcccggag

SEQ ID NO: 1584495 - DNA, 15 bp, Homo sapiens
gaaaataagcccgga

SEQ ID NO: 1584496 - DNA, 15 bp, Homo sapiens
cgaaaataagcccgg

SEQ ID NO: 1584497 - DNA, 15 bp, Homo sapiens
ccgaaaataagcccg

SEQ ID NO: 1584498 - DNA, 15 bp, Homo sapiens
gccgaaaataagccc

SEQ ID NO: 1584499 - DNA, 15 bp, Homo sapiens
tgccgaaaataagcc

SEQ ID NO: 1584500 - DNA, 15 bp, Homo sapiens
ctgccgaaaataagc

SEQ ID NO: 1584501 - DNA, 15 bp, Homo sapiens
actgccgaaaataag

SEQ ID NO: 1584502 - DNA, 15 bp, Homo sapiens
cactgccgaaaataa

SEQ ID NO: 1584503 - DNA, 15 bp, Homo sapiens
gcactgccgaaaata

SEQ ID NO: 1584504 - DNA, 15 bp, Homo sapiens
tgcactgccgaaaat

SEQ ID NO: 1584505 - DNA, 15 bp, Homo sapiens
ctgcactgccgaaaa

SEQ ID NO: 1584506 - DNA, 15 bp, Homo sapiens
actgcactgccgaaa

SEQ ID NO: 1584507 - DNA, 15 bp, Homo sapiens
cactgcactgccgaa

SEQ ID NO: 1584508 - DNA, 15 bp, Homo sapiens
ccactgcactgccga

SEQ ID NO: 1584509 - DNA, 15 bp, Homo sapiens
accactgcactgccg

SEQ ID NO: 1584510 - DNA, 15 bp, Homo sapiens
taccactgcactgcc

SEQ ID NO: 1584511 - DNA, 15 bp, Homo sapiens
gtaccactgcactgc

SEQ ID NO: 1584512 - DNA, 15 bp, Homo sapiens
agtaccactgcactg

SEQ ID NO: 1584513 - DNA, 15 bp, Homo sapiens
cagtaccactgcact

SEQ ID NO: 1584514 - DNA, 15 bp, Homo sapiens
ccagtaccactgcac

SEQ ID NO: 1584515 - DNA, 15 bp, Homo sapiens
cccagtaccactgca

SEQ ID NO: 1584516 - DNA, 15 bp, Homo sapiens
ccccagtaccactgc

SEQ ID NO: 1584517 - DNA, 15 bp, Homo sapiens
cttccccagtaccac

SEQ ID NO: 1584518 - DNA, 15 bp, Homo sapiens
tcttccccagtacca

SEQ ID NO: 1584519 - DNA, 15 bp, Homo sapiens
ttcttccccagtacc

SEQ ID NO: 1584520 - DNA, 15 bp, Homo sapiens
cttcttccccagtac

SEQ ID NO: 1584521 - DNA, 15 bp, Homo sapiens
ccttcttccccagta

SEQ ID NO: 1584522 - DNA, 15 bp, Homo sapiens
gccttcttccccagt

SEQ ID NO: 1584523 - DNA, 15 bp, Homo sapiens
tgccttcttccccag

SEQ ID NO: 1584524 - DNA, 15 bp, Homo sapiens
ctgccttcttcccca

SEQ ID NO: 1584525 - DNA, 15 bp, Homo sapiens
tctgccttcttcccc

SEQ ID NO: 1584526 - DNA, 15 bp, Homo sapiens
ctctgccttcttccc

SEQ ID NO: 1584527 - DNA, 15 bp, Homo sapiens
gctctgccttcttcc

SEQ ID NO: 1584528 - DNA, 15 bp, Homo sapiens
ggctctgccttcttc

SEQ ID NO: 1584529 - DNA, 15 bp, Homo sapiens
cggctctgccttctt

SEQ ID NO: 1584530 - DNA, 15 bp, Homo sapiens
gcggctctgccttct

SEQ ID NO: 1584531 - DNA, 15 bp, Homo sapiens
cgcggctctgccttc

SEQ ID NO: 1584532 - DNA, 15 bp, Homo sapiens
acgcggctctgcctt

SEQ ID NO: 1584533 - DNA, 15 bp, Homo sapiens
cacgcggctctgcct

SEQ ID NO: 1584534 - DNA, 15 bp, Homo sapiens
acacgcggctctgcc

SEQ ID NO: 1584535 - DNA, 15 bp, Homo sapiens
aacacgcggctctgc

SEQ ID NO: 1584536 - DNA, 15 bp, Homo sapiens
caacacgcggctctg

SEQ ID NO: 1584537 - DNA, 15 bp, Homo sapiens
tcaacacgcggctct

SEQ ID NO: 1584538 - DNA, 15 bp, Homo sapiens
ctcaacacgcggctc

SEQ ID NO: 1584539 - DNA, 15 bp, Homo sapiens
tctcaacacgcggct

SEQ ID NO: 1584540 - DNA, 15 bp, Homo sapiens
ttctcaacacgcggc

SEQ ID NO: 1584541 - DNA, 15 bp, Homo sapiens
cttctcaacacgcgg

SEQ ID NO: 1584542 - DNA, 15 bp, Homo sapiens
ccttctcaacacgcg

SEQ ID NO: 1584543 - DNA, 15 bp, Homo sapiens
cccttctcaacacgc

SEQ ID NO: 1584544 - DNA, 15 bp, Homo sapiens
ccccttctcaacacg

SEQ ID NO: 1584545 - DNA, 15 bp, Homo sapiens
gccccttctcaacac

SEQ ID NO: 1584546 - DNA, 15 bp, Homo sapiens
agccccttctcaaca

SEQ ID NO: 1584547 - DNA, 15 bp, Homo sapiens
tagccccttctcaac

SEQ ID NO: 1584548 - DNA, 15 bp, Homo sapiens
ctagccccttctcaa

SEQ ID NO: 1584549 - DNA, 15 bp, Homo sapiens
cctagccccttctca

SEQ ID NO: 1584550 - DNA, 15 bp, Homo sapiens
ccctagccccttctc

SEQ ID NO: 1584551 - DNA, 15 bp, Homo sapiens
accctagccccttct

SEQ ID NO: 1584552 - DNA, 15 bp, Homo sapiens
taccctagccccttc

SEQ ID NO: 1584553 - DNA, 15 bp, Homo sapiens
ctaccctagcccctt

SEQ ID NO: 1584554 - DNA, 15 bp, Homo sapiens
actaccctagcccct

SEQ ID NO: 1584555 - DNA, 15 bp, Homo sapiens
tactaccctagcccc

SEQ ID NO: 1584556 - DNA, 15 bp, Homo sapiens
ctactaccctagccc

SEQ ID NO: 1584557 - DNA, 15 bp, Homo sapiens
tctactaccctagcc

SEQ ID NO: 1584558 - DNA, 15 bp, Homo sapiens
ctctactaccctagc

SEQ ID NO: 1584559 - DNA, 15 bp, Homo sapiens
cctctactaccctag

SEQ ID NO: 1584560 - DNA, 15 bp, Homo sapiens
gcctctactacccta

SEQ ID NO: 1584561 - DNA, 15 bp, Homo sapiens
cgcctctactaccct

SEQ ID NO: 1584562 - DNA, 15 bp, Homo sapiens
gcgcctctactaccc

SEQ ID NO: 1584563 - DNA, 15 bp, Homo sapiens
agcgcctctactacc

SEQ ID NO: 1584564 - DNA, 15 bp, Homo sapiens
cagcgcctctactac

SEQ ID NO: 1584565 - DNA, 15 bp, Homo sapiens
ccagcgcctctacta

SEQ ID NO: 1584566 - DNA, 15 bp, Homo sapiens
tccagcgcctctact

SEQ ID NO: 1584567 - DNA, 15 bp, Homo sapiens
ctccagcgcctctac

SEQ ID NO: 1584568 - DNA, 15 bp, Homo sapiens
gctccagcgcctcta

SEQ ID NO: 1584569 - DNA, 15 bp, Homo sapiens
ggctccagcgcctct

SEQ ID NO: 1584570 - DNA, 15 bp, Homo sapiens
aggctccagcgcctc

SEQ ID NO: 1584571 - DNA, 15 bp, Homo sapiens
caggctccagcgcct

SEQ ID NO: 1584572 - DNA, 15 bp, Homo sapiens
ccaggctccagcgcc

SEQ ID NO: 1584573 - DNA, 15 bp, Homo sapiens
cccaggctccagcgc

SEQ ID NO: 1584574 - DNA, 15 bp, Homo sapiens
gcccaggctccagcg

SEQ ID NO: 1584575 - DNA, 15 bp, Homo sapiens
cgcccaggctccagc

SEQ ID NO: 1584576 - DNA, 15 bp, Homo sapiens
ccgcccaggctccag

SEQ ID NO: 1584577 - DNA, 15 bp, Homo sapiens
gccgcccaggctcca

SEQ ID NO: 1584578 - DNA, 15 bp, Homo sapiens
tgccgcccaggctcc

SEQ ID NO: 1584579 - DNA, 15 bp, Homo sapiens
ctgccgcccaggctc

SEQ ID NO: 1584580 - DNA, 15 bp, Homo sapiens
gccctgccgcccagg

SEQ ID NO: 1584581 - DNA, 15 bp, Homo sapiens
cgccctgccgcccag

SEQ ID NO: 1584582 - DNA, 15 bp, Homo sapiens
gcgccctgccgccca

SEQ ID NO: 1584583 - DNA, 15 bp, Homo sapiens
gcagcgccctgccgc

SEQ ID NO: 1584584 - DNA, 15 bp, Homo sapiens
tgcagcgccctgccg

SEQ ID NO: 1584585 - DNA, 15 bp, Homo sapiens
ttgcagcgccctgcc

SEQ ID NO: 1584586 - DNA, 15 bp, Homo sapiens
tttgcagcgccctgc

SEQ ID NO: 1584587 - DNA, 15 bp, Homo sapiens
ctttgcagcgccctg

SEQ ID NO: 1584588 - DNA, 15 bp, Homo sapiens
cctttgcagcgccct

SEQ ID NO: 1584589 - DNA, 15 bp, Homo sapiens
gcctttgcagcgccc

SEQ ID NO: 1584590 - DNA, 15 bp, Homo sapiens
ggcctttgcagcgcc

SEQ ID NO: 1584591 - DNA, 15 bp, Homo sapiens
gggcctttgcagcgc

SEQ ID NO: 1584592 - DNA, 15 bp, Homo sapiens
tgggcctttgcagcg

SEQ ID NO: 1584593 - DNA, 15 bp, Homo sapiens
ctgggcctttgcagc

SEQ ID NO: 1584594 - DNA, 15 bp, Homo sapiens
cctgggcctttgcag

SEQ ID NO: 1584595 - DNA, 15 bp, Homo sapiens
gcctgggcctttgca

SEQ ID NO: 1584596 - DNA, 15 bp, Homo sapiens
cgcctgggcctttgc

SEQ ID NO: 1584597 - DNA, 15 bp, Homo sapiens
tcgcctgggcctttg

SEQ ID NO: 1584598 - DNA, 15 bp, Homo sapiens
ctcgcctgggccttt

SEQ ID NO: 1584599 - DNA, 15 bp, Homo sapiens
cctcgcctgggcctt

SEQ ID NO: 1584600 - DNA, 15 bp, Homo sapiens
acctcgcctgggcct

SEQ ID NO: 1584601 - DNA, 15 bp, Homo sapiens
cacctcgcctgggcc

SEQ ID NO: 1584602 - DNA, 15 bp, Homo sapiens
ccacctcgcctgggc

SEQ ID NO: 1584603 - DNA, 15 bp, Homo sapiens
tccacctcgcctggg

SEQ ID NO: 1584604 - DNA, 15 bp, Homo sapiens
atccacctcgcctgg

SEQ ID NO: 1584605 - DNA, 15 bp, Homo sapiens
tatccacctcgcctg

SEQ ID NO: 1584606 - DNA, 15 bp, Homo sapiens
ctatccacctcgcct

SEQ ID NO: 1584607 - DNA, 15 bp, Homo sapiens
tctatccacctcgcc

SEQ ID NO: 1584608 - DNA, 15 bp, Homo sapiens
ctctatccacctcgc

SEQ ID NO: 1584609 - DNA, 15 bp, Homo sapiens
tctctatccacctcg

SEQ ID NO: 1584610 - DNA, 15 bp, Homo sapiens
ctctctatccacctc

SEQ ID NO: 1584611 - DNA, 15 bp, Homo sapiens
gctctctatccacct

SEQ ID NO: 1584612 - DNA, 15 bp, Homo sapiens
agctctctatccacc

SEQ ID NO: 1584613 - DNA, 15 bp, Homo sapiens
aagctctctatccac

SEQ ID NO: 1584614 - DNA, 15 bp, Homo sapiens
caagctctctatcca

SEQ ID NO: 1584615 - DNA, 15 bp, Homo sapiens
gcaagctctctatcc

SEQ ID NO: 1584616 - DNA, 15 bp, Homo sapiens
agcaagctctctatc

SEQ ID NO: 1584617 - DNA, 15 bp, Homo sapiens
cagcaagctctctat

SEQ ID NO: 1584618 - DNA, 15 bp, Homo sapiens
ccagcaagctctcta

SEQ ID NO: 1584619 - DNA, 15 bp, Homo sapiens
accagcaagctctct

SEQ ID NO: 1584620 - DNA, 15 bp, Homo sapiens
caccagcaagctctc

SEQ ID NO: 1584621 - DNA, 15 bp, Homo sapiens
gcaccagcaagctct

SEQ ID NO: 1584622 - DNA, 15 bp, Homo sapiens
cgcaccagcaagctc

SEQ ID NO: 1584623 - DNA, 15 bp, Homo sapiens
gcgcaccagcaagct

SEQ ID NO: 1584624 - DNA, 15 bp, Homo sapiens
cgcgcaccagcaagc

SEQ ID NO: 1584625 - DNA, 15 bp, Homo sapiens
gcgcgcaccagcaag

SEQ ID NO: 1584626 - DNA, 15 bp, Homo sapiens
cgcgcgcaccagcaa

SEQ ID NO: 1584627 - DNA, 15 bp, Homo sapiens
tcgcgcgcaccagca

SEQ ID NO: 1584628 - DNA, 15 bp, Homo sapiens
ctcgcgcgcaccagc

SEQ ID NO: 1584629 - DNA, 15 bp, Homo sapiens
tctcgcgcgcaccag

SEQ ID NO: 1584630 - DNA, 15 bp, Homo sapiens
ttctcgcgcgcacca

SEQ ID NO: 1584631 - DNA, 15 bp, Homo sapiens
cttctcgcgcgcacc

SEQ ID NO: 1584632 - DNA, 15 bp, Homo sapiens
gcttctcgcgcgcac

SEQ ID NO: 1584633 - DNA, 15 bp, Homo sapiens
tgcttctcgcgcgca

SEQ ID NO: 1584634 - DNA, 15 bp, Homo sapiens
gtgcttctcgcgcgc

SEQ ID NO: 1584635 - DNA, 15 bp, Homo sapiens
cgtgcttctcgcgcg

SEQ ID NO: 1584636 - DNA, 15 bp, Homo sapiens
gcgtgcttctcgcgc

SEQ ID NO: 1584637 - DNA, 15 bp, Homo sapiens
ggcgtgcttctcgcg

SEQ ID NO: 1584638 - DNA, 15 bp, Homo sapiens
aggcgtgcttctcgc

SEQ ID NO: 1584639 - DNA, 15 bp, Homo sapiens
caggcgtgcttctcg

SEQ ID NO: 1584640 - DNA, 15 bp, Homo sapiens
gcaggcgtgcttctc

SEQ ID NO: 1584641 - DNA, 15 bp, Homo sapiens
tgcaggcgtgcttct

SEQ ID NO: 1584642 - DNA, 15 bp, Homo sapiens
ctgcaggcgtgcttc

SEQ ID NO: 1584643 - DNA, 15 bp, Homo sapiens
cctgcaggcgtgctt

SEQ ID NO: 1584644 - DNA, 15 bp, Homo sapiens
gcctgcaggcgtgct

SEQ ID NO: 1584645 - DNA, 15 bp, Homo sapiens
tgcctgcaggcgtgc

SEQ ID NO: 1584646 - DNA, 15 bp, Homo sapiens
ctgcctgcaggcgtg

SEQ ID NO: 1584647 - DNA, 15 bp, Homo sapiens
tctgcctgcaggcgt

SEQ ID NO: 1584648 - DNA, 15 bp, Homo sapiens
ctctgcctgcaggcg

SEQ ID NO: 1584649 - DNA, 15 bp, Homo sapiens
cctctgcctgcaggc

SEQ ID NO: 1584650 - DNA, 15 bp, Homo sapiens
acctctgcctgcagg

SEQ ID NO: 1584651 - DNA, 15 bp, Homo sapiens
aacctctgcctgcag

SEQ ID NO: 1584652 - DNA, 15 bp, Homo sapiens
caacctctgcctgca

SEQ ID NO: 1584653 - DNA, 15 bp, Homo sapiens
tcaacctctgcctgc

SEQ ID NO: 1584654 - DNA, 15 bp, Homo sapiens
ttcaacctctgcctg

SEQ ID NO: 1584655 - DNA, 15 bp, Homo sapiens
cttcaacctctgcct

SEQ ID NO: 1584656 - DNA, 15 bp, Homo sapiens
gcttcaacctctgcc

SEQ ID NO: 1584657 - DNA, 15 bp, Homo sapiens
cgcttcaacctctgc

SEQ ID NO: 1584658 - DNA, 15 bp, Homo sapiens
gcgcttcaacctctg

SEQ ID NO: 1584659 - DNA, 15 bp, Homo sapiens
ggcgcttcaacctct

SEQ ID NO: 1584660 - DNA, 15 bp, Homo sapiens
cggcgcttcaacctc

SEQ ID NO: 1584661 - DNA, 15 bp, Homo sapiens
acggcgcttcaacct

SEQ ID NO: 1584662 - DNA, 15 bp, Homo sapiens
gacggcgcttcaacc

SEQ ID NO: 1584663 - DNA, 15 bp, Homo sapiens
ggacggcgcttcaac

SEQ ID NO: 1584664 - DNA, 15 bp, Homo sapiens
gggacggcgcttcaa

SEQ ID NO: 1584665 - DNA, 15 bp, Homo sapiens
tgggacggcgcttca

SEQ ID NO: 1584666 - DNA, 15 bp, Homo sapiens
ctgggacggcgcttc

SEQ ID NO: 1584667 - DNA, 15 bp, Homo sapiens
actgggacggcgctt

SEQ ID NO: 1584668 - DNA, 15 bp, Homo sapiens
aactgggacggcgct

SEQ ID NO: 1584669 - DNA, 15 bp, Homo sapiens
caactgggacggcgc

SEQ ID NO: 1584670 - DNA, 15 bp, Homo sapiens
acaactgggacggcg

SEQ ID NO: 1584671 - DNA, 15 bp, Homo sapiens
cacaactgggacggc

SEQ ID NO: 1584672 - DNA, 15 bp, Homo sapiens
acacaactgggacgg

SEQ ID NO: 1584673 - DNA, 15 bp, Homo sapiens
gacacaactgggacg

SEQ ID NO: 1584674 - DNA, 15 bp, Homo sapiens
ggacacaactgggac

SEQ ID NO: 1584675 - DNA, 15 bp, Homo sapiens
gggacacaactggga

SEQ ID NO: 1584676 - DNA, 15 bp, Homo sapiens
tgggacacaactggg

SEQ ID NO: 1584677 - DNA, 15 bp, Homo sapiens
ctgggacacaactgg

SEQ ID NO: 1584678 - DNA, 15 bp, Homo sapiens
tctgggacacaactg

SEQ ID NO: 1584679 - DNA, 15 bp, Homo sapiens
ctctgggacacaact

SEQ ID NO: 1584680 - DNA, 15 bp, Homo sapiens
actctgggacacaac

SEQ ID NO: 1584681 - DNA, 15 bp, Homo sapiens
cactctgggacacaa

SEQ ID NO: 1584682 - DNA, 15 bp, Homo sapiens
tcactctgggacaca

SEQ ID NO: 1584683 - DNA, 15 bp, Homo sapiens
ttcactctgggacac

SEQ ID NO: 1584684 - DNA, 15 bp, Homo sapiens
cttcactctgggaca

SEQ ID NO: 1584685 - DNA, 15 bp, Homo sapiens
gcttcactctgggac

SEQ ID NO: 1584686 - DNA, 15 bp, Homo sapiens
cgcttcactctggga

SEQ ID NO: 1584687 - DNA, 15 bp, Homo sapiens
ccgcttcactctggg

SEQ ID NO: 1584688 - DNA, 15 bp, Homo sapiens
cccgcttcactctgg

SEQ ID NO: 1584689 - DNA, 15 bp, Homo sapiens
tcccgcttcactctg

SEQ ID NO: 1584690 - DNA, 15 bp, Homo sapiens
ctcccgcttcactct

SEQ ID NO: 1584691 - DNA, 15 bp, Homo sapiens
actcccgcttcactc

SEQ ID NO: 1584692 - DNA, 15 bp, Homo sapiens
gactcccgcttcact

SEQ ID NO: 1584693 - DNA, 15 bp, Homo sapiens
agactcccgcttcac

SEQ ID NO: 1584694 - DNA, 15 bp, Homo sapiens
aagactcccgcttca

SEQ ID NO: 1584695 - DNA, 15 bp, Homo sapiens
aaagactcccgcttc

SEQ ID NO: 1584696 - DNA, 15 bp, Homo sapiens
caaagactcccgctt

SEQ ID NO: 1584697 - DNA, 15 bp, Homo sapiens
gcaaagactcccgct

SEQ ID NO: 1584698 - DNA, 15 bp, Homo sapiens
ggcaaagactcccgc

SEQ ID NO: 1584699 - DNA, 15 bp, Homo sapiens
gggcaaagactcccg

SEQ ID NO: 1584700 - DNA, 15 bp, Homo sapiens
cgggcaaagactccc

SEQ ID NO: 1584701 - DNA, 15 bp, Homo sapiens
gcgggcaaagactcc

SEQ ID NO: 1584702 - DNA, 15 bp, Homo sapiens
ggcgggcaaagactc

SEQ ID NO: 1584703 - DNA, 15 bp, Homo sapiens
gggcgggcaaagact

SEQ ID NO: 1584704 - DNA, 15 bp, Homo sapiens
ggggcgggcaaagac

SEQ ID NO: 1584705 - DNA, 15 bp, Homo sapiens
tggggcgggcaaaga

SEQ ID NO: 1584706 - DNA, 15 bp, Homo sapiens
ctggggcgggcaaag

SEQ ID NO: 1584707 - DNA, 15 bp, Homo sapiens
gctggggcgggcaaa

SEQ ID NO: 1584708 - DNA, 15 bp, Homo sapiens
ggctggggcgggcaa

SEQ ID NO: 1584709 - DNA, 15 bp, Homo sapiens
tggctggggcgggca

SEQ ID NO: 1584710 - DNA, 15 bp, Homo sapiens
gtggctggggcgggc

SEQ ID NO: 1584711 - DNA, 15 bp, Homo sapiens
agtggctggggcggg

SEQ ID NO: 1584712 - DNA, 15 bp, Homo sapiens
aagtggctggggcgg

SEQ ID NO: 1584713 - DNA, 15 bp, Homo sapiens
gaagtggctggggcg

SEQ ID NO: 1584714 - DNA, 15 bp, Homo sapiens
cgaagtggctggggc

SEQ ID NO: 1584715 - DNA, 15 bp, Homo sapiens
tcgaagtggctgggg

SEQ ID NO: 1584716 - DNA, 15 bp, Homo sapiens
ctcgaagtggctggg

SEQ ID NO: 1584717 - DNA, 15 bp, Homo sapiens
gctcgaagtggctgg

SEQ ID NO: 1584718 - DNA, 15 bp, Homo sapiens
agctcgaagtggctg

SEQ ID NO: 1584719 - DNA, 15 bp, Homo sapiens
gagctcgaagtggct

SEQ ID NO: 1584720 - DNA, 15 bp, Homo sapiens
ggagctcgaagtggc

SEQ ID NO: 1584721 - DNA, 15 bp, Homo sapiens
tggagctcgaagtgg

SEQ ID NO: 1584722 - DNA, 15 bp, Homo sapiens
gtggagctcgaagtg

SEQ ID NO: 1584723 - DNA, 15 bp, Homo sapiens
agtggagctcgaagt

SEQ ID NO: 1584724 - DNA, 15 bp, Homo sapiens
gagtggagctcgaag

SEQ ID NO: 1584725 - DNA, 15 bp, Homo sapiens
ggagtggagctcgaa

SEQ ID NO: 1584726 - DNA, 15 bp, Homo sapiens
tggagtggagctcga

SEQ ID NO: 1584727 - DNA, 15 bp, Homo sapiens
ctggagtggagctcg

SEQ ID NO: 1584728 - DNA, 15 bp, Homo sapiens
actggagtggagctc

SEQ ID NO: 1584729 - DNA, 15 bp, Homo sapiens
aactggagtggagct

SEQ ID NO: 1584730 - DNA, 15 bp, Homo sapiens
gaactggagtggagc

SEQ ID NO: 1584731 - DNA, 15 bp, Homo sapiens
tgaactggagtggag

SEQ ID NO: 1584732 - DNA, 15 bp, Homo sapiens
ctgaactggagtgga

SEQ ID NO: 1584733 - DNA, 15 bp, Homo sapiens
gctgaactggagtgg

SEQ ID NO: 1584734 - DNA, 15 bp, Homo sapiens
agctgaactggagtg

SEQ ID NO: 1584735 - DNA, 15 bp, Homo sapiens
gagctgaactggagt

SEQ ID NO: 1584736 - DNA, 15 bp, Homo sapiens
ggagctgaactggag

SEQ ID NO: 1584737 - DNA, 15 bp, Homo sapiens
gggagctgaactgga

SEQ ID NO: 1584738 - DNA, 15 bp, Homo sapiens
tgggagctgaactgg

SEQ ID NO: 1584739 - DNA, 15 bp, Homo sapiens
ctgggagctgaactg

SEQ ID NO: 1584740 - DNA, 15 bp, Homo sapiens
tctgggagctgaact

SEQ ID NO: 1584741 - DNA, 15 bp, Homo sapiens
ctctgggagctgaac

SEQ ID NO: 1584742 - DNA, 15 bp, Homo sapiens
actctgggagctgaa

SEQ ID NO: 1584743 - DNA, 15 bp, Homo sapiens
gactctgggagctga

SEQ ID NO: 1584744 - DNA, 15 bp, Homo sapiens
cgactctgggagctg

SEQ ID NO: 1584745 - DNA, 15 bp, Homo sapiens
gcgactctgggagct

SEQ ID NO: 1584746 - DNA, 15 bp, Homo sapiens
ggcgactctgggagc

SEQ ID NO: 1584747 - DNA, 15 bp, Homo sapiens
tggcgactctgggag

SEQ ID NO: 1584748 - DNA, 15 bp, Homo sapiens
gtggcgactctggga

SEQ ID NO: 1584749 - DNA, 15 bp, Homo sapiens
agtggcgactctggg

SEQ ID NO: 1584750 - DNA, 15 bp, Homo sapiens
aagtggcgactctgg

SEQ ID NO: 1584751 - DNA, 15 bp, Homo sapiens
caagtggcgactctg

SEQ ID NO: 1584752 - DNA, 15 bp, Homo sapiens
gcaagtggcgactct

SEQ ID NO: 1584753 - DNA, 15 bp, Homo sapiens
agcaagtggcgactc

SEQ ID NO: 1584754 - DNA, 15 bp, Homo sapiens
cagcaagtggcgact

SEQ ID NO: 1584755 - DNA, 15 bp, Homo sapiens
gcagcaagtggcgac

SEQ ID NO: 1584756 - DNA, 15 bp, Homo sapiens
cgcagcaagtggcga

SEQ ID NO: 1584757 - DNA, 15 bp, Homo sapiens
gcgcagcaagtggcg

SEQ ID NO: 1584758 - DNA, 15 bp, Homo sapiens
cgcgcagcaagtggc

SEQ ID NO: 1584759 - DNA, 15 bp, Homo sapiens
ccgcgcagcaagtgg

SEQ ID NO: 1584760 - DNA, 15 bp, Homo sapiens
accgcgcagcaagtg

SEQ ID NO: 1584761 - DNA, 15 bp, Homo sapiens
aaccgcgcagcaagt

SEQ ID NO: 1584762 - DNA, 15 bp, Homo sapiens
caaccgcgcagcaag

SEQ ID NO: 1584763 - DNA, 15 bp, Homo sapiens
acaaccgcgcagcaa

SEQ ID NO: 1584764 - DNA, 15 bp, Homo sapiens
aacaaccgcgcagca

SEQ ID NO: 1584765 - DNA, 15 bp, Homo sapiens
caacaaccgcgcagc

SEQ ID NO: 1584766 - DNA, 15 bp, Homo sapiens
ccaacaaccgcgcag

SEQ ID NO: 1584767 - DNA, 15 bp, Homo sapiens
cccaacaaccgcgca

SEQ ID NO: 1584768 - DNA, 15 bp, Homo sapiens
ccccaacaaccgcgc

SEQ ID NO: 1584769 - DNA, 15 bp, Homo sapiens
tccccaacaaccgcg

SEQ ID NO: 1584770 - DNA, 15 bp, Homo sapiens
ctccccaacaaccgc

SEQ ID NO: 1584771 - DNA, 15 bp, Homo sapiens
cctccccaacaaccg

SEQ ID NO: 1584772 - DNA, 15 bp, Homo sapiens
ccctccccaacaacc

SEQ ID NO: 1584773 - DNA, 15 bp, Homo sapiens
cccctccccaacaac

SEQ ID NO: 1584774 - DNA, 15 bp, Homo sapiens
ccccctccccaacaa

SEQ ID NO: 1584775 - DNA, 15 bp, Homo sapiens
accccctccccaaca

SEQ ID NO: 1584776 - DNA, 15 bp, Homo sapiens
aaccccctccccaac

SEQ ID NO: 1584777 - DNA, 15 bp, Homo sapiens
gaaccccctccccaa

SEQ ID NO: 1584778 - DNA, 15 bp, Homo sapiens
ggaaccccctcccca

SEQ ID NO: 1584779 - DNA, 15 bp, Homo sapiens
aggaaccccctcccc

SEQ ID NO: 1584780 - DNA, 15 bp, Homo sapiens
caggaaccccctccc

SEQ ID NO: 1584781 - DNA, 15 bp, Homo sapiens
ccaggaaccccctcc

SEQ ID NO: 1584782 - DNA, 15 bp, Homo sapiens
accaggaaccccctc

SEQ ID NO: 1584783 - DNA, 15 bp, Homo sapiens
gaccaggaaccccct

SEQ ID NO: 1584784 - DNA, 15 bp, Homo sapiens
ggaccaggaaccccc

SEQ ID NO: 1584785 - DNA, 15 bp, Homo sapiens
tggaccaggaacccc

SEQ ID NO: 1584786 - DNA, 15 bp, Homo sapiens
ctggaccaggaaccc

SEQ ID NO: 1584787 - DNA, 15 bp, Homo sapiens
tctggaccaggaacc

SEQ ID NO: 1584788 - DNA, 15 bp, Homo sapiens
ttctggaccaggaac

SEQ ID NO: 1584789 - DNA, 15 bp, Homo sapiens
gttctggaccaggaa

SEQ ID NO: 1584790 - DNA, 15 bp, Homo sapiens
cgttctggaccagga

SEQ ID NO: 1584791 - DNA, 15 bp, Homo sapiens
tcgttctggaccagg

SEQ ID NO: 1584792 - DNA, 15 bp, Homo sapiens
ctcgttctggaccag

SEQ ID NO: 1584793 - DNA, 15 bp, Homo sapiens
tctcgttctggacca

SEQ ID NO: 1584794 - DNA, 15 bp, Homo sapiens
gtctcgttctggacc

SEQ ID NO: 1584795 - DNA, 15 bp, Homo sapiens
cgtctcgttctggac

SEQ ID NO: 1584796 - DNA, 15 bp, Homo sapiens
acgtctcgttctgga

SEQ ID NO: 1584797 - DNA, 15 bp, Homo sapiens
cacgtctcgttctgg

SEQ ID NO: 1584798 - DNA, 15 bp, Homo sapiens
ccacgtctcgttctg

SEQ ID NO: 1584799 - DNA, 15 bp, Homo sapiens
cccacgtctcgttct

SEQ ID NO: 1584800 - DNA, 15 bp, Homo sapiens
ccccacgtctcgttc

SEQ ID NO: 1584801 - DNA, 15 bp, Homo sapiens
cccccacgtctcgtt

SEQ ID NO: 1584802 - DNA, 15 bp, Homo sapiens
ccccccacgtctcgt

SEQ ID NO: 1584803 - DNA, 15 bp, Homo sapiens
gccccccacgtctcg

SEQ ID NO: 1584804 - DNA, 15 bp, Homo sapiens
agccccccacgtctc

SEQ ID NO: 1584805 - DNA, 15 bp, Homo sapiens
cagccccccacgtct

SEQ ID NO: 1584806 - DNA, 15 bp, Homo sapiens
ccagccccccacgtc

SEQ ID NO: 1584807 - DNA, 15 bp, Homo sapiens
cccagccccccacgt

SEQ ID NO: 1584808 - DNA, 15 bp, Homo sapiens
ccccagccccccacg

SEQ ID NO: 1584809 - DNA, 15 bp, Homo sapiens
cccccagccccccac

SEQ ID NO: 1584810 - DNA, 15 bp, Homo sapiens
acccccagcccccca

SEQ ID NO: 1584811 - DNA, 15 bp, Homo sapiens
aacccccagcccccc

SEQ ID NO: 1584812 - DNA, 15 bp, Homo sapiens
aaacccccagccccc

SEQ ID NO: 1584813 - DNA, 15 bp, Homo sapiens
gaaacccccagcccc

SEQ ID NO: 1584814 - DNA, 15 bp, Homo sapiens
ggaaacccccagccc

SEQ ID NO: 1584815 - DNA, 15 bp, Homo sapiens
aggaaacccccagcc

SEQ ID NO: 1584816 - DNA, 15 bp, Homo sapiens
gaggaaacccccagc

SEQ ID NO: 1584817 - DNA, 15 bp, Homo sapiens
cgaggaaacccccag

SEQ ID NO: 1584818 - DNA, 15 bp, Homo sapiens
tcgaggaaaccccca

SEQ ID NO: 1584819 - DNA, 15 bp, Homo sapiens
ctcgaggaaaccccc

SEQ ID NO: 1584820 - DNA, 15 bp, Homo sapiens
tctcgaggaaacccc

SEQ ID NO: 1584821 - DNA, 15 bp, Homo sapiens
ttctcgaggaaaccc

SEQ ID NO: 1584822 - DNA, 15 bp, Homo sapiens
gttctcgaggaaacc

SEQ ID NO: 1584823 - DNA, 15 bp, Homo sapiens
agttctcgaggaaac

SEQ ID NO: 1584824 - DNA, 15 bp, Homo sapiens
cagttctcgaggaaa

SEQ ID NO: 1584825 - DNA, 15 bp, Homo sapiens
gcagttctcgaggaa

SEQ ID NO: 1584826 - DNA, 15 bp, Homo sapiens
tgcagttctcgagga

SEQ ID NO: 1584827 - DNA, 15 bp, Homo sapiens
ctgcagttctcgagg

SEQ ID NO: 1584828 - DNA, 15 bp, Homo sapiens
cctgcagttctcgag

SEQ ID NO: 1584829 - DNA, 15 bp, Homo sapiens
gcctgcagttctcga

SEQ ID NO: 1584830 - DNA, 15 bp, Homo sapiens
ggcctgcagttctcg

SEQ ID NO: 1584831 - DNA, 15 bp, Homo sapiens
aggcctgcagttctc

SEQ ID NO: 1584832 - DNA, 15 bp, Homo sapiens
caggcctgcagttct

SEQ ID NO: 1584833 - DNA, 15 bp, Homo sapiens
ccaggcctgcagttc

SEQ ID NO: 1584834 - DNA, 15 bp, Homo sapiens
accaggcctgcagtt

SEQ ID NO: 1584835 - DNA, 15 bp, Homo sapiens
aaccaggcctgcagt

SEQ ID NO: 1584836 - DNA, 15 bp, Homo sapiens
caaccaggcctgcag

SEQ ID NO: 1584837 - DNA, 15 bp, Homo sapiens
gcaaccaggcctgca

SEQ ID NO: 1584838 - DNA, 15 bp, Homo sapiens
ggcaaccaggcctgc

SEQ ID NO: 1584839 - DNA, 15 bp, Homo sapiens
gggcaaccaggcctg

SEQ ID NO: 1584840 - DNA, 15 bp, Homo sapiens
ggggcaaccaggcct

SEQ ID NO: 1584841 - DNA, 15 bp, Homo sapiens
gggggcaaccaggcc

SEQ ID NO: 1584842 - DNA, 15 bp, Homo sapiens
cgggggcaaccaggc

SEQ ID NO: 1584843 - DNA, 15 bp, Homo sapiens
ccgggggcaaccagg

SEQ ID NO: 1584844 - DNA, 15 bp, Homo sapiens
tccgggggcaaccag

SEQ ID NO: 1584845 - DNA, 15 bp, Homo sapiens
gtccgggggcaacca

SEQ ID NO: 1584846 - DNA, 15 bp, Homo sapiens
agtccgggggcaacc

SEQ ID NO: 1584847 - DNA, 15 bp, Homo sapiens
cagtccgggggcaac

SEQ ID NO: 1584848 - DNA, 15 bp, Homo sapiens
acagtccgggggcaa

SEQ ID NO: 1584849 - DNA, 15 bp, Homo sapiens
gacagtccgggggca

SEQ ID NO: 1584850 - DNA, 15 bp, Homo sapiens
tgacagtccgggggc

SEQ ID NO: 1584851 - DNA, 15 bp, Homo sapiens
ctgacagtccggggg

SEQ ID NO: 1584852 - DNA, 15 bp, Homo sapiens
tctgacagtccgggg

SEQ ID NO: 1584853 - DNA, 15 bp, Homo sapiens
ctctgacagtccggg

SEQ ID NO: 1584854 - DNA, 15 bp, Homo sapiens
gctctgacagtccgg

SEQ ID NO: 1584855 - DNA, 15 bp, Homo sapiens
ggctctgacagtccg

SEQ ID NO: 1584856 - DNA, 15 bp, Homo sapiens
cggctctgacagtcc

SEQ ID NO: 1584857 - DNA, 15 bp, Homo sapiens
ccggctctgacagtc

SEQ ID NO: 1584858 - DNA, 15 bp, Homo sapiens
tccggctctgacagt

SEQ ID NO: 1584859 - DNA, 15 bp, Homo sapiens
ctccggctctgacag

SEQ ID NO: 1584860 - DNA, 15 bp, Homo sapiens
cctccggctctgaca

SEQ ID NO: 1584861 - DNA, 15 bp, Homo sapiens
gcctccggctctgac

SEQ ID NO: 1584862 - DNA, 15 bp, Homo sapiens
ggcctccggctctga

SEQ ID NO: 1584863 - DNA, 15 bp, Homo sapiens
cggcctccggctctg

SEQ ID NO: 1584864 - DNA, 15 bp, Homo sapiens
ccggcctccggctct

SEQ ID NO: 1584865 - DNA, 15 bp, Homo sapiens
cccggcctccggctc

SEQ ID NO: 1584866 - DNA, 15 bp, Homo sapiens
ccccggcctccggct

SEQ ID NO: 1584867 - DNA, 15 bp, Homo sapiens
tccccggcctccggc

SEQ ID NO: 1584868 - DNA, 15 bp, Homo sapiens
ctccccggcctccgg

SEQ ID NO: 1584869 - DNA, 15 bp, Homo sapiens
gctccccggcctccg

SEQ ID NO: 1584870 - DNA, 15 bp, Homo sapiens
agctccccggcctcc

SEQ ID NO: 1584871 - DNA, 15 bp, Homo sapiens
cagctccccggcctc

SEQ ID NO: 1584872 - DNA, 15 bp, Homo sapiens
gcagctccccggcct

SEQ ID NO: 1584873 - DNA, 15 bp, Homo sapiens
ggcagctccccggcc

SEQ ID NO: 1584874 - DNA, 15 bp, Homo sapiens
tggcagctccccggc

SEQ ID NO: 1584875 - DNA, 15 bp, Homo sapiens
ctggcagctccccgg

SEQ ID NO: 1584876 - DNA, 15 bp, Homo sapiens
gctggcagctccccg

SEQ ID NO: 1584877 - DNA, 15 bp, Homo sapiens
ggctggcagctcccc

SEQ ID NO: 1584878 - DNA, 15 bp, Homo sapiens
tggctggcagctccc

SEQ ID NO: 1584879 - DNA, 15 bp, Homo sapiens
gtggctggcagctcc

SEQ ID NO: 1584880 - DNA, 15 bp, Homo sapiens
cgtggctggcagctc

SEQ ID NO: 1584881 - DNA, 15 bp, Homo sapiens
acgtggctggcagct

SEQ ID NO: 1584882 - DNA, 15 bp, Homo sapiens
cacgtggctggcagc

SEQ ID NO: 1584883 - DNA, 15 bp, Homo sapiens
gcacgtggctggcag

SEQ ID NO: 1584884 - DNA, 15 bp, Homo sapiens
cgcacgtggctggca

SEQ ID NO: 1584885 - DNA, 15 bp, Homo sapiens
gcgcacgtggctggc

SEQ ID NO: 1584886 - DNA, 15 bp, Homo sapiens
ggcgcacgtggctgg

SEQ ID NO: 1584887 - DNA, 15 bp, Homo sapiens
aggcgcacgtggctg

SEQ ID NO: 1584888 - DNA, 15 bp, Homo sapiens
caggcgcacgtggct

SEQ ID NO: 1584889 - DNA, 15 bp, Homo sapiens
acaggcgcacgtggc

SEQ ID NO: 1584890 - DNA, 15 bp, Homo sapiens
cacaggcgcacgtgg

SEQ ID NO: 1584891 - DNA, 15 bp, Homo sapiens
ccacaggcgcacgtg

SEQ ID NO: 1584892 - DNA, 15 bp, Homo sapiens
gccacaggcgcacgt

SEQ ID NO: 1584893 - DNA, 15 bp, Homo sapiens
ggccacaggcgcacg

SEQ ID NO: 1584894 - DNA, 15 bp, Homo sapiens
aggccacaggcgcac

SEQ ID NO: 1584895 - DNA, 15 bp, Homo sapiens
caggccacaggcgca

SEQ ID NO: 1584896 - DNA, 15 bp, Homo sapiens
gcaggccacaggcgc

SEQ ID NO: 1584897 - DNA, 15 bp, Homo sapiens
agcaggccacaggcg

SEQ ID NO: 1584898 - DNA, 15 bp, Homo sapiens
cagcaggccacaggc

SEQ ID NO: 1584899 - DNA, 15 bp, Homo sapiens
tcagcaggccacagg

SEQ ID NO: 1584900 - DNA, 15 bp, Homo sapiens
ctcagcaggccacag

SEQ ID NO: 1584901 - DNA, 15 bp, Homo sapiens
tctcagcaggccaca

SEQ ID NO: 1584902 - DNA, 15 bp, Homo sapiens
ctctcagcaggccac

SEQ ID NO: 1584903 - DNA, 15 bp, Homo sapiens
cctctcagcaggcca

SEQ ID NO: 1584904 - DNA, 15 bp, Homo sapiens
acctctcagcaggcc

SEQ ID NO: 1584905 - DNA, 15 bp, Homo sapiens
aacctctcagcaggc

SEQ ID NO: 1584906 - DNA, 15 bp, Homo sapiens
caacctctcagcagg

SEQ ID NO: 1584907 - DNA, 15 bp, Homo sapiens
tcaacctctcagcag

SEQ ID NO: 1584908 - DNA, 15 bp, Homo sapiens
ttcaacctctcagca

SEQ ID NO: 1584909 - DNA, 15 bp, Homo sapiens
tttcaacctctcagc

SEQ ID NO: 1584910 - DNA, 15 bp, Homo sapiens
ttttcaacctctcag

SEQ ID NO: 1584911 - DNA, 15 bp, Homo sapiens
cttttcaacctctca

SEQ ID NO: 1584912 - DNA, 15 bp, Homo sapiens
gcttttcaacctctc

SEQ ID NO: 1584913 - DNA, 15 bp, Homo sapiens
agcttttcaacctct

SEQ ID NO: 1584914 - DNA, 15 bp, Homo sapiens
cagcttttcaacctc

SEQ ID NO: 1584915 - DNA, 15 bp, Homo sapiens
gcagcttttcaacct

SEQ ID NO: 1584916 - DNA, 15 bp, Homo sapiens
ggcagcttttcaacc

SEQ ID NO: 1584917 - DNA, 15 bp, Homo sapiens
tggcagcttttcaac

SEQ ID NO: 1584918 - DNA, 15 bp, Homo sapiens
ttggcagcttttcaa

SEQ ID NO: 1584919 - DNA, 15 bp, Homo sapiens
cttggcagcttttca

SEQ ID NO: 1584920 - DNA, 15 bp, Homo sapiens
ccttggcagcttttc

SEQ ID NO: 1584921 - DNA, 15 bp, Homo sapiens
cccttggcagctttt

SEQ ID NO: 1584922 - DNA, 15 bp, Homo sapiens
tcccttggcagcttt

SEQ ID NO: 1584923 - DNA, 15 bp, Homo sapiens
gtcccttggcagctt

SEQ ID NO: 1584924 - DNA, 15 bp, Homo sapiens
cgtcccttggcagct

SEQ ID NO: 1584925 - DNA, 15 bp, Homo sapiens
tcgtcccttggcagc

SEQ ID NO: 1584926 - DNA, 15 bp, Homo sapiens
ttcgtcccttggcag

SEQ ID NO: 1584927 - DNA, 15 bp, Homo sapiens
cttcgtcccttggca

SEQ ID NO: 1584928 - DNA, 15 bp, Homo sapiens
ccttcgtcccttggc

SEQ ID NO: 1584929 - DNA, 15 bp, Homo sapiens
gccttcgtcccttgg

SEQ ID NO: 1584930 - DNA, 15 bp, Homo sapiens
ggccttcgtcccttg

SEQ ID NO: 1584931 - DNA, 15 bp, Homo sapiens
cggccttcgtccctt

SEQ ID NO: 1584932 - DNA, 15 bp, Homo sapiens
tcggccttcgtccct

SEQ ID NO: 1584933 - DNA, 15 bp, Homo sapiens
ctcggccttcgtccc

SEQ ID NO: 1584934 - DNA, 15 bp, Homo sapiens
tctcggccttcgtcc

SEQ ID NO: 1584935 - DNA, 15 bp, Homo sapiens
ttctcggccttcgtc

SEQ ID NO: 1584936 - DNA, 15 bp, Homo sapiens
cttctcggccttcgt

SEQ ID NO: 1584937 - DNA, 15 bp, Homo sapiens
tcttctcggccttcg

SEQ ID NO: 1584938 - DNA, 15 bp, Homo sapiens
gtcttctcggccttc

SEQ ID NO: 1584939 - DNA, 15 bp, Homo sapiens
tgtcttctcggcctt

SEQ ID NO: 1584940 - DNA, 15 bp, Homo sapiens
ctgtcttctcggcct

SEQ ID NO: 1584941 - DNA, 15 bp, Homo sapiens
cctgtcttctcggcc

SEQ ID NO: 1584942 - DNA, 15 bp, Homo sapiens
tcctgtcttctcggc

SEQ ID NO: 1584943 - DNA, 15 bp, Homo sapiens
gtcctgtcttctcgg

SEQ ID NO: 1584944 - DNA, 15 bp, Homo sapiens
ggtcctgtcttctcg

SEQ ID NO: 1584945 - DNA, 15 bp, Homo sapiens
aggtcctgtcttctc

SEQ ID NO: 1584946 - DNA, 15 bp, Homo sapiens
taggtcctgtcttct

SEQ ID NO: 1584947 - DNA, 15 bp, Homo sapiens
ctaggtcctgtcttc

SEQ ID NO: 1584948 - DNA, 15 bp, Homo sapiens
cctaggtcctgtctt

SEQ ID NO: 1584949 - DNA, 15 bp, Homo sapiens
ccctaggtcctgtct

SEQ ID NO: 1584950 - DNA, 15 bp, Homo sapiens
cccctaggtcctgtc

SEQ ID NO: 1584951 - DNA, 15 bp, Homo sapiens
gcccctaggtcctgt

SEQ ID NO: 1584952 - DNA, 15 bp, Homo sapiens
agcccctaggtcctg

SEQ ID NO: 1584953 - DNA, 15 bp, Homo sapiens
cagcccctaggtcct

SEQ ID NO: 1584954 - DNA, 15 bp, Homo sapiens
acagcccctaggtcc

SEQ ID NO: 1584955 - DNA, 15 bp, Homo sapiens
cacagcccctaggtc

SEQ ID NO: 1584956 - DNA, 15 bp, Homo sapiens
ccacagcccctaggt

SEQ ID NO: 1584957 - DNA, 15 bp, Homo sapiens
tccacagcccctagg

SEQ ID NO: 1584958 - DNA, 15 bp, Homo sapiens
ttccacagcccctag

SEQ ID NO: 1584959 - DNA, 15 bp, Homo sapiens
cttccacagccccta

SEQ ID NO: 1584960 - DNA, 15 bp, Homo sapiens
tcttccacagcccct

SEQ ID NO: 1584961 - DNA, 15 bp, Homo sapiens
atcttccacagcccc

SEQ ID NO: 1584962 - DNA, 15 bp, Homo sapiens
aatcttccacagccc

SEQ ID NO: 1584963 - DNA, 15 bp, Homo sapiens
gaatcttccacagcc

SEQ ID NO: 1584964 - DNA, 15 bp, Homo sapiens
tgaatcttccacagc

SEQ ID NO: 1584965 - DNA, 15 bp, Homo sapiens
gtgaatcttccacag

SEQ ID NO: 1584966 - DNA, 15 bp, Homo sapiens
ggtgaatcttccaca

SEQ ID NO: 1584967 - DNA, 15 bp, Homo sapiens
gggtgaatcttccac

SEQ ID NO: 1584968 - DNA, 15 bp, Homo sapiens
tgggtgaatcttcca

SEQ ID NO: 1584969 - DNA, 15 bp, Homo sapiens
ttgggtgaatcttcc

SEQ ID NO: 1584970 - DNA, 15 bp, Homo sapiens
gttgggtgaatcttc

SEQ ID NO: 1584971 - DNA, 15 bp, Homo sapiens
agttgggtgaatctt

SEQ ID NO: 1584972 - DNA, 15 bp, Homo sapiens
gagttgggtgaatct

SEQ ID NO: 1584973 - DNA, 15 bp, Homo sapiens
agagttgggtgaatc

SEQ ID NO: 1584974 - DNA, 15 bp, Homo sapiens
aagagttgggtgaat

SEQ ID NO: 1584975 - DNA, 15 bp, Homo sapiens
gaagagttgggtgaa

SEQ ID NO: 1584976 - DNA, 15 bp, Homo sapiens
ggaagagttgggtga

SEQ ID NO: 1584977 - DNA, 15 bp, Homo sapiens
aggaagagttgggtg

SEQ ID NO: 1584978 - DNA, 15 bp, Homo sapiens
aaggaagagttgggt

SEQ ID NO: 1584979 - DNA, 15 bp, Homo sapiens
aaaggaagagttggg

SEQ ID NO: 1584980 - DNA, 15 bp, Homo sapiens
aaaaggaagagttgg

SEQ ID NO: 1584981 - DNA, 15 bp, Homo sapiens
taaaaggaagagttg

SEQ ID NO: 1584982 - DNA, 15 bp, Homo sapiens
gtaaaaggaagagtt

SEQ ID NO: 1584983 - DNA, 15 bp, Homo sapiens
agtaaaaggaagagt

SEQ ID NO: 1584984 - DNA, 15 bp, Homo sapiens
gagtaaaaggaagag

SEQ ID NO: 1584985 - DNA, 15 bp, Homo sapiens
tgagtaaaaggaaga

SEQ ID NO: 1584986 - DNA, 15 bp, Homo sapiens
ctgagtaaaaggaag

SEQ ID NO: 1584987 - DNA, 15 bp, Homo sapiens
cctgagtaaaaggaa

SEQ ID NO: 1584988 - DNA, 15 bp, Homo sapiens
acctgagtaaaagga

SEQ ID NO: 1584989 - DNA, 15 bp, Homo sapiens
gacctgagtaaaagg

SEQ ID NO: 1584990 - DNA, 15 bp, Homo sapiens
agacctgagtaaaag

SEQ ID NO: 1584991 - DNA, 15 bp, Homo sapiens
aagacctgagtaaaa

SEQ ID NO: 1584992 - DNA, 15 bp, Homo sapiens
caagacctgagtaaa

SEQ ID NO: 1584993 - DNA, 15 bp, Homo sapiens
ccaagacctgagtaa

SEQ ID NO: 1584994 - DNA, 15 bp, Homo sapiens
cccaagacctgagta

SEQ ID NO: 1584995 - DNA, 15 bp, Homo sapiens
tcccaagacctgagt

SEQ ID NO: 1584996 - DNA, 15 bp, Homo sapiens
gtcccaagacctgag

SEQ ID NO: 1584997 - DNA, 15 bp, Homo sapiens
ggtcccaagacctga

SEQ ID NO: 1584998 - DNA, 15 bp, Homo sapiens
aggtcccaagacctg

SEQ ID NO: 1584999 - DNA, 15 bp, Homo sapiens
taggtcccaagacct

SEQ ID NO: 1585000 - DNA, 15 bp, Homo sapiens
ttaggtcccaagacc

SEQ ID NO: 1585001 - DNA, 15 bp, Homo sapiens
cttaggtcccaagac

SEQ ID NO: 1585002 - DNA, 15 bp, Homo sapiens
tcttaggtcccaaga

SEQ ID NO: 1585003 - DNA, 15 bp, Homo sapiens
ctcttaggtcccaag

SEQ ID NO: 1585004 - DNA, 15 bp, Homo sapiens
cctcttaggtcccaa

SEQ ID NO: 1585005 - DNA, 15 bp, Homo sapiens
ccctcttaggtccca

SEQ ID NO: 1585006 - DNA, 15 bp, Homo sapiens
cccctcttaggtccc

SEQ ID NO: 1585007 - DNA, 15 bp, Homo sapiens
ccccctcttaggtcc

SEQ ID NO: 1585008 - DNA, 15 bp, Homo sapiens
accccctcttaggtc

SEQ ID NO: 1585009 - DNA, 15 bp, Homo sapiens
caccccctcttaggt

SEQ ID NO: 1585010 - DNA, 15 bp, Homo sapiens
ccaccccctcttagg

SEQ ID NO: 1585011 - DNA, 15 bp, Homo sapiens
cccaccccctcttag

SEQ ID NO: 1585012 - DNA, 15 bp, Homo sapiens
ccccaccccctctta

SEQ ID NO: 1585013 - DNA, 15 bp, Homo sapiens
tccccaccccctctt

SEQ ID NO: 1585014 - DNA, 15 bp, Homo sapiens
atccccaccccctct

SEQ ID NO: 1585015 - DNA, 15 bp, Homo sapiens
tatccccaccccctc

SEQ ID NO: 1585016 - DNA, 15 bp, Homo sapiens
ctatccccaccccct

SEQ ID NO: 1585017 - DNA, 15 bp, Homo sapiens
actatccccaccccc

SEQ ID NO: 1585018 - DNA, 15 bp, Homo sapiens
gactatccccacccc

SEQ ID NO: 1585019 - DNA, 15 bp, Homo sapiens
tgactatccccaccc

SEQ ID NO: 1585020 - DNA, 15 bp, Homo sapiens
atgactatccccacc

SEQ ID NO: 1585021 - DNA, 15 bp, Homo sapiens
catgactatccccac

SEQ ID NO: 1585022 - DNA, 15 bp, Homo sapiens
tcatgactatcccca

SEQ ID NO: 1585023 - DNA, 15 bp, Homo sapiens
atcatgactatcccc

SEQ ID NO: 1585024 - DNA, 15 bp, Homo sapiens
tatcatgactatccc

SEQ ID NO: 1585025 - DNA, 15 bp, Homo sapiens
ttatcatgactatcc

SEQ ID NO: 1585026 - DNA, 15 bp, Homo sapiens
attatcatgactatc

SEQ ID NO: 1585027 - DNA, 15 bp, Homo sapiens
tattatcatgactat

SEQ ID NO: 1585028 - DNA, 15 bp, Homo sapiens
ttattatcatgacta

SEQ ID NO: 1585029 - DNA, 15 bp, Homo sapiens
gttattatcatgact

SEQ ID NO: 1585030 - DNA, 15 bp, Homo sapiens
agttattatcatgac

SEQ ID NO: 1585031 - DNA, 15 bp, Homo sapiens
tagttattatcatga

SEQ ID NO: 1585032 - DNA, 15 bp, Homo sapiens
gtagttattatcatg

SEQ ID NO: 1585033 - DNA, 15 bp, Homo sapiens
ggtagttattatcat

SEQ ID NO: 1585034 - DNA, 15 bp, Homo sapiens
cggtagttattatca

SEQ ID NO: 1585035 - DNA, 15 bp, Homo sapiens
gcggtagttattatc

SEQ ID NO: 1585036 - DNA, 15 bp, Homo sapiens
tgcggtagttattat

SEQ ID NO: 1585037 - DNA, 15 bp, Homo sapiens
ttgcggtagttatta

SEQ ID NO: 1585038 - DNA, 15 bp, Homo sapiens
attgcggtagttatt

SEQ ID NO: 1585039 - DNA, 15 bp, Homo sapiens
gattgcggtagttat

SEQ ID NO: 1585040 - DNA, 15 bp, Homo sapiens
agattgcggtagtta

SEQ ID NO: 1585041 - DNA, 15 bp, Homo sapiens
gagattgcggtagtt

SEQ ID NO: 1585042 - DNA, 15 bp, Homo sapiens
ggagattgcggtagt

SEQ ID NO: 1585043 - DNA, 15 bp, Homo sapiens
tggagattgcggtag

SEQ ID NO: 1585044 - DNA, 15 bp, Homo sapiens
ctggagattgcggta

SEQ ID NO: 1585045 - DNA, 15 bp, Homo sapiens
actggagattgcggt

SEQ ID NO: 1585046 - DNA, 15 bp, Homo sapiens
cactggagattgcgg

SEQ ID NO: 1585047 - DNA, 15 bp, Homo sapiens
gcactggagattgcg

SEQ ID NO: 1585048 - DNA, 15 bp, Homo sapiens
agcactggagattgc

SEQ ID NO: 1585049 - DNA, 15 bp, Homo sapiens
cagcactggagattg

SEQ ID NO: 1585050 - DNA, 15 bp, Homo sapiens
ccagcactggagatt

SEQ ID NO: 1585051 - DNA, 15 bp, Homo sapiens
gccagcactggagat

SEQ ID NO: 1585052 - DNA, 15 bp, Homo sapiens
tgccagcactggaga

SEQ ID NO: 1585053 - DNA, 15 bp, Homo sapiens
gtgccagcactggag

SEQ ID NO: 1585054 - DNA, 15 bp, Homo sapiens
agtgccagcactgga

SEQ ID NO: 1585055 - DNA, 15 bp, Homo sapiens
cagtgccagcactgg

SEQ ID NO: 1585056 - DNA, 15 bp, Homo sapiens
tcagtgccagcactg

SEQ ID NO: 1585057 - DNA, 15 bp, Homo sapiens
ctcagtgccagcact

SEQ ID NO: 1585058 - DNA, 15 bp, Homo sapiens
gctcagtgccagcac

SEQ ID NO: 1585059 - DNA, 15 bp, Homo sapiens
agctcagtgccagca

SEQ ID NO: 1585060 - DNA, 15 bp, Homo sapiens
cagctcagtgccagc

SEQ ID NO: 1585061 - DNA, 15 bp, Homo sapiens
tcagctcagtgccag

SEQ ID NO: 1585062 - DNA, 15 bp, Homo sapiens
ttcagctcagtgcca

SEQ ID NO: 1585063 - DNA, 15 bp, Homo sapiens
tttcagctcagtgcc

SEQ ID NO: 1585064 - DNA, 15 bp, Homo sapiens
ttttcagctcagtgc

SEQ ID NO: 1585065 - DNA, 15 bp, Homo sapiens
tttttcagctcagtg

SEQ ID NO: 1585066 - DNA, 15 bp, Homo sapiens
gtttttcagctcagt

SEQ ID NO: 1585067 - DNA, 15 bp, Homo sapiens
tgtttttcagctcag

SEQ ID NO: 1585068 - DNA, 15 bp, Homo sapiens
atgtttttcagctca

SEQ ID NO: 1585069 - DNA, 15 bp, Homo sapiens
aatgtttttcagctc

SEQ ID NO: 1585070 - DNA, 15 bp, Homo sapiens
gaatgtttttcagct

SEQ ID NO: 1585071 - DNA, 15 bp, Homo sapiens
tgaatgtttttcagc

SEQ ID NO: 1585072 - DNA, 15 bp, Homo sapiens
ttgaatgtttttcag

SEQ ID NO: 1585073 - DNA, 15 bp, Homo sapiens
tttgaatgtttttca

SEQ ID NO: 1585074 - DNA, 15 bp, Homo sapiens
ctttgaatgtttttc

SEQ ID NO: 1585075 - DNA, 15 bp, Homo sapiens
gctttgaatgttttt

SEQ ID NO: 1585076 - DNA, 15 bp, Homo sapiens
agctttgaatgtttt

SEQ ID NO: 1585077 - DNA, 15 bp, Homo sapiens
aagctttgaatgttt

SEQ ID NO: 1585078 - DNA, 15 bp, Homo sapiens
aaagctttgaatgtt

SEQ ID NO: 1585079 - DNA, 15 bp, Homo sapiens
gaaagctttgaatgt

SEQ ID NO: 1585080 - DNA, 15 bp, Homo sapiens
tgaaagctttgaatg

SEQ ID NO: 1585081 - DNA, 15 bp, Homo sapiens
ttgaaagctttgaat

SEQ ID NO: 1585082 - DNA, 15 bp, Homo sapiens
tttgaaagctttgaa

SEQ ID NO: 1585083 - DNA, 15 bp, Homo sapiens
ctttgaaagctttga

SEQ ID NO: 1585084 - DNA, 15 bp, Homo sapiens
gctttgaaagctttg

SEQ ID NO: 1585085 - DNA, 15 bp, Homo sapiens
tgctttgaaagcttt

SEQ ID NO: 1585086 - DNA, 15 bp, Homo sapiens
atgctttgaaagctt

SEQ ID NO: 1585087 - DNA, 15 bp, Homo sapiens
aatgctttgaaagct

SEQ ID NO: 1585088 - DNA, 15 bp, Homo sapiens
aaatgctttgaaagc

SEQ ID NO: 1585089 - DNA, 15 bp, Homo sapiens
aaaatgctttgaaag

SEQ ID NO: 1585090 - DNA, 15 bp, Homo sapiens
caaaatgctttgaaa

SEQ ID NO: 1585091 - DNA, 15 bp, Homo sapiens
tcaaaatgctttgaa

SEQ ID NO: 1585092 - DNA, 15 bp, Homo sapiens
atcaaaatgctttga

SEQ ID NO: 1585093 - DNA, 15 bp, Homo sapiens
catcaaaatgctttg

SEQ ID NO: 1585094 - DNA, 15 bp, Homo sapiens
acatcaaaatgcttt

SEQ ID NO: 1585095 - DNA, 15 bp, Homo sapiens
cacatcaaaatgctt

SEQ ID NO: 1585096 - DNA, 15 bp, Homo sapiens
gcacatcaaaatgct

SEQ ID NO: 1585097 - DNA, 15 bp, Homo sapiens
agcacatcaaaatgc

SEQ ID NO: 1585098 - DNA, 15 bp, Homo sapiens
aagcacatcaaaatg

SEQ ID NO: 1585099 - DNA, 15 bp, Homo sapiens
gaagcacatcaaaat

SEQ ID NO: 1585100 - DNA, 15 bp, Homo sapiens
tgaagcacatcaaaa

SEQ ID NO: 1585101 - DNA, 15 bp, Homo sapiens
atgaagcacatcaaa

SEQ ID NO: 1585102 - DNA, 15 bp, Homo sapiens
gatgaagcacatcaa

SEQ ID NO: 1585103 - DNA, 15 bp, Homo sapiens
agatgaagcacatca

SEQ ID NO: 1585104 - DNA, 15 bp, Homo sapiens
aagatgaagcacatc

SEQ ID NO: 1585105 - DNA, 15 bp, Homo sapiens
taagatgaagcacat

SEQ ID NO: 1585106 - DNA, 15 bp, Homo sapiens
gtaagatgaagcaca

SEQ ID NO: 1585107 - DNA, 15 bp, Homo sapiens
agtaagatgaagcac

SEQ ID NO: 1585108 - DNA, 15 bp, Homo sapiens
aagtaagatgaagca

SEQ ID NO: 1585109 - DNA, 15 bp, Homo sapiens
caagtaagatgaagc

SEQ ID NO: 1585110 - DNA, 15 bp, Homo sapiens
tcaagtaagatgaag

SEQ ID NO: 1585111 - DNA, 15 bp, Homo sapiens
ttcaagtaagatgaa

SEQ ID NO: 1585112 - DNA, 15 bp, Homo sapiens
attcaagtaagatga

SEQ ID NO: 1585113 - DNA, 15 bp, Homo sapiens
gattcaagtaagatg

SEQ ID NO: 1585114 - DNA, 15 bp, Homo sapiens
agattcaagtaagat

SEQ ID NO: 1585115 - DNA, 15 bp, Homo sapiens
gagattcaagtaaga

SEQ ID NO: 1585116 - DNA, 15 bp, Homo sapiens
tgagattcaagtaag

SEQ ID NO: 1585117 - DNA, 15 bp, Homo sapiens
gtgagattcaagtaa

SEQ ID NO: 1585118 - DNA, 15 bp, Homo sapiens
tgtgagattcaagta

SEQ ID NO: 1585119 - DNA, 15 bp, Homo sapiens
ttgtgagattcaagt

SEQ ID NO: 1585120 - DNA, 15 bp, Homo sapiens
tttgtgagattcaag

SEQ ID NO: 1585121 - DNA, 15 bp, Homo sapiens
ttttgtgagattcaa

SEQ ID NO: 1585122 - DNA, 15 bp, Homo sapiens
tttttgtgagattca

SEQ ID NO: 1585123 - DNA, 15 bp, Homo sapiens
gtttttgtgagattc

SEQ ID NO: 1585124 - DNA, 15 bp, Homo sapiens
ggtttttgtgagatt

SEQ ID NO: 1585125 - DNA, 15 bp, Homo sapiens
aggtttttgtgagat

SEQ ID NO: 1585126 - DNA, 15 bp, Homo sapiens
aaggtttttgtgaga

SEQ ID NO: 1585127 - DNA, 15 bp, Homo sapiens
caaggtttttgtgag

SEQ ID NO: 1585128 - DNA, 15 bp, Homo sapiens
acaaggtttttgtga

SEQ ID NO: 1585129 - DNA, 15 bp, Homo sapiens
cacaaggtttttgtg

SEQ ID NO: 1585130 - DNA, 15 bp, Homo sapiens
tcacaaggtttttgt

SEQ ID NO: 1585131 - DNA, 15 bp, Homo sapiens
ttcacaaggtttttg

SEQ ID NO: 1585132 - DNA, 15 bp, Homo sapiens
cttcacaaggttttt

SEQ ID NO: 1585133 - DNA, 15 bp, Homo sapiens
tcttcacaaggtttt

SEQ ID NO: 1585134 - DNA, 15 bp, Homo sapiens
atcttcacaaggttt

SEQ ID NO: 1585135 - DNA, 15 bp, Homo sapiens
aatcttcacaaggtt

SEQ ID NO: 1585136 - DNA, 15 bp, Homo sapiens
caatcttcacaaggt

SEQ ID NO: 1585137 - DNA, 15 bp, Homo sapiens
tcaatcttcacaagg

SEQ ID NO: 1585138 - DNA, 15 bp, Homo sapiens
atcaatcttcacaag

SEQ ID NO: 1585139 - DNA, 15 bp, Homo sapiens
gatcaatcttcacaa

SEQ ID NO: 1585140 - DNA, 15 bp, Homo sapiens
agatcaatcttcaca

SEQ ID NO: 1585141 - DNA, 15 bp, Homo sapiens
gagatcaatcttcac

SEQ ID NO: 1585142 - DNA, 15 bp, Homo sapiens
ggagatcaatcttca

SEQ ID NO: 1585143 - DNA, 15 bp, Homo sapiens
tggagatcaatcttc

SEQ ID NO: 1585144 - DNA, 15 bp, Homo sapiens
atggagatcaatctt

SEQ ID NO: 1585145 - DNA, 15 bp, Homo sapiens
aatggagatcaatct

SEQ ID NO: 1585146 - DNA, 15 bp, Homo sapiens
aaatggagatcaatc

SEQ ID NO: 1585147 - DNA, 15 bp, Homo sapiens
gaaatggagatcaat

SEQ ID NO: 1585148 - DNA, 15 bp, Homo sapiens
agaaatggagatcaa

SEQ ID NO: 1585149 - DNA, 15 bp, Homo sapiens
tagaaatggagatca

SEQ ID NO: 1585150 - DNA, 15 bp, Homo sapiens
ttagaaatggagatc

SEQ ID NO: 1585151 - DNA, 15 bp, Homo sapiens
tttagaaatggagat

SEQ ID NO: 1585152 - DNA, 15 bp, Homo sapiens
atttagaaatggaga

SEQ ID NO: 1585153 - DNA, 15 bp, Homo sapiens
catttagaaatggag

SEQ ID NO: 1585154 - DNA, 15 bp, Homo sapiens
ccatttagaaatgga

SEQ ID NO: 1585155 - DNA, 15 bp, Homo sapiens
gccatttagaaatgg

SEQ ID NO: 1585156 - DNA, 15 bp, Homo sapiens
cgccatttagaaatg

SEQ ID NO: 1585157 - DNA, 15 bp, Homo sapiens
acgccatttagaaat

SEQ ID NO: 1585158 - DNA, 15 bp, Homo sapiens
aacgccatttagaaa

SEQ ID NO: 1585159 - DNA, 15 bp, Homo sapiens
caacgccatttagaa

SEQ ID NO: 1585160 - DNA, 15 bp, Homo sapiens
tcaacgccatttaga

SEQ ID NO: 1585161 - DNA, 15 bp, Homo sapiens
ctcaacgccatttag

SEQ ID NO: 1585162 - DNA, 15 bp, Homo sapiens
tctcaacgccattta

SEQ ID NO: 1585163 - DNA, 15 bp, Homo sapiens
gtctcaacgccattt

SEQ ID NO: 1585164 - DNA, 15 bp, Homo sapiens
agtctcaacgccatt

SEQ ID NO: 1585165 - DNA, 15 bp, Homo sapiens
cagtctcaacgccat

SEQ ID NO: 1585166 - DNA, 15 bp, Homo sapiens
ccagtctcaacgcca

SEQ ID NO: 1585167 - DNA, 15 bp, Homo sapiens
tccagtctcaacgcc

SEQ ID NO: 1585168 - DNA, 15 bp, Homo sapiens
ttccagtctcaacgc

SEQ ID NO: 1585169 - DNA, 15 bp, Homo sapiens
cttccagtctcaacg

SEQ ID NO: 1585170 - DNA, 15 bp, Homo sapiens
tcttccagtctcaac

SEQ ID NO: 1585171 - DNA, 15 bp, Homo sapiens
ctcttccagtctcaa

SEQ ID NO: 1585172 - DNA, 15 bp, Homo sapiens
tctcttccagtctca

SEQ ID NO: 1585173 - DNA, 15 bp, Homo sapiens
atctcttccagtctc

SEQ ID NO: 1585174 - DNA, 15 bp, Homo sapiens
catctcttccagtct

SEQ ID NO: 1585175 - DNA, 15 bp, Homo sapiens
acatctcttccagtc

SEQ ID NO: 1585176 - DNA, 15 bp, Homo sapiens
tacatctcttccagt

SEQ ID NO: 1585177 - DNA, 15 bp, Homo sapiens
gtacatctcttccag

SEQ ID NO: 1585178 - DNA, 15 bp, Homo sapiens
tgtacatctcttcca

SEQ ID NO: 1585179 - DNA, 15 bp, Homo sapiens
ttgtacatctcttcc

SEQ ID NO: 1585180 - DNA, 15 bp, Homo sapiens
gttgtacatctcttc

SEQ ID NO: 1585181 - DNA, 15 bp, Homo sapiens
tgttgtacatctctt

SEQ ID NO: 1585182 - DNA, 15 bp, Homo sapiens
atgttgtacatctct

SEQ ID NO: 1585183 - DNA, 15 bp, Homo sapiens
aatgttgtacatctc

SEQ ID NO: 1585184 - DNA, 15 bp, Homo sapiens
gaatgttgtacatct

SEQ ID NO: 1585185 - DNA, 15 bp, Homo sapiens
agaatgttgtacatc

SEQ ID NO: 1585186 - DNA, 15 bp, Homo sapiens
tagaatgttgtacat

SEQ ID NO: 1585187 - DNA, 15 bp, Homo sapiens
gtagaatgttgtaca

SEQ ID NO: 1585188 - DNA, 15 bp, Homo sapiens
tgtagaatgttgtac

SEQ ID NO: 1585189 - DNA, 15 bp, Homo sapiens
gtgtagaatgttgta

SEQ ID NO: 1585190 - DNA, 15 bp, Homo sapiens
agtgtagaatgttgt

SEQ ID NO: 1585191 - DNA, 15 bp, Homo sapiens
aagtgtagaatgttg

SEQ ID NO: 1585192 - DNA, 15 bp, Homo sapiens
caagtgtagaatgtt

SEQ ID NO: 1585193 - DNA, 15 bp, Homo sapiens
ccaagtgtagaatgt

SEQ ID NO: 1585194 - DNA, 15 bp, Homo sapiens
accaagtgtagaatg

SEQ ID NO: 1585195 - DNA, 15 bp, Homo sapiens
caccaagtgtagaat

SEQ ID NO: 1585196 - DNA, 15 bp, Homo sapiens
acaccaagtgtagaa

SEQ ID NO: 1585197 - DNA, 15 bp, Homo sapiens
aacaccaagtgtaga

SEQ ID NO: 1585198 - DNA, 15 bp, Homo sapiens
gaacaccaagtgtag

SEQ ID NO: 1585199 - DNA, 15 bp, Homo sapiens
ggaacaccaagtgta

SEQ ID NO: 1585200 - DNA, 15 bp, Homo sapiens
aggaacaccaagtgt

SEQ ID NO: 1585201 - DNA, 15 bp, Homo sapiens
aaggaacaccaagtg

SEQ ID NO: 1585202 - DNA, 15 bp, Homo sapiens
taaggaacaccaagt

SEQ ID NO: 1585203 - DNA, 15 bp, Homo sapiens
ttaaggaacaccaag

SEQ ID NO: 1585204 - DNA, 15 bp, Homo sapiens
tttaaggaacaccaa

SEQ ID NO: 1585205 - DNA, 15 bp, Homo sapiens
gtttaaggaacacca

SEQ ID NO: 1585206 - DNA, 15 bp, Homo sapiens
agtttaaggaacacc

SEQ ID NO: 1585207 - DNA, 15 bp, Homo sapiens
aagtttaaggaacac

SEQ ID NO: 1585208 - DNA, 15 bp, Homo sapiens
taagtttaaggaaca

SEQ ID NO: 1585209 - DNA, 15 bp, Homo sapiens
gtaagtttaaggaac

SEQ ID NO: 1585210 - DNA, 15 bp, Homo sapiens
tgtaagtttaaggaa

SEQ ID NO: 1585211 - DNA, 15 bp, Homo sapiens
ttgtaagtttaagga

SEQ ID NO: 1585212 - DNA, 15 bp, Homo sapiens
tttgtaagtttaagg

SEQ ID NO: 1585213 - DNA, 15 bp, Homo sapiens
gtttgtaagtttaag

SEQ ID NO: 1585214 - DNA, 15 bp, Homo sapiens
tgtttgtaagtttaa

SEQ ID NO: 1585215 - DNA, 15 bp, Homo sapiens
ttgtttgtaagttta

SEQ ID NO: 1585216 - DNA, 15 bp, Homo sapiens
gttgtttgtaagttt

SEQ ID NO: 1585217 - DNA, 15 bp, Homo sapiens
agttgtttgtaagtt

SEQ ID NO: 1585218 - DNA, 15 bp, Homo sapiens
tagttgtttgtaagt

SEQ ID NO: 1585219 - DNA, 15 bp, Homo sapiens
atagttgtttgtaag

SEQ ID NO: 1585220 - DNA, 15 bp, Homo sapiens
catagttgtttgtaa

SEQ ID NO: 1585221 - DNA, 15 bp, Homo sapiens
tcatagttgtttgta

SEQ ID NO: 1585222 - DNA, 15 bp, Homo sapiens
ttcatagttgtttgt

SEQ ID NO: 1585223 - DNA, 15 bp, Homo sapiens
tttcatagttgtttg

SEQ ID NO: 1585224 - DNA, 15 bp, Homo sapiens
atttcatagttgttt

SEQ ID NO: 1585225 - DNA, 15 bp, Homo sapiens
tatttcatagttgtt

SEQ ID NO: 1585226 - DNA, 15 bp, Homo sapiens
ttatttcatagttgt

SEQ ID NO: 1585227 - DNA, 15 bp, Homo sapiens
attatttcatagttg

SEQ ID NO: 1585228 - DNA, 15 bp, Homo sapiens
cattatttcatagtt

SEQ ID NO: 1585229 - DNA, 15 bp, Homo sapiens
ccattatttcatagt

SEQ ID NO: 1585230 - DNA, 15 bp, Homo sapiens
gccattatttcatag

SEQ ID NO: 1585231 - DNA, 15 bp, Homo sapiens
cgccattatttcata

SEQ ID NO: 1585232 - DNA, 15 bp, Homo sapiens
tcgccattatttcat

SEQ ID NO: 1585233 - DNA, 15 bp, Homo sapiens
ctcgccattatttca

SEQ ID NO: 1585234 - DNA, 15 bp, Homo sapiens
actcgccattatttc

SEQ ID NO: 1585235 - DNA, 15 bp, Homo sapiens
cactcgccattattt

SEQ ID NO: 1585236 - DNA, 15 bp, Homo sapiens
tcactcgccattatt

SEQ ID NO: 1585237 - DNA, 15 bp, Homo sapiens
ctcactcgccattat

SEQ ID NO: 1585238 - DNA, 15 bp, Homo sapiens
tctcactcgccatta

SEQ ID NO: 1585239 - DNA, 15 bp, Homo sapiens
ctctcactcgccatt

SEQ ID NO: 1585240 - DNA, 15 bp, Homo sapiens
tctctcactcgccat

SEQ ID NO: 1585241 - DNA, 15 bp, Homo sapiens
ttctctcactcgcca

SEQ ID NO: 1585242 - DNA, 15 bp, Homo sapiens
tttctctcactcgcc

SEQ ID NO: 1585243 - DNA, 15 bp, Homo sapiens
ctttctctcactcgc

SEQ ID NO: 1585244 - DNA, 15 bp, Homo sapiens
tctttctctcactcg

SEQ ID NO: 1585245 - DNA, 15 bp, Homo sapiens
ttctttctctcactc

SEQ ID NO: 1585246 - DNA, 15 bp, Homo sapiens
cttctttctctcact

SEQ ID NO: 1585247 - DNA, 15 bp, Homo sapiens
gcttctttctctcac

SEQ ID NO: 1585248 - DNA, 15 bp, Homo sapiens
agcttctttctctca

SEQ ID NO: 1585249 - DNA, 15 bp, Homo sapiens
cagcttctttctctc

SEQ ID NO: 1585250 - DNA, 15 bp, Homo sapiens
ccagcttctttctct

SEQ ID NO: 1585251 - DNA, 15 bp, Homo sapiens
cccagcttctttctc

SEQ ID NO: 1585252 - DNA, 15 bp, Homo sapiens
acccagcttctttct

SEQ ID NO: 1585253 - DNA, 15 bp, Homo sapiens
cacccagcttctttc

SEQ ID NO: 1585254 - DNA, 15 bp, Homo sapiens
tcacccagcttcttt

SEQ ID NO: 1585255 - DNA, 15 bp, Homo sapiens
gtcacccagcttctt

SEQ ID NO: 1585256 - DNA, 15 bp, Homo sapiens
agtcacccagcttct

SEQ ID NO: 1585257 - DNA, 15 bp, Homo sapiens
cagtcacccagcttc

SEQ ID NO: 1585258 - DNA, 15 bp, Homo sapiens
ccagtcacccagctt

SEQ ID NO: 1585259 - DNA, 15 bp, Homo sapiens
cccagtcacccagct

SEQ ID NO: 1585260 - DNA, 15 bp, Homo sapiens
tcccagtcacccagc

SEQ ID NO: 1585261 - DNA, 15 bp, Homo sapiens
ttcccagtcacccag

SEQ ID NO: 1585262 - DNA, 15 bp, Homo sapiens
tttcccagtcaccca

SEQ ID NO: 1585263 - DNA, 15 bp, Homo sapiens
gtttcccagtcaccc

SEQ ID NO: 1585264 - DNA, 15 bp, Homo sapiens
ggtttcccagtcacc

SEQ ID NO: 1585265 - DNA, 15 bp, Homo sapiens
gggtttcccagtcac

SEQ ID NO: 1585266 - DNA, 15 bp, Homo sapiens
tgggtttcccagtca

SEQ ID NO: 1585267 - DNA, 15 bp, Homo sapiens
gtgggtttcccagtc

SEQ ID NO: 1585268 - DNA, 15 bp, Homo sapiens
ggtgggtttcccagt

SEQ ID NO: 1585269 - DNA, 15 bp, Homo sapiens
gggtgggtttcccag

SEQ ID NO: 1585270 - DNA, 15 bp, Homo sapiens
ggggtgggtttccca

SEQ ID NO: 1585271 - DNA, 15 bp, Homo sapiens
cggggtgggtttccc

SEQ ID NO: 1585272 - DNA, 15 bp, Homo sapiens
gcggggtgggtttcc

SEQ ID NO: 1585273 - DNA, 15 bp, Homo sapiens
ggcggggtgggtttc

SEQ ID NO: 1585274 - DNA, 15 bp, Homo sapiens
aggcggggtgggttt

SEQ ID NO: 1585275 - DNA, 15 bp, Homo sapiens
aaggcggggtgggtt

SEQ ID NO: 1585276 - DNA, 15 bp, Homo sapiens
gaaggcggggtgggt

SEQ ID NO: 1585277 - DNA, 15 bp, Homo sapiens
cgaaggcggggtggg

SEQ ID NO: 1585278 - DNA, 15 bp, Homo sapiens
gcgaaggcggggtgg

SEQ ID NO: 1585279 - DNA, 15 bp, Homo sapiens
tgcgaaggcggggtg

SEQ ID NO: 1585280 - DNA, 15 bp, Homo sapiens
ttgcgaaggcggggt

SEQ ID NO: 1585281 - DNA, 15 bp, Homo sapiens
attgcgaaggcgggg

SEQ ID NO: 1585282 - DNA, 15 bp, Homo sapiens
aattgcgaaggcggg

SEQ ID NO: 1585283 - DNA, 15 bp, Homo sapiens
taattgcgaaggcgg

SEQ ID NO: 1585284 - DNA, 15 bp, Homo sapiens
ctaattgcgaaggcg

SEQ ID NO: 1585285 - DNA, 15 bp, Homo sapiens
tctaattgcgaaggc

SEQ ID NO: 1585286 - DNA, 15 bp, Homo sapiens
gtctaattgcgaagg

SEQ ID NO: 1585287 - DNA, 15 bp, Homo sapiens
ggtctaattgcgaag

SEQ ID NO: 1585288 - DNA, 15 bp, Homo sapiens
gggtctaattgcgaa

SEQ ID NO: 1585289 - DNA, 15 bp, Homo sapiens
ggggtctaattgcga

SEQ ID NO: 1585290 - DNA, 15 bp, Homo sapiens
tggggtctaattgcg

SEQ ID NO: 1585291 - DNA, 15 bp, Homo sapiens
atggggtctaattgc

SEQ ID NO: 1585292 - DNA, 15 bp, Homo sapiens
aatggggtctaattg

SEQ ID NO: 1585293 - DNA, 15 bp, Homo sapiens
gaatggggtctaatt

SEQ ID NO: 1585294 - DNA, 15 bp, Homo sapiens
cgaatggggtctaat

SEQ ID NO: 1585295 - DNA, 15 bp, Homo sapiens
ccgaatggggtctaa

SEQ ID NO: 1585296 - DNA, 15 bp, Homo sapiens
cccgaatggggtcta

SEQ ID NO: 1585297 - DNA, 15 bp, Homo sapiens
tcccgaatggggtct

SEQ ID NO: 1585298 - DNA, 15 bp, Homo sapiens
gtcccgaatggggtc

SEQ ID NO: 1585299 - DNA, 15 bp, Homo sapiens
agtcccgaatggggt

SEQ ID NO: 1585300 - DNA, 15 bp, Homo sapiens
gagtcccgaatgggg

SEQ ID NO: 1585301 - DNA, 15 bp, Homo sapiens
tgagtcccgaatggg

SEQ ID NO: 1585302 - DNA, 15 bp, Homo sapiens
ctgagtcccgaatgg

SEQ ID NO: 1585303 - DNA, 15 bp, Homo sapiens
cctgagtcccgaatg

SEQ ID NO: 1585304 - DNA, 15 bp, Homo sapiens
gcctgagtcccgaat

SEQ ID NO: 1585305 - DNA, 15 bp, Homo sapiens
ggcctgagtcccgaa

SEQ ID NO: 1585306 - DNA, 15 bp, Homo sapiens
gggcctgagtcccga

SEQ ID NO: 1585307 - DNA, 15 bp, Homo sapiens
cgggcctgagtcccg

SEQ ID NO: 1585308 - DNA, 15 bp, Homo sapiens
ccgggcctgagtccc

SEQ ID NO: 1585309 - DNA, 15 bp, Homo sapiens
gccgggcctgagtcc

SEQ ID NO: 1585310 - DNA, 15 bp, Homo sapiens
ggccgggcctgagtc

SEQ ID NO: 1585311 - DNA, 15 bp, Homo sapiens
tggccgggcctgagt

SEQ ID NO: 1585312 - DNA, 15 bp, Homo sapiens
ctggccgggcctgag

SEQ ID NO: 1585313 - DNA, 15 bp, Homo sapiens
cctggccgggcctga

SEQ ID NO: 1585314 - DNA, 15 bp, Homo sapiens
acctggccgggcctg

SEQ ID NO: 1585315 - DNA, 15 bp, Homo sapiens
gacctggccgggcct

SEQ ID NO: 1585316 - DNA, 15 bp, Homo sapiens
cgacctggccgggcc

SEQ ID NO: 1585317 - DNA, 15 bp, Homo sapiens
gcgacctggccgggc

SEQ ID NO: 1585318 - DNA, 15 bp, Homo sapiens
cgcgacctggccggg

SEQ ID NO: 1585319 - DNA, 15 bp, Homo sapiens
gcgcgacctggccgg

SEQ ID NO: 1585320 - DNA, 15 bp, Homo sapiens
ggcgcgacctggccg

SEQ ID NO: 1585321 - DNA, 15 bp, Homo sapiens
aggcgcgacctggcc

SEQ ID NO: 1585322 - DNA, 15 bp, Homo sapiens
caggcgcgacctggc

SEQ ID NO: 1585323 - DNA, 15 bp, Homo sapiens
gcaggcgcgacctgg

SEQ ID NO: 1585324 - DNA, 15 bp, Homo sapiens
tgcaggcgcgacctg

SEQ ID NO: 1585325 - DNA, 15 bp, Homo sapiens
ctgcaggcgcgacct

SEQ ID NO: 1585326 - DNA, 15 bp, Homo sapiens
tctgcaggcgcgacc

SEQ ID NO: 1585327 - DNA, 15 bp, Homo sapiens
gtctgcaggcgcgac

SEQ ID NO: 1585328 - DNA, 15 bp, Homo sapiens
tgtctgcaggcgcga

SEQ ID NO: 1585329 - DNA, 15 bp, Homo sapiens
ttgtctgcaggcgcg

SEQ ID NO: 1585330 - DNA, 15 bp, Homo sapiens
cttgtctgcaggcgc

SEQ ID NO: 1585331 - DNA, 15 bp, Homo sapiens
ccttgtctgcaggcg

SEQ ID NO: 1585332 - DNA, 15 bp, Homo sapiens
accttgtctgcaggc

SEQ ID NO: 1585333 - DNA, 15 bp, Homo sapiens
gaccttgtctgcagg

SEQ ID NO: 1585334 - DNA, 15 bp, Homo sapiens
agaccttgtctgcag

SEQ ID NO: 1585335 - DNA, 15 bp, Homo sapiens
cagaccttgtctgca

SEQ ID NO: 1585336 - DNA, 15 bp, Homo sapiens
acagaccttgtctgc

SEQ ID NO: 1585337 - DNA, 15 bp, Homo sapiens
tacagaccttgtctg

SEQ ID NO: 1585338 - DNA, 15 bp, Homo sapiens
atacagaccttgtct

SEQ ID NO: 1585339 - DNA, 15 bp, Homo sapiens
aatacagaccttgtc

SEQ ID NO: 1585340 - DNA, 15 bp, Homo sapiens
gaatacagaccttgt

SEQ ID NO: 1585341 - DNA, 15 bp, Homo sapiens
tgaatacagaccttg

SEQ ID NO: 1585342 - DNA, 15 bp, Homo sapiens
ctgaatacagacctt

SEQ ID NO: 1585343 - DNA, 15 bp, Homo sapiens
gctgaatacagacct

SEQ ID NO: 1585344 - DNA, 15 bp, Homo sapiens
cgctgaatacagacc

SEQ ID NO: 1585345 - DNA, 15 bp, Homo sapiens
acgctgaatacagac

SEQ ID NO: 1585346 - DNA, 15 bp, Homo sapiens
aacgctgaatacaga

SEQ ID NO: 1585347 - DNA, 15 bp, Homo sapiens
caacgctgaatacag

SEQ ID NO: 1585348 - DNA, 15 bp, Homo sapiens
gcaacgctgaataca

SEQ ID NO: 1585349 - DNA, 15 bp, Homo sapiens
ggcaacgctgaatac

SEQ ID NO: 1585350 - DNA, 15 bp, Homo sapiens
tggcaacgctgaata

SEQ ID NO: 1585351 - DNA, 15 bp, Homo sapiens
ctggcaacgctgaat

SEQ ID NO: 1585352 - DNA, 15 bp, Homo sapiens
actggcaacgctgaa

SEQ ID NO: 1585353 - DNA, 15 bp, Homo sapiens
aactggcaacgctga

SEQ ID NO: 1585354 - DNA, 15 bp, Homo sapiens
gaactggcaacgctg

SEQ ID NO: 1585355 - DNA, 15 bp, Homo sapiens
agaactggcaacgct

SEQ ID NO: 1585356 - DNA, 15 bp, Homo sapiens
gagaactggcaacgc

SEQ ID NO: 1585357 - DNA, 15 bp, Homo sapiens
ggagaactggcaacg

SEQ ID NO: 1585358 - DNA, 15 bp, Homo sapiens
aggagaactggcaac

SEQ ID NO: 1585359 - DNA, 15 bp, Homo sapiens
gaggagaactggcaa

SEQ ID NO: 1585360 - DNA, 15 bp, Homo sapiens
agaggagaactggca

SEQ ID NO: 1585361 - DNA, 15 bp, Homo sapiens
cagaggagaactggc

SEQ ID NO: 1585362 - DNA, 15 bp, Homo sapiens
acagaggagaactgg

SEQ ID NO: 1585363 - DNA, 15 bp, Homo sapiens
cacagaggagaactg

SEQ ID NO: 1585364 - DNA, 15 bp, Homo sapiens
ccacagaggagaact

SEQ ID NO: 1585365 - DNA, 15 bp, Homo sapiens
accacagaggagaac

SEQ ID NO: 1585366 - DNA, 15 bp, Homo sapiens
aaccacagaggagaa

SEQ ID NO: 1585367 - DNA, 15 bp, Homo sapiens
gaaccacagaggaga

SEQ ID NO: 1585368 - DNA, 15 bp, Homo sapiens
cgaaccacagaggag

SEQ ID NO: 1585369 - DNA, 15 bp, Homo sapiens
gcgaaccacagagga

SEQ ID NO: 1585370 - DNA, 15 bp, Homo sapiens
agcgaaccacagagg

SEQ ID NO: 1585371 - DNA, 15 bp, Homo sapiens
aagcgaaccacagag

SEQ ID NO: 1585372 - DNA, 15 bp, Homo sapiens
taagcgaaccacaga

SEQ ID NO: 1585373 - DNA, 15 bp, Homo sapiens
ttaagcgaaccacag

SEQ ID NO: 1585374 - DNA, 15 bp, Homo sapiens
cttaagcgaaccaca

SEQ ID NO: 1585375 - DNA, 15 bp, Homo sapiens
gcttaagcgaaccac

SEQ ID NO: 1585376 - DNA, 15 bp, Homo sapiens
ggcttaagcgaacca

SEQ ID NO: 1585377 - DNA, 15 bp, Homo sapiens
gggcttaagcgaacc

SEQ ID NO: 1585378 - DNA, 15 bp, Homo sapiens
cgggcttaagcgaac

SEQ ID NO: 1585379 - DNA, 15 bp, Homo sapiens
ccgggcttaagcgaa

SEQ ID NO: 1585380 - DNA, 15 bp, Homo sapiens
gccgggcttaagcga

SEQ ID NO: 1585381 - DNA, 15 bp, Homo sapiens
cgccgggcttaagcg

SEQ ID NO: 1585382 - DNA, 15 bp, Homo sapiens
acgccgggcttaagc

SEQ ID NO: 1585383 - DNA, 15 bp, Homo sapiens
gacgccgggcttaag

SEQ ID NO: 1585384 - DNA, 15 bp, Homo sapiens
cgacgccgggcttaa

SEQ ID NO: 1585385 - DNA, 15 bp, Homo sapiens
gcgacgccgggctta

SEQ ID NO: 1585386 - DNA, 15 bp, Homo sapiens
ggcgacgccgggctt

SEQ ID NO: 1585387 - DNA, 15 bp, Homo sapiens
aggcgacgccgggct

SEQ ID NO: 1585388 - DNA, 15 bp, Homo sapiens
gaggcgacgccgggc

SEQ ID NO: 1585389 - DNA, 15 bp, Homo sapiens
ggaggcgacgccggg

SEQ ID NO: 1585390 - DNA, 15 bp, Homo sapiens
gggaggcgacgccgg

SEQ ID NO: 1585391 - DNA, 15 bp, Homo sapiens
ggggaggcgacgccg

SEQ ID NO: 1585392 - DNA, 15 bp, Homo sapiens
aggggaggcgacgcc

SEQ ID NO: 1585393 - DNA, 15 bp, Homo sapiens
gaggggaggcgacgc

SEQ ID NO: 1585394 - DNA, 15 bp, Homo sapiens
ggaggggaggcgacg

SEQ ID NO: 1585395 - DNA, 15 bp, Homo sapiens
aggaggggaggcgac

SEQ ID NO: 1585396 - DNA, 15 bp, Homo sapiens
aaggaggggaggcga

SEQ ID NO: 1585397 - DNA, 15 bp, Homo sapiens
caaggaggggaggcg

SEQ ID NO: 1585398 - DNA, 15 bp, Homo sapiens
gcaaggaggggaggc

SEQ ID NO: 1585399 - DNA, 15 bp, Homo sapiens
agcaaggaggggagg

SEQ ID NO: 1585400 - DNA, 15 bp, Homo sapiens
aagcaaggaggggag

SEQ ID NO: 1585401 - DNA, 15 bp, Homo sapiens
taagcaaggagggga

SEQ ID NO: 1585402 - DNA, 15 bp, Homo sapiens
ctaagcaaggagggg

SEQ ID NO: 1585403 - DNA, 15 bp, Homo sapiens
gctaagcaaggaggg

SEQ ID NO: 1585404 - DNA, 15 bp, Homo sapiens
ggctaagcaaggagg

SEQ ID NO: 1585405 - DNA, 15 bp, Homo sapiens
tggctaagcaaggag

SEQ ID NO: 1585406 - DNA, 15 bp, Homo sapiens
gtggctaagcaagga

SEQ ID NO: 1585407 - DNA, 15 bp, Homo sapiens
ggtggctaagcaagg

SEQ ID NO: 1585408 - DNA, 15 bp, Homo sapiens
tggtggctaagcaag

SEQ ID NO: 1585409 - DNA, 15 bp, Homo sapiens
gtggtggctaagcaa

SEQ ID NO: 1585410 - DNA, 15 bp, Homo sapiens
tgtggtggctaagca

SEQ ID NO: 1585411 - DNA, 15 bp, Homo sapiens
ctgtggtggctaagc

SEQ ID NO: 1585412 - DNA, 15 bp, Homo sapiens
actgtggtggctaag

SEQ ID NO: 1585413 - DNA, 15 bp, Homo sapiens
cactgtggtggctaa

SEQ ID NO: 1585414 - DNA, 15 bp, Homo sapiens
tcactgtggtggcta

SEQ ID NO: 1585415 - DNA, 15 bp, Homo sapiens
atcactgtggtggct

SEQ ID NO: 1585416 - DNA, 15 bp, Homo sapiens
gatcactgtggtggc

SEQ ID NO: 1585417 - DNA, 15 bp, Homo sapiens
tgatcactgtggtgg

SEQ ID NO: 1585418 - DNA, 15 bp, Homo sapiens
ttgatcactgtggtg

SEQ ID NO: 1585419 - DNA, 15 bp, Homo sapiens
attgatcactgtggt

SEQ ID NO: 1585420 - DNA, 15 bp, Homo sapiens
cattgatcactgtgg

SEQ ID NO: 1585421 - DNA, 15 bp, Homo sapiens
gcattgatcactgtg

SEQ ID NO: 1585422 - DNA, 15 bp, Homo sapiens
agcattgatcactgt

SEQ ID NO: 1585423 - DNA, 15 bp, Homo sapiens
gagcattgatcactg

SEQ ID NO: 1585424 - DNA, 15 bp, Homo sapiens
tgagcattgatcact

SEQ ID NO: 1585425 - DNA, 15 bp, Homo sapiens
ctgagcattgatcac

SEQ ID NO: 1585426 - DNA, 15 bp, Homo sapiens
actgagcattgatca

SEQ ID NO: 1585427 - DNA, 15 bp, Homo sapiens
aactgagcattgatc

SEQ ID NO: 1585428 - DNA, 15 bp, Homo sapiens
gaactgagcattgat

SEQ ID NO: 1585429 - DNA, 15 bp, Homo sapiens
cgaactgagcattga

SEQ ID NO: 1585430 - DNA, 15 bp, Homo sapiens
acgaactgagcattg

SEQ ID NO: 1585431 - DNA, 15 bp, Homo sapiens
gacgaactgagcatt

SEQ ID NO: 1585432 - DNA, 15 bp, Homo sapiens
cgacgaactgagcat

SEQ ID NO: 1585433 - DNA, 15 bp, Homo sapiens
ccgacgaactgagca

SEQ ID NO: 1585434 - DNA, 15 bp, Homo sapiens
cccgacgaactgagc

SEQ ID NO: 1585435 - DNA, 15 bp, Homo sapiens
ccccgacgaactgag

SEQ ID NO: 1585436 - DNA, 15 bp, Homo sapiens
gccccgacgaactga

SEQ ID NO: 1585437 - DNA, 15 bp, Homo sapiens
ggccccgacgaactg

SEQ ID NO: 1585438 - DNA, 15 bp, Homo sapiens
aggccccgacgaact

SEQ ID NO: 1585439 - DNA, 15 bp, Homo sapiens
caggccccgacgaac

SEQ ID NO: 1585440 - DNA, 15 bp, Homo sapiens
tcaggccccgacgaa

SEQ ID NO: 1585441 - DNA, 15 bp, Homo sapiens
ctcaggccccgacga

SEQ ID NO: 1585442 - DNA, 15 bp, Homo sapiens
tctcaggccccgacg

SEQ ID NO: 1585443 - DNA, 15 bp, Homo sapiens
ctctcaggccccgac

SEQ ID NO: 1585444 - DNA, 15 bp, Homo sapiens
gctctcaggccccga

SEQ ID NO: 1585445 - DNA, 15 bp, Homo sapiens
cgctctcaggccccg

SEQ ID NO: 1585446 - DNA, 15 bp, Homo sapiens
gcgctctcaggcccc

SEQ ID NO: 1585447 - DNA, 15 bp, Homo sapiens
ggcgctctcaggccc

SEQ ID NO: 1585448 - DNA, 15 bp, Homo sapiens
gggcgctctcaggcc

SEQ ID NO: 1585449 - DNA, 15 bp, Homo sapiens
ggggcgctctcaggc

SEQ ID NO: 1585450 - DNA, 15 bp, Homo sapiens
gggggcgctctcagg

SEQ ID NO: 1585451 - DNA, 15 bp, Homo sapiens
ggggggcgctctcag

SEQ ID NO: 1585452 - DNA, 15 bp, Homo sapiens
tggggggcgctctca

SEQ ID NO: 1585453 - DNA, 15 bp, Homo sapiens
ctggggggcgctctc

SEQ ID NO: 1585454 - DNA, 15 bp, Homo sapiens
tctggggggcgctct

SEQ ID NO: 1585455 - DNA, 15 bp, Homo sapiens
ctctggggggcgctc

SEQ ID NO: 1585456 - DNA, 15 bp, Homo sapiens
tctctggggggcgct

SEQ ID NO: 1585457 - DNA, 15 bp, Homo sapiens
ttctctggggggcgc

SEQ ID NO: 1585458 - DNA, 15 bp, Homo sapiens
cttctctggggggcg

SEQ ID NO: 1585459 - DNA, 15 bp, Homo sapiens
gcttctctggggggc

SEQ ID NO: 1585460 - DNA, 15 bp, Homo sapiens
ggcttctctgggggg

SEQ ID NO: 1585461 - DNA, 15 bp, Homo sapiens
gggcttctctggggg

SEQ ID NO: 1585462 - DNA, 15 bp, Homo sapiens
ggggcttctctgggg

SEQ ID NO: 1585463 - DNA, 15 bp, Homo sapiens
aggggcttctctggg

SEQ ID NO: 1585464 - DNA, 15 bp, Homo sapiens
caggggcttctctgg

SEQ ID NO: 1585465 - DNA, 15 bp, Homo sapiens
ccaggggcttctctg

SEQ ID NO: 1585466 - DNA, 15 bp, Homo sapiens
cccaggggcttctct

SEQ ID NO: 1585467 - DNA, 15 bp, Homo sapiens
tcccaggggcttctc

SEQ ID NO: 1585468 - DNA, 15 bp, Homo sapiens
ttcccaggggcttct

SEQ ID NO: 1585469 - DNA, 15 bp, Homo sapiens
cttcccaggggcttc

SEQ ID NO: 1585470 - DNA, 15 bp, Homo sapiens
ccttcccaggggctt

SEQ ID NO: 1585471 - DNA, 15 bp, Homo sapiens
tccttcccaggggct

SEQ ID NO: 1585472 - DNA, 15 bp, Homo sapiens
ttccttcccaggggc

SEQ ID NO: 1585473 - DNA, 15 bp, Homo sapiens
cttccttcccagggg

SEQ ID NO: 1585474 - DNA, 15 bp, Homo sapiens
ccttccttcccaggg

SEQ ID NO: 1585475 - DNA, 15 bp, Homo sapiens
cccttccttcccagg

SEQ ID NO: 1585476 - DNA, 15 bp, Homo sapiens
gcccttccttcccag

SEQ ID NO: 1585477 - DNA, 15 bp, Homo sapiens
tgcccttccttccca

SEQ ID NO: 1585478 - DNA, 15 bp, Homo sapiens
ttgcccttccttccc

SEQ ID NO: 1585479 - DNA, 15 bp, Homo sapiens
cttgcccttccttcc

SEQ ID NO: 1585480 - DNA, 15 bp, Homo sapiens
ccttgcccttccttc

SEQ ID NO: 1585481 - DNA, 15 bp, Homo sapiens
tccttgcccttcctt

SEQ ID NO: 1585482 - DNA, 15 bp, Homo sapiens
ctccttgcccttcct

SEQ ID NO: 1585483 - DNA, 15 bp, Homo sapiens
gctccttgcccttcc

SEQ ID NO: 1585484 - DNA, 15 bp, Homo sapiens
ggctccttgcccttc

SEQ ID NO: 1585485 - DNA, 15 bp, Homo sapiens
cggctccttgccctt

SEQ ID NO: 1585486 - DNA, 15 bp, Homo sapiens
ccggctccttgccct

SEQ ID NO: 1585487 - DNA, 15 bp, Homo sapiens
cccggctccttgccc

SEQ ID NO: 1585488 - DNA, 15 bp, Homo sapiens
gcccggctccttgcc

SEQ ID NO: 1585489 - DNA, 15 bp, Homo sapiens
agcccggctccttgc

SEQ ID NO: 1585490 - DNA, 15 bp, Homo sapiens
aagcccggctccttg

SEQ ID NO: 1585491 - DNA, 15 bp, Homo sapiens
gaagcccggctcctt

SEQ ID NO: 1585492 - DNA, 15 bp, Homo sapiens
cgaagcccggctcct

SEQ ID NO: 1585493 - DNA, 15 bp, Homo sapiens
gcgaagcccggctcc

SEQ ID NO: 1585494 - DNA, 15 bp, Homo sapiens
agcgaagcccggctc

SEQ ID NO: 1585495 - DNA, 15 bp, Homo sapiens
gagcgaagcccggct

SEQ ID NO: 1585496 - DNA, 15 bp, Homo sapiens
agagcgaagcccggc

SEQ ID NO: 1585497 - DNA, 15 bp, Homo sapiens
cagagcgaagcccgg

SEQ ID NO: 1585498 - DNA, 15 bp, Homo sapiens
ccagagcgaagcccg

SEQ ID NO: 1585499 - DNA, 15 bp, Homo sapiens
accagagcgaagccc

SEQ ID NO: 1585500 - DNA, 15 bp, Homo sapiens
gaccagagcgaagcc

SEQ ID NO: 1585501 - DNA, 15 bp, Homo sapiens
agaccagagcgaagc

SEQ ID NO: 1585502 - DNA, 15 bp, Homo sapiens
aagaccagagcgaag

SEQ ID NO: 1585503 - DNA, 15 bp, Homo sapiens
aaagaccagagcgaa

SEQ ID NO: 1585504 - DNA, 15 bp, Homo sapiens
gaaagaccagagcga

SEQ ID NO: 1585505 - DNA, 15 bp, Homo sapiens
cgaaagaccagagcg

SEQ ID NO: 1585506 - DNA, 15 bp, Homo sapiens
gcgaaagaccagagc

SEQ ID NO: 1585507 - DNA, 15 bp, Homo sapiens
tgcgaaagaccagag

SEQ ID NO: 1585508 - DNA, 15 bp, Homo sapiens
ttgcgaaagaccaga

SEQ ID NO: 1585509 - DNA, 15 bp, Homo sapiens
gttgcgaaagaccag

SEQ ID NO: 1585510 - DNA, 15 bp, Homo sapiens
tgttgcgaaagacca

SEQ ID NO: 1585511 - DNA, 15 bp, Homo sapiens
gtgttgcgaaagacc

SEQ ID NO: 1585512 - DNA, 15 bp, Homo sapiens
ggtgttgcgaaagac

SEQ ID NO: 1585513 - DNA, 15 bp, Homo sapiens
tggtgttgcgaaaga

SEQ ID NO: 1585514 - DNA, 15 bp, Homo sapiens
ctggtgttgcgaaag

SEQ ID NO: 1585515 - DNA, 15 bp, Homo sapiens
gctggtgttgcgaaa

SEQ ID NO: 1585516 - DNA, 15 bp, Homo sapiens
cgctggtgttgcgaa

SEQ ID NO: 1585517 - DNA, 15 bp, Homo sapiens
ccgctggtgttgcga

SEQ ID NO: 1585518 - DNA, 15 bp, Homo sapiens
gccgctggtgttgcg

SEQ ID NO: 1585519 - DNA, 15 bp, Homo sapiens
cgccgctggtgttgc

SEQ ID NO: 1585520 - DNA, 15 bp, Homo sapiens
tcgccgctggtgttg

SEQ ID NO: 1585521 - DNA, 15 bp, Homo sapiens
ctcgccgctggtgtt

SEQ ID NO: 1585522 - DNA, 15 bp, Homo sapiens
gctcgccgctggtgt

SEQ ID NO: 1585523 - DNA, 15 bp, Homo sapiens
cgctcgccgctggtg

SEQ ID NO: 1585524 - DNA, 15 bp, Homo sapiens
gcgctcgccgctggt

SEQ ID NO: 1585525 - DNA, 15 bp, Homo sapiens
cgcgctcgccgctgg

SEQ ID NO: 1585526 - DNA, 15 bp, Homo sapiens
acgcgctcgccgctg

SEQ ID NO: 1585527 - DNA, 15 bp, Homo sapiens
gacgcgctcgccgct

SEQ ID NO: 1585528 - DNA, 15 bp, Homo sapiens
agacgcgctcgccgc

SEQ ID NO: 1585529 - DNA, 15 bp, Homo sapiens
gagacgcgctcgccg

SEQ ID NO: 1585530 - DNA, 15 bp, Homo sapiens
ggagacgcgctcgcc

SEQ ID NO: 1585531 - DNA, 15 bp, Homo sapiens
gggagacgcgctcgc

SEQ ID NO: 1585532 - DNA, 15 bp, Homo sapiens
agggagacgcgctcg

SEQ ID NO: 1585533 - DNA, 15 bp, Homo sapiens
cagggagacgcgctc

SEQ ID NO: 1585534 - DNA, 15 bp, Homo sapiens
gcagggagacgcgct

SEQ ID NO: 1585535 - DNA, 15 bp, Homo sapiens
cgcagggagacgcgc

SEQ ID NO: 1585536 - DNA, 15 bp, Homo sapiens
gcgcagggagacgcg

SEQ ID NO: 1585537 - DNA, 15 bp, Homo sapiens
tgcgcagggagacgc

SEQ ID NO: 1585538 - DNA, 15 bp, Homo sapiens
ttgcgcagggagacg

SEQ ID NO: 1585539 - DNA, 15 bp, Homo sapiens
tttgcgcagggagac

SEQ ID NO: 1585540 - DNA, 15 bp, Homo sapiens
gtttgcgcagggaga

SEQ ID NO: 1585541 - DNA, 15 bp, Homo sapiens
cgtttgcgcagggag

SEQ ID NO: 1585542 - DNA, 15 bp, Homo sapiens
acgtttgcgcaggga

SEQ ID NO: 1585543 - DNA, 15 bp, Homo sapiens
tacgtttgcgcaggg

SEQ ID NO: 1585544 - DNA, 15 bp, Homo sapiens
ctacgtttgcgcagg

SEQ ID NO: 1585545 - DNA, 15 bp, Homo sapiens
cctacgtttgcgcag

SEQ ID NO: 1585546 - DNA, 15 bp, Homo sapiens
ccctacgtttgcgca

SEQ ID NO: 1585547 - DNA, 15 bp, Homo sapiens
accctacgtttgcgc

SEQ ID NO: 1585548 - DNA, 15 bp, Homo sapiens
caccctacgtttgcg

SEQ ID NO: 1585549 - DNA, 15 bp, Homo sapiens
ccaccctacgtttgc

SEQ ID NO: 1585550 - DNA, 15 bp, Homo sapiens
gccaccctacgtttg

SEQ ID NO: 1585551 - DNA, 15 bp, Homo sapiens
ggccaccctacgttt

SEQ ID NO: 1585552 - DNA, 15 bp, Homo sapiens
aggccaccctacgtt

SEQ ID NO: 1585553 - DNA, 15 bp, Homo sapiens
gaggccaccctacgt

SEQ ID NO: 1585554 - DNA, 15 bp, Homo sapiens
ggaggccaccctacg

SEQ ID NO: 1585555 - DNA, 15 bp, Homo sapiens
gggaggccaccctac

SEQ ID NO: 1585556 - DNA, 15 bp, Homo sapiens
ggggaggccacccta

SEQ ID NO: 1585557 - DNA, 15 bp, Homo sapiens
tggggaggccaccct

SEQ ID NO: 1585558 - DNA, 15 bp, Homo sapiens
ctggggaggccaccc

SEQ ID NO: 1585559 - DNA, 15 bp, Homo sapiens
gctggggaggccacc

SEQ ID NO: 1585560 - DNA, 15 bp, Homo sapiens
agctggggaggccac

SEQ ID NO: 1585561 - DNA, 15 bp, Homo sapiens
gagctggggaggcca

SEQ ID NO: 1585562 - DNA, 15 bp, Homo sapiens
agagctggggaggcc

SEQ ID NO: 1585563 - DNA, 15 bp, Homo sapiens
cagagctggggaggc

SEQ ID NO: 1585564 - DNA, 15 bp, Homo sapiens
gcagagctggggagg

SEQ ID NO: 1585565 - DNA, 15 bp, Homo sapiens
ggcagagctggggag

SEQ ID NO: 1585566 - DNA, 15 bp, Homo sapiens
cggcagagctgggga

SEQ ID NO: 1585567 - DNA, 15 bp, Homo sapiens
acggcagagctgggg

SEQ ID NO: 1585568 - DNA, 15 bp, Homo sapiens
cacggcagagctggg

SEQ ID NO: 1585569 - DNA, 15 bp, Homo sapiens
ccacggcagagctgg

SEQ ID NO: 1585570 - DNA, 15 bp, Homo sapiens
cccacggcagagctg

SEQ ID NO: 1585571 - DNA, 15 bp, Homo sapiens
ccccacggcagagct

SEQ ID NO: 1585572 - DNA, 15 bp, Homo sapiens
tccccacggcagagc

SEQ ID NO: 1585573 - DNA, 15 bp, Homo sapiens
gtccccacggcagag

SEQ ID NO: 1585574 - DNA, 15 bp, Homo sapiens
ggtccccacggcaga

SEQ ID NO: 1585575 - DNA, 15 bp, Homo sapiens
cggtccccacggcag

SEQ ID NO: 1585576 - DNA, 15 bp, Homo sapiens
gcggtccccacggca

SEQ ID NO: 1585577 - DNA, 15 bp, Homo sapiens
tgcggtccccacggc

SEQ ID NO: 1585578 - DNA, 15 bp, Homo sapiens
gtgcggtccccacgg

SEQ ID NO: 1585579 - DNA, 15 bp, Homo sapiens
tgtgcggtccccacg

SEQ ID NO: 1585580 - DNA, 15 bp, Homo sapiens
ttgtgcggtccccac

SEQ ID NO: 1585581 - DNA, 15 bp, Homo sapiens
tttgtgcggtcccca

SEQ ID NO: 1585582 - DNA, 15 bp, Homo sapiens
ttttgtgcggtcccc

SEQ ID NO: 1585583 - DNA, 15 bp, Homo sapiens
tttttgtgcggtccc

SEQ ID NO: 1585584 - DNA, 15 bp, Homo sapiens
gtttttgtgcggtcc

SEQ ID NO: 1585585 - DNA, 15 bp, Homo sapiens
cgtttttgtgcggtc

SEQ ID NO: 1585586 - DNA, 15 bp, Homo sapiens
gcgtttttgtgcggt

SEQ ID NO: 1585587 - DNA, 15 bp, Homo sapiens
cgcgtttttgtgcgg

SEQ ID NO: 1585588 - DNA, 15 bp, Homo sapiens
ccgcgtttttgtgcg

SEQ ID NO: 1585589 - DNA, 15 bp, Homo sapiens
cccgcgtttttgtgc

SEQ ID NO: 1585590 - DNA, 15 bp, Homo sapiens
gcccgcgtttttgtg

SEQ ID NO: 1585591 - DNA, 15 bp, Homo sapiens
cgcccgcgtttttgt

SEQ ID NO: 1585592 - DNA, 15 bp, Homo sapiens
gcgcccgcgtttttg

SEQ ID NO: 1585593 - DNA, 15 bp, Homo sapiens
tgcgcccgcgttttt

SEQ ID NO: 1585594 - DNA, 15 bp, Homo sapiens
ctgcgcccgcgtttt

SEQ ID NO: 1585595 - DNA, 15 bp, Homo sapiens
cctgcgcccgcgttt

SEQ ID NO: 1585596 - DNA, 15 bp, Homo sapiens
acctgcgcccgcgtt

SEQ ID NO: 1585597 - DNA, 15 bp, Homo sapiens
cacctgcgcccgcgt

SEQ ID NO: 1585598 - DNA, 15 bp, Homo sapiens
ccacctgcgcccgcg

SEQ ID NO: 1585599 - DNA, 15 bp, Homo sapiens
cccacctgcgcccgc

SEQ ID NO: 1585600 - DNA, 15 bp, Homo sapiens
tcccacctgcgcccg

SEQ ID NO: 1585601 - DNA, 15 bp, Homo sapiens
ctcccacctgcgccc

SEQ ID NO: 1585602 - DNA, 15 bp, Homo sapiens
cctcccacctgcgcc

SEQ ID NO: 1585603 - DNA, 15 bp, Homo sapiens
ccctcccacctgcgc

SEQ ID NO: 1585604 - DNA, 15 bp, Homo sapiens
gccctcccacctgcg

SEQ ID NO: 1585605 - DNA, 15 bp, Homo sapiens
cgccctcccacctgc

SEQ ID NO: 1585606 - DNA, 15 bp, Homo sapiens
tccgccctcccacct

SEQ ID NO: 1585607 - DNA, 15 bp, Homo sapiens
ctccgccctcccacc

SEQ ID NO: 1585608 - DNA, 15 bp, Homo sapiens
cctccgccctcccac

SEQ ID NO: 1585609 - DNA, 15 bp, Homo sapiens
ccctccgccctccca

SEQ ID NO: 1585610 - DNA, 15 bp, Homo sapiens
accctccgccctccc

SEQ ID NO: 1585611 - DNA, 15 bp, Homo sapiens
caccctccgccctcc

SEQ ID NO: 1585612 - DNA, 15 bp, Homo sapiens
acaccctccgccctc

SEQ ID NO: 1585613 - DNA, 15 bp, Homo sapiens
gacaccctccgccct

SEQ ID NO: 1585614 - DNA, 15 bp, Homo sapiens
ggacaccctccgccc

SEQ ID NO: 1585615 - DNA, 15 bp, Homo sapiens
aggacaccctccgcc

SEQ ID NO: 1585616 - DNA, 15 bp, Homo sapiens
caggacaccctccgc

SEQ ID NO: 1585617 - DNA, 15 bp, Homo sapiens
tcaggacaccctccg

SEQ ID NO: 1585618 - DNA, 15 bp, Homo sapiens
ctcaggacaccctcc

SEQ ID NO: 1585619 - DNA, 15 bp, Homo sapiens
gctcaggacaccctc

SEQ ID NO: 1585620 - DNA, 15 bp, Homo sapiens
agctcaggacaccct

SEQ ID NO: 1585621 - DNA, 15 bp, Homo sapiens
aagctcaggacaccc

SEQ ID NO: 1585622 - DNA, 15 bp, Homo sapiens
aaagctcaggacacc

SEQ ID NO: 1585623 - DNA, 15 bp, Homo sapiens
gaaagctcaggacac

SEQ ID NO: 1585624 - DNA, 15 bp, Homo sapiens
agaaagctcaggaca

SEQ ID NO: 1585625 - DNA, 15 bp, Homo sapiens
aagaaagctcaggac

SEQ ID NO: 1585626 - DNA, 15 bp, Homo sapiens
aaagaaagctcagga

SEQ ID NO: 1585627 - DNA, 15 bp, Homo sapiens
taaagaaagctcagg

SEQ ID NO: 1585628 - DNA, 15 bp, Homo sapiens
gtaaagaaagctcag

SEQ ID NO: 1585629 - DNA, 15 bp, Homo sapiens
ggtaaagaaagctca

SEQ ID NO: 1585630 - DNA, 15 bp, Homo sapiens
gggtaaagaaagctc

SEQ ID NO: 1585631 - DNA, 15 bp, Homo sapiens
agggtaaagaaagct

SEQ ID NO: 1585632 - DNA, 15 bp, Homo sapiens
cagggtaaagaaagc

SEQ ID NO: 1585633 - DNA, 15 bp, Homo sapiens
ccagggtaaagaaag

SEQ ID NO: 1585634 - DNA, 15 bp, Homo sapiens
accagggtaaagaaa

SEQ ID NO: 1585635 - DNA, 15 bp, Homo sapiens
taccagggtaaagaa

SEQ ID NO: 1585636 - DNA, 15 bp, Homo sapiens
ttaccagggtaaaga

SEQ ID NO: 1585637 - DNA, 15 bp, Homo sapiens
tttaccagggtaaag

SEQ ID NO: 1585638 - DNA, 15 bp, Homo sapiens
ctttaccagggtaaa

SEQ ID NO: 1585639 - DNA, 15 bp, Homo sapiens
tctttaccagggtaa

SEQ ID NO: 1585640 - DNA, 15 bp, Homo sapiens
ttctttaccagggta

SEQ ID NO: 1585641 - DNA, 15 bp, Homo sapiens
cttctttaccagggt

SEQ ID NO: 1585642 - DNA, 15 bp, Homo sapiens
ccttctttaccaggg

SEQ ID NO: 1585643 - DNA, 15 bp, Homo sapiens
accttctttaccagg

SEQ ID NO: 1585644 - DNA, 15 bp, Homo sapiens
taccttctttaccag

SEQ ID NO: 1585645 - DNA, 15 bp, Homo sapiens
ctaccttctttacca

SEQ ID NO: 1585646 - DNA, 15 bp, Homo sapiens
cctaccttctttacc

SEQ ID NO: 1585647 - DNA, 15 bp, Homo sapiens
gcctaccttctttac

SEQ ID NO: 1585648 - DNA, 15 bp, Homo sapiens
cgcctaccttcttta

SEQ ID NO: 1585649 - DNA, 15 bp, Homo sapiens
ccgcctaccttcttt

SEQ ID NO: 1585650 - DNA, 15 bp, Homo sapiens
accgcctaccttctt

SEQ ID NO: 1585651 - DNA, 15 bp, Homo sapiens
caccgcctaccttct

SEQ ID NO: 1585652 - DNA, 15 bp, Homo sapiens
tcaccgcctaccttc

SEQ ID NO: 1585653 - DNA, 15 bp, Homo sapiens
ctcaccgcctacctt

SEQ ID NO: 1585654 - DNA, 15 bp, Homo sapiens
tctcaccgcctacct

SEQ ID NO: 1585655 - DNA, 15 bp, Homo sapiens
ttctcaccgcctacc

SEQ ID NO: 1585656 - DNA, 15 bp, Homo sapiens
tttctcaccgcctac

SEQ ID NO: 1585657 - DNA, 15 bp, Homo sapiens
ttttctcaccgccta

SEQ ID NO: 1585658 - DNA, 15 bp, Homo sapiens
cttttctcaccgcct

SEQ ID NO: 1585659 - DNA, 15 bp, Homo sapiens
gcttttctcaccgcc

SEQ ID NO: 1585660 - DNA, 15 bp, Homo sapiens
cgcttttctcaccgc

SEQ ID NO: 1585661 - DNA, 15 bp, Homo sapiens
tcgcttttctcaccg

SEQ ID NO: 1585662 - DNA, 15 bp, Homo sapiens
ttcgcttttctcacc

SEQ ID NO: 1585663 - DNA, 15 bp, Homo sapiens
attcgcttttctcac

SEQ ID NO: 1585664 - DNA, 15 bp, Homo sapiens
cattcgcttttctca

SEQ ID NO: 1585665 - DNA, 15 bp, Homo sapiens
acattcgcttttctc

SEQ ID NO: 1585666 - DNA, 15 bp, Homo sapiens
aacattcgcttttct

SEQ ID NO: 1585667 - DNA, 15 bp, Homo sapiens
taacattcgcttttc

SEQ ID NO: 1585668 - DNA, 15 bp, Homo sapiens
ataacattcgctttt

SEQ ID NO: 1585669 - DNA, 15 bp, Homo sapiens
aataacattcgcttt

SEQ ID NO: 1585670 - DNA, 15 bp, Homo sapiens
taataacattcgctt

SEQ ID NO: 1585671 - DNA, 15 bp, Homo sapiens
ataataacattcgct

SEQ ID NO: 1585672 - DNA, 15 bp, Homo sapiens
tataataacattcgc

SEQ ID NO: 1585673 - DNA, 15 bp, Homo sapiens
ctataataacattcg

SEQ ID NO: 1585674 - DNA, 15 bp, Homo sapiens
tctataataacattc

SEQ ID NO: 1585675 - DNA, 15 bp, Homo sapiens
ttctataataacatt

SEQ ID NO: 1585676 - DNA, 15 bp, Homo sapiens
cttctataataacat

SEQ ID NO: 1585677 - DNA, 15 bp, Homo sapiens
acttctataataaca

SEQ ID NO: 1585678 - DNA, 15 bp, Homo sapiens
aacttctataataac

SEQ ID NO: 1585679 - DNA, 15 bp, Homo sapiens
caacttctataataa

SEQ ID NO: 1585680 - DNA, 15 bp, Homo sapiens
ccaacttctataata

SEQ ID NO: 1585681 - DNA, 15 bp, Homo sapiens
gccaacttctataat

SEQ ID NO: 1585682 - DNA, 15 bp, Homo sapiens
agccaacttctataa

SEQ ID NO: 1585683 - DNA, 15 bp, Homo sapiens
aagccaacttctata

SEQ ID NO: 1585684 - DNA, 15 bp, Homo sapiens
aaagccaacttctat

SEQ ID NO: 1585685 - DNA, 15 bp, Homo sapiens
caaagccaacttcta

SEQ ID NO: 1585686 - DNA, 15 bp, Homo sapiens
acaaagccaacttct

SEQ ID NO: 1585687 - DNA, 15 bp, Homo sapiens
tacaaagccaacttc

SEQ ID NO: 1585688 - DNA, 15 bp, Homo sapiens
atacaaagccaactt

SEQ ID NO: 1585689 - DNA, 15 bp, Homo sapiens
aatacaaagccaact

SEQ ID NO: 1585690 - DNA, 15 bp, Homo sapiens
caatacaaagccaac

SEQ ID NO: 1585691 - DNA, 15 bp, Homo sapiens
tcaatacaaagccaa

SEQ ID NO: 1585692 - DNA, 15 bp, Homo sapiens
ctcaatacaaagcca

SEQ ID NO: 1585693 - DNA, 15 bp, Homo sapiens
cctcaatacaaagcc

SEQ ID NO: 1585694 - DNA, 15 bp, Homo sapiens
ccctcaatacaaagc

SEQ ID NO: 1585695 - DNA, 15 bp, Homo sapiens
tccctcaatacaaag

SEQ ID NO: 1585696 - DNA, 15 bp, Homo sapiens
ctccctcaatacaaa

SEQ ID NO: 1585697 - DNA, 15 bp, Homo sapiens
actccctcaatacaa

SEQ ID NO: 1585698 - DNA, 15 bp, Homo sapiens
tactccctcaataca

SEQ ID NO: 1585699 - DNA, 15 bp, Homo sapiens
ttactccctcaatac

SEQ ID NO: 1585700 - DNA, 15 bp, Homo sapiens
cttactccctcaata

SEQ ID NO: 1585701 - DNA, 15 bp, Homo sapiens
tcttactccctcaat

SEQ ID NO: 1585702 - DNA, 15 bp, Homo sapiens
ctcttactccctcaa

SEQ ID NO: 1585703 - DNA, 15 bp, Homo sapiens
gctcttactccctca

SEQ ID NO: 1585704 - DNA, 15 bp, Homo sapiens
agctcttactccctc

SEQ ID NO: 1585705 - DNA, 15 bp, Homo sapiens
gagctcttactccct

SEQ ID NO: 1585706 - DNA, 15 bp, Homo sapiens
agagctcttactccc

SEQ ID NO: 1585707 - DNA, 15 bp, Homo sapiens
gagagctcttactcc

SEQ ID NO: 1585708 - DNA, 15 bp, Homo sapiens
agagagctcttactc

SEQ ID NO: 1585709 - DNA, 15 bp, Homo sapiens
aagagagctcttact

SEQ ID NO: 1585710 - DNA, 15 bp, Homo sapiens
gaagagagctcttac

SEQ ID NO: 1585711 - DNA, 15 bp, Homo sapiens
tgaagagagctctta

SEQ ID NO: 1585712 - DNA, 15 bp, Homo sapiens
ttgaagagagctctt

SEQ ID NO: 1585713 - DNA, 15 bp, Homo sapiens
cttgaagagagctct

SEQ ID NO: 1585714 - DNA, 15 bp, Homo sapiens
ccttgaagagagctc

SEQ ID NO: 1585715 - DNA, 15 bp, Homo sapiens
tccttgaagagagct

SEQ ID NO: 1585716 - DNA, 15 bp, Homo sapiens
ctccttgaagagagc

SEQ ID NO: 1585717 - DNA, 15 bp, Homo sapiens
tctccttgaagagag

SEQ ID NO: 1585718 - DNA, 15 bp, Homo sapiens
ctctccttgaagaga

SEQ ID NO: 1585719 - DNA, 15 bp, Homo sapiens
cctctccttgaagag

SEQ ID NO: 1585720 - DNA, 15 bp, Homo sapiens
ccctctccttgaaga

SEQ ID NO: 1585721 - DNA, 15 bp, Homo sapiens
gccctctccttgaag

SEQ ID NO: 1585722 - DNA, 15 bp, Homo sapiens
agccctctccttgaa

SEQ ID NO: 1585723 - DNA, 15 bp, Homo sapiens
cagccctctccttga

SEQ ID NO: 1585724 - DNA, 15 bp, Homo sapiens
tcagccctctccttg

SEQ ID NO: 1585725 - DNA, 15 bp, Homo sapiens
ttcagccctctcctt

SEQ ID NO: 1585726 - DNA, 15 bp, Homo sapiens
tttcagccctctcct

SEQ ID NO: 1585727 - DNA, 15 bp, Homo sapiens
atttcagccctctcc

SEQ ID NO: 1585728 - DNA, 15 bp, Homo sapiens
gatttcagccctctc

SEQ ID NO: 1585729 - DNA, 15 bp, Homo sapiens
agatttcagccctct

SEQ ID NO: 1585730 - DNA, 15 bp, Homo sapiens
aagatttcagccctc

SEQ ID NO: 1585731 - DNA, 15 bp, Homo sapiens
aaagatttcagccct

SEQ ID NO: 1585732 - DNA, 15 bp, Homo sapiens
taaagatttcagccc

SEQ ID NO: 1585733 - DNA, 15 bp, Homo sapiens
ttaaagatttcagcc

SEQ ID NO: 1585734 - DNA, 15 bp, Homo sapiens
tttaaagatttcagc

SEQ ID NO: 1585735 - DNA, 15 bp, Homo sapiens
ttttaaagatttcag

SEQ ID NO: 1585736 - DNA, 15 bp, Homo sapiens
tttttaaagatttca

SEQ ID NO: 1585737 - DNA, 15 bp, Homo sapiens
atttttaaagatttc

SEQ ID NO: 1585738 - DNA, 15 bp, Homo sapiens
ttatttttaaagatt

SEQ ID NO: 1585739 - DNA, 15 bp, Homo sapiens
atttatttttaaaga

SEQ ID NO: 1585740 - DNA, 15 bp, Homo sapiens
tatttatttttaaag

SEQ ID NO: 1585741 - DNA, 15 bp, Homo sapiens
gttttatttattttt

SEQ ID NO: 1585742 - DNA, 15 bp, Homo sapiens
agttttatttatttt

SEQ ID NO: 1585743 - DNA, 15 bp, Homo sapiens
aagttttatttattt

SEQ ID NO: 1585744 - DNA, 15 bp, Homo sapiens
aaagttttatttatt

SEQ ID NO: 1585745 - DNA, 15 bp, Homo sapiens
gaaagttttatttat

SEQ ID NO: 1585746 - DNA, 15 bp, Homo sapiens
agaaagttttattta

SEQ ID NO: 1585747 - DNA, 15 bp, Homo sapiens
gagaaagttttattt

SEQ ID NO: 1585748 - DNA, 15 bp, Homo sapiens
agagaaagttttatt

SEQ ID NO: 1585749 - DNA, 15 bp, Homo sapiens
tagagaaagttttat

SEQ ID NO: 1585750 - DNA, 15 bp, Homo sapiens
gtagagaaagtttta

SEQ ID NO: 1585751 - DNA, 15 bp, Homo sapiens
agtagagaaagtttt

SEQ ID NO: 1585752 - DNA, 15 bp, Homo sapiens
cagtagagaaagttt

SEQ ID NO: 1585753 - DNA, 15 bp, Homo sapiens
acagtagagaaagtt

SEQ ID NO: 1585754 - DNA, 15 bp, Homo sapiens
tacagtagagaaagt

SEQ ID NO: 1585755 - DNA, 15 bp, Homo sapiens
ttacagtagagaaag

SEQ ID NO: 1585756 - DNA, 15 bp, Homo sapiens
attacagtagagaaa

SEQ ID NO: 1585757 - DNA, 15 bp, Homo sapiens
aattacagtagagaa

SEQ ID NO: 1585758 - DNA, 15 bp, Homo sapiens
caattacagtagaga

SEQ ID NO: 1585759 - DNA, 15 bp, Homo sapiens
gcaattacagtagag

SEQ ID NO: 1585760 - DNA, 15 bp, Homo sapiens
agcaattacagtaga

SEQ ID NO: 1585761 - DNA, 15 bp, Homo sapiens
tagcaattacagtag

SEQ ID NO: 1585762 - DNA, 15 bp, Homo sapiens
atagcaattacagta

SEQ ID NO: 1585763 - DNA, 15 bp, Homo sapiens
aatagcaattacagt

SEQ ID NO: 1585764 - DNA, 15 bp, Homo sapiens
taatagcaattacag

SEQ ID NO: 1585765 - DNA, 15 bp, Homo sapiens
ttaatagcaattaca

SEQ ID NO: 1585766 - DNA, 15 bp, Homo sapiens
attaatagcaattac

SEQ ID NO: 1585767 - DNA, 15 bp, Homo sapiens
tattaatagcaatta

SEQ ID NO: 1585768 - DNA, 15 bp, Homo sapiens
ttattaatagcaatt

SEQ ID NO: 1585769 - DNA, 15 bp, Homo sapiens
tttattaatagcaat

SEQ ID NO: 1585770 - DNA, 15 bp, Homo sapiens
ttttattaatagcaa

SEQ ID NO: 1585771 - DNA, 15 bp, Homo sapiens
tttttattaatagca

SEQ ID NO: 1585772 - DNA, 15 bp, Homo sapiens
ttttttattaatagc

SEQ ID NO: 1585773 - DNA, 15 bp, Homo sapiens
tttttttattaatag

SEQ ID NO: 1585774 - DNA, 15 bp, Homo sapiens
ctttttttattaata

SEQ ID NO: 1585775 - DNA, 15 bp, Homo sapiens
cctttttttattaat

SEQ ID NO: 1585776 - DNA, 15 bp, Homo sapiens
ccctttttttattaa

SEQ ID NO: 1585777 - DNA, 15 bp, Homo sapiens
tccctttttttatta

SEQ ID NO: 1585778 - DNA, 15 bp, Homo sapiens
ctccctttttttatt

SEQ ID NO: 1585779 - DNA, 15 bp, Homo sapiens
gctccctttttttat

SEQ ID NO: 1585780 - DNA, 15 bp, Homo sapiens
ggctcccttttttta

SEQ ID NO: 1585781 - DNA, 15 bp, Homo sapiens
gggctcccttttttt

SEQ ID NO: 1585782 - DNA, 15 bp, Homo sapiens
cgggctccctttttt

SEQ ID NO: 1585783 - DNA, 15 bp, Homo sapiens
ccgggctcccttttt

SEQ ID NO: 1585784 - DNA, 15 bp, Homo sapiens
tccgggctccctttt

SEQ ID NO: 1585785 - DNA, 15 bp, Homo sapiens
atccgggctcccttt

SEQ ID NO: 1585786 - DNA, 15 bp, Homo sapiens
catccgggctccctt

SEQ ID NO: 1585787 - DNA, 15 bp, Homo sapiens
tcatccgggctccct

SEQ ID NO: 1585788 - DNA, 15 bp, Homo sapiens
ttcatccgggctccc

SEQ ID NO: 1585789 - DNA, 15 bp, Homo sapiens
attcatccgggctcc

SEQ ID NO: 1585790 - DNA, 15 bp, Homo sapiens
aattcatccgggctc

SEQ ID NO: 1585791 - DNA, 15 bp, Homo sapiens
taattcatccgggct

SEQ ID NO: 1585792 - DNA, 15 bp, Homo sapiens
ttaattcatccgggc

SEQ ID NO: 1585793 - DNA, 15 bp, Homo sapiens
cttaattcatccggg

SEQ ID NO: 1585794 - DNA, 15 bp, Homo sapiens
acttaattcatccgg

SEQ ID NO: 1585795 - DNA, 15 bp, Homo sapiens
tacttaattcatccg

SEQ ID NO: 1585796 - DNA, 15 bp, Homo sapiens
ctacttaattcatcc

SEQ ID NO: 1585797 - DNA, 15 bp, Homo sapiens
gctacttaattcatc

SEQ ID NO: 1585798 - DNA, 15 bp, Homo sapiens
agctacttaattcat

SEQ ID NO: 1585799 - DNA, 15 bp, Homo sapiens
gagctacttaattca

SEQ ID NO: 1585800 - DNA, 15 bp, Homo sapiens
tgagctacttaattc

SEQ ID NO: 1585801 - DNA, 15 bp, Homo sapiens
ttgagctacttaatt

SEQ ID NO: 1585802 - DNA, 15 bp, Homo sapiens
tttgagctacttaat

SEQ ID NO: 1585803 - DNA, 15 bp, Homo sapiens
ttttgagctacttaa

SEQ ID NO: 1585804 - DNA, 15 bp, Homo sapiens
gttttgagctactta

SEQ ID NO: 1585805 - DNA, 15 bp, Homo sapiens
agttttgagctactt

SEQ ID NO: 1585806 - DNA, 15 bp, Homo sapiens
cagttttgagctact

SEQ ID NO: 1585807 - DNA, 15 bp, Homo sapiens
gcagttttgagctac

SEQ ID NO: 1585808 - DNA, 15 bp, Homo sapiens
ggcagttttgagcta

SEQ ID NO: 1585809 - DNA, 15 bp, Homo sapiens
aggcagttttgagct

SEQ ID NO: 1585810 - DNA, 15 bp, Homo sapiens
caggcagttttgagc

SEQ ID NO: 1585811 - DNA, 15 bp, Homo sapiens
acaggcagttttgag

SEQ ID NO: 1585812 - DNA, 15 bp, Homo sapiens
aacaggcagttttga

SEQ ID NO: 1585813 - DNA, 15 bp, Homo sapiens
gaacaggcagttttg

SEQ ID NO: 1585814 - DNA, 15 bp, Homo sapiens
cgaacaggcagtttt

SEQ ID NO: 1585815 - DNA, 15 bp, Homo sapiens
acgaacaggcagttt

SEQ ID NO: 1585816 - DNA, 15 bp, Homo sapiens
gacgaacaggcagtt

SEQ ID NO: 1585817 - DNA, 15 bp, Homo sapiens
tgacgaacaggcagt

SEQ ID NO: 1585818 - DNA, 15 bp, Homo sapiens
atgacgaacaggcag

SEQ ID NO: 1585819 - DNA, 15 bp, Homo sapiens
catgacgaacaggca

SEQ ID NO: 1585820 - DNA, 15 bp, Homo sapiens
tcatgacgaacaggc

SEQ ID NO: 1585821 - DNA, 15 bp, Homo sapiens
atcatgacgaacagg

SEQ ID NO: 1585822 - DNA, 15 bp, Homo sapiens
gatcatgacgaacag

SEQ ID NO: 1585823 - DNA, 15 bp, Homo sapiens
tgatcatgacgaaca

SEQ ID NO: 1585824 - DNA, 15 bp, Homo sapiens
ctgatcatgacgaac

SEQ ID NO: 1585825 - DNA, 15 bp, Homo sapiens
cctgatcatgacgaa

SEQ ID NO: 1585826 - DNA, 15 bp, Homo sapiens
tcctgatcatgacga

SEQ ID NO: 1585827 - DNA, 15 bp, Homo sapiens
ctcctgatcatgacg

SEQ ID NO: 1585828 - DNA, 15 bp, Homo sapiens
gctcctgatcatgac

SEQ ID NO: 1585829 - DNA, 15 bp, Homo sapiens
agctcctgatcatga

SEQ ID NO: 1585830 - DNA, 15 bp, Homo sapiens
gagctcctgatcatg

SEQ ID NO: 1585831 - DNA, 15 bp, Homo sapiens
ggagctcctgatcat

SEQ ID NO: 1585832 - DNA, 15 bp, Homo sapiens
aggagctcctgatca

SEQ ID NO: 1585833 - DNA, 15 bp, Homo sapiens
aaggagctcctgatc

SEQ ID NO: 1585834 - DNA, 15 bp, Homo sapiens
gaaggagctcctgat

SEQ ID NO: 1585835 - DNA, 15 bp, Homo sapiens
agaaggagctcctga

SEQ ID NO: 1585836 - DNA, 15 bp, Homo sapiens
gagaaggagctcctg

SEQ ID NO: 1585837 - DNA, 15 bp, Homo sapiens
agagaaggagctcct

SEQ ID NO: 1585838 - DNA, 15 bp, Homo sapiens
tagagaaggagctcc

SEQ ID NO: 1585839 - DNA, 15 bp, Homo sapiens
gtagagaaggagctc

SEQ ID NO: 1585840 - DNA, 15 bp, Homo sapiens
tgtagagaaggagct

SEQ ID NO: 1585841 - DNA, 15 bp, Homo sapiens
ttgtagagaaggagc

SEQ ID NO: 1585842 - DNA, 15 bp, Homo sapiens
cttgtagagaaggag

SEQ ID NO: 1585843 - DNA, 15 bp, Homo sapiens
ccttgtagagaagga

SEQ ID NO: 1585844 - DNA, 15 bp, Homo sapiens
tccttgtagagaagg

SEQ ID NO: 1585845 - DNA, 15 bp, Homo sapiens
ctccttgtagagaag

SEQ ID NO: 1585846 - DNA, 15 bp, Homo sapiens
cctccttgtagagaa

SEQ ID NO: 1585847 - DNA, 15 bp, Homo sapiens
ccctccttgtagaga

SEQ ID NO: 1585848 - DNA, 15 bp, Homo sapiens
cccctccttgtagag

SEQ ID NO: 1585849 - DNA, 15 bp, Homo sapiens
tcccctccttgtaga

SEQ ID NO: 1585850 - DNA, 15 bp, Homo sapiens
ttcccctccttgtag

SEQ ID NO: 1585851 - DNA, 15 bp, Homo sapiens
tttcccctccttgta

SEQ ID NO: 1585852 - DNA, 15 bp, Homo sapiens
ctttcccctccttgt

SEQ ID NO: 1585853 - DNA, 15 bp, Homo sapiens
tctttcccctccttg

SEQ ID NO: 1585854 - DNA, 15 bp, Homo sapiens
ttctttcccctcctt

SEQ ID NO: 1585855 - DNA, 15 bp, Homo sapiens
tttctttcccctcct

SEQ ID NO: 1585856 - DNA, 15 bp, Homo sapiens
ttttctttcccctcc

SEQ ID NO: 1585857 - DNA, 15 bp, Homo sapiens
attttctttcccctc

SEQ ID NO: 1585858 - DNA, 15 bp, Homo sapiens
cattttctttcccct

SEQ ID NO: 1585859 - DNA, 15 bp, Homo sapiens
acattttctttcccc

SEQ ID NO: 1585860 - DNA, 15 bp, Homo sapiens
cacattttctttccc

SEQ ID NO: 1585861 - DNA, 15 bp, Homo sapiens
tcacattttctttcc

SEQ ID NO: 1585862 - DNA, 15 bp, Homo sapiens
ttcacattttctttc

SEQ ID NO: 1585863 - DNA, 15 bp, Homo sapiens
tttcacattttcttt

SEQ ID NO: 1585864 - DNA, 15 bp, Homo sapiens
ttttcacattttctt

SEQ ID NO: 1585865 - DNA, 15 bp, Homo sapiens
gttttcacattttct

SEQ ID NO: 1585866 - DNA, 15 bp, Homo sapiens
tgttttcacattttc

SEQ ID NO: 1585867 - DNA, 15 bp, Homo sapiens
ttgttttcacatttt

SEQ ID NO: 1585868 - DNA, 15 bp, Homo sapiens
tttgttttcacattt

SEQ ID NO: 1585869 - DNA, 15 bp, Homo sapiens
ttttgttttcacatt

SEQ ID NO: 1585870 - DNA, 15 bp, Homo sapiens
tttttgttttcacat

SEQ ID NO: 1585871 - DNA, 15 bp, Homo sapiens
gtttttgttttcaca

SEQ ID NO: 1585872 - DNA, 15 bp, Homo sapiens
agtttttgttttcac

SEQ ID NO: 1585873 - DNA, 15 bp, Homo sapiens
tagtttttgttttca

SEQ ID NO: 1585874 - DNA, 15 bp, Homo sapiens
ttagtttttgttttc

SEQ ID NO: 1585875 - DNA, 15 bp, Homo sapiens
tttagtttttgtttt

SEQ ID NO: 1585876 - DNA, 15 bp, Homo sapiens
atttagtttttgttt

SEQ ID NO: 1585877 - DNA, 15 bp, Homo sapiens
aatttagtttttgtt

SEQ ID NO: 1585878 - DNA, 15 bp, Homo sapiens
gaatttagtttttgt

SEQ ID NO: 1585879 - DNA, 15 bp, Homo sapiens
tgaatttagtttttg

SEQ ID NO: 1585880 - DNA, 15 bp, Homo sapiens
ttgaatttagttttt

SEQ ID NO: 1585881 - DNA, 15 bp, Homo sapiens
cttgaatttagtttt

SEQ ID NO: 1585882 - DNA, 15 bp, Homo sapiens
tcttgaatttagttt

SEQ ID NO: 1585883 - DNA, 15 bp, Homo sapiens
ttcttgaatttagtt

SEQ ID NO: 1585884 - DNA, 15 bp, Homo sapiens
cttcttgaatttagt

SEQ ID NO: 1585885 - DNA, 15 bp, Homo sapiens
gcttcttgaatttag

SEQ ID NO: 1585886 - DNA, 15 bp, Homo sapiens
agcttcttgaattta

SEQ ID NO: 1585887 - DNA, 15 bp, Homo sapiens
gagcttcttgaattt

SEQ ID NO: 1585888 - DNA, 15 bp, Homo sapiens
ggagcttcttgaatt

SEQ ID NO: 1585889 - DNA, 15 bp, Homo sapiens
aggagcttcttgaat

SEQ ID NO: 1585890 - DNA, 15 bp, Homo sapiens
aaggagcttcttgaa

SEQ ID NO: 1585891 - DNA, 15 bp, Homo sapiens
caaggagcttcttga

SEQ ID NO: 1585892 - DNA, 15 bp, Homo sapiens
tcaaggagcttcttg

SEQ ID NO: 1585893 - DNA, 15 bp, Homo sapiens
gtcaaggagcttctt

SEQ ID NO: 1585894 - DNA, 15 bp, Homo sapiens
ggtcaaggagcttct

SEQ ID NO: 1585895 - DNA, 15 bp, Homo sapiens
tggtcaaggagcttc

SEQ ID NO: 1585896 - DNA, 15 bp, Homo sapiens
ctggtcaaggagctt

SEQ ID NO: 1585897 - DNA, 15 bp, Homo sapiens
gctggtcaaggagct

SEQ ID NO: 1585898 - DNA, 15 bp, Homo sapiens
cgctggtcaaggagc

SEQ ID NO: 1585899 - DNA, 15 bp, Homo sapiens
gcgctggtcaaggag

SEQ ID NO: 1585900 - DNA, 15 bp, Homo sapiens
cgcgctggtcaagga

SEQ ID NO: 1585901 - DNA, 15 bp, Homo sapiens
ccgcgctggtcaagg

SEQ ID NO: 1585902 - DNA, 15 bp, Homo sapiens
cccgcgctggtcaag

SEQ ID NO: 1585903 - DNA, 15 bp, Homo sapiens
acccgcgctggtcaa

SEQ ID NO: 1585904 - DNA, 15 bp, Homo sapiens
cacccgcgctggtca

SEQ ID NO: 1585905 - DNA, 15 bp, Homo sapiens
acacccgcgctggtc

SEQ ID NO: 1585906 - DNA, 15 bp, Homo sapiens
gacacccgcgctggt

SEQ ID NO: 1585907 - DNA, 15 bp, Homo sapiens
agacacccgcgctgg

SEQ ID NO: 1585908 - DNA, 15 bp, Homo sapiens
aagacacccgcgctg

SEQ ID NO: 1585909 - DNA, 15 bp, Homo sapiens
caagacacccgcgct

SEQ ID NO: 1585910 - DNA, 15 bp, Homo sapiens
ccaagacacccgcgc

SEQ ID NO: 1585911 - DNA, 15 bp, Homo sapiens
tccaagacacccgcg

SEQ ID NO: 1585912 - DNA, 15 bp, Homo sapiens
ctccaagacacccgc

SEQ ID NO: 1585913 - DNA, 15 bp, Homo sapiens
cctccaagacacccg

SEQ ID NO: 1585914 - DNA, 15 bp, Homo sapiens
gcctccaagacaccc

SEQ ID NO: 1585915 - DNA, 15 bp, Homo sapiens
tgcctccaagacacc

SEQ ID NO: 1585916 - DNA, 15 bp, Homo sapiens
gtgcctccaagacac

SEQ ID NO: 1585917 - DNA, 15 bp, Homo sapiens
ggtgcctccaagaca

SEQ ID NO: 1585918 - DNA, 15 bp, Homo sapiens
aggtgcctccaagac

SEQ ID NO: 1585919 - DNA, 15 bp, Homo sapiens
caggtgcctccaaga

SEQ ID NO: 1585920 - DNA, 15 bp, Homo sapiens
gcaggtgcctccaag

SEQ ID NO: 1585921 - DNA, 15 bp, Homo sapiens
ggcaggtgcctccaa

SEQ ID NO: 1585922 - DNA, 15 bp, Homo sapiens
cggcaggtgcctcca

SEQ ID NO: 1585923 - DNA, 15 bp, Homo sapiens
ccggcaggtgcctcc

SEQ ID NO: 1585924 - DNA, 15 bp, Homo sapiens
cccggcaggtgcctc

SEQ ID NO: 1585925 - DNA, 15 bp, Homo sapiens
ccccggcaggtgcct

SEQ ID NO: 1585926 - DNA, 15 bp, Homo sapiens
gccccggcaggtgcc

SEQ ID NO: 1585927 - DNA, 15 bp, Homo sapiens
ggccccggcaggtgc

SEQ ID NO: 1585928 - DNA, 15 bp, Homo sapiens
cggccccggcaggtg

SEQ ID NO: 1585929 - DNA, 15 bp, Homo sapiens
ccggccccggcaggt

SEQ ID NO: 1585930 - DNA, 15 bp, Homo sapiens
gccggccccggcagg

SEQ ID NO: 1585931 - DNA, 15 bp, Homo sapiens
ggccggccccggcag

SEQ ID NO: 1585932 - DNA, 15 bp, Homo sapiens
cggccggccccggca

SEQ ID NO: 1585933 - DNA, 15 bp, Homo sapiens
ccggccggccccggc

SEQ ID NO: 1585934 - DNA, 15 bp, Homo sapiens
cccggccggccccgg

SEQ ID NO: 1585935 - DNA, 15 bp, Homo sapiens
ccccggccggccccg

SEQ ID NO: 1585936 - DNA, 15 bp, Homo sapiens
tccccggccggcccc

SEQ ID NO: 1585937 - DNA, 15 bp, Homo sapiens
ctccccggccggccc

SEQ ID NO: 1585938 - DNA, 15 bp, Homo sapiens
gctccccggccggcc

SEQ ID NO: 1585939 - DNA, 15 bp, Homo sapiens
cgctccccggccggc

SEQ ID NO: 1585940 - DNA, 15 bp, Homo sapiens
gcgctccccggccgg

SEQ ID NO: 1585941 - DNA, 15 bp, Homo sapiens
agcgctccccggccg

SEQ ID NO: 1585942 - DNA, 15 bp, Homo sapiens
gagcgctccccggcc

SEQ ID NO: 1585943 - DNA, 15 bp, Homo sapiens
ggagcgctccccggc

SEQ ID NO: 1585944 - DNA, 15 bp, Homo sapiens
cggagcgctccccgg

SEQ ID NO: 1585945 - DNA, 15 bp, Homo sapiens
gcggagcgctccccg

SEQ ID NO: 1585946 - DNA, 15 bp, Homo sapiens
ggcggagcgctcccc

SEQ ID NO: 1585947 - DNA, 15 bp, Homo sapiens
gggcggagcgctccc

SEQ ID NO: 1585948 - DNA, 15 bp, Homo sapiens
agggcggagcgctcc

SEQ ID NO: 1585949 - DNA, 15 bp, Homo sapiens
gagggcggagcgctc

SEQ ID NO: 1585950 - DNA, 15 bp, Homo sapiens
ggagggcggagcgct

SEQ ID NO: 1585951 - DNA, 15 bp, Homo sapiens
gggagggcggagcgc

SEQ ID NO: 1585952 - DNA, 15 bp, Homo sapiens
tgggagggcggagcg

SEQ ID NO: 1585953 - DNA, 15 bp, Homo sapiens
ctgggagggcggagc

SEQ ID NO: 1585954 - DNA, 15 bp, Homo sapiens
gctgggagggcggag

SEQ ID NO: 1585955 - DNA, 15 bp, Homo sapiens
ggctgggagggcgga

SEQ ID NO: 1585956 - DNA, 15 bp, Homo sapiens
gggctgggagggcgg

SEQ ID NO: 1585957 - DNA, 15 bp, Homo sapiens
ggggctgggagggcg

SEQ ID NO: 1585958 - DNA, 15 bp, Homo sapiens
aggggctgggagggc

SEQ ID NO: 1585959 - DNA, 15 bp, Homo sapiens
caggggctgggaggg

SEQ ID NO: 1585960 - DNA, 15 bp, Homo sapiens
ccaggggctgggagg

SEQ ID NO: 1585961 - DNA, 15 bp, Homo sapiens
gccaggggctgggag

SEQ ID NO: 1585962 - DNA, 15 bp, Homo sapiens
cgccaggggctggga

SEQ ID NO: 1585963 - DNA, 15 bp, Homo sapiens
gcgccaggggctggg

SEQ ID NO: 1585964 - DNA, 15 bp, Homo sapiens
cgcgccaggggctgg

SEQ ID NO: 1585965 - DNA, 15 bp, Homo sapiens
gcgcgccaggggctg

SEQ ID NO: 1585966 - DNA, 15 bp, Homo sapiens
tgcgcgccaggggct

SEQ ID NO: 1585967 - DNA, 15 bp, Homo sapiens
ctgcgcgccaggggc

SEQ ID NO: 1585968 - DNA, 15 bp, Homo sapiens
tctgcgcgccagggg

SEQ ID NO: 1585969 - DNA, 15 bp, Homo sapiens
ctctgcgcgccaggg

SEQ ID NO: 1585970 - DNA, 15 bp, Homo sapiens
cctctgcgcgccagg

SEQ ID NO: 1585971 - DNA, 15 bp, Homo sapiens
tcctctgcgcgccag

SEQ ID NO: 1585972 - DNA, 15 bp, Homo sapiens
ctcctctgcgcgcca

SEQ ID NO: 1585973 - DNA, 15 bp, Homo sapiens
tctcctctgcgcgcc

SEQ ID NO: 1585974 - DNA, 15 bp, Homo sapiens
gtctcctctgcgcgc

SEQ ID NO: 1585975 - DNA, 15 bp, Homo sapiens
agtctcctctgcgcg

SEQ ID NO: 1585976 - DNA, 15 bp, Homo sapiens
tagtctcctctgcgc

SEQ ID NO: 1585977 - DNA, 15 bp, Homo sapiens
ttagtctcctctgcg

SEQ ID NO: 1585978 - DNA, 15 bp, Homo sapiens
tttagtctcctctgc

SEQ ID NO: 1585979 - DNA, 15 bp, Homo sapiens
ttttagtctcctctg

SEQ ID NO: 1585980 - DNA, 15 bp, Homo sapiens
gttttagtctcctct

SEQ ID NO: 1585981 - DNA, 15 bp, Homo sapiens
tgttttagtctcctc

SEQ ID NO: 1585982 - DNA, 15 bp, Homo sapiens
ctgttttagtctcct

SEQ ID NO: 1585983 - DNA, 15 bp, Homo sapiens
gctgttttagtctcc

SEQ ID NO: 1585984 - DNA, 15 bp, Homo sapiens
agctgttttagtctc

SEQ ID NO: 1585985 - DNA, 15 bp, Homo sapiens
tagctgttttagtct

SEQ ID NO: 1585986 - DNA, 15 bp, Homo sapiens
ttagctgttttagtc

SEQ ID NO: 1585987 - DNA, 15 bp, Homo sapiens
cttagctgttttagt

SEQ ID NO: 1585988 - DNA, 15 bp, Homo sapiens
ccttagctgttttag

SEQ ID NO: 1585989 - DNA, 15 bp, Homo sapiens
tccttagctgtttta

SEQ ID NO: 1585990 - DNA, 15 bp, Homo sapiens
ctccttagctgtttt

SEQ ID NO: 1585991 - DNA, 15 bp, Homo sapiens
tctccttagctgttt

SEQ ID NO: 1585992 - DNA, 15 bp, Homo sapiens
ttctccttagctgtt

SEQ ID NO: 1585993 - DNA, 15 bp, Homo sapiens
tttctccttagctgt

SEQ ID NO: 1585994 - DNA, 15 bp, Homo sapiens
ctttctccttagctg

SEQ ID NO: 1585995 - DNA, 15 bp, Homo sapiens
gctttctccttagct

SEQ ID NO: 1585996 - DNA, 15 bp, Homo sapiens
tgctttctccttagc

SEQ ID NO: 1585997 - DNA, 15 bp, Homo sapiens
ttgctttctccttag

SEQ ID NO: 1585998 - DNA, 15 bp, Homo sapiens
tttgctttctcctta

SEQ ID NO: 1585999 - DNA, 15 bp, Homo sapiens
ttttgctttctcctt

SEQ ID NO: 1586000 - DNA, 15 bp, Homo sapiens
gttttgctttctcct

SEQ ID NO: 1586001 - DNA, 15 bp, Homo sapiens
tgttttgctttctcc

SEQ ID NO: 1586002 - DNA, 15 bp, Homo sapiens
ttgttttgctttctc

SEQ ID NO: 1586003 - DNA, 15 bp, Homo sapiens
tttgttttgctttct

SEQ ID NO: 1586004 - DNA, 15 bp, Homo sapiens
ttttgttttgctttc

SEQ ID NO: 1586005 - DNA, 15 bp, Homo sapiens
tttttgttttgcttt

SEQ ID NO: 1586006 - DNA, 15 bp, Homo sapiens
tgtttttgttttgct

SEQ ID NO: 1586007 - DNA, 15 bp, Homo sapiens
ttgtttttgttttgc

SEQ ID NO: 1586008 - DNA, 15 bp, Homo sapiens
attgtttttgttttg

SEQ ID NO: 1586009 - DNA, 15 bp, Homo sapiens
cattgtttttgtttt

SEQ ID NO: 1586010 - DNA, 15 bp, Homo sapiens
tcattgtttttgttt

SEQ ID NO: 1586011 - DNA, 15 bp, Homo sapiens
atcattgtttttgtt

SEQ ID NO: 1586012 - DNA, 15 bp, Homo sapiens
tatcattgtttttgt

SEQ ID NO: 1586013 - DNA, 15 bp, Homo sapiens
ttatcattgtttttg

SEQ ID NO: 1586014 - DNA, 15 bp, Homo sapiens
tttatcattgttttt

SEQ ID NO: 1586015 - DNA, 15 bp, Homo sapiens
ttttatcattgtttt

SEQ ID NO: 1586016 - DNA, 15 bp, Homo sapiens
tttttatcattgttt

SEQ ID NO: 1586017 - DNA, 15 bp, Homo sapiens
gtttttatcattgtt

SEQ ID NO: 1586018 - DNA, 15 bp, Homo sapiens
cgtttttatcattgt

SEQ ID NO: 1586019 - DNA, 15 bp, Homo sapiens
acgtttttatcattg

SEQ ID NO: 1586020 - DNA, 15 bp, Homo sapiens
aacgtttttatcatt

SEQ ID NO: 1586021 - DNA, 15 bp, Homo sapiens
aaacgtttttatcat

SEQ ID NO: 1586022 - DNA, 15 bp, Homo sapiens
taaacgtttttatca

SEQ ID NO: 1586023 - DNA, 15 bp, Homo sapiens
ttaaacgtttttatc

SEQ ID NO: 1586024 - DNA, 15 bp, Homo sapiens
tttaaacgtttttat

SEQ ID NO: 1586025 - DNA, 15 bp, Homo sapiens
ttttaaacgttttta

SEQ ID NO: 1586026 - DNA, 15 bp, Homo sapiens
attttaaacgttttt

SEQ ID NO: 1586027 - DNA, 15 bp, Homo sapiens
gattttaaacgtttt

SEQ ID NO: 1586028 - DNA, 15 bp, Homo sapiens
ggattttaaacgttt

SEQ ID NO: 1586029 - DNA, 15 bp, Homo sapiens
tggattttaaacgtt

SEQ ID NO: 1586030 - DNA, 15 bp, Homo sapiens
ttggattttaaacgt

SEQ ID NO: 1586031 - DNA, 15 bp, Homo sapiens
cttggattttaaacg

SEQ ID NO: 1586032 - DNA, 15 bp, Homo sapiens
ccttggattttaaac

SEQ ID NO: 1586033 - DNA, 15 bp, Homo sapiens
tccttggattttaaa

SEQ ID NO: 1586034 - DNA, 15 bp, Homo sapiens
gtccttggattttaa

SEQ ID NO: 1586035 - DNA, 15 bp, Homo sapiens
tgtccttggatttta

SEQ ID NO: 1586036 - DNA, 15 bp, Homo sapiens
ttgtccttggatttt

SEQ ID NO: 1586037 - DNA, 15 bp, Homo sapiens
tttgtccttggattt

SEQ ID NO: 1586038 - DNA, 15 bp, Homo sapiens
ttttgtccttggatt

SEQ ID NO: 1586039 - DNA, 15 bp, Homo sapiens
tttttgtccttggat

SEQ ID NO: 1586040 - DNA, 15 bp, Homo sapiens
gtttttgtccttgga

SEQ ID NO: 1586041 - DNA, 15 bp, Homo sapiens
ggtttttgtccttgg

SEQ ID NO: 1586042 - DNA, 15 bp, Homo sapiens
cggtttttgtccttg

SEQ ID NO: 1586043 - DNA, 15 bp, Homo sapiens
ccggtttttgtcctt

SEQ ID NO: 1586044 - DNA, 15 bp, Homo sapiens
tccggtttttgtcct

SEQ ID NO: 1586045 - DNA, 15 bp, Homo sapiens
ctccggtttttgtcc

SEQ ID NO: 1586046 - DNA, 15 bp, Homo sapiens
actccggtttttgtc

SEQ ID NO: 1586047 - DNA, 15 bp, Homo sapiens
gactccggtttttgt

SEQ ID NO: 1586048 - DNA, 15 bp, Homo sapiens
cgactccggtttttg

SEQ ID NO: 1586049 - DNA, 15 bp, Homo sapiens
ccgactccggttttt

SEQ ID NO: 1586050 - DNA, 15 bp, Homo sapiens
accgactccggtttt

SEQ ID NO: 1586051 - DNA, 15 bp, Homo sapiens
gaccgactccggttt

SEQ ID NO: 1586052 - DNA, 15 bp, Homo sapiens
agaccgactccggtt

SEQ ID NO: 1586053 - DNA, 15 bp, Homo sapiens
gagaccgactccggt

SEQ ID NO: 1586054 - DNA, 15 bp, Homo sapiens
tgagaccgactccgg

SEQ ID NO: 1586055 - DNA, 15 bp, Homo sapiens
ttgagaccgactccg

SEQ ID NO: 1586056 - DNA, 15 bp, Homo sapiens
tttgagaccgactcc

SEQ ID NO: 1586057 - DNA, 15 bp, Homo sapiens
ttttgagaccgactc

SEQ ID NO: 1586058 - DNA, 15 bp, Homo sapiens
attttgagaccgact

SEQ ID NO: 1586059 - DNA, 15 bp, Homo sapiens
gattttgagaccgac

SEQ ID NO: 1586060 - DNA, 15 bp, Homo sapiens
ggattttgagaccga

SEQ ID NO: 1586061 - DNA, 15 bp, Homo sapiens
cggattttgagaccg

SEQ ID NO: 1586062 - DNA, 15 bp, Homo sapiens
gcggattttgagacc

SEQ ID NO: 1586063 - DNA, 15 bp, Homo sapiens
cgcggattttgagac

SEQ ID NO: 1586064 - DNA, 15 bp, Homo sapiens
gcgcggattttgaga

SEQ ID NO: 1586065 - DNA, 15 bp, Homo sapiens
ggcgcggattttgag

SEQ ID NO: 1586066 - DNA, 15 bp, Homo sapiens
cggcgcggattttga

SEQ ID NO: 1586067 - DNA, 15 bp, Homo sapiens
acggcgcggattttg

SEQ ID NO: 1586068 - DNA, 15 bp, Homo sapiens
aacggcgcggatttt

SEQ ID NO: 1586069 - DNA, 15 bp, Homo sapiens
gaacggcgcggattt

SEQ ID NO: 1586070 - DNA, 15 bp, Homo sapiens
tgaacggcgcggatt

SEQ ID NO: 1586071 - DNA, 15 bp, Homo sapiens
ctgaacggcgcggat

SEQ ID NO: 1586072 - DNA, 15 bp, Homo sapiens
actgaacggcgcgga

SEQ ID NO: 1586073 - DNA, 15 bp, Homo sapiens
cactgaacggcgcgg

SEQ ID NO: 1586074 - DNA, 15 bp, Homo sapiens
gcactgaacggcgcg

SEQ ID NO: 1586075 - DNA, 15 bp, Homo sapiens
agcactgaacggcgc

SEQ ID NO: 1586076 - DNA, 15 bp, Homo sapiens
gagcactgaacggcg

SEQ ID NO: 1586077 - DNA, 15 bp, Homo sapiens
ggagcactgaacggc

SEQ ID NO: 1586078 - DNA, 15 bp, Homo sapiens
tggagcactgaacgg

SEQ ID NO: 1586079 - DNA, 15 bp, Homo sapiens
gtggagcactgaacg

SEQ ID NO: 1586080 - DNA, 15 bp, Homo sapiens
agtggagcactgaac

SEQ ID NO: 1586081 - DNA, 15 bp, Homo sapiens
gagtggagcactgaa

SEQ ID NO: 1586082 - DNA, 15 bp, Homo sapiens
cgagtggagcactga

SEQ ID NO: 1586083 - DNA, 15 bp, Homo sapiens
ccgagtggagcactg

SEQ ID NO: 1586084 - DNA, 15 bp, Homo sapiens
accgagtggagcact

SEQ ID NO: 1586085 - DNA, 15 bp, Homo sapiens
taccgagtggagcac

SEQ ID NO: 1586086 - DNA, 15 bp, Homo sapiens
ctaccgagtggagca

SEQ ID NO: 1586087 - DNA, 15 bp, Homo sapiens
actaccgagtggagc

SEQ ID NO: 1586088 - DNA, 15 bp, Homo sapiens
gactaccgagtggag

SEQ ID NO: 1586089 - DNA, 15 bp, Homo sapiens
cgactaccgagtgga

SEQ ID NO: 1586090 - DNA, 15 bp, Homo sapiens
tcgactaccgagtgg

SEQ ID NO: 1586091 - DNA, 15 bp, Homo sapiens
gtcgactaccgagtg

SEQ ID NO: 1586092 - DNA, 15 bp, Homo sapiens
agtcgactaccgagt

SEQ ID NO: 1586093 - DNA, 15 bp, Homo sapiens
gagtcgactaccgag

SEQ ID NO: 1586094 - DNA, 15 bp, Homo sapiens
cgagtcgactaccga

SEQ ID NO: 1586095 - DNA, 15 bp, Homo sapiens
ccgagtcgactaccg

SEQ ID NO: 1586096 - DNA, 15 bp, Homo sapiens
gccgagtcgactacc

SEQ ID NO: 1586097 - DNA, 15 bp, Homo sapiens
agccgagtcgactac

SEQ ID NO: 1586098 - DNA, 15 bp, Homo sapiens
cagccgagtcgacta

SEQ ID NO: 1586099 - DNA, 15 bp, Homo sapiens
gcagccgagtcgact

SEQ ID NO: 1586100 - DNA, 15 bp, Homo sapiens
tgcagccgagtcgac

SEQ ID NO: 1586101 - DNA, 15 bp, Homo sapiens
ctgcagccgagtcga

SEQ ID NO: 1586102 - DNA, 15 bp, Homo sapiens
cctgcagccgagtcg

SEQ ID NO: 1586103 - DNA, 15 bp, Homo sapiens
gcctgcagccgagtc

SEQ ID NO: 1586104 - DNA, 15 bp, Homo sapiens
ggcctgcagccgagt

SEQ ID NO: 1586105 - DNA, 15 bp, Homo sapiens
gggcctgcagccgag

SEQ ID NO: 1586106 - DNA, 15 bp, Homo sapiens
ggggcctgcagccga

SEQ ID NO: 1586107 - DNA, 15 bp, Homo sapiens
cggggcctgcagccg

SEQ ID NO: 1586108 - DNA, 15 bp, Homo sapiens
ccggggcctgcagcc

SEQ ID NO: 1586109 - DNA, 15 bp, Homo sapiens
gccggggcctgcagc

SEQ ID NO: 1586110 - DNA, 15 bp, Homo sapiens
ggccggggcctgcag

SEQ ID NO: 1586111 - DNA, 15 bp, Homo sapiens
aggccggggcctgca

SEQ ID NO: 1586112 - DNA, 15 bp, Homo sapiens
caggccggggcctgc

SEQ ID NO: 1586113 - DNA, 15 bp, Homo sapiens
ccaggccggggcctg

SEQ ID NO: 1586114 - DNA, 15 bp, Homo sapiens
gccaggccggggcct

SEQ ID NO: 1586115 - DNA, 15 bp, Homo sapiens
ggccaggccggggcc

SEQ ID NO: 1586116 - DNA, 15 bp, Homo sapiens
cggccaggccggggc

SEQ ID NO: 1586117 - DNA, 15 bp, Homo sapiens
ccggccaggccgggg

SEQ ID NO: 1586118 - DNA, 15 bp, Homo sapiens
tccggccaggccggg

SEQ ID NO: 1586119 - DNA, 15 bp, Homo sapiens
ctccggccaggccgg

SEQ ID NO: 1586120 - DNA, 15 bp, Homo sapiens
gctccggccaggccg

SEQ ID NO: 1586121 - DNA, 15 bp, Homo sapiens
tgctccggccaggcc

SEQ ID NO: 1586122 - DNA, 15 bp, Homo sapiens
ttgctccggccaggc

SEQ ID NO: 1586123 - DNA, 15 bp, Homo sapiens
gttgctccggccagg

SEQ ID NO: 1586124 - DNA, 15 bp, Homo sapiens
cgttgctccggccag

SEQ ID NO: 1586125 - DNA, 15 bp, Homo sapiens
gcgttgctccggcca

SEQ ID NO: 1586126 - DNA, 15 bp, Homo sapiens
cgcgttgctccggcc

SEQ ID NO: 1586127 - DNA, 15 bp, Homo sapiens
ccgcgttgctccggc

SEQ ID NO: 1586128 - DNA, 15 bp, Homo sapiens
cccgcgttgctccgg

SEQ ID NO: 1586129 - DNA, 15 bp, Homo sapiens
ccccgcgttgctccg

SEQ ID NO: 1586130 - DNA, 15 bp, Homo sapiens
cccccgcgttgctcc

SEQ ID NO: 1586131 - DNA, 15 bp, Homo sapiens
tcccccgcgttgctc

SEQ ID NO: 1586132 - DNA, 15 bp, Homo sapiens
gtcccccgcgttgct

SEQ ID NO: 1586133 - DNA, 15 bp, Homo sapiens
tgtcccccgcgttgc

SEQ ID NO: 1586134 - DNA, 15 bp, Homo sapiens
gtgtcccccgcgttg

SEQ ID NO: 1586135 - DNA, 15 bp, Homo sapiens
ggtgtcccccgcgtt

SEQ ID NO: 1586136 - DNA, 15 bp, Homo sapiens
gggtgtcccccgcgt

SEQ ID NO: 1586137 - DNA, 15 bp, Homo sapiens
ggggtgtcccccgcg

SEQ ID NO: 1586138 - DNA, 15 bp, Homo sapiens
gggggtgtcccccgc

SEQ ID NO: 1586139 - DNA, 15 bp, Homo sapiens
cgggggtgtcccccg

SEQ ID NO: 1586140 - DNA, 15 bp, Homo sapiens
tcgggggtgtccccc

SEQ ID NO: 1586141 - DNA, 15 bp, Homo sapiens
atcgggggtgtcccc

SEQ ID NO: 1586142 - DNA, 15 bp, Homo sapiens
aatcgggggtgtccc

SEQ ID NO: 1586143 - DNA, 15 bp, Homo sapiens
gaatcgggggtgtcc

SEQ ID NO: 1586144 - DNA, 15 bp, Homo sapiens
ggaatcgggggtgtc

SEQ ID NO: 1586145 - DNA, 15 bp, Homo sapiens
cggaatcgggggtgt

SEQ ID NO: 1586146 - DNA, 15 bp, Homo sapiens
gcggaatcgggggtg

SEQ ID NO: 1586147 - DNA, 15 bp, Homo sapiens
agcggaatcgggggt

SEQ ID NO: 1586148 - DNA, 15 bp, Homo sapiens
cagcggaatcggggg

SEQ ID NO: 1586149 - DNA, 15 bp, Homo sapiens
ccagcggaatcgggg

SEQ ID NO: 1586150 - DNA, 15 bp, Homo sapiens
cccagcggaatcggg

SEQ ID NO: 1586151 - DNA, 15 bp, Homo sapiens
ccccagcggaatcgg

SEQ ID NO: 1586152 - DNA, 15 bp, Homo sapiens
tccccagcggaatcg

SEQ ID NO: 1586153 - DNA, 15 bp, Homo sapiens
ctccccagcggaatc

SEQ ID NO: 1586154 - DNA, 15 bp, Homo sapiens
gctccccagcggaat

SEQ ID NO: 1586155 - DNA, 15 bp, Homo sapiens
cgctccccagcggaa

SEQ ID NO: 1586156 - DNA, 15 bp, Homo sapiens
gcgctccccagcgga

SEQ ID NO: 1586157 - DNA, 15 bp, Homo sapiens
tgcgctccccagcgg

SEQ ID NO: 1586158 - DNA, 15 bp, Homo sapiens
ctgcgctccccagcg

SEQ ID NO: 1586159 - DNA, 15 bp, Homo sapiens
gctgcgctccccagc

SEQ ID NO: 1586160 - DNA, 15 bp, Homo sapiens
ggctgcgctccccag

SEQ ID NO: 1586161 - DNA, 15 bp, Homo sapiens
gggctgcgctcccca

SEQ ID NO: 1586162 - DNA, 15 bp, Homo sapiens
tgggctgcgctcccc

SEQ ID NO: 1586163 - DNA, 15 bp, Homo sapiens
gtgggctgcgctccc

SEQ ID NO: 1586164 - DNA, 15 bp, Homo sapiens
tgtgggctgcgctcc

SEQ ID NO: 1586165 - DNA, 15 bp, Homo sapiens
ctgtgggctgcgctc

SEQ ID NO: 1586166 - DNA, 15 bp, Homo sapiens
gctgtgggctgcgct

SEQ ID NO: 1586167 - DNA, 15 bp, Homo sapiens
agctgtgggctgcgc

SEQ ID NO: 1586168 - DNA, 15 bp, Homo sapiens
gagctgtgggctgcg

SEQ ID NO: 1586169 - DNA, 15 bp, Homo sapiens
ggagctgtgggctgc

SEQ ID NO: 1586170 - DNA, 15 bp, Homo sapiens
gggagctgtgggctg

SEQ ID NO: 1586171 - DNA, 15 bp, Homo sapiens
ggggagctgtgggct

SEQ ID NO: 1586172 - DNA, 15 bp, Homo sapiens
gggggagctgtgggc

SEQ ID NO: 1586173 - DNA, 15 bp, Homo sapiens
agggggagctgtggg

SEQ ID NO: 1586174 - DNA, 15 bp, Homo sapiens
gagggggagctgtgg

SEQ ID NO: 1586175 - DNA, 15 bp, Homo sapiens
cgagggggagctgtg

SEQ ID NO: 1586176 - DNA, 15 bp, Homo sapiens
gcgagggggagctgt

SEQ ID NO: 1586177 - DNA, 15 bp, Homo sapiens
ggcgagggggagctg

SEQ ID NO: 1586178 - DNA, 15 bp, Homo sapiens
tggcgagggggagct

SEQ ID NO: 1586179 - DNA, 15 bp, Homo sapiens
ctggcgagggggagc

SEQ ID NO: 1586180 - DNA, 15 bp, Homo sapiens
cctggcgagggggag

SEQ ID NO: 1586181 - DNA, 15 bp, Homo sapiens
gcctggcgaggggga

SEQ ID NO: 1586182 - DNA, 15 bp, Homo sapiens
cgcctggcgaggggg

SEQ ID NO: 1586183 - DNA, 15 bp, Homo sapiens
gcgcctggcgagggg

SEQ ID NO: 1586184 - DNA, 15 bp, Homo sapiens
ggcgcctggcgaggg

SEQ ID NO: 1586185 - DNA, 15 bp, Homo sapiens
gggcgcctggcgagg

SEQ ID NO: 1586186 - DNA, 15 bp, Homo sapiens
tgggcgcctggcgag

SEQ ID NO: 1586187 - DNA, 15 bp, Homo sapiens
ttgggcgcctggcga

SEQ ID NO: 1586188 - DNA, 15 bp, Homo sapiens
cttgggcgcctggcg

SEQ ID NO: 1586189 - DNA, 15 bp, Homo sapiens
ccttgggcgcctggc

SEQ ID NO: 1586190 - DNA, 15 bp, Homo sapiens
tccttgggcgcctgg

SEQ ID NO: 1586191 - DNA, 15 bp, Homo sapiens
gtccttgggcgcctg

SEQ ID NO: 1586192 - DNA, 15 bp, Homo sapiens
ggtccttgggcgcct

SEQ ID NO: 1586193 - DNA, 15 bp, Homo sapiens
gggtccttgggcgcc

SEQ ID NO: 1586194 - DNA, 15 bp, Homo sapiens
agggtccttgggcgc

SEQ ID NO: 1586195 - DNA, 15 bp, Homo sapiens
gagggtccttgggcg

SEQ ID NO: 1586196 - DNA, 15 bp, Homo sapiens
tgagggtccttgggc

SEQ ID NO: 1586197 - DNA, 15 bp, Homo sapiens
ttgagggtccttggg

SEQ ID NO: 1586198 - DNA, 15 bp, Homo sapiens
cttgagggtccttgg

SEQ ID NO: 1586199 - DNA, 15 bp, Homo sapiens
ccttgagggtccttg

SEQ ID NO: 1586200 - DNA, 15 bp, Homo sapiens
gccttgagggtcctt

SEQ ID NO: 1586201 - DNA, 15 bp, Homo sapiens
cgccttgagggtcct

SEQ ID NO: 1586202 - DNA, 15 bp, Homo sapiens
gcgccttgagggtcc

SEQ ID NO: 1586203 - DNA, 15 bp, Homo sapiens
cgcgccttgagggtc

SEQ ID NO: 1586204 - DNA, 15 bp, Homo sapiens
ccgcgccttgagggt

SEQ ID NO: 1586205 - DNA, 15 bp, Homo sapiens
cccgcgccttgaggg

SEQ ID NO: 1586206 - DNA, 15 bp, Homo sapiens
ccccgcgccttgagg

SEQ ID NO: 1586207 - DNA, 15 bp, Homo sapiens
gccccgcgccttgag

SEQ ID NO: 1586208 - DNA, 15 bp, Homo sapiens
ggccccgcgccttga

SEQ ID NO: 1586209 - DNA, 15 bp, Homo sapiens
gggccccgcgccttg

SEQ ID NO: 1586210 - DNA, 15 bp, Homo sapiens
tgggccccgcgcctt

SEQ ID NO: 1586211 - DNA, 15 bp, Homo sapiens
gtgggccccgcgcct

SEQ ID NO: 1586212 - DNA, 15 bp, Homo sapiens
tgtgggccccgcgcc

SEQ ID NO: 1586213 - DNA, 15 bp, Homo sapiens
gtgtgggccccgcgc

SEQ ID NO: 1586214 - DNA, 15 bp, Homo sapiens
agtgtgggccccgcg

SEQ ID NO: 1586215 - DNA, 15 bp, Homo sapiens
aagtgtgggccccgc

SEQ ID NO: 1586216 - DNA, 15 bp, Homo sapiens
caagtgtgggccccg

SEQ ID NO: 1586217 - DNA, 15 bp, Homo sapiens
tcaagtgtgggcccc

SEQ ID NO: 1586218 - DNA, 15 bp, Homo sapiens
ttcaagtgtgggccc

SEQ ID NO: 1586219 - DNA, 15 bp, Homo sapiens
cttcaagtgtgggcc

SEQ ID NO: 1586220 - DNA, 15 bp, Homo sapiens
gcttcaagtgtgggc

SEQ ID NO: 1586221 - DNA, 15 bp, Homo sapiens
ggcttcaagtgtggg

SEQ ID NO: 1586222 - DNA, 15 bp, Homo sapiens
aggcttcaagtgtgg

SEQ ID NO: 1586223 - DNA, 15 bp, Homo sapiens
caggcttcaagtgtg

SEQ ID NO: 1586224 - DNA, 15 bp, Homo sapiens
ccaggcttcaagtgt

SEQ ID NO: 1586225 - DNA, 15 bp, Homo sapiens
cccaggcttcaagtg

SEQ ID NO: 1586226 - DNA, 15 bp, Homo sapiens
tcccaggcttcaagt

SEQ ID NO: 1586227 - DNA, 15 bp, Homo sapiens
ttcccaggcttcaag

SEQ ID NO: 1586228 - DNA, 15 bp, Homo sapiens
gttcccaggcttcaa

SEQ ID NO: 1586229 - DNA, 15 bp, Homo sapiens
cgttcccaggcttca

SEQ ID NO: 1586230 - DNA, 15 bp, Homo sapiens
gcgttcccaggcttc

SEQ ID NO: 1586231 - DNA, 15 bp, Homo sapiens
cgcgttcccaggctt

SEQ ID NO: 1586232 - DNA, 15 bp, Homo sapiens
gcgcgttcccaggct

SEQ ID NO: 1586233 - DNA, 15 bp, Homo sapiens
tgcgcgttcccaggc

SEQ ID NO: 1586234 - DNA, 15 bp, Homo sapiens
ctgcgcgttcccagg

SEQ ID NO: 1586235 - DNA, 15 bp, Homo sapiens
tctgcgcgttcccag

SEQ ID NO: 1586236 - DNA, 15 bp, Homo sapiens
gtctgcgcgttccca

SEQ ID NO: 1586237 - DNA, 15 bp, Homo sapiens
tgtctgcgcgttccc

SEQ ID NO: 1586238 - DNA, 15 bp, Homo sapiens
ctgtctgcgcgttcc

SEQ ID NO: 1586239 - DNA, 15 bp, Homo sapiens
cctgtctgcgcgttc

SEQ ID NO: 1586240 - DNA, 15 bp, Homo sapiens
tcctgtctgcgcgtt

SEQ ID NO: 1586241 - DNA, 15 bp, Homo sapiens
ttcctgtctgcgcgt

SEQ ID NO: 1586242 - DNA, 15 bp, Homo sapiens
tttcctgtctgcgcg

SEQ ID NO: 1586243 - DNA, 15 bp, Homo sapiens
gtttcctgtctgcgc

SEQ ID NO: 1586244 - DNA, 15 bp, Homo sapiens
ggtttcctgtctgcg

SEQ ID NO: 1586245 - DNA, 15 bp, Homo sapiens
gggtttcctgtctgc

SEQ ID NO: 1586246 - DNA, 15 bp, Homo sapiens
agggtttcctgtctg

SEQ ID NO: 1586247 - DNA, 15 bp, Homo sapiens
gagggtttcctgtct

SEQ ID NO: 1586248 - DNA, 15 bp, Homo sapiens
agagggtttcctgtc

SEQ ID NO: 1586249 - DNA, 15 bp, Homo sapiens
aagagggtttcctgt

SEQ ID NO: 1586250 - DNA, 15 bp, Homo sapiens
gaagagggtttcctg

SEQ ID NO: 1586251 - DNA, 15 bp, Homo sapiens
ggaagagggtttcct

SEQ ID NO: 1586252 - DNA, 15 bp, Homo sapiens
aggaagagggtttcc

SEQ ID NO: 1586253 - DNA, 15 bp, Homo sapiens
gaggaagagggtttc

SEQ ID NO: 1586254 - DNA, 15 bp, Homo sapiens
ggaggaagagggttt

SEQ ID NO: 1586255 - DNA, 15 bp, Homo sapiens
aggaggaagagggtt

SEQ ID NO: 1586256 - DNA, 15 bp, Homo sapiens
taggaggaagagggt

SEQ ID NO: 1586257 - DNA, 15 bp, Homo sapiens
ttaggaggaagaggg

SEQ ID NO: 1586258 - DNA, 15 bp, Homo sapiens
cttaggaggaagagg

SEQ ID NO: 1586259 - DNA, 15 bp, Homo sapiens
gcttaggaggaagag

SEQ ID NO: 1586260 - DNA, 15 bp, Homo sapiens
tgcttaggaggaaga

SEQ ID NO: 1586261 - DNA, 15 bp, Homo sapiens
ctgcttaggaggaag

SEQ ID NO: 1586262 - DNA, 15 bp, Homo sapiens
actgcttaggaggaa

SEQ ID NO: 1586263 - DNA, 15 bp, Homo sapiens
aactgcttaggagga

SEQ ID NO: 1586264 - DNA, 15 bp, Homo sapiens
aaactgcttaggagg

SEQ ID NO: 1586265 - DNA, 15 bp, Homo sapiens
gaaactgcttaggag

SEQ ID NO: 1586266 - DNA, 15 bp, Homo sapiens
agaaactgcttagga

SEQ ID NO: 1586267 - DNA, 15 bp, Homo sapiens
aagaaactgcttagg

SEQ ID NO: 1586268 - DNA, 15 bp, Homo sapiens
caagaaactgcttag

SEQ ID NO: 1586269 - DNA, 15 bp, Homo sapiens
gcaagaaactgctta

SEQ ID NO: 1586270 - DNA, 15 bp, Homo sapiens
agcaagaaactgctt

SEQ ID NO: 1586271 - DNA, 15 bp, Homo sapiens
gagcaagaaactgct

SEQ ID NO: 1586272 - DNA, 15 bp, Homo sapiens
cgagcaagaaactgc

SEQ ID NO: 1586273 - DNA, 15 bp, Homo sapiens
acgagcaagaaactg

SEQ ID NO: 1586274 - DNA, 15 bp, Homo sapiens
gacgagcaagaaact

SEQ ID NO: 1586275 - DNA, 15 bp, Homo sapiens
cgacgagcaagaaac

SEQ ID NO: 1586276 - DNA, 15 bp, Homo sapiens
ccgacgagcaagaaa

SEQ ID NO: 1586277 - DNA, 15 bp, Homo sapiens
tccgacgagcaagaa

SEQ ID NO: 1586278 - DNA, 15 bp, Homo sapiens
atccgacgagcaaga

SEQ ID NO: 1586279 - DNA, 15 bp, Homo sapiens
catccgacgagcaag

SEQ ID NO: 1586280 - DNA, 15 bp, Homo sapiens
tcatccgacgagcaa

SEQ ID NO: 1586281 - DNA, 15 bp, Homo sapiens
ctcatccgacgagca

SEQ ID NO: 1586282 - DNA, 15 bp, Homo sapiens
tctcatccgacgagc

SEQ ID NO: 1586283 - DNA, 15 bp, Homo sapiens
ctctcatccgacgag

SEQ ID NO: 1586284 - DNA, 15 bp, Homo sapiens
cctctcatccgacga

SEQ ID NO: 1586285 - DNA, 15 bp, Homo sapiens
gcctctcatccgacg

SEQ ID NO: 1586286 - DNA, 15 bp, Homo sapiens
cgcctctcatccgac

SEQ ID NO: 1586287 - DNA, 15 bp, Homo sapiens
gcgcctctcatccga

SEQ ID NO: 1586288 - DNA, 15 bp, Homo sapiens
ggcgcctctcatccg

SEQ ID NO: 1586289 - DNA, 15 bp, Homo sapiens
gggcgcctctcatcc

SEQ ID NO: 1586290 - DNA, 15 bp, Homo sapiens
tgggcgcctctcatc

SEQ ID NO: 1586291 - DNA, 15 bp, Homo sapiens
ttgggcgcctctcat

SEQ ID NO: 1586292 - DNA, 15 bp, Homo sapiens
attgggcgcctctca

SEQ ID NO: 1586293 - DNA, 15 bp, Homo sapiens
aattgggcgcctctc

SEQ ID NO: 1586294 - DNA, 15 bp, Homo sapiens
caattgggcgcctct

SEQ ID NO: 1586295 - DNA, 15 bp, Homo sapiens
tcaattgggcgcctc

SEQ ID NO: 1586296 - DNA, 15 bp, Homo sapiens
ttcaattgggcgcct

SEQ ID NO: 1586297 - DNA, 15 bp, Homo sapiens
cttcaattgggcgcc

SEQ ID NO: 1586298 - DNA, 15 bp, Homo sapiens
gcttcaattgggcgc

SEQ ID NO: 1586299 - DNA, 15 bp, Homo sapiens
tgcttcaattgggcg

SEQ ID NO: 1586300 - DNA, 15 bp, Homo sapiens
ctgcttcaattgggc

SEQ ID NO: 1586301 - DNA, 15 bp, Homo sapiens
tctgcttcaattggg

SEQ ID NO: 1586302 - DNA, 15 bp, Homo sapiens
ttctgcttcaattgg

SEQ ID NO: 1586303 - DNA, 15 bp, Homo sapiens
attctgcttcaattg

SEQ ID NO: 1586304 - DNA, 15 bp, Homo sapiens
cattctgcttcaatt

SEQ ID NO: 1586305 - DNA, 15 bp, Homo sapiens
tcattctgcttcaat

SEQ ID NO: 1586306 - DNA, 15 bp, Homo sapiens
atcattctgcttcaa

SEQ ID NO: 1586307 - DNA, 15 bp, Homo sapiens
gatcattctgcttca

SEQ ID NO: 1586308 - DNA, 15 bp, Homo sapiens
ggatcattctgcttc

SEQ ID NO: 1586309 - DNA, 15 bp, Homo sapiens
aggatcattctgctt

SEQ ID NO: 1586310 - DNA, 15 bp, Homo sapiens
gaggatcattctgct

SEQ ID NO: 1586311 - DNA, 15 bp, Homo sapiens
tgaggatcattctgc

SEQ ID NO: 1586312 - DNA, 15 bp, Homo sapiens
atgaggatcattctg

SEQ ID NO: 1586313 - DNA, 15 bp, Homo sapiens
gatgaggatcattct

SEQ ID NO: 1586314 - DNA, 15 bp, Homo sapiens
agatgaggatcattc

SEQ ID NO: 1586315 - DNA, 15 bp, Homo sapiens
tagatgaggatcatt

SEQ ID NO: 1586316 - DNA, 15 bp, Homo sapiens
gtagatgaggatcat

SEQ ID NO: 1586317 - DNA, 15 bp, Homo sapiens
agtagatgaggatca

SEQ ID NO: 1586318 - DNA, 15 bp, Homo sapiens
tagtagatgaggatc

SEQ ID NO: 1586319 - DNA, 15 bp, Homo sapiens
ttagtagatgaggat

SEQ ID NO: 1586320 - DNA, 15 bp, Homo sapiens
attagtagatgagga

SEQ ID NO: 1586321 - DNA, 15 bp, Homo sapiens
tattagtagatgagg

SEQ ID NO: 1586322 - DNA, 15 bp, Homo sapiens
atattagtagatgag

SEQ ID NO: 1586323 - DNA, 15 bp, Homo sapiens
gatattagtagatga

SEQ ID NO: 1586324 - DNA, 15 bp, Homo sapiens
ggatattagtagatg

SEQ ID NO: 1586325 - DNA, 15 bp, Homo sapiens
tggatattagtagat

SEQ ID NO: 1586326 - DNA, 15 bp, Homo sapiens
ctggatattagtaga

SEQ ID NO: 1586327 - DNA, 15 bp, Homo sapiens
gctggatattagtag

SEQ ID NO: 1586328 - DNA, 15 bp, Homo sapiens
cgctggatattagta

SEQ ID NO: 1586329 - DNA, 15 bp, Homo sapiens
acgctggatattagt

SEQ ID NO: 1586330 - DNA, 15 bp, Homo sapiens
cacgctggatattag

SEQ ID NO: 1586331 - DNA, 15 bp, Homo sapiens
ccacgctggatatta

SEQ ID NO: 1586332 - DNA, 15 bp, Homo sapiens
gccacgctggatatt

SEQ ID NO: 1586333 - DNA, 15 bp, Homo sapiens
ggccacgctggatat

SEQ ID NO: 1586334 - DNA, 15 bp, Homo sapiens
tggccacgctggata

SEQ ID NO: 1586335 - DNA, 15 bp, Homo sapiens
gtggccacgctggat

SEQ ID NO: 1586336 - DNA, 15 bp, Homo sapiens
tgtggccacgctgga

SEQ ID NO: 1586337 - DNA, 15 bp, Homo sapiens
ttgtggccacgctgg

SEQ ID NO: 1586338 - DNA, 15 bp, Homo sapiens
tttgtggccacgctg

SEQ ID NO: 1586339 - DNA, 15 bp, Homo sapiens
ctttgtggccacgct

SEQ ID NO: 1586340 - DNA, 15 bp, Homo sapiens
gctttgtggccacgc

SEQ ID NO: 1586341 - DNA, 15 bp, Homo sapiens
cgctttgtggccacg

SEQ ID NO: 1586342 - DNA, 15 bp, Homo sapiens
tcgctttgtggccac

SEQ ID NO: 1586343 - DNA, 15 bp, Homo sapiens
gtcgctttgtggcca

SEQ ID NO: 1586344 - DNA, 15 bp, Homo sapiens
agtcgctttgtggcc

SEQ ID NO: 1586345 - DNA, 15 bp, Homo sapiens
cagtcgctttgtggc

SEQ ID NO: 1586346 - DNA, 15 bp, Homo sapiens
ccagtcgctttgtgg

SEQ ID NO: 1586347 - DNA, 15 bp, Homo sapiens
gccagtcgctttgtg

SEQ ID NO: 1586348 - DNA, 15 bp, Homo sapiens
ggccagtcgctttgt

SEQ ID NO: 1586349 - DNA, 15 bp, Homo sapiens
tggccagtcgctttg

SEQ ID NO: 1586350 - DNA, 15 bp, Homo sapiens
atggccagtcgcttt

SEQ ID NO: 1586351 - DNA, 15 bp, Homo sapiens
aatggccagtcgctt

SEQ ID NO: 1586352 - DNA, 15 bp, Homo sapiens
aaatggccagtcgct

SEQ ID NO: 1586353 - DNA, 15 bp, Homo sapiens
taaatggccagtcgc

SEQ ID NO: 1586354 - DNA, 15 bp, Homo sapiens
gtaaatggccagtcg

SEQ ID NO: 1586355 - DNA, 15 bp, Homo sapiens
cgtaaatggccagtc

SEQ ID NO: 1586356 - DNA, 15 bp, Homo sapiens
gcgtaaatggccagt

SEQ ID NO: 1586357 - DNA, 15 bp, Homo sapiens
ggcgtaaatggccag

SEQ ID NO: 1586358 - DNA, 15 bp, Homo sapiens
tggcgtaaatggcca

SEQ ID NO: 1586359 - DNA, 15 bp, Homo sapiens
gtggcgtaaatggcc

SEQ ID NO: 1586360 - DNA, 15 bp, Homo sapiens
ggtggcgtaaatggc

SEQ ID NO: 1586361 - DNA, 15 bp, Homo sapiens
tggtggcgtaaatgg

SEQ ID NO: 1586362 - DNA, 15 bp, Homo sapiens
gtggtggcgtaaatg

SEQ ID NO: 1586363 - DNA, 15 bp, Homo sapiens
agtggtggcgtaaat

SEQ ID NO: 1586364 - DNA, 15 bp, Homo sapiens
aagtggtggcgtaaa

SEQ ID NO: 1586365 - DNA, 15 bp, Homo sapiens
aaagtggtggcgtaa

SEQ ID NO: 1586366 - DNA, 15 bp, Homo sapiens
taaagtggtggcgta

SEQ ID NO: 1586367 - DNA, 15 bp, Homo sapiens
ttaaagtggtggcgt

SEQ ID NO: 1586368 - DNA, 15 bp, Homo sapiens
tttaaagtggtggcg

SEQ ID NO: 1586369 - DNA, 15 bp, Homo sapiens
gtttaaagtggtggc

SEQ ID NO: 1586370 - DNA, 15 bp, Homo sapiens
tgtttaaagtggtgg

SEQ ID NO: 1586371 - DNA, 15 bp, Homo sapiens
ttgtttaaagtggtg

SEQ ID NO: 1586372 - DNA, 15 bp, Homo sapiens
tttgtttaaagtggt

SEQ ID NO: 1586373 - DNA, 15 bp, Homo sapiens
ctttgtttaaagtgg

SEQ ID NO: 1586374 - DNA, 15 bp, Homo sapiens
tctttgtttaaagtg

SEQ ID NO: 1586375 - DNA, 15 bp, Homo sapiens
atctttgtttaaagt

SEQ ID NO: 1586376 - DNA, 15 bp, Homo sapiens
tatctttgtttaaag

SEQ ID NO: 1586377 - DNA, 15 bp, Homo sapiens
atatctttgtttaaa

SEQ ID NO: 1586378 - DNA, 15 bp, Homo sapiens
aatatctttgtttaa

SEQ ID NO: 1586379 - DNA, 15 bp, Homo sapiens
aaatatctttgttta

SEQ ID NO: 1586380 - DNA, 15 bp, Homo sapiens
caaatatctttgttt

SEQ ID NO: 1586381 - DNA, 15 bp, Homo sapiens
ccaaatatctttgtt

SEQ ID NO: 1586382 - DNA, 15 bp, Homo sapiens
accaaatatctttgt

SEQ ID NO: 1586383 - DNA, 15 bp, Homo sapiens
aaccaaatatctttg

SEQ ID NO: 1586384 - DNA, 15 bp, Homo sapiens
taaccaaatatcttt

SEQ ID NO: 1586385 - DNA, 15 bp, Homo sapiens
ataaccaaatatctt

SEQ ID NO: 1586386 - DNA, 15 bp, Homo sapiens
aataaccaaatatct

SEQ ID NO: 1586387 - DNA, 15 bp, Homo sapiens
gaataaccaaatatc

SEQ ID NO: 1586388 - DNA, 15 bp, Homo sapiens
ggaataaccaaatat

SEQ ID NO: 1586389 - DNA, 15 bp, Homo sapiens
gggaataaccaaata

SEQ ID NO: 1586390 - DNA, 15 bp, Homo sapiens
cgggaataaccaaat

SEQ ID NO: 1586391 - DNA, 15 bp, Homo sapiens
ccgggaataaccaaa

SEQ ID NO: 1586392 - DNA, 15 bp, Homo sapiens
cccgggaataaccaa

SEQ ID NO: 1586393 - DNA, 15 bp, Homo sapiens
tcccgggaataacca

SEQ ID NO: 1586394 - DNA, 15 bp, Homo sapiens
ttcccgggaataacc

SEQ ID NO: 1586395 - DNA, 15 bp, Homo sapiens
cttcccgggaataac

SEQ ID NO: 1586396 - DNA, 15 bp, Homo sapiens
gcttcccgggaataa

SEQ ID NO: 1586397 - DNA, 15 bp, Homo sapiens
tgcttcccgggaata

SEQ ID NO: 1586398 - DNA, 15 bp, Homo sapiens
ttgcttcccgggaat

SEQ ID NO: 1586399 - DNA, 15 bp, Homo sapiens
cttgcttcccgggaa

SEQ ID NO: 1586400 - DNA, 15 bp, Homo sapiens
tcttgcttcccggga

SEQ ID NO: 1586401 - DNA, 15 bp, Homo sapiens
ctcttgcttcccggg

SEQ ID NO: 1586402 - DNA, 15 bp, Homo sapiens
gctcttgcttcccgg

SEQ ID NO: 1586403 - DNA, 15 bp, Homo sapiens
tgctcttgcttcccg

SEQ ID NO: 1586404 - DNA, 15 bp, Homo sapiens
gtgctcttgcttccc

SEQ ID NO: 1586405 - DNA, 15 bp, Homo sapiens
agtgctcttgcttcc

SEQ ID NO: 1586406 - DNA, 15 bp, Homo sapiens
aagtgctcttgcttc

SEQ ID NO: 1586407 - DNA, 15 bp, Homo sapiens
aaagtgctcttgctt

SEQ ID NO: 1586408 - DNA, 15 bp, Homo sapiens
aaaagtgctcttgct

SEQ ID NO: 1586409 - DNA, 15 bp, Homo sapiens
caaaagtgctcttgc

SEQ ID NO: 1586410 - DNA, 15 bp, Homo sapiens
gcaaaagtgctcttg

SEQ ID NO: 1586411 - DNA, 15 bp, Homo sapiens
tgcaaaagtgctctt

SEQ ID NO: 1586412 - DNA, 15 bp, Homo sapiens
atgcaaaagtgctct

SEQ ID NO: 1586413 - DNA, 15 bp, Homo sapiens
catgcaaaagtgctc

SEQ ID NO: 1586414 - DNA, 15 bp, Homo sapiens
ccatgcaaaagtgct

SEQ ID NO: 1586415 - DNA, 15 bp, Homo sapiens
gccatgcaaaagtgc

SEQ ID NO: 1586416 - DNA, 15 bp, Homo sapiens
agccatgcaaaagtg

SEQ ID NO: 1586417 - DNA, 15 bp, Homo sapiens
cagccatgcaaaagt

SEQ ID NO: 1586418 - DNA, 15 bp, Homo sapiens
tcagccatgcaaaag

SEQ ID NO: 1586419 - DNA, 15 bp, Homo sapiens
ctcagccatgcaaaa

SEQ ID NO: 1586420 - DNA, 15 bp, Homo sapiens
gctcagccatgcaaa

SEQ ID NO: 1586421 - DNA, 15 bp, Homo sapiens
agctcagccatgcaa

SEQ ID NO: 1586422 - DNA, 15 bp, Homo sapiens
cagctcagccatgca

SEQ ID NO: 1586423 - DNA, 15 bp, Homo sapiens
gcagctcagccatgc

SEQ ID NO: 1586424 - DNA, 15 bp, Homo sapiens
cgcagctcagccatg

SEQ ID NO: 1586425 - DNA, 15 bp, Homo sapiens
ccgcagctcagccat

SEQ ID NO: 1586426 - DNA, 15 bp, Homo sapiens
cccgcagctcagcca

SEQ ID NO: 1586427 - DNA, 15 bp, Homo sapiens
gcccgcagctcagcc

SEQ ID NO: 1586428 - DNA, 15 bp, Homo sapiens
cgcccgcagctcagc

SEQ ID NO: 1586429 - DNA, 15 bp, Homo sapiens
ccgcccgcagctcag

SEQ ID NO: 1586430 - DNA, 15 bp, Homo sapiens
tccgcccgcagctca

SEQ ID NO: 1586431 - DNA, 15 bp, Homo sapiens
ctccgcccgcagctc

SEQ ID NO: 1586432 - DNA, 15 bp, Homo sapiens
cctccgcccgcagct

SEQ ID NO: 1586433 - DNA, 15 bp, Homo sapiens
gcctccgcccgcagc

SEQ ID NO: 1586434 - DNA, 15 bp, Homo sapiens
cgcctccgcccgcag

SEQ ID NO: 1586435 - DNA, 15 bp, Homo sapiens
tcgcctccgcccgca

SEQ ID NO: 1586436 - DNA, 15 bp, Homo sapiens
ctcgcctccgcccgc

SEQ ID NO: 1586437 - DNA, 15 bp, Homo sapiens
gctcgcctccgcccg

SEQ ID NO: 1586438 - DNA, 15 bp, Homo sapiens
ggctcgcctccgccc

SEQ ID NO: 1586439 - DNA, 15 bp, Homo sapiens
aggctcgcctccgcc

SEQ ID NO: 1586440 - DNA, 15 bp, Homo sapiens
gaggctcgcctccgc

SEQ ID NO: 1586441 - DNA, 15 bp, Homo sapiens
cgaggctcgcctccg

SEQ ID NO: 1586442 - DNA, 15 bp, Homo sapiens
ccgaggctcgcctcc

SEQ ID NO: 1586443 - DNA, 15 bp, Homo sapiens
gccgaggctcgcctc

SEQ ID NO: 1586444 - DNA, 15 bp, Homo sapiens
ggccgaggctcgcct

SEQ ID NO: 1586445 - DNA, 15 bp, Homo sapiens
gggccgaggctcgcc

SEQ ID NO: 1586446 - DNA, 15 bp, Homo sapiens
tgggccgaggctcgc

SEQ ID NO: 1586447 - DNA, 15 bp, Homo sapiens
ctgggccgaggctcg

SEQ ID NO: 1586448 - DNA, 15 bp, Homo sapiens
gctgggccgaggctc

SEQ ID NO: 1586449 - DNA, 15 bp, Homo sapiens
ggctgggccgaggct

SEQ ID NO: 1586450 - DNA, 15 bp, Homo sapiens
aggctgggccgaggc

SEQ ID NO: 1586451 - DNA, 15 bp, Homo sapiens
gaggctgggccgagg

SEQ ID NO: 1586452 - DNA, 15 bp, Homo sapiens
ggaggctgggccgag

SEQ ID NO: 1586453 - DNA, 15 bp, Homo sapiens
gggaggctgggccga

SEQ ID NO: 1586454 - DNA, 15 bp, Homo sapiens
cgggaggctgggccg

SEQ ID NO: 1586455 - DNA, 15 bp, Homo sapiens
gcgggaggctgggcc

SEQ ID NO: 1586456 - DNA, 15 bp, Homo sapiens
ggcgggaggctgggc

SEQ ID NO: 1586457 - DNA, 15 bp, Homo sapiens
gggcgggaggctggg

SEQ ID NO: 1586458 - DNA, 15 bp, Homo sapiens
cgggcgggaggctgg

SEQ ID NO: 1586459 - DNA, 15 bp, Homo sapiens
gcgggcgggaggctg

SEQ ID NO: 1586460 - DNA, 15 bp, Homo sapiens
agcgggcgggaggct

SEQ ID NO: 1586461 - DNA, 15 bp, Homo sapiens
cagcgggcgggaggc

SEQ ID NO: 1586462 - DNA, 15 bp, Homo sapiens
tcagcgggcgggagg

SEQ ID NO: 1586463 - DNA, 15 bp, Homo sapiens
ctcagcgggcgggag

SEQ ID NO: 1586464 - DNA, 15 bp, Homo sapiens
gctcagcgggcggga

SEQ ID NO: 1586465 - DNA, 15 bp, Homo sapiens
agctcagcgggcggg

SEQ ID NO: 1586466 - DNA, 15 bp, Homo sapiens
cagctcagcgggcgg

SEQ ID NO: 1586467 - DNA, 15 bp, Homo sapiens
gcagctcagcgggcg

SEQ ID NO: 1586468 - DNA, 15 bp, Homo sapiens
ggcagctcagcgggc

SEQ ID NO: 1586469 - DNA, 15 bp, Homo sapiens
gggcagctcagcggg

SEQ ID NO: 1586470 - DNA, 15 bp, Homo sapiens
cgggcagctcagcgg

SEQ ID NO: 1586471 - DNA, 15 bp, Homo sapiens
gcgggcagctcagcg

SEQ ID NO: 1586472 - DNA, 15 bp, Homo sapiens
tgcgggcagctcagc

SEQ ID NO: 1586473 - DNA, 15 bp, Homo sapiens
gtgcgggcagctcag

SEQ ID NO: 1586474 - DNA, 15 bp, Homo sapiens
ggtgcgggcagctca

SEQ ID NO: 1586475 - DNA, 15 bp, Homo sapiens
aggtgcgggcagctc

SEQ ID NO: 1586476 - DNA, 15 bp, Homo sapiens
gaggtgcgggcagct

SEQ ID NO: 1586477 - DNA, 15 bp, Homo sapiens
cgaggtgcgggcagc

SEQ ID NO: 1586478 - DNA, 15 bp, Homo sapiens
ccgaggtgcgggcag

SEQ ID NO: 1586479 - DNA, 15 bp, Homo sapiens
gccgaggtgcgggca

SEQ ID NO: 1586480 - DNA, 15 bp, Homo sapiens
tgccgaggtgcgggc

SEQ ID NO: 1586481 - DNA, 15 bp, Homo sapiens
atgccgaggtgcggg

SEQ ID NO: 1586482 - DNA, 15 bp, Homo sapiens
aatgccgaggtgcgg

SEQ ID NO: 1586483 - DNA, 15 bp, Homo sapiens
gaatgccgaggtgcg

SEQ ID NO: 1586484 - DNA, 15 bp, Homo sapiens
cgaatgccgaggtgc

SEQ ID NO: 1586485 - DNA, 15 bp, Homo sapiens
gcgaatgccgaggtg

SEQ ID NO: 1586486 - DNA, 15 bp, Homo sapiens
ggcgaatgccgaggt

SEQ ID NO: 1586487 - DNA, 15 bp, Homo sapiens
gggcgaatgccgagg

SEQ ID NO: 1586488 - DNA, 15 bp, Homo sapiens
ggggcgaatgccgag

SEQ ID NO: 1586489 - DNA, 15 bp, Homo sapiens
gggggcgaatgccga

SEQ ID NO: 1586490 - DNA, 15 bp, Homo sapiens
agggggcgaatgccg

SEQ ID NO: 1586491 - DNA, 15 bp, Homo sapiens
gagggggcgaatgcc

SEQ ID NO: 1586492 - DNA, 15 bp, Homo sapiens
ggagggggcgaatgc

SEQ ID NO: 1586493 - DNA, 15 bp, Homo sapiens
aggagggggcgaatg

SEQ ID NO: 1586494 - DNA, 15 bp, Homo sapiens
caggagggggcgaat

SEQ ID NO: 1586495 - DNA, 15 bp, Homo sapiens
ccaggagggggcgaa

SEQ ID NO: 1586496 - DNA, 15 bp, Homo sapiens
gccaggagggggcga

SEQ ID NO: 1586497 - DNA, 15 bp, Homo sapiens
ggccaggagggggcg

SEQ ID NO: 1586498 - DNA, 15 bp, Homo sapiens
tggccaggagggggc

SEQ ID NO: 1586499 - DNA, 15 bp, Homo sapiens
ctggccaggaggggg

SEQ ID NO: 1586500 - DNA, 15 bp, Homo sapiens
cgctggccaggaggg

SEQ ID NO: 1586501 - DNA, 15 bp, Homo sapiens
gcgctggccaggagg

SEQ ID NO: 1586502 - DNA, 15 bp, Homo sapiens
agcgctggccaggag

SEQ ID NO: 1586503 - DNA, 15 bp, Homo sapiens
gagcgctggccagga

SEQ ID NO: 1586504 - DNA, 15 bp, Homo sapiens
ggagcgctggccagg

SEQ ID NO: 1586505 - DNA, 15 bp, Homo sapiens
tggagcgctggccag

SEQ ID NO: 1586506 - DNA, 15 bp, Homo sapiens
ctggagcgctggcca

SEQ ID NO: 1586507 - DNA, 15 bp, Homo sapiens
gctggagcgctggcc

SEQ ID NO: 1586508 - DNA, 15 bp, Homo sapiens
ggctggagcgctggc

SEQ ID NO: 1586509 - DNA, 15 bp, Homo sapiens
cggctggagcgctgg

SEQ ID NO: 1586510 - DNA, 15 bp, Homo sapiens
gcggctggagcgctg

SEQ ID NO: 1586511 - DNA, 15 bp, Homo sapiens
ggcggctggagcgct

SEQ ID NO: 1586512 - DNA, 15 bp, Homo sapiens
cggcggctggagcgc

SEQ ID NO: 1586513 - DNA, 15 bp, Homo sapiens
ccggcggctggagcg

SEQ ID NO: 1586514 - DNA, 15 bp, Homo sapiens
cccggcggctggagc

SEQ ID NO: 1586515 - DNA, 15 bp, Homo sapiens
ccccggcggctggag

SEQ ID NO: 1586516 - DNA, 15 bp, Homo sapiens
accccggcggctgga

SEQ ID NO: 1586517 - DNA, 15 bp, Homo sapiens
aaccccggcggctgg

SEQ ID NO: 1586518 - DNA, 15 bp, Homo sapiens
gaaccccggcggctg

SEQ ID NO: 1586519 - DNA, 15 bp, Homo sapiens
tgaaccccggcggct

SEQ ID NO: 1586520 - DNA, 15 bp, Homo sapiens
ctgaaccccggcggc

SEQ ID NO: 1586521 - DNA, 15 bp, Homo sapiens
cctgaaccccggcgg

SEQ ID NO: 1586522 - DNA, 15 bp, Homo sapiens
gcctgaaccccggcg

SEQ ID NO: 1586523 - DNA, 15 bp, Homo sapiens
agcctgaaccccggc

SEQ ID NO: 1586524 - DNA, 15 bp, Homo sapiens
gagcctgaaccccgg

SEQ ID NO: 1586525 - DNA, 15 bp, Homo sapiens
tgagcctgaaccccg

SEQ ID NO: 1586526 - DNA, 15 bp, Homo sapiens
ctgagcctgaacccc

SEQ ID NO: 1586527 - DNA, 15 bp, Homo sapiens
actgagcctgaaccc

SEQ ID NO: 1586528 - DNA, 15 bp, Homo sapiens
aactgagcctgaacc

SEQ ID NO: 1586529 - DNA, 15 bp, Homo sapiens
gaactgagcctgaac

SEQ ID NO: 1586530 - DNA, 15 bp, Homo sapiens
ggaactgagcctgaa

SEQ ID NO: 1586531 - DNA, 15 bp, Homo sapiens
cggaactgagcctga

SEQ ID NO: 1586532 - DNA, 15 bp, Homo sapiens
gcggaactgagcctg

SEQ ID NO: 1586533 - DNA, 15 bp, Homo sapiens
ggcggaactgagcct

SEQ ID NO: 1586534 - DNA, 15 bp, Homo sapiens
gggcggaactgagcc

SEQ ID NO: 1586535 - DNA, 15 bp, Homo sapiens
cgggcggaactgagc

SEQ ID NO: 1586536 - DNA, 15 bp, Homo sapiens
ccgggcggaactgag

SEQ ID NO: 1586537 - DNA, 15 bp, Homo sapiens
gccgggcggaactga

SEQ ID NO: 1586538 - DNA, 15 bp, Homo sapiens
tgccgggcggaactg

SEQ ID NO: 1586539 - DNA, 15 bp, Homo sapiens
ttgccgggcggaact

SEQ ID NO: 1586540 - DNA, 15 bp, Homo sapiens
gttgccgggcggaac

SEQ ID NO: 1586541 - DNA, 15 bp, Homo sapiens
tgttgccgggcggaa

SEQ ID NO: 1586542 - DNA, 15 bp, Homo sapiens
ctgttgccgggcgga

SEQ ID NO: 1586543 - DNA, 15 bp, Homo sapiens
tctgttgccgggcgg

SEQ ID NO: 1586544 - DNA, 15 bp, Homo sapiens
gtctgttgccgggcg

SEQ ID NO: 1586545 - DNA, 15 bp, Homo sapiens
tgtctgttgccgggc

SEQ ID NO: 1586546 - DNA, 15 bp, Homo sapiens
ctgtctgttgccggg

SEQ ID NO: 1586547 - DNA, 15 bp, Homo sapiens
tctgtctgttgccgg

SEQ ID NO: 1586548 - DNA, 15 bp, Homo sapiens
gtctgtctgttgccg

SEQ ID NO: 1586549 - DNA, 15 bp, Homo sapiens
cgtctgtctgttgcc

SEQ ID NO: 1586550 - DNA, 15 bp, Homo sapiens
ccgtctgtctgttgc

SEQ ID NO: 1586551 - DNA, 15 bp, Homo sapiens
cccgtctgtctgttg

SEQ ID NO: 1586552 - DNA, 15 bp, Homo sapiens
gcccgtctgtctgtt

SEQ ID NO: 1586553 - DNA, 15 bp, Homo sapiens
tgcccgtctgtctgt

SEQ ID NO: 1586554 - DNA, 15 bp, Homo sapiens
gtgcccgtctgtctg

SEQ ID NO: 1586555 - DNA, 15 bp, Homo sapiens
agtgcccgtctgtct

SEQ ID NO: 1586556 - DNA, 15 bp, Homo sapiens
gagtgcccgtctgtc

SEQ ID NO: 1586557 - DNA, 15 bp, Homo sapiens
tgagtgcccgtctgt

SEQ ID NO: 1586558 - DNA, 15 bp, Homo sapiens
gtgagtgcccgtctg

SEQ ID NO: 1586559 - DNA, 15 bp, Homo sapiens
cgtgagtgcccgtct

SEQ ID NO: 1586560 - DNA, 15 bp, Homo sapiens
gcgtgagtgcccgtc

SEQ ID NO: 1586561 - DNA, 15 bp, Homo sapiens
ggcgtgagtgcccgt

SEQ ID NO: 1586562 - DNA, 15 bp, Homo sapiens
cggcgtgagtgcccg

SEQ ID NO: 1586563 - DNA, 15 bp, Homo sapiens
gcggcgtgagtgccc

SEQ ID NO: 1586564 - DNA, 15 bp, Homo sapiens
agcggcgtgagtgcc

SEQ ID NO: 1586565 - DNA, 15 bp, Homo sapiens
gagcggcgtgagtgc

SEQ ID NO: 1586566 - DNA, 15 bp, Homo sapiens
ggagcggcgtgagtg

SEQ ID NO: 1586567 - DNA, 15 bp, Homo sapiens
gggagcggcgtgagt

SEQ ID NO: 1586568 - DNA, 15 bp, Homo sapiens
agggagcggcgtgag

SEQ ID NO: 1586569 - DNA, 15 bp, Homo sapiens
cagggagcggcgtga

SEQ ID NO: 1586570 - DNA, 15 bp, Homo sapiens
gcagggagcggcgtg

SEQ ID NO: 1586571 - DNA, 15 bp, Homo sapiens
agcagggagcggcgt

SEQ ID NO: 1586572 - DNA, 15 bp, Homo sapiens
gagcagggagcggcg

SEQ ID NO: 1586573 - DNA, 15 bp, Homo sapiens
cgagcagggagcggc

SEQ ID NO: 1586574 - DNA, 15 bp, Homo sapiens
gcgagcagggagcgg

SEQ ID NO: 1586575 - DNA, 15 bp, Homo sapiens
cgcgagcagggagcg

SEQ ID NO: 1586576 - DNA, 15 bp, Homo sapiens
gcgcgagcagggagc

SEQ ID NO: 1586577 - DNA, 15 bp, Homo sapiens
cgcgcgagcagggag

SEQ ID NO: 1586578 - DNA, 15 bp, Homo sapiens
gcgcgcgagcaggga

SEQ ID NO: 1586579 - DNA, 15 bp, Homo sapiens
agcgcgcgagcaggg

SEQ ID NO: 1586580 - DNA, 15 bp, Homo sapiens
gagcgcgcgagcagg

SEQ ID NO: 1586581 - DNA, 15 bp, Homo sapiens
ggagcgcgcgagcag

SEQ ID NO: 1586582 - DNA, 15 bp, Homo sapiens
gggagcgcgcgagca

SEQ ID NO: 1586583 - DNA, 15 bp, Homo sapiens
agggagcgcgcgagc

SEQ ID NO: 1586584 - DNA, 15 bp, Homo sapiens
cagggagcgcgcgag

SEQ ID NO: 1586585 - DNA, 15 bp, Homo sapiens
tcagggagcgcgcga

SEQ ID NO: 1586586 - DNA, 15 bp, Homo sapiens
ttcagggagcgcgcg

SEQ ID NO: 1586587 - DNA, 15 bp, Homo sapiens
cttcagggagcgcgc

SEQ ID NO: 1586588 - DNA, 15 bp, Homo sapiens
gcttcagggagcgcg

SEQ ID NO: 1586589 - DNA, 15 bp, Homo sapiens
tgcttcagggagcgc

SEQ ID NO: 1586590 - DNA, 15 bp, Homo sapiens
atgcttcagggagcg

SEQ ID NO: 1586591 - DNA, 15 bp, Homo sapiens
gatgcttcagggagc

SEQ ID NO: 1586592 - DNA, 15 bp, Homo sapiens
tgatgcttcagggag

SEQ ID NO: 1586593 - DNA, 15 bp, Homo sapiens
ctgatgcttcaggga

SEQ ID NO: 1586594 - DNA, 15 bp, Homo sapiens
tctgatgcttcaggg

SEQ ID NO: 1586595 - DNA, 15 bp, Homo sapiens
ctctgatgcttcagg

SEQ ID NO: 1586596 - DNA, 15 bp, Homo sapiens
cctctgatgcttcag

SEQ ID NO: 1586597 - DNA, 15 bp, Homo sapiens
ccctctgatgcttca

SEQ ID NO: 1586598 - DNA, 15 bp, Homo sapiens
cccctctgatgcttc

SEQ ID NO: 1586599 - DNA, 15 bp, Homo sapiens
tcccctctgatgctt

SEQ ID NO: 1586600 - DNA, 15 bp, Homo sapiens
ttcccctctgatgct

SEQ ID NO: 1586601 - DNA, 15 bp, Homo sapiens
tttcccctctgatgc

SEQ ID NO: 1586602 - DNA, 15 bp, Homo sapiens
ttttcccctctgatg

SEQ ID NO: 1586603 - DNA, 15 bp, Homo sapiens
gttttcccctctgat

SEQ ID NO: 1586604 - DNA, 15 bp, Homo sapiens
tgttttcccctctga

SEQ ID NO: 1586605 - DNA, 15 bp, Homo sapiens
ctgttttcccctctg

SEQ ID NO: 1586606 - DNA, 15 bp, Homo sapiens
gctgttttcccctct

SEQ ID NO: 1586607 - DNA, 15 bp, Homo sapiens
cgctgttttcccctc

SEQ ID NO: 1586608 - DNA, 15 bp, Homo sapiens
acgctgttttcccct

SEQ ID NO: 1586609 - DNA, 15 bp, Homo sapiens
cacgctgttttcccc

SEQ ID NO: 1586610 - DNA, 15 bp, Homo sapiens
ccacgctgttttccc

SEQ ID NO: 1586611 - DNA, 15 bp, Homo sapiens
gccacgctgttttcc

SEQ ID NO: 1586612 - DNA, 15 bp, Homo sapiens
agccacgctgttttc

SEQ ID NO: 1586613 - DNA, 15 bp, Homo sapiens
gagccacgctgtttt

SEQ ID NO: 1586614 - DNA, 15 bp, Homo sapiens
agagccacgctgttt

SEQ ID NO: 1586615 - DNA, 15 bp, Homo sapiens
cagagccacgctgtt

SEQ ID NO: 1586616 - DNA, 15 bp, Homo sapiens
ccagagccacgctgt

SEQ ID NO: 1586617 - DNA, 15 bp, Homo sapiens
cccagagccacgctg

SEQ ID NO: 1586618 - DNA, 15 bp, Homo sapiens
gcccagagccacgct

SEQ ID NO: 1586619 - DNA, 15 bp, Homo sapiens
agcccagagccacgc

SEQ ID NO: 1586620 - DNA, 15 bp, Homo sapiens
gagcccagagccacg

SEQ ID NO: 1586621 - DNA, 15 bp, Homo sapiens
cgagcccagagccac

SEQ ID NO: 1586622 - DNA, 15 bp, Homo sapiens
ccgagcccagagcca

SEQ ID NO: 1586623 - DNA, 15 bp, Homo sapiens
cccgagcccagagcc

SEQ ID NO: 1586624 - DNA, 15 bp, Homo sapiens
acccgagcccagagc

SEQ ID NO: 1586625 - DNA, 15 bp, Homo sapiens
cacccgagcccagag

SEQ ID NO: 1586626 - DNA, 15 bp, Homo sapiens
gcacccgagcccaga

SEQ ID NO: 1586627 - DNA, 15 bp, Homo sapiens
agcacccgagcccag

SEQ ID NO: 1586628 - DNA, 15 bp, Homo sapiens
cagcacccgagccca

SEQ ID NO: 1586629 - DNA, 15 bp, Homo sapiens
ccagcacccgagccc

SEQ ID NO: 1586630 - DNA, 15 bp, Homo sapiens
cccagcacccgagcc

SEQ ID NO: 1586631 - DNA, 15 bp, Homo sapiens
ccccagcacccgagc

SEQ ID NO: 1586632 - DNA, 15 bp, Homo sapiens
gccccagcacccgag

SEQ ID NO: 1586633 - DNA, 15 bp, Homo sapiens
agccccagcacccga

SEQ ID NO: 1586634 - DNA, 15 bp, Homo sapiens
cagccccagcacccg

SEQ ID NO: 1586635 - DNA, 15 bp, Homo sapiens
acagccccagcaccc

SEQ ID NO: 1586636 - DNA, 15 bp, Homo sapiens
cacagccccagcacc

SEQ ID NO: 1586637 - DNA, 15 bp, Homo sapiens
tcacagccccagcac

SEQ ID NO: 1586638 - DNA, 15 bp, Homo sapiens
atcacagccccagca

SEQ ID NO: 1586639 - DNA, 15 bp, Homo sapiens
catcacagccccagc

SEQ ID NO: 1586640 - DNA, 15 bp, Homo sapiens
acatcacagccccag

SEQ ID NO: 1586641 - DNA, 15 bp, Homo sapiens
gacatcacagcccca

SEQ ID NO: 1586642 - DNA, 15 bp, Homo sapiens
ggacatcacagcccc

SEQ ID NO: 1586643 - DNA, 15 bp, Homo sapiens
aggacatcacagccc

SEQ ID NO: 1586644 - DNA, 15 bp, Homo sapiens
gaggacatcacagcc

SEQ ID NO: 1586645 - DNA, 15 bp, Homo sapiens
cgaggacatcacagc

SEQ ID NO: 1586646 - DNA, 15 bp, Homo sapiens
ccgaggacatcacag

SEQ ID NO: 1586647 - DNA, 15 bp, Homo sapiens
tccgaggacatcaca

SEQ ID NO: 1586648 - DNA, 15 bp, Homo sapiens
ttccgaggacatcac

SEQ ID NO: 1586649 - DNA, 15 bp, Homo sapiens
tttccgaggacatca

SEQ ID NO: 1586650 - DNA, 15 bp, Homo sapiens
ctttccgaggacatc

SEQ ID NO: 1586651 - DNA, 15 bp, Homo sapiens
actttccgaggacat

SEQ ID NO: 1586652 - DNA, 15 bp, Homo sapiens
gactttccgaggaca

SEQ ID NO: 1586653 - DNA, 15 bp, Homo sapiens
tgactttccgaggac

SEQ ID NO: 1586654 - DNA, 15 bp, Homo sapiens
ctgactttccgagga

SEQ ID NO: 1586655 - DNA, 15 bp, Homo sapiens
gctgactttccgagg

SEQ ID NO: 1586656 - DNA, 15 bp, Homo sapiens
agctgactttccgag

SEQ ID NO: 1586657 - DNA, 15 bp, Homo sapiens
gagctgactttccga

SEQ ID NO: 1586658 - DNA, 15 bp, Homo sapiens
ggagctgactttccg

SEQ ID NO: 1586659 - DNA, 15 bp, Homo sapiens
tggagctgactttcc

SEQ ID NO: 1586660 - DNA, 15 bp, Homo sapiens
ctggagctgactttc

SEQ ID NO: 1586661 - DNA, 15 bp, Homo sapiens
gctggagctgacttt

SEQ ID NO: 1586662 - DNA, 15 bp, Homo sapiens
ggctggagctgactt

SEQ ID NO: 1586663 - DNA, 15 bp, Homo sapiens
gggctggagctgact

SEQ ID NO: 1586664 - DNA, 15 bp, Homo sapiens
ggggctggagctgac

SEQ ID NO: 1586665 - DNA, 15 bp, Homo sapiens
tggggctggagctga

SEQ ID NO: 1586666 - DNA, 15 bp, Homo sapiens
ctggggctggagctg

SEQ ID NO: 1586667 - DNA, 15 bp, Homo sapiens
tctggggctggagct

SEQ ID NO: 1586668 - DNA, 15 bp, Homo sapiens
atctggggctggagc

SEQ ID NO: 1586669 - DNA, 15 bp, Homo sapiens
gatctggggctggag

SEQ ID NO: 1586670 - DNA, 15 bp, Homo sapiens
ggatctggggctgga

SEQ ID NO: 1586671 - DNA, 15 bp, Homo sapiens
gggatctggggctgg

SEQ ID NO: 1586672 - DNA, 15 bp, Homo sapiens
ggggatctggggctg

SEQ ID NO: 1586673 - DNA, 15 bp, Homo sapiens
cggggatctggggct

SEQ ID NO: 1586674 - DNA, 15 bp, Homo sapiens
gcggggatctggggc

SEQ ID NO: 1586675 - DNA, 15 bp, Homo sapiens
cgcggggatctgggg

SEQ ID NO: 1586676 - DNA, 15 bp, Homo sapiens
acgcggggatctggg

SEQ ID NO: 1586677 - DNA, 15 bp, Homo sapiens
cacgcggggatctgg

SEQ ID NO: 1586678 - DNA, 15 bp, Homo sapiens
acacgcggggatctg

SEQ ID NO: 1586679 - DNA, 15 bp, Homo sapiens
gacacgcggggatct

SEQ ID NO: 1586680 - DNA, 15 bp, Homo sapiens
agacacgcggggatc

SEQ ID NO: 1586681 - DNA, 15 bp, Homo sapiens
cagacacgcggggat

SEQ ID NO: 1586682 - DNA, 15 bp, Homo sapiens
ccagacacgcgggga

SEQ ID NO: 1586683 - DNA, 15 bp, Homo sapiens
cccagacacgcgggg

SEQ ID NO: 1586684 - DNA, 15 bp, Homo sapiens
tcccagacacgcggg

SEQ ID NO: 1586685 - DNA, 15 bp, Homo sapiens
ctcccagacacgcgg

SEQ ID NO: 1586686 - DNA, 15 bp, Homo sapiens
tctcccagacacgcg

SEQ ID NO: 1586687 - DNA, 15 bp, Homo sapiens
atctcccagacacgc

SEQ ID NO: 1586688 - DNA, 15 bp, Homo sapiens
catctcccagacacg

SEQ ID NO: 1586689 - DNA, 15 bp, Homo sapiens
ccatctcccagacac

SEQ ID NO: 1586690 - DNA, 15 bp, Homo sapiens
cccatctcccagaca

SEQ ID NO: 1586691 - DNA, 15 bp, Homo sapiens
gcccatctcccagac

SEQ ID NO: 1586692 - DNA, 15 bp, Homo sapiens
cgcccatctcccaga

SEQ ID NO: 1586693 - DNA, 15 bp, Homo sapiens
tcgcccatctcccag

SEQ ID NO: 1586694 - DNA, 15 bp, Homo sapiens
ctcgcccatctccca

SEQ ID NO: 1586695 - DNA, 15 bp, Homo sapiens
cctcgcccatctccc

SEQ ID NO: 1586696 - DNA, 15 bp, Homo sapiens
ccctcgcccatctcc

SEQ ID NO: 1586697 - DNA, 15 bp, Homo sapiens
accctcgcccatctc

SEQ ID NO: 1586698 - DNA, 15 bp, Homo sapiens
gaccctcgcccatct

SEQ ID NO: 1586699 - DNA, 15 bp, Homo sapiens
tgaccctcgcccatc

SEQ ID NO: 1586700 - DNA, 15 bp, Homo sapiens
ctgaccctcgcccat

SEQ ID NO: 1586701 - DNA, 15 bp, Homo sapiens
cctgaccctcgccca

SEQ ID NO: 1586702 - DNA, 15 bp, Homo sapiens
ccctgaccctcgccc

SEQ ID NO: 1586703 - DNA, 15 bp, Homo sapiens
tccctgaccctcgcc

SEQ ID NO: 1586704 - DNA, 15 bp, Homo sapiens
gtccctgaccctcgc

SEQ ID NO: 1586705 - DNA, 15 bp, Homo sapiens
tgtccctgaccctcg

SEQ ID NO: 1586706 - DNA, 15 bp, Homo sapiens
gtgtccctgaccctc

SEQ ID NO: 1586707 - DNA, 15 bp, Homo sapiens
ggtgtccctgaccct

SEQ ID NO: 1586708 - DNA, 15 bp, Homo sapiens
tggtgtccctgaccc

SEQ ID NO: 1586709 - DNA, 15 bp, Homo sapiens
ctggtgtccctgacc

SEQ ID NO: 1586710 - DNA, 15 bp, Homo sapiens
cctggtgtccctgac

SEQ ID NO: 1586711 - DNA, 15 bp, Homo sapiens
acctggtgtccctga

SEQ ID NO: 1586712 - DNA, 15 bp, Homo sapiens
aacctggtgtccctg

SEQ ID NO: 1586713 - DNA, 15 bp, Homo sapiens
aaacctggtgtccct

SEQ ID NO: 1586714 - DNA, 15 bp, Homo sapiens
caaacctggtgtccc

SEQ ID NO: 1586715 - DNA, 15 bp, Homo sapiens
acaaacctggtgtcc

SEQ ID NO: 1586716 - DNA, 15 bp, Homo sapiens
aacaaacctggtgtc

SEQ ID NO: 1586717 - DNA, 15 bp, Homo sapiens
gaacaaacctggtgt

SEQ ID NO: 1586718 - DNA, 15 bp, Homo sapiens
cgaacaaacctggtg

SEQ ID NO: 1586719 - DNA, 15 bp, Homo sapiens
tcgaacaaacctggt

SEQ ID NO: 1586720 - DNA, 15 bp, Homo sapiens
ctcgaacaaacctgg

SEQ ID NO: 1586721 - DNA, 15 bp, Homo sapiens
cctcgaacaaacctg

SEQ ID NO: 1586722 - DNA, 15 bp, Homo sapiens
acctcgaacaaacct

SEQ ID NO: 1586723 - DNA, 15 bp, Homo sapiens
cacctcgaacaaacc

SEQ ID NO: 1586724 - DNA, 15 bp, Homo sapiens
ccacctcgaacaaac

SEQ ID NO: 1586725 - DNA, 15 bp, Homo sapiens
cccacctcgaacaaa

SEQ ID NO: 1586726 - DNA, 15 bp, Homo sapiens
ccccacctcgaacaa

SEQ ID NO: 1586727 - DNA, 15 bp, Homo sapiens
gccccacctcgaaca

SEQ ID NO: 1586728 - DNA, 15 bp, Homo sapiens
tgccccacctcgaac

SEQ ID NO: 1586729 - DNA, 15 bp, Homo sapiens
ttgccccacctcgaa

SEQ ID NO: 1586730 - DNA, 15 bp, Homo sapiens
gttgccccacctcga

SEQ ID NO: 1586731 - DNA, 15 bp, Homo sapiens
agttgccccacctcg

SEQ ID NO: 1586732 - DNA, 15 bp, Homo sapiens
aagttgccccacctc

SEQ ID NO: 1586733 - DNA, 15 bp, Homo sapiens
gaagttgccccacct

SEQ ID NO: 1586734 - DNA, 15 bp, Homo sapiens
tgaagttgccccacc

SEQ ID NO: 1586735 - DNA, 15 bp, Homo sapiens
ctgaagttgccccac

SEQ ID NO: 1586736 - DNA, 15 bp, Homo sapiens
actgaagttgcccca

SEQ ID NO: 1586737 - DNA, 15 bp, Homo sapiens
cactgaagttgcccc

SEQ ID NO: 1586738 - DNA, 15 bp, Homo sapiens
tcactgaagttgccc

SEQ ID NO: 1586739 - DNA, 15 bp, Homo sapiens
gtcactgaagttgcc

SEQ ID NO: 1586740 - DNA, 15 bp, Homo sapiens
cgtcactgaagttgc

SEQ ID NO: 1586741 - DNA, 15 bp, Homo sapiens
ccgtcactgaagttg

SEQ ID NO: 1586742 - DNA, 15 bp, Homo sapiens
tccgtcactgaagtt

SEQ ID NO: 1586743 - DNA, 15 bp, Homo sapiens
gtccgtcactgaagt

SEQ ID NO: 1586744 - DNA, 15 bp, Homo sapiens
ggtccgtcactgaag

SEQ ID NO: 1586745 - DNA, 15 bp, Homo sapiens
gggtccgtcactgaa

SEQ ID NO: 1586746 - DNA, 15 bp, Homo sapiens
agggtccgtcactga

SEQ ID NO: 1586747 - DNA, 15 bp, Homo sapiens
gagggtccgtcactg

SEQ ID NO: 1586748 - DNA, 15 bp, Homo sapiens
ggagggtccgtcact

SEQ ID NO: 1586749 - DNA, 15 bp, Homo sapiens
gggagggtccgtcac

SEQ ID NO: 1586750 - DNA, 15 bp, Homo sapiens
cgggagggtccgtca

SEQ ID NO: 1586751 - DNA, 15 bp, Homo sapiens
acgggagggtccgtc

SEQ ID NO: 1586752 - DNA, 15 bp, Homo sapiens
cacgggagggtccgt

SEQ ID NO: 1586753 - DNA, 15 bp, Homo sapiens
tcacgggagggtccg

SEQ ID NO: 1586754 - DNA, 15 bp, Homo sapiens
ctcacgggagggtcc

SEQ ID NO: 1586755 - DNA, 15 bp, Homo sapiens
tctcacgggagggtc

SEQ ID NO: 1586756 - DNA, 15 bp, Homo sapiens
gtctcacgggagggt

SEQ ID NO: 1586757 - DNA, 15 bp, Homo sapiens
ggtctcacgggaggg

SEQ ID NO: 1586758 - DNA, 15 bp, Homo sapiens
gggtctcacgggagg

SEQ ID NO: 1586759 - DNA, 15 bp, Homo sapiens
ggggtctcacgggag

SEQ ID NO: 1586760 - DNA, 15 bp, Homo sapiens
aggggtctcacggga

SEQ ID NO: 1586761 - DNA, 15 bp, Homo sapiens
aaggggtctcacggg

SEQ ID NO: 1586762 - DNA, 15 bp, Homo sapiens
gaaggggtctcacgg

SEQ ID NO: 1586763 - DNA, 15 bp, Homo sapiens
ggaaggggtctcacg

SEQ ID NO: 1586764 - DNA, 15 bp, Homo sapiens
gggaaggggtctcac

SEQ ID NO: 1586765 - DNA, 15 bp, Homo sapiens
tgggaaggggtctca

SEQ ID NO: 1586766 - DNA, 15 bp, Homo sapiens
atgggaaggggtctc

SEQ ID NO: 1586767 - DNA, 15 bp, Homo sapiens
gatgggaaggggtct

SEQ ID NO: 1586768 - DNA, 15 bp, Homo sapiens
ggatgggaaggggtc

SEQ ID NO: 1586769 - DNA, 15 bp, Homo sapiens
aggatgggaaggggt

SEQ ID NO: 1586770 - DNA, 15 bp, Homo sapiens
gaggatgggaagggg

SEQ ID NO: 1586771 - DNA, 15 bp, Homo sapiens
ggaggatgggaaggg

SEQ ID NO: 1586772 - DNA, 15 bp, Homo sapiens
gggaggatgggaagg

SEQ ID NO: 1586773 - DNA, 15 bp, Homo sapiens
tgggaggatgggaag

SEQ ID NO: 1586774 - DNA, 15 bp, Homo sapiens
ctgggaggatgggaa

SEQ ID NO: 1586775 - DNA, 15 bp, Homo sapiens
gctgggaggatggga

SEQ ID NO: 1586776 - DNA, 15 bp, Homo sapiens
agctgggaggatggg

SEQ ID NO: 1586777 - DNA, 15 bp, Homo sapiens
gagctgggaggatgg

SEQ ID NO: 1586778 - DNA, 15 bp, Homo sapiens
agagctgggaggatg

SEQ ID NO: 1586779 - DNA, 15 bp, Homo sapiens
cagagctgggaggat

SEQ ID NO: 1586780 - DNA, 15 bp, Homo sapiens
ccagagctgggagga

SEQ ID NO: 1586781 - DNA, 15 bp, Homo sapiens
cccagagctgggagg

SEQ ID NO: 1586782 - DNA, 15 bp, Homo sapiens
ccccagagctgggag

SEQ ID NO: 1586783 - DNA, 15 bp, Homo sapiens
cccccagagctggga

SEQ ID NO: 1586784 - DNA, 15 bp, Homo sapiens
gcccccagagctggg

SEQ ID NO: 1586785 - DNA, 15 bp, Homo sapiens
ggcccccagagctgg

SEQ ID NO: 1586786 - DNA, 15 bp, Homo sapiens
tggcccccagagctg

SEQ ID NO: 1586787 - DNA, 15 bp, Homo sapiens
ctggcccccagagct

SEQ ID NO: 1586788 - DNA, 15 bp, Homo sapiens
actggcccccagagc

SEQ ID NO: 1586789 - DNA, 15 bp, Homo sapiens
cactggcccccagag

SEQ ID NO: 1586790 - DNA, 15 bp, Homo sapiens
gcactggcccccaga

SEQ ID NO: 1586791 - DNA, 15 bp, Homo sapiens
agcactggcccccag

SEQ ID NO: 1586792 - DNA, 15 bp, Homo sapiens
cagcactggccccca

SEQ ID NO: 1586793 - DNA, 15 bp, Homo sapiens
acagcactggccccc

SEQ ID NO: 1586794 - DNA, 15 bp, Homo sapiens
cacagcactggcccc

SEQ ID NO: 1586795 - DNA, 15 bp, Homo sapiens
acacagcactggccc

SEQ ID NO: 1586796 - DNA, 15 bp, Homo sapiens
aacacagcactggcc

SEQ ID NO: 1586797 - DNA, 15 bp, Homo sapiens
aaacacagcactggc

SEQ ID NO: 1586798 - DNA, 15 bp, Homo sapiens
caaacacagcactgg

SEQ ID NO: 1586799 - DNA, 15 bp, Homo sapiens
gcaaacacagcactg

SEQ ID NO: 1586800 - DNA, 15 bp, Homo sapiens
agcaaacacagcact

SEQ ID NO: 1586801 - DNA, 15 bp, Homo sapiens
gagcaaacacagcac

SEQ ID NO: 1586802 - DNA, 15 bp, Homo sapiens
cgagcaaacacagca

SEQ ID NO: 1586803 - DNA, 15 bp, Homo sapiens
ccgagcaaacacagc

SEQ ID NO: 1586804 - DNA, 15 bp, Homo sapiens
gccgagcaaacacag

SEQ ID NO: 1586805 - DNA, 15 bp, Homo sapiens
ggccgagcaaacaca

SEQ ID NO: 1586806 - DNA, 15 bp, Homo sapiens
cggccgagcaaacac

SEQ ID NO: 1586807 - DNA, 15 bp, Homo sapiens
ccggccgagcaaaca

SEQ ID NO: 1586808 - DNA, 15 bp, Homo sapiens
cccggccgagcaaac

SEQ ID NO: 1586809 - DNA, 15 bp, Homo sapiens
ccccggccgagcaaa

SEQ ID NO: 1586810 - DNA, 15 bp, Homo sapiens
cccccggccgagcaa

SEQ ID NO: 1586811 - DNA, 15 bp, Homo sapiens
acccccggccgagca

SEQ ID NO: 1586812 - DNA, 15 bp, Homo sapiens
cacccccggccgagc

SEQ ID NO: 1586813 - DNA, 15 bp, Homo sapiens
ccacccccggccgag

SEQ ID NO: 1586814 - DNA, 15 bp, Homo sapiens
cccacccccggccga

SEQ ID NO: 1586815 - DNA, 15 bp, Homo sapiens
ccccacccccggccg

SEQ ID NO: 1586816 - DNA, 15 bp, Homo sapiens
cccccacccccggcc

SEQ ID NO: 1586817 - DNA, 15 bp, Homo sapiens
ccccccacccccggc

SEQ ID NO: 1586818 - DNA, 15 bp, Homo sapiens
cccccccacccccgg

SEQ ID NO: 1586819 - DNA, 15 bp, Homo sapiens
ccccccccacccccg

SEQ ID NO: 1586820 - DNA, 15 bp, Homo sapiens
cccccccccaccccc

SEQ ID NO: 1586821 - DNA, 15 bp, Homo sapiens
ccccccccccacccc

SEQ ID NO: 1586822 - DNA, 15 bp, Homo sapiens
cccccccccccaccc

SEQ ID NO: 1586823 - DNA, 15 bp, Homo sapiens
ccccccccccccacc

SEQ ID NO: 1586824 - DNA, 15 bp, Homo sapiens
cccccccccccccac

SEQ ID NO: 1586825 - DNA, 15 bp, Homo sapiens
cccccccccccccca

SEQ ID NO: 1586826 - DNA, 15 bp, Homo sapiens
tcccccccccccccc

SEQ ID NO: 1586827 - DNA, 15 bp, Homo sapiens
ttccccccccccccc

SEQ ID NO: 1586828 - DNA, 15 bp, Homo sapiens
cttcccccccccccc

SEQ ID NO: 1586829 - DNA, 15 bp, Homo sapiens
tcttccccccccccc

SEQ ID NO: 1586830 - DNA, 15 bp, Homo sapiens
gtcttcccccccccc

SEQ ID NO: 1586831 - DNA, 15 bp, Homo sapiens
ggtcttccccccccc

SEQ ID NO: 1586832 - DNA, 15 bp, Homo sapiens
aggtcttcccccccc

SEQ ID NO: 1586833 - DNA, 15 bp, Homo sapiens
aaggtcttccccccc

SEQ ID NO: 1586834 - DNA, 15 bp, Homo sapiens
caaggtcttcccccc

SEQ ID NO: 1586835 - DNA, 15 bp, Homo sapiens
ccaaggtcttccccc

SEQ ID NO: 1586836 - DNA, 15 bp, Homo sapiens
cccaaggtcttcccc

SEQ ID NO: 1586837 - DNA, 15 bp, Homo sapiens
ccccaaggtcttccc

SEQ ID NO: 1586838 - DNA, 15 bp, Homo sapiens
cccccaaggtcttcc

SEQ ID NO: 1586839 - DNA, 15 bp, Homo sapiens
tcccccaaggtcttc

SEQ ID NO: 1586840 - DNA, 15 bp, Homo sapiens
ctcccccaaggtctt

SEQ ID NO: 1586841 - DNA, 15 bp, Homo sapiens
cctcccccaaggtct

SEQ ID NO: 1586842 - DNA, 15 bp, Homo sapiens
gcctcccccaaggtc

SEQ ID NO: 1586843 - DNA, 15 bp, Homo sapiens
cgcctcccccaaggt

SEQ ID NO: 1586844 - DNA, 15 bp, Homo sapiens
acgcctcccccaagg

SEQ ID NO: 1586845 - DNA, 15 bp, Homo sapiens
cacgcctcccccaag

SEQ ID NO: 1586846 - DNA, 15 bp, Homo sapiens
acacgcctcccccaa

SEQ ID NO: 1586847 - DNA, 15 bp, Homo sapiens
aacacgcctccccca

SEQ ID NO: 1586848 - DNA, 15 bp, Homo sapiens
taacacgcctccccc

SEQ ID NO: 1586849 - DNA, 15 bp, Homo sapiens
ctaacacgcctcccc

SEQ ID NO: 1586850 - DNA, 15 bp, Homo sapiens
gctaacacgcctccc

SEQ ID NO: 1586851 - DNA, 15 bp, Homo sapiens
cgctaacacgcctcc

SEQ ID NO: 1586852 - DNA, 15 bp, Homo sapiens
ccgctaacacgcctc

SEQ ID NO: 1586853 - DNA, 15 bp, Homo sapiens
cccgctaacacgcct

SEQ ID NO: 1586854 - DNA, 15 bp, Homo sapiens
ccccgctaacacgcc

SEQ ID NO: 1586855 - DNA, 15 bp, Homo sapiens
cccccgctaacacgc

SEQ ID NO: 1586856 - DNA, 15 bp, Homo sapiens
acccccgctaacacg

SEQ ID NO: 1586857 - DNA, 15 bp, Homo sapiens
cacccccgctaacac

SEQ ID NO: 1586858 - DNA, 15 bp, Homo sapiens
ccacccccgctaaca

SEQ ID NO: 1586859 - DNA, 15 bp, Homo sapiens
gccacccccgctaac

SEQ ID NO: 1586860 - DNA, 15 bp, Homo sapiens
ggccacccccgctaa

SEQ ID NO: 1586861 - DNA, 15 bp, Homo sapiens
gggccacccccgcta

SEQ ID NO: 1586862 - DNA, 15 bp, Homo sapiens
tgggccacccccgct

SEQ ID NO: 1586863 - DNA, 15 bp, Homo sapiens
gtgggccacccccgc

SEQ ID NO: 1586864 - DNA, 15 bp, Homo sapiens
agtgggccacccccg

SEQ ID NO: 1586865 - DNA, 15 bp, Homo sapiens
cagtgggccaccccc

SEQ ID NO: 1586866 - DNA, 15 bp, Homo sapiens
tcagtgggccacccc

SEQ ID NO: 1586867 - DNA, 15 bp, Homo sapiens
ttcagtgggccaccc

SEQ ID NO: 1586868 - DNA, 15 bp, Homo sapiens
tttcagtgggccacc

SEQ ID NO: 1586869 - DNA, 15 bp, Homo sapiens
ttttcagtgggccac

SEQ ID NO: 1586870 - DNA, 15 bp, Homo sapiens
tttttcagtgggcca

SEQ ID NO: 1586871 - DNA, 15 bp, Homo sapiens
gtttttcagtgggcc

SEQ ID NO: 1586872 - DNA, 15 bp, Homo sapiens
ggtttttcagtgggc

SEQ ID NO: 1586873 - DNA, 15 bp, Homo sapiens
gggtttttcagtggg

SEQ ID NO: 1586874 - DNA, 15 bp, Homo sapiens
ggggtttttcagtgg

SEQ ID NO: 1586875 - DNA, 15 bp, Homo sapiens
aggggtttttcagtg

SEQ ID NO: 1586876 - DNA, 15 bp, Homo sapiens
caggggtttttcagt

SEQ ID NO: 1586877 - DNA, 15 bp, Homo sapiens
tcaggggtttttcag

SEQ ID NO: 1586878 - DNA, 15 bp, Homo sapiens
ctcaggggtttttca

SEQ ID NO: 1586879 - DNA, 15 bp, Homo sapiens
gctcaggggtttttc

SEQ ID NO: 1586880 - DNA, 15 bp, Homo sapiens
agctcaggggttttt

SEQ ID NO: 1586881 - DNA, 15 bp, Homo sapiens
cagctcaggggtttt

SEQ ID NO: 1586882 - DNA, 15 bp, Homo sapiens
gcagctcaggggttt

SEQ ID NO: 1586883 - DNA, 15 bp, Homo sapiens
cgcagctcaggggtt

SEQ ID NO: 1586884 - DNA, 15 bp, Homo sapiens
ccgcagctcaggggt

SEQ ID NO: 1586885 - DNA, 15 bp, Homo sapiens
cccgcagctcagggg

SEQ ID NO: 1586886 - DNA, 15 bp, Homo sapiens
ccccgcagctcaggg

SEQ ID NO: 1586887 - DNA, 15 bp, Homo sapiens
cccccgcagctcagg

SEQ ID NO: 1586888 - DNA, 15 bp, Homo sapiens
gcccccgcagctcag

SEQ ID NO: 1586889 - DNA, 15 bp, Homo sapiens
cgcccccgcagctca

SEQ ID NO: 1586890 - DNA, 15 bp, Homo sapiens
ccgcccccgcagctc

SEQ ID NO: 1586891 - DNA, 15 bp, Homo sapiens
cccgcccccgcagct

SEQ ID NO: 1586892 - DNA, 15 bp, Homo sapiens
acccgcccccgcagc

SEQ ID NO: 1586893 - DNA, 15 bp, Homo sapiens
aacccgcccccgcag

SEQ ID NO: 1586894 - DNA, 15 bp, Homo sapiens
caacccgcccccgca

SEQ ID NO: 1586895 - DNA, 15 bp, Homo sapiens
acaacccgcccccgc

SEQ ID NO: 1586896 - DNA, 15 bp, Homo sapiens
cacaacccgcccccg

SEQ ID NO: 1586897 - DNA, 15 bp, Homo sapiens
ccacaacccgccccc

SEQ ID NO: 1586898 - DNA, 15 bp, Homo sapiens
gccacaacccgcccc

SEQ ID NO: 1586899 - DNA, 15 bp, Homo sapiens
agccacaacccgccc

SEQ ID NO: 1586900 - DNA, 15 bp, Homo sapiens
gagccacaacccgcc

SEQ ID NO: 1586901 - DNA, 15 bp, Homo sapiens
cgagccacaacccgc

SEQ ID NO: 1586902 - DNA, 15 bp, Homo sapiens
ccgagccacaacccg

SEQ ID NO: 1586903 - DNA, 15 bp, Homo sapiens
cccgagccacaaccc

SEQ ID NO: 1586904 - DNA, 15 bp, Homo sapiens
ccccgagccacaacc

SEQ ID NO: 1586905 - DNA, 15 bp, Homo sapiens
tccccgagccacaac

SEQ ID NO: 1586906 - DNA, 15 bp, Homo sapiens
atccccgagccacaa

SEQ ID NO: 1586907 - DNA, 15 bp, Homo sapiens
gatccccgagccaca

SEQ ID NO: 1586908 - DNA, 15 bp, Homo sapiens
ggatccccgagccac

SEQ ID NO: 1586909 - DNA, 15 bp, Homo sapiens
cggatccccgagcca

SEQ ID NO: 1586910 - DNA, 15 bp, Homo sapiens
ccggatccccgagcc

SEQ ID NO: 1586911 - DNA, 15 bp, Homo sapiens
cccggatccccgagc

SEQ ID NO: 1586912 - DNA, 15 bp, Homo sapiens
tcccggatccccgag

SEQ ID NO: 1586913 - DNA, 15 bp, Homo sapiens
gtcccggatccccga

SEQ ID NO: 1586914 - DNA, 15 bp, Homo sapiens
tgtcccggatccccg

SEQ ID NO: 1586915 - DNA, 15 bp, Homo sapiens
ctgtcccggatcccc

SEQ ID NO: 1586916 - DNA, 15 bp, Homo sapiens
gctgtcccggatccc

SEQ ID NO: 1586917 - DNA, 15 bp, Homo sapiens
ggctgtcccggatcc

SEQ ID NO: 1586918 - DNA, 15 bp, Homo sapiens
aggctgtcccggatc

SEQ ID NO: 1586919 - DNA, 15 bp, Homo sapiens
gaggctgtcccggat

SEQ ID NO: 1586920 - DNA, 15 bp, Homo sapiens
ggaggctgtcccgga

SEQ ID NO: 1586921 - DNA, 15 bp, Homo sapiens
cggaggctgtcccgg

SEQ ID NO: 1586922 - DNA, 15 bp, Homo sapiens
ccggaggctgtcccg

SEQ ID NO: 1586923 - DNA, 15 bp, Homo sapiens
cccggaggctgtccc

SEQ ID NO: 1586924 - DNA, 15 bp, Homo sapiens
tcccggaggctgtcc

SEQ ID NO: 1586925 - DNA, 15 bp, Homo sapiens
ctcccggaggctgtc

SEQ ID NO: 1586926 - DNA, 15 bp, Homo sapiens
cctcccggaggctgt

SEQ ID NO: 1586927 - DNA, 15 bp, Homo sapiens
gcctcccggaggctg

SEQ ID NO: 1586928 - DNA, 15 bp, Homo sapiens
tgcctcccggaggct

SEQ ID NO: 1586929 - DNA, 15 bp, Homo sapiens
ctgcctcccggaggc

SEQ ID NO: 1586930 - DNA, 15 bp, Homo sapiens
actgcctcccggagg

SEQ ID NO: 1586931 - DNA, 15 bp, Homo sapiens
gactgcctcccggag

SEQ ID NO: 1586932 - DNA, 15 bp, Homo sapiens
cgactgcctcccgga

SEQ ID NO: 1586933 - DNA, 15 bp, Homo sapiens
tcgactgcctcccgg

SEQ ID NO: 1586934 - DNA, 15 bp, Homo sapiens
atcgactgcctcccg

SEQ ID NO: 1586935 - DNA, 15 bp, Homo sapiens
gatcgactgcctccc

SEQ ID NO: 1586936 - DNA, 15 bp, Homo sapiens
ggatcgactgcctcc

SEQ ID NO: 1586937 - DNA, 15 bp, Homo sapiens
gggatcgactgcctc

SEQ ID NO: 1586938 - DNA, 15 bp, Homo sapiens
ggggatcgactgcct

SEQ ID NO: 1586939 - DNA, 15 bp, Homo sapiens
aggggatcgactgcc

SEQ ID NO: 1586940 - DNA, 15 bp, Homo sapiens
taggggatcgactgc

SEQ ID NO: 1586941 - DNA, 15 bp, Homo sapiens
gtaggggatcgactg

SEQ ID NO: 1586942 - DNA, 15 bp, Homo sapiens
agtaggggatcgact

SEQ ID NO: 1586943 - DNA, 15 bp, Homo sapiens
gagtaggggatcgac

SEQ ID NO: 1586944 - DNA, 15 bp, Homo sapiens
tgagtaggggatcga

SEQ ID NO: 1586945 - DNA, 15 bp, Homo sapiens
ctgagtaggggatcg

SEQ ID NO: 1586946 - DNA, 15 bp, Homo sapiens
gctgagtaggggatc

SEQ ID NO: 1586947 - DNA, 15 bp, Homo sapiens
cgctgagtaggggat

SEQ ID NO: 1586948 - DNA, 15 bp, Homo sapiens
gcgctgagtagggga

SEQ ID NO: 1586949 - DNA, 15 bp, Homo sapiens
ggcgctgagtagggg

SEQ ID NO: 1586950 - DNA, 15 bp, Homo sapiens
gggcgctgagtaggg

SEQ ID NO: 1586951 - DNA, 15 bp, Homo sapiens
ggggcgctgagtagg

SEQ ID NO: 1586952 - DNA, 15 bp, Homo sapiens
gggggcgctgagtag

SEQ ID NO: 1586953 - DNA, 15 bp, Homo sapiens
agggggcgctgagta

SEQ ID NO: 1586954 - DNA, 15 bp, Homo sapiens
gagggggcgctgagt

SEQ ID NO: 1586955 - DNA, 15 bp, Homo sapiens
ggagggggcgctgag

SEQ ID NO: 1586956 - DNA, 15 bp, Homo sapiens
cggagggggcgctga

SEQ ID NO: 1586957 - DNA, 15 bp, Homo sapiens
gcggagggggcgctg

SEQ ID NO: 1586958 - DNA, 15 bp, Homo sapiens
ggcggagggggcgct

SEQ ID NO: 1586959 - DNA, 15 bp, Homo sapiens
gggcggagggggcgc

SEQ ID NO: 1586960 - DNA, 15 bp, Homo sapiens
cgggcggagggggcg

SEQ ID NO: 1586961 - DNA, 15 bp, Homo sapiens
gcgggcggagggggc

SEQ ID NO: 1586962 - DNA, 15 bp, Homo sapiens
agcgggcggaggggg

SEQ ID NO: 1586963 - DNA, 15 bp, Homo sapiens
gagcgggcggagggg

SEQ ID NO: 1586964 - DNA, 15 bp, Homo sapiens
cgagcgggcggaggg

SEQ ID NO: 1586965 - DNA, 15 bp, Homo sapiens
ccgagcgggcggagg

SEQ ID NO: 1586966 - DNA, 15 bp, Homo sapiens
tccgagcgggcggag

SEQ ID NO: 1586967 - DNA, 15 bp, Homo sapiens
atccgagcgggcgga

SEQ ID NO: 1586968 - DNA, 15 bp, Homo sapiens
aatccgagcgggcgg

SEQ ID NO: 1586969 - DNA, 15 bp, Homo sapiens
gaatccgagcgggcg

SEQ ID NO: 1586970 - DNA, 15 bp, Homo sapiens
agaatccgagcgggc

SEQ ID NO: 1586971 - DNA, 15 bp, Homo sapiens
gagaatccgagcggg

SEQ ID NO: 1586972 - DNA, 15 bp, Homo sapiens
agagaatccgagcgg

SEQ ID NO: 1586973 - DNA, 15 bp, Homo sapiens
gagagaatccgagcg

SEQ ID NO: 1586974 - DNA, 15 bp, Homo sapiens
ggagagaatccgagc

SEQ ID NO: 1586975 - DNA, 15 bp, Homo sapiens
cggagagaatccgag

SEQ ID NO: 1586976 - DNA, 15 bp, Homo sapiens
ccggagagaatccga

SEQ ID NO: 1586977 - DNA, 15 bp, Homo sapiens
accggagagaatccg

SEQ ID NO: 1586978 - DNA, 15 bp, Homo sapiens
taccggagagaatcc

SEQ ID NO: 1586979 - DNA, 15 bp, Homo sapiens
ctaccggagagaatc

SEQ ID NO: 1586980 - DNA, 15 bp, Homo sapiens
cctaccggagagaat

SEQ ID NO: 1586981 - DNA, 15 bp, Homo sapiens
ccctaccggagagaa

SEQ ID NO: 1586982 - DNA, 15 bp, Homo sapiens
cccctaccggagaga

SEQ ID NO: 1586983 - DNA, 15 bp, Homo sapiens
ccccctaccggagag

SEQ ID NO: 1586984 - DNA, 15 bp, Homo sapiens
tccccctaccggaga

SEQ ID NO: 1586985 - DNA, 15 bp, Homo sapiens
ttccccctaccggag

SEQ ID NO: 1586986 - DNA, 15 bp, Homo sapiens
tttccccctaccgga

SEQ ID NO: 1586987 - DNA, 15 bp, Homo sapiens
ctttccccctaccgg

SEQ ID NO: 1586988 - DNA, 15 bp, Homo sapiens
cctttccccctaccg

SEQ ID NO: 1586989 - DNA, 15 bp, Homo sapiens
ccctttccccctacc

SEQ ID NO: 1586990 - DNA, 15 bp, Homo sapiens
cccctttccccctac

SEQ ID NO: 1586991 - DNA, 15 bp, Homo sapiens
ccccctttcccccta

SEQ ID NO: 1586992 - DNA, 15 bp, Homo sapiens
gccccctttccccct

SEQ ID NO: 1586993 - DNA, 15 bp, Homo sapiens
cgccccctttccccc

SEQ ID NO: 1586994 - DNA, 15 bp, Homo sapiens
ccgccccctttcccc

SEQ ID NO: 1586995 - DNA, 15 bp, Homo sapiens
cccgccccctttccc

SEQ ID NO: 1586996 - DNA, 15 bp, Homo sapiens
ccccgccccctttcc

SEQ ID NO: 1586997 - DNA, 15 bp, Homo sapiens
tccccgccccctttc

SEQ ID NO: 1586998 - DNA, 15 bp, Homo sapiens
ctccccgcccccttt

SEQ ID NO: 1586999 - DNA, 15 bp, Homo sapiens
gctccccgccccctt

SEQ ID NO: 1587000 - DNA, 15 bp, Homo sapiens
tgctccccgccccct

SEQ ID NO: 1587001 - DNA, 15 bp, Homo sapiens
ctgctccccgccccc

SEQ ID NO: 1587002 - DNA, 15 bp, Homo sapiens
tctgctccccgcccc

SEQ ID NO: 1587003 - DNA, 15 bp, Homo sapiens
ctctgctccccgccc

SEQ ID NO: 1587004 - DNA, 15 bp, Homo sapiens
cctctgctccccgcc

SEQ ID NO: 1587005 - DNA, 15 bp, Homo sapiens
acctctgctccccgc

SEQ ID NO: 1587006 - DNA, 15 bp, Homo sapiens
cacctctgctccccg

SEQ ID NO: 1587007 - DNA, 15 bp, Homo sapiens
acacctctgctcccc

SEQ ID NO: 1587008 - DNA, 15 bp, Homo sapiens
gacacctctgctccc

SEQ ID NO: 1587009 - DNA, 15 bp, Homo sapiens
ggacacctctgctcc

SEQ ID NO: 1587010 - DNA, 15 bp, Homo sapiens
gggacacctctgctc

SEQ ID NO: 1587011 - DNA, 15 bp, Homo sapiens
agggacacctctgct

SEQ ID NO: 1587012 - DNA, 15 bp, Homo sapiens
gagggacacctctgc

SEQ ID NO: 1587013 - DNA, 15 bp, Homo sapiens
agagggacacctctg

SEQ ID NO: 1587014 - DNA, 15 bp, Homo sapiens
cagagggacacctct

SEQ ID NO: 1587015 - DNA, 15 bp, Homo sapiens
tcagagggacacctc

SEQ ID NO: 1587016 - DNA, 15 bp, Homo sapiens
gtcagagggacacct

SEQ ID NO: 1587017 - DNA, 15 bp, Homo sapiens
cgtcagagggacacc

SEQ ID NO: 1587018 - DNA, 15 bp, Homo sapiens
ccgtcagagggacac

SEQ ID NO: 1587019 - DNA, 15 bp, Homo sapiens
gccgtcagagggaca

SEQ ID NO: 1587020 - DNA, 15 bp, Homo sapiens
cgccgtcagagggac

SEQ ID NO: 1587021 - DNA, 15 bp, Homo sapiens
ccgccgtcagaggga

SEQ ID NO: 1587022 - DNA, 15 bp, Homo sapiens
gccgccgtcagaggg

SEQ ID NO: 1587023 - DNA, 15 bp, Homo sapiens
tgccgccgtcagagg

SEQ ID NO: 1587024 - DNA, 15 bp, Homo sapiens
ctgccgccgtcagag

SEQ ID NO: 1587025 - DNA, 15 bp, Homo sapiens
tctgccgccgtcaga

SEQ ID NO: 1587026 - DNA, 15 bp, Homo sapiens
ttctgccgccgtcag

SEQ ID NO: 1587027 - DNA, 15 bp, Homo sapiens
cttctgccgccgtca

SEQ ID NO: 1587028 - DNA, 15 bp, Homo sapiens
tcttctgccgccgtc

SEQ ID NO: 1587029 - DNA, 15 bp, Homo sapiens
ctcttctgccgccgt

SEQ ID NO: 1587030 - DNA, 15 bp, Homo sapiens
tctcttctgccgccg

SEQ ID NO: 1587031 - DNA, 15 bp, Homo sapiens
ctctcttctgccgcc

SEQ ID NO: 1587032 - DNA, 15 bp, Homo sapiens
cctctcttctgccgc

SEQ ID NO: 1587033 - DNA, 15 bp, Homo sapiens
gcctctcttctgccg

SEQ ID NO: 1587034 - DNA, 15 bp, Homo sapiens
tgcctctcttctgcc

SEQ ID NO: 1587035 - DNA, 15 bp, Homo sapiens
ctgcctctcttctgc

SEQ ID NO: 1587036 - DNA, 15 bp, Homo sapiens
tctgcctctcttctg

SEQ ID NO: 1587037 - DNA, 15 bp, Homo sapiens
gtctgcctctcttct

SEQ ID NO: 1587038 - DNA, 15 bp, Homo sapiens
tgtctgcctctcttc

SEQ ID NO: 1587039 - DNA, 15 bp, Homo sapiens
ctgtctgcctctctt

SEQ ID NO: 1587040 - DNA, 15 bp, Homo sapiens
tctgtctgcctctct

SEQ ID NO: 1587041 - DNA, 15 bp, Homo sapiens
gtctgtctgcctctc

SEQ ID NO: 1587042 - DNA, 15 bp, Homo sapiens
agtctgtctgcctct

SEQ ID NO: 1587043 - DNA, 15 bp, Homo sapiens
cagtctgtctgcctc

SEQ ID NO: 1587044 - DNA, 15 bp, Homo sapiens
tcagtctgtctgcct

SEQ ID NO: 1587045 - DNA, 15 bp, Homo sapiens
gtcagtctgtctgcc

SEQ ID NO: 1587046 - DNA, 15 bp, Homo sapiens
tgtcagtctgtctgc

SEQ ID NO: 1587047 - DNA, 15 bp, Homo sapiens
ctgtcagtctgtctg

SEQ ID NO: 1587048 - DNA, 15 bp, Homo sapiens
tctgtcagtctgtct

SEQ ID NO: 1587049 - DNA, 15 bp, Homo sapiens
gtctgtcagtctgtc

SEQ ID NO: 1587050 - DNA, 15 bp, Homo sapiens
tgtctgtcagtctgt

SEQ ID NO: 1587051 - DNA, 15 bp, Homo sapiens
gtgtctgtcagtctg

SEQ ID NO: 1587052 - DNA, 15 bp, Homo sapiens
cgtgtctgtcagtct

SEQ ID NO: 1587053 - DNA, 15 bp, Homo sapiens
acgtgtctgtcagtc

SEQ ID NO: 1587054 - DNA, 15 bp, Homo sapiens
tacgtgtctgtcagt

SEQ ID NO: 1587055 - DNA, 15 bp, Homo sapiens
ctacgtgtctgtcag

SEQ ID NO: 1587056 - DNA, 15 bp, Homo sapiens
tctacgtgtctgtca

SEQ ID NO: 1587057 - DNA, 15 bp, Homo sapiens
gtctacgtgtctgtc

SEQ ID NO: 1587058 - DNA, 15 bp, Homo sapiens
ggtctacgtgtctgt

SEQ ID NO: 1587059 - DNA, 15 bp, Homo sapiens
tggtctacgtgtctg

SEQ ID NO: 1587060 - DNA, 15 bp, Homo sapiens
ttggtctacgtgtct

SEQ ID NO: 1587061 - DNA, 15 bp, Homo sapiens
gttggtctacgtgtc

SEQ ID NO: 1587062 - DNA, 15 bp, Homo sapiens
tgttggtctacgtgt

SEQ ID NO: 1587063 - DNA, 15 bp, Homo sapiens
ctgttggtctacgtg

SEQ ID NO: 1587064 - DNA, 15 bp, Homo sapiens
actgttggtctacgt

SEQ ID NO: 1587065 - DNA, 15 bp, Homo sapiens
cactgttggtctacg

SEQ ID NO: 1587066 - DNA, 15 bp, Homo sapiens
gcactgttggtctac

SEQ ID NO: 1587067 - DNA, 15 bp, Homo sapiens
cgcactgttggtcta

SEQ ID NO: 1587068 - DNA, 15 bp, Homo sapiens
ccgcactgttggtct

SEQ ID NO: 1587069 - DNA, 15 bp, Homo sapiens
gccgcactgttggtc

SEQ ID NO: 1587070 - DNA, 15 bp, Homo sapiens
ggccgcactgttggt

SEQ ID NO: 1587071 - DNA, 15 bp, Homo sapiens
gggccgcactgttgg

SEQ ID NO: 1587072 - DNA, 15 bp, Homo sapiens
ggggccgcactgttg

SEQ ID NO: 1587073 - DNA, 15 bp, Homo sapiens
tggggccgcactgtt

SEQ ID NO: 1587074 - DNA, 15 bp, Homo sapiens
ctggggccgcactgt

SEQ ID NO: 1587075 - DNA, 15 bp, Homo sapiens
cctggggccgcactg

SEQ ID NO: 1587076 - DNA, 15 bp, Homo sapiens
ccctggggccgcact

SEQ ID NO: 1587077 - DNA, 15 bp, Homo sapiens
accctggggccgcac

SEQ ID NO: 1587078 - DNA, 15 bp, Homo sapiens
aaccctggggccgca

SEQ ID NO: 1587079 - DNA, 15 bp, Homo sapiens
gaaccctggggccgc

SEQ ID NO: 1587080 - DNA, 15 bp, Homo sapiens
cgaaccctggggccg

SEQ ID NO: 1587081 - DNA, 15 bp, Homo sapiens
acgaaccctggggcc

SEQ ID NO: 1587082 - DNA, 15 bp, Homo sapiens
gacgaaccctggggc

SEQ ID NO: 1587083 - DNA, 15 bp, Homo sapiens
ggacgaaccctgggg

SEQ ID NO: 1587084 - DNA, 15 bp, Homo sapiens
gggacgaaccctggg

SEQ ID NO: 1587085 - DNA, 15 bp, Homo sapiens
ggggacgaaccctgg

SEQ ID NO: 1587086 - DNA, 15 bp, Homo sapiens
tggggacgaaccctg

SEQ ID NO: 1587087 - DNA, 15 bp, Homo sapiens
ctggggacgaaccct

SEQ ID NO: 1587088 - DNA, 15 bp, Homo sapiens
tctggggacgaaccc

SEQ ID NO: 1587089 - DNA, 15 bp, Homo sapiens
gtctggggacgaacc

SEQ ID NO: 1587090 - DNA, 15 bp, Homo sapiens
agtctggggacgaac

SEQ ID NO: 1587091 - DNA, 15 bp, Homo sapiens
gagtctggggacgaa

SEQ ID NO: 1587092 - DNA, 15 bp, Homo sapiens
cgagtctggggacga

SEQ ID NO: 1587093 - DNA, 15 bp, Homo sapiens
gcgagtctggggacg

SEQ ID NO: 1587094 - DNA, 15 bp, Homo sapiens
agcgagtctggggac

SEQ ID NO: 1587095 - DNA, 15 bp, Homo sapiens
gagcgagtctgggga

SEQ ID NO: 1587096 - DNA, 15 bp, Homo sapiens
cgagcgagtctgggg

SEQ ID NO: 1587097 - DNA, 15 bp, Homo sapiens
gcgagcgagtctggg

SEQ ID NO: 1587098 - DNA, 15 bp, Homo sapiens
agcgagcgagtctgg

SEQ ID NO: 1587099 - DNA, 15 bp, Homo sapiens
gagcgagcgagtctg

SEQ ID NO: 1587100 - DNA, 15 bp, Homo sapiens
tgagcgagcgagtct

SEQ ID NO: 1587101 - DNA, 15 bp, Homo sapiens
atgagcgagcgagtc

SEQ ID NO: 1587102 - DNA, 15 bp, Homo sapiens
aatgagcgagcgagt

SEQ ID NO: 1587103 - DNA, 15 bp, Homo sapiens
aaatgagcgagcgag

SEQ ID NO: 1587104 - DNA, 15 bp, Homo sapiens
caaatgagcgagcga

SEQ ID NO: 1587105 - DNA, 15 bp, Homo sapiens
acaaatgagcgagcg

SEQ ID NO: 1587106 - DNA, 15 bp, Homo sapiens
aacaaatgagcgagc

SEQ ID NO: 1587107 - DNA, 15 bp, Homo sapiens
caacaaatgagcgag

SEQ ID NO: 1587108 - DNA, 15 bp, Homo sapiens
ccaacaaatgagcga

SEQ ID NO: 1587109 - DNA, 15 bp, Homo sapiens
gccaacaaatgagcg

SEQ ID NO: 1587110 - DNA, 15 bp, Homo sapiens
cgccaacaaatgagc

SEQ ID NO: 1587111 - DNA, 15 bp, Homo sapiens
tcgccaacaaatgag

SEQ ID NO: 1587112 - DNA, 15 bp, Homo sapiens
gtcgccaacaaatga

SEQ ID NO: 1587113 - DNA, 15 bp, Homo sapiens
agtcgccaacaaatg

SEQ ID NO: 1587114 - DNA, 15 bp, Homo sapiens
cagtcgccaacaaat

SEQ ID NO: 1587115 - DNA, 15 bp, Homo sapiens
ccagtcgccaacaaa

SEQ ID NO: 1587116 - DNA, 15 bp, Homo sapiens
cccagtcgccaacaa

SEQ ID NO: 1587117 - DNA, 15 bp, Homo sapiens
ccccagtcgccaaca

SEQ ID NO: 1587118 - DNA, 15 bp, Homo sapiens
gccccagtcgccaac

SEQ ID NO: 1587119 - DNA, 15 bp, Homo sapiens
agccccagtcgccaa

SEQ ID NO: 1587120 - DNA, 15 bp, Homo sapiens
gagccccagtcgcca

SEQ ID NO: 1587121 - DNA, 15 bp, Homo sapiens
tgagccccagtcgcc

SEQ ID NO: 1587122 - DNA, 15 bp, Homo sapiens
ctgagccccagtcgc

SEQ ID NO: 1587123 - DNA, 15 bp, Homo sapiens
gctgagccccagtcg

SEQ ID NO: 1587124 - DNA, 15 bp, Homo sapiens
cgctgagccccagtc

SEQ ID NO: 1587125 - DNA, 15 bp, Homo sapiens
gcgctgagccccagt

SEQ ID NO: 1587126 - DNA, 15 bp, Homo sapiens
tgcgctgagccccag

SEQ ID NO: 1587127 - DNA, 15 bp, Homo sapiens
ctgcgctgagcccca

SEQ ID NO: 1587128 - DNA, 15 bp, Homo sapiens
gctgcgctgagcccc

SEQ ID NO: 1587129 - DNA, 15 bp, Homo sapiens
cgctgcgctgagccc

SEQ ID NO: 1587130 - DNA, 15 bp, Homo sapiens
tcgctgcgctgagcc

SEQ ID NO: 1587131 - DNA, 15 bp, Homo sapiens
ttcgctgcgctgagc

SEQ ID NO: 1587132 - DNA, 15 bp, Homo sapiens
cttcgctgcgctgag

SEQ ID NO: 1587133 - DNA, 15 bp, Homo sapiens
gcttcgctgcgctga

SEQ ID NO: 1587134 - DNA, 15 bp, Homo sapiens
ggcttcgctgcgctg

SEQ ID NO: 1587135 - DNA, 15 bp, Homo sapiens
gggcttcgctgcgct

SEQ ID NO: 1587136 - DNA, 15 bp, Homo sapiens
cgggcttcgctgcgc

SEQ ID NO: 1587137 - DNA, 15 bp, Homo sapiens
tcgggcttcgctgcg

SEQ ID NO: 1587138 - DNA, 15 bp, Homo sapiens
atcgggcttcgctgc

SEQ ID NO: 1587139 - DNA, 15 bp, Homo sapiens
catcgggcttcgctg

SEQ ID NO: 1587140 - DNA, 15 bp, Homo sapiens
acatcgggcttcgct

SEQ ID NO: 1587141 - DNA, 15 bp, Homo sapiens
cacatcgggcttcgc

SEQ ID NO: 1587142 - DNA, 15 bp, Homo sapiens
ccacatcgggcttcg

SEQ ID NO: 1587143 - DNA, 15 bp, Homo sapiens
accacatcgggcttc

SEQ ID NO: 1587144 - DNA, 15 bp, Homo sapiens
gaccacatcgggctt

SEQ ID NO: 1587145 - DNA, 15 bp, Homo sapiens
ggaccacatcgggct

SEQ ID NO: 1587146 - DNA, 15 bp, Homo sapiens
cggaccacatcgggc

SEQ ID NO: 1587147 - DNA, 15 bp, Homo sapiens
ccggaccacatcggg

SEQ ID NO: 1587148 - DNA, 15 bp, Homo sapiens
tccggaccacatcgg

SEQ ID NO: 1587149 - DNA, 15 bp, Homo sapiens
ctccggaccacatcg

SEQ ID NO: 1587150 - DNA, 15 bp, Homo sapiens
cctccggaccacatc

SEQ ID NO: 1587151 - DNA, 15 bp, Homo sapiens
gcctccggaccacat

SEQ ID NO: 1587152 - DNA, 15 bp, Homo sapiens
tgcctccggaccaca

SEQ ID NO: 1587153 - DNA, 15 bp, Homo sapiens
ctgcctccggaccac

SEQ ID NO: 1587154 - DNA, 15 bp, Homo sapiens
actgcctccggacca

SEQ ID NO: 1587155 - DNA, 15 bp, Homo sapiens
cactgcctccggacc

SEQ ID NO: 1587156 - DNA, 15 bp, Homo sapiens
ccactgcctccggac

SEQ ID NO: 1587157 - DNA, 15 bp, Homo sapiens
cccactgcctccgga

SEQ ID NO: 1587158 - DNA, 15 bp, Homo sapiens
tcccactgcctccgg

SEQ ID NO: 1587159 - DNA, 15 bp, Homo sapiens
ttcccactgcctccg

SEQ ID NO: 1587160 - DNA, 15 bp, Homo sapiens
cttcccactgcctcc

SEQ ID NO: 1587161 - DNA, 15 bp, Homo sapiens
ccttcccactgcctc

SEQ ID NO: 1587162 - DNA, 15 bp, Homo sapiens
gccttcccactgcct

SEQ ID NO: 1587163 - DNA, 15 bp, Homo sapiens
cgccttcccactgcc

SEQ ID NO: 1587164 - DNA, 15 bp, Homo sapiens
gcgccttcccactgc

SEQ ID NO: 1587165 - DNA, 15 bp, Homo sapiens
cgcgccttcccactg

SEQ ID NO: 1587166 - DNA, 15 bp, Homo sapiens
ccgcgccttcccact

SEQ ID NO: 1587167 - DNA, 15 bp, Homo sapiens
cccgcgccttcccac

SEQ ID NO: 1587168 - DNA, 15 bp, Homo sapiens
ccccgcgccttccca

SEQ ID NO: 1587169 - DNA, 15 bp, Homo sapiens
gccccgcgccttccc

SEQ ID NO: 1587170 - DNA, 15 bp, Homo sapiens
agccccgcgccttcc

SEQ ID NO: 1587171 - DNA, 15 bp, Homo sapiens
cagccccgcgccttc

SEQ ID NO: 1587172 - DNA, 15 bp, Homo sapiens
ccagccccgcgcctt

SEQ ID NO: 1587173 - DNA, 15 bp, Homo sapiens
cccagccccgcgcct

SEQ ID NO: 1587174 - DNA, 15 bp, Homo sapiens
tcccagccccgcgcc

SEQ ID NO: 1587175 - DNA, 15 bp, Homo sapiens
ctcccagccccgcgc

SEQ ID NO: 1587176 - DNA, 15 bp, Homo sapiens
cctcccagccccgcg

SEQ ID NO: 1587177 - DNA, 15 bp, Homo sapiens
gcctcccagccccgc

SEQ ID NO: 1587178 - DNA, 15 bp, Homo sapiens
ggcctcccagccccg

SEQ ID NO: 1587179 - DNA, 15 bp, Homo sapiens
cggcctcccagcccc

SEQ ID NO: 1587180 - DNA, 15 bp, Homo sapiens
gcggcctcccagccc

SEQ ID NO: 1587181 - DNA, 15 bp, Homo sapiens
cgcggcctcccagcc

SEQ ID NO: 1587182 - DNA, 15 bp, Homo sapiens
ccgcggcctcccagc

SEQ ID NO: 1587183 - DNA, 15 bp, Homo sapiens
gccgcggcctcccag

SEQ ID NO: 1587184 - DNA, 15 bp, Homo sapiens
cgccgcggcctccca

SEQ ID NO: 1587185 - DNA, 15 bp, Homo sapiens
ccgccgcggcctccc

SEQ ID NO: 1587186 - DNA, 15 bp, Homo sapiens
cccgccgcggcctcc

SEQ ID NO: 1587187 - DNA, 15 bp, Homo sapiens
tcccgccgcggcctc

SEQ ID NO: 1587188 - DNA, 15 bp, Homo sapiens
ctcccgccgcggcct

SEQ ID NO: 1587189 - DNA, 15 bp, Homo sapiens
cctcccgccgcggcc

SEQ ID NO: 1587190 - DNA, 15 bp, Homo sapiens
ccctcccgccgcggc

SEQ ID NO: 1587191 - DNA, 15 bp, Homo sapiens
tccctcccgccgcgg

SEQ ID NO: 1587192 - DNA, 15 bp, Homo sapiens
ctccctcccgccgcg

SEQ ID NO: 1587193 - DNA, 15 bp, Homo sapiens
cctccctcccgccgc

SEQ ID NO: 1587194 - DNA, 15 bp, Homo sapiens
tcctccctcccgccg

SEQ ID NO: 1587195 - DNA, 15 bp, Homo sapiens
ctcctccctcccgcc

SEQ ID NO: 1587196 - DNA, 15 bp, Homo sapiens
gctcctccctcccgc

SEQ ID NO: 1587197 - DNA, 15 bp, Homo sapiens
tgctcctccctcccg

SEQ ID NO: 1587198 - DNA, 15 bp, Homo sapiens
ctgctcctccctccc

SEQ ID NO: 1587199 - DNA, 15 bp, Homo sapiens
gctgctcctccctcc

SEQ ID NO: 1587200 - DNA, 15 bp, Homo sapiens
ggctgctcctccctc

SEQ ID NO: 1587201 - DNA, 15 bp, Homo sapiens
gggctgctcctccct

SEQ ID NO: 1587202 - DNA, 15 bp, Homo sapiens
ggggctgctcctccc

SEQ ID NO: 1587203 - DNA, 15 bp, Homo sapiens
cggggctgctcctcc

SEQ ID NO: 1587204 - DNA, 15 bp, Homo sapiens
ccggggctgctcctc

SEQ ID NO: 1587205 - DNA, 15 bp, Homo sapiens
gccggggctgctcct

SEQ ID NO: 1587206 - DNA, 15 bp, Homo sapiens
tgccggggctgctcc

SEQ ID NO: 1587207 - DNA, 15 bp, Homo sapiens
ctgccggggctgctc

SEQ ID NO: 1587208 - DNA, 15 bp, Homo sapiens
cctgccggggctgct

SEQ ID NO: 1587209 - DNA, 15 bp, Homo sapiens
gcctgccggggctgc

SEQ ID NO: 1587210 - DNA, 15 bp, Homo sapiens
agcctgccggggctg

SEQ ID NO: 1587211 - DNA, 15 bp, Homo sapiens
gagcctgccggggct

SEQ ID NO: 1587212 - DNA, 15 bp, Homo sapiens
tgagcctgccggggc

SEQ ID NO: 1587213 - DNA, 15 bp, Homo sapiens
ctgagcctgccgggg

SEQ ID NO: 1587214 - DNA, 15 bp, Homo sapiens
cctgagcctgccggg

SEQ ID NO: 1587215 - DNA, 15 bp, Homo sapiens
acctgagcctgccgg

SEQ ID NO: 1587216 - DNA, 15 bp, Homo sapiens
cacctgagcctgccg

SEQ ID NO: 1587217 - DNA, 15 bp, Homo sapiens
tcacctgagcctgcc

SEQ ID NO: 1587218 - DNA, 15 bp, Homo sapiens
ttcacctgagcctgc

SEQ ID NO: 1587219 - DNA, 15 bp, Homo sapiens
tttcacctgagcctg

SEQ ID NO: 1587220 - DNA, 15 bp, Homo sapiens
gtttcacctgagcct

SEQ ID NO: 1587221 - DNA, 15 bp, Homo sapiens
ggtttcacctgagcc

SEQ ID NO: 1587222 - DNA, 15 bp, Homo sapiens
gggtttcacctgagc

SEQ ID NO: 1587223 - DNA, 15 bp, Homo sapiens
ggggtttcacctgag

SEQ ID NO: 1587224 - DNA, 15 bp, Homo sapiens
gggggtttcacctga

SEQ ID NO: 1587225 - DNA, 15 bp, Homo sapiens
tgggggtttcacctg

SEQ ID NO: 1587226 - DNA, 15 bp, Homo sapiens
gtgggggtttcacct

SEQ ID NO: 1587227 - DNA, 15 bp, Homo sapiens
ggtgggggtttcacc

SEQ ID NO: 1587228 - DNA, 15 bp, Homo sapiens
gggtgggggtttcac

SEQ ID NO: 1587229 - DNA, 15 bp, Homo sapiens
agggtgggggtttca

SEQ ID NO: 1587230 - DNA, 15 bp, Homo sapiens
cagggtgggggtttc

SEQ ID NO: 1587231 - DNA, 15 bp, Homo sapiens
acagggtgggggttt

SEQ ID NO: 1587232 - DNA, 15 bp, Homo sapiens
gacagggtgggggtt

SEQ ID NO: 1587233 - DNA, 15 bp, Homo sapiens
ggacagggtgggggt

SEQ ID NO: 1587234 - DNA, 15 bp, Homo sapiens
gggacagggtggggg

SEQ ID NO: 1587235 - DNA, 15 bp, Homo sapiens
agggacagggtgggg

SEQ ID NO: 1587236 - DNA, 15 bp, Homo sapiens
gagggacagggtggg

SEQ ID NO: 1587237 - DNA, 15 bp, Homo sapiens
tgagggacagggtgg

SEQ ID NO: 1587238 - DNA, 15 bp, Homo sapiens
ctgagggacagggtg

SEQ ID NO: 1587239 - DNA, 15 bp, Homo sapiens
gctgagggacagggt

SEQ ID NO: 1587240 - DNA, 15 bp, Homo sapiens
ggctgagggacaggg

SEQ ID NO: 1587241 - DNA, 15 bp, Homo sapiens
gggctgagggacagg

SEQ ID NO: 1587242 - DNA, 15 bp, Homo sapiens
ggggctgagggacag

SEQ ID NO: 1587243 - DNA, 15 bp, Homo sapiens
gggggctgagggaca

SEQ ID NO: 1587244 - DNA, 15 bp, Homo sapiens
agggggctgagggac

SEQ ID NO: 1587245 - DNA, 15 bp, Homo sapiens
gagggggctgaggga

SEQ ID NO: 1587246 - DNA, 15 bp, Homo sapiens
ggagggggctgaggg

SEQ ID NO: 1587247 - DNA, 15 bp, Homo sapiens
aggagggggctgagg

SEQ ID NO: 1587248 - DNA, 15 bp, Homo sapiens
ggaggagggggctga

SEQ ID NO: 1587249 - DNA, 15 bp, Homo sapiens
aggaggagggggctg

SEQ ID NO: 1587250 - DNA, 15 bp, Homo sapiens
taggaggagggggct

SEQ ID NO: 1587251 - DNA, 15 bp, Homo sapiens
ttaggaggagggggc

SEQ ID NO: 1587252 - DNA, 15 bp, Homo sapiens
tttaggaggaggggg

SEQ ID NO: 1587253 - DNA, 15 bp, Homo sapiens
ctttaggaggagggg

SEQ ID NO: 1587254 - DNA, 15 bp, Homo sapiens
tctttaggaggaggg

SEQ ID NO: 1587255 - DNA, 15 bp, Homo sapiens
gtctttaggaggagg

SEQ ID NO: 1587256 - DNA, 15 bp, Homo sapiens
ggtctttaggaggag

SEQ ID NO: 1587257 - DNA, 15 bp, Homo sapiens
aggtctttaggagga

SEQ ID NO: 1587258 - DNA, 15 bp, Homo sapiens
caggtctttaggagg

SEQ ID NO: 1587259 - DNA, 15 bp, Homo sapiens
acaggtctttaggag

SEQ ID NO: 1587260 - DNA, 15 bp, Homo sapiens
gacaggtctttagga

SEQ ID NO: 1587261 - DNA, 15 bp, Homo sapiens
ggacaggtctttagg

SEQ ID NO: 1587262 - DNA, 15 bp, Homo sapiens
cggacaggtctttag

SEQ ID NO: 1587263 - DNA, 15 bp, Homo sapiens
acggacaggtcttta

SEQ ID NO: 1587264 - DNA, 15 bp, Homo sapiens
cacggacaggtcttt

SEQ ID NO: 1587265 - DNA, 15 bp, Homo sapiens
gcacggacaggtctt

SEQ ID NO: 1587266 - DNA, 15 bp, Homo sapiens
ggcacggacaggtct

SEQ ID NO: 1587267 - DNA, 15 bp, Homo sapiens
gggcacggacaggtc

SEQ ID NO: 1587268 - DNA, 15 bp, Homo sapiens
cgggcacggacaggt

SEQ ID NO: 1587269 - DNA, 15 bp, Homo sapiens
ccgggcacggacagg

SEQ ID NO: 1587270 - DNA, 15 bp, Homo sapiens
cccgggcacggacag

SEQ ID NO: 1587271 - DNA, 15 bp, Homo sapiens
ccccgggcacggaca

SEQ ID NO: 1587272 - DNA, 15 bp, Homo sapiens
tccccgggcacggac

SEQ ID NO: 1587273 - DNA, 15 bp, Homo sapiens
ttccccgggcacgga

SEQ ID NO: 1587274 - DNA, 15 bp, Homo sapiens
gttccccgggcacgg

SEQ ID NO: 1587275 - DNA, 15 bp, Homo sapiens
ggttccccgggcacg

SEQ ID NO: 1587276 - DNA, 15 bp, Homo sapiens
gggttccccgggcac

SEQ ID NO: 1587277 - DNA, 15 bp, Homo sapiens
ggggttccccgggca

SEQ ID NO: 1587278 - DNA, 15 bp, Homo sapiens
cggggttccccgggc

SEQ ID NO: 1587279 - DNA, 15 bp, Homo sapiens
tcggggttccccggg

SEQ ID NO: 1587280 - DNA, 15 bp, Homo sapiens
gtcggggttccccgg

SEQ ID NO: 1587281 - DNA, 15 bp, Homo sapiens
ggtcggggttccccg

SEQ ID NO: 1587282 - DNA, 15 bp, Homo sapiens
cggtcggggttcccc

SEQ ID NO: 1587283 - DNA, 15 bp, Homo sapiens
tcggtcggggttccc

SEQ ID NO: 1587284 - DNA, 15 bp, Homo sapiens
ttcggtcggggttcc

SEQ ID NO: 1587285 - DNA, 15 bp, Homo sapiens
attcggtcggggttc

SEQ ID NO: 1587286 - DNA, 15 bp, Homo sapiens
aattcggtcggggtt

SEQ ID NO: 1587287 - DNA, 15 bp, Homo sapiens
caattcggtcggggt

SEQ ID NO: 1587288 - DNA, 15 bp, Homo sapiens
ccaattcggtcgggg

SEQ ID NO: 1587289 - DNA, 15 bp, Homo sapiens
tccaattcggtcggg

SEQ ID NO: 1587290 - DNA, 15 bp, Homo sapiens
ttccaattcggtcgg

SEQ ID NO: 1587291 - DNA, 15 bp, Homo sapiens
tttccaattcggtcg

SEQ ID NO: 1587292 - DNA, 15 bp, Homo sapiens
ctttccaattcggtc

SEQ ID NO: 1587293 - DNA, 15 bp, Homo sapiens
actttccaattcggt

SEQ ID NO: 1587294 - DNA, 15 bp, Homo sapiens
cactttccaattcgg

SEQ ID NO: 1587295 - DNA, 15 bp, Homo sapiens
ccactttccaattcg

SEQ ID NO: 1587296 - DNA, 15 bp, Homo sapiens
accactttccaattc

SEQ ID NO: 1587297 - DNA, 15 bp, Homo sapiens
aaccactttccaatt

SEQ ID NO: 1587298 - DNA, 15 bp, Homo sapiens
gaaccactttccaat

SEQ ID NO: 1587299 - DNA, 15 bp, Homo sapiens
ggaaccactttccaa

SEQ ID NO: 1587300 - DNA, 15 bp, Homo sapiens
tggaaccactttcca

SEQ ID NO: 1587301 - DNA, 15 bp, Homo sapiens
gtggaaccactttcc

SEQ ID NO: 1587302 - DNA, 15 bp, Homo sapiens
agtggaaccactttc

SEQ ID NO: 1587303 - DNA, 15 bp, Homo sapiens
aagtggaaccacttt

SEQ ID NO: 1587304 - DNA, 15 bp, Homo sapiens
aaagtggaaccactt

SEQ ID NO: 1587305 - DNA, 15 bp, Homo sapiens
caaagtggaaccact

SEQ ID NO: 1587306 - DNA, 15 bp, Homo sapiens
acaaagtggaaccac

SEQ ID NO: 1587307 - DNA, 15 bp, Homo sapiens
tacaaagtggaacca

SEQ ID NO: 1587308 - DNA, 15 bp, Homo sapiens
ttacaaagtggaacc

SEQ ID NO: 1587309 - DNA, 15 bp, Homo sapiens
gttacaaagtggaac

SEQ ID NO: 1587310 - DNA, 15 bp, Homo sapiens
agttacaaagtggaa

SEQ ID NO: 1587311 - DNA, 15 bp, Homo sapiens
gagttacaaagtgga

SEQ ID NO: 1587312 - DNA, 15 bp, Homo sapiens
ggagttacaaagtgg

SEQ ID NO: 1587313 - DNA, 15 bp, Homo sapiens
cggagttacaaagtg

SEQ ID NO: 1587314 - DNA, 15 bp, Homo sapiens
gcggagttacaaagt

SEQ ID NO: 1587315 - DNA, 15 bp, Homo sapiens
tgcggagttacaaag

SEQ ID NO: 1587316 - DNA, 15 bp, Homo sapiens
ttgcggagttacaaa

SEQ ID NO: 1587317 - DNA, 15 bp, Homo sapiens
cttgcggagttacaa

SEQ ID NO: 1587318 - DNA, 15 bp, Homo sapiens
acttgcggagttaca

SEQ ID NO: 1587319 - DNA, 15 bp, Homo sapiens
aacttgcggagttac

SEQ ID NO: 1587320 - DNA, 15 bp, Homo sapiens
caacttgcggagtta

SEQ ID NO: 1587321 - DNA, 15 bp, Homo sapiens
ccaacttgcggagtt

SEQ ID NO: 1587322 - DNA, 15 bp, Homo sapiens
accaacttgcggagt

SEQ ID NO: 1587323 - DNA, 15 bp, Homo sapiens
aaccaacttgcggag

SEQ ID NO: 1587324 - DNA, 15 bp, Homo sapiens
caaccaacttgcgga

SEQ ID NO: 1587325 - DNA, 15 bp, Homo sapiens
gcaaccaacttgcgg

SEQ ID NO: 1587326 - DNA, 15 bp, Homo sapiens
tgcaaccaacttgcg

SEQ ID NO: 1587327 - DNA, 15 bp, Homo sapiens
ttgcaaccaacttgc

SEQ ID NO: 1587328 - DNA, 15 bp, Homo sapiens
tttgcaaccaacttg

SEQ ID NO: 1587329 - DNA, 15 bp, Homo sapiens
ctttgcaaccaactt

SEQ ID NO: 1587330 - DNA, 15 bp, Homo sapiens
gctttgcaaccaact

SEQ ID NO: 1587331 - DNA, 15 bp, Homo sapiens
tgctttgcaaccaac

SEQ ID NO: 1587332 - DNA, 15 bp, Homo sapiens
ctgctttgcaaccaa

SEQ ID NO: 1587333 - DNA, 15 bp, Homo sapiens
gctgctttgcaacca

SEQ ID NO: 1587334 - DNA, 15 bp, Homo sapiens
tgctgctttgcaacc

SEQ ID NO: 1587335 - DNA, 15 bp, Homo sapiens
atgctgctttgcaac

SEQ ID NO: 1587336 - DNA, 15 bp, Homo sapiens
aatgctgctttgcaa

SEQ ID NO: 1587337 - DNA, 15 bp, Homo sapiens
gaatgctgctttgca

SEQ ID NO: 1587338 - DNA, 15 bp, Homo sapiens
tgaatgctgctttgc

SEQ ID NO: 1587339 - DNA, 15 bp, Homo sapiens
gtgaatgctgctttg

SEQ ID NO: 1587340 - DNA, 15 bp, Homo sapiens
ggtgaatgctgcttt

SEQ ID NO: 1587341 - DNA, 15 bp, Homo sapiens
aggtgaatgctgctt

SEQ ID NO: 1587342 - DNA, 15 bp, Homo sapiens
aaggtgaatgctgct

SEQ ID NO: 1587343 - DNA, 15 bp, Homo sapiens
gaaggtgaatgctgc

SEQ ID NO: 1587344 - DNA, 15 bp, Homo sapiens
ggaaggtgaatgctg

SEQ ID NO: 1587345 - DNA, 15 bp, Homo sapiens
aggaaggtgaatgct

SEQ ID NO: 1587346 - DNA, 15 bp, Homo sapiens
aaggaaggtgaatgc

SEQ ID NO: 1587347 - DNA, 15 bp, Homo sapiens
gaaggaaggtgaatg

SEQ ID NO: 1587348 - DNA, 15 bp, Homo sapiens
ggaaggaaggtgaat

SEQ ID NO: 1587349 - DNA, 15 bp, Homo sapiens
aggaaggaaggtgaa

SEQ ID NO: 1587350 - DNA, 15 bp, Homo sapiens
gaggaaggaaggtga

SEQ ID NO: 1587351 - DNA, 15 bp, Homo sapiens
agaggaaggaaggtg

SEQ ID NO: 1587352 - DNA, 15 bp, Homo sapiens
gagaggaaggaaggt

SEQ ID NO: 1587353 - DNA, 15 bp, Homo sapiens
tgagaggaaggaagg

SEQ ID NO: 1587354 - DNA, 15 bp, Homo sapiens
ttgagaggaaggaag

SEQ ID NO: 1587355 - DNA, 15 bp, Homo sapiens
gttgagaggaaggaa

SEQ ID NO: 1587356 - DNA, 15 bp, Homo sapiens
ggttgagaggaagga

SEQ ID NO: 1587357 - DNA, 15 bp, Homo sapiens
tggttgagaggaagg

SEQ ID NO: 1587358 - DNA, 15 bp, Homo sapiens
atggttgagaggaag

SEQ ID NO: 1587359 - DNA, 15 bp, Homo sapiens
gatggttgagaggaa

SEQ ID NO: 1587360 - DNA, 15 bp, Homo sapiens
agatggttgagagga

SEQ ID NO: 1587361 - DNA, 15 bp, Homo sapiens
gagatggttgagagg

SEQ ID NO: 1587362 - DNA, 15 bp, Homo sapiens
agagatggttgagag

SEQ ID NO: 1587363 - DNA, 15 bp, Homo sapiens
gagagatggttgaga

SEQ ID NO: 1587364 - DNA, 15 bp, Homo sapiens
ggagagatggttgag

SEQ ID NO: 1587365 - DNA, 15 bp, Homo sapiens
aggagagatggttga

SEQ ID NO: 1587366 - DNA, 15 bp, Homo sapiens
gaggagagatggttg

SEQ ID NO: 1587367 - DNA, 15 bp, Homo sapiens
ggaggagagatggtt

SEQ ID NO: 1587368 - DNA, 15 bp, Homo sapiens
aggaggagagatggt

SEQ ID NO: 1587369 - DNA, 15 bp, Homo sapiens
gaggaggagagatgg

SEQ ID NO: 1587370 - DNA, 15 bp, Homo sapiens
agaggaggagagatg

SEQ ID NO: 1587371 - DNA, 15 bp, Homo sapiens
cagaggaggagagat

SEQ ID NO: 1587372 - DNA, 15 bp, Homo sapiens
acagaggaggagaga

SEQ ID NO: 1587373 - DNA, 15 bp, Homo sapiens
aacagaggaggagag

SEQ ID NO: 1587374 - DNA, 15 bp, Homo sapiens
taacagaggaggaga

SEQ ID NO: 1587375 - DNA, 15 bp, Homo sapiens
gtaacagaggaggag

SEQ ID NO: 1587376 - DNA, 15 bp, Homo sapiens
agtaacagaggagga

SEQ ID NO: 1587377 - DNA, 15 bp, Homo sapiens
gagtaacagaggagg

SEQ ID NO: 1587378 - DNA, 15 bp, Homo sapiens
ggagtaacagaggag

SEQ ID NO: 1587379 - DNA, 15 bp, Homo sapiens
gggagtaacagagga

SEQ ID NO: 1587380 - DNA, 15 bp, Homo sapiens
ggggagtaacagagg

SEQ ID NO: 1587381 - DNA, 15 bp, Homo sapiens
gggggagtaacagag

SEQ ID NO: 1587382 - DNA, 15 bp, Homo sapiens
tgggggagtaacaga

SEQ ID NO: 1587383 - DNA, 15 bp, Homo sapiens
gtgggggagtaacag

SEQ ID NO: 1587384 - DNA, 15 bp, Homo sapiens
ggtgggggagtaaca

SEQ ID NO: 1587385 - DNA, 15 bp, Homo sapiens
gggtgggggagtaac

SEQ ID NO: 1587386 - DNA, 15 bp, Homo sapiens
ggggtgggggagtaa

SEQ ID NO: 1587387 - DNA, 15 bp, Homo sapiens
tggggtgggggagta

SEQ ID NO: 1587388 - DNA, 15 bp, Homo sapiens
gtggggtgggggagt

SEQ ID NO: 1587389 - DNA, 15 bp, Homo sapiens
ggtggggtgggggag

SEQ ID NO: 1587390 - DNA, 15 bp, Homo sapiens
aggtggggtggggga

SEQ ID NO: 1587391 - DNA, 15 bp, Homo sapiens
gaggtggggtggggg

SEQ ID NO: 1587392 - DNA, 15 bp, Homo sapiens
ggaggtggggtgggg

SEQ ID NO: 1587393 - DNA, 15 bp, Homo sapiens
aggaggtggggtggg

SEQ ID NO: 1587394 - DNA, 15 bp, Homo sapiens
caggaggtggggtgg

SEQ ID NO: 1587395 - DNA, 15 bp, Homo sapiens
gcaggaggtggggtg

SEQ ID NO: 1587396 - DNA, 15 bp, Homo sapiens
ggcaggaggtggggt

SEQ ID NO: 1587397 - DNA, 15 bp, Homo sapiens
gggcaggaggtgggg

SEQ ID NO: 1587398 - DNA, 15 bp, Homo sapiens
agggcaggaggtggg

SEQ ID NO: 1587399 - DNA, 15 bp, Homo sapiens
gagggcaggaggtgg

SEQ ID NO: 1587400 - DNA, 15 bp, Homo sapiens
ggagggcaggaggtg

SEQ ID NO: 1587401 - DNA, 15 bp, Homo sapiens
gggagggcaggaggt

SEQ ID NO: 1587402 - DNA, 15 bp, Homo sapiens
ggggagggcaggagg

SEQ ID NO: 1587403 - DNA, 15 bp, Homo sapiens
cggggagggcaggag

SEQ ID NO: 1587404 - DNA, 15 bp, Homo sapiens
gcggggagggcagga

SEQ ID NO: 1587405 - DNA, 15 bp, Homo sapiens
agcggggagggcagg

SEQ ID NO: 1587406 - DNA, 15 bp, Homo sapiens
gagcggggagggcag

SEQ ID NO: 1587407 - DNA, 15 bp, Homo sapiens
agagcggggagggca

SEQ ID NO: 1587408 - DNA, 15 bp, Homo sapiens
gagagcggggagggc

SEQ ID NO: 1587409 - DNA, 15 bp, Homo sapiens
cgagagcggggaggg

SEQ ID NO: 1587410 - DNA, 15 bp, Homo sapiens
ccgagagcggggagg

SEQ ID NO: 1587411 - DNA, 15 bp, Homo sapiens
accgagagcggggag

SEQ ID NO: 1587412 - DNA, 15 bp, Homo sapiens
aaccgagagcgggga

SEQ ID NO: 1587413 - DNA, 15 bp, Homo sapiens
gaaccgagagcgggg

SEQ ID NO: 1587414 - DNA, 15 bp, Homo sapiens
ggaaccgagagcggg

SEQ ID NO: 1587415 - DNA, 15 bp, Homo sapiens
gggaaccgagagcgg

SEQ ID NO: 1587416 - DNA, 15 bp, Homo sapiens
agggaaccgagagcg

SEQ ID NO: 1587417 - DNA, 15 bp, Homo sapiens
gagggaaccgagagc

SEQ ID NO: 1587418 - DNA, 15 bp, Homo sapiens
ggagggaaccgagag

SEQ ID NO: 1587419 - DNA, 15 bp, Homo sapiens
aggagggaaccgaga

SEQ ID NO: 1587420 - DNA, 15 bp, Homo sapiens
gaggagggaaccgag

SEQ ID NO: 1587421 - DNA, 15 bp, Homo sapiens
ggaggagggaaccga

SEQ ID NO: 1587422 - DNA, 15 bp, Homo sapiens
aggaggagggaaccg

SEQ ID NO: 1587423 - DNA, 15 bp, Homo sapiens
aaggaggagggaacc

SEQ ID NO: 1587424 - DNA, 15 bp, Homo sapiens
gaaggaggagggaac

SEQ ID NO: 1587425 - DNA, 15 bp, Homo sapiens
ggaaggaggagggaa

SEQ ID NO: 1587426 - DNA, 15 bp, Homo sapiens
gggaaggaggaggga

SEQ ID NO: 1587427 - DNA, 15 bp, Homo sapiens
ggggaaggaggaggg

SEQ ID NO: 1587428 - DNA, 15 bp, Homo sapiens
aggggaaggaggagg

SEQ ID NO: 1587429 - DNA, 15 bp, Homo sapiens
gaggggaaggaggag

SEQ ID NO: 1587430 - DNA, 15 bp, Homo sapiens
ggaggggaaggagga

SEQ ID NO: 1587431 - DNA, 15 bp, Homo sapiens
gggaggggaaggagg

SEQ ID NO: 1587432 - DNA, 15 bp, Homo sapiens
ggggaggggaaggag

SEQ ID NO: 1587433 - DNA, 15 bp, Homo sapiens
aggggaggggaagga

SEQ ID NO: 1587434 - DNA, 15 bp, Homo sapiens
gaggggaggggaagg

SEQ ID NO: 1587435 - DNA, 15 bp, Homo sapiens
ggaggggaggggaag

SEQ ID NO: 1587436 - DNA, 15 bp, Homo sapiens
tggaggggaggggaa

SEQ ID NO: 1587437 - DNA, 15 bp, Homo sapiens
ggtggaggggagggg

SEQ ID NO: 1587438 - DNA, 15 bp, Homo sapiens
aggtggaggggaggg

SEQ ID NO: 1587439 - DNA, 15 bp, Homo sapiens
gaggtggaggggagg

SEQ ID NO: 1587440 - DNA, 15 bp, Homo sapiens
ggaggtggaggggag

SEQ ID NO: 1587441 - DNA, 15 bp, Homo sapiens
aggaggtggagggga

SEQ ID NO: 1587442 - DNA, 15 bp, Homo sapiens
gaggaggtggagggg

SEQ ID NO: 1587443 - DNA, 15 bp, Homo sapiens
ggaggaggtggaggg

SEQ ID NO: 1587444 - DNA, 15 bp, Homo sapiens
gggaggaggtggagg

SEQ ID NO: 1587445 - DNA, 15 bp, Homo sapiens
ggggaggaggtggag

SEQ ID NO: 1587446 - DNA, 15 bp, Homo sapiens
cggggaggaggtgga

SEQ ID NO: 1587447 - DNA, 15 bp, Homo sapiens
gcggggaggaggtgg

SEQ ID NO: 1587448 - DNA, 15 bp, Homo sapiens
cgcggggaggaggtg

SEQ ID NO: 1587449 - DNA, 15 bp, Homo sapiens
gcgcggggaggaggt

SEQ ID NO: 1587450 - DNA, 15 bp, Homo sapiens
agcgcggggaggagg

SEQ ID NO: 1587451 - DNA, 15 bp, Homo sapiens
gagcgcggggaggag

SEQ ID NO: 1587452 - DNA, 15 bp, Homo sapiens
ggagcgcggggagga

SEQ ID NO: 1587453 - DNA, 15 bp, Homo sapiens
cggagcgcggggagg

SEQ ID NO: 1587454 - DNA, 15 bp, Homo sapiens
gcggagcgcggggag

SEQ ID NO: 1587455 - DNA, 15 bp, Homo sapiens
agcggagcgcgggga

SEQ ID NO: 1587456 - DNA, 15 bp, Homo sapiens
cagcggagcgcgggg

SEQ ID NO: 1587457 - DNA, 15 bp, Homo sapiens
ccagcggagcgcggg

SEQ ID NO: 1587458 - DNA, 15 bp, Homo sapiens
accagcggagcgcgg

SEQ ID NO: 1587459 - DNA, 15 bp, Homo sapiens
taccagcggagcgcg

SEQ ID NO: 1587460 - DNA, 15 bp, Homo sapiens
gtaccagcggagcgc

SEQ ID NO: 1587461 - DNA, 15 bp, Homo sapiens
ggtaccagcggagcg

SEQ ID NO: 1587462 - DNA, 15 bp, Homo sapiens
gggtaccagcggagc

SEQ ID NO: 1587463 - DNA, 15 bp, Homo sapiens
ggggtaccagcggag

SEQ ID NO: 1587464 - DNA, 15 bp, Homo sapiens
tggggtaccagcgga

SEQ ID NO: 1587465 - DNA, 15 bp, Homo sapiens
gtggggtaccagcgg

SEQ ID NO: 1587466 - DNA, 15 bp, Homo sapiens
tgtggggtaccagcg

SEQ ID NO: 1587467 - DNA, 15 bp, Homo sapiens
ttgtggggtaccagc

SEQ ID NO: 1587468 - DNA, 15 bp, Homo sapiens
tttgtggggtaccag

SEQ ID NO: 1587469 - DNA, 15 bp, Homo sapiens
ttttgtggggtacca

SEQ ID NO: 1587470 - DNA, 15 bp, Homo sapiens
tttttgtggggtacc

SEQ ID NO: 1587471 - DNA, 15 bp, Homo sapiens
ttttttgtggggtac

SEQ ID NO: 1587472 - DNA, 15 bp, Homo sapiens
attttttgtggggta

SEQ ID NO: 1587473 - DNA, 15 bp, Homo sapiens
cattttttgtggggt

SEQ ID NO: 1587474 - DNA, 15 bp, Homo sapiens
ccattttttgtgggg

SEQ ID NO: 1587475 - DNA, 15 bp, Homo sapiens
cccattttttgtggg

SEQ ID NO: 1587476 - DNA, 15 bp, Homo sapiens
ccccattttttgtgg

SEQ ID NO: 1587477 - DNA, 15 bp, Homo sapiens
cccccattttttgtg

SEQ ID NO: 1587478 - DNA, 15 bp, Homo sapiens
acccccattttttgt

SEQ ID NO: 1587479 - DNA, 15 bp, Homo sapiens
cacccccattttttg

SEQ ID NO: 1587480 - DNA, 15 bp, Homo sapiens
ccacccccatttttt

SEQ ID NO: 1587481 - DNA, 15 bp, Homo sapiens
cccacccccattttt

SEQ ID NO: 1587482 - DNA, 15 bp, Homo sapiens
ccccacccccatttt

SEQ ID NO: 1587483 - DNA, 15 bp, Homo sapiens
cccccacccccattt

SEQ ID NO: 1587484 - DNA, 15 bp, Homo sapiens
acccccacccccatt

SEQ ID NO: 1587485 - DNA, 15 bp, Homo sapiens
cacccccacccccat

SEQ ID NO: 1587486 - DNA, 15 bp, Homo sapiens
acacccccaccccca

SEQ ID NO: 1587487 - DNA, 15 bp, Homo sapiens
gacacccccaccccc

SEQ ID NO: 1587488 - DNA, 15 bp, Homo sapiens
ggacacccccacccc

SEQ ID NO: 1587489 - DNA, 15 bp, Homo sapiens
tggacacccccaccc

SEQ ID NO: 1587490 - DNA, 15 bp, Homo sapiens
ttggacacccccacc

SEQ ID NO: 1587491 - DNA, 15 bp, Homo sapiens
cttggacacccccac

SEQ ID NO: 1587492 - DNA, 15 bp, Homo sapiens
ccttggacaccccca

SEQ ID NO: 1587493 - DNA, 15 bp, Homo sapiens
cccttggacaccccc

SEQ ID NO: 1587494 - DNA, 15 bp, Homo sapiens
tcccttggacacccc

SEQ ID NO: 1587495 - DNA, 15 bp, Homo sapiens
ctcccttggacaccc

SEQ ID NO: 1587496 - DNA, 15 bp, Homo sapiens
cctcccttggacacc

SEQ ID NO: 1587497 - DNA, 15 bp, Homo sapiens
ccctcccttggacac

SEQ ID NO: 1587498 - DNA, 15 bp, Homo sapiens
cccctcccttggaca

SEQ ID NO: 1587499 - DNA, 15 bp, Homo sapiens
ccccctcccttggac

SEQ ID NO: 1587500 - DNA, 15 bp, Homo sapiens
cccccctcccttgga

SEQ ID NO: 1587501 - DNA, 15 bp, Homo sapiens
tcccccctcccttgg

SEQ ID NO: 1587502 - DNA, 15 bp, Homo sapiens
ttcccccctcccttg

SEQ ID NO: 1587503 - DNA, 15 bp, Homo sapiens
tttcccccctccctt

SEQ ID NO: 1587504 - DNA, 15 bp, Homo sapiens
atttcccccctccct

SEQ ID NO: 1587505 - DNA, 15 bp, Homo sapiens
catttcccccctccc

SEQ ID NO: 1587506 - DNA, 15 bp, Homo sapiens
gcatttcccccctcc

SEQ ID NO: 1587507 - DNA, 15 bp, Homo sapiens
agcatttcccccctc

SEQ ID NO: 1587508 - DNA, 15 bp, Homo sapiens
aagcatttcccccct

SEQ ID NO: 1587509 - DNA, 15 bp, Homo sapiens
aaagcatttcccccc

SEQ ID NO: 1587510 - DNA, 15 bp, Homo sapiens
caaagcatttccccc

SEQ ID NO: 1587511 - DNA, 15 bp, Homo sapiens
ccaaagcatttcccc

SEQ ID NO: 1587512 - DNA, 15 bp, Homo sapiens
cccaaagcatttccc

SEQ ID NO: 1587513 - DNA, 15 bp, Homo sapiens
acccaaagcatttcc

SEQ ID NO: 1587514 - DNA, 15 bp, Homo sapiens
gacccaaagcatttc

SEQ ID NO: 1587515 - DNA, 15 bp, Homo sapiens
agacccaaagcattt

SEQ ID NO: 1587516 - DNA, 15 bp, Homo sapiens
gagacccaaagcatt

SEQ ID NO: 1587517 - DNA, 15 bp, Homo sapiens
cgagacccaaagcat

SEQ ID NO: 1587518 - DNA, 15 bp, Homo sapiens
acgagacccaaagca

SEQ ID NO: 1587519 - DNA, 15 bp, Homo sapiens
gacgagacccaaagc

SEQ ID NO: 1587520 - DNA, 15 bp, Homo sapiens
agacgagacccaaag

SEQ ID NO: 1587521 - DNA, 15 bp, Homo sapiens
gagacgagacccaaa

SEQ ID NO: 1587522 - DNA, 15 bp, Homo sapiens
agagacgagacccaa

SEQ ID NO: 1587523 - DNA, 15 bp, Homo sapiens
cagagacgagaccca

SEQ ID NO: 1587524 - DNA, 15 bp, Homo sapiens
gcagagacgagaccc

SEQ ID NO: 1587525 - DNA, 15 bp, Homo sapiens
ggcagagacgagacc

SEQ ID NO: 1587526 - DNA, 15 bp, Homo sapiens
aggcagagacgagac

SEQ ID NO: 1587527 - DNA, 15 bp, Homo sapiens
gaggcagagacgaga

SEQ ID NO: 1587528 - DNA, 15 bp, Homo sapiens
agaggcagagacgag

SEQ ID NO: 1587529 - DNA, 15 bp, Homo sapiens
gagaggcagagacga

SEQ ID NO: 1587530 - DNA, 15 bp, Homo sapiens
agagaggcagagacg

SEQ ID NO: 1587531 - DNA, 15 bp, Homo sapiens
gagagaggcagagac

SEQ ID NO: 1587532 - DNA, 15 bp, Homo sapiens
agagagaggcagaga

SEQ ID NO: 1587533 - DNA, 15 bp, Homo sapiens
gagagagaggcagag

SEQ ID NO: 1587534 - DNA, 15 bp, Homo sapiens
agagagagaggcaga

SEQ ID NO: 1587535 - DNA, 15 bp, Homo sapiens
gagagagagaggcag

SEQ ID NO: 1587536 - DNA, 15 bp, Homo sapiens
agagagagagaggca

SEQ ID NO: 1587537 - DNA, 15 bp, Homo sapiens
gagagagagagaggc

SEQ ID NO: 1587538 - DNA, 15 bp, Homo sapiens
caaagagagagagag

SEQ ID NO: 1587539 - DNA, 15 bp, Homo sapiens
tcaaagagagagaga

SEQ ID NO: 1587540 - DNA, 15 bp, Homo sapiens
ctcaaagagagagag

SEQ ID NO: 1587541 - DNA, 15 bp, Homo sapiens
tctcaaagagagaga

SEQ ID NO: 1587542 - DNA, 15 bp, Homo sapiens
gtctcaaagagagag

SEQ ID NO: 1587543 - DNA, 15 bp, Homo sapiens
ggtctcaaagagaga

SEQ ID NO: 1587544 - DNA, 15 bp, Homo sapiens
aggtctcaaagagag

SEQ ID NO: 1587545 - DNA, 15 bp, Homo sapiens
taggtctcaaagaga

SEQ ID NO: 1587546 - DNA, 15 bp, Homo sapiens
ttaggtctcaaagag

SEQ ID NO: 1587547 - DNA, 15 bp, Homo sapiens
tttaggtctcaaaga

SEQ ID NO: 1587548 - DNA, 15 bp, Homo sapiens
ttttaggtctcaaag

SEQ ID NO: 1587549 - DNA, 15 bp, Homo sapiens
tttttaggtctcaaa

SEQ ID NO: 1587550 - DNA, 15 bp, Homo sapiens
atttttaggtctcaa

SEQ ID NO: 1587551 - DNA, 15 bp, Homo sapiens
gatttttaggtctca

SEQ ID NO: 1587552 - DNA, 15 bp, Homo sapiens
ggatttttaggtctc

SEQ ID NO: 1587553 - DNA, 15 bp, Homo sapiens
aggatttttaggtct

SEQ ID NO: 1587554 - DNA, 15 bp, Homo sapiens
caggatttttaggtc

SEQ ID NO: 1587555 - DNA, 15 bp, Homo sapiens
tcaggatttttaggt

SEQ ID NO: 1587556 - DNA, 15 bp, Homo sapiens
gtcaggatttttagg

SEQ ID NO: 1587557 - DNA, 15 bp, Homo sapiens
tgtcaggatttttag

SEQ ID NO: 1587558 - DNA, 15 bp, Homo sapiens
ttgtcaggattttta

SEQ ID NO: 1587559 - DNA, 15 bp, Homo sapiens
cttgtcaggattttt

SEQ ID NO: 1587560 - DNA, 15 bp, Homo sapiens
acttgtcaggatttt

SEQ ID NO: 1587561 - DNA, 15 bp, Homo sapiens
cacttgtcaggattt

SEQ ID NO: 1587562 - DNA, 15 bp, Homo sapiens
tcacttgtcaggatt

SEQ ID NO: 1587563 - DNA, 15 bp, Homo sapiens
ttcacttgtcaggat

SEQ ID NO: 1587564 - DNA, 15 bp, Homo sapiens
tttcacttgtcagga

SEQ ID NO: 1587565 - DNA, 15 bp, Homo sapiens
gtttcacttgtcagg

SEQ ID NO: 1587566 - DNA, 15 bp, Homo sapiens
agtttcacttgtcag

SEQ ID NO: 1587567 - DNA, 15 bp, Homo sapiens
aagtttcacttgtca

SEQ ID NO: 1587568 - DNA, 15 bp, Homo sapiens
taagtttcacttgtc

SEQ ID NO: 1587569 - DNA, 15 bp, Homo sapiens
ttaagtttcacttgt

SEQ ID NO: 1587570 - DNA, 15 bp, Homo sapiens
tttaagtttcacttg

SEQ ID NO: 1587571 - DNA, 15 bp, Homo sapiens
ctttaagtttcactt

SEQ ID NO: 1587572 - DNA, 15 bp, Homo sapiens
cctttaagtttcact

SEQ ID NO: 1587573 - DNA, 15 bp, Homo sapiens
acctttaagtttcac

SEQ ID NO: 1587574 - DNA, 15 bp, Homo sapiens
cacctttaagtttca

SEQ ID NO: 1587575 - DNA, 15 bp, Homo sapiens
acacctttaagtttc

SEQ ID NO: 1587576 - DNA, 15 bp, Homo sapiens
aacacctttaagttt

SEQ ID NO: 1587577 - DNA, 15 bp, Homo sapiens
aaacacctttaagtt

SEQ ID NO: 1587578 - DNA, 15 bp, Homo sapiens
taaacacctttaagt

SEQ ID NO: 1587579 - DNA, 15 bp, Homo sapiens
gtaaacacctttaag

SEQ ID NO: 1587580 - DNA, 15 bp, Homo sapiens
ggtaaacacctttaa

SEQ ID NO: 1587581 - DNA, 15 bp, Homo sapiens
aggtaaacaccttta

SEQ ID NO: 1587582 - DNA, 15 bp, Homo sapiens
aaggtaaacaccttt

SEQ ID NO: 1587583 - DNA, 15 bp, Homo sapiens
caaggtaaacacctt

SEQ ID NO: 1587584 - DNA, 15 bp, Homo sapiens
acaaggtaaacacct

SEQ ID NO: 1587585 - DNA, 15 bp, Homo sapiens
gacaaggtaaacacc

SEQ ID NO: 1587586 - DNA, 15 bp, Homo sapiens
tgacaaggtaaacac

SEQ ID NO: 1587587 - DNA, 15 bp, Homo sapiens
atgacaaggtaaaca

SEQ ID NO: 1587588 - DNA, 15 bp, Homo sapiens
gatgacaaggtaaac

SEQ ID NO: 1587589 - DNA, 15 bp, Homo sapiens
tgatgacaaggtaaa

SEQ ID NO: 1587590 - DNA, 15 bp, Homo sapiens
ctgatgacaaggtaa

SEQ ID NO: 1587591 - DNA, 15 bp, Homo sapiens
gctgatgacaaggta

SEQ ID NO: 1587592 - DNA, 15 bp, Homo sapiens
tgctgatgacaaggt

SEQ ID NO: 1587593 - DNA, 15 bp, Homo sapiens
atgctgatgacaagg

SEQ ID NO: 1587594 - DNA, 15 bp, Homo sapiens
catgctgatgacaag

SEQ ID NO: 1587595 - DNA, 15 bp, Homo sapiens
acatgctgatgacaa

SEQ ID NO: 1587596 - DNA, 15 bp, Homo sapiens
tacatgctgatgaca

SEQ ID NO: 1587597 - DNA, 15 bp, Homo sapiens
ttacatgctgatgac

SEQ ID NO: 1587598 - DNA, 15 bp, Homo sapiens
cttacatgctgatga

SEQ ID NO: 1587599 - DNA, 15 bp, Homo sapiens
gcttacatgctgatg

SEQ ID NO: 1587600 - DNA, 15 bp, Homo sapiens
agcttacatgctgat

SEQ ID NO: 1587601 - DNA, 15 bp, Homo sapiens
tagcttacatgctga

SEQ ID NO: 1587602 - DNA, 15 bp, Homo sapiens
ttagcttacatgctg

SEQ ID NO: 1587603 - DNA, 15 bp, Homo sapiens
attagcttacatgct

SEQ ID NO: 1587604 - DNA, 15 bp, Homo sapiens
aattagcttacatgc

SEQ ID NO: 1587605 - DNA, 15 bp, Homo sapiens
taattagcttacatg

SEQ ID NO: 1587606 - DNA, 15 bp, Homo sapiens
ataattagcttacat

SEQ ID NO: 1587607 - DNA, 15 bp, Homo sapiens
gataattagcttaca

SEQ ID NO: 1587608 - DNA, 15 bp, Homo sapiens
agataattagcttac

SEQ ID NO: 1587609 - DNA, 15 bp, Homo sapiens
gagataattagctta

SEQ ID NO: 1587610 - DNA, 15 bp, Homo sapiens
cgagataattagctt

SEQ ID NO: 1587611 - DNA, 15 bp, Homo sapiens
ccgagataattagct

SEQ ID NO: 1587612 - DNA, 15 bp, Homo sapiens
cccgagataattagc

SEQ ID NO: 1587613 - DNA, 15 bp, Homo sapiens
gcccgagataattag

SEQ ID NO: 1587614 - DNA, 15 bp, Homo sapiens
tgcccgagataatta

SEQ ID NO: 1587615 - DNA, 15 bp, Homo sapiens
ttgcccgagataatt

SEQ ID NO: 1587616 - DNA, 15 bp, Homo sapiens
cttgcccgagataat

SEQ ID NO: 1587617 - DNA, 15 bp, Homo sapiens
tcttgcccgagataa

SEQ ID NO: 1587618 - DNA, 15 bp, Homo sapiens
atcttgcccgagata

SEQ ID NO: 1587619 - DNA, 15 bp, Homo sapiens
catcttgcccgagat

SEQ ID NO: 1587620 - DNA, 15 bp, Homo sapiens
acatcttgcccgaga

SEQ ID NO: 1587621 - DNA, 15 bp, Homo sapiens
tacatcttgcccgag

SEQ ID NO: 1587622 - DNA, 15 bp, Homo sapiens
ctacatcttgcccga

SEQ ID NO: 1587623 - DNA, 15 bp, Homo sapiens
cctacatcttgcccg

SEQ ID NO: 1587624 - DNA, 15 bp, Homo sapiens
gcctacatcttgccc

SEQ ID NO: 1587625 - DNA, 15 bp, Homo sapiens
agcctacatcttgcc

SEQ ID NO: 1587626 - DNA, 15 bp, Homo sapiens
aagcctacatcttgc

SEQ ID NO: 1587627 - DNA, 15 bp, Homo sapiens
gaagcctacatcttg

SEQ ID NO: 1587628 - DNA, 15 bp, Homo sapiens
agaagcctacatctt

SEQ ID NO: 1587629 - DNA, 15 bp, Homo sapiens
tagaagcctacatct

SEQ ID NO: 1587630 - DNA, 15 bp, Homo sapiens
atagaagcctacatc

SEQ ID NO: 1587631 - DNA, 15 bp, Homo sapiens
aatagaagcctacat

SEQ ID NO: 1587632 - DNA, 15 bp, Homo sapiens
caatagaagcctaca

SEQ ID NO: 1587633 - DNA, 15 bp, Homo sapiens
acaatagaagcctac

SEQ ID NO: 1587634 - DNA, 15 bp, Homo sapiens
gacaatagaagccta

SEQ ID NO: 1587635 - DNA, 15 bp, Homo sapiens
agacaatagaagcct

SEQ ID NO: 1587636 - DNA, 15 bp, Homo sapiens
aagacaatagaagcc

SEQ ID NO: 1587637 - DNA, 15 bp, Homo sapiens
caagacaatagaagc

SEQ ID NO: 1587638 - DNA, 15 bp, Homo sapiens
acaagacaatagaag

SEQ ID NO: 1587639 - DNA, 15 bp, Homo sapiens
aacaagacaatagaa

SEQ ID NO: 1587640 - DNA, 15 bp, Homo sapiens
caacaagacaataga

SEQ ID NO: 1587641 - DNA, 15 bp, Homo sapiens
gcaacaagacaatag

SEQ ID NO: 1587642 - DNA, 15 bp, Homo sapiens
agcaacaagacaata

SEQ ID NO: 1587643 - DNA, 15 bp, Homo sapiens
aagcaacaagacaat

SEQ ID NO: 1587644 - DNA, 15 bp, Homo sapiens
aaagcaacaagacaa

SEQ ID NO: 1587645 - DNA, 15 bp, Homo sapiens
taaagcaacaagaca

SEQ ID NO: 1587646 - DNA, 15 bp, Homo sapiens
ctaaagcaacaagac

SEQ ID NO: 1587647 - DNA, 15 bp, Homo sapiens
gctaaagcaacaaga

SEQ ID NO: 1587648 - DNA, 15 bp, Homo sapiens
cgctaaagcaacaag

SEQ ID NO: 1587649 - DNA, 15 bp, Homo sapiens
gcgctaaagcaacaa

SEQ ID NO: 1587650 - DNA, 15 bp, Homo sapiens
agcgctaaagcaaca

SEQ ID NO: 1587651 - DNA, 15 bp, Homo sapiens
aagcgctaaagcaac

SEQ ID NO: 1587652 - DNA, 15 bp, Homo sapiens
taagcgctaaagcaa

SEQ ID NO: 1587653 - DNA, 15 bp, Homo sapiens
gtaagcgctaaagca

SEQ ID NO: 1587654 - DNA, 15 bp, Homo sapiens
cgtaagcgctaaagc

SEQ ID NO: 1587655 - DNA, 15 bp, Homo sapiens
gcgtaagcgctaaag

SEQ ID NO: 1587656 - DNA, 15 bp, Homo sapiens
ggcgtaagcgctaaa

SEQ ID NO: 1587657 - DNA, 15 bp, Homo sapiens
gggcgtaagcgctaa

SEQ ID NO: 1587658 - DNA, 15 bp, Homo sapiens
ggggcgtaagcgcta

SEQ ID NO: 1587659 - DNA, 15 bp, Homo sapiens
cggggcgtaagcgct

SEQ ID NO: 1587660 - DNA, 15 bp, Homo sapiens
gcggggcgtaagcgc

SEQ ID NO: 1587661 - DNA, 15 bp, Homo sapiens
ggcggggcgtaagcg

SEQ ID NO: 1587662 - DNA, 15 bp, Homo sapiens
aggcggggcgtaagc

SEQ ID NO: 1587663 - DNA, 15 bp, Homo sapiens
gaggcggggcgtaag

SEQ ID NO: 1587664 - DNA, 15 bp, Homo sapiens
agaggcggggcgtaa

SEQ ID NO: 1587665 - DNA, 15 bp, Homo sapiens
cagaggcggggcgta

SEQ ID NO: 1587666 - DNA, 15 bp, Homo sapiens
ccagaggcggggcgt

SEQ ID NO: 1587667 - DNA, 15 bp, Homo sapiens
accagaggcggggcg

SEQ ID NO: 1587668 - DNA, 15 bp, Homo sapiens
caccagaggcggggc

SEQ ID NO: 1587669 - DNA, 15 bp, Homo sapiens
ccaccagaggcgggg

SEQ ID NO: 1587670 - DNA, 15 bp, Homo sapiens
gccaccagaggcggg

SEQ ID NO: 1587671 - DNA, 15 bp, Homo sapiens
agccaccagaggcgg

SEQ ID NO: 1587672 - DNA, 15 bp, Homo sapiens
cagccaccagaggcg

SEQ ID NO: 1587673 - DNA, 15 bp, Homo sapiens
gcagccaccagaggc

SEQ ID NO: 1587674 - DNA, 15 bp, Homo sapiens
ggcagccaccagagg

SEQ ID NO: 1587675 - DNA, 15 bp, Homo sapiens
aggcagccaccagag

SEQ ID NO: 1587676 - DNA, 15 bp, Homo sapiens
taggcagccaccaga

SEQ ID NO: 1587677 - DNA, 15 bp, Homo sapiens
ttaggcagccaccag

SEQ ID NO: 1587678 - DNA, 15 bp, Homo sapiens
tttaggcagccacca

SEQ ID NO: 1587679 - DNA, 15 bp, Homo sapiens
ttttaggcagccacc

SEQ ID NO: 1587680 - DNA, 15 bp, Homo sapiens
gttttaggcagccac

SEQ ID NO: 1587681 - DNA, 15 bp, Homo sapiens
ggttttaggcagcca

SEQ ID NO: 1587682 - DNA, 15 bp, Homo sapiens
aggttttaggcagcc

SEQ ID NO: 1587683 - DNA, 15 bp, Homo sapiens
caggttttaggcagc

SEQ ID NO: 1587684 - DNA, 15 bp, Homo sapiens
ccaggttttaggcag

SEQ ID NO: 1587685 - DNA, 15 bp, Homo sapiens
gccaggttttaggca

SEQ ID NO: 1587686 - DNA, 15 bp, Homo sapiens
cgccaggttttaggc

SEQ ID NO: 1587687 - DNA, 15 bp, Homo sapiens
gcgccaggttttagg

SEQ ID NO: 1587688 - DNA, 15 bp, Homo sapiens
ggcgccaggttttag

SEQ ID NO: 1587689 - DNA, 15 bp, Homo sapiens
cggcgccaggtttta

SEQ ID NO: 1587690 - DNA, 15 bp, Homo sapiens
ccggcgccaggtttt

SEQ ID NO: 1587691 - DNA, 15 bp, Homo sapiens
cccggcgccaggttt

SEQ ID NO: 1587692 - DNA, 15 bp, Homo sapiens
gcccggcgccaggtt

SEQ ID NO: 1587693 - DNA, 15 bp, Homo sapiens
agcccggcgccaggt

SEQ ID NO: 1587694 - DNA, 15 bp, Homo sapiens
tagcccggcgccagg

SEQ ID NO: 1587695 - DNA, 15 bp, Homo sapiens
ttagcccggcgccag

SEQ ID NO: 1587696 - DNA, 15 bp, Homo sapiens
tttagcccggcgcca

SEQ ID NO: 1587697 - DNA, 15 bp, Homo sapiens
ttttagcccggcgcc

SEQ ID NO: 1587698 - DNA, 15 bp, Homo sapiens
gttttagcccggcgc

SEQ ID NO: 1587699 - DNA, 15 bp, Homo sapiens
tgttttagcccggcg

SEQ ID NO: 1587700 - DNA, 15 bp, Homo sapiens
ttgttttagcccggc

SEQ ID NO: 1587701 - DNA, 15 bp, Homo sapiens
tttgttttagcccgg

SEQ ID NO: 1587702 - DNA, 15 bp, Homo sapiens
gtttgttttagcccg

SEQ ID NO: 1587703 - DNA, 15 bp, Homo sapiens
cgtttgttttagccc

SEQ ID NO: 1587704 - DNA, 15 bp, Homo sapiens
gcgtttgttttagcc

SEQ ID NO: 1587705 - DNA, 15 bp, Homo sapiens
cgcgtttgttttagc

SEQ ID NO: 1587706 - DNA, 15 bp, Homo sapiens
tcgcgtttgttttag

SEQ ID NO: 1587707 - DNA, 15 bp, Homo sapiens
ctcgcgtttgtttta

SEQ ID NO: 1587708 - DNA, 15 bp, Homo sapiens
cctcgcgtttgtttt

SEQ ID NO: 1587709 - DNA, 15 bp, Homo sapiens
gcctcgcgtttgttt

SEQ ID NO: 1587710 - DNA, 15 bp, Homo sapiens
tgcctcgcgtttgtt

SEQ ID NO: 1587711 - DNA, 15 bp, Homo sapiens
ctgcctcgcgtttgt

SEQ ID NO: 1587712 - DNA, 15 bp, Homo sapiens
gctgcctcgcgtttg

SEQ ID NO: 1587713 - DNA, 15 bp, Homo sapiens
ggctgcctcgcgttt

SEQ ID NO: 1587714 - DNA, 15 bp, Homo sapiens
gggctgcctcgcgtt

SEQ ID NO: 1587715 - DNA, 15 bp, Homo sapiens
ggggctgcctcgcgt

SEQ ID NO: 1587716 - DNA, 15 bp, Homo sapiens
gggggctgcctcgcg

SEQ ID NO: 1587717 - DNA, 15 bp, Homo sapiens
cgggggctgcctcgc

SEQ ID NO: 1587718 - DNA, 15 bp, Homo sapiens
tcgggggctgcctcg

SEQ ID NO: 1587719 - DNA, 15 bp, Homo sapiens
ctcgggggctgcctc

SEQ ID NO: 1587720 - DNA, 15 bp, Homo sapiens
gctcgggggctgcct

SEQ ID NO: 1587721 - DNA, 15 bp, Homo sapiens
ggctcgggggctgcc

SEQ ID NO: 1587722 - DNA, 15 bp, Homo sapiens
aggctcgggggctgc

SEQ ID NO: 1587723 - DNA, 15 bp, Homo sapiens
gaggctcgggggctg

SEQ ID NO: 1587724 - DNA, 15 bp, Homo sapiens
ggaggctcgggggct

SEQ ID NO: 1587725 - DNA, 15 bp, Homo sapiens
tggaggctcgggggc

SEQ ID NO: 1587726 - DNA, 15 bp, Homo sapiens
gtggaggctcggggg

SEQ ID NO: 1587727 - DNA, 15 bp, Homo sapiens
agtggaggctcgggg

SEQ ID NO: 1587728 - DNA, 15 bp, Homo sapiens
gagtggaggctcggg

SEQ ID NO: 1587729 - DNA, 15 bp, Homo sapiens
tgagtggaggctcgg

SEQ ID NO: 1587730 - DNA, 15 bp, Homo sapiens
ttgagtggaggctcg

SEQ ID NO: 1587731 - DNA, 15 bp, Homo sapiens
cttgagtggaggctc

SEQ ID NO: 1587732 - DNA, 15 bp, Homo sapiens
gcttgagtggaggct

SEQ ID NO: 1587733 - DNA, 15 bp, Homo sapiens
ggcttgagtggaggc

SEQ ID NO: 1587734 - DNA, 15 bp, Homo sapiens
tggcttgagtggagg

SEQ ID NO: 1587735 - DNA, 15 bp, Homo sapiens
ttggcttgagtggag

SEQ ID NO: 1587736 - DNA, 15 bp, Homo sapiens
attggcttgagtgga

SEQ ID NO: 1587737 - DNA, 15 bp, Homo sapiens
aattggcttgagtgg

SEQ ID NO: 1587738 - DNA, 15 bp, Homo sapiens
taattggcttgagtg

SEQ ID NO: 1587739 - DNA, 15 bp, Homo sapiens
ttaattggcttgagt

SEQ ID NO: 1587740 - DNA, 15 bp, Homo sapiens
cttaattggcttgag

SEQ ID NO: 1587741 - DNA, 15 bp, Homo sapiens
ccttaattggcttga

SEQ ID NO: 1587742 - DNA, 15 bp, Homo sapiens
tccttaattggcttg

SEQ ID NO: 1587743 - DNA, 15 bp, Homo sapiens
ctccttaattggctt

SEQ ID NO: 1587744 - DNA, 15 bp, Homo sapiens
cctccttaattggct

SEQ ID NO: 1587745 - DNA, 15 bp, Homo sapiens
tcctccttaattggc

SEQ ID NO: 1587746 - DNA, 15 bp, Homo sapiens
gtcctccttaattgg

SEQ ID NO: 1587747 - DNA, 15 bp, Homo sapiens
agtcctccttaattg

SEQ ID NO: 1587748 - DNA, 15 bp, Homo sapiens
gagtcctccttaatt

SEQ ID NO: 1587749 - DNA, 15 bp, Homo sapiens
cgagtcctccttaat

SEQ ID NO: 1587750 - DNA, 15 bp, Homo sapiens
ccgagtcctccttaa

SEQ ID NO: 1587751 - DNA, 15 bp, Homo sapiens
accgagtcctcctta

SEQ ID NO: 1587752 - DNA, 15 bp, Homo sapiens
gaccgagtcctcctt

SEQ ID NO: 1587753 - DNA, 15 bp, Homo sapiens
ggaccgagtcctcct

SEQ ID NO: 1587754 - DNA, 15 bp, Homo sapiens
tggaccgagtcctcc

SEQ ID NO: 1587755 - DNA, 15 bp, Homo sapiens
gtggaccgagtcctc

SEQ ID NO: 1587756 - DNA, 15 bp, Homo sapiens
agtggaccgagtcct

SEQ ID NO: 1587757 - DNA, 15 bp, Homo sapiens
gagtggaccgagtcc

SEQ ID NO: 1587758 - DNA, 15 bp, Homo sapiens
ggagtggaccgagtc

SEQ ID NO: 1587759 - DNA, 15 bp, Homo sapiens
cggagtggaccgagt

SEQ ID NO: 1587760 - DNA, 15 bp, Homo sapiens
acggagtggaccgag

SEQ ID NO: 1587761 - DNA, 15 bp, Homo sapiens
aacggagtggaccga

SEQ ID NO: 1587762 - DNA, 15 bp, Homo sapiens
taacggagtggaccg

SEQ ID NO: 1587763 - DNA, 15 bp, Homo sapiens
gtaacggagtggacc

SEQ ID NO: 1587764 - DNA, 15 bp, Homo sapiens
cgtaacggagtggac

SEQ ID NO: 1587765 - DNA, 15 bp, Homo sapiens
acgtaacggagtgga

SEQ ID NO: 1587766 - DNA, 15 bp, Homo sapiens
cacgtaacggagtgg

SEQ ID NO: 1587767 - DNA, 15 bp, Homo sapiens
acacgtaacggagtg

SEQ ID NO: 1587768 - DNA, 15 bp, Homo sapiens
tacacgtaacggagt

SEQ ID NO: 1587769 - DNA, 15 bp, Homo sapiens
gtacacgtaacggag

SEQ ID NO: 1587770 - DNA, 15 bp, Homo sapiens
tgtacacgtaacgga

SEQ ID NO: 1587771 - DNA, 15 bp, Homo sapiens
atgtacacgtaacgg

SEQ ID NO: 1587772 - DNA, 15 bp, Homo sapiens
gatgtacacgtaacg

SEQ ID NO: 1587773 - DNA, 15 bp, Homo sapiens
ggatgtacacgtaac

SEQ ID NO: 1587774 - DNA, 15 bp, Homo sapiens
tggatgtacacgtaa

SEQ ID NO: 1587775 - DNA, 15 bp, Homo sapiens
ttggatgtacacgta

SEQ ID NO: 1587776 - DNA, 15 bp, Homo sapiens
gttggatgtacacgt

SEQ ID NO: 1587777 - DNA, 15 bp, Homo sapiens
tgttggatgtacacg

SEQ ID NO: 1587778 - DNA, 15 bp, Homo sapiens
ttgttggatgtacac

SEQ ID NO: 1587779 - DNA, 15 bp, Homo sapiens
cttgttggatgtaca

SEQ ID NO: 1587780 - DNA, 15 bp, Homo sapiens
tcttgttggatgtac

SEQ ID NO: 1587781 - DNA, 15 bp, Homo sapiens
atcttgttggatgta

SEQ ID NO: 1587782 - DNA, 15 bp, Homo sapiens
gatcttgttggatgt

SEQ ID NO: 1587783 - DNA, 15 bp, Homo sapiens
cgatcttgttggatg

SEQ ID NO: 1587784 - DNA, 15 bp, Homo sapiens
ccgatcttgttggat

SEQ ID NO: 1587785 - DNA, 15 bp, Homo sapiens
gccgatcttgttgga

SEQ ID NO: 1587786 - DNA, 15 bp, Homo sapiens
cgccgatcttgttgg

SEQ ID NO: 1587787 - DNA, 15 bp, Homo sapiens
acgccgatcttgttg

SEQ ID NO: 1587788 - DNA, 15 bp, Homo sapiens
aacgccgatcttgtt

SEQ ID NO: 1587789 - DNA, 15 bp, Homo sapiens
taacgccgatcttgt

SEQ ID NO: 1587790 - DNA, 15 bp, Homo sapiens
ttaacgccgatcttg

SEQ ID NO: 1587791 - DNA, 15 bp, Homo sapiens
cttaacgccgatctt

SEQ ID NO: 1587792 - DNA, 15 bp, Homo sapiens
ccttaacgccgatct

SEQ ID NO: 1587793 - DNA, 15 bp, Homo sapiens
accttaacgccgatc

SEQ ID NO: 1587794 - DNA, 15 bp, Homo sapiens
taccttaacgccgat

SEQ ID NO: 1587795 - DNA, 15 bp, Homo sapiens
ttaccttaacgccga

SEQ ID NO: 1587796 - DNA, 15 bp, Homo sapiens
gttaccttaacgccg

SEQ ID NO: 1587797 - DNA, 15 bp, Homo sapiens
tgttaccttaacgcc

SEQ ID NO: 1587798 - DNA, 15 bp, Homo sapiens
gtgttaccttaacgc

SEQ ID NO: 1587799 - DNA, 15 bp, Homo sapiens
ggtgttaccttaacg

SEQ ID NO: 1587800 - DNA, 15 bp, Homo sapiens
tggtgttaccttaac

SEQ ID NO: 1587801 - DNA, 15 bp, Homo sapiens
ctggtgttaccttaa

SEQ ID NO: 1587802 - DNA, 15 bp, Homo sapiens
tctggtgttacctta

SEQ ID NO: 1587803 - DNA, 15 bp, Homo sapiens
ttctggtgttacctt

SEQ ID NO: 1587804 - DNA, 15 bp, Homo sapiens
attctggtgttacct

SEQ ID NO: 1587805 - DNA, 15 bp, Homo sapiens
tattctggtgttacc

SEQ ID NO: 1587806 - DNA, 15 bp, Homo sapiens
atattctggtgttac

SEQ ID NO: 1587807 - DNA, 15 bp, Homo sapiens
aatattctggtgtta

SEQ ID NO: 1587808 - DNA, 15 bp, Homo sapiens
aaatattctggtgtt

SEQ ID NO: 1587809 - DNA, 15 bp, Homo sapiens
caaatattctggtgt

SEQ ID NO: 1587810 - DNA, 15 bp, Homo sapiens
ccaaatattctggtg

SEQ ID NO: 1587811 - DNA, 15 bp, Homo sapiens
gccaaatattctggt

SEQ ID NO: 1587812 - DNA, 15 bp, Homo sapiens
tgccaaatattctgg

SEQ ID NO: 1587813 - DNA, 15 bp, Homo sapiens
ttgccaaatattctg

SEQ ID NO: 1587814 - DNA, 15 bp, Homo sapiens
tttgccaaatattct

SEQ ID NO: 1587815 - DNA, 15 bp, Homo sapiens
ctttgccaaatattc

SEQ ID NO: 1587816 - DNA, 15 bp, Homo sapiens
cctttgccaaatatt

SEQ ID NO: 1587817 - DNA, 15 bp, Homo sapiens
ccctttgccaaatat

SEQ ID NO: 1587818 - DNA, 15 bp, Homo sapiens
tccctttgccaaata

SEQ ID NO: 1587819 - DNA, 15 bp, Homo sapiens
ctccctttgccaaat

SEQ ID NO: 1587820 - DNA, 15 bp, Homo sapiens
tctccctttgccaaa

SEQ ID NO: 1587821 - DNA, 15 bp, Homo sapiens
ttctccctttgccaa

SEQ ID NO: 1587822 - DNA, 15 bp, Homo sapiens
tttctccctttgcca

SEQ ID NO: 1587823 - DNA, 15 bp, Homo sapiens
ttttctccctttgcc

SEQ ID NO: 1587824 - DNA, 15 bp, Homo sapiens
tttttctccctttgc

SEQ ID NO: 1587825 - DNA, 15 bp, Homo sapiens
ttttttctccctttg

SEQ ID NO: 1587826 - DNA, 15 bp, Homo sapiens
tttttttctcccttt

SEQ ID NO: 1587827 - DNA, 15 bp, Homo sapiens
ttttttttctccctt

SEQ ID NO: 1587828 - DNA, 15 bp, Homo sapiens
tttttttttctccct

SEQ ID NO: 1587829 - DNA, 15 bp, Homo sapiens
ctttttttttctccc

SEQ ID NO: 1587830 - DNA, 15 bp, Homo sapiens
gctttttttttctcc

SEQ ID NO: 1587831 - DNA, 15 bp, Homo sapiens
tgctttttttttctc

SEQ ID NO: 1587832 - DNA, 15 bp, Homo sapiens
ctgctttttttttct

SEQ ID NO: 1587833 - DNA, 15 bp, Homo sapiens
gctgctttttttttc

SEQ ID NO: 1587834 - DNA, 15 bp, Homo sapiens
cgctgcttttttttt

SEQ ID NO: 1587835 - DNA, 15 bp, Homo sapiens
tcgctgctttttttt

SEQ ID NO: 1587836 - DNA, 15 bp, Homo sapiens
ctcgctgcttttttt

SEQ ID NO: 1587837 - DNA, 15 bp, Homo sapiens
cctcgctgctttttt

SEQ ID NO: 1587838 - DNA, 15 bp, Homo sapiens
gcctcgctgcttttt

SEQ ID NO: 1587839 - DNA, 15 bp, Homo sapiens
agcctcgctgctttt

SEQ ID NO: 1587840 - DNA, 15 bp, Homo sapiens
aagcctcgctgcttt

SEQ ID NO: 1587841 - DNA, 15 bp, Homo sapiens
gaagcctcgctgctt

SEQ ID NO: 1587842 - DNA, 15 bp, Homo sapiens
cgaagcctcgctgct

SEQ ID NO: 1587843 - DNA, 15 bp, Homo sapiens
gcgaagcctcgctgc

SEQ ID NO: 1587844 - DNA, 15 bp, Homo sapiens
ggcgaagcctcgctg

SEQ ID NO: 1587845 - DNA, 15 bp, Homo sapiens
aggcgaagcctcgct

SEQ ID NO: 1587846 - DNA, 15 bp, Homo sapiens
aaggcgaagcctcgc

SEQ ID NO: 1587847 - DNA, 15 bp, Homo sapiens
gaaggcgaagcctcg

SEQ ID NO: 1587848 - DNA, 15 bp, Homo sapiens
ggaaggcgaagcctc

SEQ ID NO: 1587849 - DNA, 15 bp, Homo sapiens
gggaaggcgaagcct

SEQ ID NO: 1587850 - DNA, 15 bp, Homo sapiens
ggggaaggcgaagcc

SEQ ID NO: 1587851 - DNA, 15 bp, Homo sapiens
gggggaaggcgaagc

SEQ ID NO: 1587852 - DNA, 15 bp, Homo sapiens
agggggaaggcgaag

SEQ ID NO: 1587853 - DNA, 15 bp, Homo sapiens
gagggggaaggcgaa

SEQ ID NO: 1587854 - DNA, 15 bp, Homo sapiens
agagggggaaggcga

SEQ ID NO: 1587855 - DNA, 15 bp, Homo sapiens
gagagggggaaggcg

SEQ ID NO: 1587856 - DNA, 15 bp, Homo sapiens
ggagagggggaaggc

SEQ ID NO: 1587857 - DNA, 15 bp, Homo sapiens
gggagagggggaagg

SEQ ID NO: 1587858 - DNA, 15 bp, Homo sapiens
agggagagggggaag

SEQ ID NO: 1587859 - DNA, 15 bp, Homo sapiens
aagggagagggggaa

SEQ ID NO: 1587860 - DNA, 15 bp, Homo sapiens
aaagggagaggggga

SEQ ID NO: 1587861 - DNA, 15 bp, Homo sapiens
aaaagggagaggggg

SEQ ID NO: 1587862 - DNA, 15 bp, Homo sapiens
aaaaagggagagggg

SEQ ID NO: 1587863 - DNA, 15 bp, Homo sapiens
aaaaaagggagaggg

SEQ ID NO: 1587864 - DNA, 15 bp, Homo sapiens
aaaaaaagggagagg

SEQ ID NO: 1587865 - DNA, 15 bp, Homo sapiens
aaaaaaaagggagag

SEQ ID NO: 1587866 - DNA, 15 bp, Homo sapiens
gaaaaaaaagggaga

SEQ ID NO: 1587867 - DNA, 15 bp, Homo sapiens
ggaaaaaaaagggag

SEQ ID NO: 1587868 - DNA, 15 bp, Homo sapiens
aggaaaaaaaaggga

SEQ ID NO: 1587869 - DNA, 15 bp, Homo sapiens
gaggaaaaaaaaggg

SEQ ID NO: 1587870 - DNA, 15 bp, Homo sapiens
ggaggaaaaaaaagg

SEQ ID NO: 1587871 - DNA, 15 bp, Homo sapiens
aggaggaaaaaaaag

SEQ ID NO: 1587872 - DNA, 15 bp, Homo sapiens
gaggaggaaaaaaaa

SEQ ID NO: 1587873 - DNA, 15 bp, Homo sapiens
agaggaggaaaaaaa

SEQ ID NO: 1587874 - DNA, 15 bp, Homo sapiens
aagaggaggaaaaaa

SEQ ID NO: 1587875 - DNA, 15 bp, Homo sapiens
gaagaggaggaaaaa

SEQ ID NO: 1587876 - DNA, 15 bp, Homo sapiens
ggaagaggaggaaaa

SEQ ID NO: 1587877 - DNA, 15 bp, Homo sapiens
aggaagaggaggaaa

SEQ ID NO: 1587878 - DNA, 15 bp, Homo sapiens
aaggaagaggaggaa

SEQ ID NO: 1587879 - DNA, 15 bp, Homo sapiens
gaaggaagaggagga

SEQ ID NO: 1587880 - DNA, 15 bp, Homo sapiens
ggaaggaagaggagg

SEQ ID NO: 1587881 - DNA, 15 bp, Homo sapiens
aggaaggaagaggag

SEQ ID NO: 1587882 - DNA, 15 bp, Homo sapiens
gaggaaggaagagga

SEQ ID NO: 1587883 - DNA, 15 bp, Homo sapiens
ggaggaaggaagagg

SEQ ID NO: 1587884 - DNA, 15 bp, Homo sapiens
aggaggaaggaagag

SEQ ID NO: 1587885 - DNA, 15 bp, Homo sapiens
gaggaggaaggaaga

SEQ ID NO: 1587886 - DNA, 15 bp, Homo sapiens
ggaggaggaaggaag

SEQ ID NO: 1587887 - DNA, 15 bp, Homo sapiens
tggaggaggaaggaa

SEQ ID NO: 1587888 - DNA, 15 bp, Homo sapiens
ctggaggaggaagga

SEQ ID NO: 1587889 - DNA, 15 bp, Homo sapiens
gctggaggaggaagg

SEQ ID NO: 1587890 - DNA, 15 bp, Homo sapiens
ggctggaggaggaag

SEQ ID NO: 1587891 - DNA, 15 bp, Homo sapiens
cggctggaggaggaa

SEQ ID NO: 1587892 - DNA, 15 bp, Homo sapiens
gcggctggaggagga

SEQ ID NO: 1587893 - DNA, 15 bp, Homo sapiens
ggcggctggaggagg

SEQ ID NO: 1587894 - DNA, 15 bp, Homo sapiens
cggcggctggaggag

SEQ ID NO: 1587895 - DNA, 15 bp, Homo sapiens
gcggcggctggagga

SEQ ID NO: 1587896 - DNA, 15 bp, Homo sapiens
ggcggcggctggagg

SEQ ID NO: 1587897 - DNA, 15 bp, Homo sapiens
cggcggcggctggag

SEQ ID NO: 1587898 - DNA, 15 bp, Homo sapiens
tcggcggcggctgga

SEQ ID NO: 1587899 - DNA, 15 bp, Homo sapiens
ttcggcggcggctgg

SEQ ID NO: 1587900 - DNA, 15 bp, Homo sapiens
attcggcggcggctg

SEQ ID NO: 1587901 - DNA, 15 bp, Homo sapiens
gattcggcggcggct

SEQ ID NO: 1587902 - DNA, 15 bp, Homo sapiens
tgattcggcggcggc

SEQ ID NO: 1587903 - DNA, 15 bp, Homo sapiens
atgattcggcggcgg

SEQ ID NO: 1587904 - DNA, 15 bp, Homo sapiens
catgattcggcggcg

SEQ ID NO: 1587905 - DNA, 15 bp, Homo sapiens
acatgattcggcggc

SEQ ID NO: 1587906 - DNA, 15 bp, Homo sapiens
gacatgattcggcgg

SEQ ID NO: 1587907 - DNA, 15 bp, Homo sapiens
cgacatgattcggcg

SEQ ID NO: 1587908 - DNA, 15 bp, Homo sapiens
tcgacatgattcggc

SEQ ID NO: 1587909 - DNA, 15 bp, Homo sapiens
atcgacatgattcgg

SEQ ID NO: 1587910 - DNA, 15 bp, Homo sapiens
catcgacatgattcg

SEQ ID NO: 1587911 - DNA, 15 bp, Homo sapiens
tcatcgacatgattc

SEQ ID NO: 1587912 - DNA, 15 bp, Homo sapiens
ctcatcgacatgatt

SEQ ID NO: 1587913 - DNA, 15 bp, Homo sapiens
actcatcgacatgat

SEQ ID NO: 1587914 - DNA, 15 bp, Homo sapiens
gactcatcgacatga

SEQ ID NO: 1587915 - DNA, 15 bp, Homo sapiens
ggactcatcgacatg

SEQ ID NO: 1587916 - DNA, 15 bp, Homo sapiens
tggactcatcgacat

SEQ ID NO: 1587917 - DNA, 15 bp, Homo sapiens
ttggactcatcgaca

SEQ ID NO: 1587918 - DNA, 15 bp, Homo sapiens
tttggactcatcgac

SEQ ID NO: 1587919 - DNA, 15 bp, Homo sapiens
ctttggactcatcga

SEQ ID NO: 1587920 - DNA, 15 bp, Homo sapiens
gctttggactcatcg

SEQ ID NO: 1587921 - DNA, 15 bp, Homo sapiens
tgctttggactcatc

SEQ ID NO: 1587922 - DNA, 15 bp, Homo sapiens
gtgctttggactcat

SEQ ID NO: 1587923 - DNA, 15 bp, Homo sapiens
tgtgctttggactca

SEQ ID NO: 1587924 - DNA, 15 bp, Homo sapiens
gtgtgctttggactc

SEQ ID NO: 1587925 - DNA, 15 bp, Homo sapiens
cgtgtgctttggact

SEQ ID NO: 1587926 - DNA, 15 bp, Homo sapiens
tcgtgtgctttggac

SEQ ID NO: 1587927 - DNA, 15 bp, Homo sapiens
gtcgtgtgctttgga

SEQ ID NO: 1587928 - DNA, 15 bp, Homo sapiens
agtcgtgtgctttgg

SEQ ID NO: 1587929 - DNA, 15 bp, Homo sapiens
gagtcgtgtgctttg

SEQ ID NO: 1587930 - DNA, 15 bp, Homo sapiens
ggagtcgtgtgcttt

SEQ ID NO: 1587931 - DNA, 15 bp, Homo sapiens
cggagtcgtgtgctt

SEQ ID NO: 1587932 - DNA, 15 bp, Homo sapiens
acggagtcgtgtgct

SEQ ID NO: 1587933 - DNA, 15 bp, Homo sapiens
aacggagtcgtgtgc

SEQ ID NO: 1587934 - DNA, 15 bp, Homo sapiens
gaacggagtcgtgtg

SEQ ID NO: 1587935 - DNA, 15 bp, Homo sapiens
agaacggagtcgtgt

SEQ ID NO: 1587936 - DNA, 15 bp, Homo sapiens
gagaacggagtcgtg

SEQ ID NO: 1587937 - DNA, 15 bp, Homo sapiens
tgagaacggagtcgt

SEQ ID NO: 1587938 - DNA, 15 bp, Homo sapiens
ctgagaacggagtcg

SEQ ID NO: 1587939 - DNA, 15 bp, Homo sapiens
actgagaacggagtc

SEQ ID NO: 1587940 - DNA, 15 bp, Homo sapiens
cactgagaacggagt

SEQ ID NO: 1587941 - DNA, 15 bp, Homo sapiens
acactgagaacggag

SEQ ID NO: 1587942 - DNA, 15 bp, Homo sapiens
gacactgagaacgga

SEQ ID NO: 1587943 - DNA, 15 bp, Homo sapiens
agacactgagaacgg

SEQ ID NO: 1587944 - DNA, 15 bp, Homo sapiens
cagacactgagaacg

SEQ ID NO: 1587945 - DNA, 15 bp, Homo sapiens
tcagacactgagaac

SEQ ID NO: 1587946 - DNA, 15 bp, Homo sapiens
gtcagacactgagaa

SEQ ID NO: 1587947 - DNA, 15 bp, Homo sapiens
tgtcagacactgaga

SEQ ID NO: 1587948 - DNA, 15 bp, Homo sapiens
atgtcagacactgag

SEQ ID NO: 1587949 - DNA, 15 bp, Homo sapiens
gatgtcagacactga

SEQ ID NO: 1587950 - DNA, 15 bp, Homo sapiens
agatgtcagacactg

SEQ ID NO: 1587951 - DNA, 15 bp, Homo sapiens
aagatgtcagacact

SEQ ID NO: 1587952 - DNA, 15 bp, Homo sapiens
caagatgtcagacac

SEQ ID NO: 1587953 - DNA, 15 bp, Homo sapiens
tcaagatgtcagaca

SEQ ID NO: 1587954 - DNA, 15 bp, Homo sapiens
ctcaagatgtcagac

SEQ ID NO: 1587955 - DNA, 15 bp, Homo sapiens
actcaagatgtcaga

SEQ ID NO: 1587956 - DNA, 15 bp, Homo sapiens
gactcaagatgtcag

SEQ ID NO: 1587957 - DNA, 15 bp, Homo sapiens
ggactcaagatgtca

SEQ ID NO: 1587958 - DNA, 15 bp, Homo sapiens
gggactcaagatgtc

SEQ ID NO: 1587959 - DNA, 15 bp, Homo sapiens
ggggactcaagatgt

SEQ ID NO: 1587960 - DNA, 15 bp, Homo sapiens
aggggactcaagatg

SEQ ID NO: 1587961 - DNA, 15 bp, Homo sapiens
caggggactcaagat

SEQ ID NO: 1587962 - DNA, 15 bp, Homo sapiens
ccaggggactcaaga

SEQ ID NO: 1587963 - DNA, 15 bp, Homo sapiens
tccaggggactcaag

SEQ ID NO: 1587964 - DNA, 15 bp, Homo sapiens
ctccaggggactcaa

SEQ ID NO: 1587965 - DNA, 15 bp, Homo sapiens
cctccaggggactca

SEQ ID NO: 1587966 - DNA, 15 bp, Homo sapiens
tcctccaggggactc

SEQ ID NO: 1587967 - DNA, 15 bp, Homo sapiens
ttcctccaggggact

SEQ ID NO: 1587968 - DNA, 15 bp, Homo sapiens
tttcctccaggggac

SEQ ID NO: 1587969 - DNA, 15 bp, Homo sapiens
ctttcctccagggga

SEQ ID NO: 1587970 - DNA, 15 bp, Homo sapiens
gctttcctccagggg

SEQ ID NO: 1587971 - DNA, 15 bp, Homo sapiens
agctttcctccaggg

SEQ ID NO: 1587972 - DNA, 15 bp, Homo sapiens
tagctttcctccagg

SEQ ID NO: 1587973 - DNA, 15 bp, Homo sapiens
gtagctttcctccag

SEQ ID NO: 1587974 - DNA, 15 bp, Homo sapiens
tgtagctttcctcca

SEQ ID NO: 1587975 - DNA, 15 bp, Homo sapiens
ttgtagctttcctcc

SEQ ID NO: 1587976 - DNA, 15 bp, Homo sapiens
cttgtagctttcctc

SEQ ID NO: 1587977 - DNA, 15 bp, Homo sapiens
tcttgtagctttcct

SEQ ID NO: 1587978 - DNA, 15 bp, Homo sapiens
ttcttgtagctttcc

SEQ ID NO: 1587979 - DNA, 15 bp, Homo sapiens
tttcttgtagctttc

SEQ ID NO: 1587980 - DNA, 15 bp, Homo sapiens
ctttcttgtagcttt

SEQ ID NO: 1587981 - DNA, 15 bp, Homo sapiens
actttcttgtagctt

SEQ ID NO: 1587982 - DNA, 15 bp, Homo sapiens
cactttcttgtagct

SEQ ID NO: 1587983 - DNA, 15 bp, Homo sapiens
ccactttcttgtagc

SEQ ID NO: 1587984 - DNA, 15 bp, Homo sapiens
cccactttcttgtag

SEQ ID NO: 1587985 - DNA, 15 bp, Homo sapiens
gcccactttcttgta

SEQ ID NO: 1587986 - DNA, 15 bp, Homo sapiens
tgcccactttcttgt

SEQ ID NO: 1587987 - DNA, 15 bp, Homo sapiens
atgcccactttcttg

SEQ ID NO: 1587988 - DNA, 15 bp, Homo sapiens
catgcccactttctt

SEQ ID NO: 1587989 - DNA, 15 bp, Homo sapiens
ccatgcccactttct

SEQ ID NO: 1587990 - DNA, 15 bp, Homo sapiens
tccatgcccactttc

SEQ ID NO: 1587991 - DNA, 15 bp, Homo sapiens
ctccatgcccacttt

SEQ ID NO: 1587992 - DNA, 15 bp, Homo sapiens
cctccatgcccactt

SEQ ID NO: 1587993 - DNA, 15 bp, Homo sapiens
ccctccatgcccact

SEQ ID NO: 1587994 - DNA, 15 bp, Homo sapiens
gccctccatgcccac

SEQ ID NO: 1587995 - DNA, 15 bp, Homo sapiens
cgccctccatgccca

SEQ ID NO: 1587996 - DNA, 15 bp, Homo sapiens
ccgccctccatgccc

SEQ ID NO: 1587997 - DNA, 15 bp, Homo sapiens
gccgccctccatgcc

SEQ ID NO: 1587998 - DNA, 15 bp, Homo sapiens
cgccgccctccatgc

SEQ ID NO: 1587999 - DNA, 15 bp, Homo sapiens
ccgccgccctccatg

SEQ ID NO: 1588000 - DNA, 15 bp, Homo sapiens
gccgccgccctccat

SEQ ID NO: 1588001 - DNA, 15 bp, Homo sapiens
ggccgccgccctcca

SEQ ID NO: 1588002 - DNA, 15 bp, Homo sapiens
aggccgccgccctcc

SEQ ID NO: 1588003 - DNA, 15 bp, Homo sapiens
gaggccgccgccctc

SEQ ID NO: 1588004 - DNA, 15 bp, Homo sapiens
cgaggccgccgccct

SEQ ID NO: 1588005 - DNA, 15 bp, Homo sapiens
ccgaggccgccgccc

SEQ ID NO: 1588006 - DNA, 15 bp, Homo sapiens
cccgaggccgccgcc

SEQ ID NO: 1588007 - DNA, 15 bp, Homo sapiens
ccccgaggccgccgc

SEQ ID NO: 1588008 - DNA, 15 bp, Homo sapiens
gccccgaggccgccg

SEQ ID NO: 1588009 - DNA, 15 bp, Homo sapiens
agccccgaggccgcc

SEQ ID NO: 1588010 - DNA, 15 bp, Homo sapiens
gagccccgaggccgc

SEQ ID NO: 1588011 - DNA, 15 bp, Homo sapiens
ggagccccgaggccg

SEQ ID NO: 1588012 - DNA, 15 bp, Homo sapiens
cggagccccgaggcc

SEQ ID NO: 1588013 - DNA, 15 bp, Homo sapiens
gcggagccccgaggc

SEQ ID NO: 1588014 - DNA, 15 bp, Homo sapiens
agcggagccccgagg

SEQ ID NO: 1588015 - DNA, 15 bp, Homo sapiens
cagcggagccccgag

SEQ ID NO: 1588016 - DNA, 15 bp, Homo sapiens
ccagcggagccccga

SEQ ID NO: 1588017 - DNA, 15 bp, Homo sapiens
gccagcggagccccg

SEQ ID NO: 1588018 - DNA, 15 bp, Homo sapiens
cgccagcggagcccc

SEQ ID NO: 1588019 - DNA, 15 bp, Homo sapiens
ccgccagcggagccc

SEQ ID NO: 1588020 - DNA, 15 bp, Homo sapiens
gccgccagcggagcc

SEQ ID NO: 1588021 - DNA, 15 bp, Homo sapiens
cgccgccagcggagc

SEQ ID NO: 1588022 - DNA, 15 bp, Homo sapiens
acgccgccagcggag

SEQ ID NO: 1588023 - DNA, 15 bp, Homo sapiens
tacgccgccagcgga

SEQ ID NO: 1588024 - DNA, 15 bp, Homo sapiens
gtacgccgccagcgg

SEQ ID NO: 1588025 - DNA, 15 bp, Homo sapiens
tgtacgccgccagcg

SEQ ID NO: 1588026 - DNA, 15 bp, Homo sapiens
ctgtacgccgccagc

SEQ ID NO: 1588027 - DNA, 15 bp, Homo sapiens
cctgtacgccgccag

SEQ ID NO: 1588028 - DNA, 15 bp, Homo sapiens
gcctgtacgccgcca

SEQ ID NO: 1588029 - DNA, 15 bp, Homo sapiens
tgcctgtacgccgcc

SEQ ID NO: 1588030 - DNA, 15 bp, Homo sapiens
ctgcctgtacgccgc

SEQ ID NO: 1588031 - DNA, 15 bp, Homo sapiens
cctgcctgtacgccg

SEQ ID NO: 1588032 - DNA, 15 bp, Homo sapiens
ccctgcctgtacgcc

SEQ ID NO: 1588033 - DNA, 15 bp, Homo sapiens
gccctgcctgtacgc

SEQ ID NO: 1588034 - DNA, 15 bp, Homo sapiens
ggccctgcctgtacg

SEQ ID NO: 1588035 - DNA, 15 bp, Homo sapiens
tggccctgcctgtac

SEQ ID NO: 1588036 - DNA, 15 bp, Homo sapiens
ctggccctgcctgta

SEQ ID NO: 1588037 - DNA, 15 bp, Homo sapiens
cctggccctgcctgt

SEQ ID NO: 1588038 - DNA, 15 bp, Homo sapiens
gcctggccctgcctg

SEQ ID NO: 1588039 - DNA, 15 bp, Homo sapiens
cgcctggccctgcct

SEQ ID NO: 1588040 - DNA, 15 bp, Homo sapiens
ccgcctggccctgcc

SEQ ID NO: 1588041 - DNA, 15 bp, Homo sapiens
gccgcctggccctgc

SEQ ID NO: 1588042 - DNA, 15 bp, Homo sapiens
tgccgcctggccctg

SEQ ID NO: 1588043 - DNA, 15 bp, Homo sapiens
gtgccgcctggccct

SEQ ID NO: 1588044 - DNA, 15 bp, Homo sapiens
ggtgccgcctggccc

SEQ ID NO: 1588045 - DNA, 15 bp, Homo sapiens
cggtgccgcctggcc

SEQ ID NO: 1588046 - DNA, 15 bp, Homo sapiens
gcggtgccgcctggc

SEQ ID NO: 1588047 - DNA, 15 bp, Homo sapiens
ggcggtgccgcctgg

SEQ ID NO: 1588048 - DNA, 15 bp, Homo sapiens
tggcggtgccgcctg

SEQ ID NO: 1588049 - DNA, 15 bp, Homo sapiens
ttggcggtgccgcct

SEQ ID NO: 1588050 - DNA, 15 bp, Homo sapiens
gttggcggtgccgcc

SEQ ID NO: 1588051 - DNA, 15 bp, Homo sapiens
tgttggcggtgccgc

SEQ ID NO: 1588052 - DNA, 15 bp, Homo sapiens
ctgttggcggtgccg

SEQ ID NO: 1588053 - DNA, 15 bp, Homo sapiens
gctgttggcggtgcc

SEQ ID NO: 1588054 - DNA, 15 bp, Homo sapiens
cgctgttggcggtgc

SEQ ID NO: 1588055 - DNA, 15 bp, Homo sapiens
ccgctgttggcggtg

SEQ ID NO: 1588056 - DNA, 15 bp, Homo sapiens
gccgctgttggcggt

SEQ ID NO: 1588057 - DNA, 15 bp, Homo sapiens
ggccgctgttggcgg

SEQ ID NO: 1588058 - DNA, 15 bp, Homo sapiens
tggccgctgttggcg

SEQ ID NO: 1588059 - DNA, 15 bp, Homo sapiens
atggccgctgttggc

SEQ ID NO: 1588060 - DNA, 15 bp, Homo sapiens
catggccgctgttgg

SEQ ID NO: 1588061 - DNA, 15 bp, Homo sapiens
gcatggccgctgttg

SEQ ID NO: 1588062 - DNA, 15 bp, Homo sapiens
tgcatggccgctgtt

SEQ ID NO: 1588063 - DNA, 15 bp, Homo sapiens
ctgcatggccgctgt

SEQ ID NO: 1588064 - DNA, 15 bp, Homo sapiens
gctgcatggccgctg

SEQ ID NO: 1588065 - DNA, 15 bp, Homo sapiens
tgctgcatggccgct

SEQ ID NO: 1588066 - DNA, 15 bp, Homo sapiens
ctgctgcatggccgc

SEQ ID NO: 1588067 - DNA, 15 bp, Homo sapiens
gctgctgcatggccg

SEQ ID NO: 1588068 - DNA, 15 bp, Homo sapiens
tgctgctgcatggcc

SEQ ID NO: 1588069 - DNA, 15 bp, Homo sapiens
gtgctgctgcatggc

SEQ ID NO: 1588070 - DNA, 15 bp, Homo sapiens
cgtgctgctgcatgg

SEQ ID NO: 1588071 - DNA, 15 bp, Homo sapiens
gcgtgctgctgcatg

SEQ ID NO: 1588072 - DNA, 15 bp, Homo sapiens
ggcgtgctgctgcat

SEQ ID NO: 1588073 - DNA, 15 bp, Homo sapiens
cggcgtgctgctgca

SEQ ID NO: 1588074 - DNA, 15 bp, Homo sapiens
acggcgtgctgctgc

SEQ ID NO: 1588075 - DNA, 15 bp, Homo sapiens
cacggcgtgctgctg

SEQ ID NO: 1588076 - DNA, 15 bp, Homo sapiens
ccacggcgtgctgct

SEQ ID NO: 1588077 - DNA, 15 bp, Homo sapiens
cccacggcgtgctgc

SEQ ID NO: 1588078 - DNA, 15 bp, Homo sapiens
ccccacggcgtgctg

SEQ ID NO: 1588079 - DNA, 15 bp, Homo sapiens
gccccacggcgtgct

SEQ ID NO: 1588080 - DNA, 15 bp, Homo sapiens
tgccccacggcgtgc

SEQ ID NO: 1588081 - DNA, 15 bp, Homo sapiens
gtgccccacggcgtg

SEQ ID NO: 1588082 - DNA, 15 bp, Homo sapiens
ggtgccccacggcgt

SEQ ID NO: 1588083 - DNA, 15 bp, Homo sapiens
tggtgccccacggcg

SEQ ID NO: 1588084 - DNA, 15 bp, Homo sapiens
gtggtgccccacggc

SEQ ID NO: 1588085 - DNA, 15 bp, Homo sapiens
cgtggtgccccacgg

SEQ ID NO: 1588086 - DNA, 15 bp, Homo sapiens
ccgtggtgccccacg

SEQ ID NO: 1588087 - DNA, 15 bp, Homo sapiens
gccgtggtgccccac

SEQ ID NO: 1588088 - DNA, 15 bp, Homo sapiens
cgccgtggtgcccca

SEQ ID NO: 1588089 - DNA, 15 bp, Homo sapiens
gcgccgtggtgcccc

SEQ ID NO: 1588090 - DNA, 15 bp, Homo sapiens
ggcgccgtggtgccc

SEQ ID NO: 1588091 - DNA, 15 bp, Homo sapiens
cggcgccgtggtgcc

SEQ ID NO: 1588092 - DNA, 15 bp, Homo sapiens
acggcgccgtggtgc

SEQ ID NO: 1588093 - DNA, 15 bp, Homo sapiens
gacggcgccgtggtg

SEQ ID NO: 1588094 - DNA, 15 bp, Homo sapiens
tgacggcgccgtggt

SEQ ID NO: 1588095 - DNA, 15 bp, Homo sapiens
gtgacggcgccgtgg

SEQ ID NO: 1588096 - DNA, 15 bp, Homo sapiens
ggtgacggcgccgtg

SEQ ID NO: 1588097 - DNA, 15 bp, Homo sapiens
cggtgacggcgccgt

SEQ ID NO: 1588098 - DNA, 15 bp, Homo sapiens
gcggtgacggcgccg

SEQ ID NO: 1588099 - DNA, 15 bp, Homo sapiens
ggcggtgacggcgcc

SEQ ID NO: 1588100 - DNA, 15 bp, Homo sapiens
cggcggtgacggcgc

SEQ ID NO: 1588101 - DNA, 15 bp, Homo sapiens
gcggcggtgacggcg

SEQ ID NO: 1588102 - DNA, 15 bp, Homo sapiens
ggcggcggtgacggc

SEQ ID NO: 1588103 - DNA, 15 bp, Homo sapiens
aggcggcggtgacgg

SEQ ID NO: 1588104 - DNA, 15 bp, Homo sapiens
taggcggcggtgacg

SEQ ID NO: 1588105 - DNA, 15 bp, Homo sapiens
gtaggcggcggtgac

SEQ ID NO: 1588106 - DNA, 15 bp, Homo sapiens
ggtaggcggcggtga

SEQ ID NO: 1588107 - DNA, 15 bp, Homo sapiens
tggtaggcggcggtg

SEQ ID NO: 1588108 - DNA, 15 bp, Homo sapiens
gtggtaggcggcggt

SEQ ID NO: 1588109 - DNA, 15 bp, Homo sapiens
tgtggtaggcggcgg

SEQ ID NO: 1588110 - DNA, 15 bp, Homo sapiens
atgtggtaggcggcg

SEQ ID NO: 1588111 - DNA, 15 bp, Homo sapiens
catgtggtaggcggc

SEQ ID NO: 1588112 - DNA, 15 bp, Homo sapiens
tcatgtggtaggcgg

SEQ ID NO: 1588113 - DNA, 15 bp, Homo sapiens
gtcatgtggtaggcg

SEQ ID NO: 1588114 - DNA, 15 bp, Homo sapiens
cgtcatgtggtaggc

SEQ ID NO: 1588115 - DNA, 15 bp, Homo sapiens
ccgtcatgtggtagg

SEQ ID NO: 1588116 - DNA, 15 bp, Homo sapiens
gccgtcatgtggtag

SEQ ID NO: 1588117 - DNA, 15 bp, Homo sapiens
cgccgtcatgtggta

SEQ ID NO: 1588118 - DNA, 15 bp, Homo sapiens
ccgccgtcatgtggt

SEQ ID NO: 1588119 - DNA, 15 bp, Homo sapiens
gccgccgtcatgtgg

SEQ ID NO: 1588120 - DNA, 15 bp, Homo sapiens
cgccgccgtcatgtg

SEQ ID NO: 1588121 - DNA, 15 bp, Homo sapiens
ccgccgccgtcatgt

SEQ ID NO: 1588122 - DNA, 15 bp, Homo sapiens
cccgccgccgtcatg

SEQ ID NO: 1588123 - DNA, 15 bp, Homo sapiens
ccccgccgccgtcat

SEQ ID NO: 1588124 - DNA, 15 bp, Homo sapiens
cccccgccgccgtca

SEQ ID NO: 1588125 - DNA, 15 bp, Homo sapiens
acccccgccgccgtc

SEQ ID NO: 1588126 - DNA, 15 bp, Homo sapiens
cacccccgccgccgt

SEQ ID NO: 1588127 - DNA, 15 bp, Homo sapiens
gcacccccgccgccg

SEQ ID NO: 1588128 - DNA, 15 bp, Homo sapiens
ggcacccccgccgcc

SEQ ID NO: 1588129 - DNA, 15 bp, Homo sapiens
gggcacccccgccgc

SEQ ID NO: 1588130 - DNA, 15 bp, Homo sapiens
ggggcacccccgccg

SEQ ID NO: 1588131 - DNA, 15 bp, Homo sapiens
tggggcacccccgcc

SEQ ID NO: 1588132 - DNA, 15 bp, Homo sapiens
ctggggcacccccgc

SEQ ID NO: 1588133 - DNA, 15 bp, Homo sapiens
gctggggcacccccg

SEQ ID NO: 1588134 - DNA, 15 bp, Homo sapiens
agctggggcaccccc

SEQ ID NO: 1588135 - DNA, 15 bp, Homo sapiens
gagctggggcacccc

SEQ ID NO: 1588136 - DNA, 15 bp, Homo sapiens
agagctggggcaccc

SEQ ID NO: 1588137 - DNA, 15 bp, Homo sapiens
gagagctggggcacc

SEQ ID NO: 1588138 - DNA, 15 bp, Homo sapiens
cgagagctggggcac

SEQ ID NO: 1588139 - DNA, 15 bp, Homo sapiens
gcgagagctggggca

SEQ ID NO: 1588140 - DNA, 15 bp, Homo sapiens
tgcgagagctggggc

SEQ ID NO: 1588141 - DNA, 15 bp, Homo sapiens
gtgcgagagctgggg

SEQ ID NO: 1588142 - DNA, 15 bp, Homo sapiens
agtgcgagagctggg

SEQ ID NO: 1588143 - DNA, 15 bp, Homo sapiens
gagtgcgagagctgg

SEQ ID NO: 1588144 - DNA, 15 bp, Homo sapiens
ggagtgcgagagctg

SEQ ID NO: 1588145 - DNA, 15 bp, Homo sapiens
cggagtgcgagagct

SEQ ID NO: 1588146 - DNA, 15 bp, Homo sapiens
gcggagtgcgagagc

SEQ ID NO: 1588147 - DNA, 15 bp, Homo sapiens
ggcggagtgcgagag

SEQ ID NO: 1588148 - DNA, 15 bp, Homo sapiens
cggcggagtgcgaga

SEQ ID NO: 1588149 - DNA, 15 bp, Homo sapiens
acggcggagtgcgag

SEQ ID NO: 1588150 - DNA, 15 bp, Homo sapiens
cacggcggagtgcga

SEQ ID NO: 1588151 - DNA, 15 bp, Homo sapiens
ccacggcggagtgcg

SEQ ID NO: 1588152 - DNA, 15 bp, Homo sapiens
cccacggcggagtgc

SEQ ID NO: 1588153 - DNA, 15 bp, Homo sapiens
ccccacggcggagtg

SEQ ID NO: 1588154 - DNA, 15 bp, Homo sapiens
cccccacggcggagt

SEQ ID NO: 1588155 - DNA, 15 bp, Homo sapiens
ccccccacggcggag

SEQ ID NO: 1588156 - DNA, 15 bp, Homo sapiens
gccccccacggcgga

SEQ ID NO: 1588157 - DNA, 15 bp, Homo sapiens
agccccccacggcgg

SEQ ID NO: 1588158 - DNA, 15 bp, Homo sapiens
tagccccccacggcg

SEQ ID NO: 1588159 - DNA, 15 bp, Homo sapiens
gtagccccccacggc

SEQ ID NO: 1588160 - DNA, 15 bp, Homo sapiens
agtagccccccacgg

SEQ ID NO: 1588161 - DNA, 15 bp, Homo sapiens
cagtagccccccacg

SEQ ID NO: 1588162 - DNA, 15 bp, Homo sapiens
gcagtagccccccac

SEQ ID NO: 1588163 - DNA, 15 bp, Homo sapiens
tgcagtagcccccca

SEQ ID NO: 1588164 - DNA, 15 bp, Homo sapiens
ttgcagtagcccccc

SEQ ID NO: 1588165 - DNA, 15 bp, Homo sapiens
gttgcagtagccccc

SEQ ID NO: 1588166 - DNA, 15 bp, Homo sapiens
cgttgcagtagcccc

SEQ ID NO: 1588167 - DNA, 15 bp, Homo sapiens
ccgttgcagtagccc

SEQ ID NO: 1588168 - DNA, 15 bp, Homo sapiens
gccgttgcagtagcc

SEQ ID NO: 1588169 - DNA, 15 bp, Homo sapiens
tgccgttgcagtagc

SEQ ID NO: 1588170 - DNA, 15 bp, Homo sapiens
ttgccgttgcagtag

SEQ ID NO: 1588171 - DNA, 15 bp, Homo sapiens
gttgccgttgcagta

SEQ ID NO: 1588172 - DNA, 15 bp, Homo sapiens
ggttgccgttgcagt

SEQ ID NO: 1588173 - DNA, 15 bp, Homo sapiens
aggttgccgttgcag

SEQ ID NO: 1588174 - DNA, 15 bp, Homo sapiens
caggttgccgttgca

SEQ ID NO: 1588175 - DNA, 15 bp, Homo sapiens
ccaggttgccgttgc

SEQ ID NO: 1588176 - DNA, 15 bp, Homo sapiens
cccaggttgccgttg

SEQ ID NO: 1588177 - DNA, 15 bp, Homo sapiens
gcccaggttgccgtt

SEQ ID NO: 1588178 - DNA, 15 bp, Homo sapiens
tgcccaggttgccgt

SEQ ID NO: 1588179 - DNA, 15 bp, Homo sapiens
ttgcccaggttgccg

SEQ ID NO: 1588180 - DNA, 15 bp, Homo sapiens
gttgcccaggttgcc

SEQ ID NO: 1588181 - DNA, 15 bp, Homo sapiens
tgttgcccaggttgc

SEQ ID NO: 1588182 - DNA, 15 bp, Homo sapiens
atgttgcccaggttg

SEQ ID NO: 1588183 - DNA, 15 bp, Homo sapiens
catgttgcccaggtt

SEQ ID NO: 1588184 - DNA, 15 bp, Homo sapiens
tcatgttgcccaggt

SEQ ID NO: 1588185 - DNA, 15 bp, Homo sapiens
ctcatgttgcccagg

SEQ ID NO: 1588186 - DNA, 15 bp, Homo sapiens
gctcatgttgcccag

SEQ ID NO: 1588187 - DNA, 15 bp, Homo sapiens
cgctcatgttgccca

SEQ ID NO: 1588188 - DNA, 15 bp, Homo sapiens
tcgctcatgttgccc

SEQ ID NO: 1588189 - DNA, 15 bp, Homo sapiens
ctcgctcatgttgcc

SEQ ID NO: 1588190 - DNA, 15 bp, Homo sapiens
gctcgctcatgttgc

SEQ ID NO: 1588191 - DNA, 15 bp, Homo sapiens
agctcgctcatgttg

SEQ ID NO: 1588192 - DNA, 15 bp, Homo sapiens
cagctcgctcatgtt

SEQ ID NO: 1588193 - DNA, 15 bp, Homo sapiens
gcagctcgctcatgt

SEQ ID NO: 1588194 - DNA, 15 bp, Homo sapiens
ggcagctcgctcatg

SEQ ID NO: 1588195 - DNA, 15 bp, Homo sapiens
cggcagctcgctcat

SEQ ID NO: 1588196 - DNA, 15 bp, Homo sapiens
gcggcagctcgctca

SEQ ID NO: 1588197 - DNA, 15 bp, Homo sapiens
ggcggcagctcgctc

SEQ ID NO: 1588198 - DNA, 15 bp, Homo sapiens
cggcggcagctcgct

SEQ ID NO: 1588199 - DNA, 15 bp, Homo sapiens
acggcggcagctcgc

SEQ ID NO: 1588200 - DNA, 15 bp, Homo sapiens
tacggcggcagctcg

SEQ ID NO: 1588201 - DNA, 15 bp, Homo sapiens
gtacggcggcagctc

SEQ ID NO: 1588202 - DNA, 15 bp, Homo sapiens
ggtacggcggcagct

SEQ ID NO: 1588203 - DNA, 15 bp, Homo sapiens
tggtacggcggcagc

SEQ ID NO: 1588204 - DNA, 15 bp, Homo sapiens
ctggtacggcggcag

SEQ ID NO: 1588205 - DNA, 15 bp, Homo sapiens
cctggtacggcggca

SEQ ID NO: 1588206 - DNA, 15 bp, Homo sapiens
tcctggtacggcggc

SEQ ID NO: 1588207 - DNA, 15 bp, Homo sapiens
gtcctggtacggcgg

SEQ ID NO: 1588208 - DNA, 15 bp, Homo sapiens
tgtcctggtacggcg

SEQ ID NO: 1588209 - DNA, 15 bp, Homo sapiens
gtgtcctggtacggc

SEQ ID NO: 1588210 - DNA, 15 bp, Homo sapiens
ggtgtcctggtacgg

SEQ ID NO: 1588211 - DNA, 15 bp, Homo sapiens
tggtgtcctggtacg

SEQ ID NO: 1588212 - DNA, 15 bp, Homo sapiens
atggtgtcctggtac

SEQ ID NO: 1588213 - DNA, 15 bp, Homo sapiens
catggtgtcctggta

SEQ ID NO: 1588214 - DNA, 15 bp, Homo sapiens
tcatggtgtcctggt

SEQ ID NO: 1588215 - DNA, 15 bp, Homo sapiens
ctcatggtgtcctgg

SEQ ID NO: 1588216 - DNA, 15 bp, Homo sapiens
cctcatggtgtcctg

SEQ ID NO: 1588217 - DNA, 15 bp, Homo sapiens
tcctcatggtgtcct

SEQ ID NO: 1588218 - DNA, 15 bp, Homo sapiens
ttcctcatggtgtcc

SEQ ID NO: 1588219 - DNA, 15 bp, Homo sapiens
gttcctcatggtgtc

SEQ ID NO: 1588220 - DNA, 15 bp, Homo sapiens
tgttcctcatggtgt

SEQ ID NO: 1588221 - DNA, 15 bp, Homo sapiens
ctgttcctcatggtg

SEQ ID NO: 1588222 - DNA, 15 bp, Homo sapiens
gctgttcctcatggt

SEQ ID NO: 1588223 - DNA, 15 bp, Homo sapiens
cgctgttcctcatgg

SEQ ID NO: 1588224 - DNA, 15 bp, Homo sapiens
gcgctgttcctcatg

SEQ ID NO: 1588225 - DNA, 15 bp, Homo sapiens
ggcgctgttcctcat

SEQ ID NO: 1588226 - DNA, 15 bp, Homo sapiens
aggcgctgttcctca

SEQ ID NO: 1588227 - DNA, 15 bp, Homo sapiens
gaggcgctgttcctc

SEQ ID NO: 1588228 - DNA, 15 bp, Homo sapiens
agaggcgctgttcct

SEQ ID NO: 1588229 - DNA, 15 bp, Homo sapiens
cagaggcgctgttcc

SEQ ID NO: 1588230 - DNA, 15 bp, Homo sapiens
ccagaggcgctgttc

SEQ ID NO: 1588231 - DNA, 15 bp, Homo sapiens
gccagaggcgctgtt

SEQ ID NO: 1588232 - DNA, 15 bp, Homo sapiens
ggccagaggcgctgt

SEQ ID NO: 1588233 - DNA, 15 bp, Homo sapiens
gggccagaggcgctg

SEQ ID NO: 1588234 - DNA, 15 bp, Homo sapiens
ggggccagaggcgct

SEQ ID NO: 1588235 - DNA, 15 bp, Homo sapiens
cggggccagaggcgc

SEQ ID NO: 1588236 - DNA, 15 bp, Homo sapiens
ccggggccagaggcg

SEQ ID NO: 1588237 - DNA, 15 bp, Homo sapiens
tccggggccagaggc

SEQ ID NO: 1588238 - DNA, 15 bp, Homo sapiens
atccggggccagagg

SEQ ID NO: 1588239 - DNA, 15 bp, Homo sapiens
catccggggccagag

SEQ ID NO: 1588240 - DNA, 15 bp, Homo sapiens
ccatccggggccaga

SEQ ID NO: 1588241 - DNA, 15 bp, Homo sapiens
accatccggggccag

SEQ ID NO: 1588242 - DNA, 15 bp, Homo sapiens
taccatccggggcca

SEQ ID NO: 1588243 - DNA, 15 bp, Homo sapiens
gtaccatccggggcc

SEQ ID NO: 1588244 - DNA, 15 bp, Homo sapiens
cgtaccatccggggc

SEQ ID NO: 1588245 - DNA, 15 bp, Homo sapiens
ccgtaccatccgggg

SEQ ID NO: 1588246 - DNA, 15 bp, Homo sapiens
gccgtaccatccggg

SEQ ID NO: 1588247 - DNA, 15 bp, Homo sapiens
cgccgtaccatccgg

SEQ ID NO: 1588248 - DNA, 15 bp, Homo sapiens
gcgccgtaccatccg

SEQ ID NO: 1588249 - DNA, 15 bp, Homo sapiens
ggcgccgtaccatcc

SEQ ID NO: 1588250 - DNA, 15 bp, Homo sapiens
tggcgccgtaccatc

SEQ ID NO: 1588251 - DNA, 15 bp, Homo sapiens
ttggcgccgtaccat

SEQ ID NO: 1588252 - DNA, 15 bp, Homo sapiens
gttggcgccgtacca

SEQ ID NO: 1588253 - DNA, 15 bp, Homo sapiens
ggttggcgccgtacc

SEQ ID NO: 1588254 - DNA, 15 bp, Homo sapiens
gggttggcgccgtac

SEQ ID NO: 1588255 - DNA, 15 bp, Homo sapiens
tgggttggcgccgta

SEQ ID NO: 1588256 - DNA, 15 bp, Homo sapiens
ctgggttggcgccgt

SEQ ID NO: 1588257 - DNA, 15 bp, Homo sapiens
tctgggttggcgccg

SEQ ID NO: 1588258 - DNA, 15 bp, Homo sapiens
gtctgggttggcgcc

SEQ ID NO: 1588259 - DNA, 15 bp, Homo sapiens
ggtctgggttggcgc

SEQ ID NO: 1588260 - DNA, 15 bp, Homo sapiens
gggtctgggttggcg

SEQ ID NO: 1588261 - DNA, 15 bp, Homo sapiens
cgggtctgggttggc

SEQ ID NO: 1588262 - DNA, 15 bp, Homo sapiens
gcgggtctgggttgg

SEQ ID NO: 1588263 - DNA, 15 bp, Homo sapiens
cgcgggtctgggttg

SEQ ID NO: 1588264 - DNA, 15 bp, Homo sapiens
gcgcgggtctgggtt

SEQ ID NO: 1588265 - DNA, 15 bp, Homo sapiens
agcgcgggtctgggt

SEQ ID NO: 1588266 - DNA, 15 bp, Homo sapiens
aagcgcgggtctggg

SEQ ID NO: 1588267 - DNA, 15 bp, Homo sapiens
gaagcgcgggtctgg

SEQ ID NO: 1588268 - DNA, 15 bp, Homo sapiens
ggaagcgcgggtctg

SEQ ID NO: 1588269 - DNA, 15 bp, Homo sapiens
gggaagcgcgggtct

SEQ ID NO: 1588270 - DNA, 15 bp, Homo sapiens
ggggaagcgcgggtc

SEQ ID NO: 1588271 - DNA, 15 bp, Homo sapiens
cggggaagcgcgggt

SEQ ID NO: 1588272 - DNA, 15 bp, Homo sapiens
gcggggaagcgcggg

SEQ ID NO: 1588273 - DNA, 15 bp, Homo sapiens
ggcggggaagcgcgg

SEQ ID NO: 1588274 - DNA, 15 bp, Homo sapiens
tggcggggaagcgcg

SEQ ID NO: 1588275 - DNA, 15 bp, Homo sapiens
ctggcggggaagcgc

SEQ ID NO: 1588276 - DNA, 15 bp, Homo sapiens
actggcggggaagcg

SEQ ID NO: 1588277 - DNA, 15 bp, Homo sapiens
tactggcggggaagc

SEQ ID NO: 1588278 - DNA, 15 bp, Homo sapiens
ttactggcggggaag

SEQ ID NO: 1588279 - DNA, 15 bp, Homo sapiens
cttactggcggggaa

SEQ ID NO: 1588280 - DNA, 15 bp, Homo sapiens
acttactggcgggga

SEQ ID NO: 1588281 - DNA, 15 bp, Homo sapiens
cacttactggcgggg

SEQ ID NO: 1588282 - DNA, 15 bp, Homo sapiens
tcacttactggcggg

SEQ ID NO: 1588283 - DNA, 15 bp, Homo sapiens
ctcacttactggcgg

SEQ ID NO: 1588284 - DNA, 15 bp, Homo sapiens
cctcacttactggcg

SEQ ID NO: 1588285 - DNA, 15 bp, Homo sapiens
gcctcacttactggc

SEQ ID NO: 1588286 - DNA, 15 bp, Homo sapiens
ggcctcacttactgg

SEQ ID NO: 1588287 - DNA, 15 bp, Homo sapiens
cggcctcacttactg

SEQ ID NO: 1588288 - DNA, 15 bp, Homo sapiens
gcggcctcacttact

SEQ ID NO: 1588289 - DNA, 15 bp, Homo sapiens
ggcggcctcacttac

SEQ ID NO: 1588290 - DNA, 15 bp, Homo sapiens
gggcggcctcactta

SEQ ID NO: 1588291 - DNA, 15 bp, Homo sapiens
ggggcggcctcactt

SEQ ID NO: 1588292 - DNA, 15 bp, Homo sapiens
tggggcggcctcact

SEQ ID NO: 1588293 - DNA, 15 bp, Homo sapiens
gtggggcggcctcac

SEQ ID NO: 1588294 - DNA, 15 bp, Homo sapiens
agtggggcggcctca

SEQ ID NO: 1588295 - DNA, 15 bp, Homo sapiens
cagtggggcggcctc

SEQ ID NO: 1588296 - DNA, 15 bp, Homo sapiens
gcagtggggcggcct

SEQ ID NO: 1588297 - DNA, 15 bp, Homo sapiens
cgcagtggggcggcc

SEQ ID NO: 1588298 - DNA, 15 bp, Homo sapiens
ccgcagtggggcggc

SEQ ID NO: 1588299 - DNA, 15 bp, Homo sapiens
cccgcagtggggcgg

SEQ ID NO: 1588300 - DNA, 15 bp, Homo sapiens
ccccgcagtggggcg

SEQ ID NO: 1588301 - DNA, 15 bp, Homo sapiens
gccccgcagtggggc

SEQ ID NO: 1588302 - DNA, 15 bp, Homo sapiens
ggccccgcagtgggg

SEQ ID NO: 1588303 - DNA, 15 bp, Homo sapiens
cggccccgcagtggg

SEQ ID NO: 1588304 - DNA, 15 bp, Homo sapiens
gcggccccgcagtgg

SEQ ID NO: 1588305 - DNA, 15 bp, Homo sapiens
cgcggccccgcagtg

SEQ ID NO: 1588306 - DNA, 15 bp, Homo sapiens
ccgcggccccgcagt

SEQ ID NO: 1588307 - DNA, 15 bp, Homo sapiens
cccgcggccccgcag

SEQ ID NO: 1588308 - DNA, 15 bp, Homo sapiens
gcccgcggccccgca

SEQ ID NO: 1588309 - DNA, 15 bp, Homo sapiens
agcccgcggccccgc

SEQ ID NO: 1588310 - DNA, 15 bp, Homo sapiens
cagcccgcggccccg

SEQ ID NO: 1588311 - DNA, 15 bp, Homo sapiens
tcagcccgcggcccc

SEQ ID NO: 1588312 - DNA, 15 bp, Homo sapiens
ctcagcccgcggccc

SEQ ID NO: 1588313 - DNA, 15 bp, Homo sapiens
gctcagcccgcggcc

SEQ ID NO: 1588314 - DNA, 15 bp, Homo sapiens
agctcagcccgcggc

SEQ ID NO: 1588315 - DNA, 15 bp, Homo sapiens
gagctcagcccgcgg

SEQ ID NO: 1588316 - DNA, 15 bp, Homo sapiens
tgagctcagcccgcg

SEQ ID NO: 1588317 - DNA, 15 bp, Homo sapiens
ctgagctcagcccgc

SEQ ID NO: 1588318 - DNA, 15 bp, Homo sapiens
cctgagctcagcccg

SEQ ID NO: 1588319 - DNA, 15 bp, Homo sapiens
tcctgagctcagccc

SEQ ID NO: 1588320 - DNA, 15 bp, Homo sapiens
ctcctgagctcagcc

SEQ ID NO: 1588321 - DNA, 15 bp, Homo sapiens
cctcctgagctcagc

SEQ ID NO: 1588322 - DNA, 15 bp, Homo sapiens
acctcctgagctcag

SEQ ID NO: 1588323 - DNA, 15 bp, Homo sapiens
cacctcctgagctca

SEQ ID NO: 1588324 - DNA, 15 bp, Homo sapiens
gcacctcctgagctc

SEQ ID NO: 1588325 - DNA, 15 bp, Homo sapiens
cgcacctcctgagct

SEQ ID NO: 1588326 - DNA, 15 bp, Homo sapiens
ccgcacctcctgagc

SEQ ID NO: 1588327 - DNA, 15 bp, Homo sapiens
gccgcacctcctgag

SEQ ID NO: 1588328 - DNA, 15 bp, Homo sapiens
cgccgcacctcctga

SEQ ID NO: 1588329 - DNA, 15 bp, Homo sapiens
tcgccgcacctcctg

SEQ ID NO: 1588330 - DNA, 15 bp, Homo sapiens
ctcgccgcacctcct

SEQ ID NO: 1588331 - DNA, 15 bp, Homo sapiens
tctcgccgcacctcc

SEQ ID NO: 1588332 - DNA, 15 bp, Homo sapiens
ctctcgccgcacctc

SEQ ID NO: 1588333 - DNA, 15 bp, Homo sapiens
gctctcgccgcacct

SEQ ID NO: 1588334 - DNA, 15 bp, Homo sapiens
ggctctcgccgcacc

SEQ ID NO: 1588335 - DNA, 15 bp, Homo sapiens
cggctctcgccgcac

SEQ ID NO: 1588336 - DNA, 15 bp, Homo sapiens
acggctctcgccgca

SEQ ID NO: 1588337 - DNA, 15 bp, Homo sapiens
gacggctctcgccgc

SEQ ID NO: 1588338 - DNA, 15 bp, Homo sapiens
ggacggctctcgccg

SEQ ID NO: 1588339 - DNA, 15 bp, Homo sapiens
tggacggctctcgcc

SEQ ID NO: 1588340 - DNA, 15 bp, Homo sapiens
ctggacggctctcgc

SEQ ID NO: 1588341 - DNA, 15 bp, Homo sapiens
tctggacggctctcg

SEQ ID NO: 1588342 - DNA, 15 bp, Homo sapiens
ttctggacggctctc

SEQ ID NO: 1588343 - DNA, 15 bp, Homo sapiens
cttctggacggctct

SEQ ID NO: 1588344 - DNA, 15 bp, Homo sapiens
ccttctggacggctc

SEQ ID NO: 1588345 - DNA, 15 bp, Homo sapiens
gccttctggacggct

SEQ ID NO: 1588346 - DNA, 15 bp, Homo sapiens
cgccttctggacggc

SEQ ID NO: 1588347 - DNA, 15 bp, Homo sapiens
gcgccttctggacgg

SEQ ID NO: 1588348 - DNA, 15 bp, Homo sapiens
cgcgccttctggacg

SEQ ID NO: 1588349 - DNA, 15 bp, Homo sapiens
ccgcgccttctggac

SEQ ID NO: 1588350 - DNA, 15 bp, Homo sapiens
gccgcgccttctgga

SEQ ID NO: 1588351 - DNA, 15 bp, Homo sapiens
cgccgcgccttctgg

SEQ ID NO: 1588352 - DNA, 15 bp, Homo sapiens
gcgccgcgccttctg

SEQ ID NO: 1588353 - DNA, 15 bp, Homo sapiens
ggcgccgcgccttct

SEQ ID NO: 1588354 - DNA, 15 bp, Homo sapiens
cggcgccgcgccttc

SEQ ID NO: 1588355 - DNA, 15 bp, Homo sapiens
ccggcgccgcgcctt

SEQ ID NO: 1588356 - DNA, 15 bp, Homo sapiens
gccggcgccgcgcct

SEQ ID NO: 1588357 - DNA, 15 bp, Homo sapiens
tgccggcgccgcgcc

SEQ ID NO: 1588358 - DNA, 15 bp, Homo sapiens
ctgccggcgccgcgc

SEQ ID NO: 1588359 - DNA, 15 bp, Homo sapiens
cctgccggcgccgcg

SEQ ID NO: 1588360 - DNA, 15 bp, Homo sapiens
gcctgccggcgccgc

SEQ ID NO: 1588361 - DNA, 15 bp, Homo sapiens
agcctgccggcgccg

SEQ ID NO: 1588362 - DNA, 15 bp, Homo sapiens
cagcctgccggcgcc

SEQ ID NO: 1588363 - DNA, 15 bp, Homo sapiens
gcagcctgccggcgc

SEQ ID NO: 1588364 - DNA, 15 bp, Homo sapiens
cgcagcctgccggcg

SEQ ID NO: 1588365 - DNA, 15 bp, Homo sapiens
gcgcagcctgccggc

SEQ ID NO: 1588366 - DNA, 15 bp, Homo sapiens
cgcgcagcctgccgg

SEQ ID NO: 1588367 - DNA, 15 bp, Homo sapiens
gcgcgcagcctgccg

SEQ ID NO: 1588368 - DNA, 15 bp, Homo sapiens
agcgcgcagcctgcc

SEQ ID NO: 1588369 - DNA, 15 bp, Homo sapiens
cagcgcgcagcctgc

SEQ ID NO: 1588370 - DNA, 15 bp, Homo sapiens
ccagcgcgcagcctg

SEQ ID NO: 1588371 - DNA, 15 bp, Homo sapiens
cccagcgcgcagcct

SEQ ID NO: 1588372 - DNA, 15 bp, Homo sapiens
gcccagcgcgcagcc

SEQ ID NO: 1588373 - DNA, 15 bp, Homo sapiens
tgcccagcgcgcagc

SEQ ID NO: 1588374 - DNA, 15 bp, Homo sapiens
atgcccagcgcgcag

SEQ ID NO: 1588375 - DNA, 15 bp, Homo sapiens
gatgcccagcgcgca

SEQ ID NO: 1588376 - DNA, 15 bp, Homo sapiens
tgatgcccagcgcgc

SEQ ID NO: 1588377 - DNA, 15 bp, Homo sapiens
ctgatgcccagcgcg

SEQ ID NO: 1588378 - DNA, 15 bp, Homo sapiens
cctgatgcccagcgc

SEQ ID NO: 1588379 - DNA, 15 bp, Homo sapiens
ccctgatgcccagcg

SEQ ID NO: 1588380 - DNA, 15 bp, Homo sapiens
tccctgatgcccagc

SEQ ID NO: 1588381 - DNA, 15 bp, Homo sapiens
ctccctgatgcccag

SEQ ID NO: 1588382 - DNA, 15 bp, Homo sapiens
cctccctgatgccca

SEQ ID NO: 1588383 - DNA, 15 bp, Homo sapiens
ccctccctgatgccc

SEQ ID NO: 1588384 - DNA, 15 bp, Homo sapiens
gccctccctgatgcc

SEQ ID NO: 1588385 - DNA, 15 bp, Homo sapiens
cgccctccctgatgc

SEQ ID NO: 1588386 - DNA, 15 bp, Homo sapiens
ccgccctccctgatg

SEQ ID NO: 1588387 - DNA, 15 bp, Homo sapiens
gccgccctccctgat

SEQ ID NO: 1588388 - DNA, 15 bp, Homo sapiens
ggccgccctccctga

SEQ ID NO: 1588389 - DNA, 15 bp, Homo sapiens
gggccgccctccctg

SEQ ID NO: 1588390 - DNA, 15 bp, Homo sapiens
cgggccgccctccct

SEQ ID NO: 1588391 - DNA, 15 bp, Homo sapiens
ccgggccgccctccc

SEQ ID NO: 1588392 - DNA, 15 bp, Homo sapiens
gccgggccgccctcc

SEQ ID NO: 1588393 - DNA, 15 bp, Homo sapiens
tgccgggccgccctc

SEQ ID NO: 1588394 - DNA, 15 bp, Homo sapiens
ctgccgggccgccct

SEQ ID NO: 1588395 - DNA, 15 bp, Homo sapiens
gctgccgggccgccc

SEQ ID NO: 1588396 - DNA, 15 bp, Homo sapiens
cgctgccgggccgcc

SEQ ID NO: 1588397 - DNA, 15 bp, Homo sapiens
ccgctgccgggccgc

SEQ ID NO: 1588398 - DNA, 15 bp, Homo sapiens
gccgctgccgggccg

SEQ ID NO: 1588399 - DNA, 15 bp, Homo sapiens
cgccgctgccgggcc

SEQ ID NO: 1588400 - DNA, 15 bp, Homo sapiens
gcgccgctgccgggc

SEQ ID NO: 1588401 - DNA, 15 bp, Homo sapiens
ggcgccgctgccggg

SEQ ID NO: 1588402 - DNA, 15 bp, Homo sapiens
tggcgccgctgccgg

SEQ ID NO: 1588403 - DNA, 15 bp, Homo sapiens
ctggcgccgctgccg

SEQ ID NO: 1588404 - DNA, 15 bp, Homo sapiens
cctggcgccgctgcc

SEQ ID NO: 1588405 - DNA, 15 bp, Homo sapiens
ccctggcgccgctgc

SEQ ID NO: 1588406 - DNA, 15 bp, Homo sapiens
tccctggcgccgctg

SEQ ID NO: 1588407 - DNA, 15 bp, Homo sapiens
gtccctggcgccgct

SEQ ID NO: 1588408 - DNA, 15 bp, Homo sapiens
agtccctggcgccgc

SEQ ID NO: 1588409 - DNA, 15 bp, Homo sapiens
aagtccctggcgccg

SEQ ID NO: 1588410 - DNA, 15 bp, Homo sapiens
caagtccctggcgcc

SEQ ID NO: 1588411 - DNA, 15 bp, Homo sapiens
ccaagtccctggcgc

SEQ ID NO: 1588412 - DNA, 15 bp, Homo sapiens
cccaagtccctggcg

SEQ ID NO: 1588413 - DNA, 15 bp, Homo sapiens
acccaagtccctggc

SEQ ID NO: 1588414 - DNA, 15 bp, Homo sapiens
cacccaagtccctgg

SEQ ID NO: 1588415 - DNA, 15 bp, Homo sapiens
gcacccaagtccctg

SEQ ID NO: 1588416 - DNA, 15 bp, Homo sapiens
cgcacccaagtccct

SEQ ID NO: 1588417 - DNA, 15 bp, Homo sapiens
ccgcacccaagtccc

SEQ ID NO: 1588418 - DNA, 15 bp, Homo sapiens
cccgcacccaagtcc

SEQ ID NO: 1588419 - DNA, 15 bp, Homo sapiens
tcccgcacccaagtc

SEQ ID NO: 1588420 - DNA, 15 bp, Homo sapiens
ctcccgcacccaagt

SEQ ID NO: 1588421 - DNA, 15 bp, Homo sapiens
gctcccgcacccaag

SEQ ID NO: 1588422 - DNA, 15 bp, Homo sapiens
agctcccgcacccaa

SEQ ID NO: 1588423 - DNA, 15 bp, Homo sapiens
cagctcccgcaccca

SEQ ID NO: 1588424 - DNA, 15 bp, Homo sapiens
ccagctcccgcaccc

SEQ ID NO: 1588425 - DNA, 15 bp, Homo sapiens
cccagctcccgcacc

SEQ ID NO: 1588426 - DNA, 15 bp, Homo sapiens
ccccagctcccgcac

SEQ ID NO: 1588427 - DNA, 15 bp, Homo sapiens
tccccagctcccgca

SEQ ID NO: 1588428 - DNA, 15 bp, Homo sapiens
atccccagctcccgc

SEQ ID NO: 1588429 - DNA, 15 bp, Homo sapiens
catccccagctcccg

SEQ ID NO: 1588430 - DNA, 15 bp, Homo sapiens
gcatccccagctccc

SEQ ID NO: 1588431 - DNA, 15 bp, Homo sapiens
agcatccccagctcc

SEQ ID NO: 1588432 - DNA, 15 bp, Homo sapiens
aagcatccccagctc

SEQ ID NO: 1588433 - DNA, 15 bp, Homo sapiens
gaagcatccccagct

SEQ ID NO: 1588434 - DNA, 15 bp, Homo sapiens
ggaagcatccccagc

SEQ ID NO: 1588435 - DNA, 15 bp, Homo sapiens
gggaagcatccccag

SEQ ID NO: 1588436 - DNA, 15 bp, Homo sapiens
ggggaagcatcccca

SEQ ID NO: 1588437 - DNA, 15 bp, Homo sapiens
gggggaagcatcccc

SEQ ID NO: 1588438 - DNA, 15 bp, Homo sapiens
agggggaagcatccc

SEQ ID NO: 1588439 - DNA, 15 bp, Homo sapiens
cagggggaagcatcc

SEQ ID NO: 1588440 - DNA, 15 bp, Homo sapiens
gcagggggaagcatc

SEQ ID NO: 1588441 - DNA, 15 bp, Homo sapiens
agcagggggaagcat

SEQ ID NO: 1588442 - DNA, 15 bp, Homo sapiens
gagcagggggaagca

SEQ ID NO: 1588443 - DNA, 15 bp, Homo sapiens
cgagcagggggaagc

SEQ ID NO: 1588444 - DNA, 15 bp, Homo sapiens
ccgagcagggggaag

SEQ ID NO: 1588445 - DNA, 15 bp, Homo sapiens
gccgagcagggggaa

SEQ ID NO: 1588446 - DNA, 15 bp, Homo sapiens
agccgagcaggggga

SEQ ID NO: 1588447 - DNA, 15 bp, Homo sapiens
cagccgagcaggggg

SEQ ID NO: 1588448 - DNA, 15 bp, Homo sapiens
ccagccgagcagggg

SEQ ID NO: 1588449 - DNA, 15 bp, Homo sapiens
cccagccgagcaggg

SEQ ID NO: 1588450 - DNA, 15 bp, Homo sapiens
ccccagccgagcagg

SEQ ID NO: 1588451 - DNA, 15 bp, Homo sapiens
cccccagccgagcag

SEQ ID NO: 1588452 - DNA, 15 bp, Homo sapiens
acccccagccgagca

SEQ ID NO: 1588453 - DNA, 15 bp, Homo sapiens
gacccccagccgagc

SEQ ID NO: 1588454 - DNA, 15 bp, Homo sapiens
ggacccccagccgag

SEQ ID NO: 1588455 - DNA, 15 bp, Homo sapiens
tggacccccagccga

SEQ ID NO: 1588456 - DNA, 15 bp, Homo sapiens
ttggacccccagccg

SEQ ID NO: 1588457 - DNA, 15 bp, Homo sapiens
cttggacccccagcc

SEQ ID NO: 1588458 - DNA, 15 bp, Homo sapiens
tcttggacccccagc

SEQ ID NO: 1588459 - DNA, 15 bp, Homo sapiens
ttcttggacccccag

SEQ ID NO: 1588460 - DNA, 15 bp, Homo sapiens
gttcttggaccccca

SEQ ID NO: 1588461 - DNA, 15 bp, Homo sapiens
tgttcttggaccccc

SEQ ID NO: 1588462 - DNA, 15 bp, Homo sapiens
ctgttcttggacccc

SEQ ID NO: 1588463 - DNA, 15 bp, Homo sapiens
cctgttcttggaccc

SEQ ID NO: 1588464 - DNA, 15 bp, Homo sapiens
gcctgttcttggacc

SEQ ID NO: 1588465 - DNA, 15 bp, Homo sapiens
tgcctgttcttggac

SEQ ID NO: 1588466 - DNA, 15 bp, Homo sapiens
gtgcctgttcttgga

SEQ ID NO: 1588467 - DNA, 15 bp, Homo sapiens
agtgcctgttcttgg

SEQ ID NO: 1588468 - DNA, 15 bp, Homo sapiens
aagtgcctgttcttg

SEQ ID NO: 1588469 - DNA, 15 bp, Homo sapiens
caagtgcctgttctt

SEQ ID NO: 1588470 - DNA, 15 bp, Homo sapiens
ccaagtgcctgttct

SEQ ID NO: 1588471 - DNA, 15 bp, Homo sapiens
accaagtgcctgttc

SEQ ID NO: 1588472 - DNA, 15 bp, Homo sapiens
taccaagtgcctgtt

SEQ ID NO: 1588473 - DNA, 15 bp, Homo sapiens
ctaccaagtgcctgt

SEQ ID NO: 1588474 - DNA, 15 bp, Homo sapiens
gctaccaagtgcctg

SEQ ID NO: 1588475 - DNA, 15 bp, Homo sapiens
cgctaccaagtgcct

SEQ ID NO: 1588476 - DNA, 15 bp, Homo sapiens
gcgctaccaagtgcc

SEQ ID NO: 1588477 - DNA, 15 bp, Homo sapiens
agcgctaccaagtgc

SEQ ID NO: 1588478 - DNA, 15 bp, Homo sapiens
cagcgctaccaagtg

SEQ ID NO: 1588479 - DNA, 15 bp, Homo sapiens
ccagcgctaccaagt

SEQ ID NO: 1588480 - DNA, 15 bp, Homo sapiens
cccagcgctaccaag

SEQ ID NO: 1588481 - DNA, 15 bp, Homo sapiens
ccccagcgctaccaa

SEQ ID NO: 1588482 - DNA, 15 bp, Homo sapiens
accccagcgctacca

SEQ ID NO: 1588483 - DNA, 15 bp, Homo sapiens
gaccccagcgctacc

SEQ ID NO: 1588484 - DNA, 15 bp, Homo sapiens
ggaccccagcgctac

SEQ ID NO: 1588485 - DNA, 15 bp, Homo sapiens
aggaccccagcgcta

SEQ ID NO: 1588486 - DNA, 15 bp, Homo sapiens
caggaccccagcgct

SEQ ID NO: 1588487 - DNA, 15 bp, Homo sapiens
gcaggaccccagcgc

SEQ ID NO: 1588488 - DNA, 15 bp, Homo sapiens
cgcaggaccccagcg

SEQ ID NO: 1588489 - DNA, 15 bp, Homo sapiens
ccgcaggaccccagc

SEQ ID NO: 1588490 - DNA, 15 bp, Homo sapiens
accgcaggaccccag

SEQ ID NO: 1588491 - DNA, 15 bp, Homo sapiens
gaccgcaggacccca

SEQ ID NO: 1588492 - DNA, 15 bp, Homo sapiens
tgaccgcaggacccc

SEQ ID NO: 1588493 - DNA, 15 bp, Homo sapiens
ctgaccgcaggaccc

SEQ ID NO: 1588494 - DNA, 15 bp, Homo sapiens
tctgaccgcaggacc

SEQ ID NO: 1588495 - DNA, 15 bp, Homo sapiens
atctgaccgcaggac

SEQ ID NO: 1588496 - DNA, 15 bp, Homo sapiens
catctgaccgcagga

SEQ ID NO: 1588497 - DNA, 15 bp, Homo sapiens
gcatctgaccgcagg

SEQ ID NO: 1588498 - DNA, 15 bp, Homo sapiens
cgcatctgaccgcag

SEQ ID NO: 1588499 - DNA, 15 bp, Homo sapiens
ccgcatctgaccgca

SEQ ID NO: 1588500 - DNA, 15 bp, Homo sapiens
cccgcatctgaccgc

SEQ ID NO: 1588501 - DNA, 15 bp, Homo sapiens
acccgcatctgaccg

SEQ ID NO: 1588502 - DNA, 15 bp, Homo sapiens
tacccgcatctgacc

SEQ ID NO: 1588503 - DNA, 15 bp, Homo sapiens
gtacccgcatctgac

SEQ ID NO: 1588504 - DNA, 15 bp, Homo sapiens
agtacccgcatctga

SEQ ID NO: 1588505 - DNA, 15 bp, Homo sapiens
gagtacccgcatctg

SEQ ID NO: 1588506 - DNA, 15 bp, Homo sapiens
cgagtacccgcatct

SEQ ID NO: 1588507 - DNA, 15 bp, Homo sapiens
ccgagtacccgcatc

SEQ ID NO: 1588508 - DNA, 15 bp, Homo sapiens
gccgagtacccgcat

SEQ ID NO: 1588509 - DNA, 15 bp, Homo sapiens
cgccgagtacccgca

SEQ ID NO: 1588510 - DNA, 15 bp, Homo sapiens
acgccgagtacccgc

SEQ ID NO: 1588511 - DNA, 15 bp, Homo sapiens
gacgccgagtacccg

SEQ ID NO: 1588512 - DNA, 15 bp, Homo sapiens
agacgccgagtaccc

SEQ ID NO: 1588513 - DNA, 15 bp, Homo sapiens
gagacgccgagtacc

SEQ ID NO: 1588514 - DNA, 15 bp, Homo sapiens
ggagacgccgagtac

SEQ ID NO: 1588515 - DNA, 15 bp, Homo sapiens
aggagacgccgagta

SEQ ID NO: 1588516 - DNA, 15 bp, Homo sapiens
taggagacgccgagt

SEQ ID NO: 1588517 - DNA, 15 bp, Homo sapiens
ctaggagacgccgag

SEQ ID NO: 1588518 - DNA, 15 bp, Homo sapiens
cctaggagacgccga

SEQ ID NO: 1588519 - DNA, 15 bp, Homo sapiens
gcctaggagacgccg

SEQ ID NO: 1588520 - DNA, 15 bp, Homo sapiens
cgcctaggagacgcc

SEQ ID NO: 1588521 - DNA, 15 bp, Homo sapiens
gcgcctaggagacgc

SEQ ID NO: 1588522 - DNA, 15 bp, Homo sapiens
cgcgcctaggagacg

SEQ ID NO: 1588523 - DNA, 15 bp, Homo sapiens
ccgcgcctaggagac

SEQ ID NO: 1588524 - DNA, 15 bp, Homo sapiens
accgcgcctaggaga

SEQ ID NO: 1588525 - DNA, 15 bp, Homo sapiens
caccgcgcctaggag

SEQ ID NO: 1588526 - DNA, 15 bp, Homo sapiens
ccaccgcgcctagga

SEQ ID NO: 1588527 - DNA, 15 bp, Homo sapiens
tccaccgcgcctagg

SEQ ID NO: 1588528 - DNA, 15 bp, Homo sapiens
gtccaccgcgcctag

SEQ ID NO: 1588529 - DNA, 15 bp, Homo sapiens
agtccaccgcgccta

SEQ ID NO: 1588530 - DNA, 15 bp, Homo sapiens
cagtccaccgcgcct

SEQ ID NO: 1588531 - DNA, 15 bp, Homo sapiens
ccagtccaccgcgcc

SEQ ID NO: 1588532 - DNA, 15 bp, Homo sapiens
gccagtccaccgcgc

SEQ ID NO: 1588533 - DNA, 15 bp, Homo sapiens
tgccagtccaccgcg

SEQ ID NO: 1588534 - DNA, 15 bp, Homo sapiens
ctgccagtccaccgc

SEQ ID NO: 1588535 - DNA, 15 bp, Homo sapiens
gctgccagtccaccg

SEQ ID NO: 1588536 - DNA, 15 bp, Homo sapiens
agctgccagtccacc

SEQ ID NO: 1588537 - DNA, 15 bp, Homo sapiens
gagctgccagtccac

SEQ ID NO: 1588538 - DNA, 15 bp, Homo sapiens
agagctgccagtcca

SEQ ID NO: 1588539 - DNA, 15 bp, Homo sapiens
cagagctgccagtcc

SEQ ID NO: 1588540 - DNA, 15 bp, Homo sapiens
gcagagctgccagtc

SEQ ID NO: 1588541 - DNA, 15 bp, Homo sapiens
agcagagctgccagt

SEQ ID NO: 1588542 - DNA, 15 bp, Homo sapiens
gagcagagctgccag

SEQ ID NO: 1588543 - DNA, 15 bp, Homo sapiens
cgagcagagctgcca

SEQ ID NO: 1588544 - DNA, 15 bp, Homo sapiens
ccgagcagagctgcc

SEQ ID NO: 1588545 - DNA, 15 bp, Homo sapiens
gccgagcagagctgc

SEQ ID NO: 1588546 - DNA, 15 bp, Homo sapiens
cgccgagcagagctg

SEQ ID NO: 1588547 - DNA, 15 bp, Homo sapiens
gcgccgagcagagct

SEQ ID NO: 1588548 - DNA, 15 bp, Homo sapiens
tgcgccgagcagagc

SEQ ID NO: 1588549 - DNA, 15 bp, Homo sapiens
ctgcgccgagcagag

SEQ ID NO: 1588550 - DNA, 15 bp, Homo sapiens
tctgcgccgagcaga

SEQ ID NO: 1588551 - DNA, 15 bp, Homo sapiens
ttctgcgccgagcag

SEQ ID NO: 1588552 - DNA, 15 bp, Homo sapiens
cttctgcgccgagca

SEQ ID NO: 1588553 - DNA, 15 bp, Homo sapiens
tcttctgcgccgagc

SEQ ID NO: 1588554 - DNA, 15 bp, Homo sapiens
gtcttctgcgccgag

SEQ ID NO: 1588555 - DNA, 15 bp, Homo sapiens
ggtcttctgcgccga

SEQ ID NO: 1588556 - DNA, 15 bp, Homo sapiens
aggtcttctgcgccg

SEQ ID NO: 1588557 - DNA, 15 bp, Homo sapiens
gaggtcttctgcgcc

SEQ ID NO: 1588558 - DNA, 15 bp, Homo sapiens
cgaggtcttctgcgc

SEQ ID NO: 1588559 - DNA, 15 bp, Homo sapiens
ccgaggtcttctgcg

SEQ ID NO: 1588560 - DNA, 15 bp, Homo sapiens
cccgaggtcttctgc

SEQ ID NO: 1588561 - DNA, 15 bp, Homo sapiens
ccccgaggtcttctg

SEQ ID NO: 1588562 - DNA, 15 bp, Homo sapiens
tccccgaggtcttct

SEQ ID NO: 1588563 - DNA, 15 bp, Homo sapiens
ctccccgaggtcttc

SEQ ID NO: 1588564 - DNA, 15 bp, Homo sapiens
gctccccgaggtctt

SEQ ID NO: 1588565 - DNA, 15 bp, Homo sapiens
ggctccccgaggtct

SEQ ID NO: 1588566 - DNA, 15 bp, Homo sapiens
tggctccccgaggtc

SEQ ID NO: 1588567 - DNA, 15 bp, Homo sapiens
ttggctccccgaggt

SEQ ID NO: 1588568 - DNA, 15 bp, Homo sapiens
cttggctccccgagg

SEQ ID NO: 1588569 - DNA, 15 bp, Homo sapiens
ccttggctccccgag

SEQ ID NO: 1588570 - DNA, 15 bp, Homo sapiens
cccttggctccccga

SEQ ID NO: 1588571 - DNA, 15 bp, Homo sapiens
tcccttggctccccg

SEQ ID NO: 1588572 - DNA, 15 bp, Homo sapiens
ttcccttggctcccc

SEQ ID NO: 1588573 - DNA, 15 bp, Homo sapiens
cttcccttggctccc

SEQ ID NO: 1588574 - DNA, 15 bp, Homo sapiens
gcttcccttggctcc

SEQ ID NO: 1588575 - DNA, 15 bp, Homo sapiens
cgcttcccttggctc

SEQ ID NO: 1588576 - DNA, 15 bp, Homo sapiens
tcgcttcccttggct

SEQ ID NO: 1588577 - DNA, 15 bp, Homo sapiens
gtcgcttcccttggc

SEQ ID NO: 1588578 - DNA, 15 bp, Homo sapiens
ggtcgcttcccttgg

SEQ ID NO: 1588579 - DNA, 15 bp, Homo sapiens
gggtcgcttcccttg

SEQ ID NO: 1588580 - DNA, 15 bp, Homo sapiens
ggggtcgcttccctt

SEQ ID NO: 1588581 - DNA, 15 bp, Homo sapiens
cggggtcgcttccct

SEQ ID NO: 1588582 - DNA, 15 bp, Homo sapiens
tcggggtcgcttccc

SEQ ID NO: 1588583 - DNA, 15 bp, Homo sapiens
ctcggggtcgcttcc

SEQ ID NO: 1588584 - DNA, 15 bp, Homo sapiens
gctcggggtcgcttc

SEQ ID NO: 1588585 - DNA, 15 bp, Homo sapiens
agctcggggtcgctt

SEQ ID NO: 1588586 - DNA, 15 bp, Homo sapiens
gagctcggggtcgct

SEQ ID NO: 1588587 - DNA, 15 bp, Homo sapiens
tgagctcggggtcgc

SEQ ID NO: 1588588 - DNA, 15 bp, Homo sapiens
ttgagctcggggtcg

SEQ ID NO: 1588589 - DNA, 15 bp, Homo sapiens
cttgagctcggggtc

SEQ ID NO: 1588590 - DNA, 15 bp, Homo sapiens
ccttgagctcggggt

SEQ ID NO: 1588591 - DNA, 15 bp, Homo sapiens
tccttgagctcgggg

SEQ ID NO: 1588592 - DNA, 15 bp, Homo sapiens
ctccttgagctcggg

SEQ ID NO: 1588593 - DNA, 15 bp, Homo sapiens
gctccttgagctcgg

SEQ ID NO: 1588594 - DNA, 15 bp, Homo sapiens
tgctccttgagctcg

SEQ ID NO: 1588595 - DNA, 15 bp, Homo sapiens
ctgctccttgagctc

SEQ ID NO: 1588596 - DNA, 15 bp, Homo sapiens
cctgctccttgagct

SEQ ID NO: 1588597 - DNA, 15 bp, Homo sapiens
ccctgctccttgagc

SEQ ID NO: 1588598 - DNA, 15 bp, Homo sapiens
cccctgctccttgag

SEQ ID NO: 1588599 - DNA, 15 bp, Homo sapiens
gcccctgctccttga

SEQ ID NO: 1588600 - DNA, 15 bp, Homo sapiens
cgcccctgctccttg

SEQ ID NO: 1588601 - DNA, 15 bp, Homo sapiens
tcgcccctgctcctt

SEQ ID NO: 1588602 - DNA, 15 bp, Homo sapiens
ctcgcccctgctcct

SEQ ID NO: 1588603 - DNA, 15 bp, Homo sapiens
gctcgcccctgctcc

SEQ ID NO: 1588604 - DNA, 15 bp, Homo sapiens
tgctcgcccctgctc

SEQ ID NO: 1588605 - DNA, 15 bp, Homo sapiens
ctgctcgcccctgct

SEQ ID NO: 1588606 - DNA, 15 bp, Homo sapiens
tctgctcgcccctgc

SEQ ID NO: 1588607 - DNA, 15 bp, Homo sapiens
ctctgctcgcccctg

SEQ ID NO: 1588608 - DNA, 15 bp, Homo sapiens
gctctgctcgcccct

SEQ ID NO: 1588609 - DNA, 15 bp, Homo sapiens
cgctctgctcgcccc

SEQ ID NO: 1588610 - DNA, 15 bp, Homo sapiens
gcgctctgctcgccc

SEQ ID NO: 1588611 - DNA, 15 bp, Homo sapiens
cgcgctctgctcgcc

SEQ ID NO: 1588612 - DNA, 15 bp, Homo sapiens
ccgcgctctgctcgc

SEQ ID NO: 1588613 - DNA, 15 bp, Homo sapiens
tccgcgctctgctcg

SEQ ID NO: 1588614 - DNA, 15 bp, Homo sapiens
ctccgcgctctgctc

SEQ ID NO: 1588615 - DNA, 15 bp, Homo sapiens
tctccgcgctctgct

SEQ ID NO: 1588616 - DNA, 15 bp, Homo sapiens
ctctccgcgctctgc

SEQ ID NO: 1588617 - DNA, 15 bp, Homo sapiens
cctctccgcgctctg

SEQ ID NO: 1588618 - DNA, 15 bp, Homo sapiens
gcctctccgcgctct

SEQ ID NO: 1588619 - DNA, 15 bp, Homo sapiens
agcctctccgcgctc

SEQ ID NO: 1588620 - DNA, 15 bp, Homo sapiens
tagcctctccgcgct

SEQ ID NO: 1588621 - DNA, 15 bp, Homo sapiens
ctagcctctccgcgc

SEQ ID NO: 1588622 - DNA, 15 bp, Homo sapiens
tctagcctctccgcg

SEQ ID NO: 1588623 - DNA, 15 bp, Homo sapiens
gtctagcctctccgc

SEQ ID NO: 1588624 - DNA, 15 bp, Homo sapiens
ggtctagcctctccg

SEQ ID NO: 1588625 - DNA, 15 bp, Homo sapiens
cggtctagcctctcc

SEQ ID NO: 1588626 - DNA, 15 bp, Homo sapiens
ccggtctagcctctc

SEQ ID NO: 1588627 - DNA, 15 bp, Homo sapiens
cccggtctagcctct

SEQ ID NO: 1588628 - DNA, 15 bp, Homo sapiens
gcccggtctagcctc

SEQ ID NO: 1588629 - DNA, 15 bp, Homo sapiens
ggcccggtctagcct

SEQ ID NO: 1588630 - DNA, 15 bp, Homo sapiens
tggcccggtctagcc

SEQ ID NO: 1588631 - DNA, 15 bp, Homo sapiens
ctggcccggtctagc

SEQ ID NO: 1588632 - DNA, 15 bp, Homo sapiens
cctggcccggtctag

SEQ ID NO: 1588633 - DNA, 15 bp, Homo sapiens
tcctggcccggtcta

SEQ ID NO: 1588634 - DNA, 15 bp, Homo sapiens
ctcctggcccggtct

SEQ ID NO: 1588635 - DNA, 15 bp, Homo sapiens
cctcctggcccggtc

SEQ ID NO: 1588636 - DNA, 15 bp, Homo sapiens
ccctcctggcccggt

SEQ ID NO: 1588637 - DNA, 15 bp, Homo sapiens
tccctcctggcccgg

SEQ ID NO: 1588638 - DNA, 15 bp, Homo sapiens
ctccctcctggcccg

SEQ ID NO: 1588639 - DNA, 15 bp, Homo sapiens
cctccctcctggccc

SEQ ID NO: 1588640 - DNA, 15 bp, Homo sapiens
gcctccctcctggcc

SEQ ID NO: 1588641 - DNA, 15 bp, Homo sapiens
agcctccctcctggc

SEQ ID NO: 1588642 - DNA, 15 bp, Homo sapiens
cagcctccctcctgg

SEQ ID NO: 1588643 - DNA, 15 bp, Homo sapiens
gcagcctccctcctg

SEQ ID NO: 1588644 - DNA, 15 bp, Homo sapiens
gggcagcctccctcc

SEQ ID NO: 1588645 - DNA, 15 bp, Homo sapiens
agggcagcctccctc

SEQ ID NO: 1588646 - DNA, 15 bp, Homo sapiens
cagggcagcctccct

SEQ ID NO: 1588647 - DNA, 15 bp, Homo sapiens
acagggcagcctccc

SEQ ID NO: 1588648 - DNA, 15 bp, Homo sapiens
aacagggcagcctcc

SEQ ID NO: 1588649 - DNA, 15 bp, Homo sapiens
caacagggcagcctc

SEQ ID NO: 1588650 - DNA, 15 bp, Homo sapiens
ccaacagggcagcct

SEQ ID NO: 1588651 - DNA, 15 bp, Homo sapiens
cccaacagggcagcc

SEQ ID NO: 1588652 - DNA, 15 bp, Homo sapiens
tcccaacagggcagc

SEQ ID NO: 1588653 - DNA, 15 bp, Homo sapiens
ctcccaacagggcag

SEQ ID NO: 1588654 - DNA, 15 bp, Homo sapiens
cctcccaacagggca

SEQ ID NO: 1588655 - DNA, 15 bp, Homo sapiens
gcctcccaacagggc

SEQ ID NO: 1588656 - DNA, 15 bp, Homo sapiens
tgcctcccaacaggg

SEQ ID NO: 1588657 - DNA, 15 bp, Homo sapiens
gtgcctcccaacagg

SEQ ID NO: 1588658 - DNA, 15 bp, Homo sapiens
agtgcctcccaacag

SEQ ID NO: 1588659 - DNA, 15 bp, Homo sapiens
gagtgcctcccaaca

SEQ ID NO: 1588660 - DNA, 15 bp, Homo sapiens
cgagtgcctcccaac

SEQ ID NO: 1588661 - DNA, 15 bp, Homo sapiens
tcgagtgcctcccaa

SEQ ID NO: 1588662 - DNA, 15 bp, Homo sapiens
ctcgagtgcctccca

SEQ ID NO: 1588663 - DNA, 15 bp, Homo sapiens
gctcgagtgcctccc

SEQ ID NO: 1588664 - DNA, 15 bp, Homo sapiens
cgctcgagtgcctcc

SEQ ID NO: 1588665 - DNA, 15 bp, Homo sapiens
gcgctcgagtgcctc

SEQ ID NO: 1588666 - DNA, 15 bp, Homo sapiens
ggcgctcgagtgcct

SEQ ID NO: 1588667 - DNA, 15 bp, Homo sapiens
gggcgctcgagtgcc

SEQ ID NO: 1588668 - DNA, 15 bp, Homo sapiens
cgggcgctcgagtgc

SEQ ID NO: 1588669 - DNA, 15 bp, Homo sapiens
ccgggcgctcgagtg

SEQ ID NO: 1588670 - DNA, 15 bp, Homo sapiens
gccgggcgctcgagt

SEQ ID NO: 1588671 - DNA, 15 bp, Homo sapiens
ggccgggcgctcgag

SEQ ID NO: 1588672 - DNA, 15 bp, Homo sapiens
gggccgggcgctcga

SEQ ID NO: 1588673 - DNA, 15 bp, Homo sapiens
cgggccgggcgctcg

SEQ ID NO: 1588674 - DNA, 15 bp, Homo sapiens
ccgggccgggcgctc

SEQ ID NO: 1588675 - DNA, 15 bp, Homo sapiens
gccgggccgggcgct

SEQ ID NO: 1588676 - DNA, 15 bp, Homo sapiens
ggccgggccgggcgc

SEQ ID NO: 1588677 - DNA, 15 bp, Homo sapiens
gggccgggccgggcg

SEQ ID NO: 1588678 - DNA, 15 bp, Homo sapiens
agggccgggccgggc

SEQ ID NO: 1588679 - DNA, 15 bp, Homo sapiens
gagggccgggccggg

SEQ ID NO: 1588680 - DNA, 15 bp, Homo sapiens
agagggccgggccgg

SEQ ID NO: 1588681 - DNA, 15 bp, Homo sapiens
gagagggccgggccg

SEQ ID NO: 1588682 - DNA, 15 bp, Homo sapiens
agagagggccgggcc

SEQ ID NO: 1588683 - DNA, 15 bp, Homo sapiens
gagagagggccgggc

SEQ ID NO: 1588684 - DNA, 15 bp, Homo sapiens
ggagagagggccggg

SEQ ID NO: 1588685 - DNA, 15 bp, Homo sapiens
tggagagagggccgg

SEQ ID NO: 1588686 - DNA, 15 bp, Homo sapiens
ctggagagagggccg

SEQ ID NO: 1588687 - DNA, 15 bp, Homo sapiens
gctggagagagggcc

SEQ ID NO: 1588688 - DNA, 15 bp, Homo sapiens
cgctggagagagggc

SEQ ID NO: 1588689 - DNA, 15 bp, Homo sapiens
ccgctggagagaggg

SEQ ID NO: 1588690 - DNA, 15 bp, Homo sapiens
tccgctggagagagg

SEQ ID NO: 1588691 - DNA, 15 bp, Homo sapiens
ctccgctggagagag

SEQ ID NO: 1588692 - DNA, 15 bp, Homo sapiens
actccgctggagaga

SEQ ID NO: 1588693 - DNA, 15 bp, Homo sapiens
gactccgctggagag

SEQ ID NO: 1588694 - DNA, 15 bp, Homo sapiens
agactccgctggaga

SEQ ID NO: 1588695 - DNA, 15 bp, Homo sapiens
cagactccgctggag

SEQ ID NO: 1588696 - DNA, 15 bp, Homo sapiens
ccagactccgctgga

SEQ ID NO: 1588697 - DNA, 15 bp, Homo sapiens
cccagactccgctgg

SEQ ID NO: 1588698 - DNA, 15 bp, Homo sapiens
gcccagactccgctg

SEQ ID NO: 1588699 - DNA, 15 bp, Homo sapiens
tgcccagactccgct

SEQ ID NO: 1588700 - DNA, 15 bp, Homo sapiens
ctgcccagactccgc

SEQ ID NO: 1588701 - DNA, 15 bp, Homo sapiens
cctgcccagactccg

SEQ ID NO: 1588702 - DNA, 15 bp, Homo sapiens
acctgcccagactcc

SEQ ID NO: 1588703 - DNA, 15 bp, Homo sapiens
cacctgcccagactc

SEQ ID NO: 1588704 - DNA, 15 bp, Homo sapiens
ccacctgcccagact

SEQ ID NO: 1588705 - DNA, 15 bp, Homo sapiens
cccacctgcccagac

SEQ ID NO: 1588706 - DNA, 15 bp, Homo sapiens
tcccacctgcccaga

SEQ ID NO: 1588707 - DNA, 15 bp, Homo sapiens
ctcccacctgcccag

SEQ ID NO: 1588708 - DNA, 15 bp, Homo sapiens
cctcccacctgccca

SEQ ID NO: 1588709 - DNA, 15 bp, Homo sapiens
tcctcccacctgccc

SEQ ID NO: 1588710 - DNA, 15 bp, Homo sapiens
gtcctcccacctgcc

SEQ ID NO: 1588711 - DNA, 15 bp, Homo sapiens
agtcctcccacctgc

SEQ ID NO: 1588712 - DNA, 15 bp, Homo sapiens
gagtcctcccacctg

SEQ ID NO: 1588713 - DNA, 15 bp, Homo sapiens
cgagtcctcccacct

SEQ ID NO: 1588714 - DNA, 15 bp, Homo sapiens
gcgagtcctcccacc

SEQ ID NO: 1588715 - DNA, 15 bp, Homo sapiens
tgcgagtcctcccac

SEQ ID NO: 1588716 - DNA, 15 bp, Homo sapiens
ctgcgagtcctccca

SEQ ID NO: 1588717 - DNA, 15 bp, Homo sapiens
actgcgagtcctccc

SEQ ID NO: 1588718 - DNA, 15 bp, Homo sapiens
aactgcgagtcctcc

SEQ ID NO: 1588719 - DNA, 15 bp, Homo sapiens
gaactgcgagtcctc

SEQ ID NO: 1588720 - DNA, 15 bp, Homo sapiens
ggaactgcgagtcct

SEQ ID NO: 1588721 - DNA, 15 bp, Homo sapiens
tggaactgcgagtcc

SEQ ID NO: 1588722 - DNA, 15 bp, Homo sapiens
ctggaactgcgagtc

SEQ ID NO: 1588723 - DNA, 15 bp, Homo sapiens
tctggaactgcgagt

SEQ ID NO: 1588724 - DNA, 15 bp, Homo sapiens
ctctggaactgcgag

SEQ ID NO: 1588725 - DNA, 15 bp, Homo sapiens
cctctggaactgcga

SEQ ID NO: 1588726 - DNA, 15 bp, Homo sapiens
ccctctggaactgcg

SEQ ID NO: 1588727 - DNA, 15 bp, Homo sapiens
cccctctggaactgc

SEQ ID NO: 1588728 - DNA, 15 bp, Homo sapiens
tcccctctggaactg

SEQ ID NO: 1588729 - DNA, 15 bp, Homo sapiens
gtcccctctggaact

SEQ ID NO: 1588730 - DNA, 15 bp, Homo sapiens
agtcccctctggaac

SEQ ID NO: 1588731 - DNA, 15 bp, Homo sapiens
gagtcccctctggaa

SEQ ID NO: 1588732 - DNA, 15 bp, Homo sapiens
agagtcccctctgga

SEQ ID NO: 1588733 - DNA, 15 bp, Homo sapiens
tagagtcccctctgg

SEQ ID NO: 1588734 - DNA, 15 bp, Homo sapiens
ttagagtcccctctg

SEQ ID NO: 1588735 - DNA, 15 bp, Homo sapiens
cttagagtcccctct

SEQ ID NO: 1588736 - DNA, 15 bp, Homo sapiens
ccttagagtcccctc

SEQ ID NO: 1588737 - DNA, 15 bp, Homo sapiens
cccttagagtcccct

SEQ ID NO: 1588738 - DNA, 15 bp, Homo sapiens
acccttagagtcccc

SEQ ID NO: 1588739 - DNA, 15 bp, Homo sapiens
gacccttagagtccc

SEQ ID NO: 1588740 - DNA, 15 bp, Homo sapiens
ggacccttagagtcc

SEQ ID NO: 1588741 - DNA, 15 bp, Homo sapiens
cggacccttagagtc

SEQ ID NO: 1588742 - DNA, 15 bp, Homo sapiens
tcggacccttagagt

SEQ ID NO: 1588743 - DNA, 15 bp, Homo sapiens
ctcggacccttagag

SEQ ID NO: 1588744 - DNA, 15 bp, Homo sapiens
gctcggacccttaga

SEQ ID NO: 1588745 - DNA, 15 bp, Homo sapiens
tgctcggacccttag

SEQ ID NO: 1588746 - DNA, 15 bp, Homo sapiens
ctgctcggaccctta

SEQ ID NO: 1588747 - DNA, 15 bp, Homo sapiens
cctgctcggaccctt

SEQ ID NO: 1588748 - DNA, 15 bp, Homo sapiens
acctgctcggaccct

SEQ ID NO: 1588749 - DNA, 15 bp, Homo sapiens
cacctgctcggaccc

SEQ ID NO: 1588750 - DNA, 15 bp, Homo sapiens
gcacctgctcggacc

SEQ ID NO: 1588751 - DNA, 15 bp, Homo sapiens
ggcacctgctcggac

SEQ ID NO: 1588752 - DNA, 15 bp, Homo sapiens
gggcacctgctcgga

SEQ ID NO: 1588753 - DNA, 15 bp, Homo sapiens
agggcacctgctcgg

SEQ ID NO: 1588754 - DNA, 15 bp, Homo sapiens
gagggcacctgctcg

SEQ ID NO: 1588755 - DNA, 15 bp, Homo sapiens
tgagggcacctgctc

SEQ ID NO: 1588756 - DNA, 15 bp, Homo sapiens
gtgagggcacctgct

SEQ ID NO: 1588757 - DNA, 15 bp, Homo sapiens
agtgagggcacctgc

SEQ ID NO: 1588758 - DNA, 15 bp, Homo sapiens
cagtgagggcacctg

SEQ ID NO: 1588759 - DNA, 15 bp, Homo sapiens
ccagtgagggcacct

SEQ ID NO: 1588760 - DNA, 15 bp, Homo sapiens
cccagtgagggcacc

SEQ ID NO: 1588761 - DNA, 15 bp, Homo sapiens
ccccagtgagggcac

SEQ ID NO: 1588762 - DNA, 15 bp, Homo sapiens
caatgcaaagatgat

SEQ ID NO: 1588763 - DNA, 15 bp, Homo sapiens
ccaatgcaaagatga

SEQ ID NO: 1588764 - DNA, 15 bp, Homo sapiens
tccaatgcaaagatg

SEQ ID NO: 1588765 - DNA, 15 bp, Homo sapiens
atccaatgcaaagat

SEQ ID NO: 1588766 - DNA, 15 bp, Homo sapiens
catccaatgcaaaga

SEQ ID NO: 1588767 - DNA, 15 bp, Homo sapiens
ccatccaatgcaaag

SEQ ID NO: 1588768 - DNA, 15 bp, Homo sapiens
tccatccaatgcaaa

SEQ ID NO: 1588769 - DNA, 15 bp, Homo sapiens
ctccatccaatgcaa

SEQ ID NO: 1588770 - DNA, 15 bp, Homo sapiens
actccatccaatgca

SEQ ID NO: 1588771 - DNA, 15 bp, Homo sapiens
aactccatccaatgc

SEQ ID NO: 1588772 - DNA, 15 bp, Homo sapiens
aaactccatccaatg

SEQ ID NO: 1588773 - DNA, 15 bp, Homo sapiens
gaaactccatccaat

SEQ ID NO: 1588774 - DNA, 15 bp, Homo sapiens
ggaaactccatccaa

SEQ ID NO: 1588775 - DNA, 15 bp, Homo sapiens
tggaaactccatcca

SEQ ID NO: 1588776 - DNA, 15 bp, Homo sapiens
atggaaactccatcc

SEQ ID NO: 1588777 - DNA, 15 bp, Homo sapiens
gatggaaactccatc

SEQ ID NO: 1588778 - DNA, 15 bp, Homo sapiens
tgatggaaactccat

SEQ ID NO: 1588779 - DNA, 15 bp, Homo sapiens
ttgatggaaactcca

SEQ ID NO: 1588780 - DNA, 15 bp, Homo sapiens
tttgatggaaactcc

SEQ ID NO: 1588781 - DNA, 15 bp, Homo sapiens
atttgatggaaactc

SEQ ID NO: 1588782 - DNA, 15 bp, Homo sapiens
tatttgatggaaact

SEQ ID NO: 1588783 - DNA, 15 bp, Homo sapiens
gtatttgatggaaac

SEQ ID NO: 1588784 - DNA, 15 bp, Homo sapiens
tgtatttgatggaaa

SEQ ID NO: 1588785 - DNA, 15 bp, Homo sapiens
atgtatttgatggaa

SEQ ID NO: 1588786 - DNA, 15 bp, Homo sapiens
aatgtatttgatgga

SEQ ID NO: 1588787 - DNA, 15 bp, Homo sapiens
gaatgtatttgatgg

SEQ ID NO: 1588788 - DNA, 15 bp, Homo sapiens
agaatgtatttgatg

SEQ ID NO: 1588789 - DNA, 15 bp, Homo sapiens
aagaatgtatttgat

SEQ ID NO: 1588790 - DNA, 15 bp, Homo sapiens
gaagaatgtatttga

SEQ ID NO: 1588791 - DNA, 15 bp, Homo sapiens
agaagaatgtatttg

SEQ ID NO: 1588792 - DNA, 15 bp, Homo sapiens
gagaagaatgtattt

SEQ ID NO: 1588793 - DNA, 15 bp, Homo sapiens
ggagaagaatgtatt

SEQ ID NO: 1588794 - DNA, 15 bp, Homo sapiens
aggagaagaatgtat

SEQ ID NO: 1588795 - DNA, 15 bp, Homo sapiens
gaggagaagaatgta

SEQ ID NO: 1588796 - DNA, 15 bp, Homo sapiens
cgaggagaagaatgt

SEQ ID NO: 1588797 - DNA, 15 bp, Homo sapiens
gcgaggagaagaatg

SEQ ID NO: 1588798 - DNA, 15 bp, Homo sapiens
ggcgaggagaagaat

SEQ ID NO: 1588799 - DNA, 15 bp, Homo sapiens
cggcgaggagaagaa

SEQ ID NO: 1588800 - DNA, 15 bp, Homo sapiens
acggcgaggagaaga

SEQ ID NO: 1588801 - DNA, 15 bp, Homo sapiens
gacggcgaggagaag

SEQ ID NO: 1588802 - DNA, 15 bp, Homo sapiens
agacggcgaggagaa

SEQ ID NO: 1588803 - DNA, 15 bp, Homo sapiens
tagacggcgaggaga

SEQ ID NO: 1588804 - DNA, 15 bp, Homo sapiens
gtagacggcgaggag

SEQ ID NO: 1588805 - DNA, 15 bp, Homo sapiens
tgtagacggcgagga

SEQ ID NO: 1588806 - DNA, 15 bp, Homo sapiens
ctgtagacggcgagg

SEQ ID NO: 1588807 - DNA, 15 bp, Homo sapiens
actgtagacggcgag

SEQ ID NO: 1588808 - DNA, 15 bp, Homo sapiens
gactgtagacggcga

SEQ ID NO: 1588809 - DNA, 15 bp, Homo sapiens
cgactgtagacggcg

SEQ ID NO: 1588810 - DNA, 15 bp, Homo sapiens
ccgactgtagacggc

SEQ ID NO: 1588811 - DNA, 15 bp, Homo sapiens
gccgactgtagacgg

SEQ ID NO: 1588812 - DNA, 15 bp, Homo sapiens
tgccgactgtagacg

SEQ ID NO: 1588813 - DNA, 15 bp, Homo sapiens
atgccgactgtagac

SEQ ID NO: 1588814 - DNA, 15 bp, Homo sapiens
tatgccgactgtaga

SEQ ID NO: 1588815 - DNA, 15 bp, Homo sapiens
ctatgccgactgtag

SEQ ID NO: 1588816 - DNA, 15 bp, Homo sapiens
actatgccgactgta

SEQ ID NO: 1588817 - DNA, 15 bp, Homo sapiens
aactatgccgactgt

SEQ ID NO: 1588818 - DNA, 15 bp, Homo sapiens
aaactatgccgactg

SEQ ID NO: 1588819 - DNA, 15 bp, Homo sapiens
caaactatgccgact

SEQ ID NO: 1588820 - DNA, 15 bp, Homo sapiens
tcaaactatgccgac

SEQ ID NO: 1588821 - DNA, 15 bp, Homo sapiens
ttcaaactatgccga

SEQ ID NO: 1588822 - DNA, 15 bp, Homo sapiens
cttcaaactatgccg

SEQ ID NO: 1588823 - DNA, 15 bp, Homo sapiens
acttcaaactatgcc

SEQ ID NO: 1588824 - DNA, 15 bp, Homo sapiens
gacttcaaactatgc

SEQ ID NO: 1588825 - DNA, 15 bp, Homo sapiens
agacttcaaactatg

SEQ ID NO: 1588826 - DNA, 15 bp, Homo sapiens
cagacttcaaactat

SEQ ID NO: 1588827 - DNA, 15 bp, Homo sapiens
acagacttcaaacta

SEQ ID NO: 1588828 - DNA, 15 bp, Homo sapiens
aacagacttcaaact

SEQ ID NO: 1588829 - DNA, 15 bp, Homo sapiens
aaacagacttcaaac

SEQ ID NO: 1588830 - DNA, 15 bp, Homo sapiens
taaacagacttcaaa

SEQ ID NO: 1588831 - DNA, 15 bp, Homo sapiens
gtaaacagacttcaa

SEQ ID NO: 1588832 - DNA, 15 bp, Homo sapiens
agtaaacagacttca

SEQ ID NO: 1588833 - DNA, 15 bp, Homo sapiens
aagtaaacagacttc

SEQ ID NO: 1588834 - DNA, 15 bp, Homo sapiens
caagtaaacagactt

SEQ ID NO: 1588835 - DNA, 15 bp, Homo sapiens
acaagtaaacagact

SEQ ID NO: 1588836 - DNA, 15 bp, Homo sapiens
gacaagtaaacagac

SEQ ID NO: 1588837 - DNA, 15 bp, Homo sapiens
ggacaagtaaacaga

SEQ ID NO: 1588838 - DNA, 15 bp, Homo sapiens
gggacaagtaaacag

SEQ ID NO: 1588839 - DNA, 15 bp, Homo sapiens
cgggacaagtaaaca

SEQ ID NO: 1588840 - DNA, 15 bp, Homo sapiens
ccgggacaagtaaac

SEQ ID NO: 1588841 - DNA, 15 bp, Homo sapiens
cccgggacaagtaaa

SEQ ID NO: 1588842 - DNA, 15 bp, Homo sapiens
ccccgggacaagtaa

SEQ ID NO: 1588843 - DNA, 15 bp, Homo sapiens
tccccgggacaagta

SEQ ID NO: 1588844 - DNA, 15 bp, Homo sapiens
ttccccgggacaagt

SEQ ID NO: 1588845 - DNA, 15 bp, Homo sapiens
tttccccgggacaag

SEQ ID NO: 1588846 - DNA, 15 bp, Homo sapiens
ctttccccgggacaa

SEQ ID NO: 1588847 - DNA, 15 bp, Homo sapiens
cctttccccgggaca

SEQ ID NO: 1588848 - DNA, 15 bp, Homo sapiens
acctttccccgggac

SEQ ID NO: 1588849 - DNA, 15 bp, Homo sapiens
cacctttccccggga

SEQ ID NO: 1588850 - DNA, 15 bp, Homo sapiens
tcacctttccccggg

SEQ ID NO: 1588851 - DNA, 15 bp, Homo sapiens
ttcacctttccccgg

SEQ ID NO: 1588852 - DNA, 15 bp, Homo sapiens
gttcacctttccccg

SEQ ID NO: 1588853 - DNA, 15 bp, Homo sapiens
agttcacctttcccc

SEQ ID NO: 1588854 - DNA, 15 bp, Homo sapiens
gagttcacctttccc

SEQ ID NO: 1588855 - DNA, 15 bp, Homo sapiens
tgagttcacctttcc

SEQ ID NO: 1588856 - DNA, 15 bp, Homo sapiens
ttgagttcacctttc

SEQ ID NO: 1588857 - DNA, 15 bp, Homo sapiens
attgagttcaccttt

SEQ ID NO: 1588858 - DNA, 15 bp, Homo sapiens
gattgagttcacctt

SEQ ID NO: 1588859 - DNA, 15 bp, Homo sapiens
cgattgagttcacct

SEQ ID NO: 1588860 - DNA, 15 bp, Homo sapiens
ccgattgagttcacc

SEQ ID NO: 1588861 - DNA, 15 bp, Homo sapiens
cccgattgagttcac

SEQ ID NO: 1588862 - DNA, 15 bp, Homo sapiens
acccgattgagttca

SEQ ID NO: 1588863 - DNA, 15 bp, Homo sapiens
aacccgattgagttc

SEQ ID NO: 1588864 - DNA, 15 bp, Homo sapiens
aaacccgattgagtt

SEQ ID NO: 1588865 - DNA, 15 bp, Homo sapiens
caaacccgattgagt

SEQ ID NO: 1588866 - DNA, 15 bp, Homo sapiens
gcaaacccgattgag

SEQ ID NO: 1588867 - DNA, 15 bp, Homo sapiens
cgcaaacccgattga

SEQ ID NO: 1588868 - DNA, 15 bp, Homo sapiens
ccgcaaacccgattg

SEQ ID NO: 1588869 - DNA, 15 bp, Homo sapiens
tccgcaaacccgatt

SEQ ID NO: 1588870 - DNA, 15 bp, Homo sapiens
gtccgcaaacccgat

SEQ ID NO: 1588871 - DNA, 15 bp, Homo sapiens
ggtccgcaaacccga

SEQ ID NO: 1588872 - DNA, 15 bp, Homo sapiens
cggtccgcaaacccg

SEQ ID NO: 1588873 - DNA, 15 bp, Homo sapiens
tcggtccgcaaaccc

SEQ ID NO: 1588874 - DNA, 15 bp, Homo sapiens
ctcggtccgcaaacc

SEQ ID NO: 1588875 - DNA, 15 bp, Homo sapiens
tctcggtccgcaaac

SEQ ID NO: 1588876 - DNA, 15 bp, Homo sapiens
gtctcggtccgcaaa

SEQ ID NO: 1588877 - DNA, 15 bp, Homo sapiens
tgtctcggtccgcaa

SEQ ID NO: 1588878 - DNA, 15 bp, Homo sapiens
ttgtctcggtccgca

SEQ ID NO: 1588879 - DNA, 15 bp, Homo sapiens
tttgtctcggtccgc

SEQ ID NO: 1588880 - DNA, 15 bp, Homo sapiens
gtttgtctcggtccg

SEQ ID NO: 1588881 - DNA, 15 bp, Homo sapiens
tgtttgtctcggtcc

SEQ ID NO: 1588882 - DNA, 15 bp, Homo sapiens
ctgtttgtctcggtc

SEQ ID NO: 1588883 - DNA, 15 bp, Homo sapiens
cctgtttgtctcggt

SEQ ID NO: 1588884 - DNA, 15 bp, Homo sapiens
tcctgtttgtctcgg

SEQ ID NO: 1588885 - DNA, 15 bp, Homo sapiens
gtcctgtttgtctcg

SEQ ID NO: 1588886 - DNA, 15 bp, Homo sapiens
ggtcctgtttgtctc

SEQ ID NO: 1588887 - DNA, 15 bp, Homo sapiens
aggtcctgtttgtct

SEQ ID NO: 1588888 - DNA, 15 bp, Homo sapiens
gaggtcctgtttgtc

SEQ ID NO: 1588889 - DNA, 15 bp, Homo sapiens
tgaggtcctgtttgt

SEQ ID NO: 1588890 - DNA, 15 bp, Homo sapiens
ctgaggtcctgtttg

SEQ ID NO: 1588891 - DNA, 15 bp, Homo sapiens
gctgaggtcctgttt

SEQ ID NO: 1588892 - DNA, 15 bp, Homo sapiens
ggctgaggtcctgtt

SEQ ID NO: 1588893 - DNA, 15 bp, Homo sapiens
aggctgaggtcctgt

SEQ ID NO: 1588894 - DNA, 15 bp, Homo sapiens
gaggctgaggtcctg

SEQ ID NO: 1588895 - DNA, 15 bp, Homo sapiens
agaggctgaggtcct

SEQ ID NO: 1588896 - DNA, 15 bp, Homo sapiens
aagaggctgaggtcc

SEQ ID NO: 1588897 - DNA, 15 bp, Homo sapiens
aaagaggctgaggtc

SEQ ID NO: 1588898 - DNA, 15 bp, Homo sapiens
gaaagaggctgaggt

SEQ ID NO: 1588899 - DNA, 15 bp, Homo sapiens
agaaagaggctgagg

SEQ ID NO: 1588900 - DNA, 15 bp, Homo sapiens
aagaaagaggctgag

SEQ ID NO: 1588901 - DNA, 15 bp, Homo sapiens
caagaaagaggctga

SEQ ID NO: 1588902 - DNA, 15 bp, Homo sapiens
gcaagaaagaggctg

SEQ ID NO: 1588903 - DNA, 15 bp, Homo sapiens
ggcaagaaagaggct

SEQ ID NO: 1588904 - DNA, 15 bp, Homo sapiens
tggcaagaaagaggc

SEQ ID NO: 1588905 - DNA, 15 bp, Homo sapiens
atggcaagaaagagg

SEQ ID NO: 1588906 - DNA, 15 bp, Homo sapiens
gatggcaagaaagag

SEQ ID NO: 1588907 - DNA, 15 bp, Homo sapiens
tgatggcaagaaaga

SEQ ID NO: 1588908 - DNA, 15 bp, Homo sapiens
ttgatggcaagaaag

SEQ ID NO: 1588909 - DNA, 15 bp, Homo sapiens
attgatggcaagaaa

SEQ ID NO: 1588910 - DNA, 15 bp, Homo sapiens
aattgatggcaagaa

SEQ ID NO: 1588911 - DNA, 15 bp, Homo sapiens
taattgatggcaaga

SEQ ID NO: 1588912 - DNA, 15 bp, Homo sapiens
gtaattgatggcaag

SEQ ID NO: 1588913 - DNA, 15 bp, Homo sapiens
cgtaattgatggcaa

SEQ ID NO: 1588914 - DNA, 15 bp, Homo sapiens
gcgtaattgatggca

SEQ ID NO: 1588915 - DNA, 15 bp, Homo sapiens
agcgtaattgatggc

SEQ ID NO: 1588916 - DNA, 15 bp, Homo sapiens
cagcgtaattgatgg

SEQ ID NO: 1588917 - DNA, 15 bp, Homo sapiens
ccagcgtaattgatg

SEQ ID NO: 1588918 - DNA, 15 bp, Homo sapiens
gccagcgtaattgat

SEQ ID NO: 1588919 - DNA, 15 bp, Homo sapiens
agccagcgtaattga

SEQ ID NO: 1588920 - DNA, 15 bp, Homo sapiens
gagccagcgtaattg

SEQ ID NO: 1588921 - DNA, 15 bp, Homo sapiens
ggagccagcgtaatt

SEQ ID NO: 1588922 - DNA, 15 bp, Homo sapiens
tggagccagcgtaat

SEQ ID NO: 1588923 - DNA, 15 bp, Homo sapiens
atggagccagcgtaa

SEQ ID NO: 1588924 - DNA, 15 bp, Homo sapiens
gatggagccagcgta

SEQ ID NO: 1588925 - DNA, 15 bp, Homo sapiens
ggatggagccagcgt

SEQ ID NO: 1588926 - DNA, 15 bp, Homo sapiens
cggatggagccagcg

SEQ ID NO: 1588927 - DNA, 15 bp, Homo sapiens
gcggatggagccagc

SEQ ID NO: 1588928 - DNA, 15 bp, Homo sapiens
agcggatggagccag

SEQ ID NO: 1588929 - DNA, 15 bp, Homo sapiens
gagcggatggagcca

SEQ ID NO: 1588930 - DNA, 15 bp, Homo sapiens
ggagcggatggagcc

SEQ ID NO: 1588931 - DNA, 15 bp, Homo sapiens
gggagcggatggagc

SEQ ID NO: 1588932 - DNA, 15 bp, Homo sapiens
cgggagcggatggag

SEQ ID NO: 1588933 - DNA, 15 bp, Homo sapiens
gcgggagcggatgga

SEQ ID NO: 1588934 - DNA, 15 bp, Homo sapiens
agcgggagcggatgg

SEQ ID NO: 1588935 - DNA, 15 bp, Homo sapiens
gagcgggagcggatg

SEQ ID NO: 1588936 - DNA, 15 bp, Homo sapiens
ggagcgggagcggat

SEQ ID NO: 1588937 - DNA, 15 bp, Homo sapiens
gggagcgggagcgga

SEQ ID NO: 1588938 - DNA, 15 bp, Homo sapiens
cgggagcgggagcgg

SEQ ID NO: 1588939 - DNA, 15 bp, Homo sapiens
ccgggagcgggagcg

SEQ ID NO: 1588940 - DNA, 15 bp, Homo sapiens
gccgggagcgggagc

SEQ ID NO: 1588941 - DNA, 15 bp, Homo sapiens
agccgggagcgggag

SEQ ID NO: 1588942 - DNA, 15 bp, Homo sapiens
cagccgggagcggga

SEQ ID NO: 1588943 - DNA, 15 bp, Homo sapiens
ccagccgggagcggg

SEQ ID NO: 1588944 - DNA, 15 bp, Homo sapiens
cccagccgggagcgg

SEQ ID NO: 1588945 - DNA, 15 bp, Homo sapiens
ccccagccgggagcg

SEQ ID NO: 1588946 - DNA, 15 bp, Homo sapiens
cccccagccgggagc

SEQ ID NO: 1588947 - DNA, 15 bp, Homo sapiens
tcccccagccgggag

SEQ ID NO: 1588948 - DNA, 15 bp, Homo sapiens
ttcccccagccggga

SEQ ID NO: 1588949 - DNA, 15 bp, Homo sapiens
attcccccagccggg

SEQ ID NO: 1588950 - DNA, 15 bp, Homo sapiens
aattcccccagccgg

SEQ ID NO: 1588951 - DNA, 15 bp, Homo sapiens
caattcccccagccg

SEQ ID NO: 1588952 - DNA, 15 bp, Homo sapiens
acaattcccccagcc

SEQ ID NO: 1588953 - DNA, 15 bp, Homo sapiens
gacaattcccccagc

SEQ ID NO: 1588954 - DNA, 15 bp, Homo sapiens
cgacaattcccccag

SEQ ID NO: 1588955 - DNA, 15 bp, Homo sapiens
gcgacaattccccca

SEQ ID NO: 1588956 - DNA, 15 bp, Homo sapiens
tgcgacaattccccc

SEQ ID NO: 1588957 - DNA, 15 bp, Homo sapiens
ctgcgacaattcccc

SEQ ID NO: 1588958 - DNA, 15 bp, Homo sapiens
gctgcgacaattccc

SEQ ID NO: 1588959 - DNA, 15 bp, Homo sapiens
agctgcgacaattcc

SEQ ID NO: 1588960 - DNA, 15 bp, Homo sapiens
cagctgcgacaattc

SEQ ID NO: 1588961 - DNA, 15 bp, Homo sapiens
gcagctgcgacaatt

SEQ ID NO: 1588962 - DNA, 15 bp, Homo sapiens
cgcagctgcgacaat

SEQ ID NO: 1588963 - DNA, 15 bp, Homo sapiens
ccgcagctgcgacaa

SEQ ID NO: 1588964 - DNA, 15 bp, Homo sapiens
cccgcagctgcgaca

SEQ ID NO: 1588965 - DNA, 15 bp, Homo sapiens
tcccgcagctgcgac

SEQ ID NO: 1588966 - DNA, 15 bp, Homo sapiens
ttcccgcagctgcga

SEQ ID NO: 1588967 - DNA, 15 bp, Homo sapiens
cttcccgcagctgcg

SEQ ID NO: 1588968 - DNA, 15 bp, Homo sapiens
tcttcccgcagctgc

SEQ ID NO: 1588969 - DNA, 15 bp, Homo sapiens
ctcttcccgcagctg

SEQ ID NO: 1588970 - DNA, 15 bp, Homo sapiens
tctcttcccgcagct

SEQ ID NO: 1588971 - DNA, 15 bp, Homo sapiens
gtctcttcccgcagc

SEQ ID NO: 1588972 - DNA, 15 bp, Homo sapiens
ggtctcttcccgcag

SEQ ID NO: 1588973 - DNA, 15 bp, Homo sapiens
aggtctcttcccgca

SEQ ID NO: 1588974 - DNA, 15 bp, Homo sapiens
taggtctcttcccgc

SEQ ID NO: 1588975 - DNA, 15 bp, Homo sapiens
ctaggtctcttcccg

SEQ ID NO: 1588976 - DNA, 15 bp, Homo sapiens
tctaggtctcttccc

SEQ ID NO: 1588977 - DNA, 15 bp, Homo sapiens
ttctaggtctcttcc

SEQ ID NO: 1588978 - DNA, 15 bp, Homo sapiens
gttctaggtctcttc

SEQ ID NO: 1588979 - DNA, 15 bp, Homo sapiens
cgttctaggtctctt

SEQ ID NO: 1588980 - DNA, 15 bp, Homo sapiens
gcgttctaggtctct

SEQ ID NO: 1588981 - DNA, 15 bp, Homo sapiens
tgcgttctaggtctc

SEQ ID NO: 1588982 - DNA, 15 bp, Homo sapiens
ttgcgttctaggtct

SEQ ID NO: 1588983 - DNA, 15 bp, Homo sapiens
attgcgttctaggtc

SEQ ID NO: 1588984 - DNA, 15 bp, Homo sapiens
gattgcgttctaggt

SEQ ID NO: 1588985 - DNA, 15 bp, Homo sapiens
agattgcgttctagg

SEQ ID NO: 1588986 - DNA, 15 bp, Homo sapiens
cagattgcgttctag

SEQ ID NO: 1588987 - DNA, 15 bp, Homo sapiens
tcagattgcgttcta

SEQ ID NO: 1588988 - DNA, 15 bp, Homo sapiens
ttcagattgcgttct

SEQ ID NO: 1588989 - DNA, 15 bp, Homo sapiens
cttcagattgcgttc

SEQ ID NO: 1588990 - DNA, 15 bp, Homo sapiens
gcttcagattgcgtt

SEQ ID NO: 1588991 - DNA, 15 bp, Homo sapiens
cgcttcagattgcgt

SEQ ID NO: 1588992 - DNA, 15 bp, Homo sapiens
acgcttcagattgcg

SEQ ID NO: 1588993 - DNA, 15 bp, Homo sapiens
aacgcttcagattgc

SEQ ID NO: 1588994 - DNA, 15 bp, Homo sapiens
aaacgcttcagattg

SEQ ID NO: 1588995 - DNA, 15 bp, Homo sapiens
gaaacgcttcagatt

SEQ ID NO: 1588996 - DNA, 15 bp, Homo sapiens
tgaaacgcttcagat

SEQ ID NO: 1588997 - DNA, 15 bp, Homo sapiens
atgaaacgcttcaga

SEQ ID NO: 1588998 - DNA, 15 bp, Homo sapiens
aatgaaacgcttcag

SEQ ID NO: 1588999 - DNA, 15 bp, Homo sapiens
taatgaaacgcttca

SEQ ID NO: 1589000 - DNA, 15 bp, Homo sapiens
ctaatgaaacgcttc

SEQ ID NO: 1589001 - DNA, 15 bp, Homo sapiens
cctaatgaaacgctt

SEQ ID NO: 1589002 - DNA, 15 bp, Homo sapiens
ccctaatgaaacgct

SEQ ID NO: 1589003 - DNA, 15 bp, Homo sapiens
tccctaatgaaacgc

SEQ ID NO: 1589004 - DNA, 15 bp, Homo sapiens
ttccctaatgaaacg

SEQ ID NO: 1589005 - DNA, 15 bp, Homo sapiens
tttccctaatgaaac

SEQ ID NO: 1589006 - DNA, 15 bp, Homo sapiens
atttccctaatgaaa

SEQ ID NO: 1589007 - DNA, 15 bp, Homo sapiens
tatttccctaatgaa

SEQ ID NO: 1589008 - DNA, 15 bp, Homo sapiens
ctatttccctaatga

SEQ ID NO: 1589009 - DNA, 15 bp, Homo sapiens
cctatttccctaatg

SEQ ID NO: 1589010 - DNA, 15 bp, Homo sapiens
acctatttccctaat

SEQ ID NO: 1589011 - DNA, 15 bp, Homo sapiens
cacctatttccctaa

SEQ ID NO: 1589012 - DNA, 15 bp, Homo sapiens
gcacctatttcccta

SEQ ID NO: 1589013 - DNA, 15 bp, Homo sapiens
cgcacctatttccct

SEQ ID NO: 1589014 - DNA, 15 bp, Homo sapiens
gcgcacctatttccc

SEQ ID NO: 1589015 - DNA, 15 bp, Homo sapiens
cgcgcacctatttcc

SEQ ID NO: 1589016 - DNA, 15 bp, Homo sapiens
gcgcgcacctatttc

SEQ ID NO: 1589017 - DNA, 15 bp, Homo sapiens
agcgcgcacctattt

SEQ ID NO: 1589018 - DNA, 15 bp, Homo sapiens
cagcgcgcacctatt

SEQ ID NO: 1589019 - DNA, 15 bp, Homo sapiens
ccagcgcgcacctat

SEQ ID NO: 1589020 - DNA, 15 bp, Homo sapiens
cccagcgcgcaccta

SEQ ID NO: 1589021 - DNA, 15 bp, Homo sapiens
tcccagcgcgcacct

SEQ ID NO: 1589022 - DNA, 15 bp, Homo sapiens
ctcccagcgcgcacc

SEQ ID NO: 1589023 - DNA, 15 bp, Homo sapiens
gctcccagcgcgcac

SEQ ID NO: 1589024 - DNA, 15 bp, Homo sapiens
tgctcccagcgcgca

SEQ ID NO: 1589025 - DNA, 15 bp, Homo sapiens
ctgctcccagcgcgc

SEQ ID NO: 1589026 - DNA, 15 bp, Homo sapiens
actgctcccagcgcg

SEQ ID NO: 1589027 - DNA, 15 bp, Homo sapiens
cactgctcccagcgc

SEQ ID NO: 1589028 - DNA, 15 bp, Homo sapiens
gcactgctcccagcg

SEQ ID NO: 1589029 - DNA, 15 bp, Homo sapiens
tgcactgctcccagc

SEQ ID NO: 1589030 - DNA, 15 bp, Homo sapiens
ttgcactgctcccag

SEQ ID NO: 1589031 - DNA, 15 bp, Homo sapiens
cttgcactgctccca

SEQ ID NO: 1589032 - DNA, 15 bp, Homo sapiens
tcttgcactgctccc

SEQ ID NO: 1589033 - DNA, 15 bp, Homo sapiens
ctcttgcactgctcc

SEQ ID NO: 1589034 - DNA, 15 bp, Homo sapiens
cctcttgcactgctc

SEQ ID NO: 1589035 - DNA, 15 bp, Homo sapiens
ccctcttgcactgct

SEQ ID NO: 1589036 - DNA, 15 bp, Homo sapiens
accctcttgcactgc

SEQ ID NO: 1589037 - DNA, 15 bp, Homo sapiens
aaccctcttgcactg

SEQ ID NO: 1589038 - DNA, 15 bp, Homo sapiens
gaaccctcttgcact

SEQ ID NO: 1589039 - DNA, 15 bp, Homo sapiens
ggaaccctcttgcac

SEQ ID NO: 1589040 - DNA, 15 bp, Homo sapiens
cggaaccctcttgca

SEQ ID NO: 1589041 - DNA, 15 bp, Homo sapiens
gcggaaccctcttgc

SEQ ID NO: 1589042 - DNA, 15 bp, Homo sapiens
tgcggaaccctcttg

SEQ ID NO: 1589043 - DNA, 15 bp, Homo sapiens
ttgcggaaccctctt

SEQ ID NO: 1589044 - DNA, 15 bp, Homo sapiens
gttgcggaaccctct

SEQ ID NO: 1589045 - DNA, 15 bp, Homo sapiens
ggttgcggaaccctc

SEQ ID NO: 1589046 - DNA, 15 bp, Homo sapiens
aggttgcggaaccct

SEQ ID NO: 1589047 - DNA, 15 bp, Homo sapiens
caggttgcggaaccc

SEQ ID NO: 1589048 - DNA, 15 bp, Homo sapiens
ccaggttgcggaacc

SEQ ID NO: 1589049 - DNA, 15 bp, Homo sapiens
cccaggttgcggaac

SEQ ID NO: 1589050 - DNA, 15 bp, Homo sapiens
ccccaggttgcggaa

SEQ ID NO: 1589051 - DNA, 15 bp, Homo sapiens
tccccaggttgcgga

SEQ ID NO: 1589052 - DNA, 15 bp, Homo sapiens
gtccccaggttgcgg

SEQ ID NO: 1589053 - DNA, 15 bp, Homo sapiens
tgtccccaggttgcg

SEQ ID NO: 1589054 - DNA, 15 bp, Homo sapiens
gtgtccccaggttgc

SEQ ID NO: 1589055 - DNA, 15 bp, Homo sapiens
ggtgtccccaggttg

SEQ ID NO: 1589056 - DNA, 15 bp, Homo sapiens
gggtgtccccaggtt

SEQ ID NO: 1589057 - DNA, 15 bp, Homo sapiens
agggtgtccccaggt

SEQ ID NO: 1589058 - DNA, 15 bp, Homo sapiens
gagggtgtccccagg

SEQ ID NO: 1589059 - DNA, 15 bp, Homo sapiens
ggagggtgtccccag

SEQ ID NO: 1589060 - DNA, 15 bp, Homo sapiens
cggagggtgtcccca

SEQ ID NO: 1589061 - DNA, 15 bp, Homo sapiens
gcggagggtgtcccc

SEQ ID NO: 1589062 - DNA, 15 bp, Homo sapiens
ggcggagggtgtccc

SEQ ID NO: 1589063 - DNA, 15 bp, Homo sapiens
ggggcggagggtgtc

SEQ ID NO: 1589064 - DNA, 15 bp, Homo sapiens
aggggcggagggtgt

SEQ ID NO: 1589065 - DNA, 15 bp, Homo sapiens
taggggcggagggtg

SEQ ID NO: 1589066 - DNA, 15 bp, Homo sapiens
gtaggggcggagggt

SEQ ID NO: 1589067 - DNA, 15 bp, Homo sapiens
tgtaggggcggaggg

SEQ ID NO: 1589068 - DNA, 15 bp, Homo sapiens
ctgtaggggcggagg

SEQ ID NO: 1589069 - DNA, 15 bp, Homo sapiens
gctgtaggggcggag

SEQ ID NO: 1589070 - DNA, 15 bp, Homo sapiens
tgctgtaggggcgga

SEQ ID NO: 1589071 - DNA, 15 bp, Homo sapiens
gtgctgtaggggcgg

SEQ ID NO: 1589072 - DNA, 15 bp, Homo sapiens
ggtgctgtaggggcg

SEQ ID NO: 1589073 - DNA, 15 bp, Homo sapiens
cggtgctgtaggggc

SEQ ID NO: 1589074 - DNA, 15 bp, Homo sapiens
acggtgctgtagggg

SEQ ID NO: 1589075 - DNA, 15 bp, Homo sapiens
gacggtgctgtaggg

SEQ ID NO: 1589076 - DNA, 15 bp, Homo sapiens
cgacggtgctgtagg

SEQ ID NO: 1589077 - DNA, 15 bp, Homo sapiens
ccgacggtgctgtag

SEQ ID NO: 1589078 - DNA, 15 bp, Homo sapiens
gccgacggtgctgta

SEQ ID NO: 1589079 - DNA, 15 bp, Homo sapiens
agccgacggtgctgt

SEQ ID NO: 1589080 - DNA, 15 bp, Homo sapiens
aagccgacggtgctg

SEQ ID NO: 1589081 - DNA, 15 bp, Homo sapiens
gaagccgacggtgct

SEQ ID NO: 1589082 - DNA, 15 bp, Homo sapiens
agaagccgacggtgc

SEQ ID NO: 1589083 - DNA, 15 bp, Homo sapiens
cagaagccgacggtg

SEQ ID NO: 1589084 - DNA, 15 bp, Homo sapiens
ccagaagccgacggt

SEQ ID NO: 1589085 - DNA, 15 bp, Homo sapiens
tccagaagccgacgg

SEQ ID NO: 1589086 - DNA, 15 bp, Homo sapiens
ttccagaagccgacg

SEQ ID NO: 1589087 - DNA, 15 bp, Homo sapiens
tttccagaagccgac

SEQ ID NO: 1589088 - DNA, 15 bp, Homo sapiens
ctttccagaagccga

SEQ ID NO: 1589089 - DNA, 15 bp, Homo sapiens
gctttccagaagccg

SEQ ID NO: 1589090 - DNA, 15 bp, Homo sapiens
ggctttccagaagcc

SEQ ID NO: 1589091 - DNA, 15 bp, Homo sapiens
cggctttccagaagc

SEQ ID NO: 1589092 - DNA, 15 bp, Homo sapiens
tcggctttccagaag

SEQ ID NO: 1589093 - DNA, 15 bp, Homo sapiens
gtcggctttccagaa

SEQ ID NO: 1589094 - DNA, 15 bp, Homo sapiens
tgtcggctttccaga

SEQ ID NO: 1589095 - DNA, 15 bp, Homo sapiens
ctgtcggctttccag

SEQ ID NO: 1589096 - DNA, 15 bp, Homo sapiens
actgtcggctttcca

SEQ ID NO: 1589097 - DNA, 15 bp, Homo sapiens
gactgtcggctttcc

SEQ ID NO: 1589098 - DNA, 15 bp, Homo sapiens
ggactgtcggctttc

SEQ ID NO: 1589099 - DNA, 15 bp, Homo sapiens
aggactgtcggcttt

SEQ ID NO: 1589100 - DNA, 15 bp, Homo sapiens
gaggactgtcggctt

SEQ ID NO: 1589101 - DNA, 15 bp, Homo sapiens
ggaggactgtcggct

SEQ ID NO: 1589102 - DNA, 15 bp, Homo sapiens
aggaggactgtcggc

SEQ ID NO: 1589103 - DNA, 15 bp, Homo sapiens
aaggaggactgtcgg

SEQ ID NO: 1589104 - DNA, 15 bp, Homo sapiens
aaaggaggactgtcg

SEQ ID NO: 1589105 - DNA, 15 bp, Homo sapiens
gaaaggaggactgtc

SEQ ID NO: 1589106 - DNA, 15 bp, Homo sapiens
agaaaggaggactgt

SEQ ID NO: 1589107 - DNA, 15 bp, Homo sapiens
cagaaaggaggactg

SEQ ID NO: 1589108 - DNA, 15 bp, Homo sapiens
ccagaaaggaggact

SEQ ID NO: 1589109 - DNA, 15 bp, Homo sapiens
cccagaaaggaggac

SEQ ID NO: 1589110 - DNA, 15 bp, Homo sapiens
tcccagaaaggagga

SEQ ID NO: 1589111 - DNA, 15 bp, Homo sapiens
ttcccagaaaggagg

SEQ ID NO: 1589112 - DNA, 15 bp, Homo sapiens
attcccagaaaggag

SEQ ID NO: 1589113 - DNA, 15 bp, Homo sapiens
gattcccagaaagga

SEQ ID NO: 1589114 - DNA, 15 bp, Homo sapiens
agattcccagaaagg

SEQ ID NO: 1589115 - DNA, 15 bp, Homo sapiens
gagattcccagaaag

SEQ ID NO: 1589116 - DNA, 15 bp, Homo sapiens
ggagattcccagaaa

SEQ ID NO: 1589117 - DNA, 15 bp, Homo sapiens
aggagattcccagaa

SEQ ID NO: 1589118 - DNA, 15 bp, Homo sapiens
caggagattcccaga

SEQ ID NO: 1589119 - DNA, 15 bp, Homo sapiens
gcaggagattcccag

SEQ ID NO: 1589120 - DNA, 15 bp, Homo sapiens
tgcaggagattccca

SEQ ID NO: 1589121 - DNA, 15 bp, Homo sapiens
atgcaggagattccc

SEQ ID NO: 1589122 - DNA, 15 bp, Homo sapiens
gatgcaggagattcc

SEQ ID NO: 1589123 - DNA, 15 bp, Homo sapiens
tgatgcaggagattc

SEQ ID NO: 1589124 - DNA, 15 bp, Homo sapiens
ttgatgcaggagatt

SEQ ID NO: 1589125 - DNA, 15 bp, Homo sapiens
gttgatgcaggagat

SEQ ID NO: 1589126 - DNA, 15 bp, Homo sapiens
agttgatgcaggaga

SEQ ID NO: 1589127 - DNA, 15 bp, Homo sapiens
gagttgatgcaggag

SEQ ID NO: 1589128 - DNA, 15 bp, Homo sapiens
cgagttgatgcagga

SEQ ID NO: 1589129 - DNA, 15 bp, Homo sapiens
acgagttgatgcagg

SEQ ID NO: 1589130 - DNA, 15 bp, Homo sapiens
cacgagttgatgcag

SEQ ID NO: 1589131 - DNA, 15 bp, Homo sapiens
gcacgagttgatgca

SEQ ID NO: 1589132 - DNA, 15 bp, Homo sapiens
ggcacgagttgatgc

SEQ ID NO: 1589133 - DNA, 15 bp, Homo sapiens
gggcacgagttgatg

SEQ ID NO: 1589134 - DNA, 15 bp, Homo sapiens
tgggcacgagttgat

SEQ ID NO: 1589135 - DNA, 15 bp, Homo sapiens
ttgggcacgagttga

SEQ ID NO: 1589136 - DNA, 15 bp, Homo sapiens
attgggcacgagttg

SEQ ID NO: 1589137 - DNA, 15 bp, Homo sapiens
aattgggcacgagtt

SEQ ID NO: 1589138 - DNA, 15 bp, Homo sapiens
aaattgggcacgagt

SEQ ID NO: 1589139 - DNA, 15 bp, Homo sapiens
gaaattgggcacgag

SEQ ID NO: 1589140 - DNA, 15 bp, Homo sapiens
agaaattgggcacga

SEQ ID NO: 1589141 - DNA, 15 bp, Homo sapiens
cagaaattgggcacg

SEQ ID NO: 1589142 - DNA, 15 bp, Homo sapiens
ccagaaattgggcac

SEQ ID NO: 1589143 - DNA, 15 bp, Homo sapiens
gccagaaattgggca

SEQ ID NO: 1589144 - DNA, 15 bp, Homo sapiens
ggccagaaattgggc

SEQ ID NO: 1589145 - DNA, 15 bp, Homo sapiens
aggccagaaattggg

SEQ ID NO: 1589146 - DNA, 15 bp, Homo sapiens
gaggccagaaattgg

SEQ ID NO: 1589147 - DNA, 15 bp, Homo sapiens
ggaggccagaaattg

SEQ ID NO: 1589148 - DNA, 15 bp, Homo sapiens
gggaggccagaaatt

SEQ ID NO: 1589149 - DNA, 15 bp, Homo sapiens
ggggaggccagaaat

SEQ ID NO: 1589150 - DNA, 15 bp, Homo sapiens
aggggaggccagaaa

SEQ ID NO: 1589151 - DNA, 15 bp, Homo sapiens
gaggggaggccagaa

SEQ ID NO: 1589152 - DNA, 15 bp, Homo sapiens
agaggggaggccaga

SEQ ID NO: 1589153 - DNA, 15 bp, Homo sapiens
gagaggggaggccag

SEQ ID NO: 1589154 - DNA, 15 bp, Homo sapiens
cgagaggggaggcca

SEQ ID NO: 1589155 - DNA, 15 bp, Homo sapiens
ccgagaggggaggcc

SEQ ID NO: 1589156 - DNA, 15 bp, Homo sapiens
tccgagaggggaggc

SEQ ID NO: 1589157 - DNA, 15 bp, Homo sapiens
ctccgagaggggagg

SEQ ID NO: 1589158 - DNA, 15 bp, Homo sapiens
tctccgagaggggag

SEQ ID NO: 1589159 - DNA, 15 bp, Homo sapiens
ttctccgagagggga

SEQ ID NO: 1589160 - DNA, 15 bp, Homo sapiens
tttctccgagagggg

SEQ ID NO: 1589161 - DNA, 15 bp, Homo sapiens
atttctccgagaggg

SEQ ID NO: 1589162 - DNA, 15 bp, Homo sapiens
gatttctccgagagg

SEQ ID NO: 1589163 - DNA, 15 bp, Homo sapiens
tgatttctccgagag

SEQ ID NO: 1589164 - DNA, 15 bp, Homo sapiens
ctgatttctccgaga

SEQ ID NO: 1589165 - DNA, 15 bp, Homo sapiens
gctgatttctccgag

SEQ ID NO: 1589166 - DNA, 15 bp, Homo sapiens
tgctgatttctccga

SEQ ID NO: 1589167 - DNA, 15 bp, Homo sapiens
atgctgatttctccg

SEQ ID NO: 1589168 - DNA, 15 bp, Homo sapiens
aatgctgatttctcc

SEQ ID NO: 1589169 - DNA, 15 bp, Homo sapiens
gaatgctgatttctc

SEQ ID NO: 1589170 - DNA, 15 bp, Homo sapiens
agaatgctgatttct

SEQ ID NO: 1589171 - DNA, 15 bp, Homo sapiens
cctcagaatgctgat

SEQ ID NO: 1589172 - DNA, 15 bp, Homo sapiens
tcctcagaatgctga

SEQ ID NO: 1589173 - DNA, 15 bp, Homo sapiens
atcctcagaatgctg

SEQ ID NO: 1589174 - DNA, 15 bp, Homo sapiens
catcctcagaatgct

SEQ ID NO: 1589175 - DNA, 15 bp, Homo sapiens
gcatcctcagaatgc

SEQ ID NO: 1589176 - DNA, 15 bp, Homo sapiens
ggcatcctcagaatg

SEQ ID NO: 1589177 - DNA, 15 bp, Homo sapiens
gggcatcctcagaat

SEQ ID NO: 1589178 - DNA, 15 bp, Homo sapiens
ggggcatcctcagaa

SEQ ID NO: 1589179 - DNA, 15 bp, Homo sapiens
aggggcatcctcaga

SEQ ID NO: 1589180 - DNA, 15 bp, Homo sapiens
caggggcatcctcag

SEQ ID NO: 1589181 - DNA, 15 bp, Homo sapiens
ccaggggcatcctca

SEQ ID NO: 1589182 - DNA, 15 bp, Homo sapiens
gccaggggcatcctc

SEQ ID NO: 1589183 - DNA, 15 bp, Homo sapiens
cgccaggggcatcct

SEQ ID NO: 1589184 - DNA, 15 bp, Homo sapiens
gcgccaggggcatcc

SEQ ID NO: 1589185 - DNA, 15 bp, Homo sapiens
agcgccaggggcatc

SEQ ID NO: 1589186 - DNA, 15 bp, Homo sapiens
cagcgccaggggcat

SEQ ID NO: 1589187 - DNA, 15 bp, Homo sapiens
tcagcgccaggggca

SEQ ID NO: 1589188 - DNA, 15 bp, Homo sapiens
ctcagcgccaggggc

SEQ ID NO: 1589189 - DNA, 15 bp, Homo sapiens
cctcagcgccagggg

SEQ ID NO: 1589190 - DNA, 15 bp, Homo sapiens
acctcagcgccaggg

SEQ ID NO: 1589191 - DNA, 15 bp, Homo sapiens
cacctcagcgccagg

SEQ ID NO: 1589192 - DNA, 15 bp, Homo sapiens
gcacctcagcgccag

SEQ ID NO: 1589193 - DNA, 15 bp, Homo sapiens
agcacctcagcgcca

SEQ ID NO: 1589194 - DNA, 15 bp, Homo sapiens
aagcacctcagcgcc

SEQ ID NO: 1589195 - DNA, 15 bp, Homo sapiens
caagcacctcagcgc

SEQ ID NO: 1589196 - DNA, 15 bp, Homo sapiens
ccaagcacctcagcg

SEQ ID NO: 1589197 - DNA, 15 bp, Homo sapiens
tccaagcacctcagc

SEQ ID NO: 1589198 - DNA, 15 bp, Homo sapiens
ttccaagcacctcag

SEQ ID NO: 1589199 - DNA, 15 bp, Homo sapiens
cttccaagcacctca

SEQ ID NO: 1589200 - DNA, 15 bp, Homo sapiens
gcttccaagcacctc

SEQ ID NO: 1589201 - DNA, 15 bp, Homo sapiens
agcttccaagcacct

SEQ ID NO: 1589202 - DNA, 15 bp, Homo sapiens
aagcttccaagcacc

SEQ ID NO: 1589203 - DNA, 15 bp, Homo sapiens
gaagcttccaagcac

SEQ ID NO: 1589204 - DNA, 15 bp, Homo sapiens
ggaagcttccaagca

SEQ ID NO: 1589205 - DNA, 15 bp, Homo sapiens
cggaagcttccaagc

SEQ ID NO: 1589206 - DNA, 15 bp, Homo sapiens
tcggaagcttccaag

SEQ ID NO: 1589207 - DNA, 15 bp, Homo sapiens
ctcggaagcttccaa

SEQ ID NO: 1589208 - DNA, 15 bp, Homo sapiens
cctcggaagcttcca

SEQ ID NO: 1589209 - DNA, 15 bp, Homo sapiens
acctcggaagcttcc

SEQ ID NO: 1589210 - DNA, 15 bp, Homo sapiens
aacctcggaagcttc

SEQ ID NO: 1589211 - DNA, 15 bp, Homo sapiens
aaacctcggaagctt

SEQ ID NO: 1589212 - DNA, 15 bp, Homo sapiens
caaacctcggaagct

SEQ ID NO: 1589213 - DNA, 15 bp, Homo sapiens
ccaaacctcggaagc

SEQ ID NO: 1589214 - DNA, 15 bp, Homo sapiens
cccaaacctcggaag

SEQ ID NO: 1589215 - DNA, 15 bp, Homo sapiens
tcccaaacctcggaa

SEQ ID NO: 1589216 - DNA, 15 bp, Homo sapiens
ctcccaaacctcgga

SEQ ID NO: 1589217 - DNA, 15 bp, Homo sapiens
gctcccaaacctcgg

SEQ ID NO: 1589218 - DNA, 15 bp, Homo sapiens
tgctcccaaacctcg

SEQ ID NO: 1589219 - DNA, 15 bp, Homo sapiens
ttgctcccaaacctc

SEQ ID NO: 1589220 - DNA, 15 bp, Homo sapiens
cttgctcccaaacct

SEQ ID NO: 1589221 - DNA, 15 bp, Homo sapiens
acttgctcccaaacc

SEQ ID NO: 1589222 - DNA, 15 bp, Homo sapiens
tacttgctcccaaac

SEQ ID NO: 1589223 - DNA, 15 bp, Homo sapiens
gtacttgctcccaaa

SEQ ID NO: 1589224 - DNA, 15 bp, Homo sapiens
cgtacttgctcccaa

SEQ ID NO: 1589225 - DNA, 15 bp, Homo sapiens
ccgtacttgctccca

SEQ ID NO: 1589226 - DNA, 15 bp, Homo sapiens
accgtacttgctccc

SEQ ID NO: 1589227 - DNA, 15 bp, Homo sapiens
aaccgtacttgctcc

SEQ ID NO: 1589228 - DNA, 15 bp, Homo sapiens
gaaccgtacttgctc

SEQ ID NO: 1589229 - DNA, 15 bp, Homo sapiens
tgaaccgtacttgct

SEQ ID NO: 1589230 - DNA, 15 bp, Homo sapiens
gtgaaccgtacttgc

SEQ ID NO: 1589231 - DNA, 15 bp, Homo sapiens
ggtgaaccgtacttg

SEQ ID NO: 1589232 - DNA, 15 bp, Homo sapiens
gggtgaaccgtactt

SEQ ID NO: 1589233 - DNA, 15 bp, Homo sapiens
ggggtgaaccgtact

SEQ ID NO: 1589234 - DNA, 15 bp, Homo sapiens
cggggtgaaccgtac

SEQ ID NO: 1589235 - DNA, 15 bp, Homo sapiens
tcggggtgaaccgta

SEQ ID NO: 1589236 - DNA, 15 bp, Homo sapiens
ctcggggtgaaccgt

SEQ ID NO: 1589237 - DNA, 15 bp, Homo sapiens
tctcggggtgaaccg

SEQ ID NO: 1589238 - DNA, 15 bp, Homo sapiens
atctcggggtgaacc

SEQ ID NO: 1589239 - DNA, 15 bp, Homo sapiens
gatctcggggtgaac

SEQ ID NO: 1589240 - DNA, 15 bp, Homo sapiens
tgatctcggggtgaa

SEQ ID NO: 1589241 - DNA, 15 bp, Homo sapiens
gtgatctcggggtga

SEQ ID NO: 1589242 - DNA, 15 bp, Homo sapiens
ggtgatctcggggtg

SEQ ID NO: 1589243 - DNA, 15 bp, Homo sapiens
cggtgatctcggggt

SEQ ID NO: 1589244 - DNA, 15 bp, Homo sapiens
gcggtgatctcgggg

SEQ ID NO: 1589245 - DNA, 15 bp, Homo sapiens
cgcggtgatctcggg

SEQ ID NO: 1589246 - DNA, 15 bp, Homo sapiens
tcgcggtgatctcgg

SEQ ID NO: 1589247 - DNA, 15 bp, Homo sapiens
ttcgcggtgatctcg

SEQ ID NO: 1589248 - DNA, 15 bp, Homo sapiens
cttcgcggtgatctc

SEQ ID NO: 1589249 - DNA, 15 bp, Homo sapiens
gcttcgcggtgatct

SEQ ID NO: 1589250 - DNA, 15 bp, Homo sapiens
agcttcgcggtgatc

SEQ ID NO: 1589251 - DNA, 15 bp, Homo sapiens
aagcttcgcggtgat

SEQ ID NO: 1589252 - DNA, 15 bp, Homo sapiens
aaagcttcgcggtga

SEQ ID NO: 1589253 - DNA, 15 bp, Homo sapiens
caaagcttcgcggtg

SEQ ID NO: 1589254 - DNA, 15 bp, Homo sapiens
gcaaagcttcgcggt

SEQ ID NO: 1589255 - DNA, 15 bp, Homo sapiens
ggcaaagcttcgcgg

SEQ ID NO: 1589256 - DNA, 15 bp, Homo sapiens
aggcaaagcttcgcg

SEQ ID NO: 1589257 - DNA, 15 bp, Homo sapiens
gaggcaaagcttcgc

SEQ ID NO: 1589258 - DNA, 15 bp, Homo sapiens
ggaggcaaagcttcg

SEQ ID NO: 1589259 - DNA, 15 bp, Homo sapiens
cggaggcaaagcttc

SEQ ID NO: 1589260 - DNA, 15 bp, Homo sapiens
gcggaggcaaagctt

SEQ ID NO: 1589261 - DNA, 15 bp, Homo sapiens
ggcggaggcaaagct

SEQ ID NO: 1589262 - DNA, 15 bp, Homo sapiens
tggcggaggcaaagc

SEQ ID NO: 1589263 - DNA, 15 bp, Homo sapiens
ttggcggaggcaaag

SEQ ID NO: 1589264 - DNA, 15 bp, Homo sapiens
tttggcggaggcaaa

SEQ ID NO: 1589265 - DNA, 15 bp, Homo sapiens
ctttggcggaggcaa

SEQ ID NO: 1589266 - DNA, 15 bp, Homo sapiens
actttggcggaggca

SEQ ID NO: 1589267 - DNA, 15 bp, Homo sapiens
tactttggcggaggc

SEQ ID NO: 1589268 - DNA, 15 bp, Homo sapiens
gtactttggcggagg

SEQ ID NO: 1589269 - DNA, 15 bp, Homo sapiens
ggtactttggcggag

SEQ ID NO: 1589270 - DNA, 15 bp, Homo sapiens
gggtactttggcgga

SEQ ID NO: 1589271 - DNA, 15 bp, Homo sapiens
agggtactttggcgg

SEQ ID NO: 1589272 - DNA, 15 bp, Homo sapiens
tagggtactttggcg

SEQ ID NO: 1589273 - DNA, 15 bp, Homo sapiens
gtagggtactttggc

SEQ ID NO: 1589274 - DNA, 15 bp, Homo sapiens
ggtagggtactttgg

SEQ ID NO: 1589275 - DNA, 15 bp, Homo sapiens
gggtagggtactttg

SEQ ID NO: 1589276 - DNA, 15 bp, Homo sapiens
tgggtagggtacttt

SEQ ID NO: 1589277 - DNA, 15 bp, Homo sapiens
atgggtagggtactt

SEQ ID NO: 1589278 - DNA, 15 bp, Homo sapiens
gatgggtagggtact

SEQ ID NO: 1589279 - DNA, 15 bp, Homo sapiens
ggatgggtagggtac

SEQ ID NO: 1589280 - DNA, 15 bp, Homo sapiens
gggatgggtagggta

SEQ ID NO: 1589281 - DNA, 15 bp, Homo sapiens
agggatgggtagggt

SEQ ID NO: 1589282 - DNA, 15 bp, Homo sapiens
tagggatgggtaggg

SEQ ID NO: 1589283 - DNA, 15 bp, Homo sapiens
ctagggatgggtagg

SEQ ID NO: 1589284 - DNA, 15 bp, Homo sapiens
cctagggatgggtag

SEQ ID NO: 1589285 - DNA, 15 bp, Homo sapiens
gcctagggatgggta

SEQ ID NO: 1589286 - DNA, 15 bp, Homo sapiens
ggcctagggatgggt

SEQ ID NO: 1589287 - DNA, 15 bp, Homo sapiens
gggcctagggatggg

SEQ ID NO: 1589288 - DNA, 15 bp, Homo sapiens
ggggcctagggatgg

SEQ ID NO: 1589289 - DNA, 15 bp, Homo sapiens
tggggcctagggatg

SEQ ID NO: 1589290 - DNA, 15 bp, Homo sapiens
ttggggcctagggat

SEQ ID NO: 1589291 - DNA, 15 bp, Homo sapiens
gttggggcctaggga

SEQ ID NO: 1589292 - DNA, 15 bp, Homo sapiens
cgttggggcctaggg

SEQ ID NO: 1589293 - DNA, 15 bp, Homo sapiens
ccgttggggcctagg

SEQ ID NO: 1589294 - DNA, 15 bp, Homo sapiens
gccgttggggcctag

SEQ ID NO: 1589295 - DNA, 15 bp, Homo sapiens
agccgttggggccta

SEQ ID NO: 1589296 - DNA, 15 bp, Homo sapiens
cagccgttggggcct

SEQ ID NO: 1589297 - DNA, 15 bp, Homo sapiens
tcagccgttggggcc

SEQ ID NO: 1589298 - DNA, 15 bp, Homo sapiens
ctcagccgttggggc

SEQ ID NO: 1589299 - DNA, 15 bp, Homo sapiens
tctcagccgttgggg

SEQ ID NO: 1589300 - DNA, 15 bp, Homo sapiens
ctctcagccgttggg

SEQ ID NO: 1589301 - DNA, 15 bp, Homo sapiens
cctctcagccgttgg

SEQ ID NO: 1589302 - DNA, 15 bp, Homo sapiens
tcctctcagccgttg

SEQ ID NO: 1589303 - DNA, 15 bp, Homo sapiens
ctcctctcagccgtt

SEQ ID NO: 1589304 - DNA, 15 bp, Homo sapiens
actcctctcagccgt

SEQ ID NO: 1589305 - DNA, 15 bp, Homo sapiens
cactcctctcagccg

SEQ ID NO: 1589306 - DNA, 15 bp, Homo sapiens
ccactcctctcagcc

SEQ ID NO: 1589307 - DNA, 15 bp, Homo sapiens
cccactcctctcagc

SEQ ID NO: 1589308 - DNA, 15 bp, Homo sapiens
ccccactcctctcag

SEQ ID NO: 1589309 - DNA, 15 bp, Homo sapiens
cccccactcctctca

SEQ ID NO: 1589310 - DNA, 15 bp, Homo sapiens
tcccccactcctctc

SEQ ID NO: 1589311 - DNA, 15 bp, Homo sapiens
ctcccccactcctct

SEQ ID NO: 1589312 - DNA, 15 bp, Homo sapiens
tctcccccactcctc

SEQ ID NO: 1589313 - DNA, 15 bp, Homo sapiens
atctcccccactcct

SEQ ID NO: 1589314 - DNA, 15 bp, Homo sapiens
aatctcccccactcc

SEQ ID NO: 1589315 - DNA, 15 bp, Homo sapiens
aaatctcccccactc

SEQ ID NO: 1589316 - DNA, 15 bp, Homo sapiens
aaaatctcccccact

SEQ ID NO: 1589317 - DNA, 15 bp, Homo sapiens
caaaatctcccccac

SEQ ID NO: 1589318 - DNA, 15 bp, Homo sapiens
gcaaaatctccccca

SEQ ID NO: 1589319 - DNA, 15 bp, Homo sapiens
tgcaaaatctccccc

SEQ ID NO: 1589320 - DNA, 15 bp, Homo sapiens
gtgcaaaatctcccc

SEQ ID NO: 1589321 - DNA, 15 bp, Homo sapiens
tgtgcaaaatctccc

SEQ ID NO: 1589322 - DNA, 15 bp, Homo sapiens
gtgtgcaaaatctcc

SEQ ID NO: 1589323 - DNA, 15 bp, Homo sapiens
agtgtgcaaaatctc

SEQ ID NO: 1589324 - DNA, 15 bp, Homo sapiens
cagtgtgcaaaatct

SEQ ID NO: 1589325 - DNA, 15 bp, Homo sapiens
gcagtgtgcaaaatc

SEQ ID NO: 1589326 - DNA, 15 bp, Homo sapiens
tgcagtgtgcaaaat

SEQ ID NO: 1589327 - DNA, 15 bp, Homo sapiens
gtgcagtgtgcaaaa

SEQ ID NO: 1589328 - DNA, 15 bp, Homo sapiens
ggtgcagtgtgcaaa

SEQ ID NO: 1589329 - DNA, 15 bp, Homo sapiens
gggtgcagtgtgcaa

SEQ ID NO: 1589330 - DNA, 15 bp, Homo sapiens
ggggtgcagtgtgca

SEQ ID NO: 1589331 - DNA, 15 bp, Homo sapiens
gggggtgcagtgtgc

SEQ ID NO: 1589332 - DNA, 15 bp, Homo sapiens
ggggggtgcagtgtg

SEQ ID NO: 1589333 - DNA, 15 bp, Homo sapiens
aggggggtgcagtgt

SEQ ID NO: 1589334 - DNA, 15 bp, Homo sapiens
aaggggggtgcagtg

SEQ ID NO: 1589335 - DNA, 15 bp, Homo sapiens
gaaggggggtgcagt

SEQ ID NO: 1589336 - DNA, 15 bp, Homo sapiens
ggaaggggggtgcag

SEQ ID NO: 1589337 - DNA, 15 bp, Homo sapiens
aggaaggggggtgca

SEQ ID NO: 1589338 - DNA, 15 bp, Homo sapiens
gaggaaggggggtgc

SEQ ID NO: 1589339 - DNA, 15 bp, Homo sapiens
ggaggaaggggggtg

SEQ ID NO: 1589340 - DNA, 15 bp, Homo sapiens
aggaggaaggggggt

SEQ ID NO: 1589341 - DNA, 15 bp, Homo sapiens
gaggaggaagggggg

SEQ ID NO: 1589342 - DNA, 15 bp, Homo sapiens
agaggaggaaggggg

SEQ ID NO: 1589343 - DNA, 15 bp, Homo sapiens
gagaggaggaagggg

SEQ ID NO: 1589344 - DNA, 15 bp, Homo sapiens
ggagaggaggaaggg

SEQ ID NO: 1589345 - DNA, 15 bp, Homo sapiens
gggagaggaggaagg

SEQ ID NO: 1589346 - DNA, 15 bp, Homo sapiens
ggggagaggaggaag

SEQ ID NO: 1589347 - DNA, 15 bp, Homo sapiens
tggggagaggaggaa

SEQ ID NO: 1589348 - DNA, 15 bp, Homo sapiens
agtgggggtggggag

SEQ ID NO: 1589349 - DNA, 15 bp, Homo sapiens
aagtgggggtgggga

SEQ ID NO: 1589350 - DNA, 15 bp, Homo sapiens
gaagtgggggtgggg

SEQ ID NO: 1589351 - DNA, 15 bp, Homo sapiens
cgaagtgggggtggg

SEQ ID NO: 1589352 - DNA, 15 bp, Homo sapiens
gcgaagtgggggtgg

SEQ ID NO: 1589353 - DNA, 15 bp, Homo sapiens
ggcgaagtgggggtg

SEQ ID NO: 1589354 - DNA, 15 bp, Homo sapiens
tggcgaagtgggggt

SEQ ID NO: 1589355 - DNA, 15 bp, Homo sapiens
atggcgaagtggggg

SEQ ID NO: 1589356 - DNA, 15 bp, Homo sapiens
catggcgaagtgggg

SEQ ID NO: 1589357 - DNA, 15 bp, Homo sapiens
acatggcgaagtggg

SEQ ID NO: 1589358 - DNA, 15 bp, Homo sapiens
tacatggcgaagtgg

SEQ ID NO: 1589359 - DNA, 15 bp, Homo sapiens
ttacatggcgaagtg

SEQ ID NO: 1589360 - DNA, 15 bp, Homo sapiens
tttacatggcgaagt

SEQ ID NO: 1589361 - DNA, 15 bp, Homo sapiens
gtttacatggcgaag

SEQ ID NO: 1589362 - DNA, 15 bp, Homo sapiens
tgtttacatggcgaa

SEQ ID NO: 1589363 - DNA, 15 bp, Homo sapiens
gtgtttacatggcga

SEQ ID NO: 1589364 - DNA, 15 bp, Homo sapiens
agtgtttacatggcg

SEQ ID NO: 1589365 - DNA, 15 bp, Homo sapiens
tagtgtttacatggc

SEQ ID NO: 1589366 - DNA, 15 bp, Homo sapiens
ctagtgtttacatgg

SEQ ID NO: 1589367 - DNA, 15 bp, Homo sapiens
cctagtgtttacatg

SEQ ID NO: 1589368 - DNA, 15 bp, Homo sapiens
tcctagtgtttacat

SEQ ID NO: 1589369 - DNA, 15 bp, Homo sapiens
gtcctagtgtttaca

SEQ ID NO: 1589370 - DNA, 15 bp, Homo sapiens
agtcctagtgtttac

SEQ ID NO: 1589371 - DNA, 15 bp, Homo sapiens
aagtcctagtgttta

SEQ ID NO: 1589372 - DNA, 15 bp, Homo sapiens
aaagtcctagtgttt

SEQ ID NO: 1589373 - DNA, 15 bp, Homo sapiens
gaaagtcctagtgtt

SEQ ID NO: 1589374 - DNA, 15 bp, Homo sapiens
agaaagtcctagtgt

SEQ ID NO: 1589375 - DNA, 15 bp, Homo sapiens
gagaaagtcctagtg

SEQ ID NO: 1589376 - DNA, 15 bp, Homo sapiens
cgagaaagtcctagt

SEQ ID NO: 1589377 - DNA, 15 bp, Homo sapiens
tcgagaaagtcctag

SEQ ID NO: 1589378 - DNA, 15 bp, Homo sapiens
ctcgagaaagtccta

SEQ ID NO: 1589379 - DNA, 15 bp, Homo sapiens
tctcgagaaagtcct

SEQ ID NO: 1589380 - DNA, 15 bp, Homo sapiens
ctctcgagaaagtcc

SEQ ID NO: 1589381 - DNA, 15 bp, Homo sapiens
gctctcgagaaagtc

SEQ ID NO: 1589382 - DNA, 15 bp, Homo sapiens
ggctctcgagaaagt

SEQ ID NO: 1589383 - DNA, 15 bp, Homo sapiens
aggctctcgagaaag

SEQ ID NO: 1589384 - DNA, 15 bp, Homo sapiens
aaggctctcgagaaa

SEQ ID NO: 1589385 - DNA, 15 bp, Homo sapiens
caaggctctcgagaa

SEQ ID NO: 1589386 - DNA, 15 bp, Homo sapiens
ccaaggctctcgaga

SEQ ID NO: 1589387 - DNA, 15 bp, Homo sapiens
tccaaggctctcgag

SEQ ID NO: 1589388 - DNA, 15 bp, Homo sapiens
ctccaaggctctcga

SEQ ID NO: 1589389 - DNA, 15 bp, Homo sapiens
tctccaaggctctcg

SEQ ID NO: 1589390 - DNA, 15 bp, Homo sapiens
ctctccaaggctctc

SEQ ID NO: 1589391 - DNA, 15 bp, Homo sapiens
gctctccaaggctct

SEQ ID NO: 1589392 - DNA, 15 bp, Homo sapiens
ggctctccaaggctc

SEQ ID NO: 1589393 - DNA, 15 bp, Homo sapiens
cggctctccaaggct

SEQ ID NO: 1589394 - DNA, 15 bp, Homo sapiens
gcggctctccaaggc

SEQ ID NO: 1589395 - DNA, 15 bp, Homo sapiens
agcggctctccaagg

SEQ ID NO: 1589396 - DNA, 15 bp, Homo sapiens
gagcggctctccaag

SEQ ID NO: 1589397 - DNA, 15 bp, Homo sapiens
agagcggctctccaa

SEQ ID NO: 1589398 - DNA, 15 bp, Homo sapiens
tagagcggctctcca

SEQ ID NO: 1589399 - DNA, 15 bp, Homo sapiens
ctagagcggctctcc

SEQ ID NO: 1589400 - DNA, 15 bp, Homo sapiens
actagagcggctctc

SEQ ID NO: 1589401 - DNA, 15 bp, Homo sapiens
cactagagcggctct

SEQ ID NO: 1589402 - DNA, 15 bp, Homo sapiens
ccactagagcggctc

SEQ ID NO: 1589403 - DNA, 15 bp, Homo sapiens
gccactagagcggct

SEQ ID NO: 1589404 - DNA, 15 bp, Homo sapiens
agccactagagcggc

SEQ ID NO: 1589405 - DNA, 15 bp, Homo sapiens
aagccactagagcgg

SEQ ID NO: 1589406 - DNA, 15 bp, Homo sapiens
gaagccactagagcg

SEQ ID NO: 1589407 - DNA, 15 bp, Homo sapiens
cgaagccactagagc

SEQ ID NO: 1589408 - DNA, 15 bp, Homo sapiens
ccgaagccactagag

SEQ ID NO: 1589409 - DNA, 15 bp, Homo sapiens
cccgaagccactaga

SEQ ID NO: 1589410 - DNA, 15 bp, Homo sapiens
gcccgaagccactag

SEQ ID NO: 1589411 - DNA, 15 bp, Homo sapiens
ggcccgaagccacta

SEQ ID NO: 1589412 - DNA, 15 bp, Homo sapiens
gggcccgaagccact

SEQ ID NO: 1589413 - DNA, 15 bp, Homo sapiens
agggcccgaagccac

SEQ ID NO: 1589414 - DNA, 15 bp, Homo sapiens
cagggcccgaagcca

SEQ ID NO: 1589415 - DNA, 15 bp, Homo sapiens
tcagggcccgaagcc

SEQ ID NO: 1589416 - DNA, 15 bp, Homo sapiens
ttcagggcccgaagc

SEQ ID NO: 1589417 - DNA, 15 bp, Homo sapiens
tttcagggcccgaag

SEQ ID NO: 1589418 - DNA, 15 bp, Homo sapiens
gtttcagggcccgaa

SEQ ID NO: 1589419 - DNA, 15 bp, Homo sapiens
ggtttcagggcccga

SEQ ID NO: 1589420 - DNA, 15 bp, Homo sapiens
gggtttcagggcccg

SEQ ID NO: 1589421 - DNA, 15 bp, Homo sapiens
ggggtttcagggccc

SEQ ID NO: 1589422 - DNA, 15 bp, Homo sapiens
tggggtttcagggcc

SEQ ID NO: 1589423 - DNA, 15 bp, Homo sapiens
ctggggtttcagggc

SEQ ID NO: 1589424 - DNA, 15 bp, Homo sapiens
cctggggtttcaggg

SEQ ID NO: 1589425 - DNA, 15 bp, Homo sapiens
gcctggggtttcagg

SEQ ID NO: 1589426 - DNA, 15 bp, Homo sapiens
agcctggggtttcag

SEQ ID NO: 1589427 - DNA, 15 bp, Homo sapiens
cagcctggggtttca

SEQ ID NO: 1589428 - DNA, 15 bp, Homo sapiens
ccagcctggggtttc

SEQ ID NO: 1589429 - DNA, 15 bp, Homo sapiens
cccagcctggggttt

SEQ ID NO: 1589430 - DNA, 15 bp, Homo sapiens
gcccagcctggggtt

SEQ ID NO: 1589431 - DNA, 15 bp, Homo sapiens
agcccagcctggggt

SEQ ID NO: 1589432 - DNA, 15 bp, Homo sapiens
aagcccagcctgggg

SEQ ID NO: 1589433 - DNA, 15 bp, Homo sapiens
aaagcccagcctggg

SEQ ID NO: 1589434 - DNA, 15 bp, Homo sapiens
aaaagcccagcctgg

SEQ ID NO: 1589435 - DNA, 15 bp, Homo sapiens
aaaaagcccagcctg

SEQ ID NO: 1589436 - DNA, 15 bp, Homo sapiens
aaaaaagcccagcct

SEQ ID NO: 1589437 - DNA, 15 bp, Homo sapiens
caaaaaagcccagcc

SEQ ID NO: 1589438 - DNA, 15 bp, Homo sapiens
tcaaaaaagcccagc

SEQ ID NO: 1589439 - DNA, 15 bp, Homo sapiens
atcaaaaaagcccag

SEQ ID NO: 1589440 - DNA, 15 bp, Homo sapiens
catcaaaaaagccca

SEQ ID NO: 1589441 - DNA, 15 bp, Homo sapiens
acatcaaaaaagccc

SEQ ID NO: 1589442 - DNA, 15 bp, Homo sapiens
aacatcaaaaaagcc

SEQ ID NO: 1589443 - DNA, 15 bp, Homo sapiens
aaacatcaaaaaagc

SEQ ID NO: 1589444 - DNA, 15 bp, Homo sapiens
taaacatcaaaaaag

SEQ ID NO: 1589445 - DNA, 15 bp, Homo sapiens
ctaaacatcaaaaaa

SEQ ID NO: 1589446 - DNA, 15 bp, Homo sapiens
gctaaacatcaaaaa

SEQ ID NO: 1589447 - DNA, 15 bp, Homo sapiens
tgctaaacatcaaaa

SEQ ID NO: 1589448 - DNA, 15 bp, Homo sapiens
atgctaaacatcaaa

SEQ ID NO: 1589449 - DNA, 15 bp, Homo sapiens
gatgctaaacatcaa

SEQ ID NO: 1589450 - DNA, 15 bp, Homo sapiens
ggatgctaaacatca

SEQ ID NO: 1589451 - DNA, 15 bp, Homo sapiens
gggatgctaaacatc

SEQ ID NO: 1589452 - DNA, 15 bp, Homo sapiens
tgggatgctaaacat

SEQ ID NO: 1589453 - DNA, 15 bp, Homo sapiens
ttgggatgctaaaca

SEQ ID NO: 1589454 - DNA, 15 bp, Homo sapiens
tttgggatgctaaac

SEQ ID NO: 1589455 - DNA, 15 bp, Homo sapiens
ctttgggatgctaaa

SEQ ID NO: 1589456 - DNA, 15 bp, Homo sapiens
gctttgggatgctaa

SEQ ID NO: 1589457 - DNA, 15 bp, Homo sapiens
agctttgggatgcta

SEQ ID NO: 1589458 - DNA, 15 bp, Homo sapiens
cagctttgggatgct

SEQ ID NO: 1589459 - DNA, 15 bp, Homo sapiens
gcagctttgggatgc

SEQ ID NO: 1589460 - DNA, 15 bp, Homo sapiens
agcagctttgggatg

SEQ ID NO: 1589461 - DNA, 15 bp, Homo sapiens
gagcagctttgggat

SEQ ID NO: 1589462 - DNA, 15 bp, Homo sapiens
ggagcagctttggga

SEQ ID NO: 1589463 - DNA, 15 bp, Homo sapiens
gggagcagctttggg

SEQ ID NO: 1589464 - DNA, 15 bp, Homo sapiens
ggggagcagctttgg

SEQ ID NO: 1589465 - DNA, 15 bp, Homo sapiens
tggggagcagctttg

SEQ ID NO: 1589466 - DNA, 15 bp, Homo sapiens
gtggggagcagcttt

SEQ ID NO: 1589467 - DNA, 15 bp, Homo sapiens
ggtggggagcagctt

SEQ ID NO: 1589468 - DNA, 15 bp, Homo sapiens
gggtggggagcagct

SEQ ID NO: 1589469 - DNA, 15 bp, Homo sapiens
agggtggggagcagc

SEQ ID NO: 1589470 - DNA, 15 bp, Homo sapiens
cagggtggggagcag

SEQ ID NO: 1589471 - DNA, 15 bp, Homo sapiens
ccagggtggggagca

SEQ ID NO: 1589472 - DNA, 15 bp, Homo sapiens
gccagggtggggagc

SEQ ID NO: 1589473 - DNA, 15 bp, Homo sapiens
ggccagggtggggag

SEQ ID NO: 1589474 - DNA, 15 bp, Homo sapiens
gggccagggtgggga

SEQ ID NO: 1589475 - DNA, 15 bp, Homo sapiens
ggggccagggtgggg

SEQ ID NO: 1589476 - DNA, 15 bp, Homo sapiens
tggggccagggtggg

SEQ ID NO: 1589477 - DNA, 15 bp, Homo sapiens
ctggggccagggtgg

SEQ ID NO: 1589478 - DNA, 15 bp, Homo sapiens
gctggggccagggtg

SEQ ID NO: 1589479 - DNA, 15 bp, Homo sapiens
ggctggggccagggt

SEQ ID NO: 1589480 - DNA, 15 bp, Homo sapiens
aggctggggccaggg

SEQ ID NO: 1589481 - DNA, 15 bp, Homo sapiens
caggctggggccagg

SEQ ID NO: 1589482 - DNA, 15 bp, Homo sapiens
ccaggctggggccag

SEQ ID NO: 1589483 - DNA, 15 bp, Homo sapiens
cccaggctggggcca

SEQ ID NO: 1589484 - DNA, 15 bp, Homo sapiens
tcccaggctggggcc

SEQ ID NO: 1589485 - DNA, 15 bp, Homo sapiens
ttcccaggctggggc

SEQ ID NO: 1589486 - DNA, 15 bp, Homo sapiens
gttcccaggctgggg

SEQ ID NO: 1589487 - DNA, 15 bp, Homo sapiens
agttcccaggctggg

SEQ ID NO: 1589488 - DNA, 15 bp, Homo sapiens
cagttcccaggctgg

SEQ ID NO: 1589489 - DNA, 15 bp, Homo sapiens
ccagttcccaggctg

SEQ ID NO: 1589490 - DNA, 15 bp, Homo sapiens
cccagttcccaggct

SEQ ID NO: 1589491 - DNA, 15 bp, Homo sapiens
tcccagttcccaggc

SEQ ID NO: 1589492 - DNA, 15 bp, Homo sapiens
ctcccagttcccagg

SEQ ID NO: 1589493 - DNA, 15 bp, Homo sapiens
gctcccagttcccag

SEQ ID NO: 1589494 - DNA, 15 bp, Homo sapiens
agctcccagttccca

SEQ ID NO: 1589495 - DNA, 15 bp, Homo sapiens
cagctcccagttccc

SEQ ID NO: 1589496 - DNA, 15 bp, Homo sapiens
acagctcccagttcc

SEQ ID NO: 1589497 - DNA, 15 bp, Homo sapiens
cacagctcccagttc

SEQ ID NO: 1589498 - DNA, 15 bp, Homo sapiens
ccacagctcccagtt

SEQ ID NO: 1589499 - DNA, 15 bp, Homo sapiens
cccacagctcccagt

SEQ ID NO: 1589500 - DNA, 15 bp, Homo sapiens
gcccacagctcccag

SEQ ID NO: 1589501 - DNA, 15 bp, Homo sapiens
tgcccacagctccca

SEQ ID NO: 1589502 - DNA, 15 bp, Homo sapiens
ctgcccacagctccc

SEQ ID NO: 1589503 - DNA, 15 bp, Homo sapiens
cctgcccacagctcc

SEQ ID NO: 1589504 - DNA, 15 bp, Homo sapiens
tcctgcccacagctc

SEQ ID NO: 1589505 - DNA, 15 bp, Homo sapiens
ctcctgcccacagct

SEQ ID NO: 1589506 - DNA, 15 bp, Homo sapiens
tctcctgcccacagc

SEQ ID NO: 1589507 - DNA, 15 bp, Homo sapiens
ctctcctgcccacag

SEQ ID NO: 1589508 - DNA, 15 bp, Homo sapiens
cctctcctgcccaca

SEQ ID NO: 1589509 - DNA, 15 bp, Homo sapiens
cttcctctcctgccc

SEQ ID NO: 1589510 - DNA, 15 bp, Homo sapiens
ccttcctctcctgcc

SEQ ID NO: 1589511 - DNA, 15 bp, Homo sapiens
tccttcctctcctgc

SEQ ID NO: 1589512 - DNA, 15 bp, Homo sapiens
ttccttcctctcctg

SEQ ID NO: 1589513 - DNA, 15 bp, Homo sapiens
tttccttcctctcct

SEQ ID NO: 1589514 - DNA, 15 bp, Homo sapiens
ctttccttcctctcc

SEQ ID NO: 1589515 - DNA, 15 bp, Homo sapiens
gctttccttcctctc

SEQ ID NO: 1589516 - DNA, 15 bp, Homo sapiens
tgctttccttcctct

SEQ ID NO: 1589517 - DNA, 15 bp, Homo sapiens
ctgctttccttcctc

SEQ ID NO: 1589518 - DNA, 15 bp, Homo sapiens
gctgctttccttcct

SEQ ID NO: 1589519 - DNA, 15 bp, Homo sapiens
agctgctttccttcc

SEQ ID NO: 1589520 - DNA, 15 bp, Homo sapiens
gagctgctttccttc

SEQ ID NO: 1589521 - DNA, 15 bp, Homo sapiens
agagctgctttcctt

SEQ ID NO: 1589522 - DNA, 15 bp, Homo sapiens
gagagctgctttcct

SEQ ID NO: 1589523 - DNA, 15 bp, Homo sapiens
agagagctgctttcc

SEQ ID NO: 1589524 - DNA, 15 bp, Homo sapiens
gagagagctgctttc

SEQ ID NO: 1589525 - DNA, 15 bp, Homo sapiens
tgagagagctgcttt

SEQ ID NO: 1589526 - DNA, 15 bp, Homo sapiens
ctgagagagctgctt

SEQ ID NO: 1589527 - DNA, 15 bp, Homo sapiens
gctgagagagctgct

SEQ ID NO: 1589528 - DNA, 15 bp, Homo sapiens
agctgagagagctgc

SEQ ID NO: 1589529 - DNA, 15 bp, Homo sapiens
tagctgagagagctg

SEQ ID NO: 1589530 - DNA, 15 bp, Homo sapiens
ctagctgagagagct

SEQ ID NO: 1589531 - DNA, 15 bp, Homo sapiens
gctagctgagagagc

SEQ ID NO: 1589532 - DNA, 15 bp, Homo sapiens
cgctagctgagagag

SEQ ID NO: 1589533 - DNA, 15 bp, Homo sapiens
tcgctagctgagaga

SEQ ID NO: 1589534 - DNA, 15 bp, Homo sapiens
ctcgctagctgagag

SEQ ID NO: 1589535 - DNA, 15 bp, Homo sapiens
cctcgctagctgaga

SEQ ID NO: 1589536 - DNA, 15 bp, Homo sapiens
ccctcgctagctgag

SEQ ID NO: 1589537 - DNA, 15 bp, Homo sapiens
cccctcgctagctga

SEQ ID NO: 1589538 - DNA, 15 bp, Homo sapiens
ccccctcgctagctg

SEQ ID NO: 1589539 - DNA, 15 bp, Homo sapiens
accccctcgctagct

SEQ ID NO: 1589540 - DNA, 15 bp, Homo sapiens
gaccccctcgctagc

SEQ ID NO: 1589541 - DNA, 15 bp, Homo sapiens
tgaccccctcgctag

SEQ ID NO: 1589542 - DNA, 15 bp, Homo sapiens
ctgaccccctcgcta

SEQ ID NO: 1589543 - DNA, 15 bp, Homo sapiens
cctgaccccctcgct

SEQ ID NO: 1589544 - DNA, 15 bp, Homo sapiens
ccctgaccccctcgc

SEQ ID NO: 1589545 - DNA, 15 bp, Homo sapiens
tccctgaccccctcg

SEQ ID NO: 1589546 - DNA, 15 bp, Homo sapiens
gtccctgaccccctc

SEQ ID NO: 1589547 - DNA, 15 bp, Homo sapiens
agtccctgaccccct

SEQ ID NO: 1589548 - DNA, 15 bp, Homo sapiens
cagtccctgaccccc

SEQ ID NO: 1589549 - DNA, 15 bp, Homo sapiens
ccagtccctgacccc

SEQ ID NO: 1589550 - DNA, 15 bp, Homo sapiens
cccagtccctgaccc

SEQ ID NO: 1589551 - DNA, 15 bp, Homo sapiens
gcccagtccctgacc

SEQ ID NO: 1589552 - DNA, 15 bp, Homo sapiens
ggcccagtccctgac

SEQ ID NO: 1589553 - DNA, 15 bp, Homo sapiens
tggcccagtccctga

SEQ ID NO: 1589554 - DNA, 15 bp, Homo sapiens
ttggcccagtccctg

SEQ ID NO: 1589555 - DNA, 15 bp, Homo sapiens
cttggcccagtccct

SEQ ID NO: 1589556 - DNA, 15 bp, Homo sapiens
gcttggcccagtccc

SEQ ID NO: 1589557 - DNA, 15 bp, Homo sapiens
agcttggcccagtcc

SEQ ID NO: 1589558 - DNA, 15 bp, Homo sapiens
gagcttggcccagtc

SEQ ID NO: 1589559 - DNA, 15 bp, Homo sapiens
tgagcttggcccagt

SEQ ID NO: 1589560 - DNA, 15 bp, Homo sapiens
ctgagcttggcccag

SEQ ID NO: 1589561 - DNA, 15 bp, Homo sapiens
tctgagcttggccca

SEQ ID NO: 1589562 - DNA, 15 bp, Homo sapiens
ttctgagcttggccc

SEQ ID NO: 1589563 - DNA, 15 bp, Homo sapiens
cttctgagcttggcc

SEQ ID NO: 1589564 - DNA, 15 bp, Homo sapiens
gcttctgagcttggc

SEQ ID NO: 1589565 - DNA, 15 bp, Homo sapiens
cgcttctgagcttgg

SEQ ID NO: 1589566 - DNA, 15 bp, Homo sapiens
ccgcttctgagcttg

SEQ ID NO: 1589567 - DNA, 15 bp, Homo sapiens
cccgcttctgagctt

SEQ ID NO: 1589568 - DNA, 15 bp, Homo sapiens
ccccgcttctgagct

SEQ ID NO: 1589569 - DNA, 15 bp, Homo sapiens
tccccgcttctgagc

SEQ ID NO: 1589570 - DNA, 15 bp, Homo sapiens
ctccccgcttctgag

SEQ ID NO: 1589571 - DNA, 15 bp, Homo sapiens
tctccccgcttctga

SEQ ID NO: 1589572 - DNA, 15 bp, Homo sapiens
ttctccccgcttctg

SEQ ID NO: 1589573 - DNA, 15 bp, Homo sapiens
cttctccccgcttct

SEQ ID NO: 1589574 - DNA, 15 bp, Homo sapiens
tcttctccccgcttc

SEQ ID NO: 1589575 - DNA, 15 bp, Homo sapiens
ctcttctccccgctt

SEQ ID NO: 1589576 - DNA, 15 bp, Homo sapiens
gctcttctccccgct

SEQ ID NO: 1589577 - DNA, 15 bp, Homo sapiens
cgctcttctccccgc

SEQ ID NO: 1589578 - DNA, 15 bp, Homo sapiens
tcgctcttctccccg

SEQ ID NO: 1589579 - DNA, 15 bp, Homo sapiens
ctcgctcttctcccc

SEQ ID NO: 1589580 - DNA, 15 bp, Homo sapiens
tctcgctcttctccc

SEQ ID NO: 1589581 - DNA, 15 bp, Homo sapiens
gtctcgctcttctcc

SEQ ID NO: 1589582 - DNA, 15 bp, Homo sapiens
tgtctcgctcttctc

SEQ ID NO: 1589583 - DNA, 15 bp, Homo sapiens
ctgtctcgctcttct

SEQ ID NO: 1589584 - DNA, 15 bp, Homo sapiens
tctgtctcgctcttc

SEQ ID NO: 1589585 - DNA, 15 bp, Homo sapiens
ctctgtctcgctctt

SEQ ID NO: 1589586 - DNA, 15 bp, Homo sapiens
tctctgtctcgctct

SEQ ID NO: 1589587 - DNA, 15 bp, Homo sapiens
atctctgtctcgctc

SEQ ID NO: 1589588 - DNA, 15 bp, Homo sapiens
catctctgtctcgct

SEQ ID NO: 1589589 - DNA, 15 bp, Homo sapiens
gcatctctgtctcgc

SEQ ID NO: 1589590 - DNA, 15 bp, Homo sapiens
agcatctctgtctcg

SEQ ID NO: 1589591 - DNA, 15 bp, Homo sapiens
gagcatctctgtctc

SEQ ID NO: 1589592 - DNA, 15 bp, Homo sapiens
agagcatctctgtct

SEQ ID NO: 1589593 - DNA, 15 bp, Homo sapiens
cagagcatctctgtc

SEQ ID NO: 1589594 - DNA, 15 bp, Homo sapiens
tcagagcatctctgt

SEQ ID NO: 1589595 - DNA, 15 bp, Homo sapiens
ctcagagcatctctg

SEQ ID NO: 1589596 - DNA, 15 bp, Homo sapiens
gctcagagcatctct

SEQ ID NO: 1589597 - DNA, 15 bp, Homo sapiens
tgctcagagcatctc

SEQ ID NO: 1589598 - DNA, 15 bp, Homo sapiens
ctgctcagagcatct

SEQ ID NO: 1589599 - DNA, 15 bp, Homo sapiens
cctgctcagagcatc

SEQ ID NO: 1589600 - DNA, 15 bp, Homo sapiens
ccctgctcagagcat

SEQ ID NO: 1589601 - DNA, 15 bp, Homo sapiens
cccctgctcagagca

SEQ ID NO: 1589602 - DNA, 15 bp, Homo sapiens
tcccctgctcagagc

SEQ ID NO: 1589603 - DNA, 15 bp, Homo sapiens
ctcccctgctcagag

SEQ ID NO: 1589604 - DNA, 15 bp, Homo sapiens
tctcccctgctcaga

SEQ ID NO: 1589605 - DNA, 15 bp, Homo sapiens
gtctcccctgctcag

SEQ ID NO: 1589606 - DNA, 15 bp, Homo sapiens
tgtctcccctgctca

SEQ ID NO: 1589607 - DNA, 15 bp, Homo sapiens
ctgtctcccctgctc

SEQ ID NO: 1589608 - DNA, 15 bp, Homo sapiens
cctgtctcccctgct

SEQ ID NO: 1589609 - DNA, 15 bp, Homo sapiens
ccctgtctcccctgc

SEQ ID NO: 1589610 - DNA, 15 bp, Homo sapiens
tccctgtctcccctg

SEQ ID NO: 1589611 - DNA, 15 bp, Homo sapiens
atccctgtctcccct

SEQ ID NO: 1589612 - DNA, 15 bp, Homo sapiens
gatccctgtctcccc

SEQ ID NO: 1589613 - DNA, 15 bp, Homo sapiens
ggatccctgtctccc

SEQ ID NO: 1589614 - DNA, 15 bp, Homo sapiens
gggatccctgtctcc

SEQ ID NO: 1589615 - DNA, 15 bp, Homo sapiens
cgggatccctgtctc

SEQ ID NO: 1589616 - DNA, 15 bp, Homo sapiens
ccgggatccctgtct

SEQ ID NO: 1589617 - DNA, 15 bp, Homo sapiens
cccgggatccctgtc

SEQ ID NO: 1589618 - DNA, 15 bp, Homo sapiens
gcccgggatccctgt

SEQ ID NO: 1589619 - DNA, 15 bp, Homo sapiens
agcccgggatccctg

SEQ ID NO: 1589620 - DNA, 15 bp, Homo sapiens
cagcccgggatccct

SEQ ID NO: 1589621 - DNA, 15 bp, Homo sapiens
gcagcccgggatccc

SEQ ID NO: 1589622 - DNA, 15 bp, Homo sapiens
agcagcccgggatcc

SEQ ID NO: 1589623 - DNA, 15 bp, Homo sapiens
cagcagcccgggatc

SEQ ID NO: 1589624 - DNA, 15 bp, Homo sapiens
gcagcagcccgggat

SEQ ID NO: 1589625 - DNA, 15 bp, Homo sapiens
ggcagcagcccggga

SEQ ID NO: 1589626 - DNA, 15 bp, Homo sapiens
cggcagcagcccggg

SEQ ID NO: 1589627 - DNA, 15 bp, Homo sapiens
gcggcagcagcccgg

SEQ ID NO: 1589628 - DNA, 15 bp, Homo sapiens
agcggcagcagcccg

SEQ ID NO: 1589629 - DNA, 15 bp, Homo sapiens
tagcggcagcagccc

SEQ ID NO: 1589630 - DNA, 15 bp, Homo sapiens
gtagcggcagcagcc

SEQ ID NO: 1589631 - DNA, 15 bp, Homo sapiens
ggtagcggcagcagc

SEQ ID NO: 1589632 - DNA, 15 bp, Homo sapiens
tggtagcggcagcag

SEQ ID NO: 1589633 - DNA, 15 bp, Homo sapiens
ttggtagcggcagca

SEQ ID NO: 1589634 - DNA, 15 bp, Homo sapiens
gttggtagcggcagc

SEQ ID NO: 1589635 - DNA, 15 bp, Homo sapiens
tgttggtagcggcag

SEQ ID NO: 1589636 - DNA, 15 bp, Homo sapiens
ttgttggtagcggca

SEQ ID NO: 1589637 - DNA, 15 bp, Homo sapiens
cttgttggtagcggc

SEQ ID NO: 1589638 - DNA, 15 bp, Homo sapiens
ccttgttggtagcgg

SEQ ID NO: 1589639 - DNA, 15 bp, Homo sapiens
cccttgttggtagcg

SEQ ID NO: 1589640 - DNA, 15 bp, Homo sapiens
acccttgttggtagc

SEQ ID NO: 1589641 - DNA, 15 bp, Homo sapiens
tacccttgttggtag

SEQ ID NO: 1589642 - DNA, 15 bp, Homo sapiens
gtacccttgttggta

SEQ ID NO: 1589643 - DNA, 15 bp, Homo sapiens
tgtacccttgttggt

SEQ ID NO: 1589644 - DNA, 15 bp, Homo sapiens
gtgtacccttgttgg

SEQ ID NO: 1589645 - DNA, 15 bp, Homo sapiens
tgtgtacccttgttg

SEQ ID NO: 1589646 - DNA, 15 bp, Homo sapiens
gtgtgtacccttgtt

SEQ ID NO: 1589647 - DNA, 15 bp, Homo sapiens
agtgtgtacccttgt

SEQ ID NO: 1589648 - DNA, 15 bp, Homo sapiens
cagtgtgtacccttg

SEQ ID NO: 1589649 - DNA, 15 bp, Homo sapiens
gcagtgtgtaccctt

SEQ ID NO: 1589650 - DNA, 15 bp, Homo sapiens
cgcagtgtgtaccct

SEQ ID NO: 1589651 - DNA, 15 bp, Homo sapiens
ccgcagtgtgtaccc

SEQ ID NO: 1589652 - DNA, 15 bp, Homo sapiens
accgcagtgtgtacc

SEQ ID NO: 1589653 - DNA, 15 bp, Homo sapiens
gaccgcagtgtgtac

SEQ ID NO: 1589654 - DNA, 15 bp, Homo sapiens
ggaccgcagtgtgta

SEQ ID NO: 1589655 - DNA, 15 bp, Homo sapiens
aggaccgcagtgtgt

SEQ ID NO: 1589656 - DNA, 15 bp, Homo sapiens
gaggaccgcagtgtg

SEQ ID NO: 1589657 - DNA, 15 bp, Homo sapiens
tgaggaccgcagtgt

SEQ ID NO: 1589658 - DNA, 15 bp, Homo sapiens
ttgaggaccgcagtg

SEQ ID NO: 1589659 - DNA, 15 bp, Homo sapiens
cttgaggaccgcagt

SEQ ID NO: 1589660 - DNA, 15 bp, Homo sapiens
ccttgaggaccgcag

SEQ ID NO: 1589661 - DNA, 15 bp, Homo sapiens
gccttgaggaccgca

SEQ ID NO: 1589662 - DNA, 15 bp, Homo sapiens
ggccttgaggaccgc

SEQ ID NO: 1589663 - DNA, 15 bp, Homo sapiens
tggccttgaggaccg

SEQ ID NO: 1589664 - DNA, 15 bp, Homo sapiens
ctggccttgaggacc

SEQ ID NO: 1589665 - DNA, 15 bp, Homo sapiens
cctggccttgaggac

SEQ ID NO: 1589666 - DNA, 15 bp, Homo sapiens
tcctggccttgagga

SEQ ID NO: 1589667 - DNA, 15 bp, Homo sapiens
ctcctggccttgagg

SEQ ID NO: 1589668 - DNA, 15 bp, Homo sapiens
cctcctggccttgag

SEQ ID NO: 1589669 - DNA, 15 bp, Homo sapiens
ccctcctggccttga

SEQ ID NO: 1589670 - DNA, 15 bp, Homo sapiens
cccctcctggccttg

SEQ ID NO: 1589671 - DNA, 15 bp, Homo sapiens
ccccctcctggcctt

SEQ ID NO: 1589672 - DNA, 15 bp, Homo sapiens
cccccctcctggcct

SEQ ID NO: 1589673 - DNA, 15 bp, Homo sapiens
acccccctcctggcc

SEQ ID NO: 1589674 - DNA, 15 bp, Homo sapiens
cacccccctcctggc

SEQ ID NO: 1589675 - DNA, 15 bp, Homo sapiens
ccacccccctcctgg

SEQ ID NO: 1589676 - DNA, 15 bp, Homo sapiens
cccacccccctcctg

SEQ ID NO: 1589677 - DNA, 15 bp, Homo sapiens
ccccacccccctcct

SEQ ID NO: 1589678 - DNA, 15 bp, Homo sapiens
cccccacccccctcc

SEQ ID NO: 1589679 - DNA, 15 bp, Homo sapiens
gcccccacccccctc

SEQ ID NO: 1589680 - DNA, 15 bp, Homo sapiens
tgcccccacccccct

SEQ ID NO: 1589681 - DNA, 15 bp, Homo sapiens
ctgcccccacccccc

SEQ ID NO: 1589682 - DNA, 15 bp, Homo sapiens
cctgcccccaccccc

SEQ ID NO: 1589683 - DNA, 15 bp, Homo sapiens
ccctgcccccacccc

SEQ ID NO: 1589684 - DNA, 15 bp, Homo sapiens
tccctgcccccaccc

SEQ ID NO: 1589685 - DNA, 15 bp, Homo sapiens
ttccctgcccccacc

SEQ ID NO: 1589686 - DNA, 15 bp, Homo sapiens
attccctgcccccac

SEQ ID NO: 1589687 - DNA, 15 bp, Homo sapiens
cattccctgccccca

SEQ ID NO: 1589688 - DNA, 15 bp, Homo sapiens
gcattccctgccccc

SEQ ID NO: 1589689 - DNA, 15 bp, Homo sapiens
ggcattccctgcccc

SEQ ID NO: 1589690 - DNA, 15 bp, Homo sapiens
aggcattccctgccc

SEQ ID NO: 1589691 - DNA, 15 bp, Homo sapiens
gaggcattccctgcc

SEQ ID NO: 1589692 - DNA, 15 bp, Homo sapiens
tgaggcattccctgc

SEQ ID NO: 1589693 - DNA, 15 bp, Homo sapiens
ctgaggcattccctg

SEQ ID NO: 1589694 - DNA, 15 bp, Homo sapiens
gctgaggcattccct

SEQ ID NO: 1589695 - DNA, 15 bp, Homo sapiens
ggctgaggcattccc

SEQ ID NO: 1589696 - DNA, 15 bp, Homo sapiens
tggctgaggcattcc

SEQ ID NO: 1589697 - DNA, 15 bp, Homo sapiens
ttggctgaggcattc

SEQ ID NO: 1589698 - DNA, 15 bp, Homo sapiens
gttggctgaggcatt

SEQ ID NO: 1589699 - DNA, 15 bp, Homo sapiens
tgttggctgaggcat

SEQ ID NO: 1589700 - DNA, 15 bp, Homo sapiens
ctgttggctgaggca

SEQ ID NO: 1589701 - DNA, 15 bp, Homo sapiens
cctgttggctgaggc

SEQ ID NO: 1589702 - DNA, 15 bp, Homo sapiens
ccctgttggctgagg

SEQ ID NO: 1589703 - DNA, 15 bp, Homo sapiens
gccctgttggctgag

SEQ ID NO: 1589704 - DNA, 15 bp, Homo sapiens
tgccctgttggctga

SEQ ID NO: 1589705 - DNA, 15 bp, Homo sapiens
ctgccctgttggctg

SEQ ID NO: 1589706 - DNA, 15 bp, Homo sapiens
gctgccctgttggct

SEQ ID NO: 1589707 - DNA, 15 bp, Homo sapiens
cgctgccctgttggc

SEQ ID NO: 1589708 - DNA, 15 bp, Homo sapiens
ccgctgccctgttgg

SEQ ID NO: 1589709 - DNA, 15 bp, Homo sapiens
gccgctgccctgttg

SEQ ID NO: 1589710 - DNA, 15 bp, Homo sapiens
agccgctgccctgtt

SEQ ID NO: 1589711 - DNA, 15 bp, Homo sapiens
gagccgctgccctgt

SEQ ID NO: 1589712 - DNA, 15 bp, Homo sapiens
cgagccgctgccctg

SEQ ID NO: 1589713 - DNA, 15 bp, Homo sapiens
ccgagccgctgccct

SEQ ID NO: 1589714 - DNA, 15 bp, Homo sapiens
gccgagccgctgccc

SEQ ID NO: 1589715 - DNA, 15 bp, Homo sapiens
ggccgagccgctgcc

SEQ ID NO: 1589716 - DNA, 15 bp, Homo sapiens
gggccgagccgctgc

SEQ ID NO: 1589717 - DNA, 15 bp, Homo sapiens
agggccgagccgctg

SEQ ID NO: 1589718 - DNA, 15 bp, Homo sapiens
cagggccgagccgct

SEQ ID NO: 1589719 - DNA, 15 bp, Homo sapiens
gcagggccgagccgc

SEQ ID NO: 1589720 - DNA, 15 bp, Homo sapiens
agcagggccgagccg

SEQ ID NO: 1589721 - DNA, 15 bp, Homo sapiens
cagcagggccgagcc

SEQ ID NO: 1589722 - DNA, 15 bp, Homo sapiens
gcagcagggccgagc

SEQ ID NO: 1589723 - DNA, 15 bp, Homo sapiens
agcagcagggccgag

SEQ ID NO: 1589724 - DNA, 15 bp, Homo sapiens
cagcagcagggccga

SEQ ID NO: 1589725 - DNA, 15 bp, Homo sapiens
ccagcagcagggccg

SEQ ID NO: 1589726 - DNA, 15 bp, Homo sapiens
gggccagcagcaggg

SEQ ID NO: 1589727 - DNA, 15 bp, Homo sapiens
cgggccagcagcagg

SEQ ID NO: 1589728 - DNA, 15 bp, Homo sapiens
ccgggccagcagcag

SEQ ID NO: 1589729 - DNA, 15 bp, Homo sapiens
accgggccagcagca

SEQ ID NO: 1589730 - DNA, 15 bp, Homo sapiens
caccgggccagcagc

SEQ ID NO: 1589731 - DNA, 15 bp, Homo sapiens
ccaccgggccagcag

SEQ ID NO: 1589732 - DNA, 15 bp, Homo sapiens
cccaccgggccagca

SEQ ID NO: 1589733 - DNA, 15 bp, Homo sapiens
tcccaccgggccagc

SEQ ID NO: 1589734 - DNA, 15 bp, Homo sapiens
ttcccaccgggccag

SEQ ID NO: 1589735 - DNA, 15 bp, Homo sapiens
cttcccaccgggcca

SEQ ID NO: 1589736 - DNA, 15 bp, Homo sapiens
acttcccaccgggcc

SEQ ID NO: 1589737 - DNA, 15 bp, Homo sapiens
tacttcccaccgggc

SEQ ID NO: 1589738 - DNA, 15 bp, Homo sapiens
ctacttcccaccggg

SEQ ID NO: 1589739 - DNA, 15 bp, Homo sapiens
gctacttcccaccgg

SEQ ID NO: 1589740 - DNA, 15 bp, Homo sapiens
ggctacttcccaccg

SEQ ID NO: 1589741 - DNA, 15 bp, Homo sapiens
aggctacttcccacc

SEQ ID NO: 1589742 - DNA, 15 bp, Homo sapiens
caggctacttcccac

SEQ ID NO: 1589743 - DNA, 15 bp, Homo sapiens
ccaggctacttccca

SEQ ID NO: 1589744 - DNA, 15 bp, Homo sapiens
cccaggctacttccc

SEQ ID NO: 1589745 - DNA, 15 bp, Homo sapiens
ccccaggctacttcc

SEQ ID NO: 1589746 - DNA, 15 bp, Homo sapiens
gccccaggctacttc

SEQ ID NO: 1589747 - DNA, 15 bp, Homo sapiens
ggccccaggctactt

SEQ ID NO: 1589748 - DNA, 15 bp, Homo sapiens
gggccccaggctact

SEQ ID NO: 1589749 - DNA, 15 bp, Homo sapiens
ggggccccaggctac

SEQ ID NO: 1589750 - DNA, 15 bp, Homo sapiens
cggggccccaggcta

SEQ ID NO: 1589751 - DNA, 15 bp, Homo sapiens
gcggggccccaggct

SEQ ID NO: 1589752 - DNA, 15 bp, Homo sapiens
cgcggggccccaggc

SEQ ID NO: 1589753 - DNA, 15 bp, Homo sapiens
tcgcggggccccagg

SEQ ID NO: 1589754 - DNA, 15 bp, Homo sapiens
gtcgcggggccccag

SEQ ID NO: 1589755 - DNA, 15 bp, Homo sapiens
agtcgcggggcccca

SEQ ID NO: 1589756 - DNA, 15 bp, Homo sapiens
cagtcgcggggcccc

SEQ ID NO: 1589757 - DNA, 15 bp, Homo sapiens
tcagtcgcggggccc

SEQ ID NO: 1589758 - DNA, 15 bp, Homo sapiens
ttcagtcgcggggcc

SEQ ID NO: 1589759 - DNA, 15 bp, Homo sapiens
tttcagtcgcggggc

SEQ ID NO: 1589760 - DNA, 15 bp, Homo sapiens
atttcagtcgcgggg

SEQ ID NO: 1589761 - DNA, 15 bp, Homo sapiens
gatttcagtcgcggg

SEQ ID NO: 1589762 - DNA, 15 bp, Homo sapiens
ggatttcagtcgcgg

SEQ ID NO: 1589763 - DNA, 15 bp, Homo sapiens
cggatttcagtcgcg

SEQ ID NO: 1589764 - DNA, 15 bp, Homo sapiens
tcggatttcagtcgc

SEQ ID NO: 1589765 - DNA, 15 bp, Homo sapiens
ctcggatttcagtcg

SEQ ID NO: 1589766 - DNA, 15 bp, Homo sapiens
gctcggatttcagtc

SEQ ID NO: 1589767 - DNA, 15 bp, Homo sapiens
ggctcggatttcagt

SEQ ID NO: 1589768 - DNA, 15 bp, Homo sapiens
tggctcggatttcag

SEQ ID NO: 1589769 - DNA, 15 bp, Homo sapiens
ctggctcggatttca

SEQ ID NO: 1589770 - DNA, 15 bp, Homo sapiens
cctggctcggatttc

SEQ ID NO: 1589771 - DNA, 15 bp, Homo sapiens
gcctggctcggattt

SEQ ID NO: 1589772 - DNA, 15 bp, Homo sapiens
ggcctggctcggatt

SEQ ID NO: 1589773 - DNA, 15 bp, Homo sapiens
aggcctggctcggat

SEQ ID NO: 1589774 - DNA, 15 bp, Homo sapiens
caggcctggctcgga

SEQ ID NO: 1589775 - DNA, 15 bp, Homo sapiens
ccaggcctggctcgg

SEQ ID NO: 1589776 - DNA, 15 bp, Homo sapiens
cccaggcctggctcg

SEQ ID NO: 1589777 - DNA, 15 bp, Homo sapiens
gcccaggcctggctc

SEQ ID NO: 1589778 - DNA, 15 bp, Homo sapiens
tgcccaggcctggct

SEQ ID NO: 1589779 - DNA, 15 bp, Homo sapiens
ctgcccaggcctggc

SEQ ID NO: 1589780 - DNA, 15 bp, Homo sapiens
gactgcccaggcctg

SEQ ID NO: 1589781 - DNA, 15 bp, Homo sapiens
agactgcccaggcct

SEQ ID NO: 1589782 - DNA, 15 bp, Homo sapiens
gagactgcccaggcc

SEQ ID NO: 1589783 - DNA, 15 bp, Homo sapiens
ggagactgcccaggc

SEQ ID NO: 1589784 - DNA, 15 bp, Homo sapiens
cggagactgcccagg

SEQ ID NO: 1589785 - DNA, 15 bp, Homo sapiens
gcggagactgcccag

SEQ ID NO: 1589786 - DNA, 15 bp, Homo sapiens
agcggagactgccca

SEQ ID NO: 1589787 - DNA, 15 bp, Homo sapiens
tagcggagactgccc

SEQ ID NO: 1589788 - DNA, 15 bp, Homo sapiens
ctagcggagactgcc

SEQ ID NO: 1589789 - DNA, 15 bp, Homo sapiens
tctagcggagactgc

SEQ ID NO: 1589790 - DNA, 15 bp, Homo sapiens
ttctagcggagactg

SEQ ID NO: 1589791 - DNA, 15 bp, Homo sapiens
tttctagcggagact

SEQ ID NO: 1589792 - DNA, 15 bp, Homo sapiens
gtttctagcggagac

SEQ ID NO: 1589793 - DNA, 15 bp, Homo sapiens
cgtttctagcggaga

SEQ ID NO: 1589794 - DNA, 15 bp, Homo sapiens
gcgtttctagcggag

SEQ ID NO: 1589795 - DNA, 15 bp, Homo sapiens
agcgtttctagcgga

SEQ ID NO: 1589796 - DNA, 15 bp, Homo sapiens
gagcgtttctagcgg

SEQ ID NO: 1589797 - DNA, 15 bp, Homo sapiens
agagcgtttctagcg

SEQ ID NO: 1589798 - DNA, 15 bp, Homo sapiens
cagagcgtttctagc

SEQ ID NO: 1589799 - DNA, 15 bp, Homo sapiens
ccagagcgtttctag

SEQ ID NO: 1589800 - DNA, 15 bp, Homo sapiens
cccagagcgtttcta

SEQ ID NO: 1589801 - DNA, 15 bp, Homo sapiens
gcccagagcgtttct

SEQ ID NO: 1589802 - DNA, 15 bp, Homo sapiens
cgcccagagcgtttc

SEQ ID NO: 1589803 - DNA, 15 bp, Homo sapiens
gcgcccagagcgttt

SEQ ID NO: 1589804 - DNA, 15 bp, Homo sapiens
cgcgcccagagcgtt

SEQ ID NO: 1589805 - DNA, 15 bp, Homo sapiens
gcgcgcccagagcgt

SEQ ID NO: 1589806 - DNA, 15 bp, Homo sapiens
tgcgcgcccagagcg

SEQ ID NO: 1589807 - DNA, 15 bp, Homo sapiens
gtgcgcgcccagagc

SEQ ID NO: 1589808 - DNA, 15 bp, Homo sapiens
agtgcgcgcccagag

SEQ ID NO: 1589809 - DNA, 15 bp, Homo sapiens
gagtgcgcgcccaga

SEQ ID NO: 1589810 - DNA, 15 bp, Homo sapiens
ggagtgcgcgcccag

SEQ ID NO: 1589811 - DNA, 15 bp, Homo sapiens
aggagtgcgcgccca

SEQ ID NO: 1589812 - DNA, 15 bp, Homo sapiens
caggagtgcgcgccc

SEQ ID NO: 1589813 - DNA, 15 bp, Homo sapiens
ccaggagtgcgcgcc

SEQ ID NO: 1589814 - DNA, 15 bp, Homo sapiens
tccaggagtgcgcgc

SEQ ID NO: 1589815 - DNA, 15 bp, Homo sapiens
ctccaggagtgcgcg

SEQ ID NO: 1589816 - DNA, 15 bp, Homo sapiens
tctccaggagtgcgc

SEQ ID NO: 1589817 - DNA, 15 bp, Homo sapiens
gtctccaggagtgcg

SEQ ID NO: 1589818 - DNA, 15 bp, Homo sapiens
cgtctccaggagtgc

SEQ ID NO: 1589819 - DNA, 15 bp, Homo sapiens
gcgtctccaggagtg

SEQ ID NO: 1589820 - DNA, 15 bp, Homo sapiens
cgcgtctccaggagt

SEQ ID NO: 1589821 - DNA, 15 bp, Homo sapiens
ccgcgtctccaggag

SEQ ID NO: 1589822 - DNA, 15 bp, Homo sapiens
tccgcgtctccagga

SEQ ID NO: 1589823 - DNA, 15 bp, Homo sapiens
ctccgcgtctccagg

SEQ ID NO: 1589824 - DNA, 15 bp, Homo sapiens
cctccgcgtctccag

SEQ ID NO: 1589825 - DNA, 15 bp, Homo sapiens
gcctccgcgtctcca

SEQ ID NO: 1589826 - DNA, 15 bp, Homo sapiens
ggcctccgcgtctcc

SEQ ID NO: 1589827 - DNA, 15 bp, Homo sapiens
gggcctccgcgtctc

SEQ ID NO: 1589828 - DNA, 15 bp, Homo sapiens
cgggcctccgcgtct

SEQ ID NO: 1589829 - DNA, 15 bp, Homo sapiens
ccgggcctccgcgtc

SEQ ID NO: 1589830 - DNA, 15 bp, Homo sapiens
cccgggcctccgcgt

SEQ ID NO: 1589831 - DNA, 15 bp, Homo sapiens
gcccgggcctccgcg

SEQ ID NO: 1589832 - DNA, 15 bp, Homo sapiens
cgcccgggcctccgc

SEQ ID NO: 1589833 - DNA, 15 bp, Homo sapiens
gcgcccgggcctccg

SEQ ID NO: 1589834 - DNA, 15 bp, Homo sapiens
agcgcccgggcctcc

SEQ ID NO: 1589835 - DNA, 15 bp, Homo sapiens
gagcgcccgggcctc

SEQ ID NO: 1589836 - DNA, 15 bp, Homo sapiens
ggagcgcccgggcct

SEQ ID NO: 1589837 - DNA, 15 bp, Homo sapiens
tggagcgcccgggcc

SEQ ID NO: 1589838 - DNA, 15 bp, Homo sapiens
ctggagcgcccgggc

SEQ ID NO: 1589839 - DNA, 15 bp, Homo sapiens
tctggagcgcccggg

SEQ ID NO: 1589840 - DNA, 15 bp, Homo sapiens
gtctggagcgcccgg

SEQ ID NO: 1589841 - DNA, 15 bp, Homo sapiens
ggtctggagcgcccg

SEQ ID NO: 1589842 - DNA, 15 bp, Homo sapiens
tggtctggagcgccc

SEQ ID NO: 1589843 - DNA, 15 bp, Homo sapiens
ctggtctggagcgcc

SEQ ID NO: 1589844 - DNA, 15 bp, Homo sapiens
actggtctggagcgc

SEQ ID NO: 1589845 - DNA, 15 bp, Homo sapiens
cactggtctggagcg

SEQ ID NO: 1589846 - DNA, 15 bp, Homo sapiens
acactggtctggagc

SEQ ID NO: 1589847 - DNA, 15 bp, Homo sapiens
gacactggtctggag

SEQ ID NO: 1589848 - DNA, 15 bp, Homo sapiens
ggacactggtctgga

SEQ ID NO: 1589849 - DNA, 15 bp, Homo sapiens
aggacactggtctgg

SEQ ID NO: 1589850 - DNA, 15 bp, Homo sapiens
aaggacactggtctg

SEQ ID NO: 1589851 - DNA, 15 bp, Homo sapiens
caaggacactggtct

SEQ ID NO: 1589852 - DNA, 15 bp, Homo sapiens
acaaggacactggtc

SEQ ID NO: 1589853 - DNA, 15 bp, Homo sapiens
tacaaggacactggt

SEQ ID NO: 1589854 - DNA, 15 bp, Homo sapiens
ctacaaggacactgg

SEQ ID NO: 1589855 - DNA, 15 bp, Homo sapiens
cctacaaggacactg

SEQ ID NO: 1589856 - DNA, 15 bp, Homo sapiens
tcctacaaggacact

SEQ ID NO: 1589857 - DNA, 15 bp, Homo sapiens
ctcctacaaggacac

SEQ ID NO: 1589858 - DNA, 15 bp, Homo sapiens
cctcctacaaggaca

SEQ ID NO: 1589859 - DNA, 15 bp, Homo sapiens
gcctcctacaaggac

SEQ ID NO: 1589860 - DNA, 15 bp, Homo sapiens
agcctcctacaagga

SEQ ID NO: 1589861 - DNA, 15 bp, Homo sapiens
aagcctcctacaagg

SEQ ID NO: 1589862 - DNA, 15 bp, Homo sapiens
gaagcctcctacaag

SEQ ID NO: 1589863 - DNA, 15 bp, Homo sapiens
agaagcctcctacaa

SEQ ID NO: 1589864 - DNA, 15 bp, Homo sapiens
aagaagcctcctaca

SEQ ID NO: 1589865 - DNA, 15 bp, Homo sapiens
gaagaagcctcctac

SEQ ID NO: 1589866 - DNA, 15 bp, Homo sapiens
tgaagaagcctccta

SEQ ID NO: 1589867 - DNA, 15 bp, Homo sapiens
gtgaagaagcctcct

SEQ ID NO: 1589868 - DNA, 15 bp, Homo sapiens
cgtgaagaagcctcc

SEQ ID NO: 1589869 - DNA, 15 bp, Homo sapiens
tcgtgaagaagcctc

SEQ ID NO: 1589870 - DNA, 15 bp, Homo sapiens
ttcgtgaagaagcct

SEQ ID NO: 1589871 - DNA, 15 bp, Homo sapiens
cttcgtgaagaagcc

SEQ ID NO: 1589872 - DNA, 15 bp, Homo sapiens
gcttcgtgaagaagc

SEQ ID NO: 1589873 - DNA, 15 bp, Homo sapiens
agcttcgtgaagaag

SEQ ID NO: 1589874 - DNA, 15 bp, Homo sapiens
aagcttcgtgaagaa

SEQ ID NO: 1589875 - DNA, 15 bp, Homo sapiens
taagcttcgtgaaga

SEQ ID NO: 1589876 - DNA, 15 bp, Homo sapiens
ctaagcttcgtgaag

SEQ ID NO: 1589877 - DNA, 15 bp, Homo sapiens
tctaagcttcgtgaa

SEQ ID NO: 1589878 - DNA, 15 bp, Homo sapiens
ctctaagcttcgtga

SEQ ID NO: 1589879 - DNA, 15 bp, Homo sapiens
actctaagcttcgtg

SEQ ID NO: 1589880 - DNA, 15 bp, Homo sapiens
aactctaagcttcgt

SEQ ID NO: 1589881 - DNA, 15 bp, Homo sapiens
aaactctaagcttcg

SEQ ID NO: 1589882 - DNA, 15 bp, Homo sapiens
caaactctaagcttc

SEQ ID NO: 1589883 - DNA, 15 bp, Homo sapiens
ccaaactctaagctt

SEQ ID NO: 1589884 - DNA, 15 bp, Homo sapiens
gccaaactctaagct

SEQ ID NO: 1589885 - DNA, 15 bp, Homo sapiens
ggccaaactctaagc

SEQ ID NO: 1589886 - DNA, 15 bp, Homo sapiens
aggccaaactctaag

SEQ ID NO: 1589887 - DNA, 15 bp, Homo sapiens
aaggccaaactctaa

SEQ ID NO: 1589888 - DNA, 15 bp, Homo sapiens
aaaggccaaactcta

SEQ ID NO: 1589889 - DNA, 15 bp, Homo sapiens
gaaaggccaaactct

SEQ ID NO: 1589890 - DNA, 15 bp, Homo sapiens
tgaaaggccaaactc

SEQ ID NO: 1589891 - DNA, 15 bp, Homo sapiens
atgaaaggccaaact

SEQ ID NO: 1589892 - DNA, 15 bp, Homo sapiens
tatgaaaggccaaac

SEQ ID NO: 1589893 - DNA, 15 bp, Homo sapiens
ctatgaaaggccaaa

SEQ ID NO: 1589894 - DNA, 15 bp, Homo sapiens
cctatgaaaggccaa

SEQ ID NO: 1589895 - DNA, 15 bp, Homo sapiens
ccctatgaaaggcca

SEQ ID NO: 1589896 - DNA, 15 bp, Homo sapiens
tccctatgaaaggcc

SEQ ID NO: 1589897 - DNA, 15 bp, Homo sapiens
ttccctatgaaaggc

SEQ ID NO: 1589898 - DNA, 15 bp, Homo sapiens
tttccctatgaaagg

SEQ ID NO: 1589899 - DNA, 15 bp, Homo sapiens
ctttccctatgaaag

SEQ ID NO: 1589900 - DNA, 15 bp, Homo sapiens
tctttccctatgaaa

SEQ ID NO: 1589901 - DNA, 15 bp, Homo sapiens
gtctttccctatgaa

SEQ ID NO: 1589902 - DNA, 15 bp, Homo sapiens
agtctttccctatga

SEQ ID NO: 1589903 - DNA, 15 bp, Homo sapiens
aagtctttccctatg

SEQ ID NO: 1589904 - DNA, 15 bp, Homo sapiens
caagtctttccctat

SEQ ID NO: 1589905 - DNA, 15 bp, Homo sapiens
gcaagtctttcccta

SEQ ID NO: 1589906 - DNA, 15 bp, Homo sapiens
agcaagtctttccct

SEQ ID NO: 1589907 - DNA, 15 bp, Homo sapiens
gagcaagtctttccc

SEQ ID NO: 1589908 - DNA, 15 bp, Homo sapiens
cgagcaagtctttcc

SEQ ID NO: 1589909 - DNA, 15 bp, Homo sapiens
ccgagcaagtctttc

SEQ ID NO: 1589910 - DNA, 15 bp, Homo sapiens
cccgagcaagtcttt

SEQ ID NO: 1589911 - DNA, 15 bp, Homo sapiens
tcccgagcaagtctt

SEQ ID NO: 1589912 - DNA, 15 bp, Homo sapiens
ctcccgagcaagtct

SEQ ID NO: 1589913 - DNA, 15 bp, Homo sapiens
gctcccgagcaagtc

SEQ ID NO: 1589914 - DNA, 15 bp, Homo sapiens
tgctcccgagcaagt

SEQ ID NO: 1589915 - DNA, 15 bp, Homo sapiens
ttgctcccgagcaag

SEQ ID NO: 1589916 - DNA, 15 bp, Homo sapiens
cttgctcccgagcaa

SEQ ID NO: 1589917 - DNA, 15 bp, Homo sapiens
acttgctcccgagca

SEQ ID NO: 1589918 - DNA, 15 bp, Homo sapiens
gacttgctcccgagc

SEQ ID NO: 1589919 - DNA, 15 bp, Homo sapiens
agacttgctcccgag

SEQ ID NO: 1589920 - DNA, 15 bp, Homo sapiens
tagacttgctcccga

SEQ ID NO: 1589921 - DNA, 15 bp, Homo sapiens
ttagacttgctcccg

SEQ ID NO: 1589922 - DNA, 15 bp, Homo sapiens
cttagacttgctccc

SEQ ID NO: 1589923 - DNA, 15 bp, Homo sapiens
ccttagacttgctcc

SEQ ID NO: 1589924 - DNA, 15 bp, Homo sapiens
cccttagacttgctc

SEQ ID NO: 1589925 - DNA, 15 bp, Homo sapiens
tcccttagacttgct

SEQ ID NO: 1589926 - DNA, 15 bp, Homo sapiens
atcccttagacttgc

SEQ ID NO: 1589927 - DNA, 15 bp, Homo sapiens
aatcccttagacttg

SEQ ID NO: 1589928 - DNA, 15 bp, Homo sapiens
aaatcccttagactt

SEQ ID NO: 1589929 - DNA, 15 bp, Homo sapiens
aaaatcccttagact

SEQ ID NO: 1589930 - DNA, 15 bp, Homo sapiens
taaaatcccttagac

SEQ ID NO: 1589931 - DNA, 15 bp, Homo sapiens
ttaaaatcccttaga

SEQ ID NO: 1589932 - DNA, 15 bp, Homo sapiens
cttaaaatcccttag

SEQ ID NO: 1589933 - DNA, 15 bp, Homo sapiens
ccttaaaatccctta

SEQ ID NO: 1589934 - DNA, 15 bp, Homo sapiens
cccttaaaatccctt

SEQ ID NO: 1589935 - DNA, 15 bp, Homo sapiens
tcccttaaaatccct

SEQ ID NO: 1589936 - DNA, 15 bp, Homo sapiens
atcccttaaaatccc

SEQ ID NO: 1589937 - DNA, 15 bp, Homo sapiens
aatcccttaaaatcc

SEQ ID NO: 1589938 - DNA, 15 bp, Homo sapiens
aaatcccttaaaatc

SEQ ID NO: 1589939 - DNA, 15 bp, Homo sapiens
aaaatcccttaaaat

SEQ ID NO: 1589940 - DNA, 15 bp, Homo sapiens
taaaatcccttaaaa

SEQ ID NO: 1589941 - DNA, 15 bp, Homo sapiens
ttaaaatcccttaaa

SEQ ID NO: 1589942 - DNA, 15 bp, Homo sapiens
tttaaaatcccttaa

SEQ ID NO: 1589943 - DNA, 15 bp, Homo sapiens
atttaaaatccctta

SEQ ID NO: 1589944 - DNA, 15 bp, Homo sapiens
gatttaaaatccctt

SEQ ID NO: 1589945 - DNA, 15 bp, Homo sapiens
agatttaaaatccct

SEQ ID NO: 1589946 - DNA, 15 bp, Homo sapiens
aagatttaaaatccc

SEQ ID NO: 1589947 - DNA, 15 bp, Homo sapiens
gaagatttaaaatcc

SEQ ID NO: 1589948 - DNA, 15 bp, Homo sapiens
ggaagatttaaaatc

SEQ ID NO: 1589949 - DNA, 15 bp, Homo sapiens
aggaagatttaaaat

SEQ ID NO: 1589950 - DNA, 15 bp, Homo sapiens
caggaagatttaaaa

SEQ ID NO: 1589951 - DNA, 15 bp, Homo sapiens
ccaggaagatttaaa

SEQ ID NO: 1589952 - DNA, 15 bp, Homo sapiens
cccaggaagatttaa

SEQ ID NO: 1589953 - DNA, 15 bp, Homo sapiens
gcccaggaagattta

SEQ ID NO: 1589954 - DNA, 15 bp, Homo sapiens
ggcccaggaagattt

SEQ ID NO: 1589955 - DNA, 15 bp, Homo sapiens
tggcccaggaagatt

SEQ ID NO: 1589956 - DNA, 15 bp, Homo sapiens
ctggcccaggaagat

SEQ ID NO: 1589957 - DNA, 15 bp, Homo sapiens
cctggcccaggaaga

SEQ ID NO: 1589958 - DNA, 15 bp, Homo sapiens
ccctggcccaggaag

SEQ ID NO: 1589959 - DNA, 15 bp, Homo sapiens
gccctggcccaggaa

SEQ ID NO: 1589960 - DNA, 15 bp, Homo sapiens
agccctggcccagga

SEQ ID NO: 1589961 - DNA, 15 bp, Homo sapiens
tagccctggcccagg

SEQ ID NO: 1589962 - DNA, 15 bp, Homo sapiens
ctagccctggcccag

SEQ ID NO: 1589963 - DNA, 15 bp, Homo sapiens
cctagccctggccca

SEQ ID NO: 1589964 - DNA, 15 bp, Homo sapiens
ccctagccctggccc

SEQ ID NO: 1589965 - DNA, 15 bp, Homo sapiens
tccctagccctggcc

SEQ ID NO: 1589966 - DNA, 15 bp, Homo sapiens
ctccctagccctggc

SEQ ID NO: 1589967 - DNA, 15 bp, Homo sapiens
gctccctagccctgg

SEQ ID NO: 1589968 - DNA, 15 bp, Homo sapiens
agctccctagccctg

SEQ ID NO: 1589969 - DNA, 15 bp, Homo sapiens
gagctccctagccct

SEQ ID NO: 1589970 - DNA, 15 bp, Homo sapiens
agagctccctagccc

SEQ ID NO: 1589971 - DNA, 15 bp, Homo sapiens
tagagctccctagcc

SEQ ID NO: 1589972 - DNA, 15 bp, Homo sapiens
ctagagctccctagc

SEQ ID NO: 1589973 - DNA, 15 bp, Homo sapiens
actagagctccctag

SEQ ID NO: 1589974 - DNA, 15 bp, Homo sapiens
cactagagctcccta

SEQ ID NO: 1589975 - DNA, 15 bp, Homo sapiens
tcactagagctccct

SEQ ID NO: 1589976 - DNA, 15 bp, Homo sapiens
gtcactagagctccc

SEQ ID NO: 1589977 - DNA, 15 bp, Homo sapiens
tgtcactagagctcc

SEQ ID NO: 1589978 - DNA, 15 bp, Homo sapiens
ctgtcactagagctc

SEQ ID NO: 1589979 - DNA, 15 bp, Homo sapiens
actgtcactagagct

SEQ ID NO: 1589980 - DNA, 15 bp, Homo sapiens
cactgtcactagagc

SEQ ID NO: 1589981 - DNA, 15 bp, Homo sapiens
acactgtcactagag

SEQ ID NO: 1589982 - DNA, 15 bp, Homo sapiens
gacactgtcactaga

SEQ ID NO: 1589983 - DNA, 15 bp, Homo sapiens
agacactgtcactag

SEQ ID NO: 1589984 - DNA, 15 bp, Homo sapiens
aagacactgtcacta

SEQ ID NO: 1589985 - DNA, 15 bp, Homo sapiens
caagacactgtcact

SEQ ID NO: 1589986 - DNA, 15 bp, Homo sapiens
ccaagacactgtcac

SEQ ID NO: 1589987 - DNA, 15 bp, Homo sapiens
accaagacactgtca

SEQ ID NO: 1589988 - DNA, 15 bp, Homo sapiens
gaccaagacactgtc

SEQ ID NO: 1589989 - DNA, 15 bp, Homo sapiens
agaccaagacactgt

SEQ ID NO: 1589990 - DNA, 15 bp, Homo sapiens
cagaccaagacactg

SEQ ID NO: 1589991 - DNA, 15 bp, Homo sapiens
ccagaccaagacact

SEQ ID NO: 1589992 - DNA, 15 bp, Homo sapiens
tccagaccaagacac

SEQ ID NO: 1589993 - DNA, 15 bp, Homo sapiens
ttccagaccaagaca

SEQ ID NO: 1589994 - DNA, 15 bp, Homo sapiens
attccagaccaagac

SEQ ID NO: 1589995 - DNA, 15 bp, Homo sapiens
gattccagaccaaga

SEQ ID NO: 1589996 - DNA, 15 bp, Homo sapiens
ggattccagaccaag

SEQ ID NO: 1589997 - DNA, 15 bp, Homo sapiens
tggattccagaccaa

SEQ ID NO: 1589998 - DNA, 15 bp, Homo sapiens
ttggattccagacca

SEQ ID NO: 1589999 - DNA, 15 bp, Homo sapiens
gttggattccagacc

SEQ ID NO: 1590000 - DNA, 15 bp, Homo sapiens
agttggattccagac

SEQ ID NO: 1590001 - DNA, 15 bp, Homo sapiens
gagttggattccaga

SEQ ID NO: 1590002 - DNA, 15 bp, Homo sapiens
agagttggattccag

SEQ ID NO: 1590003 - DNA, 15 bp, Homo sapiens
gagagttggattcca

SEQ ID NO: 1590004 - DNA, 15 bp, Homo sapiens
ggagagttggattcc

SEQ ID NO: 1590005 - DNA, 15 bp, Homo sapiens
tggagagttggattc

SEQ ID NO: 1590006 - DNA, 15 bp, Homo sapiens
ttggagagttggatt

SEQ ID NO: 1590007 - DNA, 15 bp, Homo sapiens
attggagagttggat

SEQ ID NO: 1590008 - DNA, 15 bp, Homo sapiens
aattggagagttgga

SEQ ID NO: 1590009 - DNA, 15 bp, Homo sapiens
aaattggagagttgg

SEQ ID NO: 1590010 - DNA, 15 bp, Homo sapiens
aaaattggagagttg

SEQ ID NO: 1590011 - DNA, 15 bp, Homo sapiens
caaaattggagagtt

SEQ ID NO: 1590012 - DNA, 15 bp, Homo sapiens
tcaaaattggagagt

SEQ ID NO: 1590013 - DNA, 15 bp, Homo sapiens
ctcaaaattggagag

SEQ ID NO: 1590014 - DNA, 15 bp, Homo sapiens
cctcaaaattggaga

SEQ ID NO: 1590015 - DNA, 15 bp, Homo sapiens
gcctcaaaattggag

SEQ ID NO: 1590016 - DNA, 15 bp, Homo sapiens
ggcctcaaaattgga

SEQ ID NO: 1590017 - DNA, 15 bp, Homo sapiens
cggcctcaaaattgg

SEQ ID NO: 1590018 - DNA, 15 bp, Homo sapiens
gcggcctcaaaattg

SEQ ID NO: 1590019 - DNA, 15 bp, Homo sapiens
tgcggcctcaaaatt

SEQ ID NO: 1590020 - DNA, 15 bp, Homo sapiens
ctgcggcctcaaaat

SEQ ID NO: 1590021 - DNA, 15 bp, Homo sapiens
cctgcggcctcaaaa

SEQ ID NO: 1590022 - DNA, 15 bp, Homo sapiens
ccctgcggcctcaaa

SEQ ID NO: 1590023 - DNA, 15 bp, Homo sapiens
tccctgcggcctcaa

SEQ ID NO: 1590024 - DNA, 15 bp, Homo sapiens
ctccctgcggcctca

SEQ ID NO: 1590025 - DNA, 15 bp, Homo sapiens
cctccctgcggcctc

SEQ ID NO: 1590026 - DNA, 15 bp, Homo sapiens
tcctccctgcggcct

SEQ ID NO: 1590027 - DNA, 15 bp, Homo sapiens
ttcctccctgcggcc

SEQ ID NO: 1590028 - DNA, 15 bp, Homo sapiens
attcctccctgcggc

SEQ ID NO: 1590029 - DNA, 15 bp, Homo sapiens
aattcctccctgcgg

SEQ ID NO: 1590030 - DNA, 15 bp, Homo sapiens
gaattcctccctgcg

SEQ ID NO: 1590031 - DNA, 15 bp, Homo sapiens
agaattcctccctgc

SEQ ID NO: 1590032 - DNA, 15 bp, Homo sapiens
cagaattcctccctg

SEQ ID NO: 1590033 - DNA, 15 bp, Homo sapiens
tcagaattcctccct

SEQ ID NO: 1590034 - DNA, 15 bp, Homo sapiens
ctcagaattcctccc

SEQ ID NO: 1590035 - DNA, 15 bp, Homo sapiens
tctcagaattcctcc

SEQ ID NO: 1590036 - DNA, 15 bp, Homo sapiens
gtctcagaattcctc

SEQ ID NO: 1590037 - DNA, 15 bp, Homo sapiens
agtctcagaattcct

SEQ ID NO: 1590038 - DNA, 15 bp, Homo sapiens
aagtctcagaattcc

SEQ ID NO: 1590039 - DNA, 15 bp, Homo sapiens
aaagtctcagaattc

SEQ ID NO: 1590040 - DNA, 15 bp, Homo sapiens
taaagtctcagaatt

SEQ ID NO: 1590041 - DNA, 15 bp, Homo sapiens
ctaaagtctcagaat

SEQ ID NO: 1590042 - DNA, 15 bp, Homo sapiens
tctaaagtctcagaa

SEQ ID NO: 1590043 - DNA, 15 bp, Homo sapiens
ctctaaagtctcaga

SEQ ID NO: 1590044 - DNA, 15 bp, Homo sapiens
cctctaaagtctcag

SEQ ID NO: 1590045 - DNA, 15 bp, Homo sapiens
gcctctaaagtctca

SEQ ID NO: 1590046 - DNA, 15 bp, Homo sapiens
ggcctctaaagtctc

SEQ ID NO: 1590047 - DNA, 15 bp, Homo sapiens
cggcctctaaagtct

SEQ ID NO: 1590048 - DNA, 15 bp, Homo sapiens
gcggcctctaaagtc

SEQ ID NO: 1590049 - DNA, 15 bp, Homo sapiens
tgcggcctctaaagt

SEQ ID NO: 1590050 - DNA, 15 bp, Homo sapiens
gtgcggcctctaaag

SEQ ID NO: 1590051 - DNA, 15 bp, Homo sapiens
tgtgcggcctctaaa

SEQ ID NO: 1590052 - DNA, 15 bp, Homo sapiens
ctgtgcggcctctaa

SEQ ID NO: 1590053 - DNA, 15 bp, Homo sapiens
gctgtgcggcctcta

SEQ ID NO: 1590054 - DNA, 15 bp, Homo sapiens
ggctgtgcggcctct

SEQ ID NO: 1590055 - DNA, 15 bp, Homo sapiens
aggctgtgcggcctc

SEQ ID NO: 1590056 - DNA, 15 bp, Homo sapiens
aaggctgtgcggcct

SEQ ID NO: 1590057 - DNA, 15 bp, Homo sapiens
gaaggctgtgcggcc

SEQ ID NO: 1590058 - DNA, 15 bp, Homo sapiens
tgaaggctgtgcggc

SEQ ID NO: 1590059 - DNA, 15 bp, Homo sapiens
ctgaaggctgtgcgg

SEQ ID NO: 1590060 - DNA, 15 bp, Homo sapiens
gctgaaggctgtgcg

SEQ ID NO: 1590061 - DNA, 15 bp, Homo sapiens
cgctgaaggctgtgc

SEQ ID NO: 1590062 - DNA, 15 bp, Homo sapiens
gcgctgaaggctgtg

SEQ ID NO: 1590063 - DNA, 15 bp, Homo sapiens
cgcgctgaaggctgt

SEQ ID NO: 1590064 - DNA, 15 bp, Homo sapiens
gcgcgctgaaggctg

SEQ ID NO: 1590065 - DNA, 15 bp, Homo sapiens
agcgcgctgaaggct

SEQ ID NO: 1590066 - DNA, 15 bp, Homo sapiens
gagcgcgctgaaggc

SEQ ID NO: 1590067 - DNA, 15 bp, Homo sapiens
tgagcgcgctgaagg

SEQ ID NO: 1590068 - DNA, 15 bp, Homo sapiens
gtgagcgcgctgaag

SEQ ID NO: 1590069 - DNA, 15 bp, Homo sapiens
ggtgagcgcgctgaa

SEQ ID NO: 1590070 - DNA, 15 bp, Homo sapiens
cggtgagcgcgctga

SEQ ID NO: 1590071 - DNA, 15 bp, Homo sapiens
gcggtgagcgcgctg

SEQ ID NO: 1590072 - DNA, 15 bp, Homo sapiens
cgcggtgagcgcgct

SEQ ID NO: 1590073 - DNA, 15 bp, Homo sapiens
acgcggtgagcgcgc

SEQ ID NO: 1590074 - DNA, 15 bp, Homo sapiens
gacgcggtgagcgcg

SEQ ID NO: 1590075 - DNA, 15 bp, Homo sapiens
ggacgcggtgagcgc

SEQ ID NO: 1590076 - DNA, 15 bp, Homo sapiens
tggacgcggtgagcg

SEQ ID NO: 1590077 - DNA, 15 bp, Homo sapiens
ctggacgcggtgagc

SEQ ID NO: 1590078 - DNA, 15 bp, Homo sapiens
cctggacgcggtgag

SEQ ID NO: 1590079 - DNA, 15 bp, Homo sapiens
gcctggacgcggtga

SEQ ID NO: 1590080 - DNA, 15 bp, Homo sapiens
cgcctggacgcggtg

SEQ ID NO: 1590081 - DNA, 15 bp, Homo sapiens
acgcctggacgcggt

SEQ ID NO: 1590082 - DNA, 15 bp, Homo sapiens
gacgcctggacgcgg

SEQ ID NO: 1590083 - DNA, 15 bp, Homo sapiens
tgacgcctggacgcg

SEQ ID NO: 1590084 - DNA, 15 bp, Homo sapiens
ctgacgcctggacgc

SEQ ID NO: 1590085 - DNA, 15 bp, Homo sapiens
actgacgcctggacg

SEQ ID NO: 1590086 - DNA, 15 bp, Homo sapiens
cactgacgcctggac

SEQ ID NO: 1590087 - DNA, 15 bp, Homo sapiens
tcactgacgcctgga

SEQ ID NO: 1590088 - DNA, 15 bp, Homo sapiens
ctcactgacgcctgg

SEQ ID NO: 1590089 - DNA, 15 bp, Homo sapiens
cctcactgacgcctg

SEQ ID NO: 1590090 - DNA, 15 bp, Homo sapiens
ccctcactgacgcct

SEQ ID NO: 1590091 - DNA, 15 bp, Homo sapiens
cccctcactgacgcc

SEQ ID NO: 1590092 - DNA, 15 bp, Homo sapiens
gcccctcactgacgc

SEQ ID NO: 1590093 - DNA, 15 bp, Homo sapiens
agcccctcactgacg

SEQ ID NO: 1590094 - DNA, 15 bp, Homo sapiens
tagcccctcactgac

SEQ ID NO: 1590095 - DNA, 15 bp, Homo sapiens
atagcccctcactga

SEQ ID NO: 1590096 - DNA, 15 bp, Homo sapiens
gatagcccctcactg

SEQ ID NO: 1590097 - DNA, 15 bp, Homo sapiens
agatagcccctcact

SEQ ID NO: 1590098 - DNA, 15 bp, Homo sapiens
gagatagcccctcac

SEQ ID NO: 1590099 - DNA, 15 bp, Homo sapiens
cgagatagcccctca

SEQ ID NO: 1590100 - DNA, 15 bp, Homo sapiens
tcgagatagcccctc

SEQ ID NO: 1590101 - DNA, 15 bp, Homo sapiens
ctcgagatagcccct

SEQ ID NO: 1590102 - DNA, 15 bp, Homo sapiens
cctcgagatagcccc

SEQ ID NO: 1590103 - DNA, 15 bp, Homo sapiens
gcctcgagatagccc

SEQ ID NO: 1590104 - DNA, 15 bp, Homo sapiens
cgcctcgagatagcc

SEQ ID NO: 1590105 - DNA, 15 bp, Homo sapiens
gcgcctcgagatagc

SEQ ID NO: 1590106 - DNA, 15 bp, Homo sapiens
cgcgcctcgagatag

SEQ ID NO: 1590107 - DNA, 15 bp, Homo sapiens
tcgcgcctcgagata

SEQ ID NO: 1590108 - DNA, 15 bp, Homo sapiens
ctcgcgcctcgagat

SEQ ID NO: 1590109 - DNA, 15 bp, Homo sapiens
actcgcgcctcgaga

SEQ ID NO: 1590110 - DNA, 15 bp, Homo sapiens
cactcgcgcctcgag

SEQ ID NO: 1590111 - DNA, 15 bp, Homo sapiens
gcactcgcgcctcga

SEQ ID NO: 1590112 - DNA, 15 bp, Homo sapiens
tgcactcgcgcctcg

SEQ ID NO: 1590113 - DNA, 15 bp, Homo sapiens
gtgcactcgcgcctc

SEQ ID NO: 1590114 - DNA, 15 bp, Homo sapiens
tgtgcactcgcgcct

SEQ ID NO: 1590115 - DNA, 15 bp, Homo sapiens
ttgtgcactcgcgcc

SEQ ID NO: 1590116 - DNA, 15 bp, Homo sapiens
tttgtgcactcgcgc

SEQ ID NO: 1590117 - DNA, 15 bp, Homo sapiens
ttttgtgcactcgcg

SEQ ID NO: 1590118 - DNA, 15 bp, Homo sapiens
cttttgtgcactcgc

SEQ ID NO: 1590119 - DNA, 15 bp, Homo sapiens
ccttttgtgcactcg

SEQ ID NO: 1590120 - DNA, 15 bp, Homo sapiens
accttttgtgcactc

SEQ ID NO: 1590121 - DNA, 15 bp, Homo sapiens
taccttttgtgcact

SEQ ID NO: 1590122 - DNA, 15 bp, Homo sapiens
ctaccttttgtgcac

SEQ ID NO: 1590123 - DNA, 15 bp, Homo sapiens
gctaccttttgtgca

SEQ ID NO: 1590124 - DNA, 15 bp, Homo sapiens
cgctaccttttgtgc

SEQ ID NO: 1590125 - DNA, 15 bp, Homo sapiens
gcgctaccttttgtg

SEQ ID NO: 1590126 - DNA, 15 bp, Homo sapiens
cgcgctaccttttgt

SEQ ID NO: 1590127 - DNA, 15 bp, Homo sapiens
tcgcgctaccttttg

SEQ ID NO: 1590128 - DNA, 15 bp, Homo sapiens
ctcgcgctacctttt

SEQ ID NO: 1590129 - DNA, 15 bp, Homo sapiens
actcgcgctaccttt

SEQ ID NO: 1590130 - DNA, 15 bp, Homo sapiens
gactcgcgctacctt

SEQ ID NO: 1590131 - DNA, 15 bp, Homo sapiens
agactcgcgctacct

SEQ ID NO: 1590132 - DNA, 15 bp, Homo sapiens
gagactcgcgctacc

SEQ ID NO: 1590133 - DNA, 15 bp, Homo sapiens
agagactcgcgctac

SEQ ID NO: 1590134 - DNA, 15 bp, Homo sapiens
aagagactcgcgcta

SEQ ID NO: 1590135 - DNA, 15 bp, Homo sapiens
gaagagactcgcgct

SEQ ID NO: 1590136 - DNA, 15 bp, Homo sapiens
agaagagactcgcgc

SEQ ID NO: 1590137 - DNA, 15 bp, Homo sapiens
gagaagagactcgcg

SEQ ID NO: 1590138 - DNA, 15 bp, Homo sapiens
tgagaagagactcgc

SEQ ID NO: 1590139 - DNA, 15 bp, Homo sapiens
ctgagaagagactcg

SEQ ID NO: 1590140 - DNA, 15 bp, Homo sapiens
cctgagaagagactc

SEQ ID NO: 1590141 - DNA, 15 bp, Homo sapiens
gcctgagaagagact

SEQ ID NO: 1590142 - DNA, 15 bp, Homo sapiens
cgcctgagaagagac

SEQ ID NO: 1590143 - DNA, 15 bp, Homo sapiens
tcgcctgagaagaga

SEQ ID NO: 1590144 - DNA, 15 bp, Homo sapiens
atcgcctgagaagag

SEQ ID NO: 1590145 - DNA, 15 bp, Homo sapiens
gatcgcctgagaaga

SEQ ID NO: 1590146 - DNA, 15 bp, Homo sapiens
ggatcgcctgagaag

SEQ ID NO: 1590147 - DNA, 15 bp, Homo sapiens
tggatcgcctgagaa

SEQ ID NO: 1590148 - DNA, 15 bp, Homo sapiens
ctggatcgcctgaga

SEQ ID NO: 1590149 - DNA, 15 bp, Homo sapiens
tctggatcgcctgag

SEQ ID NO: 1590150 - DNA, 15 bp, Homo sapiens
atctggatcgcctga

SEQ ID NO: 1590151 - DNA, 15 bp, Homo sapiens
tatctggatcgcctg

SEQ ID NO: 1590152 - DNA, 15 bp, Homo sapiens
ttatctggatcgcct

SEQ ID NO: 1590153 - DNA, 15 bp, Homo sapiens
cttatctggatcgcc

SEQ ID NO: 1590154 - DNA, 15 bp, Homo sapiens
tcttatctggatcgc

SEQ ID NO: 1590155 - DNA, 15 bp, Homo sapiens
ctcttatctggatcg

SEQ ID NO: 1590156 - DNA, 15 bp, Homo sapiens
cctcttatctggatc

SEQ ID NO: 1590157 - DNA, 15 bp, Homo sapiens
tcctcttatctggat

SEQ ID NO: 1590158 - DNA, 15 bp, Homo sapiens
ttcctcttatctgga

SEQ ID NO: 1590159 - DNA, 15 bp, Homo sapiens
tttcctcttatctgg

SEQ ID NO: 1590160 - DNA, 15 bp, Homo sapiens
atttcctcttatctg

SEQ ID NO: 1590161 - DNA, 15 bp, Homo sapiens
catttcctcttatct

SEQ ID NO: 1590162 - DNA, 15 bp, Homo sapiens
tcatttcctcttatc

SEQ ID NO: 1590163 - DNA, 15 bp, Homo sapiens
ctcatttcctcttat

SEQ ID NO: 1590164 - DNA, 15 bp, Homo sapiens
tctcatttcctctta

SEQ ID NO: 1590165 - DNA, 15 bp, Homo sapiens
ctctcatttcctctt

SEQ ID NO: 1590166 - DNA, 15 bp, Homo sapiens
gctctcatttcctct

SEQ ID NO: 1590167 - DNA, 15 bp, Homo sapiens
ggctctcatttcctc

SEQ ID NO: 1590168 - DNA, 15 bp, Homo sapiens
cggctctcatttcct

SEQ ID NO: 1590169 - DNA, 15 bp, Homo sapiens
ccggctctcatttcc

SEQ ID NO: 1590170 - DNA, 15 bp, Homo sapiens
cccggctctcatttc

SEQ ID NO: 1590171 - DNA, 15 bp, Homo sapiens
acccggctctcattt

SEQ ID NO: 1590172 - DNA, 15 bp, Homo sapiens
aacccggctctcatt

SEQ ID NO: 1590173 - DNA, 15 bp, Homo sapiens
aaacccggctctcat

SEQ ID NO: 1590174 - DNA, 15 bp, Homo sapiens
aaaacccggctctca

SEQ ID NO: 1590175 - DNA, 15 bp, Homo sapiens
gaaaacccggctctc

SEQ ID NO: 1590176 - DNA, 15 bp, Homo sapiens
agaaaacccggctct

SEQ ID NO: 1590177 - DNA, 15 bp, Homo sapiens
cagaaaacccggctc

SEQ ID NO: 1590178 - DNA, 15 bp, Homo sapiens
tcagaaaacccggct

SEQ ID NO: 1590179 - DNA, 15 bp, Homo sapiens
gtcagaaaacccggc

SEQ ID NO: 1590180 - DNA, 15 bp, Homo sapiens
agtcagaaaacccgg

SEQ ID NO: 1590181 - DNA, 15 bp, Homo sapiens
aagtcagaaaacccg

SEQ ID NO: 1590182 - DNA, 15 bp, Homo sapiens
gaagtcagaaaaccc

SEQ ID NO: 1590183 - DNA, 15 bp, Homo sapiens
ggaagtcagaaaacc

SEQ ID NO: 1590184 - DNA, 15 bp, Homo sapiens
tggaagtcagaaaac

SEQ ID NO: 1590185 - DNA, 15 bp, Homo sapiens
ttggaagtcagaaaa

SEQ ID NO: 1590186 - DNA, 15 bp, Homo sapiens
gttggaagtcagaaa

SEQ ID NO: 1590187 - DNA, 15 bp, Homo sapiens
agttggaagtcagaa

SEQ ID NO: 1590188 - DNA, 15 bp, Homo sapiens
gagttggaagtcaga

SEQ ID NO: 1590189 - DNA, 15 bp, Homo sapiens
tgagttggaagtcag

SEQ ID NO: 1590190 - DNA, 15 bp, Homo sapiens
atgagttggaagtca

SEQ ID NO: 1590191 - DNA, 15 bp, Homo sapiens
aatgagttggaagtc

SEQ ID NO: 1590192 - DNA, 15 bp, Homo sapiens
taatgagttggaagt

SEQ ID NO: 1590193 - DNA, 15 bp, Homo sapiens
ctaatgagttggaag

SEQ ID NO: 1590194 - DNA, 15 bp, Homo sapiens
cctaatgagttggaa

SEQ ID NO: 1590195 - DNA, 15 bp, Homo sapiens
ccctaatgagttgga

SEQ ID NO: 1590196 - DNA, 15 bp, Homo sapiens
tccctaatgagttgg

SEQ ID NO: 1590197 - DNA, 15 bp, Homo sapiens
gtccctaatgagttg

SEQ ID NO: 1590198 - DNA, 15 bp, Homo sapiens
ggtccctaatgagtt

SEQ ID NO: 1590199 - DNA, 15 bp, Homo sapiens
tggtccctaatgagt

SEQ ID NO: 1590200 - DNA, 15 bp, Homo sapiens
ctggtccctaatgag

SEQ ID NO: 1590201 - DNA, 15 bp, Homo sapiens
cctggtccctaatga

SEQ ID NO: 1590202 - DNA, 15 bp, Homo sapiens
acctggtccctaatg

SEQ ID NO: 1590203 - DNA, 15 bp, Homo sapiens
tacctggtccctaat

SEQ ID NO: 1590204 - DNA, 15 bp, Homo sapiens
ttacctggtccctaa

SEQ ID NO: 1590205 - DNA, 15 bp, Homo sapiens
cttacctggtcccta

SEQ ID NO: 1590206 - DNA, 15 bp, Homo sapiens
ccttacctggtccct

SEQ ID NO: 1590207 - DNA, 15 bp, Homo sapiens
accttacctggtccc

SEQ ID NO: 1590208 - DNA, 15 bp, Homo sapiens
gaccttacctggtcc

SEQ ID NO: 1590209 - DNA, 15 bp, Homo sapiens
tgaccttacctggtc

SEQ ID NO: 1590210 - DNA, 15 bp, Homo sapiens
ttgaccttacctggt

SEQ ID NO: 1590211 - DNA, 15 bp, Homo sapiens
attgaccttacctgg

SEQ ID NO: 1590212 - DNA, 15 bp, Homo sapiens
cattgaccttacctg

SEQ ID NO: 1590213 - DNA, 15 bp, Homo sapiens
gcattgaccttacct

SEQ ID NO: 1590214 - DNA, 15 bp, Homo sapiens
agcattgaccttacc

SEQ ID NO: 1590215 - DNA, 15 bp, Homo sapiens
aagcattgaccttac

SEQ ID NO: 1590216 - DNA, 15 bp, Homo sapiens
aaagcattgacctta

SEQ ID NO: 1590217 - DNA, 15 bp, Homo sapiens
gaaagcattgacctt

SEQ ID NO: 1590218 - DNA, 15 bp, Homo sapiens
agaaagcattgacct

SEQ ID NO: 1590219 - DNA, 15 bp, Homo sapiens
gagaaagcattgacc

SEQ ID NO: 1590220 - DNA, 15 bp, Homo sapiens
agagaaagcattgac

SEQ ID NO: 1590221 - DNA, 15 bp, Homo sapiens
tagagaaagcattga

SEQ ID NO: 1590222 - DNA, 15 bp, Homo sapiens
atagagaaagcattg

SEQ ID NO: 1590223 - DNA, 15 bp, Homo sapiens
taatagagaaagcat

SEQ ID NO: 1590224 - DNA, 15 bp, Homo sapiens
ataatagagaaagca

SEQ ID NO: 1590225 - DNA, 15 bp, Homo sapiens
cataatagagaaagc

SEQ ID NO: 1590226 - DNA, 15 bp, Homo sapiens
acataatagagaaag

SEQ ID NO: 1590227 - DNA, 15 bp, Homo sapiens
gacataatagagaaa

SEQ ID NO: 1590228 - DNA, 15 bp, Homo sapiens
agacataatagagaa

SEQ ID NO: 1590229 - DNA, 15 bp, Homo sapiens
aagacataatagaga

SEQ ID NO: 1590230 - DNA, 15 bp, Homo sapiens
aaagacataatagag

SEQ ID NO: 1590231 - DNA, 15 bp, Homo sapiens
taaagacataataga

SEQ ID NO: 1590232 - DNA, 15 bp, Homo sapiens
ataaagacataatag

SEQ ID NO: 1590233 - DNA, 15 bp, Homo sapiens
gataaagacataata

SEQ ID NO: 1590234 - DNA, 15 bp, Homo sapiens
agataaagacataat

SEQ ID NO: 1590235 - DNA, 15 bp, Homo sapiens
aagataaagacataa

SEQ ID NO: 1590236 - DNA, 15 bp, Homo sapiens
taagataaagacata

SEQ ID NO: 1590237 - DNA, 15 bp, Homo sapiens
ttaagataaagacat

SEQ ID NO: 1590238 - DNA, 15 bp, Homo sapiens
tttaagataaagaca

SEQ ID NO: 1590239 - DNA, 15 bp, Homo sapiens
ttttaagataaagac

SEQ ID NO: 1590240 - DNA, 15 bp, Homo sapiens
cttttaagataaaga

SEQ ID NO: 1590241 - DNA, 15 bp, Homo sapiens
gcttttaagataaag

SEQ ID NO: 1590242 - DNA, 15 bp, Homo sapiens
cgcttttaagataaa

SEQ ID NO: 1590243 - DNA, 15 bp, Homo sapiens
ccgcttttaagataa

SEQ ID NO: 1590244 - DNA, 15 bp, Homo sapiens
cccgcttttaagata

SEQ ID NO: 1590245 - DNA, 15 bp, Homo sapiens
acccgcttttaagat

SEQ ID NO: 1590246 - DNA, 15 bp, Homo sapiens
gacccgcttttaaga

SEQ ID NO: 1590247 - DNA, 15 bp, Homo sapiens
tgacccgcttttaag

SEQ ID NO: 1590248 - DNA, 15 bp, Homo sapiens
ttgacccgcttttaa

SEQ ID NO: 1590249 - DNA, 15 bp, Homo sapiens
attgacccgctttta

SEQ ID NO: 1590250 - DNA, 15 bp, Homo sapiens
aattgacccgctttt

SEQ ID NO: 1590251 - DNA, 15 bp, Homo sapiens
aaattgacccgcttt

SEQ ID NO: 1590252 - DNA, 15 bp, Homo sapiens
taaattgacccgctt

SEQ ID NO: 1590253 - DNA, 15 bp, Homo sapiens
ttaaattgacccgct

SEQ ID NO: 1590254 - DNA, 15 bp, Homo sapiens
cttaaattgacccgc

SEQ ID NO: 1590255 - DNA, 15 bp, Homo sapiens
tcttaaattgacccg

SEQ ID NO: 1590256 - DNA, 15 bp, Homo sapiens
atcttaaattgaccc

SEQ ID NO: 1590257 - DNA, 15 bp, Homo sapiens
tatcttaaattgacc

SEQ ID NO: 1590258 - DNA, 15 bp, Homo sapiens
ttatcttaaattgac

SEQ ID NO: 1590259 - DNA, 15 bp, Homo sapiens
cttatcttaaattga

SEQ ID NO: 1590260 - DNA, 15 bp, Homo sapiens
ccttatcttaaattg

SEQ ID NO: 1590261 - DNA, 15 bp, Homo sapiens
cccttatcttaaatt

SEQ ID NO: 1590262 - DNA, 15 bp, Homo sapiens
tcccttatcttaaat

SEQ ID NO: 1590263 - DNA, 15 bp, Homo sapiens
ttcccttatcttaaa

SEQ ID NO: 1590264 - DNA, 15 bp, Homo sapiens
tttcccttatcttaa

SEQ ID NO: 1590265 - DNA, 15 bp, Homo sapiens
ttttcccttatctta

SEQ ID NO: 1590266 - DNA, 15 bp, Homo sapiens
tttttcccttatctt

SEQ ID NO: 1590267 - DNA, 15 bp, Homo sapiens
ttttttcccttatct

SEQ ID NO: 1590268 - DNA, 15 bp, Homo sapiens
tttttttcccttatc

SEQ ID NO: 1590269 - DNA, 15 bp, Homo sapiens
ttttttttcccttat

SEQ ID NO: 1590270 - DNA, 15 bp, Homo sapiens
attttttttccctta

SEQ ID NO: 1590271 - DNA, 15 bp, Homo sapiens
gattttttttccctt

SEQ ID NO: 1590272 - DNA, 15 bp, Homo sapiens
ggattttttttccct

SEQ ID NO: 1590273 - DNA, 15 bp, Homo sapiens
tggattttttttccc

SEQ ID NO: 1590274 - DNA, 15 bp, Homo sapiens
ctggattttttttcc

SEQ ID NO: 1590275 - DNA, 15 bp, Homo sapiens
cctggattttttttc

SEQ ID NO: 1590276 - DNA, 15 bp, Homo sapiens
tcctggatttttttt

SEQ ID NO: 1590277 - DNA, 15 bp, Homo sapiens
atcctggattttttt

SEQ ID NO: 1590278 - DNA, 15 bp, Homo sapiens
gatcctggatttttt

SEQ ID NO: 1590279 - DNA, 15 bp, Homo sapiens
agatcctggattttt

SEQ ID NO: 1590280 - DNA, 15 bp, Homo sapiens
cagatcctggatttt

SEQ ID NO: 1590281 - DNA, 15 bp, Homo sapiens
acagatcctggattt

SEQ ID NO: 1590282 - DNA, 15 bp, Homo sapiens
cacagatcctggatt

SEQ ID NO: 1590283 - DNA, 15 bp, Homo sapiens
acacagatcctggat

SEQ ID NO: 1590284 - DNA, 15 bp, Homo sapiens
cacacagatcctgga

SEQ ID NO: 1590285 - DNA, 15 bp, Homo sapiens
tcacacagatcctgg

SEQ ID NO: 1590286 - DNA, 15 bp, Homo sapiens
ttcacacagatcctg

SEQ ID NO: 1590287 - DNA, 15 bp, Homo sapiens
gttcacacagatcct

SEQ ID NO: 1590288 - DNA, 15 bp, Homo sapiens
ggttcacacagatcc

SEQ ID NO: 1590289 - DNA, 15 bp, Homo sapiens
cggttcacacagatc

SEQ ID NO: 1590290 - DNA, 15 bp, Homo sapiens
acggttcacacagat

SEQ ID NO: 1590291 - DNA, 15 bp, Homo sapiens
cacggttcacacaga

SEQ ID NO: 1590292 - DNA, 15 bp, Homo sapiens
gcacggttcacacag

SEQ ID NO: 1590293 - DNA, 15 bp, Homo sapiens
agcacggttcacaca

SEQ ID NO: 1590294 - DNA, 15 bp, Homo sapiens
cagcacggttcacac

SEQ ID NO: 1590295 - DNA, 15 bp, Homo sapiens
tcagcacggttcaca

SEQ ID NO: 1590296 - DNA, 15 bp, Homo sapiens
atcagcacggttcac

SEQ ID NO: 1590297 - DNA, 15 bp, Homo sapiens
tatcagcacggttca

SEQ ID NO: 1590298 - DNA, 15 bp, Homo sapiens
ttatcagcacggttc

SEQ ID NO: 1590299 - DNA, 15 bp, Homo sapiens
tttatcagcacggtt

SEQ ID NO: 1590300 - DNA, 15 bp, Homo sapiens
ctttatcagcacggt

SEQ ID NO: 1590301 - DNA, 15 bp, Homo sapiens
tctttatcagcacgg

SEQ ID NO: 1590302 - DNA, 15 bp, Homo sapiens
gtctttatcagcacg

SEQ ID NO: 1590303 - DNA, 15 bp, Homo sapiens
agtctttatcagcac

SEQ ID NO: 1590304 - DNA, 15 bp, Homo sapiens
cagtctttatcagca

SEQ ID NO: 1590305 - DNA, 15 bp, Homo sapiens
tcagtctttatcagc

SEQ ID NO: 1590306 - DNA, 15 bp, Homo sapiens
gtcagtctttatcag

SEQ ID NO: 1590307 - DNA, 15 bp, Homo sapiens
ggtcagtctttatca

SEQ ID NO: 1590308 - DNA, 15 bp, Homo sapiens
gggtcagtctttatc

SEQ ID NO: 1590309 - DNA, 15 bp, Homo sapiens
ggggtcagtctttat

SEQ ID NO: 1590310 - DNA, 15 bp, Homo sapiens
aggggtcagtcttta

SEQ ID NO: 1590311 - DNA, 15 bp, Homo sapiens
aaggggtcagtcttt

SEQ ID NO: 1590312 - DNA, 15 bp, Homo sapiens
aaaggggtcagtctt

SEQ ID NO: 1590313 - DNA, 15 bp, Homo sapiens
aaaaggggtcagtct

SEQ ID NO: 1590314 - DNA, 15 bp, Homo sapiens
gaaaaggggtcagtc

SEQ ID NO: 1590315 - DNA, 15 bp, Homo sapiens
agaaaaggggtcagt

SEQ ID NO: 1590316 - DNA, 15 bp, Homo sapiens
cagaaaaggggtcag

SEQ ID NO: 1590317 - DNA, 15 bp, Homo sapiens
tcagaaaaggggtca

SEQ ID NO: 1590318 - DNA, 15 bp, Homo sapiens
ttcagaaaaggggtc

SEQ ID NO: 1590319 - DNA, 15 bp, Homo sapiens
gttcagaaaaggggt

SEQ ID NO: 1590320 - DNA, 15 bp, Homo sapiens
agttcagaaaagggg

SEQ ID NO: 1590321 - DNA, 15 bp, Homo sapiens
tagttcagaaaaggg

SEQ ID NO: 1590322 - DNA, 15 bp, Homo sapiens
ttagttcagaaaagg

SEQ ID NO: 1590323 - DNA, 15 bp, Homo sapiens
tttagttcagaaaag

SEQ ID NO: 1590324 - DNA, 15 bp, Homo sapiens
ttttagttcagaaaa

SEQ ID NO: 1590325 - DNA, 15 bp, Homo sapiens
cttttagttcagaaa

SEQ ID NO: 1590326 - DNA, 15 bp, Homo sapiens
gcttttagttcagaa

SEQ ID NO: 1590327 - DNA, 15 bp, Homo sapiens
tgcttttagttcaga

SEQ ID NO: 1590328 - DNA, 15 bp, Homo sapiens
ttgcttttagttcag

SEQ ID NO: 1590329 - DNA, 15 bp, Homo sapiens
cttgcttttagttca

SEQ ID NO: 1590330 - DNA, 15 bp, Homo sapiens
gcttgcttttagttc

SEQ ID NO: 1590331 - DNA, 15 bp, Homo sapiens
ggcttgcttttagtt

SEQ ID NO: 1590332 - DNA, 15 bp, Homo sapiens
tggcttgcttttagt

SEQ ID NO: 1590333 - DNA, 15 bp, Homo sapiens
ctggcttgcttttag

SEQ ID NO: 1590334 - DNA, 15 bp, Homo sapiens
cctggcttgctttta

SEQ ID NO: 1590335 - DNA, 15 bp, Homo sapiens
gcctggcttgctttt

SEQ ID NO: 1590336 - DNA, 15 bp, Homo sapiens
tgcctggcttgcttt

SEQ ID NO: 1590337 - DNA, 15 bp, Homo sapiens
ctgcctggcttgctt

SEQ ID NO: 1590338 - DNA, 15 bp, Homo sapiens
tctgcctggcttgct

SEQ ID NO: 1590339 - DNA, 15 bp, Homo sapiens
gtctgcctggcttgc

SEQ ID NO: 1590340 - DNA, 15 bp, Homo sapiens
tgtctgcctggcttg

SEQ ID NO: 1590341 - DNA, 15 bp, Homo sapiens
atgtctgcctggctt

SEQ ID NO: 1590342 - DNA, 15 bp, Homo sapiens
aatgtctgcctggct

SEQ ID NO: 1590343 - DNA, 15 bp, Homo sapiens
gaatgtctgcctggc

SEQ ID NO: 1590344 - DNA, 15 bp, Homo sapiens
tgaatgtctgcctgg

SEQ ID NO: 1590345 - DNA, 15 bp, Homo sapiens
atgaatgtctgcctg

SEQ ID NO: 1590346 - DNA, 15 bp, Homo sapiens
aatgaatgtctgcct

SEQ ID NO: 1590347 - DNA, 15 bp, Homo sapiens
aaatgaatgtctgcc

SEQ ID NO: 1590348 - DNA, 15 bp, Homo sapiens
aaaatgaatgtctgc

SEQ ID NO: 1590349 - DNA, 15 bp, Homo sapiens
gaaaatgaatgtctg

SEQ ID NO: 1590350 - DNA, 15 bp, Homo sapiens
agaaaatgaatgtct

SEQ ID NO: 1590351 - DNA, 15 bp, Homo sapiens
tagaaaatgaatgtc

SEQ ID NO: 1590352 - DNA, 15 bp, Homo sapiens
atagaaaatgaatgt

SEQ ID NO: 1590353 - DNA, 15 bp, Homo sapiens
tatagaaaatgaatg

SEQ ID NO: 1590354 - DNA, 15 bp, Homo sapiens
ttatagaaaatgaat

SEQ ID NO: 1590355 - DNA, 15 bp, Homo sapiens
tttatagaaaatgaa

SEQ ID NO: 1590356 - DNA, 15 bp, Homo sapiens
gtttatagaaaatga

SEQ ID NO: 1590357 - DNA, 15 bp, Homo sapiens
tgtttatagaaaatg

SEQ ID NO: 1590358 - DNA, 15 bp, Homo sapiens
ttgtttatagaaaat

SEQ ID NO: 1590359 - DNA, 15 bp, Homo sapiens
cttgtttatagaaaa

SEQ ID NO: 1590360 - DNA, 15 bp, Homo sapiens
tcttgtttatagaaa

SEQ ID NO: 1590361 - DNA, 15 bp, Homo sapiens
ctcttgtttatagaa

SEQ ID NO: 1590362 - DNA, 15 bp, Homo sapiens
tctcttgtttataga

SEQ ID NO: 1590363 - DNA, 15 bp, Homo sapiens
ctctcttgtttatag

SEQ ID NO: 1590364 - DNA, 15 bp, Homo sapiens
actctcttgtttata

SEQ ID NO: 1590365 - DNA, 15 bp, Homo sapiens
aactctcttgtttat

SEQ ID NO: 1590366 - DNA, 15 bp, Homo sapiens
caactctcttgttta

SEQ ID NO: 1590367 - DNA, 15 bp, Homo sapiens
acaactctcttgttt

SEQ ID NO: 1590368 - DNA, 15 bp, Homo sapiens
cacaactctcttgtt

SEQ ID NO: 1590369 - DNA, 15 bp, Homo sapiens
tcacaactctcttgt

SEQ ID NO: 1590370 - DNA, 15 bp, Homo sapiens
ctcacaactctcttg

SEQ ID NO: 1590371 - DNA, 15 bp, Homo sapiens
tctcacaactctctt

SEQ ID NO: 1590372 - DNA, 15 bp, Homo sapiens
ttctcacaactctct

SEQ ID NO: 1590373 - DNA, 15 bp, Homo sapiens
cttctcacaactctc

SEQ ID NO: 1590374 - DNA, 15 bp, Homo sapiens
gcttctcacaactct

SEQ ID NO: 1590375 - DNA, 15 bp, Homo sapiens
agcttctcacaactc

SEQ ID NO: 1590376 - DNA, 15 bp, Homo sapiens
cagcttctcacaact

SEQ ID NO: 1590377 - DNA, 15 bp, Homo sapiens
gcagcttctcacaac

SEQ ID NO: 1590378 - DNA, 15 bp, Homo sapiens
ggcagcttctcacaa

SEQ ID NO: 1590379 - DNA, 15 bp, Homo sapiens
aggcagcttctcaca

SEQ ID NO: 1590380 - DNA, 15 bp, Homo sapiens
aaggcagcttctcac

SEQ ID NO: 1590381 - DNA, 15 bp, Homo sapiens
caaggcagcttctca

SEQ ID NO: 1590382 - DNA, 15 bp, Homo sapiens
tcaaggcagcttctc

SEQ ID NO: 1590383 - DNA, 15 bp, Homo sapiens
ttcaaggcagcttct

SEQ ID NO: 1590384 - DNA, 15 bp, Homo sapiens
attcaaggcagcttc

SEQ ID NO: 1590385 - DNA, 15 bp, Homo sapiens
aattcaaggcagctt

SEQ ID NO: 1590386 - DNA, 15 bp, Homo sapiens
gaattcaaggcagct

SEQ ID NO: 1590387 - DNA, 15 bp, Homo sapiens
agaattcaaggcagc

SEQ ID NO: 1590388 - DNA, 15 bp, Homo sapiens
cagaattcaaggcag

SEQ ID NO: 1590389 - DNA, 15 bp, Homo sapiens
tcagaattcaaggca

SEQ ID NO: 1590390 - DNA, 15 bp, Homo sapiens
atcagaattcaaggc

SEQ ID NO: 1590391 - DNA, 15 bp, Homo sapiens
gatcagaattcaagg

SEQ ID NO: 1590392 - DNA, 15 bp, Homo sapiens
tgatcagaattcaag

SEQ ID NO: 1590393 - DNA, 15 bp, Homo sapiens
atgatcagaattcaa

SEQ ID NO: 1590394 - DNA, 15 bp, Homo sapiens
tatgatcagaattca

SEQ ID NO: 1590395 - DNA, 15 bp, Homo sapiens
atatgatcagaattc

SEQ ID NO: 1590396 - DNA, 15 bp, Homo sapiens
catatgatcagaatt

SEQ ID NO: 1590397 - DNA, 15 bp, Homo sapiens
acatatgatcagaat

SEQ ID NO: 1590398 - DNA, 15 bp, Homo sapiens
gacatatgatcagaa

SEQ ID NO: 1590399 - DNA, 15 bp, Homo sapiens
agacatatgatcaga

SEQ ID NO: 1590400 - DNA, 15 bp, Homo sapiens
gagacatatgatcag

SEQ ID NO: 1590401 - DNA, 15 bp, Homo sapiens
ggagacatatgatca

SEQ ID NO: 1590402 - DNA, 15 bp, Homo sapiens
tggagacatatgatc

SEQ ID NO: 1590403 - DNA, 15 bp, Homo sapiens
ctggagacatatgat

SEQ ID NO: 1590404 - DNA, 15 bp, Homo sapiens
tctggagacatatga

SEQ ID NO: 1590405 - DNA, 15 bp, Homo sapiens
gtctggagacatatg

SEQ ID NO: 1590406 - DNA, 15 bp, Homo sapiens
tgtctggagacatat

SEQ ID NO: 1590407 - DNA, 15 bp, Homo sapiens
atgtctggagacata

SEQ ID NO: 1590408 - DNA, 15 bp, Homo sapiens
gatgtctggagacat

SEQ ID NO: 1590409 - DNA, 15 bp, Homo sapiens
cgatgtctggagaca

SEQ ID NO: 1590410 - DNA, 15 bp, Homo sapiens
gcgatgtctggagac

SEQ ID NO: 1590411 - DNA, 15 bp, Homo sapiens
agcgatgtctggaga

SEQ ID NO: 1590412 - DNA, 15 bp, Homo sapiens
gagcgatgtctggag

SEQ ID NO: 1590413 - DNA, 15 bp, Homo sapiens
agagcgatgtctgga

SEQ ID NO: 1590414 - DNA, 15 bp, Homo sapiens
gagagcgatgtctgg

SEQ ID NO: 1590415 - DNA, 15 bp, Homo sapiens
ggagagcgatgtctg

SEQ ID NO: 1590416 - DNA, 15 bp, Homo sapiens
gggagagcgatgtct

SEQ ID NO: 1590417 - DNA, 15 bp, Homo sapiens
agggagagcgatgtc

SEQ ID NO: 1590418 - DNA, 15 bp, Homo sapiens
aagggagagcgatgt

SEQ ID NO: 1590419 - DNA, 15 bp, Homo sapiens
gaagggagagcgatg

SEQ ID NO: 1590420 - DNA, 15 bp, Homo sapiens
ggaagggagagcgat

SEQ ID NO: 1590421 - DNA, 15 bp, Homo sapiens
gggaagggagagcga

SEQ ID NO: 1590422 - DNA, 15 bp, Homo sapiens
agggaagggagagcg

SEQ ID NO: 1590423 - DNA, 15 bp, Homo sapiens
cagggaagggagagc

SEQ ID NO: 1590424 - DNA, 15 bp, Homo sapiens
gcagggaagggagag

SEQ ID NO: 1590425 - DNA, 15 bp, Homo sapiens
agcagggaagggaga

SEQ ID NO: 1590426 - DNA, 15 bp, Homo sapiens
gagcagggaagggag

SEQ ID NO: 1590427 - DNA, 15 bp, Homo sapiens
ggagcagggaaggga

SEQ ID NO: 1590428 - DNA, 15 bp, Homo sapiens
gggagcagggaaggg

SEQ ID NO: 1590429 - DNA, 15 bp, Homo sapiens
ggggagcagggaagg

SEQ ID NO: 1590430 - DNA, 15 bp, Homo sapiens
tggggagcagggaag

SEQ ID NO: 1590431 - DNA, 15 bp, Homo sapiens
gtggggagcagggaa

SEQ ID NO: 1590432 - DNA, 15 bp, Homo sapiens
ggtggggagcaggga

SEQ ID NO: 1590433 - DNA, 15 bp, Homo sapiens
gggtggggagcaggg

SEQ ID NO: 1590434 - DNA, 15 bp, Homo sapiens
ggggtggggagcagg

SEQ ID NO: 1590435 - DNA, 15 bp, Homo sapiens
gggggtggggagcag

SEQ ID NO: 1590436 - DNA, 15 bp, Homo sapiens
ggggggtggggagca

SEQ ID NO: 1590437 - DNA, 15 bp, Homo sapiens
tggggggtggggagc

SEQ ID NO: 1590438 - DNA, 15 bp, Homo sapiens
ttggggggtggggag

SEQ ID NO: 1590439 - DNA, 15 bp, Homo sapiens
attggggggtgggga

SEQ ID NO: 1590440 - DNA, 15 bp, Homo sapiens
aattggggggtgggg

SEQ ID NO: 1590441 - DNA, 15 bp, Homo sapiens
taattggggggtggg

SEQ ID NO: 1590442 - DNA, 15 bp, Homo sapiens
ataattggggggtgg

SEQ ID NO: 1590443 - DNA, 15 bp, Homo sapiens
aataattggggggtg

SEQ ID NO: 1590444 - DNA, 15 bp, Homo sapiens
taataattggggggt

SEQ ID NO: 1590445 - DNA, 15 bp, Homo sapiens
ctaataattgggggg

SEQ ID NO: 1590446 - DNA, 15 bp, Homo sapiens
gctaataattggggg

SEQ ID NO: 1590447 - DNA, 15 bp, Homo sapiens
cgctaataattgggg

SEQ ID NO: 1590448 - DNA, 15 bp, Homo sapiens
gcgctaataattggg

SEQ ID NO: 1590449 - DNA, 15 bp, Homo sapiens
cgcgctaataattgg

SEQ ID NO: 1590450 - DNA, 15 bp, Homo sapiens
tcgcgctaataattg

SEQ ID NO: 1590451 - DNA, 15 bp, Homo sapiens
ctcgcgctaataatt

SEQ ID NO: 1590452 - DNA, 15 bp, Homo sapiens
cctcgcgctaataat

SEQ ID NO: 1590453 - DNA, 15 bp, Homo sapiens
tcctcgcgctaataa

SEQ ID NO: 1590454 - DNA, 15 bp, Homo sapiens
ttcctcgcgctaata

SEQ ID NO: 1590455 - DNA, 15 bp, Homo sapiens
cttcctcgcgctaat

SEQ ID NO: 1590456 - DNA, 15 bp, Homo sapiens
gcttcctcgcgctaa

SEQ ID NO: 1590457 - DNA, 15 bp, Homo sapiens
tgcttcctcgcgcta

SEQ ID NO: 1590458 - DNA, 15 bp, Homo sapiens
ctgcttcctcgcgct

SEQ ID NO: 1590459 - DNA, 15 bp, Homo sapiens
tctgcttcctcgcgc

SEQ ID NO: 1590460 - DNA, 15 bp, Homo sapiens
ctctgcttcctcgcg

SEQ ID NO: 1590461 - DNA, 15 bp, Homo sapiens
actctgcttcctcgc

SEQ ID NO: 1590462 - DNA, 15 bp, Homo sapiens
tactctgcttcctcg

SEQ ID NO: 1590463 - DNA, 15 bp, Homo sapiens
ctactctgcttcctc

SEQ ID NO: 1590464 - DNA, 15 bp, Homo sapiens
tctactctgcttcct

SEQ ID NO: 1590465 - DNA, 15 bp, Homo sapiens
gtctactctgcttcc

SEQ ID NO: 1590466 - DNA, 15 bp, Homo sapiens
cgtctactctgcttc

SEQ ID NO: 1590467 - DNA, 15 bp, Homo sapiens
tcgtctactctgctt

SEQ ID NO: 1590468 - DNA, 15 bp, Homo sapiens
atcgtctactctgct

SEQ ID NO: 1590469 - DNA, 15 bp, Homo sapiens
aatcgtctactctgc

SEQ ID NO: 1590470 - DNA, 15 bp, Homo sapiens
aaatcgtctactctg

SEQ ID NO: 1590471 - DNA, 15 bp, Homo sapiens
aaaatcgtctactct

SEQ ID NO: 1590472 - DNA, 15 bp, Homo sapiens
taaaatcgtctactc

SEQ ID NO: 1590473 - DNA, 15 bp, Homo sapiens
ataaaatcgtctact

SEQ ID NO: 1590474 - DNA, 15 bp, Homo sapiens
aataaaatcgtctac

SEQ ID NO: 1590475 - DNA, 15 bp, Homo sapiens
aaataaaatcgtcta

SEQ ID NO: 1590476 - DNA, 15 bp, Homo sapiens
caaataaaatcgtct

SEQ ID NO: 1590477 - DNA, 15 bp, Homo sapiens
acaaataaaatcgtc

SEQ ID NO: 1590478 - DNA, 15 bp, Homo sapiens
cacaaataaaatcgt

SEQ ID NO: 1590479 - DNA, 15 bp, Homo sapiens
ccacaaataaaatcg

SEQ ID NO: 1590480 - DNA, 15 bp, Homo sapiens
tccacaaataaaatc

SEQ ID NO: 1590481 - DNA, 15 bp, Homo sapiens
ctccacaaataaaat

SEQ ID NO: 1590482 - DNA, 15 bp, Homo sapiens
tctccacaaataaaa

SEQ ID NO: 1590483 - DNA, 15 bp, Homo sapiens
ttctccacaaataaa

SEQ ID NO: 1590484 - DNA, 15 bp, Homo sapiens
gttctccacaaataa

SEQ ID NO: 1590485 - DNA, 15 bp, Homo sapiens
agttctccacaaata

SEQ ID NO: 1590486 - DNA, 15 bp, Homo sapiens
tagttctccacaaat

SEQ ID NO: 1590487 - DNA, 15 bp, Homo sapiens
ctagttctccacaaa

SEQ ID NO: 1590488 - DNA, 15 bp, Homo sapiens
tctagttctccacaa

SEQ ID NO: 1590489 - DNA, 15 bp, Homo sapiens
ttctagttctccaca

SEQ ID NO: 1590490 - DNA, 15 bp, Homo sapiens
tttctagttctccac

SEQ ID NO: 1590491 - DNA, 15 bp, Homo sapiens
ctttctagttctcca

SEQ ID NO: 1590492 - DNA, 15 bp, Homo sapiens
gctttctagttctcc

SEQ ID NO: 1590493 - DNA, 15 bp, Homo sapiens
ggctttctagttctc

SEQ ID NO: 1590494 - DNA, 15 bp, Homo sapiens
gggctttctagttct

SEQ ID NO: 1590495 - DNA, 15 bp, Homo sapiens
tgggctttctagttc

SEQ ID NO: 1590496 - DNA, 15 bp, Homo sapiens
atgggctttctagtt

SEQ ID NO: 1590497 - DNA, 15 bp, Homo sapiens
aatgggctttctagt

SEQ ID NO: 1590498 - DNA, 15 bp, Homo sapiens
caatgggctttctag

SEQ ID NO: 1590499 - DNA, 15 bp, Homo sapiens
ccaatgggctttcta

SEQ ID NO: 1590500 - DNA, 15 bp, Homo sapiens
cccaatgggctttct

SEQ ID NO: 1590501 - DNA, 15 bp, Homo sapiens
tcccaatgggctttc

SEQ ID NO: 1590502 - DNA, 15 bp, Homo sapiens
ctcccaatgggcttt

SEQ ID NO: 1590503 - DNA, 15 bp, Homo sapiens
tctcccaatgggctt

SEQ ID NO: 1590504 - DNA, 15 bp, Homo sapiens
atctcccaatgggct

SEQ ID NO: 1590505 - DNA, 15 bp, Homo sapiens
catctcccaatgggc

SEQ ID NO: 1590506 - DNA, 15 bp, Homo sapiens
tcatctcccaatggg

SEQ ID NO: 1590507 - DNA, 15 bp, Homo sapiens
ctcatctcccaatgg

SEQ ID NO: 1590508 - DNA, 15 bp, Homo sapiens
tctcatctcccaatg

SEQ ID NO: 1590509 - DNA, 15 bp, Homo sapiens
ttctcatctcccaat

SEQ ID NO: 1590510 - DNA, 15 bp, Homo sapiens
attctcatctcccaa

SEQ ID NO: 1590511 - DNA, 15 bp, Homo sapiens
gattctcatctccca

SEQ ID NO: 1590512 - DNA, 15 bp, Homo sapiens
agattctcatctccc

SEQ ID NO: 1590513 - DNA, 15 bp, Homo sapiens
cagattctcatctcc

SEQ ID NO: 1590514 - DNA, 15 bp, Homo sapiens
tcagattctcatctc

SEQ ID NO: 1590515 - DNA, 15 bp, Homo sapiens
ctcagattctcatct

SEQ ID NO: 1590516 - DNA, 15 bp, Homo sapiens
tctcagattctcatc

SEQ ID NO: 1590517 - DNA, 15 bp, Homo sapiens
atctcagattctcat

SEQ ID NO: 1590518 - DNA, 15 bp, Homo sapiens
catctcagattctca

SEQ ID NO: 1590519 - DNA, 15 bp, Homo sapiens
tcatctcagattctc

SEQ ID NO: 1590520 - DNA, 15 bp, Homo sapiens
atcatctcagattct

SEQ ID NO: 1590521 - DNA, 15 bp, Homo sapiens
tatcatctcagattc

SEQ ID NO: 1590522 - DNA, 15 bp, Homo sapiens
atatcatctcagatt

SEQ ID NO: 1590523 - DNA, 15 bp, Homo sapiens
catatcatctcagat

SEQ ID NO: 1590524 - DNA, 15 bp, Homo sapiens
tcatatcatctcaga

SEQ ID NO: 1590525 - DNA, 15 bp, Homo sapiens
atcatatcatctcag

SEQ ID NO: 1590526 - DNA, 15 bp, Homo sapiens
aatcatatcatctca

SEQ ID NO: 1590527 - DNA, 15 bp, Homo sapiens
gaatcatatcatctc

SEQ ID NO: 1590528 - DNA, 15 bp, Homo sapiens
agaatcatatcatct

SEQ ID NO: 1590529 - DNA, 15 bp, Homo sapiens
aagaatcatatcatc

SEQ ID NO: 1590530 - DNA, 15 bp, Homo sapiens
taagaatcatatcat

SEQ ID NO: 1590531 - DNA, 15 bp, Homo sapiens
ctaagaatcatatca

SEQ ID NO: 1590532 - DNA, 15 bp, Homo sapiens
cctaagaatcatatc

SEQ ID NO: 1590533 - DNA, 15 bp, Homo sapiens
gcctaagaatcatat

SEQ ID NO: 1590534 - DNA, 15 bp, Homo sapiens
tgcctaagaatcata

SEQ ID NO: 1590535 - DNA, 15 bp, Homo sapiens
atgcctaagaatcat

SEQ ID NO: 1590536 - DNA, 15 bp, Homo sapiens
catgcctaagaatca

SEQ ID NO: 1590537 - DNA, 15 bp, Homo sapiens
ccatgcctaagaatc

SEQ ID NO: 1590538 - DNA, 15 bp, Homo sapiens
cccatgcctaagaat

SEQ ID NO: 1590539 - DNA, 15 bp, Homo sapiens
acccatgcctaagaa

SEQ ID NO: 1590540 - DNA, 15 bp, Homo sapiens
aacccatgcctaaga

SEQ ID NO: 1590541 - DNA, 15 bp, Homo sapiens
taacccatgcctaag

SEQ ID NO: 1590542 - DNA, 15 bp, Homo sapiens
gtaacccatgcctaa

SEQ ID NO: 1590543 - DNA, 15 bp, Homo sapiens
agtaacccatgccta

SEQ ID NO: 1590544 - DNA, 15 bp, Homo sapiens
cagtaacccatgcct

SEQ ID NO: 1590545 - DNA, 15 bp, Homo sapiens
ccagtaacccatgcc

SEQ ID NO: 1590546 - DNA, 15 bp, Homo sapiens
gccagtaacccatgc

SEQ ID NO: 1590547 - DNA, 15 bp, Homo sapiens
agccagtaacccatg

SEQ ID NO: 1590548 - DNA, 15 bp, Homo sapiens
aagccagtaacccat

SEQ ID NO: 1590549 - DNA, 15 bp, Homo sapiens
caagccagtaaccca

SEQ ID NO: 1590550 - DNA, 15 bp, Homo sapiens
acaagccagtaaccc

SEQ ID NO: 1590551 - DNA, 15 bp, Homo sapiens
aacaagccagtaacc

SEQ ID NO: 1590552 - DNA, 15 bp, Homo sapiens
aaacaagccagtaac

SEQ ID NO: 1590553 - DNA, 15 bp, Homo sapiens
taaacaagccagtaa

SEQ ID NO: 1590554 - DNA, 15 bp, Homo sapiens
ctaaacaagccagta

SEQ ID NO: 1590555 - DNA, 15 bp, Homo sapiens
actaaacaagccagt

SEQ ID NO: 1590556 - DNA, 15 bp, Homo sapiens
aactaaacaagccag

SEQ ID NO: 1590557 - DNA, 15 bp, Homo sapiens
gaactaaacaagcca

SEQ ID NO: 1590558 - DNA, 15 bp, Homo sapiens
tgaactaaacaagcc

SEQ ID NO: 1590559 - DNA, 15 bp, Homo sapiens
ttgaactaaacaagc

SEQ ID NO: 1590560 - DNA, 15 bp, Homo sapiens
gttgaactaaacaag

SEQ ID NO: 1590561 - DNA, 15 bp, Homo sapiens
agttgaactaaacaa

SEQ ID NO: 1590562 - DNA, 15 bp, Homo sapiens
tagttgaactaaaca

SEQ ID NO: 1590563 - DNA, 15 bp, Homo sapiens
ctagttgaactaaac

SEQ ID NO: 1590564 - DNA, 15 bp, Homo sapiens
cctagttgaactaaa

SEQ ID NO: 1590565 - DNA, 15 bp, Homo sapiens
tcctagttgaactaa

SEQ ID NO: 1590566 - DNA, 15 bp, Homo sapiens
gtcctagttgaacta

SEQ ID NO: 1590567 - DNA, 15 bp, Homo sapiens
agtcctagttgaact

SEQ ID NO: 1590568 - DNA, 15 bp, Homo sapiens
aagtcctagttgaac

SEQ ID NO: 1590569 - DNA, 15 bp, Homo sapiens
aaagtcctagttgaa

SEQ ID NO: 1590570 - DNA, 15 bp, Homo sapiens
gaaagtcctagttga

SEQ ID NO: 1590571 - DNA, 15 bp, Homo sapiens
agaaagtcctagttg

SEQ ID NO: 1590572 - DNA, 15 bp, Homo sapiens
aagaaagtcctagtt

SEQ ID NO: 1590573 - DNA, 15 bp, Homo sapiens
aaagaaagtcctagt

SEQ ID NO: 1590574 - DNA, 15 bp, Homo sapiens
aaaagaaagtcctag

SEQ ID NO: 1590575 - DNA, 15 bp, Homo sapiens
aaaaagaaagtccta

SEQ ID NO: 1590576 - DNA, 15 bp, Homo sapiens
caaaaagaaagtcct

SEQ ID NO: 1590577 - DNA, 15 bp, Homo sapiens
tcaaaaagaaagtcc

SEQ ID NO: 1590578 - DNA, 15 bp, Homo sapiens
ttcaaaaagaaagtc

SEQ ID NO: 1590579 - DNA, 15 bp, Homo sapiens
attcaaaaagaaagt

SEQ ID NO: 1590580 - DNA, 15 bp, Homo sapiens
cattcaaaaagaaag

SEQ ID NO: 1590581 - DNA, 15 bp, Homo sapiens
ccattcaaaaagaaa

SEQ ID NO: 1590582 - DNA, 15 bp, Homo sapiens
tccattcaaaaagaa

SEQ ID NO: 1590583 - DNA, 15 bp, Homo sapiens
ttccattcaaaaaga

SEQ ID NO: 1590584 - DNA, 15 bp, Homo sapiens
tttccattcaaaaag

SEQ ID NO: 1590585 - DNA, 15 bp, Homo sapiens
ctttccattcaaaaa

SEQ ID NO: 1590586 - DNA, 15 bp, Homo sapiens
tctttccattcaaaa

SEQ ID NO: 1590587 - DNA, 15 bp, Homo sapiens
ttctttccattcaaa

SEQ ID NO: 1590588 - DNA, 15 bp, Homo sapiens
tttctttccattcaa

SEQ ID NO: 1590589 - DNA, 15 bp, Homo sapiens
ctttctttccattca

SEQ ID NO: 1590590 - DNA, 15 bp, Homo sapiens
actttctttccattc

SEQ ID NO: 1590591 - DNA, 15 bp, Homo sapiens
cactttctttccatt

SEQ ID NO: 1590592 - DNA, 15 bp, Homo sapiens
tcactttctttccat

SEQ ID NO: 1590593 - DNA, 15 bp, Homo sapiens
gtcactttctttcca

SEQ ID NO: 1590594 - DNA, 15 bp, Homo sapiens
tgtcactttctttcc

SEQ ID NO: 1590595 - DNA, 15 bp, Homo sapiens
ctgtcactttctttc

SEQ ID NO: 1590596 - DNA, 15 bp, Homo sapiens
tctgtcactttcttt

SEQ ID NO: 1590597 - DNA, 15 bp, Homo sapiens
gtctgtcactttctt

SEQ ID NO: 1590598 - DNA, 15 bp, Homo sapiens
tgtctgtcactttct

SEQ ID NO: 1590599 - DNA, 15 bp, Homo sapiens
gtgtctgtcactttc

SEQ ID NO: 1590600 - DNA, 15 bp, Homo sapiens
cgtgtctgtcacttt

SEQ ID NO: 1590601 - DNA, 15 bp, Homo sapiens
ccgtgtctgtcactt

SEQ ID NO: 1590602 - DNA, 15 bp, Homo sapiens
cccgtgtctgtcact

SEQ ID NO: 1590603 - DNA, 15 bp, Homo sapiens
acccgtgtctgtcac

SEQ ID NO: 1590604 - DNA, 15 bp, Homo sapiens
tacccgtgtctgtca

SEQ ID NO: 1590605 - DNA, 15 bp, Homo sapiens
atacccgtgtctgtc

SEQ ID NO: 1590606 - DNA, 15 bp, Homo sapiens
aatacccgtgtctgt

SEQ ID NO: 1590607 - DNA, 15 bp, Homo sapiens
caatacccgtgtctg

SEQ ID NO: 1590608 - DNA, 15 bp, Homo sapiens
ccaatacccgtgtct

SEQ ID NO: 1590609 - DNA, 15 bp, Homo sapiens
cccaatacccgtgtc

SEQ ID NO: 1590610 - DNA, 15 bp, Homo sapiens
tcccaatacccgtgt

SEQ ID NO: 1590611 - DNA, 15 bp, Homo sapiens
ctcccaatacccgtg

SEQ ID NO: 1590612 - DNA, 15 bp, Homo sapiens
cctcccaatacccgt

SEQ ID NO: 1590613 - DNA, 15 bp, Homo sapiens
ccctcccaatacccg

SEQ ID NO: 1590614 - DNA, 15 bp, Homo sapiens
tccctcccaataccc

SEQ ID NO: 1590615 - DNA, 15 bp, Homo sapiens
ctccctcccaatacc

SEQ ID NO: 1590616 - DNA, 15 bp, Homo sapiens
cctccctcccaatac

SEQ ID NO: 1590617 - DNA, 15 bp, Homo sapiens
tcctccctcccaata

SEQ ID NO: 1590618 - DNA, 15 bp, Homo sapiens
ctcctccctcccaat

SEQ ID NO: 1590619 - DNA, 15 bp, Homo sapiens
cctcctccctcccaa

SEQ ID NO: 1590620 - DNA, 15 bp, Homo sapiens
gcctcctccctccca

SEQ ID NO: 1590621 - DNA, 15 bp, Homo sapiens
agcctcctccctccc

SEQ ID NO: 1590622 - DNA, 15 bp, Homo sapiens
cagcctcctccctcc

SEQ ID NO: 1590623 - DNA, 15 bp, Homo sapiens
tcagcctcctccctc

SEQ ID NO: 1590624 - DNA, 15 bp, Homo sapiens
ttcagcctcctccct

SEQ ID NO: 1590625 - DNA, 15 bp, Homo sapiens
attcagcctcctccc

SEQ ID NO: 1590626 - DNA, 15 bp, Homo sapiens
cattcagcctcctcc

SEQ ID NO: 1590627 - DNA, 15 bp, Homo sapiens
acattcagcctcctc

SEQ ID NO: 1590628 - DNA, 15 bp, Homo sapiens
aacattcagcctcct

SEQ ID NO: 1590629 - DNA, 15 bp, Homo sapiens
aaacattcagcctcc

SEQ ID NO: 1590630 - DNA, 15 bp, Homo sapiens
aaaacattcagcctc

SEQ ID NO: 1590631 - DNA, 15 bp, Homo sapiens
gaaaacattcagcct

SEQ ID NO: 1590632 - DNA, 15 bp, Homo sapiens
agaaaacattcagcc

SEQ ID NO: 1590633 - DNA, 15 bp, Homo sapiens
gagaaaacattcagc

SEQ ID NO: 1590634 - DNA, 15 bp, Homo sapiens
agagaaaacattcag

SEQ ID NO: 1590635 - DNA, 15 bp, Homo sapiens
cagagaaaacattca

SEQ ID NO: 1590636 - DNA, 15 bp, Homo sapiens
gcagagaaaacattc

SEQ ID NO: 1590637 - DNA, 15 bp, Homo sapiens
agcagagaaaacatt

SEQ ID NO: 1590638 - DNA, 15 bp, Homo sapiens
gagcagagaaaacat

SEQ ID NO: 1590639 - DNA, 15 bp, Homo sapiens
cgagcagagaaaaca

SEQ ID NO: 1590640 - DNA, 15 bp, Homo sapiens
ccgagcagagaaaac

SEQ ID NO: 1590641 - DNA, 15 bp, Homo sapiens
gccgagcagagaaaa

SEQ ID NO: 1590642 - DNA, 15 bp, Homo sapiens
agccgagcagagaaa

SEQ ID NO: 1590643 - DNA, 15 bp, Homo sapiens
tagccgagcagagaa

SEQ ID NO: 1590644 - DNA, 15 bp, Homo sapiens
ctagccgagcagaga

SEQ ID NO: 1590645 - DNA, 15 bp, Homo sapiens
tctagccgagcagag

SEQ ID NO: 1590646 - DNA, 15 bp, Homo sapiens
atctagccgagcaga

SEQ ID NO: 1590647 - DNA, 15 bp, Homo sapiens
gatctagccgagcag

SEQ ID NO: 1590648 - DNA, 15 bp, Homo sapiens
ggatctagccgagca

SEQ ID NO: 1590649 - DNA, 15 bp, Homo sapiens
aggatctagccgagc

SEQ ID NO: 1590650 - DNA, 15 bp, Homo sapiens
caggatctagccgag

SEQ ID NO: 1590651 - DNA, 15 bp, Homo sapiens
ccaggatctagccga

SEQ ID NO: 1590652 - DNA, 15 bp, Homo sapiens
accaggatctagccg

SEQ ID NO: 1590653 - DNA, 15 bp, Homo sapiens
aaccaggatctagcc

SEQ ID NO: 1590654 - DNA, 15 bp, Homo sapiens
taaccaggatctagc

SEQ ID NO: 1590655 - DNA, 15 bp, Homo sapiens
ctaaccaggatctag

SEQ ID NO: 1590656 - DNA, 15 bp, Homo sapiens
cctaaccaggatcta

SEQ ID NO: 1590657 - DNA, 15 bp, Homo sapiens
tcctaaccaggatct

SEQ ID NO: 1590658 - DNA, 15 bp, Homo sapiens
ctcctaaccaggatc

SEQ ID NO: 1590659 - DNA, 15 bp, Homo sapiens
tctcctaaccaggat

SEQ ID NO: 1590660 - DNA, 15 bp, Homo sapiens
gtctcctaaccagga

SEQ ID NO: 1590661 - DNA, 15 bp, Homo sapiens
cgtctcctaaccagg

SEQ ID NO: 1590662 - DNA, 15 bp, Homo sapiens
gcgtctcctaaccag

SEQ ID NO: 1590663 - DNA, 15 bp, Homo sapiens
agcgtctcctaacca

SEQ ID NO: 1590664 - DNA, 15 bp, Homo sapiens
cagcgtctcctaacc

SEQ ID NO: 1590665 - DNA, 15 bp, Homo sapiens
ccagcgtctcctaac

SEQ ID NO: 1590666 - DNA, 15 bp, Homo sapiens
tccagcgtctcctaa

SEQ ID NO: 1590667 - DNA, 15 bp, Homo sapiens
gtccagcgtctccta

SEQ ID NO: 1590668 - DNA, 15 bp, Homo sapiens
tgtccagcgtctcct

SEQ ID NO: 1590669 - DNA, 15 bp, Homo sapiens
gtgtccagcgtctcc

SEQ ID NO: 1590670 - DNA, 15 bp, Homo sapiens
ggtgtccagcgtctc

SEQ ID NO: 1590671 - DNA, 15 bp, Homo sapiens
tggtgtccagcgtct

SEQ ID NO: 1590672 - DNA, 15 bp, Homo sapiens
atggtgtccagcgtc

SEQ ID NO: 1590673 - DNA, 15 bp, Homo sapiens
catggtgtccagcgt

SEQ ID NO: 1590674 - DNA, 15 bp, Homo sapiens
acatggtgtccagcg

SEQ ID NO: 1590675 - DNA, 15 bp, Homo sapiens
aacatggtgtccagc

SEQ ID NO: 1590676 - DNA, 15 bp, Homo sapiens
gaacatggtgtccag

SEQ ID NO: 1590677 - DNA, 15 bp, Homo sapiens
ggaacatggtgtcca

SEQ ID NO: 1590678 - DNA, 15 bp, Homo sapiens
aggaacatggtgtcc

SEQ ID NO: 1590679 - DNA, 15 bp, Homo sapiens
gaggaacatggtgtc

SEQ ID NO: 1590680 - DNA, 15 bp, Homo sapiens
agaggaacatggtgt

SEQ ID NO: 1590681 - DNA, 15 bp, Homo sapiens
cagaggaacatggtg

SEQ ID NO: 1590682 - DNA, 15 bp, Homo sapiens
ccagaggaacatggt

SEQ ID NO: 1590683 - DNA, 15 bp, Homo sapiens
gccagaggaacatgg

SEQ ID NO: 1590684 - DNA, 15 bp, Homo sapiens
agccagaggaacatg

SEQ ID NO: 1590685 - DNA, 15 bp, Homo sapiens
gagccagaggaacat

SEQ ID NO: 1590686 - DNA, 15 bp, Homo sapiens
agagccagaggaaca

SEQ ID NO: 1590687 - DNA, 15 bp, Homo sapiens
gagagccagaggaac

SEQ ID NO: 1590688 - DNA, 15 bp, Homo sapiens
ggagagccagaggaa

SEQ ID NO: 1590689 - DNA, 15 bp, Homo sapiens
gggagagccagagga

SEQ ID NO: 1590690 - DNA, 15 bp, Homo sapiens
agggagagccagagg

SEQ ID NO: 1590691 - DNA, 15 bp, Homo sapiens
cagggagagccagag

SEQ ID NO: 1590692 - DNA, 15 bp, Homo sapiens
gcagggagagccaga

SEQ ID NO: 1590693 - DNA, 15 bp, Homo sapiens
ggcagggagagccag

SEQ ID NO: 1590694 - DNA, 15 bp, Homo sapiens
aggcagggagagcca

SEQ ID NO: 1590695 - DNA, 15 bp, Homo sapiens
aaggcagggagagcc

SEQ ID NO: 1590696 - DNA, 15 bp, Homo sapiens
gaaggcagggagagc

SEQ ID NO: 1590697 - DNA, 15 bp, Homo sapiens
agaaggcagggagag

SEQ ID NO: 1590698 - DNA, 15 bp, Homo sapiens
cagaaggcagggaga

SEQ ID NO: 1590699 - DNA, 15 bp, Homo sapiens
ccagaaggcagggag

SEQ ID NO: 1590700 - DNA, 15 bp, Homo sapiens
gccagaaggcaggga

SEQ ID NO: 1590701 - DNA, 15 bp, Homo sapiens
agccagaaggcaggg

SEQ ID NO: 1590702 - DNA, 15 bp, Homo sapiens
cagccagaaggcagg

SEQ ID NO: 1590703 - DNA, 15 bp, Homo sapiens
tcagccagaaggcag

SEQ ID NO: 1590704 - DNA, 15 bp, Homo sapiens
gtcagccagaaggca

SEQ ID NO: 1590705 - DNA, 15 bp, Homo sapiens
cgtcagccagaaggc

SEQ ID NO: 1590706 - DNA, 15 bp, Homo sapiens
gcgtcagccagaagg

SEQ ID NO: 1590707 - DNA, 15 bp, Homo sapiens
cgcgtcagccagaag

SEQ ID NO: 1590708 - DNA, 15 bp, Homo sapiens
acgcgtcagccagaa

SEQ ID NO: 1590709 - DNA, 15 bp, Homo sapiens
aacgcgtcagccaga

SEQ ID NO: 1590710 - DNA, 15 bp, Homo sapiens
gaacgcgtcagccag

SEQ ID NO: 1590711 - DNA, 15 bp, Homo sapiens
ggaacgcgtcagcca

SEQ ID NO: 1590712 - DNA, 15 bp, Homo sapiens
aggaacgcgtcagcc

SEQ ID NO: 1590713 - DNA, 15 bp, Homo sapiens
gaggaacgcgtcagc

SEQ ID NO: 1590714 - DNA, 15 bp, Homo sapiens
ggaggaacgcgtcag

SEQ ID NO: 1590715 - DNA, 15 bp, Homo sapiens
aggaggaacgcgtca

SEQ ID NO: 1590716 - DNA, 15 bp, Homo sapiens
aaggaggaacgcgtc

SEQ ID NO: 1590717 - DNA, 15 bp, Homo sapiens
caaggaggaacgcgt

SEQ ID NO: 1590718 - DNA, 15 bp, Homo sapiens
acaaggaggaacgcg

SEQ ID NO: 1590719 - DNA, 15 bp, Homo sapiens
cacaaggaggaacgc

SEQ ID NO: 1590720 - DNA, 15 bp, Homo sapiens
gcacaaggaggaacg

SEQ ID NO: 1590721 - DNA, 15 bp, Homo sapiens
tgcacaaggaggaac

SEQ ID NO: 1590722 - DNA, 15 bp, Homo sapiens
ctgcacaaggaggaa

SEQ ID NO: 1590723 - DNA, 15 bp, Homo sapiens
gctgcacaaggagga

SEQ ID NO: 1590724 - DNA, 15 bp, Homo sapiens
agctgcacaaggagg

SEQ ID NO: 1590725 - DNA, 15 bp, Homo sapiens
cagctgcacaaggag

SEQ ID NO: 1590726 - DNA, 15 bp, Homo sapiens
acagctgcacaagga

SEQ ID NO: 1590727 - DNA, 15 bp, Homo sapiens
cacagctgcacaagg

SEQ ID NO: 1590728 - DNA, 15 bp, Homo sapiens
acacagctgcacaag

SEQ ID NO: 1590729 - DNA, 15 bp, Homo sapiens
aacacagctgcacaa

SEQ ID NO: 1590730 - DNA, 15 bp, Homo sapiens
aaacacagctgcaca

SEQ ID NO: 1590731 - DNA, 15 bp, Homo sapiens
gaaacacagctgcac

SEQ ID NO: 1590732 - DNA, 15 bp, Homo sapiens
agaaacacagctgca

SEQ ID NO: 1590733 - DNA, 15 bp, Homo sapiens
cagaaacacagctgc

SEQ ID NO: 1590734 - DNA, 15 bp, Homo sapiens
tcagaaacacagctg

SEQ ID NO: 1590735 - DNA, 15 bp, Homo sapiens
ctcagaaacacagct

SEQ ID NO: 1590736 - DNA, 15 bp, Homo sapiens
tctcagaaacacagc

SEQ ID NO: 1590737 - DNA, 15 bp, Homo sapiens
gtctcagaaacacag

SEQ ID NO: 1590738 - DNA, 15 bp, Homo sapiens
agtctcagaaacaca

SEQ ID NO: 1590739 - DNA, 15 bp, Homo sapiens
aagtctcagaaacac

SEQ ID NO: 1590740 - DNA, 15 bp, Homo sapiens
gaagtctcagaaaca

SEQ ID NO: 1590741 - DNA, 15 bp, Homo sapiens
tgaagtctcagaaac

SEQ ID NO: 1590742 - DNA, 15 bp, Homo sapiens
ctgaagtctcagaaa

SEQ ID NO: 1590743 - DNA, 15 bp, Homo sapiens
cctgaagtctcagaa

SEQ ID NO: 1590744 - DNA, 15 bp, Homo sapiens
gcctgaagtctcaga

SEQ ID NO: 1590745 - DNA, 15 bp, Homo sapiens
ggcctgaagtctcag

SEQ ID NO: 1590746 - DNA, 15 bp, Homo sapiens
tggcctgaagtctca

SEQ ID NO: 1590747 - DNA, 15 bp, Homo sapiens
gtggcctgaagtctc

SEQ ID NO: 1590748 - DNA, 15 bp, Homo sapiens
ggtggcctgaagtct

SEQ ID NO: 1590749 - DNA, 15 bp, Homo sapiens
gggtggcctgaagtc

SEQ ID NO: 1590750 - DNA, 15 bp, Homo sapiens
agggtggcctgaagt

SEQ ID NO: 1590751 - DNA, 15 bp, Homo sapiens
gagggtggcctgaag

SEQ ID NO: 1590752 - DNA, 15 bp, Homo sapiens
agagggtggcctgaa

SEQ ID NO: 1590753 - DNA, 15 bp, Homo sapiens
cagagggtggcctga

SEQ ID NO: 1590754 - DNA, 15 bp, Homo sapiens
acagagggtggcctg

SEQ ID NO: 1590755 - DNA, 15 bp, Homo sapiens
cacagagggtggcct

SEQ ID NO: 1590756 - DNA, 15 bp, Homo sapiens
ccacagagggtggcc

SEQ ID NO: 1590757 - DNA, 15 bp, Homo sapiens
cccacagagggtggc

SEQ ID NO: 1590758 - DNA, 15 bp, Homo sapiens
ccccacagagggtgg

SEQ ID NO: 1590759 - DNA, 15 bp, Homo sapiens
gccccacagagggtg

SEQ ID NO: 1590760 - DNA, 15 bp, Homo sapiens
ggccccacagagggt

SEQ ID NO: 1590761 - DNA, 15 bp, Homo sapiens
gggccccacagaggg

SEQ ID NO: 1590762 - DNA, 15 bp, Homo sapiens
tgggccccacagagg

SEQ ID NO: 1590763 - DNA, 15 bp, Homo sapiens
ttgggccccacagag

SEQ ID NO: 1590764 - DNA, 15 bp, Homo sapiens
attgggccccacaga

SEQ ID NO: 1590765 - DNA, 15 bp, Homo sapiens
aattgggccccacag

SEQ ID NO: 1590766 - DNA, 15 bp, Homo sapiens
aaattgggccccaca

SEQ ID NO: 1590767 - DNA, 15 bp, Homo sapiens
caaattgggccccac

SEQ ID NO: 1590768 - DNA, 15 bp, Homo sapiens
ccaaattgggcccca

SEQ ID NO: 1590769 - DNA, 15 bp, Homo sapiens
accaaattgggcccc

SEQ ID NO: 1590770 - DNA, 15 bp, Homo sapiens
taccaaattgggccc

SEQ ID NO: 1590771 - DNA, 15 bp, Homo sapiens
ctaccaaattgggcc

SEQ ID NO: 1590772 - DNA, 15 bp, Homo sapiens
gctaccaaattgggc

SEQ ID NO: 1590773 - DNA, 15 bp, Homo sapiens
agctaccaaattggg

SEQ ID NO: 1590774 - DNA, 15 bp, Homo sapiens
aagctaccaaattgg

SEQ ID NO: 1590775 - DNA, 15 bp, Homo sapiens
taagctaccaaattg

SEQ ID NO: 1590776 - DNA, 15 bp, Homo sapiens
gtaagctaccaaatt

SEQ ID NO: 1590777 - DNA, 15 bp, Homo sapiens
ggtaagctaccaaat

SEQ ID NO: 1590778 - DNA, 15 bp, Homo sapiens
aggtaagctaccaaa

SEQ ID NO: 1590779 - DNA, 15 bp, Homo sapiens
gaggtaagctaccaa

SEQ ID NO: 1590780 - DNA, 15 bp, Homo sapiens
tgaggtaagctacca

SEQ ID NO: 1590781 - DNA, 15 bp, Homo sapiens
ttgaggtaagctacc

SEQ ID NO: 1590782 - DNA, 15 bp, Homo sapiens
gttgaggtaagctac

SEQ ID NO: 1590783 - DNA, 15 bp, Homo sapiens
agttgaggtaagcta

SEQ ID NO: 1590784 - DNA, 15 bp, Homo sapiens
aagttgaggtaagct

SEQ ID NO: 1590785 - DNA, 15 bp, Homo sapiens
caagttgaggtaagc

SEQ ID NO: 1590786 - DNA, 15 bp, Homo sapiens
ccaagttgaggtaag

SEQ ID NO: 1590787 - DNA, 15 bp, Homo sapiens
tccaagttgaggtaa

SEQ ID NO: 1590788 - DNA, 15 bp, Homo sapiens
ctccaagttgaggta

SEQ ID NO: 1590789 - DNA, 15 bp, Homo sapiens
gctccaagttgaggt

SEQ ID NO: 1590790 - DNA, 15 bp, Homo sapiens
tgctccaagttgagg

SEQ ID NO: 1590791 - DNA, 15 bp, Homo sapiens
atgctccaagttgag

SEQ ID NO: 1590792 - DNA, 15 bp, Homo sapiens
tatgctccaagttga

SEQ ID NO: 1590793 - DNA, 15 bp, Homo sapiens
ctatgctccaagttg

SEQ ID NO: 1590794 - DNA, 15 bp, Homo sapiens
tctatgctccaagtt

SEQ ID NO: 1590795 - DNA, 15 bp, Homo sapiens
ttctatgctccaagt

SEQ ID NO: 1590796 - DNA, 15 bp, Homo sapiens
tttctatgctccaag

SEQ ID NO: 1590797 - DNA, 15 bp, Homo sapiens
ctttctatgctccaa

SEQ ID NO: 1590798 - DNA, 15 bp, Homo sapiens
actttctatgctcca

SEQ ID NO: 1590799 - DNA, 15 bp, Homo sapiens
aactttctatgctcc

SEQ ID NO: 1590800 - DNA, 15 bp, Homo sapiens
aaactttctatgctc

SEQ ID NO: 1590801 - DNA, 15 bp, Homo sapiens
aaaactttctatgct

SEQ ID NO: 1590802 - DNA, 15 bp, Homo sapiens
gaaaactttctatgc

SEQ ID NO: 1590803 - DNA, 15 bp, Homo sapiens
agaaaactttctatg

SEQ ID NO: 1590804 - DNA, 15 bp, Homo sapiens
cagaaaactttctat

SEQ ID NO: 1590805 - DNA, 15 bp, Homo sapiens
ccagaaaactttcta

SEQ ID NO: 1590806 - DNA, 15 bp, Homo sapiens
accagaaaactttct

SEQ ID NO: 1590807 - DNA, 15 bp, Homo sapiens
caccagaaaactttc

SEQ ID NO: 1590808 - DNA, 15 bp, Homo sapiens
gcaccagaaaacttt

SEQ ID NO: 1590809 - DNA, 15 bp, Homo sapiens
ggcaccagaaaactt

SEQ ID NO: 1590810 - DNA, 15 bp, Homo sapiens
gggcaccagaaaact

SEQ ID NO: 1590811 - DNA, 15 bp, Homo sapiens
ggggcaccagaaaac

SEQ ID NO: 1590812 - DNA, 15 bp, Homo sapiens
aggggcaccagaaaa

SEQ ID NO: 1590813 - DNA, 15 bp, Homo sapiens
aaggggcaccagaaa

SEQ ID NO: 1590814 - DNA, 15 bp, Homo sapiens
gaaggggcaccagaa

SEQ ID NO: 1590815 - DNA, 15 bp, Homo sapiens
cgaaggggcaccaga

SEQ ID NO: 1590816 - DNA, 15 bp, Homo sapiens
ccgaaggggcaccag

SEQ ID NO: 1590817 - DNA, 15 bp, Homo sapiens
gccgaaggggcacca

SEQ ID NO: 1590818 - DNA, 15 bp, Homo sapiens
ggccgaaggggcacc

SEQ ID NO: 1590819 - DNA, 15 bp, Homo sapiens
tggccgaaggggcac

SEQ ID NO: 1590820 - DNA, 15 bp, Homo sapiens
ctggccgaaggggca

SEQ ID NO: 1590821 - DNA, 15 bp, Homo sapiens
actggccgaaggggc

SEQ ID NO: 1590822 - DNA, 15 bp, Homo sapiens
aactggccgaagggg

SEQ ID NO: 1590823 - DNA, 15 bp, Homo sapiens
caactggccgaaggg

SEQ ID NO: 1590824 - DNA, 15 bp, Homo sapiens
acaactggccgaagg

SEQ ID NO: 1590825 - DNA, 15 bp, Homo sapiens
aacaactggccgaag

SEQ ID NO: 1590826 - DNA, 15 bp, Homo sapiens
aaacaactggccgaa

SEQ ID NO: 1590827 - DNA, 15 bp, Homo sapiens
gaaacaactggccga

SEQ ID NO: 1590828 - DNA, 15 bp, Homo sapiens
agaaacaactggccg

SEQ ID NO: 1590829 - DNA, 15 bp, Homo sapiens
tagaaacaactggcc

SEQ ID NO: 1590830 - DNA, 15 bp, Homo sapiens
ctagaaacaactggc

SEQ ID NO: 1590831 - DNA, 15 bp, Homo sapiens
tctagaaacaactgg

SEQ ID NO: 1590832 - DNA, 15 bp, Homo sapiens
ttctagaaacaactg

SEQ ID NO: 1590833 - DNA, 15 bp, Homo sapiens
cttctagaaacaact

SEQ ID NO: 1590834 - DNA, 15 bp, Homo sapiens
ccttctagaaacaac

SEQ ID NO: 1590835 - DNA, 15 bp, Homo sapiens
tccttctagaaacaa

SEQ ID NO: 1590836 - DNA, 15 bp, Homo sapiens
ctccttctagaaaca

SEQ ID NO: 1590837 - DNA, 15 bp, Homo sapiens
actccttctagaaac

SEQ ID NO: 1590838 - DNA, 15 bp, Homo sapiens
tactccttctagaaa

SEQ ID NO: 1590839 - DNA, 15 bp, Homo sapiens
atactccttctagaa

SEQ ID NO: 1590840 - DNA, 15 bp, Homo sapiens
gatactccttctaga

SEQ ID NO: 1590841 - DNA, 15 bp, Homo sapiens
agatactccttctag

SEQ ID NO: 1590842 - DNA, 15 bp, Homo sapiens
aagatactccttcta

SEQ ID NO: 1590843 - DNA, 15 bp, Homo sapiens
taagatactccttct

SEQ ID NO: 1590844 - DNA, 15 bp, Homo sapiens
ataagatactccttc

SEQ ID NO: 1590845 - DNA, 15 bp, Homo sapiens
aataagatactcctt

SEQ ID NO: 1590846 - DNA, 15 bp, Homo sapiens
aaataagatactcct

SEQ ID NO: 1590847 - DNA, 15 bp, Homo sapiens
aaaataagatactcc

SEQ ID NO: 1590848 - DNA, 15 bp, Homo sapiens
gaaaataagatactc

SEQ ID NO: 1590849 - DNA, 15 bp, Homo sapiens
tgaaaataagatact

SEQ ID NO: 1590850 - DNA, 15 bp, Homo sapiens
ctgaaaataagatac

SEQ ID NO: 1590851 - DNA, 15 bp, Homo sapiens
actgaaaataagata

SEQ ID NO: 1590852 - DNA, 15 bp, Homo sapiens
gactgaaaataagat

SEQ ID NO: 1590853 - DNA, 15 bp, Homo sapiens
tgactgaaaataaga

SEQ ID NO: 1590854 - DNA, 15 bp, Homo sapiens
gtgactgaaaataag

SEQ ID NO: 1590855 - DNA, 15 bp, Homo sapiens
ggtgactgaaaataa

SEQ ID NO: 1590856 - DNA, 15 bp, Homo sapiens
gggtgactgaaaata

SEQ ID NO: 1590857 - DNA, 15 bp, Homo sapiens
agggtgactgaaaat

SEQ ID NO: 1590858 - DNA, 15 bp, Homo sapiens
gagggtgactgaaaa

SEQ ID NO: 1590859 - DNA, 15 bp, Homo sapiens
agagggtgactgaaa

SEQ ID NO: 1590860 - DNA, 15 bp, Homo sapiens
gagagggtgactgaa

SEQ ID NO: 1590861 - DNA, 15 bp, Homo sapiens
agagagggtgactga

SEQ ID NO: 1590862 - DNA, 15 bp, Homo sapiens
cagagagggtgactg

SEQ ID NO: 1590863 - DNA, 15 bp, Homo sapiens
ccagagagggtgact

SEQ ID NO: 1590864 - DNA, 15 bp, Homo sapiens
tccagagagggtgac

SEQ ID NO: 1590865 - DNA, 15 bp, Homo sapiens
ttccagagagggtga

SEQ ID NO: 1590866 - DNA, 15 bp, Homo sapiens
tttccagagagggtg

SEQ ID NO: 1590867 - DNA, 15 bp, Homo sapiens
ctttccagagagggt

SEQ ID NO: 1590868 - DNA, 15 bp, Homo sapiens
actttccagagaggg

SEQ ID NO: 1590869 - DNA, 15 bp, Homo sapiens
aactttccagagagg

SEQ ID NO: 1590870 - DNA, 15 bp, Homo sapiens
aaactttccagagag

SEQ ID NO: 1590871 - DNA, 15 bp, Homo sapiens
caaactttccagaga

SEQ ID NO: 1590872 - DNA, 15 bp, Homo sapiens
acaaactttccagag

SEQ ID NO: 1590873 - DNA, 15 bp, Homo sapiens
gacaaactttccaga

SEQ ID NO: 1590874 - DNA, 15 bp, Homo sapiens
ggacaaactttccag

SEQ ID NO: 1590875 - DNA, 15 bp, Homo sapiens
tggacaaactttcca

SEQ ID NO: 1590876 - DNA, 15 bp, Homo sapiens
gtggacaaactttcc

SEQ ID NO: 1590877 - DNA, 15 bp, Homo sapiens
ggtggacaaactttc

SEQ ID NO: 1590878 - DNA, 15 bp, Homo sapiens
gggtggacaaacttt

SEQ ID NO: 1590879 - DNA, 15 bp, Homo sapiens
tgggtggacaaactt

SEQ ID NO: 1590880 - DNA, 15 bp, Homo sapiens
ttgggtggacaaact

SEQ ID NO: 1590881 - DNA, 15 bp, Homo sapiens
cttgggtggacaaac

SEQ ID NO: 1590882 - DNA, 15 bp, Homo sapiens
gcttgggtggacaaa

SEQ ID NO: 1590883 - DNA, 15 bp, Homo sapiens
agcttgggtggacaa

SEQ ID NO: 1590884 - DNA, 15 bp, Homo sapiens
cagcttgggtggaca

SEQ ID NO: 1590885 - DNA, 15 bp, Homo sapiens
tcagcttgggtggac

SEQ ID NO: 1590886 - DNA, 15 bp, Homo sapiens
ctcagcttgggtgga

SEQ ID NO: 1590887 - DNA, 15 bp, Homo sapiens
cctcagcttgggtgg

SEQ ID NO: 1590888 - DNA, 15 bp, Homo sapiens
ccctcagcttgggtg

SEQ ID NO: 1590889 - DNA, 15 bp, Homo sapiens
tccctcagcttgggt

SEQ ID NO: 1590890 - DNA, 15 bp, Homo sapiens
atccctcagcttggg

SEQ ID NO: 1590891 - DNA, 15 bp, Homo sapiens
aatccctcagcttgg

SEQ ID NO: 1590892 - DNA, 15 bp, Homo sapiens
aaatccctcagcttg

SEQ ID NO: 1590893 - DNA, 15 bp, Homo sapiens
caaatccctcagctt

SEQ ID NO: 1590894 - DNA, 15 bp, Homo sapiens
ccaaatccctcagct

SEQ ID NO: 1590895 - DNA, 15 bp, Homo sapiens
tccaaatccctcagc

SEQ ID NO: 1590896 - DNA, 15 bp, Homo sapiens
atccaaatccctcag

SEQ ID NO: 1590897 - DNA, 15 bp, Homo sapiens
tatccaaatccctca

SEQ ID NO: 1590898 - DNA, 15 bp, Homo sapiens
atatccaaatccctc

SEQ ID NO: 1590899 - DNA, 15 bp, Homo sapiens
catatccaaatccct

SEQ ID NO: 1590900 - DNA, 15 bp, Homo sapiens
ccatatccaaatccc

SEQ ID NO: 1590901 - DNA, 15 bp, Homo sapiens
tccatatccaaatcc

SEQ ID NO: 1590902 - DNA, 15 bp, Homo sapiens
atccatatccaaatc

SEQ ID NO: 1590903 - DNA, 15 bp, Homo sapiens
catccatatccaaat

SEQ ID NO: 1590904 - DNA, 15 bp, Homo sapiens
ccatccatatccaaa

SEQ ID NO: 1590905 - DNA, 15 bp, Homo sapiens
cccatccatatccaa

SEQ ID NO: 1590906 - DNA, 15 bp, Homo sapiens
tcccatccatatcca

SEQ ID NO: 1590907 - DNA, 15 bp, Homo sapiens
ctcccatccatatcc

SEQ ID NO: 1590908 - DNA, 15 bp, Homo sapiens
actcccatccatatc

SEQ ID NO: 1590909 - DNA, 15 bp, Homo sapiens
tactcccatccatat

SEQ ID NO: 1590910 - DNA, 15 bp, Homo sapiens
ctactcccatccata

SEQ ID NO: 1590911 - DNA, 15 bp, Homo sapiens
tctactcccatccat

SEQ ID NO: 1590912 - DNA, 15 bp, Homo sapiens
atctactcccatcca

SEQ ID NO: 1590913 - DNA, 15 bp, Homo sapiens
catctactcccatcc

SEQ ID NO: 1590914 - DNA, 15 bp, Homo sapiens
tcatctactcccatc

SEQ ID NO: 1590915 - DNA, 15 bp, Homo sapiens
ttcatctactcccat

SEQ ID NO: 1590916 - DNA, 15 bp, Homo sapiens
tttcatctactccca

SEQ ID NO: 1590917 - DNA, 15 bp, Homo sapiens
ctttcatctactccc

SEQ ID NO: 1590918 - DNA, 15 bp, Homo sapiens
actttcatctactcc

SEQ ID NO: 1590919 - DNA, 15 bp, Homo sapiens
tactttcatctactc

SEQ ID NO: 1590920 - DNA, 15 bp, Homo sapiens
ttactttcatctact

SEQ ID NO: 1590921 - DNA, 15 bp, Homo sapiens
cttactttcatctac

SEQ ID NO: 1590922 - DNA, 15 bp, Homo sapiens
acttactttcatcta

SEQ ID NO: 1590923 - DNA, 15 bp, Homo sapiens
aacttactttcatct

SEQ ID NO: 1590924 - DNA, 15 bp, Homo sapiens
aaacttactttcatc

SEQ ID NO: 1590925 - DNA, 15 bp, Homo sapiens
aaaacttactttcat

SEQ ID NO: 1590926 - DNA, 15 bp, Homo sapiens
taaaacttactttca

SEQ ID NO: 1590927 - DNA, 15 bp, Homo sapiens
ataaaacttactttc

SEQ ID NO: 1590928 - DNA, 15 bp, Homo sapiens
aataaaacttacttt

SEQ ID NO: 1590929 - DNA, 15 bp, Homo sapiens
caataaaacttactt

SEQ ID NO: 1590930 - DNA, 15 bp, Homo sapiens
tcaataaaacttact

SEQ ID NO: 1590931 - DNA, 15 bp, Homo sapiens
ttcaataaaacttac

SEQ ID NO: 1590932 - DNA, 15 bp, Homo sapiens
cttcaataaaactta

SEQ ID NO: 1590933 - DNA, 15 bp, Homo sapiens
ccttcaataaaactt

SEQ ID NO: 1590934 - DNA, 15 bp, Homo sapiens
cccttcaataaaact

SEQ ID NO: 1590935 - DNA, 15 bp, Homo sapiens
ccccttcaataaaac

SEQ ID NO: 1590936 - DNA, 15 bp, Homo sapiens
cccccttcaataaaa

SEQ ID NO: 1590937 - DNA, 15 bp, Homo sapiens
acccccttcaataaa

SEQ ID NO: 1590938 - DNA, 15 bp, Homo sapiens
gacccccttcaataa

SEQ ID NO: 1590939 - DNA, 15 bp, Homo sapiens
agacccccttcaata

SEQ ID NO: 1590940 - DNA, 15 bp, Homo sapiens
cagacccccttcaat

SEQ ID NO: 1590941 - DNA, 15 bp, Homo sapiens
gcagacccccttcaa

SEQ ID NO: 1590942 - DNA, 15 bp, Homo sapiens
tgcagacccccttca

SEQ ID NO: 1590943 - DNA, 15 bp, Homo sapiens
atgcagacccccttc

SEQ ID NO: 1590944 - DNA, 15 bp, Homo sapiens
tatgcagaccccctt

SEQ ID NO: 1590945 - DNA, 15 bp, Homo sapiens
atatgcagaccccct

SEQ ID NO: 1590946 - DNA, 15 bp, Homo sapiens
catatgcagaccccc

SEQ ID NO: 1590947 - DNA, 15 bp, Homo sapiens
gcatatgcagacccc

SEQ ID NO: 1590948 - DNA, 15 bp, Homo sapiens
ggcatatgcagaccc

SEQ ID NO: 1590949 - DNA, 15 bp, Homo sapiens
gggcatatgcagacc

SEQ ID NO: 1590950 - DNA, 15 bp, Homo sapiens
agggcatatgcagac

SEQ ID NO: 1590951 - DNA, 15 bp, Homo sapiens
aagggcatatgcaga

SEQ ID NO: 1590952 - DNA, 15 bp, Homo sapiens
taagggcatatgcag

SEQ ID NO: 1590953 - DNA, 15 bp, Homo sapiens
ataagggcatatgca

SEQ ID NO: 1590954 - DNA, 15 bp, Homo sapiens
gataagggcatatgc

SEQ ID NO: 1590955 - DNA, 15 bp, Homo sapiens
ggataagggcatatg

SEQ ID NO: 1590956 - DNA, 15 bp, Homo sapiens
aggataagggcatat

SEQ ID NO: 1590957 - DNA, 15 bp, Homo sapiens
gaggataagggcata

SEQ ID NO: 1590958 - DNA, 15 bp, Homo sapiens
tgaggataagggcat

SEQ ID NO: 1590959 - DNA, 15 bp, Homo sapiens
gtgaggataagggca

SEQ ID NO: 1590960 - DNA, 15 bp, Homo sapiens
ggtgaggataagggc

SEQ ID NO: 1590961 - DNA, 15 bp, Homo sapiens
aggtgaggataaggg

SEQ ID NO: 1590962 - DNA, 15 bp, Homo sapiens
gaggtgaggataagg

SEQ ID NO: 1590963 - DNA, 15 bp, Homo sapiens
tgaggtgaggataag

SEQ ID NO: 1590964 - DNA, 15 bp, Homo sapiens
atgaggtgaggataa

SEQ ID NO: 1590965 - DNA, 15 bp, Homo sapiens
catgaggtgaggata

SEQ ID NO: 1590966 - DNA, 15 bp, Homo sapiens
acatgaggtgaggat

SEQ ID NO: 1590967 - DNA, 15 bp, Homo sapiens
tacatgaggtgagga

SEQ ID NO: 1590968 - DNA, 15 bp, Homo sapiens
ctacatgaggtgagg

SEQ ID NO: 1590969 - DNA, 15 bp, Homo sapiens
actacatgaggtgag

SEQ ID NO: 1590970 - DNA, 15 bp, Homo sapiens
aactacatgaggtga

SEQ ID NO: 1590971 - DNA, 15 bp, Homo sapiens
caactacatgaggtg

SEQ ID NO: 1590972 - DNA, 15 bp, Homo sapiens
acaactacatgaggt

SEQ ID NO: 1590973 - DNA, 15 bp, Homo sapiens
cacaactacatgagg

SEQ ID NO: 1590974 - DNA, 15 bp, Homo sapiens
acacaactacatgag

SEQ ID NO: 1590975 - DNA, 15 bp, Homo sapiens
aacacaactacatga

SEQ ID NO: 1590976 - DNA, 15 bp, Homo sapiens
aaacacaactacatg

SEQ ID NO: 1590977 - DNA, 15 bp, Homo sapiens
gaaacacaactacat

SEQ ID NO: 1590978 - DNA, 15 bp, Homo sapiens
agaaacacaactaca

SEQ ID NO: 1590979 - DNA, 15 bp, Homo sapiens
cagaaacacaactac

SEQ ID NO: 1590980 - DNA, 15 bp, Homo sapiens
tcagaaacacaacta

SEQ ID NO: 1590981 - DNA, 15 bp, Homo sapiens
ttcagaaacacaact

SEQ ID NO: 1590982 - DNA, 15 bp, Homo sapiens
gttcagaaacacaac

SEQ ID NO: 1590983 - DNA, 15 bp, Homo sapiens
agttcagaaacacaa

SEQ ID NO: 1590984 - DNA, 15 bp, Homo sapiens
aagttcagaaacaca

SEQ ID NO: 1590985 - DNA, 15 bp, Homo sapiens
aaagttcagaaacac

SEQ ID NO: 1590986 - DNA, 15 bp, Homo sapiens
gaaagttcagaaaca

SEQ ID NO: 1590987 - DNA, 15 bp, Homo sapiens
agaaagttcagaaac

SEQ ID NO: 1590988 - DNA, 15 bp, Homo sapiens
aagaaagttcagaaa

SEQ ID NO: 1590989 - DNA, 15 bp, Homo sapiens
aaagaaagttcagaa

SEQ ID NO: 1590990 - DNA, 15 bp, Homo sapiens
taaagaaagttcaga

SEQ ID NO: 1590991 - DNA, 15 bp, Homo sapiens
ttaaagaaagttcag

SEQ ID NO: 1590992 - DNA, 15 bp, Homo sapiens
attaaagaaagttca

SEQ ID NO: 1590993 - DNA, 15 bp, Homo sapiens
cattaaagaaagttc

SEQ ID NO: 1590994 - DNA, 15 bp, Homo sapiens
tcattaaagaaagtt

SEQ ID NO: 1590995 - DNA, 15 bp, Homo sapiens
ttcattaaagaaagt

SEQ ID NO: 1590996 - DNA, 15 bp, Homo sapiens
attcattaaagaaag

SEQ ID NO: 1590997 - DNA, 15 bp, Homo sapiens
gattcattaaagaaa

SEQ ID NO: 1590998 - DNA, 15 bp, Homo sapiens
agattcattaaagaa

SEQ ID NO: 1590999 - DNA, 15 bp, Homo sapiens
gagattcattaaaga

SEQ ID NO: 1591000 - DNA, 15 bp, Homo sapiens
tgagattcattaaag

SEQ ID NO: 1591001 - DNA, 15 bp, Homo sapiens
ttgagattcattaaa

SEQ ID NO: 1591002 - DNA, 15 bp, Homo sapiens
tttgagattcattaa

SEQ ID NO: 1591003 - DNA, 15 bp, Homo sapiens
ctttgagattcatta

SEQ ID NO: 1591004 - DNA, 15 bp, Homo sapiens
cctttgagattcatt

SEQ ID NO: 1591005 - DNA, 15 bp, Homo sapiens
tcctttgagattcat

SEQ ID NO: 1591006 - DNA, 15 bp, Homo sapiens
ttcctttgagattca

SEQ ID NO: 1591007 - DNA, 15 bp, Homo sapiens
gttcctttgagattc

SEQ ID NO: 1591008 - DNA, 15 bp, Homo sapiens
cgttcctttgagatt

SEQ ID NO: 1591009 - DNA, 15 bp, Homo sapiens
ccgttcctttgagat

SEQ ID NO: 1591010 - DNA, 15 bp, Homo sapiens
tccgttcctttgaga

SEQ ID NO: 1591011 - DNA, 15 bp, Homo sapiens
ctccgttcctttgag

SEQ ID NO: 1591012 - DNA, 15 bp, Homo sapiens
tctccgttcctttga

SEQ ID NO: 1591013 - DNA, 15 bp, Homo sapiens
ttctccgttcctttg

SEQ ID NO: 1591014 - DNA, 15 bp, Homo sapiens
tttctccgttccttt

SEQ ID NO: 1591015 - DNA, 15 bp, Homo sapiens
ctttctccgttcctt

SEQ ID NO: 1591016 - DNA, 15 bp, Homo sapiens
tctttctccgttcct

SEQ ID NO: 1591017 - DNA, 15 bp, Homo sapiens
ctctttctccgttcc

SEQ ID NO: 1591018 - DNA, 15 bp, Homo sapiens
gctctttctccgttc

SEQ ID NO: 1591019 - DNA, 15 bp, Homo sapiens
tgctctttctccgtt

SEQ ID NO: 1591020 - DNA, 15 bp, Homo sapiens
ctgctctttctccgt

SEQ ID NO: 1591021 - DNA, 15 bp, Homo sapiens
cctgctctttctccg

SEQ ID NO: 1591022 - DNA, 15 bp, Homo sapiens
acctgctctttctcc

SEQ ID NO: 1591023 - DNA, 15 bp, Homo sapiens
aacctgctctttctc

SEQ ID NO: 1591024 - DNA, 15 bp, Homo sapiens
gaacctgctctttct

SEQ ID NO: 1591025 - DNA, 15 bp, Homo sapiens
tgaacctgctctttc

SEQ ID NO: 1591026 - DNA, 15 bp, Homo sapiens
ctgaacctgctcttt

SEQ ID NO: 1591027 - DNA, 15 bp, Homo sapiens
gctgaacctgctctt

SEQ ID NO: 1591028 - DNA, 15 bp, Homo sapiens
tgctgaacctgctct

SEQ ID NO: 1591029 - DNA, 15 bp, Homo sapiens
ttgctgaacctgctc

SEQ ID NO: 1591030 - DNA, 15 bp, Homo sapiens
gttgctgaacctgct

SEQ ID NO: 1591031 - DNA, 15 bp, Homo sapiens
agttgctgaacctgc

SEQ ID NO: 1591032 - DNA, 15 bp, Homo sapiens
aagttgctgaacctg

SEQ ID NO: 1591033 - DNA, 15 bp, Homo sapiens
caagttgctgaacct

SEQ ID NO: 1591034 - DNA, 15 bp, Homo sapiens
ccaagttgctgaacc

SEQ ID NO: 1591035 - DNA, 15 bp, Homo sapiens
gccaagttgctgaac

SEQ ID NO: 1591036 - DNA, 15 bp, Homo sapiens
tgccaagttgctgaa

SEQ ID NO: 1591037 - DNA, 15 bp, Homo sapiens
ctgccaagttgctga

SEQ ID NO: 1591038 - DNA, 15 bp, Homo sapiens
gctgccaagttgctg

SEQ ID NO: 1591039 - DNA, 15 bp, Homo sapiens
tgctgccaagttgct

SEQ ID NO: 1591040 - DNA, 15 bp, Homo sapiens
gtgctgccaagttgc

SEQ ID NO: 1591041 - DNA, 15 bp, Homo sapiens
tgtgctgccaagttg

SEQ ID NO: 1591042 - DNA, 15 bp, Homo sapiens
ctgtgctgccaagtt

SEQ ID NO: 1591043 - DNA, 15 bp, Homo sapiens
gctgtgctgccaagt

SEQ ID NO: 1591044 - DNA, 15 bp, Homo sapiens
agctgtgctgccaag

SEQ ID NO: 1591045 - DNA, 15 bp, Homo sapiens
aagctgtgctgccaa

SEQ ID NO: 1591046 - DNA, 15 bp, Homo sapiens
aaagctgtgctgcca

SEQ ID NO: 1591047 - DNA, 15 bp, Homo sapiens
aaaagctgtgctgcc

SEQ ID NO: 1591048 - DNA, 15 bp, Homo sapiens
caaaagctgtgctgc

SEQ ID NO: 1591049 - DNA, 15 bp, Homo sapiens
gcaaaagctgtgctg

SEQ ID NO: 1591050 - DNA, 15 bp, Homo sapiens
ggcaaaagctgtgct

SEQ ID NO: 1591051 - DNA, 15 bp, Homo sapiens
aggcaaaagctgtgc

SEQ ID NO: 1591052 - DNA, 15 bp, Homo sapiens
gaggcaaaagctgtg

SEQ ID NO: 1591053 - DNA, 15 bp, Homo sapiens
tgaggcaaaagctgt

SEQ ID NO: 1591054 - DNA, 15 bp, Homo sapiens
ctgaggcaaaagctg

SEQ ID NO: 1591055 - DNA, 15 bp, Homo sapiens
gctgaggcaaaagct

SEQ ID NO: 1591056 - DNA, 15 bp, Homo sapiens
agctgaggcaaaagc

SEQ ID NO: 1591057 - DNA, 15 bp, Homo sapiens
cagctgaggcaaaag

SEQ ID NO: 1591058 - DNA, 15 bp, Homo sapiens
tcagctgaggcaaaa

SEQ ID NO: 1591059 - DNA, 15 bp, Homo sapiens
ttcagctgaggcaaa

SEQ ID NO: 1591060 - DNA, 15 bp, Homo sapiens
cttcagctgaggcaa

SEQ ID NO: 1591061 - DNA, 15 bp, Homo sapiens
gcttcagctgaggca

SEQ ID NO: 1591062 - DNA, 15 bp, Homo sapiens
ggcttcagctgaggc

SEQ ID NO: 1591063 - DNA, 15 bp, Homo sapiens
tggcttcagctgagg

SEQ ID NO: 1591064 - DNA, 15 bp, Homo sapiens
atggcttcagctgag

SEQ ID NO: 1591065 - DNA, 15 bp, Homo sapiens
tatggcttcagctga

SEQ ID NO: 1591066 - DNA, 15 bp, Homo sapiens
ctatggcttcagctg

SEQ ID NO: 1591067 - DNA, 15 bp, Homo sapiens
gctatggcttcagct

SEQ ID NO: 1591068 - DNA, 15 bp, Homo sapiens
agctatggcttcagc

SEQ ID NO: 1591069 - DNA, 15 bp, Homo sapiens
cagctatggcttcag

SEQ ID NO: 1591070 - DNA, 15 bp, Homo sapiens
tcagctatggcttca

SEQ ID NO: 1591071 - DNA, 15 bp, Homo sapiens
ttcagctatggcttc

SEQ ID NO: 1591072 - DNA, 15 bp, Homo sapiens
cttcagctatggctt

SEQ ID NO: 1591073 - DNA, 15 bp, Homo sapiens
acttcagctatggct

SEQ ID NO: 1591074 - DNA, 15 bp, Homo sapiens
cacttcagctatggc

SEQ ID NO: 1591075 - DNA, 15 bp, Homo sapiens
ccacttcagctatgg

SEQ ID NO: 1591076 - DNA, 15 bp, Homo sapiens
gccacttcagctatg

SEQ ID NO: 1591077 - DNA, 15 bp, Homo sapiens
agccacttcagctat

SEQ ID NO: 1591078 - DNA, 15 bp, Homo sapiens
cagccacttcagcta

SEQ ID NO: 1591079 - DNA, 15 bp, Homo sapiens
ccagccacttcagct

SEQ ID NO: 1591080 - DNA, 15 bp, Homo sapiens
gccagccacttcagc

SEQ ID NO: 1591081 - DNA, 15 bp, Homo sapiens
agccagccacttcag

SEQ ID NO: 1591082 - DNA, 15 bp, Homo sapiens
cagccagccacttca

SEQ ID NO: 1591083 - DNA, 15 bp, Homo sapiens
gcagccagccacttc

SEQ ID NO: 1591084 - DNA, 15 bp, Homo sapiens
tgcagccagccactt

SEQ ID NO: 1591085 - DNA, 15 bp, Homo sapiens
atgcagccagccact

SEQ ID NO: 1591086 - DNA, 15 bp, Homo sapiens
aatgcagccagccac

SEQ ID NO: 1591087 - DNA, 15 bp, Homo sapiens
aaatgcagccagcca

SEQ ID NO: 1591088 - DNA, 15 bp, Homo sapiens
gaaatgcagccagcc

SEQ ID NO: 1591089 - DNA, 15 bp, Homo sapiens
agaaatgcagccagc

SEQ ID NO: 1591090 - DNA, 15 bp, Homo sapiens
gagaaatgcagccag

SEQ ID NO: 1591091 - DNA, 15 bp, Homo sapiens
agagaaatgcagcca

SEQ ID NO: 1591092 - DNA, 15 bp, Homo sapiens
gagagaaatgcagcc

SEQ ID NO: 1591093 - DNA, 15 bp, Homo sapiens
agagagaaatgcagc

SEQ ID NO: 1591094 - DNA, 15 bp, Homo sapiens
cagagagaaatgcag

SEQ ID NO: 1591095 - DNA, 15 bp, Homo sapiens
tcagagagaaatgca

SEQ ID NO: 1591096 - DNA, 15 bp, Homo sapiens
atcagagagaaatgc

SEQ ID NO: 1591097 - DNA, 15 bp, Homo sapiens
tatcagagagaaatg

SEQ ID NO: 1591098 - DNA, 15 bp, Homo sapiens
ctatcagagagaaat

SEQ ID NO: 1591099 - DNA, 15 bp, Homo sapiens
actatcagagagaaa

SEQ ID NO: 1591100 - DNA, 15 bp, Homo sapiens
cactatcagagagaa

SEQ ID NO: 1591101 - DNA, 15 bp, Homo sapiens
tcactatcagagaga

SEQ ID NO: 1591102 - DNA, 15 bp, Homo sapiens
gtcactatcagagag

SEQ ID NO: 1591103 - DNA, 15 bp, Homo sapiens
ggtcactatcagaga

SEQ ID NO: 1591104 - DNA, 15 bp, Homo sapiens
aggtcactatcagag

SEQ ID NO: 1591105 - DNA, 15 bp, Homo sapiens
taggtcactatcaga

SEQ ID NO: 1591106 - DNA, 15 bp, Homo sapiens
ttaggtcactatcag

SEQ ID NO: 1591107 - DNA, 15 bp, Homo sapiens
attaggtcactatca

SEQ ID NO: 1591108 - DNA, 15 bp, Homo sapiens
cattaggtcactatc

SEQ ID NO: 1591109 - DNA, 15 bp, Homo sapiens
gcattaggtcactat

SEQ ID NO: 1591110 - DNA, 15 bp, Homo sapiens
ggcattaggtcacta

SEQ ID NO: 1591111 - DNA, 15 bp, Homo sapiens
gggcattaggtcact

SEQ ID NO: 1591112 - DNA, 15 bp, Homo sapiens
tgggcattaggtcac

SEQ ID NO: 1591113 - DNA, 15 bp, Homo sapiens
ttgggcattaggtca

SEQ ID NO: 1591114 - DNA, 15 bp, Homo sapiens
gttgggcattaggtc

SEQ ID NO: 1591115 - DNA, 15 bp, Homo sapiens
agttgggcattaggt

SEQ ID NO: 1591116 - DNA, 15 bp, Homo sapiens
aagttgggcattagg

SEQ ID NO: 1591117 - DNA, 15 bp, Homo sapiens
caagttgggcattag

SEQ ID NO: 1591118 - DNA, 15 bp, Homo sapiens
ccaagttgggcatta

SEQ ID NO: 1591119 - DNA, 15 bp, Homo sapiens
accaagttgggcatt

SEQ ID NO: 1591120 - DNA, 15 bp, Homo sapiens
caccaagttgggcat

SEQ ID NO: 1591121 - DNA, 15 bp, Homo sapiens
ccaccaagttgggca

SEQ ID NO: 1591122 - DNA, 15 bp, Homo sapiens
cccaccaagttgggc

SEQ ID NO: 1591123 - DNA, 15 bp, Homo sapiens
gcccaccaagttggg

SEQ ID NO: 1591124 - DNA, 15 bp, Homo sapiens
tgcccaccaagttgg

SEQ ID NO: 1591125 - DNA, 15 bp, Homo sapiens
atgcccaccaagttg

SEQ ID NO: 1591126 - DNA, 15 bp, Homo sapiens
gatgcccaccaagtt

SEQ ID NO: 1591127 - DNA, 15 bp, Homo sapiens
cgatgcccaccaagt

SEQ ID NO: 1591128 - DNA, 15 bp, Homo sapiens
tcgatgcccaccaag

SEQ ID NO: 1591129 - DNA, 15 bp, Homo sapiens
ctcgatgcccaccaa

SEQ ID NO: 1591130 - DNA, 15 bp, Homo sapiens
cctcgatgcccacca

SEQ ID NO: 1591131 - DNA, 15 bp, Homo sapiens
gcctcgatgcccacc

SEQ ID NO: 1591132 - DNA, 15 bp, Homo sapiens
tgcctcgatgcccac

SEQ ID NO: 1591133 - DNA, 15 bp, Homo sapiens
atgcctcgatgccca

SEQ ID NO: 1591134 - DNA, 15 bp, Homo sapiens
catgcctcgatgccc

SEQ ID NO: 1591135 - DNA, 15 bp, Homo sapiens
tcatgcctcgatgcc

SEQ ID NO: 1591136 - DNA, 15 bp, Homo sapiens
atcatgcctcgatgc

SEQ ID NO: 1591137 - DNA, 15 bp, Homo sapiens
gatcatgcctcgatg

SEQ ID NO: 1591138 - DNA, 15 bp, Homo sapiens
ggatcatgcctcgat

SEQ ID NO: 1591139 - DNA, 15 bp, Homo sapiens
aggatcatgcctcga

SEQ ID NO: 1591140 - DNA, 15 bp, Homo sapiens
caggatcatgcctcg

SEQ ID NO: 1591141 - DNA, 15 bp, Homo sapiens
ccaggatcatgcctc

SEQ ID NO: 1591142 - DNA, 15 bp, Homo sapiens
cccaggatcatgcct

SEQ ID NO: 1591143 - DNA, 15 bp, Homo sapiens
gcccaggatcatgcc

SEQ ID NO: 1591144 - DNA, 15 bp, Homo sapiens
agcccaggatcatgc

SEQ ID NO: 1591145 - DNA, 15 bp, Homo sapiens
gagcccaggatcatg

SEQ ID NO: 1591146 - DNA, 15 bp, Homo sapiens
ggagcccaggatcat

SEQ ID NO: 1591147 - DNA, 15 bp, Homo sapiens
aggagcccaggatca

SEQ ID NO: 1591148 - DNA, 15 bp, Homo sapiens
caggagcccaggatc

SEQ ID NO: 1591149 - DNA, 15 bp, Homo sapiens
gcaggagcccaggat

SEQ ID NO: 1591150 - DNA, 15 bp, Homo sapiens
cgcaggagcccagga

SEQ ID NO: 1591151 - DNA, 15 bp, Homo sapiens
gcgcaggagcccagg

SEQ ID NO: 1591152 - DNA, 15 bp, Homo sapiens
ggcgcaggagcccag

SEQ ID NO: 1591153 - DNA, 15 bp, Homo sapiens
aggcgcaggagccca

SEQ ID NO: 1591154 - DNA, 15 bp, Homo sapiens
gaggcgcaggagccc

SEQ ID NO: 1591155 - DNA, 15 bp, Homo sapiens
agaggcgcaggagcc

SEQ ID NO: 1591156 - DNA, 15 bp, Homo sapiens
gagaggcgcaggagc

SEQ ID NO: 1591157 - DNA, 15 bp, Homo sapiens
ggagaggcgcaggag

SEQ ID NO: 1591158 - DNA, 15 bp, Homo sapiens
aggagaggcgcagga

SEQ ID NO: 1591159 - DNA, 15 bp, Homo sapiens
gaggagaggcgcagg

SEQ ID NO: 1591160 - DNA, 15 bp, Homo sapiens
cgaggagaggcgcag

SEQ ID NO: 1591161 - DNA, 15 bp, Homo sapiens
acgaggagaggcgca

SEQ ID NO: 1591162 - DNA, 15 bp, Homo sapiens
aacgaggagaggcgc

SEQ ID NO: 1591163 - DNA, 15 bp, Homo sapiens
aaacgaggagaggcg

SEQ ID NO: 1591164 - DNA, 15 bp, Homo sapiens
caaacgaggagaggc

SEQ ID NO: 1591165 - DNA, 15 bp, Homo sapiens
gcaaacgaggagagg

SEQ ID NO: 1591166 - DNA, 15 bp, Homo sapiens
agcaaacgaggagag

SEQ ID NO: 1591167 - DNA, 15 bp, Homo sapiens
tagcaaacgaggaga

SEQ ID NO: 1591168 - DNA, 15 bp, Homo sapiens
ttagcaaacgaggag

SEQ ID NO: 1591169 - DNA, 15 bp, Homo sapiens
attagcaaacgagga

SEQ ID NO: 1591170 - DNA, 15 bp, Homo sapiens
cattagcaaacgagg

SEQ ID NO: 1591171 - DNA, 15 bp, Homo sapiens
acattagcaaacgag

SEQ ID NO: 1591172 - DNA, 15 bp, Homo sapiens
aacattagcaaacga

SEQ ID NO: 1591173 - DNA, 15 bp, Homo sapiens
aaacattagcaaacg

SEQ ID NO: 1591174 - DNA, 15 bp, Homo sapiens
gaaacattagcaaac

SEQ ID NO: 1591175 - DNA, 15 bp, Homo sapiens
ggaaacattagcaaa

SEQ ID NO: 1591176 - DNA, 15 bp, Homo sapiens
gggaaacattagcaa

SEQ ID NO: 1591177 - DNA, 15 bp, Homo sapiens
cgggaaacattagca

SEQ ID NO: 1591178 - DNA, 15 bp, Homo sapiens
acgggaaacattagc

SEQ ID NO: 1591179 - DNA, 15 bp, Homo sapiens
aacgggaaacattag

SEQ ID NO: 1591180 - DNA, 15 bp, Homo sapiens
aaacgggaaacatta

SEQ ID NO: 1591181 - DNA, 15 bp, Homo sapiens
caaacgggaaacatt

SEQ ID NO: 1591182 - DNA, 15 bp, Homo sapiens
tcaaacgggaaacat

SEQ ID NO: 1591183 - DNA, 15 bp, Homo sapiens
gtcaaacgggaaaca

SEQ ID NO: 1591184 - DNA, 15 bp, Homo sapiens
ggtcaaacgggaaac

SEQ ID NO: 1591185 - DNA, 15 bp, Homo sapiens
aggtcaaacgggaaa

SEQ ID NO: 1591186 - DNA, 15 bp, Homo sapiens
gaggtcaaacgggaa

SEQ ID NO: 1591187 - DNA, 15 bp, Homo sapiens
agaggtcaaacggga

SEQ ID NO: 1591188 - DNA, 15 bp, Homo sapiens
cagaggtcaaacggg

SEQ ID NO: 1591189 - DNA, 15 bp, Homo sapiens
gcagaggtcaaacgg

SEQ ID NO: 1591190 - DNA, 15 bp, Homo sapiens
agcagaggtcaaacg

SEQ ID NO: 1591191 - DNA, 15 bp, Homo sapiens
aagcagaggtcaaac

SEQ ID NO: 1591192 - DNA, 15 bp, Homo sapiens
gaagcagaggtcaaa

SEQ ID NO: 1591193 - DNA, 15 bp, Homo sapiens
cgaagcagaggtcaa

SEQ ID NO: 1591194 - DNA, 15 bp, Homo sapiens
acgaagcagaggtca

SEQ ID NO: 1591195 - DNA, 15 bp, Homo sapiens
tacgaagcagaggtc

SEQ ID NO: 1591196 - DNA, 15 bp, Homo sapiens
ttacgaagcagaggt

SEQ ID NO: 1591197 - DNA, 15 bp, Homo sapiens
cttacgaagcagagg

SEQ ID NO: 1591198 - DNA, 15 bp, Homo sapiens
gcttacgaagcagag

SEQ ID NO: 1591199 - DNA, 15 bp, Homo sapiens
tgcttacgaagcaga

SEQ ID NO: 1591200 - DNA, 15 bp, Homo sapiens
atgcttacgaagcag

SEQ ID NO: 1591201 - DNA, 15 bp, Homo sapiens
aatgcttacgaagca

SEQ ID NO: 1591202 - DNA, 15 bp, Homo sapiens
aaatgcttacgaagc

SEQ ID NO: 1591203 - DNA, 15 bp, Homo sapiens
taaatgcttacgaag

SEQ ID NO: 1591204 - DNA, 15 bp, Homo sapiens
ataaatgcttacgaa

SEQ ID NO: 1591205 - DNA, 15 bp, Homo sapiens
aataaatgcttacga

SEQ ID NO: 1591206 - DNA, 15 bp, Homo sapiens
taataaatgcttacg

SEQ ID NO: 1591207 - DNA, 15 bp, Homo sapiens
gtaataaatgcttac

SEQ ID NO: 1591208 - DNA, 15 bp, Homo sapiens
ggtaataaatgctta

SEQ ID NO: 1591209 - DNA, 15 bp, Homo sapiens
gggtaataaatgctt

SEQ ID NO: 1591210 - DNA, 15 bp, Homo sapiens
agggtaataaatgct

SEQ ID NO: 1591211 - DNA, 15 bp, Homo sapiens
aagggtaataaatgc

SEQ ID NO: 1591212 - DNA, 15 bp, Homo sapiens
caagggtaataaatg

SEQ ID NO: 1591213 - DNA, 15 bp, Homo sapiens
acaagggtaataaat

SEQ ID NO: 1591214 - DNA, 15 bp, Homo sapiens
aacaagggtaataaa

SEQ ID NO: 1591215 - DNA, 15 bp, Homo sapiens
taacaagggtaataa

SEQ ID NO: 1591216 - DNA, 15 bp, Homo sapiens
ataacaagggtaata

SEQ ID NO: 1591217 - DNA, 15 bp, Homo sapiens
aataacaagggtaat

SEQ ID NO: 1591218 - DNA, 15 bp, Homo sapiens
taataacaagggtaa

SEQ ID NO: 1591219 - DNA, 15 bp, Homo sapiens
ataataacaagggta

SEQ ID NO: 1591220 - DNA, 15 bp, Homo sapiens
cataataacaagggt

SEQ ID NO: 1591221 - DNA, 15 bp, Homo sapiens
tcataataacaaggg

SEQ ID NO: 1591222 - DNA, 15 bp, Homo sapiens
ctcataataacaagg

SEQ ID NO: 1591223 - DNA, 15 bp, Homo sapiens
actcataataacaag

SEQ ID NO: 1591224 - DNA, 15 bp, Homo sapiens
aactcataataacaa

SEQ ID NO: 1591225 - DNA, 15 bp, Homo sapiens
caactcataataaca

SEQ ID NO: 1591226 - DNA, 15 bp, Homo sapiens
acaactcataataac

SEQ ID NO: 1591227 - DNA, 15 bp, Homo sapiens
tacaactcataataa

SEQ ID NO: 1591228 - DNA, 15 bp, Homo sapiens
ctacaactcataata

SEQ ID NO: 1591229 - DNA, 15 bp, Homo sapiens
gctacaactcataat

SEQ ID NO: 1591230 - DNA, 15 bp, Homo sapiens
tgctacaactcataa

SEQ ID NO: 1591231 - DNA, 15 bp, Homo sapiens
ttgctacaactcata

SEQ ID NO: 1591232 - DNA, 15 bp, Homo sapiens
tttgctacaactcat

SEQ ID NO: 1591233 - DNA, 15 bp, Homo sapiens
ctttgctacaactca

SEQ ID NO: 1591234 - DNA, 15 bp, Homo sapiens
actttgctacaactc

SEQ ID NO: 1591235 - DNA, 15 bp, Homo sapiens
aactttgctacaact

SEQ ID NO: 1591236 - DNA, 15 bp, Homo sapiens
aaactttgctacaac

SEQ ID NO: 1591237 - DNA, 15 bp, Homo sapiens
aaaactttgctacaa

SEQ ID NO: 1591238 - DNA, 15 bp, Homo sapiens
caaaactttgctaca

SEQ ID NO: 1591239 - DNA, 15 bp, Homo sapiens
ccaaaactttgctac

SEQ ID NO: 1591240 - DNA, 15 bp, Homo sapiens
tccaaaactttgcta

SEQ ID NO: 1591241 - DNA, 15 bp, Homo sapiens
ttccaaaactttgct

SEQ ID NO: 1591242 - DNA, 15 bp, Homo sapiens
tttccaaaactttgc

SEQ ID NO: 1591243 - DNA, 15 bp, Homo sapiens
ctttccaaaactttg

SEQ ID NO: 1591244 - DNA, 15 bp, Homo sapiens
cctttccaaaacttt

SEQ ID NO: 1591245 - DNA, 15 bp, Homo sapiens
ccctttccaaaactt

SEQ ID NO: 1591246 - DNA, 15 bp, Homo sapiens
accctttccaaaact

SEQ ID NO: 1591247 - DNA, 15 bp, Homo sapiens
caccctttccaaaac

SEQ ID NO: 1591248 - DNA, 15 bp, Homo sapiens
tcaccctttccaaaa

SEQ ID NO: 1591249 - DNA, 15 bp, Homo sapiens
ctcaccctttccaaa

SEQ ID NO: 1591250 - DNA, 15 bp, Homo sapiens
tctcaccctttccaa

SEQ ID NO: 1591251 - DNA, 15 bp, Homo sapiens
atctcaccctttcca

SEQ ID NO: 1591252 - DNA, 15 bp, Homo sapiens
aatctcaccctttcc

SEQ ID NO: 1591253 - DNA, 15 bp, Homo sapiens
aaatctcaccctttc

SEQ ID NO: 1591254 - DNA, 15 bp, Homo sapiens
taaatctcacccttt

SEQ ID NO: 1591255 - DNA, 15 bp, Homo sapiens
ttaaatctcaccctt

SEQ ID NO: 1591256 - DNA, 15 bp, Homo sapiens
tttaaatctcaccct

SEQ ID NO: 1591257 - DNA, 15 bp, Homo sapiens
atttaaatctcaccc

SEQ ID NO: 1591258 - DNA, 15 bp, Homo sapiens
aatttaaatctcacc

SEQ ID NO: 1591259 - DNA, 15 bp, Homo sapiens
gaatttaaatctcac

SEQ ID NO: 1591260 - DNA, 15 bp, Homo sapiens
tgaatttaaatctca

SEQ ID NO: 1591261 - DNA, 15 bp, Homo sapiens
atgaatttaaatctc

SEQ ID NO: 1591262 - DNA, 15 bp, Homo sapiens
aatgaatttaaatct

SEQ ID NO: 1591263 - DNA, 15 bp, Homo sapiens
aaatgaatttaaatc

SEQ ID NO: 1591264 - DNA, 15 bp, Homo sapiens
aaaatgaatttaaat

SEQ ID NO: 1591265 - DNA, 15 bp, Homo sapiens
gaaaatgaatttaaa

SEQ ID NO: 1591266 - DNA, 15 bp, Homo sapiens
ggaaaatgaatttaa

SEQ ID NO: 1591267 - DNA, 15 bp, Homo sapiens
aggaaaatgaattta

SEQ ID NO: 1591268 - DNA, 15 bp, Homo sapiens
caggaaaatgaattt

SEQ ID NO: 1591269 - DNA, 15 bp, Homo sapiens
acaggaaaatgaatt

SEQ ID NO: 1591270 - DNA, 15 bp, Homo sapiens
aacaggaaaatgaat

SEQ ID NO: 1591271 - DNA, 15 bp, Homo sapiens
aaacaggaaaatgaa

SEQ ID NO: 1591272 - DNA, 15 bp, Homo sapiens
aaaacaggaaaatga

SEQ ID NO: 1591273 - DNA, 15 bp, Homo sapiens
taaaacaggaaaatg

SEQ ID NO: 1591274 - DNA, 15 bp, Homo sapiens
ataaaacaggaaaat

SEQ ID NO: 1591275 - DNA, 15 bp, Homo sapiens
gataaaacaggaaaa

SEQ ID NO: 1591276 - DNA, 15 bp, Homo sapiens
agataaaacaggaaa

SEQ ID NO: 1591277 - DNA, 15 bp, Homo sapiens
tagataaaacaggaa

SEQ ID NO: 1591278 - DNA, 15 bp, Homo sapiens
atagataaaacagga

SEQ ID NO: 1591279 - DNA, 15 bp, Homo sapiens
aatagataaaacagg

SEQ ID NO: 1591280 - DNA, 15 bp, Homo sapiens
aaatagataaaacag

SEQ ID NO: 1591281 - DNA, 15 bp, Homo sapiens
aaaatagataaaaca

SEQ ID NO: 1591282 - DNA, 15 bp, Homo sapiens
aaaaatagataaaac

SEQ ID NO: 1591283 - DNA, 15 bp, Homo sapiens
caaaaatagataaaa

SEQ ID NO: 1591284 - DNA, 15 bp, Homo sapiens
acaaaaatagataaa

SEQ ID NO: 1591285 - DNA, 15 bp, Homo sapiens
aacaaaaatagataa

SEQ ID NO: 1591286 - DNA, 15 bp, Homo sapiens
taacaaaaatagata

SEQ ID NO: 1591287 - DNA, 15 bp, Homo sapiens
ataacaaaaatagat

SEQ ID NO: 1591288 - DNA, 15 bp, Homo sapiens
aataacaaaaataga

SEQ ID NO: 1591289 - DNA, 15 bp, Homo sapiens
aaataacaaaaatag

SEQ ID NO: 1591290 - DNA, 15 bp, Homo sapiens
caaataacaaaaata

SEQ ID NO: 1591291 - DNA, 15 bp, Homo sapiens
gcaaataacaaaaat

SEQ ID NO: 1591292 - DNA, 15 bp, Homo sapiens
tgcaaataacaaaaa

SEQ ID NO: 1591293 - DNA, 15 bp, Homo sapiens
ctgcaaataacaaaa

SEQ ID NO: 1591294 - DNA, 15 bp, Homo sapiens
cctgcaaataacaaa

SEQ ID NO: 1591295 - DNA, 15 bp, Homo sapiens
tcctgcaaataacaa

SEQ ID NO: 1591296 - DNA, 15 bp, Homo sapiens
gtcctgcaaataaca

SEQ ID NO: 1591297 - DNA, 15 bp, Homo sapiens
ggtcctgcaaataac

SEQ ID NO: 1591298 - DNA, 15 bp, Homo sapiens
gggtcctgcaaataa

SEQ ID NO: 1591299 - DNA, 15 bp, Homo sapiens
agggtcctgcaaata

SEQ ID NO: 1591300 - DNA, 15 bp, Homo sapiens
aagggtcctgcaaat

SEQ ID NO: 1591301 - DNA, 15 bp, Homo sapiens
gaagggtcctgcaaa

SEQ ID NO: 1591302 - DNA, 15 bp, Homo sapiens
tgaagggtcctgcaa

SEQ ID NO: 1591303 - DNA, 15 bp, Homo sapiens
ttgaagggtcctgca

SEQ ID NO: 1591304 - DNA, 15 bp, Homo sapiens
gttgaagggtcctgc

SEQ ID NO: 1591305 - DNA, 15 bp, Homo sapiens
tgttgaagggtcctg

SEQ ID NO: 1591306 - DNA, 15 bp, Homo sapiens
atgttgaagggtcct

SEQ ID NO: 1591307 - DNA, 15 bp, Homo sapiens
tatgttgaagggtcc

SEQ ID NO: 1591308 - DNA, 15 bp, Homo sapiens
ttatgttgaagggtc

SEQ ID NO: 1591309 - DNA, 15 bp, Homo sapiens
tttatgttgaagggt

SEQ ID NO: 1591310 - DNA, 15 bp, Homo sapiens
atttatgttgaaggg

SEQ ID NO: 1591311 - DNA, 15 bp, Homo sapiens
aatttatgttgaagg

SEQ ID NO: 1591312 - DNA, 15 bp, Homo sapiens
caatttatgttgaag

SEQ ID NO: 1591313 - DNA, 15 bp, Homo sapiens
tcaatttatgttgaa

SEQ ID NO: 1591314 - DNA, 15 bp, Homo sapiens
atcaatttatgttga

SEQ ID NO: 1591315 - DNA, 15 bp, Homo sapiens
gatcaatttatgttg

SEQ ID NO: 1591316 - DNA, 15 bp, Homo sapiens
tgatcaatttatgtt

SEQ ID NO: 1591317 - DNA, 15 bp, Homo sapiens
gtgatcaatttatgt

SEQ ID NO: 1591318 - DNA, 15 bp, Homo sapiens
agtgatcaatttatg

SEQ ID NO: 1591319 - DNA, 15 bp, Homo sapiens
cagtgatcaatttat

SEQ ID NO: 1591320 - DNA, 15 bp, Homo sapiens
acagtgatcaattta

SEQ ID NO: 1591321 - DNA, 15 bp, Homo sapiens
aacagtgatcaattt

SEQ ID NO: 1591322 - DNA, 15 bp, Homo sapiens
taacagtgatcaatt

SEQ ID NO: 1591323 - DNA, 15 bp, Homo sapiens
ctaacagtgatcaat

SEQ ID NO: 1591324 - DNA, 15 bp, Homo sapiens
actaacagtgatcaa

SEQ ID NO: 1591325 - DNA, 15 bp, Homo sapiens
cactaacagtgatca

SEQ ID NO: 1591326 - DNA, 15 bp, Homo sapiens
gcactaacagtgatc

SEQ ID NO: 1591327 - DNA, 15 bp, Homo sapiens
agcactaacagtgat

SEQ ID NO: 1591328 - DNA, 15 bp, Homo sapiens
gagcactaacagtga

SEQ ID NO: 1591329 - DNA, 15 bp, Homo sapiens
agagcactaacagtg

SEQ ID NO: 1591330 - DNA, 15 bp, Homo sapiens
cagagcactaacagt

SEQ ID NO: 1591331 - DNA, 15 bp, Homo sapiens
gcagagcactaacag

SEQ ID NO: 1591332 - DNA, 15 bp, Homo sapiens
ggcagagcactaaca

SEQ ID NO: 1591333 - DNA, 15 bp, Homo sapiens
aggcagagcactaac

SEQ ID NO: 1591334 - DNA, 15 bp, Homo sapiens
caggcagagcactaa

SEQ ID NO: 1591335 - DNA, 15 bp, Homo sapiens
tcaggcagagcacta

SEQ ID NO: 1591336 - DNA, 15 bp, Homo sapiens
ttcaggcagagcact

SEQ ID NO: 1591337 - DNA, 15 bp, Homo sapiens
tttcaggcagagcac

SEQ ID NO: 1591338 - DNA, 15 bp, Homo sapiens
atttcaggcagagca

SEQ ID NO: 1591339 - DNA, 15 bp, Homo sapiens
tatttcaggcagagc

SEQ ID NO: 1591340 - DNA, 15 bp, Homo sapiens
atatttcaggcagag

SEQ ID NO: 1591341 - DNA, 15 bp, Homo sapiens
tatatttcaggcaga

SEQ ID NO: 1591342 - DNA, 15 bp, Homo sapiens
ttatatttcaggcag

SEQ ID NO: 1591343 - DNA, 15 bp, Homo sapiens
tttatatttcaggca

SEQ ID NO: 1591344 - DNA, 15 bp, Homo sapiens
atttatatttcaggc

SEQ ID NO: 1591345 - DNA, 15 bp, Homo sapiens
tatttatatttcagg

SEQ ID NO: 1591346 - DNA, 15 bp, Homo sapiens
ttatttatatttcag

SEQ ID NO: 1591347 - DNA, 15 bp, Homo sapiens
tttatttatatttca

SEQ ID NO: 1591348 - DNA, 15 bp, Homo sapiens
ttttatttatatttc

SEQ ID NO: 1591349 - DNA, 15 bp, Homo sapiens
gttttatttatattt

SEQ ID NO: 1591350 - DNA, 15 bp, Homo sapiens
tgttttatttatatt

SEQ ID NO: 1591351 - DNA, 15 bp, Homo sapiens
atgttttatttatat

SEQ ID NO: 1591352 - DNA, 15 bp, Homo sapiens
tatgttttatttata

SEQ ID NO: 1591353 - DNA, 15 bp, Homo sapiens
ttatgttttatttat

SEQ ID NO: 1591354 - DNA, 15 bp, Homo sapiens
gttatgttttattta

SEQ ID NO: 1591355 - DNA, 15 bp, Homo sapiens
tgttatgttttattt

SEQ ID NO: 1591356 - DNA, 15 bp, Homo sapiens
atgttatgttttatt

SEQ ID NO: 1591357 - DNA, 15 bp, Homo sapiens
tatgttatgttttat

SEQ ID NO: 1591358 - DNA, 15 bp, Homo sapiens
ttatgttatgtttta

SEQ ID NO: 1591359 - DNA, 15 bp, Homo sapiens
tttatgttatgtttt

SEQ ID NO: 1591360 - DNA, 15 bp, Homo sapiens
atttatgttatgttt

SEQ ID NO: 1591361 - DNA, 15 bp, Homo sapiens
catttatgttatgtt

SEQ ID NO: 1591362 - DNA, 15 bp, Homo sapiens
acatttatgttatgt

SEQ ID NO: 1591363 - DNA, 15 bp, Homo sapiens
cacatttatgttatg

SEQ ID NO: 1591364 - DNA, 15 bp, Homo sapiens
ccacatttatgttat

SEQ ID NO: 1591365 - DNA, 15 bp, Homo sapiens
gccacatttatgtta

SEQ ID NO: 1591366 - DNA, 15 bp, Homo sapiens
tgccacatttatgtt

SEQ ID NO: 1591367 - DNA, 15 bp, Homo sapiens
ctgccacatttatgt

SEQ ID NO: 1591368 - DNA, 15 bp, Homo sapiens
cctgccacatttatg

SEQ ID NO: 1591369 - DNA, 15 bp, Homo sapiens
gcctgccacatttat

SEQ ID NO: 1591370 - DNA, 15 bp, Homo sapiens
tgcctgccacattta

SEQ ID NO: 1591371 - DNA, 15 bp, Homo sapiens
ttgcctgccacattt

SEQ ID NO: 1591372 - DNA, 15 bp, Homo sapiens
tttgcctgccacatt

SEQ ID NO: 1591373 - DNA, 15 bp, Homo sapiens
ctttgcctgccacat

SEQ ID NO: 1591374 - DNA, 15 bp, Homo sapiens
cctttgcctgccaca

SEQ ID NO: 1591375 - DNA, 15 bp, Homo sapiens
tcctttgcctgccac

SEQ ID NO: 1591376 - DNA, 15 bp, Homo sapiens
gtcctttgcctgcca

SEQ ID NO: 1591377 - DNA, 15 bp, Homo sapiens
agtcctttgcctgcc

SEQ ID NO: 1591378 - DNA, 15 bp, Homo sapiens
aagtcctttgcctgc

SEQ ID NO: 1591379 - DNA, 15 bp, Homo sapiens
caagtcctttgcctg

SEQ ID NO: 1591380 - DNA, 15 bp, Homo sapiens
acaagtcctttgcct

SEQ ID NO: 1591381 - DNA, 15 bp, Homo sapiens
aacaagtcctttgcc

SEQ ID NO: 1591382 - DNA, 15 bp, Homo sapiens
taacaagtcctttgc

SEQ ID NO: 1591383 - DNA, 15 bp, Homo sapiens
ttaacaagtcctttg

SEQ ID NO: 1591384 - DNA, 15 bp, Homo sapiens
tttaacaagtccttt

SEQ ID NO: 1591385 - DNA, 15 bp, Homo sapiens
tctttaacaagtcct

SEQ ID NO: 1591386 - DNA, 15 bp, Homo sapiens
ttctttaacaagtcc

SEQ ID NO: 1591387 - DNA, 15 bp, Homo sapiens
tttctttaacaagtc

SEQ ID NO: 1591388 - DNA, 15 bp, Homo sapiens
ttttctttaacaagt

SEQ ID NO: 1591389 - DNA, 15 bp, Homo sapiens
gttttctttaacaag

SEQ ID NO: 1591390 - DNA, 15 bp, Homo sapiens
agttttctttaacaa

SEQ ID NO: 1591391 - DNA, 15 bp, Homo sapiens
gagttttctttaaca

SEQ ID NO: 1591392 - DNA, 15 bp, Homo sapiens
agagttttctttaac

SEQ ID NO: 1591393 - DNA, 15 bp, Homo sapiens
caagagttttcttta

SEQ ID NO: 1591394 - DNA, 15 bp, Homo sapiens
gcaagagttttcttt

SEQ ID NO: 1591395 - DNA, 15 bp, Homo sapiens
ggcaagagttttctt

SEQ ID NO: 1591396 - DNA, 15 bp, Homo sapiens
aggcaagagttttct

SEQ ID NO: 1591397 - DNA, 15 bp, Homo sapiens
gaggcaagagttttc

SEQ ID NO: 1591398 - DNA, 15 bp, Homo sapiens
ggaggcaagagtttt

SEQ ID NO: 1591399 - DNA, 15 bp, Homo sapiens
gggaggcaagagttt

SEQ ID NO: 1591400 - DNA, 15 bp, Homo sapiens
tgggaggcaagagtt

SEQ ID NO: 1591401 - DNA, 15 bp, Homo sapiens
gtgggaggcaagagt

SEQ ID NO: 1591402 - DNA, 15 bp, Homo sapiens
ggtgggaggcaagag

SEQ ID NO: 1591403 - DNA, 15 bp, Homo sapiens
aggtgggaggcaaga

SEQ ID NO: 1591404 - DNA, 15 bp, Homo sapiens
taggtgggaggcaag

SEQ ID NO: 1591405 - DNA, 15 bp, Homo sapiens
ttaggtgggaggcaa

SEQ ID NO: 1591406 - DNA, 15 bp, Homo sapiens
tttaggtgggaggca

SEQ ID NO: 1591407 - DNA, 15 bp, Homo sapiens
ttttaggtgggaggc

SEQ ID NO: 1591408 - DNA, 15 bp, Homo sapiens
attttaggtgggagg

SEQ ID NO: 1591409 - DNA, 15 bp, Homo sapiens
gattttaggtgggag

SEQ ID NO: 1591410 - DNA, 15 bp, Homo sapiens
ggattttaggtggga

SEQ ID NO: 1591411 - DNA, 15 bp, Homo sapiens
tggattttaggtggg

SEQ ID NO: 1591412 - DNA, 15 bp, Homo sapiens
gtggattttaggtgg

SEQ ID NO: 1591413 - DNA, 15 bp, Homo sapiens
tgtggattttaggtg

SEQ ID NO: 1591414 - DNA, 15 bp, Homo sapiens
atgtggattttaggt

SEQ ID NO: 1591415 - DNA, 15 bp, Homo sapiens
gatgtggattttagg

SEQ ID NO: 1591416 - DNA, 15 bp, Homo sapiens
agatgtggattttag

SEQ ID NO: 1591417 - DNA, 15 bp, Homo sapiens
cagatgtggatttta

SEQ ID NO: 1591418 - DNA, 15 bp, Homo sapiens
tcagatgtggatttt

SEQ ID NO: 1591419 - DNA, 15 bp, Homo sapiens
atcagatgtggattt

SEQ ID NO: 1591420 - DNA, 15 bp, Homo sapiens
aatcagatgtggatt

SEQ ID NO: 1591421 - DNA, 15 bp, Homo sapiens
gaatcagatgtggat

SEQ ID NO: 1591422 - DNA, 15 bp, Homo sapiens
agaatcagatgtgga

SEQ ID NO: 1591423 - DNA, 15 bp, Homo sapiens
cagaatcagatgtgg

SEQ ID NO: 1591424 - DNA, 15 bp, Homo sapiens
gcagaatcagatgtg

SEQ ID NO: 1591425 - DNA, 15 bp, Homo sapiens
ggcagaatcagatgt

SEQ ID NO: 1591426 - DNA, 15 bp, Homo sapiens
aggcagaatcagatg

SEQ ID NO: 1591427 - DNA, 15 bp, Homo sapiens
taggcagaatcagat

SEQ ID NO: 1591428 - DNA, 15 bp, Homo sapiens
gtaggcagaatcaga

SEQ ID NO: 1591429 - DNA, 15 bp, Homo sapiens
agtaggcagaatcag

SEQ ID NO: 1591430 - DNA, 15 bp, Homo sapiens
aagtaggcagaatca

SEQ ID NO: 1591431 - DNA, 15 bp, Homo sapiens
aaagtaggcagaatc

SEQ ID NO: 1591432 - DNA, 15 bp, Homo sapiens
caaagtaggcagaat

SEQ ID NO: 1591433 - DNA, 15 bp, Homo sapiens
acaaagtaggcagaa

SEQ ID NO: 1591434 - DNA, 15 bp, Homo sapiens
tacaaagtaggcaga

SEQ ID NO: 1591435 - DNA, 15 bp, Homo sapiens
ttacaaagtaggcag

SEQ ID NO: 1591436 - DNA, 15 bp, Homo sapiens
cttacaaagtaggca

SEQ ID NO: 1591437 - DNA, 15 bp, Homo sapiens
acttacaaagtaggc

SEQ ID NO: 1591438 - DNA, 15 bp, Homo sapiens
cacttacaaagtagg

SEQ ID NO: 1591439 - DNA, 15 bp, Homo sapiens
tcacttacaaagtag

SEQ ID NO: 1591440 - DNA, 15 bp, Homo sapiens
atcacttacaaagta

SEQ ID NO: 1591441 - DNA, 15 bp, Homo sapiens
aatcacttacaaagt

SEQ ID NO: 1591442 - DNA, 15 bp, Homo sapiens
caatcacttacaaag

SEQ ID NO: 1591443 - DNA, 15 bp, Homo sapiens
gcaatcacttacaaa

SEQ ID NO: 1591444 - DNA, 15 bp, Homo sapiens
tgcaatcacttacaa

SEQ ID NO: 1591445 - DNA, 15 bp, Homo sapiens
gtgcaatcacttaca

SEQ ID NO: 1591446 - DNA, 15 bp, Homo sapiens
tgtgcaatcacttac

SEQ ID NO: 1591447 - DNA, 15 bp, Homo sapiens
gtgtgcaatcactta

SEQ ID NO: 1591448 - DNA, 15 bp, Homo sapiens
tgtgtgcaatcactt

SEQ ID NO: 1591449 - DNA, 15 bp, Homo sapiens
ctgtgtgcaatcact

SEQ ID NO: 1591450 - DNA, 15 bp, Homo sapiens
tctgtgtgcaatcac

SEQ ID NO: 1591451 - DNA, 15 bp, Homo sapiens
atctgtgtgcaatca

SEQ ID NO: 1591452 - DNA, 15 bp, Homo sapiens
aatctgtgtgcaatc

SEQ ID NO: 1591453 - DNA, 15 bp, Homo sapiens
aaatctgtgtgcaat

SEQ ID NO: 1591454 - DNA, 15 bp, Homo sapiens
gaaatctgtgtgcaa

SEQ ID NO: 1591455 - DNA, 15 bp, Homo sapiens
agaaatctgtgtgca

SEQ ID NO: 1591456 - DNA, 15 bp, Homo sapiens
tagaaatctgtgtgc

SEQ ID NO: 1591457 - DNA, 15 bp, Homo sapiens
atagaaatctgtgtg

SEQ ID NO: 1591458 - DNA, 15 bp, Homo sapiens
catagaaatctgtgt

SEQ ID NO: 1591459 - DNA, 15 bp, Homo sapiens
acatagaaatctgtg

SEQ ID NO: 1591460 - DNA, 15 bp, Homo sapiens
tacatagaaatctgt

SEQ ID NO: 1591461 - DNA, 15 bp, Homo sapiens
atacatagaaatctg

SEQ ID NO: 1591462 - DNA, 15 bp, Homo sapiens
tatacatagaaatct

SEQ ID NO: 1591463 - DNA, 15 bp, Homo sapiens
atatacatagaaatc

SEQ ID NO: 1591464 - DNA, 15 bp, Homo sapiens
tatatacatagaaat

SEQ ID NO: 1591465 - DNA, 15 bp, Homo sapiens
atatatacatagaaa

SEQ ID NO: 1591466 - DNA, 15 bp, Homo sapiens
catatatacatagaa

SEQ ID NO: 1591467 - DNA, 15 bp, Homo sapiens
acatatatacataga

SEQ ID NO: 1591468 - DNA, 15 bp, Homo sapiens
tacatatatacatag

SEQ ID NO: 1591469 - DNA, 15 bp, Homo sapiens
atacatatatacata

SEQ ID NO: 1591470 - DNA, 15 bp, Homo sapiens
catacatatatacat

SEQ ID NO: 1591471 - DNA, 15 bp, Homo sapiens
acatacatatataca

SEQ ID NO: 1591472 - DNA, 15 bp, Homo sapiens
cacatacatatatac

SEQ ID NO: 1591473 - DNA, 15 bp, Homo sapiens
tacacacatacatat

SEQ ID NO: 1591474 - DNA, 15 bp, Homo sapiens
tatacacacatacat

SEQ ID NO: 1591475 - DNA, 15 bp, Homo sapiens
tctatacacacatac

SEQ ID NO: 1591476 - DNA, 15 bp, Homo sapiens
ctctatacacacata

SEQ ID NO: 1591477 - DNA, 15 bp, Homo sapiens
cctctatacacacat

SEQ ID NO: 1591478 - DNA, 15 bp, Homo sapiens
acctctatacacaca

SEQ ID NO: 1591479 - DNA, 15 bp, Homo sapiens
tacctctatacacac

SEQ ID NO: 1591480 - DNA, 15 bp, Homo sapiens
atacctctatacaca

SEQ ID NO: 1591481 - DNA, 15 bp, Homo sapiens
tatacctctatacac

SEQ ID NO: 1591482 - DNA, 15 bp, Homo sapiens
atatacctctataca

SEQ ID NO: 1591483 - DNA, 15 bp, Homo sapiens
tatatacctctatac

SEQ ID NO: 1591484 - DNA, 15 bp, Homo sapiens
atatatacctctata

SEQ ID NO: 1591485 - DNA, 15 bp, Homo sapiens
tatatatacctctat

SEQ ID NO: 1591486 - DNA, 15 bp, Homo sapiens
gtatatatacctcta

SEQ ID NO: 1591487 - DNA, 15 bp, Homo sapiens
tgtatatatacctct

SEQ ID NO: 1591488 - DNA, 15 bp, Homo sapiens
atgtatatatacctc

SEQ ID NO: 1591489 - DNA, 15 bp, Homo sapiens
tatgtatatatacct

SEQ ID NO: 1591490 - DNA, 15 bp, Homo sapiens
atatgtatatatacc

SEQ ID NO: 1591491 - DNA, 15 bp, Homo sapiens
catatgtatatatac

SEQ ID NO: 1591492 - DNA, 15 bp, Homo sapiens
acatatgtatatata

SEQ ID NO: 1591493 - DNA, 15 bp, Homo sapiens
cacatatgtatatat

SEQ ID NO: 1591494 - DNA, 15 bp, Homo sapiens
acacatatgtatata

SEQ ID NO: 1591495 - DNA, 15 bp, Homo sapiens
gacacatatgtatat

SEQ ID NO: 1591496 - DNA, 15 bp, Homo sapiens
agacacatatgtata

SEQ ID NO: 1591497 - DNA, 15 bp, Homo sapiens
gagacacatatgtat

SEQ ID NO: 1591498 - DNA, 15 bp, Homo sapiens
agagacacatatgta

SEQ ID NO: 1591499 - DNA, 15 bp, Homo sapiens
gagagacacatatgt

SEQ ID NO: 1591500 - DNA, 15 bp, Homo sapiens
agagagacacatatg

SEQ ID NO: 1591501 - DNA, 15 bp, Homo sapiens
aagagagacacatat

SEQ ID NO: 1591502 - DNA, 15 bp, Homo sapiens
taagagagacacata

SEQ ID NO: 1591503 - DNA, 15 bp, Homo sapiens
ataagagagacacat

SEQ ID NO: 1591504 - DNA, 15 bp, Homo sapiens
tataagagagacaca

SEQ ID NO: 1591505 - DNA, 15 bp, Homo sapiens
gtataagagagacac

SEQ ID NO: 1591506 - DNA, 15 bp, Homo sapiens
tgtataagagagaca

SEQ ID NO: 1591507 - DNA, 15 bp, Homo sapiens
gtgtataagagagac

SEQ ID NO: 1591508 - DNA, 15 bp, Homo sapiens
tgtgtataagagaga

SEQ ID NO: 1591509 - DNA, 15 bp, Homo sapiens
atgtgtataagagag

SEQ ID NO: 1591510 - DNA, 15 bp, Homo sapiens
catgtgtataagaga

SEQ ID NO: 1591511 - DNA, 15 bp, Homo sapiens
acatgtgtataagag

SEQ ID NO: 1591512 - DNA, 15 bp, Homo sapiens
tacatgtgtataaga

SEQ ID NO: 1591513 - DNA, 15 bp, Homo sapiens
atacatgtgtataag

SEQ ID NO: 1591514 - DNA, 15 bp, Homo sapiens
tatacatgtgtataa

SEQ ID NO: 1591515 - DNA, 15 bp, Homo sapiens
atatacatgtgtata

SEQ ID NO: 1591516 - DNA, 15 bp, Homo sapiens
tatatacatgtgtat

SEQ ID NO: 1591517 - DNA, 15 bp, Homo sapiens
atatatacatgtgta

SEQ ID NO: 1591518 - DNA, 15 bp, Homo sapiens
tatatatacatgtgt

SEQ ID NO: 1591519 - DNA, 15 bp, Homo sapiens
gtatatatacatgtg

SEQ ID NO: 1591520 - DNA, 15 bp, Homo sapiens
tgtatatatacatgt

SEQ ID NO: 1591521 - DNA, 15 bp, Homo sapiens
atgtatatatacatg

SEQ ID NO: 1591522 - DNA, 15 bp, Homo sapiens
tatgtatatatacat

SEQ ID NO: 1591523 - DNA, 15 bp, Homo sapiens
atatgtatatataca

SEQ ID NO: 1591524 - DNA, 15 bp, Homo sapiens
tacatatgtatatat

SEQ ID NO: 1591525 - DNA, 15 bp, Homo sapiens
atacatatgtatata

SEQ ID NO: 1591526 - DNA, 15 bp, Homo sapiens
gatacatatgtatat

SEQ ID NO: 1591527 - DNA, 15 bp, Homo sapiens
agatacatatgtata

SEQ ID NO: 1591528 - DNA, 15 bp, Homo sapiens
gagatacatatgtat

SEQ ID NO: 1591529 - DNA, 15 bp, Homo sapiens
agagatacatatgta

SEQ ID NO: 1591530 - DNA, 15 bp, Homo sapiens
gagagatacatatgt

SEQ ID NO: 1591531 - DNA, 15 bp, Homo sapiens
agagagatacatatg

SEQ ID NO: 1591532 - DNA, 15 bp, Homo sapiens
aagagagatacatat

SEQ ID NO: 1591533 - DNA, 15 bp, Homo sapiens
taagagagatacata

SEQ ID NO: 1591534 - DNA, 15 bp, Homo sapiens
ataagagagatacat

SEQ ID NO: 1591535 - DNA, 15 bp, Homo sapiens
tataagagagataca

SEQ ID NO: 1591536 - DNA, 15 bp, Homo sapiens
gtataagagagatac

SEQ ID NO: 1591537 - DNA, 15 bp, Homo sapiens
tgtataagagagata

SEQ ID NO: 1591538 - DNA, 15 bp, Homo sapiens
gtgtataagagagat

SEQ ID NO: 1591539 - DNA, 15 bp, Homo sapiens
aagagatacatatgt

SEQ ID NO: 1591540 - DNA, 15 bp, Homo sapiens
taagagatacatatg

SEQ ID NO: 1591541 - DNA, 15 bp, Homo sapiens
ataagagatacatat

SEQ ID NO: 1591542 - DNA, 15 bp, Homo sapiens
tataagagatacata

SEQ ID NO: 1591543 - DNA, 15 bp, Homo sapiens
gtataagagatacat

SEQ ID NO: 1591544 - DNA, 15 bp, Homo sapiens
tgtataagagataca

SEQ ID NO: 1591545 - DNA, 15 bp, Homo sapiens
gtgtataagagatac

SEQ ID NO: 1591546 - DNA, 15 bp, Homo sapiens
tgtgtataagagata

SEQ ID NO: 1591547 - DNA, 15 bp, Homo sapiens
atgtgtataagagat

SEQ ID NO: 1591548 - DNA, 15 bp, Homo sapiens
tagatacatatgtat

SEQ ID NO: 1591549 - DNA, 15 bp, Homo sapiens
atagatacatatgta

SEQ ID NO: 1591550 - DNA, 15 bp, Homo sapiens
gatagatacatatgt

SEQ ID NO: 1591551 - DNA, 15 bp, Homo sapiens
agatagatacatatg

SEQ ID NO: 1591552 - DNA, 15 bp, Homo sapiens
aagatagatacatat

SEQ ID NO: 1591553 - DNA, 15 bp, Homo sapiens
taagatagatacata

SEQ ID NO: 1591554 - DNA, 15 bp, Homo sapiens
gtaagatagatacat

SEQ ID NO: 1591555 - DNA, 15 bp, Homo sapiens
tgtaagatagataca

SEQ ID NO: 1591556 - DNA, 15 bp, Homo sapiens
gtgtaagatagatac

SEQ ID NO: 1591557 - DNA, 15 bp, Homo sapiens
tgtgtaagatagata

SEQ ID NO: 1591558 - DNA, 15 bp, Homo sapiens
gtgtgtaagatagat

SEQ ID NO: 1591559 - DNA, 15 bp, Homo sapiens
tgtgtgtaagataga

SEQ ID NO: 1591560 - DNA, 15 bp, Homo sapiens
atgtgtgtaagatag

SEQ ID NO: 1591561 - DNA, 15 bp, Homo sapiens
tatgtgtgtaagata

SEQ ID NO: 1591562 - DNA, 15 bp, Homo sapiens
atatgtgtgtaagat

SEQ ID NO: 1591563 - DNA, 15 bp, Homo sapiens
tatatgtgtgtaaga

SEQ ID NO: 1591564 - DNA, 15 bp, Homo sapiens
atatatgtgtgtaag

SEQ ID NO: 1591565 - DNA, 15 bp, Homo sapiens
gatatatgtgtgtaa

SEQ ID NO: 1591566 - DNA, 15 bp, Homo sapiens
agatatatgtgtgta

SEQ ID NO: 1591567 - DNA, 15 bp, Homo sapiens
tagatatatgtgtgt

SEQ ID NO: 1591568 - DNA, 15 bp, Homo sapiens
atagatatatgtgtg

SEQ ID NO: 1591569 - DNA, 15 bp, Homo sapiens
aatagatatatgtgt

SEQ ID NO: 1591570 - DNA, 15 bp, Homo sapiens
aaatagatatatgtg

SEQ ID NO: 1591571 - DNA, 15 bp, Homo sapiens
aaaatagatatatgt

SEQ ID NO: 1591572 - DNA, 15 bp, Homo sapiens
taaaatagatatatg

SEQ ID NO: 1591573 - DNA, 15 bp, Homo sapiens
ataaaatagatatat

SEQ ID NO: 1591574 - DNA, 15 bp, Homo sapiens
tataaaatagatata

SEQ ID NO: 1591575 - DNA, 15 bp, Homo sapiens
ttataaaatagatat

SEQ ID NO: 1591576 - DNA, 15 bp, Homo sapiens
cttataaaatagata

SEQ ID NO: 1591577 - DNA, 15 bp, Homo sapiens
tcttataaaatagat

SEQ ID NO: 1591578 - DNA, 15 bp, Homo sapiens
atcttataaaataga

SEQ ID NO: 1591579 - DNA, 15 bp, Homo sapiens
tatcttataaaatag

SEQ ID NO: 1591580 - DNA, 15 bp, Homo sapiens
atatcttataaaata

SEQ ID NO: 1591581 - DNA, 15 bp, Homo sapiens
aatatcttataaaat

SEQ ID NO: 1591582 - DNA, 15 bp, Homo sapiens
gaatatcttataaaa

SEQ ID NO: 1591583 - DNA, 15 bp, Homo sapiens
tgaatatcttataaa

SEQ ID NO: 1591584 - DNA, 15 bp, Homo sapiens
ttgaatatcttataa

SEQ ID NO: 1591585 - DNA, 15 bp, Homo sapiens
tttgaatatcttata

SEQ ID NO: 1591586 - DNA, 15 bp, Homo sapiens
ttttgaatatcttat

SEQ ID NO: 1591587 - DNA, 15 bp, Homo sapiens
tttttgaatatctta

SEQ ID NO: 1591588 - DNA, 15 bp, Homo sapiens
gtttttgaatatctt

SEQ ID NO: 1591589 - DNA, 15 bp, Homo sapiens
agtttttgaatatct

SEQ ID NO: 1591590 - DNA, 15 bp, Homo sapiens
cagtttttgaatatc

SEQ ID NO: 1591591 - DNA, 15 bp, Homo sapiens
acagtttttgaatat

SEQ ID NO: 1591592 - DNA, 15 bp, Homo sapiens
tacagtttttgaata

SEQ ID NO: 1591593 - DNA, 15 bp, Homo sapiens
ttacagtttttgaat

SEQ ID NO: 1591594 - DNA, 15 bp, Homo sapiens
attacagtttttgaa

SEQ ID NO: 1591595 - DNA, 15 bp, Homo sapiens
tattacagtttttga

SEQ ID NO: 1591596 - DNA, 15 bp, Homo sapiens
atattacagtttttg

SEQ ID NO: 1591597 - DNA, 15 bp, Homo sapiens
tatattacagttttt

SEQ ID NO: 1591598 - DNA, 15 bp, Homo sapiens
ctatattacagtttt

SEQ ID NO: 1591599 - DNA, 15 bp, Homo sapiens
tctatattacagttt

SEQ ID NO: 1591600 - DNA, 15 bp, Homo sapiens
ttctatattacagtt

SEQ ID NO: 1591601 - DNA, 15 bp, Homo sapiens
attctatattacagt

SEQ ID NO: 1591602 - DNA, 15 bp, Homo sapiens
aattctatattacag

SEQ ID NO: 1591603 - DNA, 15 bp, Homo sapiens
gaattctatattaca

SEQ ID NO: 1591604 - DNA, 15 bp, Homo sapiens
agaattctatattac

SEQ ID NO: 1591605 - DNA, 15 bp, Homo sapiens
gagaattctatatta

SEQ ID NO: 1591606 - DNA, 15 bp, Homo sapiens
tgagaattctatatt

SEQ ID NO: 1591607 - DNA, 15 bp, Homo sapiens
ctgagaattctatat

SEQ ID NO: 1591608 - DNA, 15 bp, Homo sapiens
tctgagaattctata

SEQ ID NO: 1591609 - DNA, 15 bp, Homo sapiens
ctctgagaattctat

SEQ ID NO: 1591610 - DNA, 15 bp, Homo sapiens
tctctgagaattcta

SEQ ID NO: 1591611 - DNA, 15 bp, Homo sapiens
atctctgagaattct

SEQ ID NO: 1591612 - DNA, 15 bp, Homo sapiens
aatctctgagaattc

SEQ ID NO: 1591613 - DNA, 15 bp, Homo sapiens
aaatctctgagaatt

SEQ ID NO: 1591614 - DNA, 15 bp, Homo sapiens
aaaatctctgagaat

SEQ ID NO: 1591615 - DNA, 15 bp, Homo sapiens
taaaatctctgagaa

SEQ ID NO: 1591616 - DNA, 15 bp, Homo sapiens
gtaaaatctctgaga

SEQ ID NO: 1591617 - DNA, 15 bp, Homo sapiens
tgtaaaatctctgag

SEQ ID NO: 1591618 - DNA, 15 bp, Homo sapiens
ctgtaaaatctctga

SEQ ID NO: 1591619 - DNA, 15 bp, Homo sapiens
tctgtaaaatctctg

SEQ ID NO: 1591620 - DNA, 15 bp, Homo sapiens
ttctgtaaaatctct

SEQ ID NO: 1591621 - DNA, 15 bp, Homo sapiens
gttctgtaaaatctc

SEQ ID NO: 1591622 - DNA, 15 bp, Homo sapiens
ggttctgtaaaatct

SEQ ID NO: 1591623 - DNA, 15 bp, Homo sapiens
aggttctgtaaaatc

SEQ ID NO: 1591624 - DNA, 15 bp, Homo sapiens
caggttctgtaaaat

SEQ ID NO: 1591625 - DNA, 15 bp, Homo sapiens
acaggttctgtaaaa

SEQ ID NO: 1591626 - DNA, 15 bp, Homo sapiens
aacaggttctgtaaa

SEQ ID NO: 1591627 - DNA, 15 bp, Homo sapiens
taacaggttctgtaa

SEQ ID NO: 1591628 - DNA, 15 bp, Homo sapiens
ctaacaggttctgta

SEQ ID NO: 1591629 - DNA, 15 bp, Homo sapiens
tctaacaggttctgt

SEQ ID NO: 1591630 - DNA, 15 bp, Homo sapiens
atctaacaggttctg

SEQ ID NO: 1591631 - DNA, 15 bp, Homo sapiens
catctaacaggttct

SEQ ID NO: 1591632 - DNA, 15 bp, Homo sapiens
gcatctaacaggttc

SEQ ID NO: 1591633 - DNA, 15 bp, Homo sapiens
tgcatctaacaggtt

SEQ ID NO: 1591634 - DNA, 15 bp, Homo sapiens
ttgcatctaacaggt

SEQ ID NO: 1591635 - DNA, 15 bp, Homo sapiens
cttgcatctaacagg

SEQ ID NO: 1591636 - DNA, 15 bp, Homo sapiens
tcttgcatctaacag

SEQ ID NO: 1591637 - DNA, 15 bp, Homo sapiens
ttcttgcatctaaca

SEQ ID NO: 1591638 - DNA, 15 bp, Homo sapiens
gttcttgcatctaac

SEQ ID NO: 1591639 - DNA, 15 bp, Homo sapiens
tgttcttgcatctaa

SEQ ID NO: 1591640 - DNA, 15 bp, Homo sapiens
atgttcttgcatcta

SEQ ID NO: 1591641 - DNA, 15 bp, Homo sapiens
aatgttcttgcatct

SEQ ID NO: 1591642 - DNA, 15 bp, Homo sapiens
caatgttcttgcatc

SEQ ID NO: 1591643 - DNA, 15 bp, Homo sapiens
tcaatgttcttgcat

SEQ ID NO: 1591644 - DNA, 15 bp, Homo sapiens
ttcaatgttcttgca

SEQ ID NO: 1591645 - DNA, 15 bp, Homo sapiens
attcaatgttcttgc

SEQ ID NO: 1591646 - DNA, 15 bp, Homo sapiens
tattcaatgttcttg

SEQ ID NO: 1591647 - DNA, 15 bp, Homo sapiens
ttattcaatgttctt

SEQ ID NO: 1591648 - DNA, 15 bp, Homo sapiens
tttattcaatgttct

SEQ ID NO: 1591649 - DNA, 15 bp, Homo sapiens
atttattcaatgttc

SEQ ID NO: 1591650 - DNA, 15 bp, Homo sapiens
aatttattcaatgtt

SEQ ID NO: 1591651 - DNA, 15 bp, Homo sapiens
gaatttattcaatgt

SEQ ID NO: 1591652 - DNA, 15 bp, Homo sapiens
tgaatttattcaatg

SEQ ID NO: 1591653 - DNA, 15 bp, Homo sapiens
gtgaatttattcaat

SEQ ID NO: 1591654 - DNA, 15 bp, Homo sapiens
agtgaatttattcaa

SEQ ID NO: 1591655 - DNA, 15 bp, Homo sapiens
tagtgaatttattca

SEQ ID NO: 1591656 - DNA, 15 bp, Homo sapiens
gtagtgaatttattc

SEQ ID NO: 1591657 - DNA, 15 bp, Homo sapiens
ggtagtgaatttatt

SEQ ID NO: 1591658 - DNA, 15 bp, Homo sapiens
aggtagtgaatttat

SEQ ID NO: 1591659 - DNA, 15 bp, Homo sapiens
gaggtagtgaattta

SEQ ID NO: 1591660 - DNA, 15 bp, Homo sapiens
tgaggtagtgaattt

SEQ ID NO: 1591661 - DNA, 15 bp, Homo sapiens
ttgaggtagtgaatt

SEQ ID NO: 1591662 - DNA, 15 bp, Homo sapiens
attgaggtagtgaat

SEQ ID NO: 1591663 - DNA, 15 bp, Homo sapiens
aattgaggtagtgaa

SEQ ID NO: 1591664 - DNA, 15 bp, Homo sapiens
taattgaggtagtga

SEQ ID NO: 1591665 - DNA, 15 bp, Homo sapiens
ttaattgaggtagtg

SEQ ID NO: 1591666 - DNA, 15 bp, Homo sapiens
cttaattgaggtagt

SEQ ID NO: 1591667 - DNA, 15 bp, Homo sapiens
ccttaattgaggtag

SEQ ID NO: 1591668 - DNA, 15 bp, Homo sapiens
accttaattgaggta

SEQ ID NO: 1591669 - DNA, 15 bp, Homo sapiens
caccttaattgaggt

SEQ ID NO: 1591670 - DNA, 15 bp, Homo sapiens
acaccttaattgagg

SEQ ID NO: 1591671 - DNA, 15 bp, Homo sapiens
gacaccttaattgag

SEQ ID NO: 1591672 - DNA, 15 bp, Homo sapiens
agacaccttaattga

SEQ ID NO: 1591673 - DNA, 15 bp, Homo sapiens
gagacaccttaattg

SEQ ID NO: 1591674 - DNA, 15 bp, Homo sapiens
tgagacaccttaatt

SEQ ID NO: 1591675 - DNA, 15 bp, Homo sapiens
atgagacaccttaat

SEQ ID NO: 1591676 - DNA, 15 bp, Homo sapiens
catgagacaccttaa

SEQ ID NO: 1591677 - DNA, 15 bp, Homo sapiens
tcatgagacacctta

SEQ ID NO: 1591678 - DNA, 15 bp, Homo sapiens
ttcatgagacacctt

SEQ ID NO: 1591679 - DNA, 15 bp, Homo sapiens
tttcatgagacacct

SEQ ID NO: 1591680 - DNA, 15 bp, Homo sapiens
ttttcatgagacacc

SEQ ID NO: 1591681 - DNA, 15 bp, Homo sapiens
tttttcatgagacac

SEQ ID NO: 1591682 - DNA, 15 bp, Homo sapiens
ctttttcatgagaca

SEQ ID NO: 1591683 - DNA, 15 bp, Homo sapiens
actttttcatgagac

SEQ ID NO: 1591684 - DNA, 15 bp, Homo sapiens
aactttttcatgaga

SEQ ID NO: 1591685 - DNA, 15 bp, Homo sapiens
aaactttttcatgag

SEQ ID NO: 1591686 - DNA, 15 bp, Homo sapiens
gaaactttttcatga

SEQ ID NO: 1591687 - DNA, 15 bp, Homo sapiens
ggaaactttttcatg

SEQ ID NO: 1591688 - DNA, 15 bp, Homo sapiens
aggaaactttttcat

SEQ ID NO: 1591689 - DNA, 15 bp, Homo sapiens
aaggaaactttttca

SEQ ID NO: 1591690 - DNA, 15 bp, Homo sapiens
caaggaaactttttc

SEQ ID NO: 1591691 - DNA, 15 bp, Homo sapiens
tcaaggaaacttttt

SEQ ID NO: 1591692 - DNA, 15 bp, Homo sapiens
ttcaaggaaactttt

SEQ ID NO: 1591693 - DNA, 15 bp, Homo sapiens
tttcaaggaaacttt

SEQ ID NO: 1591694 - DNA, 15 bp, Homo sapiens
ttttcaaggaaactt

SEQ ID NO: 1591695 - DNA, 15 bp, Homo sapiens
tttttcaaggaaact

SEQ ID NO: 1591696 - DNA, 15 bp, Homo sapiens
atttttcaaggaaac

SEQ ID NO: 1591697 - DNA, 15 bp, Homo sapiens
aatttttcaaggaaa

SEQ ID NO: 1591698 - DNA, 15 bp, Homo sapiens
gaatttttcaaggaa

SEQ ID NO: 1591699 - DNA, 15 bp, Homo sapiens
tgaatttttcaagga

SEQ ID NO: 1591700 - DNA, 15 bp, Homo sapiens
ttgaatttttcaagg

SEQ ID NO: 1591701 - DNA, 15 bp, Homo sapiens
tttgaatttttcaag

SEQ ID NO: 1591702 - DNA, 15 bp, Homo sapiens
atttgaatttttcaa

SEQ ID NO: 1591703 - DNA, 15 bp, Homo sapiens
tatttgaatttttca

SEQ ID NO: 1591704 - DNA, 15 bp, Homo sapiens
ctatttgaatttttc

SEQ ID NO: 1591705 - DNA, 15 bp, Homo sapiens
tctatttgaattttt

SEQ ID NO: 1591706 - DNA, 15 bp, Homo sapiens
gtctatttgaatttt

SEQ ID NO: 1591707 - DNA, 15 bp, Homo sapiens
ggtctatttgaattt

SEQ ID NO: 1591708 - DNA, 15 bp, Homo sapiens
tggtctatttgaatt

SEQ ID NO: 1591709 - DNA, 15 bp, Homo sapiens
ttggtctatttgaat

SEQ ID NO: 1591710 - DNA, 15 bp, Homo sapiens
tttggtctatttgaa

SEQ ID NO: 1591711 - DNA, 15 bp, Homo sapiens
ttttggtctatttga

SEQ ID NO: 1591712 - DNA, 15 bp, Homo sapiens
gttttggtctatttg

SEQ ID NO: 1591713 - DNA, 15 bp, Homo sapiens
ggttttggtctattt

SEQ ID NO: 1591714 - DNA, 15 bp, Homo sapiens
gggttttggtctatt

SEQ ID NO: 1591715 - DNA, 15 bp, Homo sapiens
agggttttggtctat

SEQ ID NO: 1591716 - DNA, 15 bp, Homo sapiens
aagggttttggtcta

SEQ ID NO: 1591717 - DNA, 15 bp, Homo sapiens
aaagggttttggtct

SEQ ID NO: 1591718 - DNA, 15 bp, Homo sapiens
taaagggttttggtc

SEQ ID NO: 1591719 - DNA, 15 bp, Homo sapiens
ctaaagggttttggt

SEQ ID NO: 1591720 - DNA, 15 bp, Homo sapiens
actaaagggttttgg

SEQ ID NO: 1591721 - DNA, 15 bp, Homo sapiens
aactaaagggttttg

SEQ ID NO: 1591722 - DNA, 15 bp, Homo sapiens
aaactaaagggtttt

SEQ ID NO: 1591723 - DNA, 15 bp, Homo sapiens
aaaactaaagggttt

SEQ ID NO: 1591724 - DNA, 15 bp, Homo sapiens
taaaactaaagggtt

SEQ ID NO: 1591725 - DNA, 15 bp, Homo sapiens
gtaaaactaaagggt

SEQ ID NO: 1591726 - DNA, 15 bp, Homo sapiens
ggtaaaactaaaggg

SEQ ID NO: 1591727 - DNA, 15 bp, Homo sapiens
gggtaaaactaaagg

SEQ ID NO: 1591728 - DNA, 15 bp, Homo sapiens
tgggtaaaactaaag

SEQ ID NO: 1591729 - DNA, 15 bp, Homo sapiens
gtgggtaaaactaaa

SEQ ID NO: 1591730 - DNA, 15 bp, Homo sapiens
agtgggtaaaactaa

SEQ ID NO: 1591731 - DNA, 15 bp, Homo sapiens
aagtgggtaaaacta

SEQ ID NO: 1591732 - DNA, 15 bp, Homo sapiens
aaagtgggtaaaact

SEQ ID NO: 1591733 - DNA, 15 bp, Homo sapiens
taaagtgggtaaaac

SEQ ID NO: 1591734 - DNA, 15 bp, Homo sapiens
ttaaagtgggtaaaa

SEQ ID NO: 1591735 - DNA, 15 bp, Homo sapiens
cttaaagtgggtaaa

SEQ ID NO: 1591736 - DNA, 15 bp, Homo sapiens
acttaaagtgggtaa

SEQ ID NO: 1591737 - DNA, 15 bp, Homo sapiens
gacttaaagtgggta

SEQ ID NO: 1591738 - DNA, 15 bp, Homo sapiens
tgacttaaagtgggt

SEQ ID NO: 1591739 - DNA, 15 bp, Homo sapiens
ctgacttaaagtggg

SEQ ID NO: 1591740 - DNA, 15 bp, Homo sapiens
tctgacttaaagtgg

SEQ ID NO: 1591741 - DNA, 15 bp, Homo sapiens
ttctgacttaaagtg

SEQ ID NO: 1591742 - DNA, 15 bp, Homo sapiens
attctgacttaaagt

SEQ ID NO: 1591743 - DNA, 15 bp, Homo sapiens
tattctgacttaaag

SEQ ID NO: 1591744 - DNA, 15 bp, Homo sapiens
atattctgacttaaa

SEQ ID NO: 1591745 - DNA, 15 bp, Homo sapiens
aatattctgacttaa

SEQ ID NO: 1591746 - DNA, 15 bp, Homo sapiens
aaatattctgactta

SEQ ID NO: 1591747 - DNA, 15 bp, Homo sapiens
taaatattctgactt

SEQ ID NO: 1591748 - DNA, 15 bp, Homo sapiens
ataaatattctgact

SEQ ID NO: 1591749 - DNA, 15 bp, Homo sapiens
aataaatattctgac

SEQ ID NO: 1591750 - DNA, 15 bp, Homo sapiens
aaataaatattctga

SEQ ID NO: 1591751 - DNA, 15 bp, Homo sapiens
taaataaatattctg

SEQ ID NO: 1591752 - DNA, 15 bp, Homo sapiens
ataaataaatattct

SEQ ID NO: 1591753 - DNA, 15 bp, Homo sapiens
aataaataaatattc

SEQ ID NO: 1591754 - DNA, 15 bp, Homo sapiens
caataaataaatatt

SEQ ID NO: 1591755 - DNA, 15 bp, Homo sapiens
acaataaataaatat

SEQ ID NO: 1591756 - DNA, 15 bp, Homo sapiens
gacaataaataaata

SEQ ID NO: 1591757 - DNA, 15 bp, Homo sapiens
tgacaataaataaat

SEQ ID NO: 1591758 - DNA, 15 bp, Homo sapiens
atgacaataaataaa

SEQ ID NO: 1591759 - DNA, 15 bp, Homo sapiens
catgacaataaataa

SEQ ID NO: 1591760 - DNA, 15 bp, Homo sapiens
acatgacaataaata

SEQ ID NO: 1591761 - DNA, 15 bp, Homo sapiens
cacatgacaataaat

SEQ ID NO: 1591762 - DNA, 15 bp, Homo sapiens
tcacatgacaataaa

SEQ ID NO: 1591763 - DNA, 15 bp, Homo sapiens
ttcacatgacaataa

SEQ ID NO: 1591764 - DNA, 15 bp, Homo sapiens
tttcacatgacaata

SEQ ID NO: 1591765 - DNA, 15 bp, Homo sapiens
gtttcacatgacaat

SEQ ID NO: 1591766 - DNA, 15 bp, Homo sapiens
agtttcacatgacaa

SEQ ID NO: 1591767 - DNA, 15 bp, Homo sapiens
gagtttcacatgaca

SEQ ID NO: 1591768 - DNA, 15 bp, Homo sapiens
agagtttcacatgac

SEQ ID NO: 1591769 - DNA, 15 bp, Homo sapiens
cagagtttcacatga

SEQ ID NO: 1591770 - DNA, 15 bp, Homo sapiens
ccagagtttcacatg

SEQ ID NO: 1591771 - DNA, 15 bp, Homo sapiens
tccagagtttcacat

SEQ ID NO: 1591772 - DNA, 15 bp, Homo sapiens
atccagagtttcaca

SEQ ID NO: 1591773 - DNA, 15 bp, Homo sapiens
tatccagagtttcac

SEQ ID NO: 1591774 - DNA, 15 bp, Homo sapiens
ttatccagagtttca

SEQ ID NO: 1591775 - DNA, 15 bp, Homo sapiens
gttatccagagtttc

SEQ ID NO: 1591776 - DNA, 15 bp, Homo sapiens
agttatccagagttt

SEQ ID NO: 1591777 - DNA, 15 bp, Homo sapiens
tagttatccagagtt

SEQ ID NO: 1591778 - DNA, 15 bp, Homo sapiens
ttagttatccagagt

SEQ ID NO: 1591779 - DNA, 15 bp, Homo sapiens
attagttatccagag

SEQ ID NO: 1591780 - DNA, 15 bp, Homo sapiens
aattagttatccaga

SEQ ID NO: 1591781 - DNA, 15 bp, Homo sapiens
taattagttatccag

SEQ ID NO: 1591782 - DNA, 15 bp, Homo sapiens
ataattagttatcca

SEQ ID NO: 1591783 - DNA, 15 bp, Homo sapiens
cataattagttatcc

SEQ ID NO: 1591784 - DNA, 15 bp, Homo sapiens
acataattagttatc

SEQ ID NO: 1591785 - DNA, 15 bp, Homo sapiens
aacataattagttat

SEQ ID NO: 1591786 - DNA, 15 bp, Homo sapiens
aaacataattagtta

SEQ ID NO: 1591787 - DNA, 15 bp, Homo sapiens
aaaacataattagtt

SEQ ID NO: 1591788 - DNA, 15 bp, Homo sapiens
taaaacataattagt

SEQ ID NO: 1591789 - DNA, 15 bp, Homo sapiens
ctaaaacataattag

SEQ ID NO: 1591790 - DNA, 15 bp, Homo sapiens
cctaaaacataatta

SEQ ID NO: 1591791 - DNA, 15 bp, Homo sapiens
tcctaaaacataatt

SEQ ID NO: 1591792 - DNA, 15 bp, Homo sapiens
ttcctaaaacataat

SEQ ID NO: 1591793 - DNA, 15 bp, Homo sapiens
tttcctaaaacataa

SEQ ID NO: 1591794 - DNA, 15 bp, Homo sapiens
atttcctaaaacata

SEQ ID NO: 1591795 - DNA, 15 bp, Homo sapiens
aatttcctaaaacat

SEQ ID NO: 1591796 - DNA, 15 bp, Homo sapiens
aaatttcctaaaaca

SEQ ID NO: 1591797 - DNA, 15 bp, Homo sapiens
aaaatttcctaaaac

SEQ ID NO: 1591798 - DNA, 15 bp, Homo sapiens
taaaatttcctaaaa

SEQ ID NO: 1591799 - DNA, 15 bp, Homo sapiens
ttaaaatttcctaaa

SEQ ID NO: 1591800 - DNA, 15 bp, Homo sapiens
tttaaaatttcctaa

SEQ ID NO: 1591801 - DNA, 15 bp, Homo sapiens
ttttaaaatttccta

SEQ ID NO: 1591802 - DNA, 15 bp, Homo sapiens
attttaaaatttcct

SEQ ID NO: 1591803 - DNA, 15 bp, Homo sapiens
aattttaaaatttcc

SEQ ID NO: 1591804 - DNA, 15 bp, Homo sapiens
aaattttaaaatttc

SEQ ID NO: 1591805 - DNA, 15 bp, Homo sapiens
taaattttaaaattt

SEQ ID NO: 1591806 - DNA, 15 bp, Homo sapiens
ataaattttaaaatt

SEQ ID NO: 1591807 - DNA, 15 bp, Homo sapiens
aataaattttaaaat

SEQ ID NO: 1591808 - DNA, 15 bp, Homo sapiens
gaataaattttaaaa

SEQ ID NO: 1591809 - DNA, 15 bp, Homo sapiens
ggaataaattttaaa

SEQ ID NO: 1591810 - DNA, 15 bp, Homo sapiens
aggaataaattttaa

SEQ ID NO: 1591811 - DNA, 15 bp, Homo sapiens
taggaataaatttta

SEQ ID NO: 1591812 - DNA, 15 bp, Homo sapiens
ttaggaataaatttt

SEQ ID NO: 1591813 - DNA, 15 bp, Homo sapiens
tttaggaataaattt

SEQ ID NO: 1591814 - DNA, 15 bp, Homo sapiens
atttaggaataaatt

SEQ ID NO: 1591815 - DNA, 15 bp, Homo sapiens
tatttaggaataaat

SEQ ID NO: 1591816 - DNA, 15 bp, Homo sapiens
ttatttaggaataaa

SEQ ID NO: 1591817 - DNA, 15 bp, Homo sapiens
attatttaggaataa

SEQ ID NO: 1591818 - DNA, 15 bp, Homo sapiens
aattatttaggaata

SEQ ID NO: 1591819 - DNA, 15 bp, Homo sapiens
aaattatttaggaat

SEQ ID NO: 1591820 - DNA, 15 bp, Homo sapiens
caaattatttaggaa

SEQ ID NO: 1591821 - DNA, 15 bp, Homo sapiens
tcaaattatttagga

SEQ ID NO: 1591822 - DNA, 15 bp, Homo sapiens
ttcaaattatttagg

SEQ ID NO: 1591823 - DNA, 15 bp, Homo sapiens
gttcaaattatttag

SEQ ID NO: 1591824 - DNA, 15 bp, Homo sapiens
agttcaaattattta

SEQ ID NO: 1591825 - DNA, 15 bp, Homo sapiens
aagttcaaattattt

SEQ ID NO: 1591826 - DNA, 15 bp, Homo sapiens
caagttcaaattatt

SEQ ID NO: 1591827 - DNA, 15 bp, Homo sapiens
ccaagttcaaattat

SEQ ID NO: 1591828 - DNA, 15 bp, Homo sapiens
accaagttcaaatta

SEQ ID NO: 1591829 - DNA, 15 bp, Homo sapiens
caccaagttcaaatt

SEQ ID NO: 1591830 - DNA, 15 bp, Homo sapiens
acaccaagttcaaat

SEQ ID NO: 1591831 - DNA, 15 bp, Homo sapiens
cagacaccaagttca

SEQ ID NO: 1591832 - DNA, 15 bp, Homo sapiens
tcagacaccaagttc

SEQ ID NO: 1591833 - DNA, 15 bp, Homo sapiens
ctcagacaccaagtt

SEQ ID NO: 1591834 - DNA, 15 bp, Homo sapiens
tctcagacaccaagt

SEQ ID NO: 1591835 - DNA, 15 bp, Homo sapiens
gtctcagacaccaag

SEQ ID NO: 1591836 - DNA, 15 bp, Homo sapiens
tgtctcagacaccaa

SEQ ID NO: 1591837 - DNA, 15 bp, Homo sapiens
gtgtctcagacacca

SEQ ID NO: 1591838 - DNA, 15 bp, Homo sapiens
tgtgtctcagacacc

SEQ ID NO: 1591839 - DNA, 15 bp, Homo sapiens
ctgtgtctcagacac

SEQ ID NO: 1591840 - DNA, 15 bp, Homo sapiens
gctgtgtctcagaca

SEQ ID NO: 1591841 - DNA, 15 bp, Homo sapiens
agctgtgtctcagac

SEQ ID NO: 1591842 - DNA, 15 bp, Homo sapiens
cagctgtgtctcaga

SEQ ID NO: 1591843 - DNA, 15 bp, Homo sapiens
acagctgtgtctcag

SEQ ID NO: 1591844 - DNA, 15 bp, Homo sapiens
cacagctgtgtctca

SEQ ID NO: 1591845 - DNA, 15 bp, Homo sapiens
ccacagctgtgtctc

SEQ ID NO: 1591846 - DNA, 15 bp, Homo sapiens
tccacagctgtgtct

SEQ ID NO: 1591847 - DNA, 15 bp, Homo sapiens
atccacagctgtgtc

SEQ ID NO: 1591848 - DNA, 15 bp, Homo sapiens
tatccacagctgtgt

SEQ ID NO: 1591849 - DNA, 15 bp, Homo sapiens
ttatccacagctgtg

SEQ ID NO: 1591850 - DNA, 15 bp, Homo sapiens
cttatccacagctgt

SEQ ID NO: 1591851 - DNA, 15 bp, Homo sapiens
tcttatccacagctg

SEQ ID NO: 1591852 - DNA, 15 bp, Homo sapiens
gtcttatccacagct

SEQ ID NO: 1591853 - DNA, 15 bp, Homo sapiens
agtcttatccacagc

SEQ ID NO: 1591854 - DNA, 15 bp, Homo sapiens
aagtcttatccacag

SEQ ID NO: 1591855 - DNA, 15 bp, Homo sapiens
aaagtcttatccaca

SEQ ID NO: 1591856 - DNA, 15 bp, Homo sapiens
aaaagtcttatccac

SEQ ID NO: 1591857 - DNA, 15 bp, Homo sapiens
aaaaagtcttatcca

SEQ ID NO: 1591858 - DNA, 15 bp, Homo sapiens
caaaaagtcttatcc

SEQ ID NO: 1591859 - DNA, 15 bp, Homo sapiens
tcaaaaagtcttatc

SEQ ID NO: 1591860 - DNA, 15 bp, Homo sapiens
ctcaaaaagtcttat

SEQ ID NO: 1591861 - DNA, 15 bp, Homo sapiens
tctcaaaaagtctta

SEQ ID NO: 1591862 - DNA, 15 bp, Homo sapiens
gtctcaaaaagtctt

SEQ ID NO: 1591863 - DNA, 15 bp, Homo sapiens
tgtctcaaaaagtct

SEQ ID NO: 1591864 - DNA, 15 bp, Homo sapiens
atgtctcaaaaagtc

SEQ ID NO: 1591865 - DNA, 15 bp, Homo sapiens
aatgtctcaaaaagt

SEQ ID NO: 1591866 - DNA, 15 bp, Homo sapiens
gaatgtctcaaaaag

SEQ ID NO: 1591867 - DNA, 15 bp, Homo sapiens
agaatgtctcaaaaa

SEQ ID NO: 1591868 - DNA, 15 bp, Homo sapiens
tagaatgtctcaaaa

SEQ ID NO: 1591869 - DNA, 15 bp, Homo sapiens
atagaatgtctcaaa

SEQ ID NO: 1591870 - DNA, 15 bp, Homo sapiens
tatagaatgtctcaa

SEQ ID NO: 1591871 - DNA, 15 bp, Homo sapiens
ttatagaatgtctca

SEQ ID NO: 1591872 - DNA, 15 bp, Homo sapiens
gttatagaatgtctc

SEQ ID NO: 1591873 - DNA, 15 bp, Homo sapiens
tgttatagaatgtct

SEQ ID NO: 1591874 - DNA, 15 bp, Homo sapiens
ttgttatagaatgtc

SEQ ID NO: 1591875 - DNA, 15 bp, Homo sapiens
gttgttatagaatgt

SEQ ID NO: 1591876 - DNA, 15 bp, Homo sapiens
tgttgttatagaatg

SEQ ID NO: 1591877 - DNA, 15 bp, Homo sapiens
ttgttgttatagaat

SEQ ID NO: 1591878 - DNA, 15 bp, Homo sapiens
gttgttgttatagaa

SEQ ID NO: 1591879 - DNA, 15 bp, Homo sapiens
tgttgttgttataga

SEQ ID NO: 1591880 - DNA, 15 bp, Homo sapiens
ttgttgttgttatag

SEQ ID NO: 1591881 - DNA, 15 bp, Homo sapiens
tttgttgttgttata

SEQ ID NO: 1591882 - DNA, 15 bp, Homo sapiens
tttttttgttgttgt

SEQ ID NO: 1591883 - DNA, 15 bp, Homo sapiens
atttttttgttgttg

SEQ ID NO: 1591884 - DNA, 15 bp, Homo sapiens
aatttttttgttgtt

SEQ ID NO: 1591885 - DNA, 15 bp, Homo sapiens
caatttttttgttgt

SEQ ID NO: 1591886 - DNA, 15 bp, Homo sapiens
acaatttttttgttg

SEQ ID NO: 1591887 - DNA, 15 bp, Homo sapiens
gacaatttttttgtt

SEQ ID NO: 1591888 - DNA, 15 bp, Homo sapiens
ggacaatttttttgt

SEQ ID NO: 1591889 - DNA, 15 bp, Homo sapiens
gggacaatttttttg

SEQ ID NO: 1591890 - DNA, 15 bp, Homo sapiens
agggacaattttttt

SEQ ID NO: 1591891 - DNA, 15 bp, Homo sapiens
aagggacaatttttt

SEQ ID NO: 1591892 - DNA, 15 bp, Homo sapiens
caagggacaattttt

SEQ ID NO: 1591893 - DNA, 15 bp, Homo sapiens
gcaagggacaatttt

SEQ ID NO: 1591894 - DNA, 15 bp, Homo sapiens
ggcaagggacaattt

SEQ ID NO: 1591895 - DNA, 15 bp, Homo sapiens
cggcaagggacaatt

SEQ ID NO: 1591896 - DNA, 15 bp, Homo sapiens
tcggcaagggacaat

SEQ ID NO: 1591897 - DNA, 15 bp, Homo sapiens
ttcggcaagggacaa

SEQ ID NO: 1591898 - DNA, 15 bp, Homo sapiens
gttcggcaagggaca

SEQ ID NO: 1591899 - DNA, 15 bp, Homo sapiens
agttcggcaagggac

SEQ ID NO: 1591900 - DNA, 15 bp, Homo sapiens
aagttcggcaaggga

SEQ ID NO: 1591901 - DNA, 15 bp, Homo sapiens
gaagttcggcaaggg

SEQ ID NO: 1591902 - DNA, 15 bp, Homo sapiens
agaagttcggcaagg

SEQ ID NO: 1591903 - DNA, 15 bp, Homo sapiens
tagaagttcggcaag

SEQ ID NO: 1591904 - DNA, 15 bp, Homo sapiens
atagaagttcggcaa

SEQ ID NO: 1591905 - DNA, 15 bp, Homo sapiens
aatagaagttcggca

SEQ ID NO: 1591906 - DNA, 15 bp, Homo sapiens
taatagaagttcggc

SEQ ID NO: 1591907 - DNA, 15 bp, Homo sapiens
ataatagaagttcgg

SEQ ID NO: 1591908 - DNA, 15 bp, Homo sapiens
gataatagaagttcg

SEQ ID NO: 1591909 - DNA, 15 bp, Homo sapiens
ggataatagaagttc

SEQ ID NO: 1591910 - DNA, 15 bp, Homo sapiens
tggataatagaagtt

SEQ ID NO: 1591911 - DNA, 15 bp, Homo sapiens
atggataatagaagt

SEQ ID NO: 1591912 - DNA, 15 bp, Homo sapiens
gatggataatagaag

SEQ ID NO: 1591913 - DNA, 15 bp, Homo sapiens
agatggataatagaa

SEQ ID NO: 1591914 - DNA, 15 bp, Homo sapiens
tagatggataataga

SEQ ID NO: 1591915 - DNA, 15 bp, Homo sapiens
atagatggataatag

SEQ ID NO: 1591916 - DNA, 15 bp, Homo sapiens
tatagatggataata

SEQ ID NO: 1591917 - DNA, 15 bp, Homo sapiens
ttatagatggataat

SEQ ID NO: 1591918 - DNA, 15 bp, Homo sapiens
tttatagatggataa

SEQ ID NO: 1591919 - DNA, 15 bp, Homo sapiens
ttttatagatggata

SEQ ID NO: 1591920 - DNA, 15 bp, Homo sapiens
tttttatagatggat

SEQ ID NO: 1591921 - DNA, 15 bp, Homo sapiens
atttttatagatgga

SEQ ID NO: 1591922 - DNA, 15 bp, Homo sapiens
gatttttatagatgg

SEQ ID NO: 1591923 - DNA, 15 bp, Homo sapiens
tgatttttatagatg

SEQ ID NO: 1591924 - DNA, 15 bp, Homo sapiens
gtgatttttatagat

SEQ ID NO: 1591925 - DNA, 15 bp, Homo sapiens
agtgatttttataga

SEQ ID NO: 1591926 - DNA, 15 bp, Homo sapiens
cagtgatttttatag

SEQ ID NO: 1591927 - DNA, 15 bp, Homo sapiens
ccagtgatttttata

SEQ ID NO: 1591928 - DNA, 15 bp, Homo sapiens
accagtgatttttat

SEQ ID NO: 1591929 - DNA, 15 bp, Homo sapiens
taccagtgattttta

SEQ ID NO: 1591930 - DNA, 15 bp, Homo sapiens
ataccagtgattttt

SEQ ID NO: 1591931 - DNA, 15 bp, Homo sapiens
tataccagtgatttt

SEQ ID NO: 1591932 - DNA, 15 bp, Homo sapiens
ttataccagtgattt

SEQ ID NO: 1591933 - DNA, 15 bp, Homo sapiens
tttataccagtgatt

SEQ ID NO: 1591934 - DNA, 15 bp, Homo sapiens
atttataccagtgat

SEQ ID NO: 1591935 - DNA, 15 bp, Homo sapiens
tatttataccagtga

SEQ ID NO: 1591936 - DNA, 15 bp, Homo sapiens
gtatttataccagtg

SEQ ID NO: 1591937 - DNA, 15 bp, Homo sapiens
agtatttataccagt

SEQ ID NO: 1591938 - DNA, 15 bp, Homo sapiens
tagtatttataccag

SEQ ID NO: 1591939 - DNA, 15 bp, Homo sapiens
gtagtatttatacca

SEQ ID NO: 1591940 - DNA, 15 bp, Homo sapiens
ggtagtatttatacc

SEQ ID NO: 1591941 - DNA, 15 bp, Homo sapiens
cggtagtatttatac

SEQ ID NO: 1591942 - DNA, 15 bp, Homo sapiens
gcggtagtatttata

SEQ ID NO: 1591943 - DNA, 15 bp, Homo sapiens
ggcggtagtatttat

SEQ ID NO: 1591944 - DNA, 15 bp, Homo sapiens
gggcggtagtattta

SEQ ID NO: 1591945 - DNA, 15 bp, Homo sapiens
agggcggtagtattt

SEQ ID NO: 1591946 - DNA, 15 bp, Homo sapiens
cagggcggtagtatt

SEQ ID NO: 1591947 - DNA, 15 bp, Homo sapiens
ccagggcggtagtat

SEQ ID NO: 1591948 - DNA, 15 bp, Homo sapiens
cccagggcggtagta

SEQ ID NO: 1591949 - DNA, 15 bp, Homo sapiens
ccccagggcggtagt

SEQ ID NO: 1591950 - DNA, 15 bp, Homo sapiens
gccccagggcggtag

SEQ ID NO: 1591951 - DNA, 15 bp, Homo sapiens
tgccccagggcggta

SEQ ID NO: 1591952 - DNA, 15 bp, Homo sapiens
ttgccccagggcggt

SEQ ID NO: 1591953 - DNA, 15 bp, Homo sapiens
gttgccccagggcgg

SEQ ID NO: 1591954 - DNA, 15 bp, Homo sapiens
tgttgccccagggcg

SEQ ID NO: 1591955 - DNA, 15 bp, Homo sapiens
ttgttgccccagggc

SEQ ID NO: 1591956 - DNA, 15 bp, Homo sapiens
gttgttgccccaggg

SEQ ID NO: 1591957 - DNA, 15 bp, Homo sapiens
tgttgttgccccagg

SEQ ID NO: 1591958 - DNA, 15 bp, Homo sapiens
ctgttgttgccccag

SEQ ID NO: 1591959 - DNA, 15 bp, Homo sapiens
gctgttgttgcccca

SEQ ID NO: 1591960 - DNA, 15 bp, Homo sapiens
tgctgttgttgcccc

SEQ ID NO: 1591961 - DNA, 15 bp, Homo sapiens
ttgctgttgttgccc

SEQ ID NO: 1591962 - DNA, 15 bp, Homo sapiens
gttgctgttgttgcc

SEQ ID NO: 1591963 - DNA, 15 bp, Homo sapiens
cgttgctgttgttgc

SEQ ID NO: 1591964 - DNA, 15 bp, Homo sapiens
tcgttgctgttgttg

SEQ ID NO: 1591965 - DNA, 15 bp, Homo sapiens
ttcgttgctgttgtt

SEQ ID NO: 1591966 - DNA, 15 bp, Homo sapiens
gttcgttgctgttgt

SEQ ID NO: 1591967 - DNA, 15 bp, Homo sapiens
tgttcgttgctgttg

SEQ ID NO: 1591968 - DNA, 15 bp, Homo sapiens
ttgttcgttgctgtt

SEQ ID NO: 1591969 - DNA, 15 bp, Homo sapiens
tttgttcgttgctgt

SEQ ID NO: 1591970 - DNA, 15 bp, Homo sapiens
atttgttcgttgctg

SEQ ID NO: 1591971 - DNA, 15 bp, Homo sapiens
catttgttcgttgct

SEQ ID NO: 1591972 - DNA, 15 bp, Homo sapiens
tcatttgttcgttgc

SEQ ID NO: 1591973 - DNA, 15 bp, Homo sapiens
ttcatttgttcgttg

SEQ ID NO: 1591974 - DNA, 15 bp, Homo sapiens
tttcatttgttcgtt

SEQ ID NO: 1591975 - DNA, 15 bp, Homo sapiens
ttttcatttgttcgt

SEQ ID NO: 1591976 - DNA, 15 bp, Homo sapiens
gttttcatttgttcg

SEQ ID NO: 1591977 - DNA, 15 bp, Homo sapiens
agttttcatttgttc

SEQ ID NO: 1591978 - DNA, 15 bp, Homo sapiens
cagttttcatttgtt

SEQ ID NO: 1591979 - DNA, 15 bp, Homo sapiens
acagttttcatttgt

SEQ ID NO: 1591980 - DNA, 15 bp, Homo sapiens
aacagttttcatttg

SEQ ID NO: 1591981 - DNA, 15 bp, Homo sapiens
aaacagttttcattt

SEQ ID NO: 1591982 - DNA, 15 bp, Homo sapiens
gaaacagttttcatt

SEQ ID NO: 1591983 - DNA, 15 bp, Homo sapiens
agaaacagttttcat

SEQ ID NO: 1591984 - DNA, 15 bp, Homo sapiens
cagaaacagttttca

SEQ ID NO: 1591985 - DNA, 15 bp, Homo sapiens
gcagaaacagttttc

SEQ ID NO: 1591986 - DNA, 15 bp, Homo sapiens
agcagaaacagtttt

SEQ ID NO: 1591987 - DNA, 15 bp, Homo sapiens
gagcagaaacagttt

SEQ ID NO: 1591988 - DNA, 15 bp, Homo sapiens
ggagcagaaacagtt

SEQ ID NO: 1591989 - DNA, 15 bp, Homo sapiens
cggagcagaaacagt

SEQ ID NO: 1591990 - DNA, 15 bp, Homo sapiens
gcggagcagaaacag

SEQ ID NO: 1591991 - DNA, 15 bp, Homo sapiens
tgcggagcagaaaca

SEQ ID NO: 1591992 - DNA, 15 bp, Homo sapiens
atgcggagcagaaac

SEQ ID NO: 1591993 - DNA, 15 bp, Homo sapiens
aatgcggagcagaaa

SEQ ID NO: 1591994 - DNA, 15 bp, Homo sapiens
aaatgcggagcagaa

SEQ ID NO: 1591995 - DNA, 15 bp, Homo sapiens
caaatgcggagcaga

SEQ ID NO: 1591996 - DNA, 15 bp, Homo sapiens
acaaatgcggagcag

SEQ ID NO: 1591997 - DNA, 15 bp, Homo sapiens
aacaaatgcggagca

SEQ ID NO: 1591998 - DNA, 15 bp, Homo sapiens
caacaaatgcggagc

SEQ ID NO: 1591999 - DNA, 15 bp, Homo sapiens
gcaacaaatgcggag

SEQ ID NO: 1592000 - DNA, 15 bp, Homo sapiens
tgcaacaaatgcgga

SEQ ID NO: 1592001 - DNA, 15 bp, Homo sapiens
ttgcaacaaatgcgg

SEQ ID NO: 1592002 - DNA, 15 bp, Homo sapiens
tttgcaacaaatgcg

SEQ ID NO: 1592003 - DNA, 15 bp, Homo sapiens
gtttgcaacaaatgc

SEQ ID NO: 1592004 - DNA, 15 bp, Homo sapiens
cgtttgcaacaaatg

SEQ ID NO: 1592005 - DNA, 15 bp, Homo sapiens
acgtttgcaacaaat

SEQ ID NO: 1592006 - DNA, 15 bp, Homo sapiens
gacgtttgcaacaaa

SEQ ID NO: 1592007 - DNA, 15 bp, Homo sapiens
ggacgtttgcaacaa

SEQ ID NO: 1592008 - DNA, 15 bp, Homo sapiens
aggacgtttgcaaca

SEQ ID NO: 1592009 - DNA, 15 bp, Homo sapiens
gaggacgtttgcaac

SEQ ID NO: 1592010 - DNA, 15 bp, Homo sapiens
agaggacgtttgcaa

SEQ ID NO: 1592011 - DNA, 15 bp, Homo sapiens
aagaggacgtttgca

SEQ ID NO: 1592012 - DNA, 15 bp, Homo sapiens
caagaggacgtttgc

SEQ ID NO: 1592013 - DNA, 15 bp, Homo sapiens
tcaagaggacgtttg

SEQ ID NO: 1592014 - DNA, 15 bp, Homo sapiens
atcaagaggacgttt

SEQ ID NO: 1592015 - DNA, 15 bp, Homo sapiens
aatcaagaggacgtt

SEQ ID NO: 1592016 - DNA, 15 bp, Homo sapiens
aaatcaagaggacgt

SEQ ID NO: 1592017 - DNA, 15 bp, Homo sapiens
gaaatcaagaggacg

SEQ ID NO: 1592018 - DNA, 15 bp, Homo sapiens
tgaaatcaagaggac

SEQ ID NO: 1592019 - DNA, 15 bp, Homo sapiens
gtgaaatcaagagga

SEQ ID NO: 1592020 - DNA, 15 bp, Homo sapiens
tgtgaaatcaagagg

SEQ ID NO: 1592021 - DNA, 15 bp, Homo sapiens
gtgtgaaatcaagag

SEQ ID NO: 1592022 - DNA, 15 bp, Homo sapiens
agtgtgaaatcaaga

SEQ ID NO: 1592023 - DNA, 15 bp, Homo sapiens
aagtgtgaaatcaag

SEQ ID NO: 1592024 - DNA, 15 bp, Homo sapiens
aaagtgtgaaatcaa

SEQ ID NO: 1592025 - DNA, 15 bp, Homo sapiens
taaagtgtgaaatca

SEQ ID NO: 1592026 - DNA, 15 bp, Homo sapiens
ttaaagtgtgaaatc

SEQ ID NO: 1592027 - DNA, 15 bp, Homo sapiens
cttaaagtgtgaaat

SEQ ID NO: 1592028 - DNA, 15 bp, Homo sapiens
gcttaaagtgtgaaa

SEQ ID NO: 1592029 - DNA, 15 bp, Homo sapiens
ggcttaaagtgtgaa

SEQ ID NO: 1592030 - DNA, 15 bp, Homo sapiens
aggcttaaagtgtga

SEQ ID NO: 1592031 - DNA, 15 bp, Homo sapiens
aaggcttaaagtgtg

SEQ ID NO: 1592032 - DNA, 15 bp, Homo sapiens
gaaggcttaaagtgt

SEQ ID NO: 1592033 - DNA, 15 bp, Homo sapiens
tgaaggcttaaagtg

SEQ ID NO: 1592034 - DNA, 15 bp, Homo sapiens
gtgaaggcttaaagt

SEQ ID NO: 1592035 - DNA, 15 bp, Homo sapiens
tgtgaaggcttaaag

SEQ ID NO: 1592036 - DNA, 15 bp, Homo sapiens
atgtgaaggcttaaa

SEQ ID NO: 1592037 - DNA, 15 bp, Homo sapiens
tatgtgaaggcttaa

SEQ ID NO: 1592038 - DNA, 15 bp, Homo sapiens
ctatgtgaaggctta

SEQ ID NO: 1592039 - DNA, 15 bp, Homo sapiens
actatgtgaaggctt

SEQ ID NO: 1592040 - DNA, 15 bp, Homo sapiens
tactatgtgaaggct

SEQ ID NO: 1592041 - DNA, 15 bp, Homo sapiens
ctactatgtgaaggc

SEQ ID NO: 1592042 - DNA, 15 bp, Homo sapiens
actactatgtgaagg

SEQ ID NO: 1592043 - DNA, 15 bp, Homo sapiens
cactactatgtgaag

SEQ ID NO: 1592044 - DNA, 15 bp, Homo sapiens
ccactactatgtgaa

SEQ ID NO: 1592045 - DNA, 15 bp, Homo sapiens
tccactactatgtga

SEQ ID NO: 1592046 - DNA, 15 bp, Homo sapiens
ttccactactatgtg

SEQ ID NO: 1592047 - DNA, 15 bp, Homo sapiens
tttccactactatgt

SEQ ID NO: 1592048 - DNA, 15 bp, Homo sapiens
atttccactactatg

SEQ ID NO: 1592049 - DNA, 15 bp, Homo sapiens
tatttccactactat

SEQ ID NO: 1592050 - DNA, 15 bp, Homo sapiens
ttatttccactacta

SEQ ID NO: 1592051 - DNA, 15 bp, Homo sapiens
cttatttccactact

SEQ ID NO: 1592052 - DNA, 15 bp, Homo sapiens
tcttatttccactac

SEQ ID NO: 1592053 - DNA, 15 bp, Homo sapiens
ttcttatttccacta

SEQ ID NO: 1592054 - DNA, 15 bp, Homo sapiens
attcttatttccact

SEQ ID NO: 1592055 - DNA, 15 bp, Homo sapiens
cattcttatttccac

SEQ ID NO: 1592056 - DNA, 15 bp, Homo sapiens
gcattcttatttcca

SEQ ID NO: 1592057 - DNA, 15 bp, Homo sapiens
tgcattcttatttcc

SEQ ID NO: 1592058 - DNA, 15 bp, Homo sapiens
ctgcattcttatttc

SEQ ID NO: 1592059 - DNA, 15 bp, Homo sapiens
cctgcattcttattt

SEQ ID NO: 1592060 - DNA, 15 bp, Homo sapiens
acctgcattcttatt

SEQ ID NO: 1592061 - DNA, 15 bp, Homo sapiens
gacctgcattcttat

SEQ ID NO: 1592062 - DNA, 15 bp, Homo sapiens
agacctgcattctta

SEQ ID NO: 1592063 - DNA, 15 bp, Homo sapiens
cagacctgcattctt

SEQ ID NO: 1592064 - DNA, 15 bp, Homo sapiens
tcagacctgcattct

SEQ ID NO: 1592065 - DNA, 15 bp, Homo sapiens
ctcagacctgcattc

SEQ ID NO: 1592066 - DNA, 15 bp, Homo sapiens
actcagacctgcatt

SEQ ID NO: 1592067 - DNA, 15 bp, Homo sapiens
cactcagacctgcat

SEQ ID NO: 1592068 - DNA, 15 bp, Homo sapiens
acactcagacctgca

SEQ ID NO: 1592069 - DNA, 15 bp, Homo sapiens
aacactcagacctgc

SEQ ID NO: 1592070 - DNA, 15 bp, Homo sapiens
caacactcagacctg

SEQ ID NO: 1592071 - DNA, 15 bp, Homo sapiens
acaacactcagacct

SEQ ID NO: 1592072 - DNA, 15 bp, Homo sapiens
gacaacactcagacc

SEQ ID NO: 1592073 - DNA, 15 bp, Homo sapiens
agacaacactcagac

SEQ ID NO: 1592074 - DNA, 15 bp, Homo sapiens
cagacaacactcaga

SEQ ID NO: 1592075 - DNA, 15 bp, Homo sapiens
tcagacaacactcag

SEQ ID NO: 1592076 - DNA, 15 bp, Homo sapiens
gtcagacaacactca

SEQ ID NO: 1592077 - DNA, 15 bp, Homo sapiens
tgtcagacaacactc

SEQ ID NO: 1592078 - DNA, 15 bp, Homo sapiens
ttgtcagacaacact

SEQ ID NO: 1592079 - DNA, 15 bp, Homo sapiens
gttgtcagacaacac

SEQ ID NO: 1592080 - DNA, 15 bp, Homo sapiens
tgttgtcagacaaca

SEQ ID NO: 1592081 - DNA, 15 bp, Homo sapiens
ttgttgtcagacaac

SEQ ID NO: 1592082 - DNA, 15 bp, Homo sapiens
cttgttgtcagacaa

SEQ ID NO: 1592083 - DNA, 15 bp, Homo sapiens
ccttgttgtcagaca

SEQ ID NO: 1592084 - DNA, 15 bp, Homo sapiens
tccttgttgtcagac

SEQ ID NO: 1592085 - DNA, 15 bp, Homo sapiens
ttccttgttgtcaga

SEQ ID NO: 1592086 - DNA, 15 bp, Homo sapiens
tttccttgttgtcag

SEQ ID NO: 1592087 - DNA, 15 bp, Homo sapiens
ttttccttgttgtca

SEQ ID NO: 1592088 - DNA, 15 bp, Homo sapiens
tttttccttgttgtc

SEQ ID NO: 1592089 - DNA, 15 bp, Homo sapiens
ctttttccttgttgt

SEQ ID NO: 1592090 - DNA, 15 bp, Homo sapiens
tctttttccttgttg

SEQ ID NO: 1592091 - DNA, 15 bp, Homo sapiens
gtctttttccttgtt

SEQ ID NO: 1592092 - DNA, 15 bp, Homo sapiens
tgtctttttccttgt

SEQ ID NO: 1592093 - DNA, 15 bp, Homo sapiens
ttgtctttttccttg

SEQ ID NO: 1592094 - DNA, 15 bp, Homo sapiens
tttgtctttttcctt

SEQ ID NO: 1592095 - DNA, 15 bp, Homo sapiens
atttgtctttttcct

SEQ ID NO: 1592096 - DNA, 15 bp, Homo sapiens
aatttgtctttttcc

SEQ ID NO: 1592097 - DNA, 15 bp, Homo sapiens
aaatttgtctttttc

SEQ ID NO: 1592098 - DNA, 15 bp, Homo sapiens
aaaatttgtcttttt

SEQ ID NO: 1592099 - DNA, 15 bp, Homo sapiens
aaaaatttgtctttt

SEQ ID NO: 1592100 - DNA, 15 bp, Homo sapiens
aaaaaatttgtcttt

SEQ ID NO: 1592101 - DNA, 15 bp, Homo sapiens
aaaaaaatttgtctt

SEQ ID NO: 1592102 - DNA, 15 bp, Homo sapiens
aaaaaaaatttgtct

SEQ ID NO: 1592103 - DNA, 15 bp, Homo sapiens
gaaaaaaaatttgtc

SEQ ID NO: 1592104 - DNA, 15 bp, Homo sapiens
agaaaaaaaatttgt

SEQ ID NO: 1592105 - DNA, 15 bp, Homo sapiens
aagaaaaaaaatttg

SEQ ID NO: 1592106 - DNA, 15 bp, Homo sapiens
gaagaaaaaaaattt

SEQ ID NO: 1592107 - DNA, 15 bp, Homo sapiens
agaagaaaaaaaatt

SEQ ID NO: 1592108 - DNA, 15 bp, Homo sapiens
gagaagaaaaaaaat

SEQ ID NO: 1592109 - DNA, 15 bp, Homo sapiens
ggagaagaaaaaaaa

SEQ ID NO: 1592110 - DNA, 15 bp, Homo sapiens
gggagaagaaaaaaa

SEQ ID NO: 1592111 - DNA, 15 bp, Homo sapiens
agggagaagaaaaaa

SEQ ID NO: 1592112 - DNA, 15 bp, Homo sapiens
aagggagaagaaaaa

SEQ ID NO: 1592113 - DNA, 15 bp, Homo sapiens
aaagggagaagaaaa

SEQ ID NO: 1592114 - DNA, 15 bp, Homo sapiens
aaaagggagaagaaa

SEQ ID NO: 1592115 - DNA, 15 bp, Homo sapiens
gaaaagggagaagaa

SEQ ID NO: 1592116 - DNA, 15 bp, Homo sapiens
ggaaaagggagaaga

SEQ ID NO: 1592117 - DNA, 15 bp, Homo sapiens
gggaaaagggagaag

SEQ ID NO: 1592118 - DNA, 15 bp, Homo sapiens
ggggaaaagggagaa

SEQ ID NO: 1592119 - DNA, 15 bp, Homo sapiens
aggggaaaagggaga

SEQ ID NO: 1592120 - DNA, 15 bp, Homo sapiens
gaggggaaaagggag

SEQ ID NO: 1592121 - DNA, 15 bp, Homo sapiens
agaggggaaaaggga

SEQ ID NO: 1592122 - DNA, 15 bp, Homo sapiens
tagaggggaaaaggg

SEQ ID NO: 1592123 - DNA, 15 bp, Homo sapiens
atagaggggaaaagg

SEQ ID NO: 1592124 - DNA, 15 bp, Homo sapiens
aatagaggggaaaag

SEQ ID NO: 1592125 - DNA, 15 bp, Homo sapiens
aaatagaggggaaaa

SEQ ID NO: 1592126 - DNA, 15 bp, Homo sapiens
gaaatagaggggaaa

SEQ ID NO: 1592127 - DNA, 15 bp, Homo sapiens
tgaaatagaggggaa

SEQ ID NO: 1592128 - DNA, 15 bp, Homo sapiens
gtgaaatagagggga

SEQ ID NO: 1592129 - DNA, 15 bp, Homo sapiens
tgtgaaatagagggg

SEQ ID NO: 1592130 - DNA, 15 bp, Homo sapiens
gtgtgaaatagaggg

SEQ ID NO: 1592131 - DNA, 15 bp, Homo sapiens
tgtgtgaaatagagg

SEQ ID NO: 1592132 - DNA, 15 bp, Homo sapiens
atgtgtgaaatagag

SEQ ID NO: 1592133 - DNA, 15 bp, Homo sapiens
aatgtgtgaaataga

SEQ ID NO: 1592134 - DNA, 15 bp, Homo sapiens
aaatgtgtgaaatag

SEQ ID NO: 1592135 - DNA, 15 bp, Homo sapiens
gaaatgtgtgaaata

SEQ ID NO: 1592136 - DNA, 15 bp, Homo sapiens
agaaatgtgtgaaat

SEQ ID NO: 1592137 - DNA, 15 bp, Homo sapiens
cagaaatgtgtgaaa

SEQ ID NO: 1592138 - DNA, 15 bp, Homo sapiens
ccagaaatgtgtgaa

SEQ ID NO: 1592139 - DNA, 15 bp, Homo sapiens
cccagaaatgtgtga

SEQ ID NO: 1592140 - DNA, 15 bp, Homo sapiens
ccccagaaatgtgtg

SEQ ID NO: 1592141 - DNA, 15 bp, Homo sapiens
tccccagaaatgtgt

SEQ ID NO: 1592142 - DNA, 15 bp, Homo sapiens
ttccccagaaatgtg

SEQ ID NO: 1592143 - DNA, 15 bp, Homo sapiens
attccccagaaatgt

SEQ ID NO: 1592144 - DNA, 15 bp, Homo sapiens
gattccccagaaatg

SEQ ID NO: 1592145 - DNA, 15 bp, Homo sapiens
ggattccccagaaat

SEQ ID NO: 1592146 - DNA, 15 bp, Homo sapiens
cggattccccagaaa

SEQ ID NO: 1592147 - DNA, 15 bp, Homo sapiens
ccggattccccagaa

SEQ ID NO: 1592148 - DNA, 15 bp, Homo sapiens
accggattccccaga

SEQ ID NO: 1592149 - DNA, 15 bp, Homo sapiens
gaccggattccccag

SEQ ID NO: 1592150 - DNA, 15 bp, Homo sapiens
agaccggattcccca

SEQ ID NO: 1592151 - DNA, 15 bp, Homo sapiens
aagaccggattcccc

SEQ ID NO: 1592152 - DNA, 15 bp, Homo sapiens
aaagaccggattccc

SEQ ID NO: 1592153 - DNA, 15 bp, Homo sapiens
caaagaccggattcc

SEQ ID NO: 1592154 - DNA, 15 bp, Homo sapiens
tcaaagaccggattc

SEQ ID NO: 1592155 - DNA, 15 bp, Homo sapiens
atcaaagaccggatt

SEQ ID NO: 1592156 - DNA, 15 bp, Homo sapiens
aatcaaagaccggat

SEQ ID NO: 1592157 - DNA, 15 bp, Homo sapiens
caatcaaagaccgga

SEQ ID NO: 1592158 - DNA, 15 bp, Homo sapiens
acaatcaaagaccgg

SEQ ID NO: 1592159 - DNA, 15 bp, Homo sapiens
aacaatcaaagaccg

SEQ ID NO: 1592160 - DNA, 15 bp, Homo sapiens
taacaatcaaagacc

SEQ ID NO: 1592161 - DNA, 15 bp, Homo sapiens
ctaacaatcaaagac

SEQ ID NO: 1592162 - DNA, 15 bp, Homo sapiens
tctaacaatcaaaga

SEQ ID NO: 1592163 - DNA, 15 bp, Homo sapiens
atctaacaatcaaag

SEQ ID NO: 1592164 - DNA, 15 bp, Homo sapiens
gatctaacaatcaaa

SEQ ID NO: 1592165 - DNA, 15 bp, Homo sapiens
agatctaacaatcaa

SEQ ID NO: 1592166 - DNA, 15 bp, Homo sapiens
aagatctaacaatca

SEQ ID NO: 1592167 - DNA, 15 bp, Homo sapiens
caagatctaacaatc

SEQ ID NO: 1592168 - DNA, 15 bp, Homo sapiens
gcaagatctaacaat

SEQ ID NO: 1592169 - DNA, 15 bp, Homo sapiens
agcaagatctaacaa

SEQ ID NO: 1592170 - DNA, 15 bp, Homo sapiens
cagcaagatctaaca

SEQ ID NO: 1592171 - DNA, 15 bp, Homo sapiens
gcagcaagatctaac

SEQ ID NO: 1592172 - DNA, 15 bp, Homo sapiens
agcagcaagatctaa

SEQ ID NO: 1592173 - DNA, 15 bp, Homo sapiens
tagcagcaagatcta

SEQ ID NO: 1592174 - DNA, 15 bp, Homo sapiens
ctagcagcaagatct

SEQ ID NO: 1592175 - DNA, 15 bp, Homo sapiens
actagcagcaagatc

SEQ ID NO: 1592176 - DNA, 15 bp, Homo sapiens
tactagcagcaagat

SEQ ID NO: 1592177 - DNA, 15 bp, Homo sapiens
ttactagcagcaaga

SEQ ID NO: 1592178 - DNA, 15 bp, Homo sapiens
gttactagcagcaag

SEQ ID NO: 1592179 - DNA, 15 bp, Homo sapiens
tgttactagcagcaa

SEQ ID NO: 1592180 - DNA, 15 bp, Homo sapiens
ctgttactagcagca

SEQ ID NO: 1592181 - DNA, 15 bp, Homo sapiens
gctgttactagcagc

SEQ ID NO: 1592182 - DNA, 15 bp, Homo sapiens
tgctgttactagcag

SEQ ID NO: 1592183 - DNA, 15 bp, Homo sapiens
ctgctgttactagca

SEQ ID NO: 1592184 - DNA, 15 bp, Homo sapiens
tctgctgttactagc

SEQ ID NO: 1592185 - DNA, 15 bp, Homo sapiens
gtctgctgttactag

SEQ ID NO: 1592186 - DNA, 15 bp, Homo sapiens
agtctgctgttacta

SEQ ID NO: 1592187 - DNA, 15 bp, Homo sapiens
cagtctgctgttact

SEQ ID NO: 1592188 - DNA, 15 bp, Homo sapiens
acagtctgctgttac

SEQ ID NO: 1592189 - DNA, 15 bp, Homo sapiens
aacagtctgctgtta

SEQ ID NO: 1592190 - DNA, 15 bp, Homo sapiens
caacagtctgctgtt

SEQ ID NO: 1592191 - DNA, 15 bp, Homo sapiens
ccaacagtctgctgt

SEQ ID NO: 1592192 - DNA, 15 bp, Homo sapiens
accaacagtctgctg

SEQ ID NO: 1592193 - DNA, 15 bp, Homo sapiens
caccaacagtctgct

SEQ ID NO: 1592194 - DNA, 15 bp, Homo sapiens
ccaccaacagtctgc

SEQ ID NO: 1592195 - DNA, 15 bp, Homo sapiens
tccaccaacagtctg

SEQ ID NO: 1592196 - DNA, 15 bp, Homo sapiens
ctccaccaacagtct

SEQ ID NO: 1592197 - DNA, 15 bp, Homo sapiens
actccaccaacagtc

SEQ ID NO: 1592198 - DNA, 15 bp, Homo sapiens
cactccaccaacagt

SEQ ID NO: 1592199 - DNA, 15 bp, Homo sapiens
acactccaccaacag

SEQ ID NO: 1592200 - DNA, 15 bp, Homo sapiens
gacactccaccaaca

SEQ ID NO: 1592201 - DNA, 15 bp, Homo sapiens
tgacactccaccaac

SEQ ID NO: 1592202 - DNA, 15 bp, Homo sapiens
ttgacactccaccaa

SEQ ID NO: 1592203 - DNA, 15 bp, Homo sapiens
tttgacactccacca

SEQ ID NO: 1592204 - DNA, 15 bp, Homo sapiens
gtttgacactccacc

SEQ ID NO: 1592205 - DNA, 15 bp, Homo sapiens
tgtttgacactccac

SEQ ID NO: 1592206 - DNA, 15 bp, Homo sapiens
atgtttgacactcca

SEQ ID NO: 1592207 - DNA, 15 bp, Homo sapiens
aatgtttgacactcc

SEQ ID NO: 1592208 - DNA, 15 bp, Homo sapiens
gaatgtttgacactc

SEQ ID NO: 1592209 - DNA, 15 bp, Homo sapiens
agaatgtttgacact

SEQ ID NO: 1592210 - DNA, 15 bp, Homo sapiens
tagaatgtttgacac

SEQ ID NO: 1592211 - DNA, 15 bp, Homo sapiens
atagaatgtttgaca

SEQ ID NO: 1592212 - DNA, 15 bp, Homo sapiens
aatagaatgtttgac

SEQ ID NO: 1592213 - DNA, 15 bp, Homo sapiens
aaatagaatgtttga

SEQ ID NO: 1592214 - DNA, 15 bp, Homo sapiens
gaaatagaatgtttg

SEQ ID NO: 1592215 - DNA, 15 bp, Homo sapiens
agaaatagaatgttt

SEQ ID NO: 1592216 - DNA, 15 bp, Homo sapiens
tagaaatagaatgtt

SEQ ID NO: 1592217 - DNA, 15 bp, Homo sapiens
ctagaaatagaatgt

SEQ ID NO: 1592218 - DNA, 15 bp, Homo sapiens
tctagaaatagaatg

SEQ ID NO: 1592219 - DNA, 15 bp, Homo sapiens
ctctagaaatagaat

SEQ ID NO: 1592220 - DNA, 15 bp, Homo sapiens
actctagaaatagaa

SEQ ID NO: 1592221 - DNA, 15 bp, Homo sapiens
tactctagaaataga

SEQ ID NO: 1592222 - DNA, 15 bp, Homo sapiens
atactctagaaatag

SEQ ID NO: 1592223 - DNA, 15 bp, Homo sapiens
aatactctagaaata

SEQ ID NO: 1592224 - DNA, 15 bp, Homo sapiens
caatactctagaaat

SEQ ID NO: 1592225 - DNA, 15 bp, Homo sapiens
ccaatactctagaaa

SEQ ID NO: 1592226 - DNA, 15 bp, Homo sapiens
accaatactctagaa

SEQ ID NO: 1592227 - DNA, 15 bp, Homo sapiens
caccaatactctaga

SEQ ID NO: 1592228 - DNA, 15 bp, Homo sapiens
tcaccaatactctag

SEQ ID NO: 1592229 - DNA, 15 bp, Homo sapiens
atcaccaatactcta

SEQ ID NO: 1592230 - DNA, 15 bp, Homo sapiens
aatcaccaatactct

SEQ ID NO: 1592231 - DNA, 15 bp, Homo sapiens
caatcaccaatactc

SEQ ID NO: 1592232 - DNA, 15 bp, Homo sapiens
acaatcaccaatact

SEQ ID NO: 1592233 - DNA, 15 bp, Homo sapiens
aacaatcaccaatac

SEQ ID NO: 1592234 - DNA, 15 bp, Homo sapiens
caacaatcaccaata

SEQ ID NO: 1592235 - DNA, 15 bp, Homo sapiens
tcaacaatcaccaat

SEQ ID NO: 1592236 - DNA, 15 bp, Homo sapiens
atcaacaatcaccaa

SEQ ID NO: 1592237 - DNA, 15 bp, Homo sapiens
gatcaacaatcacca

SEQ ID NO: 1592238 - DNA, 15 bp, Homo sapiens
tgatcaacaatcacc

SEQ ID NO: 1592239 - DNA, 15 bp, Homo sapiens
atgatcaacaatcac

SEQ ID NO: 1592240 - DNA, 15 bp, Homo sapiens
aatgatcaacaatca

SEQ ID NO: 1592241 - DNA, 15 bp, Homo sapiens
gaatgatcaacaatc

SEQ ID NO: 1592242 - DNA, 15 bp, Homo sapiens
tgaatgatcaacaat

SEQ ID NO: 1592243 - DNA, 15 bp, Homo sapiens
atgaatgatcaacaa

SEQ ID NO: 1592244 - DNA, 15 bp, Homo sapiens
aatgaatgatcaaca

SEQ ID NO: 1592245 - DNA, 15 bp, Homo sapiens
aaatgaatgatcaac

SEQ ID NO: 1592246 - DNA, 15 bp, Homo sapiens
taaatgaatgatcaa

SEQ ID NO: 1592247 - DNA, 15 bp, Homo sapiens
ataaatgaatgatca

SEQ ID NO: 1592248 - DNA, 15 bp, Homo sapiens
tataaatgaatgatc

SEQ ID NO: 1592249 - DNA, 15 bp, Homo sapiens
atataaatgaatgat

SEQ ID NO: 1592250 - DNA, 15 bp, Homo sapiens
tatataaatgaatga

SEQ ID NO: 1592251 - DNA, 15 bp, Homo sapiens
ttatataaatgaatg

SEQ ID NO: 1592252 - DNA, 15 bp, Homo sapiens
tttatataaatgaat

SEQ ID NO: 1592253 - DNA, 15 bp, Homo sapiens
ttttatataaatgaa

SEQ ID NO: 1592254 - DNA, 15 bp, Homo sapiens
attttatataaatga

SEQ ID NO: 1592255 - DNA, 15 bp, Homo sapiens
gattttatataaatg

SEQ ID NO: 1592256 - DNA, 15 bp, Homo sapiens
tgattttatataaat

SEQ ID NO: 1592257 - DNA, 15 bp, Homo sapiens
ctgattttatataaa

SEQ ID NO: 1592258 - DNA, 15 bp, Homo sapiens
tctgattttatataa

SEQ ID NO: 1592259 - DNA, 15 bp, Homo sapiens
ctctgattttatata

SEQ ID NO: 1592260 - DNA, 15 bp, Homo sapiens
gctctgattttatat

SEQ ID NO: 1592261 - DNA, 15 bp, Homo sapiens
agctctgattttata

SEQ ID NO: 1592262 - DNA, 15 bp, Homo sapiens
tagctctgattttat

SEQ ID NO: 1592263 - DNA, 15 bp, Homo sapiens
atagctctgatttta

SEQ ID NO: 1592264 - DNA, 15 bp, Homo sapiens
gatagctctgatttt

SEQ ID NO: 1592265 - DNA, 15 bp, Homo sapiens
tgatagctctgattt

SEQ ID NO: 1592266 - DNA, 15 bp, Homo sapiens
ctgatagctctgatt

SEQ ID NO: 1592267 - DNA, 15 bp, Homo sapiens
cctgatagctctgat

SEQ ID NO: 1592268 - DNA, 15 bp, Homo sapiens
gcctgatagctctga

SEQ ID NO: 1592269 - DNA, 15 bp, Homo sapiens
ggcctgatagctctg

SEQ ID NO: 1592270 - DNA, 15 bp, Homo sapiens
tggcctgatagctct

SEQ ID NO: 1592271 - DNA, 15 bp, Homo sapiens
gtggcctgatagctc

SEQ ID NO: 1592272 - DNA, 15 bp, Homo sapiens
ggtggcctgatagct

SEQ ID NO: 1592273 - DNA, 15 bp, Homo sapiens
tggtggcctgatagc

SEQ ID NO: 1592274 - DNA, 15 bp, Homo sapiens
ttggtggcctgatag

SEQ ID NO: 1592275 - DNA, 15 bp, Homo sapiens
cttggtggcctgata

SEQ ID NO: 1592276 - DNA, 15 bp, Homo sapiens
acttggtggcctgat

SEQ ID NO: 1592277 - DNA, 15 bp, Homo sapiens
tacttggtggcctga

SEQ ID NO: 1592278 - DNA, 15 bp, Homo sapiens
atacttggtggcctg

SEQ ID NO: 1592279 - DNA, 15 bp, Homo sapiens
gatacttggtggcct

SEQ ID NO: 1592280 - DNA, 15 bp, Homo sapiens
agatacttggtggcc

SEQ ID NO: 1592281 - DNA, 15 bp, Homo sapiens
aagatacttggtggc

SEQ ID NO: 1592282 - DNA, 15 bp, Homo sapiens
aaagatacttggtgg

SEQ ID NO: 1592283 - DNA, 15 bp, Homo sapiens
caaagatacttggtg

SEQ ID NO: 1592284 - DNA, 15 bp, Homo sapiens
ccaaagatacttggt

SEQ ID NO: 1592285 - DNA, 15 bp, Homo sapiens
tccaaagatacttgg

SEQ ID NO: 1592286 - DNA, 15 bp, Homo sapiens
atccaaagatacttg

SEQ ID NO: 1592287 - DNA, 15 bp, Homo sapiens
tatccaaagatactt

SEQ ID NO: 1592288 - DNA, 15 bp, Homo sapiens
atatccaaagatact

SEQ ID NO: 1592289 - DNA, 15 bp, Homo sapiens
gatatccaaagatac

SEQ ID NO: 1592290 - DNA, 15 bp, Homo sapiens
ggatatccaaagata

SEQ ID NO: 1592291 - DNA, 15 bp, Homo sapiens
aggatatccaaagat

SEQ ID NO: 1592292 - DNA, 15 bp, Homo sapiens
aaggatatccaaaga

SEQ ID NO: 1592293 - DNA, 15 bp, Homo sapiens
gaaggatatccaaag

SEQ ID NO: 1592294 - DNA, 15 bp, Homo sapiens
ggaaggatatccaaa

SEQ ID NO: 1592295 - DNA, 15 bp, Homo sapiens
gggaaggatatccaa

SEQ ID NO: 1592296 - DNA, 15 bp, Homo sapiens
ggggaaggatatcca

SEQ ID NO: 1592297 - DNA, 15 bp, Homo sapiens
aggggaaggatatcc

SEQ ID NO: 1592298 - DNA, 15 bp, Homo sapiens
caggggaaggatatc

SEQ ID NO: 1592299 - DNA, 15 bp, Homo sapiens
acaggggaaggatat

SEQ ID NO: 1592300 - DNA, 15 bp, Homo sapiens
gacaggggaaggata

SEQ ID NO: 1592301 - DNA, 15 bp, Homo sapiens
ggacaggggaaggat

SEQ ID NO: 1592302 - DNA, 15 bp, Homo sapiens
gggacaggggaagga

SEQ ID NO: 1592303 - DNA, 15 bp, Homo sapiens
agggacaggggaagg

SEQ ID NO: 1592304 - DNA, 15 bp, Homo sapiens
cagggacaggggaag

SEQ ID NO: 1592305 - DNA, 15 bp, Homo sapiens
acagggacaggggaa

SEQ ID NO: 1592306 - DNA, 15 bp, Homo sapiens
cacagggacagggga

SEQ ID NO: 1592307 - DNA, 15 bp, Homo sapiens
gcacagggacagggg

SEQ ID NO: 1592308 - DNA, 15 bp, Homo sapiens
agcacagggacaggg

SEQ ID NO: 1592309 - DNA, 15 bp, Homo sapiens
gagcacagggacagg

SEQ ID NO: 1592310 - DNA, 15 bp, Homo sapiens
agagcacagggacag

SEQ ID NO: 1592311 - DNA, 15 bp, Homo sapiens
cagagcacagggaca

SEQ ID NO: 1592312 - DNA, 15 bp, Homo sapiens
ccagagcacagggac

SEQ ID NO: 1592313 - DNA, 15 bp, Homo sapiens
tccagagcacaggga

SEQ ID NO: 1592314 - DNA, 15 bp, Homo sapiens
atccagagcacaggg

SEQ ID NO: 1592315 - DNA, 15 bp, Homo sapiens
gatccagagcacagg

SEQ ID NO: 1592316 - DNA, 15 bp, Homo sapiens
ggatccagagcacag

SEQ ID NO: 1592317 - DNA, 15 bp, Homo sapiens
tggatccagagcaca

SEQ ID NO: 1592318 - DNA, 15 bp, Homo sapiens
ctggatccagagcac

SEQ ID NO: 1592319 - DNA, 15 bp, Homo sapiens
actggatccagagca

SEQ ID NO: 1592320 - DNA, 15 bp, Homo sapiens
gactggatccagagc

SEQ ID NO: 1592321 - DNA, 15 bp, Homo sapiens
agactggatccagag

SEQ ID NO: 1592322 - DNA, 15 bp, Homo sapiens
tagactggatccaga

SEQ ID NO: 1592323 - DNA, 15 bp, Homo sapiens
atagactggatccag

SEQ ID NO: 1592324 - DNA, 15 bp, Homo sapiens
catagactggatcca

SEQ ID NO: 1592325 - DNA, 15 bp, Homo sapiens
ccatagactggatcc

SEQ ID NO: 1592326 - DNA, 15 bp, Homo sapiens
tccatagactggatc

SEQ ID NO: 1592327 - DNA, 15 bp, Homo sapiens
ttccatagactggat

SEQ ID NO: 1592328 - DNA, 15 bp, Homo sapiens
tttccatagactgga

SEQ ID NO: 1592329 - DNA, 15 bp, Homo sapiens
ttttccatagactgg

SEQ ID NO: 1592330 - DNA, 15 bp, Homo sapiens
attttccatagactg

SEQ ID NO: 1592331 - DNA, 15 bp, Homo sapiens
cattttccatagact

SEQ ID NO: 1592332 - DNA, 15 bp, Homo sapiens
tcattttccatagac

SEQ ID NO: 1592333 - DNA, 15 bp, Homo sapiens
gtcattttccataga

SEQ ID NO: 1592334 - DNA, 15 bp, Homo sapiens
ggtcattttccatag

SEQ ID NO: 1592335 - DNA, 15 bp, Homo sapiens
gggtcattttccata

SEQ ID NO: 1592336 - DNA, 15 bp, Homo sapiens
tgggtcattttccat

SEQ ID NO: 1592337 - DNA, 15 bp, Homo sapiens
gtgggtcattttcca

SEQ ID NO: 1592338 - DNA, 15 bp, Homo sapiens
tgtgggtcattttcc

SEQ ID NO: 1592339 - DNA, 15 bp, Homo sapiens
ttgtgggtcattttc

SEQ ID NO: 1592340 - DNA, 15 bp, Homo sapiens
gttgtgggtcatttt

SEQ ID NO: 1592341 - DNA, 15 bp, Homo sapiens
tgttgtgggtcattt

SEQ ID NO: 1592342 - DNA, 15 bp, Homo sapiens
ctgttgtgggtcatt

SEQ ID NO: 1592343 - DNA, 15 bp, Homo sapiens
cctgttgtgggtcat

SEQ ID NO: 1592344 - DNA, 15 bp, Homo sapiens
acctgttgtgggtca

SEQ ID NO: 1592345 - DNA, 15 bp, Homo sapiens
aacctgttgtgggtc

SEQ ID NO: 1592346 - DNA, 15 bp, Homo sapiens
taacctgttgtgggt

SEQ ID NO: 1592347 - DNA, 15 bp, Homo sapiens
ctaacctgttgtggg

SEQ ID NO: 1592348 - DNA, 15 bp, Homo sapiens
gctaacctgttgtgg

SEQ ID NO: 1592349 - DNA, 15 bp, Homo sapiens
cgctaacctgttgtg

SEQ ID NO: 1592350 - DNA, 15 bp, Homo sapiens
acgctaacctgttgt

SEQ ID NO: 1592351 - DNA, 15 bp, Homo sapiens
gacgctaacctgttg

SEQ ID NO: 1592352 - DNA, 15 bp, Homo sapiens
agacgctaacctgtt

SEQ ID NO: 1592353 - DNA, 15 bp, Homo sapiens
cagacgctaacctgt

SEQ ID NO: 1592354 - DNA, 15 bp, Homo sapiens
gcagacgctaacctg

SEQ ID NO: 1592355 - DNA, 15 bp, Homo sapiens
ggcagacgctaacct

SEQ ID NO: 1592356 - DNA, 15 bp, Homo sapiens
aggcagacgctaacc

SEQ ID NO: 1592357 - DNA, 15 bp, Homo sapiens
aaggcagacgctaac

SEQ ID NO: 1592358 - DNA, 15 bp, Homo sapiens
caaggcagacgctaa

SEQ ID NO: 1592359 - DNA, 15 bp, Homo sapiens
gcaaggcagacgcta

SEQ ID NO: 1592360 - DNA, 15 bp, Homo sapiens
ggcaaggcagacgct

SEQ ID NO: 1592361 - DNA, 15 bp, Homo sapiens
aggcaaggcagacgc

SEQ ID NO: 1592362 - DNA, 15 bp, Homo sapiens
taggcaaggcagacg

SEQ ID NO: 1592363 - DNA, 15 bp, Homo sapiens
ctaggcaaggcagac

SEQ ID NO: 1592364 - DNA, 15 bp, Homo sapiens
gctaggcaaggcaga

SEQ ID NO: 1592365 - DNA, 15 bp, Homo sapiens
tgctaggcaaggcag

SEQ ID NO: 1592366 - DNA, 15 bp, Homo sapiens
atgctaggcaaggca

SEQ ID NO: 1592367 - DNA, 15 bp, Homo sapiens
aatgctaggcaaggc

SEQ ID NO: 1592368 - DNA, 15 bp, Homo sapiens
gaatgctaggcaagg

SEQ ID NO: 1592369 - DNA, 15 bp, Homo sapiens
agaatgctaggcaag

SEQ ID NO: 1592370 - DNA, 15 bp, Homo sapiens
gagaatgctaggcaa

SEQ ID NO: 1592371 - DNA, 15 bp, Homo sapiens
ggagaatgctaggca

SEQ ID NO: 1592372 - DNA, 15 bp, Homo sapiens
gggagaatgctaggc

SEQ ID NO: 1592373 - DNA, 15 bp, Homo sapiens
agggagaatgctagg

SEQ ID NO: 1592374 - DNA, 15 bp, Homo sapiens
gagggagaatgctag

SEQ ID NO: 1592375 - DNA, 15 bp, Homo sapiens
ggagggagaatgcta

SEQ ID NO: 1592376 - DNA, 15 bp, Homo sapiens
aggagggagaatgct

SEQ ID NO: 1592377 - DNA, 15 bp, Homo sapiens
taggagggagaatgc

SEQ ID NO: 1592378 - DNA, 15 bp, Homo sapiens
ttaggagggagaatg

SEQ ID NO: 1592379 - DNA, 15 bp, Homo sapiens
attaggagggagaat

SEQ ID NO: 1592380 - DNA, 15 bp, Homo sapiens
cattaggagggagaa

SEQ ID NO: 1592381 - DNA, 15 bp, Homo sapiens
gcattaggagggaga

SEQ ID NO: 1592382 - DNA, 15 bp, Homo sapiens
agcattaggagggag

SEQ ID NO: 1592383 - DNA, 15 bp, Homo sapiens
cagcattaggaggga

SEQ ID NO: 1592384 - DNA, 15 bp, Homo sapiens
gcagcattaggaggg

SEQ ID NO: 1592385 - DNA, 15 bp, Homo sapiens
agcagcattaggagg

SEQ ID NO: 1592386 - DNA, 15 bp, Homo sapiens
cagcagcattaggag

SEQ ID NO: 1592387 - DNA, 15 bp, Homo sapiens
gcagcagcattagga

SEQ ID NO: 1592388 - DNA, 15 bp, Homo sapiens
agcagcagcattagg

SEQ ID NO: 1592389 - DNA, 15 bp, Homo sapiens
gagcagcagcattag

SEQ ID NO: 1592390 - DNA, 15 bp, Homo sapiens
agagcagcagcatta

SEQ ID NO: 1592391 - DNA, 15 bp, Homo sapiens
tagagcagcagcatt

SEQ ID NO: 1592392 - DNA, 15 bp, Homo sapiens
ttagagcagcagcat

SEQ ID NO: 1592393 - DNA, 15 bp, Homo sapiens
tttagagcagcagca

SEQ ID NO: 1592394 - DNA, 15 bp, Homo sapiens
ttttagagcagcagc

SEQ ID NO: 1592395 - DNA, 15 bp, Homo sapiens
cttttagagcagcag

SEQ ID NO: 1592396 - DNA, 15 bp, Homo sapiens
acttttagagcagca

SEQ ID NO: 1592397 - DNA, 15 bp, Homo sapiens
gacttttagagcagc

SEQ ID NO: 1592398 - DNA, 15 bp, Homo sapiens
ggacttttagagcag

SEQ ID NO: 1592399 - DNA, 15 bp, Homo sapiens
tggacttttagagca

SEQ ID NO: 1592400 - DNA, 15 bp, Homo sapiens
ttggacttttagagc

SEQ ID NO: 1592401 - DNA, 15 bp, Homo sapiens
tttggacttttagag

SEQ ID NO: 1592402 - DNA, 15 bp, Homo sapiens
ctttggacttttaga

SEQ ID NO: 1592403 - DNA, 15 bp, Homo sapiens
gctttggacttttag

SEQ ID NO: 1592404 - DNA, 15 bp, Homo sapiens
agctttggactttta

SEQ ID NO: 1592405 - DNA, 15 bp, Homo sapiens
gagctttggactttt

SEQ ID NO: 1592406 - DNA, 15 bp, Homo sapiens
agagctttggacttt

SEQ ID NO: 1592407 - DNA, 15 bp, Homo sapiens
tagagctttggactt

SEQ ID NO: 1592408 - DNA, 15 bp, Homo sapiens
ctagagctttggact

SEQ ID NO: 1592409 - DNA, 15 bp, Homo sapiens
cctagagctttggac

SEQ ID NO: 1592410 - DNA, 15 bp, Homo sapiens
tcctagagctttgga

SEQ ID NO: 1592411 - DNA, 15 bp, Homo sapiens
ttcctagagctttgg

SEQ ID NO: 1592412 - DNA, 15 bp, Homo sapiens
tttcctagagctttg

SEQ ID NO: 1592413 - DNA, 15 bp, Homo sapiens
ttttcctagagcttt

SEQ ID NO: 1592414 - DNA, 15 bp, Homo sapiens
gttttcctagagctt

SEQ ID NO: 1592415 - DNA, 15 bp, Homo sapiens
tgttttcctagagct

SEQ ID NO: 1592416 - DNA, 15 bp, Homo sapiens
ttgttttcctagagc

SEQ ID NO: 1592417 - DNA, 15 bp, Homo sapiens
cttgttttcctagag

SEQ ID NO: 1592418 - DNA, 15 bp, Homo sapiens
ccttgttttcctaga

SEQ ID NO: 1592419 - DNA, 15 bp, Homo sapiens
gccttgttttcctag

SEQ ID NO: 1592420 - DNA, 15 bp, Homo sapiens
agccttgttttccta

SEQ ID NO: 1592421 - DNA, 15 bp, Homo sapiens
aagccttgttttcct

SEQ ID NO: 1592422 - DNA, 15 bp, Homo sapiens
aaagccttgttttcc

SEQ ID NO: 1592423 - DNA, 15 bp, Homo sapiens
taaagccttgttttc

SEQ ID NO: 1592424 - DNA, 15 bp, Homo sapiens
ataaagccttgtttt

SEQ ID NO: 1592425 - DNA, 15 bp, Homo sapiens
aataaagccttgttt

SEQ ID NO: 1592426 - DNA, 15 bp, Homo sapiens
aaataaagccttgtt

SEQ ID NO: 1592427 - DNA, 15 bp, Homo sapiens
caaataaagccttgt

SEQ ID NO: 1592428 - DNA, 15 bp, Homo sapiens
ccaaataaagccttg

SEQ ID NO: 1592429 - DNA, 15 bp, Homo sapiens
gccaaataaagcctt

SEQ ID NO: 1592430 - DNA, 15 bp, Homo sapiens
ggccaaataaagcct

SEQ ID NO: 1592431 - DNA, 15 bp, Homo sapiens
gggccaaataaagcc

SEQ ID NO: 1592432 - DNA, 15 bp, Homo sapiens
cgggccaaataaagc

SEQ ID NO: 1592433 - DNA, 15 bp, Homo sapiens
gcgggccaaataaag

SEQ ID NO: 1592434 - DNA, 15 bp, Homo sapiens
cgcgggccaaataaa

SEQ ID NO: 1592435 - DNA, 15 bp, Homo sapiens
acgcgggccaaataa

SEQ ID NO: 1592436 - DNA, 15 bp, Homo sapiens
cacgcgggccaaata

SEQ ID NO: 1592437 - DNA, 15 bp, Homo sapiens
gcacgcgggccaaat

SEQ ID NO: 1592438 - DNA, 15 bp, Homo sapiens
agcacgcgggccaaa

SEQ ID NO: 1592439 - DNA, 15 bp, Homo sapiens
tagcacgcgggccaa

SEQ ID NO: 1592440 - DNA, 15 bp, Homo sapiens
gtagcacgcgggcca

SEQ ID NO: 1592441 - DNA, 15 bp, Homo sapiens
agtagcacgcgggcc

SEQ ID NO: 1592442 - DNA, 15 bp, Homo sapiens
cagtagcacgcgggc

SEQ ID NO: 1592443 - DNA, 15 bp, Homo sapiens
tcagtagcacgcggg

SEQ ID NO: 1592444 - DNA, 15 bp, Homo sapiens
atcagtagcacgcgg

SEQ ID NO: 1592445 - DNA, 15 bp, Homo sapiens
aatcagtagcacgcg

SEQ ID NO: 1592446 - DNA, 15 bp, Homo sapiens
aaatcagtagcacgc

SEQ ID NO: 1592447 - DNA, 15 bp, Homo sapiens
taaatcagtagcacg

SEQ ID NO: 1592448 - DNA, 15 bp, Homo sapiens
gtaaatcagtagcac

SEQ ID NO: 1592449 - DNA, 15 bp, Homo sapiens
ggtaaatcagtagca

SEQ ID NO: 1592450 - DNA, 15 bp, Homo sapiens
aggtaaatcagtagc

SEQ ID NO: 1592451 - DNA, 15 bp, Homo sapiens
caggtaaatcagtag

SEQ ID NO: 1592452 - DNA, 15 bp, Homo sapiens
tcaggtaaatcagta

SEQ ID NO: 1592453 - DNA, 15 bp, Homo sapiens
atcaggtaaatcagt

SEQ ID NO: 1592454 - DNA, 15 bp, Homo sapiens
gatcaggtaaatcag

SEQ ID NO: 1592455 - DNA, 15 bp, Homo sapiens
agatcaggtaaatca

SEQ ID NO: 1592456 - DNA, 15 bp, Homo sapiens
gagatcaggtaaatc

SEQ ID NO: 1592457 - DNA, 15 bp, Homo sapiens
tgagatcaggtaaat

SEQ ID NO: 1592458 - DNA, 15 bp, Homo sapiens
ctgagatcaggtaaa

SEQ ID NO: 1592459 - DNA, 15 bp, Homo sapiens
gctgagatcaggtaa

SEQ ID NO: 1592460 - DNA, 15 bp, Homo sapiens
tgctgagatcaggta

SEQ ID NO: 1592461 - DNA, 15 bp, Homo sapiens
ctgctgagatcaggt

SEQ ID NO: 1592462 - DNA, 15 bp, Homo sapiens
gctgctgagatcagg

SEQ ID NO: 1592463 - DNA, 15 bp, Homo sapiens
tgctgctgagatcag

SEQ ID NO: 1592464 - DNA, 15 bp, Homo sapiens
gtgctgctgagatca

SEQ ID NO: 1592465 - DNA, 15 bp, Homo sapiens
tgtgctgctgagatc

SEQ ID NO: 1592466 - DNA, 15 bp, Homo sapiens
gtgtgctgctgagat

SEQ ID NO: 1592467 - DNA, 15 bp, Homo sapiens
tgtgtgctgctgaga

SEQ ID NO: 1592468 - DNA, 15 bp, Homo sapiens
gtgtgtgctgctgag

SEQ ID NO: 1592469 - DNA, 15 bp, Homo sapiens
cgtgtgtgctgctga

SEQ ID NO: 1592470 - DNA, 15 bp, Homo sapiens
ccgtgtgtgctgctg

SEQ ID NO: 1592471 - DNA, 15 bp, Homo sapiens
cccgtgtgtgctgct

SEQ ID NO: 1592472 - DNA, 15 bp, Homo sapiens
ccccgtgtgtgctgc

SEQ ID NO: 1592473 - DNA, 15 bp, Homo sapiens
gccccgtgtgtgctg

SEQ ID NO: 1592474 - DNA, 15 bp, Homo sapiens
agccccgtgtgtgct

SEQ ID NO: 1592475 - DNA, 15 bp, Homo sapiens
cagccccgtgtgtgc

SEQ ID NO: 1592476 - DNA, 15 bp, Homo sapiens
tcagccccgtgtgtg

SEQ ID NO: 1592477 - DNA, 15 bp, Homo sapiens
ctcagccccgtgtgt

SEQ ID NO: 1592478 - DNA, 15 bp, Homo sapiens
actcagccccgtgtg

SEQ ID NO: 1592479 - DNA, 15 bp, Homo sapiens
cactcagccccgtgt

SEQ ID NO: 1592480 - DNA, 15 bp, Homo sapiens
gcactcagccccgtg

SEQ ID NO: 1592481 - DNA, 15 bp, Homo sapiens
cgcactcagccccgt

SEQ ID NO: 1592482 - DNA, 15 bp, Homo sapiens
gcgcactcagccccg

SEQ ID NO: 1592483 - DNA, 15 bp, Homo sapiens
cgcgcactcagcccc

SEQ ID NO: 1592484 - DNA, 15 bp, Homo sapiens
gcgcgcactcagccc

SEQ ID NO: 1592485 - DNA, 15 bp, Homo sapiens
cgcgcgcactcagcc

SEQ ID NO: 1592486 - DNA, 15 bp, Homo sapiens
gcgcgcgcactcagc

SEQ ID NO: 1592487 - DNA, 15 bp, Homo sapiens
cgcgcgcgcactcag

SEQ ID NO: 1592488 - DNA, 15 bp, Homo sapiens
gcgcgcgcgcactca

SEQ ID NO: 1592489 - DNA, 15 bp, Homo sapiens
tgcgcgcgcgcactc

SEQ ID NO: 1592490 - DNA, 15 bp, Homo sapiens
ctgcgcgcgcgcact

SEQ ID NO: 1592491 - DNA, 15 bp, Homo sapiens
tctgcgcgcgcgcac

SEQ ID NO: 1592492 - DNA, 15 bp, Homo sapiens
ttctgcgcgcgcgca

SEQ ID NO: 1592493 - DNA, 15 bp, Homo sapiens
cttctgcgcgcgcgc

SEQ ID NO: 1592494 - DNA, 15 bp, Homo sapiens
acttctgcgcgcgcg

SEQ ID NO: 1592495 - DNA, 15 bp, Homo sapiens
tacttctgcgcgcgc

SEQ ID NO: 1592496 - DNA, 15 bp, Homo sapiens
ttacttctgcgcgcg

SEQ ID NO: 1592497 - DNA, 15 bp, Homo sapiens
tttacttctgcgcgc

SEQ ID NO: 1592498 - DNA, 15 bp, Homo sapiens
gtttacttctgcgcg

SEQ ID NO: 1592499 - DNA, 15 bp, Homo sapiens
ggtttacttctgcgc

SEQ ID NO: 1592500 - DNA, 15 bp, Homo sapiens
aggtttacttctgcg

SEQ ID NO: 1592501 - DNA, 15 bp, Homo sapiens
caggtttacttctgc

SEQ ID NO: 1592502 - DNA, 15 bp, Homo sapiens
acaggtttacttctg

SEQ ID NO: 1592503 - DNA, 15 bp, Homo sapiens
cacaggtttacttct

SEQ ID NO: 1592504 - DNA, 15 bp, Homo sapiens
tcacaggtttacttc

SEQ ID NO: 1592505 - DNA, 15 bp, Homo sapiens
ttcacaggtttactt

SEQ ID NO: 1592506 - DNA, 15 bp, Homo sapiens
attcacaggtttact

SEQ ID NO: 1592507 - DNA, 15 bp, Homo sapiens
aattcacaggtttac

SEQ ID NO: 1592508 - DNA, 15 bp, Homo sapiens
taattcacaggttta

SEQ ID NO: 1592509 - DNA, 15 bp, Homo sapiens
gtaattcacaggttt

SEQ ID NO: 1592510 - DNA, 15 bp, Homo sapiens
ggtaattcacaggtt

SEQ ID NO: 1592511 - DNA, 15 bp, Homo sapiens
tggtaattcacaggt

SEQ ID NO: 1592512 - DNA, 15 bp, Homo sapiens
atggtaattcacagg

SEQ ID NO: 1592513 - DNA, 15 bp, Homo sapiens
tatggtaattcacag

SEQ ID NO: 1592514 - DNA, 15 bp, Homo sapiens
ttatggtaattcaca

SEQ ID NO: 1592515 - DNA, 15 bp, Homo sapiens
attatggtaattcac

SEQ ID NO: 1592516 - DNA, 15 bp, Homo sapiens
cattatggtaattca

SEQ ID NO: 1592517 - DNA, 15 bp, Homo sapiens
tcattatggtaattc

SEQ ID NO: 1592518 - DNA, 15 bp, Homo sapiens
gtcattatggtaatt

SEQ ID NO: 1592519 - DNA, 15 bp, Homo sapiens
tgtcattatggtaat

SEQ ID NO: 1592520 - DNA, 15 bp, Homo sapiens
gtgtcattatggtaa

SEQ ID NO: 1592521 - DNA, 15 bp, Homo sapiens
agtgtcattatggta

SEQ ID NO: 1592522 - DNA, 15 bp, Homo sapiens
tagtgtcattatggt

SEQ ID NO: 1592523 - DNA, 15 bp, Homo sapiens
ttagtgtcattatgg

SEQ ID NO: 1592524 - DNA, 15 bp, Homo sapiens
cttagtgtcattatg

SEQ ID NO: 1592525 - DNA, 15 bp, Homo sapiens
tcttagtgtcattat

SEQ ID NO: 1592526 - DNA, 15 bp, Homo sapiens
ctcttagtgtcatta

SEQ ID NO: 1592527 - DNA, 15 bp, Homo sapiens
cctcttagtgtcatt

SEQ ID NO: 1592528 - DNA, 15 bp, Homo sapiens
tcctcttagtgtcat

SEQ ID NO: 1592529 - DNA, 15 bp, Homo sapiens
gtcctcttagtgtca

SEQ ID NO: 1592530 - DNA, 15 bp, Homo sapiens
ggtcctcttagtgtc

SEQ ID NO: 1592531 - DNA, 15 bp, Homo sapiens
cggtcctcttagtgt

SEQ ID NO: 1592532 - DNA, 15 bp, Homo sapiens
tcggtcctcttagtg

SEQ ID NO: 1592533 - DNA, 15 bp, Homo sapiens
ctcggtcctcttagt

SEQ ID NO: 1592534 - DNA, 15 bp, Homo sapiens
tctcggtcctcttag

SEQ ID NO: 1592535 - DNA, 15 bp, Homo sapiens
ctctcggtcctctta

SEQ ID NO: 1592536 - DNA, 15 bp, Homo sapiens
gctctcggtcctctt

SEQ ID NO: 1592537 - DNA, 15 bp, Homo sapiens
agctctcggtcctct

SEQ ID NO: 1592538 - DNA, 15 bp, Homo sapiens
tagctctcggtcctc

SEQ ID NO: 1592539 - DNA, 15 bp, Homo sapiens
ctagctctcggtcct

SEQ ID NO: 1592540 - DNA, 15 bp, Homo sapiens
actagctctcggtcc

SEQ ID NO: 1592541 - DNA, 15 bp, Homo sapiens
aactagctctcggtc

SEQ ID NO: 1592542 - DNA, 15 bp, Homo sapiens
gaactagctctcggt

SEQ ID NO: 1592543 - DNA, 15 bp, Homo sapiens
ggaactagctctcgg

SEQ ID NO: 1592544 - DNA, 15 bp, Homo sapiens
aggaactagctctcg

SEQ ID NO: 1592545 - DNA, 15 bp, Homo sapiens
gaggaactagctctc

SEQ ID NO: 1592546 - DNA, 15 bp, Homo sapiens
agaggaactagctct

SEQ ID NO: 1592547 - DNA, 15 bp, Homo sapiens
cagaggaactagctc

SEQ ID NO: 1592548 - DNA, 15 bp, Homo sapiens
tcagaggaactagct

SEQ ID NO: 1592549 - DNA, 15 bp, Homo sapiens
ctcagaggaactagc

SEQ ID NO: 1592550 - DNA, 15 bp, Homo sapiens
gctcagaggaactag

SEQ ID NO: 1592551 - DNA, 15 bp, Homo sapiens
agctcagaggaacta

SEQ ID NO: 1592552 - DNA, 15 bp, Homo sapiens
cagctcagaggaact

SEQ ID NO: 1592553 - DNA, 15 bp, Homo sapiens
tcagctcagaggaac

SEQ ID NO: 1592554 - DNA, 15 bp, Homo sapiens
gtcagctcagaggaa

SEQ ID NO: 1592555 - DNA, 15 bp, Homo sapiens
agtcagctcagagga

SEQ ID NO: 1592556 - DNA, 15 bp, Homo sapiens
cagtcagctcagagg

SEQ ID NO: 1592557 - DNA, 15 bp, Homo sapiens
gcagtcagctcagag

SEQ ID NO: 1592558 - DNA, 15 bp, Homo sapiens
tgcagtcagctcaga

SEQ ID NO: 1592559 - DNA, 15 bp, Homo sapiens
gtgcagtcagctcag

SEQ ID NO: 1592560 - DNA, 15 bp, Homo sapiens
cgtgcagtcagctca

SEQ ID NO: 1592561 - DNA, 15 bp, Homo sapiens
gcgtgcagtcagctc

SEQ ID NO: 1592562 - DNA, 15 bp, Homo sapiens
agcgtgcagtcagct

SEQ ID NO: 1592563 - DNA, 15 bp, Homo sapiens
gagcgtgcagtcagc

SEQ ID NO: 1592564 - DNA, 15 bp, Homo sapiens
agagcgtgcagtcag

SEQ ID NO: 1592565 - DNA, 15 bp, Homo sapiens
cagagcgtgcagtca

SEQ ID NO: 1592566 - DNA, 15 bp, Homo sapiens
gcagagcgtgcagtc

SEQ ID NO: 1592567 - DNA, 15 bp, Homo sapiens
ggcagagcgtgcagt

SEQ ID NO: 1592568 - DNA, 15 bp, Homo sapiens
cggcagagcgtgcag

SEQ ID NO: 1592569 - DNA, 15 bp, Homo sapiens
gcggcagagcgtgca

SEQ ID NO: 1592570 - DNA, 15 bp, Homo sapiens
tgcggcagagcgtgc

SEQ ID NO: 1592571 - DNA, 15 bp, Homo sapiens
ttgcggcagagcgtg

SEQ ID NO: 1592572 - DNA, 15 bp, Homo sapiens
gttgcggcagagcgt

SEQ ID NO: 1592573 - DNA, 15 bp, Homo sapiens
ggttgcggcagagcg

SEQ ID NO: 1592574 - DNA, 15 bp, Homo sapiens
gggttgcggcagagc

SEQ ID NO: 1592575 - DNA, 15 bp, Homo sapiens
tgggttgcggcagag

SEQ ID NO: 1592576 - DNA, 15 bp, Homo sapiens
ctgggttgcggcaga

SEQ ID NO: 1592577 - DNA, 15 bp, Homo sapiens
cctgggttgcggcag

SEQ ID NO: 1592578 - DNA, 15 bp, Homo sapiens
tcctgggttgcggca

SEQ ID NO: 1592579 - DNA, 15 bp, Homo sapiens
ctcctgggttgcggc

SEQ ID NO: 1592580 - DNA, 15 bp, Homo sapiens
tctcctgggttgcgg

SEQ ID NO: 1592581 - DNA, 15 bp, Homo sapiens
gtctcctgggttgcg

SEQ ID NO: 1592582 - DNA, 15 bp, Homo sapiens
ggtctcctgggttgc

SEQ ID NO: 1592583 - DNA, 15 bp, Homo sapiens
gggtctcctgggttg

SEQ ID NO: 1592584 - DNA, 15 bp, Homo sapiens
tgggtctcctgggtt

SEQ ID NO: 1592585 - DNA, 15 bp, Homo sapiens
ctgggtctcctgggt

SEQ ID NO: 1592586 - DNA, 15 bp, Homo sapiens
actgggtctcctggg

SEQ ID NO: 1592587 - DNA, 15 bp, Homo sapiens
gactgggtctcctgg

SEQ ID NO: 1592588 - DNA, 15 bp, Homo sapiens
tgactgggtctcctg

SEQ ID NO: 1592589 - DNA, 15 bp, Homo sapiens
ttgactgggtctcct

SEQ ID NO: 1592590 - DNA, 15 bp, Homo sapiens
attgactgggtctcc

SEQ ID NO: 1592591 - DNA, 15 bp, Homo sapiens
cattgactgggtctc

SEQ ID NO: 1592592 - DNA, 15 bp, Homo sapiens
acattgactgggtct

SEQ ID NO: 1592593 - DNA, 15 bp, Homo sapiens
gacattgactgggtc

SEQ ID NO: 1592594 - DNA, 15 bp, Homo sapiens
agacattgactgggt

SEQ ID NO: 1592595 - DNA, 15 bp, Homo sapiens
tagacattgactggg

SEQ ID NO: 1592596 - DNA, 15 bp, Homo sapiens
ttagacattgactgg

SEQ ID NO: 1592597 - DNA, 15 bp, Homo sapiens
cttagacattgactg

SEQ ID NO: 1592598 - DNA, 15 bp, Homo sapiens
ccttagacattgact

SEQ ID NO: 1592599 - DNA, 15 bp, Homo sapiens
tccttagacattgac

SEQ ID NO: 1592600 - DNA, 15 bp, Homo sapiens
ttccttagacattga

SEQ ID NO: 1592601 - DNA, 15 bp, Homo sapiens
gttccttagacattg

SEQ ID NO: 1592602 - DNA, 15 bp, Homo sapiens
agttccttagacatt

SEQ ID NO: 1592603 - DNA, 15 bp, Homo sapiens
cagttccttagacat

SEQ ID NO: 1592604 - DNA, 15 bp, Homo sapiens
ccagttccttagaca

SEQ ID NO: 1592605 - DNA, 15 bp, Homo sapiens
tccagttccttagac

SEQ ID NO: 1592606 - DNA, 15 bp, Homo sapiens
atccagttccttaga

SEQ ID NO: 1592607 - DNA, 15 bp, Homo sapiens
tatccagttccttag

SEQ ID NO: 1592608 - DNA, 15 bp, Homo sapiens
atatccagttcctta

SEQ ID NO: 1592609 - DNA, 15 bp, Homo sapiens
catatccagttcctt

SEQ ID NO: 1592610 - DNA, 15 bp, Homo sapiens
gcatatccagttcct

SEQ ID NO: 1592611 - DNA, 15 bp, Homo sapiens
ggcatatccagttcc

SEQ ID NO: 1592612 - DNA, 15 bp, Homo sapiens
aggcatatccagttc

SEQ ID NO: 1592613 - DNA, 15 bp, Homo sapiens
taggcatatccagtt

SEQ ID NO: 1592614 - DNA, 15 bp, Homo sapiens
ataggcatatccagt

SEQ ID NO: 1592615 - DNA, 15 bp, Homo sapiens
cataggcatatccag

SEQ ID NO: 1592616 - DNA, 15 bp, Homo sapiens
acataggcatatcca

SEQ ID NO: 1592617 - DNA, 15 bp, Homo sapiens
cacataggcatatcc

SEQ ID NO: 1592618 - DNA, 15 bp, Homo sapiens
acacataggcatatc

SEQ ID NO: 1592619 - DNA, 15 bp, Homo sapiens
tacacataggcatat

SEQ ID NO: 1592620 - DNA, 15 bp, Homo sapiens
ttacacataggcata

SEQ ID NO: 1592621 - DNA, 15 bp, Homo sapiens
tttacacataggcat

SEQ ID NO: 1592622 - DNA, 15 bp, Homo sapiens
ctttacacataggca

SEQ ID NO: 1592623 - DNA, 15 bp, Homo sapiens
gctttacacataggc

SEQ ID NO: 1592624 - DNA, 15 bp, Homo sapiens
cgctttacacatagg

SEQ ID NO: 1592625 - DNA, 15 bp, Homo sapiens
tcgctttacacatag

SEQ ID NO: 1592626 - DNA, 15 bp, Homo sapiens
ttcgctttacacata

SEQ ID NO: 1592627 - DNA, 15 bp, Homo sapiens
gttcgctttacacat

SEQ ID NO: 1592628 - DNA, 15 bp, Homo sapiens
ggttcgctttacaca

SEQ ID NO: 1592629 - DNA, 15 bp, Homo sapiens
aggttcgctttacac

SEQ ID NO: 1592630 - DNA, 15 bp, Homo sapiens
gaggttcgctttaca

SEQ ID NO: 1592631 - DNA, 15 bp, Homo sapiens
cgaggttcgctttac

SEQ ID NO: 1592632 - DNA, 15 bp, Homo sapiens
gcgaggttcgcttta

SEQ ID NO: 1592633 - DNA, 15 bp, Homo sapiens
tgcgaggttcgcttt

SEQ ID NO: 1592634 - DNA, 15 bp, Homo sapiens
ttgcgaggttcgctt

SEQ ID NO: 1592635 - DNA, 15 bp, Homo sapiens
tttgcgaggttcgct

SEQ ID NO: 1592636 - DNA, 15 bp, Homo sapiens
ctttgcgaggttcgc

SEQ ID NO: 1592637 - DNA, 15 bp, Homo sapiens
actttgcgaggttcg

SEQ ID NO: 1592638 - DNA, 15 bp, Homo sapiens
aactttgcgaggttc

SEQ ID NO: 1592639 - DNA, 15 bp, Homo sapiens
taactttgcgaggtt

SEQ ID NO: 1592640 - DNA, 15 bp, Homo sapiens
ataactttgcgaggt

SEQ ID NO: 1592641 - DNA, 15 bp, Homo sapiens
cataactttgcgagg

SEQ ID NO: 1592642 - DNA, 15 bp, Homo sapiens
ccataactttgcgag

SEQ ID NO: 1592643 - DNA, 15 bp, Homo sapiens
accataactttgcga

SEQ ID NO: 1592644 - DNA, 15 bp, Homo sapiens
gaccataactttgcg

SEQ ID NO: 1592645 - DNA, 15 bp, Homo sapiens
ggaccataactttgc

SEQ ID NO: 1592646 - DNA, 15 bp, Homo sapiens
gggaccataactttg

SEQ ID NO: 1592647 - DNA, 15 bp, Homo sapiens
tgggaccataacttt

SEQ ID NO: 1592648 - DNA, 15 bp, Homo sapiens
ttgggaccataactt

SEQ ID NO: 1592649 - DNA, 15 bp, Homo sapiens
gttgggaccataact

SEQ ID NO: 1592650 - DNA, 15 bp, Homo sapiens
tgttgggaccataac

SEQ ID NO: 1592651 - DNA, 15 bp, Homo sapiens
ctgttgggaccataa

SEQ ID NO: 1592652 - DNA, 15 bp, Homo sapiens
tctgttgggaccata

SEQ ID NO: 1592653 - DNA, 15 bp, Homo sapiens
gtctgttgggaccat

SEQ ID NO: 1592654 - DNA, 15 bp, Homo sapiens
cgtctgttgggacca

SEQ ID NO: 1592655 - DNA, 15 bp, Homo sapiens
gcgtctgttgggacc

SEQ ID NO: 1592656 - DNA, 15 bp, Homo sapiens
agcgtctgttgggac

SEQ ID NO: 1592657 - DNA, 15 bp, Homo sapiens
aagcgtctgttggga

SEQ ID NO: 1592658 - DNA, 15 bp, Homo sapiens
gaagcgtctgttggg

SEQ ID NO: 1592659 - DNA, 15 bp, Homo sapiens
ggaagcgtctgttgg

SEQ ID NO: 1592660 - DNA, 15 bp, Homo sapiens
tggaagcgtctgttg

SEQ ID NO: 1592661 - DNA, 15 bp, Homo sapiens
ctggaagcgtctgtt

SEQ ID NO: 1592662 - DNA, 15 bp, Homo sapiens
tctggaagcgtctgt

SEQ ID NO: 1592663 - DNA, 15 bp, Homo sapiens
ctctggaagcgtctg

SEQ ID NO: 1592664 - DNA, 15 bp, Homo sapiens
gctctggaagcgtct

SEQ ID NO: 1592665 - DNA, 15 bp, Homo sapiens
tgctctggaagcgtc

SEQ ID NO: 1592666 - DNA, 15 bp, Homo sapiens
atgctctggaagcgt

SEQ ID NO: 1592667 - DNA, 15 bp, Homo sapiens
aatgctctggaagcg

SEQ ID NO: 1592668 - DNA, 15 bp, Homo sapiens
taatgctctggaagc

SEQ ID NO: 1592669 - DNA, 15 bp, Homo sapiens
ctaatgctctggaag

SEQ ID NO: 1592670 - DNA, 15 bp, Homo sapiens
cctaatgctctggaa

SEQ ID NO: 1592671 - DNA, 15 bp, Homo sapiens
acctaatgctctgga

SEQ ID NO: 1592672 - DNA, 15 bp, Homo sapiens
gacctaatgctctgg

SEQ ID NO: 1592673 - DNA, 15 bp, Homo sapiens
agacctaatgctctg

SEQ ID NO: 1592674 - DNA, 15 bp, Homo sapiens
gagacctaatgctct

SEQ ID NO: 1592675 - DNA, 15 bp, Homo sapiens
agagacctaatgctc

SEQ ID NO: 1592676 - DNA, 15 bp, Homo sapiens
tagagacctaatgct

SEQ ID NO: 1592677 - DNA, 15 bp, Homo sapiens
ttagagacctaatgc

SEQ ID NO: 1592678 - DNA, 15 bp, Homo sapiens
tttagagacctaatg

SEQ ID NO: 1592679 - DNA, 15 bp, Homo sapiens
gtttagagacctaat

SEQ ID NO: 1592680 - DNA, 15 bp, Homo sapiens
tgtttagagacctaa

SEQ ID NO: 1592681 - DNA, 15 bp, Homo sapiens
ctgtttagagaccta

SEQ ID NO: 1592682 - DNA, 15 bp, Homo sapiens
tctgtttagagacct

SEQ ID NO: 1592683 - DNA, 15 bp, Homo sapiens
gtctgtttagagacc

SEQ ID NO: 1592684 - DNA, 15 bp, Homo sapiens
agtctgtttagagac

SEQ ID NO: 1592685 - DNA, 15 bp, Homo sapiens
aagtctgtttagaga

SEQ ID NO: 1592686 - DNA, 15 bp, Homo sapiens
caagtctgtttagag

SEQ ID NO: 1592687 - DNA, 15 bp, Homo sapiens
gcaagtctgtttaga

SEQ ID NO: 1592688 - DNA, 15 bp, Homo sapiens
tgcaagtctgtttag

SEQ ID NO: 1592689 - DNA, 15 bp, Homo sapiens
ctgcaagtctgttta

SEQ ID NO: 1592690 - DNA, 15 bp, Homo sapiens
gctgcaagtctgttt

SEQ ID NO: 1592691 - DNA, 15 bp, Homo sapiens
cgctgcaagtctgtt

SEQ ID NO: 1592692 - DNA, 15 bp, Homo sapiens
tcgctgcaagtctgt

SEQ ID NO: 1592693 - DNA, 15 bp, Homo sapiens
gtcgctgcaagtctg

SEQ ID NO: 1592694 - DNA, 15 bp, Homo sapiens
tgtcgctgcaagtct

SEQ ID NO: 1592695 - DNA, 15 bp, Homo sapiens
ctgtcgctgcaagtc

SEQ ID NO: 1592696 - DNA, 15 bp, Homo sapiens
tctgtcgctgcaagt

SEQ ID NO: 1592697 - DNA, 15 bp, Homo sapiens
gtctgtcgctgcaag

SEQ ID NO: 1592698 - DNA, 15 bp, Homo sapiens
agtctgtcgctgcaa

SEQ ID NO: 1592699 - DNA, 15 bp, Homo sapiens
aagtctgtcgctgca

SEQ ID NO: 1592700 - DNA, 15 bp, Homo sapiens
gaagtctgtcgctgc

SEQ ID NO: 1592701 - DNA, 15 bp, Homo sapiens
agaagtctgtcgctg

SEQ ID NO: 1592702 - DNA, 15 bp, Homo sapiens
tagaagtctgtcgct

SEQ ID NO: 1592703 - DNA, 15 bp, Homo sapiens
ctagaagtctgtcgc

SEQ ID NO: 1592704 - DNA, 15 bp, Homo sapiens
tctagaagtctgtcg

SEQ ID NO: 1592705 - DNA, 15 bp, Homo sapiens
ctctagaagtctgtc

SEQ ID NO: 1592706 - DNA, 15 bp, Homo sapiens
cctctagaagtctgt

SEQ ID NO: 1592707 - DNA, 15 bp, Homo sapiens
tcctctagaagtctg

SEQ ID NO: 1592708 - DNA, 15 bp, Homo sapiens
ctcctctagaagtct

SEQ ID NO: 1592709 - DNA, 15 bp, Homo sapiens
tctcctctagaagtc

SEQ ID NO: 1592710 - DNA, 15 bp, Homo sapiens
gtctcctctagaagt

SEQ ID NO: 1592711 - DNA, 15 bp, Homo sapiens
agtctcctctagaag

SEQ ID NO: 1592712 - DNA, 15 bp, Homo sapiens
gagtctcctctagaa

SEQ ID NO: 1592713 - DNA, 15 bp, Homo sapiens
tgagtctcctctaga

SEQ ID NO: 1592714 - DNA, 15 bp, Homo sapiens
ttgagtctcctctag

SEQ ID NO: 1592715 - DNA, 15 bp, Homo sapiens
cttgagtctcctcta

SEQ ID NO: 1592716 - DNA, 15 bp, Homo sapiens
gcttgagtctcctct

SEQ ID NO: 1592717 - DNA, 15 bp, Homo sapiens
ggcttgagtctcctc

SEQ ID NO: 1592718 - DNA, 15 bp, Homo sapiens
cggcttgagtctcct

SEQ ID NO: 1592719 - DNA, 15 bp, Homo sapiens
gcggcttgagtctcc

SEQ ID NO: 1592720 - DNA, 15 bp, Homo sapiens
tgcggcttgagtctc

SEQ ID NO: 1592721 - DNA, 15 bp, Homo sapiens
ctgcggcttgagtct

SEQ ID NO: 1592722 - DNA, 15 bp, Homo sapiens
tctgcggcttgagtc

SEQ ID NO: 1592723 - DNA, 15 bp, Homo sapiens
ctctgcggcttgagt

SEQ ID NO: 1592724 - DNA, 15 bp, Homo sapiens
cctctgcggcttgag

SEQ ID NO: 1592725 - DNA, 15 bp, Homo sapiens
tcctctgcggcttga

SEQ ID NO: 1592726 - DNA, 15 bp, Homo sapiens
atcctctgcggcttg

SEQ ID NO: 1592727 - DNA, 15 bp, Homo sapiens
aatcctctgcggctt

SEQ ID NO: 1592728 - DNA, 15 bp, Homo sapiens
taatcctctgcggct

SEQ ID NO: 1592729 - DNA, 15 bp, Homo sapiens
ttaatcctctgcggc

SEQ ID NO: 1592730 - DNA, 15 bp, Homo sapiens
tttaatcctctgcgg

SEQ ID NO: 1592731 - DNA, 15 bp, Homo sapiens
atttaatcctctgcg

SEQ ID NO: 1592732 - DNA, 15 bp, Homo sapiens
gatttaatcctctgc

SEQ ID NO: 1592733 - DNA, 15 bp, Homo sapiens
agatttaatcctctg

SEQ ID NO: 1592734 - DNA, 15 bp, Homo sapiens
gagatttaatcctct

SEQ ID NO: 1592735 - DNA, 15 bp, Homo sapiens
agagatttaatcctc

SEQ ID NO: 1592736 - DNA, 15 bp, Homo sapiens
gagagatttaatcct

SEQ ID NO: 1592737 - DNA, 15 bp, Homo sapiens
agagagatttaatcc

SEQ ID NO: 1592738 - DNA, 15 bp, Homo sapiens
gagagagatttaatc

SEQ ID NO: 1592739 - DNA, 15 bp, Homo sapiens
agagagagatttaat

SEQ ID NO: 1592740 - DNA, 15 bp, Homo sapiens
gagagagagatttaa

SEQ ID NO: 1592741 - DNA, 15 bp, Homo sapiens
agagagagagattta

SEQ ID NO: 1592742 - DNA, 15 bp, Homo sapiens
cagagagagagattt

SEQ ID NO: 1592743 - DNA, 15 bp, Homo sapiens
gcagagagagagatt

SEQ ID NO: 1592744 - DNA, 15 bp, Homo sapiens
ggcagagagagagat

SEQ ID NO: 1592745 - DNA, 15 bp, Homo sapiens
aggcagagagagaga

SEQ ID NO: 1592746 - DNA, 15 bp, Homo sapiens
caggcagagagagag

SEQ ID NO: 1592747 - DNA, 15 bp, Homo sapiens
ccaggcagagagaga

SEQ ID NO: 1592748 - DNA, 15 bp, Homo sapiens
gccaggcagagagag

SEQ ID NO: 1592749 - DNA, 15 bp, Homo sapiens
ggccaggcagagaga

SEQ ID NO: 1592750 - DNA, 15 bp, Homo sapiens
tggccaggcagagag

SEQ ID NO: 1592751 - DNA, 15 bp, Homo sapiens
gtggccaggcagaga

SEQ ID NO: 1592752 - DNA, 15 bp, Homo sapiens
agtggccaggcagag

SEQ ID NO: 1592753 - DNA, 15 bp, Homo sapiens
aagtggccaggcaga

SEQ ID NO: 1592754 - DNA, 15 bp, Homo sapiens
caagtggccaggcag

SEQ ID NO: 1592755 - DNA, 15 bp, Homo sapiens
tcaagtggccaggca

SEQ ID NO: 1592756 - DNA, 15 bp, Homo sapiens
atcaagtggccaggc

SEQ ID NO: 1592757 - DNA, 15 bp, Homo sapiens
catcaagtggccagg

SEQ ID NO: 1592758 - DNA, 15 bp, Homo sapiens
ccatcaagtggccag

SEQ ID NO: 1592759 - DNA, 15 bp, Homo sapiens
accatcaagtggcca

SEQ ID NO: 1592760 - DNA, 15 bp, Homo sapiens
caccatcaagtggcc

SEQ ID NO: 1592761 - DNA, 15 bp, Homo sapiens
gcaccatcaagtggc

SEQ ID NO: 1592762 - DNA, 15 bp, Homo sapiens
ggcaccatcaagtgg

SEQ ID NO: 1592763 - DNA, 15 bp, Homo sapiens
aggcaccatcaagtg

SEQ ID NO: 1592764 - DNA, 15 bp, Homo sapiens
gaggcaccatcaagt

SEQ ID NO: 1592765 - DNA, 15 bp, Homo sapiens
tgaggcaccatcaag

SEQ ID NO: 1592766 - DNA, 15 bp, Homo sapiens
ttgaggcaccatcaa

SEQ ID NO: 1592767 - DNA, 15 bp, Homo sapiens
cttgaggcaccatca

SEQ ID NO: 1592768 - DNA, 15 bp, Homo sapiens
ccttgaggcaccatc

SEQ ID NO: 1592769 - DNA, 15 bp, Homo sapiens
accttgaggcaccat

SEQ ID NO: 1592770 - DNA, 15 bp, Homo sapiens
gaccttgaggcacca

SEQ ID NO: 1592771 - DNA, 15 bp, Homo sapiens
agaccttgaggcacc

SEQ ID NO: 1592772 - DNA, 15 bp, Homo sapiens
cagaccttgaggcac

SEQ ID NO: 1592773 - DNA, 15 bp, Homo sapiens
gcagaccttgaggca

SEQ ID NO: 1592774 - DNA, 15 bp, Homo sapiens
tgcagaccttgaggc

SEQ ID NO: 1592775 - DNA, 15 bp, Homo sapiens
ttgcagaccttgagg

SEQ ID NO: 1592776 - DNA, 15 bp, Homo sapiens
cttgcagaccttgag

SEQ ID NO: 1592777 - DNA, 15 bp, Homo sapiens
ccttgcagaccttga

SEQ ID NO: 1592778 - DNA, 15 bp, Homo sapiens
gccttgcagaccttg

SEQ ID NO: 1592779 - DNA, 15 bp, Homo sapiens
ggccttgcagacctt

SEQ ID NO: 1592780 - DNA, 15 bp, Homo sapiens
aggccttgcagacct

SEQ ID NO: 1592781 - DNA, 15 bp, Homo sapiens
caggccttgcagacc

SEQ ID NO: 1592782 - DNA, 15 bp, Homo sapiens
ccaggccttgcagac

SEQ ID NO: 1592783 - DNA, 15 bp, Homo sapiens
cccaggccttgcaga

SEQ ID NO: 1592784 - DNA, 15 bp, Homo sapiens
ccccaggccttgcag

SEQ ID NO: 1592785 - DNA, 15 bp, Homo sapiens
accccaggccttgca

SEQ ID NO: 1592786 - DNA, 15 bp, Homo sapiens
caccccaggccttgc

SEQ ID NO: 1592787 - DNA, 15 bp, Homo sapiens
ccaccccaggccttg

SEQ ID NO: 1592788 - DNA, 15 bp, Homo sapiens
cccaccccaggcctt

SEQ ID NO: 1592789 - DNA, 15 bp, Homo sapiens
tcccaccccaggcct

SEQ ID NO: 1592790 - DNA, 15 bp, Homo sapiens
gtcccaccccaggcc

SEQ ID NO: 1592791 - DNA, 15 bp, Homo sapiens
agtcccaccccaggc

SEQ ID NO: 1592792 - DNA, 15 bp, Homo sapiens
tagtcccaccccagg

SEQ ID NO: 1592793 - DNA, 15 bp, Homo sapiens
ttagtcccaccccag

SEQ ID NO: 1592794 - DNA, 15 bp, Homo sapiens
cttagtcccacccca

SEQ ID NO: 1592795 - DNA, 15 bp, Homo sapiens
ccttagtcccacccc

SEQ ID NO: 1592796 - DNA, 15 bp, Homo sapiens
cccttagtcccaccc

SEQ ID NO: 1592797 - DNA, 15 bp, Homo sapiens
gcccttagtcccacc

SEQ ID NO: 1592798 - DNA, 15 bp, Homo sapiens
ggcccttagtcccac

SEQ ID NO: 1592799 - DNA, 15 bp, Homo sapiens
aggcccttagtccca

SEQ ID NO: 1592800 - DNA, 15 bp, Homo sapiens
caggcccttagtccc

SEQ ID NO: 1592801 - DNA, 15 bp, Homo sapiens
ccaggcccttagtcc

SEQ ID NO: 1592802 - DNA, 15 bp, Homo sapiens
cccaggcccttagtc

SEQ ID NO: 1592803 - DNA, 15 bp, Homo sapiens
ccccaggcccttagt

SEQ ID NO: 1592804 - DNA, 15 bp, Homo sapiens
cccccaggcccttag

SEQ ID NO: 1592805 - DNA, 15 bp, Homo sapiens
ccccccaggccctta

SEQ ID NO: 1592806 - DNA, 15 bp, Homo sapiens
gccccccaggccctt

SEQ ID NO: 1592807 - DNA, 15 bp, Homo sapiens
agccccccaggccct

SEQ ID NO: 1592808 - DNA, 15 bp, Homo sapiens
cagccccccaggccc

SEQ ID NO: 1592809 - DNA, 15 bp, Homo sapiens
ccagccccccaggcc

SEQ ID NO: 1592810 - DNA, 15 bp, Homo sapiens
cccagccccccaggc

SEQ ID NO: 1592811 - DNA, 15 bp, Homo sapiens
gcccagccccccagg

SEQ ID NO: 1592812 - DNA, 15 bp, Homo sapiens
tgcccagccccccag

SEQ ID NO: 1592813 - DNA, 15 bp, Homo sapiens
ctgcccagcccccca

SEQ ID NO: 1592814 - DNA, 15 bp, Homo sapiens
actgcccagcccccc

SEQ ID NO: 1592815 - DNA, 15 bp, Homo sapiens
cactgcccagccccc

SEQ ID NO: 1592816 - DNA, 15 bp, Homo sapiens
ccactgcccagcccc

SEQ ID NO: 1592817 - DNA, 15 bp, Homo sapiens
gccactgcccagccc

SEQ ID NO: 1592818 - DNA, 15 bp, Homo sapiens
tgccactgcccagcc

SEQ ID NO: 1592819 - DNA, 15 bp, Homo sapiens
ctgccactgcccagc

SEQ ID NO: 1592820 - DNA, 15 bp, Homo sapiens
gctgccactgcccag

SEQ ID NO: 1592821 - DNA, 15 bp, Homo sapiens
agctgccactgccca

SEQ ID NO: 1592822 - DNA, 15 bp, Homo sapiens
aagctgccactgccc

SEQ ID NO: 1592823 - DNA, 15 bp, Homo sapiens
gaagctgccactgcc

SEQ ID NO: 1592824 - DNA, 15 bp, Homo sapiens
agaagctgccactgc

SEQ ID NO: 1592825 - DNA, 15 bp, Homo sapiens
aagaagctgccactg

SEQ ID NO: 1592826 - DNA, 15 bp, Homo sapiens
gaagaagctgccact

SEQ ID NO: 1592827 - DNA, 15 bp, Homo sapiens
ggaagaagctgccac

SEQ ID NO: 1592828 - DNA, 15 bp, Homo sapiens
aggaagaagctgcca

SEQ ID NO: 1592829 - DNA, 15 bp, Homo sapiens
aaggaagaagctgcc

SEQ ID NO: 1592830 - DNA, 15 bp, Homo sapiens
gaaggaagaagctgc

SEQ ID NO: 1592831 - DNA, 15 bp, Homo sapiens
ggaaggaagaagctg

SEQ ID NO: 1592832 - DNA, 15 bp, Homo sapiens
gggaaggaagaagct

SEQ ID NO: 1592833 - DNA, 15 bp, Homo sapiens
agggaaggaagaagc

SEQ ID NO: 1592834 - DNA, 15 bp, Homo sapiens
aagggaaggaagaag

SEQ ID NO: 1592835 - DNA, 15 bp, Homo sapiens
gaagggaaggaagaa

SEQ ID NO: 1592836 - DNA, 15 bp, Homo sapiens
agaagggaaggaaga

SEQ ID NO: 1592837 - DNA, 15 bp, Homo sapiens
cagaagggaaggaag

SEQ ID NO: 1592838 - DNA, 15 bp, Homo sapiens
tcagaagggaaggaa

SEQ ID NO: 1592839 - DNA, 15 bp, Homo sapiens
atcagaagggaagga

SEQ ID NO: 1592840 - DNA, 15 bp, Homo sapiens
aatcagaagggaagg

SEQ ID NO: 1592841 - DNA, 15 bp, Homo sapiens
gaatcagaagggaag

SEQ ID NO: 1592842 - DNA, 15 bp, Homo sapiens
agaatcagaagggaa

SEQ ID NO: 1592843 - DNA, 15 bp, Homo sapiens
tagaatcagaaggga

SEQ ID NO: 1592844 - DNA, 15 bp, Homo sapiens
gtagaatcagaaggg

SEQ ID NO: 1592845 - DNA, 15 bp, Homo sapiens
agtagaatcagaagg

SEQ ID NO: 1592846 - DNA, 15 bp, Homo sapiens
aagtagaatcagaag

SEQ ID NO: 1592847 - DNA, 15 bp, Homo sapiens
gaagtagaatcagaa

SEQ ID NO: 1592848 - DNA, 15 bp, Homo sapiens
tgaagtagaatcaga

SEQ ID NO: 1592849 - DNA, 15 bp, Homo sapiens
ctgaagtagaatcag

SEQ ID NO: 1592850 - DNA, 15 bp, Homo sapiens
tctgaagtagaatca

SEQ ID NO: 1592851 - DNA, 15 bp, Homo sapiens
ttctgaagtagaatc

SEQ ID NO: 1592852 - DNA, 15 bp, Homo sapiens
tttctgaagtagaat

SEQ ID NO: 1592853 - DNA, 15 bp, Homo sapiens
ctttctgaagtagaa

SEQ ID NO: 1592854 - DNA, 15 bp, Homo sapiens
tctttctgaagtaga

SEQ ID NO: 1592855 - DNA, 15 bp, Homo sapiens
ttctttctgaagtag

SEQ ID NO: 1592856 - DNA, 15 bp, Homo sapiens
attctttctgaagta

SEQ ID NO: 1592857 - DNA, 15 bp, Homo sapiens
aattctttctgaagt

SEQ ID NO: 1592858 - DNA, 15 bp, Homo sapiens
caattctttctgaag

SEQ ID NO: 1592859 - DNA, 15 bp, Homo sapiens
gcaattctttctgaa

SEQ ID NO: 1592860 - DNA, 15 bp, Homo sapiens
tgcaattctttctga

SEQ ID NO: 1592861 - DNA, 15 bp, Homo sapiens
ttgcaattctttctg

SEQ ID NO: 1592862 - DNA, 15 bp, Homo sapiens
gttgcaattctttct

SEQ ID NO: 1592863 - DNA, 15 bp, Homo sapiens
agttgcaattctttc

SEQ ID NO: 1592864 - DNA, 15 bp, Homo sapiens
cagttgcaattcttt

SEQ ID NO: 1592865 - DNA, 15 bp, Homo sapiens
acagttgcaattctt

SEQ ID NO: 1592866 - DNA, 15 bp, Homo sapiens
gacagttgcaattct

SEQ ID NO: 1592867 - DNA, 15 bp, Homo sapiens
tgacagttgcaattc

SEQ ID NO: 1592868 - DNA, 15 bp, Homo sapiens
ttgacagttgcaatt

SEQ ID NO: 1592869 - DNA, 15 bp, Homo sapiens
tttgacagttgcaat

SEQ ID NO: 1592870 - DNA, 15 bp, Homo sapiens
gtttgacagttgcaa

SEQ ID NO: 1592871 - DNA, 15 bp, Homo sapiens
ggtttgacagttgca

SEQ ID NO: 1592872 - DNA, 15 bp, Homo sapiens
tggtttgacagttgc

SEQ ID NO: 1592873 - DNA, 15 bp, Homo sapiens
gtggtttgacagttg

SEQ ID NO: 1592874 - DNA, 15 bp, Homo sapiens
ggtggtttgacagtt

SEQ ID NO: 1592875 - DNA, 15 bp, Homo sapiens
cggtggtttgacagt

SEQ ID NO: 1592876 - DNA, 15 bp, Homo sapiens
acggtggtttgacag

SEQ ID NO: 1592877 - DNA, 15 bp, Homo sapiens
cacggtggtttgaca

SEQ ID NO: 1592878 - DNA, 15 bp, Homo sapiens
ccacggtggtttgac

SEQ ID NO: 1592879 - DNA, 15 bp, Homo sapiens
accacggtggtttga

SEQ ID NO: 1592880 - DNA, 15 bp, Homo sapiens
caccacggtggtttg

SEQ ID NO: 1592881 - DNA, 15 bp, Homo sapiens
gcaccacggtggttt

SEQ ID NO: 1592882 - DNA, 15 bp, Homo sapiens
tgcaccacggtggtt

SEQ ID NO: 1592883 - DNA, 15 bp, Homo sapiens
gtgcaccacggtggt

SEQ ID NO: 1592884 - DNA, 15 bp, Homo sapiens
tgtgcaccacggtgg

SEQ ID NO: 1592885 - DNA, 15 bp, Homo sapiens
gtgtgcaccacggtg

SEQ ID NO: 1592886 - DNA, 15 bp, Homo sapiens
tgtgtgcaccacggt

SEQ ID NO: 1592887 - DNA, 15 bp, Homo sapiens
ctgtgtgcaccacgg

SEQ ID NO: 1592888 - DNA, 15 bp, Homo sapiens
gctgtgtgcaccacg

SEQ ID NO: 1592889 - DNA, 15 bp, Homo sapiens
tgctgtgtgcaccac

SEQ ID NO: 1592890 - DNA, 15 bp, Homo sapiens
gtgctgtgtgcacca

SEQ ID NO: 1592891 - DNA, 15 bp, Homo sapiens
tgtgctgtgtgcacc

SEQ ID NO: 1592892 - DNA, 15 bp, Homo sapiens
gtgtgctgtgtgcac

SEQ ID NO: 1592893 - DNA, 15 bp, Homo sapiens
tgtgtgctgtgtgca

SEQ ID NO: 1592894 - DNA, 15 bp, Homo sapiens
atgtgtgctgtgtgc

SEQ ID NO: 1592895 - DNA, 15 bp, Homo sapiens
aatgtgtgctgtgtg

SEQ ID NO: 1592896 - DNA, 15 bp, Homo sapiens
gaatgtgtgctgtgt

SEQ ID NO: 1592897 - DNA, 15 bp, Homo sapiens
ggaatgtgtgctgtg

SEQ ID NO: 1592898 - DNA, 15 bp, Homo sapiens
aggaatgtgtgctgt

SEQ ID NO: 1592899 - DNA, 15 bp, Homo sapiens
taggaatgtgtgctg

SEQ ID NO: 1592900 - DNA, 15 bp, Homo sapiens
gtaggaatgtgtgct

SEQ ID NO: 1592901 - DNA, 15 bp, Homo sapiens
ggtaggaatgtgtgc

SEQ ID NO: 1592902 - DNA, 15 bp, Homo sapiens
aggtaggaatgtgtg

SEQ ID NO: 1592903 - DNA, 15 bp, Homo sapiens
gaggtaggaatgtgt

SEQ ID NO: 1592904 - DNA, 15 bp, Homo sapiens
tgaggtaggaatgtg

SEQ ID NO: 1592905 - DNA, 15 bp, Homo sapiens
ttgaggtaggaatgt

SEQ ID NO: 1592906 - DNA, 15 bp, Homo sapiens
cttgaggtaggaatg

SEQ ID NO: 1592907 - DNA, 15 bp, Homo sapiens
gcttgaggtaggaat

SEQ ID NO: 1592908 - DNA, 15 bp, Homo sapiens
ggcttgaggtaggaa

SEQ ID NO: 1592909 - DNA, 15 bp, Homo sapiens
tggcttgaggtagga

SEQ ID NO: 1592910 - DNA, 15 bp, Homo sapiens
gtggcttgaggtagg

SEQ ID NO: 1592911 - DNA, 15 bp, Homo sapiens
tgtggcttgaggtag

SEQ ID NO: 1592912 - DNA, 15 bp, Homo sapiens
ctgtggcttgaggta

SEQ ID NO: 1592913 - DNA, 15 bp, Homo sapiens
gctgtggcttgaggt

SEQ ID NO: 1592914 - DNA, 15 bp, Homo sapiens
tgctgtggcttgagg

SEQ ID NO: 1592915 - DNA, 15 bp, Homo sapiens
ctgctgtggcttgag

SEQ ID NO: 1592916 - DNA, 15 bp, Homo sapiens
tctgctgtggcttga

SEQ ID NO: 1592917 - DNA, 15 bp, Homo sapiens
gtctgctgtggcttg

SEQ ID NO: 1592918 - DNA, 15 bp, Homo sapiens
tgtctgctgtggctt

SEQ ID NO: 1592919 - DNA, 15 bp, Homo sapiens
ctgtctgctgtggct

SEQ ID NO: 1592920 - DNA, 15 bp, Homo sapiens
tctgtctgctgtggc

SEQ ID NO: 1592921 - DNA, 15 bp, Homo sapiens
ttctgtctgctgtgg

SEQ ID NO: 1592922 - DNA, 15 bp, Homo sapiens
tttctgtctgctgtg

SEQ ID NO: 1592923 - DNA, 15 bp, Homo sapiens
atttctgtctgctgt

SEQ ID NO: 1592924 - DNA, 15 bp, Homo sapiens
aatttctgtctgctg

SEQ ID NO: 1592925 - DNA, 15 bp, Homo sapiens
caatttctgtctgct

SEQ ID NO: 1592926 - DNA, 15 bp, Homo sapiens
acaatttctgtctgc

SEQ ID NO: 1592927 - DNA, 15 bp, Homo sapiens
tacaatttctgtctg

SEQ ID NO: 1592928 - DNA, 15 bp, Homo sapiens
ctacaatttctgtct

SEQ ID NO: 1592929 - DNA, 15 bp, Homo sapiens
gctacaatttctgtc

SEQ ID NO: 1592930 - DNA, 15 bp, Homo sapiens
agctacaatttctgt

SEQ ID NO: 1592931 - DNA, 15 bp, Homo sapiens
tagctacaatttctg

SEQ ID NO: 1592932 - DNA, 15 bp, Homo sapiens
ctagctacaatttct

SEQ ID NO: 1592933 - DNA, 15 bp, Homo sapiens
actagctacaatttc

SEQ ID NO: 1592934 - DNA, 15 bp, Homo sapiens
aactagctacaattt

SEQ ID NO: 1592935 - DNA, 15 bp, Homo sapiens
gaactagctacaatt

SEQ ID NO: 1592936 - DNA, 15 bp, Homo sapiens
cgaactagctacaat

SEQ ID NO: 1592937 - DNA, 15 bp, Homo sapiens
acgaactagctacaa

SEQ ID NO: 1592938 - DNA, 15 bp, Homo sapiens
aacgaactagctaca

SEQ ID NO: 1592939 - DNA, 15 bp, Homo sapiens
taacgaactagctac

SEQ ID NO: 1592940 - DNA, 15 bp, Homo sapiens
gtaacgaactagcta

SEQ ID NO: 1592941 - DNA, 15 bp, Homo sapiens
agtaacgaactagct

SEQ ID NO: 1592942 - DNA, 15 bp, Homo sapiens
cagtaacgaactagc

SEQ ID NO: 1592943 - DNA, 15 bp, Homo sapiens
gcagtaacgaactag

SEQ ID NO: 1592944 - DNA, 15 bp, Homo sapiens
ggcagtaacgaacta

SEQ ID NO: 1592945 - DNA, 15 bp, Homo sapiens
gggcagtaacgaact

SEQ ID NO: 1592946 - DNA, 15 bp, Homo sapiens
agggcagtaacgaac

SEQ ID NO: 1592947 - DNA, 15 bp, Homo sapiens
cagggcagtaacgaa

SEQ ID NO: 1592948 - DNA, 15 bp, Homo sapiens
acagggcagtaacga

SEQ ID NO: 1592949 - DNA, 15 bp, Homo sapiens
cacagggcagtaacg

SEQ ID NO: 1592950 - DNA, 15 bp, Homo sapiens
tcacagggcagtaac

SEQ ID NO: 1592951 - DNA, 15 bp, Homo sapiens
gtcacagggcagtaa

SEQ ID NO: 1592952 - DNA, 15 bp, Homo sapiens
ggtcacagggcagta

SEQ ID NO: 1592953 - DNA, 15 bp, Homo sapiens
aggtcacagggcagt

SEQ ID NO: 1592954 - DNA, 15 bp, Homo sapiens
caggtcacagggcag

SEQ ID NO: 1592955 - DNA, 15 bp, Homo sapiens
ccaggtcacagggca

SEQ ID NO: 1592956 - DNA, 15 bp, Homo sapiens
gccaggtcacagggc

SEQ ID NO: 1592957 - DNA, 15 bp, Homo sapiens
tgccaggtcacaggg

SEQ ID NO: 1592958 - DNA, 15 bp, Homo sapiens
ctgccaggtcacagg

SEQ ID NO: 1592959 - DNA, 15 bp, Homo sapiens
actgccaggtcacag

SEQ ID NO: 1592960 - DNA, 15 bp, Homo sapiens
tactgccaggtcaca

SEQ ID NO: 1592961 - DNA, 15 bp, Homo sapiens
atactgccaggtcac

SEQ ID NO: 1592962 - DNA, 15 bp, Homo sapiens
aatactgccaggtca

SEQ ID NO: 1592963 - DNA, 15 bp, Homo sapiens
taatactgccaggtc

SEQ ID NO: 1592964 - DNA, 15 bp, Homo sapiens
ttaatactgccaggt

SEQ ID NO: 1592965 - DNA, 15 bp, Homo sapiens
gttaatactgccagg

SEQ ID NO: 1592966 - DNA, 15 bp, Homo sapiens
agttaatactgccag

SEQ ID NO: 1592967 - DNA, 15 bp, Homo sapiens
cagttaatactgcca

SEQ ID NO: 1592968 - DNA, 15 bp, Homo sapiens
tcagttaatactgcc

SEQ ID NO: 1592969 - DNA, 15 bp, Homo sapiens
ttcagttaatactgc

SEQ ID NO: 1592970 - DNA, 15 bp, Homo sapiens
tttcagttaatactg

SEQ ID NO: 1592971 - DNA, 15 bp, Homo sapiens
atttcagttaatact

SEQ ID NO: 1592972 - DNA, 15 bp, Homo sapiens
catttcagttaatac

SEQ ID NO: 1592973 - DNA, 15 bp, Homo sapiens
acatttcagttaata

SEQ ID NO: 1592974 - DNA, 15 bp, Homo sapiens
gacatttcagttaat

SEQ ID NO: 1592975 - DNA, 15 bp, Homo sapiens
cgacatttcagttaa

SEQ ID NO: 1592976 - DNA, 15 bp, Homo sapiens
tcgacatttcagtta

SEQ ID NO: 1592977 - DNA, 15 bp, Homo sapiens
atcgacatttcagtt

SEQ ID NO: 1592978 - DNA, 15 bp, Homo sapiens
aatcgacatttcagt

SEQ ID NO: 1592979 - DNA, 15 bp, Homo sapiens
taatcgacatttcag

SEQ ID NO: 1592980 - DNA, 15 bp, Homo sapiens
gtaatcgacatttca

SEQ ID NO: 1592981 - DNA, 15 bp, Homo sapiens
agtaatcgacatttc

SEQ ID NO: 1592982 - DNA, 15 bp, Homo sapiens
tagtaatcgacattt

SEQ ID NO: 1592983 - DNA, 15 bp, Homo sapiens
gtagtaatcgacatt

SEQ ID NO: 1592984 - DNA, 15 bp, Homo sapiens
agtagtaatcgacat

SEQ ID NO: 1592985 - DNA, 15 bp, Homo sapiens
gagtagtaatcgaca

SEQ ID NO: 1592986 - DNA, 15 bp, Homo sapiens
ggagtagtaatcgac

SEQ ID NO: 1592987 - DNA, 15 bp, Homo sapiens
gggagtagtaatcga

SEQ ID NO: 1592988 - DNA, 15 bp, Homo sapiens
agggagtagtaatcg

SEQ ID NO: 1592989 - DNA, 15 bp, Homo sapiens
cagggagtagtaatc

SEQ ID NO: 1592990 - DNA, 15 bp, Homo sapiens
ccagggagtagtaat

SEQ ID NO: 1592991 - DNA, 15 bp, Homo sapiens
gccagggagtagtaa

SEQ ID NO: 1592992 - DNA, 15 bp, Homo sapiens
tgccagggagtagta

SEQ ID NO: 1592993 - DNA, 15 bp, Homo sapiens
ctgccagggagtagt

SEQ ID NO: 1592994 - DNA, 15 bp, Homo sapiens
gctgccagggagtag

SEQ ID NO: 1592995 - DNA, 15 bp, Homo sapiens
tgctgccagggagta

SEQ ID NO: 1592996 - DNA, 15 bp, Homo sapiens
gtgctgccagggagt

SEQ ID NO: 1592997 - DNA, 15 bp, Homo sapiens
agtgctgccagggag

SEQ ID NO: 1592998 - DNA, 15 bp, Homo sapiens
cagtgctgccaggga

SEQ ID NO: 1592999 - DNA, 15 bp, Homo sapiens
acagtgctgccaggg

SEQ ID NO: 1593000 - DNA, 15 bp, Homo sapiens
aacagtgctgccagg

SEQ ID NO: 1593001 - DNA, 15 bp, Homo sapiens
gaacagtgctgccag

SEQ ID NO: 1593002 - DNA, 15 bp, Homo sapiens
ggaacagtgctgcca

SEQ ID NO: 1593003 - DNA, 15 bp, Homo sapiens
gggaacagtgctgcc

SEQ ID NO: 1593004 - DNA, 15 bp, Homo sapiens
agggaacagtgctgc

SEQ ID NO: 1593005 - DNA, 15 bp, Homo sapiens
cagggaacagtgctg

SEQ ID NO: 1593006 - DNA, 15 bp, Homo sapiens
tcagggaacagtgct

SEQ ID NO: 1593007 - DNA, 15 bp, Homo sapiens
gtcagggaacagtgc

SEQ ID NO: 1593008 - DNA, 15 bp, Homo sapiens
tgtcagggaacagtg

SEQ ID NO: 1593009 - DNA, 15 bp, Homo sapiens
ctgtcagggaacagt

SEQ ID NO: 1593010 - DNA, 15 bp, Homo sapiens
cctgtcagggaacag

SEQ ID NO: 1593011 - DNA, 15 bp, Homo sapiens
tcctgtcagggaaca

SEQ ID NO: 1593012 - DNA, 15 bp, Homo sapiens
gtcctgtcagggaac

SEQ ID NO: 1593013 - DNA, 15 bp, Homo sapiens
agtcctgtcagggaa

SEQ ID NO: 1593014 - DNA, 15 bp, Homo sapiens
gagtcctgtcaggga

SEQ ID NO: 1593015 - DNA, 15 bp, Homo sapiens
ggagtcctgtcaggg

SEQ ID NO: 1593016 - DNA, 15 bp, Homo sapiens
aggagtcctgtcagg

SEQ ID NO: 1593017 - DNA, 15 bp, Homo sapiens
caggagtcctgtcag

SEQ ID NO: 1593018 - DNA, 15 bp, Homo sapiens
tcaggagtcctgtca

SEQ ID NO: 1593019 - DNA, 15 bp, Homo sapiens
ctcaggagtcctgtc

SEQ ID NO: 1593020 - DNA, 15 bp, Homo sapiens
gctcaggagtcctgt

SEQ ID NO: 1593021 - DNA, 15 bp, Homo sapiens
ggctcaggagtcctg

SEQ ID NO: 1593022 - DNA, 15 bp, Homo sapiens
aggctcaggagtcct

SEQ ID NO: 1593023 - DNA, 15 bp, Homo sapiens
gaggctcaggagtcc

SEQ ID NO: 1593024 - DNA, 15 bp, Homo sapiens
cgaggctcaggagtc

SEQ ID NO: 1593025 - DNA, 15 bp, Homo sapiens
tcgaggctcaggagt

SEQ ID NO: 1593026 - DNA, 15 bp, Homo sapiens
gtcgaggctcaggag

SEQ ID NO: 1593027 - DNA, 15 bp, Homo sapiens
ggtcgaggctcagga

SEQ ID NO: 1593028 - DNA, 15 bp, Homo sapiens
aggtcgaggctcagg

SEQ ID NO: 1593029 - DNA, 15 bp, Homo sapiens
caggtcgaggctcag

SEQ ID NO: 1593030 - DNA, 15 bp, Homo sapiens
ccaggtcgaggctca

SEQ ID NO: 1593031 - DNA, 15 bp, Homo sapiens
cccaggtcgaggctc

SEQ ID NO: 1593032 - DNA, 15 bp, Homo sapiens
acccaggtcgaggct

SEQ ID NO: 1593033 - DNA, 15 bp, Homo sapiens
cacccaggtcgaggc

SEQ ID NO: 1593034 - DNA, 15 bp, Homo sapiens
gcacccaggtcgagg

SEQ ID NO: 1593035 - DNA, 15 bp, Homo sapiens
tgcacccaggtcgag

SEQ ID NO: 1593036 - DNA, 15 bp, Homo sapiens
ctgcacccaggtcga

SEQ ID NO: 1593037 - DNA, 15 bp, Homo sapiens
actgcacccaggtcg

SEQ ID NO: 1593038 - DNA, 15 bp, Homo sapiens
tactgcacccaggtc

SEQ ID NO: 1593039 - DNA, 15 bp, Homo sapiens
ttactgcacccaggt

SEQ ID NO: 1593040 - DNA, 15 bp, Homo sapiens
tttactgcacccagg

SEQ ID NO: 1593041 - DNA, 15 bp, Homo sapiens
gtttactgcacccag

SEQ ID NO: 1593042 - DNA, 15 bp, Homo sapiens
agtttactgcaccca

SEQ ID NO: 1593043 - DNA, 15 bp, Homo sapiens
aagtttactgcaccc

SEQ ID NO: 1593044 - DNA, 15 bp, Homo sapiens
aaagtttactgcacc

SEQ ID NO: 1593045 - DNA, 15 bp, Homo sapiens
caaagtttactgcac

SEQ ID NO: 1593046 - DNA, 15 bp, Homo sapiens
ccaaagtttactgca

SEQ ID NO: 1593047 - DNA, 15 bp, Homo sapiens
tccaaagtttactgc

SEQ ID NO: 1593048 - DNA, 15 bp, Homo sapiens
ttccaaagtttactg

SEQ ID NO: 1593049 - DNA, 15 bp, Homo sapiens
cttccaaagtttact

SEQ ID NO: 1593050 - DNA, 15 bp, Homo sapiens
acttccaaagtttac

SEQ ID NO: 1593051 - DNA, 15 bp, Homo sapiens
cacttccaaagttta

SEQ ID NO: 1593052 - DNA, 15 bp, Homo sapiens
gcacttccaaagttt

SEQ ID NO: 1593053 - DNA, 15 bp, Homo sapiens
agcacttccaaagtt

SEQ ID NO: 1593054 - DNA, 15 bp, Homo sapiens
cagcacttccaaagt

SEQ ID NO: 1593055 - DNA, 15 bp, Homo sapiens
gcagcacttccaaag

SEQ ID NO: 1593056 - DNA, 15 bp, Homo sapiens
tgcagcacttccaaa

SEQ ID NO: 1593057 - DNA, 15 bp, Homo sapiens
atgcagcacttccaa

SEQ ID NO: 1593058 - DNA, 15 bp, Homo sapiens
aatgcagcacttcca

SEQ ID NO: 1593059 - DNA, 15 bp, Homo sapiens
caatgcagcacttcc

SEQ ID NO: 1593060 - DNA, 15 bp, Homo sapiens
acaatgcagcacttc

SEQ ID NO: 1593061 - DNA, 15 bp, Homo sapiens
tacaatgcagcactt

SEQ ID NO: 1593062 - DNA, 15 bp, Homo sapiens
atacaatgcagcact

SEQ ID NO: 1593063 - DNA, 15 bp, Homo sapiens
gatacaatgcagcac

SEQ ID NO: 1593064 - DNA, 15 bp, Homo sapiens
tgatacaatgcagca

SEQ ID NO: 1593065 - DNA, 15 bp, Homo sapiens
atgatacaatgcagc

SEQ ID NO: 1593066 - DNA, 15 bp, Homo sapiens
tatgatacaatgcag

SEQ ID NO: 1593067 - DNA, 15 bp, Homo sapiens
gtatgatacaatgca

SEQ ID NO: 1593068 - DNA, 15 bp, Homo sapiens
ggtatgatacaatgc

SEQ ID NO: 1593069 - DNA, 15 bp, Homo sapiens
aggtatgatacaatg

SEQ ID NO: 1593070 - DNA, 15 bp, Homo sapiens
taggtatgatacaat

SEQ ID NO: 1593071 - DNA, 15 bp, Homo sapiens
gtaggtatgatacaa

SEQ ID NO: 1593072 - DNA, 15 bp, Homo sapiens
tgtaggtatgataca

SEQ ID NO: 1593073 - DNA, 15 bp, Homo sapiens
ttgtaggtatgatac

SEQ ID NO: 1593074 - DNA, 15 bp, Homo sapiens
gttgtaggtatgata

SEQ ID NO: 1593075 - DNA, 15 bp, Homo sapiens
agttgtaggtatgat

SEQ ID NO: 1593076 - DNA, 15 bp, Homo sapiens
gagttgtaggtatga

SEQ ID NO: 1593077 - DNA, 15 bp, Homo sapiens
tgagttgtaggtatg

SEQ ID NO: 1593078 - DNA, 15 bp, Homo sapiens
gtgagttgtaggtat

SEQ ID NO: 1593079 - DNA, 15 bp, Homo sapiens
cgtgagttgtaggta

SEQ ID NO: 1593080 - DNA, 15 bp, Homo sapiens
gcgtgagttgtaggt

SEQ ID NO: 1593081 - DNA, 15 bp, Homo sapiens
tgcgtgagttgtagg

SEQ ID NO: 1593082 - DNA, 15 bp, Homo sapiens
ttgcgtgagttgtag

SEQ ID NO: 1593083 - DNA, 15 bp, Homo sapiens
attgcgtgagttgta

SEQ ID NO: 1593084 - DNA, 15 bp, Homo sapiens
tattgcgtgagttgt

SEQ ID NO: 1593085 - DNA, 15 bp, Homo sapiens
ctattgcgtgagttg

SEQ ID NO: 1593086 - DNA, 15 bp, Homo sapiens
tctattgcgtgagtt

SEQ ID NO: 1593087 - DNA, 15 bp, Homo sapiens
atctattgcgtgagt

SEQ ID NO: 1593088 - DNA, 15 bp, Homo sapiens
tatctattgcgtgag

SEQ ID NO: 1593089 - DNA, 15 bp, Homo sapiens
ttatctattgcgtga

SEQ ID NO: 1593090 - DNA, 15 bp, Homo sapiens
tttatctattgcgtg

SEQ ID NO: 1593091 - DNA, 15 bp, Homo sapiens
ttttatctattgcgt

SEQ ID NO: 1593092 - DNA, 15 bp, Homo sapiens
gttttatctattgcg

SEQ ID NO: 1593093 - DNA, 15 bp, Homo sapiens
agttttatctattgc

SEQ ID NO: 1593094 - DNA, 15 bp, Homo sapiens
gagttttatctattg

SEQ ID NO: 1593095 - DNA, 15 bp, Homo sapiens
tgagttttatctatt

SEQ ID NO: 1593096 - DNA, 15 bp, Homo sapiens
ctgagttttatctat

SEQ ID NO: 1593097 - DNA, 15 bp, Homo sapiens
tctgagttttatcta

SEQ ID NO: 1593098 - DNA, 15 bp, Homo sapiens
gtctgagttttatct

SEQ ID NO: 1593099 - DNA, 15 bp, Homo sapiens
tgtctgagttttatc

SEQ ID NO: 1593100 - DNA, 15 bp, Homo sapiens
atgtctgagttttat

SEQ ID NO: 1593101 - DNA, 15 bp, Homo sapiens
gatgtctgagtttta

SEQ ID NO: 1593102 - DNA, 15 bp, Homo sapiens
agatgtctgagtttt

SEQ ID NO: 1593103 - DNA, 15 bp, Homo sapiens
gagatgtctgagttt

SEQ ID NO: 1593104 - DNA, 15 bp, Homo sapiens
agagatgtctgagtt

SEQ ID NO: 1593105 - DNA, 15 bp, Homo sapiens
gagagatgtctgagt

SEQ ID NO: 1593106 - DNA, 15 bp, Homo sapiens
agagagatgtctgag

SEQ ID NO: 1593107 - DNA, 15 bp, Homo sapiens
tagagagatgtctga

SEQ ID NO: 1593108 - DNA, 15 bp, Homo sapiens
gtagagagatgtctg

SEQ ID NO: 1593109 - DNA, 15 bp, Homo sapiens
tgtagagagatgtct

SEQ ID NO: 1593110 - DNA, 15 bp, Homo sapiens
gtgtagagagatgtc

SEQ ID NO: 1593111 - DNA, 15 bp, Homo sapiens
tgtgtagagagatgt

SEQ ID NO: 1593112 - DNA, 15 bp, Homo sapiens
atgtgtagagagatg

SEQ ID NO: 1593113 - DNA, 15 bp, Homo sapiens
gatgtgtagagagat

SEQ ID NO: 1593114 - DNA, 15 bp, Homo sapiens
agatgtgtagagaga

SEQ ID NO: 1593115 - DNA, 15 bp, Homo sapiens
tagatgtgtagagag

SEQ ID NO: 1593116 - DNA, 15 bp, Homo sapiens
gtagatgtgtagaga

SEQ ID NO: 1593117 - DNA, 15 bp, Homo sapiens
tgtagatgtgtagag

SEQ ID NO: 1593118 - DNA, 15 bp, Homo sapiens
tatgtagatgtgtag

SEQ ID NO: 1593119 - DNA, 15 bp, Homo sapiens
ctatgtagatgtgta

SEQ ID NO: 1593120 - DNA, 15 bp, Homo sapiens
actatgtagatgtgt

SEQ ID NO: 1593121 - DNA, 15 bp, Homo sapiens
gactatgtagatgtg

SEQ ID NO: 1593122 - DNA, 15 bp, Homo sapiens
ggactatgtagatgt

SEQ ID NO: 1593123 - DNA, 15 bp, Homo sapiens
tggactatgtagatg

SEQ ID NO: 1593124 - DNA, 15 bp, Homo sapiens
atggactatgtagat

SEQ ID NO: 1593125 - DNA, 15 bp, Homo sapiens
aatggactatgtaga

SEQ ID NO: 1593126 - DNA, 15 bp, Homo sapiens
caatggactatgtag

SEQ ID NO: 1593127 - DNA, 15 bp, Homo sapiens
ccaatggactatgta

SEQ ID NO: 1593128 - DNA, 15 bp, Homo sapiens
gccaatggactatgt

SEQ ID NO: 1593129 - DNA, 15 bp, Homo sapiens
agccaatggactatg

SEQ ID NO: 1593130 - DNA, 15 bp, Homo sapiens
aagccaatggactat

SEQ ID NO: 1593131 - DNA, 15 bp, Homo sapiens
gaagccaatggacta

SEQ ID NO: 1593132 - DNA, 15 bp, Homo sapiens
cgaagccaatggact

SEQ ID NO: 1593133 - DNA, 15 bp, Homo sapiens
acgaagccaatggac

SEQ ID NO: 1593134 - DNA, 15 bp, Homo sapiens
tacgaagccaatgga

SEQ ID NO: 1593135 - DNA, 15 bp, Homo sapiens
gtacgaagccaatgg

SEQ ID NO: 1593136 - DNA, 15 bp, Homo sapiens
agtacgaagccaatg

SEQ ID NO: 1593137 - DNA, 15 bp, Homo sapiens
cagtacgaagccaat

SEQ ID NO: 1593138 - DNA, 15 bp, Homo sapiens
tcagtacgaagccaa

SEQ ID NO: 1593139 - DNA, 15 bp, Homo sapiens
ttcagtacgaagcca

SEQ ID NO: 1593140 - DNA, 15 bp, Homo sapiens
tttcagtacgaagcc

SEQ ID NO: 1593141 - DNA, 15 bp, Homo sapiens
atttcagtacgaagc

SEQ ID NO: 1593142 - DNA, 15 bp, Homo sapiens
gatttcagtacgaag

SEQ ID NO: 1593143 - DNA, 15 bp, Homo sapiens
tgatttcagtacgaa

SEQ ID NO: 1593144 - DNA, 15 bp, Homo sapiens
ttgatttcagtacga

SEQ ID NO: 1593145 - DNA, 15 bp, Homo sapiens
tttgatttcagtacg

SEQ ID NO: 1593146 - DNA, 15 bp, Homo sapiens
gtttgatttcagtac

SEQ ID NO: 1593147 - DNA, 15 bp, Homo sapiens
tgtttgatttcagta

SEQ ID NO: 1593148 - DNA, 15 bp, Homo sapiens
ctgtttgatttcagt

SEQ ID NO: 1593149 - DNA, 15 bp, Homo sapiens
tctgtttgatttcag

SEQ ID NO: 1593150 - DNA, 15 bp, Homo sapiens
ttctgtttgatttca

SEQ ID NO: 1593151 - DNA, 15 bp, Homo sapiens
tttctgtttgatttc

SEQ ID NO: 1593152 - DNA, 15 bp, Homo sapiens
ttttctgtttgattt

SEQ ID NO: 1593153 - DNA, 15 bp, Homo sapiens
tttttctgtttgatt

SEQ ID NO: 1593154 - DNA, 15 bp, Homo sapiens
ctttttctgtttgat

SEQ ID NO: 1593155 - DNA, 15 bp, Homo sapiens
actttttctgtttga

SEQ ID NO: 1593156 - DNA, 15 bp, Homo sapiens
aactttttctgtttg

SEQ ID NO: 1593157 - DNA, 15 bp, Homo sapiens
aaactttttctgttt

SEQ ID NO: 1593158 - DNA, 15 bp, Homo sapiens
aaaactttttctgtt

SEQ ID NO: 1593159 - DNA, 15 bp, Homo sapiens
aaaaactttttctgt

SEQ ID NO: 1593160 - DNA, 15 bp, Homo sapiens
caaaaactttttctg

SEQ ID NO: 1593161 - DNA, 15 bp, Homo sapiens
ccaaaaactttttct

SEQ ID NO: 1593162 - DNA, 15 bp, Homo sapiens
tccaaaaactttttc

SEQ ID NO: 1593163 - DNA, 15 bp, Homo sapiens
ttccaaaaacttttt

SEQ ID NO: 1593164 - DNA, 15 bp, Homo sapiens
tttccaaaaactttt

SEQ ID NO: 1593165 - DNA, 15 bp, Homo sapiens
atttccaaaaacttt

SEQ ID NO: 1593166 - DNA, 15 bp, Homo sapiens
tatttccaaaaactt

SEQ ID NO: 1593167 - DNA, 15 bp, Homo sapiens
atatttccaaaaact

SEQ ID NO: 1593168 - DNA, 15 bp, Homo sapiens
aatatttccaaaaac

SEQ ID NO: 1593169 - DNA, 15 bp, Homo sapiens
aaatatttccaaaaa

SEQ ID NO: 1593170 - DNA, 15 bp, Homo sapiens
taaatatttccaaaa

SEQ ID NO: 1593171 - DNA, 15 bp, Homo sapiens
ttaaatatttccaaa

SEQ ID NO: 1593172 - DNA, 15 bp, Homo sapiens
gttaaatatttccaa

SEQ ID NO: 1593173 - DNA, 15 bp, Homo sapiens
tgttaaatatttcca

SEQ ID NO: 1593174 - DNA, 15 bp, Homo sapiens
ttgttaaatatttcc

SEQ ID NO: 1593175 - DNA, 15 bp, Homo sapiens
tttgttaaatatttc

SEQ ID NO: 1593176 - DNA, 15 bp, Homo sapiens
ttttgttaaatattt

SEQ ID NO: 1593177 - DNA, 15 bp, Homo sapiens
tttttgttaaatatt

SEQ ID NO: 1593178 - DNA, 15 bp, Homo sapiens
ctttttgttaaatat

SEQ ID NO: 1593179 - DNA, 15 bp, Homo sapiens
gctttttgttaaata

SEQ ID NO: 1593180 - DNA, 15 bp, Homo sapiens
ggctttttgttaaat

SEQ ID NO: 1593181 - DNA, 15 bp, Homo sapiens
tggctttttgttaaa

SEQ ID NO: 1593182 - DNA, 15 bp, Homo sapiens
ttggctttttgttaa

SEQ ID NO: 1593183 - DNA, 15 bp, Homo sapiens
gttggctttttgtta

SEQ ID NO: 1593184 - DNA, 15 bp, Homo sapiens
ggttggctttttgtt

SEQ ID NO: 1593185 - DNA, 15 bp, Homo sapiens
gggttggctttttgt

SEQ ID NO: 1593186 - DNA, 15 bp, Homo sapiens
tgggttggctttttg

SEQ ID NO: 1593187 - DNA, 15 bp, Homo sapiens
gtgggttggcttttt

SEQ ID NO: 1593188 - DNA, 15 bp, Homo sapiens
agtgggttggctttt

SEQ ID NO: 1593189 - DNA, 15 bp, Homo sapiens
gagtgggttggcttt

SEQ ID NO: 1593190 - DNA, 15 bp, Homo sapiens
tgagtgggttggctt

SEQ ID NO: 1593191 - DNA, 15 bp, Homo sapiens
atgagtgggttggct

SEQ ID NO: 1593192 - DNA, 15 bp, Homo sapiens
catgagtgggttggc

SEQ ID NO: 1593193 - DNA, 15 bp, Homo sapiens
ccatgagtgggttgg

SEQ ID NO: 1593194 - DNA, 15 bp, Homo sapiens
gccatgagtgggttg

SEQ ID NO: 1593195 - DNA, 15 bp, Homo sapiens
ggccatgagtgggtt

SEQ ID NO: 1593196 - DNA, 15 bp, Homo sapiens
tggccatgagtgggt

SEQ ID NO: 1593197 - DNA, 15 bp, Homo sapiens
atggccatgagtggg

SEQ ID NO: 1593198 - DNA, 15 bp, Homo sapiens
gatggccatgagtgg

SEQ ID NO: 1593199 - DNA, 15 bp, Homo sapiens
tgatggccatgagtg

SEQ ID NO: 1593200 - DNA, 15 bp, Homo sapiens
atgatggccatgagt

SEQ ID NO: 1593201 - DNA, 15 bp, Homo sapiens
aatgatggccatgag

SEQ ID NO: 1593202 - DNA, 15 bp, Homo sapiens
aaatgatggccatga

SEQ ID NO: 1593203 - DNA, 15 bp, Homo sapiens
taaatgatggccatg

SEQ ID NO: 1593204 - DNA, 15 bp, Homo sapiens
ctaaatgatggccat

SEQ ID NO: 1593205 - DNA, 15 bp, Homo sapiens
gctaaatgatggcca

SEQ ID NO: 1593206 - DNA, 15 bp, Homo sapiens
tgctaaatgatggcc

SEQ ID NO: 1593207 - DNA, 15 bp, Homo sapiens
gtgctaaatgatggc

SEQ ID NO: 1593208 - DNA, 15 bp, Homo sapiens
agtgctaaatgatgg

SEQ ID NO: 1593209 - DNA, 15 bp, Homo sapiens
cagtgctaaatgatg

SEQ ID NO: 1593210 - DNA, 15 bp, Homo sapiens
ccagtgctaaatgat

SEQ ID NO: 1593211 - DNA, 15 bp, Homo sapiens
cccagtgctaaatga

SEQ ID NO: 1593212 - DNA, 15 bp, Homo sapiens
acccagtgctaaatg

SEQ ID NO: 1593213 - DNA, 15 bp, Homo sapiens
tacccagtgctaaat

SEQ ID NO: 1593214 - DNA, 15 bp, Homo sapiens
ctacccagtgctaaa

SEQ ID NO: 1593215 - DNA, 15 bp, Homo sapiens
cctacccagtgctaa

SEQ ID NO: 1593216 - DNA, 15 bp, Homo sapiens
ccctacccagtgcta

SEQ ID NO: 1593217 - DNA, 15 bp, Homo sapiens
cccctacccagtgct

SEQ ID NO: 1593218 - DNA, 15 bp, Homo sapiens
acccctacccagtgc

SEQ ID NO: 1593219 - DNA, 15 bp, Homo sapiens
tacccctacccagtg

SEQ ID NO: 1593220 - DNA, 15 bp, Homo sapiens
ttacccctacccagt

SEQ ID NO: 1593221 - DNA, 15 bp, Homo sapiens
tttacccctacccag

SEQ ID NO: 1593222 - DNA, 15 bp, Homo sapiens
ctttacccctaccca

SEQ ID NO: 1593223 - DNA, 15 bp, Homo sapiens
tctttacccctaccc

SEQ ID NO: 1593224 - DNA, 15 bp, Homo sapiens
ctctttacccctacc

SEQ ID NO: 1593225 - DNA, 15 bp, Homo sapiens
tctctttacccctac

SEQ ID NO: 1593226 - DNA, 15 bp, Homo sapiens
ttctctttaccccta

SEQ ID NO: 1593227 - DNA, 15 bp, Homo sapiens
tttctctttacccct

SEQ ID NO: 1593228 - DNA, 15 bp, Homo sapiens
ctttctctttacccc

SEQ ID NO: 1593229 - DNA, 15 bp, Homo sapiens
tctttctctttaccc

SEQ ID NO: 1593230 - DNA, 15 bp, Homo sapiens
ctctttctctttacc

SEQ ID NO: 1593231 - DNA, 15 bp, Homo sapiens
tctctttctctttac

SEQ ID NO: 1593232 - DNA, 15 bp, Homo sapiens
ttctctttctcttta

SEQ ID NO: 1593233 - DNA, 15 bp, Homo sapiens
tttctctttctcttt

SEQ ID NO: 1593234 - DNA, 15 bp, Homo sapiens
gtttctctttctctt

SEQ ID NO: 1593235 - DNA, 15 bp, Homo sapiens
ggtttctctttctct

SEQ ID NO: 1593236 - DNA, 15 bp, Homo sapiens
gggtttctctttctc

SEQ ID NO: 1593237 - DNA, 15 bp, Homo sapiens
agggtttctctttct

SEQ ID NO: 1593238 - DNA, 15 bp, Homo sapiens
aagggtttctctttc

SEQ ID NO: 1593239 - DNA, 15 bp, Homo sapiens
aaagggtttctcttt

SEQ ID NO: 1593240 - DNA, 15 bp, Homo sapiens
caaagggtttctctt

SEQ ID NO: 1593241 - DNA, 15 bp, Homo sapiens
tcaaagggtttctct

SEQ ID NO: 1593242 - DNA, 15 bp, Homo sapiens
ctcaaagggtttctc

SEQ ID NO: 1593243 - DNA, 15 bp, Homo sapiens
cctcaaagggtttct

SEQ ID NO: 1593244 - DNA, 15 bp, Homo sapiens
acctcaaagggtttc

SEQ ID NO: 1593245 - DNA, 15 bp, Homo sapiens
tacctcaaagggttt

SEQ ID NO: 1593246 - DNA, 15 bp, Homo sapiens
atacctcaaagggtt

SEQ ID NO: 1593247 - DNA, 15 bp, Homo sapiens
catacctcaaagggt

SEQ ID NO: 1593248 - DNA, 15 bp, Homo sapiens
acatacctcaaaggg

SEQ ID NO: 1593249 - DNA, 15 bp, Homo sapiens
cacatacctcaaagg

SEQ ID NO: 1593250 - DNA, 15 bp, Homo sapiens
ccacatacctcaaag

SEQ ID NO: 1593251 - DNA, 15 bp, Homo sapiens
accacatacctcaaa

SEQ ID NO: 1593252 - DNA, 15 bp, Homo sapiens
taccacatacctcaa

SEQ ID NO: 1593253 - DNA, 15 bp, Homo sapiens
ctaccacatacctca

SEQ ID NO: 1593254 - DNA, 15 bp, Homo sapiens
gctaccacatacctc

SEQ ID NO: 1593255 - DNA, 15 bp, Homo sapiens
tgctaccacatacct

SEQ ID NO: 1593256 - DNA, 15 bp, Homo sapiens
atgctaccacatacc

SEQ ID NO: 1593257 - DNA, 15 bp, Homo sapiens
tatgctaccacatac

SEQ ID NO: 1593258 - DNA, 15 bp, Homo sapiens
gtatgctaccacata

SEQ ID NO: 1593259 - DNA, 15 bp, Homo sapiens
tgtatgctaccacat

SEQ ID NO: 1593260 - DNA, 15 bp, Homo sapiens
ttgtatgctaccaca

SEQ ID NO: 1593261 - DNA, 15 bp, Homo sapiens
tttgtatgctaccac

SEQ ID NO: 1593262 - DNA, 15 bp, Homo sapiens
gtttgtatgctacca

SEQ ID NO: 1593263 - DNA, 15 bp, Homo sapiens
tgtttgtatgctacc

SEQ ID NO: 1593264 - DNA, 15 bp, Homo sapiens
atgtttgtatgctac

SEQ ID NO: 1593265 - DNA, 15 bp, Homo sapiens
catgtttgtatgcta

SEQ ID NO: 1593266 - DNA, 15 bp, Homo sapiens
acatgtttgtatgct

SEQ ID NO: 1593267 - DNA, 15 bp, Homo sapiens
aacatgtttgtatgc

SEQ ID NO: 1593268 - DNA, 15 bp, Homo sapiens
gaacatgtttgtatg

SEQ ID NO: 1593269 - DNA, 15 bp, Homo sapiens
tgaacatgtttgtat

SEQ ID NO: 1593270 - DNA, 15 bp, Homo sapiens
gtgaacatgtttgta

SEQ ID NO: 1593271 - DNA, 15 bp, Homo sapiens
tgtgaacatgtttgt

SEQ ID NO: 1593272 - DNA, 15 bp, Homo sapiens
ctgtgaacatgtttg

SEQ ID NO: 1593273 - DNA, 15 bp, Homo sapiens
actgtgaacatgttt

SEQ ID NO: 1593274 - DNA, 15 bp, Homo sapiens
tactgtgaacatgtt

SEQ ID NO: 1593275 - DNA, 15 bp, Homo sapiens
ttactgtgaacatgt

SEQ ID NO: 1593276 - DNA, 15 bp, Homo sapiens
gttactgtgaacatg

SEQ ID NO: 1593277 - DNA, 15 bp, Homo sapiens
ggttactgtgaacat

SEQ ID NO: 1593278 - DNA, 15 bp, Homo sapiens
aggttactgtgaaca

SEQ ID NO: 1593279 - DNA, 15 bp, Homo sapiens
aaggttactgtgaac

SEQ ID NO: 1593280 - DNA, 15 bp, Homo sapiens
gaaggttactgtgaa

SEQ ID NO: 1593281 - DNA, 15 bp, Homo sapiens
ggaaggttactgtga

SEQ ID NO: 1593282 - DNA, 15 bp, Homo sapiens
aggaaggttactgtg

SEQ ID NO: 1593283 - DNA, 15 bp, Homo sapiens
caggaaggttactgt

SEQ ID NO: 1593284 - DNA, 15 bp, Homo sapiens
acaggaaggttactg

SEQ ID NO: 1593285 - DNA, 15 bp, Homo sapiens
tacaggaaggttact

SEQ ID NO: 1593286 - DNA, 15 bp, Homo sapiens
atacaggaaggttac

SEQ ID NO: 1593287 - DNA, 15 bp, Homo sapiens
aatacaggaaggtta

SEQ ID NO: 1593288 - DNA, 15 bp, Homo sapiens
taatacaggaaggtt

SEQ ID NO: 1593289 - DNA, 15 bp, Homo sapiens
ttaatacaggaaggt

SEQ ID NO: 1593290 - DNA, 15 bp, Homo sapiens
gttaatacaggaagg

SEQ ID NO: 1593291 - DNA, 15 bp, Homo sapiens
ggttaatacaggaag

SEQ ID NO: 1593292 - DNA, 15 bp, Homo sapiens
tggttaatacaggaa

SEQ ID NO: 1593293 - DNA, 15 bp, Homo sapiens
atggttaatacagga

SEQ ID NO: 1593294 - DNA, 15 bp, Homo sapiens
aatggttaatacagg

SEQ ID NO: 1593295 - DNA, 15 bp, Homo sapiens
aaatggttaatacag

SEQ ID NO: 1593296 - DNA, 15 bp, Homo sapiens
aaaatggttaataca

SEQ ID NO: 1593297 - DNA, 15 bp, Homo sapiens
gaaaatggttaatac

SEQ ID NO: 1593298 - DNA, 15 bp, Homo sapiens
agaaaatggttaata

SEQ ID NO: 1593299 - DNA, 15 bp, Homo sapiens
tagaaaatggttaat

SEQ ID NO: 1593300 - DNA, 15 bp, Homo sapiens
ttagaaaatggttaa

SEQ ID NO: 1593301 - DNA, 15 bp, Homo sapiens
gttagaaaatggtta

SEQ ID NO: 1593302 - DNA, 15 bp, Homo sapiens
tgttagaaaatggtt

SEQ ID NO: 1593303 - DNA, 15 bp, Homo sapiens
ttgttagaaaatggt

SEQ ID NO: 1593304 - DNA, 15 bp, Homo sapiens
attgttagaaaatgg

SEQ ID NO: 1593305 - DNA, 15 bp, Homo sapiens
aattgttagaaaatg

SEQ ID NO: 1593306 - DNA, 15 bp, Homo sapiens
taattgttagaaaat

SEQ ID NO: 1593307 - DNA, 15 bp, Homo sapiens
gtaattgttagaaaa

SEQ ID NO: 1593308 - DNA, 15 bp, Homo sapiens
tgtaattgttagaaa

SEQ ID NO: 1593309 - DNA, 15 bp, Homo sapiens
ttgtaattgttagaa

SEQ ID NO: 1593310 - DNA, 15 bp, Homo sapiens
attgtaattgttaga

SEQ ID NO: 1593311 - DNA, 15 bp, Homo sapiens
cattgtaattgttag

SEQ ID NO: 1593312 - DNA, 15 bp, Homo sapiens
gcattgtaattgtta

SEQ ID NO: 1593313 - DNA, 15 bp, Homo sapiens
ggcattgtaattgtt

SEQ ID NO: 1593314 - DNA, 15 bp, Homo sapiens
tggcattgtaattgt

SEQ ID NO: 1593315 - DNA, 15 bp, Homo sapiens
gtggcattgtaattg

SEQ ID NO: 1593316 - DNA, 15 bp, Homo sapiens
tgtggcattgtaatt

SEQ ID NO: 1593317 - DNA, 15 bp, Homo sapiens
atgtggcattgtaat

SEQ ID NO: 1593318 - DNA, 15 bp, Homo sapiens
gatgtggcattgtaa

SEQ ID NO: 1593319 - DNA, 15 bp, Homo sapiens
tgatgtggcattgta

SEQ ID NO: 1593320 - DNA, 15 bp, Homo sapiens
ttgatgtggcattgt

SEQ ID NO: 1593321 - DNA, 15 bp, Homo sapiens
gttgatgtggcattg

SEQ ID NO: 1593322 - DNA, 15 bp, Homo sapiens
tgttgatgtggcatt

SEQ ID NO: 1593323 - DNA, 15 bp, Homo sapiens
gtgttgatgtggcat

SEQ ID NO: 1593324 - DNA, 15 bp, Homo sapiens
tgtgttgatgtggca

SEQ ID NO: 1593325 - DNA, 15 bp, Homo sapiens
ctgtgttgatgtggc

SEQ ID NO: 1593326 - DNA, 15 bp, Homo sapiens
actgtgttgatgtgg

SEQ ID NO: 1593327 - DNA, 15 bp, Homo sapiens
aactgtgttgatgtg

SEQ ID NO: 1593328 - DNA, 15 bp, Homo sapiens
taactgtgttgatgt

SEQ ID NO: 1593329 - DNA, 15 bp, Homo sapiens
ctaactgtgttgatg

SEQ ID NO: 1593330 - DNA, 15 bp, Homo sapiens
actaactgtgttgat

SEQ ID NO: 1593331 - DNA, 15 bp, Homo sapiens
aactaactgtgttga

SEQ ID NO: 1593332 - DNA, 15 bp, Homo sapiens
caactaactgtgttg

SEQ ID NO: 1593333 - DNA, 15 bp, Homo sapiens
acaactaactgtgtt

SEQ ID NO: 1593334 - DNA, 15 bp, Homo sapiens
aacaactaactgtgt

SEQ ID NO: 1593335 - DNA, 15 bp, Homo sapiens
caacaactaactgtg

SEQ ID NO: 1593336 - DNA, 15 bp, Homo sapiens
tcaacaactaactgt

SEQ ID NO: 1593337 - DNA, 15 bp, Homo sapiens
ttcaacaactaactg

SEQ ID NO: 1593338 - DNA, 15 bp, Homo sapiens
tttcaacaactaact

SEQ ID NO: 1593339 - DNA, 15 bp, Homo sapiens
ttttcaacaactaac

SEQ ID NO: 1593340 - DNA, 15 bp, Homo sapiens
attttcaacaactaa

SEQ ID NO: 1593341 - DNA, 15 bp, Homo sapiens
aattttcaacaacta

SEQ ID NO: 1593342 - DNA, 15 bp, Homo sapiens
gaattttcaacaact

SEQ ID NO: 1593343 - DNA, 15 bp, Homo sapiens
agaattttcaacaac

SEQ ID NO: 1593344 - DNA, 15 bp, Homo sapiens
gagaattttcaacaa

SEQ ID NO: 1593345 - DNA, 15 bp, Homo sapiens
tgagaattttcaaca

SEQ ID NO: 1593346 - DNA, 15 bp, Homo sapiens
ttgagaattttcaac

SEQ ID NO: 1593347 - DNA, 15 bp, Homo sapiens
gttgagaattttcaa

SEQ ID NO: 1593348 - DNA, 15 bp, Homo sapiens
tgttgagaattttca

SEQ ID NO: 1593349 - DNA, 15 bp, Homo sapiens
atgttgagaattttc

SEQ ID NO: 1593350 - DNA, 15 bp, Homo sapiens
catgttgagaatttt

SEQ ID NO: 1593351 - DNA, 15 bp, Homo sapiens
ccatgttgagaattt

SEQ ID NO: 1593352 - DNA, 15 bp, Homo sapiens
gccatgttgagaatt

SEQ ID NO: 1593353 - DNA, 15 bp, Homo sapiens
agccatgttgagaat

SEQ ID NO: 1593354 - DNA, 15 bp, Homo sapiens
tagccatgttgagaa

SEQ ID NO: 1593355 - DNA, 15 bp, Homo sapiens
ttagccatgttgaga

SEQ ID NO: 1593356 - DNA, 15 bp, Homo sapiens
tttagccatgttgag

SEQ ID NO: 1593357 - DNA, 15 bp, Homo sapiens
atttagccatgttga

SEQ ID NO: 1593358 - DNA, 15 bp, Homo sapiens
tatttagccatgttg

SEQ ID NO: 1593359 - DNA, 15 bp, Homo sapiens
gtatttagccatgtt

SEQ ID NO: 1593360 - DNA, 15 bp, Homo sapiens
agtatttagccatgt

SEQ ID NO: 1593361 - DNA, 15 bp, Homo sapiens
aagtatttagccatg

SEQ ID NO: 1593362 - DNA, 15 bp, Homo sapiens
taagtatttagccat

SEQ ID NO: 1593363 - DNA, 15 bp, Homo sapiens
ctaagtatttagcca

SEQ ID NO: 1593364 - DNA, 15 bp, Homo sapiens
tctaagtatttagcc

SEQ ID NO: 1593365 - DNA, 15 bp, Homo sapiens
atctaagtatttagc

SEQ ID NO: 1593366 - DNA, 15 bp, Homo sapiens
aatctaagtatttag

SEQ ID NO: 1593367 - DNA, 15 bp, Homo sapiens
caatctaagtattta

SEQ ID NO: 1593368 - DNA, 15 bp, Homo sapiens
gcaatctaagtattt

SEQ ID NO: 1593369 - DNA, 15 bp, Homo sapiens
tgcaatctaagtatt

SEQ ID NO: 1593370 - DNA, 15 bp, Homo sapiens
atgcaatctaagtat

SEQ ID NO: 1593371 - DNA, 15 bp, Homo sapiens
aatgcaatctaagta

SEQ ID NO: 1593372 - DNA, 15 bp, Homo sapiens
caatgcaatctaagt

SEQ ID NO: 1593373 - DNA, 15 bp, Homo sapiens
ccaatgcaatctaag

SEQ ID NO: 1593374 - DNA, 15 bp, Homo sapiens
accaatgcaatctaa

SEQ ID NO: 1593375 - DNA, 15 bp, Homo sapiens
caccaatgcaatcta

SEQ ID NO: 1593376 - DNA, 15 bp, Homo sapiens
ccaccaatgcaatct

SEQ ID NO: 1593377 - DNA, 15 bp, Homo sapiens
accaccaatgcaatc

SEQ ID NO: 1593378 - DNA, 15 bp, Homo sapiens
caccaccaatgcaat

SEQ ID NO: 1593379 - DNA, 15 bp, Homo sapiens
acaccaccaatgcaa

SEQ ID NO: 1593380 - DNA, 15 bp, Homo sapiens
cacaccaccaatgca

SEQ ID NO: 1593381 - DNA, 15 bp, Homo sapiens
gcacaccaccaatgc

SEQ ID NO: 1593382 - DNA, 15 bp, Homo sapiens
ggcacaccaccaatg

SEQ ID NO: 1593383 - DNA, 15 bp, Homo sapiens
aggcacaccaccaat

SEQ ID NO: 1593384 - DNA, 15 bp, Homo sapiens
caggcacaccaccaa

SEQ ID NO: 1593385 - DNA, 15 bp, Homo sapiens
acaggcacaccacca

SEQ ID NO: 1593386 - DNA, 15 bp, Homo sapiens
cacaggcacaccacc

SEQ ID NO: 1593387 - DNA, 15 bp, Homo sapiens
tcacaggcacaccac

SEQ ID NO: 1593388 - DNA, 15 bp, Homo sapiens
ttcacaggcacacca

SEQ ID NO: 1593389 - DNA, 15 bp, Homo sapiens
tttcacaggcacacc

SEQ ID NO: 1593390 - DNA, 15 bp, Homo sapiens
ctttcacaggcacac

SEQ ID NO: 1593391 - DNA, 15 bp, Homo sapiens
gctttcacaggcaca

SEQ ID NO: 1593392 - DNA, 15 bp, Homo sapiens
agctttcacaggcac

SEQ ID NO: 1593393 - DNA, 15 bp, Homo sapiens
tagctttcacaggca

SEQ ID NO: 1593394 - DNA, 15 bp, Homo sapiens
atagctttcacaggc

SEQ ID NO: 1593395 - DNA, 15 bp, Homo sapiens
aatagctttcacagg

SEQ ID NO: 1593396 - DNA, 15 bp, Homo sapiens
aaatagctttcacag

SEQ ID NO: 1593397 - DNA, 15 bp, Homo sapiens
caaatagctttcaca

SEQ ID NO: 1593398 - DNA, 15 bp, Homo sapiens
ccaaatagctttcac

SEQ ID NO: 1593399 - DNA, 15 bp, Homo sapiens
cccaaatagctttca

SEQ ID NO: 1593400 - DNA, 15 bp, Homo sapiens
ccccaaatagctttc

SEQ ID NO: 1593401 - DNA, 15 bp, Homo sapiens
cccccaaatagcttt

SEQ ID NO: 1593402 - DNA, 15 bp, Homo sapiens
acccccaaatagctt

SEQ ID NO: 1593403 - DNA, 15 bp, Homo sapiens
aacccccaaatagct

SEQ ID NO: 1593404 - DNA, 15 bp, Homo sapiens
caacccccaaatagc

SEQ ID NO: 1593405 - DNA, 15 bp, Homo sapiens
acaacccccaaatag

SEQ ID NO: 1593406 - DNA, 15 bp, Homo sapiens
cacaacccccaaata

SEQ ID NO: 1593407 - DNA, 15 bp, Homo sapiens
acacaacccccaaat

SEQ ID NO: 1593408 - DNA, 15 bp, Homo sapiens
tacacaacccccaaa

SEQ ID NO: 1593409 - DNA, 15 bp, Homo sapiens
atacacaacccccaa

SEQ ID NO: 1593410 - DNA, 15 bp, Homo sapiens
catacacaaccccca

SEQ ID NO: 1593411 - DNA, 15 bp, Homo sapiens
acatacacaaccccc

SEQ ID NO: 1593412 - DNA, 15 bp, Homo sapiens
cacatacacaacccc

SEQ ID NO: 1593413 - DNA, 15 bp, Homo sapiens
ccacatacacaaccc

SEQ ID NO: 1593414 - DNA, 15 bp, Homo sapiens
accacatacacaacc

SEQ ID NO: 1593415 - DNA, 15 bp, Homo sapiens
aaccacatacacaac

SEQ ID NO: 1593416 - DNA, 15 bp, Homo sapiens
gaaccacatacacaa

SEQ ID NO: 1593417 - DNA, 15 bp, Homo sapiens
agaaccacatacaca

SEQ ID NO: 1593418 - DNA, 15 bp, Homo sapiens
cagaaccacatacac

SEQ ID NO: 1593419 - DNA, 15 bp, Homo sapiens
gcagaaccacataca

SEQ ID NO: 1593420 - DNA, 15 bp, Homo sapiens
agcagaaccacatac

SEQ ID NO: 1593421 - DNA, 15 bp, Homo sapiens
gagcagaaccacata

SEQ ID NO: 1593422 - DNA, 15 bp, Homo sapiens
tgagcagaaccacat

SEQ ID NO: 1593423 - DNA, 15 bp, Homo sapiens
atgagcagaaccaca

SEQ ID NO: 1593424 - DNA, 15 bp, Homo sapiens
aatgagcagaaccac

SEQ ID NO: 1593425 - DNA, 15 bp, Homo sapiens
caatgagcagaacca

SEQ ID NO: 1593426 - DNA, 15 bp, Homo sapiens
ccaatgagcagaacc

SEQ ID NO: 1593427 - DNA, 15 bp, Homo sapiens
tccaatgagcagaac

SEQ ID NO: 1593428 - DNA, 15 bp, Homo sapiens
ttccaatgagcagaa

SEQ ID NO: 1593429 - DNA, 15 bp, Homo sapiens
tttccaatgagcaga

SEQ ID NO: 1593430 - DNA, 15 bp, Homo sapiens
ctttccaatgagcag

SEQ ID NO: 1593431 - DNA, 15 bp, Homo sapiens
tctttccaatgagca

SEQ ID NO: 1593432 - DNA, 15 bp, Homo sapiens
gtctttccaatgagc

SEQ ID NO: 1593433 - DNA, 15 bp, Homo sapiens
tgtctttccaatgag

SEQ ID NO: 1593434 - DNA, 15 bp, Homo sapiens
ctgtctttccaatga

SEQ ID NO: 1593435 - DNA, 15 bp, Homo sapiens
tctgtctttccaatg

SEQ ID NO: 1593436 - DNA, 15 bp, Homo sapiens
ttctgtctttccaat

SEQ ID NO: 1593437 - DNA, 15 bp, Homo sapiens
cttctgtctttccaa

SEQ ID NO: 1593438 - DNA, 15 bp, Homo sapiens
tcttctgtctttcca

SEQ ID NO: 1593439 - DNA, 15 bp, Homo sapiens
ctcttctgtctttcc

SEQ ID NO: 1593440 - DNA, 15 bp, Homo sapiens
tctcttctgtctttc

SEQ ID NO: 1593441 - DNA, 15 bp, Homo sapiens
ctctcttctgtcttt

SEQ ID NO: 1593442 - DNA, 15 bp, Homo sapiens
tctctcttctgtctt

SEQ ID NO: 1593443 - DNA, 15 bp, Homo sapiens
ttctctcttctgtct

SEQ ID NO: 1593444 - DNA, 15 bp, Homo sapiens
tttctctcttctgtc

SEQ ID NO: 1593445 - DNA, 15 bp, Homo sapiens
ctttctctcttctgt

SEQ ID NO: 1593446 - DNA, 15 bp, Homo sapiens
cctttctctcttctg

SEQ ID NO: 1593447 - DNA, 15 bp, Homo sapiens
ccctttctctcttct

SEQ ID NO: 1593448 - DNA, 15 bp, Homo sapiens
cccctttctctcttc

SEQ ID NO: 1593449 - DNA, 15 bp, Homo sapiens
gccccctttctctct

SEQ ID NO: 1593450 - DNA, 15 bp, Homo sapiens
ggccccctttctctc

SEQ ID NO: 1593451 - DNA, 15 bp, Homo sapiens
cggccccctttctct

SEQ ID NO: 1593452 - DNA, 15 bp, Homo sapiens
ccggccccctttctc

SEQ ID NO: 1593453 - DNA, 15 bp, Homo sapiens
tccggccccctttct

SEQ ID NO: 1593454 - DNA, 15 bp, Homo sapiens
ttccggccccctttc

SEQ ID NO: 1593455 - DNA, 15 bp, Homo sapiens
tttccggcccccttt

SEQ ID NO: 1593456 - DNA, 15 bp, Homo sapiens
ctttccggccccctt

SEQ ID NO: 1593457 - DNA, 15 bp, Homo sapiens
cctttccggccccct

SEQ ID NO: 1593458 - DNA, 15 bp, Homo sapiens
tcctttccggccccc

SEQ ID NO: 1593459 - DNA, 15 bp, Homo sapiens
atcctttccggcccc

SEQ ID NO: 1593460 - DNA, 15 bp, Homo sapiens
tatcctttccggccc

SEQ ID NO: 1593461 - DNA, 15 bp, Homo sapiens
gtatcctttccggcc

SEQ ID NO: 1593462 - DNA, 15 bp, Homo sapiens
agtatcctttccggc

SEQ ID NO: 1593463 - DNA, 15 bp, Homo sapiens
cagtatcctttccgg

SEQ ID NO: 1593464 - DNA, 15 bp, Homo sapiens
ccagtatcctttccg

SEQ ID NO: 1593465 - DNA, 15 bp, Homo sapiens
cccagtatcctttcc

SEQ ID NO: 1593466 - DNA, 15 bp, Homo sapiens
tcccagtatcctttc

SEQ ID NO: 1593467 - DNA, 15 bp, Homo sapiens
ctcccagtatccttt

SEQ ID NO: 1593468 - DNA, 15 bp, Homo sapiens
tctcccagtatcctt

SEQ ID NO: 1593469 - DNA, 15 bp, Homo sapiens
ttctcccagtatcct

SEQ ID NO: 1593470 - DNA, 15 bp, Homo sapiens
tttctcccagtatcc

SEQ ID NO: 1593471 - DNA, 15 bp, Homo sapiens
ttttctcccagtatc

SEQ ID NO: 1593472 - DNA, 15 bp, Homo sapiens
gttttctcccagtat

SEQ ID NO: 1593473 - DNA, 15 bp, Homo sapiens
tgttttctcccagta

SEQ ID NO: 1593474 - DNA, 15 bp, Homo sapiens
ctgttttctcccagt

SEQ ID NO: 1593475 - DNA, 15 bp, Homo sapiens
tctgttttctcccag

SEQ ID NO: 1593476 - DNA, 15 bp, Homo sapiens
ttctgttttctccca

SEQ ID NO: 1593477 - DNA, 15 bp, Homo sapiens
tttctgttttctccc

SEQ ID NO: 1593478 - DNA, 15 bp, Homo sapiens
gtttctgttttctcc

SEQ ID NO: 1593479 - DNA, 15 bp, Homo sapiens
tgtttctgttttctc

SEQ ID NO: 1593480 - DNA, 15 bp, Homo sapiens
ttgtttctgttttct

SEQ ID NO: 1593481 - DNA, 15 bp, Homo sapiens
gttgtttctgttttc

SEQ ID NO: 1593482 - DNA, 15 bp, Homo sapiens
agttgtttctgtttt

SEQ ID NO: 1593483 - DNA, 15 bp, Homo sapiens
tagttgtttctgttt

SEQ ID NO: 1593484 - DNA, 15 bp, Homo sapiens
atagttgtttctgtt

SEQ ID NO: 1593485 - DNA, 15 bp, Homo sapiens
aatagttgtttctgt

SEQ ID NO: 1593486 - DNA, 15 bp, Homo sapiens
gaatagttgtttctg

SEQ ID NO: 1593487 - DNA, 15 bp, Homo sapiens
ggaatagttgtttct

SEQ ID NO: 1593488 - DNA, 15 bp, Homo sapiens
aggaatagttgtttc

SEQ ID NO: 1593489 - DNA, 15 bp, Homo sapiens
caggaatagttgttt

SEQ ID NO: 1593490 - DNA, 15 bp, Homo sapiens
ccaggaatagttgtt

SEQ ID NO: 1593491 - DNA, 15 bp, Homo sapiens
accaggaatagttgt

SEQ ID NO: 1593492 - DNA, 15 bp, Homo sapiens
caccaggaatagttg

SEQ ID NO: 1593493 - DNA, 15 bp, Homo sapiens
tcaccaggaatagtt

SEQ ID NO: 1593494 - DNA, 15 bp, Homo sapiens
ttcaccaggaatagt

SEQ ID NO: 1593495 - DNA, 15 bp, Homo sapiens
tttcaccaggaatag

SEQ ID NO: 1593496 - DNA, 15 bp, Homo sapiens
ctttcaccaggaata

SEQ ID NO: 1593497 - DNA, 15 bp, Homo sapiens
actttcaccaggaat

SEQ ID NO: 1593498 - DNA, 15 bp, Homo sapiens
cactttcaccaggaa

SEQ ID NO: 1593499 - DNA, 15 bp, Homo sapiens
acactttcaccagga

SEQ ID NO: 1593500 - DNA, 15 bp, Homo sapiens
cacactttcaccagg

SEQ ID NO: 1593501 - DNA, 15 bp, Homo sapiens
acacactttcaccag

SEQ ID NO: 1593502 - DNA, 15 bp, Homo sapiens
cacacactttcacca

SEQ ID NO: 1593503 - DNA, 15 bp, Homo sapiens
ccacacactttcacc

SEQ ID NO: 1593504 - DNA, 15 bp, Homo sapiens
cccacacactttcac

SEQ ID NO: 1593505 - DNA, 15 bp, Homo sapiens
gcccacacactttca

SEQ ID NO: 1593506 - DNA, 15 bp, Homo sapiens
agcccacacactttc

SEQ ID NO: 1593507 - DNA, 15 bp, Homo sapiens
aagcccacacacttt

SEQ ID NO: 1593508 - DNA, 15 bp, Homo sapiens
gaagcccacacactt

SEQ ID NO: 1593509 - DNA, 15 bp, Homo sapiens
agaagcccacacact

SEQ ID NO: 1593510 - DNA, 15 bp, Homo sapiens
cagaagcccacacac

SEQ ID NO: 1593511 - DNA, 15 bp, Homo sapiens
tcagaagcccacaca

SEQ ID NO: 1593512 - DNA, 15 bp, Homo sapiens
ctcagaagcccacac

SEQ ID NO: 1593513 - DNA, 15 bp, Homo sapiens
cctcagaagcccaca

SEQ ID NO: 1593514 - DNA, 15 bp, Homo sapiens
ccctcagaagcccac

SEQ ID NO: 1593515 - DNA, 15 bp, Homo sapiens
gccctcagaagccca

SEQ ID NO: 1593516 - DNA, 15 bp, Homo sapiens
cgccctcagaagccc

SEQ ID NO: 1593517 - DNA, 15 bp, Homo sapiens
ccgccctcagaagcc

SEQ ID NO: 1593518 - DNA, 15 bp, Homo sapiens
accgccctcagaagc

SEQ ID NO: 1593519 - DNA, 15 bp, Homo sapiens
aaccgccctcagaag

SEQ ID NO: 1593520 - DNA, 15 bp, Homo sapiens
caaccgccctcagaa

SEQ ID NO: 1593521 - DNA, 15 bp, Homo sapiens
acaaccgccctcaga

SEQ ID NO: 1593522 - DNA, 15 bp, Homo sapiens
cacaaccgccctcag

SEQ ID NO: 1593523 - DNA, 15 bp, Homo sapiens
ccacaaccgccctca

SEQ ID NO: 1593524 - DNA, 15 bp, Homo sapiens
gccacaaccgccctc

SEQ ID NO: 1593525 - DNA, 15 bp, Homo sapiens
tgccacaaccgccct

SEQ ID NO: 1593526 - DNA, 15 bp, Homo sapiens
ctgccacaaccgccc

SEQ ID NO: 1593527 - DNA, 15 bp, Homo sapiens
gctgccacaaccgcc

SEQ ID NO: 1593528 - DNA, 15 bp, Homo sapiens
agctgccacaaccgc

SEQ ID NO: 1593529 - DNA, 15 bp, Homo sapiens
cagctgccacaaccg

SEQ ID NO: 1593530 - DNA, 15 bp, Homo sapiens
tcagctgccacaacc

SEQ ID NO: 1593531 - DNA, 15 bp, Homo sapiens
ctcagctgccacaac

SEQ ID NO: 1593532 - DNA, 15 bp, Homo sapiens
tctcagctgccacaa

SEQ ID NO: 1593533 - DNA, 15 bp, Homo sapiens
ttctcagctgccaca

SEQ ID NO: 1593534 - DNA, 15 bp, Homo sapiens
cttctcagctgccac

SEQ ID NO: 1593535 - DNA, 15 bp, Homo sapiens
acttctcagctgcca

SEQ ID NO: 1593536 - DNA, 15 bp, Homo sapiens
cacttctcagctgcc

SEQ ID NO: 1593537 - DNA, 15 bp, Homo sapiens
gcacttctcagctgc

SEQ ID NO: 1593538 - DNA, 15 bp, Homo sapiens
agcacttctcagctg

SEQ ID NO: 1593539 - DNA, 15 bp, Homo sapiens
cagcacttctcagct

SEQ ID NO: 1593540 - DNA, 15 bp, Homo sapiens
ccagcacttctcagc

SEQ ID NO: 1593541 - DNA, 15 bp, Homo sapiens
accagcacttctcag

SEQ ID NO: 1593542 - DNA, 15 bp, Homo sapiens
aaccagcacttctca

SEQ ID NO: 1593543 - DNA, 15 bp, Homo sapiens
taaccagcacttctc

SEQ ID NO: 1593544 - DNA, 15 bp, Homo sapiens
ataaccagcacttct

SEQ ID NO: 1593545 - DNA, 15 bp, Homo sapiens
tataaccagcacttc

SEQ ID NO: 1593546 - DNA, 15 bp, Homo sapiens
atataaccagcactt

SEQ ID NO: 1593547 - DNA, 15 bp, Homo sapiens
tatataaccagcact

SEQ ID NO: 1593548 - DNA, 15 bp, Homo sapiens
atatataaccagcac

SEQ ID NO: 1593549 - DNA, 15 bp, Homo sapiens
tatatataaccagca

SEQ ID NO: 1593550 - DNA, 15 bp, Homo sapiens
ctatatataaccagc

SEQ ID NO: 1593551 - DNA, 15 bp, Homo sapiens
gctatatataaccag

SEQ ID NO: 1593552 - DNA, 15 bp, Homo sapiens
agctatatataacca

SEQ ID NO: 1593553 - DNA, 15 bp, Homo sapiens
cagctatatataacc

SEQ ID NO: 1593554 - DNA, 15 bp, Homo sapiens
ccagctatatataac

SEQ ID NO: 1593555 - DNA, 15 bp, Homo sapiens
cccagctatatataa

SEQ ID NO: 1593556 - DNA, 15 bp, Homo sapiens
acccagctatatata

SEQ ID NO: 1593557 - DNA, 15 bp, Homo sapiens
gacccagctatatat

SEQ ID NO: 1593558 - DNA, 15 bp, Homo sapiens
tgacccagctatata

SEQ ID NO: 1593559 - DNA, 15 bp, Homo sapiens
gtgacccagctatat

SEQ ID NO: 1593560 - DNA, 15 bp, Homo sapiens
tgtgacccagctata

SEQ ID NO: 1593561 - DNA, 15 bp, Homo sapiens
ctgtgacccagctat

SEQ ID NO: 1593562 - DNA, 15 bp, Homo sapiens
actgtgacccagcta

SEQ ID NO: 1593563 - DNA, 15 bp, Homo sapiens
cactgtgacccagct

SEQ ID NO: 1593564 - DNA, 15 bp, Homo sapiens
tcactgtgacccagc

SEQ ID NO: 1593565 - DNA, 15 bp, Homo sapiens
atcactgtgacccag

SEQ ID NO: 1593566 - DNA, 15 bp, Homo sapiens
catcactgtgaccca

SEQ ID NO: 1593567 - DNA, 15 bp, Homo sapiens
ccatcactgtgaccc

SEQ ID NO: 1593568 - DNA, 15 bp, Homo sapiens
cccatcactgtgacc

SEQ ID NO: 1593569 - DNA, 15 bp, Homo sapiens
ccccatcactgtgac

SEQ ID NO: 1593570 - DNA, 15 bp, Homo sapiens
tccccatcactgtga

SEQ ID NO: 1593571 - DNA, 15 bp, Homo sapiens
ctccccatcactgtg

SEQ ID NO: 1593572 - DNA, 15 bp, Homo sapiens
cctccccatcactgt

SEQ ID NO: 1593573 - DNA, 15 bp, Homo sapiens
acctccccatcactg

SEQ ID NO: 1593574 - DNA, 15 bp, Homo sapiens
cacctccccatcact

SEQ ID NO: 1593575 - DNA, 15 bp, Homo sapiens
ccacctccccatcac

SEQ ID NO: 1593576 - DNA, 15 bp, Homo sapiens
cccacctccccatca

SEQ ID NO: 1593577 - DNA, 15 bp, Homo sapiens
ccccacctccccatc

SEQ ID NO: 1593578 - DNA, 15 bp, Homo sapiens
tccccacctccccat

SEQ ID NO: 1593579 - DNA, 15 bp, Homo sapiens
atccccacctcccca

SEQ ID NO: 1593580 - DNA, 15 bp, Homo sapiens
catccccacctcccc

SEQ ID NO: 1593581 - DNA, 15 bp, Homo sapiens
ccatccccacctccc

SEQ ID NO: 1593582 - DNA, 15 bp, Homo sapiens
accatccccacctcc

SEQ ID NO: 1593583 - DNA, 15 bp, Homo sapiens
caccatccccacctc

SEQ ID NO: 1593584 - DNA, 15 bp, Homo sapiens
ccaccatccccacct

SEQ ID NO: 1593585 - DNA, 15 bp, Homo sapiens
accaccatccccacc

SEQ ID NO: 1593586 - DNA, 15 bp, Homo sapiens
caccaccatccccac

SEQ ID NO: 1593587 - DNA, 15 bp, Homo sapiens
ccaccaccatcccca

SEQ ID NO: 1593588 - DNA, 15 bp, Homo sapiens
tccaccaccatcccc

SEQ ID NO: 1593589 - DNA, 15 bp, Homo sapiens
atccaccaccatccc

SEQ ID NO: 1593590 - DNA, 15 bp, Homo sapiens
catccaccaccatcc

SEQ ID NO: 1593591 - DNA, 15 bp, Homo sapiens
tcatccaccaccatc

SEQ ID NO: 1593592 - DNA, 15 bp, Homo sapiens
gtcatccaccaccat

SEQ ID NO: 1593593 - DNA, 15 bp, Homo sapiens
agtcatccaccacca

SEQ ID NO: 1593594 - DNA, 15 bp, Homo sapiens
cagtcatccaccacc

SEQ ID NO: 1593595 - DNA, 15 bp, Homo sapiens
acagtcatccaccac

SEQ ID NO: 1593596 - DNA, 15 bp, Homo sapiens
cacagtcatccacca

SEQ ID NO: 1593597 - DNA, 15 bp, Homo sapiens
acacagtcatccacc

SEQ ID NO: 1593598 - DNA, 15 bp, Homo sapiens
gacacagtcatccac

SEQ ID NO: 1593599 - DNA, 15 bp, Homo sapiens
tgacacagtcatcca

SEQ ID NO: 1593600 - DNA, 15 bp, Homo sapiens
atgacacagtcatcc

SEQ ID NO: 1593601 - DNA, 15 bp, Homo sapiens
catgacacagtcatc

SEQ ID NO: 1593602 - DNA, 15 bp, Homo sapiens
acatgacacagtcat

SEQ ID NO: 1593603 - DNA, 15 bp, Homo sapiens
cacatgacacagtca

SEQ ID NO: 1593604 - DNA, 15 bp, Homo sapiens
gcacatgacacagtc

SEQ ID NO: 1593605 - DNA, 15 bp, Homo sapiens
ggcacatgacacagt

SEQ ID NO: 1593606 - DNA, 15 bp, Homo sapiens
aggcacatgacacag

SEQ ID NO: 1593607 - DNA, 15 bp, Homo sapiens
caggcacatgacaca

SEQ ID NO: 1593608 - DNA, 15 bp, Homo sapiens
acaggcacatgacac

SEQ ID NO: 1593609 - DNA, 15 bp, Homo sapiens
cacaggcacatgaca

SEQ ID NO: 1593610 - DNA, 15 bp, Homo sapiens
ccacaggcacatgac

SEQ ID NO: 1593611 - DNA, 15 bp, Homo sapiens
accacaggcacatga

SEQ ID NO: 1593612 - DNA, 15 bp, Homo sapiens
caccacaggcacatg

SEQ ID NO: 1593613 - DNA, 15 bp, Homo sapiens
acaccacaggcacat

SEQ ID NO: 1593614 - DNA, 15 bp, Homo sapiens
aacaccacaggcaca

SEQ ID NO: 1593615 - DNA, 15 bp, Homo sapiens
aaacaccacaggcac

SEQ ID NO: 1593616 - DNA, 15 bp, Homo sapiens
taaacaccacaggca

SEQ ID NO: 1593617 - DNA, 15 bp, Homo sapiens
ctaaacaccacaggc

SEQ ID NO: 1593618 - DNA, 15 bp, Homo sapiens
cctaaacaccacagg

SEQ ID NO: 1593619 - DNA, 15 bp, Homo sapiens
ccctaaacaccacag

SEQ ID NO: 1593620 - DNA, 15 bp, Homo sapiens
cccctaaacaccaca

SEQ ID NO: 1593621 - DNA, 15 bp, Homo sapiens
ccccctaaacaccac

SEQ ID NO: 1593622 - DNA, 15 bp, Homo sapiens
accccctaaacacca

SEQ ID NO: 1593623 - DNA, 15 bp, Homo sapiens
caccccctaaacacc

SEQ ID NO: 1593624 - DNA, 15 bp, Homo sapiens
tcaccccctaaacac

SEQ ID NO: 1593625 - DNA, 15 bp, Homo sapiens
atcaccccctaaaca

SEQ ID NO: 1593626 - DNA, 15 bp, Homo sapiens
gatcaccccctaaac

SEQ ID NO: 1593627 - DNA, 15 bp, Homo sapiens
ggatcaccccctaaa

SEQ ID NO: 1593628 - DNA, 15 bp, Homo sapiens
aggatcaccccctaa

SEQ ID NO: 1593629 - DNA, 15 bp, Homo sapiens
taggatcacccccta

SEQ ID NO: 1593630 - DNA, 15 bp, Homo sapiens
ctaggatcaccccct

SEQ ID NO: 1593631 - DNA, 15 bp, Homo sapiens
actaggatcaccccc

SEQ ID NO: 1593632 - DNA, 15 bp, Homo sapiens
cactaggatcacccc

SEQ ID NO: 1593633 - DNA, 15 bp, Homo sapiens
ccactaggatcaccc

SEQ ID NO: 1593634 - DNA, 15 bp, Homo sapiens
cccactaggatcacc

SEQ ID NO: 1593635 - DNA, 15 bp, Homo sapiens
ccccactaggatcac

SEQ ID NO: 1593636 - DNA, 15 bp, Homo sapiens
tccccactaggatca

SEQ ID NO: 1593637 - DNA, 15 bp, Homo sapiens
ctccccactaggatc

SEQ ID NO: 1593638 - DNA, 15 bp, Homo sapiens
cctccccactaggat

SEQ ID NO: 1593639 - DNA, 15 bp, Homo sapiens
ccctccccactagga

SEQ ID NO: 1593640 - DNA, 15 bp, Homo sapiens
gccctccccactagg

SEQ ID NO: 1593641 - DNA, 15 bp, Homo sapiens
ggccctccccactag

SEQ ID NO: 1593642 - DNA, 15 bp, Homo sapiens
aggccctccccacta

SEQ ID NO: 1593643 - DNA, 15 bp, Homo sapiens
caggccctccccact

SEQ ID NO: 1593644 - DNA, 15 bp, Homo sapiens
ccaggccctccccac

SEQ ID NO: 1593645 - DNA, 15 bp, Homo sapiens
cccaggccctcccca

SEQ ID NO: 1593646 - DNA, 15 bp, Homo sapiens
tcccaggccctcccc

SEQ ID NO: 1593647 - DNA, 15 bp, Homo sapiens
ctcccaggccctccc

SEQ ID NO: 1593648 - DNA, 15 bp, Homo sapiens
tctcccaggccctcc

SEQ ID NO: 1593649 - DNA, 15 bp, Homo sapiens
cgtctcccaggccct

SEQ ID NO: 1593650 - DNA, 15 bp, Homo sapiens
ccgtctcccaggccc

SEQ ID NO: 1593651 - DNA, 15 bp, Homo sapiens
gccgtctcccaggcc

SEQ ID NO: 1593652 - DNA, 15 bp, Homo sapiens
agccgtctcccaggc

SEQ ID NO: 1593653 - DNA, 15 bp, Homo sapiens
cagccgtctcccagg

SEQ ID NO: 1593654 - DNA, 15 bp, Homo sapiens
ccagccgtctcccag

SEQ ID NO: 1593655 - DNA, 15 bp, Homo sapiens
cccagccgtctccca

SEQ ID NO: 1593656 - DNA, 15 bp, Homo sapiens
acccagccgtctccc

SEQ ID NO: 1593657 - DNA, 15 bp, Homo sapiens
cacccagccgtctcc

SEQ ID NO: 1593658 - DNA, 15 bp, Homo sapiens
ccacccagccgtctc

SEQ ID NO: 1593659 - DNA, 15 bp, Homo sapiens
accacccagccgtct

SEQ ID NO: 1593660 - DNA, 15 bp, Homo sapiens
caccacccagccgtc

SEQ ID NO: 1593661 - DNA, 15 bp, Homo sapiens
ccaccacccagccgt

SEQ ID NO: 1593662 - DNA, 15 bp, Homo sapiens
accaccacccagccg

SEQ ID NO: 1593663 - DNA, 15 bp, Homo sapiens
caccaccacccagcc

SEQ ID NO: 1593664 - DNA, 15 bp, Homo sapiens
acaccaccacccagc

SEQ ID NO: 1593665 - DNA, 15 bp, Homo sapiens
cacaccaccacccag

SEQ ID NO: 1593666 - DNA, 15 bp, Homo sapiens
acacaccaccaccca

SEQ ID NO: 1593667 - DNA, 15 bp, Homo sapiens
cacacaccaccaccc

SEQ ID NO: 1593668 - DNA, 15 bp, Homo sapiens
acacacaccaccacc

SEQ ID NO: 1593669 - DNA, 15 bp, Homo sapiens
tacacacaccaccac

SEQ ID NO: 1593670 - DNA, 15 bp, Homo sapiens
gtacacacaccacca

SEQ ID NO: 1593671 - DNA, 15 bp, Homo sapiens
ggtacacacaccacc

SEQ ID NO: 1593672 - DNA, 15 bp, Homo sapiens
gggtacacacaccac

SEQ ID NO: 1593673 - DNA, 15 bp, Homo sapiens
agggtacacacacca

SEQ ID NO: 1593674 - DNA, 15 bp, Homo sapiens
cagggtacacacacc

SEQ ID NO: 1593675 - DNA, 15 bp, Homo sapiens
acagggtacacacac

SEQ ID NO: 1593676 - DNA, 15 bp, Homo sapiens
gacagggtacacaca

SEQ ID NO: 1593677 - DNA, 15 bp, Homo sapiens
agacagggtacacac

SEQ ID NO: 1593678 - DNA, 15 bp, Homo sapiens
cagacagggtacaca

SEQ ID NO: 1593679 - DNA, 15 bp, Homo sapiens
tcagacagggtacac

SEQ ID NO: 1593680 - DNA, 15 bp, Homo sapiens
ctcagacagggtaca

SEQ ID NO: 1593681 - DNA, 15 bp, Homo sapiens
gctcagacagggtac

SEQ ID NO: 1593682 - DNA, 15 bp, Homo sapiens
agctcagacagggta

SEQ ID NO: 1593683 - DNA, 15 bp, Homo sapiens
aagctcagacagggt

SEQ ID NO: 1593684 - DNA, 15 bp, Homo sapiens
cccaaagctcagaca

SEQ ID NO: 1593685 - DNA, 15 bp, Homo sapiens
gcccaaagctcagac

SEQ ID NO: 1593686 - DNA, 15 bp, Homo sapiens
ggcccaaagctcaga

SEQ ID NO: 1593687 - DNA, 15 bp, Homo sapiens
cggcccaaagctcag

SEQ ID NO: 1593688 - DNA, 15 bp, Homo sapiens
ccggcccaaagctca

SEQ ID NO: 1593689 - DNA, 15 bp, Homo sapiens
accggcccaaagctc

SEQ ID NO: 1593690 - DNA, 15 bp, Homo sapiens
taccggcccaaagct

SEQ ID NO: 1593691 - DNA, 15 bp, Homo sapiens
ttaccggcccaaagc

SEQ ID NO: 1593692 - DNA, 15 bp, Homo sapiens
gttaccggcccaaag

SEQ ID NO: 1593693 - DNA, 15 bp, Homo sapiens
tgttaccggcccaaa

SEQ ID NO: 1593694 - DNA, 15 bp, Homo sapiens
gtgttaccggcccaa

SEQ ID NO: 1593695 - DNA, 15 bp, Homo sapiens
tgtgttaccggccca

SEQ ID NO: 1593696 - DNA, 15 bp, Homo sapiens
ttgtgttaccggccc

SEQ ID NO: 1593697 - DNA, 15 bp, Homo sapiens
attgtgttaccggcc

SEQ ID NO: 1593698 - DNA, 15 bp, Homo sapiens
cattgtgttaccggc

SEQ ID NO: 1593699 - DNA, 15 bp, Homo sapiens
ccattgtgttaccgg

SEQ ID NO: 1593700 - DNA, 15 bp, Homo sapiens
gccattgtgttaccg

SEQ ID NO: 1593701 - DNA, 15 bp, Homo sapiens
tgccattgtgttacc

SEQ ID NO: 1593702 - DNA, 15 bp, Homo sapiens
ttgccattgtgttac

SEQ ID NO: 1593703 - DNA, 15 bp, Homo sapiens
gttgccattgtgtta

SEQ ID NO: 1593704 - DNA, 15 bp, Homo sapiens
cgttgccattgtgtt

SEQ ID NO: 1593705 - DNA, 15 bp, Homo sapiens
acgttgccattgtgt

SEQ ID NO: 1593706 - DNA, 15 bp, Homo sapiens
tacgttgccattgtg

SEQ ID NO: 1593707 - DNA, 15 bp, Homo sapiens
ttacgttgccattgt

SEQ ID NO: 1593708 - DNA, 15 bp, Homo sapiens
attacgttgccattg

SEQ ID NO: 1593709 - DNA, 15 bp, Homo sapiens
aattacgttgccatt

SEQ ID NO: 1593710 - DNA, 15 bp, Homo sapiens
taattacgttgccat

SEQ ID NO: 1593711 - DNA, 15 bp, Homo sapiens
ataattacgttgcca

SEQ ID NO: 1593712 - DNA, 15 bp, Homo sapiens
gataattacgttgcc

SEQ ID NO: 1593713 - DNA, 15 bp, Homo sapiens
agataattacgttgc

SEQ ID NO: 1593714 - DNA, 15 bp, Homo sapiens
cagataattacgttg

SEQ ID NO: 1593715 - DNA, 15 bp, Homo sapiens
ccagataattacgtt

SEQ ID NO: 1593716 - DNA, 15 bp, Homo sapiens
gccagataattacgt

SEQ ID NO: 1593717 - DNA, 15 bp, Homo sapiens
agccagataattacg

SEQ ID NO: 1593718 - DNA, 15 bp, Homo sapiens
cagccagataattac

SEQ ID NO: 1593719 - DNA, 15 bp, Homo sapiens
tcagccagataatta

SEQ ID NO: 1593720 - DNA, 15 bp, Homo sapiens
ttcagccagataatt

SEQ ID NO: 1593721 - DNA, 15 bp, Homo sapiens
tttcagccagataat

SEQ ID NO: 1593722 - DNA, 15 bp, Homo sapiens
gtttcagccagataa

SEQ ID NO: 1593723 - DNA, 15 bp, Homo sapiens
tgtttcagccagata

SEQ ID NO: 1593724 - DNA, 15 bp, Homo sapiens
gtgtttcagccagat

SEQ ID NO: 1593725 - DNA, 15 bp, Homo sapiens
cgtgtttcagccaga

SEQ ID NO: 1593726 - DNA, 15 bp, Homo sapiens
gcgtgtttcagccag

SEQ ID NO: 1593727 - DNA, 15 bp, Homo sapiens
agcgtgtttcagcca

SEQ ID NO: 1593728 - DNA, 15 bp, Homo sapiens
gagcgtgtttcagcc

SEQ ID NO: 1593729 - DNA, 15 bp, Homo sapiens
tgagcgtgtttcagc

SEQ ID NO: 1593730 - DNA, 15 bp, Homo sapiens
ttgagcgtgtttcag

SEQ ID NO: 1593731 - DNA, 15 bp, Homo sapiens
tttgagcgtgtttca

SEQ ID NO: 1593732 - DNA, 15 bp, Homo sapiens
atttgagcgtgtttc

SEQ ID NO: 1593733 - DNA, 15 bp, Homo sapiens
catttgagcgtgttt

SEQ ID NO: 1593734 - DNA, 15 bp, Homo sapiens
ccatttgagcgtgtt

SEQ ID NO: 1593735 - DNA, 15 bp, Homo sapiens
gccatttgagcgtgt

SEQ ID NO: 1593736 - DNA, 15 bp, Homo sapiens
tgccatttgagcgtg

SEQ ID NO: 1593737 - DNA, 15 bp, Homo sapiens
ttgccatttgagcgt

SEQ ID NO: 1593738 - DNA, 15 bp, Homo sapiens
tttgccatttgagcg

SEQ ID NO: 1593739 - DNA, 15 bp, Homo sapiens
ttttgccatttgagc

SEQ ID NO: 1593740 - DNA, 15 bp, Homo sapiens
tttttgccatttgag

SEQ ID NO: 1593741 - DNA, 15 bp, Homo sapiens
ctttttgccatttga

SEQ ID NO: 1593742 - DNA, 15 bp, Homo sapiens
actttttgccatttg

SEQ ID NO: 1593743 - DNA, 15 bp, Homo sapiens
aactttttgccattt

SEQ ID NO: 1593744 - DNA, 15 bp, Homo sapiens
caactttttgccatt

SEQ ID NO: 1593745 - DNA, 15 bp, Homo sapiens
gcaactttttgccat

SEQ ID NO: 1593746 - DNA, 15 bp, Homo sapiens
tgcaactttttgcca

SEQ ID NO: 1593747 - DNA, 15 bp, Homo sapiens
ttgcaactttttgcc

SEQ ID NO: 1593748 - DNA, 15 bp, Homo sapiens
tttgcaactttttgc

SEQ ID NO: 1593749 - DNA, 15 bp, Homo sapiens
ttttgcaactttttg

SEQ ID NO: 1593750 - DNA, 15 bp, Homo sapiens
attttgcaacttttt

SEQ ID NO: 1593751 - DNA, 15 bp, Homo sapiens
tattttgcaactttt

SEQ ID NO: 1593752 - DNA, 15 bp, Homo sapiens
ctattttgcaacttt

SEQ ID NO: 1593753 - DNA, 15 bp, Homo sapiens
tctattttgcaactt

SEQ ID NO: 1593754 - DNA, 15 bp, Homo sapiens
atctattttgcaact

SEQ ID NO: 1593755 - DNA, 15 bp, Homo sapiens
gatctattttgcaac

SEQ ID NO: 1593756 - DNA, 15 bp, Homo sapiens
cgatctattttgcaa

SEQ ID NO: 1593757 - DNA, 15 bp, Homo sapiens
tcgatctattttgca

SEQ ID NO: 1593758 - DNA, 15 bp, Homo sapiens
gtcgatctattttgc

SEQ ID NO: 1593759 - DNA, 15 bp, Homo sapiens
ggtcgatctattttg

SEQ ID NO: 1593760 - DNA, 15 bp, Homo sapiens
aggtcgatctatttt

SEQ ID NO: 1593761 - DNA, 15 bp, Homo sapiens
gaggtcgatctattt

SEQ ID NO: 1593762 - DNA, 15 bp, Homo sapiens
ggaggtcgatctatt

SEQ ID NO: 1593763 - DNA, 15 bp, Homo sapiens
gggaggtcgatctat

SEQ ID NO: 1593764 - DNA, 15 bp, Homo sapiens
tgggaggtcgatcta

SEQ ID NO: 1593765 - DNA, 15 bp, Homo sapiens
ctgggaggtcgatct

SEQ ID NO: 1593766 - DNA, 15 bp, Homo sapiens
tctgggaggtcgatc

SEQ ID NO: 1593767 - DNA, 15 bp, Homo sapiens
ctctgggaggtcgat

SEQ ID NO: 1593768 - DNA, 15 bp, Homo sapiens
tctctgggaggtcga

SEQ ID NO: 1593769 - DNA, 15 bp, Homo sapiens
ttctctgggaggtcg

SEQ ID NO: 1593770 - DNA, 15 bp, Homo sapiens
cttctctgggaggtc

SEQ ID NO: 1593771 - DNA, 15 bp, Homo sapiens
tcttctctgggaggt

SEQ ID NO: 1593772 - DNA, 15 bp, Homo sapiens
ctcttctctgggagg

SEQ ID NO: 1593773 - DNA, 15 bp, Homo sapiens
tctcttctctgggag

SEQ ID NO: 1593774 - DNA, 15 bp, Homo sapiens
gtctcttctctggga

SEQ ID NO: 1593775 - DNA, 15 bp, Homo sapiens
tgtctcttctctggg

SEQ ID NO: 1593776 - DNA, 15 bp, Homo sapiens
ctgtctcttctctgg

SEQ ID NO: 1593777 - DNA, 15 bp, Homo sapiens
gctctgtctcttctc

SEQ ID NO: 1593778 - DNA, 15 bp, Homo sapiens
agctctgtctcttct

SEQ ID NO: 1593779 - DNA, 15 bp, Homo sapiens
cagctctgtctcttc

SEQ ID NO: 1593780 - DNA, 15 bp, Homo sapiens
ccagctctgtctctt

SEQ ID NO: 1593781 - DNA, 15 bp, Homo sapiens
accagctctgtctct

SEQ ID NO: 1593782 - DNA, 15 bp, Homo sapiens
aaccagctctgtctc

SEQ ID NO: 1593783 - DNA, 15 bp, Homo sapiens
taaccagctctgtct

SEQ ID NO: 1593784 - DNA, 15 bp, Homo sapiens
gtaaccagctctgtc

SEQ ID NO: 1593785 - DNA, 15 bp, Homo sapiens
tgtaaccagctctgt

SEQ ID NO: 1593786 - DNA, 15 bp, Homo sapiens
ctgtaaccagctctg

SEQ ID NO: 1593787 - DNA, 15 bp, Homo sapiens
tctgtaaccagctct

SEQ ID NO: 1593788 - DNA, 15 bp, Homo sapiens
ctctgtaaccagctc

SEQ ID NO: 1593789 - DNA, 15 bp, Homo sapiens
cctctgtaaccagct

SEQ ID NO: 1593790 - DNA, 15 bp, Homo sapiens
acctctgtaaccagc

SEQ ID NO: 1593791 - DNA, 15 bp, Homo sapiens
gacctctgtaaccag

SEQ ID NO: 1593792 - DNA, 15 bp, Homo sapiens
agacctctgtaacca

SEQ ID NO: 1593793 - DNA, 15 bp, Homo sapiens
cagacctctgtaacc

SEQ ID NO: 1593794 - DNA, 15 bp, Homo sapiens
gcagacctctgtaac

SEQ ID NO: 1593795 - DNA, 15 bp, Homo sapiens
tgcagacctctgtaa

SEQ ID NO: 1593796 - DNA, 15 bp, Homo sapiens
gtgcagacctctgta

SEQ ID NO: 1593797 - DNA, 15 bp, Homo sapiens
ggtgcagacctctgt

SEQ ID NO: 1593798 - DNA, 15 bp, Homo sapiens
gggtgcagacctctg

SEQ ID NO: 1593799 - DNA, 15 bp, Homo sapiens
tgggtgcagacctct

SEQ ID NO: 1593800 - DNA, 15 bp, Homo sapiens
atgggtgcagacctc

SEQ ID NO: 1593801 - DNA, 15 bp, Homo sapiens
gatgggtgcagacct

SEQ ID NO: 1593802 - DNA, 15 bp, Homo sapiens
tgatgggtgcagacc

SEQ ID NO: 1593803 - DNA, 15 bp, Homo sapiens
atgatgggtgcagac

SEQ ID NO: 1593804 - DNA, 15 bp, Homo sapiens
gatgatgggtgcaga

SEQ ID NO: 1593805 - DNA, 15 bp, Homo sapiens
ggatgatgggtgcag

SEQ ID NO: 1593806 - DNA, 15 bp, Homo sapiens
aggatgatgggtgca

SEQ ID NO: 1593807 - DNA, 15 bp, Homo sapiens
aaggatgatgggtgc

SEQ ID NO: 1593808 - DNA, 15 bp, Homo sapiens
aaaggatgatgggtg

SEQ ID NO: 1593809 - DNA, 15 bp, Homo sapiens
aaaaggatgatgggt

SEQ ID NO: 1593810 - DNA, 15 bp, Homo sapiens
aaaaaggatgatggg

SEQ ID NO: 1593811 - DNA, 15 bp, Homo sapiens
aaaaaaggatgatgg

SEQ ID NO: 1593812 - DNA, 15 bp, Homo sapiens
gaaaaaaggatgatg

SEQ ID NO: 1593813 - DNA, 15 bp, Homo sapiens
tgaaaaaaggatgat

SEQ ID NO: 1593814 - DNA, 15 bp, Homo sapiens
ttgaaaaaaggatga

SEQ ID NO: 1593815 - DNA, 15 bp, Homo sapiens
attgaaaaaaggatg

SEQ ID NO: 1593816 - DNA, 15 bp, Homo sapiens
tattgaaaaaaggat

SEQ ID NO: 1593817 - DNA, 15 bp, Homo sapiens
gtattgaaaaaagga

SEQ ID NO: 1593818 - DNA, 15 bp, Homo sapiens
tgtattgaaaaaagg

SEQ ID NO: 1593819 - DNA, 15 bp, Homo sapiens
atgtattgaaaaaag

SEQ ID NO: 1593820 - DNA, 15 bp, Homo sapiens
aatgtattgaaaaaa

SEQ ID NO: 1593821 - DNA, 15 bp, Homo sapiens
aaatgtattgaaaaa

SEQ ID NO: 1593822 - DNA, 15 bp, Homo sapiens
aaaatgtattgaaaa

SEQ ID NO: 1593823 - DNA, 15 bp, Homo sapiens
taaaatgtattgaaa

SEQ ID NO: 1593824 - DNA, 15 bp, Homo sapiens
ttaaaatgtattgaa

SEQ ID NO: 1593825 - DNA, 15 bp, Homo sapiens
tttaaaatgtattga

SEQ ID NO: 1593826 - DNA, 15 bp, Homo sapiens
gtttaaaatgtattg

SEQ ID NO: 1593827 - DNA, 15 bp, Homo sapiens
tgtttaaaatgtatt

SEQ ID NO: 1593828 - DNA, 15 bp, Homo sapiens
ttgtttaaaatgtat

SEQ ID NO: 1593829 - DNA, 15 bp, Homo sapiens
cttgtttaaaatgta

SEQ ID NO: 1593830 - DNA, 15 bp, Homo sapiens
tcttgtttaaaatgt

SEQ ID NO: 1593831 - DNA, 15 bp, Homo sapiens
ctcttgtttaaaatg

SEQ ID NO: 1593832 - DNA, 15 bp, Homo sapiens
cctcttgtttaaaat

SEQ ID NO: 1593833 - DNA, 15 bp, Homo sapiens
tcctcttgtttaaaa

SEQ ID NO: 1593834 - DNA, 15 bp, Homo sapiens
atcctcttgtttaaa

SEQ ID NO: 1593835 - DNA, 15 bp, Homo sapiens
gatcctcttgtttaa

SEQ ID NO: 1593836 - DNA, 15 bp, Homo sapiens
agatcctcttgttta

SEQ ID NO: 1593837 - DNA, 15 bp, Homo sapiens
tagatcctcttgttt

SEQ ID NO: 1593838 - DNA, 15 bp, Homo sapiens
ctagatcctcttgtt

SEQ ID NO: 1593839 - DNA, 15 bp, Homo sapiens
gctagatcctcttgt

SEQ ID NO: 1593840 - DNA, 15 bp, Homo sapiens
cgctagatcctcttg

SEQ ID NO: 1593841 - DNA, 15 bp, Homo sapiens
tcgctagatcctctt

SEQ ID NO: 1593842 - DNA, 15 bp, Homo sapiens
ctcgctagatcctct

SEQ ID NO: 1593843 - DNA, 15 bp, Homo sapiens
actcgctagatcctc

SEQ ID NO: 1593844 - DNA, 15 bp, Homo sapiens
cactcgctagatcct

SEQ ID NO: 1593845 - DNA, 15 bp, Homo sapiens
tcactcgctagatcc

SEQ ID NO: 1593846 - DNA, 15 bp, Homo sapiens
atcactcgctagatc

SEQ ID NO: 1593847 - DNA, 15 bp, Homo sapiens
aatcactcgctagat

SEQ ID NO: 1593848 - DNA, 15 bp, Homo sapiens
gaatcactcgctaga

SEQ ID NO: 1593849 - DNA, 15 bp, Homo sapiens
agaatcactcgctag

SEQ ID NO: 1593850 - DNA, 15 bp, Homo sapiens
cagaatcactcgcta

SEQ ID NO: 1593851 - DNA, 15 bp, Homo sapiens
tcagaatcactcgct

SEQ ID NO: 1593852 - DNA, 15 bp, Homo sapiens
atcagaatcactcgc

SEQ ID NO: 1593853 - DNA, 15 bp, Homo sapiens
aatcagaatcactcg

SEQ ID NO: 1593854 - DNA, 15 bp, Homo sapiens
gaatcagaatcactc

SEQ ID NO: 1593855 - DNA, 15 bp, Homo sapiens
tgaatcagaatcact

SEQ ID NO: 1593856 - DNA, 15 bp, Homo sapiens
ttgaatcagaatcac

SEQ ID NO: 1593857 - DNA, 15 bp, Homo sapiens
attgaatcagaatca

SEQ ID NO: 1593858 - DNA, 15 bp, Homo sapiens
tattgaatcagaatc

SEQ ID NO: 1593859 - DNA, 15 bp, Homo sapiens
gtattgaatcagaat

SEQ ID NO: 1593860 - DNA, 15 bp, Homo sapiens
tgtattgaatcagaa

SEQ ID NO: 1593861 - DNA, 15 bp, Homo sapiens
gtgtattgaatcaga

SEQ ID NO: 1593862 - DNA, 15 bp, Homo sapiens
tgtgtattgaatcag

SEQ ID NO: 1593863 - DNA, 15 bp, Homo sapiens
atgtgtattgaatca

SEQ ID NO: 1593864 - DNA, 15 bp, Homo sapiens
tatgtgtattgaatc

SEQ ID NO: 1593865 - DNA, 15 bp, Homo sapiens
ttatgtgtattgaat

SEQ ID NO: 1593866 - DNA, 15 bp, Homo sapiens
attatgtgtattgaa

SEQ ID NO: 1593867 - DNA, 15 bp, Homo sapiens
gattatgtgtattga

SEQ ID NO: 1593868 - DNA, 15 bp, Homo sapiens
tgattatgtgtattg

SEQ ID NO: 1593869 - DNA, 15 bp, Homo sapiens
ctgattatgtgtatt

SEQ ID NO: 1593870 - DNA, 15 bp, Homo sapiens
actgattatgtgtat

SEQ ID NO: 1593871 - DNA, 15 bp, Homo sapiens
aactgattatgtgta

SEQ ID NO: 1593872 - DNA, 15 bp, Homo sapiens
aaactgattatgtgt

SEQ ID NO: 1593873 - DNA, 15 bp, Homo sapiens
caaactgattatgtg

SEQ ID NO: 1593874 - DNA, 15 bp, Homo sapiens
gcaaactgattatgt

SEQ ID NO: 1593875 - DNA, 15 bp, Homo sapiens
tgcaaactgattatg

SEQ ID NO: 1593876 - DNA, 15 bp, Homo sapiens
ttgcaaactgattat

SEQ ID NO: 1593877 - DNA, 15 bp, Homo sapiens
cttgcaaactgatta

SEQ ID NO: 1593878 - DNA, 15 bp, Homo sapiens
acttgcaaactgatt

SEQ ID NO: 1593879 - DNA, 15 bp, Homo sapiens
gacttgcaaactgat

SEQ ID NO: 1593880 - DNA, 15 bp, Homo sapiens
agacttgcaaactga

SEQ ID NO: 1593881 - DNA, 15 bp, Homo sapiens
aagacttgcaaactg

SEQ ID NO: 1593882 - DNA, 15 bp, Homo sapiens
taagacttgcaaact

SEQ ID NO: 1593883 - DNA, 15 bp, Homo sapiens
ataagacttgcaaac

SEQ ID NO: 1593884 - DNA, 15 bp, Homo sapiens
aataagacttgcaaa

SEQ ID NO: 1593885 - DNA, 15 bp, Homo sapiens
aaataagacttgcaa

SEQ ID NO: 1593886 - DNA, 15 bp, Homo sapiens
gaaataagacttgca

SEQ ID NO: 1593887 - DNA, 15 bp, Homo sapiens
ggaaataagacttgc

SEQ ID NO: 1593888 - DNA, 15 bp, Homo sapiens
tggaaataagacttg

SEQ ID NO: 1593889 - DNA, 15 bp, Homo sapiens
atggaaataagactt

SEQ ID NO: 1593890 - DNA, 15 bp, Homo sapiens
aatggaaataagact

SEQ ID NO: 1593891 - DNA, 15 bp, Homo sapiens
aaatggaaataagac

SEQ ID NO: 1593892 - DNA, 15 bp, Homo sapiens
caaatggaaataaga

SEQ ID NO: 1593893 - DNA, 15 bp, Homo sapiens
tcaaatggaaataag

SEQ ID NO: 1593894 - DNA, 15 bp, Homo sapiens
ttcaaatggaaataa

SEQ ID NO: 1593895 - DNA, 15 bp, Homo sapiens
tttcaaatggaaata

SEQ ID NO: 1593896 - DNA, 15 bp, Homo sapiens
ttttcaaatggaaat

SEQ ID NO: 1593897 - DNA, 15 bp, Homo sapiens
gttttcaaatggaaa

SEQ ID NO: 1593898 - DNA, 15 bp, Homo sapiens
tgttttcaaatggaa

SEQ ID NO: 1593899 - DNA, 15 bp, Homo sapiens
ctgttttcaaatgga

SEQ ID NO: 1593900 - DNA, 15 bp, Homo sapiens
cctgttttcaaatgg

SEQ ID NO: 1593901 - DNA, 15 bp, Homo sapiens
ccctgttttcaaatg

SEQ ID NO: 1593902 - DNA, 15 bp, Homo sapiens
gccctgttttcaaat

SEQ ID NO: 1593903 - DNA, 15 bp, Homo sapiens
ggccctgttttcaaa

SEQ ID NO: 1593904 - DNA, 15 bp, Homo sapiens
tggccctgttttcaa

SEQ ID NO: 1593905 - DNA, 15 bp, Homo sapiens
atggccctgttttca

SEQ ID NO: 1593906 - DNA, 15 bp, Homo sapiens
aatggccctgttttc

SEQ ID NO: 1593907 - DNA, 15 bp, Homo sapiens
aaatggccctgtttt

SEQ ID NO: 1593908 - DNA, 15 bp, Homo sapiens
caaatggccctgttt

SEQ ID NO: 1593909 - DNA, 15 bp, Homo sapiens
gcaaatggccctgtt

SEQ ID NO: 1593910 - DNA, 15 bp, Homo sapiens
tgcaaatggccctgt

SEQ ID NO: 1593911 - DNA, 15 bp, Homo sapiens
ttgcaaatggccctg

SEQ ID NO: 1593912 - DNA, 15 bp, Homo sapiens
attgcaaatggccct

SEQ ID NO: 1593913 - DNA, 15 bp, Homo sapiens
gattgcaaatggccc

SEQ ID NO: 1593914 - DNA, 15 bp, Homo sapiens
tgattgcaaatggcc

SEQ ID NO: 1593915 - DNA, 15 bp, Homo sapiens
atgattgcaaatggc

SEQ ID NO: 1593916 - DNA, 15 bp, Homo sapiens
tatgattgcaaatgg

SEQ ID NO: 1593917 - DNA, 15 bp, Homo sapiens
ttatgattgcaaatg

SEQ ID NO: 1593918 - DNA, 15 bp, Homo sapiens
cttatgattgcaaat

SEQ ID NO: 1593919 - DNA, 15 bp, Homo sapiens
tcttatgattgcaaa

SEQ ID NO: 1593920 - DNA, 15 bp, Homo sapiens
ctcttatgattgcaa

SEQ ID NO: 1593921 - DNA, 15 bp, Homo sapiens
gctcttatgattgca

SEQ ID NO: 1593922 - DNA, 15 bp, Homo sapiens
ggctcttatgattgc

SEQ ID NO: 1593923 - DNA, 15 bp, Homo sapiens
cggctcttatgattg

SEQ ID NO: 1593924 - DNA, 15 bp, Homo sapiens
ccggctcttatgatt

SEQ ID NO: 1593925 - DNA, 15 bp, Homo sapiens
tccggctcttatgat

SEQ ID NO: 1593926 - DNA, 15 bp, Homo sapiens
gtccggctcttatga

SEQ ID NO: 1593927 - DNA, 15 bp, Homo sapiens
tgtccggctcttatg

SEQ ID NO: 1593928 - DNA, 15 bp, Homo sapiens
gtgtccggctcttat

SEQ ID NO: 1593929 - DNA, 15 bp, Homo sapiens
cgtgtccggctctta

SEQ ID NO: 1593930 - DNA, 15 bp, Homo sapiens
gcgtgtccggctctt

SEQ ID NO: 1593931 - DNA, 15 bp, Homo sapiens
agcgtgtccggctct

SEQ ID NO: 1593932 - DNA, 15 bp, Homo sapiens
cagcgtgtccggctc

SEQ ID NO: 1593933 - DNA, 15 bp, Homo sapiens
tcagcgtgtccggct

SEQ ID NO: 1593934 - DNA, 15 bp, Homo sapiens
ttcagcgtgtccggc

SEQ ID NO: 1593935 - DNA, 15 bp, Homo sapiens
tttcagcgtgtccgg

SEQ ID NO: 1593936 - DNA, 15 bp, Homo sapiens
ctttcagcgtgtccg

SEQ ID NO: 1593937 - DNA, 15 bp, Homo sapiens
tctttcagcgtgtcc

SEQ ID NO: 1593938 - DNA, 15 bp, Homo sapiens
atctttcagcgtgtc

SEQ ID NO: 1593939 - DNA, 15 bp, Homo sapiens
gtatctttcagcgtg

SEQ ID NO: 1593940 - DNA, 15 bp, Homo sapiens
cgtatctttcagcgt

SEQ ID NO: 1593941 - DNA, 15 bp, Homo sapiens
ccgtatctttcagcg

SEQ ID NO: 1593942 - DNA, 15 bp, Homo sapiens
tccgtatctttcagc

SEQ ID NO: 1593943 - DNA, 15 bp, Homo sapiens
ctccgtatctttcag

SEQ ID NO: 1593944 - DNA, 15 bp, Homo sapiens
gctccgtatctttca

SEQ ID NO: 1593945 - DNA, 15 bp, Homo sapiens
cgctccgtatctttc

SEQ ID NO: 1593946 - DNA, 15 bp, Homo sapiens
gcgctccgtatcttt

SEQ ID NO: 1593947 - DNA, 15 bp, Homo sapiens
tgcgctccgtatctt

SEQ ID NO: 1593948 - DNA, 15 bp, Homo sapiens
atgcgctccgtatct

SEQ ID NO: 1593949 - DNA, 15 bp, Homo sapiens
aatgcgctccgtatc

SEQ ID NO: 1593950 - DNA, 15 bp, Homo sapiens
gaatgcgctccgtat

SEQ ID NO: 1593951 - DNA, 15 bp, Homo sapiens
ggaatgcgctccgta

SEQ ID NO: 1593952 - DNA, 15 bp, Homo sapiens
cggaatgcgctccgt

SEQ ID NO: 1593953 - DNA, 15 bp, Homo sapiens
tcggaatgcgctccg

SEQ ID NO: 1593954 - DNA, 15 bp, Homo sapiens
ctcggaatgcgctcc

SEQ ID NO: 1593955 - DNA, 15 bp, Homo sapiens
gctcggaatgcgctc

SEQ ID NO: 1593956 - DNA, 15 bp, Homo sapiens
tgctcggaatgcgct

SEQ ID NO: 1593957 - DNA, 15 bp, Homo sapiens
ctgctcggaatgcgc

SEQ ID NO: 1593958 - DNA, 15 bp, Homo sapiens
tctgctcggaatgcg

SEQ ID NO: 1593959 - DNA, 15 bp, Homo sapiens
atctgctcggaatgc

SEQ ID NO: 1593960 - DNA, 15 bp, Homo sapiens
catctgctcggaatg

SEQ ID NO: 1593961 - DNA, 15 bp, Homo sapiens
tcatctgctcggaat

SEQ ID NO: 1593962 - DNA, 15 bp, Homo sapiens
atcatctgctcggaa

SEQ ID NO: 1593963 - DNA, 15 bp, Homo sapiens
catcatctgctcgga

SEQ ID NO: 1593964 - DNA, 15 bp, Homo sapiens
ccatcatctgctcgg

SEQ ID NO: 1593965 - DNA, 15 bp, Homo sapiens
cccatcatctgctcg

SEQ ID NO: 1593966 - DNA, 15 bp, Homo sapiens
acccatcatctgctc

SEQ ID NO: 1593967 - DNA, 15 bp, Homo sapiens
cacccatcatctgct

SEQ ID NO: 1593968 - DNA, 15 bp, Homo sapiens
tcacccatcatctgc

SEQ ID NO: 1593969 - DNA, 15 bp, Homo sapiens
gtcacccatcatctg

SEQ ID NO: 1593970 - DNA, 15 bp, Homo sapiens
tgtcacccatcatct

SEQ ID NO: 1593971 - DNA, 15 bp, Homo sapiens
ctgtcacccatcatc

SEQ ID NO: 1593972 - DNA, 15 bp, Homo sapiens
tctgtcacccatcat

SEQ ID NO: 1593973 - DNA, 15 bp, Homo sapiens
ttctgtcacccatca

SEQ ID NO: 1593974 - DNA, 15 bp, Homo sapiens
attctgtcacccatc

SEQ ID NO: 1593975 - DNA, 15 bp, Homo sapiens
gattctgtcacccat

SEQ ID NO: 1593976 - DNA, 15 bp, Homo sapiens
agattctgtcaccca

SEQ ID NO: 1593977 - DNA, 15 bp, Homo sapiens
cagattctgtcaccc

SEQ ID NO: 1593978 - DNA, 15 bp, Homo sapiens
acagattctgtcacc

SEQ ID NO: 1593979 - DNA, 15 bp, Homo sapiens
tacagattctgtcac

SEQ ID NO: 1593980 - DNA, 15 bp, Homo sapiens
ctacagattctgtca

SEQ ID NO: 1593981 - DNA, 15 bp, Homo sapiens
cctacagattctgtc

SEQ ID NO: 1593982 - DNA, 15 bp, Homo sapiens
gcctacagattctgt

SEQ ID NO: 1593983 - DNA, 15 bp, Homo sapiens
tgcctacagattctg

SEQ ID NO: 1593984 - DNA, 15 bp, Homo sapiens
ttgcctacagattct

SEQ ID NO: 1593985 - DNA, 15 bp, Homo sapiens
cttgcctacagattc

SEQ ID NO: 1593986 - DNA, 15 bp, Homo sapiens
gcttgcctacagatt

SEQ ID NO: 1593987 - DNA, 15 bp, Homo sapiens
tgcttgcctacagat

SEQ ID NO: 1593988 - DNA, 15 bp, Homo sapiens
gtgcttgcctacaga

SEQ ID NO: 1593989 - DNA, 15 bp, Homo sapiens
agtgcttgcctacag

SEQ ID NO: 1593990 - DNA, 15 bp, Homo sapiens
tagtgcttgcctaca

SEQ ID NO: 1593991 - DNA, 15 bp, Homo sapiens
ttagtgcttgcctac

SEQ ID NO: 1593992 - DNA, 15 bp, Homo sapiens
tttagtgcttgccta

SEQ ID NO: 1593993 - DNA, 15 bp, Homo sapiens
atttagtgcttgcct

SEQ ID NO: 1593994 - DNA, 15 bp, Homo sapiens
tatttagtgcttgcc

SEQ ID NO: 1593995 - DNA, 15 bp, Homo sapiens
atatttagtgcttgc

SEQ ID NO: 1593996 - DNA, 15 bp, Homo sapiens
aatatttagtgcttg

SEQ ID NO: 1593997 - DNA, 15 bp, Homo sapiens
aaatatttagtgctt

SEQ ID NO: 1593998 - DNA, 15 bp, Homo sapiens
aaaatatttagtgct

SEQ ID NO: 1593999 - DNA, 15 bp, Homo sapiens
gaaaatatttagtgc

SEQ ID NO: 1594000 - DNA, 15 bp, Homo sapiens
agaaaatatttagtg

SEQ ID NO: 1594001 - DNA, 15 bp, Homo sapiens
aagaaaatatttagt

SEQ ID NO: 1594002 - DNA, 15 bp, Homo sapiens
gaagaaaatatttag

SEQ ID NO: 1594003 - DNA, 15 bp, Homo sapiens
ggaagaaaatattta

SEQ ID NO: 1594004 - DNA, 15 bp, Homo sapiens
tggaagaaaatattt

SEQ ID NO: 1594005 - DNA, 15 bp, Homo sapiens
ctggaagaaaatatt

SEQ ID NO: 1594006 - DNA, 15 bp, Homo sapiens
gctggaagaaaatat

SEQ ID NO: 1594007 - DNA, 15 bp, Homo sapiens
agctggaagaaaata

SEQ ID NO: 1594008 - DNA, 15 bp, Homo sapiens
aagctggaagaaaat

SEQ ID NO: 1594009 - DNA, 15 bp, Homo sapiens
gaagctggaagaaaa

SEQ ID NO: 1594010 - DNA, 15 bp, Homo sapiens
tgaagctggaagaaa

SEQ ID NO: 1594011 - DNA, 15 bp, Homo sapiens
ctgaagctggaagaa

SEQ ID NO: 1594012 - DNA, 15 bp, Homo sapiens
tctgaagctggaaga

SEQ ID NO: 1594013 - DNA, 15 bp, Homo sapiens
gtctgaagctggaag

SEQ ID NO: 1594014 - DNA, 15 bp, Homo sapiens
ggtctgaagctggaa

SEQ ID NO: 1594015 - DNA, 15 bp, Homo sapiens
aggtctgaagctgga

SEQ ID NO: 1594016 - DNA, 15 bp, Homo sapiens
aaggtctgaagctgg

SEQ ID NO: 1594017 - DNA, 15 bp, Homo sapiens
caaggtctgaagctg

SEQ ID NO: 1594018 - DNA, 15 bp, Homo sapiens
acaaggtctgaagct

SEQ ID NO: 1594019 - DNA, 15 bp, Homo sapiens
cacaaggtctgaagc

SEQ ID NO: 1594020 - DNA, 15 bp, Homo sapiens
gcacaaggtctgaag

SEQ ID NO: 1594021 - DNA, 15 bp, Homo sapiens
tgcacaaggtctgaa

SEQ ID NO: 1594022 - DNA, 15 bp, Homo sapiens
atgcacaaggtctga

SEQ ID NO: 1594023 - DNA, 15 bp, Homo sapiens
gatgcacaaggtctg

SEQ ID NO: 1594024 - DNA, 15 bp, Homo sapiens
tgatgcacaaggtct

SEQ ID NO: 1594025 - DNA, 15 bp, Homo sapiens
ctgatgcacaaggtc

SEQ ID NO: 1594026 - DNA, 15 bp, Homo sapiens
actgatgcacaaggt

SEQ ID NO: 1594027 - DNA, 15 bp, Homo sapiens
gactgatgcacaagg

SEQ ID NO: 1594028 - DNA, 15 bp, Homo sapiens
agactgatgcacaag

SEQ ID NO: 1594029 - DNA, 15 bp, Homo sapiens
aagactgatgcacaa

SEQ ID NO: 1594030 - DNA, 15 bp, Homo sapiens
gaagactgatgcaca

SEQ ID NO: 1594031 - DNA, 15 bp, Homo sapiens
agaagactgatgcac

SEQ ID NO: 1594032 - DNA, 15 bp, Homo sapiens
cagaagactgatgca

SEQ ID NO: 1594033 - DNA, 15 bp, Homo sapiens
acagaagactgatgc

SEQ ID NO: 1594034 - DNA, 15 bp, Homo sapiens
gacagaagactgatg

SEQ ID NO: 1594035 - DNA, 15 bp, Homo sapiens
ggacagaagactgat

SEQ ID NO: 1594036 - DNA, 15 bp, Homo sapiens
gggacagaagactga

SEQ ID NO: 1594037 - DNA, 15 bp, Homo sapiens
cgggacagaagactg

SEQ ID NO: 1594038 - DNA, 15 bp, Homo sapiens
tcgggacagaagact

SEQ ID NO: 1594039 - DNA, 15 bp, Homo sapiens
ttcgggacagaagac

SEQ ID NO: 1594040 - DNA, 15 bp, Homo sapiens
gttcgggacagaaga

SEQ ID NO: 1594041 - DNA, 15 bp, Homo sapiens
ggttcgggacagaag

SEQ ID NO: 1594042 - DNA, 15 bp, Homo sapiens
tggttcgggacagaa

SEQ ID NO: 1594043 - DNA, 15 bp, Homo sapiens
atggttcgggacaga

SEQ ID NO: 1594044 - DNA, 15 bp, Homo sapiens
aatggttcgggacag

SEQ ID NO: 1594045 - DNA, 15 bp, Homo sapiens
aaatggttcgggaca

SEQ ID NO: 1594046 - DNA, 15 bp, Homo sapiens
aaaatggttcgggac

SEQ ID NO: 1594047 - DNA, 15 bp, Homo sapiens
taaaatggttcggga

SEQ ID NO: 1594048 - DNA, 15 bp, Homo sapiens
ttaaaatggttcggg

SEQ ID NO: 1594049 - DNA, 15 bp, Homo sapiens
tttaaaatggttcgg

SEQ ID NO: 1594050 - DNA, 15 bp, Homo sapiens
atttaaaatggttcg

SEQ ID NO: 1594051 - DNA, 15 bp, Homo sapiens
catttaaaatggttc

SEQ ID NO: 1594052 - DNA, 15 bp, Homo sapiens
ccatttaaaatggtt

SEQ ID NO: 1594053 - DNA, 15 bp, Homo sapiens
tccatttaaaatggt

SEQ ID NO: 1594054 - DNA, 15 bp, Homo sapiens
ttccatttaaaatgg

SEQ ID NO: 1594055 - DNA, 15 bp, Homo sapiens
attccatttaaaatg

SEQ ID NO: 1594056 - DNA, 15 bp, Homo sapiens
cattccatttaaaat

SEQ ID NO: 1594057 - DNA, 15 bp, Homo sapiens
acattccatttaaaa

SEQ ID NO: 1594058 - DNA, 15 bp, Homo sapiens
aacattccatttaaa

SEQ ID NO: 1594059 - DNA, 15 bp, Homo sapiens
gaacattccatttaa

SEQ ID NO: 1594060 - DNA, 15 bp, Homo sapiens
ggaacattccattta

SEQ ID NO: 1594061 - DNA, 15 bp, Homo sapiens
aggaacattccattt

SEQ ID NO: 1594062 - DNA, 15 bp, Homo sapiens
caggaacattccatt

SEQ ID NO: 1594063 - DNA, 15 bp, Homo sapiens
acaggaacattccat

SEQ ID NO: 1594064 - DNA, 15 bp, Homo sapiens
aacaggaacattcca

SEQ ID NO: 1594065 - DNA, 15 bp, Homo sapiens
caacaggaacattcc

SEQ ID NO: 1594066 - DNA, 15 bp, Homo sapiens
tcaacaggaacattc

SEQ ID NO: 1594067 - DNA, 15 bp, Homo sapiens
ttcaacaggaacatt

SEQ ID NO: 1594068 - DNA, 15 bp, Homo sapiens
attcaacaggaacat

SEQ ID NO: 1594069 - DNA, 15 bp, Homo sapiens
tattcaacaggaaca

SEQ ID NO: 1594070 - DNA, 15 bp, Homo sapiens
atattcaacaggaac

SEQ ID NO: 1594071 - DNA, 15 bp, Homo sapiens
tatattcaacaggaa

SEQ ID NO: 1594072 - DNA, 15 bp, Homo sapiens
atatattcaacagga

SEQ ID NO: 1594073 - DNA, 15 bp, Homo sapiens
tatatattcaacagg

SEQ ID NO: 1594074 - DNA, 15 bp, Homo sapiens
ttatatattcaacag

SEQ ID NO: 1594075 - DNA, 15 bp, Homo sapiens
attatatattcaaca

SEQ ID NO: 1594076 - DNA, 15 bp, Homo sapiens
aattatatattcaac

SEQ ID NO: 1594077 - DNA, 15 bp, Homo sapiens
aaattatatattcaa

SEQ ID NO: 1594078 - DNA, 15 bp, Homo sapiens
taaattatatattca

SEQ ID NO: 1594079 - DNA, 15 bp, Homo sapiens
ttaaattatatattc

SEQ ID NO: 1594080 - DNA, 15 bp, Homo sapiens
attaaattatatatt

SEQ ID NO: 1594081 - DNA, 15 bp, Homo sapiens
aattaaattatatat

SEQ ID NO: 1594082 - DNA, 15 bp, Homo sapiens
caattaaattatata

SEQ ID NO: 1594083 - DNA, 15 bp, Homo sapiens
gcaattaaattatat

SEQ ID NO: 1594084 - DNA, 15 bp, Homo sapiens
agcaattaaattata

SEQ ID NO: 1594085 - DNA, 15 bp, Homo sapiens
aagcaattaaattat

SEQ ID NO: 1594086 - DNA, 15 bp, Homo sapiens
taagcaattaaatta

SEQ ID NO: 1594087 - DNA, 15 bp, Homo sapiens
ctaagcaattaaatt

SEQ ID NO: 1594088 - DNA, 15 bp, Homo sapiens
tctaagcaattaaat

SEQ ID NO: 1594089 - DNA, 15 bp, Homo sapiens
ttctaagcaattaaa

SEQ ID NO: 1594090 - DNA, 15 bp, Homo sapiens
tttctaagcaattaa

SEQ ID NO: 1594091 - DNA, 15 bp, Homo sapiens
ttttctaagcaatta

SEQ ID NO: 1594092 - DNA, 15 bp, Homo sapiens
attttctaagcaatt

SEQ ID NO: 1594093 - DNA, 15 bp, Homo sapiens
cattttctaagcaat

SEQ ID NO: 1594094 - DNA, 15 bp, Homo sapiens
ccattttctaagcaa

SEQ ID NO: 1594095 - DNA, 15 bp, Homo sapiens
tccattttctaagca

SEQ ID NO: 1594096 - DNA, 15 bp, Homo sapiens
ctccattttctaagc

SEQ ID NO: 1594097 - DNA, 15 bp, Homo sapiens
tctccattttctaag

SEQ ID NO: 1594098 - DNA, 15 bp, Homo sapiens
gtctccattttctaa

SEQ ID NO: 1594099 - DNA, 15 bp, Homo sapiens
agtctccattttcta

SEQ ID NO: 1594100 - DNA, 15 bp, Homo sapiens
gagtctccattttct

SEQ ID NO: 1594101 - DNA, 15 bp, Homo sapiens
ggagtctccattttc

SEQ ID NO: 1594102 - DNA, 15 bp, Homo sapiens
tggagtctccatttt

SEQ ID NO: 1594103 - DNA, 15 bp, Homo sapiens
atggagtctccattt

SEQ ID NO: 1594104 - DNA, 15 bp, Homo sapiens
catggagtctccatt

SEQ ID NO: 1594105 - DNA, 15 bp, Homo sapiens
ccatggagtctccat

SEQ ID NO: 1594106 - DNA, 15 bp, Homo sapiens
accatggagtctcca

SEQ ID NO: 1594107 - DNA, 15 bp, Homo sapiens
aaccatggagtctcc

SEQ ID NO: 1594108 - DNA, 15 bp, Homo sapiens
caaccatggagtctc

SEQ ID NO: 1594109 - DNA, 15 bp, Homo sapiens
ccaaccatggagtct

SEQ ID NO: 1594110 - DNA, 15 bp, Homo sapiens
cccaaccatggagtc

SEQ ID NO: 1594111 - DNA, 15 bp, Homo sapiens
tcccaaccatggagt

SEQ ID NO: 1594112 - DNA, 15 bp, Homo sapiens
ctcccaaccatggag

SEQ ID NO: 1594113 - DNA, 15 bp, Homo sapiens
cctcccaaccatgga

SEQ ID NO: 1594114 - DNA, 15 bp, Homo sapiens
tcctcccaaccatgg

SEQ ID NO: 1594115 - DNA, 15 bp, Homo sapiens
ttcctcccaaccatg

SEQ ID NO: 1594116 - DNA, 15 bp, Homo sapiens
tttcctcccaaccat

SEQ ID NO: 1594117 - DNA, 15 bp, Homo sapiens
ttttcctcccaacca

SEQ ID NO: 1594118 - DNA, 15 bp, Homo sapiens
tttttcctcccaacc

SEQ ID NO: 1594119 - DNA, 15 bp, Homo sapiens
ttttttcctcccaac

SEQ ID NO: 1594120 - DNA, 15 bp, Homo sapiens
gttttttcctcccaa

SEQ ID NO: 1594121 - DNA, 15 bp, Homo sapiens
ggttttttcctccca

SEQ ID NO: 1594122 - DNA, 15 bp, Homo sapiens
cggttttttcctccc

SEQ ID NO: 1594123 - DNA, 15 bp, Homo sapiens
ccggttttttcctcc

SEQ ID NO: 1594124 - DNA, 15 bp, Homo sapiens
gccggttttttcctc

SEQ ID NO: 1594125 - DNA, 15 bp, Homo sapiens
tgccggttttttcct

SEQ ID NO: 1594126 - DNA, 15 bp, Homo sapiens
ttgccggttttttcc

SEQ ID NO: 1594127 - DNA, 15 bp, Homo sapiens
cttgccggttttttc

SEQ ID NO: 1594128 - DNA, 15 bp, Homo sapiens
tcttgccggtttttt

SEQ ID NO: 1594129 - DNA, 15 bp, Homo sapiens
ttcttgccggttttt

SEQ ID NO: 1594130 - DNA, 15 bp, Homo sapiens
tttcttgccggtttt

SEQ ID NO: 1594131 - DNA, 15 bp, Homo sapiens
ctttcttgccggttt

SEQ ID NO: 1594132 - DNA, 15 bp, Homo sapiens
cctttcttgccggtt

SEQ ID NO: 1594133 - DNA, 15 bp, Homo sapiens
acctttcttgccggt

SEQ ID NO: 1594134 - DNA, 15 bp, Homo sapiens
cacctttcttgccgg

SEQ ID NO: 1594135 - DNA, 15 bp, Homo sapiens
tcacctttcttgccg

SEQ ID NO: 1594136 - DNA, 15 bp, Homo sapiens
gtcacctttcttgcc

SEQ ID NO: 1594137 - DNA, 15 bp, Homo sapiens
tgtcacctttcttgc

SEQ ID NO: 1594138 - DNA, 15 bp, Homo sapiens
ctgtcacctttcttg

SEQ ID NO: 1594139 - DNA, 15 bp, Homo sapiens
tctgtcacctttctt

SEQ ID NO: 1594140 - DNA, 15 bp, Homo sapiens
ctctgtcacctttct

SEQ ID NO: 1594141 - DNA, 15 bp, Homo sapiens
tctctgtcacctttc

SEQ ID NO: 1594142 - DNA, 15 bp, Homo sapiens
ttctctgtcaccttt

SEQ ID NO: 1594143 - DNA, 15 bp, Homo sapiens
tttctctgtcacctt

SEQ ID NO: 1594144 - DNA, 15 bp, Homo sapiens
gtttctctgtcacct

SEQ ID NO: 1594145 - DNA, 15 bp, Homo sapiens
agtttctctgtcacc

SEQ ID NO: 1594146 - DNA, 15 bp, Homo sapiens
tagtttctctgtcac

SEQ ID NO: 1594147 - DNA, 15 bp, Homo sapiens
atagtttctctgtca

SEQ ID NO: 1594148 - DNA, 15 bp, Homo sapiens
catagtttctctgtc

SEQ ID NO: 1594149 - DNA, 15 bp, Homo sapiens
acatagtttctctgt

SEQ ID NO: 1594150 - DNA, 15 bp, Homo sapiens
aacatagtttctctg

SEQ ID NO: 1594151 - DNA, 15 bp, Homo sapiens
caacatagtttctct

SEQ ID NO: 1594152 - DNA, 15 bp, Homo sapiens
tcaacatagtttctc

SEQ ID NO: 1594153 - DNA, 15 bp, Homo sapiens
atcaacatagtttct

SEQ ID NO: 1594154 - DNA, 15 bp, Homo sapiens
aatcaacatagtttc

SEQ ID NO: 1594155 - DNA, 15 bp, Homo sapiens
caatcaacatagttt

SEQ ID NO: 1594156 - DNA, 15 bp, Homo sapiens
acaatcaacatagtt

SEQ ID NO: 1594157 - DNA, 15 bp, Homo sapiens
cacaatcaacatagt

SEQ ID NO: 1594158 - DNA, 15 bp, Homo sapiens
gcacaatcaacatag

SEQ ID NO: 1594159 - DNA, 15 bp, Homo sapiens
agcacaatcaacata

SEQ ID NO: 1594160 - DNA, 15 bp, Homo sapiens
aagcacaatcaacat

SEQ ID NO: 1594161 - DNA, 15 bp, Homo sapiens
gaagcacaatcaaca

SEQ ID NO: 1594162 - DNA, 15 bp, Homo sapiens
agaagcacaatcaac

SEQ ID NO: 1594163 - DNA, 15 bp, Homo sapiens
gagaagcacaatcaa

SEQ ID NO: 1594164 - DNA, 15 bp, Homo sapiens
ggagaagcacaatca

SEQ ID NO: 1594165 - DNA, 15 bp, Homo sapiens
aggagaagcacaatc

SEQ ID NO: 1594166 - DNA, 15 bp, Homo sapiens
gaggagaagcacaat

SEQ ID NO: 1594167 - DNA, 15 bp, Homo sapiens
tgaggagaagcacaa

SEQ ID NO: 1594168 - DNA, 15 bp, Homo sapiens
ctgaggagaagcaca

SEQ ID NO: 1594169 - DNA, 15 bp, Homo sapiens
actgaggagaagcac

SEQ ID NO: 1594170 - DNA, 15 bp, Homo sapiens
tactgaggagaagca

SEQ ID NO: 1594171 - DNA, 15 bp, Homo sapiens
gtactgaggagaagc

SEQ ID NO: 1594172 - DNA, 15 bp, Homo sapiens
agtactgaggagaag

SEQ ID NO: 1594173 - DNA, 15 bp, Homo sapiens
cagtactgaggagaa

SEQ ID NO: 1594174 - DNA, 15 bp, Homo sapiens
ccagtactgaggaga

SEQ ID NO: 1594175 - DNA, 15 bp, Homo sapiens
accagtactgaggag

SEQ ID NO: 1594176 - DNA, 15 bp, Homo sapiens
aaccagtactgagga

SEQ ID NO: 1594177 - DNA, 15 bp, Homo sapiens
taaccagtactgagg

SEQ ID NO: 1594178 - DNA, 15 bp, Homo sapiens
ttaaccagtactgag

SEQ ID NO: 1594179 - DNA, 15 bp, Homo sapiens
gttaaccagtactga

SEQ ID NO: 1594180 - DNA, 15 bp, Homo sapiens
tgttaaccagtactg

SEQ ID NO: 1594181 - DNA, 15 bp, Homo sapiens
ctgttaaccagtact

SEQ ID NO: 1594182 - DNA, 15 bp, Homo sapiens
actgttaaccagtac

SEQ ID NO: 1594183 - DNA, 15 bp, Homo sapiens
gactgttaaccagta

SEQ ID NO: 1594184 - DNA, 15 bp, Homo sapiens
tgactgttaaccagt

SEQ ID NO: 1594185 - DNA, 15 bp, Homo sapiens
atgactgttaaccag

SEQ ID NO: 1594186 - DNA, 15 bp, Homo sapiens
aatgactgttaacca

SEQ ID NO: 1594187 - DNA, 15 bp, Homo sapiens
aaatgactgttaacc

SEQ ID NO: 1594188 - DNA, 15 bp, Homo sapiens
taaatgactgttaac

SEQ ID NO: 1594189 - DNA, 15 bp, Homo sapiens
ttaaatgactgttaa

SEQ ID NO: 1594190 - DNA, 15 bp, Homo sapiens
gttaaatgactgtta

SEQ ID NO: 1594191 - DNA, 15 bp, Homo sapiens
cgttaaatgactgtt

SEQ ID NO: 1594192 - DNA, 15 bp, Homo sapiens
tcgttaaatgactgt

SEQ ID NO: 1594193 - DNA, 15 bp, Homo sapiens
ttcgttaaatgactg

SEQ ID NO: 1594194 - DNA, 15 bp, Homo sapiens
cttcgttaaatgact

SEQ ID NO: 1594195 - DNA, 15 bp, Homo sapiens
tcttcgttaaatgac

SEQ ID NO: 1594196 - DNA, 15 bp, Homo sapiens
ctcttcgttaaatga

SEQ ID NO: 1594197 - DNA, 15 bp, Homo sapiens
actcttcgttaaatg

SEQ ID NO: 1594198 - DNA, 15 bp, Homo sapiens
gactcttcgttaaat

SEQ ID NO: 1594199 - DNA, 15 bp, Homo sapiens
agactcttcgttaaa

SEQ ID NO: 1594200 - DNA, 15 bp, Homo sapiens
tagactcttcgttaa

SEQ ID NO: 1594201 - DNA, 15 bp, Homo sapiens
gtagactcttcgtta

SEQ ID NO: 1594202 - DNA, 15 bp, Homo sapiens
ggtagactcttcgtt

SEQ ID NO: 1594203 - DNA, 15 bp, Homo sapiens
gggtagactcttcgt

SEQ ID NO: 1594204 - DNA, 15 bp, Homo sapiens
tgggtagactcttcg

SEQ ID NO: 1594205 - DNA, 15 bp, Homo sapiens
atgggtagactcttc

SEQ ID NO: 1594206 - DNA, 15 bp, Homo sapiens
aatgggtagactctt

SEQ ID NO: 1594207 - DNA, 15 bp, Homo sapiens
caatgggtagactct

SEQ ID NO: 1594208 - DNA, 15 bp, Homo sapiens
ccaatgggtagactc

SEQ ID NO: 1594209 - DNA, 15 bp, Homo sapiens
cccaatgggtagact

SEQ ID NO: 1594210 - DNA, 15 bp, Homo sapiens
acccaatgggtagac

SEQ ID NO: 1594211 - DNA, 15 bp, Homo sapiens
tacccaatgggtaga

SEQ ID NO: 1594212 - DNA, 15 bp, Homo sapiens
ctacccaatgggtag

SEQ ID NO: 1594213 - DNA, 15 bp, Homo sapiens
tctacccaatgggta

SEQ ID NO: 1594214 - DNA, 15 bp, Homo sapiens
ttctacccaatgggt

SEQ ID NO: 1594215 - DNA, 15 bp, Homo sapiens
cttctacccaatggg

SEQ ID NO: 1594216 - DNA, 15 bp, Homo sapiens
tcttctacccaatgg

SEQ ID NO: 1594217 - DNA, 15 bp, Homo sapiens
gtcttctacccaatg

SEQ ID NO: 1594218 - DNA, 15 bp, Homo sapiens
agtcttctacccaat

SEQ ID NO: 1594219 - DNA, 15 bp, Homo sapiens
aagtcttctacccaa

SEQ ID NO: 1594220 - DNA, 15 bp, Homo sapiens
caagtcttctaccca

SEQ ID NO: 1594221 - DNA, 15 bp, Homo sapiens
tcaagtcttctaccc

SEQ ID NO: 1594222 - DNA, 15 bp, Homo sapiens
atcaagtcttctacc

SEQ ID NO: 1594223 - DNA, 15 bp, Homo sapiens
catcaagtcttctac

SEQ ID NO: 1594224 - DNA, 15 bp, Homo sapiens
ccatcaagtcttcta

SEQ ID NO: 1594225 - DNA, 15 bp, Homo sapiens
tccatcaagtcttct

SEQ ID NO: 1594226 - DNA, 15 bp, Homo sapiens
ttccatcaagtcttc

SEQ ID NO: 1594227 - DNA, 15 bp, Homo sapiens
tttccatcaagtctt

SEQ ID NO: 1594228 - DNA, 15 bp, Homo sapiens
ttttccatcaagtct

SEQ ID NO: 1594229 - DNA, 15 bp, Homo sapiens
tttttccatcaagtc

SEQ ID NO: 1594230 - DNA, 15 bp, Homo sapiens
ttttttccatcaagt

SEQ ID NO: 1594231 - DNA, 15 bp, Homo sapiens
attttttccatcaag

SEQ ID NO: 1594232 - DNA, 15 bp, Homo sapiens
cattttttccatcaa

SEQ ID NO: 1594233 - DNA, 15 bp, Homo sapiens
tcattttttccatca

SEQ ID NO: 1594234 - DNA, 15 bp, Homo sapiens
ttcattttttccatc

SEQ ID NO: 1594235 - DNA, 15 bp, Homo sapiens
attcattttttccat

SEQ ID NO: 1594236 - DNA, 15 bp, Homo sapiens
aattcattttttcca

SEQ ID NO: 1594237 - DNA, 15 bp, Homo sapiens
caattcattttttcc

SEQ ID NO: 1594238 - DNA, 15 bp, Homo sapiens
ccaattcattttttc

SEQ ID NO: 1594239 - DNA, 15 bp, Homo sapiens
accaattcatttttt

SEQ ID NO: 1594240 - DNA, 15 bp, Homo sapiens
aaccaattcattttt

SEQ ID NO: 1594241 - DNA, 15 bp, Homo sapiens
aaaccaattcatttt

SEQ ID NO: 1594242 - DNA, 15 bp, Homo sapiens
aaaaccaattcattt

SEQ ID NO: 1594243 - DNA, 15 bp, Homo sapiens
aaaaaccaattcatt

SEQ ID NO: 1594244 - DNA, 15 bp, Homo sapiens
taaaaaccaattcat

SEQ ID NO: 1594245 - DNA, 15 bp, Homo sapiens
ttaaaaaccaattca

SEQ ID NO: 1594246 - DNA, 15 bp, Homo sapiens
tttaaaaaccaattc

SEQ ID NO: 1594247 - DNA, 15 bp, Homo sapiens
ctttaaaaaccaatt

SEQ ID NO: 1594248 - DNA, 15 bp, Homo sapiens
cctttaaaaaccaat

SEQ ID NO: 1594249 - DNA, 15 bp, Homo sapiens
tcctttaaaaaccaa

SEQ ID NO: 1594250 - DNA, 15 bp, Homo sapiens
ttcctttaaaaacca

SEQ ID NO: 1594251 - DNA, 15 bp, Homo sapiens
gttcctttaaaaacc

SEQ ID NO: 1594252 - DNA, 15 bp, Homo sapiens
tgttcctttaaaaac

SEQ ID NO: 1594253 - DNA, 15 bp, Homo sapiens
ttgttcctttaaaaa

SEQ ID NO: 1594254 - DNA, 15 bp, Homo sapiens
gttgttcctttaaaa

SEQ ID NO: 1594255 - DNA, 15 bp, Homo sapiens
ggttgttcctttaaa

SEQ ID NO: 1594256 - DNA, 15 bp, Homo sapiens
cggttgttcctttaa

SEQ ID NO: 1594257 - DNA, 15 bp, Homo sapiens
gcggttgttccttta

SEQ ID NO: 1594258 - DNA, 15 bp, Homo sapiens
ggcggttgttccttt

SEQ ID NO: 1594259 - DNA, 15 bp, Homo sapiens
tggcggttgttcctt

SEQ ID NO: 1594260 - DNA, 15 bp, Homo sapiens
ctggcggttgttcct

SEQ ID NO: 1594261 - DNA, 15 bp, Homo sapiens
tctggcggttgttcc

SEQ ID NO: 1594262 - DNA, 15 bp, Homo sapiens
ttctggcggttgttc

SEQ ID NO: 1594263 - DNA, 15 bp, Homo sapiens
cttctggcggttgtt

SEQ ID NO: 1594264 - DNA, 15 bp, Homo sapiens
ccttctggcggttgt

SEQ ID NO: 1594265 - DNA, 15 bp, Homo sapiens
cccttctggcggttg

SEQ ID NO: 1594266 - DNA, 15 bp, Homo sapiens
ccccttctggcggtt

SEQ ID NO: 1594267 - DNA, 15 bp, Homo sapiens
accccttctggcggt

SEQ ID NO: 1594268 - DNA, 15 bp, Homo sapiens
aaccccttctggcgg

SEQ ID NO: 1594269 - DNA, 15 bp, Homo sapiens
caaccccttctggcg

SEQ ID NO: 1594270 - DNA, 15 bp, Homo sapiens
gcaaccccttctggc

SEQ ID NO: 1594271 - DNA, 15 bp, Homo sapiens
ggcaaccccttctgg

SEQ ID NO: 1594272 - DNA, 15 bp, Homo sapiens
cggcaaccccttctg

SEQ ID NO: 1594273 - DNA, 15 bp, Homo sapiens
ccggcaaccccttct

SEQ ID NO: 1594274 - DNA, 15 bp, Homo sapiens
cccggcaaccccttc

SEQ ID NO: 1594275 - DNA, 15 bp, Homo sapiens
ccccggcaacccctt

SEQ ID NO: 1594276 - DNA, 15 bp, Homo sapiens
gccccggcaacccct

SEQ ID NO: 1594277 - DNA, 15 bp, Homo sapiens
agccccggcaacccc

SEQ ID NO: 1594278 - DNA, 15 bp, Homo sapiens
tagccccggcaaccc

SEQ ID NO: 1594279 - DNA, 15 bp, Homo sapiens
ttagccccggcaacc

SEQ ID NO: 1594280 - DNA, 15 bp, Homo sapiens
gttagccccggcaac

SEQ ID NO: 1594281 - DNA, 15 bp, Homo sapiens
tgttagccccggcaa

SEQ ID NO: 1594282 - DNA, 15 bp, Homo sapiens
atgttagccccggca

SEQ ID NO: 1594283 - DNA, 15 bp, Homo sapiens
aatgttagccccggc

SEQ ID NO: 1594284 - DNA, 15 bp, Homo sapiens
gaatgttagccccgg

SEQ ID NO: 1594285 - DNA, 15 bp, Homo sapiens
agaatgttagccccg

SEQ ID NO: 1594286 - DNA, 15 bp, Homo sapiens
gagaatgttagcccc

SEQ ID NO: 1594287 - DNA, 15 bp, Homo sapiens
tgagaatgttagccc

SEQ ID NO: 1594288 - DNA, 15 bp, Homo sapiens
ctgagaatgttagcc

SEQ ID NO: 1594289 - DNA, 15 bp, Homo sapiens
cctgagaatgttagc

SEQ ID NO: 1594290 - DNA, 15 bp, Homo sapiens
gcctgagaatgttag

SEQ ID NO: 1594291 - DNA, 15 bp, Homo sapiens
agcctgagaatgtta

SEQ ID NO: 1594292 - DNA, 15 bp, Homo sapiens
cagcctgagaatgtt

SEQ ID NO: 1594293 - DNA, 15 bp, Homo sapiens
ccagcctgagaatgt

SEQ ID NO: 1594294 - DNA, 15 bp, Homo sapiens
tccagcctgagaatg

SEQ ID NO: 1594295 - DNA, 15 bp, Homo sapiens
ctccagcctgagaat

SEQ ID NO: 1594296 - DNA, 15 bp, Homo sapiens
gctccagcctgagaa

SEQ ID NO: 1594297 - DNA, 15 bp, Homo sapiens
agctccagcctgaga

SEQ ID NO: 1594298 - DNA, 15 bp, Homo sapiens
cagctccagcctgag

SEQ ID NO: 1594299 - DNA, 15 bp, Homo sapiens
gcagctccagcctga

SEQ ID NO: 1594300 - DNA, 15 bp, Homo sapiens
tgcagctccagcctg

SEQ ID NO: 1594301 - DNA, 15 bp, Homo sapiens
ttgcagctccagcct

SEQ ID NO: 1594302 - DNA, 15 bp, Homo sapiens
tttgcagctccagcc

SEQ ID NO: 1594303 - DNA, 15 bp, Homo sapiens
ctttgcagctccagc

SEQ ID NO: 1594304 - DNA, 15 bp, Homo sapiens
gctttgcagctccag

SEQ ID NO: 1594305 - DNA, 15 bp, Homo sapiens
ggctttgcagctcca

SEQ ID NO: 1594306 - DNA, 15 bp, Homo sapiens
gggctttgcagctcc

SEQ ID NO: 1594307 - DNA, 15 bp, Homo sapiens
agggctttgcagctc

SEQ ID NO: 1594308 - DNA, 15 bp, Homo sapiens
cagggctttgcagct

SEQ ID NO: 1594309 - DNA, 15 bp, Homo sapiens
ccagggctttgcagc

SEQ ID NO: 1594310 - DNA, 15 bp, Homo sapiens
gccagggctttgcag

SEQ ID NO: 1594311 - DNA, 15 bp, Homo sapiens
agccagggctttgca

SEQ ID NO: 1594312 - DNA, 15 bp, Homo sapiens
cagccagggctttgc

SEQ ID NO: 1594313 - DNA, 15 bp, Homo sapiens
ccagccagggctttg

SEQ ID NO: 1594314 - DNA, 15 bp, Homo sapiens
cccagccagggcttt

SEQ ID NO: 1594315 - DNA, 15 bp, Homo sapiens
acccagccagggctt

SEQ ID NO: 1594316 - DNA, 15 bp, Homo sapiens
cacccagccagggct

SEQ ID NO: 1594317 - DNA, 15 bp, Homo sapiens
acacccagccagggc

SEQ ID NO: 1594318 - DNA, 15 bp, Homo sapiens
gccacacccagccag

SEQ ID NO: 1594319 - DNA, 15 bp, Homo sapiens
ggccacacccagcca

SEQ ID NO: 1594320 - DNA, 15 bp, Homo sapiens
cggccacacccagcc

SEQ ID NO: 1594321 - DNA, 15 bp, Homo sapiens
ccggccacacccagc

SEQ ID NO: 1594322 - DNA, 15 bp, Homo sapiens
cccggccacacccag

SEQ ID NO: 1594323 - DNA, 15 bp, Homo sapiens
tcccggccacaccca

SEQ ID NO: 1594324 - DNA, 15 bp, Homo sapiens
gtcccggccacaccc

SEQ ID NO: 1594325 - DNA, 15 bp, Homo sapiens
agtcccggccacacc

SEQ ID NO: 1594326 - DNA, 15 bp, Homo sapiens
cagtcccggccacac

SEQ ID NO: 1594327 - DNA, 15 bp, Homo sapiens
ccagtcccggccaca

SEQ ID NO: 1594328 - DNA, 15 bp, Homo sapiens
gccagtcccggccac

SEQ ID NO: 1594329 - DNA, 15 bp, Homo sapiens
cgccagtcccggcca

SEQ ID NO: 1594330 - DNA, 15 bp, Homo sapiens
ccgccagtcccggcc

SEQ ID NO: 1594331 - DNA, 15 bp, Homo sapiens
cccgccagtcccggc

SEQ ID NO: 1594332 - DNA, 15 bp, Homo sapiens
ccccgccagtcccgg

SEQ ID NO: 1594333 - DNA, 15 bp, Homo sapiens
tccccgccagtcccg

SEQ ID NO: 1594334 - DNA, 15 bp, Homo sapiens
ctccccgccagtccc

SEQ ID NO: 1594335 - DNA, 15 bp, Homo sapiens
actccccgccagtcc

SEQ ID NO: 1594336 - DNA, 15 bp, Homo sapiens
gactccccgccagtc

SEQ ID NO: 1594337 - DNA, 15 bp, Homo sapiens
agactccccgccagt

SEQ ID NO: 1594338 - DNA, 15 bp, Homo sapiens
cagactccccgccag

SEQ ID NO: 1594339 - DNA, 15 bp, Homo sapiens
gcagactccccgcca

SEQ ID NO: 1594340 - DNA, 15 bp, Homo sapiens
cgcagactccccgcc

SEQ ID NO: 1594341 - DNA, 15 bp, Homo sapiens
ccgcagactccccgc

SEQ ID NO: 1594342 - DNA, 15 bp, Homo sapiens
cccgcagactccccg

SEQ ID NO: 1594343 - DNA, 15 bp, Homo sapiens
ccccgcagactcccc

SEQ ID NO: 1594344 - DNA, 15 bp, Homo sapiens
gccccgcagactccc

SEQ ID NO: 1594345 - DNA, 15 bp, Homo sapiens
ggccccgcagactcc

SEQ ID NO: 1594346 - DNA, 15 bp, Homo sapiens
aggccccgcagactc

SEQ ID NO: 1594347 - DNA, 15 bp, Homo sapiens
aaggccccgcagact

SEQ ID NO: 1594348 - DNA, 15 bp, Homo sapiens
gaaggccccgcagac

SEQ ID NO: 1594349 - DNA, 15 bp, Homo sapiens
tgaaggccccgcaga

SEQ ID NO: 1594350 - DNA, 15 bp, Homo sapiens
ctgaaggccccgcag

SEQ ID NO: 1594351 - DNA, 15 bp, Homo sapiens
cctgaaggccccgca

SEQ ID NO: 1594352 - DNA, 15 bp, Homo sapiens
ccctgaaggccccgc

SEQ ID NO: 1594353 - DNA, 15 bp, Homo sapiens
tccctgaaggccccg

SEQ ID NO: 1594354 - DNA, 15 bp, Homo sapiens
ttccctgaaggcccc

SEQ ID NO: 1594355 - DNA, 15 bp, Homo sapiens
cttccctgaaggccc

SEQ ID NO: 1594356 - DNA, 15 bp, Homo sapiens
gcttccctgaaggcc

SEQ ID NO: 1594357 - DNA, 15 bp, Homo sapiens
ggcttccctgaaggc

SEQ ID NO: 1594358 - DNA, 15 bp, Homo sapiens
gggcttccctgaagg

SEQ ID NO: 1594359 - DNA, 15 bp, Homo sapiens
tgggcttccctgaag

SEQ ID NO: 1594360 - DNA, 15 bp, Homo sapiens
ctgggcttccctgaa

SEQ ID NO: 1594361 - DNA, 15 bp, Homo sapiens
cctgggcttccctga

SEQ ID NO: 1594362 - DNA, 15 bp, Homo sapiens
ccctgggcttccctg

SEQ ID NO: 1594363 - DNA, 15 bp, Homo sapiens
tccctgggcttccct

SEQ ID NO: 1594364 - DNA, 15 bp, Homo sapiens
gtccctgggcttccc

SEQ ID NO: 1594365 - DNA, 15 bp, Homo sapiens
tgtccctgggcttcc

SEQ ID NO: 1594366 - DNA, 15 bp, Homo sapiens
ttgtccctgggcttc

SEQ ID NO: 1594367 - DNA, 15 bp, Homo sapiens
gttgtccctgggctt

SEQ ID NO: 1594368 - DNA, 15 bp, Homo sapiens
agttgtccctgggct

SEQ ID NO: 1594369 - DNA, 15 bp, Homo sapiens
gagttgtccctgggc

SEQ ID NO: 1594370 - DNA, 15 bp, Homo sapiens
ggagttgtccctggg

SEQ ID NO: 1594371 - DNA, 15 bp, Homo sapiens
cggagttgtccctgg

SEQ ID NO: 1594372 - DNA, 15 bp, Homo sapiens
gcggagttgtccctg

SEQ ID NO: 1594373 - DNA, 15 bp, Homo sapiens
cgcggagttgtccct

SEQ ID NO: 1594374 - DNA, 15 bp, Homo sapiens
ccgcggagttgtccc

SEQ ID NO: 1594375 - DNA, 15 bp, Homo sapiens
gccgcggagttgtcc

SEQ ID NO: 1594376 - DNA, 15 bp, Homo sapiens
ggccgcggagttgtc

SEQ ID NO: 1594377 - DNA, 15 bp, Homo sapiens
aggccgcggagttgt

SEQ ID NO: 1594378 - DNA, 15 bp, Homo sapiens
gaggccgcggagttg

SEQ ID NO: 1594379 - DNA, 15 bp, Homo sapiens
ggaggccgcggagtt

SEQ ID NO: 1594380 - DNA, 15 bp, Homo sapiens
gggaggccgcggagt

SEQ ID NO: 1594381 - DNA, 15 bp, Homo sapiens
tgggaggccgcggag

SEQ ID NO: 1594382 - DNA, 15 bp, Homo sapiens
ttgggaggccgcgga

SEQ ID NO: 1594383 - DNA, 15 bp, Homo sapiens
gttgggaggccgcgg

SEQ ID NO: 1594384 - DNA, 15 bp, Homo sapiens
cgttgggaggccgcg

SEQ ID NO: 1594385 - DNA, 15 bp, Homo sapiens
tcgttgggaggccgc

SEQ ID NO: 1594386 - DNA, 15 bp, Homo sapiens
gtcgttgggaggccg

SEQ ID NO: 1594387 - DNA, 15 bp, Homo sapiens
cgtcgttgggaggcc

SEQ ID NO: 1594388 - DNA, 15 bp, Homo sapiens
gcgtcgttgggaggc

SEQ ID NO: 1594389 - DNA, 15 bp, Homo sapiens
ggcgtcgttgggagg

SEQ ID NO: 1594390 - DNA, 15 bp, Homo sapiens
cggcgtcgttgggag

SEQ ID NO: 1594391 - DNA, 15 bp, Homo sapiens
gcggcgtcgttggga

SEQ ID NO: 1594392 - DNA, 15 bp, Homo sapiens
ggcggcgtcgttggg

SEQ ID NO: 1594393 - DNA, 15 bp, Homo sapiens
tggcggcgtcgttgg

SEQ ID NO: 1594394 - DNA, 15 bp, Homo sapiens
ttggcggcgtcgttg

SEQ ID NO: 1594395 - DNA, 15 bp, Homo sapiens
tttggcggcgtcgtt

SEQ ID NO: 1594396 - DNA, 15 bp, Homo sapiens
ctttggcggcgtcgt

SEQ ID NO: 1594397 - DNA, 15 bp, Homo sapiens
tctttggcggcgtcg

SEQ ID NO: 1594398 - DNA, 15 bp, Homo sapiens
gtctttggcggcgtc

SEQ ID NO: 1594399 - DNA, 15 bp, Homo sapiens
ggtctttggcggcgt

SEQ ID NO: 1594400 - DNA, 15 bp, Homo sapiens
aggtctttggcggcg

SEQ ID NO: 1594401 - DNA, 15 bp, Homo sapiens
caggtctttggcggc

SEQ ID NO: 1594402 - DNA, 15 bp, Homo sapiens
ccaggtctttggcgg

SEQ ID NO: 1594403 - DNA, 15 bp, Homo sapiens
cccaggtctttggcg

SEQ ID NO: 1594404 - DNA, 15 bp, Homo sapiens
ccccaggtctttggc

SEQ ID NO: 1594405 - DNA, 15 bp, Homo sapiens
cccccaggtctttgg

SEQ ID NO: 1594406 - DNA, 15 bp, Homo sapiens
gcccccaggtctttg

SEQ ID NO: 1594407 - DNA, 15 bp, Homo sapiens
ggcccccaggtcttt

SEQ ID NO: 1594408 - DNA, 15 bp, Homo sapiens
gggcccccaggtctt

SEQ ID NO: 1594409 - DNA, 15 bp, Homo sapiens
ggggcccccaggtct

SEQ ID NO: 1594410 - DNA, 15 bp, Homo sapiens
aggggcccccaggtc

SEQ ID NO: 1594411 - DNA, 15 bp, Homo sapiens
gaggggcccccaggt

SEQ ID NO: 1594412 - DNA, 15 bp, Homo sapiens
cgaggggcccccagg

SEQ ID NO: 1594413 - DNA, 15 bp, Homo sapiens
gcgaggggcccccag

SEQ ID NO: 1594414 - DNA, 15 bp, Homo sapiens
cgcgaggggccccca

SEQ ID NO: 1594415 - DNA, 15 bp, Homo sapiens
ccgcgaggggccccc

SEQ ID NO: 1594416 - DNA, 15 bp, Homo sapiens
gccgcgaggggcccc

SEQ ID NO: 1594417 - DNA, 15 bp, Homo sapiens
ggccgcgaggggccc

SEQ ID NO: 1594418 - DNA, 15 bp, Homo sapiens
gggccgcgaggggcc

SEQ ID NO: 1594419 - DNA, 15 bp, Homo sapiens
cgggccgcgaggggc

SEQ ID NO: 1594420 - DNA, 15 bp, Homo sapiens
ccgggccgcgagggg

SEQ ID NO: 1594421 - DNA, 15 bp, Homo sapiens
gccgggccgcgaggg

SEQ ID NO: 1594422 - DNA, 15 bp, Homo sapiens
agccgggccgcgagg

SEQ ID NO: 1594423 - DNA, 15 bp, Homo sapiens
cagccgggccgcgag

SEQ ID NO: 1594424 - DNA, 15 bp, Homo sapiens
acagccgggccgcga

SEQ ID NO: 1594425 - DNA, 15 bp, Homo sapiens
aacagccgggccgcg

SEQ ID NO: 1594426 - DNA, 15 bp, Homo sapiens
gaacagccgggccgc

SEQ ID NO: 1594427 - DNA, 15 bp, Homo sapiens
ggaacagccgggccg

SEQ ID NO: 1594428 - DNA, 15 bp, Homo sapiens
cggaacagccgggcc

SEQ ID NO: 1594429 - DNA, 15 bp, Homo sapiens
tcggaacagccgggc

SEQ ID NO: 1594430 - DNA, 15 bp, Homo sapiens
ttcggaacagccggg

SEQ ID NO: 1594431 - DNA, 15 bp, Homo sapiens
attcggaacagccgg

SEQ ID NO: 1594432 - DNA, 15 bp, Homo sapiens
aattcggaacagccg

SEQ ID NO: 1594433 - DNA, 15 bp, Homo sapiens
caattcggaacagcc

SEQ ID NO: 1594434 - DNA, 15 bp, Homo sapiens
ccaattcggaacagc

SEQ ID NO: 1594435 - DNA, 15 bp, Homo sapiens
accaattcggaacag

SEQ ID NO: 1594436 - DNA, 15 bp, Homo sapiens
aaccaattcggaaca

SEQ ID NO: 1594437 - DNA, 15 bp, Homo sapiens
caaccaattcggaac

SEQ ID NO: 1594438 - DNA, 15 bp, Homo sapiens
gcaaccaattcggaa

SEQ ID NO: 1594439 - DNA, 15 bp, Homo sapiens
ggcaaccaattcgga

SEQ ID NO: 1594440 - DNA, 15 bp, Homo sapiens
tggcaaccaattcgg

SEQ ID NO: 1594441 - DNA, 15 bp, Homo sapiens
ttggcaaccaattcg

SEQ ID NO: 1594442 - DNA, 15 bp, Homo sapiens
tttggcaaccaattc

SEQ ID NO: 1594443 - DNA, 15 bp, Homo sapiens
atttggcaaccaatt

SEQ ID NO: 1594444 - DNA, 15 bp, Homo sapiens
catttggcaaccaat

SEQ ID NO: 1594445 - DNA, 15 bp, Homo sapiens
acatttggcaaccaa

SEQ ID NO: 1594446 - DNA, 15 bp, Homo sapiens
gacatttggcaacca

SEQ ID NO: 1594447 - DNA, 15 bp, Homo sapiens
agacatttggcaacc

SEQ ID NO: 1594448 - DNA, 15 bp, Homo sapiens
tagacatttggcaac

SEQ ID NO: 1594449 - DNA, 15 bp, Homo sapiens
ttagacatttggcaa

SEQ ID NO: 1594450 - DNA, 15 bp, Homo sapiens
tttagacatttggca

SEQ ID NO: 1594451 - DNA, 15 bp, Homo sapiens
gtttagacatttggc

SEQ ID NO: 1594452 - DNA, 15 bp, Homo sapiens
agtttagacatttgg

SEQ ID NO: 1594453 - DNA, 15 bp, Homo sapiens
tagtttagacatttg

SEQ ID NO: 1594454 - DNA, 15 bp, Homo sapiens
ctagtttagacattt

SEQ ID NO: 1594455 - DNA, 15 bp, Homo sapiens
tctagtttagacatt

SEQ ID NO: 1594456 - DNA, 15 bp, Homo sapiens
ttctagtttagacat

SEQ ID NO: 1594457 - DNA, 15 bp, Homo sapiens
cttctagtttagaca

SEQ ID NO: 1594458 - DNA, 15 bp, Homo sapiens
acttctagtttagac

SEQ ID NO: 1594459 - DNA, 15 bp, Homo sapiens
cacttctagtttaga

SEQ ID NO: 1594460 - DNA, 15 bp, Homo sapiens
acacttctagtttag

SEQ ID NO: 1594461 - DNA, 15 bp, Homo sapiens
cacacttctagttta

SEQ ID NO: 1594462 - DNA, 15 bp, Homo sapiens
ccacacttctagttt

SEQ ID NO: 1594463 - DNA, 15 bp, Homo sapiens
tccacacttctagtt

SEQ ID NO: 1594464 - DNA, 15 bp, Homo sapiens
gtccacacttctagt

SEQ ID NO: 1594465 - DNA, 15 bp, Homo sapiens
tgtccacacttctag

SEQ ID NO: 1594466 - DNA, 15 bp, Homo sapiens
gtgtccacacttcta

SEQ ID NO: 1594467 - DNA, 15 bp, Homo sapiens
agtgtccacacttct

SEQ ID NO: 1594468 - DNA, 15 bp, Homo sapiens
aagtgtccacacttc

SEQ ID NO: 1594469 - DNA, 15 bp, Homo sapiens
caagtgtccacactt

SEQ ID NO: 1594470 - DNA, 15 bp, Homo sapiens
tcaagtgtccacact

SEQ ID NO: 1594471 - DNA, 15 bp, Homo sapiens
ttcaagtgtccacac

SEQ ID NO: 1594472 - DNA, 15 bp, Homo sapiens
tttcaagtgtccaca

SEQ ID NO: 1594473 - DNA, 15 bp, Homo sapiens
atttcaagtgtccac

SEQ ID NO: 1594474 - DNA, 15 bp, Homo sapiens
gatttcaagtgtcca

SEQ ID NO: 1594475 - DNA, 15 bp, Homo sapiens
agatttcaagtgtcc

SEQ ID NO: 1594476 - DNA, 15 bp, Homo sapiens
gagatttcaagtgtc

SEQ ID NO: 1594477 - DNA, 15 bp, Homo sapiens
cgagatttcaagtgt

SEQ ID NO: 1594478 - DNA, 15 bp, Homo sapiens
tcgagatttcaagtg

SEQ ID NO: 1594479 - DNA, 15 bp, Homo sapiens
ctcgagatttcaagt

SEQ ID NO: 1594480 - DNA, 15 bp, Homo sapiens
gctcgagatttcaag

SEQ ID NO: 1594481 - DNA, 15 bp, Homo sapiens
agctcgagatttcaa

SEQ ID NO: 1594482 - DNA, 15 bp, Homo sapiens
cagctcgagatttca

SEQ ID NO: 1594483 - DNA, 15 bp, Homo sapiens
acagctcgagatttc

SEQ ID NO: 1594484 - DNA, 15 bp, Homo sapiens
gacagctcgagattt

SEQ ID NO: 1594485 - DNA, 15 bp, Homo sapiens
agacagctcgagatt

SEQ ID NO: 1594486 - DNA, 15 bp, Homo sapiens
aagacagctcgagat

SEQ ID NO: 1594487 - DNA, 15 bp, Homo sapiens
taagacagctcgaga

SEQ ID NO: 1594488 - DNA, 15 bp, Homo sapiens
ctaagacagctcgag

SEQ ID NO: 1594489 - DNA, 15 bp, Homo sapiens
cctaagacagctcga

SEQ ID NO: 1594490 - DNA, 15 bp, Homo sapiens
ccctaagacagctcg

SEQ ID NO: 1594491 - DNA, 15 bp, Homo sapiens
accctaagacagctc

SEQ ID NO: 1594492 - DNA, 15 bp, Homo sapiens
gaccctaagacagct

SEQ ID NO: 1594493 - DNA, 15 bp, Homo sapiens
agaccctaagacagc

SEQ ID NO: 1594494 - DNA, 15 bp, Homo sapiens
gagaccctaagacag

SEQ ID NO: 1594495 - DNA, 15 bp, Homo sapiens
agagaccctaagaca

SEQ ID NO: 1594496 - DNA, 15 bp, Homo sapiens
gagagaccctaagac

SEQ ID NO: 1594497 - DNA, 15 bp, Homo sapiens
cgagagaccctaaga

SEQ ID NO: 1594498 - DNA, 15 bp, Homo sapiens
gcgagagaccctaag

SEQ ID NO: 1594499 - DNA, 15 bp, Homo sapiens
agcgagagaccctaa

SEQ ID NO: 1594500 - DNA, 15 bp, Homo sapiens
tagcgagagacccta

SEQ ID NO: 1594501 - DNA, 15 bp, Homo sapiens
gtagcgagagaccct

SEQ ID NO: 1594502 - DNA, 15 bp, Homo sapiens
cgtagcgagagaccc

SEQ ID NO: 1594503 - DNA, 15 bp, Homo sapiens
tcgtagcgagagacc

SEQ ID NO: 1594504 - DNA, 15 bp, Homo sapiens
ttcgtagcgagagac

SEQ ID NO: 1594505 - DNA, 15 bp, Homo sapiens
tttcgtagcgagaga

SEQ ID NO: 1594506 - DNA, 15 bp, Homo sapiens
ctttcgtagcgagag

SEQ ID NO: 1594507 - DNA, 15 bp, Homo sapiens
actttcgtagcgaga

SEQ ID NO: 1594508 - DNA, 15 bp, Homo sapiens
aactttcgtagcgag

SEQ ID NO: 1594509 - DNA, 15 bp, Homo sapiens
aaactttcgtagcga

SEQ ID NO: 1594510 - DNA, 15 bp, Homo sapiens
caaactttcgtagcg

SEQ ID NO: 1594511 - DNA, 15 bp, Homo sapiens
ccaaactttcgtagc

SEQ ID NO: 1594512 - DNA, 15 bp, Homo sapiens
accaaactttcgtag

SEQ ID NO: 1594513 - DNA, 15 bp, Homo sapiens
aaccaaactttcgta

SEQ ID NO: 1594514 - DNA, 15 bp, Homo sapiens
aaaccaaactttcgt

SEQ ID NO: 1594515 - DNA, 15 bp, Homo sapiens
gaaaccaaactttcg

SEQ ID NO: 1594516 - DNA, 15 bp, Homo sapiens
agaaaccaaactttc

SEQ ID NO: 1594517 - DNA, 15 bp, Homo sapiens
tagaaaccaaacttt

SEQ ID NO: 1594518 - DNA, 15 bp, Homo sapiens
ctagaaaccaaactt

SEQ ID NO: 1594519 - DNA, 15 bp, Homo sapiens
cctagaaaccaaact

SEQ ID NO: 1594520 - DNA, 15 bp, Homo sapiens
tcctagaaaccaaac

SEQ ID NO: 1594521 - DNA, 15 bp, Homo sapiens
gtcctagaaaccaaa

SEQ ID NO: 1594522 - DNA, 15 bp, Homo sapiens
ggtcctagaaaccaa

SEQ ID NO: 1594523 - DNA, 15 bp, Homo sapiens
tggtcctagaaacca

SEQ ID NO: 1594524 - DNA, 15 bp, Homo sapiens
ttggtcctagaaacc

SEQ ID NO: 1594525 - DNA, 15 bp, Homo sapiens
cttggtcctagaaac

SEQ ID NO: 1594526 - DNA, 15 bp, Homo sapiens
ctcttggtcctagaa

SEQ ID NO: 1594527 - DNA, 15 bp, Homo sapiens
tctcttggtcctaga

SEQ ID NO: 1594528 - DNA, 15 bp, Homo sapiens
ttctcttggtcctag

SEQ ID NO: 1594529 - DNA, 15 bp, Homo sapiens
cttctcttggtccta

SEQ ID NO: 1594530 - DNA, 15 bp, Homo sapiens
gcttctcttggtcct

SEQ ID NO: 1594531 - DNA, 15 bp, Homo sapiens
tgcttctcttggtcc

SEQ ID NO: 1594532 - DNA, 15 bp, Homo sapiens
ctgcttctcttggtc

SEQ ID NO: 1594533 - DNA, 15 bp, Homo sapiens
gctgcttctcttggt

SEQ ID NO: 1594534 - DNA, 15 bp, Homo sapiens
agctgcttctcttgg

SEQ ID NO: 1594535 - DNA, 15 bp, Homo sapiens
cagctgcttctcttg

SEQ ID NO: 1594536 - DNA, 15 bp, Homo sapiens
acagctgcttctctt

SEQ ID NO: 1594537 - DNA, 15 bp, Homo sapiens
gacagctgcttctct

SEQ ID NO: 1594538 - DNA, 15 bp, Homo sapiens
ggacagctgcttctc

SEQ ID NO: 1594539 - DNA, 15 bp, Homo sapiens
gggacagctgcttct

SEQ ID NO: 1594540 - DNA, 15 bp, Homo sapiens
tgggacagctgcttc

SEQ ID NO: 1594541 - DNA, 15 bp, Homo sapiens
ctgggacagctgctt

SEQ ID NO: 1594542 - DNA, 15 bp, Homo sapiens
cctgggacagctgct

SEQ ID NO: 1594543 - DNA, 15 bp, Homo sapiens
gcctgggacagctgc

SEQ ID NO: 1594544 - DNA, 15 bp, Homo sapiens
ggcctgggacagctg

SEQ ID NO: 1594545 - DNA, 15 bp, Homo sapiens
aagggcctgggacag

SEQ ID NO: 1594546 - DNA, 15 bp, Homo sapiens
gaagggcctgggaca

SEQ ID NO: 1594547 - DNA, 15 bp, Homo sapiens
cgaagggcctgggac

SEQ ID NO: 1594548 - DNA, 15 bp, Homo sapiens
acgaagggcctggga

SEQ ID NO: 1594549 - DNA, 15 bp, Homo sapiens
aacgaagggcctggg

SEQ ID NO: 1594550 - DNA, 15 bp, Homo sapiens
aaacgaagggcctgg

SEQ ID NO: 1594551 - DNA, 15 bp, Homo sapiens
gaaacgaagggcctg

SEQ ID NO: 1594552 - DNA, 15 bp, Homo sapiens
ggaaacgaagggcct

SEQ ID NO: 1594553 - DNA, 15 bp, Homo sapiens
aggaaacgaagggcc

SEQ ID NO: 1594554 - DNA, 15 bp, Homo sapiens
caggaaacgaagggc

SEQ ID NO: 1594555 - DNA, 15 bp, Homo sapiens
acaggaaacgaaggg

SEQ ID NO: 1594556 - DNA, 15 bp, Homo sapiens
gacaggaaacgaagg

SEQ ID NO: 1594557 - DNA, 15 bp, Homo sapiens
ggacaggaaacgaag

SEQ ID NO: 1594558 - DNA, 15 bp, Homo sapiens
cggacaggaaacgaa

SEQ ID NO: 1594559 - DNA, 15 bp, Homo sapiens
gcggacaggaaacga

SEQ ID NO: 1594560 - DNA, 15 bp, Homo sapiens
tgcggacaggaaacg

SEQ ID NO: 1594561 - DNA, 15 bp, Homo sapiens
ctgcggacaggaaac

SEQ ID NO: 1594562 - DNA, 15 bp, Homo sapiens
gctgcggacaggaaa

SEQ ID NO: 1594563 - DNA, 15 bp, Homo sapiens
ggctgcggacaggaa

SEQ ID NO: 1594564 - DNA, 15 bp, Homo sapiens
aggctgcggacagga

SEQ ID NO: 1594565 - DNA, 15 bp, Homo sapiens
gaggctgcggacagg

SEQ ID NO: 1594566 - DNA, 15 bp, Homo sapiens
tgaggctgcggacag

SEQ ID NO: 1594567 - DNA, 15 bp, Homo sapiens
atgaggctgcggaca

SEQ ID NO: 1594568 - DNA, 15 bp, Homo sapiens
gatgaggctgcggac

SEQ ID NO: 1594569 - DNA, 15 bp, Homo sapiens
ggatgaggctgcgga

SEQ ID NO: 1594570 - DNA, 15 bp, Homo sapiens
aggatgaggctgcgg

SEQ ID NO: 1594571 - DNA, 15 bp, Homo sapiens
gaggatgaggctgcg

SEQ ID NO: 1594572 - DNA, 15 bp, Homo sapiens
ggaggatgaggctgc

SEQ ID NO: 1594573 - DNA, 15 bp, Homo sapiens
gggaggatgaggctg

SEQ ID NO: 1594574 - DNA, 15 bp, Homo sapiens
ggggaggatgaggct

SEQ ID NO: 1594575 - DNA, 15 bp, Homo sapiens
cggggaggatgaggc

SEQ ID NO: 1594576 - DNA, 15 bp, Homo sapiens
gcggggaggatgagg

SEQ ID NO: 1594577 - DNA, 15 bp, Homo sapiens
tgcggggaggatgag

SEQ ID NO: 1594578 - DNA, 15 bp, Homo sapiens
gtgcggggaggatga

SEQ ID NO: 1594579 - DNA, 15 bp, Homo sapiens
ggtgcggggaggatg

SEQ ID NO: 1594580 - DNA, 15 bp, Homo sapiens
gggtgcggggaggat

SEQ ID NO: 1594581 - DNA, 15 bp, Homo sapiens
ggggtgcggggagga

SEQ ID NO: 1594582 - DNA, 15 bp, Homo sapiens
gggggtgcggggagg

SEQ ID NO: 1594583 - DNA, 15 bp, Homo sapiens
ggggggtgcggggag

SEQ ID NO: 1594584 - DNA, 15 bp, Homo sapiens
tggggggtgcgggga

SEQ ID NO: 1594585 - DNA, 15 bp, Homo sapiens
ctggggggtgcgggg

SEQ ID NO: 1594586 - DNA, 15 bp, Homo sapiens
gctggggggtgcggg

SEQ ID NO: 1594587 - DNA, 15 bp, Homo sapiens
agctggggggtgcgg

SEQ ID NO: 1594588 - DNA, 15 bp, Homo sapiens
gagctggggggtgcg

SEQ ID NO: 1594589 - DNA, 15 bp, Homo sapiens
agagctggggggtgc

SEQ ID NO: 1594590 - DNA, 15 bp, Homo sapiens
gagagctggggggtg

SEQ ID NO: 1594591 - DNA, 15 bp, Homo sapiens
tgagagctggggggt

SEQ ID NO: 1594592 - DNA, 15 bp, Homo sapiens
ctgagagctgggggg

SEQ ID NO: 1594593 - DNA, 15 bp, Homo sapiens
actgagagctggggg

SEQ ID NO: 1594594 - DNA, 15 bp, Homo sapiens
gactgagagctgggg

SEQ ID NO: 1594595 - DNA, 15 bp, Homo sapiens
agactgagagctggg

SEQ ID NO: 1594596 - DNA, 15 bp, Homo sapiens
gagactgagagctgg

SEQ ID NO: 1594597 - DNA, 15 bp, Homo sapiens
ggagactgagagctg

SEQ ID NO: 1594598 - DNA, 15 bp, Homo sapiens
gggagactgagagct

SEQ ID NO: 1594599 - DNA, 15 bp, Homo sapiens
ggggagactgagagc

SEQ ID NO: 1594600 - DNA, 15 bp, Homo sapiens
tggggagactgagag

SEQ ID NO: 1594601 - DNA, 15 bp, Homo sapiens
ctggggagactgaga

SEQ ID NO: 1594602 - DNA, 15 bp, Homo sapiens
actggggagactgag

SEQ ID NO: 1594603 - DNA, 15 bp, Homo sapiens
gactggggagactga

SEQ ID NO: 1594604 - DNA, 15 bp, Homo sapiens
ggactggggagactg

SEQ ID NO: 1594605 - DNA, 15 bp, Homo sapiens
gggactggggagact

SEQ ID NO: 1594606 - DNA, 15 bp, Homo sapiens
tgggactggggagac

SEQ ID NO: 1594607 - DNA, 15 bp, Homo sapiens
ctgggactggggaga

SEQ ID NO: 1594608 - DNA, 15 bp, Homo sapiens
actgggactggggag

SEQ ID NO: 1594609 - DNA, 15 bp, Homo sapiens
gactgggactgggga

SEQ ID NO: 1594610 - DNA, 15 bp, Homo sapiens
ggactgggactgggg

SEQ ID NO: 1594611 - DNA, 15 bp, Homo sapiens
aggactgggactggg

SEQ ID NO: 1594612 - DNA, 15 bp, Homo sapiens
aaggactgggactgg

SEQ ID NO: 1594613 - DNA, 15 bp, Homo sapiens
taaggactgggactg

SEQ ID NO: 1594614 - DNA, 15 bp, Homo sapiens
gtaaggactgggact

SEQ ID NO: 1594615 - DNA, 15 bp, Homo sapiens
ggtaaggactgggac

SEQ ID NO: 1594616 - DNA, 15 bp, Homo sapiens
gggtaaggactggga

SEQ ID NO: 1594617 - DNA, 15 bp, Homo sapiens
ggggtaaggactggg

SEQ ID NO: 1594618 - DNA, 15 bp, Homo sapiens
cggggtaaggactgg

SEQ ID NO: 1594619 - DNA, 15 bp, Homo sapiens
acggggtaaggactg

SEQ ID NO: 1594620 - DNA, 15 bp, Homo sapiens
gacggggtaaggact

SEQ ID NO: 1594621 - DNA, 15 bp, Homo sapiens
ggacggggtaaggac

SEQ ID NO: 1594622 - DNA, 15 bp, Homo sapiens
tggacggggtaagga

SEQ ID NO: 1594623 - DNA, 15 bp, Homo sapiens
gtggacggggtaagg

SEQ ID NO: 1594624 - DNA, 15 bp, Homo sapiens
ggtggacggggtaag

SEQ ID NO: 1594625 - DNA, 15 bp, Homo sapiens
gggtggacggggtaa

SEQ ID NO: 1594626 - DNA, 15 bp, Homo sapiens
cgggtggacggggta

SEQ ID NO: 1594627 - DNA, 15 bp, Homo sapiens
gcgggtggacggggt

SEQ ID NO: 1594628 - DNA, 15 bp, Homo sapiens
cgcgggtggacgggg

SEQ ID NO: 1594629 - DNA, 15 bp, Homo sapiens
ccgcgggtggacggg

SEQ ID NO: 1594630 - DNA, 15 bp, Homo sapiens
gccgcgggtggacgg

SEQ ID NO: 1594631 - DNA, 15 bp, Homo sapiens
ggccgcgggtggacg

SEQ ID NO: 1594632 - DNA, 15 bp, Homo sapiens
aggccgcgggtggac

SEQ ID NO: 1594633 - DNA, 15 bp, Homo sapiens
gaggccgcgggtgga

SEQ ID NO: 1594634 - DNA, 15 bp, Homo sapiens
agaggccgcgggtgg

SEQ ID NO: 1594635 - DNA, 15 bp, Homo sapiens
gagaggccgcgggtg

SEQ ID NO: 1594636 - DNA, 15 bp, Homo sapiens
agagaggccgcgggt

SEQ ID NO: 1594637 - DNA, 15 bp, Homo sapiens
gagagaggccgcggg

SEQ ID NO: 1594638 - DNA, 15 bp, Homo sapiens
ggagagaggccgcgg

SEQ ID NO: 1594639 - DNA, 15 bp, Homo sapiens
gggagagaggccgcg

SEQ ID NO: 1594640 - DNA, 15 bp, Homo sapiens
tgggagagaggccgc

SEQ ID NO: 1594641 - DNA, 15 bp, Homo sapiens
ttgggagagaggccg

SEQ ID NO: 1594642 - DNA, 15 bp, Homo sapiens
gttgggagagaggcc

SEQ ID NO: 1594643 - DNA, 15 bp, Homo sapiens
tgttgggagagaggc

SEQ ID NO: 1594644 - DNA, 15 bp, Homo sapiens
gtgttgggagagagg

SEQ ID NO: 1594645 - DNA, 15 bp, Homo sapiens
ggtgttgggagagag

SEQ ID NO: 1594646 - DNA, 15 bp, Homo sapiens
gggtgttgggagaga

SEQ ID NO: 1594647 - DNA, 15 bp, Homo sapiens
tgggtgttgggagag

SEQ ID NO: 1594648 - DNA, 15 bp, Homo sapiens
ctgggtgttgggaga

SEQ ID NO: 1594649 - DNA, 15 bp, Homo sapiens
gctgggtgttgggag

SEQ ID NO: 1594650 - DNA, 15 bp, Homo sapiens
ggctgggtgttggga

SEQ ID NO: 1594651 - DNA, 15 bp, Homo sapiens
cggctgggtgttggg

SEQ ID NO: 1594652 - DNA, 15 bp, Homo sapiens
ccggctgggtgttgg

SEQ ID NO: 1594653 - DNA, 15 bp, Homo sapiens
gccggctgggtgttg

SEQ ID NO: 1594654 - DNA, 15 bp, Homo sapiens
tgccggctgggtgtt

SEQ ID NO: 1594655 - DNA, 15 bp, Homo sapiens
ctgccggctgggtgt

SEQ ID NO: 1594656 - DNA, 15 bp, Homo sapiens
gctgccggctgggtg

SEQ ID NO: 1594657 - DNA, 15 bp, Homo sapiens
ggctgccggctgggt

SEQ ID NO: 1594658 - DNA, 15 bp, Homo sapiens
aggctgccggctggg

SEQ ID NO: 1594659 - DNA, 15 bp, Homo sapiens
gaggctgccggctgg

SEQ ID NO: 1594660 - DNA, 15 bp, Homo sapiens
cgaggctgccggctg

SEQ ID NO: 1594661 - DNA, 15 bp, Homo sapiens
gcgaggctgccggct

SEQ ID NO: 1594662 - DNA, 15 bp, Homo sapiens
agcgaggctgccggc

SEQ ID NO: 1594663 - DNA, 15 bp, Homo sapiens
gagcgaggctgccgg

SEQ ID NO: 1594664 - DNA, 15 bp, Homo sapiens
agagcgaggctgccg

SEQ ID NO: 1594665 - DNA, 15 bp, Homo sapiens
gagagcgaggctgcc

SEQ ID NO: 1594666 - DNA, 15 bp, Homo sapiens
cgagagcgaggctgc

SEQ ID NO: 1594667 - DNA, 15 bp, Homo sapiens
ccgagagcgaggctg

SEQ ID NO: 1594668 - DNA, 15 bp, Homo sapiens
gccgagagcgaggct

SEQ ID NO: 1594669 - DNA, 15 bp, Homo sapiens
ggccgagagcgaggc

SEQ ID NO: 1594670 - DNA, 15 bp, Homo sapiens
gggccgagagcgagg

SEQ ID NO: 1594671 - DNA, 15 bp, Homo sapiens
ggggccgagagcgag

SEQ ID NO: 1594672 - DNA, 15 bp, Homo sapiens
gggggccgagagcga

SEQ ID NO: 1594673 - DNA, 15 bp, Homo sapiens
cgggggccgagagcg

SEQ ID NO: 1594674 - DNA, 15 bp, Homo sapiens
gcgggggccgagagc

SEQ ID NO: 1594675 - DNA, 15 bp, Homo sapiens
ggcgggggccgagag

SEQ ID NO: 1594676 - DNA, 15 bp, Homo sapiens
gggcgggggccgaga

SEQ ID NO: 1594677 - DNA, 15 bp, Homo sapiens
cgggcgggggccgag

SEQ ID NO: 1594678 - DNA, 15 bp, Homo sapiens
gcgggcgggggccga

SEQ ID NO: 1594679 - DNA, 15 bp, Homo sapiens
ggcgggcgggggccg

SEQ ID NO: 1594680 - DNA, 15 bp, Homo sapiens
gggcgggcgggggcc

SEQ ID NO: 1594681 - DNA, 15 bp, Homo sapiens
ggggcgggcgggggc

SEQ ID NO: 1594682 - DNA, 15 bp, Homo sapiens
cggggcgggcggggg

SEQ ID NO: 1594683 - DNA, 15 bp, Homo sapiens
acgcggggcgggcgg

SEQ ID NO: 1594684 - DNA, 15 bp, Homo sapiens
gacgcggggcgggcg

SEQ ID NO: 1594685 - DNA, 15 bp, Homo sapiens
agacgcggggcgggc

SEQ ID NO: 1594686 - DNA, 15 bp, Homo sapiens
gagacgcggggcggg

SEQ ID NO: 1594687 - DNA, 15 bp, Homo sapiens
ggagacgcggggcgg

SEQ ID NO: 1594688 - DNA, 15 bp, Homo sapiens
cggagacgcggggcg

SEQ ID NO: 1594689 - DNA, 15 bp, Homo sapiens
gcggagacgcggggc

SEQ ID NO: 1594690 - DNA, 15 bp, Homo sapiens
cgcggagacgcgggg

SEQ ID NO: 1594691 - DNA, 15 bp, Homo sapiens
acgcggagacgcggg

SEQ ID NO: 1594692 - DNA, 15 bp, Homo sapiens
tacgcggagacgcgg

SEQ ID NO: 1594693 - DNA, 15 bp, Homo sapiens
gtacgcggagacgcg

SEQ ID NO: 1594694 - DNA, 15 bp, Homo sapiens
ggtacgcggagacgc

SEQ ID NO: 1594695 - DNA, 15 bp, Homo sapiens
gggtacgcggagacg

SEQ ID NO: 1594696 - DNA, 15 bp, Homo sapiens
tgggtacgcggagac

SEQ ID NO: 1594697 - DNA, 15 bp, Homo sapiens
ctgggtacgcggaga

SEQ ID NO: 1594698 - DNA, 15 bp, Homo sapiens
cctgggtacgcggag

SEQ ID NO: 1594699 - DNA, 15 bp, Homo sapiens
acctgggtacgcgga

SEQ ID NO: 1594700 - DNA, 15 bp, Homo sapiens
gacctgggtacgcgg

SEQ ID NO: 1594701 - DNA, 15 bp, Homo sapiens
ggacctgggtacgcg

SEQ ID NO: 1594702 - DNA, 15 bp, Homo sapiens
gggacctgggtacgc

SEQ ID NO: 1594703 - DNA, 15 bp, Homo sapiens
ggggacctgggtacg

SEQ ID NO: 1594704 - DNA, 15 bp, Homo sapiens
cggggacctgggtac

SEQ ID NO: 1594705 - DNA, 15 bp, Homo sapiens
gcggggacctgggta

SEQ ID NO: 1594706 - DNA, 15 bp, Homo sapiens
cgcggggacctgggt

SEQ ID NO: 1594707 - DNA, 15 bp, Homo sapiens
gcgcggggacctggg

SEQ ID NO: 1594708 - DNA, 15 bp, Homo sapiens
ggcgcggggacctgg

SEQ ID NO: 1594709 - DNA, 15 bp, Homo sapiens
gggcgcggggacctg

SEQ ID NO: 1594710 - DNA, 15 bp, Homo sapiens
ggggcgcggggacct

SEQ ID NO: 1594711 - DNA, 15 bp, Homo sapiens
cggggcgcggggacc

SEQ ID NO: 1594712 - DNA, 15 bp, Homo sapiens
gcggggcgcggggac

SEQ ID NO: 1594713 - DNA, 15 bp, Homo sapiens
ggcggggcgcgggga

SEQ ID NO: 1594714 - DNA, 15 bp, Homo sapiens
aggggcggggcgggg

SEQ ID NO: 1594715 - DNA, 15 bp, Homo sapiens
caggggcggggcggg

SEQ ID NO: 1594716 - DNA, 15 bp, Homo sapiens
gcaggggcggggcgg

SEQ ID NO: 1594717 - DNA, 15 bp, Homo sapiens
ggcaggggcggggcg

SEQ ID NO: 1594718 - DNA, 15 bp, Homo sapiens
gggcaggggcggggc

SEQ ID NO: 1594719 - DNA, 15 bp, Homo sapiens
tgggcaggggcgggg

SEQ ID NO: 1594720 - DNA, 15 bp, Homo sapiens
ctgggcaggggcggg

SEQ ID NO: 1594721 - DNA, 15 bp, Homo sapiens
cctgggcaggggcgg

SEQ ID NO: 1594722 - DNA, 15 bp, Homo sapiens
acctgggcaggggcg

SEQ ID NO: 1594723 - DNA, 15 bp, Homo sapiens
aacctgggcaggggc

SEQ ID NO: 1594724 - DNA, 15 bp, Homo sapiens
gaacctgggcagggg

SEQ ID NO: 1594725 - DNA, 15 bp, Homo sapiens
agaacctgggcaggg

SEQ ID NO: 1594726 - DNA, 15 bp, Homo sapiens
gagaacctgggcagg

SEQ ID NO: 1594727 - DNA, 15 bp, Homo sapiens
ggagaacctgggcag

SEQ ID NO: 1594728 - DNA, 15 bp, Homo sapiens
gggagaacctgggca

SEQ ID NO: 1594729 - DNA, 15 bp, Homo sapiens
agggagaacctgggc

SEQ ID NO: 1594730 - DNA, 15 bp, Homo sapiens
gagggagaacctggg

SEQ ID NO: 1594731 - DNA, 15 bp, Homo sapiens
ggagggagaacctgg

SEQ ID NO: 1594732 - DNA, 15 bp, Homo sapiens
gggagggagaacctg

SEQ ID NO: 1594733 - DNA, 15 bp, Homo sapiens
cgggagggagaacct

SEQ ID NO: 1594734 - DNA, 15 bp, Homo sapiens
acgggagggagaacc

SEQ ID NO: 1594735 - DNA, 15 bp, Homo sapiens
aacgggagggagaac

SEQ ID NO: 1594736 - DNA, 15 bp, Homo sapiens
gaacgggagggagaa

SEQ ID NO: 1594737 - DNA, 15 bp, Homo sapiens
ggaacgggagggaga

SEQ ID NO: 1594738 - DNA, 15 bp, Homo sapiens
gggaacgggagggag

SEQ ID NO: 1594739 - DNA, 15 bp, Homo sapiens
cgggaacgggaggga

SEQ ID NO: 1594740 - DNA, 15 bp, Homo sapiens
gcgggaacgggaggg

SEQ ID NO: 1594741 - DNA, 15 bp, Homo sapiens
cgcgggaacgggagg

SEQ ID NO: 1594742 - DNA, 15 bp, Homo sapiens
gcgcgggaacgggag

SEQ ID NO: 1594743 - DNA, 15 bp, Homo sapiens
agcgcgggaacggga

SEQ ID NO: 1594744 - DNA, 15 bp, Homo sapiens
cagcgcgggaacggg

SEQ ID NO: 1594745 - DNA, 15 bp, Homo sapiens
ccagcgcgggaacgg

SEQ ID NO: 1594746 - DNA, 15 bp, Homo sapiens
cccagcgcgggaacg

SEQ ID NO: 1594747 - DNA, 15 bp, Homo sapiens
tcccagcgcgggaac

SEQ ID NO: 1594748 - DNA, 15 bp, Homo sapiens
ttcccagcgcgggaa

SEQ ID NO: 1594749 - DNA, 15 bp, Homo sapiens
gttcccagcgcggga

SEQ ID NO: 1594750 - DNA, 15 bp, Homo sapiens
tgttcccagcgcggg

SEQ ID NO: 1594751 - DNA, 15 bp, Homo sapiens
ctgttcccagcgcgg

SEQ ID NO: 1594752 - DNA, 15 bp, Homo sapiens
gctgttcccagcgcg

SEQ ID NO: 1594753 - DNA, 15 bp, Homo sapiens
ggctgttcccagcgc

SEQ ID NO: 1594754 - DNA, 15 bp, Homo sapiens
aggctgttcccagcg

SEQ ID NO: 1594755 - DNA, 15 bp, Homo sapiens
gaggctgttcccagc

SEQ ID NO: 1594756 - DNA, 15 bp, Homo sapiens
cgaggctgttcccag

SEQ ID NO: 1594757 - DNA, 15 bp, Homo sapiens
ccgaggctgttccca

SEQ ID NO: 1594758 - DNA, 15 bp, Homo sapiens
gccgaggctgttccc

SEQ ID NO: 1594759 - DNA, 15 bp, Homo sapiens
ggccgaggctgttcc

SEQ ID NO: 1594760 - DNA, 15 bp, Homo sapiens
cggccgaggctgttc

SEQ ID NO: 1594761 - DNA, 15 bp, Homo sapiens
gcggccgaggctgtt

SEQ ID NO: 1594762 - DNA, 15 bp, Homo sapiens
cgcggccgaggctgt

SEQ ID NO: 1594763 - DNA, 15 bp, Homo sapiens
gcgcggccgaggctg

SEQ ID NO: 1594764 - DNA, 15 bp, Homo sapiens
cgcgcggccgaggct

SEQ ID NO: 1594765 - DNA, 15 bp, Homo sapiens
gcgcgcggccgaggc

SEQ ID NO: 1594766 - DNA, 15 bp, Homo sapiens
ggcgcgcggccgagg

SEQ ID NO: 1594767 - DNA, 15 bp, Homo sapiens
gggcgcgcggccgag

SEQ ID NO: 1594768 - DNA, 15 bp, Homo sapiens
ggggcgcgcggccga

SEQ ID NO: 1594769 - DNA, 15 bp, Homo sapiens
gggggcgcgcggccg

SEQ ID NO: 1594770 - DNA, 15 bp, Homo sapiens
agggggcgcgcggcc

SEQ ID NO: 1594771 - DNA, 15 bp, Homo sapiens
cagggggcgcgcggc

SEQ ID NO: 1594772 - DNA, 15 bp, Homo sapiens
tcagggggcgcgcgg

SEQ ID NO: 1594773 - DNA, 15 bp, Homo sapiens
ctcagggggcgcgcg

SEQ ID NO: 1594774 - DNA, 15 bp, Homo sapiens
cctcagggggcgcgc

SEQ ID NO: 1594775 - DNA, 15 bp, Homo sapiens
tcctcagggggcgcg

SEQ ID NO: 1594776 - DNA, 15 bp, Homo sapiens
gtcctcagggggcgc

SEQ ID NO: 1594777 - DNA, 15 bp, Homo sapiens
cgtcctcagggggcg

SEQ ID NO: 1594778 - DNA, 15 bp, Homo sapiens
gcgtcctcagggggc

SEQ ID NO: 1594779 - DNA, 15 bp, Homo sapiens
cgcgtcctcaggggg

SEQ ID NO: 1594780 - DNA, 15 bp, Homo sapiens
ccgcgtcctcagggg

SEQ ID NO: 1594781 - DNA, 15 bp, Homo sapiens
gccgcgtcctcaggg

SEQ ID NO: 1594782 - DNA, 15 bp, Homo sapiens
ggccgcgtcctcagg

SEQ ID NO: 1594783 - DNA, 15 bp, Homo sapiens
gggccgcgtcctcag

SEQ ID NO: 1594784 - DNA, 15 bp, Homo sapiens
ggggccgcgtcctca

SEQ ID NO: 1594785 - DNA, 15 bp, Homo sapiens
gggggccgcgtcctc

SEQ ID NO: 1594786 - DNA, 15 bp, Homo sapiens
tgggggccgcgtcct

SEQ ID NO: 1594787 - DNA, 15 bp, Homo sapiens
ttgggggccgcgtcc

SEQ ID NO: 1594788 - DNA, 15 bp, Homo sapiens
gttgggggccgcgtc

SEQ ID NO: 1594789 - DNA, 15 bp, Homo sapiens
ggttgggggccgcgt

SEQ ID NO: 1594790 - DNA, 15 bp, Homo sapiens
gggttgggggccgcg

SEQ ID NO: 1594791 - DNA, 15 bp, Homo sapiens
ggggttgggggccgc

SEQ ID NO: 1594792 - DNA, 15 bp, Homo sapiens
aggggttgggggccg

SEQ ID NO: 1594793 - DNA, 15 bp, Homo sapiens
gaggggttgggggcc

SEQ ID NO: 1594794 - DNA, 15 bp, Homo sapiens
ggaggggttgggggc

SEQ ID NO: 1594795 - DNA, 15 bp, Homo sapiens
aggaggggttggggg

SEQ ID NO: 1594796 - DNA, 15 bp, Homo sapiens
caggaggggttgggg

SEQ ID NO: 1594797 - DNA, 15 bp, Homo sapiens
ccaggaggggttggg

SEQ ID NO: 1594798 - DNA, 15 bp, Homo sapiens
tccaggaggggttgg

SEQ ID NO: 1594799 - DNA, 15 bp, Homo sapiens
ctccaggaggggttg

SEQ ID NO: 1594800 - DNA, 15 bp, Homo sapiens
tctccaggaggggtt

SEQ ID NO: 1594801 - DNA, 15 bp, Homo sapiens
gtctccaggaggggt

SEQ ID NO: 1594802 - DNA, 15 bp, Homo sapiens
ggtctccaggagggg

SEQ ID NO: 1594803 - DNA, 15 bp, Homo sapiens
tggtctccaggaggg

SEQ ID NO: 1594804 - DNA, 15 bp, Homo sapiens
gtggtctccaggagg

SEQ ID NO: 1594805 - DNA, 15 bp, Homo sapiens
tgtggtctccaggag

SEQ ID NO: 1594806 - DNA, 15 bp, Homo sapiens
gtgtggtctccagga

SEQ ID NO: 1594807 - DNA, 15 bp, Homo sapiens
ggtgtggtctccagg

SEQ ID NO: 1594808 - DNA, 15 bp, Homo sapiens
cggtgtggtctccag

SEQ ID NO: 1594809 - DNA, 15 bp, Homo sapiens
ccggtgtggtctcca

SEQ ID NO: 1594810 - DNA, 15 bp, Homo sapiens
gccggtgtggtctcc

SEQ ID NO: 1594811 - DNA, 15 bp, Homo sapiens
tgccggtgtggtctc

SEQ ID NO: 1594812 - DNA, 15 bp, Homo sapiens
ttgccggtgtggtct

SEQ ID NO: 1594813 - DNA, 15 bp, Homo sapiens
cttgccggtgtggtc

SEQ ID NO: 1594814 - DNA, 15 bp, Homo sapiens
acttgccggtgtggt

SEQ ID NO: 1594815 - DNA, 15 bp, Homo sapiens
gacttgccggtgtgg

SEQ ID NO: 1594816 - DNA, 15 bp, Homo sapiens
agacttgccggtgtg

SEQ ID NO: 1594817 - DNA, 15 bp, Homo sapiens
cagacttgccggtgt

SEQ ID NO: 1594818 - DNA, 15 bp, Homo sapiens
ccagacttgccggtg

SEQ ID NO: 1594819 - DNA, 15 bp, Homo sapiens
accagacttgccggt

SEQ ID NO: 1594820 - DNA, 15 bp, Homo sapiens
caccagacttgccgg

SEQ ID NO: 1594821 - DNA, 15 bp, Homo sapiens
acaccagacttgccg

SEQ ID NO: 1594822 - DNA, 15 bp, Homo sapiens
cacaccagacttgcc

SEQ ID NO: 1594823 - DNA, 15 bp, Homo sapiens
gcacaccagacttgc

SEQ ID NO: 1594824 - DNA, 15 bp, Homo sapiens
cgcacaccagacttg

SEQ ID NO: 1594825 - DNA, 15 bp, Homo sapiens
ccgcacaccagactt

SEQ ID NO: 1594826 - DNA, 15 bp, Homo sapiens
tccgcacaccagact

SEQ ID NO: 1594827 - DNA, 15 bp, Homo sapiens
ttccgcacaccagac

SEQ ID NO: 1594828 - DNA, 15 bp, Homo sapiens
cttccgcacaccaga

SEQ ID NO: 1594829 - DNA, 15 bp, Homo sapiens
tcttccgcacaccag

SEQ ID NO: 1594830 - DNA, 15 bp, Homo sapiens
ctcttccgcacacca

SEQ ID NO: 1594831 - DNA, 15 bp, Homo sapiens
gctcttccgcacacc

SEQ ID NO: 1594832 - DNA, 15 bp, Homo sapiens
tgctcttccgcacac

SEQ ID NO: 1594833 - DNA, 15 bp, Homo sapiens
ctgctcttccgcaca

SEQ ID NO: 1594834 - DNA, 15 bp, Homo sapiens
tctgctcttccgcac

SEQ ID NO: 1594835 - DNA, 15 bp, Homo sapiens
ttctgctcttccgca

SEQ ID NO: 1594836 - DNA, 15 bp, Homo sapiens
tttctgctcttccgc

SEQ ID NO: 1594837 - DNA, 15 bp, Homo sapiens
gtttctgctcttccg

SEQ ID NO: 1594838 - DNA, 15 bp, Homo sapiens
agtttctgctcttcc

SEQ ID NO: 1594839 - DNA, 15 bp, Homo sapiens
aagtttctgctcttc

SEQ ID NO: 1594840 - DNA, 15 bp, Homo sapiens
gaagtttctgctctt

SEQ ID NO: 1594841 - DNA, 15 bp, Homo sapiens
ggaagtttctgctct

SEQ ID NO: 1594842 - DNA, 15 bp, Homo sapiens
aggaagtttctgctc

SEQ ID NO: 1594843 - DNA, 15 bp, Homo sapiens
gaggaagtttctgct

SEQ ID NO: 1594844 - DNA, 15 bp, Homo sapiens
cgaggaagtttctgc

SEQ ID NO: 1594845 - DNA, 15 bp, Homo sapiens
ccgaggaagtttctg

SEQ ID NO: 1594846 - DNA, 15 bp, Homo sapiens
tccgaggaagtttct

SEQ ID NO: 1594847 - DNA, 15 bp, Homo sapiens
ttccgaggaagtttc

SEQ ID NO: 1594848 - DNA, 15 bp, Homo sapiens
attccgaggaagttt

SEQ ID NO: 1594849 - DNA, 15 bp, Homo sapiens
aattccgaggaagtt

SEQ ID NO: 1594850 - DNA, 15 bp, Homo sapiens
aaattccgaggaagt

SEQ ID NO: 1594851 - DNA, 15 bp, Homo sapiens
gaaattccgaggaag

SEQ ID NO: 1594852 - DNA, 15 bp, Homo sapiens
cgaaattccgaggaa

SEQ ID NO: 1594853 - DNA, 15 bp, Homo sapiens
tcgaaattccgagga

SEQ ID NO: 1594854 - DNA, 15 bp, Homo sapiens
atcgaaattccgagg

SEQ ID NO: 1594855 - DNA, 15 bp, Homo sapiens
gatcgaaattccgag

SEQ ID NO: 1594856 - DNA, 15 bp, Homo sapiens
ggatcgaaattccga

SEQ ID NO: 1594857 - DNA, 15 bp, Homo sapiens
gggatcgaaattccg

SEQ ID NO: 1594858 - DNA, 15 bp, Homo sapiens
tgggatcgaaattcc

SEQ ID NO: 1594859 - DNA, 15 bp, Homo sapiens
ctgggatcgaaattc

SEQ ID NO: 1594860 - DNA, 15 bp, Homo sapiens
tctgggatcgaaatt

SEQ ID NO: 1594861 - DNA, 15 bp, Homo sapiens
ttctgggatcgaaat

SEQ ID NO: 1594862 - DNA, 15 bp, Homo sapiens
attctgggatcgaaa

SEQ ID NO: 1594863 - DNA, 15 bp, Homo sapiens
tattctgggatcgaa

SEQ ID NO: 1594864 - DNA, 15 bp, Homo sapiens
atattctgggatcga

SEQ ID NO: 1594865 - DNA, 15 bp, Homo sapiens
tatattctgggatcg

SEQ ID NO: 1594866 - DNA, 15 bp, Homo sapiens
gtatattctgggatc

SEQ ID NO: 1594867 - DNA, 15 bp, Homo sapiens
tgtatattctgggat

SEQ ID NO: 1594868 - DNA, 15 bp, Homo sapiens
ttgtatattctggga

SEQ ID NO: 1594869 - DNA, 15 bp, Homo sapiens
tttgtatattctggg

SEQ ID NO: 1594870 - DNA, 15 bp, Homo sapiens
atttgtatattctgg

SEQ ID NO: 1594871 - DNA, 15 bp, Homo sapiens
tatttgtatattctg

SEQ ID NO: 1594872 - DNA, 15 bp, Homo sapiens
atatttgtatattct

SEQ ID NO: 1594873 - DNA, 15 bp, Homo sapiens
aatatttgtatattc

SEQ ID NO: 1594874 - DNA, 15 bp, Homo sapiens
taatatttgtatatt

SEQ ID NO: 1594875 - DNA, 15 bp, Homo sapiens
ctaatatttgtatat

SEQ ID NO: 1594876 - DNA, 15 bp, Homo sapiens
actaatatttgtata

SEQ ID NO: 1594877 - DNA, 15 bp, Homo sapiens
aactaatatttgtat

SEQ ID NO: 1594878 - DNA, 15 bp, Homo sapiens
gaactaatatttgta

SEQ ID NO: 1594879 - DNA, 15 bp, Homo sapiens
tgaactaatatttgt

SEQ ID NO: 1594880 - DNA, 15 bp, Homo sapiens
gtgaactaatatttg

SEQ ID NO: 1594881 - DNA, 15 bp, Homo sapiens
agtgaactaatattt

SEQ ID NO: 1594882 - DNA, 15 bp, Homo sapiens
tagtgaactaatatt

SEQ ID NO: 1594883 - DNA, 15 bp, Homo sapiens
ctagtgaactaatat

SEQ ID NO: 1594884 - DNA, 15 bp, Homo sapiens
gagcccccgggcaag

SEQ ID NO: 1594885 - DNA, 15 bp, Homo sapiens
tgagcccccgggcaa

SEQ ID NO: 1594886 - DNA, 15 bp, Homo sapiens
ctgagcccccgggca

SEQ ID NO: 1594887 - DNA, 15 bp, Homo sapiens
actgagcccccgggc

SEQ ID NO: 1594888 - DNA, 15 bp, Homo sapiens
cactgagcccccggg

SEQ ID NO: 1594889 - DNA, 15 bp, Homo sapiens
acactgagcccccgg

SEQ ID NO: 1594890 - DNA, 15 bp, Homo sapiens
cacactgagcccccg

SEQ ID NO: 1594891 - DNA, 15 bp, Homo sapiens
ccacactgagccccc

SEQ ID NO: 1594892 - DNA, 15 bp, Homo sapiens
tccacactgagcccc

SEQ ID NO: 1594893 - DNA, 15 bp, Homo sapiens
ctccacactgagccc

SEQ ID NO: 1594894 - DNA, 15 bp, Homo sapiens
tctccacactgagcc

SEQ ID NO: 1594895 - DNA, 15 bp, Homo sapiens
ctctccacactgagc

SEQ ID NO: 1594896 - DNA, 15 bp, Homo sapiens
tctctccacactgag

SEQ ID NO: 1594897 - DNA, 15 bp, Homo sapiens
ttctctccacactga

SEQ ID NO: 1594898 - DNA, 15 bp, Homo sapiens
cttctctccacactg

SEQ ID NO: 1594899 - DNA, 15 bp, Homo sapiens
ccttctctccacact

SEQ ID NO: 1594900 - DNA, 15 bp, Homo sapiens
tccttctctccacac

SEQ ID NO: 1594901 - DNA, 15 bp, Homo sapiens
ctccttctctccaca

SEQ ID NO: 1594902 - DNA, 15 bp, Homo sapiens
tctccttctctccac

SEQ ID NO: 1594903 - DNA, 15 bp, Homo sapiens
ctctccttctctcca

SEQ ID NO: 1594904 - DNA, 15 bp, Homo sapiens
cctctccttctctcc

SEQ ID NO: 1594905 - DNA, 15 bp, Homo sapiens
ccctctccttctctc

SEQ ID NO: 1594906 - DNA, 15 bp, Homo sapiens
cccctctccttctct

SEQ ID NO: 1594907 - DNA, 15 bp, Homo sapiens
tcccctctccttctc

SEQ ID NO: 1594908 - DNA, 15 bp, Homo sapiens
ctcccctctccttct

SEQ ID NO: 1594909 - DNA, 15 bp, Homo sapiens
actcccctctccttc

SEQ ID NO: 1594910 - DNA, 15 bp, Homo sapiens
gactcccctctcctt

SEQ ID NO: 1594911 - DNA, 15 bp, Homo sapiens
ggactcccctctcct

SEQ ID NO: 1594912 - DNA, 15 bp, Homo sapiens
gggactcccctctcc

SEQ ID NO: 1594913 - DNA, 15 bp, Homo sapiens
ggggactcccctctc

SEQ ID NO: 1594914 - DNA, 15 bp, Homo sapiens
gggggactcccctct

SEQ ID NO: 1594915 - DNA, 15 bp, Homo sapiens
tgggggactcccctc

SEQ ID NO: 1594916 - DNA, 15 bp, Homo sapiens
gtgggggactcccct

SEQ ID NO: 1594917 - DNA, 15 bp, Homo sapiens
ggtgggggactcccc

SEQ ID NO: 1594918 - DNA, 15 bp, Homo sapiens
gggtgggggactccc

SEQ ID NO: 1594919 - DNA, 15 bp, Homo sapiens
agggtgggggactcc

SEQ ID NO: 1594920 - DNA, 15 bp, Homo sapiens
gagggtgggggactc

SEQ ID NO: 1594921 - DNA, 15 bp, Homo sapiens
ggagggtgggggact

SEQ ID NO: 1594922 - DNA, 15 bp, Homo sapiens
tggagggtgggggac

SEQ ID NO: 1594923 - DNA, 15 bp, Homo sapiens
ctggagggtggggga

SEQ ID NO: 1594924 - DNA, 15 bp, Homo sapiens
cctggagggtggggg

SEQ ID NO: 1594925 - DNA, 15 bp, Homo sapiens
gcctggagggtgggg

SEQ ID NO: 1594926 - DNA, 15 bp, Homo sapiens
agcctggagggtggg

SEQ ID NO: 1594927 - DNA, 15 bp, Homo sapiens
cagcctggagggtgg

SEQ ID NO: 1594928 - DNA, 15 bp, Homo sapiens
gcagcctggagggtg

SEQ ID NO: 1594929 - DNA, 15 bp, Homo sapiens
agcagcctggagggt

SEQ ID NO: 1594930 - DNA, 15 bp, Homo sapiens
aagcagcctggaggg

SEQ ID NO: 1594931 - DNA, 15 bp, Homo sapiens
caagcagcctggagg

SEQ ID NO: 1594932 - DNA, 15 bp, Homo sapiens
ccaagcagcctggag

SEQ ID NO: 1594933 - DNA, 15 bp, Homo sapiens
cccaagcagcctgga

SEQ ID NO: 1594934 - DNA, 15 bp, Homo sapiens
ccccaagcagcctgg

SEQ ID NO: 1594935 - DNA, 15 bp, Homo sapiens
tccccaagcagcctg

SEQ ID NO: 1594936 - DNA, 15 bp, Homo sapiens
gtccccaagcagcct

SEQ ID NO: 1594937 - DNA, 15 bp, Homo sapiens
agtccccaagcagcc

SEQ ID NO: 1594938 - DNA, 15 bp, Homo sapiens
aagtccccaagcagc

SEQ ID NO: 1594939 - DNA, 15 bp, Homo sapiens
gaagtccccaagcag

SEQ ID NO: 1594940 - DNA, 15 bp, Homo sapiens
cgaagtccccaagca

SEQ ID NO: 1594941 - DNA, 15 bp, Homo sapiens
tcgaagtccccaagc

SEQ ID NO: 1594942 - DNA, 15 bp, Homo sapiens
ctcgaagtccccaag

SEQ ID NO: 1594943 - DNA, 15 bp, Homo sapiens
cctcgaagtccccaa

SEQ ID NO: 1594944 - DNA, 15 bp, Homo sapiens
ccctcgaagtcccca

SEQ ID NO: 1594945 - DNA, 15 bp, Homo sapiens
cccctcgaagtcccc

SEQ ID NO: 1594946 - DNA, 15 bp, Homo sapiens
gcccctcgaagtccc

SEQ ID NO: 1594947 - DNA, 15 bp, Homo sapiens
agcccctcgaagtcc

SEQ ID NO: 1594948 - DNA, 15 bp, Homo sapiens
aagcccctcgaagtc

SEQ ID NO: 1594949 - DNA, 15 bp, Homo sapiens
caagcccctcgaagt

SEQ ID NO: 1594950 - DNA, 15 bp, Homo sapiens
ccaagcccctcgaag

SEQ ID NO: 1594951 - DNA, 15 bp, Homo sapiens
tccaagcccctcgaa

SEQ ID NO: 1594952 - DNA, 15 bp, Homo sapiens
ttccaagcccctcga

SEQ ID NO: 1594953 - DNA, 15 bp, Homo sapiens
attccaagcccctcg

SEQ ID NO: 1594954 - DNA, 15 bp, Homo sapiens
gattccaagcccctc

SEQ ID NO: 1594955 - DNA, 15 bp, Homo sapiens
ggattccaagcccct

SEQ ID NO: 1594956 - DNA, 15 bp, Homo sapiens
cggattccaagcccc

SEQ ID NO: 1594957 - DNA, 15 bp, Homo sapiens
ccggattccaagccc

SEQ ID NO: 1594958 - DNA, 15 bp, Homo sapiens
cccggattccaagcc

SEQ ID NO: 1594959 - DNA, 15 bp, Homo sapiens
acccggattccaagc

SEQ ID NO: 1594960 - DNA, 15 bp, Homo sapiens
gacccggattccaag

SEQ ID NO: 1594961 - DNA, 15 bp, Homo sapiens
ggacccggattccaa

SEQ ID NO: 1594962 - DNA, 15 bp, Homo sapiens
aggacccggattcca

SEQ ID NO: 1594963 - DNA, 15 bp, Homo sapiens
gaggacccggattcc

SEQ ID NO: 1594964 - DNA, 15 bp, Homo sapiens
ggaggacccggattc

SEQ ID NO: 1594965 - DNA, 15 bp, Homo sapiens
gggaggacccggatt

SEQ ID NO: 1594966 - DNA, 15 bp, Homo sapiens
agggaggacccggat

SEQ ID NO: 1594967 - DNA, 15 bp, Homo sapiens
aagggaggacccgga

SEQ ID NO: 1594968 - DNA, 15 bp, Homo sapiens
aaagggaggacccgg

SEQ ID NO: 1594969 - DNA, 15 bp, Homo sapiens
aaaagggaggacccg

SEQ ID NO: 1594970 - DNA, 15 bp, Homo sapiens
taaaagggaggaccc

SEQ ID NO: 1594971 - DNA, 15 bp, Homo sapiens
ataaaagggaggacc

SEQ ID NO: 1594972 - DNA, 15 bp, Homo sapiens
cataaaagggaggac

SEQ ID NO: 1594973 - DNA, 15 bp, Homo sapiens
tcataaaagggagga

SEQ ID NO: 1594974 - DNA, 15 bp, Homo sapiens
ctcataaaagggagg

SEQ ID NO: 1594975 - DNA, 15 bp, Homo sapiens
cctcataaaagggag

SEQ ID NO: 1594976 - DNA, 15 bp, Homo sapiens
acctcataaaaggga

SEQ ID NO: 1594977 - DNA, 15 bp, Homo sapiens
aacctcataaaaggg

SEQ ID NO: 1594978 - DNA, 15 bp, Homo sapiens
gaacctcataaaagg

SEQ ID NO: 1594979 - DNA, 15 bp, Homo sapiens
tgaacctcataaaag

SEQ ID NO: 1594980 - DNA, 15 bp, Homo sapiens
gtgaacctcataaaa

SEQ ID NO: 1594981 - DNA, 15 bp, Homo sapiens
tgtgaacctcataaa

SEQ ID NO: 1594982 - DNA, 15 bp, Homo sapiens
gtgtgaacctcataa

SEQ ID NO: 1594983 - DNA, 15 bp, Homo sapiens
tgtgtgaacctcata

SEQ ID NO: 1594984 - DNA, 15 bp, Homo sapiens
gtgtgtgaacctcat

SEQ ID NO: 1594985 - DNA, 15 bp, Homo sapiens
tgtgtgtgaacctca

SEQ ID NO: 1594986 - DNA, 15 bp, Homo sapiens
gtgtgtgtgaacctc

SEQ ID NO: 1594987 - DNA, 15 bp, Homo sapiens
agtgtgtgtgaacct

SEQ ID NO: 1594988 - DNA, 15 bp, Homo sapiens
cagtgtgtgtgaacc

SEQ ID NO: 1594989 - DNA, 15 bp, Homo sapiens
acagtgtgtgtgaac

SEQ ID NO: 1594990 - DNA, 15 bp, Homo sapiens
cacagtgtgtgtgaa

SEQ ID NO: 1594991 - DNA, 15 bp, Homo sapiens
tcacagtgtgtgtga

SEQ ID NO: 1594992 - DNA, 15 bp, Homo sapiens
ctcacagtgtgtgtg

SEQ ID NO: 1594993 - DNA, 15 bp, Homo sapiens
tctcacagtgtgtgt

SEQ ID NO: 1594994 - DNA, 15 bp, Homo sapiens
atctcacagtgtgtg

SEQ ID NO: 1594995 - DNA, 15 bp, Homo sapiens
tatctcacagtgtgt

SEQ ID NO: 1594996 - DNA, 15 bp, Homo sapiens
atatctcacagtgtg

SEQ ID NO: 1594997 - DNA, 15 bp, Homo sapiens
aatatctcacagtgt

SEQ ID NO: 1594998 - DNA, 15 bp, Homo sapiens
aaatatctcacagtg

SEQ ID NO: 1594999 - DNA, 15 bp, Homo sapiens
aaaatatctcacagt

SEQ ID NO: 1595000 - DNA, 15 bp, Homo sapiens
taaaatatctcacag

SEQ ID NO: 1595001 - DNA, 15 bp, Homo sapiens
ctaaaatatctcaca

SEQ ID NO: 1595002 - DNA, 15 bp, Homo sapiens
gctaaaatatctcac

SEQ ID NO: 1595003 - DNA, 15 bp, Homo sapiens
agctaaaatatctca

SEQ ID NO: 1595004 - DNA, 15 bp, Homo sapiens
cagctaaaatatctc

SEQ ID NO: 1595005 - DNA, 15 bp, Homo sapiens
gcagctaaaatatct

SEQ ID NO: 1595006 - DNA, 15 bp, Homo sapiens
tgcagctaaaatatc

SEQ ID NO: 1595007 - DNA, 15 bp, Homo sapiens
ctgcagctaaaatat

SEQ ID NO: 1595008 - DNA, 15 bp, Homo sapiens
gctgcagctaaaata

SEQ ID NO: 1595009 - DNA, 15 bp, Homo sapiens
tgctgcagctaaaat

SEQ ID NO: 1595010 - DNA, 15 bp, Homo sapiens
gtgctgcagctaaaa

SEQ ID NO: 1595011 - DNA, 15 bp, Homo sapiens
tgtgctgcagctaaa

SEQ ID NO: 1595012 - DNA, 15 bp, Homo sapiens
ttgtgctgcagctaa

SEQ ID NO: 1595013 - DNA, 15 bp, Homo sapiens
gttgtgctgcagcta

SEQ ID NO: 1595014 - DNA, 15 bp, Homo sapiens
ggttgtgctgcagct

SEQ ID NO: 1595015 - DNA, 15 bp, Homo sapiens
gggttgtgctgcagc

SEQ ID NO: 1595016 - DNA, 15 bp, Homo sapiens
agggttgtgctgcag

SEQ ID NO: 1595017 - DNA, 15 bp, Homo sapiens
aagggttgtgctgca

SEQ ID NO: 1595018 - DNA, 15 bp, Homo sapiens
aaagggttgtgctgc

SEQ ID NO: 1595019 - DNA, 15 bp, Homo sapiens
aaaagggttgtgctg

SEQ ID NO: 1595020 - DNA, 15 bp, Homo sapiens
taaaagggttgtgct

SEQ ID NO: 1595021 - DNA, 15 bp, Homo sapiens
ttaaaagggttgtgc

SEQ ID NO: 1595022 - DNA, 15 bp, Homo sapiens
attaaaagggttgtg

SEQ ID NO: 1595023 - DNA, 15 bp, Homo sapiens
tattaaaagggttgt

SEQ ID NO: 1595024 - DNA, 15 bp, Homo sapiens
gtattaaaagggttg

SEQ ID NO: 1595025 - DNA, 15 bp, Homo sapiens
ggtattaaaagggtt

SEQ ID NO: 1595026 - DNA, 15 bp, Homo sapiens
gggtattaaaagggt

SEQ ID NO: 1595027 - DNA, 15 bp, Homo sapiens
tgggtattaaaaggg

SEQ ID NO: 1595028 - DNA, 15 bp, Homo sapiens
ctgggtattaaaagg

SEQ ID NO: 1595029 - DNA, 15 bp, Homo sapiens
gctgggtattaaaag

SEQ ID NO: 1595030 - DNA, 15 bp, Homo sapiens
tgctgggtattaaaa

SEQ ID NO: 1595031 - DNA, 15 bp, Homo sapiens
atgctgggtattaaa

SEQ ID NO: 1595032 - DNA, 15 bp, Homo sapiens
catgctgggtattaa

SEQ ID NO: 1595033 - DNA, 15 bp, Homo sapiens
tcatgctgggtatta

SEQ ID NO: 1595034 - DNA, 15 bp, Homo sapiens
gtcatgctgggtatt

SEQ ID NO: 1595035 - DNA, 15 bp, Homo sapiens
tgtcatgctgggtat

SEQ ID NO: 1595036 - DNA, 15 bp, Homo sapiens
atgtcatgctgggta

SEQ ID NO: 1595037 - DNA, 15 bp, Homo sapiens
gatgtcatgctgggt

SEQ ID NO: 1595038 - DNA, 15 bp, Homo sapiens
cgatgtcatgctggg

SEQ ID NO: 1595039 - DNA, 15 bp, Homo sapiens
tcgatgtcatgctgg

SEQ ID NO: 1595040 - DNA, 15 bp, Homo sapiens
gtcgatgtcatgctg

SEQ ID NO: 1595041 - DNA, 15 bp, Homo sapiens
agtcgatgtcatgct

SEQ ID NO: 1595042 - DNA, 15 bp, Homo sapiens
cagtcgatgtcatgc

SEQ ID NO: 1595043 - DNA, 15 bp, Homo sapiens
acagtcgatgtcatg

SEQ ID NO: 1595044 - DNA, 15 bp, Homo sapiens
cacagtcgatgtcat

SEQ ID NO: 1595045 - DNA, 15 bp, Homo sapiens
acacagtcgatgtca

SEQ ID NO: 1595046 - DNA, 15 bp, Homo sapiens
cacacagtcgatgtc

SEQ ID NO: 1595047 - DNA, 15 bp, Homo sapiens
tcacacagtcgatgt

SEQ ID NO: 1595048 - DNA, 15 bp, Homo sapiens
ctcacacagtcgatg

SEQ ID NO: 1595049 - DNA, 15 bp, Homo sapiens
gctcacacagtcgat

SEQ ID NO: 1595050 - DNA, 15 bp, Homo sapiens
cgctcacacagtcga

SEQ ID NO: 1595051 - DNA, 15 bp, Homo sapiens
tcgctcacacagtcg

SEQ ID NO: 1595052 - DNA, 15 bp, Homo sapiens
ctcgctcacacagtc

SEQ ID NO: 1595053 - DNA, 15 bp, Homo sapiens
cctcgctcacacagt

SEQ ID NO: 1595054 - DNA, 15 bp, Homo sapiens
gcctcgctcacacag

SEQ ID NO: 1595055 - DNA, 15 bp, Homo sapiens
ggcctcgctcacaca

SEQ ID NO: 1595056 - DNA, 15 bp, Homo sapiens
gggcctcgctcacac

SEQ ID NO: 1595057 - DNA, 15 bp, Homo sapiens
agggcctcgctcaca

SEQ ID NO: 1595058 - DNA, 15 bp, Homo sapiens
aagggcctcgctcac

SEQ ID NO: 1595059 - DNA, 15 bp, Homo sapiens
taagggcctcgctca

SEQ ID NO: 1595060 - DNA, 15 bp, Homo sapiens
ataagggcctcgctc

SEQ ID NO: 1595061 - DNA, 15 bp, Homo sapiens
aataagggcctcgct

SEQ ID NO: 1595062 - DNA, 15 bp, Homo sapiens
aaataagggcctcgc

SEQ ID NO: 1595063 - DNA, 15 bp, Homo sapiens
caaataagggcctcg

SEQ ID NO: 1595064 - DNA, 15 bp, Homo sapiens
ccaaataagggcctc

SEQ ID NO: 1595065 - DNA, 15 bp, Homo sapiens
accaaataagggcct

SEQ ID NO: 1595066 - DNA, 15 bp, Homo sapiens
aaccaaataagggcc

SEQ ID NO: 1595067 - DNA, 15 bp, Homo sapiens
caaccaaataagggc

SEQ ID NO: 1595068 - DNA, 15 bp, Homo sapiens
ccaaccaaataaggg

SEQ ID NO: 1595069 - DNA, 15 bp, Homo sapiens
accaaccaaataagg

SEQ ID NO: 1595070 - DNA, 15 bp, Homo sapiens
caccaaccaaataag

SEQ ID NO: 1595071 - DNA, 15 bp, Homo sapiens
tcaccaaccaaataa

SEQ ID NO: 1595072 - DNA, 15 bp, Homo sapiens
ttcaccaaccaaata

SEQ ID NO: 1595073 - DNA, 15 bp, Homo sapiens
gttcaccaaccaaat

SEQ ID NO: 1595074 - DNA, 15 bp, Homo sapiens
cgttcaccaaccaaa

SEQ ID NO: 1595075 - DNA, 15 bp, Homo sapiens
gcgttcaccaaccaa

SEQ ID NO: 1595076 - DNA, 15 bp, Homo sapiens
ggcgttcaccaacca

SEQ ID NO: 1595077 - DNA, 15 bp, Homo sapiens
cggcgttcaccaacc

SEQ ID NO: 1595078 - DNA, 15 bp, Homo sapiens
ccggcgttcaccaac

SEQ ID NO: 1595079 - DNA, 15 bp, Homo sapiens
cccggcgttcaccaa

SEQ ID NO: 1595080 - DNA, 15 bp, Homo sapiens
ccccggcgttcacca

SEQ ID NO: 1595081 - DNA, 15 bp, Homo sapiens
accccggcgttcacc

SEQ ID NO: 1595082 - DNA, 15 bp, Homo sapiens
caccccggcgttcac

SEQ ID NO: 1595083 - DNA, 15 bp, Homo sapiens
gcaccccggcgttca

SEQ ID NO: 1595084 - DNA, 15 bp, Homo sapiens
tgcaccccggcgttc

SEQ ID NO: 1595085 - DNA, 15 bp, Homo sapiens
gtgcaccccggcgtt

SEQ ID NO: 1595086 - DNA, 15 bp, Homo sapiens
tgtgcaccccggcgt

SEQ ID NO: 1595087 - DNA, 15 bp, Homo sapiens
atgtgcaccccggcg

SEQ ID NO: 1595088 - DNA, 15 bp, Homo sapiens
gatgtgcaccccggc

SEQ ID NO: 1595089 - DNA, 15 bp, Homo sapiens
tgatgtgcaccccgg

SEQ ID NO: 1595090 - DNA, 15 bp, Homo sapiens
ttgatgtgcaccccg

SEQ ID NO: 1595091 - DNA, 15 bp, Homo sapiens
cttgatgtgcacccc

SEQ ID NO: 1595092 - DNA, 15 bp, Homo sapiens
tcttgatgtgcaccc

SEQ ID NO: 1595093 - DNA, 15 bp, Homo sapiens
gtcttgatgtgcacc

SEQ ID NO: 1595094 - DNA, 15 bp, Homo sapiens
cgtcttgatgtgcac

SEQ ID NO: 1595095 - DNA, 15 bp, Homo sapiens
gcgtcttgatgtgca

SEQ ID NO: 1595096 - DNA, 15 bp, Homo sapiens
agcgtcttgatgtgc

SEQ ID NO: 1595097 - DNA, 15 bp, Homo sapiens
aagcgtcttgatgtg

SEQ ID NO: 1595098 - DNA, 15 bp, Homo sapiens
gaagcgtcttgatgt

SEQ ID NO: 1595099 - DNA, 15 bp, Homo sapiens
ggaagcgtcttgatg

SEQ ID NO: 1595100 - DNA, 15 bp, Homo sapiens
gggaagcgtcttgat

SEQ ID NO: 1595101 - DNA, 15 bp, Homo sapiens
agggaagcgtcttga

SEQ ID NO: 1595102 - DNA, 15 bp, Homo sapiens
cagggaagcgtcttg

SEQ ID NO: 1595103 - DNA, 15 bp, Homo sapiens
gcagggaagcgtctt

SEQ ID NO: 1595104 - DNA, 15 bp, Homo sapiens
ggcagggaagcgtct

SEQ ID NO: 1595105 - DNA, 15 bp, Homo sapiens
aggcagggaagcgtc

SEQ ID NO: 1595106 - DNA, 15 bp, Homo sapiens
caggcagggaagcgt

SEQ ID NO: 1595107 - DNA, 15 bp, Homo sapiens
ccaggcagggaagcg

SEQ ID NO: 1595108 - DNA, 15 bp, Homo sapiens
cccaggcagggaagc

SEQ ID NO: 1595109 - DNA, 15 bp, Homo sapiens
tcccaggcagggaag

SEQ ID NO: 1595110 - DNA, 15 bp, Homo sapiens
ctcccaggcagggaa

SEQ ID NO: 1595111 - DNA, 15 bp, Homo sapiens
cctcccaggcaggga

SEQ ID NO: 1595112 - DNA, 15 bp, Homo sapiens
gcctcccaggcaggg

SEQ ID NO: 1595113 - DNA, 15 bp, Homo sapiens
tgcctcccaggcagg

SEQ ID NO: 1595114 - DNA, 15 bp, Homo sapiens
gtgcctcccaggcag

SEQ ID NO: 1595115 - DNA, 15 bp, Homo sapiens
tgtgcctcccaggca

SEQ ID NO: 1595116 - DNA, 15 bp, Homo sapiens
ctgtgcctcccaggc

SEQ ID NO: 1595117 - DNA, 15 bp, Homo sapiens
tctgtgcctcccagg

SEQ ID NO: 1595118 - DNA, 15 bp, Homo sapiens
gtctgtgcctcccag

SEQ ID NO: 1595119 - DNA, 15 bp, Homo sapiens
ggtctgtgcctccca

SEQ ID NO: 1595120 - DNA, 15 bp, Homo sapiens
gggtctgtgcctccc

SEQ ID NO: 1595121 - DNA, 15 bp, Homo sapiens
ggggtctgtgcctcc

SEQ ID NO: 1595122 - DNA, 15 bp, Homo sapiens
aggggtctgtgcctc

SEQ ID NO: 1595123 - DNA, 15 bp, Homo sapiens
gaggggtctgtgcct

SEQ ID NO: 1595124 - DNA, 15 bp, Homo sapiens
agaggggtctgtgcc

SEQ ID NO: 1595125 - DNA, 15 bp, Homo sapiens
gagaggggtctgtgc

SEQ ID NO: 1595126 - DNA, 15 bp, Homo sapiens
ggagaggggtctgtg

SEQ ID NO: 1595127 - DNA, 15 bp, Homo sapiens
tggagaggggtctgt

SEQ ID NO: 1595128 - DNA, 15 bp, Homo sapiens
ctggagaggggtctg

SEQ ID NO: 1595129 - DNA, 15 bp, Homo sapiens
cctggagaggggtct

SEQ ID NO: 1595130 - DNA, 15 bp, Homo sapiens
ccctggagaggggtc

SEQ ID NO: 1595131 - DNA, 15 bp, Homo sapiens
cccctggagaggggt

SEQ ID NO: 1595132 - DNA, 15 bp, Homo sapiens
gcccctggagagggg

SEQ ID NO: 1595133 - DNA, 15 bp, Homo sapiens
ggcccctggagaggg

SEQ ID NO: 1595134 - DNA, 15 bp, Homo sapiens
gggcccctggagagg

SEQ ID NO: 1595135 - DNA, 15 bp, Homo sapiens
ggggcccctggagag

SEQ ID NO: 1595136 - DNA, 15 bp, Homo sapiens
cggggcccctggaga

SEQ ID NO: 1595137 - DNA, 15 bp, Homo sapiens
tcggggcccctggag

SEQ ID NO: 1595138 - DNA, 15 bp, Homo sapiens
ctcggggcccctgga

SEQ ID NO: 1595139 - DNA, 15 bp, Homo sapiens
cctcggggcccctgg

SEQ ID NO: 1595140 - DNA, 15 bp, Homo sapiens
gcctcggggcccctg

SEQ ID NO: 1595141 - DNA, 15 bp, Homo sapiens
cgcctcggggcccct

SEQ ID NO: 1595142 - DNA, 15 bp, Homo sapiens
ccgcctcggggcccc

SEQ ID NO: 1595143 - DNA, 15 bp, Homo sapiens
cccgcctcggggccc

SEQ ID NO: 1595144 - DNA, 15 bp, Homo sapiens
gcccgcctcggggcc

SEQ ID NO: 1595145 - DNA, 15 bp, Homo sapiens
tgcccgcctcggggc

SEQ ID NO: 1595146 - DNA, 15 bp, Homo sapiens
ttgcccgcctcgggg

SEQ ID NO: 1595147 - DNA, 15 bp, Homo sapiens
cttgcccgcctcggg

SEQ ID NO: 1595148 - DNA, 15 bp, Homo sapiens
gcttgcccgcctcgg

SEQ ID NO: 1595149 - DNA, 15 bp, Homo sapiens
cgcttgcccgcctcg

SEQ ID NO: 1595150 - DNA, 15 bp, Homo sapiens
tcgcttgcccgcctc

SEQ ID NO: 1595151 - DNA, 15 bp, Homo sapiens
ctcgcttgcccgcct

SEQ ID NO: 1595152 - DNA, 15 bp, Homo sapiens
cctcgcttgcccgcc

SEQ ID NO: 1595153 - DNA, 15 bp, Homo sapiens
acctcgcttgcccgc

SEQ ID NO: 1595154 - DNA, 15 bp, Homo sapiens
tacctcgcttgcccg

SEQ ID NO: 1595155 - DNA, 15 bp, Homo sapiens
ctacctcgcttgccc

SEQ ID NO: 1595156 - DNA, 15 bp, Homo sapiens
gctacctcgcttgcc

SEQ ID NO: 1595157 - DNA, 15 bp, Homo sapiens
agctacctcgcttgc

SEQ ID NO: 1595158 - DNA, 15 bp, Homo sapiens
cagctacctcgcttg

SEQ ID NO: 1595159 - DNA, 15 bp, Homo sapiens
tcagctacctcgctt

SEQ ID NO: 1595160 - DNA, 15 bp, Homo sapiens
ctcagctacctcgct

SEQ ID NO: 1595161 - DNA, 15 bp, Homo sapiens
tctcagctacctcgc

SEQ ID NO: 1595162 - DNA, 15 bp, Homo sapiens
ctctcagctacctcg

SEQ ID NO: 1595163 - DNA, 15 bp, Homo sapiens
cctctcagctacctc

SEQ ID NO: 1595164 - DNA, 15 bp, Homo sapiens
ccctctcagctacct

SEQ ID NO: 1595165 - DNA, 15 bp, Homo sapiens
tccctctcagctacc

SEQ ID NO: 1595166 - DNA, 15 bp, Homo sapiens
gtccctctcagctac

SEQ ID NO: 1595167 - DNA, 15 bp, Homo sapiens
ggtccctctcagcta

SEQ ID NO: 1595168 - DNA, 15 bp, Homo sapiens
cggtccctctcagct

SEQ ID NO: 1595169 - DNA, 15 bp, Homo sapiens
gcggtccctctcagc

SEQ ID NO: 1595170 - DNA, 15 bp, Homo sapiens
cgcggtccctctcag

SEQ ID NO: 1595171 - DNA, 15 bp, Homo sapiens
ccgcggtccctctca

SEQ ID NO: 1595172 - DNA, 15 bp, Homo sapiens
gccgcggtccctctc

SEQ ID NO: 1595173 - DNA, 15 bp, Homo sapiens
ggccgcggtccctct

SEQ ID NO: 1595174 - DNA, 15 bp, Homo sapiens
gggccgcggtccctc

SEQ ID NO: 1595175 - DNA, 15 bp, Homo sapiens
tgggccgcggtccct

SEQ ID NO: 1595176 - DNA, 15 bp, Homo sapiens
ctgggccgcggtccc

SEQ ID NO: 1595177 - DNA, 15 bp, Homo sapiens
gctgggccgcggtcc

SEQ ID NO: 1595178 - DNA, 15 bp, Homo sapiens
tgctgggccgcggtc

SEQ ID NO: 1595179 - DNA, 15 bp, Homo sapiens
atgctgggccgcggt

SEQ ID NO: 1595180 - DNA, 15 bp, Homo sapiens
gatgctgggccgcgg

SEQ ID NO: 1595181 - DNA, 15 bp, Homo sapiens
cgatgctgggccgcg

SEQ ID NO: 1595182 - DNA, 15 bp, Homo sapiens
ccgatgctgggccgc

SEQ ID NO: 1595183 - DNA, 15 bp, Homo sapiens
gccgatgctgggccg

SEQ ID NO: 1595184 - DNA, 15 bp, Homo sapiens
agccgatgctgggcc

SEQ ID NO: 1595185 - DNA, 15 bp, Homo sapiens
gagccgatgctgggc

SEQ ID NO: 1595186 - DNA, 15 bp, Homo sapiens
cgagccgatgctggg

SEQ ID NO: 1595187 - DNA, 15 bp, Homo sapiens
acgagccgatgctgg

SEQ ID NO: 1595188 - DNA, 15 bp, Homo sapiens
gacgagccgatgctg

SEQ ID NO: 1595189 - DNA, 15 bp, Homo sapiens
agacgagccgatgct

SEQ ID NO: 1595190 - DNA, 15 bp, Homo sapiens
cagacgagccgatgc

SEQ ID NO: 1595191 - DNA, 15 bp, Homo sapiens
ccagacgagccgatg

SEQ ID NO: 1595192 - DNA, 15 bp, Homo sapiens
cccagacgagccgat

SEQ ID NO: 1595193 - DNA, 15 bp, Homo sapiens
acccagacgagccga

SEQ ID NO: 1595194 - DNA, 15 bp, Homo sapiens
cacccagacgagccg

SEQ ID NO: 1595195 - DNA, 15 bp, Homo sapiens
ccacccagacgagcc

SEQ ID NO: 1595196 - DNA, 15 bp, Homo sapiens
cccacccagacgagc

SEQ ID NO: 1595197 - DNA, 15 bp, Homo sapiens
tcccacccagacgag

SEQ ID NO: 1595198 - DNA, 15 bp, Homo sapiens
ctcccacccagacga

SEQ ID NO: 1595199 - DNA, 15 bp, Homo sapiens
cctcccacccagacg

SEQ ID NO: 1595200 - DNA, 15 bp, Homo sapiens
ccctcccacccagac

SEQ ID NO: 1595201 - DNA, 15 bp, Homo sapiens
gccctcccacccaga

SEQ ID NO: 1595202 - DNA, 15 bp, Homo sapiens
cgccctcccacccag

SEQ ID NO: 1595203 - DNA, 15 bp, Homo sapiens
ccgccctcccaccca

SEQ ID NO: 1595204 - DNA, 15 bp, Homo sapiens
gccgccctcccaccc

SEQ ID NO: 1595205 - DNA, 15 bp, Homo sapiens
ggccgccctcccacc

SEQ ID NO: 1595206 - DNA, 15 bp, Homo sapiens
cggccgccctcccac

SEQ ID NO: 1595207 - DNA, 15 bp, Homo sapiens
gcggccgccctccca

SEQ ID NO: 1595208 - DNA, 15 bp, Homo sapiens
ggcggccgccctccc

SEQ ID NO: 1595209 - DNA, 15 bp, Homo sapiens
gggcggccgccctcc

SEQ ID NO: 1595210 - DNA, 15 bp, Homo sapiens
tgggcggccgccctc

SEQ ID NO: 1595211 - DNA, 15 bp, Homo sapiens
ctgggcggccgccct

SEQ ID NO: 1595212 - DNA, 15 bp, Homo sapiens
tctgggcggccgccc

SEQ ID NO: 1595213 - DNA, 15 bp, Homo sapiens
gtctgggcggccgcc

SEQ ID NO: 1595214 - DNA, 15 bp, Homo sapiens
agtctgggcggccgc

SEQ ID NO: 1595215 - DNA, 15 bp, Homo sapiens
aagtctgggcggccg

SEQ ID NO: 1595216 - DNA, 15 bp, Homo sapiens
gaagtctgggcggcc

SEQ ID NO: 1595217 - DNA, 15 bp, Homo sapiens
ggaagtctgggcggc

SEQ ID NO: 1595218 - DNA, 15 bp, Homo sapiens
gggaagtctgggcgg

SEQ ID NO: 1595219 - DNA, 15 bp, Homo sapiens
cgggaagtctgggcg

SEQ ID NO: 1595220 - DNA, 15 bp, Homo sapiens
gcgggaagtctgggc

SEQ ID NO: 1595221 - DNA, 15 bp, Homo sapiens
cgcgggaagtctggg

SEQ ID NO: 1595222 - DNA, 15 bp, Homo sapiens
ccgcgggaagtctgg

SEQ ID NO: 1595223 - DNA, 15 bp, Homo sapiens
accgcgggaagtctg

SEQ ID NO: 1595224 - DNA, 15 bp, Homo sapiens
gaccgcgggaagtct

SEQ ID NO: 1595225 - DNA, 15 bp, Homo sapiens
cgaccgcgggaagtc

SEQ ID NO: 1595226 - DNA, 15 bp, Homo sapiens
ccgaccgcgggaagt

SEQ ID NO: 1595227 - DNA, 15 bp, Homo sapiens
gccgaccgcgggaag

SEQ ID NO: 1595228 - DNA, 15 bp, Homo sapiens
tgccgaccgcgggaa

SEQ ID NO: 1595229 - DNA, 15 bp, Homo sapiens
gtgccgaccgcggga

SEQ ID NO: 1595230 - DNA, 15 bp, Homo sapiens
ggtgccgaccgcggg

SEQ ID NO: 1595231 - DNA, 15 bp, Homo sapiens
gggtgccgaccgcgg

SEQ ID NO: 1595232 - DNA, 15 bp, Homo sapiens
ggggtgccgaccgcg

SEQ ID NO: 1595233 - DNA, 15 bp, Homo sapiens
gggggtgccgaccgc

SEQ ID NO: 1595234 - DNA, 15 bp, Homo sapiens
agggggtgccgaccg

SEQ ID NO: 1595235 - DNA, 15 bp, Homo sapiens
cagggggtgccgacc

SEQ ID NO: 1595236 - DNA, 15 bp, Homo sapiens
gcagggggtgccgac

SEQ ID NO: 1595237 - DNA, 15 bp, Homo sapiens
agcagggggtgccga

SEQ ID NO: 1595238 - DNA, 15 bp, Homo sapiens
gagcagggggtgccg

SEQ ID NO: 1595239 - DNA, 15 bp, Homo sapiens
cgagcagggggtgcc

SEQ ID NO: 1595240 - DNA, 15 bp, Homo sapiens
ccgagcagggggtgc

SEQ ID NO: 1595241 - DNA, 15 bp, Homo sapiens
gggccgagcaggggg

SEQ ID NO: 1595242 - DNA, 15 bp, Homo sapiens
ggggccgagcagggg

SEQ ID NO: 1595243 - DNA, 15 bp, Homo sapiens
tggggccgagcaggg

SEQ ID NO: 1595244 - DNA, 15 bp, Homo sapiens
ctggggccgagcagg

SEQ ID NO: 1595245 - DNA, 15 bp, Homo sapiens
gctggggccgagcag

SEQ ID NO: 1595246 - DNA, 15 bp, Homo sapiens
ggctggggccgagca

SEQ ID NO: 1595247 - DNA, 15 bp, Homo sapiens
gggctggggccgagc

SEQ ID NO: 1595248 - DNA, 15 bp, Homo sapiens
tgggctggggccgag

SEQ ID NO: 1595249 - DNA, 15 bp, Homo sapiens
ctgggctggggccga

SEQ ID NO: 1595250 - DNA, 15 bp, Homo sapiens
tctgggctggggccg

SEQ ID NO: 1595251 - DNA, 15 bp, Homo sapiens
ctctgggctggggcc

SEQ ID NO: 1595252 - DNA, 15 bp, Homo sapiens
cctctgggctggggc

SEQ ID NO: 1595253 - DNA, 15 bp, Homo sapiens
gcctctgggctgggg

SEQ ID NO: 1595254 - DNA, 15 bp, Homo sapiens
ggcctctgggctggg

SEQ ID NO: 1595255 - DNA, 15 bp, Homo sapiens
cggcctctgggctgg

SEQ ID NO: 1595256 - DNA, 15 bp, Homo sapiens
gcggcctctgggctg

SEQ ID NO: 1595257 - DNA, 15 bp, Homo sapiens
ggcggcctctgggct

SEQ ID NO: 1595258 - DNA, 15 bp, Homo sapiens
tggcggcctctgggc

SEQ ID NO: 1595259 - DNA, 15 bp, Homo sapiens
ctggcggcctctggg

SEQ ID NO: 1595260 - DNA, 15 bp, Homo sapiens
gctggcggcctctgg

SEQ ID NO: 1595261 - DNA, 15 bp, Homo sapiens
tgctggcggcctctg

SEQ ID NO: 1595262 - DNA, 15 bp, Homo sapiens
atgctggcggcctct

SEQ ID NO: 1595263 - DNA, 15 bp, Homo sapiens
aatgctggcggcctc

SEQ ID NO: 1595264 - DNA, 15 bp, Homo sapiens
aaatgctggcggcct

SEQ ID NO: 1595265 - DNA, 15 bp, Homo sapiens
caaatgctggcggcc

SEQ ID NO: 1595266 - DNA, 15 bp, Homo sapiens
tcaaatgctggcggc

SEQ ID NO: 1595267 - DNA, 15 bp, Homo sapiens
ctcaaatgctggcgg

SEQ ID NO: 1595268 - DNA, 15 bp, Homo sapiens
actcaaatgctggcg

SEQ ID NO: 1595269 - DNA, 15 bp, Homo sapiens
gactcaaatgctggc

SEQ ID NO: 1595270 - DNA, 15 bp, Homo sapiens
ggactcaaatgctgg

SEQ ID NO: 1595271 - DNA, 15 bp, Homo sapiens
gggactcaaatgctg

SEQ ID NO: 1595272 - DNA, 15 bp, Homo sapiens
ggggactcaaatgct

SEQ ID NO: 1595273 - DNA, 15 bp, Homo sapiens
cggggactcaaatgc

SEQ ID NO: 1595274 - DNA, 15 bp, Homo sapiens
gcggggactcaaatg

SEQ ID NO: 1595275 - DNA, 15 bp, Homo sapiens
ggcggggactcaaat

SEQ ID NO: 1595276 - DNA, 15 bp, Homo sapiens
gggcggggactcaaa

SEQ ID NO: 1595277 - DNA, 15 bp, Homo sapiens
tgggcggggactcaa

SEQ ID NO: 1595278 - DNA, 15 bp, Homo sapiens
ctgggcggggactca

SEQ ID NO: 1595279 - DNA, 15 bp, Homo sapiens
gctgggcggggactc

SEQ ID NO: 1595280 - DNA, 15 bp, Homo sapiens
ggctgggcggggact

SEQ ID NO: 1595281 - DNA, 15 bp, Homo sapiens
cggctgggcggggac

SEQ ID NO: 1595282 - DNA, 15 bp, Homo sapiens
gcggctgggcgggga

SEQ ID NO: 1595283 - DNA, 15 bp, Homo sapiens
cgcggctgggcgggg

SEQ ID NO: 1595284 - DNA, 15 bp, Homo sapiens
ccgcggctgggcggg

SEQ ID NO: 1595285 - DNA, 15 bp, Homo sapiens
gccgcggctgggcgg

SEQ ID NO: 1595286 - DNA, 15 bp, Homo sapiens
agccgcggctgggcg

SEQ ID NO: 1595287 - DNA, 15 bp, Homo sapiens
gagccgcggctgggc

SEQ ID NO: 1595288 - DNA, 15 bp, Homo sapiens
ggagccgcggctggg

SEQ ID NO: 1595289 - DNA, 15 bp, Homo sapiens
cggagccgcggctgg

SEQ ID NO: 1595290 - DNA, 15 bp, Homo sapiens
gcggagccgcggctg

SEQ ID NO: 1595291 - DNA, 15 bp, Homo sapiens
ggcggagccgcggct

SEQ ID NO: 1595292 - DNA, 15 bp, Homo sapiens
cggcggagccgcggc

SEQ ID NO: 1595293 - DNA, 15 bp, Homo sapiens
acggcggagccgcgg

SEQ ID NO: 1595294 - DNA, 15 bp, Homo sapiens
gacggcggagccgcg

SEQ ID NO: 1595295 - DNA, 15 bp, Homo sapiens
cgacggcggagccgc

SEQ ID NO: 1595296 - DNA, 15 bp, Homo sapiens
ccgacggcggagccg

SEQ ID NO: 1595297 - DNA, 15 bp, Homo sapiens
cccgacggcggagcc

SEQ ID NO: 1595298 - DNA, 15 bp, Homo sapiens
ccccgacggcggagc

SEQ ID NO: 1595299 - DNA, 15 bp, Homo sapiens
gccccgacggcggag

SEQ ID NO: 1595300 - DNA, 15 bp, Homo sapiens
agccccgacggcgga

SEQ ID NO: 1595301 - DNA, 15 bp, Homo sapiens
aagccccgacggcgg

SEQ ID NO: 1595302 - DNA, 15 bp, Homo sapiens
aaagccccgacggcg

SEQ ID NO: 1595303 - DNA, 15 bp, Homo sapiens
gaaagccccgacggc

SEQ ID NO: 1595304 - DNA, 15 bp, Homo sapiens
ggaaagccccgacgg

SEQ ID NO: 1595305 - DNA, 15 bp, Homo sapiens
gggaaagccccgacg

SEQ ID NO: 1595306 - DNA, 15 bp, Homo sapiens
ggggaaagccccgac

SEQ ID NO: 1595307 - DNA, 15 bp, Homo sapiens
gggggaaagccccga

SEQ ID NO: 1595308 - DNA, 15 bp, Homo sapiens
cgggggaaagccccg

SEQ ID NO: 1595309 - DNA, 15 bp, Homo sapiens
tcgggggaaagcccc

SEQ ID NO: 1595310 - DNA, 15 bp, Homo sapiens
ttcgggggaaagccc

SEQ ID NO: 1595311 - DNA, 15 bp, Homo sapiens
tttcgggggaaagcc

SEQ ID NO: 1595312 - DNA, 15 bp, Homo sapiens
ctttcgggggaaagc

SEQ ID NO: 1595313 - DNA, 15 bp, Homo sapiens
cctttcgggggaaag

SEQ ID NO: 1595314 - DNA, 15 bp, Homo sapiens
gcctttcgggggaaa

SEQ ID NO: 1595315 - DNA, 15 bp, Homo sapiens
ggcctttcgggggaa

SEQ ID NO: 1595316 - DNA, 15 bp, Homo sapiens
gggcctttcggggga

SEQ ID NO: 1595317 - DNA, 15 bp, Homo sapiens
tgggcctttcggggg

SEQ ID NO: 1595318 - DNA, 15 bp, Homo sapiens
ctgggcctttcgggg

SEQ ID NO: 1595319 - DNA, 15 bp, Homo sapiens
cctgggcctttcggg

SEQ ID NO: 1595320 - DNA, 15 bp, Homo sapiens
gcctgggcctttcgg

SEQ ID NO: 1595321 - DNA, 15 bp, Homo sapiens
cgcctgggcctttcg

SEQ ID NO: 1595322 - DNA, 15 bp, Homo sapiens
gcgcctgggcctttc

SEQ ID NO: 1595323 - DNA, 15 bp, Homo sapiens
ggcgcctgggccttt

SEQ ID NO: 1595324 - DNA, 15 bp, Homo sapiens
tggcgcctgggcctt

SEQ ID NO: 1595325 - DNA, 15 bp, Homo sapiens
gtggcgcctgggcct

SEQ ID NO: 1595326 - DNA, 15 bp, Homo sapiens
ggtggcgcctgggcc

SEQ ID NO: 1595327 - DNA, 15 bp, Homo sapiens
aggtggcgcctgggc

SEQ ID NO: 1595328 - DNA, 15 bp, Homo sapiens
gaggtggcgcctggg

SEQ ID NO: 1595329 - DNA, 15 bp, Homo sapiens
cgaggtggcgcctgg

SEQ ID NO: 1595330 - DNA, 15 bp, Homo sapiens
gcgaggtggcgcctg

SEQ ID NO: 1595331 - DNA, 15 bp, Homo sapiens
cgcgaggtggcgcct

SEQ ID NO: 1595332 - DNA, 15 bp, Homo sapiens
tcgcgaggtggcgcc

SEQ ID NO: 1595333 - DNA, 15 bp, Homo sapiens
ttcgcgaggtggcgc

SEQ ID NO: 1595334 - DNA, 15 bp, Homo sapiens
cttcgcgaggtggcg

SEQ ID NO: 1595335 - DNA, 15 bp, Homo sapiens
acttcgcgaggtggc

SEQ ID NO: 1595336 - DNA, 15 bp, Homo sapiens
gacttcgcgaggtgg

SEQ ID NO: 1595337 - DNA, 15 bp, Homo sapiens
tgacttcgcgaggtg

SEQ ID NO: 1595338 - DNA, 15 bp, Homo sapiens
ctgacttcgcgaggt

SEQ ID NO: 1595339 - DNA, 15 bp, Homo sapiens
gctgacttcgcgagg

SEQ ID NO: 1595340 - DNA, 15 bp, Homo sapiens
agctgacttcgcgag

SEQ ID NO: 1595341 - DNA, 15 bp, Homo sapiens
aagctgacttcgcga

SEQ ID NO: 1595342 - DNA, 15 bp, Homo sapiens
caagctgacttcgcg

SEQ ID NO: 1595343 - DNA, 15 bp, Homo sapiens
ccaagctgacttcgc

SEQ ID NO: 1595344 - DNA, 15 bp, Homo sapiens
gccaagctgacttcg

SEQ ID NO: 1595345 - DNA, 15 bp, Homo sapiens
agccaagctgacttc

SEQ ID NO: 1595346 - DNA, 15 bp, Homo sapiens
cagccaagctgactt

SEQ ID NO: 1595347 - DNA, 15 bp, Homo sapiens
ccagccaagctgact

SEQ ID NO: 1595348 - DNA, 15 bp, Homo sapiens
gccagccaagctgac

SEQ ID NO: 1595349 - DNA, 15 bp, Homo sapiens
agccagccaagctga

SEQ ID NO: 1595350 - DNA, 15 bp, Homo sapiens
gagccagccaagctg

SEQ ID NO: 1595351 - DNA, 15 bp, Homo sapiens
ggagccagccaagct

SEQ ID NO: 1595352 - DNA, 15 bp, Homo sapiens
aggagccagccaagc

SEQ ID NO: 1595353 - DNA, 15 bp, Homo sapiens
caggagccagccaag

SEQ ID NO: 1595354 - DNA, 15 bp, Homo sapiens
tcaggagccagccaa

SEQ ID NO: 1595355 - DNA, 15 bp, Homo sapiens
ctcaggagccagcca

SEQ ID NO: 1595356 - DNA, 15 bp, Homo sapiens
gctcaggagccagcc

SEQ ID NO: 1595357 - DNA, 15 bp, Homo sapiens
ggctcaggagccagc

SEQ ID NO: 1595358 - DNA, 15 bp, Homo sapiens
gggctcaggagccag

SEQ ID NO: 1595359 - DNA, 15 bp, Homo sapiens
cgggctcaggagcca

SEQ ID NO: 1595360 - DNA, 15 bp, Homo sapiens
ccgggctcaggagcc

SEQ ID NO: 1595361 - DNA, 15 bp, Homo sapiens
gccgggctcaggagc

SEQ ID NO: 1595362 - DNA, 15 bp, Homo sapiens
agccgggctcaggag

SEQ ID NO: 1595363 - DNA, 15 bp, Homo sapiens
gagccgggctcagga

SEQ ID NO: 1595364 - DNA, 15 bp, Homo sapiens
agagccgggctcagg

SEQ ID NO: 1595365 - DNA, 15 bp, Homo sapiens
cagagccgggctcag

SEQ ID NO: 1595366 - DNA, 15 bp, Homo sapiens
gcagagccgggctca

SEQ ID NO: 1595367 - DNA, 15 bp, Homo sapiens
ggcagagccgggctc

SEQ ID NO: 1595368 - DNA, 15 bp, Homo sapiens
tggcagagccgggct

SEQ ID NO: 1595369 - DNA, 15 bp, Homo sapiens
gtggcagagccgggc

SEQ ID NO: 1595370 - DNA, 15 bp, Homo sapiens
ggtggcagagccggg

SEQ ID NO: 1595371 - DNA, 15 bp, Homo sapiens
gggtggcagagccgg

SEQ ID NO: 1595372 - DNA, 15 bp, Homo sapiens
ggggtggcagagccg

SEQ ID NO: 1595373 - DNA, 15 bp, Homo sapiens
tggggtggcagagcc

SEQ ID NO: 1595374 - DNA, 15 bp, Homo sapiens
ttggggtggcagagc

SEQ ID NO: 1595375 - DNA, 15 bp, Homo sapiens
tttggggtggcagag

SEQ ID NO: 1595376 - DNA, 15 bp, Homo sapiens
ctttggggtggcaga

SEQ ID NO: 1595377 - DNA, 15 bp, Homo sapiens
gctttggggtggcag

SEQ ID NO: 1595378 - DNA, 15 bp, Homo sapiens
tgctttggggtggca

SEQ ID NO: 1595379 - DNA, 15 bp, Homo sapiens
ttgctttggggtggc

SEQ ID NO: 1595380 - DNA, 15 bp, Homo sapiens
cttgctttggggtgg

SEQ ID NO: 1595381 - DNA, 15 bp, Homo sapiens
ccttgctttggggtg

SEQ ID NO: 1595382 - DNA, 15 bp, Homo sapiens
cccttgctttggggt

SEQ ID NO: 1595383 - DNA, 15 bp, Homo sapiens
ccccttgctttgggg

SEQ ID NO: 1595384 - DNA, 15 bp, Homo sapiens
gccccttgctttggg

SEQ ID NO: 1595385 - DNA, 15 bp, Homo sapiens
ggccccttgctttgg

SEQ ID NO: 1595386 - DNA, 15 bp, Homo sapiens
cggccccttgctttg

SEQ ID NO: 1595387 - DNA, 15 bp, Homo sapiens
acggccccttgcttt

SEQ ID NO: 1595388 - DNA, 15 bp, Homo sapiens
tacggccccttgctt

SEQ ID NO: 1595389 - DNA, 15 bp, Homo sapiens
gtacggccccttgct

SEQ ID NO: 1595390 - DNA, 15 bp, Homo sapiens
ggtacggccccttgc

SEQ ID NO: 1595391 - DNA, 15 bp, Homo sapiens
gggtacggccccttg

SEQ ID NO: 1595392 - DNA, 15 bp, Homo sapiens
cgggtacggcccctt

SEQ ID NO: 1595393 - DNA, 15 bp, Homo sapiens
gcgggtacggcccct

SEQ ID NO: 1595394 - DNA, 15 bp, Homo sapiens
cgcgggtacggcccc

SEQ ID NO: 1595395 - DNA, 15 bp, Homo sapiens
acgcgggtacggccc

SEQ ID NO: 1595396 - DNA, 15 bp, Homo sapiens
gacgcgggtacggcc

SEQ ID NO: 1595397 - DNA, 15 bp, Homo sapiens
ggacgcgggtacggc

SEQ ID NO: 1595398 - DNA, 15 bp, Homo sapiens
aggacgcgggtacgg

SEQ ID NO: 1595399 - DNA, 15 bp, Homo sapiens
aaggacgcgggtacg

SEQ ID NO: 1595400 - DNA, 15 bp, Homo sapiens
gaaggacgcgggtac

SEQ ID NO: 1595401 - DNA, 15 bp, Homo sapiens
ggaaggacgcgggta

SEQ ID NO: 1595402 - DNA, 15 bp, Homo sapiens
aggaaggacgcgggt

SEQ ID NO: 1595403 - DNA, 15 bp, Homo sapiens
gaggaaggacgcggg

SEQ ID NO: 1595404 - DNA, 15 bp, Homo sapiens
cgaggaaggacgcgg

SEQ ID NO: 1595405 - DNA, 15 bp, Homo sapiens
ccgaggaaggacgcg

SEQ ID NO: 1595406 - DNA, 15 bp, Homo sapiens
gccgaggaaggacgc

SEQ ID NO: 1595407 - DNA, 15 bp, Homo sapiens
cgccgaggaaggacg

SEQ ID NO: 1595408 - DNA, 15 bp, Homo sapiens
tcgccgaggaaggac

SEQ ID NO: 1595409 - DNA, 15 bp, Homo sapiens
gtcgccgaggaagga

SEQ ID NO: 1595410 - DNA, 15 bp, Homo sapiens
ggtcgccgaggaagg

SEQ ID NO: 1595411 - DNA, 15 bp, Homo sapiens
gggtcgccgaggaag

SEQ ID NO: 1595412 - DNA, 15 bp, Homo sapiens
cgggtcgccgaggaa

SEQ ID NO: 1595413 - DNA, 15 bp, Homo sapiens
gcgggtcgccgagga

SEQ ID NO: 1595414 - DNA, 15 bp, Homo sapiens
cgcgggtcgccgagg

SEQ ID NO: 1595415 - DNA, 15 bp, Homo sapiens
gcgcgggtcgccgag

SEQ ID NO: 1595416 - DNA, 15 bp, Homo sapiens
cgcgcgggtcgccga

SEQ ID NO: 1595417 - DNA, 15 bp, Homo sapiens
gcgcgcgggtcgccg

SEQ ID NO: 1595418 - DNA, 15 bp, Homo sapiens
agcgcgcgggtcgcc

SEQ ID NO: 1595419 - DNA, 15 bp, Homo sapiens
gagcgcgcgggtcgc

SEQ ID NO: 1595420 - DNA, 15 bp, Homo sapiens
ggagcgcgcgggtcg

SEQ ID NO: 1595421 - DNA, 15 bp, Homo sapiens
gggagcgcgcgggtc

SEQ ID NO: 1595422 - DNA, 15 bp, Homo sapiens
ggggagcgcgcgggt

SEQ ID NO: 1595423 - DNA, 15 bp, Homo sapiens
aggggagcgcgcggg

SEQ ID NO: 1595424 - DNA, 15 bp, Homo sapiens
gaggggagcgcgcgg

SEQ ID NO: 1595425 - DNA, 15 bp, Homo sapiens
ggaggggagcgcgcg

SEQ ID NO: 1595426 - DNA, 15 bp, Homo sapiens
gggaggggagcgcgc

SEQ ID NO: 1595427 - DNA, 15 bp, Homo sapiens
agggaggggagcgcg

SEQ ID NO: 1595428 - DNA, 15 bp, Homo sapiens
gagggaggggagcgc

SEQ ID NO: 1595429 - DNA, 15 bp, Homo sapiens
agagggaggggagcg

SEQ ID NO: 1595430 - DNA, 15 bp, Homo sapiens
gagagggaggggagc

SEQ ID NO: 1595431 - DNA, 15 bp, Homo sapiens
ggagagggaggggag

SEQ ID NO: 1595432 - DNA, 15 bp, Homo sapiens
cggagagggagggga

SEQ ID NO: 1595433 - DNA, 15 bp, Homo sapiens
acggagagggagggg

SEQ ID NO: 1595434 - DNA, 15 bp, Homo sapiens
aacggagagggaggg

SEQ ID NO: 1595435 - DNA, 15 bp, Homo sapiens
taacggagagggagg

SEQ ID NO: 1595436 - DNA, 15 bp, Homo sapiens
ttaacggagagggag

SEQ ID NO: 1595437 - DNA, 15 bp, Homo sapiens
attaacggagaggga

SEQ ID NO: 1595438 - DNA, 15 bp, Homo sapiens
tattaacggagaggg

SEQ ID NO: 1595439 - DNA, 15 bp, Homo sapiens
atattaacggagagg

SEQ ID NO: 1595440 - DNA, 15 bp, Homo sapiens
aatattaacggagag

SEQ ID NO: 1595441 - DNA, 15 bp, Homo sapiens
gaatattaacggaga

SEQ ID NO: 1595442 - DNA, 15 bp, Homo sapiens
agaatattaacggag

SEQ ID NO: 1595443 - DNA, 15 bp, Homo sapiens
gagaatattaacgga

SEQ ID NO: 1595444 - DNA, 15 bp, Homo sapiens
ggagaatattaacgg

SEQ ID NO: 1595445 - DNA, 15 bp, Homo sapiens
cggagaatattaacg

SEQ ID NO: 1595446 - DNA, 15 bp, Homo sapiens
tcggagaatattaac

SEQ ID NO: 1595447 - DNA, 15 bp, Homo sapiens
atcggagaatattaa

SEQ ID NO: 1595448 - DNA, 15 bp, Homo sapiens
tatcggagaatatta

SEQ ID NO: 1595449 - DNA, 15 bp, Homo sapiens
ttatcggagaatatt

SEQ ID NO: 1595450 - DNA, 15 bp, Homo sapiens
attatcggagaatat

SEQ ID NO: 1595451 - DNA, 15 bp, Homo sapiens
aattatcggagaata

SEQ ID NO: 1595452 - DNA, 15 bp, Homo sapiens
aaattatcggagaat

SEQ ID NO: 1595453 - DNA, 15 bp, Homo sapiens
gaaattatcggagaa

SEQ ID NO: 1595454 - DNA, 15 bp, Homo sapiens
ggaaattatcggaga

SEQ ID NO: 1595455 - DNA, 15 bp, Homo sapiens
cggaaattatcggag

SEQ ID NO: 1595456 - DNA, 15 bp, Homo sapiens
tcggaaattatcgga

SEQ ID NO: 1595457 - DNA, 15 bp, Homo sapiens
ctcggaaattatcgg

SEQ ID NO: 1595458 - DNA, 15 bp, Homo sapiens
cctcggaaattatcg

SEQ ID NO: 1595459 - DNA, 15 bp, Homo sapiens
gcctcggaaattatc

SEQ ID NO: 1595460 - DNA, 15 bp, Homo sapiens
tgcctcggaaattat

SEQ ID NO: 1595461 - DNA, 15 bp, Homo sapiens
ttgcctcggaaatta

SEQ ID NO: 1595462 - DNA, 15 bp, Homo sapiens
tttgcctcggaaatt

SEQ ID NO: 1595463 - DNA, 15 bp, Homo sapiens
ctttgcctcggaaat

SEQ ID NO: 1595464 - DNA, 15 bp, Homo sapiens
tctttgcctcggaaa

SEQ ID NO: 1595465 - DNA, 15 bp, Homo sapiens
atctttgcctcggaa

SEQ ID NO: 1595466 - DNA, 15 bp, Homo sapiens
aatctttgcctcgga

SEQ ID NO: 1595467 - DNA, 15 bp, Homo sapiens
aaatctttgcctcgg

SEQ ID NO: 1595468 - DNA, 15 bp, Homo sapiens
gaaatctttgcctcg

SEQ ID NO: 1595469 - DNA, 15 bp, Homo sapiens
agaaatctttgcctc

SEQ ID NO: 1595470 - DNA, 15 bp, Homo sapiens
tagaaatctttgcct

SEQ ID NO: 1595471 - DNA, 15 bp, Homo sapiens
atagaaatctttgcc

SEQ ID NO: 1595472 - DNA, 15 bp, Homo sapiens
gatagaaatctttgc

SEQ ID NO: 1595473 - DNA, 15 bp, Homo sapiens
agatagaaatctttg

SEQ ID NO: 1595474 - DNA, 15 bp, Homo sapiens
aagatagaaatcttt

SEQ ID NO: 1595475 - DNA, 15 bp, Homo sapiens
aaagatagaaatctt

SEQ ID NO: 1595476 - DNA, 15 bp, Homo sapiens
aaaagatagaaatct

SEQ ID NO: 1595477 - DNA, 15 bp, Homo sapiens
caaaagatagaaatc

SEQ ID NO: 1595478 - DNA, 15 bp, Homo sapiens
ccaaaagatagaaat

SEQ ID NO: 1595479 - DNA, 15 bp, Homo sapiens
cccaaaagatagaaa

SEQ ID NO: 1595480 - DNA, 15 bp, Homo sapiens
gcccaaaagatagaa

SEQ ID NO: 1595481 - DNA, 15 bp, Homo sapiens
cgcccaaaagataga

SEQ ID NO: 1595482 - DNA, 15 bp, Homo sapiens
tcgcccaaaagatag

SEQ ID NO: 1595483 - DNA, 15 bp, Homo sapiens
ttcgcccaaaagata

SEQ ID NO: 1595484 - DNA, 15 bp, Homo sapiens
attcgcccaaaagat

SEQ ID NO: 1595485 - DNA, 15 bp, Homo sapiens
aattcgcccaaaaga

SEQ ID NO: 1595486 - DNA, 15 bp, Homo sapiens
aaattcgcccaaaag

SEQ ID NO: 1595487 - DNA, 15 bp, Homo sapiens
caaattcgcccaaaa

SEQ ID NO: 1595488 - DNA, 15 bp, Homo sapiens
acaaattcgcccaaa

SEQ ID NO: 1595489 - DNA, 15 bp, Homo sapiens
aacaaattcgcccaa

SEQ ID NO: 1595490 - DNA, 15 bp, Homo sapiens
aaacaaattcgccca

SEQ ID NO: 1595491 - DNA, 15 bp, Homo sapiens
gaaacaaattcgccc

SEQ ID NO: 1595492 - DNA, 15 bp, Homo sapiens
tgaaacaaattcgcc

SEQ ID NO: 1595493 - DNA, 15 bp, Homo sapiens
atgaaacaaattcgc

SEQ ID NO: 1595494 - DNA, 15 bp, Homo sapiens
gatgaaacaaattcg

SEQ ID NO: 1595495 - DNA, 15 bp, Homo sapiens
agatgaaacaaattc

SEQ ID NO: 1595496 - DNA, 15 bp, Homo sapiens
gagatgaaacaaatt

SEQ ID NO: 1595497 - DNA, 15 bp, Homo sapiens
agagatgaaacaaat

SEQ ID NO: 1595498 - DNA, 15 bp, Homo sapiens
gagagatgaaacaaa

SEQ ID NO: 1595499 - DNA, 15 bp, Homo sapiens
agagagatgaaacaa

SEQ ID NO: 1595500 - DNA, 15 bp, Homo sapiens
aagagagatgaaaca

SEQ ID NO: 1595501 - DNA, 15 bp, Homo sapiens
caagagagatgaaac

SEQ ID NO: 1595502 - DNA, 15 bp, Homo sapiens
tcaagagagatgaaa

SEQ ID NO: 1595503 - DNA, 15 bp, Homo sapiens
ttcaagagagatgaa

SEQ ID NO: 1595504 - DNA, 15 bp, Homo sapiens
attcaagagagatga

SEQ ID NO: 1595505 - DNA, 15 bp, Homo sapiens
aattcaagagagatg

SEQ ID NO: 1595506 - DNA, 15 bp, Homo sapiens
gaattcaagagagat

SEQ ID NO: 1595507 - DNA, 15 bp, Homo sapiens
tgaattcaagagaga

SEQ ID NO: 1595508 - DNA, 15 bp, Homo sapiens
ctgaattcaagagag

SEQ ID NO: 1595509 - DNA, 15 bp, Homo sapiens
tctgaattcaagaga

SEQ ID NO: 1595510 - DNA, 15 bp, Homo sapiens
ttctgaattcaagag

SEQ ID NO: 1595511 - DNA, 15 bp, Homo sapiens
tttctgaattcaaga

SEQ ID NO: 1595512 - DNA, 15 bp, Homo sapiens
atttctgaattcaag

SEQ ID NO: 1595513 - DNA, 15 bp, Homo sapiens
catttctgaattcaa

SEQ ID NO: 1595514 - DNA, 15 bp, Homo sapiens
ccatttctgaattca

SEQ ID NO: 1595515 - DNA, 15 bp, Homo sapiens
tccatttctgaattc

SEQ ID NO: 1595516 - DNA, 15 bp, Homo sapiens
ctccatttctgaatt

SEQ ID NO: 1595517 - DNA, 15 bp, Homo sapiens
gctccatttctgaat

SEQ ID NO: 1595518 - DNA, 15 bp, Homo sapiens
ggctccatttctgaa

SEQ ID NO: 1595519 - DNA, 15 bp, Homo sapiens
aggctccatttctga

SEQ ID NO: 1595520 - DNA, 15 bp, Homo sapiens
aaggctccatttctg

SEQ ID NO: 1595521 - DNA, 15 bp, Homo sapiens
gaaggctccatttct

SEQ ID NO: 1595522 - DNA, 15 bp, Homo sapiens
tgaaggctccatttc

SEQ ID NO: 1595523 - DNA, 15 bp, Homo sapiens
ttgaaggctccattt

SEQ ID NO: 1595524 - DNA, 15 bp, Homo sapiens
tttgaaggctccatt

SEQ ID NO: 1595525 - DNA, 15 bp, Homo sapiens
ttttgaaggctccat

SEQ ID NO: 1595526 - DNA, 15 bp, Homo sapiens
cttttgaaggctcca

SEQ ID NO: 1595527 - DNA, 15 bp, Homo sapiens
acttttgaaggctcc

SEQ ID NO: 1595528 - DNA, 15 bp, Homo sapiens
gacttttgaaggctc

SEQ ID NO: 1595529 - DNA, 15 bp, Homo sapiens
agacttttgaaggct

SEQ ID NO: 1595530 - DNA, 15 bp, Homo sapiens
aagacttttgaaggc

SEQ ID NO: 1595531 - DNA, 15 bp, Homo sapiens
taagacttttgaagg

SEQ ID NO: 1595532 - DNA, 15 bp, Homo sapiens
ttaagacttttgaag

SEQ ID NO: 1595533 - DNA, 15 bp, Homo sapiens
attaagacttttgaa

SEQ ID NO: 1595534 - DNA, 15 bp, Homo sapiens
cattaagacttttga

SEQ ID NO: 1595535 - DNA, 15 bp, Homo sapiens
acattaagacttttg

SEQ ID NO: 1595536 - DNA, 15 bp, Homo sapiens
cacattaagactttt

SEQ ID NO: 1595537 - DNA, 15 bp, Homo sapiens
acacattaagacttt

SEQ ID NO: 1595538 - DNA, 15 bp, Homo sapiens
cacacattaagactt

SEQ ID NO: 1595539 - DNA, 15 bp, Homo sapiens
acacacattaagact

SEQ ID NO: 1595540 - DNA, 15 bp, Homo sapiens
aacacacattaagac

SEQ ID NO: 1595541 - DNA, 15 bp, Homo sapiens
aaacacacattaaga

SEQ ID NO: 1595542 - DNA, 15 bp, Homo sapiens
taaacacacattaag

SEQ ID NO: 1595543 - DNA, 15 bp, Homo sapiens
ataaacacacattaa

SEQ ID NO: 1595544 - DNA, 15 bp, Homo sapiens
aataaacacacatta

SEQ ID NO: 1595545 - DNA, 15 bp, Homo sapiens
aaataaacacacatt

SEQ ID NO: 1595546 - DNA, 15 bp, Homo sapiens
aaaataaacacacat

SEQ ID NO: 1595547 - DNA, 15 bp, Homo sapiens
aaaaataaacacaca

SEQ ID NO: 1595548 - DNA, 15 bp, Homo sapiens
aaaaaataaacacac

SEQ ID NO: 1595549 - DNA, 15 bp, Homo sapiens
gaaaaaataaacaca

SEQ ID NO: 1595550 - DNA, 15 bp, Homo sapiens
agaaaaaataaacac

SEQ ID NO: 1595551 - DNA, 15 bp, Homo sapiens
tagaaaaaataaaca

SEQ ID NO: 1595552 - DNA, 15 bp, Homo sapiens
ctagaaaaaataaac

SEQ ID NO: 1595553 - DNA, 15 bp, Homo sapiens
gctagaaaaaataaa

SEQ ID NO: 1595554 - DNA, 15 bp, Homo sapiens
tgctagaaaaaataa

SEQ ID NO: 1595555 - DNA, 15 bp, Homo sapiens
atgctagaaaaaata

SEQ ID NO: 1595556 - DNA, 15 bp, Homo sapiens
aatgctagaaaaaat

SEQ ID NO: 1595557 - DNA, 15 bp, Homo sapiens
gaatgctagaaaaaa

SEQ ID NO: 1595558 - DNA, 15 bp, Homo sapiens
tgaatgctagaaaaa

SEQ ID NO: 1595559 - DNA, 15 bp, Homo sapiens
ttgaatgctagaaaa

SEQ ID NO: 1595560 - DNA, 15 bp, Homo sapiens
tttgaatgctagaaa

SEQ ID NO: 1595561 - DNA, 15 bp, Homo sapiens
atttgaatgctagaa

SEQ ID NO: 1595562 - DNA, 15 bp, Homo sapiens
catttgaatgctaga

SEQ ID NO: 1595563 - DNA, 15 bp, Homo sapiens
tcatttgaatgctag

SEQ ID NO: 1595564 - DNA, 15 bp, Homo sapiens
ttcatttgaatgcta

SEQ ID NO: 1595565 - DNA, 15 bp, Homo sapiens
attcatttgaatgct

SEQ ID NO: 1595566 - DNA, 15 bp, Homo sapiens
cattcatttgaatgc

SEQ ID NO: 1595567 - DNA, 15 bp, Homo sapiens
gcattcatttgaatg

SEQ ID NO: 1595568 - DNA, 15 bp, Homo sapiens
cgcattcatttgaat

SEQ ID NO: 1595569 - DNA, 15 bp, Homo sapiens
tcgcattcatttgaa

SEQ ID NO: 1595570 - DNA, 15 bp, Homo sapiens
ttcgcattcatttga

SEQ ID NO: 1595571 - DNA, 15 bp, Homo sapiens
cttcgcattcatttg

SEQ ID NO: 1595572 - DNA, 15 bp, Homo sapiens
gcttcgcattcattt

SEQ ID NO: 1595573 - DNA, 15 bp, Homo sapiens
ggcttcgcattcatt

SEQ ID NO: 1595574 - DNA, 15 bp, Homo sapiens
tggcttcgcattcat

SEQ ID NO: 1595575 - DNA, 15 bp, Homo sapiens
gtggcttcgcattca

SEQ ID NO: 1595576 - DNA, 15 bp, Homo sapiens
cgtggcttcgcattc

SEQ ID NO: 1595577 - DNA, 15 bp, Homo sapiens
ccgtggcttcgcatt

SEQ ID NO: 1595578 - DNA, 15 bp, Homo sapiens
tccgtggcttcgcat

SEQ ID NO: 1595579 - DNA, 15 bp, Homo sapiens
atccgtggcttcgca

SEQ ID NO: 1595580 - DNA, 15 bp, Homo sapiens
aatccgtggcttcgc

SEQ ID NO: 1595581 - DNA, 15 bp, Homo sapiens
caatccgtggcttcg

SEQ ID NO: 1595582 - DNA, 15 bp, Homo sapiens
tcaatccgtggcttc

SEQ ID NO: 1595583 - DNA, 15 bp, Homo sapiens
ttcaatccgtggctt

SEQ ID NO: 1595584 - DNA, 15 bp, Homo sapiens
attcaatccgtggct

SEQ ID NO: 1595585 - DNA, 15 bp, Homo sapiens
gattcaatccgtggc

SEQ ID NO: 1595586 - DNA, 15 bp, Homo sapiens
ggattcaatccgtgg

SEQ ID NO: 1595587 - DNA, 15 bp, Homo sapiens
gggattcaatccgtg

SEQ ID NO: 1595588 - DNA, 15 bp, Homo sapiens
cgggattcaatccgt

SEQ ID NO: 1595589 - DNA, 15 bp, Homo sapiens
acgggattcaatccg

SEQ ID NO: 1595590 - DNA, 15 bp, Homo sapiens
gacgggattcaatcc

SEQ ID NO: 1595591 - DNA, 15 bp, Homo sapiens
tgacgggattcaatc

SEQ ID NO: 1595592 - DNA, 15 bp, Homo sapiens
gtgacgggattcaat

SEQ ID NO: 1595593 - DNA, 15 bp, Homo sapiens
agtgacgggattcaa

SEQ ID NO: 1595594 - DNA, 15 bp, Homo sapiens
gagtgacgggattca

SEQ ID NO: 1595595 - DNA, 15 bp, Homo sapiens
agagtgacgggattc

SEQ ID NO: 1595596 - DNA, 15 bp, Homo sapiens
aagagtgacgggatt

SEQ ID NO: 1595597 - DNA, 15 bp, Homo sapiens
aaagagtgacgggat

SEQ ID NO: 1595598 - DNA, 15 bp, Homo sapiens
caaagagtgacggga

SEQ ID NO: 1595599 - DNA, 15 bp, Homo sapiens
ccaaagagtgacggg

SEQ ID NO: 1595600 - DNA, 15 bp, Homo sapiens
cccaaagagtgacgg

SEQ ID NO: 1595601 - DNA, 15 bp, Homo sapiens
ccccaaagagtgacg

SEQ ID NO: 1595602 - DNA, 15 bp, Homo sapiens
cccccaaagagtgac

SEQ ID NO: 1595603 - DNA, 15 bp, Homo sapiens
acccccaaagagtga

SEQ ID NO: 1595604 - DNA, 15 bp, Homo sapiens
aacccccaaagagtg

SEQ ID NO: 1595605 - DNA, 15 bp, Homo sapiens
taacccccaaagagt

SEQ ID NO: 1595606 - DNA, 15 bp, Homo sapiens
ctaacccccaaagag

SEQ ID NO: 1595607 - DNA, 15 bp, Homo sapiens
gctaacccccaaaga

SEQ ID NO: 1595608 - DNA, 15 bp, Homo sapiens
agctaacccccaaag

SEQ ID NO: 1595609 - DNA, 15 bp, Homo sapiens
aagctaacccccaaa

SEQ ID NO: 1595610 - DNA, 15 bp, Homo sapiens
gaagctaacccccaa

SEQ ID NO: 1595611 - DNA, 15 bp, Homo sapiens
agaagctaaccccca

SEQ ID NO: 1595612 - DNA, 15 bp, Homo sapiens
gagaagctaaccccc

SEQ ID NO: 1595613 - DNA, 15 bp, Homo sapiens
ggagaagctaacccc

SEQ ID NO: 1595614 - DNA, 15 bp, Homo sapiens
gggagaagctaaccc

SEQ ID NO: 1595615 - DNA, 15 bp, Homo sapiens
cgggagaagctaacc

SEQ ID NO: 1595616 - DNA, 15 bp, Homo sapiens
tcgggagaagctaac

SEQ ID NO: 1595617 - DNA, 15 bp, Homo sapiens
atcgggagaagctaa

SEQ ID NO: 1595618 - DNA, 15 bp, Homo sapiens
tatcgggagaagcta

SEQ ID NO: 1595619 - DNA, 15 bp, Homo sapiens
atatcgggagaagct

SEQ ID NO: 1595620 - DNA, 15 bp, Homo sapiens
aatatcgggagaagc

SEQ ID NO: 1595621 - DNA, 15 bp, Homo sapiens
aaatatcgggagaag

SEQ ID NO: 1595622 - DNA, 15 bp, Homo sapiens
gaaatatcgggagaa

SEQ ID NO: 1595623 - DNA, 15 bp, Homo sapiens
tgaaatatcgggaga

SEQ ID NO: 1595624 - DNA, 15 bp, Homo sapiens
gtgaaatatcgggag

SEQ ID NO: 1595625 - DNA, 15 bp, Homo sapiens
tgtgaaatatcggga

SEQ ID NO: 1595626 - DNA, 15 bp, Homo sapiens
gtgtgaaatatcggg

SEQ ID NO: 1595627 - DNA, 15 bp, Homo sapiens
cgtgtgaaatatcgg

SEQ ID NO: 1595628 - DNA, 15 bp, Homo sapiens
ccgtgtgaaatatcg

SEQ ID NO: 1595629 - DNA, 15 bp, Homo sapiens
tccgtgtgaaatatc

SEQ ID NO: 1595630 - DNA, 15 bp, Homo sapiens
ttccgtgtgaaatat

SEQ ID NO: 1595631 - DNA, 15 bp, Homo sapiens
tttccgtgtgaaata

SEQ ID NO: 1595632 - DNA, 15 bp, Homo sapiens
ttttccgtgtgaaat

SEQ ID NO: 1595633 - DNA, 15 bp, Homo sapiens
gttttccgtgtgaaa

SEQ ID NO: 1595634 - DNA, 15 bp, Homo sapiens
tgttttccgtgtgaa

SEQ ID NO: 1595635 - DNA, 15 bp, Homo sapiens
ttgttttccgtgtga

SEQ ID NO: 1595636 - DNA, 15 bp, Homo sapiens
tttgttttccgtgtg

SEQ ID NO: 1595637 - DNA, 15 bp, Homo sapiens
ttttgttttccgtgt

SEQ ID NO: 1595638 - DNA, 15 bp, Homo sapiens
gttttgttttccgtg

SEQ ID NO: 1595639 - DNA, 15 bp, Homo sapiens
agttttgttttccgt

SEQ ID NO: 1595640 - DNA, 15 bp, Homo sapiens
cagttttgttttccg

SEQ ID NO: 1595641 - DNA, 15 bp, Homo sapiens
ccagttttgttttcc

SEQ ID NO: 1595642 - DNA, 15 bp, Homo sapiens
cccagttttgttttc

SEQ ID NO: 1595643 - DNA, 15 bp, Homo sapiens
acccagttttgtttt

SEQ ID NO: 1595644 - DNA, 15 bp, Homo sapiens
gacccagttttgttt

SEQ ID NO: 1595645 - DNA, 15 bp, Homo sapiens
ggacccagttttgtt

SEQ ID NO: 1595646 - DNA, 15 bp, Homo sapiens
gggacccagttttgt

SEQ ID NO: 1595647 - DNA, 15 bp, Homo sapiens
agggacccagttttg

SEQ ID NO: 1595648 - DNA, 15 bp, Homo sapiens
gagggacccagtttt

SEQ ID NO: 1595649 - DNA, 15 bp, Homo sapiens
agagggacccagttt

SEQ ID NO: 1595650 - DNA, 15 bp, Homo sapiens
aagagggacccagtt

SEQ ID NO: 1595651 - DNA, 15 bp, Homo sapiens
taagagggacccagt

SEQ ID NO: 1595652 - DNA, 15 bp, Homo sapiens
ataagagggacccag

SEQ ID NO: 1595653 - DNA, 15 bp, Homo sapiens
aataagagggaccca

SEQ ID NO: 1595654 - DNA, 15 bp, Homo sapiens
aaataagagggaccc

SEQ ID NO: 1595655 - DNA, 15 bp, Homo sapiens
caaataagagggacc

SEQ ID NO: 1595656 - DNA, 15 bp, Homo sapiens
acaaataagagggac

SEQ ID NO: 1595657 - DNA, 15 bp, Homo sapiens
tacaaataagaggga

SEQ ID NO: 1595658 - DNA, 15 bp, Homo sapiens
gtacaaataagaggg

SEQ ID NO: 1595659 - DNA, 15 bp, Homo sapiens
agtacaaataagagg

SEQ ID NO: 1595660 - DNA, 15 bp, Homo sapiens
aagtacaaataagag

SEQ ID NO: 1595661 - DNA, 15 bp, Homo sapiens
caagtacaaataaga

SEQ ID NO: 1595662 - DNA, 15 bp, Homo sapiens
acaagtacaaataag

SEQ ID NO: 1595663 - DNA, 15 bp, Homo sapiens
gacaagtacaaataa

SEQ ID NO: 1595664 - DNA, 15 bp, Homo sapiens
ggacaagtacaaata

SEQ ID NO: 1595665 - DNA, 15 bp, Homo sapiens
aggacaagtacaaat

SEQ ID NO: 1595666 - DNA, 15 bp, Homo sapiens
aaggacaagtacaaa

SEQ ID NO: 1595667 - DNA, 15 bp, Homo sapiens
taaggacaagtacaa

SEQ ID NO: 1595668 - DNA, 15 bp, Homo sapiens
ttaaggacaagtaca

SEQ ID NO: 1595669 - DNA, 15 bp, Homo sapiens
gttaaggacaagtac

SEQ ID NO: 1595670 - DNA, 15 bp, Homo sapiens
ggttaaggacaagta

SEQ ID NO: 1595671 - DNA, 15 bp, Homo sapiens
aggttaaggacaagt

SEQ ID NO: 1595672 - DNA, 15 bp, Homo sapiens
aaggttaaggacaag

SEQ ID NO: 1595673 - DNA, 15 bp, Homo sapiens
aaaggttaaggacaa

SEQ ID NO: 1595674 - DNA, 15 bp, Homo sapiens
caaaggttaaggaca

SEQ ID NO: 1595675 - DNA, 15 bp, Homo sapiens
gcaaaggttaaggac

SEQ ID NO: 1595676 - DNA, 15 bp, Homo sapiens
tgcaaaggttaagga

SEQ ID NO: 1595677 - DNA, 15 bp, Homo sapiens
ctgcaaaggttaagg

SEQ ID NO: 1595678 - DNA, 15 bp, Homo sapiens
gctgcaaaggttaag

SEQ ID NO: 1595679 - DNA, 15 bp, Homo sapiens
tgctgcaaaggttaa

SEQ ID NO: 1595680 - DNA, 15 bp, Homo sapiens
ttgctgcaaaggtta

SEQ ID NO: 1595681 - DNA, 15 bp, Homo sapiens
gttgctgcaaaggtt

SEQ ID NO: 1595682 - DNA, 15 bp, Homo sapiens
agttgctgcaaaggt

SEQ ID NO: 1595683 - DNA, 15 bp, Homo sapiens
cagttgctgcaaagg

SEQ ID NO: 1595684 - DNA, 15 bp, Homo sapiens
gcagttgctgcaaag

SEQ ID NO: 1595685 - DNA, 15 bp, Homo sapiens
agcagttgctgcaaa

SEQ ID NO: 1595686 - DNA, 15 bp, Homo sapiens
cagcagttgctgcaa

SEQ ID NO: 1595687 - DNA, 15 bp, Homo sapiens
acagcagttgctgca

SEQ ID NO: 1595688 - DNA, 15 bp, Homo sapiens
tacagcagttgctgc

SEQ ID NO: 1595689 - DNA, 15 bp, Homo sapiens
ctacagcagttgctg

SEQ ID NO: 1595690 - DNA, 15 bp, Homo sapiens
tctacagcagttgct

SEQ ID NO: 1595691 - DNA, 15 bp, Homo sapiens
atctacagcagttgc

SEQ ID NO: 1595692 - DNA, 15 bp, Homo sapiens
catctacagcagttg

SEQ ID NO: 1595693 - DNA, 15 bp, Homo sapiens
gcatctacagcagtt

SEQ ID NO: 1595694 - DNA, 15 bp, Homo sapiens
cgcatctacagcagt

SEQ ID NO: 1595695 - DNA, 15 bp, Homo sapiens
ccgcatctacagcag

SEQ ID NO: 1595696 - DNA, 15 bp, Homo sapiens
gccgcatctacagca

SEQ ID NO: 1595697 - DNA, 15 bp, Homo sapiens
agccgcatctacagc

SEQ ID NO: 1595698 - DNA, 15 bp, Homo sapiens
gagccgcatctacag

SEQ ID NO: 1595699 - DNA, 15 bp, Homo sapiens
agagccgcatctaca

SEQ ID NO: 1595700 - DNA, 15 bp, Homo sapiens
cagagccgcatctac

SEQ ID NO: 1595701 - DNA, 15 bp, Homo sapiens
acagagccgcatcta

SEQ ID NO: 1595702 - DNA, 15 bp, Homo sapiens
gacagagccgcatct

SEQ ID NO: 1595703 - DNA, 15 bp, Homo sapiens
ggacagagccgcatc

SEQ ID NO: 1595704 - DNA, 15 bp, Homo sapiens
tggacagagccgcat

SEQ ID NO: 1595705 - DNA, 15 bp, Homo sapiens
atggacagagccgca

SEQ ID NO: 1595706 - DNA, 15 bp, Homo sapiens
aatggacagagccgc

SEQ ID NO: 1595707 - DNA, 15 bp, Homo sapiens
gaatggacagagccg

SEQ ID NO: 1595708 - DNA, 15 bp, Homo sapiens
agaatggacagagcc

SEQ ID NO: 1595709 - DNA, 15 bp, Homo sapiens
gagaatggacagagc

SEQ ID NO: 1595710 - DNA, 15 bp, Homo sapiens
agagaatggacagag

SEQ ID NO: 1595711 - DNA, 15 bp, Homo sapiens
tagagaatggacaga

SEQ ID NO: 1595712 - DNA, 15 bp, Homo sapiens
ttagagaatggacag

SEQ ID NO: 1595713 - DNA, 15 bp, Homo sapiens
attagagaatggaca

SEQ ID NO: 1595714 - DNA, 15 bp, Homo sapiens
tattagagaatggac

SEQ ID NO: 1595715 - DNA, 15 bp, Homo sapiens
ctattagagaatgga

SEQ ID NO: 1595716 - DNA, 15 bp, Homo sapiens
tctattagagaatgg

SEQ ID NO: 1595717 - DNA, 15 bp, Homo sapiens
atctattagagaatg

SEQ ID NO: 1595718 - DNA, 15 bp, Homo sapiens
aatctattagagaat

SEQ ID NO: 1595719 - DNA, 15 bp, Homo sapiens
aaatctattagagaa

SEQ ID NO: 1595720 - DNA, 15 bp, Homo sapiens
aaaatctattagaga

SEQ ID NO: 1595721 - DNA, 15 bp, Homo sapiens
taaaatctattagag

SEQ ID NO: 1595722 - DNA, 15 bp, Homo sapiens
gtaaaatctattaga

SEQ ID NO: 1595723 - DNA, 15 bp, Homo sapiens
ggtaaaatctattag

SEQ ID NO: 1595724 - DNA, 15 bp, Homo sapiens
tggtaaaatctatta

SEQ ID NO: 1595725 - DNA, 15 bp, Homo sapiens
ctggtaaaatctatt

SEQ ID NO: 1595726 - DNA, 15 bp, Homo sapiens
cctggtaaaatctat

SEQ ID NO: 1595727 - DNA, 15 bp, Homo sapiens
ccctggtaaaatcta

SEQ ID NO: 1595728 - DNA, 15 bp, Homo sapiens
cccctggtaaaatct

SEQ ID NO: 1595729 - DNA, 15 bp, Homo sapiens
gcccctggtaaaatc

SEQ ID NO: 1595730 - DNA, 15 bp, Homo sapiens
agcccctggtaaaat

SEQ ID NO: 1595731 - DNA, 15 bp, Homo sapiens
cagcccctggtaaaa

SEQ ID NO: 1595732 - DNA, 15 bp, Homo sapiens
ccagcccctggtaaa

SEQ ID NO: 1595733 - DNA, 15 bp, Homo sapiens
accagcccctggtaa

SEQ ID NO: 1595734 - DNA, 15 bp, Homo sapiens
caccagcccctggta

SEQ ID NO: 1595735 - DNA, 15 bp, Homo sapiens
tcaccagcccctggt

SEQ ID NO: 1595736 - DNA, 15 bp, Homo sapiens
gtcaccagcccctgg

SEQ ID NO: 1595737 - DNA, 15 bp, Homo sapiens
tgtcaccagcccctg

SEQ ID NO: 1595738 - DNA, 15 bp, Homo sapiens
ctgtcaccagcccct

SEQ ID NO: 1595739 - DNA, 15 bp, Homo sapiens
tctgtcaccagcccc

SEQ ID NO: 1595740 - DNA, 15 bp, Homo sapiens
ctctgtcaccagccc

SEQ ID NO: 1595741 - DNA, 15 bp, Homo sapiens
tctctgtcaccagcc

SEQ ID NO: 1595742 - DNA, 15 bp, Homo sapiens
ttctctgtcaccagc

SEQ ID NO: 1595743 - DNA, 15 bp, Homo sapiens
gttctctgtcaccag

SEQ ID NO: 1595744 - DNA, 15 bp, Homo sapiens
agttctctgtcacca

SEQ ID NO: 1595745 - DNA, 15 bp, Homo sapiens
cagttctctgtcacc

SEQ ID NO: 1595746 - DNA, 15 bp, Homo sapiens
tcagttctctgtcac

SEQ ID NO: 1595747 - DNA, 15 bp, Homo sapiens
atcagttctctgtca

SEQ ID NO: 1595748 - DNA, 15 bp, Homo sapiens
aatcagttctctgtc

SEQ ID NO: 1595749 - DNA, 15 bp, Homo sapiens
aaatcagttctctgt

SEQ ID NO: 1595750 - DNA, 15 bp, Homo sapiens
gaaatcagttctctg

SEQ ID NO: 1595751 - DNA, 15 bp, Homo sapiens
agaaatcagttctct

SEQ ID NO: 1595752 - DNA, 15 bp, Homo sapiens
aagaaatcagttctc

SEQ ID NO: 1595753 - DNA, 15 bp, Homo sapiens
aaagaaatcagttct

SEQ ID NO: 1595754 - DNA, 15 bp, Homo sapiens
aaaagaaatcagttc

SEQ ID NO: 1595755 - DNA, 15 bp, Homo sapiens
gaaaagaaatcagtt

SEQ ID NO: 1595756 - DNA, 15 bp, Homo sapiens
agaaaagaaatcagt

SEQ ID NO: 1595757 - DNA, 15 bp, Homo sapiens
tagaaaagaaatcag

SEQ ID NO: 1595758 - DNA, 15 bp, Homo sapiens
atagaaaagaaatca

SEQ ID NO: 1595759 - DNA, 15 bp, Homo sapiens
aatagaaaagaaatc

SEQ ID NO: 1595760 - DNA, 15 bp, Homo sapiens
taatagaaaagaaat

SEQ ID NO: 1595761 - DNA, 15 bp, Homo sapiens
ctaatagaaaagaaa

SEQ ID NO: 1595762 - DNA, 15 bp, Homo sapiens
cctaatagaaaagaa

SEQ ID NO: 1595763 - DNA, 15 bp, Homo sapiens
ccctaatagaaaaga

SEQ ID NO: 1595764 - DNA, 15 bp, Homo sapiens
accctaatagaaaag

SEQ ID NO: 1595765 - DNA, 15 bp, Homo sapiens
aaccctaatagaaaa

SEQ ID NO: 1595766 - DNA, 15 bp, Homo sapiens
aaaccctaatagaaa

SEQ ID NO: 1595767 - DNA, 15 bp, Homo sapiens
taaaccctaatagaa

SEQ ID NO: 1595768 - DNA, 15 bp, Homo sapiens
ctaaaccctaataga

SEQ ID NO: 1595769 - DNA, 15 bp, Homo sapiens
gctaaaccctaatag

SEQ ID NO: 1595770 - DNA, 15 bp, Homo sapiens
tgctaaaccctaata

SEQ ID NO: 1595771 - DNA, 15 bp, Homo sapiens
gtgctaaaccctaat

SEQ ID NO: 1595772 - DNA, 15 bp, Homo sapiens
tgtgctaaaccctaa

SEQ ID NO: 1595773 - DNA, 15 bp, Homo sapiens
atgtgctaaacccta

SEQ ID NO: 1595774 - DNA, 15 bp, Homo sapiens
gatgtgctaaaccct

SEQ ID NO: 1595775 - DNA, 15 bp, Homo sapiens
agatgtgctaaaccc

SEQ ID NO: 1595776 - DNA, 15 bp, Homo sapiens
aagatgtgctaaacc

SEQ ID NO: 1595777 - DNA, 15 bp, Homo sapiens
aaagatgtgctaaac

SEQ ID NO: 1595778 - DNA, 15 bp, Homo sapiens
caaagatgtgctaaa

SEQ ID NO: 1595779 - DNA, 15 bp, Homo sapiens
acaaagatgtgctaa

SEQ ID NO: 1595780 - DNA, 15 bp, Homo sapiens
aacaaagatgtgcta

SEQ ID NO: 1595781 - DNA, 15 bp, Homo sapiens
caacaaagatgtgct

SEQ ID NO: 1595782 - DNA, 15 bp, Homo sapiens
tcaacaaagatgtgc

SEQ ID NO: 1595783 - DNA, 15 bp, Homo sapiens
ttcaacaaagatgtg

SEQ ID NO: 1595784 - DNA, 15 bp, Homo sapiens
cttcaacaaagatgt

SEQ ID NO: 1595785 - DNA, 15 bp, Homo sapiens
ccttcaacaaagatg

SEQ ID NO: 1595786 - DNA, 15 bp, Homo sapiens
gccttcaacaaagat

SEQ ID NO: 1595787 - DNA, 15 bp, Homo sapiens
ggccttcaacaaaga

SEQ ID NO: 1595788 - DNA, 15 bp, Homo sapiens
aggccttcaacaaag

SEQ ID NO: 1595789 - DNA, 15 bp, Homo sapiens
caggccttcaacaaa

SEQ ID NO: 1595790 - DNA, 15 bp, Homo sapiens
acaggccttcaacaa

SEQ ID NO: 1595791 - DNA, 15 bp, Homo sapiens
tacaggccttcaaca

SEQ ID NO: 1595792 - DNA, 15 bp, Homo sapiens
ctacaggccttcaac

SEQ ID NO: 1595793 - DNA, 15 bp, Homo sapiens
tctacaggccttcaa

SEQ ID NO: 1595794 - DNA, 15 bp, Homo sapiens
ttctacaggccttca

SEQ ID NO: 1595795 - DNA, 15 bp, Homo sapiens
attctacaggccttc

SEQ ID NO: 1595796 - DNA, 15 bp, Homo sapiens
cattctacaggcctt

SEQ ID NO: 1595797 - DNA, 15 bp, Homo sapiens
tcattctacaggcct

SEQ ID NO: 1595798 - DNA, 15 bp, Homo sapiens
gtcattctacaggcc

SEQ ID NO: 1595799 - DNA, 15 bp, Homo sapiens
ggtcattctacaggc

SEQ ID NO: 1595800 - DNA, 15 bp, Homo sapiens
tggtcattctacagg

SEQ ID NO: 1595801 - DNA, 15 bp, Homo sapiens
ctggtcattctacag

SEQ ID NO: 1595802 - DNA, 15 bp, Homo sapiens
cctggtcattctaca

SEQ ID NO: 1595803 - DNA, 15 bp, Homo sapiens
ccctggtcattctac

SEQ ID NO: 1595804 - DNA, 15 bp, Homo sapiens
tccctggtcattcta

SEQ ID NO: 1595805 - DNA, 15 bp, Homo sapiens
atccctggtcattct

SEQ ID NO: 1595806 - DNA, 15 bp, Homo sapiens
aatccctggtcattc

SEQ ID NO: 1595807 - DNA, 15 bp, Homo sapiens
taatccctggtcatt

SEQ ID NO: 1595808 - DNA, 15 bp, Homo sapiens
ctaatccctggtcat

SEQ ID NO: 1595809 - DNA, 15 bp, Homo sapiens
tctaatccctggtca

SEQ ID NO: 1595810 - DNA, 15 bp, Homo sapiens
atctaatccctggtc

SEQ ID NO: 1595811 - DNA, 15 bp, Homo sapiens
aatctaatccctggt

SEQ ID NO: 1595812 - DNA, 15 bp, Homo sapiens
aaatctaatccctgg

SEQ ID NO: 1595813 - DNA, 15 bp, Homo sapiens
caaatctaatccctg

SEQ ID NO: 1595814 - DNA, 15 bp, Homo sapiens
gcaaatctaatccct

SEQ ID NO: 1595815 - DNA, 15 bp, Homo sapiens
tgcaaatctaatccc

SEQ ID NO: 1595816 - DNA, 15 bp, Homo sapiens
atgcaaatctaatcc

SEQ ID NO: 1595817 - DNA, 15 bp, Homo sapiens
gatgcaaatctaatc

SEQ ID NO: 1595818 - DNA, 15 bp, Homo sapiens
agatgcaaatctaat

SEQ ID NO: 1595819 - DNA, 15 bp, Homo sapiens
gagatgcaaatctaa

SEQ ID NO: 1595820 - DNA, 15 bp, Homo sapiens
agagatgcaaatcta

SEQ ID NO: 1595821 - DNA, 15 bp, Homo sapiens
aagagatgcaaatct

SEQ ID NO: 1595822 - DNA, 15 bp, Homo sapiens
taagagatgcaaatc

SEQ ID NO: 1595823 - DNA, 15 bp, Homo sapiens
ctaagagatgcaaat

SEQ ID NO: 1595824 - DNA, 15 bp, Homo sapiens
tctaagagatgcaaa

SEQ ID NO: 1595825 - DNA, 15 bp, Homo sapiens
gtctaagagatgcaa

SEQ ID NO: 1595826 - DNA, 15 bp, Homo sapiens
cgtctaagagatgca

SEQ ID NO: 1595827 - DNA, 15 bp, Homo sapiens
gcgtctaagagatgc

SEQ ID NO: 1595828 - DNA, 15 bp, Homo sapiens
ggcgtctaagagatg

SEQ ID NO: 1595829 - DNA, 15 bp, Homo sapiens
gggcgtctaagagat

SEQ ID NO: 1595830 - DNA, 15 bp, Homo sapiens
agggcgtctaagaga

SEQ ID NO: 1595831 - DNA, 15 bp, Homo sapiens
cagggcgtctaagag

SEQ ID NO: 1595832 - DNA, 15 bp, Homo sapiens
acagggcgtctaaga

SEQ ID NO: 1595833 - DNA, 15 bp, Homo sapiens
cacagggcgtctaag

SEQ ID NO: 1595834 - DNA, 15 bp, Homo sapiens
acacagggcgtctaa

SEQ ID NO: 1595835 - DNA, 15 bp, Homo sapiens
cacacagggcgtcta

SEQ ID NO: 1595836 - DNA, 15 bp, Homo sapiens
ccacacagggcgtct

SEQ ID NO: 1595837 - DNA, 15 bp, Homo sapiens
accacacagggcgtc

SEQ ID NO: 1595838 - DNA, 15 bp, Homo sapiens
gaccacacagggcgt

SEQ ID NO: 1595839 - DNA, 15 bp, Homo sapiens
agaccacacagggcg

SEQ ID NO: 1595840 - DNA, 15 bp, Homo sapiens
aagaccacacagggc

SEQ ID NO: 1595841 - DNA, 15 bp, Homo sapiens
aaagaccacacaggg

SEQ ID NO: 1595842 - DNA, 15 bp, Homo sapiens
caaagaccacacagg

SEQ ID NO: 1595843 - DNA, 15 bp, Homo sapiens
acaaagaccacacag

SEQ ID NO: 1595844 - DNA, 15 bp, Homo sapiens
cacaaagaccacaca

SEQ ID NO: 1595845 - DNA, 15 bp, Homo sapiens
gcacaaagaccacac

SEQ ID NO: 1595846 - DNA, 15 bp, Homo sapiens
cgcacaaagaccaca

SEQ ID NO: 1595847 - DNA, 15 bp, Homo sapiens
tcgcacaaagaccac

SEQ ID NO: 1595848 - DNA, 15 bp, Homo sapiens
ttcgcacaaagacca

SEQ ID NO: 1595849 - DNA, 15 bp, Homo sapiens
cttcgcacaaagacc

SEQ ID NO: 1595850 - DNA, 15 bp, Homo sapiens
gcttcgcacaaagac

SEQ ID NO: 1595851 - DNA, 15 bp, Homo sapiens
agcttcgcacaaaga

SEQ ID NO: 1595852 - DNA, 15 bp, Homo sapiens
aagcttcgcacaaag

SEQ ID NO: 1595853 - DNA, 15 bp, Homo sapiens
caagcttcgcacaaa

SEQ ID NO: 1595854 - DNA, 15 bp, Homo sapiens
acaagcttcgcacaa

SEQ ID NO: 1595855 - DNA, 15 bp, Homo sapiens
tacaagcttcgcaca

SEQ ID NO: 1595856 - DNA, 15 bp, Homo sapiens
ttacaagcttcgcac

SEQ ID NO: 1595857 - DNA, 15 bp, Homo sapiens
gttacaagcttcgca

SEQ ID NO: 1595858 - DNA, 15 bp, Homo sapiens
agttacaagcttcgc

SEQ ID NO: 1595859 - DNA, 15 bp, Homo sapiens
cagttacaagcttcg

SEQ ID NO: 1595860 - DNA, 15 bp, Homo sapiens
acagttacaagcttc

SEQ ID NO: 1595861 - DNA, 15 bp, Homo sapiens
aacagttacaagctt

SEQ ID NO: 1595862 - DNA, 15 bp, Homo sapiens
taacagttacaagct

SEQ ID NO: 1595863 - DNA, 15 bp, Homo sapiens
ttaacagttacaagc

SEQ ID NO: 1595864 - DNA, 15 bp, Homo sapiens
tttaacagttacaag

SEQ ID NO: 1595865 - DNA, 15 bp, Homo sapiens
ttttaacagttacaa

SEQ ID NO: 1595866 - DNA, 15 bp, Homo sapiens
tttttaacagttaca

SEQ ID NO: 1595867 - DNA, 15 bp, Homo sapiens
atttttaacagttac

SEQ ID NO: 1595868 - DNA, 15 bp, Homo sapiens
catttttaacagtta

SEQ ID NO: 1595869 - DNA, 15 bp, Homo sapiens
tcatttttaacagtt

SEQ ID NO: 1595870 - DNA, 15 bp, Homo sapiens
gtcatttttaacagt

SEQ ID NO: 1595871 - DNA, 15 bp, Homo sapiens
agtcatttttaacag

SEQ ID NO: 1595872 - DNA, 15 bp, Homo sapiens
aagtcatttttaaca

SEQ ID NO: 1595873 - DNA, 15 bp, Homo sapiens
caagtcatttttaac

SEQ ID NO: 1595874 - DNA, 15 bp, Homo sapiens
taacaagtcattttt

SEQ ID NO: 1595875 - DNA, 15 bp, Homo sapiens
ctaacaagtcatttt

SEQ ID NO: 1595876 - DNA, 15 bp, Homo sapiens
cctaacaagtcattt

SEQ ID NO: 1595877 - DNA, 15 bp, Homo sapiens
tcctaacaagtcatt

SEQ ID NO: 1595878 - DNA, 15 bp, Homo sapiens
ttcctaacaagtcat

SEQ ID NO: 1595879 - DNA, 15 bp, Homo sapiens
cttcctaacaagtca

SEQ ID NO: 1595880 - DNA, 15 bp, Homo sapiens
gcttcctaacaagtc

SEQ ID NO: 1595881 - DNA, 15 bp, Homo sapiens
cgcttcctaacaagt

SEQ ID NO: 1595882 - DNA, 15 bp, Homo sapiens
acgcttcctaacaag

SEQ ID NO: 1595883 - DNA, 15 bp, Homo sapiens
cacgcttcctaacaa

SEQ ID NO: 1595884 - DNA, 15 bp, Homo sapiens
acacgcttcctaaca

SEQ ID NO: 1595885 - DNA, 15 bp, Homo sapiens
cacacgcttcctaac

SEQ ID NO: 1595886 - DNA, 15 bp, Homo sapiens
ccacacgcttcctaa

SEQ ID NO: 1595887 - DNA, 15 bp, Homo sapiens
cccacacgcttccta

SEQ ID NO: 1595888 - DNA, 15 bp, Homo sapiens
gcccacacgcttcct

SEQ ID NO: 1595889 - DNA, 15 bp, Homo sapiens
agcccacacgcttcc

SEQ ID NO: 1595890 - DNA, 15 bp, Homo sapiens
gagcccacacgcttc

SEQ ID NO: 1595891 - DNA, 15 bp, Homo sapiens
agagcccacacgctt

SEQ ID NO: 1595892 - DNA, 15 bp, Homo sapiens
gagagcccacacgct

SEQ ID NO: 1595893 - DNA, 15 bp, Homo sapiens
tgagagcccacacgc

SEQ ID NO: 1595894 - DNA, 15 bp, Homo sapiens
atgagagcccacacg

SEQ ID NO: 1595895 - DNA, 15 bp, Homo sapiens
gatgagagcccacac

SEQ ID NO: 1595896 - DNA, 15 bp, Homo sapiens
cgatgagagcccaca

SEQ ID NO: 1595897 - DNA, 15 bp, Homo sapiens
gcgatgagagcccac

SEQ ID NO: 1595898 - DNA, 15 bp, Homo sapiens
agcgatgagagccca

SEQ ID NO: 1595899 - DNA, 15 bp, Homo sapiens
gagcgatgagagccc

SEQ ID NO: 1595900 - DNA, 15 bp, Homo sapiens
agagcgatgagagcc

SEQ ID NO: 1595901 - DNA, 15 bp, Homo sapiens
gagagcgatgagagc

SEQ ID NO: 1595902 - DNA, 15 bp, Homo sapiens
ggagagcgatgagag

SEQ ID NO: 1595903 - DNA, 15 bp, Homo sapiens
aggagagcgatgaga

SEQ ID NO: 1595904 - DNA, 15 bp, Homo sapiens
aaggagagcgatgag

SEQ ID NO: 1595905 - DNA, 15 bp, Homo sapiens
aaaggagagcgatga

SEQ ID NO: 1595906 - DNA, 15 bp, Homo sapiens
aaaaggagagcgatg

SEQ ID NO: 1595907 - DNA, 15 bp, Homo sapiens
caaaaggagagcgat

SEQ ID NO: 1595908 - DNA, 15 bp, Homo sapiens
tcaaaaggagagcga

SEQ ID NO: 1595909 - DNA, 15 bp, Homo sapiens
gtcaaaaggagagcg

SEQ ID NO: 1595910 - DNA, 15 bp, Homo sapiens
tgtcaaaaggagagc

SEQ ID NO: 1595911 - DNA, 15 bp, Homo sapiens
ctgtcaaaaggagag

SEQ ID NO: 1595912 - DNA, 15 bp, Homo sapiens
tctgtcaaaaggaga

SEQ ID NO: 1595913 - DNA, 15 bp, Homo sapiens
ttctgtcaaaaggag

SEQ ID NO: 1595914 - DNA, 15 bp, Homo sapiens
attctgtcaaaagga

SEQ ID NO: 1595915 - DNA, 15 bp, Homo sapiens
cattctgtcaaaagg

SEQ ID NO: 1595916 - DNA, 15 bp, Homo sapiens
tcattctgtcaaaag

SEQ ID NO: 1595917 - DNA, 15 bp, Homo sapiens
atcattctgtcaaaa

SEQ ID NO: 1595918 - DNA, 15 bp, Homo sapiens
aatcattctgtcaaa

SEQ ID NO: 1595919 - DNA, 15 bp, Homo sapiens
caatcattctgtcaa

SEQ ID NO: 1595920 - DNA, 15 bp, Homo sapiens
acaatcattctgtca

SEQ ID NO: 1595921 - DNA, 15 bp, Homo sapiens
cacaatcattctgtc

SEQ ID NO: 1595922 - DNA, 15 bp, Homo sapiens
tcacaatcattctgt

SEQ ID NO: 1595923 - DNA, 15 bp, Homo sapiens
ttcacaatcattctg

SEQ ID NO: 1595924 - DNA, 15 bp, Homo sapiens
tttcacaatcattct

SEQ ID NO: 1595925 - DNA, 15 bp, Homo sapiens
atttcacaatcattc

SEQ ID NO: 1595926 - DNA, 15 bp, Homo sapiens
aatttcacaatcatt

SEQ ID NO: 1595927 - DNA, 15 bp, Homo sapiens
gaatttcacaatcat

SEQ ID NO: 1595928 - DNA, 15 bp, Homo sapiens
tgaatttcacaatca

SEQ ID NO: 1595929 - DNA, 15 bp, Homo sapiens
ctgaatttcacaatc

SEQ ID NO: 1595930 - DNA, 15 bp, Homo sapiens
tctgaatttcacaat

SEQ ID NO: 1595931 - DNA, 15 bp, Homo sapiens
atctgaatttcacaa

SEQ ID NO: 1595932 - DNA, 15 bp, Homo sapiens
aatctgaatttcaca

SEQ ID NO: 1595933 - DNA, 15 bp, Homo sapiens
caatctgaatttcac

SEQ ID NO: 1595934 - DNA, 15 bp, Homo sapiens
ccaatctgaatttca

SEQ ID NO: 1595935 - DNA, 15 bp, Homo sapiens
gccaatctgaatttc

SEQ ID NO: 1595936 - DNA, 15 bp, Homo sapiens
ggccaatctgaattt

SEQ ID NO: 1595937 - DNA, 15 bp, Homo sapiens
gggccaatctgaatt

SEQ ID NO: 1595938 - DNA, 15 bp, Homo sapiens
agggccaatctgaat

SEQ ID NO: 1595939 - DNA, 15 bp, Homo sapiens
cagggccaatctgaa

SEQ ID NO: 1595940 - DNA, 15 bp, Homo sapiens
acagggccaatctga

SEQ ID NO: 1595941 - DNA, 15 bp, Homo sapiens
tacagggccaatctg

SEQ ID NO: 1595942 - DNA, 15 bp, Homo sapiens
ctacagggccaatct

SEQ ID NO: 1595943 - DNA, 15 bp, Homo sapiens
cctacagggccaatc

SEQ ID NO: 1595944 - DNA, 15 bp, Homo sapiens
tcctacagggccaat

SEQ ID NO: 1595945 - DNA, 15 bp, Homo sapiens
atcctacagggccaa

SEQ ID NO: 1595946 - DNA, 15 bp, Homo sapiens
aatcctacagggcca

SEQ ID NO: 1595947 - DNA, 15 bp, Homo sapiens
aaatcctacagggcc

SEQ ID NO: 1595948 - DNA, 15 bp, Homo sapiens
taaatcctacagggc

SEQ ID NO: 1595949 - DNA, 15 bp, Homo sapiens
ctaaatcctacaggg

SEQ ID NO: 1595950 - DNA, 15 bp, Homo sapiens
gctaaatcctacagg

SEQ ID NO: 1595951 - DNA, 15 bp, Homo sapiens
ggctaaatcctacag

SEQ ID NO: 1595952 - DNA, 15 bp, Homo sapiens
gggctaaatcctaca

SEQ ID NO: 1595953 - DNA, 15 bp, Homo sapiens
tgggctaaatcctac

SEQ ID NO: 1595954 - DNA, 15 bp, Homo sapiens
gtgggctaaatccta

SEQ ID NO: 1595955 - DNA, 15 bp, Homo sapiens
tgtgggctaaatcct

SEQ ID NO: 1595956 - DNA, 15 bp, Homo sapiens
ctgtgggctaaatcc

SEQ ID NO: 1595957 - DNA, 15 bp, Homo sapiens
tctgtgggctaaatc

SEQ ID NO: 1595958 - DNA, 15 bp, Homo sapiens
atctgtgggctaaat

SEQ ID NO: 1595959 - DNA, 15 bp, Homo sapiens
aatctgtgggctaaa

SEQ ID NO: 1595960 - DNA, 15 bp, Homo sapiens
gaatctgtgggctaa

SEQ ID NO: 1595961 - DNA, 15 bp, Homo sapiens
ggaatctgtgggcta

SEQ ID NO: 1595962 - DNA, 15 bp, Homo sapiens
tggaatctgtgggct

SEQ ID NO: 1595963 - DNA, 15 bp, Homo sapiens
gtggaatctgtgggc

SEQ ID NO: 1595964 - DNA, 15 bp, Homo sapiens
ggtggaatctgtggg

SEQ ID NO: 1595965 - DNA, 15 bp, Homo sapiens
aggtggaatctgtgg

SEQ ID NO: 1595966 - DNA, 15 bp, Homo sapiens
caggtggaatctgtg

SEQ ID NO: 1595967 - DNA, 15 bp, Homo sapiens
tcaggtggaatctgt

SEQ ID NO: 1595968 - DNA, 15 bp, Homo sapiens
ttcaggtggaatctg

SEQ ID NO: 1595969 - DNA, 15 bp, Homo sapiens
gttcaggtggaatct

SEQ ID NO: 1595970 - DNA, 15 bp, Homo sapiens
ggttcaggtggaatc

SEQ ID NO: 1595971 - DNA, 15 bp, Homo sapiens
gggttcaggtggaat

SEQ ID NO: 1595972 - DNA, 15 bp, Homo sapiens
agggttcaggtggaa

SEQ ID NO: 1595973 - DNA, 15 bp, Homo sapiens
tagggttcaggtgga

SEQ ID NO: 1595974 - DNA, 15 bp, Homo sapiens
ttagggttcaggtgg

SEQ ID NO: 1595975 - DNA, 15 bp, Homo sapiens
cttagggttcaggtg

SEQ ID NO: 1595976 - DNA, 15 bp, Homo sapiens
gcttagggttcaggt

SEQ ID NO: 1595977 - DNA, 15 bp, Homo sapiens
tgcttagggttcagg

SEQ ID NO: 1595978 - DNA, 15 bp, Homo sapiens
ttgcttagggttcag

SEQ ID NO: 1595979 - DNA, 15 bp, Homo sapiens
attgcttagggttca

SEQ ID NO: 1595980 - DNA, 15 bp, Homo sapiens
aattgcttagggttc

SEQ ID NO: 1595981 - DNA, 15 bp, Homo sapiens
taattgcttagggtt

SEQ ID NO: 1595982 - DNA, 15 bp, Homo sapiens
ctaattgcttagggt

SEQ ID NO: 1595983 - DNA, 15 bp, Homo sapiens
tctaattgcttaggg

SEQ ID NO: 1595984 - DNA, 15 bp, Homo sapiens
gtctaattgcttagg

SEQ ID NO: 1595985 - DNA, 15 bp, Homo sapiens
ggtctaattgcttag

SEQ ID NO: 1595986 - DNA, 15 bp, Homo sapiens
gggtctaattgctta

SEQ ID NO: 1595987 - DNA, 15 bp, Homo sapiens
agggtctaattgctt

SEQ ID NO: 1595988 - DNA, 15 bp, Homo sapiens
tagggtctaattgct

SEQ ID NO: 1595989 - DNA, 15 bp, Homo sapiens
ttagggtctaattgc

SEQ ID NO: 1595990 - DNA, 15 bp, Homo sapiens
attagggtctaattg

SEQ ID NO: 1595991 - DNA, 15 bp, Homo sapiens
gattagggtctaatt

SEQ ID NO: 1595992 - DNA, 15 bp, Homo sapiens
agattagggtctaat

SEQ ID NO: 1595993 - DNA, 15 bp, Homo sapiens
gagattagggtctaa

SEQ ID NO: 1595994 - DNA, 15 bp, Homo sapiens
ggagattagggtcta

SEQ ID NO: 1595995 - DNA, 15 bp, Homo sapiens
gggagattagggtct

SEQ ID NO: 1595996 - DNA, 15 bp, Homo sapiens
agggagattagggtc

SEQ ID NO: 1595997 - DNA, 15 bp, Homo sapiens
cagggagattagggt

SEQ ID NO: 1595998 - DNA, 15 bp, Homo sapiens
gcagggagattaggg

SEQ ID NO: 1595999 - DNA, 15 bp, Homo sapiens
tgcagggagattagg

SEQ ID NO: 1596000 - DNA, 15 bp, Homo sapiens
ttgcagggagattag

SEQ ID NO: 1596001 - DNA, 15 bp, Homo sapiens
attgcagggagatta

SEQ ID NO: 1596002 - DNA, 15 bp, Homo sapiens
gattgcagggagatt

SEQ ID NO: 1596003 - DNA, 15 bp, Homo sapiens
tgattgcagggagat

SEQ ID NO: 1596004 - DNA, 15 bp, Homo sapiens
atgattgcagggaga

SEQ ID NO: 1596005 - DNA, 15 bp, Homo sapiens
tatgattgcagggag

SEQ ID NO: 1596006 - DNA, 15 bp, Homo sapiens
atatgattgcaggga

SEQ ID NO: 1596007 - DNA, 15 bp, Homo sapiens
aatatgattgcaggg

SEQ ID NO: 1596008 - DNA, 15 bp, Homo sapiens
aaatatgattgcagg

SEQ ID NO: 1596009 - DNA, 15 bp, Homo sapiens
caaatatgattgcag

SEQ ID NO: 1596010 - DNA, 15 bp, Homo sapiens
tcaaatatgattgca

SEQ ID NO: 1596011 - DNA, 15 bp, Homo sapiens
ctcaaatatgattgc

SEQ ID NO: 1596012 - DNA, 15 bp, Homo sapiens
actcaaatatgattg

SEQ ID NO: 1596013 - DNA, 15 bp, Homo sapiens
aactcaaatatgatt

SEQ ID NO: 1596014 - DNA, 15 bp, Homo sapiens
taactcaaatatgat

SEQ ID NO: 1596015 - DNA, 15 bp, Homo sapiens
ctaactcaaatatga

SEQ ID NO: 1596016 - DNA, 15 bp, Homo sapiens
cctaactcaaatatg

SEQ ID NO: 1596017 - DNA, 15 bp, Homo sapiens
tcctaactcaaatat

SEQ ID NO: 1596018 - DNA, 15 bp, Homo sapiens
atcctaactcaaata

SEQ ID NO: 1596019 - DNA, 15 bp, Homo sapiens
aatcctaactcaaat

SEQ ID NO: 1596020 - DNA, 15 bp, Homo sapiens
aaatcctaactcaaa

SEQ ID NO: 1596021 - DNA, 15 bp, Homo sapiens
caaatcctaactcaa

SEQ ID NO: 1596022 - DNA, 15 bp, Homo sapiens
acaaatcctaactca

SEQ ID NO: 1596023 - DNA, 15 bp, Homo sapiens
aacaaatcctaactc

SEQ ID NO: 1596024 - DNA, 15 bp, Homo sapiens
caacaaatcctaact

SEQ ID NO: 1596025 - DNA, 15 bp, Homo sapiens
gcaacaaatcctaac

SEQ ID NO: 1596026 - DNA, 15 bp, Homo sapiens
tgcaacaaatcctaa

SEQ ID NO: 1596027 - DNA, 15 bp, Homo sapiens
gtgcaacaaatccta

SEQ ID NO: 1596028 - DNA, 15 bp, Homo sapiens
agtgcaacaaatcct

SEQ ID NO: 1596029 - DNA, 15 bp, Homo sapiens
aagtgcaacaaatcc

SEQ ID NO: 1596030 - DNA, 15 bp, Homo sapiens
aaagtgcaacaaatc

SEQ ID NO: 1596031 - DNA, 15 bp, Homo sapiens
caaagtgcaacaaat

SEQ ID NO: 1596032 - DNA, 15 bp, Homo sapiens
acaaagtgcaacaaa

SEQ ID NO: 1596033 - DNA, 15 bp, Homo sapiens
aacaaagtgcaacaa

SEQ ID NO: 1596034 - DNA, 15 bp, Homo sapiens
aaacaaagtgcaaca

SEQ ID NO: 1596035 - DNA, 15 bp, Homo sapiens
taaacaaagtgcaac

SEQ ID NO: 1596036 - DNA, 15 bp, Homo sapiens
gtaaacaaagtgcaa

SEQ ID NO: 1596037 - DNA, 15 bp, Homo sapiens
agtaaacaaagtgca

SEQ ID NO: 1596038 - DNA, 15 bp, Homo sapiens
aagtaaacaaagtgc

SEQ ID NO: 1596039 - DNA, 15 bp, Homo sapiens
gaagtaaacaaagtg

SEQ ID NO: 1596040 - DNA, 15 bp, Homo sapiens
tgaagtaaacaaagt

SEQ ID NO: 1596041 - DNA, 15 bp, Homo sapiens
ttgaagtaaacaaag

SEQ ID NO: 1596042 - DNA, 15 bp, Homo sapiens
attgaagtaaacaaa

SEQ ID NO: 1596043 - DNA, 15 bp, Homo sapiens
aattgaagtaaacaa

SEQ ID NO: 1596044 - DNA, 15 bp, Homo sapiens
taattgaagtaaaca

SEQ ID NO: 1596045 - DNA, 15 bp, Homo sapiens
ttaattgaagtaaac

SEQ ID NO: 1596046 - DNA, 15 bp, Homo sapiens
tttaattgaagtaaa

SEQ ID NO: 1596047 - DNA, 15 bp, Homo sapiens
ttttaattgaagtaa

SEQ ID NO: 1596048 - DNA, 15 bp, Homo sapiens
cttttaattgaagta

SEQ ID NO: 1596049 - DNA, 15 bp, Homo sapiens
gcttttaattgaagt

SEQ ID NO: 1596050 - DNA, 15 bp, Homo sapiens
tgcttttaattgaag

SEQ ID NO: 1596051 - DNA, 15 bp, Homo sapiens
ctgcttttaattgaa

SEQ ID NO: 1596052 - DNA, 15 bp, Homo sapiens
actgcttttaattga

SEQ ID NO: 1596053 - DNA, 15 bp, Homo sapiens
cactgcttttaattg

SEQ ID NO: 1596054 - DNA, 15 bp, Homo sapiens
ccactgcttttaatt

SEQ ID NO: 1596055 - DNA, 15 bp, Homo sapiens
tccactgcttttaat

SEQ ID NO: 1596056 - DNA, 15 bp, Homo sapiens
ttccactgcttttaa

SEQ ID NO: 1596057 - DNA, 15 bp, Homo sapiens
attccactgctttta

SEQ ID NO: 1596058 - DNA, 15 bp, Homo sapiens
tattccactgctttt

SEQ ID NO: 1596059 - DNA, 15 bp, Homo sapiens
ttattccactgcttt

SEQ ID NO: 1596060 - DNA, 15 bp, Homo sapiens
attattccactgctt

SEQ ID NO: 1596061 - DNA, 15 bp, Homo sapiens
aattattccactgct

SEQ ID NO: 1596062 - DNA, 15 bp, Homo sapiens
aaattattccactgc

SEQ ID NO: 1596063 - DNA, 15 bp, Homo sapiens
aaaattattccactg

SEQ ID NO: 1596064 - DNA, 15 bp, Homo sapiens
aaaaattattccact

SEQ ID NO: 1596065 - DNA, 15 bp, Homo sapiens
aaaaaattattccac

SEQ ID NO: 1596066 - DNA, 15 bp, Homo sapiens
aaaaaaattattcca

SEQ ID NO: 1596067 - DNA, 15 bp, Homo sapiens
gaaaaaaattattcc

SEQ ID NO: 1596068 - DNA, 15 bp, Homo sapiens
ggaaaaaaattattc

SEQ ID NO: 1596069 - DNA, 15 bp, Homo sapiens
tggaaaaaaattatt

SEQ ID NO: 1596070 - DNA, 15 bp, Homo sapiens
ctggaaaaaaattat

SEQ ID NO: 1596071 - DNA, 15 bp, Homo sapiens
gctggaaaaaaatta

SEQ ID NO: 1596072 - DNA, 15 bp, Homo sapiens
agctggaaaaaaatt

SEQ ID NO: 1596073 - DNA, 15 bp, Homo sapiens
aagctggaaaaaaat

SEQ ID NO: 1596074 - DNA, 15 bp, Homo sapiens
aaagctggaaaaaaa

SEQ ID NO: 1596075 - DNA, 15 bp, Homo sapiens
aaaagctggaaaaaa

SEQ ID NO: 1596076 - DNA, 15 bp, Homo sapiens
taaaagctggaaaaa

SEQ ID NO: 1596077 - DNA, 15 bp, Homo sapiens
ttaaaagctggaaaa

SEQ ID NO: 1596078 - DNA, 15 bp, Homo sapiens
tttaaaagctggaaa

SEQ ID NO: 1596079 - DNA, 15 bp, Homo sapiens
ctttaaaagctggaa

SEQ ID NO: 1596080 - DNA, 15 bp, Homo sapiens
actttaaaagctgga

SEQ ID NO: 1596081 - DNA, 15 bp, Homo sapiens
cactttaaaagctgg

SEQ ID NO: 1596082 - DNA, 15 bp, Homo sapiens
tcactttaaaagctg

SEQ ID NO: 1596083 - DNA, 15 bp, Homo sapiens
ttcactttaaaagct

SEQ ID NO: 1596084 - DNA, 15 bp, Homo sapiens
tttcactttaaaagc

SEQ ID NO: 1596085 - DNA, 15 bp, Homo sapiens
atttcactttaaaag

SEQ ID NO: 1596086 - DNA, 15 bp, Homo sapiens
gatttcactttaaaa

SEQ ID NO: 1596087 - DNA, 15 bp, Homo sapiens
agatttcactttaaa

SEQ ID NO: 1596088 - DNA, 15 bp, Homo sapiens
gagatttcactttaa

SEQ ID NO: 1596089 - DNA, 15 bp, Homo sapiens
ggagatttcacttta

SEQ ID NO: 1596090 - DNA, 15 bp, Homo sapiens
tggagatttcacttt

SEQ ID NO: 1596091 - DNA, 15 bp, Homo sapiens
ctggagatttcactt

SEQ ID NO: 1596092 - DNA, 15 bp, Homo sapiens
cctggagatttcact

SEQ ID NO: 1596093 - DNA, 15 bp, Homo sapiens
gcctggagatttcac

SEQ ID NO: 1596094 - DNA, 15 bp, Homo sapiens
tgcctggagatttca

SEQ ID NO: 1596095 - DNA, 15 bp, Homo sapiens
atgcctggagatttc

SEQ ID NO: 1596096 - DNA, 15 bp, Homo sapiens
tatgcctggagattt

SEQ ID NO: 1596097 - DNA, 15 bp, Homo sapiens
ttatgcctggagatt

SEQ ID NO: 1596098 - DNA, 15 bp, Homo sapiens
tttatgcctggagat

SEQ ID NO: 1596099 - DNA, 15 bp, Homo sapiens
ttttatgcctggaga

SEQ ID NO: 1596100 - DNA, 15 bp, Homo sapiens
gttttatgcctggag

SEQ ID NO: 1596101 - DNA, 15 bp, Homo sapiens
ggttttatgcctgga

SEQ ID NO: 1596102 - DNA, 15 bp, Homo sapiens
aggttttatgcctgg

SEQ ID NO: 1596103 - DNA, 15 bp, Homo sapiens
aaggttttatgcctg

SEQ ID NO: 1596104 - DNA, 15 bp, Homo sapiens
taaggttttatgcct

SEQ ID NO: 1596105 - DNA, 15 bp, Homo sapiens
ctaaggttttatgcc

SEQ ID NO: 1596106 - DNA, 15 bp, Homo sapiens
cctaaggttttatgc

SEQ ID NO: 1596107 - DNA, 15 bp, Homo sapiens
tcctaaggttttatg

SEQ ID NO: 1596108 - DNA, 15 bp, Homo sapiens
gtcctaaggttttat

SEQ ID NO: 1596109 - DNA, 15 bp, Homo sapiens
agtcctaaggtttta

SEQ ID NO: 1596110 - DNA, 15 bp, Homo sapiens
aagtcctaaggtttt

SEQ ID NO: 1596111 - DNA, 15 bp, Homo sapiens
gaagtcctaaggttt

SEQ ID NO: 1596112 - DNA, 15 bp, Homo sapiens
agaagtcctaaggtt

SEQ ID NO: 1596113 - DNA, 15 bp, Homo sapiens
aagaagtcctaaggt

SEQ ID NO: 1596114 - DNA, 15 bp, Homo sapiens
taagaagtcctaagg

SEQ ID NO: 1596115 - DNA, 15 bp, Homo sapiens
ctaagaagtcctaag

SEQ ID NO: 1596116 - DNA, 15 bp, Homo sapiens
tctaagaagtcctaa

SEQ ID NO: 1596117 - DNA, 15 bp, Homo sapiens
ttctaagaagtccta

SEQ ID NO: 1596118 - DNA, 15 bp, Homo sapiens
tttctaagaagtcct

SEQ ID NO: 1596119 - DNA, 15 bp, Homo sapiens
atttctaagaagtcc

SEQ ID NO: 1596120 - DNA, 15 bp, Homo sapiens
catttctaagaagtc

SEQ ID NO: 1596121 - DNA, 15 bp, Homo sapiens
gcatttctaagaagt

SEQ ID NO: 1596122 - DNA, 15 bp, Homo sapiens
agcatttctaagaag

SEQ ID NO: 1596123 - DNA, 15 bp, Homo sapiens
aagcatttctaagaa

SEQ ID NO: 1596124 - DNA, 15 bp, Homo sapiens
aaagcatttctaaga

SEQ ID NO: 1596125 - DNA, 15 bp, Homo sapiens
aaaagcatttctaag

SEQ ID NO: 1596126 - DNA, 15 bp, Homo sapiens
caaaagcatttctaa

SEQ ID NO: 1596127 - DNA, 15 bp, Homo sapiens
ccaaaagcatttcta

SEQ ID NO: 1596128 - DNA, 15 bp, Homo sapiens
accaaaagcatttct

SEQ ID NO: 1596129 - DNA, 15 bp, Homo sapiens
taccaaaagcatttc

SEQ ID NO: 1596130 - DNA, 15 bp, Homo sapiens
ctaccaaaagcattt

SEQ ID NO: 1596131 - DNA, 15 bp, Homo sapiens
actaccaaaagcatt

SEQ ID NO: 1596132 - DNA, 15 bp, Homo sapiens
cactaccaaaagcat

SEQ ID NO: 1596133 - DNA, 15 bp, Homo sapiens
tcactaccaaaagca

SEQ ID NO: 1596134 - DNA, 15 bp, Homo sapiens
atcactaccaaaagc

SEQ ID NO: 1596135 - DNA, 15 bp, Homo sapiens
catcactaccaaaag

SEQ ID NO: 1596136 - DNA, 15 bp, Homo sapiens
tcatcactaccaaaa

SEQ ID NO: 1596137 - DNA, 15 bp, Homo sapiens
ctcatcactaccaaa

SEQ ID NO: 1596138 - DNA, 15 bp, Homo sapiens
cctcatcactaccaa

SEQ ID NO: 1596139 - DNA, 15 bp, Homo sapiens
tcctcatcactacca

SEQ ID NO: 1596140 - DNA, 15 bp, Homo sapiens
atcctcatcactacc

SEQ ID NO: 1596141 - DNA, 15 bp, Homo sapiens
aatcctcatcactac

SEQ ID NO: 1596142 - DNA, 15 bp, Homo sapiens
aaatcctcatcacta

SEQ ID NO: 1596143 - DNA, 15 bp, Homo sapiens
gaaatcctcatcact

SEQ ID NO: 1596144 - DNA, 15 bp, Homo sapiens
agaaatcctcatcac

SEQ ID NO: 1596145 - DNA, 15 bp, Homo sapiens
aagaaatcctcatca

SEQ ID NO: 1596146 - DNA, 15 bp, Homo sapiens
aaagaaatcctcatc

SEQ ID NO: 1596147 - DNA, 15 bp, Homo sapiens
aaaagaaatcctcat

SEQ ID NO: 1596148 - DNA, 15 bp, Homo sapiens
gaaaagaaatcctca

SEQ ID NO: 1596149 - DNA, 15 bp, Homo sapiens
ggaaaagaaatcctc

SEQ ID NO: 1596150 - DNA, 15 bp, Homo sapiens
cggaaaagaaatcct

SEQ ID NO: 1596151 - DNA, 15 bp, Homo sapiens
acggaaaagaaatcc

SEQ ID NO: 1596152 - DNA, 15 bp, Homo sapiens
cacggaaaagaaatc

SEQ ID NO: 1596153 - DNA, 15 bp, Homo sapiens
acacggaaaagaaat

SEQ ID NO: 1596154 - DNA, 15 bp, Homo sapiens
cacacggaaaagaaa

SEQ ID NO: 1596155 - DNA, 15 bp, Homo sapiens
ccacacggaaaagaa

SEQ ID NO: 1596156 - DNA, 15 bp, Homo sapiens
accacacggaaaaga

SEQ ID NO: 1596157 - DNA, 15 bp, Homo sapiens
aaccacacggaaaag

SEQ ID NO: 1596158 - DNA, 15 bp, Homo sapiens
aaaccacacggaaaa

SEQ ID NO: 1596159 - DNA, 15 bp, Homo sapiens
gaaaccacacggaaa

SEQ ID NO: 1596160 - DNA, 15 bp, Homo sapiens
ggaaaccacacggaa

SEQ ID NO: 1596161 - DNA, 15 bp, Homo sapiens
aggaaaccacacgga

SEQ ID NO: 1596162 - DNA, 15 bp, Homo sapiens
gaggaaaccacacgg

SEQ ID NO: 1596163 - DNA, 15 bp, Homo sapiens
ggaggaaaccacacg

SEQ ID NO: 1596164 - DNA, 15 bp, Homo sapiens
tggaggaaaccacac

SEQ ID NO: 1596165 - DNA, 15 bp, Homo sapiens
ttggaggaaaccaca

SEQ ID NO: 1596166 - DNA, 15 bp, Homo sapiens
cttggaggaaaccac

SEQ ID NO: 1596167 - DNA, 15 bp, Homo sapiens
acttggaggaaacca

SEQ ID NO: 1596168 - DNA, 15 bp, Homo sapiens
gacttggaggaaacc

SEQ ID NO: 1596169 - DNA, 15 bp, Homo sapiens
ggacttggaggaaac

SEQ ID NO: 1596170 - DNA, 15 bp, Homo sapiens
aggacttggaggaaa

SEQ ID NO: 1596171 - DNA, 15 bp, Homo sapiens
gaggacttggaggaa

SEQ ID NO: 1596172 - DNA, 15 bp, Homo sapiens
tgaggacttggagga

SEQ ID NO: 1596173 - DNA, 15 bp, Homo sapiens
atgaggacttggagg

SEQ ID NO: 1596174 - DNA, 15 bp, Homo sapiens
catgaggacttggag

SEQ ID NO: 1596175 - DNA, 15 bp, Homo sapiens
tcatgaggacttgga

SEQ ID NO: 1596176 - DNA, 15 bp, Homo sapiens
gtcatgaggacttgg

SEQ ID NO: 1596177 - DNA, 15 bp, Homo sapiens
ggtcatgaggacttg

SEQ ID NO: 1596178 - DNA, 15 bp, Homo sapiens
tggtcatgaggactt

SEQ ID NO: 1596179 - DNA, 15 bp, Homo sapiens
atggtcatgaggact

SEQ ID NO: 1596180 - DNA, 15 bp, Homo sapiens
gatggtcatgaggac

SEQ ID NO: 1596181 - DNA, 15 bp, Homo sapiens
ggatggtcatgagga

SEQ ID NO: 1596182 - DNA, 15 bp, Homo sapiens
gggatggtcatgagg

SEQ ID NO: 1596183 - DNA, 15 bp, Homo sapiens
ggggatggtcatgag

SEQ ID NO: 1596184 - DNA, 15 bp, Homo sapiens
aggggatggtcatga

SEQ ID NO: 1596185 - DNA, 15 bp, Homo sapiens
aaggggatggtcatg

SEQ ID NO: 1596186 - DNA, 15 bp, Homo sapiens
gaaggggatggtcat

SEQ ID NO: 1596187 - DNA, 15 bp, Homo sapiens
ggaaggggatggtca

SEQ ID NO: 1596188 - DNA, 15 bp, Homo sapiens
aggaaggggatggtc

SEQ ID NO: 1596189 - DNA, 15 bp, Homo sapiens
aaggaaggggatggt

SEQ ID NO: 1596190 - DNA, 15 bp, Homo sapiens
gaaggaaggggatgg

SEQ ID NO: 1596191 - DNA, 15 bp, Homo sapiens
agaaggaaggggatg

SEQ ID NO: 1596192 - DNA, 15 bp, Homo sapiens
gagaaggaaggggat

SEQ ID NO: 1596193 - DNA, 15 bp, Homo sapiens
ggagaaggaagggga

SEQ ID NO: 1596194 - DNA, 15 bp, Homo sapiens
gggagaaggaagggg

SEQ ID NO: 1596195 - DNA, 15 bp, Homo sapiens
tgggagaaggaaggg

SEQ ID NO: 1596196 - DNA, 15 bp, Homo sapiens
atgggagaaggaagg

SEQ ID NO: 1596197 - DNA, 15 bp, Homo sapiens
aatgggagaaggaag

SEQ ID NO: 1596198 - DNA, 15 bp, Homo sapiens
aaatgggagaaggaa

SEQ ID NO: 1596199 - DNA, 15 bp, Homo sapiens
taaatgggagaagga

SEQ ID NO: 1596200 - DNA, 15 bp, Homo sapiens
ttaaatgggagaagg

SEQ ID NO: 1596201 - DNA, 15 bp, Homo sapiens
cttaaatgggagaag

SEQ ID NO: 1596202 - DNA, 15 bp, Homo sapiens
acttaaatgggagaa

SEQ ID NO: 1596203 - DNA, 15 bp, Homo sapiens
cacttaaatgggaga

SEQ ID NO: 1596204 - DNA, 15 bp, Homo sapiens
tcacttaaatgggag

SEQ ID NO: 1596205 - DNA, 15 bp, Homo sapiens
gtcacttaaatggga

SEQ ID NO: 1596206 - DNA, 15 bp, Homo sapiens
agtcacttaaatggg

SEQ ID NO: 1596207 - DNA, 15 bp, Homo sapiens
gagtcacttaaatgg

SEQ ID NO: 1596208 - DNA, 15 bp, Homo sapiens
cgagtcacttaaatg

SEQ ID NO: 1596209 - DNA, 15 bp, Homo sapiens
acgagtcacttaaat

SEQ ID NO: 1596210 - DNA, 15 bp, Homo sapiens
aacgagtcacttaaa

SEQ ID NO: 1596211 - DNA, 15 bp, Homo sapiens
aaacgagtcacttaa

SEQ ID NO: 1596212 - DNA, 15 bp, Homo sapiens
aaaacgagtcactta

SEQ ID NO: 1596213 - DNA, 15 bp, Homo sapiens
aaaaacgagtcactt

SEQ ID NO: 1596214 - DNA, 15 bp, Homo sapiens
aaaaaacgagtcact

SEQ ID NO: 1596215 - DNA, 15 bp, Homo sapiens
gaaaaaacgagtcac

SEQ ID NO: 1596216 - DNA, 15 bp, Homo sapiens
ggaaaaaacgagtca

SEQ ID NO: 1596217 - DNA, 15 bp, Homo sapiens
gggaaaaaacgagtc

SEQ ID NO: 1596218 - DNA, 15 bp, Homo sapiens
ggggaaaaaacgagt

SEQ ID NO: 1596219 - DNA, 15 bp, Homo sapiens
aggggaaaaaacgag

SEQ ID NO: 1596220 - DNA, 15 bp, Homo sapiens
caggggaaaaaacga

SEQ ID NO: 1596221 - DNA, 15 bp, Homo sapiens
acaggggaaaaaacg

SEQ ID NO: 1596222 - DNA, 15 bp, Homo sapiens
aacaggggaaaaaac

SEQ ID NO: 1596223 - DNA, 15 bp, Homo sapiens
caacaggggaaaaaa

SEQ ID NO: 1596224 - DNA, 15 bp, Homo sapiens
gcaacaggggaaaaa

SEQ ID NO: 1596225 - DNA, 15 bp, Homo sapiens
agcaacaggggaaaa

SEQ ID NO: 1596226 - DNA, 15 bp, Homo sapiens
gagcaacaggggaaa

SEQ ID NO: 1596227 - DNA, 15 bp, Homo sapiens
cgagcaacaggggaa

SEQ ID NO: 1596228 - DNA, 15 bp, Homo sapiens
gcgagcaacagggga

SEQ ID NO: 1596229 - DNA, 15 bp, Homo sapiens
ggcgagcaacagggg

SEQ ID NO: 1596230 - DNA, 15 bp, Homo sapiens
tggcgagcaacaggg

SEQ ID NO: 1596231 - DNA, 15 bp, Homo sapiens
ttggcgagcaacagg

SEQ ID NO: 1596232 - DNA, 15 bp, Homo sapiens
attggcgagcaacag

SEQ ID NO: 1596233 - DNA, 15 bp, Homo sapiens
cattggcgagcaaca

SEQ ID NO: 1596234 - DNA, 15 bp, Homo sapiens
gcattggcgagcaac

SEQ ID NO: 1596235 - DNA, 15 bp, Homo sapiens
ggcattggcgagcaa

SEQ ID NO: 1596236 - DNA, 15 bp, Homo sapiens
gggcattggcgagca

SEQ ID NO: 1596237 - DNA, 15 bp, Homo sapiens
tgggcattggcgagc

SEQ ID NO: 1596238 - DNA, 15 bp, Homo sapiens
ttgggcattggcgag

SEQ ID NO: 1596239 - DNA, 15 bp, Homo sapiens
tttgggcattggcga

SEQ ID NO: 1596240 - DNA, 15 bp, Homo sapiens
ctttgggcattggcg

SEQ ID NO: 1596241 - DNA, 15 bp, Homo sapiens
gctttgggcattggc

SEQ ID NO: 1596242 - DNA, 15 bp, Homo sapiens
cgctttgggcattgg

SEQ ID NO: 1596243 - DNA, 15 bp, Homo sapiens
acgctttgggcattg

SEQ ID NO: 1596244 - DNA, 15 bp, Homo sapiens
gacgctttgggcatt

SEQ ID NO: 1596245 - DNA, 15 bp, Homo sapiens
agacgctttgggcat

SEQ ID NO: 1596246 - DNA, 15 bp, Homo sapiens
aagacgctttgggca

SEQ ID NO: 1596247 - DNA, 15 bp, Homo sapiens
gaagacgctttgggc

SEQ ID NO: 1596248 - DNA, 15 bp, Homo sapiens
tgaagacgctttggg

SEQ ID NO: 1596249 - DNA, 15 bp, Homo sapiens
gtgaagacgctttgg

SEQ ID NO: 1596250 - DNA, 15 bp, Homo sapiens
tgtgaagacgctttg

SEQ ID NO: 1596251 - DNA, 15 bp, Homo sapiens
ctgtgaagacgcttt

SEQ ID NO: 1596252 - DNA, 15 bp, Homo sapiens
cctgtgaagacgctt

SEQ ID NO: 1596253 - DNA, 15 bp, Homo sapiens
ccctgtgaagacgct

SEQ ID NO: 1596254 - DNA, 15 bp, Homo sapiens
cccctgtgaagacgc

SEQ ID NO: 1596255 - DNA, 15 bp, Homo sapiens
gcccctgtgaagacg

SEQ ID NO: 1596256 - DNA, 15 bp, Homo sapiens
agcccctgtgaagac

SEQ ID NO: 1596257 - DNA, 15 bp, Homo sapiens
cagcccctgtgaaga

SEQ ID NO: 1596258 - DNA, 15 bp, Homo sapiens
tcagcccctgtgaag

SEQ ID NO: 1596259 - DNA, 15 bp, Homo sapiens
ttcagcccctgtgaa

SEQ ID NO: 1596260 - DNA, 15 bp, Homo sapiens
attcagcccctgtga

SEQ ID NO: 1596261 - DNA, 15 bp, Homo sapiens
aattcagcccctgtg

SEQ ID NO: 1596262 - DNA, 15 bp, Homo sapiens
gaattcagcccctgt

SEQ ID NO: 1596263 - DNA, 15 bp, Homo sapiens
cgaattcagcccctg

SEQ ID NO: 1596264 - DNA, 15 bp, Homo sapiens
gcgaattcagcccct

SEQ ID NO: 1596265 - DNA, 15 bp, Homo sapiens
cgcgaattcagcccc

SEQ ID NO: 1596266 - DNA, 15 bp, Homo sapiens
ccgcgaattcagccc

SEQ ID NO: 1596267 - DNA, 15 bp, Homo sapiens
gccgcgaattcagcc

SEQ ID NO: 1596268 - DNA, 15 bp, Homo sapiens
cgccgcgaattcagc

SEQ ID NO: 1596269 - DNA, 15 bp, Homo sapiens
gcgccgcgaattcag

SEQ ID NO: 1596270 - DNA, 15 bp, Homo sapiens
tgcgccgcgaattca

SEQ ID NO: 1596271 - DNA, 15 bp, Homo sapiens
ttgcgccgcgaattc

SEQ ID NO: 1596272 - DNA, 15 bp, Homo sapiens
cttgcgccgcgaatt

SEQ ID NO: 1596273 - DNA, 15 bp, Homo sapiens
ccttgcgccgcgaat

SEQ ID NO: 1596274 - DNA, 15 bp, Homo sapiens
cccttgcgccgcgaa

SEQ ID NO: 1596275 - DNA, 15 bp, Homo sapiens
tcccttgcgccgcga

SEQ ID NO: 1596276 - DNA, 15 bp, Homo sapiens
ttcccttgcgccgcg

SEQ ID NO: 1596277 - DNA, 15 bp, Homo sapiens
cttcccttgcgccgc

SEQ ID NO: 1596278 - DNA, 15 bp, Homo sapiens
tcttcccttgcgccg

SEQ ID NO: 1596279 - DNA, 15 bp, Homo sapiens
ttcttcccttgcgcc

SEQ ID NO: 1596280 - DNA, 15 bp, Homo sapiens
gttcttcccttgcgc

SEQ ID NO: 1596281 - DNA, 15 bp, Homo sapiens
agttcttcccttgcg

SEQ ID NO: 1596282 - DNA, 15 bp, Homo sapiens
cagttcttcccttgc

SEQ ID NO: 1596283 - DNA, 15 bp, Homo sapiens
acagttcttcccttg

SEQ ID NO: 1596284 - DNA, 15 bp, Homo sapiens
cacagttcttccctt

SEQ ID NO: 1596285 - DNA, 15 bp, Homo sapiens
acacagttcttccct

SEQ ID NO: 1596286 - DNA, 15 bp, Homo sapiens
cacacagttcttccc

SEQ ID NO: 1596287 - DNA, 15 bp, Homo sapiens
ccacacagttcttcc

SEQ ID NO: 1596288 - DNA, 15 bp, Homo sapiens
tccacacagttcttc

SEQ ID NO: 1596289 - DNA, 15 bp, Homo sapiens
ctccacacagttctt

SEQ ID NO: 1596290 - DNA, 15 bp, Homo sapiens
tctccacacagttct

SEQ ID NO: 1596291 - DNA, 15 bp, Homo sapiens
atctccacacagttc

SEQ ID NO: 1596292 - DNA, 15 bp, Homo sapiens
catctccacacagtt

SEQ ID NO: 1596293 - DNA, 15 bp, Homo sapiens
tcatctccacacagt

SEQ ID NO: 1596294 - DNA, 15 bp, Homo sapiens
gtcatctccacacag

SEQ ID NO: 1596295 - DNA, 15 bp, Homo sapiens
cgtcatctccacaca

SEQ ID NO: 1596296 - DNA, 15 bp, Homo sapiens
gcgtcatctccacac

SEQ ID NO: 1596297 - DNA, 15 bp, Homo sapiens
ggcgtcatctccaca

SEQ ID NO: 1596298 - DNA, 15 bp, Homo sapiens
gggcgtcatctccac

SEQ ID NO: 1596299 - DNA, 15 bp, Homo sapiens
tgggcgtcatctcca

SEQ ID NO: 1596300 - DNA, 15 bp, Homo sapiens
ctgggcgtcatctcc

SEQ ID NO: 1596301 - DNA, 15 bp, Homo sapiens
gctgggcgtcatctc

SEQ ID NO: 1596302 - DNA, 15 bp, Homo sapiens
agctgggcgtcatct

SEQ ID NO: 1596303 - DNA, 15 bp, Homo sapiens
cagctgggcgtcatc

SEQ ID NO: 1596304 - DNA, 15 bp, Homo sapiens
ccagctgggcgtcat

SEQ ID NO: 1596305 - DNA, 15 bp, Homo sapiens
tccagctgggcgtca

SEQ ID NO: 1596306 - DNA, 15 bp, Homo sapiens
ctccagctgggcgtc

SEQ ID NO: 1596307 - DNA, 15 bp, Homo sapiens
cctccagctgggcgt

SEQ ID NO: 1596308 - DNA, 15 bp, Homo sapiens
ccctccagctgggcg

SEQ ID NO: 1596309 - DNA, 15 bp, Homo sapiens
cccctccagctgggc

SEQ ID NO: 1596310 - DNA, 15 bp, Homo sapiens
gcccctccagctggg

SEQ ID NO: 1596311 - DNA, 15 bp, Homo sapiens
cgcccctccagctgg

SEQ ID NO: 1596312 - DNA, 15 bp, Homo sapiens
gcgcccctccagctg

SEQ ID NO: 1596313 - DNA, 15 bp, Homo sapiens
ggcgcccctccagct

SEQ ID NO: 1596314 - DNA, 15 bp, Homo sapiens
gggcgcccctccagc

SEQ ID NO: 1596315 - DNA, 15 bp, Homo sapiens
tgggcgcccctccag

SEQ ID NO: 1596316 - DNA, 15 bp, Homo sapiens
ttgggcgcccctcca

SEQ ID NO: 1596317 - DNA, 15 bp, Homo sapiens
cttgggcgcccctcc

SEQ ID NO: 1596318 - DNA, 15 bp, Homo sapiens
gcttgggcgcccctc

SEQ ID NO: 1596319 - DNA, 15 bp, Homo sapiens
agcttgggcgcccct

SEQ ID NO: 1596320 - DNA, 15 bp, Homo sapiens
gagcttgggcgcccc

SEQ ID NO: 1596321 - DNA, 15 bp, Homo sapiens
tgagcttgggcgccc

SEQ ID NO: 1596322 - DNA, 15 bp, Homo sapiens
ctgagcttgggcgcc

SEQ ID NO: 1596323 - DNA, 15 bp, Homo sapiens
cctgagcttgggcgc

SEQ ID NO: 1596324 - DNA, 15 bp, Homo sapiens
gcctgagcttgggcg

SEQ ID NO: 1596325 - DNA, 15 bp, Homo sapiens
ggcctgagcttgggc

SEQ ID NO: 1596326 - DNA, 15 bp, Homo sapiens
cggcctgagcttggg

SEQ ID NO: 1596327 - DNA, 15 bp, Homo sapiens
acggcctgagcttgg

SEQ ID NO: 1596328 - DNA, 15 bp, Homo sapiens
gacggcctgagcttg

SEQ ID NO: 1596329 - DNA, 15 bp, Homo sapiens
cgacggcctgagctt

SEQ ID NO: 1596330 - DNA, 15 bp, Homo sapiens
gcgacggcctgagct

SEQ ID NO: 1596331 - DNA, 15 bp, Homo sapiens
ggcgacggcctgagc

SEQ ID NO: 1596332 - DNA, 15 bp, Homo sapiens
gggcgacggcctgag

SEQ ID NO: 1596333 - DNA, 15 bp, Homo sapiens
tgggcgacggcctga

SEQ ID NO: 1596334 - DNA, 15 bp, Homo sapiens
ctgggcgacggcctg

SEQ ID NO: 1596335 - DNA, 15 bp, Homo sapiens
cctgggcgacggcct

SEQ ID NO: 1596336 - DNA, 15 bp, Homo sapiens
acctgggcgacggcc

SEQ ID NO: 1596337 - DNA, 15 bp, Homo sapiens
gacctgggcgacggc

SEQ ID NO: 1596338 - DNA, 15 bp, Homo sapiens
ggacctgggcgacgg

SEQ ID NO: 1596339 - DNA, 15 bp, Homo sapiens
gggacctgggcgacg

SEQ ID NO: 1596340 - DNA, 15 bp, Homo sapiens
ggggacctgggcgac

SEQ ID NO: 1596341 - DNA, 15 bp, Homo sapiens
cggggacctgggcga

SEQ ID NO: 1596342 - DNA, 15 bp, Homo sapiens
tcggggacctgggcg

SEQ ID NO: 1596343 - DNA, 15 bp, Homo sapiens
atcggggacctgggc

SEQ ID NO: 1596344 - DNA, 15 bp, Homo sapiens
catcggggacctggg

SEQ ID NO: 1596345 - DNA, 15 bp, Homo sapiens
ccatcggggacctgg

SEQ ID NO: 1596346 - DNA, 15 bp, Homo sapiens
cccatcggggacctg

SEQ ID NO: 1596347 - DNA, 15 bp, Homo sapiens
ccccatcggggacct

SEQ ID NO: 1596348 - DNA, 15 bp, Homo sapiens
tccccatcggggacc

SEQ ID NO: 1596349 - DNA, 15 bp, Homo sapiens
atccccatcggggac

SEQ ID NO: 1596350 - DNA, 15 bp, Homo sapiens
gatccccatcgggga

SEQ ID NO: 1596351 - DNA, 15 bp, Homo sapiens
ggatccccatcgggg

SEQ ID NO: 1596352 - DNA, 15 bp, Homo sapiens
aggatccccatcggg

SEQ ID NO: 1596353 - DNA, 15 bp, Homo sapiens
taggatccccatcgg

SEQ ID NO: 1596354 - DNA, 15 bp, Homo sapiens
ataggatccccatcg

SEQ ID NO: 1596355 - DNA, 15 bp, Homo sapiens
cataggatccccatc

SEQ ID NO: 1596356 - DNA, 15 bp, Homo sapiens
acataggatccccat

SEQ ID NO: 1596357 - DNA, 15 bp, Homo sapiens
gacataggatcccca

SEQ ID NO: 1596358 - DNA, 15 bp, Homo sapiens
ggacataggatcccc

SEQ ID NO: 1596359 - DNA, 15 bp, Homo sapiens
gggacataggatccc

SEQ ID NO: 1596360 - DNA, 15 bp, Homo sapiens
cgggacataggatcc

SEQ ID NO: 1596361 - DNA, 15 bp, Homo sapiens
gcgggacataggatc

SEQ ID NO: 1596362 - DNA, 15 bp, Homo sapiens
ggcgggacataggat

SEQ ID NO: 1596363 - DNA, 15 bp, Homo sapiens
cggcgggacatagga

SEQ ID NO: 1596364 - DNA, 15 bp, Homo sapiens
gcggcgggacatagg

SEQ ID NO: 1596365 - DNA, 15 bp, Homo sapiens
ggcggcgggacatag

SEQ ID NO: 1596366 - DNA, 15 bp, Homo sapiens
cggcggcgggacata

SEQ ID NO: 1596367 - DNA, 15 bp, Homo sapiens
gcggcggcgggacat

SEQ ID NO: 1596368 - DNA, 15 bp, Homo sapiens
cgcggcggcgggaca

SEQ ID NO: 1596369 - DNA, 15 bp, Homo sapiens
gcgcggcggcgggac

SEQ ID NO: 1596370 - DNA, 15 bp, Homo sapiens
cgcgcggcggcggga

SEQ ID NO: 1596371 - DNA, 15 bp, Homo sapiens
ccgcgcggcggcggg

SEQ ID NO: 1596372 - DNA, 15 bp, Homo sapiens
tccgcgcggcggcgg

SEQ ID NO: 1596373 - DNA, 15 bp, Homo sapiens
ctccgcgcggcggcg

SEQ ID NO: 1596374 - DNA, 15 bp, Homo sapiens
gctccgcgcggcggc

SEQ ID NO: 1596375 - DNA, 15 bp, Homo sapiens
agctccgcgcggcgg

SEQ ID NO: 1596376 - DNA, 15 bp, Homo sapiens
aagctccgcgcggcg

SEQ ID NO: 1596377 - DNA, 15 bp, Homo sapiens
aaagctccgcgcggc

SEQ ID NO: 1596378 - DNA, 15 bp, Homo sapiens
gaaagctccgcgcgg

SEQ ID NO: 1596379 - DNA, 15 bp, Homo sapiens
ggaaagctccgcgcg

SEQ ID NO: 1596380 - DNA, 15 bp, Homo sapiens
gggaaagctccgcgc

SEQ ID NO: 1596381 - DNA, 15 bp, Homo sapiens
tgggaaagctccgcg

SEQ ID NO: 1596382 - DNA, 15 bp, Homo sapiens
ttgggaaagctccgc

SEQ ID NO: 1596383 - DNA, 15 bp, Homo sapiens
gttgggaaagctccg

SEQ ID NO: 1596384 - DNA, 15 bp, Homo sapiens
tgttgggaaagctcc

SEQ ID NO: 1596385 - DNA, 15 bp, Homo sapiens
gtgttgggaaagctc

SEQ ID NO: 1596386 - DNA, 15 bp, Homo sapiens
cgtgttgggaaagct

SEQ ID NO: 1596387 - DNA, 15 bp, Homo sapiens
ccgtgttgggaaagc

SEQ ID NO: 1596388 - DNA, 15 bp, Homo sapiens
gccgtgttgggaaag

SEQ ID NO: 1596389 - DNA, 15 bp, Homo sapiens
ggccgtgttgggaaa

SEQ ID NO: 1596390 - DNA, 15 bp, Homo sapiens
gggccgtgttgggaa

SEQ ID NO: 1596391 - DNA, 15 bp, Homo sapiens
cgggccgtgttggga

SEQ ID NO: 1596392 - DNA, 15 bp, Homo sapiens
gcgggccgtgttggg

SEQ ID NO: 1596393 - DNA, 15 bp, Homo sapiens
agcgggccgtgttgg

SEQ ID NO: 1596394 - DNA, 15 bp, Homo sapiens
cagcgggccgtgttg

SEQ ID NO: 1596395 - DNA, 15 bp, Homo sapiens
ccagcgggccgtgtt

SEQ ID NO: 1596396 - DNA, 15 bp, Homo sapiens
gccagcgggccgtgt

SEQ ID NO: 1596397 - DNA, 15 bp, Homo sapiens
agccagcgggccgtg

SEQ ID NO: 1596398 - DNA, 15 bp, Homo sapiens
cacatgactatttct

SEQ ID NO: 1596399 - DNA, 15 bp, Homo sapiens
ccacatgactatttc

SEQ ID NO: 1596400 - DNA, 15 bp, Homo sapiens
cccacatgactattt

SEQ ID NO: 1596401 - DNA, 15 bp, Homo sapiens
gcccacatgactatt

SEQ ID NO: 1596402 - DNA, 15 bp, Homo sapiens
tgcccacatgactat

SEQ ID NO: 1596403 - DNA, 15 bp, Homo sapiens
ttgcccacatgacta

SEQ ID NO: 1596404 - DNA, 15 bp, Homo sapiens
attgcccacatgact

SEQ ID NO: 1596405 - DNA, 15 bp, Homo sapiens
tattgcccacatgac

SEQ ID NO: 1596406 - DNA, 15 bp, Homo sapiens
atattgcccacatga

SEQ ID NO: 1596407 - DNA, 15 bp, Homo sapiens
tatattgcccacatg

SEQ ID NO: 1596408 - DNA, 15 bp, Homo sapiens
atatattgcccacat

SEQ ID NO: 1596409 - DNA, 15 bp, Homo sapiens
gatatattgcccaca

SEQ ID NO: 1596410 - DNA, 15 bp, Homo sapiens
agatatattgcccac

SEQ ID NO: 1596411 - DNA, 15 bp, Homo sapiens
gagatatattgccca

SEQ ID NO: 1596412 - DNA, 15 bp, Homo sapiens
agagatatattgccc

SEQ ID NO: 1596413 - DNA, 15 bp, Homo sapiens
tagagatatattgcc

SEQ ID NO: 1596414 - DNA, 15 bp, Homo sapiens
atagagatatattgc

SEQ ID NO: 1596415 - DNA, 15 bp, Homo sapiens
catagagatatattg

SEQ ID NO: 1596416 - DNA, 15 bp, Homo sapiens
ccatagagatatatt

SEQ ID NO: 1596417 - DNA, 15 bp, Homo sapiens
cccatagagatatat

SEQ ID NO: 1596418 - DNA, 15 bp, Homo sapiens
ccccatagagatata

SEQ ID NO: 1596419 - DNA, 15 bp, Homo sapiens
accccatagagatat

SEQ ID NO: 1596420 - DNA, 15 bp, Homo sapiens
aaccccatagagata

SEQ ID NO: 1596421 - DNA, 15 bp, Homo sapiens
aaaccccatagagat

SEQ ID NO: 1596422 - DNA, 15 bp, Homo sapiens
aaaaccccatagaga

SEQ ID NO: 1596423 - DNA, 15 bp, Homo sapiens
gaaaaccccatagag

SEQ ID NO: 1596424 - DNA, 15 bp, Homo sapiens
tgaaaaccccataga

SEQ ID NO: 1596425 - DNA, 15 bp, Homo sapiens
ctgaaaaccccatag

SEQ ID NO: 1596426 - DNA, 15 bp, Homo sapiens
tctgaaaaccccata

SEQ ID NO: 1596427 - DNA, 15 bp, Homo sapiens
atctgaaaaccccat

SEQ ID NO: 1596428 - DNA, 15 bp, Homo sapiens
catctgaaaacccca

SEQ ID NO: 1596429 - DNA, 15 bp, Homo sapiens
ccatctgaaaacccc

SEQ ID NO: 1596430 - DNA, 15 bp, Homo sapiens
gccatctgaaaaccc

SEQ ID NO: 1596431 - DNA, 15 bp, Homo sapiens
agccatctgaaaacc

SEQ ID NO: 1596432 - DNA, 15 bp, Homo sapiens
cagccatctgaaaac

SEQ ID NO: 1596433 - DNA, 15 bp, Homo sapiens
gcagccatctgaaaa

SEQ ID NO: 1596434 - DNA, 15 bp, Homo sapiens
tgcagccatctgaaa

SEQ ID NO: 1596435 - DNA, 15 bp, Homo sapiens
ttgcagccatctgaa

SEQ ID NO: 1596436 - DNA, 15 bp, Homo sapiens
gttgcagccatctga

SEQ ID NO: 1596437 - DNA, 15 bp, Homo sapiens
agttgcagccatctg

SEQ ID NO: 1596438 - DNA, 15 bp, Homo sapiens
aagttgcagccatct

SEQ ID NO: 1596439 - DNA, 15 bp, Homo sapiens
gaagttgcagccatc

SEQ ID NO: 1596440 - DNA, 15 bp, Homo sapiens
ggaagttgcagccat

SEQ ID NO: 1596441 - DNA, 15 bp, Homo sapiens
aggaagttgcagcca

SEQ ID NO: 1596442 - DNA, 15 bp, Homo sapiens
taggaagttgcagcc

SEQ ID NO: 1596443 - DNA, 15 bp, Homo sapiens
gtaggaagttgcagc

SEQ ID NO: 1596444 - DNA, 15 bp, Homo sapiens
ggtaggaagttgcag

SEQ ID NO: 1596445 - DNA, 15 bp, Homo sapiens
gggtaggaagttgca

SEQ ID NO: 1596446 - DNA, 15 bp, Homo sapiens
agggtaggaagttgc

SEQ ID NO: 1596447 - DNA, 15 bp, Homo sapiens
cagggtaggaagttg

SEQ ID NO: 1596448 - DNA, 15 bp, Homo sapiens
ccagggtaggaagtt

SEQ ID NO: 1596449 - DNA, 15 bp, Homo sapiens
tccagggtaggaagt

SEQ ID NO: 1596450 - DNA, 15 bp, Homo sapiens
atccagggtaggaag

SEQ ID NO: 1596451 - DNA, 15 bp, Homo sapiens
gatccagggtaggaa

SEQ ID NO: 1596452 - DNA, 15 bp, Homo sapiens
agatccagggtagga

SEQ ID NO: 1596453 - DNA, 15 bp, Homo sapiens
gagatccagggtagg

SEQ ID NO: 1596454 - DNA, 15 bp, Homo sapiens
agagatccagggtag

SEQ ID NO: 1596455 - DNA, 15 bp, Homo sapiens
cagagatccagggta

SEQ ID NO: 1596456 - DNA, 15 bp, Homo sapiens
gcagagatccagggt

SEQ ID NO: 1596457 - DNA, 15 bp, Homo sapiens
agcagagatccaggg

SEQ ID NO: 1596458 - DNA, 15 bp, Homo sapiens
cagcagagatccagg

SEQ ID NO: 1596459 - DNA, 15 bp, Homo sapiens
gcagcagagatccag

SEQ ID NO: 1596460 - DNA, 15 bp, Homo sapiens
agcagcagagatcca

SEQ ID NO: 1596461 - DNA, 15 bp, Homo sapiens
gagcagcagagatcc

SEQ ID NO: 1596462 - DNA, 15 bp, Homo sapiens
agagcagcagagatc

SEQ ID NO: 1596463 - DNA, 15 bp, Homo sapiens
aagagcagcagagat

SEQ ID NO: 1596464 - DNA, 15 bp, Homo sapiens
caagagcagcagaga

SEQ ID NO: 1596465 - DNA, 15 bp, Homo sapiens
ccaagagcagcagag

SEQ ID NO: 1596466 - DNA, 15 bp, Homo sapiens
cccaagagcagcaga

SEQ ID NO: 1596467 - DNA, 15 bp, Homo sapiens
gcccaagagcagcag

SEQ ID NO: 1596468 - DNA, 15 bp, Homo sapiens
tgcccaagagcagca

SEQ ID NO: 1596469 - DNA, 15 bp, Homo sapiens
gtgcccaagagcagc

SEQ ID NO: 1596470 - DNA, 15 bp, Homo sapiens
ggtgcccaagagcag

SEQ ID NO: 1596471 - DNA, 15 bp, Homo sapiens
tggtgcccaagagca

SEQ ID NO: 1596472 - DNA, 15 bp, Homo sapiens
gtggtgcccaagagc

SEQ ID NO: 1596473 - DNA, 15 bp, Homo sapiens
tgtggtgcccaagag

SEQ ID NO: 1596474 - DNA, 15 bp, Homo sapiens
atgtggtgcccaaga

SEQ ID NO: 1596475 - DNA, 15 bp, Homo sapiens
aatgtggtgcccaag

SEQ ID NO: 1596476 - DNA, 15 bp, Homo sapiens
gaatgtggtgcccaa

SEQ ID NO: 1596477 - DNA, 15 bp, Homo sapiens
ggaatgtggtgccca

SEQ ID NO: 1596478 - DNA, 15 bp, Homo sapiens
aggaatgtggtgccc

SEQ ID NO: 1596479 - DNA, 15 bp, Homo sapiens
caggaatgtggtgcc

SEQ ID NO: 1596480 - DNA, 15 bp, Homo sapiens
acaggaatgtggtgc

SEQ ID NO: 1596481 - DNA, 15 bp, Homo sapiens
gacaggaatgtggtg

SEQ ID NO: 1596482 - DNA, 15 bp, Homo sapiens
ggacaggaatgtggt

SEQ ID NO: 1596483 - DNA, 15 bp, Homo sapiens
tggacaggaatgtgg

SEQ ID NO: 1596484 - DNA, 15 bp, Homo sapiens
gtggacaggaatgtg

SEQ ID NO: 1596485 - DNA, 15 bp, Homo sapiens
ggtggacaggaatgt

SEQ ID NO: 1596486 - DNA, 15 bp, Homo sapiens
gggtggacaggaatg

SEQ ID NO: 1596487 - DNA, 15 bp, Homo sapiens
tgggtggacaggaat

SEQ ID NO: 1596488 - DNA, 15 bp, Homo sapiens
ctgggtggacaggaa

SEQ ID NO: 1596489 - DNA, 15 bp, Homo sapiens
gctgggtggacagga

SEQ ID NO: 1596490 - DNA, 15 bp, Homo sapiens
ggctgggtggacagg

SEQ ID NO: 1596491 - DNA, 15 bp, Homo sapiens
tggctgggtggacag

SEQ ID NO: 1596492 - DNA, 15 bp, Homo sapiens
ttggctgggtggaca

SEQ ID NO: 1596493 - DNA, 15 bp, Homo sapiens
cttggctgggtggac

SEQ ID NO: 1596494 - DNA, 15 bp, Homo sapiens
gcttggctgggtgga

SEQ ID NO: 1596495 - DNA, 15 bp, Homo sapiens
ggcttggctgggtgg

SEQ ID NO: 1596496 - DNA, 15 bp, Homo sapiens
aggcttggctgggtg

SEQ ID NO: 1596497 - DNA, 15 bp, Homo sapiens
caggcttggctgggt

SEQ ID NO: 1596498 - DNA, 15 bp, Homo sapiens
ccaggcttggctggg

SEQ ID NO: 1596499 - DNA, 15 bp, Homo sapiens
accaggcttggctgg

SEQ ID NO: 1596500 - DNA, 15 bp, Homo sapiens
gaccaggcttggctg

SEQ ID NO: 1596501 - DNA, 15 bp, Homo sapiens
agaccaggcttggct

SEQ ID NO: 1596502 - DNA, 15 bp, Homo sapiens
cagaccaggcttggc

SEQ ID NO: 1596503 - DNA, 15 bp, Homo sapiens
tcagaccaggcttgg

SEQ ID NO: 1596504 - DNA, 15 bp, Homo sapiens
ctcagaccaggcttg

SEQ ID NO: 1596505 - DNA, 15 bp, Homo sapiens
cctcagaccaggctt

SEQ ID NO: 1596506 - DNA, 15 bp, Homo sapiens
gcctcagaccaggct

SEQ ID NO: 1596507 - DNA, 15 bp, Homo sapiens
agcctcagaccaggc

SEQ ID NO: 1596508 - DNA, 15 bp, Homo sapiens
cagcctcagaccagg

SEQ ID NO: 1596509 - DNA, 15 bp, Homo sapiens
acagcctcagaccag

SEQ ID NO: 1596510 - DNA, 15 bp, Homo sapiens
cacagcctcagacca

SEQ ID NO: 1596511 - DNA, 15 bp, Homo sapiens
acacagcctcagacc

SEQ ID NO: 1596512 - DNA, 15 bp, Homo sapiens
gacacagcctcagac

SEQ ID NO: 1596513 - DNA, 15 bp, Homo sapiens
ggacacagcctcaga

SEQ ID NO: 1596514 - DNA, 15 bp, Homo sapiens
aggacacagcctcag

SEQ ID NO: 1596515 - DNA, 15 bp, Homo sapiens
aaggacacagcctca

SEQ ID NO: 1596516 - DNA, 15 bp, Homo sapiens
taaggacacagcctc

SEQ ID NO: 1596517 - DNA, 15 bp, Homo sapiens
ctaaggacacagcct

SEQ ID NO: 1596518 - DNA, 15 bp, Homo sapiens
actaaggacacagcc

SEQ ID NO: 1596519 - DNA, 15 bp, Homo sapiens
gactaaggacacagc

SEQ ID NO: 1596520 - DNA, 15 bp, Homo sapiens
tgactaaggacacag

SEQ ID NO: 1596521 - DNA, 15 bp, Homo sapiens
ctgactaaggacaca

SEQ ID NO: 1596522 - DNA, 15 bp, Homo sapiens
cctgactaaggacac

SEQ ID NO: 1596523 - DNA, 15 bp, Homo sapiens
ccctgactaaggaca

SEQ ID NO: 1596524 - DNA, 15 bp, Homo sapiens
cccctgactaaggac

SEQ ID NO: 1596525 - DNA, 15 bp, Homo sapiens
tcccctgactaagga

SEQ ID NO: 1596526 - DNA, 15 bp, Homo sapiens
ctcccctgactaagg

SEQ ID NO: 1596527 - DNA, 15 bp, Homo sapiens
gctcccctgactaag

SEQ ID NO: 1596528 - DNA, 15 bp, Homo sapiens
ggctcccctgactaa

SEQ ID NO: 1596529 - DNA, 15 bp, Homo sapiens
aggctcccctgacta

SEQ ID NO: 1596530 - DNA, 15 bp, Homo sapiens
caggctcccctgact

SEQ ID NO: 1596531 - DNA, 15 bp, Homo sapiens
acaggctcccctgac

SEQ ID NO: 1596532 - DNA, 15 bp, Homo sapiens
aacaggctcccctga

SEQ ID NO: 1596533 - DNA, 15 bp, Homo sapiens
aaacaggctcccctg

SEQ ID NO: 1596534 - DNA, 15 bp, Homo sapiens
gaaacaggctcccct

SEQ ID NO: 1596535 - DNA, 15 bp, Homo sapiens
ggaaacaggctcccc

SEQ ID NO: 1596536 - DNA, 15 bp, Homo sapiens
gggaaacaggctccc

SEQ ID NO: 1596537 - DNA, 15 bp, Homo sapiens
agggaaacaggctcc

SEQ ID NO: 1596538 - DNA, 15 bp, Homo sapiens
aagggaaacaggctc

SEQ ID NO: 1596539 - DNA, 15 bp, Homo sapiens
ggaaagggaaacagg

SEQ ID NO: 1596540 - DNA, 15 bp, Homo sapiens
gggaaagggaaacag

SEQ ID NO: 1596541 - DNA, 15 bp, Homo sapiens
ggggaaagggaaaca

SEQ ID NO: 1596542 - DNA, 15 bp, Homo sapiens
aggggaaagggaaac

SEQ ID NO: 1596543 - DNA, 15 bp, Homo sapiens
caggggaaagggaaa

SEQ ID NO: 1596544 - DNA, 15 bp, Homo sapiens
ccaggggaaagggaa

SEQ ID NO: 1596545 - DNA, 15 bp, Homo sapiens
gccaggggaaaggga

SEQ ID NO: 1596546 - DNA, 15 bp, Homo sapiens
tgccaggggaaaggg

SEQ ID NO: 1596547 - DNA, 15 bp, Homo sapiens
ctgccaggggaaagg

SEQ ID NO: 1596548 - DNA, 15 bp, Homo sapiens
tctgccaggggaaag

SEQ ID NO: 1596549 - DNA, 15 bp, Homo sapiens
gtctgccaggggaaa

SEQ ID NO: 1596550 - DNA, 15 bp, Homo sapiens
agtctgccaggggaa

SEQ ID NO: 1596551 - DNA, 15 bp, Homo sapiens
tagtctgccagggga

SEQ ID NO: 1596552 - DNA, 15 bp, Homo sapiens
ctagtctgccagggg

SEQ ID NO: 1596553 - DNA, 15 bp, Homo sapiens
cctagtctgccaggg

SEQ ID NO: 1596554 - DNA, 15 bp, Homo sapiens
acctagtctgccagg

SEQ ID NO: 1596555 - DNA, 15 bp, Homo sapiens
gacctagtctgccag

SEQ ID NO: 1596556 - DNA, 15 bp, Homo sapiens
ggacctagtctgcca

SEQ ID NO: 1596557 - DNA, 15 bp, Homo sapiens
aggacctagtctgcc

SEQ ID NO: 1596558 - DNA, 15 bp, Homo sapiens
caggacctagtctgc

SEQ ID NO: 1596559 - DNA, 15 bp, Homo sapiens
acaggacctagtctg

SEQ ID NO: 1596560 - DNA, 15 bp, Homo sapiens
cacaggacctagtct

SEQ ID NO: 1596561 - DNA, 15 bp, Homo sapiens
ccacaggacctagtc

SEQ ID NO: 1596562 - DNA, 15 bp, Homo sapiens
cccacaggacctagt

SEQ ID NO: 1596563 - DNA, 15 bp, Homo sapiens
acccacaggacctag

SEQ ID NO: 1596564 - DNA, 15 bp, Homo sapiens
gacccacaggaccta

SEQ ID NO: 1596565 - DNA, 15 bp, Homo sapiens
ggacccacaggacct

SEQ ID NO: 1596566 - DNA, 15 bp, Homo sapiens
gggacccacaggacc

SEQ ID NO: 1596567 - DNA, 15 bp, Homo sapiens
tgggacccacaggac

SEQ ID NO: 1596568 - DNA, 15 bp, Homo sapiens
ctgggacccacagga

SEQ ID NO: 1596569 - DNA, 15 bp, Homo sapiens
gctgggacccacagg

SEQ ID NO: 1596570 - DNA, 15 bp, Homo sapiens
cgctgggacccacag

SEQ ID NO: 1596571 - DNA, 15 bp, Homo sapiens
acgctgggacccaca

SEQ ID NO: 1596572 - DNA, 15 bp, Homo sapiens
gacgctgggacccac

SEQ ID NO: 1596573 - DNA, 15 bp, Homo sapiens
ggacgctgggaccca

SEQ ID NO: 1596574 - DNA, 15 bp, Homo sapiens
aggacgctgggaccc

SEQ ID NO: 1596575 - DNA, 15 bp, Homo sapiens
gaggacgctgggacc

SEQ ID NO: 1596576 - DNA, 15 bp, Homo sapiens
agaggacgctgggac

SEQ ID NO: 1596577 - DNA, 15 bp, Homo sapiens
aagaggacgctggga

SEQ ID NO: 1596578 - DNA, 15 bp, Homo sapiens
gaagaggacgctggg

SEQ ID NO: 1596579 - DNA, 15 bp, Homo sapiens
tgaagaggacgctgg

SEQ ID NO: 1596580 - DNA, 15 bp, Homo sapiens
gtgaagaggacgctg

SEQ ID NO: 1596581 - DNA, 15 bp, Homo sapiens
ggtgaagaggacgct

SEQ ID NO: 1596582 - DNA, 15 bp, Homo sapiens
aggtgaagaggacgc

SEQ ID NO: 1596583 - DNA, 15 bp, Homo sapiens
gaggtgaagaggacg

SEQ ID NO: 1596584 - DNA, 15 bp, Homo sapiens
ggaggtgaagaggac

SEQ ID NO: 1596585 - DNA, 15 bp, Homo sapiens
aggaggtgaagagga

SEQ ID NO: 1596586 - DNA, 15 bp, Homo sapiens
caggaggtgaagagg

SEQ ID NO: 1596587 - DNA, 15 bp, Homo sapiens
gcaggaggtgaagag

SEQ ID NO: 1596588 - DNA, 15 bp, Homo sapiens
ggcaggaggtgaaga

SEQ ID NO: 1596589 - DNA, 15 bp, Homo sapiens
tggcaggaggtgaag

SEQ ID NO: 1596590 - DNA, 15 bp, Homo sapiens
ctggcaggaggtgaa

SEQ ID NO: 1596591 - DNA, 15 bp, Homo sapiens
actggcaggaggtga

SEQ ID NO: 1596592 - DNA, 15 bp, Homo sapiens
aactggcaggaggtg

SEQ ID NO: 1596593 - DNA, 15 bp, Homo sapiens
caactggcaggaggt

SEQ ID NO: 1596594 - DNA, 15 bp, Homo sapiens
acaactggcaggagg

SEQ ID NO: 1596595 - DNA, 15 bp, Homo sapiens
tacaactggcaggag

SEQ ID NO: 1596596 - DNA, 15 bp, Homo sapiens
ctacaactggcagga

SEQ ID NO: 1596597 - DNA, 15 bp, Homo sapiens
cctacaactggcagg

SEQ ID NO: 1596598 - DNA, 15 bp, Homo sapiens
tcctacaactggcag

SEQ ID NO: 1596599 - DNA, 15 bp, Homo sapiens
ctcctacaactggca

SEQ ID NO: 1596600 - DNA, 15 bp, Homo sapiens
actcctacaactggc

SEQ ID NO: 1596601 - DNA, 15 bp, Homo sapiens
aactcctacaactgg

SEQ ID NO: 1596602 - DNA, 15 bp, Homo sapiens
gaactcctacaactg

SEQ ID NO: 1596603 - DNA, 15 bp, Homo sapiens
agaactcctacaact

SEQ ID NO: 1596604 - DNA, 15 bp, Homo sapiens
cagaactcctacaac

SEQ ID NO: 1596605 - DNA, 15 bp, Homo sapiens
acagaactcctacaa

SEQ ID NO: 1596606 - DNA, 15 bp, Homo sapiens
gacagaactcctaca

SEQ ID NO: 1596607 - DNA, 15 bp, Homo sapiens
ggacagaactcctac

SEQ ID NO: 1596608 - DNA, 15 bp, Homo sapiens
aggacagaactccta

SEQ ID NO: 1596609 - DNA, 15 bp, Homo sapiens
gaggacagaactcct

SEQ ID NO: 1596610 - DNA, 15 bp, Homo sapiens
ggaggacagaactcc

SEQ ID NO: 1596611 - DNA, 15 bp, Homo sapiens
gggaggacagaactc

SEQ ID NO: 1596612 - DNA, 15 bp, Homo sapiens
tgggaggacagaact

SEQ ID NO: 1596613 - DNA, 15 bp, Homo sapiens
atgggaggacagaac

SEQ ID NO: 1596614 - DNA, 15 bp, Homo sapiens
aatgggaggacagaa

SEQ ID NO: 1596615 - DNA, 15 bp, Homo sapiens
aaatgggaggacaga

SEQ ID NO: 1596616 - DNA, 15 bp, Homo sapiens
aaaatgggaggacag

SEQ ID NO: 1596617 - DNA, 15 bp, Homo sapiens
caaaatgggaggaca

SEQ ID NO: 1596618 - DNA, 15 bp, Homo sapiens
gcaaaatgggaggac

SEQ ID NO: 1596619 - DNA, 15 bp, Homo sapiens
cgcaaaatgggagga

SEQ ID NO: 1596620 - DNA, 15 bp, Homo sapiens
ccgcaaaatgggagg

SEQ ID NO: 1596621 - DNA, 15 bp, Homo sapiens
tccgcaaaatgggag

SEQ ID NO: 1596622 - DNA, 15 bp, Homo sapiens
ttccgcaaaatggga

SEQ ID NO: 1596623 - DNA, 15 bp, Homo sapiens
gttccgcaaaatggg

SEQ ID NO: 1596624 - DNA, 15 bp, Homo sapiens
ggttccgcaaaatgg

SEQ ID NO: 1596625 - DNA, 15 bp, Homo sapiens
tggttccgcaaaatg

SEQ ID NO: 1596626 - DNA, 15 bp, Homo sapiens
ctggttccgcaaaat

SEQ ID NO: 1596627 - DNA, 15 bp, Homo sapiens
cctggttccgcaaaa

SEQ ID NO: 1596628 - DNA, 15 bp, Homo sapiens
ccctggttccgcaaa

SEQ ID NO: 1596629 - DNA, 15 bp, Homo sapiens
tccctggttccgcaa

SEQ ID NO: 1596630 - DNA, 15 bp, Homo sapiens
ctccctggttccgca

SEQ ID NO: 1596631 - DNA, 15 bp, Homo sapiens
gctccctggttccgc

SEQ ID NO: 1596632 - DNA, 15 bp, Homo sapiens
ggctccctggttccg

SEQ ID NO: 1596633 - DNA, 15 bp, Homo sapiens
aggctccctggttcc

SEQ ID NO: 1596634 - DNA, 15 bp, Homo sapiens
caggctccctggttc

SEQ ID NO: 1596635 - DNA, 15 bp, Homo sapiens
acaggctccctggtt

SEQ ID NO: 1596636 - DNA, 15 bp, Homo sapiens
cacaggctccctggt

SEQ ID NO: 1596637 - DNA, 15 bp, Homo sapiens
ccacaggctccctgg

SEQ ID NO: 1596638 - DNA, 15 bp, Homo sapiens
cccacaggctccctg

SEQ ID NO: 1596639 - DNA, 15 bp, Homo sapiens
tcccacaggctccct

SEQ ID NO: 1596640 - DNA, 15 bp, Homo sapiens
ctcccacaggctccc

SEQ ID NO: 1596641 - DNA, 15 bp, Homo sapiens
cctcccacaggctcc

SEQ ID NO: 1596642 - DNA, 15 bp, Homo sapiens
gcctcccacaggctc

SEQ ID NO: 1596643 - DNA, 15 bp, Homo sapiens
ggcctcccacaggct

SEQ ID NO: 1596644 - DNA, 15 bp, Homo sapiens
aggcctcccacaggc

SEQ ID NO: 1596645 - DNA, 15 bp, Homo sapiens
aaggcctcccacagg

SEQ ID NO: 1596646 - DNA, 15 bp, Homo sapiens
taaggcctcccacag

SEQ ID NO: 1596647 - DNA, 15 bp, Homo sapiens
gtaaggcctcccaca

SEQ ID NO: 1596648 - DNA, 15 bp, Homo sapiens
ggtaaggcctcccac

SEQ ID NO: 1596649 - DNA, 15 bp, Homo sapiens
aggtaaggcctccca

SEQ ID NO: 1596650 - DNA, 15 bp, Homo sapiens
gaggtaaggcctccc

SEQ ID NO: 1596651 - DNA, 15 bp, Homo sapiens
ggaggtaaggcctcc

SEQ ID NO: 1596652 - DNA, 15 bp, Homo sapiens
tggaggtaaggcctc

SEQ ID NO: 1596653 - DNA, 15 bp, Homo sapiens
gtggaggtaaggcct

SEQ ID NO: 1596654 - DNA, 15 bp, Homo sapiens
agtggaggtaaggcc

SEQ ID NO: 1596655 - DNA, 15 bp, Homo sapiens
cagtggaggtaaggc

SEQ ID NO: 1596656 - DNA, 15 bp, Homo sapiens
gcagtggaggtaagg

SEQ ID NO: 1596657 - DNA, 15 bp, Homo sapiens
ggcagtggaggtaag

SEQ ID NO: 1596658 - DNA, 15 bp, Homo sapiens
tggcagtggaggtaa

SEQ ID NO: 1596659 - DNA, 15 bp, Homo sapiens
ctggcagtggaggta

SEQ ID NO: 1596660 - DNA, 15 bp, Homo sapiens
gctggcagtggaggt

SEQ ID NO: 1596661 - DNA, 15 bp, Homo sapiens
ggctggcagtggagg

SEQ ID NO: 1596662 - DNA, 15 bp, Homo sapiens
gggctggcagtggag

SEQ ID NO: 1596663 - DNA, 15 bp, Homo sapiens
ggggctggcagtgga

SEQ ID NO: 1596664 - DNA, 15 bp, Homo sapiens
tggggctggcagtgg

SEQ ID NO: 1596665 - DNA, 15 bp, Homo sapiens
gtggggctggcagtg

SEQ ID NO: 1596666 - DNA, 15 bp, Homo sapiens
ggtggggctggcagt

SEQ ID NO: 1596667 - DNA, 15 bp, Homo sapiens
aggtggggctggcag

SEQ ID NO: 1596668 - DNA, 15 bp, Homo sapiens
gaggtggggctggca

SEQ ID NO: 1596669 - DNA, 15 bp, Homo sapiens
tgaggtggggctggc

SEQ ID NO: 1596670 - DNA, 15 bp, Homo sapiens
gtgaggtggggctgg

SEQ ID NO: 1596671 - DNA, 15 bp, Homo sapiens
ggtgaggtggggctg

SEQ ID NO: 1596672 - DNA, 15 bp, Homo sapiens
gggtgaggtggggct

SEQ ID NO: 1596673 - DNA, 15 bp, Homo sapiens
ggggtgaggtggggc

SEQ ID NO: 1596674 - DNA, 15 bp, Homo sapiens
tggggtgaggtgggg

SEQ ID NO: 1596675 - DNA, 15 bp, Homo sapiens
ctggggtgaggtggg

SEQ ID NO: 1596676 - DNA, 15 bp, Homo sapiens
cctggggtgaggtgg

SEQ ID NO: 1596677 - DNA, 15 bp, Homo sapiens
ccctggggtgaggtg

SEQ ID NO: 1596678 - DNA, 15 bp, Homo sapiens
gccctggggtgaggt

SEQ ID NO: 1596679 - DNA, 15 bp, Homo sapiens
tgccctggggtgagg

SEQ ID NO: 1596680 - DNA, 15 bp, Homo sapiens
ctgccctggggtgag

SEQ ID NO: 1596681 - DNA, 15 bp, Homo sapiens
tctgccctggggtga

SEQ ID NO: 1596682 - DNA, 15 bp, Homo sapiens
atctgccctggggtg

SEQ ID NO: 1596683 - DNA, 15 bp, Homo sapiens
aatctgccctggggt

SEQ ID NO: 1596684 - DNA, 15 bp, Homo sapiens
taatctgccctgggg

SEQ ID NO: 1596685 - DNA, 15 bp, Homo sapiens
ctaatctgccctggg

SEQ ID NO: 1596686 - DNA, 15 bp, Homo sapiens
actaatctgccctgg

SEQ ID NO: 1596687 - DNA, 15 bp, Homo sapiens
cactaatctgccctg

SEQ ID NO: 1596688 - DNA, 15 bp, Homo sapiens
gcactaatctgccct

SEQ ID NO: 1596689 - DNA, 15 bp, Homo sapiens
ggcactaatctgccc

SEQ ID NO: 1596690 - DNA, 15 bp, Homo sapiens
aggcactaatctgcc

SEQ ID NO: 1596691 - DNA, 15 bp, Homo sapiens
gaggcactaatctgc

SEQ ID NO: 1596692 - DNA, 15 bp, Homo sapiens
agaggcactaatctg

SEQ ID NO: 1596693 - DNA, 15 bp, Homo sapiens
cagaggcactaatct

SEQ ID NO: 1596694 - DNA, 15 bp, Homo sapiens
tcagaggcactaatc

SEQ ID NO: 1596695 - DNA, 15 bp, Homo sapiens
ctcagaggcactaat

SEQ ID NO: 1596696 - DNA, 15 bp, Homo sapiens
gctcagaggcactaa

SEQ ID NO: 1596697 - DNA, 15 bp, Homo sapiens
ggctcagaggcacta

SEQ ID NO: 1596698 - DNA, 15 bp, Homo sapiens
tggctcagaggcact

SEQ ID NO: 1596699 - DNA, 15 bp, Homo sapiens
gtggctcagaggcac

SEQ ID NO: 1596700 - DNA, 15 bp, Homo sapiens
agtggctcagaggca

SEQ ID NO: 1596701 - DNA, 15 bp, Homo sapiens
gagtggctcagaggc

SEQ ID NO: 1596702 - DNA, 15 bp, Homo sapiens
tgagtggctcagagg

SEQ ID NO: 1596703 - DNA, 15 bp, Homo sapiens
ttgagtggctcagag

SEQ ID NO: 1596704 - DNA, 15 bp, Homo sapiens
attgagtggctcaga

SEQ ID NO: 1596705 - DNA, 15 bp, Homo sapiens
aattgagtggctcag

SEQ ID NO: 1596706 - DNA, 15 bp, Homo sapiens
taattgagtggctca

SEQ ID NO: 1596707 - DNA, 15 bp, Homo sapiens
ataattgagtggctc

SEQ ID NO: 1596708 - DNA, 15 bp, Homo sapiens
gataattgagtggct

SEQ ID NO: 1596709 - DNA, 15 bp, Homo sapiens
ggataattgagtggc

SEQ ID NO: 1596710 - DNA, 15 bp, Homo sapiens
cggataattgagtgg

SEQ ID NO: 1596711 - DNA, 15 bp, Homo sapiens
gcggataattgagtg

SEQ ID NO: 1596712 - DNA, 15 bp, Homo sapiens
tgcggataattgagt

SEQ ID NO: 1596713 - DNA, 15 bp, Homo sapiens
ctgcggataattgag

SEQ ID NO: 1596714 - DNA, 15 bp, Homo sapiens
cctgcggataattga

SEQ ID NO: 1596715 - DNA, 15 bp, Homo sapiens
tcctgcggataattg

SEQ ID NO: 1596716 - DNA, 15 bp, Homo sapiens
atcctgcggataatt

SEQ ID NO: 1596717 - DNA, 15 bp, Homo sapiens
catcctgcggataat

SEQ ID NO: 1596718 - DNA, 15 bp, Homo sapiens
ccatcctgcggataa

SEQ ID NO: 1596719 - DNA, 15 bp, Homo sapiens
cccatcctgcggata

SEQ ID NO: 1596720 - DNA, 15 bp, Homo sapiens
acccatcctgcggat

SEQ ID NO: 1596721 - DNA, 15 bp, Homo sapiens
cacccatcctgcgga

SEQ ID NO: 1596722 - DNA, 15 bp, Homo sapiens
ccacccatcctgcgg

SEQ ID NO: 1596723 - DNA, 15 bp, Homo sapiens
cccacccatcctgcg

SEQ ID NO: 1596724 - DNA, 15 bp, Homo sapiens
ccccacccatcctgc

SEQ ID NO: 1596725 - DNA, 15 bp, Homo sapiens
cccccacccatcctg

SEQ ID NO: 1596726 - DNA, 15 bp, Homo sapiens
ccccccacccatcct

SEQ ID NO: 1596727 - DNA, 15 bp, Homo sapiens
cccccccacccatcc

SEQ ID NO: 1596728 - DNA, 15 bp, Homo sapiens
ccccccccacccatc

SEQ ID NO: 1596729 - DNA, 15 bp, Homo sapiens
cccccccccacccat

SEQ ID NO: 1596730 - DNA, 15 bp, Homo sapiens
ccccccccccaccca

SEQ ID NO: 1596731 - DNA, 15 bp, Homo sapiens
gccccccccccaccc

SEQ ID NO: 1596732 - DNA, 15 bp, Homo sapiens
cgccccccccccacc

SEQ ID NO: 1596733 - DNA, 15 bp, Homo sapiens
ccgccccccccccac

SEQ ID NO: 1596734 - DNA, 15 bp, Homo sapiens
cccgcccccccccca

SEQ ID NO: 1596735 - DNA, 15 bp, Homo sapiens
ccccgcccccccccc

SEQ ID NO: 1596736 - DNA, 15 bp, Homo sapiens
tccccgccccccccc

SEQ ID NO: 1596737 - DNA, 15 bp, Homo sapiens
ctccccgcccccccc

SEQ ID NO: 1596738 - DNA, 15 bp, Homo sapiens
cctccccgccccccc

SEQ ID NO: 1596739 - DNA, 15 bp, Homo sapiens
ccctccccgcccccc

SEQ ID NO: 1596740 - DNA, 15 bp, Homo sapiens
cccctccccgccccc

SEQ ID NO: 1596741 - DNA, 15 bp, Homo sapiens
tcccctccccgcccc

SEQ ID NO: 1596742 - DNA, 15 bp, Homo sapiens
ttcccctccccgccc

SEQ ID NO: 1596743 - DNA, 15 bp, Homo sapiens
attcccctccccgcc

SEQ ID NO: 1596744 - DNA, 15 bp, Homo sapiens
gattcccctccccgc

SEQ ID NO: 1596745 - DNA, 15 bp, Homo sapiens
agattcccctccccg

SEQ ID NO: 1596746 - DNA, 15 bp, Homo sapiens
tagattcccctcccc

SEQ ID NO: 1596747 - DNA, 15 bp, Homo sapiens
ctagattcccctccc

SEQ ID NO: 1596748 - DNA, 15 bp, Homo sapiens
tctagattcccctcc

SEQ ID NO: 1596749 - DNA, 15 bp, Homo sapiens
ttctagattcccctc

SEQ ID NO: 1596750 - DNA, 15 bp, Homo sapiens
attctagattcccct

SEQ ID NO: 1596751 - DNA, 15 bp, Homo sapiens
aattctagattcccc

SEQ ID NO: 1596752 - DNA, 15 bp, Homo sapiens
aaattctagattccc

SEQ ID NO: 1596753 - DNA, 15 bp, Homo sapiens
taaattctagattcc

SEQ ID NO: 1596754 - DNA, 15 bp, Homo sapiens
ataaattctagattc

SEQ ID NO: 1596755 - DNA, 15 bp, Homo sapiens
tataaattctagatt

SEQ ID NO: 1596756 - DNA, 15 bp, Homo sapiens
ctataaattctagat

SEQ ID NO: 1596757 - DNA, 15 bp, Homo sapiens
gctataaattctaga

SEQ ID NO: 1596758 - DNA, 15 bp, Homo sapiens
agctataaattctag

SEQ ID NO: 1596759 - DNA, 15 bp, Homo sapiens
cagctataaattcta

SEQ ID NO: 1596760 - DNA, 15 bp, Homo sapiens
ccagctataaattct

SEQ ID NO: 1596761 - DNA, 15 bp, Homo sapiens
cccagctataaattc

SEQ ID NO: 1596762 - DNA, 15 bp, Homo sapiens
ccccagctataaatt

SEQ ID NO: 1596763 - DNA, 15 bp, Homo sapiens
cccccagctataaat

SEQ ID NO: 1596764 - DNA, 15 bp, Homo sapiens
acccccagctataaa

SEQ ID NO: 1596765 - DNA, 15 bp, Homo sapiens
cacccccagctataa

SEQ ID NO: 1596766 - DNA, 15 bp, Homo sapiens
ccacccccagctata

SEQ ID NO: 1596767 - DNA, 15 bp, Homo sapiens
tccacccccagctat

SEQ ID NO: 1596768 - DNA, 15 bp, Homo sapiens
ttccacccccagcta

SEQ ID NO: 1596769 - DNA, 15 bp, Homo sapiens
cttccacccccagct

SEQ ID NO: 1596770 - DNA, 15 bp, Homo sapiens
ccttccacccccagc

SEQ ID NO: 1596771 - DNA, 15 bp, Homo sapiens
gccttccacccccag

SEQ ID NO: 1596772 - DNA, 15 bp, Homo sapiens
cgccttccaccccca

SEQ ID NO: 1596773 - DNA, 15 bp, Homo sapiens
gcgccttccaccccc

SEQ ID NO: 1596774 - DNA, 15 bp, Homo sapiens
tgcgccttccacccc

SEQ ID NO: 1596775 - DNA, 15 bp, Homo sapiens
ctgcgccttccaccc

SEQ ID NO: 1596776 - DNA, 15 bp, Homo sapiens
actgcgccttccacc

SEQ ID NO: 1596777 - DNA, 15 bp, Homo sapiens
cactgcgccttccac

SEQ ID NO: 1596778 - DNA, 15 bp, Homo sapiens
tcactgcgccttcca

SEQ ID NO: 1596779 - DNA, 15 bp, Homo sapiens
ctcactgcgccttcc

SEQ ID NO: 1596780 - DNA, 15 bp, Homo sapiens
cctcactgcgccttc

SEQ ID NO: 1596781 - DNA, 15 bp, Homo sapiens
ccctcactgcgcctt

SEQ ID NO: 1596782 - DNA, 15 bp, Homo sapiens
tccctcactgcgcct

SEQ ID NO: 1596783 - DNA, 15 bp, Homo sapiens
ctccctcactgcgcc

SEQ ID NO: 1596784 - DNA, 15 bp, Homo sapiens
cctccctcactgcgc

SEQ ID NO: 1596785 - DNA, 15 bp, Homo sapiens
acctccctcactgcg

SEQ ID NO: 1596786 - DNA, 15 bp, Homo sapiens
tacctccctcactgc

SEQ ID NO: 1596787 - DNA, 15 bp, Homo sapiens
gtacctccctcactg

SEQ ID NO: 1596788 - DNA, 15 bp, Homo sapiens
tgtacctccctcact

SEQ ID NO: 1596789 - DNA, 15 bp, Homo sapiens
ctgtacctccctcac

SEQ ID NO: 1596790 - DNA, 15 bp, Homo sapiens
cctgtacctccctca

SEQ ID NO: 1596791 - DNA, 15 bp, Homo sapiens
ccctgtacctccctc

SEQ ID NO: 1596792 - DNA, 15 bp, Homo sapiens
tccctgtacctccct

SEQ ID NO: 1596793 - DNA, 15 bp, Homo sapiens
ctccctgtacctccc

SEQ ID NO: 1596794 - DNA, 15 bp, Homo sapiens
cctccctgtacctcc

SEQ ID NO: 1596795 - DNA, 15 bp, Homo sapiens
tcctccctgtacctc

SEQ ID NO: 1596796 - DNA, 15 bp, Homo sapiens
ttcctccctgtacct

SEQ ID NO: 1596797 - DNA, 15 bp, Homo sapiens
cttcctccctgtacc

SEQ ID NO: 1596798 - DNA, 15 bp, Homo sapiens
tcttcctccctgtac

SEQ ID NO: 1596799 - DNA, 15 bp, Homo sapiens
ctcttcctccctgta

SEQ ID NO: 1596800 - DNA, 15 bp, Homo sapiens
actcttcctccctgt

SEQ ID NO: 1596801 - DNA, 15 bp, Homo sapiens
cactcttcctccctg

SEQ ID NO: 1596802 - DNA, 15 bp, Homo sapiens
tcactcttcctccct

SEQ ID NO: 1596803 - DNA, 15 bp, Homo sapiens
ttcactcttcctccc

SEQ ID NO: 1596804 - DNA, 15 bp, Homo sapiens
tttcactcttcctcc

SEQ ID NO: 1596805 - DNA, 15 bp, Homo sapiens
atttcactcttcctc

SEQ ID NO: 1596806 - DNA, 15 bp, Homo sapiens
tatttcactcttcct

SEQ ID NO: 1596807 - DNA, 15 bp, Homo sapiens
atatttcactcttcc

SEQ ID NO: 1596808 - DNA, 15 bp, Homo sapiens
aatatttcactcttc

SEQ ID NO: 1596809 - DNA, 15 bp, Homo sapiens
aaatatttcactctt

SEQ ID NO: 1596810 - DNA, 15 bp, Homo sapiens
taaatatttcactct

SEQ ID NO: 1596811 - DNA, 15 bp, Homo sapiens
ctaaatatttcactc

SEQ ID NO: 1596812 - DNA, 15 bp, Homo sapiens
tctaaatatttcact

SEQ ID NO: 1596813 - DNA, 15 bp, Homo sapiens
atctaaatatttcac

SEQ ID NO: 1596814 - DNA, 15 bp, Homo sapiens
gatctaaatatttca

SEQ ID NO: 1596815 - DNA, 15 bp, Homo sapiens
agatctaaatatttc

SEQ ID NO: 1596816 - DNA, 15 bp, Homo sapiens
aagatctaaatattt

SEQ ID NO: 1596817 - DNA, 15 bp, Homo sapiens
aaagatctaaatatt

SEQ ID NO: 1596818 - DNA, 15 bp, Homo sapiens
caaagatctaaatat

SEQ ID NO: 1596819 - DNA, 15 bp, Homo sapiens
ccaaagatctaaata

SEQ ID NO: 1596820 - DNA, 15 bp, Homo sapiens
cccaaagatctaaat

SEQ ID NO: 1596821 - DNA, 15 bp, Homo sapiens
ccccaaagatctaaa

SEQ ID NO: 1596822 - DNA, 15 bp, Homo sapiens
accccaaagatctaa

SEQ ID NO: 1596823 - DNA, 15 bp, Homo sapiens
aaccccaaagatcta

SEQ ID NO: 1596824 - DNA, 15 bp, Homo sapiens
gaaccccaaagatct

SEQ ID NO: 1596825 - DNA, 15 bp, Homo sapiens
ggaaccccaaagatc

SEQ ID NO: 1596826 - DNA, 15 bp, Homo sapiens
aggaaccccaaagat

SEQ ID NO: 1596827 - DNA, 15 bp, Homo sapiens
caggaaccccaaaga

SEQ ID NO: 1596828 - DNA, 15 bp, Homo sapiens
gcaggaaccccaaag

SEQ ID NO: 1596829 - DNA, 15 bp, Homo sapiens
ggcaggaaccccaaa

SEQ ID NO: 1596830 - DNA, 15 bp, Homo sapiens
tggcaggaaccccaa

SEQ ID NO: 1596831 - DNA, 15 bp, Homo sapiens
atggcaggaacccca

SEQ ID NO: 1596832 - DNA, 15 bp, Homo sapiens
aatggcaggaacccc

SEQ ID NO: 1596833 - DNA, 15 bp, Homo sapiens
aaatggcaggaaccc

SEQ ID NO: 1596834 - DNA, 15 bp, Homo sapiens
caaatggcaggaacc

SEQ ID NO: 1596835 - DNA, 15 bp, Homo sapiens
ccaaatggcaggaac

SEQ ID NO: 1596836 - DNA, 15 bp, Homo sapiens
gccaaatggcaggaa

SEQ ID NO: 1596837 - DNA, 15 bp, Homo sapiens
ggccaaatggcagga

SEQ ID NO: 1596838 - DNA, 15 bp, Homo sapiens
gggccaaatggcagg

SEQ ID NO: 1596839 - DNA, 15 bp, Homo sapiens
ggggccaaatggcag

SEQ ID NO: 1596840 - DNA, 15 bp, Homo sapiens
aggggccaaatggca

SEQ ID NO: 1596841 - DNA, 15 bp, Homo sapiens
taggggccaaatggc

SEQ ID NO: 1596842 - DNA, 15 bp, Homo sapiens
ataggggccaaatgg

SEQ ID NO: 1596843 - DNA, 15 bp, Homo sapiens
aataggggccaaatg

SEQ ID NO: 1596844 - DNA, 15 bp, Homo sapiens
taataggggccaaat

SEQ ID NO: 1596845 - DNA, 15 bp, Homo sapiens
ttaataggggccaaa

SEQ ID NO: 1596846 - DNA, 15 bp, Homo sapiens
tttaataggggccaa

SEQ ID NO: 1596847 - DNA, 15 bp, Homo sapiens
ctttaataggggcca

SEQ ID NO: 1596848 - DNA, 15 bp, Homo sapiens
tctttaataggggcc

SEQ ID NO: 1596849 - DNA, 15 bp, Homo sapiens
ctctttaataggggc

SEQ ID NO: 1596850 - DNA, 15 bp, Homo sapiens
tctctttaatagggg

SEQ ID NO: 1596851 - DNA, 15 bp, Homo sapiens
ttctctttaataggg

SEQ ID NO: 1596852 - DNA, 15 bp, Homo sapiens
gttctctttaatagg

SEQ ID NO: 1596853 - DNA, 15 bp, Homo sapiens
ggttctctttaatag

SEQ ID NO: 1596854 - DNA, 15 bp, Homo sapiens
gggttctctttaata

SEQ ID NO: 1596855 - DNA, 15 bp, Homo sapiens
agggttctctttaat

SEQ ID NO: 1596856 - DNA, 15 bp, Homo sapiens
cagggttctctttaa

SEQ ID NO: 1596857 - DNA, 15 bp, Homo sapiens
ccagggttctcttta

SEQ ID NO: 1596858 - DNA, 15 bp, Homo sapiens
cccagggttctcttt

SEQ ID NO: 1596859 - DNA, 15 bp, Homo sapiens
ccccagggttctctt

SEQ ID NO: 1596860 - DNA, 15 bp, Homo sapiens
gccccagggttctct

SEQ ID NO: 1596861 - DNA, 15 bp, Homo sapiens
agccccagggttctc

SEQ ID NO: 1596862 - DNA, 15 bp, Homo sapiens
aagccccagggttct

SEQ ID NO: 1596863 - DNA, 15 bp, Homo sapiens
aaagccccagggttc

SEQ ID NO: 1596864 - DNA, 15 bp, Homo sapiens
aaaagccccagggtt

SEQ ID NO: 1596865 - DNA, 15 bp, Homo sapiens
taaaagccccagggt

SEQ ID NO: 1596866 - DNA, 15 bp, Homo sapiens
ctaaaagccccaggg

SEQ ID NO: 1596867 - DNA, 15 bp, Homo sapiens
tctaaaagccccagg

SEQ ID NO: 1596868 - DNA, 15 bp, Homo sapiens
ttctaaaagccccag

SEQ ID NO: 1596869 - DNA, 15 bp, Homo sapiens
attctaaaagcccca

SEQ ID NO: 1596870 - DNA, 15 bp, Homo sapiens
cattctaaaagcccc

SEQ ID NO: 1596871 - DNA, 15 bp, Homo sapiens
tcattctaaaagccc

SEQ ID NO: 1596872 - DNA, 15 bp, Homo sapiens
ctcattctaaaagcc

SEQ ID NO: 1596873 - DNA, 15 bp, Homo sapiens
actcattctaaaagc

SEQ ID NO: 1596874 - DNA, 15 bp, Homo sapiens
aactcattctaaaag

SEQ ID NO: 1596875 - DNA, 15 bp, Homo sapiens
aaactcattctaaaa

SEQ ID NO: 1596876 - DNA, 15 bp, Homo sapiens
aaaactcattctaaa

SEQ ID NO: 1596877 - DNA, 15 bp, Homo sapiens
caaaactcattctaa

SEQ ID NO: 1596878 - DNA, 15 bp, Homo sapiens
gcaaaactcattcta

SEQ ID NO: 1596879 - DNA, 15 bp, Homo sapiens
tgcaaaactcattct

SEQ ID NO: 1596880 - DNA, 15 bp, Homo sapiens
atgcaaaactcattc

SEQ ID NO: 1596881 - DNA, 15 bp, Homo sapiens
catgcaaaactcatt

SEQ ID NO: 1596882 - DNA, 15 bp, Homo sapiens
tcatgcaaaactcat

SEQ ID NO: 1596883 - DNA, 15 bp, Homo sapiens
ttcatgcaaaactca

SEQ ID NO: 1596884 - DNA, 15 bp, Homo sapiens
tttcatgcaaaactc

SEQ ID NO: 1596885 - DNA, 15 bp, Homo sapiens
atttcatgcaaaact

SEQ ID NO: 1596886 - DNA, 15 bp, Homo sapiens
aatttcatgcaaaac

SEQ ID NO: 1596887 - DNA, 15 bp, Homo sapiens
caatttcatgcaaaa

SEQ ID NO: 1596888 - DNA, 15 bp, Homo sapiens
tcaatttcatgcaaa

SEQ ID NO: 1596889 - DNA, 15 bp, Homo sapiens
ttcaatttcatgcaa

SEQ ID NO: 1596890 - DNA, 15 bp, Homo sapiens
gttcaatttcatgca

SEQ ID NO: 1596891 - DNA, 15 bp, Homo sapiens
tgttcaatttcatgc

SEQ ID NO: 1596892 - DNA, 15 bp, Homo sapiens
ttgttcaatttcatg

SEQ ID NO: 1596893 - DNA, 15 bp, Homo sapiens
cttgttcaatttcat

SEQ ID NO: 1596894 - DNA, 15 bp, Homo sapiens
gcttgttcaatttca

SEQ ID NO: 1596895 - DNA, 15 bp, Homo sapiens
tgcttgttcaatttc

SEQ ID NO: 1596896 - DNA, 15 bp, Homo sapiens
ctgcttgttcaattt

SEQ ID NO: 1596897 - DNA, 15 bp, Homo sapiens
cctgcttgttcaatt

SEQ ID NO: 1596898 - DNA, 15 bp, Homo sapiens
ccctgcttgttcaat

SEQ ID NO: 1596899 - DNA, 15 bp, Homo sapiens
gccctgcttgttcaa

SEQ ID NO: 1596900 - DNA, 15 bp, Homo sapiens
ggccctgcttgttca

SEQ ID NO: 1596901 - DNA, 15 bp, Homo sapiens
tggccctgcttgttc

SEQ ID NO: 1596902 - DNA, 15 bp, Homo sapiens
atggccctgcttgtt

SEQ ID NO: 1596903 - DNA, 15 bp, Homo sapiens
catggccctgcttgt

SEQ ID NO: 1596904 - DNA, 15 bp, Homo sapiens
tcatggccctgcttg

SEQ ID NO: 1596905 - DNA, 15 bp, Homo sapiens
ctcatggccctgctt

SEQ ID NO: 1596906 - DNA, 15 bp, Homo sapiens
gctcatggccctgct

SEQ ID NO: 1596907 - DNA, 15 bp, Homo sapiens
agctcatggccctgc

SEQ ID NO: 1596908 - DNA, 15 bp, Homo sapiens
cagctcatggccctg

SEQ ID NO: 1596909 - DNA, 15 bp, Homo sapiens
acagctcatggccct

SEQ ID NO: 1596910 - DNA, 15 bp, Homo sapiens
tacagctcatggccc

SEQ ID NO: 1596911 - DNA, 15 bp, Homo sapiens
gtacagctcatggcc

SEQ ID NO: 1596912 - DNA, 15 bp, Homo sapiens
tgtacagctcatggc

SEQ ID NO: 1596913 - DNA, 15 bp, Homo sapiens
ctgtacagctcatgg

SEQ ID NO: 1596914 - DNA, 15 bp, Homo sapiens
tctgtacagctcatg

SEQ ID NO: 1596915 - DNA, 15 bp, Homo sapiens
ttctgtacagctcat

SEQ ID NO: 1596916 - DNA, 15 bp, Homo sapiens
attctgtacagctca

SEQ ID NO: 1596917 - DNA, 15 bp, Homo sapiens
gattctgtacagctc

SEQ ID NO: 1596918 - DNA, 15 bp, Homo sapiens
ggattctgtacagct

SEQ ID NO: 1596919 - DNA, 15 bp, Homo sapiens
gggattctgtacagc

SEQ ID NO: 1596920 - DNA, 15 bp, Homo sapiens
tgggattctgtacag

SEQ ID NO: 1596921 - DNA, 15 bp, Homo sapiens
gtgggattctgtaca

SEQ ID NO: 1596922 - DNA, 15 bp, Homo sapiens
ggtgggattctgtac

SEQ ID NO: 1596923 - DNA, 15 bp, Homo sapiens
aggtgggattctgta

SEQ ID NO: 1596924 - DNA, 15 bp, Homo sapiens
gaggtgggattctgt

SEQ ID NO: 1596925 - DNA, 15 bp, Homo sapiens
ggaggtgggattctg

SEQ ID NO: 1596926 - DNA, 15 bp, Homo sapiens
tggaggtgggattct

SEQ ID NO: 1596927 - DNA, 15 bp, Homo sapiens
gtggaggtgggattc

SEQ ID NO: 1596928 - DNA, 15 bp, Homo sapiens
ggtggaggtgggatt

SEQ ID NO: 1596929 - DNA, 15 bp, Homo sapiens
gggtggaggtgggat

SEQ ID NO: 1596930 - DNA, 15 bp, Homo sapiens
ggggtggaggtggga

SEQ ID NO: 1596931 - DNA, 15 bp, Homo sapiens
gggggtggaggtggg

SEQ ID NO: 1596932 - DNA, 15 bp, Homo sapiens
ggggggtggaggtgg

SEQ ID NO: 1596933 - DNA, 15 bp, Homo sapiens
tggggggtggaggtg

SEQ ID NO: 1596934 - DNA, 15 bp, Homo sapiens
ttggggggtggaggt

SEQ ID NO: 1596935 - DNA, 15 bp, Homo sapiens
gttggggggtggagg

SEQ ID NO: 1596936 - DNA, 15 bp, Homo sapiens
tgttggggggtggag

SEQ ID NO: 1596937 - DNA, 15 bp, Homo sapiens
atgttggggggtgga

SEQ ID NO: 1596938 - DNA, 15 bp, Homo sapiens
tatgttggggggtgg

SEQ ID NO: 1596939 - DNA, 15 bp, Homo sapiens
gtatgttggggggtg

SEQ ID NO: 1596940 - DNA, 15 bp, Homo sapiens
tgtatgttggggggt

SEQ ID NO: 1596941 - DNA, 15 bp, Homo sapiens
gtgtatgttgggggg

SEQ ID NO: 1596942 - DNA, 15 bp, Homo sapiens
tgtgtatgttggggg

SEQ ID NO: 1596943 - DNA, 15 bp, Homo sapiens
gtgtgtatgttgggg

SEQ ID NO: 1596944 - DNA, 15 bp, Homo sapiens
gtgtgtgtatgttgg

SEQ ID NO: 1596945 - DNA, 15 bp, Homo sapiens
ggtgtgtgtatgttg

SEQ ID NO: 1596946 - DNA, 15 bp, Homo sapiens
aggtgtgtgtatgtt

SEQ ID NO: 1596947 - DNA, 15 bp, Homo sapiens
aaggtgtgtgtatgt

SEQ ID NO: 1596948 - DNA, 15 bp, Homo sapiens
taaggtgtgtgtatg

SEQ ID NO: 1596949 - DNA, 15 bp, Homo sapiens
ataaggtgtgtgtat

SEQ ID NO: 1596950 - DNA, 15 bp, Homo sapiens
aataaggtgtgtgta

SEQ ID NO: 1596951 - DNA, 15 bp, Homo sapiens
aaataaggtgtgtgt

SEQ ID NO: 1596952 - DNA, 15 bp, Homo sapiens
taaataaggtgtgtg

SEQ ID NO: 1596953 - DNA, 15 bp, Homo sapiens
ataaataaggtgtgt

SEQ ID NO: 1596954 - DNA, 15 bp, Homo sapiens
aataaataaggtgtg

SEQ ID NO: 1596955 - DNA, 15 bp, Homo sapiens
caataaataaggtgt

SEQ ID NO: 1596956 - DNA, 15 bp, Homo sapiens
ccaataaataaggtg

SEQ ID NO: 1596957 - DNA, 15 bp, Homo sapiens
accaataaataaggt

SEQ ID NO: 1596958 - DNA, 15 bp, Homo sapiens
aaccaataaataagg

SEQ ID NO: 1596959 - DNA, 15 bp, Homo sapiens
gaaccaataaataag

SEQ ID NO: 1596960 - DNA, 15 bp, Homo sapiens
agaaccaataaataa

SEQ ID NO: 1596961 - DNA, 15 bp, Homo sapiens
aagaaccaataaata

SEQ ID NO: 1596962 - DNA, 15 bp, Homo sapiens
gaagaaccaataaat

SEQ ID NO: 1596963 - DNA, 15 bp, Homo sapiens
agaagaaccaataaa

SEQ ID NO: 1596964 - DNA, 15 bp, Homo sapiens
cagaagaaccaataa

SEQ ID NO: 1596965 - DNA, 15 bp, Homo sapiens
tcagaagaaccaata

SEQ ID NO: 1596966 - DNA, 15 bp, Homo sapiens
ctcagaagaaccaat

SEQ ID NO: 1596967 - DNA, 15 bp, Homo sapiens
tctcagaagaaccaa

SEQ ID NO: 1596968 - DNA, 15 bp, Homo sapiens
atctcagaagaacca

SEQ ID NO: 1596969 - DNA, 15 bp, Homo sapiens
gatctcagaagaacc

SEQ ID NO: 1596970 - DNA, 15 bp, Homo sapiens
agatctcagaagaac

SEQ ID NO: 1596971 - DNA, 15 bp, Homo sapiens
aagatctcagaagaa

SEQ ID NO: 1596972 - DNA, 15 bp, Homo sapiens
gaagatctcagaaga

SEQ ID NO: 1596973 - DNA, 15 bp, Homo sapiens
ggaagatctcagaag

SEQ ID NO: 1596974 - DNA, 15 bp, Homo sapiens
gggaagatctcagaa

SEQ ID NO: 1596975 - DNA, 15 bp, Homo sapiens
tgggaagatctcaga

SEQ ID NO: 1596976 - DNA, 15 bp, Homo sapiens
ctgggaagatctcag

SEQ ID NO: 1596977 - DNA, 15 bp, Homo sapiens
tctgggaagatctca

SEQ ID NO: 1596978 - DNA, 15 bp, Homo sapiens
gtctgggaagatctc

SEQ ID NO: 1596979 - DNA, 15 bp, Homo sapiens
cgtctgggaagatct

SEQ ID NO: 1596980 - DNA, 15 bp, Homo sapiens
gcgtctgggaagatc

SEQ ID NO: 1596981 - DNA, 15 bp, Homo sapiens
tgcgtctgggaagat

SEQ ID NO: 1596982 - DNA, 15 bp, Homo sapiens
ttgcgtctgggaaga

SEQ ID NO: 1596983 - DNA, 15 bp, Homo sapiens
tttgcgtctgggaag

SEQ ID NO: 1596984 - DNA, 15 bp, Homo sapiens
ttttgcgtctgggaa

SEQ ID NO: 1596985 - DNA, 15 bp, Homo sapiens
tttttgcgtctggga

SEQ ID NO: 1596986 - DNA, 15 bp, Homo sapiens
gtttttgcgtctggg

SEQ ID NO: 1596987 - DNA, 15 bp, Homo sapiens
agtttttgcgtctgg

SEQ ID NO: 1596988 - DNA, 15 bp, Homo sapiens
gagtttttgcgtctg

SEQ ID NO: 1596989 - DNA, 15 bp, Homo sapiens
agagtttttgcgtct

SEQ ID NO: 1596990 - DNA, 15 bp, Homo sapiens
aagagtttttgcgtc

SEQ ID NO: 1596991 - DNA, 15 bp, Homo sapiens
aaagagtttttgcgt

SEQ ID NO: 1596992 - DNA, 15 bp, Homo sapiens
taaagagtttttgcg

SEQ ID NO: 1596993 - DNA, 15 bp, Homo sapiens
gtaaagagtttttgc

SEQ ID NO: 1596994 - DNA, 15 bp, Homo sapiens
tgtaaagagtttttg

SEQ ID NO: 1596995 - DNA, 15 bp, Homo sapiens
cttgtaaagagtttt

SEQ ID NO: 1596996 - DNA, 15 bp, Homo sapiens
ccttgtaaagagttt

SEQ ID NO: 1596997 - DNA, 15 bp, Homo sapiens
tccttgtaaagagtt

SEQ ID NO: 1596998 - DNA, 15 bp, Homo sapiens
atccttgtaaagagt

SEQ ID NO: 1596999 - DNA, 15 bp, Homo sapiens
tatccttgtaaagag

SEQ ID NO: 1597000 - DNA, 15 bp, Homo sapiens
atatccttgtaaaga

SEQ ID NO: 1597001 - DNA, 15 bp, Homo sapiens
gatatccttgtaaag

SEQ ID NO: 1597002 - DNA, 15 bp, Homo sapiens
tgatatccttgtaaa

SEQ ID NO: 1597003 - DNA, 15 bp, Homo sapiens
ttgatatccttgtaa

SEQ ID NO: 1597004 - DNA, 15 bp, Homo sapiens
tttgatatccttgta

SEQ ID NO: 1597005 - DNA, 15 bp, Homo sapiens
ttttgatatccttgt

SEQ ID NO: 1597006 - DNA, 15 bp, Homo sapiens
tttttgatatccttg

SEQ ID NO: 1597007 - DNA, 15 bp, Homo sapiens
ttttttgatatcctt

SEQ ID NO: 1597008 - DNA, 15 bp, Homo sapiens
attttttgatatcct

SEQ ID NO: 1597009 - DNA, 15 bp, Homo sapiens
tattttttgatatcc

SEQ ID NO: 1597010 - DNA, 15 bp, Homo sapiens
gtattttttgatatc

SEQ ID NO: 1597011 - DNA, 15 bp, Homo sapiens
tgtattttttgatat

SEQ ID NO: 1597012 - DNA, 15 bp, Homo sapiens
ttgtattttttgata

SEQ ID NO: 1597013 - DNA, 15 bp, Homo sapiens
gttgtattttttgat

SEQ ID NO: 1597014 - DNA, 15 bp, Homo sapiens
tgttgtattttttga

SEQ ID NO: 1597015 - DNA, 15 bp, Homo sapiens
gtgttgtattttttg

SEQ ID NO: 1597016 - DNA, 15 bp, Homo sapiens
ggtgttgtatttttt

SEQ ID NO: 1597017 - DNA, 15 bp, Homo sapiens
aggtgttgtattttt

SEQ ID NO: 1597018 - DNA, 15 bp, Homo sapiens
caggtgttgtatttt

SEQ ID NO: 1597019 - DNA, 15 bp, Homo sapiens
gcaggtgttgtattt

SEQ ID NO: 1597020 - DNA, 15 bp, Homo sapiens
ggcaggtgttgtatt

SEQ ID NO: 1597021 - DNA, 15 bp, Homo sapiens
aggcaggtgttgtat

SEQ ID NO: 1597022 - DNA, 15 bp, Homo sapiens
taggcaggtgttgta

SEQ ID NO: 1597023 - DNA, 15 bp, Homo sapiens
gtaggcaggtgttgt

SEQ ID NO: 1597024 - DNA, 15 bp, Homo sapiens
cgtaggcaggtgttg

SEQ ID NO: 1597025 - DNA, 15 bp, Homo sapiens
tcgtaggcaggtgtt

SEQ ID NO: 1597026 - DNA, 15 bp, Homo sapiens
ctcgtaggcaggtgt

SEQ ID NO: 1597027 - DNA, 15 bp, Homo sapiens
cctcgtaggcaggtg

SEQ ID NO: 1597028 - DNA, 15 bp, Homo sapiens
gcctcgtaggcaggt

SEQ ID NO: 1597029 - DNA, 15 bp, Homo sapiens
tgcctcgtaggcagg

SEQ ID NO: 1597030 - DNA, 15 bp, Homo sapiens
gtgcctcgtaggcag

SEQ ID NO: 1597031 - DNA, 15 bp, Homo sapiens
ggtgcctcgtaggca

SEQ ID NO: 1597032 - DNA, 15 bp, Homo sapiens
tggtgcctcgtaggc

SEQ ID NO: 1597033 - DNA, 15 bp, Homo sapiens
gtggtgcctcgtagg

SEQ ID NO: 1597034 - DNA, 15 bp, Homo sapiens
agtggtgcctcgtag

SEQ ID NO: 1597035 - DNA, 15 bp, Homo sapiens
aagtggtgcctcgta

SEQ ID NO: 1597036 - DNA, 15 bp, Homo sapiens
aaagtggtgcctcgt

SEQ ID NO: 1597037 - DNA, 15 bp, Homo sapiens
caaagtggtgcctcg

SEQ ID NO: 1597038 - DNA, 15 bp, Homo sapiens
tcaaagtggtgcctc

SEQ ID NO: 1597039 - DNA, 15 bp, Homo sapiens
ctcaaagtggtgcct

SEQ ID NO: 1597040 - DNA, 15 bp, Homo sapiens
cctcaaagtggtgcc

SEQ ID NO: 1597041 - DNA, 15 bp, Homo sapiens
tcctcaaagtggtgc

SEQ ID NO: 1597042 - DNA, 15 bp, Homo sapiens
ttcctcaaagtggtg

SEQ ID NO: 1597043 - DNA, 15 bp, Homo sapiens
cttcctcaaagtggt

SEQ ID NO: 1597044 - DNA, 15 bp, Homo sapiens
gcttcctcaaagtgg

SEQ ID NO: 1597045 - DNA, 15 bp, Homo sapiens
agcttcctcaaagtg

SEQ ID NO: 1597046 - DNA, 15 bp, Homo sapiens
tagcttcctcaaagt

SEQ ID NO: 1597047 - DNA, 15 bp, Homo sapiens
ttagcttcctcaaag

SEQ ID NO: 1597048 - DNA, 15 bp, Homo sapiens
attagcttcctcaaa

SEQ ID NO: 1597049 - DNA, 15 bp, Homo sapiens
tattagcttcctcaa

SEQ ID NO: 1597050 - DNA, 15 bp, Homo sapiens
ttattagcttcctca

SEQ ID NO: 1597051 - DNA, 15 bp, Homo sapiens
tttattagcttcctc

SEQ ID NO: 1597052 - DNA, 15 bp, Homo sapiens
atttattagcttcct

SEQ ID NO: 1597053 - DNA, 15 bp, Homo sapiens
aatttattagcttcc

SEQ ID NO: 1597054 - DNA, 15 bp, Homo sapiens
taatttattagcttc

SEQ ID NO: 1597055 - DNA, 15 bp, Homo sapiens
gtaatttattagctt

SEQ ID NO: 1597056 - DNA, 15 bp, Homo sapiens
ggtaatttattagct

SEQ ID NO: 1597057 - DNA, 15 bp, Homo sapiens
gggtaatttattagc

SEQ ID NO: 1597058 - DNA, 15 bp, Homo sapiens
ggggtaatttattag

SEQ ID NO: 1597059 - DNA, 15 bp, Homo sapiens
gggggtaatttatta

SEQ ID NO: 1597060 - DNA, 15 bp, Homo sapiens
ggggggtaatttatt

SEQ ID NO: 1597061 - DNA, 15 bp, Homo sapiens
aggggggtaatttat

SEQ ID NO: 1597062 - DNA, 15 bp, Homo sapiens
aaggggggtaattta

SEQ ID NO: 1597063 - DNA, 15 bp, Homo sapiens
aaaggggggtaattt

SEQ ID NO: 1597064 - DNA, 15 bp, Homo sapiens
caaaggggggtaatt

SEQ ID NO: 1597065 - DNA, 15 bp, Homo sapiens
tcaaaggggggtaat

SEQ ID NO: 1597066 - DNA, 15 bp, Homo sapiens
ttcaaaggggggtaa

SEQ ID NO: 1597067 - DNA, 15 bp, Homo sapiens
tttcaaaggggggta

SEQ ID NO: 1597068 - DNA, 15 bp, Homo sapiens
gtttcaaaggggggt

SEQ ID NO: 1597069 - DNA, 15 bp, Homo sapiens
tgtttcaaagggggg

SEQ ID NO: 1597070 - DNA, 15 bp, Homo sapiens
ttgtttcaaaggggg

SEQ ID NO: 1597071 - DNA, 15 bp, Homo sapiens
tttgtttcaaagggg

SEQ ID NO: 1597072 - DNA, 15 bp, Homo sapiens
ttttgtttcaaaggg

SEQ ID NO: 1597073 - DNA, 15 bp, Homo sapiens
tttttgtttcaaagg

SEQ ID NO: 1597074 - DNA, 15 bp, Homo sapiens
atttttgtttcaaag

SEQ ID NO: 1597075 - DNA, 15 bp, Homo sapiens
catttttgtttcaaa

SEQ ID NO: 1597076 - DNA, 15 bp, Homo sapiens
ccatttttgtttcaa

SEQ ID NO: 1597077 - DNA, 15 bp, Homo sapiens
tccatttttgtttca

SEQ ID NO: 1597078 - DNA, 15 bp, Homo sapiens
ttccatttttgtttc

SEQ ID NO: 1597079 - DNA, 15 bp, Homo sapiens
attccatttttgttt

SEQ ID NO: 1597080 - DNA, 15 bp, Homo sapiens
gattccatttttgtt

SEQ ID NO: 1597081 - DNA, 15 bp, Homo sapiens
tgattccatttttgt

SEQ ID NO: 1597082 - DNA, 15 bp, Homo sapiens
ctgattccatttttg

SEQ ID NO: 1597083 - DNA, 15 bp, Homo sapiens
gctgattccattttt

SEQ ID NO: 1597084 - DNA, 15 bp, Homo sapiens
tgctgattccatttt

SEQ ID NO: 1597085 - DNA, 15 bp, Homo sapiens
atgctgattccattt

SEQ ID NO: 1597086 - DNA, 15 bp, Homo sapiens
aatgctgattccatt

SEQ ID NO: 1597087 - DNA, 15 bp, Homo sapiens
taatgctgattccat

SEQ ID NO: 1597088 - DNA, 15 bp, Homo sapiens
ttaatgctgattcca

SEQ ID NO: 1597089 - DNA, 15 bp, Homo sapiens
cttaatgctgattcc

SEQ ID NO: 1597090 - DNA, 15 bp, Homo sapiens
gcttaatgctgattc

SEQ ID NO: 1597091 - DNA, 15 bp, Homo sapiens
tgcttaatgctgatt

SEQ ID NO: 1597092 - DNA, 15 bp, Homo sapiens
gtgcttaatgctgat

SEQ ID NO: 1597093 - DNA, 15 bp, Homo sapiens
tgtgcttaatgctga

SEQ ID NO: 1597094 - DNA, 15 bp, Homo sapiens
atgtgcttaatgctg

SEQ ID NO: 1597095 - DNA, 15 bp, Homo sapiens
tatgtgcttaatgct

SEQ ID NO: 1597096 - DNA, 15 bp, Homo sapiens
gtatgtgcttaatgc

SEQ ID NO: 1597097 - DNA, 15 bp, Homo sapiens
agtatgtgcttaatg

SEQ ID NO: 1597098 - DNA, 15 bp, Homo sapiens
tagtatgtgcttaat

SEQ ID NO: 1597099 - DNA, 15 bp, Homo sapiens
atagtatgtgcttaa

SEQ ID NO: 1597100 - DNA, 15 bp, Homo sapiens
aatagtatgtgctta

SEQ ID NO: 1597101 - DNA, 15 bp, Homo sapiens
taatagtatgtgctt

SEQ ID NO: 1597102 - DNA, 15 bp, Homo sapiens
ataatagtatgtgct

SEQ ID NO: 1597103 - DNA, 15 bp, Homo sapiens
aataatagtatgtgc

SEQ ID NO: 1597104 - DNA, 15 bp, Homo sapiens
taataatagtatgtg

SEQ ID NO: 1597105 - DNA, 15 bp, Homo sapiens
ctaataatagtatgt

SEQ ID NO: 1597106 - DNA, 15 bp, Homo sapiens
cctaataatagtatg

SEQ ID NO: 1597107 - DNA, 15 bp, Homo sapiens
acctaataatagtat

SEQ ID NO: 1597108 - DNA, 15 bp, Homo sapiens
aacctaataatagta

SEQ ID NO: 1597109 - DNA, 15 bp, Homo sapiens
caacctaataatagt

SEQ ID NO: 1597110 - DNA, 15 bp, Homo sapiens
tcaacctaataatag

SEQ ID NO: 1597111 - DNA, 15 bp, Homo sapiens
ctcaacctaataata

SEQ ID NO: 1597112 - DNA, 15 bp, Homo sapiens
actcaacctaataat

SEQ ID NO: 1597113 - DNA, 15 bp, Homo sapiens
aactcaacctaataa

SEQ ID NO: 1597114 - DNA, 15 bp, Homo sapiens
aaactcaacctaata

SEQ ID NO: 1597115 - DNA, 15 bp, Homo sapiens
gaaactcaacctaat

SEQ ID NO: 1597116 - DNA, 15 bp, Homo sapiens
tgaaactcaacctaa

SEQ ID NO: 1597117 - DNA, 15 bp, Homo sapiens
ctgaaactcaaccta

SEQ ID NO: 1597118 - DNA, 15 bp, Homo sapiens
actgaaactcaacct

SEQ ID NO: 1597119 - DNA, 15 bp, Homo sapiens
gactgaaactcaacc

SEQ ID NO: 1597120 - DNA, 15 bp, Homo sapiens
agactgaaactcaac

SEQ ID NO: 1597121 - DNA, 15 bp, Homo sapiens
gagactgaaactcaa

SEQ ID NO: 1597122 - DNA, 15 bp, Homo sapiens
ggagactgaaactca

SEQ ID NO: 1597123 - DNA, 15 bp, Homo sapiens
aggagactgaaactc

SEQ ID NO: 1597124 - DNA, 15 bp, Homo sapiens
taggagactgaaact

SEQ ID NO: 1597125 - DNA, 15 bp, Homo sapiens
ctaggagactgaaac

SEQ ID NO: 1597126 - DNA, 15 bp, Homo sapiens
tctaggagactgaaa

SEQ ID NO: 1597127 - DNA, 15 bp, Homo sapiens
ttctaggagactgaa

SEQ ID NO: 1597128 - DNA, 15 bp, Homo sapiens
tttctaggagactga

SEQ ID NO: 1597129 - DNA, 15 bp, Homo sapiens
ttttctaggagactg

SEQ ID NO: 1597130 - DNA, 15 bp, Homo sapiens
attttctaggagact

SEQ ID NO: 1597131 - DNA, 15 bp, Homo sapiens
aattttctaggagac

SEQ ID NO: 1597132 - DNA, 15 bp, Homo sapiens
gaattttctaggaga

SEQ ID NO: 1597133 - DNA, 15 bp, Homo sapiens
cgaattttctaggag

SEQ ID NO: 1597134 - DNA, 15 bp, Homo sapiens
acgaattttctagga

SEQ ID NO: 1597135 - DNA, 15 bp, Homo sapiens
aacgaattttctagg

SEQ ID NO: 1597136 - DNA, 15 bp, Homo sapiens
taacgaattttctag

SEQ ID NO: 1597137 - DNA, 15 bp, Homo sapiens
ctaacgaattttcta

SEQ ID NO: 1597138 - DNA, 15 bp, Homo sapiens
tctaacgaattttct

SEQ ID NO: 1597139 - DNA, 15 bp, Homo sapiens
atctaacgaattttc

SEQ ID NO: 1597140 - DNA, 15 bp, Homo sapiens
catctaacgaatttt

SEQ ID NO: 1597141 - DNA, 15 bp, Homo sapiens
acatctaacgaattt

SEQ ID NO: 1597142 - DNA, 15 bp, Homo sapiens
aacatctaacgaatt

SEQ ID NO: 1597143 - DNA, 15 bp, Homo sapiens
caacatctaacgaat

SEQ ID NO: 1597144 - DNA, 15 bp, Homo sapiens
tcaacatctaacgaa

SEQ ID NO: 1597145 - DNA, 15 bp, Homo sapiens
atcaacatctaacga

SEQ ID NO: 1597146 - DNA, 15 bp, Homo sapiens
tatcaacatctaacg

SEQ ID NO: 1597147 - DNA, 15 bp, Homo sapiens
atatcaacatctaac

SEQ ID NO: 1597148 - DNA, 15 bp, Homo sapiens
gatatcaacatctaa

SEQ ID NO: 1597149 - DNA, 15 bp, Homo sapiens
agatatcaacatcta

SEQ ID NO: 1597150 - DNA, 15 bp, Homo sapiens
cagatatcaacatct

SEQ ID NO: 1597151 - DNA, 15 bp, Homo sapiens
ccagatatcaacatc

SEQ ID NO: 1597152 - DNA, 15 bp, Homo sapiens
cccagatatcaacat

SEQ ID NO: 1597153 - DNA, 15 bp, Homo sapiens
ccccagatatcaaca

SEQ ID NO: 1597154 - DNA, 15 bp, Homo sapiens
tccccagatatcaac

SEQ ID NO: 1597155 - DNA, 15 bp, Homo sapiens
ctccccagatatcaa

SEQ ID NO: 1597156 - DNA, 15 bp, Homo sapiens
tctccccagatatca

SEQ ID NO: 1597157 - DNA, 15 bp, Homo sapiens
ctctccccagatatc

SEQ ID NO: 1597158 - DNA, 15 bp, Homo sapiens
tctctccccagatat

SEQ ID NO: 1597159 - DNA, 15 bp, Homo sapiens
ttctctccccagata

SEQ ID NO: 1597160 - DNA, 15 bp, Homo sapiens
cttctctccccagat

SEQ ID NO: 1597161 - DNA, 15 bp, Homo sapiens
ccttctctccccaga

SEQ ID NO: 1597162 - DNA, 15 bp, Homo sapiens
tccttctctccccag

SEQ ID NO: 1597163 - DNA, 15 bp, Homo sapiens
ttccttctctcccca

SEQ ID NO: 1597164 - DNA, 15 bp, Homo sapiens
attccttctctcccc

SEQ ID NO: 1597165 - DNA, 15 bp, Homo sapiens
gattccttctctccc

SEQ ID NO: 1597166 - DNA, 15 bp, Homo sapiens
agattccttctctcc

SEQ ID NO: 1597167 - DNA, 15 bp, Homo sapiens
gagattccttctctc

SEQ ID NO: 1597168 - DNA, 15 bp, Homo sapiens
agagattccttctct

SEQ ID NO: 1597169 - DNA, 15 bp, Homo sapiens
gagagattccttctc

SEQ ID NO: 1597170 - DNA, 15 bp, Homo sapiens
agagagattccttct

SEQ ID NO: 1597171 - DNA, 15 bp, Homo sapiens
aagagagattccttc

SEQ ID NO: 1597172 - DNA, 15 bp, Homo sapiens
aaagagagattcctt

SEQ ID NO: 1597173 - DNA, 15 bp, Homo sapiens
aaaagagagattcct

SEQ ID NO: 1597174 - DNA, 15 bp, Homo sapiens
gaaaagagagattcc

SEQ ID NO: 1597175 - DNA, 15 bp, Homo sapiens
ggaaaagagagattc

SEQ ID NO: 1597176 - DNA, 15 bp, Homo sapiens
aggaaaagagagatt

SEQ ID NO: 1597177 - DNA, 15 bp, Homo sapiens
aaggaaaagagagat

SEQ ID NO: 1597178 - DNA, 15 bp, Homo sapiens
taaggaaaagagaga

SEQ ID NO: 1597179 - DNA, 15 bp, Homo sapiens
ttaaggaaaagagag

SEQ ID NO: 1597180 - DNA, 15 bp, Homo sapiens
cttaaggaaaagaga

SEQ ID NO: 1597181 - DNA, 15 bp, Homo sapiens
tcttaaggaaaagag

SEQ ID NO: 1597182 - DNA, 15 bp, Homo sapiens
ttcttaaggaaaaga

SEQ ID NO: 1597183 - DNA, 15 bp, Homo sapiens
tttcttaaggaaaag

SEQ ID NO: 1597184 - DNA, 15 bp, Homo sapiens
ttttcttaaggaaaa

SEQ ID NO: 1597185 - DNA, 15 bp, Homo sapiens
attttcttaaggaaa

SEQ ID NO: 1597186 - DNA, 15 bp, Homo sapiens
aattttcttaaggaa

SEQ ID NO: 1597187 - DNA, 15 bp, Homo sapiens
gaattttcttaagga

SEQ ID NO: 1597188 - DNA, 15 bp, Homo sapiens
tgaattttcttaagg

SEQ ID NO: 1597189 - DNA, 15 bp, Homo sapiens
gtgaattttcttaag

SEQ ID NO: 1597190 - DNA, 15 bp, Homo sapiens
cgtgaattttcttaa

SEQ ID NO: 1597191 - DNA, 15 bp, Homo sapiens
tcgtgaattttctta

SEQ ID NO: 1597192 - DNA, 15 bp, Homo sapiens
ctcgtgaattttctt

SEQ ID NO: 1597193 - DNA, 15 bp, Homo sapiens
cctcgtgaattttct

SEQ ID NO: 1597194 - DNA, 15 bp, Homo sapiens
ccctcgtgaattttc

SEQ ID NO: 1597195 - DNA, 15 bp, Homo sapiens
tccctcgtgaatttt

SEQ ID NO: 1597196 - DNA, 15 bp, Homo sapiens
ttccctcgtgaattt

SEQ ID NO: 1597197 - DNA, 15 bp, Homo sapiens
tttccctcgtgaatt

SEQ ID NO: 1597198 - DNA, 15 bp, Homo sapiens
gtttccctcgtgaat

SEQ ID NO: 1597199 - DNA, 15 bp, Homo sapiens
tgtttccctcgtgaa

SEQ ID NO: 1597200 - DNA, 15 bp, Homo sapiens
ctgtttccctcgtga

SEQ ID NO: 1597201 - DNA, 15 bp, Homo sapiens
gctgtttccctcgtg

SEQ ID NO: 1597202 - DNA, 15 bp, Homo sapiens
tgctgtttccctcgt

SEQ ID NO: 1597203 - DNA, 15 bp, Homo sapiens
ctgctgtttccctcg

SEQ ID NO: 1597204 - DNA, 15 bp, Homo sapiens
actgctgtttccctc

SEQ ID NO: 1597205 - DNA, 15 bp, Homo sapiens
tactgctgtttccct

SEQ ID NO: 1597206 - DNA, 15 bp, Homo sapiens
ctactgctgtttccc

SEQ ID NO: 1597207 - DNA, 15 bp, Homo sapiens
actactgctgtttcc

SEQ ID NO: 1597208 - DNA, 15 bp, Homo sapiens
aactactgctgtttc

SEQ ID NO: 1597209 - DNA, 15 bp, Homo sapiens
gaactactgctgttt

SEQ ID NO: 1597210 - DNA, 15 bp, Homo sapiens
cgaactactgctgtt

SEQ ID NO: 1597211 - DNA, 15 bp, Homo sapiens
gcgaactactgctgt

SEQ ID NO: 1597212 - DNA, 15 bp, Homo sapiens
agcgaactactgctg

SEQ ID NO: 1597213 - DNA, 15 bp, Homo sapiens
cagcgaactactgct

SEQ ID NO: 1597214 - DNA, 15 bp, Homo sapiens
ccagcgaactactgc

SEQ ID NO: 1597215 - DNA, 15 bp, Homo sapiens
gccagcgaactactg

SEQ ID NO: 1597216 - DNA, 15 bp, Homo sapiens
agccagcgaactact

SEQ ID NO: 1597217 - DNA, 15 bp, Homo sapiens
aagccagcgaactac

SEQ ID NO: 1597218 - DNA, 15 bp, Homo sapiens
aaagccagcgaacta

SEQ ID NO: 1597219 - DNA, 15 bp, Homo sapiens
caaagccagcgaact

SEQ ID NO: 1597220 - DNA, 15 bp, Homo sapiens
acaaagccagcgaac

SEQ ID NO: 1597221 - DNA, 15 bp, Homo sapiens
aacaaagccagcgaa

SEQ ID NO: 1597222 - DNA, 15 bp, Homo sapiens
aaacaaagccagcga

SEQ ID NO: 1597223 - DNA, 15 bp, Homo sapiens
caaacaaagccagcg

SEQ ID NO: 1597224 - DNA, 15 bp, Homo sapiens
ccaaacaaagccagc

SEQ ID NO: 1597225 - DNA, 15 bp, Homo sapiens
accaaacaaagccag

SEQ ID NO: 1597226 - DNA, 15 bp, Homo sapiens
aaccaaacaaagcca

SEQ ID NO: 1597227 - DNA, 15 bp, Homo sapiens
aaaccaaacaaagcc

SEQ ID NO: 1597228 - DNA, 15 bp, Homo sapiens
gaaaccaaacaaagc

SEQ ID NO: 1597229 - DNA, 15 bp, Homo sapiens
cgaaaccaaacaaag

SEQ ID NO: 1597230 - DNA, 15 bp, Homo sapiens
acgaaaccaaacaaa

SEQ ID NO: 1597231 - DNA, 15 bp, Homo sapiens
aacgaaaccaaacaa

SEQ ID NO: 1597232 - DNA, 15 bp, Homo sapiens
aaacgaaaccaaaca

SEQ ID NO: 1597233 - DNA, 15 bp, Homo sapiens
taaacgaaaccaaac

SEQ ID NO: 1597234 - DNA, 15 bp, Homo sapiens
ataaacgaaaccaaa

SEQ ID NO: 1597235 - DNA, 15 bp, Homo sapiens
aataaacgaaaccaa

SEQ ID NO: 1597236 - DNA, 15 bp, Homo sapiens
aaataaacgaaacca

SEQ ID NO: 1597237 - DNA, 15 bp, Homo sapiens
caaataaacgaaacc

SEQ ID NO: 1597238 - DNA, 15 bp, Homo sapiens
acaaataaacgaaac

SEQ ID NO: 1597239 - DNA, 15 bp, Homo sapiens
tacaaataaacgaaa

SEQ ID NO: 1597240 - DNA, 15 bp, Homo sapiens
gtacaaataaacgaa

SEQ ID NO: 1597241 - DNA, 15 bp, Homo sapiens
tgtacaaataaacga

SEQ ID NO: 1597242 - DNA, 15 bp, Homo sapiens
ttgtacaaataaacg

SEQ ID NO: 1597243 - DNA, 15 bp, Homo sapiens
tttgtacaaataaac

SEQ ID NO: 1597244 - DNA, 15 bp, Homo sapiens
ctttgtacaaataaa

SEQ ID NO: 1597245 - DNA, 15 bp, Homo sapiens
tctttgtacaaataa

SEQ ID NO: 1597246 - DNA, 15 bp, Homo sapiens
ttctttgtacaaata

SEQ ID NO: 1597247 - DNA, 15 bp, Homo sapiens
tttctttgtacaaat

SEQ ID NO: 1597248 - DNA, 15 bp, Homo sapiens
ctttctttgtacaaa

SEQ ID NO: 1597249 - DNA, 15 bp, Homo sapiens
tctttctttgtacaa

SEQ ID NO: 1597250 - DNA, 15 bp, Homo sapiens
atctttctttgtaca

SEQ ID NO: 1597251 - DNA, 15 bp, Homo sapiens
aatctttctttgtac

SEQ ID NO: 1597252 - DNA, 15 bp, Homo sapiens
caatctttctttgta

SEQ ID NO: 1597253 - DNA, 15 bp, Homo sapiens
acaatctttctttgt

SEQ ID NO: 1597254 - DNA, 15 bp, Homo sapiens
cacaatctttctttg

SEQ ID NO: 1597255 - DNA, 15 bp, Homo sapiens
gcacaatctttcttt

SEQ ID NO: 1597256 - DNA, 15 bp, Homo sapiens
cgcacaatctttctt

SEQ ID NO: 1597257 - DNA, 15 bp, Homo sapiens
acgcacaatctttct

SEQ ID NO: 1597258 - DNA, 15 bp, Homo sapiens
aacgcacaatctttc

SEQ ID NO: 1597259 - DNA, 15 bp, Homo sapiens
taacgcacaatcttt

SEQ ID NO: 1597260 - DNA, 15 bp, Homo sapiens
ttaacgcacaatctt

SEQ ID NO: 1597261 - DNA, 15 bp, Homo sapiens
cttaacgcacaatct

SEQ ID NO: 1597262 - DNA, 15 bp, Homo sapiens
tcttaacgcacaatc

SEQ ID NO: 1597263 - DNA, 15 bp, Homo sapiens
atcttaacgcacaat

SEQ ID NO: 1597264 - DNA, 15 bp, Homo sapiens
gatcttaacgcacaa

SEQ ID NO: 1597265 - DNA, 15 bp, Homo sapiens
agatcttaacgcaca

SEQ ID NO: 1597266 - DNA, 15 bp, Homo sapiens
aagatcttaacgcac

SEQ ID NO: 1597267 - DNA, 15 bp, Homo sapiens
aaagatcttaacgca

SEQ ID NO: 1597268 - DNA, 15 bp, Homo sapiens
aaaagatcttaacgc

SEQ ID NO: 1597269 - DNA, 15 bp, Homo sapiens
aaaaagatcttaacg

SEQ ID NO: 1597270 - DNA, 15 bp, Homo sapiens
aaaaaagatcttaac

SEQ ID NO: 1597271 - DNA, 15 bp, Homo sapiens
taaaaaagatcttaa

SEQ ID NO: 1597272 - DNA, 15 bp, Homo sapiens
ttaaaaaagatctta

SEQ ID NO: 1597273 - DNA, 15 bp, Homo sapiens
tttaaaaaagatctt

SEQ ID NO: 1597274 - DNA, 15 bp, Homo sapiens
ttttaaaaaagatct

SEQ ID NO: 1597275 - DNA, 15 bp, Homo sapiens
tttttaaaaaagatc

SEQ ID NO: 1597276 - DNA, 15 bp, Homo sapiens
atttttaaaaaagat

SEQ ID NO: 1597277 - DNA, 15 bp, Homo sapiens
gatttttaaaaaaga

SEQ ID NO: 1597278 - DNA, 15 bp, Homo sapiens
ggatttttaaaaaag

SEQ ID NO: 1597279 - DNA, 15 bp, Homo sapiens
gggatttttaaaaaa

SEQ ID NO: 1597280 - DNA, 15 bp, Homo sapiens
agggatttttaaaaa

SEQ ID NO: 1597281 - DNA, 15 bp, Homo sapiens
cagggatttttaaaa

SEQ ID NO: 1597282 - DNA, 15 bp, Homo sapiens
gcagggatttttaaa

SEQ ID NO: 1597283 - DNA, 15 bp, Homo sapiens
tgcagggatttttaa

SEQ ID NO: 1597284 - DNA, 15 bp, Homo sapiens
ttgcagggattttta

SEQ ID NO: 1597285 - DNA, 15 bp, Homo sapiens
cttgcagggattttt

SEQ ID NO: 1597286 - DNA, 15 bp, Homo sapiens
acttgcagggatttt

SEQ ID NO: 1597287 - DNA, 15 bp, Homo sapiens
aacttgcagggattt

SEQ ID NO: 1597288 - DNA, 15 bp, Homo sapiens
taacttgcagggatt

SEQ ID NO: 1597289 - DNA, 15 bp, Homo sapiens
ctaacttgcagggat

SEQ ID NO: 1597290 - DNA, 15 bp, Homo sapiens
tctaacttgcaggga

SEQ ID NO: 1597291 - DNA, 15 bp, Homo sapiens
ctctaacttgcaggg

SEQ ID NO: 1597292 - DNA, 15 bp, Homo sapiens
actctaacttgcagg

SEQ ID NO: 1597293 - DNA, 15 bp, Homo sapiens
aactctaacttgcag

SEQ ID NO: 1597294 - DNA, 15 bp, Homo sapiens
aaactctaacttgca

SEQ ID NO: 1597295 - DNA, 15 bp, Homo sapiens
caaactctaacttgc

SEQ ID NO: 1597296 - DNA, 15 bp, Homo sapiens
gcaaactctaacttg

SEQ ID NO: 1597297 - DNA, 15 bp, Homo sapiens
tgcaaactctaactt

SEQ ID NO: 1597298 - DNA, 15 bp, Homo sapiens
atgcaaactctaact

SEQ ID NO: 1597299 - DNA, 15 bp, Homo sapiens
gatgcaaactctaac

SEQ ID NO: 1597300 - DNA, 15 bp, Homo sapiens
tgatgcaaactctaa

SEQ ID NO: 1597301 - DNA, 15 bp, Homo sapiens
atgatgcaaactcta

SEQ ID NO: 1597302 - DNA, 15 bp, Homo sapiens
gatgatgcaaactct

SEQ ID NO: 1597303 - DNA, 15 bp, Homo sapiens
cgatgatgcaaactc

SEQ ID NO: 1597304 - DNA, 15 bp, Homo sapiens
acgatgatgcaaact

SEQ ID NO: 1597305 - DNA, 15 bp, Homo sapiens
gacgatgatgcaaac

SEQ ID NO: 1597306 - DNA, 15 bp, Homo sapiens
cgacgatgatgcaaa

SEQ ID NO: 1597307 - DNA, 15 bp, Homo sapiens
acgacgatgatgcaa

SEQ ID NO: 1597308 - DNA, 15 bp, Homo sapiens
cacgacgatgatgca

SEQ ID NO: 1597309 - DNA, 15 bp, Homo sapiens
tcacgacgatgatgc

SEQ ID NO: 1597310 - DNA, 15 bp, Homo sapiens
gtcacgacgatgatg

SEQ ID NO: 1597311 - DNA, 15 bp, Homo sapiens
ggtcacgacgatgat

SEQ ID NO: 1597312 - DNA, 15 bp, Homo sapiens
aggtcacgacgatga

SEQ ID NO: 1597313 - DNA, 15 bp, Homo sapiens
taggtcacgacgatg

SEQ ID NO: 1597314 - DNA, 15 bp, Homo sapiens
ctaggtcacgacgat

SEQ ID NO: 1597315 - DNA, 15 bp, Homo sapiens
actaggtcacgacga

SEQ ID NO: 1597316 - DNA, 15 bp, Homo sapiens
cactaggtcacgacg

SEQ ID NO: 1597317 - DNA, 15 bp, Homo sapiens
tcactaggtcacgac

SEQ ID NO: 1597318 - DNA, 15 bp, Homo sapiens
ttcactaggtcacga

SEQ ID NO: 1597319 - DNA, 15 bp, Homo sapiens
gttcactaggtcacg

SEQ ID NO: 1597320 - DNA, 15 bp, Homo sapiens
agttcactaggtcac

SEQ ID NO: 1597321 - DNA, 15 bp, Homo sapiens
tagttcactaggtca

SEQ ID NO: 1597322 - DNA, 15 bp, Homo sapiens
ttagttcactaggtc

SEQ ID NO: 1597323 - DNA, 15 bp, Homo sapiens
attagttcactaggt

SEQ ID NO: 1597324 - DNA, 15 bp, Homo sapiens
tattagttcactagg

SEQ ID NO: 1597325 - DNA, 15 bp, Homo sapiens
tacacactgcggtcc

SEQ ID NO: 1597326 - DNA, 15 bp, Homo sapiens
gtacacactgcggtc

SEQ ID NO: 1597327 - DNA, 15 bp, Homo sapiens
ggtacacactgcggt

SEQ ID NO: 1597328 - DNA, 15 bp, Homo sapiens
gggtacacactgcgg

SEQ ID NO: 1597329 - DNA, 15 bp, Homo sapiens
agggtacacactgcg

SEQ ID NO: 1597330 - DNA, 15 bp, Homo sapiens
aagggtacacactgc

SEQ ID NO: 1597331 - DNA, 15 bp, Homo sapiens
caagggtacacactg

SEQ ID NO: 1597332 - DNA, 15 bp, Homo sapiens
acaagggtacacact

SEQ ID NO: 1597333 - DNA, 15 bp, Homo sapiens
aacaagggtacacac

SEQ ID NO: 1597334 - DNA, 15 bp, Homo sapiens
caacaagggtacaca

SEQ ID NO: 1597335 - DNA, 15 bp, Homo sapiens
ccaacaagggtacac

SEQ ID NO: 1597336 - DNA, 15 bp, Homo sapiens
accaacaagggtaca

SEQ ID NO: 1597337 - DNA, 15 bp, Homo sapiens
taccaacaagggtac

SEQ ID NO: 1597338 - DNA, 15 bp, Homo sapiens
ctaccaacaagggta

SEQ ID NO: 1597339 - DNA, 15 bp, Homo sapiens
gctaccaacaagggt

SEQ ID NO: 1597340 - DNA, 15 bp, Homo sapiens
cgctaccaacaaggg

SEQ ID NO: 1597341 - DNA, 15 bp, Homo sapiens
ccgctaccaacaagg

SEQ ID NO: 1597342 - DNA, 15 bp, Homo sapiens
gccgctaccaacaag

SEQ ID NO: 1597343 - DNA, 15 bp, Homo sapiens
tgccgctaccaacaa

SEQ ID NO: 1597344 - DNA, 15 bp, Homo sapiens
ctgccgctaccaaca

SEQ ID NO: 1597345 - DNA, 15 bp, Homo sapiens
gctgccgctaccaac

SEQ ID NO: 1597346 - DNA, 15 bp, Homo sapiens
tgctgccgctaccaa

SEQ ID NO: 1597347 - DNA, 15 bp, Homo sapiens
ctgctgccgctacca

SEQ ID NO: 1597348 - DNA, 15 bp, Homo sapiens
gctgctgccgctacc

SEQ ID NO: 1597349 - DNA, 15 bp, Homo sapiens
ggctgctgccgctac

SEQ ID NO: 1597350 - DNA, 15 bp, Homo sapiens
gggctgctgccgcta

SEQ ID NO: 1597351 - DNA, 15 bp, Homo sapiens
cgggctgctgccgct

SEQ ID NO: 1597352 - DNA, 15 bp, Homo sapiens
ccgggctgctgccgc

SEQ ID NO: 1597353 - DNA, 15 bp, Homo sapiens
cccgggctgctgccg

SEQ ID NO: 1597354 - DNA, 15 bp, Homo sapiens
tcccgggctgctgcc

SEQ ID NO: 1597355 - DNA, 15 bp, Homo sapiens
atcccgggctgctgc

SEQ ID NO: 1597356 - DNA, 15 bp, Homo sapiens
gatcccgggctgctg

SEQ ID NO: 1597357 - DNA, 15 bp, Homo sapiens
ggatcccgggctgct

SEQ ID NO: 1597358 - DNA, 15 bp, Homo sapiens
gggatcccgggctgc

SEQ ID NO: 1597359 - DNA, 15 bp, Homo sapiens
agggatcccgggctg

SEQ ID NO: 1597360 - DNA, 15 bp, Homo sapiens
cagggatcccgggct

SEQ ID NO: 1597361 - DNA, 15 bp, Homo sapiens
acagggatcccgggc

SEQ ID NO: 1597362 - DNA, 15 bp, Homo sapiens
gacagggatcccggg

SEQ ID NO: 1597363 - DNA, 15 bp, Homo sapiens
agacagggatcccgg

SEQ ID NO: 1597364 - DNA, 15 bp, Homo sapiens
gagacagggatcccg

SEQ ID NO: 1597365 - DNA, 15 bp, Homo sapiens
ggagacagggatccc

SEQ ID NO: 1597366 - DNA, 15 bp, Homo sapiens
gggagacagggatcc

SEQ ID NO: 1597367 - DNA, 15 bp, Homo sapiens
ggggagacagggatc

SEQ ID NO: 1597368 - DNA, 15 bp, Homo sapiens
aggggagacagggat

SEQ ID NO: 1597369 - DNA, 15 bp, Homo sapiens
caggggagacaggga

SEQ ID NO: 1597370 - DNA, 15 bp, Homo sapiens
gcaggggagacaggg

SEQ ID NO: 1597371 - DNA, 15 bp, Homo sapiens
gagcaggggagacag

SEQ ID NO: 1597372 - DNA, 15 bp, Homo sapiens
tgagcaggggagaca

SEQ ID NO: 1597373 - DNA, 15 bp, Homo sapiens
ctgagcaggggagac

SEQ ID NO: 1597374 - DNA, 15 bp, Homo sapiens
tctgagcaggggaga

SEQ ID NO: 1597375 - DNA, 15 bp, Homo sapiens
ctctgagcaggggag

SEQ ID NO: 1597376 - DNA, 15 bp, Homo sapiens
gctctgagcagggga

SEQ ID NO: 1597377 - DNA, 15 bp, Homo sapiens
tgctctgagcagggg

SEQ ID NO: 1597378 - DNA, 15 bp, Homo sapiens
atgctctgagcaggg

SEQ ID NO: 1597379 - DNA, 15 bp, Homo sapiens
gatgctctgagcagg

SEQ ID NO: 1597380 - DNA, 15 bp, Homo sapiens
agatgctctgagcag

SEQ ID NO: 1597381 - DNA, 15 bp, Homo sapiens
gagatgctctgagca

SEQ ID NO: 1597382 - DNA, 15 bp, Homo sapiens
agagatgctctgagc

SEQ ID NO: 1597383 - DNA, 15 bp, Homo sapiens
cagagatgctctgag

SEQ ID NO: 1597384 - DNA, 15 bp, Homo sapiens
acagagatgctctga

SEQ ID NO: 1597385 - DNA, 15 bp, Homo sapiens
gacagagatgctctg

SEQ ID NO: 1597386 - DNA, 15 bp, Homo sapiens
agacagagatgctct

SEQ ID NO: 1597387 - DNA, 15 bp, Homo sapiens
gagacagagatgctc

SEQ ID NO: 1597388 - DNA, 15 bp, Homo sapiens
cgagacagagatgct

SEQ ID NO: 1597389 - DNA, 15 bp, Homo sapiens
gcgagacagagatgc

SEQ ID NO: 1597390 - DNA, 15 bp, Homo sapiens
agcgagacagagatg

SEQ ID NO: 1597391 - DNA, 15 bp, Homo sapiens
gagcgagacagagat

SEQ ID NO: 1597392 - DNA, 15 bp, Homo sapiens
agagcgagacagaga

SEQ ID NO: 1597393 - DNA, 15 bp, Homo sapiens
aagagcgagacagag

SEQ ID NO: 1597394 - DNA, 15 bp, Homo sapiens
gaagagcgagacaga

SEQ ID NO: 1597395 - DNA, 15 bp, Homo sapiens
agaagagcgagacag

SEQ ID NO: 1597396 - DNA, 15 bp, Homo sapiens
gagaagagcgagaca

SEQ ID NO: 1597397 - DNA, 15 bp, Homo sapiens
ggagaagagcgagac

SEQ ID NO: 1597398 - DNA, 15 bp, Homo sapiens
gggagaagagcgaga

SEQ ID NO: 1597399 - DNA, 15 bp, Homo sapiens
ggggagaagagcgag

SEQ ID NO: 1597400 - DNA, 15 bp, Homo sapiens
cggggagaagagcga

SEQ ID NO: 1597401 - DNA, 15 bp, Homo sapiens
gcggggagaagagcg

SEQ ID NO: 1597402 - DNA, 15 bp, Homo sapiens
agcggggagaagagc

SEQ ID NO: 1597403 - DNA, 15 bp, Homo sapiens
aagcggggagaagag

SEQ ID NO: 1597404 - DNA, 15 bp, Homo sapiens
gaagcggggagaaga

SEQ ID NO: 1597405 - DNA, 15 bp, Homo sapiens
agaagcggggagaag

SEQ ID NO: 1597406 - DNA, 15 bp, Homo sapiens
cagaagcggggagaa

SEQ ID NO: 1597407 - DNA, 15 bp, Homo sapiens
tcagaagcggggaga

SEQ ID NO: 1597408 - DNA, 15 bp, Homo sapiens
ctcagaagcggggag

SEQ ID NO: 1597409 - DNA, 15 bp, Homo sapiens
gctcagaagcgggga

SEQ ID NO: 1597410 - DNA, 15 bp, Homo sapiens
agctcagaagcgggg

SEQ ID NO: 1597411 - DNA, 15 bp, Homo sapiens
aagctcagaagcggg

SEQ ID NO: 1597412 - DNA, 15 bp, Homo sapiens
caagctcagaagcgg

SEQ ID NO: 1597413 - DNA, 15 bp, Homo sapiens
ccaagctcagaagcg

SEQ ID NO: 1597414 - DNA, 15 bp, Homo sapiens
gccaagctcagaagc

SEQ ID NO: 1597415 - DNA, 15 bp, Homo sapiens
ggccaagctcagaag

SEQ ID NO: 1597416 - DNA, 15 bp, Homo sapiens
gggccaagctcagaa

SEQ ID NO: 1597417 - DNA, 15 bp, Homo sapiens
tgggccaagctcaga

SEQ ID NO: 1597418 - DNA, 15 bp, Homo sapiens
ctgggccaagctcag

SEQ ID NO: 1597419 - DNA, 15 bp, Homo sapiens
actgggccaagctca

SEQ ID NO: 1597420 - DNA, 15 bp, Homo sapiens
gactgggccaagctc

SEQ ID NO: 1597421 - DNA, 15 bp, Homo sapiens
ggactgggccaagct

SEQ ID NO: 1597422 - DNA, 15 bp, Homo sapiens
gggactgggccaagc

SEQ ID NO: 1597423 - DNA, 15 bp, Homo sapiens
agggactgggccaag

SEQ ID NO: 1597424 - DNA, 15 bp, Homo sapiens
cagggactgggccaa

SEQ ID NO: 1597425 - DNA, 15 bp, Homo sapiens
tcagggactgggcca

SEQ ID NO: 1597426 - DNA, 15 bp, Homo sapiens
gtcagggactgggcc

SEQ ID NO: 1597427 - DNA, 15 bp, Homo sapiens
ggtcagggactgggc

SEQ ID NO: 1597428 - DNA, 15 bp, Homo sapiens
ggggtcagggactgg

SEQ ID NO: 1597429 - DNA, 15 bp, Homo sapiens
gggggtcagggactg

SEQ ID NO: 1597430 - DNA, 15 bp, Homo sapiens
agggggtcagggact

SEQ ID NO: 1597431 - DNA, 15 bp, Homo sapiens
gagggggtcagggac

SEQ ID NO: 1597432 - DNA, 15 bp, Homo sapiens
cgagggggtcaggga

SEQ ID NO: 1597433 - DNA, 15 bp, Homo sapiens
gcgagggggtcaggg

SEQ ID NO: 1597434 - DNA, 15 bp, Homo sapiens
agcgagggggtcagg

SEQ ID NO: 1597435 - DNA, 15 bp, Homo sapiens
tagcgagggggtcag

SEQ ID NO: 1597436 - DNA, 15 bp, Homo sapiens
ctagcgagggggtca

SEQ ID NO: 1597437 - DNA, 15 bp, Homo sapiens
gctagcgagggggtc

SEQ ID NO: 1597438 - DNA, 15 bp, Homo sapiens
agctagcgagggggt

SEQ ID NO: 1597439 - DNA, 15 bp, Homo sapiens
cagctagcgaggggg

SEQ ID NO: 1597440 - DNA, 15 bp, Homo sapiens
tcagctagcgagggg

SEQ ID NO: 1597441 - DNA, 15 bp, Homo sapiens
ctcagctagcgaggg

SEQ ID NO: 1597442 - DNA, 15 bp, Homo sapiens
tctcagctagcgagg

SEQ ID NO: 1597443 - DNA, 15 bp, Homo sapiens
ctctcagctagcgag

SEQ ID NO: 1597444 - DNA, 15 bp, Homo sapiens
tctctcagctagcga

SEQ ID NO: 1597445 - DNA, 15 bp, Homo sapiens
ctctctcagctagcg

SEQ ID NO: 1597446 - DNA, 15 bp, Homo sapiens
gctctctcagctagc

SEQ ID NO: 1597447 - DNA, 15 bp, Homo sapiens
agctctctcagctag

SEQ ID NO: 1597448 - DNA, 15 bp, Homo sapiens
cagctctctcagcta

SEQ ID NO: 1597449 - DNA, 15 bp, Homo sapiens
gcagctctctcagct

SEQ ID NO: 1597450 - DNA, 15 bp, Homo sapiens
agcagctctctcagc

SEQ ID NO: 1597451 - DNA, 15 bp, Homo sapiens
aagcagctctctcag

SEQ ID NO: 1597452 - DNA, 15 bp, Homo sapiens
aaagcagctctctca

SEQ ID NO: 1597453 - DNA, 15 bp, Homo sapiens
gaaagcagctctctc

SEQ ID NO: 1597454 - DNA, 15 bp, Homo sapiens
ggaaagcagctctct

SEQ ID NO: 1597455 - DNA, 15 bp, Homo sapiens
aggaaagcagctctc

SEQ ID NO: 1597456 - DNA, 15 bp, Homo sapiens
aaggaaagcagctct

SEQ ID NO: 1597457 - DNA, 15 bp, Homo sapiens
gaaggaaagcagctc

SEQ ID NO: 1597458 - DNA, 15 bp, Homo sapiens
ggaaggaaagcagct

SEQ ID NO: 1597459 - DNA, 15 bp, Homo sapiens
aggaaggaaagcagc

SEQ ID NO: 1597460 - DNA, 15 bp, Homo sapiens
gaggaaggaaagcag

SEQ ID NO: 1597461 - DNA, 15 bp, Homo sapiens
agaggaaggaaagca

SEQ ID NO: 1597462 - DNA, 15 bp, Homo sapiens
gagaggaaggaaagc

SEQ ID NO: 1597463 - DNA, 15 bp, Homo sapiens
ggagaggaaggaaag

SEQ ID NO: 1597464 - DNA, 15 bp, Homo sapiens
aggagaggaaggaaa

SEQ ID NO: 1597465 - DNA, 15 bp, Homo sapiens
caggagaggaaggaa

SEQ ID NO: 1597466 - DNA, 15 bp, Homo sapiens
gcaggagaggaagga

SEQ ID NO: 1597467 - DNA, 15 bp, Homo sapiens
ggcaggagaggaagg

SEQ ID NO: 1597468 - DNA, 15 bp, Homo sapiens
gggcaggagaggaag

SEQ ID NO: 1597469 - DNA, 15 bp, Homo sapiens
tgggcaggagaggaa

SEQ ID NO: 1597470 - DNA, 15 bp, Homo sapiens
gtgggcaggagagga

SEQ ID NO: 1597471 - DNA, 15 bp, Homo sapiens
tgtgggcaggagagg

SEQ ID NO: 1597472 - DNA, 15 bp, Homo sapiens
ctgtgggcaggagag

SEQ ID NO: 1597473 - DNA, 15 bp, Homo sapiens
gctgtgggcaggaga

SEQ ID NO: 1597474 - DNA, 15 bp, Homo sapiens
agctgtgggcaggag

SEQ ID NO: 1597475 - DNA, 15 bp, Homo sapiens
gagctgtgggcagga

SEQ ID NO: 1597476 - DNA, 15 bp, Homo sapiens
ggagctgtgggcagg

SEQ ID NO: 1597477 - DNA, 15 bp, Homo sapiens
gggagctgtgggcag

SEQ ID NO: 1597478 - DNA, 15 bp, Homo sapiens
tgggagctgtgggca

SEQ ID NO: 1597479 - DNA, 15 bp, Homo sapiens
ctgggagctgtgggc

SEQ ID NO: 1597480 - DNA, 15 bp, Homo sapiens
actgggagctgtggg

SEQ ID NO: 1597481 - DNA, 15 bp, Homo sapiens
aactgggagctgtgg

SEQ ID NO: 1597482 - DNA, 15 bp, Homo sapiens
gaactgggagctgtg

SEQ ID NO: 1597483 - DNA, 15 bp, Homo sapiens
ggaactgggagctgt

SEQ ID NO: 1597484 - DNA, 15 bp, Homo sapiens
gggaactgggagctg

SEQ ID NO: 1597485 - DNA, 15 bp, Homo sapiens
tgggaactgggagct

SEQ ID NO: 1597486 - DNA, 15 bp, Homo sapiens
ctgggaactgggagc

SEQ ID NO: 1597487 - DNA, 15 bp, Homo sapiens
cctgggaactgggag

SEQ ID NO: 1597488 - DNA, 15 bp, Homo sapiens
gcctgggaactggga

SEQ ID NO: 1597489 - DNA, 15 bp, Homo sapiens
agcctgggaactggg

SEQ ID NO: 1597490 - DNA, 15 bp, Homo sapiens
cagcctgggaactgg

SEQ ID NO: 1597491 - DNA, 15 bp, Homo sapiens
ccagcctgggaactg

SEQ ID NO: 1597492 - DNA, 15 bp, Homo sapiens
cccagcctgggaact

SEQ ID NO: 1597493 - DNA, 15 bp, Homo sapiens
ccccagcctgggaac

SEQ ID NO: 1597494 - DNA, 15 bp, Homo sapiens
gccccagcctgggaa

SEQ ID NO: 1597495 - DNA, 15 bp, Homo sapiens
ggccccagcctggga

SEQ ID NO: 1597496 - DNA, 15 bp, Homo sapiens
tggccccagcctggg

SEQ ID NO: 1597497 - DNA, 15 bp, Homo sapiens
ctggccccagcctgg

SEQ ID NO: 1597498 - DNA, 15 bp, Homo sapiens
cctggccccagcctg

SEQ ID NO: 1597499 - DNA, 15 bp, Homo sapiens
ccctggccccagcct

SEQ ID NO: 1597500 - DNA, 15 bp, Homo sapiens
ccaccctggccccag

SEQ ID NO: 1597501 - DNA, 15 bp, Homo sapiens
cccaccctggcccca

SEQ ID NO: 1597502 - DNA, 15 bp, Homo sapiens
ccccaccctggcccc

SEQ ID NO: 1597503 - DNA, 15 bp, Homo sapiens
tccccaccctggccc

SEQ ID NO: 1597504 - DNA, 15 bp, Homo sapiens
ctccccaccctggcc

SEQ ID NO: 1597505 - DNA, 15 bp, Homo sapiens
gctccccaccctggc

SEQ ID NO: 1597506 - DNA, 15 bp, Homo sapiens
tgctccccaccctgg

SEQ ID NO: 1597507 - DNA, 15 bp, Homo sapiens
ctgctccccaccctg

SEQ ID NO: 1597508 - DNA, 15 bp, Homo sapiens
gctgctccccaccct

SEQ ID NO: 1597509 - DNA, 15 bp, Homo sapiens
agctgctccccaccc

SEQ ID NO: 1597510 - DNA, 15 bp, Homo sapiens
aagctgctccccacc

SEQ ID NO: 1597511 - DNA, 15 bp, Homo sapiens
aaagctgctccccac

SEQ ID NO: 1597512 - DNA, 15 bp, Homo sapiens
caaagctgctcccca

SEQ ID NO: 1597513 - DNA, 15 bp, Homo sapiens
ccaaagctgctcccc

SEQ ID NO: 1597514 - DNA, 15 bp, Homo sapiens
cccaaagctgctccc

SEQ ID NO: 1597515 - DNA, 15 bp, Homo sapiens
tcccaaagctgctcc

SEQ ID NO: 1597516 - DNA, 15 bp, Homo sapiens
atcccaaagctgctc

SEQ ID NO: 1597517 - DNA, 15 bp, Homo sapiens
catcccaaagctgct

SEQ ID NO: 1597518 - DNA, 15 bp, Homo sapiens
gcatcccaaagctgc

SEQ ID NO: 1597519 - DNA, 15 bp, Homo sapiens
agcatcccaaagctg

SEQ ID NO: 1597520 - DNA, 15 bp, Homo sapiens
tagcatcccaaagct

SEQ ID NO: 1597521 - DNA, 15 bp, Homo sapiens
ttagcatcccaaagc

SEQ ID NO: 1597522 - DNA, 15 bp, Homo sapiens
tttagcatcccaaag

SEQ ID NO: 1597523 - DNA, 15 bp, Homo sapiens
gtttagcatcccaaa

SEQ ID NO: 1597524 - DNA, 15 bp, Homo sapiens
tgtttagcatcccaa

SEQ ID NO: 1597525 - DNA, 15 bp, Homo sapiens
atgtttagcatccca

SEQ ID NO: 1597526 - DNA, 15 bp, Homo sapiens
gatgtttagcatccc

SEQ ID NO: 1597527 - DNA, 15 bp, Homo sapiens
tgatgtttagcatcc

SEQ ID NO: 1597528 - DNA, 15 bp, Homo sapiens
ttgatgtttagcatc

SEQ ID NO: 1597529 - DNA, 15 bp, Homo sapiens
tttgatgtttagcat

SEQ ID NO: 1597530 - DNA, 15 bp, Homo sapiens
ttttgatgtttagca

SEQ ID NO: 1597531 - DNA, 15 bp, Homo sapiens
tttttgatgtttagc

SEQ ID NO: 1597532 - DNA, 15 bp, Homo sapiens
ttttttgatgtttag

SEQ ID NO: 1597533 - DNA, 15 bp, Homo sapiens
cttttttgatgttta

SEQ ID NO: 1597534 - DNA, 15 bp, Homo sapiens
gcttttttgatgttt

SEQ ID NO: 1597535 - DNA, 15 bp, Homo sapiens
ggcttttttgatgtt

SEQ ID NO: 1597536 - DNA, 15 bp, Homo sapiens
gggcttttttgatgt

SEQ ID NO: 1597537 - DNA, 15 bp, Homo sapiens
tgggcttttttgatg

SEQ ID NO: 1597538 - DNA, 15 bp, Homo sapiens
ctgggcttttttgat

SEQ ID NO: 1597539 - DNA, 15 bp, Homo sapiens
gctgggcttttttga

SEQ ID NO: 1597540 - DNA, 15 bp, Homo sapiens
ggctgggcttttttg

SEQ ID NO: 1597541 - DNA, 15 bp, Homo sapiens
aggctgggctttttt

SEQ ID NO: 1597542 - DNA, 15 bp, Homo sapiens
caggctgggcttttt

SEQ ID NO: 1597543 - DNA, 15 bp, Homo sapiens
ccaggctgggctttt

SEQ ID NO: 1597544 - DNA, 15 bp, Homo sapiens
cccaggctgggcttt

SEQ ID NO: 1597545 - DNA, 15 bp, Homo sapiens
ccccaggctgggctt

SEQ ID NO: 1597546 - DNA, 15 bp, Homo sapiens
accccaggctgggct

SEQ ID NO: 1597547 - DNA, 15 bp, Homo sapiens
aaccccaggctgggc

SEQ ID NO: 1597548 - DNA, 15 bp, Homo sapiens
aaaccccaggctggg

SEQ ID NO: 1597549 - DNA, 15 bp, Homo sapiens
gaaaccccaggctgg

SEQ ID NO: 1597550 - DNA, 15 bp, Homo sapiens
tgaaaccccaggctg

SEQ ID NO: 1597551 - DNA, 15 bp, Homo sapiens
ctgaaaccccaggct

SEQ ID NO: 1597552 - DNA, 15 bp, Homo sapiens
cctgaaaccccaggc

SEQ ID NO: 1597553 - DNA, 15 bp, Homo sapiens
ccctgaaaccccagg

SEQ ID NO: 1597554 - DNA, 15 bp, Homo sapiens
gccctgaaaccccag

SEQ ID NO: 1597555 - DNA, 15 bp, Homo sapiens
ggccctgaaacccca

SEQ ID NO: 1597556 - DNA, 15 bp, Homo sapiens
gggccctgaaacccc

SEQ ID NO: 1597557 - DNA, 15 bp, Homo sapiens
cgggccctgaaaccc

SEQ ID NO: 1597558 - DNA, 15 bp, Homo sapiens
tcgggccctgaaacc

SEQ ID NO: 1597559 - DNA, 15 bp, Homo sapiens
ttcgggccctgaaac

SEQ ID NO: 1597560 - DNA, 15 bp, Homo sapiens
cttcgggccctgaaa

SEQ ID NO: 1597561 - DNA, 15 bp, Homo sapiens
gcttcgggccctgaa

SEQ ID NO: 1597562 - DNA, 15 bp, Homo sapiens
ggcttcgggccctga

SEQ ID NO: 1597563 - DNA, 15 bp, Homo sapiens
tggcttcgggccctg

SEQ ID NO: 1597564 - DNA, 15 bp, Homo sapiens
gtggcttcgggccct

SEQ ID NO: 1597565 - DNA, 15 bp, Homo sapiens
agtggcttcgggccc

SEQ ID NO: 1597566 - DNA, 15 bp, Homo sapiens
tagtggcttcgggcc

SEQ ID NO: 1597567 - DNA, 15 bp, Homo sapiens
ctagtggcttcgggc

SEQ ID NO: 1597568 - DNA, 15 bp, Homo sapiens
tctagtggcttcggg

SEQ ID NO: 1597569 - DNA, 15 bp, Homo sapiens
ctctagtggcttcgg

SEQ ID NO: 1597570 - DNA, 15 bp, Homo sapiens
gctctagtggcttcg

SEQ ID NO: 1597571 - DNA, 15 bp, Homo sapiens
cgctctagtggcttc

SEQ ID NO: 1597572 - DNA, 15 bp, Homo sapiens
ccgctctagtggctt

SEQ ID NO: 1597573 - DNA, 15 bp, Homo sapiens
gccgctctagtggct

SEQ ID NO: 1597574 - DNA, 15 bp, Homo sapiens
agccgctctagtggc

SEQ ID NO: 1597575 - DNA, 15 bp, Homo sapiens
gagccgctctagtgg

SEQ ID NO: 1597576 - DNA, 15 bp, Homo sapiens
agagccgctctagtg

SEQ ID NO: 1597577 - DNA, 15 bp, Homo sapiens
gagagccgctctagt

SEQ ID NO: 1597578 - DNA, 15 bp, Homo sapiens
ggagagccgctctag

SEQ ID NO: 1597579 - DNA, 15 bp, Homo sapiens
tggagagccgctcta

SEQ ID NO: 1597580 - DNA, 15 bp, Homo sapiens
ttggagagccgctct

SEQ ID NO: 1597581 - DNA, 15 bp, Homo sapiens
cttggagagccgctc

SEQ ID NO: 1597582 - DNA, 15 bp, Homo sapiens
ccttggagagccgct

SEQ ID NO: 1597583 - DNA, 15 bp, Homo sapiens
gccttggagagccgc

SEQ ID NO: 1597584 - DNA, 15 bp, Homo sapiens
agccttggagagccg

SEQ ID NO: 1597585 - DNA, 15 bp, Homo sapiens
gagccttggagagcc

SEQ ID NO: 1597586 - DNA, 15 bp, Homo sapiens
agagccttggagagc

SEQ ID NO: 1597587 - DNA, 15 bp, Homo sapiens
gagagccttggagag

SEQ ID NO: 1597588 - DNA, 15 bp, Homo sapiens
cgagagccttggaga

SEQ ID NO: 1597589 - DNA, 15 bp, Homo sapiens
tcgagagccttggag

SEQ ID NO: 1597590 - DNA, 15 bp, Homo sapiens
ctcgagagccttgga

SEQ ID NO: 1597591 - DNA, 15 bp, Homo sapiens
tctcgagagccttgg

SEQ ID NO: 1597592 - DNA, 15 bp, Homo sapiens
ttctcgagagccttg

SEQ ID NO: 1597593 - DNA, 15 bp, Homo sapiens
tttctcgagagcctt

SEQ ID NO: 1597594 - DNA, 15 bp, Homo sapiens
ctttctcgagagcct

SEQ ID NO: 1597595 - DNA, 15 bp, Homo sapiens
actttctcgagagcc

SEQ ID NO: 1597596 - DNA, 15 bp, Homo sapiens
gactttctcgagagc

SEQ ID NO: 1597597 - DNA, 15 bp, Homo sapiens
ggactttctcgagag

SEQ ID NO: 1597598 - DNA, 15 bp, Homo sapiens
aggactttctcgaga

SEQ ID NO: 1597599 - DNA, 15 bp, Homo sapiens
taggactttctcgag

SEQ ID NO: 1597600 - DNA, 15 bp, Homo sapiens
ctaggactttctcga

SEQ ID NO: 1597601 - DNA, 15 bp, Homo sapiens
actaggactttctcg

SEQ ID NO: 1597602 - DNA, 15 bp, Homo sapiens
cactaggactttctc

SEQ ID NO: 1597603 - DNA, 15 bp, Homo sapiens
acactaggactttct

SEQ ID NO: 1597604 - DNA, 15 bp, Homo sapiens
aacactaggactttc

SEQ ID NO: 1597605 - DNA, 15 bp, Homo sapiens
aaacactaggacttt

SEQ ID NO: 1597606 - DNA, 15 bp, Homo sapiens
taaacactaggactt

SEQ ID NO: 1597607 - DNA, 15 bp, Homo sapiens
gtaaacactaggact

SEQ ID NO: 1597608 - DNA, 15 bp, Homo sapiens
tgtaaacactaggac

SEQ ID NO: 1597609 - DNA, 15 bp, Homo sapiens
atgtaaacactagga

SEQ ID NO: 1597610 - DNA, 15 bp, Homo sapiens
catgtaaacactagg

SEQ ID NO: 1597611 - DNA, 15 bp, Homo sapiens
ccatgtaaacactag

SEQ ID NO: 1597612 - DNA, 15 bp, Homo sapiens
gccatgtaaacacta

SEQ ID NO: 1597613 - DNA, 15 bp, Homo sapiens
cgccatgtaaacact

SEQ ID NO: 1597614 - DNA, 15 bp, Homo sapiens
tcgccatgtaaacac

SEQ ID NO: 1597615 - DNA, 15 bp, Homo sapiens
ttcgccatgtaaaca

SEQ ID NO: 1597616 - DNA, 15 bp, Homo sapiens
cttcgccatgtaaac

SEQ ID NO: 1597617 - DNA, 15 bp, Homo sapiens
acttcgccatgtaaa

SEQ ID NO: 1597618 - DNA, 15 bp, Homo sapiens
cacttcgccatgtaa

SEQ ID NO: 1597619 - DNA, 15 bp, Homo sapiens
ccacttcgccatgta

SEQ ID NO: 1597620 - DNA, 15 bp, Homo sapiens
cccacttcgccatgt

SEQ ID NO: 1597621 - DNA, 15 bp, Homo sapiens
ccccacttcgccatg

SEQ ID NO: 1597622 - DNA, 15 bp, Homo sapiens
cccccacttcgccat

SEQ ID NO: 1597623 - DNA, 15 bp, Homo sapiens
acccccacttcgcca

SEQ ID NO: 1597624 - DNA, 15 bp, Homo sapiens
cacccccacttcgcc

SEQ ID NO: 1597625 - DNA, 15 bp, Homo sapiens
ccacccccacttcgc

SEQ ID NO: 1597626 - DNA, 15 bp, Homo sapiens
cccacccccacttcg

SEQ ID NO: 1597627 - DNA, 15 bp, Homo sapiens
ccccacccccacttc

SEQ ID NO: 1597628 - DNA, 15 bp, Homo sapiens
tccccacccccactt

SEQ ID NO: 1597629 - DNA, 15 bp, Homo sapiens
ctccccacccccact

SEQ ID NO: 1597630 - DNA, 15 bp, Homo sapiens
tctccccacccccac

SEQ ID NO: 1597631 - DNA, 15 bp, Homo sapiens
ctctccccaccccca

SEQ ID NO: 1597632 - DNA, 15 bp, Homo sapiens
cctctccccaccccc

SEQ ID NO: 1597633 - DNA, 15 bp, Homo sapiens
tcctctccccacccc

SEQ ID NO: 1597634 - DNA, 15 bp, Homo sapiens
ctcctctccccaccc

SEQ ID NO: 1597635 - DNA, 15 bp, Homo sapiens
cctcctctccccacc

SEQ ID NO: 1597636 - DNA, 15 bp, Homo sapiens
tcctcctctccccac

SEQ ID NO: 1597637 - DNA, 15 bp, Homo sapiens
ttcctcctctcccca

SEQ ID NO: 1597638 - DNA, 15 bp, Homo sapiens
cttcctcctctcccc

SEQ ID NO: 1597639 - DNA, 15 bp, Homo sapiens
ccttcctcctctccc

SEQ ID NO: 1597640 - DNA, 15 bp, Homo sapiens
cccttcctcctctcc

SEQ ID NO: 1597641 - DNA, 15 bp, Homo sapiens
ccccttcctcctctc

SEQ ID NO: 1597642 - DNA, 15 bp, Homo sapiens
cccccttcctcctct

SEQ ID NO: 1597643 - DNA, 15 bp, Homo sapiens
ccccccttcctcctc

SEQ ID NO: 1597644 - DNA, 15 bp, Homo sapiens
accccccttcctcct

SEQ ID NO: 1597645 - DNA, 15 bp, Homo sapiens
caccccccttcctcc

SEQ ID NO: 1597646 - DNA, 15 bp, Homo sapiens
gcaccccccttcctc

SEQ ID NO: 1597647 - DNA, 15 bp, Homo sapiens
tgcaccccccttcct

SEQ ID NO: 1597648 - DNA, 15 bp, Homo sapiens
ctgcaccccccttcc

SEQ ID NO: 1597649 - DNA, 15 bp, Homo sapiens
actgcaccccccttc

SEQ ID NO: 1597650 - DNA, 15 bp, Homo sapiens
cactgcacccccctt

SEQ ID NO: 1597651 - DNA, 15 bp, Homo sapiens
acactgcacccccct

SEQ ID NO: 1597652 - DNA, 15 bp, Homo sapiens
cacactgcacccccc

SEQ ID NO: 1597653 - DNA, 15 bp, Homo sapiens
gcacactgcaccccc

SEQ ID NO: 1597654 - DNA, 15 bp, Homo sapiens
tgcacactgcacccc

SEQ ID NO: 1597655 - DNA, 15 bp, Homo sapiens
ttgcacactgcaccc

SEQ ID NO: 1597656 - DNA, 15 bp, Homo sapiens
tttgcacactgcacc

SEQ ID NO: 1597657 - DNA, 15 bp, Homo sapiens
ttttgcacactgcac

SEQ ID NO: 1597658 - DNA, 15 bp, Homo sapiens
attttgcacactgca

SEQ ID NO: 1597659 - DNA, 15 bp, Homo sapiens
gattttgcacactgc

SEQ ID NO: 1597660 - DNA, 15 bp, Homo sapiens
agattttgcacactg

SEQ ID NO: 1597661 - DNA, 15 bp, Homo sapiens
gagattttgcacact

SEQ ID NO: 1597662 - DNA, 15 bp, Homo sapiens
ggagattttgcacac

SEQ ID NO: 1597663 - DNA, 15 bp, Homo sapiens
gggagattttgcaca

SEQ ID NO: 1597664 - DNA, 15 bp, Homo sapiens
ggggagattttgcac

SEQ ID NO: 1597665 - DNA, 15 bp, Homo sapiens
gggggagattttgca

SEQ ID NO: 1597666 - DNA, 15 bp, Homo sapiens
tgggggagattttgc

SEQ ID NO: 1597667 - DNA, 15 bp, Homo sapiens
gtgggggagattttg

SEQ ID NO: 1597668 - DNA, 15 bp, Homo sapiens
agtgggggagatttt

SEQ ID NO: 1597669 - DNA, 15 bp, Homo sapiens
gagtgggggagattt

SEQ ID NO: 1597670 - DNA, 15 bp, Homo sapiens
ggagtgggggagatt

SEQ ID NO: 1597671 - DNA, 15 bp, Homo sapiens
aggagtgggggagat

SEQ ID NO: 1597672 - DNA, 15 bp, Homo sapiens
gaggagtgggggaga

SEQ ID NO: 1597673 - DNA, 15 bp, Homo sapiens
agaggagtgggggag

SEQ ID NO: 1597674 - DNA, 15 bp, Homo sapiens
gagaggagtggggga

SEQ ID NO: 1597675 - DNA, 15 bp, Homo sapiens
tgagaggagtggggg

SEQ ID NO: 1597676 - DNA, 15 bp, Homo sapiens
ctgagaggagtgggg

SEQ ID NO: 1597677 - DNA, 15 bp, Homo sapiens
gctgagaggagtggg

SEQ ID NO: 1597678 - DNA, 15 bp, Homo sapiens
ggctgagaggagtgg

SEQ ID NO: 1597679 - DNA, 15 bp, Homo sapiens
cggctgagaggagtg

SEQ ID NO: 1597680 - DNA, 15 bp, Homo sapiens
acggctgagaggagt

SEQ ID NO: 1597681 - DNA, 15 bp, Homo sapiens
aacggctgagaggag

SEQ ID NO: 1597682 - DNA, 15 bp, Homo sapiens
caacggctgagagga

SEQ ID NO: 1597683 - DNA, 15 bp, Homo sapiens
ccaacggctgagagg

SEQ ID NO: 1597684 - DNA, 15 bp, Homo sapiens
cccaacggctgagag

SEQ ID NO: 1597685 - DNA, 15 bp, Homo sapiens
ccccaacggctgaga

SEQ ID NO: 1597686 - DNA, 15 bp, Homo sapiens
gccccaacggctgag

SEQ ID NO: 1597687 - DNA, 15 bp, Homo sapiens
ggccccaacggctga

SEQ ID NO: 1597688 - DNA, 15 bp, Homo sapiens
aggccccaacggctg

SEQ ID NO: 1597689 - DNA, 15 bp, Homo sapiens
taggccccaacggct

SEQ ID NO: 1597690 - DNA, 15 bp, Homo sapiens
ctaggccccaacggc

SEQ ID NO: 1597691 - DNA, 15 bp, Homo sapiens
cctaggccccaacgg

SEQ ID NO: 1597692 - DNA, 15 bp, Homo sapiens
ccctaggccccaacg

SEQ ID NO: 1597693 - DNA, 15 bp, Homo sapiens
tccctaggccccaac

SEQ ID NO: 1597694 - DNA, 15 bp, Homo sapiens
atccctaggccccaa

SEQ ID NO: 1597695 - DNA, 15 bp, Homo sapiens
catccctaggcccca

SEQ ID NO: 1597696 - DNA, 15 bp, Homo sapiens
ccatccctaggcccc

SEQ ID NO: 1597697 - DNA, 15 bp, Homo sapiens
cccatccctaggccc

SEQ ID NO: 1597698 - DNA, 15 bp, Homo sapiens
acccatccctaggcc

SEQ ID NO: 1597699 - DNA, 15 bp, Homo sapiens
tacccatccctaggc

SEQ ID NO: 1597700 - DNA, 15 bp, Homo sapiens
ctacccatccctagg

SEQ ID NO: 1597701 - DNA, 15 bp, Homo sapiens
cctacccatccctag

SEQ ID NO: 1597702 - DNA, 15 bp, Homo sapiens
ccctacccatcccta

SEQ ID NO: 1597703 - DNA, 15 bp, Homo sapiens
accctacccatccct

SEQ ID NO: 1597704 - DNA, 15 bp, Homo sapiens
taccctacccatccc

SEQ ID NO: 1597705 - DNA, 15 bp, Homo sapiens
gtaccctacccatcc

SEQ ID NO: 1597706 - DNA, 15 bp, Homo sapiens
agtaccctacccatc

SEQ ID NO: 1597707 - DNA, 15 bp, Homo sapiens
aagtaccctacccat

SEQ ID NO: 1597708 - DNA, 15 bp, Homo sapiens
aaagtaccctaccca

SEQ ID NO: 1597709 - DNA, 15 bp, Homo sapiens
caaagtaccctaccc

SEQ ID NO: 1597710 - DNA, 15 bp, Homo sapiens
ccaaagtaccctacc

SEQ ID NO: 1597711 - DNA, 15 bp, Homo sapiens
gccaaagtaccctac

SEQ ID NO: 1597712 - DNA, 15 bp, Homo sapiens
cgccaaagtacccta

SEQ ID NO: 1597713 - DNA, 15 bp, Homo sapiens
ccgccaaagtaccct

SEQ ID NO: 1597714 - DNA, 15 bp, Homo sapiens
tccgccaaagtaccc

SEQ ID NO: 1597715 - DNA, 15 bp, Homo sapiens
ctccgccaaagtacc

SEQ ID NO: 1597716 - DNA, 15 bp, Homo sapiens
cctccgccaaagtac

SEQ ID NO: 1597717 - DNA, 15 bp, Homo sapiens
gcctccgccaaagta

SEQ ID NO: 1597718 - DNA, 15 bp, Homo sapiens
tgcctccgccaaagt

SEQ ID NO: 1597719 - DNA, 15 bp, Homo sapiens
ttgcctccgccaaag

SEQ ID NO: 1597720 - DNA, 15 bp, Homo sapiens
tttgcctccgccaaa

SEQ ID NO: 1597721 - DNA, 15 bp, Homo sapiens
ctttgcctccgccaa

SEQ ID NO: 1597722 - DNA, 15 bp, Homo sapiens
gctttgcctccgcca

SEQ ID NO: 1597723 - DNA, 15 bp, Homo sapiens
agctttgcctccgcc

SEQ ID NO: 1597724 - DNA, 15 bp, Homo sapiens
aagctttgcctccgc

SEQ ID NO: 1597725 - DNA, 15 bp, Homo sapiens
gaagctttgcctccg

SEQ ID NO: 1597726 - DNA, 15 bp, Homo sapiens
cgaagctttgcctcc

SEQ ID NO: 1597727 - DNA, 15 bp, Homo sapiens
gcgaagctttgcctc

SEQ ID NO: 1597728 - DNA, 15 bp, Homo sapiens
cgcgaagctttgcct

SEQ ID NO: 1597729 - DNA, 15 bp, Homo sapiens
ccgcgaagctttgcc

SEQ ID NO: 1597730 - DNA, 15 bp, Homo sapiens
accgcgaagctttgc

SEQ ID NO: 1597731 - DNA, 15 bp, Homo sapiens
caccgcgaagctttg

SEQ ID NO: 1597732 - DNA, 15 bp, Homo sapiens
tcaccgcgaagcttt

SEQ ID NO: 1597733 - DNA, 15 bp, Homo sapiens
atcaccgcgaagctt

SEQ ID NO: 1597734 - DNA, 15 bp, Homo sapiens
gatcaccgcgaagct

SEQ ID NO: 1597735 - DNA, 15 bp, Homo sapiens
agatcaccgcgaagc

SEQ ID NO: 1597736 - DNA, 15 bp, Homo sapiens
gagatcaccgcgaag

SEQ ID NO: 1597737 - DNA, 15 bp, Homo sapiens
cgagatcaccgcgaa

SEQ ID NO: 1597738 - DNA, 15 bp, Homo sapiens
ccgagatcaccgcga

SEQ ID NO: 1597739 - DNA, 15 bp, Homo sapiens
cccgagatcaccgcg

SEQ ID NO: 1597740 - DNA, 15 bp, Homo sapiens
ccccgagatcaccgc

SEQ ID NO: 1597741 - DNA, 15 bp, Homo sapiens
accccgagatcaccg

SEQ ID NO: 1597742 - DNA, 15 bp, Homo sapiens
caccccgagatcacc

SEQ ID NO: 1597743 - DNA, 15 bp, Homo sapiens
tcaccccgagatcac

SEQ ID NO: 1597744 - DNA, 15 bp, Homo sapiens
ttcaccccgagatca

SEQ ID NO: 1597745 - DNA, 15 bp, Homo sapiens
gttcaccccgagatc

SEQ ID NO: 1597746 - DNA, 15 bp, Homo sapiens
ggttcaccccgagat

SEQ ID NO: 1597747 - DNA, 15 bp, Homo sapiens
cggttcaccccgaga

SEQ ID NO: 1597748 - DNA, 15 bp, Homo sapiens
acggttcaccccgag

SEQ ID NO: 1597749 - DNA, 15 bp, Homo sapiens
tacggttcaccccga

SEQ ID NO: 1597750 - DNA, 15 bp, Homo sapiens
gtacggttcaccccg

SEQ ID NO: 1597751 - DNA, 15 bp, Homo sapiens
agtacggttcacccc

SEQ ID NO: 1597752 - DNA, 15 bp, Homo sapiens
aagtacggttcaccc

SEQ ID NO: 1597753 - DNA, 15 bp, Homo sapiens
caagtacggttcacc

SEQ ID NO: 1597754 - DNA, 15 bp, Homo sapiens
gcaagtacggttcac

SEQ ID NO: 1597755 - DNA, 15 bp, Homo sapiens
agcaagtacggttca

SEQ ID NO: 1597756 - DNA, 15 bp, Homo sapiens
gagcaagtacggttc

SEQ ID NO: 1597757 - DNA, 15 bp, Homo sapiens
ggagcaagtacggtt

SEQ ID NO: 1597758 - DNA, 15 bp, Homo sapiens
gggagcaagtacggt

SEQ ID NO: 1597759 - DNA, 15 bp, Homo sapiens
tgggagcaagtacgg

SEQ ID NO: 1597760 - DNA, 15 bp, Homo sapiens
ttgggagcaagtacg

SEQ ID NO: 1597761 - DNA, 15 bp, Homo sapiens
tttgggagcaagtac

SEQ ID NO: 1597762 - DNA, 15 bp, Homo sapiens
gtttgggagcaagta

SEQ ID NO: 1597763 - DNA, 15 bp, Homo sapiens
ggtttgggagcaagt

SEQ ID NO: 1597764 - DNA, 15 bp, Homo sapiens
aggtttgggagcaag

SEQ ID NO: 1597765 - DNA, 15 bp, Homo sapiens
gaggtttgggagcaa

SEQ ID NO: 1597766 - DNA, 15 bp, Homo sapiens
cgaggtttgggagca

SEQ ID NO: 1597767 - DNA, 15 bp, Homo sapiens
ccgaggtttgggagc

SEQ ID NO: 1597768 - DNA, 15 bp, Homo sapiens
tccgaggtttgggag

SEQ ID NO: 1597769 - DNA, 15 bp, Homo sapiens
ttccgaggtttggga

SEQ ID NO: 1597770 - DNA, 15 bp, Homo sapiens
cttccgaggtttggg

SEQ ID NO: 1597771 - DNA, 15 bp, Homo sapiens
gcttccgaggtttgg

SEQ ID NO: 1597772 - DNA, 15 bp, Homo sapiens
agcttccgaggtttg

SEQ ID NO: 1597773 - DNA, 15 bp, Homo sapiens
aagcttccgaggttt

SEQ ID NO: 1597774 - DNA, 15 bp, Homo sapiens
gaagcttccgaggtt

SEQ ID NO: 1597775 - DNA, 15 bp, Homo sapiens
ggaagcttccgaggt

SEQ ID NO: 1597776 - DNA, 15 bp, Homo sapiens
tggaagcttccgagg

SEQ ID NO: 1597777 - DNA, 15 bp, Homo sapiens
ttggaagcttccgag

SEQ ID NO: 1597778 - DNA, 15 bp, Homo sapiens
cttggaagcttccga

SEQ ID NO: 1597779 - DNA, 15 bp, Homo sapiens
gcttggaagcttccg

SEQ ID NO: 1597780 - DNA, 15 bp, Homo sapiens
tgcttggaagcttcc

SEQ ID NO: 1597781 - DNA, 15 bp, Homo sapiens
gtgcttggaagcttc

SEQ ID NO: 1597782 - DNA, 15 bp, Homo sapiens
ggtgcttggaagctt

SEQ ID NO: 1597783 - DNA, 15 bp, Homo sapiens
aggtgcttggaagct

SEQ ID NO: 1597784 - DNA, 15 bp, Homo sapiens
gaggtgcttggaagc

SEQ ID NO: 1597785 - DNA, 15 bp, Homo sapiens
tgaggtgcttggaag

SEQ ID NO: 1597786 - DNA, 15 bp, Homo sapiens
ctgaggtgcttggaa

SEQ ID NO: 1597787 - DNA, 15 bp, Homo sapiens
gctgaggtgcttgga

SEQ ID NO: 1597788 - DNA, 15 bp, Homo sapiens
cgctgaggtgcttgg

SEQ ID NO: 1597789 - DNA, 15 bp, Homo sapiens
gcgctgaggtgcttg

SEQ ID NO: 1597790 - DNA, 15 bp, Homo sapiens
ggcgctgaggtgctt

SEQ ID NO: 1597791 - DNA, 15 bp, Homo sapiens
tggcgctgaggtgct

SEQ ID NO: 1597792 - DNA, 15 bp, Homo sapiens
ctggcgctgaggtgc

SEQ ID NO: 1597793 - DNA, 15 bp, Homo sapiens
cctggcgctgaggtg

SEQ ID NO: 1597794 - DNA, 15 bp, Homo sapiens
ccctggcgctgaggt

SEQ ID NO: 1597795 - DNA, 15 bp, Homo sapiens
cccctggcgctgagg

SEQ ID NO: 1597796 - DNA, 15 bp, Homo sapiens
gcccctggcgctgag

SEQ ID NO: 1597797 - DNA, 15 bp, Homo sapiens
tgcccctggcgctga

SEQ ID NO: 1597798 - DNA, 15 bp, Homo sapiens
atgcccctggcgctg

SEQ ID NO: 1597799 - DNA, 15 bp, Homo sapiens
gatgcccctggcgct

SEQ ID NO: 1597800 - DNA, 15 bp, Homo sapiens
ggatgcccctggcgc

SEQ ID NO: 1597801 - DNA, 15 bp, Homo sapiens
aggatgcccctggcg

SEQ ID NO: 1597802 - DNA, 15 bp, Homo sapiens
gaggatgcccctggc

SEQ ID NO: 1597803 - DNA, 15 bp, Homo sapiens
tgaggatgcccctgg

SEQ ID NO: 1597804 - DNA, 15 bp, Homo sapiens
ctgaggatgcccctg

SEQ ID NO: 1597805 - DNA, 15 bp, Homo sapiens
tctgaggatgcccct

SEQ ID NO: 1597806 - DNA, 15 bp, Homo sapiens
ttctgaggatgcccc

SEQ ID NO: 1597807 - DNA, 15 bp, Homo sapiens
attctgaggatgccc

SEQ ID NO: 1597808 - DNA, 15 bp, Homo sapiens
cattctgaggatgcc

SEQ ID NO: 1597809 - DNA, 15 bp, Homo sapiens
gcattctgaggatgc

SEQ ID NO: 1597810 - DNA, 15 bp, Homo sapiens
agcattctgaggatg

SEQ ID NO: 1597811 - DNA, 15 bp, Homo sapiens
cagcattctgaggat

SEQ ID NO: 1597812 - DNA, 15 bp, Homo sapiens
tcagcattctgagga

SEQ ID NO: 1597813 - DNA, 15 bp, Homo sapiens
atcagcattctgagg

SEQ ID NO: 1597814 - DNA, 15 bp, Homo sapiens
aatcagcattctgag

SEQ ID NO: 1597815 - DNA, 15 bp, Homo sapiens
aaatcagcattctga

SEQ ID NO: 1597816 - DNA, 15 bp, Homo sapiens
gaaatcagcattctg

SEQ ID NO: 1597817 - DNA, 15 bp, Homo sapiens
agaaatcagcattct

SEQ ID NO: 1597818 - DNA, 15 bp, Homo sapiens
gagaaatcagcattc

SEQ ID NO: 1597819 - DNA, 15 bp, Homo sapiens
ggagaaatcagcatt

SEQ ID NO: 1597820 - DNA, 15 bp, Homo sapiens
cggagaaatcagcat

SEQ ID NO: 1597821 - DNA, 15 bp, Homo sapiens
tcggagaaatcagca

SEQ ID NO: 1597822 - DNA, 15 bp, Homo sapiens
ctcggagaaatcagc

SEQ ID NO: 1597823 - DNA, 15 bp, Homo sapiens
tctcggagaaatcag

SEQ ID NO: 1597824 - DNA, 15 bp, Homo sapiens
ctctcggagaaatca

SEQ ID NO: 1597825 - DNA, 15 bp, Homo sapiens
cctctcggagaaatc

SEQ ID NO: 1597826 - DNA, 15 bp, Homo sapiens
ccctctcggagaaat

SEQ ID NO: 1597827 - DNA, 15 bp, Homo sapiens
cccctctcggagaaa

SEQ ID NO: 1597828 - DNA, 15 bp, Homo sapiens
tcccctctcggagaa

SEQ ID NO: 1597829 - DNA, 15 bp, Homo sapiens
ctcccctctcggaga

SEQ ID NO: 1597830 - DNA, 15 bp, Homo sapiens
cctcccctctcggag

SEQ ID NO: 1597831 - DNA, 15 bp, Homo sapiens
gcctcccctctcgga

SEQ ID NO: 1597832 - DNA, 15 bp, Homo sapiens
ggcctcccctctcgg

SEQ ID NO: 1597833 - DNA, 15 bp, Homo sapiens
tggcctcccctctcg

SEQ ID NO: 1597834 - DNA, 15 bp, Homo sapiens
ctggcctcccctctc

SEQ ID NO: 1597835 - DNA, 15 bp, Homo sapiens
tctggcctcccctct

SEQ ID NO: 1597836 - DNA, 15 bp, Homo sapiens
ttctggcctcccctc

SEQ ID NO: 1597837 - DNA, 15 bp, Homo sapiens
tttctggcctcccct

SEQ ID NO: 1597838 - DNA, 15 bp, Homo sapiens
atttctggcctcccc

SEQ ID NO: 1597839 - DNA, 15 bp, Homo sapiens
aatttctggcctccc

SEQ ID NO: 1597840 - DNA, 15 bp, Homo sapiens
caatttctggcctcc

SEQ ID NO: 1597841 - DNA, 15 bp, Homo sapiens
ccaatttctggcctc

SEQ ID NO: 1597842 - DNA, 15 bp, Homo sapiens
cccaatttctggcct

SEQ ID NO: 1597843 - DNA, 15 bp, Homo sapiens
gcccaatttctggcc

SEQ ID NO: 1597844 - DNA, 15 bp, Homo sapiens
tgcccaatttctggc

SEQ ID NO: 1597845 - DNA, 15 bp, Homo sapiens
gtgcccaatttctgg

SEQ ID NO: 1597846 - DNA, 15 bp, Homo sapiens
cgtgcccaatttctg

SEQ ID NO: 1597847 - DNA, 15 bp, Homo sapiens
tcgtgcccaatttct

SEQ ID NO: 1597848 - DNA, 15 bp, Homo sapiens
ctcgtgcccaatttc

SEQ ID NO: 1597849 - DNA, 15 bp, Homo sapiens
actcgtgcccaattt

SEQ ID NO: 1597850 - DNA, 15 bp, Homo sapiens
aactcgtgcccaatt

SEQ ID NO: 1597851 - DNA, 15 bp, Homo sapiens
caactcgtgcccaat

SEQ ID NO: 1597852 - DNA, 15 bp, Homo sapiens
tcaactcgtgcccaa

SEQ ID NO: 1597853 - DNA, 15 bp, Homo sapiens
atcaactcgtgccca

SEQ ID NO: 1597854 - DNA, 15 bp, Homo sapiens
catcaactcgtgccc

SEQ ID NO: 1597855 - DNA, 15 bp, Homo sapiens
gcatcaactcgtgcc

SEQ ID NO: 1597856 - DNA, 15 bp, Homo sapiens
tgcatcaactcgtgc

SEQ ID NO: 1597857 - DNA, 15 bp, Homo sapiens
ctgcatcaactcgtg

SEQ ID NO: 1597858 - DNA, 15 bp, Homo sapiens
cctgcatcaactcgt

SEQ ID NO: 1597859 - DNA, 15 bp, Homo sapiens
tcctgcatcaactcg

SEQ ID NO: 1597860 - DNA, 15 bp, Homo sapiens
ctcctgcatcaactc

SEQ ID NO: 1597861 - DNA, 15 bp, Homo sapiens
tctcctgcatcaact

SEQ ID NO: 1597862 - DNA, 15 bp, Homo sapiens
atctcctgcatcaac

SEQ ID NO: 1597863 - DNA, 15 bp, Homo sapiens
aatctcctgcatcaa

SEQ ID NO: 1597864 - DNA, 15 bp, Homo sapiens
gaatctcctgcatca

SEQ ID NO: 1597865 - DNA, 15 bp, Homo sapiens
ggaatctcctgcatc

SEQ ID NO: 1597866 - DNA, 15 bp, Homo sapiens
gggaatctcctgcat

SEQ ID NO: 1597867 - DNA, 15 bp, Homo sapiens
tgggaatctcctgca

SEQ ID NO: 1597868 - DNA, 15 bp, Homo sapiens
ctgggaatctcctgc

SEQ ID NO: 1597869 - DNA, 15 bp, Homo sapiens
tctgggaatctcctg

SEQ ID NO: 1597870 - DNA, 15 bp, Homo sapiens
ttctgggaatctcct

SEQ ID NO: 1597871 - DNA, 15 bp, Homo sapiens
tttctgggaatctcc

SEQ ID NO: 1597872 - DNA, 15 bp, Homo sapiens
ctttctgggaatctc

SEQ ID NO: 1597873 - DNA, 15 bp, Homo sapiens
cctttctgggaatct

SEQ ID NO: 1597874 - DNA, 15 bp, Homo sapiens
tcctttctgggaatc

SEQ ID NO: 1597875 - DNA, 15 bp, Homo sapiens
ctcctttctgggaat

SEQ ID NO: 1597876 - DNA, 15 bp, Homo sapiens
cctcctttctgggaa

SEQ ID NO: 1597877 - DNA, 15 bp, Homo sapiens
tcctcctttctggga

SEQ ID NO: 1597878 - DNA, 15 bp, Homo sapiens
gtcctcctttctggg

SEQ ID NO: 1597879 - DNA, 15 bp, Homo sapiens
agtcctcctttctgg

SEQ ID NO: 1597880 - DNA, 15 bp, Homo sapiens
cagtcctcctttctg

SEQ ID NO: 1597881 - DNA, 15 bp, Homo sapiens
acagtcctcctttct

SEQ ID NO: 1597882 - DNA, 15 bp, Homo sapiens
gacagtcctcctttc

SEQ ID NO: 1597883 - DNA, 15 bp, Homo sapiens
cgacagtcctccttt

SEQ ID NO: 1597884 - DNA, 15 bp, Homo sapiens
ccgacagtcctcctt

SEQ ID NO: 1597885 - DNA, 15 bp, Homo sapiens
gccgacagtcctcct

SEQ ID NO: 1597886 - DNA, 15 bp, Homo sapiens
agccgacagtcctcc

SEQ ID NO: 1597887 - DNA, 15 bp, Homo sapiens
aagccgacagtcctc

SEQ ID NO: 1597888 - DNA, 15 bp, Homo sapiens
aaagccgacagtcct

SEQ ID NO: 1597889 - DNA, 15 bp, Homo sapiens
gaaagccgacagtcc

SEQ ID NO: 1597890 - DNA, 15 bp, Homo sapiens
ggaaagccgacagtc

SEQ ID NO: 1597891 - DNA, 15 bp, Homo sapiens
tggaaagccgacagt

SEQ ID NO: 1597892 - DNA, 15 bp, Homo sapiens
ctggaaagccgacag

SEQ ID NO: 1597893 - DNA, 15 bp, Homo sapiens
tctggaaagccgaca

SEQ ID NO: 1597894 - DNA, 15 bp, Homo sapiens
ttctggaaagccgac

SEQ ID NO: 1597895 - DNA, 15 bp, Homo sapiens
cttctggaaagccga

SEQ ID NO: 1597896 - DNA, 15 bp, Homo sapiens
gcttctggaaagccg

SEQ ID NO: 1597897 - DNA, 15 bp, Homo sapiens
ggcttctggaaagcc

SEQ ID NO: 1597898 - DNA, 15 bp, Homo sapiens
cggcttctggaaagc

SEQ ID NO: 1597899 - DNA, 15 bp, Homo sapiens
tcggcttctggaaag

SEQ ID NO: 1597900 - DNA, 15 bp, Homo sapiens
gtcggcttctggaaa

SEQ ID NO: 1597901 - DNA, 15 bp, Homo sapiens
cgtcggcttctggaa

SEQ ID NO: 1597902 - DNA, 15 bp, Homo sapiens
ccgtcggcttctgga

SEQ ID NO: 1597903 - DNA, 15 bp, Homo sapiens
accgtcggcttctgg

SEQ ID NO: 1597904 - DNA, 15 bp, Homo sapiens
caccgtcggcttctg

SEQ ID NO: 1597905 - DNA, 15 bp, Homo sapiens
gcaccgtcggcttct

SEQ ID NO: 1597906 - DNA, 15 bp, Homo sapiens
agcaccgtcggcttc

SEQ ID NO: 1597907 - DNA, 15 bp, Homo sapiens
cagcaccgtcggctt

SEQ ID NO: 1597908 - DNA, 15 bp, Homo sapiens
acagcaccgtcggct

SEQ ID NO: 1597909 - DNA, 15 bp, Homo sapiens
tacagcaccgtcggc

SEQ ID NO: 1597910 - DNA, 15 bp, Homo sapiens
ctacagcaccgtcgg

SEQ ID NO: 1597911 - DNA, 15 bp, Homo sapiens
cctacagcaccgtcg

SEQ ID NO: 1597912 - DNA, 15 bp, Homo sapiens
ccctacagcaccgtc

SEQ ID NO: 1597913 - DNA, 15 bp, Homo sapiens
cccctacagcaccgt

SEQ ID NO: 1597914 - DNA, 15 bp, Homo sapiens
gcccctacagcaccg

SEQ ID NO: 1597915 - DNA, 15 bp, Homo sapiens
cgcccctacagcacc

SEQ ID NO: 1597916 - DNA, 15 bp, Homo sapiens
ccgcccctacagcac

SEQ ID NO: 1597917 - DNA, 15 bp, Homo sapiens
tccgcccctacagca

SEQ ID NO: 1597918 - DNA, 15 bp, Homo sapiens
ctccgcccctacagc

SEQ ID NO: 1597919 - DNA, 15 bp, Homo sapiens
cctccgcccctacag

SEQ ID NO: 1597920 - DNA, 15 bp, Homo sapiens
ccctccgcccctaca

SEQ ID NO: 1597921 - DNA, 15 bp, Homo sapiens
accctccgcccctac

SEQ ID NO: 1597922 - DNA, 15 bp, Homo sapiens
caccctccgccccta

SEQ ID NO: 1597923 - DNA, 15 bp, Homo sapiens
acaccctccgcccct

SEQ ID NO: 1597924 - DNA, 15 bp, Homo sapiens
gacaccctccgcccc

SEQ ID NO: 1597925 - DNA, 15 bp, Homo sapiens
ggacaccctccgccc

SEQ ID NO: 1597926 - DNA, 15 bp, Homo sapiens
gggacaccctccgcc

SEQ ID NO: 1597927 - DNA, 15 bp, Homo sapiens
ggggacaccctccgc

SEQ ID NO: 1597928 - DNA, 15 bp, Homo sapiens
tggggacaccctccg

SEQ ID NO: 1597929 - DNA, 15 bp, Homo sapiens
ctggggacaccctcc

SEQ ID NO: 1597930 - DNA, 15 bp, Homo sapiens
cctggggacaccctc

SEQ ID NO: 1597931 - DNA, 15 bp, Homo sapiens
acctggggacaccct

SEQ ID NO: 1597932 - DNA, 15 bp, Homo sapiens
aacctggggacaccc

SEQ ID NO: 1597933 - DNA, 15 bp, Homo sapiens
caacctggggacacc

SEQ ID NO: 1597934 - DNA, 15 bp, Homo sapiens
gcaacctggggacac

SEQ ID NO: 1597935 - DNA, 15 bp, Homo sapiens
cgcaacctggggaca

SEQ ID NO: 1597936 - DNA, 15 bp, Homo sapiens
ccgcaacctggggac

SEQ ID NO: 1597937 - DNA, 15 bp, Homo sapiens
tccgcaacctgggga

SEQ ID NO: 1597938 - DNA, 15 bp, Homo sapiens
ttccgcaacctgggg

SEQ ID NO: 1597939 - DNA, 15 bp, Homo sapiens
gttccgcaacctggg

SEQ ID NO: 1597940 - DNA, 15 bp, Homo sapiens
ggttccgcaacctgg

SEQ ID NO: 1597941 - DNA, 15 bp, Homo sapiens
gggttccgcaacctg

SEQ ID NO: 1597942 - DNA, 15 bp, Homo sapiens
agggttccgcaacct

SEQ ID NO: 1597943 - DNA, 15 bp, Homo sapiens
gagggttccgcaacc

SEQ ID NO: 1597944 - DNA, 15 bp, Homo sapiens
agagggttccgcaac

SEQ ID NO: 1597945 - DNA, 15 bp, Homo sapiens
aagagggttccgcaa

SEQ ID NO: 1597946 - DNA, 15 bp, Homo sapiens
caagagggttccgca

SEQ ID NO: 1597947 - DNA, 15 bp, Homo sapiens
gcaagagggttccgc

SEQ ID NO: 1597948 - DNA, 15 bp, Homo sapiens
tgcaagagggttccg

SEQ ID NO: 1597949 - DNA, 15 bp, Homo sapiens
gtgcaagagggttcc

SEQ ID NO: 1597950 - DNA, 15 bp, Homo sapiens
agtgcaagagggttc

SEQ ID NO: 1597951 - DNA, 15 bp, Homo sapiens
cagtgcaagagggtt

SEQ ID NO: 1597952 - DNA, 15 bp, Homo sapiens
gcagtgcaagagggt

SEQ ID NO: 1597953 - DNA, 15 bp, Homo sapiens
agcagtgcaagaggg

SEQ ID NO: 1597954 - DNA, 15 bp, Homo sapiens
gagcagtgcaagagg

SEQ ID NO: 1597955 - DNA, 15 bp, Homo sapiens
ggagcagtgcaagag

SEQ ID NO: 1597956 - DNA, 15 bp, Homo sapiens
gggagcagtgcaaga

SEQ ID NO: 1597957 - DNA, 15 bp, Homo sapiens
tgggagcagtgcaag

SEQ ID NO: 1597958 - DNA, 15 bp, Homo sapiens
ctgggagcagtgcaa

SEQ ID NO: 1597959 - DNA, 15 bp, Homo sapiens
gctgggagcagtgca

SEQ ID NO: 1597960 - DNA, 15 bp, Homo sapiens
cgctgggagcagtgc

SEQ ID NO: 1597961 - DNA, 15 bp, Homo sapiens
gcgctgggagcagtg

SEQ ID NO: 1597962 - DNA, 15 bp, Homo sapiens
cgcgctgggagcagt

SEQ ID NO: 1597963 - DNA, 15 bp, Homo sapiens
gcgcgctgggagcag

SEQ ID NO: 1597964 - DNA, 15 bp, Homo sapiens
tgcgcgctgggagca

SEQ ID NO: 1597965 - DNA, 15 bp, Homo sapiens
gtgcgcgctgggagc

SEQ ID NO: 1597966 - DNA, 15 bp, Homo sapiens
ggtgcgcgctgggag

SEQ ID NO: 1597967 - DNA, 15 bp, Homo sapiens
aggtgcgcgctggga

SEQ ID NO: 1597968 - DNA, 15 bp, Homo sapiens
taggtgcgcgctggg

SEQ ID NO: 1597969 - DNA, 15 bp, Homo sapiens
ataggtgcgcgctgg

SEQ ID NO: 1597970 - DNA, 15 bp, Homo sapiens
aataggtgcgcgctg

SEQ ID NO: 1597971 - DNA, 15 bp, Homo sapiens
aaataggtgcgcgct

SEQ ID NO: 1597972 - DNA, 15 bp, Homo sapiens
gaaataggtgcgcgc

SEQ ID NO: 1597973 - DNA, 15 bp, Homo sapiens
ggaaataggtgcgcg

SEQ ID NO: 1597974 - DNA, 15 bp, Homo sapiens
gggaaataggtgcgc

SEQ ID NO: 1597975 - DNA, 15 bp, Homo sapiens
agggaaataggtgcg

SEQ ID NO: 1597976 - DNA, 15 bp, Homo sapiens
tagggaaataggtgc

SEQ ID NO: 1597977 - DNA, 15 bp, Homo sapiens
ttagggaaataggtg

SEQ ID NO: 1597978 - DNA, 15 bp, Homo sapiens
attagggaaataggt

SEQ ID NO: 1597979 - DNA, 15 bp, Homo sapiens
cattagggaaatagg

SEQ ID NO: 1597980 - DNA, 15 bp, Homo sapiens
tcattagggaaatag

SEQ ID NO: 1597981 - DNA, 15 bp, Homo sapiens
ttcattagggaaata

SEQ ID NO: 1597982 - DNA, 15 bp, Homo sapiens
tttcattagggaaat

SEQ ID NO: 1597983 - DNA, 15 bp, Homo sapiens
gtttcattagggaaa

SEQ ID NO: 1597984 - DNA, 15 bp, Homo sapiens
cgtttcattagggaa

SEQ ID NO: 1597985 - DNA, 15 bp, Homo sapiens
gcgtttcattaggga

SEQ ID NO: 1597986 - DNA, 15 bp, Homo sapiens
agcgtttcattaggg

SEQ ID NO: 1597987 - DNA, 15 bp, Homo sapiens
aagcgtttcattagg

SEQ ID NO: 1597988 - DNA, 15 bp, Homo sapiens
gaagcgtttcattag

SEQ ID NO: 1597989 - DNA, 15 bp, Homo sapiens
tgaagcgtttcatta

SEQ ID NO: 1597990 - DNA, 15 bp, Homo sapiens
ctgaagcgtttcatt

SEQ ID NO: 1597991 - DNA, 15 bp, Homo sapiens
tctgaagcgtttcat

SEQ ID NO: 1597992 - DNA, 15 bp, Homo sapiens
atctgaagcgtttca

SEQ ID NO: 1597993 - DNA, 15 bp, Homo sapiens
aatctgaagcgtttc

SEQ ID NO: 1597994 - DNA, 15 bp, Homo sapiens
caatctgaagcgttt

SEQ ID NO: 1597995 - DNA, 15 bp, Homo sapiens
gcaatctgaagcgtt

SEQ ID NO: 1597996 - DNA, 15 bp, Homo sapiens
cgcaatctgaagcgt

SEQ ID NO: 1597997 - DNA, 15 bp, Homo sapiens
acgcaatctgaagcg

SEQ ID NO: 1597998 - DNA, 15 bp, Homo sapiens
aacgcaatctgaagc

SEQ ID NO: 1597999 - DNA, 15 bp, Homo sapiens
gaacgcaatctgaag

SEQ ID NO: 1598000 - DNA, 15 bp, Homo sapiens
agaacgcaatctgaa

SEQ ID NO: 1598001 - DNA, 15 bp, Homo sapiens
tagaacgcaatctga

SEQ ID NO: 1598002 - DNA, 15 bp, Homo sapiens
ctagaacgcaatctg

SEQ ID NO: 1598003 - DNA, 15 bp, Homo sapiens
cctagaacgcaatct

SEQ ID NO: 1598004 - DNA, 15 bp, Homo sapiens
acctagaacgcaatc

SEQ ID NO: 1598005 - DNA, 15 bp, Homo sapiens
gacctagaacgcaat

SEQ ID NO: 1598006 - DNA, 15 bp, Homo sapiens
agacctagaacgcaa

SEQ ID NO: 1598007 - DNA, 15 bp, Homo sapiens
gagacctagaacgca

SEQ ID NO: 1598008 - DNA, 15 bp, Homo sapiens
agagacctagaacgc

SEQ ID NO: 1598009 - DNA, 15 bp, Homo sapiens
aagagacctagaacg

SEQ ID NO: 1598010 - DNA, 15 bp, Homo sapiens
gaagagacctagaac

SEQ ID NO: 1598011 - DNA, 15 bp, Homo sapiens
ggaagagacctagaa

SEQ ID NO: 1598012 - DNA, 15 bp, Homo sapiens
gggaagagacctaga

SEQ ID NO: 1598013 - DNA, 15 bp, Homo sapiens
cgggaagagacctag

SEQ ID NO: 1598014 - DNA, 15 bp, Homo sapiens
gcgggaagagaccta

SEQ ID NO: 1598015 - DNA, 15 bp, Homo sapiens
tgcgggaagagacct

SEQ ID NO: 1598016 - DNA, 15 bp, Homo sapiens
ctgcgggaagagacc

SEQ ID NO: 1598017 - DNA, 15 bp, Homo sapiens
gctgcgggaagagac

SEQ ID NO: 1598018 - DNA, 15 bp, Homo sapiens
agctgcgggaagaga

SEQ ID NO: 1598019 - DNA, 15 bp, Homo sapiens
cagctgcgggaagag

SEQ ID NO: 1598020 - DNA, 15 bp, Homo sapiens
gcagctgcgggaaga

SEQ ID NO: 1598021 - DNA, 15 bp, Homo sapiens
cgcagctgcgggaag

SEQ ID NO: 1598022 - DNA, 15 bp, Homo sapiens
tcgcagctgcgggaa

SEQ ID NO: 1598023 - DNA, 15 bp, Homo sapiens
gtcgcagctgcggga

SEQ ID NO: 1598024 - DNA, 15 bp, Homo sapiens
tgtcgcagctgcggg

SEQ ID NO: 1598025 - DNA, 15 bp, Homo sapiens
ttgtcgcagctgcgg

SEQ ID NO: 1598026 - DNA, 15 bp, Homo sapiens
attgtcgcagctgcg

SEQ ID NO: 1598027 - DNA, 15 bp, Homo sapiens
aattgtcgcagctgc

SEQ ID NO: 1598028 - DNA, 15 bp, Homo sapiens
gaattgtcgcagctg

SEQ ID NO: 1598029 - DNA, 15 bp, Homo sapiens
ggaattgtcgcagct

SEQ ID NO: 1598030 - DNA, 15 bp, Homo sapiens
gggaattgtcgcagc

SEQ ID NO: 1598031 - DNA, 15 bp, Homo sapiens
ggggaattgtcgcag

SEQ ID NO: 1598032 - DNA, 15 bp, Homo sapiens
gggggaattgtcgca

SEQ ID NO: 1598033 - DNA, 15 bp, Homo sapiens
tgggggaattgtcgc

SEQ ID NO: 1598034 - DNA, 15 bp, Homo sapiens
ctgggggaattgtcg

SEQ ID NO: 1598035 - DNA, 15 bp, Homo sapiens
gctgggggaattgtc

SEQ ID NO: 1598036 - DNA, 15 bp, Homo sapiens
ggctgggggaattgt

SEQ ID NO: 1598037 - DNA, 15 bp, Homo sapiens
cggctgggggaattg

SEQ ID NO: 1598038 - DNA, 15 bp, Homo sapiens
ccggctgggggaatt

SEQ ID NO: 1598039 - DNA, 15 bp, Homo sapiens
cccggctgggggaat

SEQ ID NO: 1598040 - DNA, 15 bp, Homo sapiens
tcccggctgggggaa

SEQ ID NO: 1598041 - DNA, 15 bp, Homo sapiens
ctcccggctggggga

SEQ ID NO: 1598042 - DNA, 15 bp, Homo sapiens
gctcccggctggggg

SEQ ID NO: 1598043 - DNA, 15 bp, Homo sapiens
cgctcccggctgggg

SEQ ID NO: 1598044 - DNA, 15 bp, Homo sapiens
ccgctcccggctggg

SEQ ID NO: 1598045 - DNA, 15 bp, Homo sapiens
cccgctcccggctgg

SEQ ID NO: 1598046 - DNA, 15 bp, Homo sapiens
tcccgctcccggctg

SEQ ID NO: 1598047 - DNA, 15 bp, Homo sapiens
ctcccgctcccggct

SEQ ID NO: 1598048 - DNA, 15 bp, Homo sapiens
gctcccgctcccggc

SEQ ID NO: 1598049 - DNA, 15 bp, Homo sapiens
cgctcccgctcccgg

SEQ ID NO: 1598050 - DNA, 15 bp, Homo sapiens
ccgctcccgctcccg

SEQ ID NO: 1598051 - DNA, 15 bp, Homo sapiens
tccgctcccgctccc

SEQ ID NO: 1598052 - DNA, 15 bp, Homo sapiens
atccgctcccgctcc

SEQ ID NO: 1598053 - DNA, 15 bp, Homo sapiens
catccgctcccgctc

SEQ ID NO: 1598054 - DNA, 15 bp, Homo sapiens
ccatccgctcccgct

SEQ ID NO: 1598055 - DNA, 15 bp, Homo sapiens
tccatccgctcccgc

SEQ ID NO: 1598056 - DNA, 15 bp, Homo sapiens
ctccatccgctcccg

SEQ ID NO: 1598057 - DNA, 15 bp, Homo sapiens
gctccatccgctccc

SEQ ID NO: 1598058 - DNA, 15 bp, Homo sapiens
ggctccatccgctcc

SEQ ID NO: 1598059 - DNA, 15 bp, Homo sapiens
tggctccatccgctc

SEQ ID NO: 1598060 - DNA, 15 bp, Homo sapiens
ctggctccatccgct

SEQ ID NO: 1598061 - DNA, 15 bp, Homo sapiens
gctggctccatccgc

SEQ ID NO: 1598062 - DNA, 15 bp, Homo sapiens
cgctggctccatccg

SEQ ID NO: 1598063 - DNA, 15 bp, Homo sapiens
acgctggctccatcc

SEQ ID NO: 1598064 - DNA, 15 bp, Homo sapiens
tacgctggctccatc

SEQ ID NO: 1598065 - DNA, 15 bp, Homo sapiens
ttacgctggctccat

SEQ ID NO: 1598066 - DNA, 15 bp, Homo sapiens
attacgctggctcca

SEQ ID NO: 1598067 - DNA, 15 bp, Homo sapiens
aattacgctggctcc

SEQ ID NO: 1598068 - DNA, 15 bp, Homo sapiens
caattacgctggctc

SEQ ID NO: 1598069 - DNA, 15 bp, Homo sapiens
tcaattacgctggct

SEQ ID NO: 1598070 - DNA, 15 bp, Homo sapiens
atcaattacgctggc

SEQ ID NO: 1598071 - DNA, 15 bp, Homo sapiens
catcaattacgctgg

SEQ ID NO: 1598072 - DNA, 15 bp, Homo sapiens
ccatcaattacgctg

SEQ ID NO: 1598073 - DNA, 15 bp, Homo sapiens
gccatcaattacgct

SEQ ID NO: 1598074 - DNA, 15 bp, Homo sapiens
tgccatcaattacgc

SEQ ID NO: 1598075 - DNA, 15 bp, Homo sapiens
ttgccatcaattacg

SEQ ID NO: 1598076 - DNA, 15 bp, Homo sapiens
cttgccatcaattac

SEQ ID NO: 1598077 - DNA, 15 bp, Homo sapiens
tcttgccatcaatta

SEQ ID NO: 1598078 - DNA, 15 bp, Homo sapiens
ttcttgccatcaatt

SEQ ID NO: 1598079 - DNA, 15 bp, Homo sapiens
tttcttgccatcaat

SEQ ID NO: 1598080 - DNA, 15 bp, Homo sapiens
ctttcttgccatcaa

SEQ ID NO: 1598081 - DNA, 15 bp, Homo sapiens
tctttcttgccatca

SEQ ID NO: 1598082 - DNA, 15 bp, Homo sapiens
ctctttcttgccatc

SEQ ID NO: 1598083 - DNA, 15 bp, Homo sapiens
cctctttcttgccat

SEQ ID NO: 1598084 - DNA, 15 bp, Homo sapiens
gcctctttcttgcca

SEQ ID NO: 1598085 - DNA, 15 bp, Homo sapiens
agcctctttcttgcc

SEQ ID NO: 1598086 - DNA, 15 bp, Homo sapiens
cagcctctttcttgc

SEQ ID NO: 1598087 - DNA, 15 bp, Homo sapiens
tcagcctctttcttg

SEQ ID NO: 1598088 - DNA, 15 bp, Homo sapiens
ctcagcctctttctt

SEQ ID NO: 1598089 - DNA, 15 bp, Homo sapiens
cctcagcctctttct

SEQ ID NO: 1598090 - DNA, 15 bp, Homo sapiens
acctcagcctctttc

SEQ ID NO: 1598091 - DNA, 15 bp, Homo sapiens
gacctcagcctcttt

SEQ ID NO: 1598092 - DNA, 15 bp, Homo sapiens
ggacctcagcctctt

SEQ ID NO: 1598093 - DNA, 15 bp, Homo sapiens
aggacctcagcctct

SEQ ID NO: 1598094 - DNA, 15 bp, Homo sapiens
caggacctcagcctc

SEQ ID NO: 1598095 - DNA, 15 bp, Homo sapiens
acaggacctcagcct

SEQ ID NO: 1598096 - DNA, 15 bp, Homo sapiens
aacaggacctcagcc

SEQ ID NO: 1598097 - DNA, 15 bp, Homo sapiens
aaacaggacctcagc

SEQ ID NO: 1598098 - DNA, 15 bp, Homo sapiens
caaacaggacctcag

SEQ ID NO: 1598099 - DNA, 15 bp, Homo sapiens
acaaacaggacctca

SEQ ID NO: 1598100 - DNA, 15 bp, Homo sapiens
gacaaacaggacctc

SEQ ID NO: 1598101 - DNA, 15 bp, Homo sapiens
agacaaacaggacct

SEQ ID NO: 1598102 - DNA, 15 bp, Homo sapiens
gagacaaacaggacc

SEQ ID NO: 1598103 - DNA, 15 bp, Homo sapiens
cgagacaaacaggac

SEQ ID NO: 1598104 - DNA, 15 bp, Homo sapiens
ccgagacaaacagga

SEQ ID NO: 1598105 - DNA, 15 bp, Homo sapiens
accgagacaaacagg

SEQ ID NO: 1598106 - DNA, 15 bp, Homo sapiens
gaccgagacaaacag

SEQ ID NO: 1598107 - DNA, 15 bp, Homo sapiens
ggaccgagacaaaca

SEQ ID NO: 1598108 - DNA, 15 bp, Homo sapiens
cggaccgagacaaac

SEQ ID NO: 1598109 - DNA, 15 bp, Homo sapiens
gcggaccgagacaaa

SEQ ID NO: 1598110 - DNA, 15 bp, Homo sapiens
tgcggaccgagacaa

SEQ ID NO: 1598111 - DNA, 15 bp, Homo sapiens
ttgcggaccgagaca

SEQ ID NO: 1598112 - DNA, 15 bp, Homo sapiens
tttgcggaccgagac

SEQ ID NO: 1598113 - DNA, 15 bp, Homo sapiens
gtttgcggaccgaga

SEQ ID NO: 1598114 - DNA, 15 bp, Homo sapiens
ggtttgcggaccgag

SEQ ID NO: 1598115 - DNA, 15 bp, Homo sapiens
gggtttgcggaccga

SEQ ID NO: 1598116 - DNA, 15 bp, Homo sapiens
cgggtttgcggaccg

SEQ ID NO: 1598117 - DNA, 15 bp, Homo sapiens
tcgggtttgcggacc

SEQ ID NO: 1598118 - DNA, 15 bp, Homo sapiens
atcgggtttgcggac

SEQ ID NO: 1598119 - DNA, 15 bp, Homo sapiens
aatcgggtttgcgga

SEQ ID NO: 1598120 - DNA, 15 bp, Homo sapiens
caatcgggtttgcgg

SEQ ID NO: 1598121 - DNA, 15 bp, Homo sapiens
tcaatcgggtttgcg

SEQ ID NO: 1598122 - DNA, 15 bp, Homo sapiens
ctcaatcgggtttgc

SEQ ID NO: 1598123 - DNA, 15 bp, Homo sapiens
actcaatcgggtttg

SEQ ID NO: 1598124 - DNA, 15 bp, Homo sapiens
aactcaatcgggttt

SEQ ID NO: 1598125 - DNA, 15 bp, Homo sapiens
gaactcaatcgggtt

SEQ ID NO: 1598126 - DNA, 15 bp, Homo sapiens
tgaactcaatcgggt

SEQ ID NO: 1598127 - DNA, 15 bp, Homo sapiens
gtgaactcaatcggg

SEQ ID NO: 1598128 - DNA, 15 bp, Homo sapiens
ggtgaactcaatcgg

SEQ ID NO: 1598129 - DNA, 15 bp, Homo sapiens
aggtgaactcaatcg

SEQ ID NO: 1598130 - DNA, 15 bp, Homo sapiens
aaggtgaactcaatc

SEQ ID NO: 1598131 - DNA, 15 bp, Homo sapiens
aaaggtgaactcaat

SEQ ID NO: 1598132 - DNA, 15 bp, Homo sapiens
gaaaggtgaactcaa

SEQ ID NO: 1598133 - DNA, 15 bp, Homo sapiens
ggaaaggtgaactca

SEQ ID NO: 1598134 - DNA, 15 bp, Homo sapiens
gggaaaggtgaactc

SEQ ID NO: 1598135 - DNA, 15 bp, Homo sapiens
ggggaaaggtgaact

SEQ ID NO: 1598136 - DNA, 15 bp, Homo sapiens
cggggaaaggtgaac

SEQ ID NO: 1598137 - DNA, 15 bp, Homo sapiens
ccggggaaaggtgaa

SEQ ID NO: 1598138 - DNA, 15 bp, Homo sapiens
cccggggaaaggtga

SEQ ID NO: 1598139 - DNA, 15 bp, Homo sapiens
tcccggggaaaggtg

SEQ ID NO: 1598140 - DNA, 15 bp, Homo sapiens
gtcccggggaaaggt

SEQ ID NO: 1598141 - DNA, 15 bp, Homo sapiens
tgtcccggggaaagg

SEQ ID NO: 1598142 - DNA, 15 bp, Homo sapiens
ttgtcccggggaaag

SEQ ID NO: 1598143 - DNA, 15 bp, Homo sapiens
cttgtcccggggaaa

SEQ ID NO: 1598144 - DNA, 15 bp, Homo sapiens
acttgtcccggggaa

SEQ ID NO: 1598145 - DNA, 15 bp, Homo sapiens
tacttgtcccgggga

SEQ ID NO: 1598146 - DNA, 15 bp, Homo sapiens
ttacttgtcccgggg

SEQ ID NO: 1598147 - DNA, 15 bp, Homo sapiens
tttacttgtcccggg

SEQ ID NO: 1598148 - DNA, 15 bp, Homo sapiens
gtttacttgtcccgg

SEQ ID NO: 1598149 - DNA, 15 bp, Homo sapiens
tgtttacttgtcccg

SEQ ID NO: 1598150 - DNA, 15 bp, Homo sapiens
ctgtttacttgtccc

SEQ ID NO: 1598151 - DNA, 15 bp, Homo sapiens
tctgtttacttgtcc

SEQ ID NO: 1598152 - DNA, 15 bp, Homo sapiens
gtctgtttacttgtc

SEQ ID NO: 1598153 - DNA, 15 bp, Homo sapiens
agtctgtttacttgt

SEQ ID NO: 1598154 - DNA, 15 bp, Homo sapiens
aagtctgtttacttg

SEQ ID NO: 1598155 - DNA, 15 bp, Homo sapiens
gaagtctgtttactt

SEQ ID NO: 1598156 - DNA, 15 bp, Homo sapiens
tgaagtctgtttact

SEQ ID NO: 1598157 - DNA, 15 bp, Homo sapiens
ttgaagtctgtttac

SEQ ID NO: 1598158 - DNA, 15 bp, Homo sapiens
tttgaagtctgttta

SEQ ID NO: 1598159 - DNA, 15 bp, Homo sapiens
gtttgaagtctgttt

SEQ ID NO: 1598160 - DNA, 15 bp, Homo sapiens
agtttgaagtctgtt

SEQ ID NO: 1598161 - DNA, 15 bp, Homo sapiens
tagtttgaagtctgt

SEQ ID NO: 1598162 - DNA, 15 bp, Homo sapiens
atagtttgaagtctg

SEQ ID NO: 1598163 - DNA, 15 bp, Homo sapiens
catagtttgaagtct

SEQ ID NO: 1598164 - DNA, 15 bp, Homo sapiens
gcatagtttgaagtc

SEQ ID NO: 1598165 - DNA, 15 bp, Homo sapiens
ggcatagtttgaagt

SEQ ID NO: 1598166 - DNA, 15 bp, Homo sapiens
cggcatagtttgaag

SEQ ID NO: 1598167 - DNA, 15 bp, Homo sapiens
tcggcatagtttgaa

SEQ ID NO: 1598168 - DNA, 15 bp, Homo sapiens
gtcggcatagtttga

SEQ ID NO: 1598169 - DNA, 15 bp, Homo sapiens
agtcggcatagtttg

SEQ ID NO: 1598170 - DNA, 15 bp, Homo sapiens
cagtcggcatagttt

SEQ ID NO: 1598171 - DNA, 15 bp, Homo sapiens
acagtcggcatagtt

SEQ ID NO: 1598172 - DNA, 15 bp, Homo sapiens
tacagtcggcatagt

SEQ ID NO: 1598173 - DNA, 15 bp, Homo sapiens
ctacagtcggcatag

SEQ ID NO: 1598174 - DNA, 15 bp, Homo sapiens
tctacagtcggcata

SEQ ID NO: 1598175 - DNA, 15 bp, Homo sapiens
gtctacagtcggcat

SEQ ID NO: 1598176 - DNA, 15 bp, Homo sapiens
cgtctacagtcggca

SEQ ID NO: 1598177 - DNA, 15 bp, Homo sapiens
ccgtctacagtcggc

SEQ ID NO: 1598178 - DNA, 15 bp, Homo sapiens
gccgtctacagtcgg

SEQ ID NO: 1598179 - DNA, 15 bp, Homo sapiens
cgccgtctacagtcg

SEQ ID NO: 1598180 - DNA, 15 bp, Homo sapiens
tcgccgtctacagtc

SEQ ID NO: 1598181 - DNA, 15 bp, Homo sapiens
ctcgccgtctacagt

SEQ ID NO: 1598182 - DNA, 15 bp, Homo sapiens
cctcgccgtctacag

SEQ ID NO: 1598183 - DNA, 15 bp, Homo sapiens
tcctcgccgtctaca

SEQ ID NO: 1598184 - DNA, 15 bp, Homo sapiens
ctcctcgccgtctac

SEQ ID NO: 1598185 - DNA, 15 bp, Homo sapiens
tctcctcgccgtcta

SEQ ID NO: 1598186 - DNA, 15 bp, Homo sapiens
ttctcctcgccgtct

SEQ ID NO: 1598187 - DNA, 15 bp, Homo sapiens
cttctcctcgccgtc

SEQ ID NO: 1598188 - DNA, 15 bp, Homo sapiens
tcttctcctcgccgt

SEQ ID NO: 1598189 - DNA, 15 bp, Homo sapiens
ttcttctcctcgccg

SEQ ID NO: 1598190 - DNA, 15 bp, Homo sapiens
attcttctcctcgcc

SEQ ID NO: 1598191 - DNA, 15 bp, Homo sapiens
cattcttctcctcgc

SEQ ID NO: 1598192 - DNA, 15 bp, Homo sapiens
acattcttctcctcg

SEQ ID NO: 1598193 - DNA, 15 bp, Homo sapiens
tacattcttctcctc

SEQ ID NO: 1598194 - DNA, 15 bp, Homo sapiens
atacattcttctcct

SEQ ID NO: 1598195 - DNA, 15 bp, Homo sapiens
aatacattcttctcc

SEQ ID NO: 1598196 - DNA, 15 bp, Homo sapiens
aaatacattcttctc

SEQ ID NO: 1598197 - DNA, 15 bp, Homo sapiens
caaatacattcttct

SEQ ID NO: 1598198 - DNA, 15 bp, Homo sapiens
tcaaatacattcttc

SEQ ID NO: 1598199 - DNA, 15 bp, Homo sapiens
atcaaatacattctt

SEQ ID NO: 1598200 - DNA, 15 bp, Homo sapiens
catcaaatacattct

SEQ ID NO: 1598201 - DNA, 15 bp, Homo sapiens
ccatcaaatacattc

SEQ ID NO: 1598202 - DNA, 15 bp, Homo sapiens
tccatcaaatacatt

SEQ ID NO: 1598203 - DNA, 15 bp, Homo sapiens
ttccatcaaatacat

SEQ ID NO: 1598204 - DNA, 15 bp, Homo sapiens
tttccatcaaataca

SEQ ID NO: 1598205 - DNA, 15 bp, Homo sapiens
gtttccatcaaatac

SEQ ID NO: 1598206 - DNA, 15 bp, Homo sapiens
agtttccatcaaata

SEQ ID NO: 1598207 - DNA, 15 bp, Homo sapiens
gagtttccatcaaat

SEQ ID NO: 1598208 - DNA, 15 bp, Homo sapiens
ggagtttccatcaaa

SEQ ID NO: 1598209 - DNA, 15 bp, Homo sapiens
tggagtttccatcaa

SEQ ID NO: 1598210 - DNA, 15 bp, Homo sapiens
atggagtttccatca

SEQ ID NO: 1598211 - DNA, 15 bp, Homo sapiens
gatggagtttccatc

SEQ ID NO: 1598212 - DNA, 15 bp, Homo sapiens
ggatggagtttccat

SEQ ID NO: 1598213 - DNA, 15 bp, Homo sapiens
tggatggagtttcca

SEQ ID NO: 1598214 - DNA, 15 bp, Homo sapiens
ttggatggagtttcc

SEQ ID NO: 1598215 - DNA, 15 bp, Homo sapiens
attggatggagtttc

SEQ ID NO: 1598216 - DNA, 15 bp, Homo sapiens
cattggatggagttt

SEQ ID NO: 1598217 - DNA, 15 bp, Homo sapiens
gcattggatggagtt

SEQ ID NO: 1598218 - DNA, 15 bp, Homo sapiens
tgcattggatggagt

SEQ ID NO: 1598219 - DNA, 15 bp, Homo sapiens
ttgcattggatggag

SEQ ID NO: 1598220 - DNA, 15 bp, Homo sapiens
tttgcattggatgga

SEQ ID NO: 1598221 - DNA, 15 bp, Homo sapiens
ctttgcattggatgg

SEQ ID NO: 1598222 - DNA, 15 bp, Homo sapiens
tctttgcattggatg

SEQ ID NO: 1598223 - DNA, 15 bp, Homo sapiens
atctttgcattggat

SEQ ID NO: 1598224 - DNA, 15 bp, Homo sapiens
catctttgcattgga

SEQ ID NO: 1598225 - DNA, 15 bp, Homo sapiens
tcatctttgcattgg

SEQ ID NO: 1598226 - DNA, 15 bp, Homo sapiens
atcatctttgcattg

SEQ ID NO: 1598227 - DNA, 15 bp, Homo sapiens
tatcatctttgcatt

SEQ ID NO: 1598228 - DNA, 15 bp, Homo sapiens
ttatcatctttgcat

SEQ ID NO: 1598229 - DNA, 15 bp, Homo sapiens
cttatcatctttgca

SEQ ID NO: 1598230 - DNA, 15 bp, Homo sapiens
ccttatcatctttgc

SEQ ID NO: 1598231 - DNA, 15 bp, Homo sapiens
gccttatcatctttg

SEQ ID NO: 1598232 - DNA, 15 bp, Homo sapiens
ggccttatcatcttt

SEQ ID NO: 1598233 - DNA, 15 bp, Homo sapiens
cggccttatcatctt

SEQ ID NO: 1598234 - DNA, 15 bp, Homo sapiens
tcggccttatcatct

SEQ ID NO: 1598235 - DNA, 15 bp, Homo sapiens
ctcggccttatcatc

SEQ ID NO: 1598236 - DNA, 15 bp, Homo sapiens
cctcggccttatcat

SEQ ID NO: 1598237 - DNA, 15 bp, Homo sapiens
ccctcggccttatca

SEQ ID NO: 1598238 - DNA, 15 bp, Homo sapiens
accctcggccttatc

SEQ ID NO: 1598239 - DNA, 15 bp, Homo sapiens
caccctcggccttat

SEQ ID NO: 1598240 - DNA, 15 bp, Homo sapiens
gcaccctcggcctta

SEQ ID NO: 1598241 - DNA, 15 bp, Homo sapiens
ggcaccctcggcctt

SEQ ID NO: 1598242 - DNA, 15 bp, Homo sapiens
tggcaccctcggcct

SEQ ID NO: 1598243 - DNA, 15 bp, Homo sapiens
gtggcaccctcggcc

SEQ ID NO: 1598244 - DNA, 15 bp, Homo sapiens
tgtggcaccctcggc

SEQ ID NO: 1598245 - DNA, 15 bp, Homo sapiens
ctgtggcaccctcgg

SEQ ID NO: 1598246 - DNA, 15 bp, Homo sapiens
gctgtggcaccctcg

SEQ ID NO: 1598247 - DNA, 15 bp, Homo sapiens
ggctgtggcaccctc

SEQ ID NO: 1598248 - DNA, 15 bp, Homo sapiens
aggctgtggcaccct

SEQ ID NO: 1598249 - DNA, 15 bp, Homo sapiens
taggctgtggcaccc

SEQ ID NO: 1598250 - DNA, 15 bp, Homo sapiens
gtaggctgtggcacc

SEQ ID NO: 1598251 - DNA, 15 bp, Homo sapiens
agtaggctgtggcac

SEQ ID NO: 1598252 - DNA, 15 bp, Homo sapiens
tagtaggctgtggca

SEQ ID NO: 1598253 - DNA, 15 bp, Homo sapiens
ttagtaggctgtggc

SEQ ID NO: 1598254 - DNA, 15 bp, Homo sapiens
tttagtaggctgtgg

SEQ ID NO: 1598255 - DNA, 15 bp, Homo sapiens
ttttagtaggctgtg

SEQ ID NO: 1598256 - DNA, 15 bp, Homo sapiens
attttagtaggctgt

SEQ ID NO: 1598257 - DNA, 15 bp, Homo sapiens
aattttagtaggctg

SEQ ID NO: 1598258 - DNA, 15 bp, Homo sapiens
caattttagtaggct

SEQ ID NO: 1598259 - DNA, 15 bp, Homo sapiens
acaattttagtaggc

SEQ ID NO: 1598260 - DNA, 15 bp, Homo sapiens
cacaattttagtagg

SEQ ID NO: 1598261 - DNA, 15 bp, Homo sapiens
tcacaattttagtag

SEQ ID NO: 1598262 - DNA, 15 bp, Homo sapiens
gtcacaattttagta

SEQ ID NO: 1598263 - DNA, 15 bp, Homo sapiens
agtcacaattttagt

SEQ ID NO: 1598264 - DNA, 15 bp, Homo sapiens
gagtcacaattttag

SEQ ID NO: 1598265 - DNA, 15 bp, Homo sapiens
ggagtcacaatttta

SEQ ID NO: 1598266 - DNA, 15 bp, Homo sapiens
gggagtcacaatttt

SEQ ID NO: 1598267 - DNA, 15 bp, Homo sapiens
tgggagtcacaattt

SEQ ID NO: 1598268 - DNA, 15 bp, Homo sapiens
ttgggagtcacaatt

SEQ ID NO: 1598269 - DNA, 15 bp, Homo sapiens
tttgggagtcacaat

SEQ ID NO: 1598270 - DNA, 15 bp, Homo sapiens
ctttgggagtcacaa

SEQ ID NO: 1598271 - DNA, 15 bp, Homo sapiens
cctttgggagtcaca

SEQ ID NO: 1598272 - DNA, 15 bp, Homo sapiens
gcctttgggagtcac

SEQ ID NO: 1598273 - DNA, 15 bp, Homo sapiens
agcctttgggagtca

SEQ ID NO: 1598274 - DNA, 15 bp, Homo sapiens
aagcctttgggagtc

SEQ ID NO: 1598275 - DNA, 15 bp, Homo sapiens
gaagcctttgggagt

SEQ ID NO: 1598276 - DNA, 15 bp, Homo sapiens
ggaagcctttgggag

SEQ ID NO: 1598277 - DNA, 15 bp, Homo sapiens
aggaagcctttggga

SEQ ID NO: 1598278 - DNA, 15 bp, Homo sapiens
gaggaagcctttggg

SEQ ID NO: 1598279 - DNA, 15 bp, Homo sapiens
ggaggaagcctttgg

SEQ ID NO: 1598280 - DNA, 15 bp, Homo sapiens
gggaggaagcctttg

SEQ ID NO: 1598281 - DNA, 15 bp, Homo sapiens
tgggaggaagccttt

SEQ ID NO: 1598282 - DNA, 15 bp, Homo sapiens
ctgggaggaagcctt

SEQ ID NO: 1598283 - DNA, 15 bp, Homo sapiens
gctgggaggaagcct

SEQ ID NO: 1598284 - DNA, 15 bp, Homo sapiens
agctgggaggaagcc

SEQ ID NO: 1598285 - DNA, 15 bp, Homo sapiens
tagctgggaggaagc

SEQ ID NO: 1598286 - DNA, 15 bp, Homo sapiens
ctagctgggaggaag

SEQ ID NO: 1598287 - DNA, 15 bp, Homo sapiens
tctagctgggaggaa

SEQ ID NO: 1598288 - DNA, 15 bp, Homo sapiens
ttctagctgggagga

SEQ ID NO: 1598289 - DNA, 15 bp, Homo sapiens
attctagctgggagg

SEQ ID NO: 1598290 - DNA, 15 bp, Homo sapiens
cattctagctgggag

SEQ ID NO: 1598291 - DNA, 15 bp, Homo sapiens
ccattctagctggga

SEQ ID NO: 1598292 - DNA, 15 bp, Homo sapiens
cccattctagctggg

SEQ ID NO: 1598293 - DNA, 15 bp, Homo sapiens
ccccattctagctgg

SEQ ID NO: 1598294 - DNA, 15 bp, Homo sapiens
accccattctagctg

SEQ ID NO: 1598295 - DNA, 15 bp, Homo sapiens
caccccattctagct

SEQ ID NO: 1598296 - DNA, 15 bp, Homo sapiens
gcaccccattctagc

SEQ ID NO: 1598297 - DNA, 15 bp, Homo sapiens
cgcaccccattctag

SEQ ID NO: 1598298 - DNA, 15 bp, Homo sapiens
ccgcaccccattcta

SEQ ID NO: 1598299 - DNA, 15 bp, Homo sapiens
cccgcaccccattct

SEQ ID NO: 1598300 - DNA, 15 bp, Homo sapiens
ccccgcaccccattc

SEQ ID NO: 1598301 - DNA, 15 bp, Homo sapiens
gccccgcaccccatt

SEQ ID NO: 1598302 - DNA, 15 bp, Homo sapiens
tgccccgcaccccat

SEQ ID NO: 1598303 - DNA, 15 bp, Homo sapiens
ctgccccgcacccca

SEQ ID NO: 1598304 - DNA, 15 bp, Homo sapiens
gctgccccgcacccc

SEQ ID NO: 1598305 - DNA, 15 bp, Homo sapiens
ggctgccccgcaccc

SEQ ID NO: 1598306 - DNA, 15 bp, Homo sapiens
cggctgccccgcacc

SEQ ID NO: 1598307 - DNA, 15 bp, Homo sapiens
gcggctgccccgcac

SEQ ID NO: 1598308 - DNA, 15 bp, Homo sapiens
ggcggctgccccgca

SEQ ID NO: 1598309 - DNA, 15 bp, Homo sapiens
tggcggctgccccgc

SEQ ID NO: 1598310 - DNA, 15 bp, Homo sapiens
ctggcggctgccccg

SEQ ID NO: 1598311 - DNA, 15 bp, Homo sapiens
tctggcggctgcccc

SEQ ID NO: 1598312 - DNA, 15 bp, Homo sapiens
ttctggcggctgccc

SEQ ID NO: 1598313 - DNA, 15 bp, Homo sapiens
gttctggcggctgcc

SEQ ID NO: 1598314 - DNA, 15 bp, Homo sapiens
ggttctggcggctgc

SEQ ID NO: 1598315 - DNA, 15 bp, Homo sapiens
tggttctggcggctg

SEQ ID NO: 1598316 - DNA, 15 bp, Homo sapiens
gtggttctggcggct

SEQ ID NO: 1598317 - DNA, 15 bp, Homo sapiens
tgtggttctggcggc

SEQ ID NO: 1598318 - DNA, 15 bp, Homo sapiens
ctgtggttctggcgg

SEQ ID NO: 1598319 - DNA, 15 bp, Homo sapiens
gctgtggttctggcg

SEQ ID NO: 1598320 - DNA, 15 bp, Homo sapiens
ggctgtggttctggc

SEQ ID NO: 1598321 - DNA, 15 bp, Homo sapiens
cggctgtggttctgg

SEQ ID NO: 1598322 - DNA, 15 bp, Homo sapiens
ccggctgtggttctg

SEQ ID NO: 1598323 - DNA, 15 bp, Homo sapiens
cccggctgtggttct

SEQ ID NO: 1598324 - DNA, 15 bp, Homo sapiens
gcccggctgtggttc

SEQ ID NO: 1598325 - DNA, 15 bp, Homo sapiens
tgcccggctgtggtt

SEQ ID NO: 1598326 - DNA, 15 bp, Homo sapiens
gtgcccggctgtggt

SEQ ID NO: 1598327 - DNA, 15 bp, Homo sapiens
ggtgcccggctgtgg

SEQ ID NO: 1598328 - DNA, 15 bp, Homo sapiens
cggtgcccggctgtg

SEQ ID NO: 1598329 - DNA, 15 bp, Homo sapiens
gcggtgcccggctgt

SEQ ID NO: 1598330 - DNA, 15 bp, Homo sapiens
ggcggtgcccggctg

SEQ ID NO: 1598331 - DNA, 15 bp, Homo sapiens
tggcggtgcccggct

SEQ ID NO: 1598332 - DNA, 15 bp, Homo sapiens
ctggcggtgcccggc

SEQ ID NO: 1598333 - DNA, 15 bp, Homo sapiens
gctggcggtgcccgg

SEQ ID NO: 1598334 - DNA, 15 bp, Homo sapiens
ggctggcggtgcccg

SEQ ID NO: 1598335 - DNA, 15 bp, Homo sapiens
tggctggcggtgccc

SEQ ID NO: 1598336 - DNA, 15 bp, Homo sapiens
ctggctggcggtgcc

SEQ ID NO: 1598337 - DNA, 15 bp, Homo sapiens
cctggctggcggtgc

SEQ ID NO: 1598338 - DNA, 15 bp, Homo sapiens
acctggctggcggtg

SEQ ID NO: 1598339 - DNA, 15 bp, Homo sapiens
gacctggctggcggt

SEQ ID NO: 1598340 - DNA, 15 bp, Homo sapiens
ggacctggctggcgg

SEQ ID NO: 1598341 - DNA, 15 bp, Homo sapiens
gggacctggctggcg

SEQ ID NO: 1598342 - DNA, 15 bp, Homo sapiens
ggggacctggctggc

SEQ ID NO: 1598343 - DNA, 15 bp, Homo sapiens
cggggacctggctgg

SEQ ID NO: 1598344 - DNA, 15 bp, Homo sapiens
gcggggacctggctg

SEQ ID NO: 1598345 - DNA, 15 bp, Homo sapiens
ggcggggacctggct

SEQ ID NO: 1598346 - DNA, 15 bp, Homo sapiens
gggcggggacctggc

SEQ ID NO: 1598347 - DNA, 15 bp, Homo sapiens
cgggcggggacctgg

SEQ ID NO: 1598348 - DNA, 15 bp, Homo sapiens
ccgggcggggacctg

SEQ ID NO: 1598349 - DNA, 15 bp, Homo sapiens
cccgggcggggacct

SEQ ID NO: 1598350 - DNA, 15 bp, Homo sapiens
gcccgggcggggacc

SEQ ID NO: 1598351 - DNA, 15 bp, Homo sapiens
agcccgggcggggac

SEQ ID NO: 1598352 - DNA, 15 bp, Homo sapiens
aagcccgggcgggga

SEQ ID NO: 1598353 - DNA, 15 bp, Homo sapiens
caagcccgggcgggg

SEQ ID NO: 1598354 - DNA, 15 bp, Homo sapiens
ccaagcccgggcggg

SEQ ID NO: 1598355 - DNA, 15 bp, Homo sapiens
cccaagcccgggcgg

SEQ ID NO: 1598356 - DNA, 15 bp, Homo sapiens
gcccaagcccgggcg

SEQ ID NO: 1598357 - DNA, 15 bp, Homo sapiens
agcccaagcccgggc

SEQ ID NO: 1598358 - DNA, 15 bp, Homo sapiens
tagcccaagcccggg

SEQ ID NO: 1598359 - DNA, 15 bp, Homo sapiens
ctagcccaagcccgg

SEQ ID NO: 1598360 - DNA, 15 bp, Homo sapiens
cctagcccaagcccg

SEQ ID NO: 1598361 - DNA, 15 bp, Homo sapiens
gcctagcccaagccc

SEQ ID NO: 1598362 - DNA, 15 bp, Homo sapiens
agcctagcccaagcc

SEQ ID NO: 1598363 - DNA, 15 bp, Homo sapiens
cagcctagcccaagc

SEQ ID NO: 1598364 - DNA, 15 bp, Homo sapiens
ccagcctagcccaag

SEQ ID NO: 1598365 - DNA, 15 bp, Homo sapiens
cccagcctagcccaa

SEQ ID NO: 1598366 - DNA, 15 bp, Homo sapiens
ccccagcctagccca

SEQ ID NO: 1598367 - DNA, 15 bp, Homo sapiens
gccccagcctagccc

SEQ ID NO: 1598368 - DNA, 15 bp, Homo sapiens
tgccccagcctagcc

SEQ ID NO: 1598369 - DNA, 15 bp, Homo sapiens
ctgccccagcctagc

SEQ ID NO: 1598370 - DNA, 15 bp, Homo sapiens
cctgccccagcctag

SEQ ID NO: 1598371 - DNA, 15 bp, Homo sapiens
acctgccccagccta

SEQ ID NO: 1598372 - DNA, 15 bp, Homo sapiens
aacctgccccagcct

SEQ ID NO: 1598373 - DNA, 15 bp, Homo sapiens
taacctgccccagcc

SEQ ID NO: 1598374 - DNA, 15 bp, Homo sapiens
ttaacctgccccagc

SEQ ID NO: 1598375 - DNA, 15 bp, Homo sapiens
cttaacctgccccag

SEQ ID NO: 1598376 - DNA, 15 bp, Homo sapiens
gcttaacctgcccca

SEQ ID NO: 1598377 - DNA, 15 bp, Homo sapiens
cgcttaacctgcccc

SEQ ID NO: 1598378 - DNA, 15 bp, Homo sapiens
tcgcttaacctgccc

SEQ ID NO: 1598379 - DNA, 15 bp, Homo sapiens
ttcgcttaacctgcc

SEQ ID NO: 1598380 - DNA, 15 bp, Homo sapiens
cttcgcttaacctgc

SEQ ID NO: 1598381 - DNA, 15 bp, Homo sapiens
gcttcgcttaacctg

SEQ ID NO: 1598382 - DNA, 15 bp, Homo sapiens
agcttcgcttaacct

SEQ ID NO: 1598383 - DNA, 15 bp, Homo sapiens
gagcttcgcttaacc

SEQ ID NO: 1598384 - DNA, 15 bp, Homo sapiens
ggagcttcgcttaac

SEQ ID NO: 1598385 - DNA, 15 bp, Homo sapiens
tggagcttcgcttaa

SEQ ID NO: 1598386 - DNA, 15 bp, Homo sapiens
ttggagcttcgctta

SEQ ID NO: 1598387 - DNA, 15 bp, Homo sapiens
attggagcttcgctt

SEQ ID NO: 1598388 - DNA, 15 bp, Homo sapiens
aattggagcttcgct

SEQ ID NO: 1598389 - DNA, 15 bp, Homo sapiens
gaattggagcttcgc

SEQ ID NO: 1598390 - DNA, 15 bp, Homo sapiens
ggaattggagcttcg

SEQ ID NO: 1598391 - DNA, 15 bp, Homo sapiens
cggaattggagcttc

SEQ ID NO: 1598392 - DNA, 15 bp, Homo sapiens
acggaattggagctt

SEQ ID NO: 1598393 - DNA, 15 bp, Homo sapiens
cacggaattggagct

SEQ ID NO: 1598394 - DNA, 15 bp, Homo sapiens
ccacggaattggagc

SEQ ID NO: 1598395 - DNA, 15 bp, Homo sapiens
cccacggaattggag

SEQ ID NO: 1598396 - DNA, 15 bp, Homo sapiens
tcccacggaattgga

SEQ ID NO: 1598397 - DNA, 15 bp, Homo sapiens
atcccacggaattgg

SEQ ID NO: 1598398 - DNA, 15 bp, Homo sapiens
gatcccacggaattg

SEQ ID NO: 1598399 - DNA, 15 bp, Homo sapiens
ggatcccacggaatt

SEQ ID NO: 1598400 - DNA, 15 bp, Homo sapiens
cggatcccacggaat

SEQ ID NO: 1598401 - DNA, 15 bp, Homo sapiens
ccggatcccacggaa

SEQ ID NO: 1598402 - DNA, 15 bp, Homo sapiens
tccggatcccacgga

SEQ ID NO: 1598403 - DNA, 15 bp, Homo sapiens
gtccggatcccacgg

SEQ ID NO: 1598404 - DNA, 15 bp, Homo sapiens
ggtccggatcccacg

SEQ ID NO: 1598405 - DNA, 15 bp, Homo sapiens
aggtccggatcccac

SEQ ID NO: 1598406 - DNA, 15 bp, Homo sapiens
taggtccggatccca

SEQ ID NO: 1598407 - DNA, 15 bp, Homo sapiens
ctaggtccggatccc

SEQ ID NO: 1598408 - DNA, 15 bp, Homo sapiens
tctaggtccggatcc

SEQ ID NO: 1598409 - DNA, 15 bp, Homo sapiens
ctctaggtccggatc

SEQ ID NO: 1598410 - DNA, 15 bp, Homo sapiens
gctctaggtccggat

SEQ ID NO: 1598411 - DNA, 15 bp, Homo sapiens
ggctctaggtccgga

SEQ ID NO: 1598412 - DNA, 15 bp, Homo sapiens
tggctctaggtccgg

SEQ ID NO: 1598413 - DNA, 15 bp, Homo sapiens
ttggctctaggtccg

SEQ ID NO: 1598414 - DNA, 15 bp, Homo sapiens
tttggctctaggtcc

SEQ ID NO: 1598415 - DNA, 15 bp, Homo sapiens
gtttggctctaggtc

SEQ ID NO: 1598416 - DNA, 15 bp, Homo sapiens
tgtttggctctaggt

SEQ ID NO: 1598417 - DNA, 15 bp, Homo sapiens
ctgtttggctctagg

SEQ ID NO: 1598418 - DNA, 15 bp, Homo sapiens
gctgtttggctctag

SEQ ID NO: 1598419 - DNA, 15 bp, Homo sapiens
tgctgtttggctcta

SEQ ID NO: 1598420 - DNA, 15 bp, Homo sapiens
ctgctgtttggctct

SEQ ID NO: 1598421 - DNA, 15 bp, Homo sapiens
gctgctgtttggctc

SEQ ID NO: 1598422 - DNA, 15 bp, Homo sapiens
agctgctgtttggct

SEQ ID NO: 1598423 - DNA, 15 bp, Homo sapiens
cagctgctgtttggc

SEQ ID NO: 1598424 - DNA, 15 bp, Homo sapiens
gcagctgctgtttgg

SEQ ID NO: 1598425 - DNA, 15 bp, Homo sapiens
tgcagctgctgtttg

SEQ ID NO: 1598426 - DNA, 15 bp, Homo sapiens
ctgcagctgctgttt

SEQ ID NO: 1598427 - DNA, 15 bp, Homo sapiens
actgcagctgctgtt

SEQ ID NO: 1598428 - DNA, 15 bp, Homo sapiens
tactgcagctgctgt

SEQ ID NO: 1598429 - DNA, 15 bp, Homo sapiens
atactgcagctgctg

SEQ ID NO: 1598430 - DNA, 15 bp, Homo sapiens
gatactgcagctgct

SEQ ID NO: 1598431 - DNA, 15 bp, Homo sapiens
ggatactgcagctgc

SEQ ID NO: 1598432 - DNA, 15 bp, Homo sapiens
tggatactgcagctg

SEQ ID NO: 1598433 - DNA, 15 bp, Homo sapiens
atggatactgcagct

SEQ ID NO: 1598434 - DNA, 15 bp, Homo sapiens
catggatactgcagc

SEQ ID NO: 1598435 - DNA, 15 bp, Homo sapiens
acatggatactgcag

SEQ ID NO: 1598436 - DNA, 15 bp, Homo sapiens
gacatggatactgca

SEQ ID NO: 1598437 - DNA, 15 bp, Homo sapiens
ggacatggatactgc

SEQ ID NO: 1598438 - DNA, 15 bp, Homo sapiens
gggacatggatactg

SEQ ID NO: 1598439 - DNA, 15 bp, Homo sapiens
ggggacatggatact

SEQ ID NO: 1598440 - DNA, 15 bp, Homo sapiens
aggggacatggatac

SEQ ID NO: 1598441 - DNA, 15 bp, Homo sapiens
caggggacatggata

SEQ ID NO: 1598442 - DNA, 15 bp, Homo sapiens
gcaggggacatggat

SEQ ID NO: 1598443 - DNA, 15 bp, Homo sapiens
ggcaggggacatgga

SEQ ID NO: 1598444 - DNA, 15 bp, Homo sapiens
gggcaggggacatgg

SEQ ID NO: 1598445 - DNA, 15 bp, Homo sapiens
cgggcaggggacatg

SEQ ID NO: 1598446 - DNA, 15 bp, Homo sapiens
ccgggcaggggacat

SEQ ID NO: 1598447 - DNA, 15 bp, Homo sapiens
gccgggcaggggaca

SEQ ID NO: 1598448 - DNA, 15 bp, Homo sapiens
ggccgggcaggggac

SEQ ID NO: 1598449 - DNA, 15 bp, Homo sapiens
cggccgggcagggga

SEQ ID NO: 1598450 - DNA, 15 bp, Homo sapiens
ccggccgggcagggg

SEQ ID NO: 1598451 - DNA, 15 bp, Homo sapiens
gccggccgggcaggg

SEQ ID NO: 1598452 - DNA, 15 bp, Homo sapiens
ggccggccgggcagg

SEQ ID NO: 1598453 - DNA, 15 bp, Homo sapiens
aggccggccgggcag

SEQ ID NO: 1598454 - DNA, 15 bp, Homo sapiens
caggccggccgggca

SEQ ID NO: 1598455 - DNA, 15 bp, Homo sapiens
tcaggccggccgggc

SEQ ID NO: 1598456 - DNA, 15 bp, Homo sapiens
ctcaggccggccggg

SEQ ID NO: 1598457 - DNA, 15 bp, Homo sapiens
gctcaggccggccgg

SEQ ID NO: 1598458 - DNA, 15 bp, Homo sapiens
agctcaggccggccg

SEQ ID NO: 1598459 - DNA, 15 bp, Homo sapiens
cagctcaggccggcc

SEQ ID NO: 1598460 - DNA, 15 bp, Homo sapiens
ccagctcaggccggc

SEQ ID NO: 1598461 - DNA, 15 bp, Homo sapiens
cccagctcaggccgg

SEQ ID NO: 1598462 - DNA, 15 bp, Homo sapiens
acccagctcaggccg

SEQ ID NO: 1598463 - DNA, 15 bp, Homo sapiens
cacccagctcaggcc

SEQ ID NO: 1598464 - DNA, 15 bp, Homo sapiens
gcacccagctcaggc

SEQ ID NO: 1598465 - DNA, 15 bp, Homo sapiens
ggcacccagctcagg

SEQ ID NO: 1598466 - DNA, 15 bp, Homo sapiens
aggcacccagctcag

SEQ ID NO: 1598467 - DNA, 15 bp, Homo sapiens
aaggcacccagctca

SEQ ID NO: 1598468 - DNA, 15 bp, Homo sapiens
taaggcacccagctc

SEQ ID NO: 1598469 - DNA, 15 bp, Homo sapiens
ctaaggcacccagct

SEQ ID NO: 1598470 - DNA, 15 bp, Homo sapiens
gctaaggcacccagc

SEQ ID NO: 1598471 - DNA, 15 bp, Homo sapiens
ggctaaggcacccag

SEQ ID NO: 1598472 - DNA, 15 bp, Homo sapiens
tggctaaggcaccca

SEQ ID NO: 1598473 - DNA, 15 bp, Homo sapiens
gtggctaaggcaccc

SEQ ID NO: 1598474 - DNA, 15 bp, Homo sapiens
ggtggctaaggcacc

SEQ ID NO: 1598475 - DNA, 15 bp, Homo sapiens
aggtggctaaggcac

SEQ ID NO: 1598476 - DNA, 15 bp, Homo sapiens
taggtggctaaggca

SEQ ID NO: 1598477 - DNA, 15 bp, Homo sapiens
gtaggtggctaaggc

SEQ ID NO: 1598478 - DNA, 15 bp, Homo sapiens
tgtaggtggctaagg

SEQ ID NO: 1598479 - DNA, 15 bp, Homo sapiens
gtgtaggtggctaag

SEQ ID NO: 1598480 - DNA, 15 bp, Homo sapiens
agtgtaggtggctaa

SEQ ID NO: 1598481 - DNA, 15 bp, Homo sapiens
gagtgtaggtggcta

SEQ ID NO: 1598482 - DNA, 15 bp, Homo sapiens
ggagtgtaggtggct

SEQ ID NO: 1598483 - DNA, 15 bp, Homo sapiens
gggagtgtaggtggc

SEQ ID NO: 1598484 - DNA, 15 bp, Homo sapiens
cgggagtgtaggtgg

SEQ ID NO: 1598485 - DNA, 15 bp, Homo sapiens
ccgggagtgtaggtg

SEQ ID NO: 1598486 - DNA, 15 bp, Homo sapiens
accgggagtgtaggt

SEQ ID NO: 1598487 - DNA, 15 bp, Homo sapiens
gaccgggagtgtagg

SEQ ID NO: 1598488 - DNA, 15 bp, Homo sapiens
ggaccgggagtgtag

SEQ ID NO: 1598489 - DNA, 15 bp, Homo sapiens
gggaccgggagtgta

SEQ ID NO: 1598490 - DNA, 15 bp, Homo sapiens
cgggaccgggagtgt

SEQ ID NO: 1598491 - DNA, 15 bp, Homo sapiens
ccgggaccgggagtg

SEQ ID NO: 1598492 - DNA, 15 bp, Homo sapiens
tccgggaccgggagt

SEQ ID NO: 1598493 - DNA, 15 bp, Homo sapiens
ttccgggaccgggag

SEQ ID NO: 1598494 - DNA, 15 bp, Homo sapiens
gttccgggaccggga

SEQ ID NO: 1598495 - DNA, 15 bp, Homo sapiens
ggttccgggaccggg

SEQ ID NO: 1598496 - DNA, 15 bp, Homo sapiens
tggttccgggaccgg

SEQ ID NO: 1598497 - DNA, 15 bp, Homo sapiens
gtggttccgggaccg

SEQ ID NO: 1598498 - DNA, 15 bp, Homo sapiens
tgtggttccgggacc

SEQ ID NO: 1598499 - DNA, 15 bp, Homo sapiens
ctgtggttccgggac

SEQ ID NO: 1598500 - DNA, 15 bp, Homo sapiens
gctgtggttccggga

SEQ ID NO: 1598501 - DNA, 15 bp, Homo sapiens
agctgtggttccggg

SEQ ID NO: 1598502 - DNA, 15 bp, Homo sapiens
cagctgtggttccgg

SEQ ID NO: 1598503 - DNA, 15 bp, Homo sapiens
tcagctgtggttccg

SEQ ID NO: 1598504 - DNA, 15 bp, Homo sapiens
gtcagctgtggttcc

SEQ ID NO: 1598505 - DNA, 15 bp, Homo sapiens
ggtcagctgtggttc

SEQ ID NO: 1598506 - DNA, 15 bp, Homo sapiens
tggtcagctgtggtt

SEQ ID NO: 1598507 - DNA, 15 bp, Homo sapiens
atggtcagctgtggt

SEQ ID NO: 1598508 - DNA, 15 bp, Homo sapiens
aatggtcagctgtgg

SEQ ID NO: 1598509 - DNA, 15 bp, Homo sapiens
gaatggtcagctgtg

SEQ ID NO: 1598510 - DNA, 15 bp, Homo sapiens
ggaatggtcagctgt

SEQ ID NO: 1598511 - DNA, 15 bp, Homo sapiens
tggaatggtcagctg

SEQ ID NO: 1598512 - DNA, 15 bp, Homo sapiens
ttggaatggtcagct

SEQ ID NO: 1598513 - DNA, 15 bp, Homo sapiens
gttggaatggtcagc

SEQ ID NO: 1598514 - DNA, 15 bp, Homo sapiens
cgttggaatggtcag

SEQ ID NO: 1598515 - DNA, 15 bp, Homo sapiens
gcgttggaatggtca

SEQ ID NO: 1598516 - DNA, 15 bp, Homo sapiens
tgcgttggaatggtc

SEQ ID NO: 1598517 - DNA, 15 bp, Homo sapiens
ttgcgttggaatggt

SEQ ID NO: 1598518 - DNA, 15 bp, Homo sapiens
cttgcgttggaatgg

SEQ ID NO: 1598519 - DNA, 15 bp, Homo sapiens
acttgcgttggaatg

SEQ ID NO: 1598520 - DNA, 15 bp, Homo sapiens
cacttgcgttggaat

SEQ ID NO: 1598521 - DNA, 15 bp, Homo sapiens
ccacttgcgttggaa

SEQ ID NO: 1598522 - DNA, 15 bp, Homo sapiens
accacttgcgttgga

SEQ ID NO: 1598523 - DNA, 15 bp, Homo sapiens
gaccacttgcgttgg

SEQ ID NO: 1598524 - DNA, 15 bp, Homo sapiens
tgaccacttgcgttg

SEQ ID NO: 1598525 - DNA, 15 bp, Homo sapiens
ttgaccacttgcgtt

SEQ ID NO: 1598526 - DNA, 15 bp, Homo sapiens
tttgaccacttgcgt

SEQ ID NO: 1598527 - DNA, 15 bp, Homo sapiens
atttgaccacttgcg

SEQ ID NO: 1598528 - DNA, 15 bp, Homo sapiens
aatttgaccacttgc

SEQ ID NO: 1598529 - DNA, 15 bp, Homo sapiens
aaatttgaccacttg

SEQ ID NO: 1598530 - DNA, 15 bp, Homo sapiens
caaatttgaccactt

SEQ ID NO: 1598531 - DNA, 15 bp, Homo sapiens
acaaatttgaccact

SEQ ID NO: 1598532 - DNA, 15 bp, Homo sapiens
aacaaatttgaccac

SEQ ID NO: 1598533 - DNA, 15 bp, Homo sapiens
aaacaaatttgacca

SEQ ID NO: 1598534 - DNA, 15 bp, Homo sapiens
caaacaaatttgacc

SEQ ID NO: 1598535 - DNA, 15 bp, Homo sapiens
acaaacaaatttgac

SEQ ID NO: 1598536 - DNA, 15 bp, Homo sapiens
aacaaacaaatttga

SEQ ID NO: 1598537 - DNA, 15 bp, Homo sapiens
aaacaaacaaatttg

SEQ ID NO: 1598538 - DNA, 15 bp, Homo sapiens
aaaacaaacaaattt

SEQ ID NO: 1598539 - DNA, 15 bp, Homo sapiens
gaaaacaaacaaatt

SEQ ID NO: 1598540 - DNA, 15 bp, Homo sapiens
ggaaaacaaacaaat

SEQ ID NO: 1598541 - DNA, 15 bp, Homo sapiens
tggaaaacaaacaaa

SEQ ID NO: 1598542 - DNA, 15 bp, Homo sapiens
ttggaaaacaaacaa

SEQ ID NO: 1598543 - DNA, 15 bp, Homo sapiens
tttggaaaacaaaca

SEQ ID NO: 1598544 - DNA, 15 bp, Homo sapiens
ttttggaaaacaaac

SEQ ID NO: 1598545 - DNA, 15 bp, Homo sapiens
gttttggaaaacaaa

SEQ ID NO: 1598546 - DNA, 15 bp, Homo sapiens
cgttttggaaaacaa

SEQ ID NO: 1598547 - DNA, 15 bp, Homo sapiens
acgttttggaaaaca

SEQ ID NO: 1598548 - DNA, 15 bp, Homo sapiens
cacgttttggaaaac

SEQ ID NO: 1598549 - DNA, 15 bp, Homo sapiens
tcacgttttggaaaa

SEQ ID NO: 1598550 - DNA, 15 bp, Homo sapiens
ctcacgttttggaaa

SEQ ID NO: 1598551 - DNA, 15 bp, Homo sapiens
tctcacgttttggaa

SEQ ID NO: 1598552 - DNA, 15 bp, Homo sapiens
gtctcacgttttgga

SEQ ID NO: 1598553 - DNA, 15 bp, Homo sapiens
ggtctcacgttttgg

SEQ ID NO: 1598554 - DNA, 15 bp, Homo sapiens
aggtctcacgttttg

SEQ ID NO: 1598555 - DNA, 15 bp, Homo sapiens
caggtctcacgtttt

SEQ ID NO: 1598556 - DNA, 15 bp, Homo sapiens
acaggtctcacgttt

SEQ ID NO: 1598557 - DNA, 15 bp, Homo sapiens
aacaggtctcacgtt

SEQ ID NO: 1598558 - DNA, 15 bp, Homo sapiens
taacaggtctcacgt

SEQ ID NO: 1598559 - DNA, 15 bp, Homo sapiens
ttaacaggtctcacg

SEQ ID NO: 1598560 - DNA, 15 bp, Homo sapiens
tttaacaggtctcac

SEQ ID NO: 1598561 - DNA, 15 bp, Homo sapiens
ttttaacaggtctca

SEQ ID NO: 1598562 - DNA, 15 bp, Homo sapiens
attttaacaggtctc

SEQ ID NO: 1598563 - DNA, 15 bp, Homo sapiens
gattttaacaggtct

SEQ ID NO: 1598564 - DNA, 15 bp, Homo sapiens
agattttaacaggtc

SEQ ID NO: 1598565 - DNA, 15 bp, Homo sapiens
gagattttaacaggt

SEQ ID NO: 1598566 - DNA, 15 bp, Homo sapiens
ggagattttaacagg

SEQ ID NO: 1598567 - DNA, 15 bp, Homo sapiens
gggagattttaacag

SEQ ID NO: 1598568 - DNA, 15 bp, Homo sapiens
agggagattttaaca

SEQ ID NO: 1598569 - DNA, 15 bp, Homo sapiens
aagggagattttaac

SEQ ID NO: 1598570 - DNA, 15 bp, Homo sapiens
gaagggagattttaa

SEQ ID NO: 1598571 - DNA, 15 bp, Homo sapiens
ggaagggagatttta

SEQ ID NO: 1598572 - DNA, 15 bp, Homo sapiens
gggaagggagatttt

SEQ ID NO: 1598573 - DNA, 15 bp, Homo sapiens
ggggaagggagattt

SEQ ID NO: 1598574 - DNA, 15 bp, Homo sapiens
cggggaagggagatt

SEQ ID NO: 1598575 - DNA, 15 bp, Homo sapiens
gcggggaagggagat

SEQ ID NO: 1598576 - DNA, 15 bp, Homo sapiens
ggcggggaagggaga

SEQ ID NO: 1598577 - DNA, 15 bp, Homo sapiens
aggcggggaagggag

SEQ ID NO: 1598578 - DNA, 15 bp, Homo sapiens
aaggcggggaaggga

SEQ ID NO: 1598579 - DNA, 15 bp, Homo sapiens
gaaggcggggaaggg

SEQ ID NO: 1598580 - DNA, 15 bp, Homo sapiens
ggaaggcggggaagg

SEQ ID NO: 1598581 - DNA, 15 bp, Homo sapiens
tggaaggcggggaag

SEQ ID NO: 1598582 - DNA, 15 bp, Homo sapiens
ttggaaggcggggaa

SEQ ID NO: 1598583 - DNA, 15 bp, Homo sapiens
gttggaaggcgggga

SEQ ID NO: 1598584 - DNA, 15 bp, Homo sapiens
tgttggaaggcgggg

SEQ ID NO: 1598585 - DNA, 15 bp, Homo sapiens
ttgttggaaggcggg

SEQ ID NO: 1598586 - DNA, 15 bp, Homo sapiens
cttgttggaaggcgg

SEQ ID NO: 1598587 - DNA, 15 bp, Homo sapiens
gcttgttggaaggcg

SEQ ID NO: 1598588 - DNA, 15 bp, Homo sapiens
tgcttgttggaaggc

SEQ ID NO: 1598589 - DNA, 15 bp, Homo sapiens
gtgcttgttggaagg

SEQ ID NO: 1598590 - DNA, 15 bp, Homo sapiens
agtgcttgttggaag

SEQ ID NO: 1598591 - DNA, 15 bp, Homo sapiens
gagtgcttgttggaa

SEQ ID NO: 1598592 - DNA, 15 bp, Homo sapiens
agagtgcttgttgga

SEQ ID NO: 1598593 - DNA, 15 bp, Homo sapiens
gagagtgcttgttgg

SEQ ID NO: 1598594 - DNA, 15 bp, Homo sapiens
tgagagtgcttgttg

SEQ ID NO: 1598595 - DNA, 15 bp, Homo sapiens
gtgagagtgcttgtt

SEQ ID NO: 1598596 - DNA, 15 bp, Homo sapiens
agtgagagtgcttgt

SEQ ID NO: 1598597 - DNA, 15 bp, Homo sapiens
tagtgagagtgcttg

SEQ ID NO: 1598598 - DNA, 15 bp, Homo sapiens
ctagtgagagtgctt

SEQ ID NO: 1598599 - DNA, 15 bp, Homo sapiens
tctagtgagagtgct

SEQ ID NO: 1598600 - DNA, 15 bp, Homo sapiens
gtctagtgagagtgc

SEQ ID NO: 1598601 - DNA, 15 bp, Homo sapiens
ggtctagtgagagtg

SEQ ID NO: 1598602 - DNA, 15 bp, Homo sapiens
gggtctagtgagagt

SEQ ID NO: 1598603 - DNA, 15 bp, Homo sapiens
tgggtctagtgagag

SEQ ID NO: 1598604 - DNA, 15 bp, Homo sapiens
ttgggtctagtgaga

SEQ ID NO: 1598605 - DNA, 15 bp, Homo sapiens
gttgggtctagtgag

SEQ ID NO: 1598606 - DNA, 15 bp, Homo sapiens
ggttgggtctagtga

SEQ ID NO: 1598607 - DNA, 15 bp, Homo sapiens
tggttgggtctagtg

SEQ ID NO: 1598608 - DNA, 15 bp, Homo sapiens
atggttgggtctagt

SEQ ID NO: 1598609 - DNA, 15 bp, Homo sapiens
gatggttgggtctag

SEQ ID NO: 1598610 - DNA, 15 bp, Homo sapiens
ggatggttgggtcta

SEQ ID NO: 1598611 - DNA, 15 bp, Homo sapiens
aggatggttgggtct

SEQ ID NO: 1598612 - DNA, 15 bp, Homo sapiens
gaggatggttgggtc

SEQ ID NO: 1598613 - DNA, 15 bp, Homo sapiens
agaggatggttgggt

SEQ ID NO: 1598614 - DNA, 15 bp, Homo sapiens
aagaggatggttggg

SEQ ID NO: 1598615 - DNA, 15 bp, Homo sapiens
caagaggatggttgg

SEQ ID NO: 1598616 - DNA, 15 bp, Homo sapiens
ccaagaggatggttg

SEQ ID NO: 1598617 - DNA, 15 bp, Homo sapiens
cccaagaggatggtt

SEQ ID NO: 1598618 - DNA, 15 bp, Homo sapiens
tcccaagaggatggt

SEQ ID NO: 1598619 - DNA, 15 bp, Homo sapiens
ttcccaagaggatgg

SEQ ID NO: 1598620 - DNA, 15 bp, Homo sapiens
attcccaagaggatg

SEQ ID NO: 1598621 - DNA, 15 bp, Homo sapiens
gattcccaagaggat

SEQ ID NO: 1598622 - DNA, 15 bp, Homo sapiens
agattcccaagagga

SEQ ID NO: 1598623 - DNA, 15 bp, Homo sapiens
aagattcccaagagg

SEQ ID NO: 1598624 - DNA, 15 bp, Homo sapiens
gaagattcccaagag

SEQ ID NO: 1598625 - DNA, 15 bp, Homo sapiens
cgaagattcccaaga

SEQ ID NO: 1598626 - DNA, 15 bp, Homo sapiens
tcgaagattcccaag

SEQ ID NO: 1598627 - DNA, 15 bp, Homo sapiens
ctcgaagattcccaa

SEQ ID NO: 1598628 - DNA, 15 bp, Homo sapiens
actcgaagattccca

SEQ ID NO: 1598629 - DNA, 15 bp, Homo sapiens
gactcgaagattccc

SEQ ID NO: 1598630 - DNA, 15 bp, Homo sapiens
ggactcgaagattcc

SEQ ID NO: 1598631 - DNA, 15 bp, Homo sapiens
gggactcgaagattc

SEQ ID NO: 1598632 - DNA, 15 bp, Homo sapiens
agggactcgaagatt

SEQ ID NO: 1598633 - DNA, 15 bp, Homo sapiens
gagggactcgaagat

SEQ ID NO: 1598634 - DNA, 15 bp, Homo sapiens
agagggactcgaaga

SEQ ID NO: 1598635 - DNA, 15 bp, Homo sapiens
cagagggactcgaag

SEQ ID NO: 1598636 - DNA, 15 bp, Homo sapiens
ccagagggactcgaa

SEQ ID NO: 1598637 - DNA, 15 bp, Homo sapiens
gccagagggactcga

SEQ ID NO: 1598638 - DNA, 15 bp, Homo sapiens
agccagagggactcg

SEQ ID NO: 1598639 - DNA, 15 bp, Homo sapiens
cagccagagggactc

SEQ ID NO: 1598640 - DNA, 15 bp, Homo sapiens
acagccagagggact

SEQ ID NO: 1598641 - DNA, 15 bp, Homo sapiens
aacagccagagggac

SEQ ID NO: 1598642 - DNA, 15 bp, Homo sapiens
caacagccagaggga

SEQ ID NO: 1598643 - DNA, 15 bp, Homo sapiens
ccaacagccagaggg

SEQ ID NO: 1598644 - DNA, 15 bp, Homo sapiens
tccaacagccagagg

SEQ ID NO: 1598645 - DNA, 15 bp, Homo sapiens
ttccaacagccagag

SEQ ID NO: 1598646 - DNA, 15 bp, Homo sapiens
tttccaacagccaga

SEQ ID NO: 1598647 - DNA, 15 bp, Homo sapiens
gtttccaacagccag

SEQ ID NO: 1598648 - DNA, 15 bp, Homo sapiens
agtttccaacagcca

SEQ ID NO: 1598649 - DNA, 15 bp, Homo sapiens
cagtttccaacagcc

SEQ ID NO: 1598650 - DNA, 15 bp, Homo sapiens
acagtttccaacagc

SEQ ID NO: 1598651 - DNA, 15 bp, Homo sapiens
cacagtttccaacag

SEQ ID NO: 1598652 - DNA, 15 bp, Homo sapiens
acacagtttccaaca

SEQ ID NO: 1598653 - DNA, 15 bp, Homo sapiens
gacacagtttccaac

SEQ ID NO: 1598654 - DNA, 15 bp, Homo sapiens
agacacagtttccaa

SEQ ID NO: 1598655 - DNA, 15 bp, Homo sapiens
gagacacagtttcca

SEQ ID NO: 1598656 - DNA, 15 bp, Homo sapiens
tgagacacagtttcc

SEQ ID NO: 1598657 - DNA, 15 bp, Homo sapiens
ctgagacacagtttc

SEQ ID NO: 1598658 - DNA, 15 bp, Homo sapiens
gctgagacacagttt

SEQ ID NO: 1598659 - DNA, 15 bp, Homo sapiens
tgctgagacacagtt

SEQ ID NO: 1598660 - DNA, 15 bp, Homo sapiens
ctgctgagacacagt

SEQ ID NO: 1598661 - DNA, 15 bp, Homo sapiens
actgctgagacacag

SEQ ID NO: 1598662 - DNA, 15 bp, Homo sapiens
cactgctgagacaca

SEQ ID NO: 1598663 - DNA, 15 bp, Homo sapiens
tcactgctgagacac

SEQ ID NO: 1598664 - DNA, 15 bp, Homo sapiens
ctcactgctgagaca

SEQ ID NO: 1598665 - DNA, 15 bp, Homo sapiens
cctcactgctgagac

SEQ ID NO: 1598666 - DNA, 15 bp, Homo sapiens
gcctcactgctgaga

SEQ ID NO: 1598667 - DNA, 15 bp, Homo sapiens
ggcctcactgctgag

SEQ ID NO: 1598668 - DNA, 15 bp, Homo sapiens
gggcctcactgctga

SEQ ID NO: 1598669 - DNA, 15 bp, Homo sapiens
tgggcctcactgctg

SEQ ID NO: 1598670 - DNA, 15 bp, Homo sapiens
ctgggcctcactgct

SEQ ID NO: 1598671 - DNA, 15 bp, Homo sapiens
cctgggcctcactgc

SEQ ID NO: 1598672 - DNA, 15 bp, Homo sapiens
acctgggcctcactg

SEQ ID NO: 1598673 - DNA, 15 bp, Homo sapiens
aacctgggcctcact

SEQ ID NO: 1598674 - DNA, 15 bp, Homo sapiens
aaacctgggcctcac

SEQ ID NO: 1598675 - DNA, 15 bp, Homo sapiens
gaaacctgggcctca

SEQ ID NO: 1598676 - DNA, 15 bp, Homo sapiens
agaaacctgggcctc

SEQ ID NO: 1598677 - DNA, 15 bp, Homo sapiens
cagaaacctgggcct

SEQ ID NO: 1598678 - DNA, 15 bp, Homo sapiens
tcagaaacctgggcc

SEQ ID NO: 1598679 - DNA, 15 bp, Homo sapiens
ctcagaaacctgggc

SEQ ID NO: 1598680 - DNA, 15 bp, Homo sapiens
cctcagaaacctggg

SEQ ID NO: 1598681 - DNA, 15 bp, Homo sapiens
ccctcagaaacctgg

SEQ ID NO: 1598682 - DNA, 15 bp, Homo sapiens
tccctcagaaacctg

SEQ ID NO: 1598683 - DNA, 15 bp, Homo sapiens
ctccctcagaaacct

SEQ ID NO: 1598684 - DNA, 15 bp, Homo sapiens
tctccctcagaaacc

SEQ ID NO: 1598685 - DNA, 15 bp, Homo sapiens
ttctccctcagaaac

SEQ ID NO: 1598686 - DNA, 15 bp, Homo sapiens
tttctccctcagaaa

SEQ ID NO: 1598687 - DNA, 15 bp, Homo sapiens
ctttctccctcagaa

SEQ ID NO: 1598688 - DNA, 15 bp, Homo sapiens
gctttctccctcaga

SEQ ID NO: 1598689 - DNA, 15 bp, Homo sapiens
ggctttctccctcag

SEQ ID NO: 1598690 - DNA, 15 bp, Homo sapiens
gggctttctccctca

SEQ ID NO: 1598691 - DNA, 15 bp, Homo sapiens
cgggctttctccctc

SEQ ID NO: 1598692 - DNA, 15 bp, Homo sapiens
ccgggctttctccct

SEQ ID NO: 1598693 - DNA, 15 bp, Homo sapiens
gccgggctttctccc

SEQ ID NO: 1598694 - DNA, 15 bp, Homo sapiens
ggccgggctttctcc

SEQ ID NO: 1598695 - DNA, 15 bp, Homo sapiens
aggccgggctttctc

SEQ ID NO: 1598696 - DNA, 15 bp, Homo sapiens
taggccgggctttct

SEQ ID NO: 1598697 - DNA, 15 bp, Homo sapiens
ctaggccgggctttc

SEQ ID NO: 1598698 - DNA, 15 bp, Homo sapiens
gctaggccgggcttt

SEQ ID NO: 1598699 - DNA, 15 bp, Homo sapiens
ggctaggccgggctt

SEQ ID NO: 1598700 - DNA, 15 bp, Homo sapiens
gggctaggccgggct

SEQ ID NO: 1598701 - DNA, 15 bp, Homo sapiens
tgggctaggccgggc

SEQ ID NO: 1598702 - DNA, 15 bp, Homo sapiens
gtgggctaggccggg

SEQ ID NO: 1598703 - DNA, 15 bp, Homo sapiens
tgtgggctaggccgg

SEQ ID NO: 1598704 - DNA, 15 bp, Homo sapiens
ctgtgggctaggccg

SEQ ID NO: 1598705 - DNA, 15 bp, Homo sapiens
actgtgggctaggcc

SEQ ID NO: 1598706 - DNA, 15 bp, Homo sapiens
gactgtgggctaggc

SEQ ID NO: 1598707 - DNA, 15 bp, Homo sapiens
agactgtgggctagg

SEQ ID NO: 1598708 - DNA, 15 bp, Homo sapiens
aagactgtgggctag

SEQ ID NO: 1598709 - DNA, 15 bp, Homo sapiens
taagactgtgggcta

SEQ ID NO: 1598710 - DNA, 15 bp, Homo sapiens
ttaagactgtgggct

SEQ ID NO: 1598711 - DNA, 15 bp, Homo sapiens
cttaagactgtgggc

SEQ ID NO: 1598712 - DNA, 15 bp, Homo sapiens
ccttaagactgtggg

SEQ ID NO: 1598713 - DNA, 15 bp, Homo sapiens
gccttaagactgtgg

SEQ ID NO: 1598714 - DNA, 15 bp, Homo sapiens
tgccttaagactgtg

SEQ ID NO: 1598715 - DNA, 15 bp, Homo sapiens
gtgccttaagactgt

SEQ ID NO: 1598716 - DNA, 15 bp, Homo sapiens
ggtgccttaagactg

SEQ ID NO: 1598717 - DNA, 15 bp, Homo sapiens
tggtgccttaagact

SEQ ID NO: 1598718 - DNA, 15 bp, Homo sapiens
gtggtgccttaagac

SEQ ID NO: 1598719 - DNA, 15 bp, Homo sapiens
cgtggtgccttaaga

SEQ ID NO: 1598720 - DNA, 15 bp, Homo sapiens
gcgtggtgccttaag

SEQ ID NO: 1598721 - DNA, 15 bp, Homo sapiens
ggcgtggtgccttaa

SEQ ID NO: 1598722 - DNA, 15 bp, Homo sapiens
tggcgtggtgcctta

SEQ ID NO: 1598723 - DNA, 15 bp, Homo sapiens
ctggcgtggtgcctt

SEQ ID NO: 1598724 - DNA, 15 bp, Homo sapiens
tctggcgtggtgcct

SEQ ID NO: 1598725 - DNA, 15 bp, Homo sapiens
ctctggcgtggtgcc

SEQ ID NO: 1598726 - DNA, 15 bp, Homo sapiens
cctctggcgtggtgc

SEQ ID NO: 1598727 - DNA, 15 bp, Homo sapiens
tcctctggcgtggtg

SEQ ID NO: 1598728 - DNA, 15 bp, Homo sapiens
ctcctctggcgtggt

SEQ ID NO: 1598729 - DNA, 15 bp, Homo sapiens
cctcctctggcgtgg

SEQ ID NO: 1598730 - DNA, 15 bp, Homo sapiens
gcctcctctggcgtg

SEQ ID NO: 1598731 - DNA, 15 bp, Homo sapiens
agcctcctctggcgt

SEQ ID NO: 1598732 - DNA, 15 bp, Homo sapiens
gagcctcctctggcg

SEQ ID NO: 1598733 - DNA, 15 bp, Homo sapiens
ggagcctcctctggc

SEQ ID NO: 1598734 - DNA, 15 bp, Homo sapiens
tggagcctcctctgg

SEQ ID NO: 1598735 - DNA, 15 bp, Homo sapiens
ctggagcctcctctg

SEQ ID NO: 1598736 - DNA, 15 bp, Homo sapiens
cctggagcctcctct

SEQ ID NO: 1598737 - DNA, 15 bp, Homo sapiens
tcctggagcctcctc

SEQ ID NO: 1598738 - DNA, 15 bp, Homo sapiens
ttcctggagcctcct

SEQ ID NO: 1598739 - DNA, 15 bp, Homo sapiens
cttcctggagcctcc

SEQ ID NO: 1598740 - DNA, 15 bp, Homo sapiens
acttcctggagcctc

SEQ ID NO: 1598741 - DNA, 15 bp, Homo sapiens
aacttcctggagcct

SEQ ID NO: 1598742 - DNA, 15 bp, Homo sapiens
taacttcctggagcc

SEQ ID NO: 1598743 - DNA, 15 bp, Homo sapiens
ttaacttcctggagc

SEQ ID NO: 1598744 - DNA, 15 bp, Homo sapiens
gttaacttcctggag

SEQ ID NO: 1598745 - DNA, 15 bp, Homo sapiens
tgttaacttcctgga

SEQ ID NO: 1598746 - DNA, 15 bp, Homo sapiens
ttgttaacttcctgg

SEQ ID NO: 1598747 - DNA, 15 bp, Homo sapiens
tttgttaacttcctg

SEQ ID NO: 1598748 - DNA, 15 bp, Homo sapiens
ctttgttaacttcct

SEQ ID NO: 1598749 - DNA, 15 bp, Homo sapiens
tctttgttaacttcc

SEQ ID NO: 1598750 - DNA, 15 bp, Homo sapiens
ctctttgttaacttc

SEQ ID NO: 1598751 - DNA, 15 bp, Homo sapiens
cctctttgttaactt

SEQ ID NO: 1598752 - DNA, 15 bp, Homo sapiens
tcctctttgttaact

SEQ ID NO: 1598753 - DNA, 15 bp, Homo sapiens
gtcctctttgttaac

SEQ ID NO: 1598754 - DNA, 15 bp, Homo sapiens
agtcctctttgttaa

SEQ ID NO: 1598755 - DNA, 15 bp, Homo sapiens
cagtcctctttgtta

SEQ ID NO: 1598756 - DNA, 15 bp, Homo sapiens
gcagtcctctttgtt

SEQ ID NO: 1598757 - DNA, 15 bp, Homo sapiens
agcagtcctctttgt

SEQ ID NO: 1598758 - DNA, 15 bp, Homo sapiens
cagcagtcctctttg

SEQ ID NO: 1598759 - DNA, 15 bp, Homo sapiens
ccagcagtcctcttt

SEQ ID NO: 1598760 - DNA, 15 bp, Homo sapiens
cccagcagtcctctt

SEQ ID NO: 1598761 - DNA, 15 bp, Homo sapiens
gcccagcagtcctct

SEQ ID NO: 1598762 - DNA, 15 bp, Homo sapiens
ggcccagcagtcctc

SEQ ID NO: 1598763 - DNA, 15 bp, Homo sapiens
gggcccagcagtcct

SEQ ID NO: 1598764 - DNA, 15 bp, Homo sapiens
cgggcccagcagtcc

SEQ ID NO: 1598765 - DNA, 15 bp, Homo sapiens
ccgggcccagcagtc

SEQ ID NO: 1598766 - DNA, 15 bp, Homo sapiens
tccgggcccagcagt

SEQ ID NO: 1598767 - DNA, 15 bp, Homo sapiens
ctccgggcccagcag

SEQ ID NO: 1598768 - DNA, 15 bp, Homo sapiens
gctccgggcccagca

SEQ ID NO: 1598769 - DNA, 15 bp, Homo sapiens
cgctccgggcccagc

SEQ ID NO: 1598770 - DNA, 15 bp, Homo sapiens
tcgctccgggcccag

SEQ ID NO: 1598771 - DNA, 15 bp, Homo sapiens
ctcgctccgggccca

SEQ ID NO: 1598772 - DNA, 15 bp, Homo sapiens
cctcgctccgggccc

SEQ ID NO: 1598773 - DNA, 15 bp, Homo sapiens
tcctcgctccgggcc

SEQ ID NO: 1598774 - DNA, 15 bp, Homo sapiens
gtcctcgctccgggc

SEQ ID NO: 1598775 - DNA, 15 bp, Homo sapiens
agtcctcgctccggg

SEQ ID NO: 1598776 - DNA, 15 bp, Homo sapiens
gagtcctcgctccgg

SEQ ID NO: 1598777 - DNA, 15 bp, Homo sapiens
ggagtcctcgctccg

SEQ ID NO: 1598778 - DNA, 15 bp, Homo sapiens
cggagtcctcgctcc

SEQ ID NO: 1598779 - DNA, 15 bp, Homo sapiens
ccggagtcctcgctc

SEQ ID NO: 1598780 - DNA, 15 bp, Homo sapiens
gccggagtcctcgct

SEQ ID NO: 1598781 - DNA, 15 bp, Homo sapiens
ggccggagtcctcgc

SEQ ID NO: 1598782 - DNA, 15 bp, Homo sapiens
tggccggagtcctcg

SEQ ID NO: 1598783 - DNA, 15 bp, Homo sapiens
ctggccggagtcctc

SEQ ID NO: 1598784 - DNA, 15 bp, Homo sapiens
actggccggagtcct

SEQ ID NO: 1598785 - DNA, 15 bp, Homo sapiens
gactggccggagtcc

SEQ ID NO: 1598786 - DNA, 15 bp, Homo sapiens
agactggccggagtc

SEQ ID NO: 1598787 - DNA, 15 bp, Homo sapiens
cagactggccggagt

SEQ ID NO: 1598788 - DNA, 15 bp, Homo sapiens
gcagactggccggag

SEQ ID NO: 1598789 - DNA, 15 bp, Homo sapiens
agcagactggccgga

SEQ ID NO: 1598790 - DNA, 15 bp, Homo sapiens
aagcagactggccgg

SEQ ID NO: 1598791 - DNA, 15 bp, Homo sapiens
aaagcagactggccg

SEQ ID NO: 1598792 - DNA, 15 bp, Homo sapiens
gaaagcagactggcc

SEQ ID NO: 1598793 - DNA, 15 bp, Homo sapiens
ggaaagcagactggc

SEQ ID NO: 1598794 - DNA, 15 bp, Homo sapiens
aggaaagcagactgg

SEQ ID NO: 1598795 - DNA, 15 bp, Homo sapiens
gaggaaagcagactg

SEQ ID NO: 1598796 - DNA, 15 bp, Homo sapiens
tgaggaaagcagact

SEQ ID NO: 1598797 - DNA, 15 bp, Homo sapiens
gtgaggaaagcagac

SEQ ID NO: 1598798 - DNA, 15 bp, Homo sapiens
tgtgaggaaagcaga

SEQ ID NO: 1598799 - DNA, 15 bp, Homo sapiens
ttgtgaggaaagcag

SEQ ID NO: 1598800 - DNA, 15 bp, Homo sapiens
cttgtgaggaaagca

SEQ ID NO: 1598801 - DNA, 15 bp, Homo sapiens
gcttgtgaggaaagc

SEQ ID NO: 1598802 - DNA, 15 bp, Homo sapiens
agcttgtgaggaaag

SEQ ID NO: 1598803 - DNA, 15 bp, Homo sapiens
gagcttgtgaggaaa

SEQ ID NO: 1598804 - DNA, 15 bp, Homo sapiens
agagcttgtgaggaa

SEQ ID NO: 1598805 - DNA, 15 bp, Homo sapiens
aagagcttgtgagga

SEQ ID NO: 1598806 - DNA, 15 bp, Homo sapiens
caagagcttgtgagg

SEQ ID NO: 1598807 - DNA, 15 bp, Homo sapiens
ccaagagcttgtgag

SEQ ID NO: 1598808 - DNA, 15 bp, Homo sapiens
accaagagcttgtga

SEQ ID NO: 1598809 - DNA, 15 bp, Homo sapiens
caccaagagcttgtg

SEQ ID NO: 1598810 - DNA, 15 bp, Homo sapiens
ccaccaagagcttgt

SEQ ID NO: 1598811 - DNA, 15 bp, Homo sapiens
cccaccaagagcttg

SEQ ID NO: 1598812 - DNA, 15 bp, Homo sapiens
ccccaccaagagctt

SEQ ID NO: 1598813 - DNA, 15 bp, Homo sapiens
cccccaccaagagct

SEQ ID NO: 1598814 - DNA, 15 bp, Homo sapiens
tcccccaccaagagc

SEQ ID NO: 1598815 - DNA, 15 bp, Homo sapiens
ctcccccaccaagag

SEQ ID NO: 1598816 - DNA, 15 bp, Homo sapiens
gctcccccaccaaga

SEQ ID NO: 1598817 - DNA, 15 bp, Homo sapiens
cgctcccccaccaag

SEQ ID NO: 1598818 - DNA, 15 bp, Homo sapiens
ccgctcccccaccaa

SEQ ID NO: 1598819 - DNA, 15 bp, Homo sapiens
cccgctcccccacca

SEQ ID NO: 1598820 - DNA, 15 bp, Homo sapiens
tcccgctcccccacc

SEQ ID NO: 1598821 - DNA, 15 bp, Homo sapiens
ctcccgctcccccac

SEQ ID NO: 1598822 - DNA, 15 bp, Homo sapiens
tctcccgctccccca

SEQ ID NO: 1598823 - DNA, 15 bp, Homo sapiens
ctctcccgctccccc

SEQ ID NO: 1598824 - DNA, 15 bp, Homo sapiens
tctctcccgctcccc

SEQ ID NO: 1598825 - DNA, 15 bp, Homo sapiens
ctctctcccgctccc

SEQ ID NO: 1598826 - DNA, 15 bp, Homo sapiens
cctctctcccgctcc

SEQ ID NO: 1598827 - DNA, 15 bp, Homo sapiens
ccctctctcccgctc

SEQ ID NO: 1598828 - DNA, 15 bp, Homo sapiens
tccctctctcccgct

SEQ ID NO: 1598829 - DNA, 15 bp, Homo sapiens
atccctctctcccgc

SEQ ID NO: 1598830 - DNA, 15 bp, Homo sapiens
aatccctctctcccg

SEQ ID NO: 1598831 - DNA, 15 bp, Homo sapiens
caatccctctctccc

SEQ ID NO: 1598832 - DNA, 15 bp, Homo sapiens
ccaatccctctctcc

SEQ ID NO: 1598833 - DNA, 15 bp, Homo sapiens
cccaatccctctctc

SEQ ID NO: 1598834 - DNA, 15 bp, Homo sapiens
tcccaatccctctct

SEQ ID NO: 1598835 - DNA, 15 bp, Homo sapiens
ttcccaatccctctc

SEQ ID NO: 1598836 - DNA, 15 bp, Homo sapiens
cttcccaatccctct

SEQ ID NO: 1598837 - DNA, 15 bp, Homo sapiens
tcttcccaatccctc

SEQ ID NO: 1598838 - DNA, 15 bp, Homo sapiens
ctcttcccaatccct

SEQ ID NO: 1598839 - DNA, 15 bp, Homo sapiens
tctcttcccaatccc

SEQ ID NO: 1598840 - DNA, 15 bp, Homo sapiens
atctcttcccaatcc

SEQ ID NO: 1598841 - DNA, 15 bp, Homo sapiens
catctcttcccaatc

SEQ ID NO: 1598842 - DNA, 15 bp, Homo sapiens
gcatctcttcccaat

SEQ ID NO: 1598843 - DNA, 15 bp, Homo sapiens
tgcatctcttcccaa

SEQ ID NO: 1598844 - DNA, 15 bp, Homo sapiens
ctgcatctcttccca

SEQ ID NO: 1598845 - DNA, 15 bp, Homo sapiens
gtctgcatctcttcc

SEQ ID NO: 1598846 - DNA, 15 bp, Homo sapiens
cgtctgcatctcttc

SEQ ID NO: 1598847 - DNA, 15 bp, Homo sapiens
tcgtctgcatctctt

SEQ ID NO: 1598848 - DNA, 15 bp, Homo sapiens
ttcgtctgcatctct

SEQ ID NO: 1598849 - DNA, 15 bp, Homo sapiens
attcgtctgcatctc

SEQ ID NO: 1598850 - DNA, 15 bp, Homo sapiens
tattcgtctgcatct

SEQ ID NO: 1598851 - DNA, 15 bp, Homo sapiens
ttattcgtctgcatc

SEQ ID NO: 1598852 - DNA, 15 bp, Homo sapiens
gttattcgtctgcat

SEQ ID NO: 1598853 - DNA, 15 bp, Homo sapiens
cgttattcgtctgca

SEQ ID NO: 1598854 - DNA, 15 bp, Homo sapiens
tcgttattcgtctgc

SEQ ID NO: 1598855 - DNA, 15 bp, Homo sapiens
ttcgttattcgtctg

SEQ ID NO: 1598856 - DNA, 15 bp, Homo sapiens
tttcgttattcgtct

SEQ ID NO: 1598857 - DNA, 15 bp, Homo sapiens
atttcgttattcgtc

SEQ ID NO: 1598858 - DNA, 15 bp, Homo sapiens
catttcgttattcgt

SEQ ID NO: 1598859 - DNA, 15 bp, Homo sapiens
tcatttcgttattcg

SEQ ID NO: 1598860 - DNA, 15 bp, Homo sapiens
ctcatttcgttattc

SEQ ID NO: 1598861 - DNA, 15 bp, Homo sapiens
tctcatttcgttatt

SEQ ID NO: 1598862 - DNA, 15 bp, Homo sapiens
ctctcatttcgttat

SEQ ID NO: 1598863 - DNA, 15 bp, Homo sapiens
tctctcatttcgtta

SEQ ID NO: 1598864 - DNA, 15 bp, Homo sapiens
ctctctcatttcgtt

SEQ ID NO: 1598865 - DNA, 15 bp, Homo sapiens
cctctctcatttcgt

SEQ ID NO: 1598866 - DNA, 15 bp, Homo sapiens
ccctctctcatttcg

SEQ ID NO: 1598867 - DNA, 15 bp, Homo sapiens
cccctctctcatttc

SEQ ID NO: 1598868 - DNA, 15 bp, Homo sapiens
tcccctctctcattt

SEQ ID NO: 1598869 - DNA, 15 bp, Homo sapiens
ttcccctctctcatt

SEQ ID NO: 1598870 - DNA, 15 bp, Homo sapiens
cttcccctctctcat

SEQ ID NO: 1598871 - DNA, 15 bp, Homo sapiens
tcttcccctctctca

SEQ ID NO: 1598872 - DNA, 15 bp, Homo sapiens
ctcttcccctctctc

SEQ ID NO: 1598873 - DNA, 15 bp, Homo sapiens
tctcttcccctctct

SEQ ID NO: 1598874 - DNA, 15 bp, Homo sapiens
ctctcttcccctctc

SEQ ID NO: 1598875 - DNA, 15 bp, Homo sapiens
cctctcttcccctct

SEQ ID NO: 1598876 - DNA, 15 bp, Homo sapiens
tcctctcttcccctc

SEQ ID NO: 1598877 - DNA, 15 bp, Homo sapiens
ttcctctcttcccct

SEQ ID NO: 1598878 - DNA, 15 bp, Homo sapiens
cttcctctcttcccc

SEQ ID NO: 1598879 - DNA, 15 bp, Homo sapiens
tcttcctctcttccc

SEQ ID NO: 1598880 - DNA, 15 bp, Homo sapiens
ttcttcctctcttcc

SEQ ID NO: 1598881 - DNA, 15 bp, Homo sapiens
tttcttcctctcttc

SEQ ID NO: 1598882 - DNA, 15 bp, Homo sapiens
ttttcttcctctctt

SEQ ID NO: 1598883 - DNA, 15 bp, Homo sapiens
tttttcttcctctct

SEQ ID NO: 1598884 - DNA, 15 bp, Homo sapiens
ctttttcttcctctc

SEQ ID NO: 1598885 - DNA, 15 bp, Homo sapiens
tctttttcttcctct

SEQ ID NO: 1598886 - DNA, 15 bp, Homo sapiens
ttctttttcttcctc

SEQ ID NO: 1598887 - DNA, 15 bp, Homo sapiens
tttctttttcttcct

SEQ ID NO: 1598888 - DNA, 15 bp, Homo sapiens
ctttctttttcttcc

SEQ ID NO: 1598889 - DNA, 15 bp, Homo sapiens
actttctttttcttc

SEQ ID NO: 1598890 - DNA, 15 bp, Homo sapiens
aactttctttttctt

SEQ ID NO: 1598891 - DNA, 15 bp, Homo sapiens
caactttctttttct

SEQ ID NO: 1598892 - DNA, 15 bp, Homo sapiens
tcaactttctttttc

SEQ ID NO: 1598893 - DNA, 15 bp, Homo sapiens
ttcaactttcttttt

SEQ ID NO: 1598894 - DNA, 15 bp, Homo sapiens
tttcaactttctttt

SEQ ID NO: 1598895 - DNA, 15 bp, Homo sapiens
ttttcaactttcttt

SEQ ID NO: 1598896 - DNA, 15 bp, Homo sapiens
gttttcaactttctt

SEQ ID NO: 1598897 - DNA, 15 bp, Homo sapiens
ggttttcaactttct

SEQ ID NO: 1598898 - DNA, 15 bp, Homo sapiens
aggttttcaactttc

SEQ ID NO: 1598899 - DNA, 15 bp, Homo sapiens
caggttttcaacttt

SEQ ID NO: 1598900 - DNA, 15 bp, Homo sapiens
ccaggttttcaactt

SEQ ID NO: 1598901 - DNA, 15 bp, Homo sapiens
cccaggttttcaact

SEQ ID NO: 1598902 - DNA, 15 bp, Homo sapiens
gcccaggttttcaac

SEQ ID NO: 1598903 - DNA, 15 bp, Homo sapiens
cgcccaggttttcaa

SEQ ID NO: 1598904 - DNA, 15 bp, Homo sapiens
tcgcccaggttttca

SEQ ID NO: 1598905 - DNA, 15 bp, Homo sapiens
ctcgcccaggttttc

SEQ ID NO: 1598906 - DNA, 15 bp, Homo sapiens
tctcgcccaggtttt

SEQ ID NO: 1598907 - DNA, 15 bp, Homo sapiens
ttctcgcccaggttt

SEQ ID NO: 1598908 - DNA, 15 bp, Homo sapiens
cttctcgcccaggtt

SEQ ID NO: 1598909 - DNA, 15 bp, Homo sapiens
acttctcgcccaggt

SEQ ID NO: 1598910 - DNA, 15 bp, Homo sapiens
cacttctcgcccagg

SEQ ID NO: 1598911 - DNA, 15 bp, Homo sapiens
tcacttctcgcccag

SEQ ID NO: 1598912 - DNA, 15 bp, Homo sapiens
ctcacttctcgccca

SEQ ID NO: 1598913 - DNA, 15 bp, Homo sapiens
actcacttctcgccc

SEQ ID NO: 1598914 - DNA, 15 bp, Homo sapiens
tactcacttctcgcc

SEQ ID NO: 1598915 - DNA, 15 bp, Homo sapiens
gtactcacttctcgc

SEQ ID NO: 1598916 - DNA, 15 bp, Homo sapiens
tgtactcacttctcg

SEQ ID NO: 1598917 - DNA, 15 bp, Homo sapiens
atgtactcacttctc

SEQ ID NO: 1598918 - DNA, 15 bp, Homo sapiens
catgtactcacttct

SEQ ID NO: 1598919 - DNA, 15 bp, Homo sapiens
gcatgtactcacttc

SEQ ID NO: 1598920 - DNA, 15 bp, Homo sapiens
ggcatgtactcactt

SEQ ID NO: 1598921 - DNA, 15 bp, Homo sapiens
tggcatgtactcact

SEQ ID NO: 1598922 - DNA, 15 bp, Homo sapiens
ttggcatgtactcac

SEQ ID NO: 1598923 - DNA, 15 bp, Homo sapiens
tttggcatgtactca

SEQ ID NO: 1598924 - DNA, 15 bp, Homo sapiens
atttggcatgtactc

SEQ ID NO: 1598925 - DNA, 15 bp, Homo sapiens
tatttggcatgtact

SEQ ID NO: 1598926 - DNA, 15 bp, Homo sapiens
ttatttggcatgtac

SEQ ID NO: 1598927 - DNA, 15 bp, Homo sapiens
cttatttggcatgta

SEQ ID NO: 1598928 - DNA, 15 bp, Homo sapiens
tcttatttggcatgt

SEQ ID NO: 1598929 - DNA, 15 bp, Homo sapiens
ttcttatttggcatg

SEQ ID NO: 1598930 - DNA, 15 bp, Homo sapiens
attcttatttggcat

SEQ ID NO: 1598931 - DNA, 15 bp, Homo sapiens
gattcttatttggca

SEQ ID NO: 1598932 - DNA, 15 bp, Homo sapiens
tgattcttatttggc

SEQ ID NO: 1598933 - DNA, 15 bp, Homo sapiens
ttgattcttatttgg

SEQ ID NO: 1598934 - DNA, 15 bp, Homo sapiens
attgattcttatttg

SEQ ID NO: 1598935 - DNA, 15 bp, Homo sapiens
aattgattcttattt

SEQ ID NO: 1598936 - DNA, 15 bp, Homo sapiens
caattgattcttatt

SEQ ID NO: 1598937 - DNA, 15 bp, Homo sapiens
gcaattgattcttat

SEQ ID NO: 1598938 - DNA, 15 bp, Homo sapiens
ggcaattgattctta

SEQ ID NO: 1598939 - DNA, 15 bp, Homo sapiens
gggcaattgattctt

SEQ ID NO: 1598940 - DNA, 15 bp, Homo sapiens
tgggcaattgattct

SEQ ID NO: 1598941 - DNA, 15 bp, Homo sapiens
atgggcaattgattc

SEQ ID NO: 1598942 - DNA, 15 bp, Homo sapiens
tatgggcaattgatt

SEQ ID NO: 1598943 - DNA, 15 bp, Homo sapiens
ttatgggcaattgat

SEQ ID NO: 1598944 - DNA, 15 bp, Homo sapiens
attatgggcaattga

SEQ ID NO: 1598945 - DNA, 15 bp, Homo sapiens
gattatgggcaattg

SEQ ID NO: 1598946 - DNA, 15 bp, Homo sapiens
ggattatgggcaatt

SEQ ID NO: 1598947 - DNA, 15 bp, Homo sapiens
tggattatgggcaat

SEQ ID NO: 1598948 - DNA, 15 bp, Homo sapiens
ttggattatgggcaa

SEQ ID NO: 1598949 - DNA, 15 bp, Homo sapiens
attggattatgggca

SEQ ID NO: 1598950 - DNA, 15 bp, Homo sapiens
tattggattatgggc

SEQ ID NO: 1598951 - DNA, 15 bp, Homo sapiens
gtattggattatggg

SEQ ID NO: 1598952 - DNA, 15 bp, Homo sapiens
agtattggattatgg

SEQ ID NO: 1598953 - DNA, 15 bp, Homo sapiens
aagtattggattatg

SEQ ID NO: 1598954 - DNA, 15 bp, Homo sapiens
gaagtattggattat

SEQ ID NO: 1598955 - DNA, 15 bp, Homo sapiens
ggaagtattggatta

SEQ ID NO: 1598956 - DNA, 15 bp, Homo sapiens
tggaagtattggatt

SEQ ID NO: 1598957 - DNA, 15 bp, Homo sapiens
ctggaagtattggat

SEQ ID NO: 1598958 - DNA, 15 bp, Homo sapiens
cctggaagtattgga

SEQ ID NO: 1598959 - DNA, 15 bp, Homo sapiens
gcctggaagtattgg

SEQ ID NO: 1598960 - DNA, 15 bp, Homo sapiens
ggcctggaagtattg

SEQ ID NO: 1598961 - DNA, 15 bp, Homo sapiens
aggcctggaagtatt

SEQ ID NO: 1598962 - DNA, 15 bp, Homo sapiens
taggcctggaagtat

SEQ ID NO: 1598963 - DNA, 15 bp, Homo sapiens
ctaggcctggaagta

SEQ ID NO: 1598964 - DNA, 15 bp, Homo sapiens
tctaggcctggaagt

SEQ ID NO: 1598965 - DNA, 15 bp, Homo sapiens
ctctaggcctggaag

SEQ ID NO: 1598966 - DNA, 15 bp, Homo sapiens
cctctaggcctggaa

SEQ ID NO: 1598967 - DNA, 15 bp, Homo sapiens
tcctctaggcctgga

SEQ ID NO: 1598968 - DNA, 15 bp, Homo sapiens
ttcctctaggcctgg

SEQ ID NO: 1598969 - DNA, 15 bp, Homo sapiens
tttcctctaggcctg

SEQ ID NO: 1598970 - DNA, 15 bp, Homo sapiens
ctttcctctaggcct

SEQ ID NO: 1598971 - DNA, 15 bp, Homo sapiens
actttcctctaggcc

SEQ ID NO: 1598972 - DNA, 15 bp, Homo sapiens
cactttcctctaggc

SEQ ID NO: 1598973 - DNA, 15 bp, Homo sapiens
gcactttcctctagg

SEQ ID NO: 1598974 - DNA, 15 bp, Homo sapiens
agcactttcctctag

SEQ ID NO: 1598975 - DNA, 15 bp, Homo sapiens
cagcactttcctcta

SEQ ID NO: 1598976 - DNA, 15 bp, Homo sapiens
ccagcactttcctct

SEQ ID NO: 1598977 - DNA, 15 bp, Homo sapiens
cccagcactttcctc

SEQ ID NO: 1598978 - DNA, 15 bp, Homo sapiens
tcccagcactttcct

SEQ ID NO: 1598979 - DNA, 15 bp, Homo sapiens
ctcccagcactttcc

SEQ ID NO: 1598980 - DNA, 15 bp, Homo sapiens
cctcccagcactttc

SEQ ID NO: 1598981 - DNA, 15 bp, Homo sapiens
ccctcccagcacttt

SEQ ID NO: 1598982 - DNA, 15 bp, Homo sapiens
cccctcccagcactt

SEQ ID NO: 1598983 - DNA, 15 bp, Homo sapiens
gcccctcccagcact

SEQ ID NO: 1598984 - DNA, 15 bp, Homo sapiens
cgcccctcccagcac

SEQ ID NO: 1598985 - DNA, 15 bp, Homo sapiens
acgcccctcccagca

SEQ ID NO: 1598986 - DNA, 15 bp, Homo sapiens
gacgcccctcccagc

SEQ ID NO: 1598987 - DNA, 15 bp, Homo sapiens
agacgcccctcccag

SEQ ID NO: 1598988 - DNA, 15 bp, Homo sapiens
cagacgcccctccca

SEQ ID NO: 1598989 - DNA, 15 bp, Homo sapiens
gcagacgcccctccc

SEQ ID NO: 1598990 - DNA, 15 bp, Homo sapiens
ggcagacgcccctcc

SEQ ID NO: 1598991 - DNA, 15 bp, Homo sapiens
gggcagacgcccctc

SEQ ID NO: 1598992 - DNA, 15 bp, Homo sapiens
cgggcagacgcccct

SEQ ID NO: 1598993 - DNA, 15 bp, Homo sapiens
gcgggcagacgcccc

SEQ ID NO: 1598994 - DNA, 15 bp, Homo sapiens
tgcgggcagacgccc

SEQ ID NO: 1598995 - DNA, 15 bp, Homo sapiens
ctgcgggcagacgcc

SEQ ID NO: 1598996 - DNA, 15 bp, Homo sapiens
gctgcgggcagacgc

SEQ ID NO: 1598997 - DNA, 15 bp, Homo sapiens
agctgcgggcagacg

SEQ ID NO: 1598998 - DNA, 15 bp, Homo sapiens
cagctgcgggcagac

SEQ ID NO: 1598999 - DNA, 15 bp, Homo sapiens
ccagctgcgggcaga

SEQ ID NO: 1599000 - DNA, 15 bp, Homo sapiens
gccagctgcgggcag

SEQ ID NO: 1599001 - DNA, 15 bp, Homo sapiens
agccagctgcgggca

SEQ ID NO: 1599002 - DNA, 15 bp, Homo sapiens
gagccagctgcgggc

SEQ ID NO: 1599003 - DNA, 15 bp, Homo sapiens
tgagccagctgcggg

SEQ ID NO: 1599004 - DNA, 15 bp, Homo sapiens
ctgagccagctgcgg

SEQ ID NO: 1599005 - DNA, 15 bp, Homo sapiens
gctgagccagctgcg

SEQ ID NO: 1599006 - DNA, 15 bp, Homo sapiens
agctgagccagctgc

SEQ ID NO: 1599007 - DNA, 15 bp, Homo sapiens
cagctgagccagctg

SEQ ID NO: 1599008 - DNA, 15 bp, Homo sapiens
gcagctgagccagct

SEQ ID NO: 1599009 - DNA, 15 bp, Homo sapiens
ggcagctgagccagc

SEQ ID NO: 1599010 - DNA, 15 bp, Homo sapiens
aggcagctgagccag

SEQ ID NO: 1599011 - DNA, 15 bp, Homo sapiens
aaggcagctgagcca

SEQ ID NO: 1599012 - DNA, 15 bp, Homo sapiens
aaaggcagctgagcc

SEQ ID NO: 1599013 - DNA, 15 bp, Homo sapiens
gaaaggcagctgagc

SEQ ID NO: 1599014 - DNA, 15 bp, Homo sapiens
cgaaaggcagctgag

SEQ ID NO: 1599015 - DNA, 15 bp, Homo sapiens
tcgaaaggcagctga

SEQ ID NO: 1599016 - DNA, 15 bp, Homo sapiens
gtcgaaaggcagctg

SEQ ID NO: 1599017 - DNA, 15 bp, Homo sapiens
ggtcgaaaggcagct

SEQ ID NO: 1599018 - DNA, 15 bp, Homo sapiens
cggtcgaaaggcagc

SEQ ID NO: 1599019 - DNA, 15 bp, Homo sapiens
ccggtcgaaaggcag

SEQ ID NO: 1599020 - DNA, 15 bp, Homo sapiens
tccggtcgaaaggca

SEQ ID NO: 1599021 - DNA, 15 bp, Homo sapiens
ctccggtcgaaaggc

SEQ ID NO: 1599022 - DNA, 15 bp, Homo sapiens
tctccggtcgaaagg

SEQ ID NO: 1599023 - DNA, 15 bp, Homo sapiens
atctccggtcgaaag

SEQ ID NO: 1599024 - DNA, 15 bp, Homo sapiens
aatctccggtcgaaa

SEQ ID NO: 1599025 - DNA, 15 bp, Homo sapiens
aaatctccggtcgaa

SEQ ID NO: 1599026 - DNA, 15 bp, Homo sapiens
caaatctccggtcga

SEQ ID NO: 1599027 - DNA, 15 bp, Homo sapiens
ccaaatctccggtcg

SEQ ID NO: 1599028 - DNA, 15 bp, Homo sapiens
gccaaatctccggtc

SEQ ID NO: 1599029 - DNA, 15 bp, Homo sapiens
tgccaaatctccggt

SEQ ID NO: 1599030 - DNA, 15 bp, Homo sapiens
ttgccaaatctccgg

SEQ ID NO: 1599031 - DNA, 15 bp, Homo sapiens
cttgccaaatctccg

SEQ ID NO: 1599032 - DNA, 15 bp, Homo sapiens
ccttgccaaatctcc

SEQ ID NO: 1599033 - DNA, 15 bp, Homo sapiens
cccttgccaaatctc

SEQ ID NO: 1599034 - DNA, 15 bp, Homo sapiens
acccttgccaaatct

SEQ ID NO: 1599035 - DNA, 15 bp, Homo sapiens
cacccttgccaaatc

SEQ ID NO: 1599036 - DNA, 15 bp, Homo sapiens
tcacccttgccaaat

SEQ ID NO: 1599037 - DNA, 15 bp, Homo sapiens
gtcacccttgccaaa

SEQ ID NO: 1599038 - DNA, 15 bp, Homo sapiens
ggtcacccttgccaa

SEQ ID NO: 1599039 - DNA, 15 bp, Homo sapiens
gggtcacccttgcca

SEQ ID NO: 1599040 - DNA, 15 bp, Homo sapiens
cgggtcacccttgcc

SEQ ID NO: 1599041 - DNA, 15 bp, Homo sapiens
ccgggtcacccttgc

SEQ ID NO: 1599042 - DNA, 15 bp, Homo sapiens
tccgggtcacccttg

SEQ ID NO: 1599043 - DNA, 15 bp, Homo sapiens
ttccgggtcaccctt

SEQ ID NO: 1599044 - DNA, 15 bp, Homo sapiens
cttccgggtcaccct

SEQ ID NO: 1599045 - DNA, 15 bp, Homo sapiens
ccttccgggtcaccc

SEQ ID NO: 1599046 - DNA, 15 bp, Homo sapiens
cccttccgggtcacc

SEQ ID NO: 1599047 - DNA, 15 bp, Homo sapiens
gcccttccgggtcac

SEQ ID NO: 1599048 - DNA, 15 bp, Homo sapiens
agcccttccgggtca

SEQ ID NO: 1599049 - DNA, 15 bp, Homo sapiens
tagcccttccgggtc

SEQ ID NO: 1599050 - DNA, 15 bp, Homo sapiens
gtagcccttccgggt

SEQ ID NO: 1599051 - DNA, 15 bp, Homo sapiens
tgtagcccttccggg

SEQ ID NO: 1599052 - DNA, 15 bp, Homo sapiens
ctgtagcccttccgg

SEQ ID NO: 1599053 - DNA, 15 bp, Homo sapiens
gctgtagcccttccg

SEQ ID NO: 1599054 - DNA, 15 bp, Homo sapiens
ggctgtagcccttcc

SEQ ID NO: 1599055 - DNA, 15 bp, Homo sapiens
gggctgtagcccttc

SEQ ID NO: 1599056 - DNA, 15 bp, Homo sapiens
tgggctgtagccctt

SEQ ID NO: 1599057 - DNA, 15 bp, Homo sapiens
atgggctgtagccct

SEQ ID NO: 1599058 - DNA, 15 bp, Homo sapiens
gatgggctgtagccc

SEQ ID NO: 1599059 - DNA, 15 bp, Homo sapiens
ggatgggctgtagcc

SEQ ID NO: 1599060 - DNA, 15 bp, Homo sapiens
tggatgggctgtagc

SEQ ID NO: 1599061 - DNA, 15 bp, Homo sapiens
ctggatgggctgtag

SEQ ID NO: 1599062 - DNA, 15 bp, Homo sapiens
cctggatgggctgta

SEQ ID NO: 1599063 - DNA, 15 bp, Homo sapiens
ccctggatgggctgt

SEQ ID NO: 1599064 - DNA, 15 bp, Homo sapiens
cccctggatgggctg

SEQ ID NO: 1599065 - DNA, 15 bp, Homo sapiens
tcccctggatgggct

SEQ ID NO: 1599066 - DNA, 15 bp, Homo sapiens
gtcccctggatgggc

SEQ ID NO: 1599067 - DNA, 15 bp, Homo sapiens
agtcccctggatggg

SEQ ID NO: 1599068 - DNA, 15 bp, Homo sapiens
tagtcccctggatgg

SEQ ID NO: 1599069 - DNA, 15 bp, Homo sapiens
gtagtcccctggatg

SEQ ID NO: 1599070 - DNA, 15 bp, Homo sapiens
tgtagtcccctggat

SEQ ID NO: 1599071 - DNA, 15 bp, Homo sapiens
ttgtagtcccctgga

SEQ ID NO: 1599072 - DNA, 15 bp, Homo sapiens
attgtagtcccctgg

SEQ ID NO: 1599073 - DNA, 15 bp, Homo sapiens
aattgtagtcccctg

SEQ ID NO: 1599074 - DNA, 15 bp, Homo sapiens
aaattgtagtcccct

SEQ ID NO: 1599075 - DNA, 15 bp, Homo sapiens
aaaattgtagtcccc

SEQ ID NO: 1599076 - DNA, 15 bp, Homo sapiens
aaaaattgtagtccc

SEQ ID NO: 1599077 - DNA, 15 bp, Homo sapiens
gaaaaattgtagtcc

SEQ ID NO: 1599078 - DNA, 15 bp, Homo sapiens
agaaaaattgtagtc

SEQ ID NO: 1599079 - DNA, 15 bp, Homo sapiens
cagaaaaattgtagt

SEQ ID NO: 1599080 - DNA, 15 bp, Homo sapiens
acagaaaaattgtag

SEQ ID NO: 1599081 - DNA, 15 bp, Homo sapiens
cacagaaaaattgta

SEQ ID NO: 1599082 - DNA, 15 bp, Homo sapiens
acacagaaaaattgt

SEQ ID NO: 1599083 - DNA, 15 bp, Homo sapiens
aacacagaaaaattg

SEQ ID NO: 1599084 - DNA, 15 bp, Homo sapiens
gaacacagaaaaatt

SEQ ID NO: 1599085 - DNA, 15 bp, Homo sapiens
tgaacacagaaaaat

SEQ ID NO: 1599086 - DNA, 15 bp, Homo sapiens
ttgaacacagaaaaa

SEQ ID NO: 1599087 - DNA, 15 bp, Homo sapiens
tttgaacacagaaaa

SEQ ID NO: 1599088 - DNA, 15 bp, Homo sapiens
ttttgaacacagaaa

SEQ ID NO: 1599089 - DNA, 15 bp, Homo sapiens
gttttgaacacagaa

SEQ ID NO: 1599090 - DNA, 15 bp, Homo sapiens
ggttttgaacacaga

SEQ ID NO: 1599091 - DNA, 15 bp, Homo sapiens
tggttttgaacacag

SEQ ID NO: 1599092 - DNA, 15 bp, Homo sapiens
atggttttgaacaca

SEQ ID NO: 1599093 - DNA, 15 bp, Homo sapiens
aatggttttgaacac

SEQ ID NO: 1599094 - DNA, 15 bp, Homo sapiens
gaatggttttgaaca

SEQ ID NO: 1599095 - DNA, 15 bp, Homo sapiens
ggaatggttttgaac

SEQ ID NO: 1599096 - DNA, 15 bp, Homo sapiens
aggaatggttttgaa

SEQ ID NO: 1599097 - DNA, 15 bp, Homo sapiens
aaggaatggttttga

SEQ ID NO: 1599098 - DNA, 15 bp, Homo sapiens
agaaggaatggtttt

SEQ ID NO: 1599099 - DNA, 15 bp, Homo sapiens
gagaaggaatggttt

SEQ ID NO: 1599100 - DNA, 15 bp, Homo sapiens
ggagaaggaatggtt

SEQ ID NO: 1599101 - DNA, 15 bp, Homo sapiens
gggagaaggaatggt

SEQ ID NO: 1599102 - DNA, 15 bp, Homo sapiens
ggggagaaggaatgg

SEQ ID NO: 1599103 - DNA, 15 bp, Homo sapiens
aggggagaaggaatg

SEQ ID NO: 1599104 - DNA, 15 bp, Homo sapiens
gaggggagaaggaat

SEQ ID NO: 1599105 - DNA, 15 bp, Homo sapiens
agaggggagaaggaa

SEQ ID NO: 1599106 - DNA, 15 bp, Homo sapiens
gagaggggagaagga

SEQ ID NO: 1599107 - DNA, 15 bp, Homo sapiens
agagaggggagaagg

SEQ ID NO: 1599108 - DNA, 15 bp, Homo sapiens
gagagaggggagaag

SEQ ID NO: 1599109 - DNA, 15 bp, Homo sapiens
agagagaggggagaa

SEQ ID NO: 1599110 - DNA, 15 bp, Homo sapiens
gagagagaggggaga

SEQ ID NO: 1599111 - DNA, 15 bp, Homo sapiens
tgagagagaggggag

SEQ ID NO: 1599112 - DNA, 15 bp, Homo sapiens
atgagagagagggga

SEQ ID NO: 1599113 - DNA, 15 bp, Homo sapiens
gatgagagagagggg

SEQ ID NO: 1599114 - DNA, 15 bp, Homo sapiens
ggatgagagagaggg

SEQ ID NO: 1599115 - DNA, 15 bp, Homo sapiens
gggatgagagagagg

SEQ ID NO: 1599116 - DNA, 15 bp, Homo sapiens
agggatgagagagag

SEQ ID NO: 1599117 - DNA, 15 bp, Homo sapiens
tagggatgagagaga

SEQ ID NO: 1599118 - DNA, 15 bp, Homo sapiens
ttagggatgagagag

SEQ ID NO: 1599119 - DNA, 15 bp, Homo sapiens
attagggatgagaga

SEQ ID NO: 1599120 - DNA, 15 bp, Homo sapiens
cattagggatgagag

SEQ ID NO: 1599121 - DNA, 15 bp, Homo sapiens
ccattagggatgaga

SEQ ID NO: 1599122 - DNA, 15 bp, Homo sapiens
cccattagggatgag

SEQ ID NO: 1599123 - DNA, 15 bp, Homo sapiens
acccattagggatga

SEQ ID NO: 1599124 - DNA, 15 bp, Homo sapiens
gacccattagggatg

SEQ ID NO: 1599125 - DNA, 15 bp, Homo sapiens
agacccattagggat

SEQ ID NO: 1599126 - DNA, 15 bp, Homo sapiens
gagacccattaggga

SEQ ID NO: 1599127 - DNA, 15 bp, Homo sapiens
ggagacccattaggg

SEQ ID NO: 1599128 - DNA, 15 bp, Homo sapiens
gggagacccattagg

SEQ ID NO: 1599129 - DNA, 15 bp, Homo sapiens
tgggagacccattag

SEQ ID NO: 1599130 - DNA, 15 bp, Homo sapiens
ttgggagacccatta

SEQ ID NO: 1599131 - DNA, 15 bp, Homo sapiens
gttgggagacccatt

SEQ ID NO: 1599132 - DNA, 15 bp, Homo sapiens
tgttgggagacccat

SEQ ID NO: 1599133 - DNA, 15 bp, Homo sapiens
gtgttgggagaccca

SEQ ID NO: 1599134 - DNA, 15 bp, Homo sapiens
tgtgttgggagaccc

SEQ ID NO: 1599135 - DNA, 15 bp, Homo sapiens
ttgtgttgggagacc

SEQ ID NO: 1599136 - DNA, 15 bp, Homo sapiens
tttgtgttgggagac

SEQ ID NO: 1599137 - DNA, 15 bp, Homo sapiens
gtttgtgttgggaga

SEQ ID NO: 1599138 - DNA, 15 bp, Homo sapiens
tgtttgtgttgggag

SEQ ID NO: 1599139 - DNA, 15 bp, Homo sapiens
gtgtttgtgttggga

SEQ ID NO: 1599140 - DNA, 15 bp, Homo sapiens
agtgtttgtgttggg

SEQ ID NO: 1599141 - DNA, 15 bp, Homo sapiens
cagtgtttgtgttgg

SEQ ID NO: 1599142 - DNA, 15 bp, Homo sapiens
tcagtgtttgtgttg

SEQ ID NO: 1599143 - DNA, 15 bp, Homo sapiens
ctcagtgtttgtgtt

SEQ ID NO: 1599144 - DNA, 15 bp, Homo sapiens
gctcagtgtttgtgt

SEQ ID NO: 1599145 - DNA, 15 bp, Homo sapiens
cgctcagtgtttgtg

SEQ ID NO: 1599146 - DNA, 15 bp, Homo sapiens
gcgctcagtgtttgt

SEQ ID NO: 1599147 - DNA, 15 bp, Homo sapiens
agcgctcagtgtttg

SEQ ID NO: 1599148 - DNA, 15 bp, Homo sapiens
cagcgctcagtgttt

SEQ ID NO: 1599149 - DNA, 15 bp, Homo sapiens
tcagcgctcagtgtt

SEQ ID NO: 1599150 - DNA, 15 bp, Homo sapiens
ctcagcgctcagtgt

SEQ ID NO: 1599151 - DNA, 15 bp, Homo sapiens
cctcagcgctcagtg

SEQ ID NO: 1599152 - DNA, 15 bp, Homo sapiens
tcctcagcgctcagt

SEQ ID NO: 1599153 - DNA, 15 bp, Homo sapiens
ttcctcagcgctcag

SEQ ID NO: 1599154 - DNA, 15 bp, Homo sapiens
tttcctcagcgctca

SEQ ID NO: 1599155 - DNA, 15 bp, Homo sapiens
gtttcctcagcgctc

SEQ ID NO: 1599156 - DNA, 15 bp, Homo sapiens
ggtttcctcagcgct

SEQ ID NO: 1599157 - DNA, 15 bp, Homo sapiens
tggtttcctcagcgc

SEQ ID NO: 1599158 - DNA, 15 bp, Homo sapiens
ctggtttcctcagcg

SEQ ID NO: 1599159 - DNA, 15 bp, Homo sapiens
cctggtttcctcagc

SEQ ID NO: 1599160 - DNA, 15 bp, Homo sapiens
tcctggtttcctcag

SEQ ID NO: 1599161 - DNA, 15 bp, Homo sapiens
ttcctggtttcctca

SEQ ID NO: 1599162 - DNA, 15 bp, Homo sapiens
tttcctggtttcctc

SEQ ID NO: 1599163 - DNA, 15 bp, Homo sapiens
atttcctggtttcct

SEQ ID NO: 1599164 - DNA, 15 bp, Homo sapiens
aatttcctggtttcc

SEQ ID NO: 1599165 - DNA, 15 bp, Homo sapiens
taatttcctggtttc

SEQ ID NO: 1599166 - DNA, 15 bp, Homo sapiens
ctaatttcctggttt

SEQ ID NO: 1599167 - DNA, 15 bp, Homo sapiens
tctaatttcctggtt

SEQ ID NO: 1599168 - DNA, 15 bp, Homo sapiens
ctctaatttcctggt

SEQ ID NO: 1599169 - DNA, 15 bp, Homo sapiens
cctctaatttcctgg

SEQ ID NO: 1599170 - DNA, 15 bp, Homo sapiens
acctctaatttcctg

SEQ ID NO: 1599171 - DNA, 15 bp, Homo sapiens
aacctctaatttcct

SEQ ID NO: 1599172 - DNA, 15 bp, Homo sapiens
caacctctaatttcc

SEQ ID NO: 1599173 - DNA, 15 bp, Homo sapiens
ccaacctctaatttc

SEQ ID NO: 1599174 - DNA, 15 bp, Homo sapiens
tccaacctctaattt

SEQ ID NO: 1599175 - DNA, 15 bp, Homo sapiens
ttccaacctctaatt

SEQ ID NO: 1599176 - DNA, 15 bp, Homo sapiens
cttccaacctctaat

SEQ ID NO: 1599177 - DNA, 15 bp, Homo sapiens
tcttccaacctctaa

SEQ ID NO: 1599178 - DNA, 15 bp, Homo sapiens
ttcttccaacctcta

SEQ ID NO: 1599179 - DNA, 15 bp, Homo sapiens
tttcttccaacctct

SEQ ID NO: 1599180 - DNA, 15 bp, Homo sapiens
ctttcttccaacctc

SEQ ID NO: 1599181 - DNA, 15 bp, Homo sapiens
cctttcttccaacct

SEQ ID NO: 1599182 - DNA, 15 bp, Homo sapiens
tcctttcttccaacc

SEQ ID NO: 1599183 - DNA, 15 bp, Homo sapiens
ttcctttcttccaac

SEQ ID NO: 1599184 - DNA, 15 bp, Homo sapiens
attcctttcttccaa

SEQ ID NO: 1599185 - DNA, 15 bp, Homo sapiens
gattcctttcttcca

SEQ ID NO: 1599186 - DNA, 15 bp, Homo sapiens
tttgattcctttctt

SEQ ID NO: 1599187 - DNA, 15 bp, Homo sapiens
ttttgattcctttct

SEQ ID NO: 1599188 - DNA, 15 bp, Homo sapiens
tttttgattcctttc

SEQ ID NO: 1599189 - DNA, 15 bp, Homo sapiens
atttttgattccttt

SEQ ID NO: 1599190 - DNA, 15 bp, Homo sapiens
catttttgattcctt

SEQ ID NO: 1599191 - DNA, 15 bp, Homo sapiens
tcatttttgattcct

SEQ ID NO: 1599192 - DNA, 15 bp, Homo sapiens
atcatttttgattcc

SEQ ID NO: 1599193 - DNA, 15 bp, Homo sapiens
aatcatttttgattc

SEQ ID NO: 1599194 - DNA, 15 bp, Homo sapiens
aaatcatttttgatt

SEQ ID NO: 1599195 - DNA, 15 bp, Homo sapiens
taaatcatttttgat

SEQ ID NO: 1599196 - DNA, 15 bp, Homo sapiens
ataaatcatttttga

SEQ ID NO: 1599197 - DNA, 15 bp, Homo sapiens
aataaatcatttttg

SEQ ID NO: 1599198 - DNA, 15 bp, Homo sapiens
taataaatcattttt

SEQ ID NO: 1599199 - DNA, 15 bp, Homo sapiens
ataataaatcatttt

SEQ ID NO: 1599200 - DNA, 15 bp, Homo sapiens
aataataaatcattt

SEQ ID NO: 1599201 - DNA, 15 bp, Homo sapiens
aaataataaatcatt

SEQ ID NO: 1599202 - DNA, 15 bp, Homo sapiens
taaataataaatcat

SEQ ID NO: 1599203 - DNA, 15 bp, Homo sapiens
ataaataataaatca

SEQ ID NO: 1599204 - DNA, 15 bp, Homo sapiens
aataaataataaatc

SEQ ID NO: 1599205 - DNA, 15 bp, Homo sapiens
aaataaataataaat

SEQ ID NO: 1599206 - DNA, 15 bp, Homo sapiens
ataaataaataataa

SEQ ID NO: 1599207 - DNA, 15 bp, Homo sapiens
aataaataaataata

SEQ ID NO: 1599208 - DNA, 15 bp, Homo sapiens
aaaaaaaataaataa

SEQ ID NO: 1599209 - DNA, 15 bp, Homo sapiens
caaaaaaaataaata

SEQ ID NO: 1599210 - DNA, 15 bp, Homo sapiens
gcaaaaaaaataaat

SEQ ID NO: 1599211 - DNA, 15 bp, Homo sapiens
agcaaaaaaaataaa

SEQ ID NO: 1599212 - DNA, 15 bp, Homo sapiens
aagcaaaaaaaataa

SEQ ID NO: 1599213 - DNA, 15 bp, Homo sapiens
caagcaaaaaaaata

SEQ ID NO: 1599214 - DNA, 15 bp, Homo sapiens
ccaagcaaaaaaaat

SEQ ID NO: 1599215 - DNA, 15 bp, Homo sapiens
gccaagcaaaaaaaa

SEQ ID NO: 1599216 - DNA, 15 bp, Homo sapiens
cgccaagcaaaaaaa

SEQ ID NO: 1599217 - DNA, 15 bp, Homo sapiens
acgccaagcaaaaaa

SEQ ID NO: 1599218 - DNA, 15 bp, Homo sapiens
cacgccaagcaaaaa

SEQ ID NO: 1599219 - DNA, 15 bp, Homo sapiens
ccacgccaagcaaaa

SEQ ID NO: 1599220 - DNA, 15 bp, Homo sapiens
cccacgccaagcaaa

SEQ ID NO: 1599221 - DNA, 15 bp, Homo sapiens
tcccacgccaagcaa

SEQ ID NO: 1599222 - DNA, 15 bp, Homo sapiens
ctcccacgccaagca

SEQ ID NO: 1599223 - DNA, 15 bp, Homo sapiens
cctcccacgccaagc

SEQ ID NO: 1599224 - DNA, 15 bp, Homo sapiens
acctcccacgccaag

SEQ ID NO: 1599225 - DNA, 15 bp, Homo sapiens
tacctcccacgccaa

SEQ ID NO: 1599226 - DNA, 15 bp, Homo sapiens
ctacctcccacgcca

SEQ ID NO: 1599227 - DNA, 15 bp, Homo sapiens
actacctcccacgcc

SEQ ID NO: 1599228 - DNA, 15 bp, Homo sapiens
cactacctcccacgc

SEQ ID NO: 1599229 - DNA, 15 bp, Homo sapiens
ccactacctcccacg

SEQ ID NO: 1599230 - DNA, 15 bp, Homo sapiens
gccactacctcccac

SEQ ID NO: 1599231 - DNA, 15 bp, Homo sapiens
agccactacctccca

SEQ ID NO: 1599232 - DNA, 15 bp, Homo sapiens
cagccactacctccc

SEQ ID NO: 1599233 - DNA, 15 bp, Homo sapiens
ccagccactacctcc

SEQ ID NO: 1599234 - DNA, 15 bp, Homo sapiens
cccagccactacctc

SEQ ID NO: 1599235 - DNA, 15 bp, Homo sapiens
tcccagccactacct

SEQ ID NO: 1599236 - DNA, 15 bp, Homo sapiens
ctcccagccactacc

SEQ ID NO: 1599237 - DNA, 15 bp, Homo sapiens
cctcccagccactac

SEQ ID NO: 1599238 - DNA, 15 bp, Homo sapiens
acctcccagccacta

SEQ ID NO: 1599239 - DNA, 15 bp, Homo sapiens
cacctcccagccact

SEQ ID NO: 1599240 - DNA, 15 bp, Homo sapiens
tcacctcccagccac

SEQ ID NO: 1599241 - DNA, 15 bp, Homo sapiens
ttcacctcccagcca

SEQ ID NO: 1599242 - DNA, 15 bp, Homo sapiens
cttcacctcccagcc

SEQ ID NO: 1599243 - DNA, 15 bp, Homo sapiens
tcttcacctcccagc

SEQ ID NO: 1599244 - DNA, 15 bp, Homo sapiens
ttcttcacctcccag

SEQ ID NO: 1599245 - DNA, 15 bp, Homo sapiens
gttcttcacctccca

SEQ ID NO: 1599246 - DNA, 15 bp, Homo sapiens
agttcttcacctccc

SEQ ID NO: 1599247 - DNA, 15 bp, Homo sapiens
cagttcttcacctcc

SEQ ID NO: 1599248 - DNA, 15 bp, Homo sapiens
acagttcttcacctc

SEQ ID NO: 1599249 - DNA, 15 bp, Homo sapiens
tacagttcttcacct

SEQ ID NO: 1599250 - DNA, 15 bp, Homo sapiens
ttacagttcttcacc

SEQ ID NO: 1599251 - DNA, 15 bp, Homo sapiens
tttacagttcttcac

SEQ ID NO: 1599252 - DNA, 15 bp, Homo sapiens
gtttacagttcttca

SEQ ID NO: 1599253 - DNA, 15 bp, Homo sapiens
tgtttacagttcttc

SEQ ID NO: 1599254 - DNA, 15 bp, Homo sapiens
ctgtttacagttctt

SEQ ID NO: 1599255 - DNA, 15 bp, Homo sapiens
cctgtttacagttct

SEQ ID NO: 1599256 - DNA, 15 bp, Homo sapiens
tcctgtttacagttc

SEQ ID NO: 1599257 - DNA, 15 bp, Homo sapiens
ctcctgtttacagtt

SEQ ID NO: 1599258 - DNA, 15 bp, Homo sapiens
tctcctgtttacagt

SEQ ID NO: 1599259 - DNA, 15 bp, Homo sapiens
ttctcctgtttacag

SEQ ID NO: 1599260 - DNA, 15 bp, Homo sapiens
tttctcctgtttaca

SEQ ID NO: 1599261 - DNA, 15 bp, Homo sapiens
ctttctcctgtttac

SEQ ID NO: 1599262 - DNA, 15 bp, Homo sapiens
tctttctcctgttta

SEQ ID NO: 1599263 - DNA, 15 bp, Homo sapiens
atctttctcctgttt

SEQ ID NO: 1599264 - DNA, 15 bp, Homo sapiens
aatctttctcctgtt

SEQ ID NO: 1599265 - DNA, 15 bp, Homo sapiens
gaatctttctcctgt

SEQ ID NO: 1599266 - DNA, 15 bp, Homo sapiens
tgaatctttctcctg

SEQ ID NO: 1599267 - DNA, 15 bp, Homo sapiens
atgaatctttctcct

SEQ ID NO: 1599268 - DNA, 15 bp, Homo sapiens
aatgaatctttctcc

SEQ ID NO: 1599269 - DNA, 15 bp, Homo sapiens
taatgaatctttctc

SEQ ID NO: 1599270 - DNA, 15 bp, Homo sapiens
gtaatgaatctttct

SEQ ID NO: 1599271 - DNA, 15 bp, Homo sapiens
agtaatgaatctttc

SEQ ID NO: 1599272 - DNA, 15 bp, Homo sapiens
tagtaatgaatcttt

SEQ ID NO: 1599273 - DNA, 15 bp, Homo sapiens
gtagtaatgaatctt

SEQ ID NO: 1599274 - DNA, 15 bp, Homo sapiens
tgtagtaatgaatct

SEQ ID NO: 1599275 - DNA, 15 bp, Homo sapiens
ttgtagtaatgaatc

SEQ ID NO: 1599276 - DNA, 15 bp, Homo sapiens
tttgtagtaatgaat

SEQ ID NO: 1599277 - DNA, 15 bp, Homo sapiens
ttttgtagtaatgaa

SEQ ID NO: 1599278 - DNA, 15 bp, Homo sapiens
tttttgtagtaatga

SEQ ID NO: 1599279 - DNA, 15 bp, Homo sapiens
atttttgtagtaatg

SEQ ID NO: 1599280 - DNA, 15 bp, Homo sapiens
aatttttgtagtaat

SEQ ID NO: 1599281 - DNA, 15 bp, Homo sapiens
aaatttttgtagtaa

SEQ ID NO: 1599282 - DNA, 15 bp, Homo sapiens
taaatttttgtagta

SEQ ID NO: 1599283 - DNA, 15 bp, Homo sapiens
ctaaatttttgtagt

SEQ ID NO: 1599284 - DNA, 15 bp, Homo sapiens
cctaaatttttgtag

SEQ ID NO: 1599285 - DNA, 15 bp, Homo sapiens
tcctaaatttttgta

SEQ ID NO: 1599286 - DNA, 15 bp, Homo sapiens
atcctaaatttttgt

SEQ ID NO: 1599287 - DNA, 15 bp, Homo sapiens
gatcctaaatttttg

SEQ ID NO: 1599288 - DNA, 15 bp, Homo sapiens
ggatcctaaattttt

SEQ ID NO: 1599289 - DNA, 15 bp, Homo sapiens
gggatcctaaatttt

SEQ ID NO: 1599290 - DNA, 15 bp, Homo sapiens
tgggatcctaaattt

SEQ ID NO: 1599291 - DNA, 15 bp, Homo sapiens
ctgggatcctaaatt

SEQ ID NO: 1599292 - DNA, 15 bp, Homo sapiens
tctgggatcctaaat

SEQ ID NO: 1599293 - DNA, 15 bp, Homo sapiens
ctctgggatcctaaa

SEQ ID NO: 1599294 - DNA, 15 bp, Homo sapiens
tctctgggatcctaa

SEQ ID NO: 1599295 - DNA, 15 bp, Homo sapiens
atctctgggatccta

SEQ ID NO: 1599296 - DNA, 15 bp, Homo sapiens
tatctctgggatcct

SEQ ID NO: 1599297 - DNA, 15 bp, Homo sapiens
ttatctctgggatcc

SEQ ID NO: 1599298 - DNA, 15 bp, Homo sapiens
tttatctctgggatc

SEQ ID NO: 1599299 - DNA, 15 bp, Homo sapiens
ttttatctctgggat

SEQ ID NO: 1599300 - DNA, 15 bp, Homo sapiens
gttttatctctggga

SEQ ID NO: 1599301 - DNA, 15 bp, Homo sapiens
ggttttatctctggg

SEQ ID NO: 1599302 - DNA, 15 bp, Homo sapiens
gggttttatctctgg

SEQ ID NO: 1599303 - DNA, 15 bp, Homo sapiens
tgggttttatctctg

SEQ ID NO: 1599304 - DNA, 15 bp, Homo sapiens
ctgggttttatctct

SEQ ID NO: 1599305 - DNA, 15 bp, Homo sapiens
actgggttttatctc

SEQ ID NO: 1599306 - DNA, 15 bp, Homo sapiens
tactgggttttatct

SEQ ID NO: 1599307 - DNA, 15 bp, Homo sapiens
gtactgggttttatc

SEQ ID NO: 1599308 - DNA, 15 bp, Homo sapiens
tgtactgggttttat

SEQ ID NO: 1599309 - DNA, 15 bp, Homo sapiens
ttgtactgggtttta

SEQ ID NO: 1599310 - DNA, 15 bp, Homo sapiens
gttgtactgggtttt

SEQ ID NO: 1599311 - DNA, 15 bp, Homo sapiens
tgttgtactgggttt

SEQ ID NO: 1599312 - DNA, 15 bp, Homo sapiens
ttgttgtactgggtt

SEQ ID NO: 1599313 - DNA, 15 bp, Homo sapiens
tttgttgtactgggt

SEQ ID NO: 1599314 - DNA, 15 bp, Homo sapiens
ctttgttgtactggg

SEQ ID NO: 1599315 - DNA, 15 bp, Homo sapiens
tctttgttgtactgg

SEQ ID NO: 1599316 - DNA, 15 bp, Homo sapiens
ctctttgttgtactg

SEQ ID NO: 1599317 - DNA, 15 bp, Homo sapiens
actctttgttgtact

SEQ ID NO: 1599318 - DNA, 15 bp, Homo sapiens
cactctttgttgtac

SEQ ID NO: 1599319 - DNA, 15 bp, Homo sapiens
tcactctttgttgta

SEQ ID NO: 1599320 - DNA, 15 bp, Homo sapiens
ttcactctttgttgt

SEQ ID NO: 1599321 - DNA, 15 bp, Homo sapiens
tttcactctttgttg

SEQ ID NO: 1599322 - DNA, 15 bp, Homo sapiens
atttcactctttgtt

SEQ ID NO: 1599323 - DNA, 15 bp, Homo sapiens
gatttcactctttgt

SEQ ID NO: 1599324 - DNA, 15 bp, Homo sapiens
agatttcactctttg

SEQ ID NO: 1599325 - DNA, 15 bp, Homo sapiens
gagatttcactcttt

SEQ ID NO: 1599326 - DNA, 15 bp, Homo sapiens
tgagatttcactctt

SEQ ID NO: 1599327 - DNA, 15 bp, Homo sapiens
ctgagatttcactct

SEQ ID NO: 1599328 - DNA, 15 bp, Homo sapiens
gctgagatttcactc

SEQ ID NO: 1599329 - DNA, 15 bp, Homo sapiens
agctgagatttcact

SEQ ID NO: 1599330 - DNA, 15 bp, Homo sapiens
gagctgagatttcac

SEQ ID NO: 1599331 - DNA, 15 bp, Homo sapiens
ggagctgagatttca

SEQ ID NO: 1599332 - DNA, 15 bp, Homo sapiens
gggagctgagatttc

SEQ ID NO: 1599333 - DNA, 15 bp, Homo sapiens
tgggagctgagattt

SEQ ID NO: 1599334 - DNA, 15 bp, Homo sapiens
ttgggagctgagatt

SEQ ID NO: 1599335 - DNA, 15 bp, Homo sapiens
tttgggagctgagat

SEQ ID NO: 1599336 - DNA, 15 bp, Homo sapiens
ctttgggagctgaga

SEQ ID NO: 1599337 - DNA, 15 bp, Homo sapiens
actttgggagctgag

SEQ ID NO: 1599338 - DNA, 15 bp, Homo sapiens
gactttgggagctga

SEQ ID NO: 1599339 - DNA, 15 bp, Homo sapiens
ggactttgggagctg

SEQ ID NO: 1599340 - DNA, 15 bp, Homo sapiens
aggactttgggagct

SEQ ID NO: 1599341 - DNA, 15 bp, Homo sapiens
aaggactttgggagc

SEQ ID NO: 1599342 - DNA, 15 bp, Homo sapiens
gaaggactttgggag

SEQ ID NO: 1599343 - DNA, 15 bp, Homo sapiens
ggaaggactttggga

SEQ ID NO: 1599344 - DNA, 15 bp, Homo sapiens
aggaaggactttggg

SEQ ID NO: 1599345 - DNA, 15 bp, Homo sapiens
caggaaggactttgg

SEQ ID NO: 1599346 - DNA, 15 bp, Homo sapiens
ccaggaaggactttg

SEQ ID NO: 1599347 - DNA, 15 bp, Homo sapiens
cccaggaaggacttt

SEQ ID NO: 1599348 - DNA, 15 bp, Homo sapiens
tcccaggaaggactt

SEQ ID NO: 1599349 - DNA, 15 bp, Homo sapiens
atcccaggaaggact

SEQ ID NO: 1599350 - DNA, 15 bp, Homo sapiens
catcccaggaaggac

SEQ ID NO: 1599351 - DNA, 15 bp, Homo sapiens
acatcccaggaagga

SEQ ID NO: 1599352 - DNA, 15 bp, Homo sapiens
gacatcccaggaagg

SEQ ID NO: 1599353 - DNA, 15 bp, Homo sapiens
ggacatcccaggaag

SEQ ID NO: 1599354 - DNA, 15 bp, Homo sapiens
aggacatcccaggaa

SEQ ID NO: 1599355 - DNA, 15 bp, Homo sapiens
gaggacatcccagga

SEQ ID NO: 1599356 - DNA, 15 bp, Homo sapiens
tgaggacatcccagg

SEQ ID NO: 1599357 - DNA, 15 bp, Homo sapiens
ctgaggacatcccag

SEQ ID NO: 1599358 - DNA, 15 bp, Homo sapiens
cctgaggacatccca

SEQ ID NO: 1599359 - DNA, 15 bp, Homo sapiens
gcctgaggacatccc

SEQ ID NO: 1599360 - DNA, 15 bp, Homo sapiens
ggcctgaggacatcc

SEQ ID NO: 1599361 - DNA, 15 bp, Homo sapiens
aggcctgaggacatc

SEQ ID NO: 1599362 - DNA, 15 bp, Homo sapiens
caggcctgaggacat

SEQ ID NO: 1599363 - DNA, 15 bp, Homo sapiens
acaggcctgaggaca

SEQ ID NO: 1599364 - DNA, 15 bp, Homo sapiens
gacaggcctgaggac

SEQ ID NO: 1599365 - DNA, 15 bp, Homo sapiens
tgacaggcctgagga

SEQ ID NO: 1599366 - DNA, 15 bp, Homo sapiens
gtgacaggcctgagg

SEQ ID NO: 1599367 - DNA, 15 bp, Homo sapiens
ggtgacaggcctgag

SEQ ID NO: 1599368 - DNA, 15 bp, Homo sapiens
gggtgacaggcctga

SEQ ID NO: 1599369 - DNA, 15 bp, Homo sapiens
tgggtgacaggcctg

SEQ ID NO: 1599370 - DNA, 15 bp, Homo sapiens
ctgggtgacaggcct

SEQ ID NO: 1599371 - DNA, 15 bp, Homo sapiens
actgggtgacaggcc

SEQ ID NO: 1599372 - DNA, 15 bp, Homo sapiens
cactgggtgacaggc

SEQ ID NO: 1599373 - DNA, 15 bp, Homo sapiens
acactgggtgacagg

SEQ ID NO: 1599374 - DNA, 15 bp, Homo sapiens
aacactgggtgacag

SEQ ID NO: 1599375 - DNA, 15 bp, Homo sapiens
taacactgggtgaca

SEQ ID NO: 1599376 - DNA, 15 bp, Homo sapiens
gtaacactgggtgac

SEQ ID NO: 1599377 - DNA, 15 bp, Homo sapiens
ggtaacactgggtga

SEQ ID NO: 1599378 - DNA, 15 bp, Homo sapiens
gggtaacactgggtg

SEQ ID NO: 1599379 - DNA, 15 bp, Homo sapiens
ggggtaacactgggt

SEQ ID NO: 1599380 - DNA, 15 bp, Homo sapiens
cggggtaacactggg

SEQ ID NO: 1599381 - DNA, 15 bp, Homo sapiens
acggggtaacactgg

SEQ ID NO: 1599382 - DNA, 15 bp, Homo sapiens
aacggggtaacactg

SEQ ID NO: 1599383 - DNA, 15 bp, Homo sapiens
caacggggtaacact

SEQ ID NO: 1599384 - DNA, 15 bp, Homo sapiens
ccaacggggtaacac

SEQ ID NO: 1599385 - DNA, 15 bp, Homo sapiens
tccaacggggtaaca

SEQ ID NO: 1599386 - DNA, 15 bp, Homo sapiens
ctccaacggggtaac

SEQ ID NO: 1599387 - DNA, 15 bp, Homo sapiens
cctccaacggggtaa

SEQ ID NO: 1599388 - DNA, 15 bp, Homo sapiens
gcctccaacggggta

SEQ ID NO: 1599389 - DNA, 15 bp, Homo sapiens
ggcctccaacggggt

SEQ ID NO: 1599390 - DNA, 15 bp, Homo sapiens
tggcctccaacgggg

SEQ ID NO: 1599391 - DNA, 15 bp, Homo sapiens
ttggcctccaacggg

SEQ ID NO: 1599392 - DNA, 15 bp, Homo sapiens
tttggcctccaacgg

SEQ ID NO: 1599393 - DNA, 15 bp, Homo sapiens
ctttggcctccaacg

SEQ ID NO: 1599394 - DNA, 15 bp, Homo sapiens
cctttggcctccaac

SEQ ID NO: 1599395 - DNA, 15 bp, Homo sapiens
tcctttggcctccaa

SEQ ID NO: 1599396 - DNA, 15 bp, Homo sapiens
ctcctttggcctcca

SEQ ID NO: 1599397 - DNA, 15 bp, Homo sapiens
gctcctttggcctcc

SEQ ID NO: 1599398 - DNA, 15 bp, Homo sapiens
ggctcctttggcctc

SEQ ID NO: 1599399 - DNA, 15 bp, Homo sapiens
tggctcctttggcct

SEQ ID NO: 1599400 - DNA, 15 bp, Homo sapiens
ttggctcctttggcc

SEQ ID NO: 1599401 - DNA, 15 bp, Homo sapiens
tttggctcctttggc

SEQ ID NO: 1599402 - DNA, 15 bp, Homo sapiens
ttttggctcctttgg

SEQ ID NO: 1599403 - DNA, 15 bp, Homo sapiens
cttttggctcctttg

SEQ ID NO: 1599404 - DNA, 15 bp, Homo sapiens
gcttttggctccttt

SEQ ID NO: 1599405 - DNA, 15 bp, Homo sapiens
tgcttttggctcctt

SEQ ID NO: 1599406 - DNA, 15 bp, Homo sapiens
ctgcttttggctcct

SEQ ID NO: 1599407 - DNA, 15 bp, Homo sapiens
gctgcttttggctcc

SEQ ID NO: 1599408 - DNA, 15 bp, Homo sapiens
tgctgcttttggctc

SEQ ID NO: 1599409 - DNA, 15 bp, Homo sapiens
ctgctgcttttggct

SEQ ID NO: 1599410 - DNA, 15 bp, Homo sapiens
cctgctgcttttggc

SEQ ID NO: 1599411 - DNA, 15 bp, Homo sapiens
ccctgctgcttttgg

SEQ ID NO: 1599412 - DNA, 15 bp, Homo sapiens
cccctgctgcttttg

SEQ ID NO: 1599413 - DNA, 15 bp, Homo sapiens
gcccctgctgctttt

SEQ ID NO: 1599414 - DNA, 15 bp, Homo sapiens
agcccctgctgcttt

SEQ ID NO: 1599415 - DNA, 15 bp, Homo sapiens
cagcccctgctgctt

SEQ ID NO: 1599416 - DNA, 15 bp, Homo sapiens
tcagcccctgctgct

SEQ ID NO: 1599417 - DNA, 15 bp, Homo sapiens
ttcagcccctgctgc

SEQ ID NO: 1599418 - DNA, 15 bp, Homo sapiens
cttcagcccctgctg

SEQ ID NO: 1599419 - DNA, 15 bp, Homo sapiens
ccttcagcccctgct

SEQ ID NO: 1599420 - DNA, 15 bp, Homo sapiens
gccttcagcccctgc

SEQ ID NO: 1599421 - DNA, 15 bp, Homo sapiens
cgccttcagcccctg

SEQ ID NO: 1599422 - DNA, 15 bp, Homo sapiens
acgccttcagcccct

SEQ ID NO: 1599423 - DNA, 15 bp, Homo sapiens
gacgccttcagcccc

SEQ ID NO: 1599424 - DNA, 15 bp, Homo sapiens
agacgccttcagccc

SEQ ID NO: 1599425 - DNA, 15 bp, Homo sapiens
cagacgccttcagcc

SEQ ID NO: 1599426 - DNA, 15 bp, Homo sapiens
gcagacgccttcagc

SEQ ID NO: 1599427 - DNA, 15 bp, Homo sapiens
agcagacgccttcag

SEQ ID NO: 1599428 - DNA, 15 bp, Homo sapiens
cagcagacgccttca

SEQ ID NO: 1599429 - DNA, 15 bp, Homo sapiens
gcagcagacgccttc

SEQ ID NO: 1599430 - DNA, 15 bp, Homo sapiens
agcagcagacgcctt

SEQ ID NO: 1599431 - DNA, 15 bp, Homo sapiens
cagcagcagacgcct

SEQ ID NO: 1599432 - DNA, 15 bp, Homo sapiens
ccagcagcagacgcc

SEQ ID NO: 1599433 - DNA, 15 bp, Homo sapiens
accagcagcagacgc

SEQ ID NO: 1599434 - DNA, 15 bp, Homo sapiens
gaccagcagcagacg

SEQ ID NO: 1599435 - DNA, 15 bp, Homo sapiens
ggaccagcagcagac

SEQ ID NO: 1599436 - DNA, 15 bp, Homo sapiens
gggaccagcagcaga

SEQ ID NO: 1599437 - DNA, 15 bp, Homo sapiens
ggggaccagcagcag

SEQ ID NO: 1599438 - DNA, 15 bp, Homo sapiens
aggggaccagcagca

SEQ ID NO: 1599439 - DNA, 15 bp, Homo sapiens
taggggaccagcagc

SEQ ID NO: 1599440 - DNA, 15 bp, Homo sapiens
ctaggggaccagcag

SEQ ID NO: 1599441 - DNA, 15 bp, Homo sapiens
tctaggggaccagca

SEQ ID NO: 1599442 - DNA, 15 bp, Homo sapiens
ctctaggggaccagc

SEQ ID NO: 1599443 - DNA, 15 bp, Homo sapiens
cctctaggggaccag

SEQ ID NO: 1599444 - DNA, 15 bp, Homo sapiens
ccctctaggggacca

SEQ ID NO: 1599445 - DNA, 15 bp, Homo sapiens
cccctctaggggacc

SEQ ID NO: 1599446 - DNA, 15 bp, Homo sapiens
acccctctaggggac

SEQ ID NO: 1599447 - DNA, 15 bp, Homo sapiens
gacccctctagggga

SEQ ID NO: 1599448 - DNA, 15 bp, Homo sapiens
ggacccctctagggg

SEQ ID NO: 1599449 - DNA, 15 bp, Homo sapiens
gggacccctctaggg

SEQ ID NO: 1599450 - DNA, 15 bp, Homo sapiens
agggacccctctagg

SEQ ID NO: 1599451 - DNA, 15 bp, Homo sapiens
cagggacccctctag

SEQ ID NO: 1599452 - DNA, 15 bp, Homo sapiens
acagggacccctcta

SEQ ID NO: 1599453 - DNA, 15 bp, Homo sapiens
aacagggacccctct

SEQ ID NO: 1599454 - DNA, 15 bp, Homo sapiens
aaacagggacccctc

SEQ ID NO: 1599455 - DNA, 15 bp, Homo sapiens
aaaacagggacccct

SEQ ID NO: 1599456 - DNA, 15 bp, Homo sapiens
taaaacagggacccc

SEQ ID NO: 1599457 - DNA, 15 bp, Homo sapiens
ctaaaacagggaccc

SEQ ID NO: 1599458 - DNA, 15 bp, Homo sapiens
cctaaaacagggacc

SEQ ID NO: 1599459 - DNA, 15 bp, Homo sapiens
tcctaaaacagggac

SEQ ID NO: 1599460 - DNA, 15 bp, Homo sapiens
gtcctaaaacaggga

SEQ ID NO: 1599461 - DNA, 15 bp, Homo sapiens
tgtcctaaaacaggg

SEQ ID NO: 1599462 - DNA, 15 bp, Homo sapiens
ctgtcctaaaacagg

SEQ ID NO: 1599463 - DNA, 15 bp, Homo sapiens
tctgtcctaaaacag

SEQ ID NO: 1599464 - DNA, 15 bp, Homo sapiens
ttctgtcctaaaaca

SEQ ID NO: 1599465 - DNA, 15 bp, Homo sapiens
tttctgtcctaaaac

SEQ ID NO: 1599466 - DNA, 15 bp, Homo sapiens
gtttctgtcctaaaa

SEQ ID NO: 1599467 - DNA, 15 bp, Homo sapiens
tgtttctgtcctaaa

SEQ ID NO: 1599468 - DNA, 15 bp, Homo sapiens
ttgtttctgtcctaa

SEQ ID NO: 1599469 - DNA, 15 bp, Homo sapiens
tttgtttctgtccta

SEQ ID NO: 1599470 - DNA, 15 bp, Homo sapiens
ttttgtttctgtcct

SEQ ID NO: 1599471 - DNA, 15 bp, Homo sapiens
gttttgtttctgtcc

SEQ ID NO: 1599472 - DNA, 15 bp, Homo sapiens
ggttttgtttctgtc

SEQ ID NO: 1599473 - DNA, 15 bp, Homo sapiens
gggttttgtttctgt

SEQ ID NO: 1599474 - DNA, 15 bp, Homo sapiens
ggggttttgtttctg

SEQ ID NO: 1599475 - DNA, 15 bp, Homo sapiens
aggggttttgtttct

SEQ ID NO: 1599476 - DNA, 15 bp, Homo sapiens
caggggttttgtttc

SEQ ID NO: 1599477 - DNA, 15 bp, Homo sapiens
tcaggggttttgttt

SEQ ID NO: 1599478 - DNA, 15 bp, Homo sapiens
ttcaggggttttgtt

SEQ ID NO: 1599479 - DNA, 15 bp, Homo sapiens
attcaggggttttgt

SEQ ID NO: 1599480 - DNA, 15 bp, Homo sapiens
cattcaggggttttg

SEQ ID NO: 1599481 - DNA, 15 bp, Homo sapiens
tcattcaggggtttt

SEQ ID NO: 1599482 - DNA, 15 bp, Homo sapiens
gtcattcaggggttt

SEQ ID NO: 1599483 - DNA, 15 bp, Homo sapiens
agtcattcaggggtt

SEQ ID NO: 1599484 - DNA, 15 bp, Homo sapiens
aagtcattcaggggt

SEQ ID NO: 1599485 - DNA, 15 bp, Homo sapiens
gaagtcattcagggg

SEQ ID NO: 1599486 - DNA, 15 bp, Homo sapiens
ggaagtcattcaggg

SEQ ID NO: 1599487 - DNA, 15 bp, Homo sapiens
aggaagtcattcagg

SEQ ID NO: 1599488 - DNA, 15 bp, Homo sapiens
aaggaagtcattcag

SEQ ID NO: 1599489 - DNA, 15 bp, Homo sapiens
taaggaagtcattca

SEQ ID NO: 1599490 - DNA, 15 bp, Homo sapiens
gtaaggaagtcattc

SEQ ID NO: 1599491 - DNA, 15 bp, Homo sapiens
agtaaggaagtcatt

SEQ ID NO: 1599492 - DNA, 15 bp, Homo sapiens
aagtaaggaagtcat

SEQ ID NO: 1599493 - DNA, 15 bp, Homo sapiens
aaagtaaggaagtca

SEQ ID NO: 1599494 - DNA, 15 bp, Homo sapiens
gaaagtaaggaagtc

SEQ ID NO: 1599495 - DNA, 15 bp, Homo sapiens
cgaaagtaaggaagt

SEQ ID NO: 1599496 - DNA, 15 bp, Homo sapiens
tcgaaagtaaggaag

SEQ ID NO: 1599497 - DNA, 15 bp, Homo sapiens
ttcgaaagtaaggaa

SEQ ID NO: 1599498 - DNA, 15 bp, Homo sapiens
tttcgaaagtaagga

SEQ ID NO: 1599499 - DNA, 15 bp, Homo sapiens
ttttcgaaagtaagg

SEQ ID NO: 1599500 - DNA, 15 bp, Homo sapiens
gttttcgaaagtaag

SEQ ID NO: 1599501 - DNA, 15 bp, Homo sapiens
tgttttcgaaagtaa

SEQ ID NO: 1599502 - DNA, 15 bp, Homo sapiens
ctgttttcgaaagta

SEQ ID NO: 1599503 - DNA, 15 bp, Homo sapiens
gctgttttcgaaagt

SEQ ID NO: 1599504 - DNA, 15 bp, Homo sapiens
ggctgttttcgaaag

SEQ ID NO: 1599505 - DNA, 15 bp, Homo sapiens
aggctgttttcgaaa

SEQ ID NO: 1599506 - DNA, 15 bp, Homo sapiens
gaggctgttttcgaa

SEQ ID NO: 1599507 - DNA, 15 bp, Homo sapiens
ggaggctgttttcga

SEQ ID NO: 1599508 - DNA, 15 bp, Homo sapiens
gggaggctgttttcg

SEQ ID NO: 1599509 - DNA, 15 bp, Homo sapiens
tgggaggctgttttc

SEQ ID NO: 1599510 - DNA, 15 bp, Homo sapiens
atgggaggctgtttt

SEQ ID NO: 1599511 - DNA, 15 bp, Homo sapiens
gatgggaggctgttt

SEQ ID NO: 1599512 - DNA, 15 bp, Homo sapiens
cgatgggaggctgtt

SEQ ID NO: 1599513 - DNA, 15 bp, Homo sapiens
tcgatgggaggctgt

SEQ ID NO: 1599514 - DNA, 15 bp, Homo sapiens
ttcgatgggaggctg

SEQ ID NO: 1599515 - DNA, 15 bp, Homo sapiens
attcgatgggaggct

SEQ ID NO: 1599516 - DNA, 15 bp, Homo sapiens
aattcgatgggaggc

SEQ ID NO: 1599517 - DNA, 15 bp, Homo sapiens
gaattcgatgggagg

SEQ ID NO: 1599518 - DNA, 15 bp, Homo sapiens
agaattcgatgggag

SEQ ID NO: 1599519 - DNA, 15 bp, Homo sapiens
cagaattcgatggga

SEQ ID NO: 1599520 - DNA, 15 bp, Homo sapiens
acagaattcgatggg

SEQ ID NO: 1599521 - DNA, 15 bp, Homo sapiens
cacagaattcgatgg

SEQ ID NO: 1599522 - DNA, 15 bp, Homo sapiens
tcacagaattcgatg

SEQ ID NO: 1599523 - DNA, 15 bp, Homo sapiens
ttcacagaattcgat

SEQ ID NO: 1599524 - DNA, 15 bp, Homo sapiens
cttcacagaattcga

SEQ ID NO: 1599525 - DNA, 15 bp, Homo sapiens
ccttcacagaattcg

SEQ ID NO: 1599526 - DNA, 15 bp, Homo sapiens
tccttcacagaattc

SEQ ID NO: 1599527 - DNA, 15 bp, Homo sapiens
ctccttcacagaatt

SEQ ID NO: 1599528 - DNA, 15 bp, Homo sapiens
gctccttcacagaat

SEQ ID NO: 1599529 - DNA, 15 bp, Homo sapiens
agctccttcacagaa

SEQ ID NO: 1599530 - DNA, 15 bp, Homo sapiens
gagctccttcacaga

SEQ ID NO: 1599531 - DNA, 15 bp, Homo sapiens
tgagctccttcacag

SEQ ID NO: 1599532 - DNA, 15 bp, Homo sapiens
ctgagctccttcaca

SEQ ID NO: 1599533 - DNA, 15 bp, Homo sapiens
gctgagctccttcac

SEQ ID NO: 1599534 - DNA, 15 bp, Homo sapiens
ggctgagctccttca

SEQ ID NO: 1599535 - DNA, 15 bp, Homo sapiens
tggctgagctccttc

SEQ ID NO: 1599536 - DNA, 15 bp, Homo sapiens
gtggctgagctcctt

SEQ ID NO: 1599537 - DNA, 15 bp, Homo sapiens
agtggctgagctcct

SEQ ID NO: 1599538 - DNA, 15 bp, Homo sapiens
cagtggctgagctcc

SEQ ID NO: 1599539 - DNA, 15 bp, Homo sapiens
tcagtggctgagctc

SEQ ID NO: 1599540 - DNA, 15 bp, Homo sapiens
atcagtggctgagct

SEQ ID NO: 1599541 - DNA, 15 bp, Homo sapiens
aatcagtggctgagc

SEQ ID NO: 1599542 - DNA, 15 bp, Homo sapiens
taatcagtggctgag

SEQ ID NO: 1599543 - DNA, 15 bp, Homo sapiens
ctaatcagtggctga

SEQ ID NO: 1599544 - DNA, 15 bp, Homo sapiens
tctaatcagtggctg

SEQ ID NO: 1599545 - DNA, 15 bp, Homo sapiens
ttctaatcagtggct

SEQ ID NO: 1599546 - DNA, 15 bp, Homo sapiens
tttctaatcagtggc

SEQ ID NO: 1599547 - DNA, 15 bp, Homo sapiens
atttctaatcagtgg

SEQ ID NO: 1599548 - DNA, 15 bp, Homo sapiens
tatttctaatcagtg

SEQ ID NO: 1599549 - DNA, 15 bp, Homo sapiens
ttatttctaatcagt

SEQ ID NO: 1599550 - DNA, 15 bp, Homo sapiens
tttatttctaatcag

SEQ ID NO: 1599551 - DNA, 15 bp, Homo sapiens
ctttatttctaatca

SEQ ID NO: 1599552 - DNA, 15 bp, Homo sapiens
cctttatttctaatc

SEQ ID NO: 1599553 - DNA, 15 bp, Homo sapiens
acctttatttctaat

SEQ ID NO: 1599554 - DNA, 15 bp, Homo sapiens
aacctttatttctaa

SEQ ID NO: 1599555 - DNA, 15 bp, Homo sapiens
aaacctttatttcta

SEQ ID NO: 1599556 - DNA, 15 bp, Homo sapiens
caaacctttatttct

SEQ ID NO: 1599557 - DNA, 15 bp, Homo sapiens
tcaaacctttatttc

SEQ ID NO: 1599558 - DNA, 15 bp, Homo sapiens
atcaaacctttattt

SEQ ID NO: 1599559 - DNA, 15 bp, Homo sapiens
catcaaacctttatt

SEQ ID NO: 1599560 - DNA, 15 bp, Homo sapiens
acatcaaacctttat

SEQ ID NO: 1599561 - DNA, 15 bp, Homo sapiens
aacatcaaaccttta

SEQ ID NO: 1599562 - DNA, 15 bp, Homo sapiens
gaacatcaaaccttt

SEQ ID NO: 1599563 - DNA, 15 bp, Homo sapiens
tgaacatcaaacctt

SEQ ID NO: 1599564 - DNA, 15 bp, Homo sapiens
ttgaacatcaaacct

SEQ ID NO: 1599565 - DNA, 15 bp, Homo sapiens
tttgaacatcaaacc

SEQ ID NO: 1599566 - DNA, 15 bp, Homo sapiens
atttgaacatcaaac

SEQ ID NO: 1599567 - DNA, 15 bp, Homo sapiens
gatttgaacatcaaa

SEQ ID NO: 1599568 - DNA, 15 bp, Homo sapiens
agatttgaacatcaa

SEQ ID NO: 1599569 - DNA, 15 bp, Homo sapiens
tagatttgaacatca

SEQ ID NO: 1599570 - DNA, 15 bp, Homo sapiens
gtagatttgaacatc

SEQ ID NO: 1599571 - DNA, 15 bp, Homo sapiens
tgtagatttgaacat

SEQ ID NO: 1599572 - DNA, 15 bp, Homo sapiens
ctgtagatttgaaca

SEQ ID NO: 1599573 - DNA, 15 bp, Homo sapiens
tctgtagatttgaac

SEQ ID NO: 1599574 - DNA, 15 bp, Homo sapiens
ctctgtagatttgaa

SEQ ID NO: 1599575 - DNA, 15 bp, Homo sapiens
cctctgtagatttga

SEQ ID NO: 1599576 - DNA, 15 bp, Homo sapiens
acctctgtagatttg

SEQ ID NO: 1599577 - DNA, 15 bp, Homo sapiens
cacctctgtagattt

SEQ ID NO: 1599578 - DNA, 15 bp, Homo sapiens
tcacctctgtagatt

SEQ ID NO: 1599579 - DNA, 15 bp, Homo sapiens
atcacctctgtagat

SEQ ID NO: 1599580 - DNA, 15 bp, Homo sapiens
gatcacctctgtaga

SEQ ID NO: 1599581 - DNA, 15 bp, Homo sapiens
ggatcacctctgtag

SEQ ID NO: 1599582 - DNA, 15 bp, Homo sapiens
tggatcacctctgta

SEQ ID NO: 1599583 - DNA, 15 bp, Homo sapiens
atggatcacctctgt

SEQ ID NO: 1599584 - DNA, 15 bp, Homo sapiens
aatggatcacctctg

SEQ ID NO: 1599585 - DNA, 15 bp, Homo sapiens
gaatggatcacctct

SEQ ID NO: 1599586 - DNA, 15 bp, Homo sapiens
tgaatggatcacctc

SEQ ID NO: 1599587 - DNA, 15 bp, Homo sapiens
gtgaatggatcacct

SEQ ID NO: 1599588 - DNA, 15 bp, Homo sapiens
agtgaatggatcacc

SEQ ID NO: 1599589 - DNA, 15 bp, Homo sapiens
cagtgaatggatcac

SEQ ID NO: 1599590 - DNA, 15 bp, Homo sapiens
tcagtgaatggatca

SEQ ID NO: 1599591 - DNA, 15 bp, Homo sapiens
ttcagtgaatggatc

SEQ ID NO: 1599592 - DNA, 15 bp, Homo sapiens
tttcagtgaatggat

SEQ ID NO: 1599593 - DNA, 15 bp, Homo sapiens
ttttcagtgaatgga

SEQ ID NO: 1599594 - DNA, 15 bp, Homo sapiens
gttttcagtgaatgg

SEQ ID NO: 1599595 - DNA, 15 bp, Homo sapiens
ggttttcagtgaatg

SEQ ID NO: 1599596 - DNA, 15 bp, Homo sapiens
tggttttcagtgaat

SEQ ID NO: 1599597 - DNA, 15 bp, Homo sapiens
atggttttcagtgaa

SEQ ID NO: 1599598 - DNA, 15 bp, Homo sapiens
tatggttttcagtga

SEQ ID NO: 1599599 - DNA, 15 bp, Homo sapiens
ttatggttttcagtg

SEQ ID NO: 1599600 - DNA, 15 bp, Homo sapiens
gttatggttttcagt

SEQ ID NO: 1599601 - DNA, 15 bp, Homo sapiens
agttatggttttcag

SEQ ID NO: 1599602 - DNA, 15 bp, Homo sapiens
gagttatggttttca

SEQ ID NO: 1599603 - DNA, 15 bp, Homo sapiens
tgagttatggttttc

SEQ ID NO: 1599604 - DNA, 15 bp, Homo sapiens
gtgagttatggtttt

SEQ ID NO: 1599605 - DNA, 15 bp, Homo sapiens
agtgagttatggttt

SEQ ID NO: 1599606 - DNA, 15 bp, Homo sapiens
gagtgagttatggtt

SEQ ID NO: 1599607 - DNA, 15 bp, Homo sapiens
tgagtgagttatggt

SEQ ID NO: 1599608 - DNA, 15 bp, Homo sapiens
ctgagtgagttatgg

SEQ ID NO: 1599609 - DNA, 15 bp, Homo sapiens
tctgagtgagttatg

SEQ ID NO: 1599610 - DNA, 15 bp, Homo sapiens
gtctgagtgagttat

SEQ ID NO: 1599611 - DNA, 15 bp, Homo sapiens
agtctgagtgagtta

SEQ ID NO: 1599612 - DNA, 15 bp, Homo sapiens
cagtctgagtgagtt

SEQ ID NO: 1599613 - DNA, 15 bp, Homo sapiens
tcagtctgagtgagt

SEQ ID NO: 1599614 - DNA, 15 bp, Homo sapiens
atcagtctgagtgag

SEQ ID NO: 1599615 - DNA, 15 bp, Homo sapiens
aatcagtctgagtga

SEQ ID NO: 1599616 - DNA, 15 bp, Homo sapiens
aaatcagtctgagtg

SEQ ID NO: 1599617 - DNA, 15 bp, Homo sapiens
taaatcagtctgagt

SEQ ID NO: 1599618 - DNA, 15 bp, Homo sapiens
ttaaatcagtctgag

SEQ ID NO: 1599619 - DNA, 15 bp, Homo sapiens
tttaaatcagtctga

SEQ ID NO: 1599620 - DNA, 15 bp, Homo sapiens
ttttaaatcagtctg

SEQ ID NO: 1599621 - DNA, 15 bp, Homo sapiens
attttaaatcagtct

SEQ ID NO: 1599622 - DNA, 15 bp, Homo sapiens
cattttaaatcagtc

SEQ ID NO: 1599623 - DNA, 15 bp, Homo sapiens
ccattttaaatcagt

SEQ ID NO: 1599624 - DNA, 15 bp, Homo sapiens
cccattttaaatcag

SEQ ID NO: 1599625 - DNA, 15 bp, Homo sapiens
acccattttaaatca

SEQ ID NO: 1599626 - DNA, 15 bp, Homo sapiens
cacccattttaaatc

SEQ ID NO: 1599627 - DNA, 15 bp, Homo sapiens
acacccattttaaat

SEQ ID NO: 1599628 - DNA, 15 bp, Homo sapiens
gacacccattttaaa

SEQ ID NO: 1599629 - DNA, 15 bp, Homo sapiens
ggacacccattttaa

SEQ ID NO: 1599630 - DNA, 15 bp, Homo sapiens
aggacacccatttta

SEQ ID NO: 1599631 - DNA, 15 bp, Homo sapiens
gaggacacccatttt

SEQ ID NO: 1599632 - DNA, 15 bp, Homo sapiens
agaggacacccattt

SEQ ID NO: 1599633 - DNA, 15 bp, Homo sapiens
gagaggacacccatt

SEQ ID NO: 1599634 - DNA, 15 bp, Homo sapiens
agagaggacacccat

SEQ ID NO: 1599635 - DNA, 15 bp, Homo sapiens
gagagaggacaccca

SEQ ID NO: 1599636 - DNA, 15 bp, Homo sapiens
tgagagaggacaccc

SEQ ID NO: 1599637 - DNA, 15 bp, Homo sapiens
gtgagagaggacacc

SEQ ID NO: 1599638 - DNA, 15 bp, Homo sapiens
agtgagagaggacac

SEQ ID NO: 1599639 - DNA, 15 bp, Homo sapiens
cagtgagagaggaca

SEQ ID NO: 1599640 - DNA, 15 bp, Homo sapiens
acagtgagagaggac

SEQ ID NO: 1599641 - DNA, 15 bp, Homo sapiens
aacagtgagagagga

SEQ ID NO: 1599642 - DNA, 15 bp, Homo sapiens
aaacagtgagagagg

SEQ ID NO: 1599643 - DNA, 15 bp, Homo sapiens
aaaacagtgagagag

SEQ ID NO: 1599644 - DNA, 15 bp, Homo sapiens
taaaacagtgagaga

SEQ ID NO: 1599645 - DNA, 15 bp, Homo sapiens
ttaaaacagtgagag

SEQ ID NO: 1599646 - DNA, 15 bp, Homo sapiens
tttaaaacagtgaga

SEQ ID NO: 1599647 - DNA, 15 bp, Homo sapiens
ttttaaaacagtgag

SEQ ID NO: 1599648 - DNA, 15 bp, Homo sapiens
gttttaaaacagtga

SEQ ID NO: 1599649 - DNA, 15 bp, Homo sapiens
agttttaaaacagtg

SEQ ID NO: 1599650 - DNA, 15 bp, Homo sapiens
aagttttaaaacagt

SEQ ID NO: 1599651 - DNA, 15 bp, Homo sapiens
aaagttttaaaacag

SEQ ID NO: 1599652 - DNA, 15 bp, Homo sapiens
caaagttttaaaaca

SEQ ID NO: 1599653 - DNA, 15 bp, Homo sapiens
ccaaagttttaaaac

SEQ ID NO: 1599654 - DNA, 15 bp, Homo sapiens
gccaaagttttaaaa

SEQ ID NO: 1599655 - DNA, 15 bp, Homo sapiens
agccaaagttttaaa

SEQ ID NO: 1599656 - DNA, 15 bp, Homo sapiens
gagccaaagttttaa

SEQ ID NO: 1599657 - DNA, 15 bp, Homo sapiens
tgagccaaagtttta

SEQ ID NO: 1599658 - DNA, 15 bp, Homo sapiens
ctgagccaaagtttt

SEQ ID NO: 1599659 - DNA, 15 bp, Homo sapiens
gctgagccaaagttt

SEQ ID NO: 1599660 - DNA, 15 bp, Homo sapiens
agctgagccaaagtt

SEQ ID NO: 1599661 - DNA, 15 bp, Homo sapiens
aagctgagccaaagt

SEQ ID NO: 1599662 - DNA, 15 bp, Homo sapiens
aaagctgagccaaag

SEQ ID NO: 1599663 - DNA, 15 bp, Homo sapiens
caaagctgagccaaa

SEQ ID NO: 1599664 - DNA, 15 bp, Homo sapiens
acaaagctgagccaa

SEQ ID NO: 1599665 - DNA, 15 bp, Homo sapiens
cacaaagctgagcca

SEQ ID NO: 1599666 - DNA, 15 bp, Homo sapiens
tcacaaagctgagcc

SEQ ID NO: 1599667 - DNA, 15 bp, Homo sapiens
ctcacaaagctgagc

SEQ ID NO: 1599668 - DNA, 15 bp, Homo sapiens
tctcacaaagctgag

SEQ ID NO: 1599669 - DNA, 15 bp, Homo sapiens
gtctcacaaagctga

SEQ ID NO: 1599670 - DNA, 15 bp, Homo sapiens
ggtctcacaaagctg

SEQ ID NO: 1599671 - DNA, 15 bp, Homo sapiens
tggtctcacaaagct

SEQ ID NO: 1599672 - DNA, 15 bp, Homo sapiens
gtggtctcacaaagc

SEQ ID NO: 1599673 - DNA, 15 bp, Homo sapiens
tgtggtctcacaaag

SEQ ID NO: 1599674 - DNA, 15 bp, Homo sapiens
ctgtggtctcacaaa

SEQ ID NO: 1599675 - DNA, 15 bp, Homo sapiens
actgtggtctcacaa

SEQ ID NO: 1599676 - DNA, 15 bp, Homo sapiens
tactgtggtctcaca

SEQ ID NO: 1599677 - DNA, 15 bp, Homo sapiens
ctactgtggtctcac

SEQ ID NO: 1599678 - DNA, 15 bp, Homo sapiens
tctactgtggtctca

SEQ ID NO: 1599679 - DNA, 15 bp, Homo sapiens
gtctactgtggtctc

SEQ ID NO: 1599680 - DNA, 15 bp, Homo sapiens
tgtctactgtggtct

SEQ ID NO: 1599681 - DNA, 15 bp, Homo sapiens
ctgtctactgtggtc

SEQ ID NO: 1599682 - DNA, 15 bp, Homo sapiens
actgtctactgtggt

SEQ ID NO: 1599683 - DNA, 15 bp, Homo sapiens
aactgtctactgtgg

SEQ ID NO: 1599684 - DNA, 15 bp, Homo sapiens
gaactgtctactgtg

SEQ ID NO: 1599685 - DNA, 15 bp, Homo sapiens
agaactgtctactgt

SEQ ID NO: 1599686 - DNA, 15 bp, Homo sapiens
cagaactgtctactg

SEQ ID NO: 1599687 - DNA, 15 bp, Homo sapiens
tcagaactgtctact

SEQ ID NO: 1599688 - DNA, 15 bp, Homo sapiens
ctcagaactgtctac

SEQ ID NO: 1599689 - DNA, 15 bp, Homo sapiens
gtctcagaactgtct

SEQ ID NO: 1599690 - DNA, 15 bp, Homo sapiens
agtctcagaactgtc

SEQ ID NO: 1599691 - DNA, 15 bp, Homo sapiens
gagtctcagaactgt

SEQ ID NO: 1599692 - DNA, 15 bp, Homo sapiens
ggagtctcagaactg

SEQ ID NO: 1599693 - DNA, 15 bp, Homo sapiens
aggagtctcagaact

SEQ ID NO: 1599694 - DNA, 15 bp, Homo sapiens
taggagtctcagaac

SEQ ID NO: 1599695 - DNA, 15 bp, Homo sapiens
ataggagtctcagaa

SEQ ID NO: 1599696 - DNA, 15 bp, Homo sapiens
gataggagtctcaga

SEQ ID NO: 1599697 - DNA, 15 bp, Homo sapiens
tgataggagtctcag

SEQ ID NO: 1599698 - DNA, 15 bp, Homo sapiens
ttgataggagtctca

SEQ ID NO: 1599699 - DNA, 15 bp, Homo sapiens
gttgataggagtctc

SEQ ID NO: 1599700 - DNA, 15 bp, Homo sapiens
tgttgataggagtct

SEQ ID NO: 1599701 - DNA, 15 bp, Homo sapiens
ctgttgataggagtc

SEQ ID NO: 1599702 - DNA, 15 bp, Homo sapiens
tctgttgataggagt

SEQ ID NO: 1599703 - DNA, 15 bp, Homo sapiens
ttctgttgataggag

SEQ ID NO: 1599704 - DNA, 15 bp, Homo sapiens
cttctgttgatagga

SEQ ID NO: 1599705 - DNA, 15 bp, Homo sapiens
acttctgttgatagg

SEQ ID NO: 1599706 - DNA, 15 bp, Homo sapiens
gacttctgttgatag

SEQ ID NO: 1599707 - DNA, 15 bp, Homo sapiens
agacttctgttgata

SEQ ID NO: 1599708 - DNA, 15 bp, Homo sapiens
cagacttctgttgat

SEQ ID NO: 1599709 - DNA, 15 bp, Homo sapiens
tcagacttctgttga

SEQ ID NO: 1599710 - DNA, 15 bp, Homo sapiens
gtcagacttctgttg

SEQ ID NO: 1599711 - DNA, 15 bp, Homo sapiens
agtcagacttctgtt

SEQ ID NO: 1599712 - DNA, 15 bp, Homo sapiens
gagtcagacttctgt

SEQ ID NO: 1599713 - DNA, 15 bp, Homo sapiens
tgagtcagacttctg

SEQ ID NO: 1599714 - DNA, 15 bp, Homo sapiens
ctgagtcagacttct

SEQ ID NO: 1599715 - DNA, 15 bp, Homo sapiens
tctgagtcagacttc

SEQ ID NO: 1599716 - DNA, 15 bp, Homo sapiens
ttctgagtcagactt

SEQ ID NO: 1599717 - DNA, 15 bp, Homo sapiens
tttctgagtcagact

SEQ ID NO: 1599718 - DNA, 15 bp, Homo sapiens
ttttctgagtcagac

SEQ ID NO: 1599719 - DNA, 15 bp, Homo sapiens
attttctgagtcaga

SEQ ID NO: 1599720 - DNA, 15 bp, Homo sapiens
cattttctgagtcag

SEQ ID NO: 1599721 - DNA, 15 bp, Homo sapiens
tcattttctgagtca

SEQ ID NO: 1599722 - DNA, 15 bp, Homo sapiens
ttcattttctgagtc

SEQ ID NO: 1599723 - DNA, 15 bp, Homo sapiens
attcattttctgagt

SEQ ID NO: 1599724 - DNA, 15 bp, Homo sapiens
aattcattttctgag

SEQ ID NO: 1599725 - DNA, 15 bp, Homo sapiens
taattcattttctga

SEQ ID NO: 1599726 - DNA, 15 bp, Homo sapiens
ataattcattttctg

SEQ ID NO: 1599727 - DNA, 15 bp, Homo sapiens
aataattcattttct

SEQ ID NO: 1599728 - DNA, 15 bp, Homo sapiens
aaataattcattttc

SEQ ID NO: 1599729 - DNA, 15 bp, Homo sapiens
caaataattcatttt

SEQ ID NO: 1599730 - DNA, 15 bp, Homo sapiens
ccaaataattcattt

SEQ ID NO: 1599731 - DNA, 15 bp, Homo sapiens
accaaataattcatt

SEQ ID NO: 1599732 - DNA, 15 bp, Homo sapiens
gaccaaataattcat

SEQ ID NO: 1599733 - DNA, 15 bp, Homo sapiens
agaccaaataattca

SEQ ID NO: 1599734 - DNA, 15 bp, Homo sapiens
gagaccaaataattc

SEQ ID NO: 1599735 - DNA, 15 bp, Homo sapiens
agagaccaaataatt

SEQ ID NO: 1599736 - DNA, 15 bp, Homo sapiens
aagagaccaaataat

SEQ ID NO: 1599737 - DNA, 15 bp, Homo sapiens
aaagagaccaaataa

SEQ ID NO: 1599738 - DNA, 15 bp, Homo sapiens
gaaagagaccaaata

SEQ ID NO: 1599739 - DNA, 15 bp, Homo sapiens
agaaagagaccaaat

SEQ ID NO: 1599740 - DNA, 15 bp, Homo sapiens
gagaaagagaccaaa

SEQ ID NO: 1599741 - DNA, 15 bp, Homo sapiens
agagaaagagaccaa

SEQ ID NO: 1599742 - DNA, 15 bp, Homo sapiens
aagagaaagagacca

SEQ ID NO: 1599743 - DNA, 15 bp, Homo sapiens
gaagagaaagagacc

SEQ ID NO: 1599744 - DNA, 15 bp, Homo sapiens
ggaagagaaagagac

SEQ ID NO: 1599745 - DNA, 15 bp, Homo sapiens
aggaagagaaagaga

SEQ ID NO: 1599746 - DNA, 15 bp, Homo sapiens
gaggaagagaaagag

SEQ ID NO: 1599747 - DNA, 15 bp, Homo sapiens
agaggaagagaaaga

SEQ ID NO: 1599748 - DNA, 15 bp, Homo sapiens
gagaggaagagaaag

SEQ ID NO: 1599749 - DNA, 15 bp, Homo sapiens
agagaggaagagaaa

SEQ ID NO: 1599750 - DNA, 15 bp, Homo sapiens
gagagaggaagagaa

SEQ ID NO: 1599751 - DNA, 15 bp, Homo sapiens
ggagagaggaagaga

SEQ ID NO: 1599752 - DNA, 15 bp, Homo sapiens
gggagagaggaagag

SEQ ID NO: 1599753 - DNA, 15 bp, Homo sapiens
agggagagaggaaga

SEQ ID NO: 1599754 - DNA, 15 bp, Homo sapiens
gagggagagaggaag

SEQ ID NO: 1599755 - DNA, 15 bp, Homo sapiens
agagggagagaggaa

SEQ ID NO: 1599756 - DNA, 15 bp, Homo sapiens
gagagggagagagga

SEQ ID NO: 1599757 - DNA, 15 bp, Homo sapiens
ggagagggagagagg

SEQ ID NO: 1599758 - DNA, 15 bp, Homo sapiens
agggagagggagaga

SEQ ID NO: 1599759 - DNA, 15 bp, Homo sapiens
gagggagagggagag

SEQ ID NO: 1599760 - DNA, 15 bp, Homo sapiens
agagggagagggaga

SEQ ID NO: 1599761 - DNA, 15 bp, Homo sapiens
aagagggagagggag

SEQ ID NO: 1599762 - DNA, 15 bp, Homo sapiens
caagagggagaggga

SEQ ID NO: 1599763 - DNA, 15 bp, Homo sapiens
ccaagagggagaggg

SEQ ID NO: 1599764 - DNA, 15 bp, Homo sapiens
accaagagggagagg

SEQ ID NO: 1599765 - DNA, 15 bp, Homo sapiens
caccaagagggagag

SEQ ID NO: 1599766 - DNA, 15 bp, Homo sapiens
ccaccaagagggaga

SEQ ID NO: 1599767 - DNA, 15 bp, Homo sapiens
tccaccaagagggag

SEQ ID NO: 1599768 - DNA, 15 bp, Homo sapiens
ttccaccaagaggga

SEQ ID NO: 1599769 - DNA, 15 bp, Homo sapiens
cttccaccaagaggg

SEQ ID NO: 1599770 - DNA, 15 bp, Homo sapiens
acttccaccaagagg

SEQ ID NO: 1599771 - DNA, 15 bp, Homo sapiens
tacttccaccaagag

SEQ ID NO: 1599772 - DNA, 15 bp, Homo sapiens
ctacttccaccaaga

SEQ ID NO: 1599773 - DNA, 15 bp, Homo sapiens
actacttccaccaag

SEQ ID NO: 1599774 - DNA, 15 bp, Homo sapiens
aactacttccaccaa

SEQ ID NO: 1599775 - DNA, 15 bp, Homo sapiens
aaactacttccacca

SEQ ID NO: 1599776 - DNA, 15 bp, Homo sapiens
caaactacttccacc

SEQ ID NO: 1599777 - DNA, 15 bp, Homo sapiens
ccaaactacttccac

SEQ ID NO: 1599778 - DNA, 15 bp, Homo sapiens
accaaactacttcca

SEQ ID NO: 1599779 - DNA, 15 bp, Homo sapiens
taccaaactacttcc

SEQ ID NO: 1599780 - DNA, 15 bp, Homo sapiens
ataccaaactacttc

SEQ ID NO: 1599781 - DNA, 15 bp, Homo sapiens
aataccaaactactt

SEQ ID NO: 1599782 - DNA, 15 bp, Homo sapiens
aaataccaaactact

SEQ ID NO: 1599783 - DNA, 15 bp, Homo sapiens
gaaataccaaactac

SEQ ID NO: 1599784 - DNA, 15 bp, Homo sapiens
cgaaataccaaacta

SEQ ID NO: 1599785 - DNA, 15 bp, Homo sapiens
ccgaaataccaaact

SEQ ID NO: 1599786 - DNA, 15 bp, Homo sapiens
accgaaataccaaac

SEQ ID NO: 1599787 - DNA, 15 bp, Homo sapiens
gaccgaaataccaaa

SEQ ID NO: 1599788 - DNA, 15 bp, Homo sapiens
ggaccgaaataccaa

SEQ ID NO: 1599789 - DNA, 15 bp, Homo sapiens
aggaccgaaatacca

SEQ ID NO: 1599790 - DNA, 15 bp, Homo sapiens
gaggaccgaaatacc

SEQ ID NO: 1599791 - DNA, 15 bp, Homo sapiens
ggaggaccgaaatac

SEQ ID NO: 1599792 - DNA, 15 bp, Homo sapiens
tggaggaccgaaata

SEQ ID NO: 1599793 - DNA, 15 bp, Homo sapiens
gtggaggaccgaaat

SEQ ID NO: 1599794 - DNA, 15 bp, Homo sapiens
agtggaggaccgaaa

SEQ ID NO: 1599795 - DNA, 15 bp, Homo sapiens
cagtggaggaccgaa

SEQ ID NO: 1599796 - DNA, 15 bp, Homo sapiens
gcagtggaggaccga

SEQ ID NO: 1599797 - DNA, 15 bp, Homo sapiens
tgcagtggaggaccg

SEQ ID NO: 1599798 - DNA, 15 bp, Homo sapiens
ctgcagtggaggacc

SEQ ID NO: 1599799 - DNA, 15 bp, Homo sapiens
actgcagtggaggac

SEQ ID NO: 1599800 - DNA, 15 bp, Homo sapiens
gactgcagtggagga

SEQ ID NO: 1599801 - DNA, 15 bp, Homo sapiens
agactgcagtggagg

SEQ ID NO: 1599802 - DNA, 15 bp, Homo sapiens
gagactgcagtggag

SEQ ID NO: 1599803 - DNA, 15 bp, Homo sapiens
tgagactgcagtgga

SEQ ID NO: 1599804 - DNA, 15 bp, Homo sapiens
ctgagactgcagtgg

SEQ ID NO: 1599805 - DNA, 15 bp, Homo sapiens
cctgagactgcagtg

SEQ ID NO: 1599806 - DNA, 15 bp, Homo sapiens
tcctgagactgcagt

SEQ ID NO: 1599807 - DNA, 15 bp, Homo sapiens
gtcctgagactgcag

SEQ ID NO: 1599808 - DNA, 15 bp, Homo sapiens
agtcctgagactgca

SEQ ID NO: 1599809 - DNA, 15 bp, Homo sapiens
cagtcctgagactgc

SEQ ID NO: 1599810 - DNA, 15 bp, Homo sapiens
gcagtcctgagactg

SEQ ID NO: 1599811 - DNA, 15 bp, Homo sapiens
agcagtcctgagact

SEQ ID NO: 1599812 - DNA, 15 bp, Homo sapiens
gagcagtcctgagac

SEQ ID NO: 1599813 - DNA, 15 bp, Homo sapiens
tgagcagtcctgaga

SEQ ID NO: 1599814 - DNA, 15 bp, Homo sapiens
ttgagcagtcctgag

SEQ ID NO: 1599815 - DNA, 15 bp, Homo sapiens
cttgagcagtcctga

SEQ ID NO: 1599816 - DNA, 15 bp, Homo sapiens
tcttgagcagtcctg

SEQ ID NO: 1599817 - DNA, 15 bp, Homo sapiens
atcttgagcagtcct

SEQ ID NO: 1599818 - DNA, 15 bp, Homo sapiens
aatcttgagcagtcc

SEQ ID NO: 1599819 - DNA, 15 bp, Homo sapiens
aaatcttgagcagtc

SEQ ID NO: 1599820 - DNA, 15 bp, Homo sapiens
caaatcttgagcagt

SEQ ID NO: 1599821 - DNA, 15 bp, Homo sapiens
acaaatcttgagcag

SEQ ID NO: 1599822 - DNA, 15 bp, Homo sapiens
aacaaatcttgagca

SEQ ID NO: 1599823 - DNA, 15 bp, Homo sapiens
aaacaaatcttgagc

SEQ ID NO: 1599824 - DNA, 15 bp, Homo sapiens
gaaacaaatcttgag

SEQ ID NO: 1599825 - DNA, 15 bp, Homo sapiens
ggaaacaaatcttga

SEQ ID NO: 1599826 - DNA, 15 bp, Homo sapiens
tggaaacaaatcttg

SEQ ID NO: 1599827 - DNA, 15 bp, Homo sapiens
gtggaaacaaatctt

SEQ ID NO: 1599828 - DNA, 15 bp, Homo sapiens
tgtggaaacaaatct

SEQ ID NO: 1599829 - DNA, 15 bp, Homo sapiens
gtgtggaaacaaatc

SEQ ID NO: 1599830 - DNA, 15 bp, Homo sapiens
tgtgtggaaacaaat

SEQ ID NO: 1599831 - DNA, 15 bp, Homo sapiens
ttgtgtggaaacaaa

SEQ ID NO: 1599832 - DNA, 15 bp, Homo sapiens
attgtgtggaaacaa

SEQ ID NO: 1599833 - DNA, 15 bp, Homo sapiens
aattgtgtggaaaca

SEQ ID NO: 1599834 - DNA, 15 bp, Homo sapiens
aaattgtgtggaaac

SEQ ID NO: 1599835 - DNA, 15 bp, Homo sapiens
gaaattgtgtggaaa

SEQ ID NO: 1599836 - DNA, 15 bp, Homo sapiens
agaaattgtgtggaa

SEQ ID NO: 1599837 - DNA, 15 bp, Homo sapiens
cagaaattgtgtgga

SEQ ID NO: 1599838 - DNA, 15 bp, Homo sapiens
tcagaaattgtgtgg

SEQ ID NO: 1599839 - DNA, 15 bp, Homo sapiens
ctcagaaattgtgtg

SEQ ID NO: 1599840 - DNA, 15 bp, Homo sapiens
cctcagaaattgtgt

SEQ ID NO: 1599841 - DNA, 15 bp, Homo sapiens
gcctcagaaattgtg

SEQ ID NO: 1599842 - DNA, 15 bp, Homo sapiens
tgcctcagaaattgt

SEQ ID NO: 1599843 - DNA, 15 bp, Homo sapiens
ctgcctcagaaattg

SEQ ID NO: 1599844 - DNA, 15 bp, Homo sapiens
tctgcctcagaaatt

SEQ ID NO: 1599845 - DNA, 15 bp, Homo sapiens
ttctgcctcagaaat

SEQ ID NO: 1599846 - DNA, 15 bp, Homo sapiens
gttctgcctcagaaa

SEQ ID NO: 1599847 - DNA, 15 bp, Homo sapiens
tgttctgcctcagaa

SEQ ID NO: 1599848 - DNA, 15 bp, Homo sapiens
ttgttctgcctcaga

SEQ ID NO: 1599849 - DNA, 15 bp, Homo sapiens
tttgttctgcctcag

SEQ ID NO: 1599850 - DNA, 15 bp, Homo sapiens
ttttgttctgcctca

SEQ ID NO: 1599851 - DNA, 15 bp, Homo sapiens
gttttgttctgcctc

SEQ ID NO: 1599852 - DNA, 15 bp, Homo sapiens
agttttgttctgcct

SEQ ID NO: 1599853 - DNA, 15 bp, Homo sapiens
gagttttgttctgcc

SEQ ID NO: 1599854 - DNA, 15 bp, Homo sapiens
ggagttttgttctgc

SEQ ID NO: 1599855 - DNA, 15 bp, Homo sapiens
gggagttttgttctg

SEQ ID NO: 1599856 - DNA, 15 bp, Homo sapiens
agggagttttgttct

SEQ ID NO: 1599857 - DNA, 15 bp, Homo sapiens
gagggagttttgttc

SEQ ID NO: 1599858 - DNA, 15 bp, Homo sapiens
agagggagttttgtt

SEQ ID NO: 1599859 - DNA, 15 bp, Homo sapiens
aagagggagttttgt

SEQ ID NO: 1599860 - DNA, 15 bp, Homo sapiens
gaagagggagttttg

SEQ ID NO: 1599861 - DNA, 15 bp, Homo sapiens
ggaagagggagtttt

SEQ ID NO: 1599862 - DNA, 15 bp, Homo sapiens
aggaagagggagttt

SEQ ID NO: 1599863 - DNA, 15 bp, Homo sapiens
caggaagagggagtt

SEQ ID NO: 1599864 - DNA, 15 bp, Homo sapiens
acaggaagagggagt

SEQ ID NO: 1599865 - DNA, 15 bp, Homo sapiens
cacaggaagagggag

SEQ ID NO: 1599866 - DNA, 15 bp, Homo sapiens
ccacaggaagaggga

SEQ ID NO: 1599867 - DNA, 15 bp, Homo sapiens
cccacaggaagaggg

SEQ ID NO: 1599868 - DNA, 15 bp, Homo sapiens
ccccacaggaagagg

SEQ ID NO: 1599869 - DNA, 15 bp, Homo sapiens
gccccacaggaagag

SEQ ID NO: 1599870 - DNA, 15 bp, Homo sapiens
tgccccacaggaaga

SEQ ID NO: 1599871 - DNA, 15 bp, Homo sapiens
ttgccccacaggaag

SEQ ID NO: 1599872 - DNA, 15 bp, Homo sapiens
cttgccccacaggaa

SEQ ID NO: 1599873 - DNA, 15 bp, Homo sapiens
ccttgccccacagga

SEQ ID NO: 1599874 - DNA, 15 bp, Homo sapiens
tccttgccccacagg

SEQ ID NO: 1599875 - DNA, 15 bp, Homo sapiens
gtccttgccccacag

SEQ ID NO: 1599876 - DNA, 15 bp, Homo sapiens
agtccttgccccaca

SEQ ID NO: 1599877 - DNA, 15 bp, Homo sapiens
gagtccttgccccac

SEQ ID NO: 1599878 - DNA, 15 bp, Homo sapiens
agagtccttgcccca

SEQ ID NO: 1599879 - DNA, 15 bp, Homo sapiens
cagagtccttgcccc

SEQ ID NO: 1599880 - DNA, 15 bp, Homo sapiens
ccagagtccttgccc

SEQ ID NO: 1599881 - DNA, 15 bp, Homo sapiens
cccagagtccttgcc

SEQ ID NO: 1599882 - DNA, 15 bp, Homo sapiens
gcccagagtccttgc

SEQ ID NO: 1599883 - DNA, 15 bp, Homo sapiens
ggcccagagtccttg

SEQ ID NO: 1599884 - DNA, 15 bp, Homo sapiens
aggcccagagtcctt

SEQ ID NO: 1599885 - DNA, 15 bp, Homo sapiens
caggcccagagtcct

SEQ ID NO: 1599886 - DNA, 15 bp, Homo sapiens
ccaggcccagagtcc

SEQ ID NO: 1599887 - DNA, 15 bp, Homo sapiens
ggccaggcccagagt

SEQ ID NO: 1599888 - DNA, 15 bp, Homo sapiens
aggccaggcccagag

SEQ ID NO: 1599889 - DNA, 15 bp, Homo sapiens
gaggccaggcccaga

SEQ ID NO: 1599890 - DNA, 15 bp, Homo sapiens
ggaggccaggcccag

SEQ ID NO: 1599891 - DNA, 15 bp, Homo sapiens
aggaggccaggccca

SEQ ID NO: 1599892 - DNA, 15 bp, Homo sapiens
aaggaggccaggccc

SEQ ID NO: 1599893 - DNA, 15 bp, Homo sapiens
taaggaggccaggcc

SEQ ID NO: 1599894 - DNA, 15 bp, Homo sapiens
gtaaggaggccaggc

SEQ ID NO: 1599895 - DNA, 15 bp, Homo sapiens
ggtaaggaggccagg

SEQ ID NO: 1599896 - DNA, 15 bp, Homo sapiens
aggtaaggaggccag

SEQ ID NO: 1599897 - DNA, 15 bp, Homo sapiens
gaggtaaggaggcca

SEQ ID NO: 1599898 - DNA, 15 bp, Homo sapiens
ggaggtaaggaggcc

SEQ ID NO: 1599899 - DNA, 15 bp, Homo sapiens
aggaggtaaggaggc

SEQ ID NO: 1599900 - DNA, 15 bp, Homo sapiens
aaggaggtaaggagg

SEQ ID NO: 1599901 - DNA, 15 bp, Homo sapiens
taaggaggtaaggag

SEQ ID NO: 1599902 - DNA, 15 bp, Homo sapiens
ttaaggaggtaagga

SEQ ID NO: 1599903 - DNA, 15 bp, Homo sapiens
gttaaggaggtaagg

SEQ ID NO: 1599904 - DNA, 15 bp, Homo sapiens
ggttaaggaggtaag

SEQ ID NO: 1599905 - DNA, 15 bp, Homo sapiens
cggttaaggaggtaa

SEQ ID NO: 1599906 - DNA, 15 bp, Homo sapiens
ccggttaaggaggta

SEQ ID NO: 1599907 - DNA, 15 bp, Homo sapiens
accggttaaggaggt

SEQ ID NO: 1599908 - DNA, 15 bp, Homo sapiens
aaccggttaaggagg

SEQ ID NO: 1599909 - DNA, 15 bp, Homo sapiens
gaaccggttaaggag

SEQ ID NO: 1599910 - DNA, 15 bp, Homo sapiens
tgaaccggttaagga

SEQ ID NO: 1599911 - DNA, 15 bp, Homo sapiens
ctgaaccggttaagg

SEQ ID NO: 1599912 - DNA, 15 bp, Homo sapiens
tctgaaccggttaag

SEQ ID NO: 1599913 - DNA, 15 bp, Homo sapiens
ttctgaaccggttaa

SEQ ID NO: 1599914 - DNA, 15 bp, Homo sapiens
attctgaaccggtta

SEQ ID NO: 1599915 - DNA, 15 bp, Homo sapiens
gattctgaaccggtt

SEQ ID NO: 1599916 - DNA, 15 bp, Homo sapiens
ggattctgaaccggt

SEQ ID NO: 1599917 - DNA, 15 bp, Homo sapiens
aggattctgaaccgg

SEQ ID NO: 1599918 - DNA, 15 bp, Homo sapiens
aaggattctgaaccg

SEQ ID NO: 1599919 - DNA, 15 bp, Homo sapiens
aaaggattctgaacc

SEQ ID NO: 1599920 - DNA, 15 bp, Homo sapiens
caaaggattctgaac

SEQ ID NO: 1599921 - DNA, 15 bp, Homo sapiens
tcaaaggattctgaa

SEQ ID NO: 1599922 - DNA, 15 bp, Homo sapiens
ctcaaaggattctga

SEQ ID NO: 1599923 - DNA, 15 bp, Homo sapiens
gctcaaaggattctg

SEQ ID NO: 1599924 - DNA, 15 bp, Homo sapiens
agctcaaaggattct

SEQ ID NO: 1599925 - DNA, 15 bp, Homo sapiens
gagctcaaaggattc

SEQ ID NO: 1599926 - DNA, 15 bp, Homo sapiens
tgagctcaaaggatt

SEQ ID NO: 1599927 - DNA, 15 bp, Homo sapiens
ttgagctcaaaggat

SEQ ID NO: 1599928 - DNA, 15 bp, Homo sapiens
tttgagctcaaagga

SEQ ID NO: 1599929 - DNA, 15 bp, Homo sapiens
gtttgagctcaaagg

SEQ ID NO: 1599930 - DNA, 15 bp, Homo sapiens
ggtttgagctcaaag

SEQ ID NO: 1599931 - DNA, 15 bp, Homo sapiens
gggtttgagctcaaa

SEQ ID NO: 1599932 - DNA, 15 bp, Homo sapiens
tgggtttgagctcaa

SEQ ID NO: 1599933 - DNA, 15 bp, Homo sapiens
ttgggtttgagctca

SEQ ID NO: 1599934 - DNA, 15 bp, Homo sapiens
tttgggtttgagctc

SEQ ID NO: 1599935 - DNA, 15 bp, Homo sapiens
gtttgggtttgagct

SEQ ID NO: 1599936 - DNA, 15 bp, Homo sapiens
tgtttgggtttgagc

SEQ ID NO: 1599937 - DNA, 15 bp, Homo sapiens
ttgtttgggtttgag

SEQ ID NO: 1599938 - DNA, 15 bp, Homo sapiens
attgtttgggtttga

SEQ ID NO: 1599939 - DNA, 15 bp, Homo sapiens
aattgtttgggtttg

SEQ ID NO: 1599940 - DNA, 15 bp, Homo sapiens
aaattgtttgggttt

SEQ ID NO: 1599941 - DNA, 15 bp, Homo sapiens
caaattgtttgggtt

SEQ ID NO: 1599942 - DNA, 15 bp, Homo sapiens
tcaaattgtttgggt

SEQ ID NO: 1599943 - DNA, 15 bp, Homo sapiens
ttcaaattgtttggg

SEQ ID NO: 1599944 - DNA, 15 bp, Homo sapiens
attcaaattgtttgg

SEQ ID NO: 1599945 - DNA, 15 bp, Homo sapiens
gattcaaattgtttg

SEQ ID NO: 1599946 - DNA, 15 bp, Homo sapiens
agattcaaattgttt

SEQ ID NO: 1599947 - DNA, 15 bp, Homo sapiens
gagattcaaattgtt

SEQ ID NO: 1599948 - DNA, 15 bp, Homo sapiens
tgagattcaaattgt

SEQ ID NO: 1599949 - DNA, 15 bp, Homo sapiens
atgagattcaaattg

SEQ ID NO: 1599950 - DNA, 15 bp, Homo sapiens
gatgagattcaaatt

SEQ ID NO: 1599951 - DNA, 15 bp, Homo sapiens
tgatgagattcaaat

SEQ ID NO: 1599952 - DNA, 15 bp, Homo sapiens
ctgatgagattcaaa

SEQ ID NO: 1599953 - DNA, 15 bp, Homo sapiens
tctgatgagattcaa

SEQ ID NO: 1599954 - DNA, 15 bp, Homo sapiens
gtctgatgagattca

SEQ ID NO: 1599955 - DNA, 15 bp, Homo sapiens
ggtctgatgagattc

SEQ ID NO: 1599956 - DNA, 15 bp, Homo sapiens
tggtctgatgagatt

SEQ ID NO: 1599957 - DNA, 15 bp, Homo sapiens
ttggtctgatgagat

SEQ ID NO: 1599958 - DNA, 15 bp, Homo sapiens
tttggtctgatgaga

SEQ ID NO: 1599959 - DNA, 15 bp, Homo sapiens
ctttggtctgatgag

SEQ ID NO: 1599960 - DNA, 15 bp, Homo sapiens
tctttggtctgatga

SEQ ID NO: 1599961 - DNA, 15 bp, Homo sapiens
gtctttggtctgatg

SEQ ID NO: 1599962 - DNA, 15 bp, Homo sapiens
tgtctttggtctgat

SEQ ID NO: 1599963 - DNA, 15 bp, Homo sapiens
ttgtctttggtctga

SEQ ID NO: 1599964 - DNA, 15 bp, Homo sapiens
cttgtctttggtctg

SEQ ID NO: 1599965 - DNA, 15 bp, Homo sapiens
tcttgtctttggtct

SEQ ID NO: 1599966 - DNA, 15 bp, Homo sapiens
atcttgtctttggtc

SEQ ID NO: 1599967 - DNA, 15 bp, Homo sapiens
gatcttgtctttggt

SEQ ID NO: 1599968 - DNA, 15 bp, Homo sapiens
ggatcttgtctttgg

SEQ ID NO: 1599969 - DNA, 15 bp, Homo sapiens
aggatcttgtctttg

SEQ ID NO: 1599970 - DNA, 15 bp, Homo sapiens
gaggatcttgtcttt

SEQ ID NO: 1599971 - DNA, 15 bp, Homo sapiens
ggaggatcttgtctt

SEQ ID NO: 1599972 - DNA, 15 bp, Homo sapiens
gggaggatcttgtct

SEQ ID NO: 1599973 - DNA, 15 bp, Homo sapiens
tgggaggatcttgtc

SEQ ID NO: 1599974 - DNA, 15 bp, Homo sapiens
ttgggaggatcttgt

SEQ ID NO: 1599975 - DNA, 15 bp, Homo sapiens
cttgggaggatcttg

SEQ ID NO: 1599976 - DNA, 15 bp, Homo sapiens
gcttgggaggatctt

SEQ ID NO: 1599977 - DNA, 15 bp, Homo sapiens
ggcttgggaggatct

SEQ ID NO: 1599978 - DNA, 15 bp, Homo sapiens
gggcttgggaggatc

SEQ ID NO: 1599979 - DNA, 15 bp, Homo sapiens
ggggcttgggaggat

SEQ ID NO: 1599980 - DNA, 15 bp, Homo sapiens
gggggcttgggagga

SEQ ID NO: 1599981 - DNA, 15 bp, Homo sapiens
cgggggcttgggagg

SEQ ID NO: 1599982 - DNA, 15 bp, Homo sapiens
gcgggggcttgggag

SEQ ID NO: 1599983 - DNA, 15 bp, Homo sapiens
ggcgggggcttggga

SEQ ID NO: 1599984 - DNA, 15 bp, Homo sapiens
gggcgggggcttggg

SEQ ID NO: 1599985 - DNA, 15 bp, Homo sapiens
ggggcgggggcttgg

SEQ ID NO: 1599986 - DNA, 15 bp, Homo sapiens
aggggcgggggcttg

SEQ ID NO: 1599987 - DNA, 15 bp, Homo sapiens
gaggggcgggggctt

SEQ ID NO: 1599988 - DNA, 15 bp, Homo sapiens
tgaggggcgggggct

SEQ ID NO: 1599989 - DNA, 15 bp, Homo sapiens
ttgaggggcgggggc

SEQ ID NO: 1599990 - DNA, 15 bp, Homo sapiens
tttgaggggcggggg

SEQ ID NO: 1599991 - DNA, 15 bp, Homo sapiens
ctttgaggggcgggg

SEQ ID NO: 1599992 - DNA, 15 bp, Homo sapiens
gctttgaggggcggg

SEQ ID NO: 1599993 - DNA, 15 bp, Homo sapiens
ggctttgaggggcgg

SEQ ID NO: 1599994 - DNA, 15 bp, Homo sapiens
tggctttgaggggcg

SEQ ID NO: 1599995 - DNA, 15 bp, Homo sapiens
atggctttgaggggc

SEQ ID NO: 1599996 - DNA, 15 bp, Homo sapiens
aatggctttgagggg

SEQ ID NO: 1599997 - DNA, 15 bp, Homo sapiens
aaatggctttgaggg

SEQ ID NO: 1599998 - DNA, 15 bp, Homo sapiens
taaatggctttgagg

SEQ ID NO: 1599999 - DNA, 15 bp, Homo sapiens
ttaaatggctttgag

SEQ ID NO: 1600000 - DNA, 15 bp, Homo sapiens
tttaaatggctttga

SEQ ID NO: 1600001 - DNA, 15 bp, Homo sapiens
ctttaaatggctttg

SEQ ID NO: 1600002 - DNA, 15 bp, Homo sapiens
gctttaaatggcttt

SEQ ID NO: 1600003 - DNA, 15 bp, Homo sapiens
ggctttaaatggctt

SEQ ID NO: 1600004 - DNA, 15 bp, Homo sapiens
tggctttaaatggct

SEQ ID NO: 1600005 - DNA, 15 bp, Homo sapiens
ttggctttaaatggc

SEQ ID NO: 1600006 - DNA, 15 bp, Homo sapiens
tttggctttaaatgg

SEQ ID NO: 1600007 - DNA, 15 bp, Homo sapiens
atttggctttaaatg

SEQ ID NO: 1600008 - DNA, 15 bp, Homo sapiens
gatttggctttaaat

SEQ ID NO: 1600009 - DNA, 15 bp, Homo sapiens
tgatttggctttaaa

SEQ ID NO: 1600010 - DNA, 15 bp, Homo sapiens
ttgatttggctttaa

SEQ ID NO: 1600011 - DNA, 15 bp, Homo sapiens
tttgatttggcttta

SEQ ID NO: 1600012 - DNA, 15 bp, Homo sapiens
ttttgatttggcttt

SEQ ID NO: 1600013 - DNA, 15 bp, Homo sapiens
gttttgatttggctt

SEQ ID NO: 1600014 - DNA, 15 bp, Homo sapiens
tgttttgatttggct

SEQ ID NO: 1600015 - DNA, 15 bp, Homo sapiens
ttgttttgatttggc

SEQ ID NO: 1600016 - DNA, 15 bp, Homo sapiens
tttgttttgatttgg

SEQ ID NO: 1600017 - DNA, 15 bp, Homo sapiens
ttttgttttgatttg

SEQ ID NO: 1600018 - DNA, 15 bp, Homo sapiens
gttttgttttgattt

SEQ ID NO: 1600019 - DNA, 15 bp, Homo sapiens
tgttttgttttgatt

SEQ ID NO: 1600020 - DNA, 15 bp, Homo sapiens
ttgttttgttttgat

SEQ ID NO: 1600021 - DNA, 15 bp, Homo sapiens
tttgttttgttttga

SEQ ID NO: 1600022 - DNA, 15 bp, Homo sapiens
cctttttgttttgtt

SEQ ID NO: 1600023 - DNA, 15 bp, Homo sapiens
tcctttttgttttgt

SEQ ID NO: 1600024 - DNA, 15 bp, Homo sapiens
ctcctttttgttttg

SEQ ID NO: 1600025 - DNA, 15 bp, Homo sapiens
cctcctttttgtttt

SEQ ID NO: 1600026 - DNA, 15 bp, Homo sapiens
ccctcctttttgttt

SEQ ID NO: 1600027 - DNA, 15 bp, Homo sapiens
accctcctttttgtt

SEQ ID NO: 1600028 - DNA, 15 bp, Homo sapiens
aaccctcctttttgt

SEQ ID NO: 1600029 - DNA, 15 bp, Homo sapiens
aaaccctcctttttg

SEQ ID NO: 1600030 - DNA, 15 bp, Homo sapiens
aaaaccctccttttt

SEQ ID NO: 1600031 - DNA, 15 bp, Homo sapiens
taaaaccctcctttt

SEQ ID NO: 1600032 - DNA, 15 bp, Homo sapiens
ttaaaaccctccttt

SEQ ID NO: 1600033 - DNA, 15 bp, Homo sapiens
attaaaaccctcctt

SEQ ID NO: 1600034 - DNA, 15 bp, Homo sapiens
gattaaaaccctcct

SEQ ID NO: 1600035 - DNA, 15 bp, Homo sapiens
tgattaaaaccctcc

SEQ ID NO: 1600036 - DNA, 15 bp, Homo sapiens
ctgattaaaaccctc

SEQ ID NO: 1600037 - DNA, 15 bp, Homo sapiens
tctgattaaaaccct

SEQ ID NO: 1600038 - DNA, 15 bp, Homo sapiens
ttctgattaaaaccc

SEQ ID NO: 1600039 - DNA, 15 bp, Homo sapiens
tttctgattaaaacc

SEQ ID NO: 1600040 - DNA, 15 bp, Homo sapiens
ttttctgattaaaac

SEQ ID NO: 1600041 - DNA, 15 bp, Homo sapiens
tttttctgattaaaa

SEQ ID NO: 1600042 - DNA, 15 bp, Homo sapiens
ctttttctgattaaa

SEQ ID NO: 1600043 - DNA, 15 bp, Homo sapiens
tctttttctgattaa

SEQ ID NO: 1600044 - DNA, 15 bp, Homo sapiens
ttctttttctgatta

SEQ ID NO: 1600045 - DNA, 15 bp, Homo sapiens
attctttttctgatt

SEQ ID NO: 1600046 - DNA, 15 bp, Homo sapiens
gattctttttctgat

SEQ ID NO: 1600047 - DNA, 15 bp, Homo sapiens
agattctttttctga

SEQ ID NO: 1600048 - DNA, 15 bp, Homo sapiens
aagattctttttctg

SEQ ID NO: 1600049 - DNA, 15 bp, Homo sapiens
aaagattctttttct

SEQ ID NO: 1600050 - DNA, 15 bp, Homo sapiens
aaaagattctttttc

SEQ ID NO: 1600051 - DNA, 15 bp, Homo sapiens
aaaaagattcttttt

SEQ ID NO: 1600052 - DNA, 15 bp, Homo sapiens
taaaaagattctttt

SEQ ID NO: 1600053 - DNA, 15 bp, Homo sapiens
ttaaaaagattcttt

SEQ ID NO: 1600054 - DNA, 15 bp, Homo sapiens
attaaaaagattctt

SEQ ID NO: 1600055 - DNA, 15 bp, Homo sapiens
aattaaaaagattct

SEQ ID NO: 1600056 - DNA, 15 bp, Homo sapiens
aaattaaaaagattc

SEQ ID NO: 1600057 - DNA, 15 bp, Homo sapiens
caaattaaaaagatt

SEQ ID NO: 1600058 - DNA, 15 bp, Homo sapiens
acaaattaaaaagat

SEQ ID NO: 1600059 - DNA, 15 bp, Homo sapiens
tacaaattaaaaaga

SEQ ID NO: 1600060 - DNA, 15 bp, Homo sapiens
atacaaattaaaaag

SEQ ID NO: 1600061 - DNA, 15 bp, Homo sapiens
tatacaaattaaaaa

SEQ ID NO: 1600062 - DNA, 15 bp, Homo sapiens
ttatacaaattaaaa

SEQ ID NO: 1600063 - DNA, 15 bp, Homo sapiens
attatacaaattaaa

SEQ ID NO: 1600064 - DNA, 15 bp, Homo sapiens
aattatacaaattaa

SEQ ID NO: 1600065 - DNA, 15 bp, Homo sapiens
aaattatacaaatta

SEQ ID NO: 1600066 - DNA, 15 bp, Homo sapiens
taaattatacaaatt

SEQ ID NO: 1600067 - DNA, 15 bp, Homo sapiens
ataaattatacaaat

SEQ ID NO: 1600068 - DNA, 15 bp, Homo sapiens
aataaattatacaaa

SEQ ID NO: 1600069 - DNA, 15 bp, Homo sapiens
taataaattatacaa

SEQ ID NO: 1600070 - DNA, 15 bp, Homo sapiens
ctaataaattataca

SEQ ID NO: 1600071 - DNA, 15 bp, Homo sapiens
tctaataaattatac

SEQ ID NO: 1600072 - DNA, 15 bp, Homo sapiens
ttctaataaattata

SEQ ID NO: 1600073 - DNA, 15 bp, Homo sapiens
cttctaataaattat

SEQ ID NO: 1600074 - DNA, 15 bp, Homo sapiens
gcttctaataaatta

SEQ ID NO: 1600075 - DNA, 15 bp, Homo sapiens
agcttctaataaatt

SEQ ID NO: 1600076 - DNA, 15 bp, Homo sapiens
aagcttctaataaat

SEQ ID NO: 1600077 - DNA, 15 bp, Homo sapiens
gaagcttctaataaa

SEQ ID NO: 1600078 - DNA, 15 bp, Homo sapiens
agaagcttctaataa

SEQ ID NO: 1600079 - DNA, 15 bp, Homo sapiens
aagaagcttctaata

SEQ ID NO: 1600080 - DNA, 15 bp, Homo sapiens
taagaagcttctaat

SEQ ID NO: 1600081 - DNA, 15 bp, Homo sapiens
ctaagaagcttctaa

SEQ ID NO: 1600082 - DNA, 15 bp, Homo sapiens
cctaagaagcttcta

SEQ ID NO: 1600083 - DNA, 15 bp, Homo sapiens
tcctaagaagcttct

SEQ ID NO: 1600084 - DNA, 15 bp, Homo sapiens
ttcctaagaagcttc

SEQ ID NO: 1600085 - DNA, 15 bp, Homo sapiens
gttcctaagaagctt

SEQ ID NO: 1600086 - DNA, 15 bp, Homo sapiens
agttcctaagaagct

SEQ ID NO: 1600087 - DNA, 15 bp, Homo sapiens
tagttcctaagaagc

SEQ ID NO: 1600088 - DNA, 15 bp, Homo sapiens
atagttcctaagaag

SEQ ID NO: 1600089 - DNA, 15 bp, Homo sapiens
tatagttcctaagaa

SEQ ID NO: 1600090 - DNA, 15 bp, Homo sapiens
atatagttcctaaga

SEQ ID NO: 1600091 - DNA, 15 bp, Homo sapiens
aatatagttcctaag

SEQ ID NO: 1600092 - DNA, 15 bp, Homo sapiens
aaatatagttcctaa

SEQ ID NO: 1600093 - DNA, 15 bp, Homo sapiens
taaatatagttccta

SEQ ID NO: 1600094 - DNA, 15 bp, Homo sapiens
ttaaatatagttcct

SEQ ID NO: 1600095 - DNA, 15 bp, Homo sapiens
cttaaatatagttcc

SEQ ID NO: 1600096 - DNA, 15 bp, Homo sapiens
gcttaaatatagttc

SEQ ID NO: 1600097 - DNA, 15 bp, Homo sapiens
ggcttaaatatagtt

SEQ ID NO: 1600098 - DNA, 15 bp, Homo sapiens
tggcttaaatatagt

SEQ ID NO: 1600099 - DNA, 15 bp, Homo sapiens
ttggcttaaatatag

SEQ ID NO: 1600100 - DNA, 15 bp, Homo sapiens
tttggcttaaatata

SEQ ID NO: 1600101 - DNA, 15 bp, Homo sapiens
atttggcttaaatat

SEQ ID NO: 1600102 - DNA, 15 bp, Homo sapiens
tatttggcttaaata

SEQ ID NO: 1600103 - DNA, 15 bp, Homo sapiens
atatttggcttaaat

SEQ ID NO: 1600104 - DNA, 15 bp, Homo sapiens
gatatttggcttaaa

SEQ ID NO: 1600105 - DNA, 15 bp, Homo sapiens
agatatttggcttaa

SEQ ID NO: 1600106 - DNA, 15 bp, Homo sapiens
tagatatttggctta

SEQ ID NO: 1600107 - DNA, 15 bp, Homo sapiens
gtagatatttggctt

SEQ ID NO: 1600108 - DNA, 15 bp, Homo sapiens
tgtagatatttggct

SEQ ID NO: 1600109 - DNA, 15 bp, Homo sapiens
atgtagatatttggc

SEQ ID NO: 1600110 - DNA, 15 bp, Homo sapiens
tatgtagatatttgg

SEQ ID NO: 1600111 - DNA, 15 bp, Homo sapiens
ttatgtagatatttg

SEQ ID NO: 1600112 - DNA, 15 bp, Homo sapiens
cttatgtagatattt

SEQ ID NO: 1600113 - DNA, 15 bp, Homo sapiens
acttatgtagatatt

SEQ ID NO: 1600114 - DNA, 15 bp, Homo sapiens
aacttatgtagatat

SEQ ID NO: 1600115 - DNA, 15 bp, Homo sapiens
taacttatgtagata

SEQ ID NO: 1600116 - DNA, 15 bp, Homo sapiens
gtaacttatgtagat

SEQ ID NO: 1600117 - DNA, 15 bp, Homo sapiens
tgtaacttatgtaga

SEQ ID NO: 1600118 - DNA, 15 bp, Homo sapiens
ttgtaacttatgtag

SEQ ID NO: 1600119 - DNA, 15 bp, Homo sapiens
gttgtaacttatgta

SEQ ID NO: 1600120 - DNA, 15 bp, Homo sapiens
tgttgtaacttatgt

SEQ ID NO: 1600121 - DNA, 15 bp, Homo sapiens
ctgttgtaacttatg

SEQ ID NO: 1600122 - DNA, 15 bp, Homo sapiens
tctgttgtaacttat

SEQ ID NO: 1600123 - DNA, 15 bp, Homo sapiens
ttctgttgtaactta

SEQ ID NO: 1600124 - DNA, 15 bp, Homo sapiens
tttctgttgtaactt

SEQ ID NO: 1600125 - DNA, 15 bp, Homo sapiens
ttttctgttgtaact

SEQ ID NO: 1600126 - DNA, 15 bp, Homo sapiens
tttttctgttgtaac

SEQ ID NO: 1600127 - DNA, 15 bp, Homo sapiens
ctttttctgttgtaa

SEQ ID NO: 1600128 - DNA, 15 bp, Homo sapiens
tctttttctgttgta

SEQ ID NO: 1600129 - DNA, 15 bp, Homo sapiens
gtctttttctgttgt

SEQ ID NO: 1600130 - DNA, 15 bp, Homo sapiens
agtctttttctgttg

SEQ ID NO: 1600131 - DNA, 15 bp, Homo sapiens
cagtctttttctgtt

SEQ ID NO: 1600132 - DNA, 15 bp, Homo sapiens
tcagtctttttctgt

SEQ ID NO: 1600133 - DNA, 15 bp, Homo sapiens
gtcagtctttttctg

SEQ ID NO: 1600134 - DNA, 15 bp, Homo sapiens
cgtcagtctttttct

SEQ ID NO: 1600135 - DNA, 15 bp, Homo sapiens
gcgtcagtctttttc

SEQ ID NO: 1600136 - DNA, 15 bp, Homo sapiens
ggcgtcagtcttttt

SEQ ID NO: 1600137 - DNA, 15 bp, Homo sapiens
cggcgtcagtctttt

SEQ ID NO: 1600138 - DNA, 15 bp, Homo sapiens
gcggcgtcagtcttt

SEQ ID NO: 1600139 - DNA, 15 bp, Homo sapiens
tgcggcgtcagtctt

SEQ ID NO: 1600140 - DNA, 15 bp, Homo sapiens
ttgcggcgtcagtct

SEQ ID NO: 1600141 - DNA, 15 bp, Homo sapiens
tttgcggcgtcagtc

SEQ ID NO: 1600142 - DNA, 15 bp, Homo sapiens
atttgcggcgtcagt

SEQ ID NO: 1600143 - DNA, 15 bp, Homo sapiens
tatttgcggcgtcag

SEQ ID NO: 1600144 - DNA, 15 bp, Homo sapiens
gtatttgcggcgtca

SEQ ID NO: 1600145 - DNA, 15 bp, Homo sapiens
ggtatttgcggcgtc

SEQ ID NO: 1600146 - DNA, 15 bp, Homo sapiens
tggtatttgcggcgt

SEQ ID NO: 1600147 - DNA, 15 bp, Homo sapiens
ttggtatttgcggcg

SEQ ID NO: 1600148 - DNA, 15 bp, Homo sapiens
tttggtatttgcggc

SEQ ID NO: 1600149 - DNA, 15 bp, Homo sapiens
gtttggtatttgcgg

SEQ ID NO: 1600150 - DNA, 15 bp, Homo sapiens
agtttggtatttgcg

SEQ ID NO: 1600151 - DNA, 15 bp, Homo sapiens
cagtttggtatttgc

SEQ ID NO: 1600152 - DNA, 15 bp, Homo sapiens
gcagtttggtatttg

SEQ ID NO: 1600153 - DNA, 15 bp, Homo sapiens
ggcagtttggtattt

SEQ ID NO: 1600154 - DNA, 15 bp, Homo sapiens
tggcagtttggtatt

SEQ ID NO: 1600155 - DNA, 15 bp, Homo sapiens
ttggcagtttggtat

SEQ ID NO: 1600156 - DNA, 15 bp, Homo sapiens
tttggcagtttggta

SEQ ID NO: 1600157 - DNA, 15 bp, Homo sapiens
atttggcagtttggt

SEQ ID NO: 1600158 - DNA, 15 bp, Homo sapiens
tatttggcagtttgg

SEQ ID NO: 1600159 - DNA, 15 bp, Homo sapiens
ttatttggcagtttg

SEQ ID NO: 1600160 - DNA, 15 bp, Homo sapiens
attatttggcagttt

SEQ ID NO: 1600161 - DNA, 15 bp, Homo sapiens
tattatttggcagtt

SEQ ID NO: 1600162 - DNA, 15 bp, Homo sapiens
atattatttggcagt

SEQ ID NO: 1600163 - DNA, 15 bp, Homo sapiens
tatattatttggcag

SEQ ID NO: 1600164 - DNA, 15 bp, Homo sapiens
gtatattatttggca

SEQ ID NO: 1600165 - DNA, 15 bp, Homo sapiens
tgtatattatttggc

SEQ ID NO: 1600166 - DNA, 15 bp, Homo sapiens
gtgtatattatttgg

SEQ ID NO: 1600167 - DNA, 15 bp, Homo sapiens
tgtgtatattatttg

SEQ ID NO: 1600168 - DNA, 15 bp, Homo sapiens
ctgtgtatattattt

SEQ ID NO: 1600169 - DNA, 15 bp, Homo sapiens
tctgtgtatattatt

SEQ ID NO: 1600170 - DNA, 15 bp, Homo sapiens
atctgtgtatattat

SEQ ID NO: 1600171 - DNA, 15 bp, Homo sapiens
aatctgtgtatatta

SEQ ID NO: 1600172 - DNA, 15 bp, Homo sapiens
aaatctgtgtatatt

SEQ ID NO: 1600173 - DNA, 15 bp, Homo sapiens
caaatctgtgtatat

SEQ ID NO: 1600174 - DNA, 15 bp, Homo sapiens
acaaatctgtgtata

SEQ ID NO: 1600175 - DNA, 15 bp, Homo sapiens
gacaaatctgtgtat

SEQ ID NO: 1600176 - DNA, 15 bp, Homo sapiens
tgacaaatctgtgta

SEQ ID NO: 1600177 - DNA, 15 bp, Homo sapiens
ttgacaaatctgtgt

SEQ ID NO: 1600178 - DNA, 15 bp, Homo sapiens
attgacaaatctgtg

SEQ ID NO: 1600179 - DNA, 15 bp, Homo sapiens
cattgacaaatctgt

SEQ ID NO: 1600180 - DNA, 15 bp, Homo sapiens
gcattgacaaatctg

SEQ ID NO: 1600181 - DNA, 15 bp, Homo sapiens
ggcattgacaaatct

SEQ ID NO: 1600182 - DNA, 15 bp, Homo sapiens
gggcattgacaaatc

SEQ ID NO: 1600183 - DNA, 15 bp, Homo sapiens
tgggcattgacaaat

SEQ ID NO: 1600184 - DNA, 15 bp, Homo sapiens
atgggcattgacaaa

SEQ ID NO: 1600185 - DNA, 15 bp, Homo sapiens
tatgggcattgacaa

SEQ ID NO: 1600186 - DNA, 15 bp, Homo sapiens
ttatgggcattgaca

SEQ ID NO: 1600187 - DNA, 15 bp, Homo sapiens
tttatgggcattgac

SEQ ID NO: 1600188 - DNA, 15 bp, Homo sapiens
ttttatgggcattga

SEQ ID NO: 1600189 - DNA, 15 bp, Homo sapiens
tttttatgggcattg

SEQ ID NO: 1600190 - DNA, 15 bp, Homo sapiens
ttttttatgggcatt

SEQ ID NO: 1600191 - DNA, 15 bp, Homo sapiens
attttttatgggcat

SEQ ID NO: 1600192 - DNA, 15 bp, Homo sapiens
cattttttatgggca

SEQ ID NO: 1600193 - DNA, 15 bp, Homo sapiens
acattttttatgggc

SEQ ID NO: 1600194 - DNA, 15 bp, Homo sapiens
cacattttttatggg

SEQ ID NO: 1600195 - DNA, 15 bp, Homo sapiens
tcacattttttatgg

SEQ ID NO: 1600196 - DNA, 15 bp, Homo sapiens
ttcacattttttatg

SEQ ID NO: 1600197 - DNA, 15 bp, Homo sapiens
cttcacattttttat

SEQ ID NO: 1600198 - DNA, 15 bp, Homo sapiens
ccttcacatttttta

SEQ ID NO: 1600199 - DNA, 15 bp, Homo sapiens
cccttcacatttttt

SEQ ID NO: 1600200 - DNA, 15 bp, Homo sapiens
gcccttcacattttt

SEQ ID NO: 1600201 - DNA, 15 bp, Homo sapiens
agcccttcacatttt

SEQ ID NO: 1600202 - DNA, 15 bp, Homo sapiens
cagcccttcacattt

SEQ ID NO: 1600203 - DNA, 15 bp, Homo sapiens
ccagcccttcacatt

SEQ ID NO: 1600204 - DNA, 15 bp, Homo sapiens
cccagcccttcacat

SEQ ID NO: 1600205 - DNA, 15 bp, Homo sapiens
ccccagcccttcaca

SEQ ID NO: 1600206 - DNA, 15 bp, Homo sapiens
tccccagcccttcac

SEQ ID NO: 1600207 - DNA, 15 bp, Homo sapiens
gtccccagcccttca

SEQ ID NO: 1600208 - DNA, 15 bp, Homo sapiens
agtccccagcccttc

SEQ ID NO: 1600209 - DNA, 15 bp, Homo sapiens
cagtccccagccctt

SEQ ID NO: 1600210 - DNA, 15 bp, Homo sapiens
ccagtccccagccct

SEQ ID NO: 1600211 - DNA, 15 bp, Homo sapiens
cccagtccccagccc

SEQ ID NO: 1600212 - DNA, 15 bp, Homo sapiens
tcccagtccccagcc

SEQ ID NO: 1600213 - DNA, 15 bp, Homo sapiens
ctcccagtccccagc

SEQ ID NO: 1600214 - DNA, 15 bp, Homo sapiens
actcccagtccccag

SEQ ID NO: 1600215 - DNA, 15 bp, Homo sapiens
cactcccagtcccca

SEQ ID NO: 1600216 - DNA, 15 bp, Homo sapiens
ccactcccagtcccc

SEQ ID NO: 1600217 - DNA, 15 bp, Homo sapiens
accactcccagtccc

SEQ ID NO: 1600218 - DNA, 15 bp, Homo sapiens
aaccactcccagtcc

SEQ ID NO: 1600219 - DNA, 15 bp, Homo sapiens
aaaccactcccagtc

SEQ ID NO: 1600220 - DNA, 15 bp, Homo sapiens
aaaaccactcccagt

SEQ ID NO: 1600221 - DNA, 15 bp, Homo sapiens
aaaaaccactcccag

SEQ ID NO: 1600222 - DNA, 15 bp, Homo sapiens
gaaaaaccactccca

SEQ ID NO: 1600223 - DNA, 15 bp, Homo sapiens
agaaaaaccactccc

SEQ ID NO: 1600224 - DNA, 15 bp, Homo sapiens
aagaaaaaccactcc

SEQ ID NO: 1600225 - DNA, 15 bp, Homo sapiens
aaagaaaaaccactc

SEQ ID NO: 1600226 - DNA, 15 bp, Homo sapiens
aaaagaaaaaccact

SEQ ID NO: 1600227 - DNA, 15 bp, Homo sapiens
aaaaagaaaaaccac

SEQ ID NO: 1600228 - DNA, 15 bp, Homo sapiens
taaaaagaaaaacca

SEQ ID NO: 1600229 - DNA, 15 bp, Homo sapiens
gtaaaaagaaaaacc

SEQ ID NO: 1600230 - DNA, 15 bp, Homo sapiens
tgtaaaaagaaaaac

SEQ ID NO: 1600231 - DNA, 15 bp, Homo sapiens
ttgtaaaaagaaaaa

SEQ ID NO: 1600232 - DNA, 15 bp, Homo sapiens
gttgtaaaaagaaaa

SEQ ID NO: 1600233 - DNA, 15 bp, Homo sapiens
tgttgtaaaaagaaa

SEQ ID NO: 1600234 - DNA, 15 bp, Homo sapiens
ttgttgtaaaaagaa

SEQ ID NO: 1600235 - DNA, 15 bp, Homo sapiens
tttgttgtaaaaaga

SEQ ID NO: 1600236 - DNA, 15 bp, Homo sapiens
ttttgttgtaaaaag

SEQ ID NO: 1600237 - DNA, 15 bp, Homo sapiens
attttgttgtaaaaa

SEQ ID NO: 1600238 - DNA, 15 bp, Homo sapiens
cattttgttgtaaaa

SEQ ID NO: 1600239 - DNA, 15 bp, Homo sapiens
acattttgttgtaaa

SEQ ID NO: 1600240 - DNA, 15 bp, Homo sapiens
tacattttgttgtaa

SEQ ID NO: 1600241 - DNA, 15 bp, Homo sapiens
gtacattttgttgta

SEQ ID NO: 1600242 - DNA, 15 bp, Homo sapiens
tgtacattttgttgt

SEQ ID NO: 1600243 - DNA, 15 bp, Homo sapiens
ctgtacattttgttg

SEQ ID NO: 1600244 - DNA, 15 bp, Homo sapiens
tctgtacattttgtt

SEQ ID NO: 1600245 - DNA, 15 bp, Homo sapiens
atctgtacattttgt

SEQ ID NO: 1600246 - DNA, 15 bp, Homo sapiens
aatctgtacattttg

SEQ ID NO: 1600247 - DNA, 15 bp, Homo sapiens
taatctgtacatttt

SEQ ID NO: 1600248 - DNA, 15 bp, Homo sapiens
gtaatctgtacattt

SEQ ID NO: 1600249 - DNA, 15 bp, Homo sapiens
agtaatctgtacatt

SEQ ID NO: 1600250 - DNA, 15 bp, Homo sapiens
tagtaatctgtacat

SEQ ID NO: 1600251 - DNA, 15 bp, Homo sapiens
ttagtaatctgtaca

SEQ ID NO: 1600252 - DNA, 15 bp, Homo sapiens
tttagtaatctgtac

SEQ ID NO: 1600253 - DNA, 15 bp, Homo sapiens
ttttagtaatctgta

SEQ ID NO: 1600254 - DNA, 15 bp, Homo sapiens
tttttagtaatctgt

SEQ ID NO: 1600255 - DNA, 15 bp, Homo sapiens
gtttttagtaatctg

SEQ ID NO: 1600256 - DNA, 15 bp, Homo sapiens
agtttttagtaatct

SEQ ID NO: 1600257 - DNA, 15 bp, Homo sapiens
tagtttttagtaatc

SEQ ID NO: 1600258 - DNA, 15 bp, Homo sapiens
ctagtttttagtaat

SEQ ID NO: 1600259 - DNA, 15 bp, Homo sapiens
cctagtttttagtaa

SEQ ID NO: 1600260 - DNA, 15 bp, Homo sapiens
gcctagtttttagta

SEQ ID NO: 1600261 - DNA, 15 bp, Homo sapiens
tgcctagtttttagt

SEQ ID NO: 1600262 - DNA, 15 bp, Homo sapiens
atgcctagtttttag

SEQ ID NO: 1600263 - DNA, 15 bp, Homo sapiens
aatgcctagttttta

SEQ ID NO: 1600264 - DNA, 15 bp, Homo sapiens
aaatgcctagttttt

SEQ ID NO: 1600265 - DNA, 15 bp, Homo sapiens
taaatgcctagtttt

SEQ ID NO: 1600266 - DNA, 15 bp, Homo sapiens
ctaaatgcctagttt

SEQ ID NO: 1600267 - DNA, 15 bp, Homo sapiens
actaaatgcctagtt

SEQ ID NO: 1600268 - DNA, 15 bp, Homo sapiens
gactaaatgcctagt

SEQ ID NO: 1600269 - DNA, 15 bp, Homo sapiens
ggactaaatgcctag

SEQ ID NO: 1600270 - DNA, 15 bp, Homo sapiens
tggactaaatgccta

SEQ ID NO: 1600271 - DNA, 15 bp, Homo sapiens
ttggactaaatgcct

SEQ ID NO: 1600272 - DNA, 15 bp, Homo sapiens
gttggactaaatgcc

SEQ ID NO: 1600273 - DNA, 15 bp, Homo sapiens
agttggactaaatgc

SEQ ID NO: 1600274 - DNA, 15 bp, Homo sapiens
aaagttggactaaat

SEQ ID NO: 1600275 - DNA, 15 bp, Homo sapiens
aaaagttggactaaa

SEQ ID NO: 1600276 - DNA, 15 bp, Homo sapiens
caaaagttggactaa

SEQ ID NO: 1600277 - DNA, 15 bp, Homo sapiens
tcaaaagttggacta

SEQ ID NO: 1600278 - DNA, 15 bp, Homo sapiens
gtcaaaagttggact

SEQ ID NO: 1600279 - DNA, 15 bp, Homo sapiens
tgtcaaaagttggac

SEQ ID NO: 1600280 - DNA, 15 bp, Homo sapiens
ctgtcaaaagttgga

SEQ ID NO: 1600281 - DNA, 15 bp, Homo sapiens
gctgtcaaaagttgg

SEQ ID NO: 1600282 - DNA, 15 bp, Homo sapiens
cgctgtcaaaagttg

SEQ ID NO: 1600283 - DNA, 15 bp, Homo sapiens
acgctgtcaaaagtt

SEQ ID NO: 1600284 - DNA, 15 bp, Homo sapiens
aacgctgtcaaaagt

SEQ ID NO: 1600285 - DNA, 15 bp, Homo sapiens
aaacgctgtcaaaag

SEQ ID NO: 1600286 - DNA, 15 bp, Homo sapiens
aaaacgctgtcaaaa

SEQ ID NO: 1600287 - DNA, 15 bp, Homo sapiens
taaaacgctgtcaaa

SEQ ID NO: 1600288 - DNA, 15 bp, Homo sapiens
gtaaaacgctgtcaa

SEQ ID NO: 1600289 - DNA, 15 bp, Homo sapiens
tgtaaaacgctgtca

SEQ ID NO: 1600290 - DNA, 15 bp, Homo sapiens
ctgtaaaacgctgtc

SEQ ID NO: 1600291 - DNA, 15 bp, Homo sapiens
gctgtaaaacgctgt

SEQ ID NO: 1600292 - DNA, 15 bp, Homo sapiens
agctgtaaaacgctg

SEQ ID NO: 1600293 - DNA, 15 bp, Homo sapiens
tagctgtaaaacgct

SEQ ID NO: 1600294 - DNA, 15 bp, Homo sapiens
gtagctgtaaaacgc

SEQ ID NO: 1600295 - DNA, 15 bp, Homo sapiens
tgtagctgtaaaacg

SEQ ID NO: 1600296 - DNA, 15 bp, Homo sapiens
ttgtagctgtaaaac

SEQ ID NO: 1600297 - DNA, 15 bp, Homo sapiens
cttgtagctgtaaaa

SEQ ID NO: 1600298 - DNA, 15 bp, Homo sapiens
acttgtagctgtaaa

SEQ ID NO: 1600299 - DNA, 15 bp, Homo sapiens
aacttgtagctgtaa

SEQ ID NO: 1600300 - DNA, 15 bp, Homo sapiens
gaacttgtagctgta

SEQ ID NO: 1600301 - DNA, 15 bp, Homo sapiens
tgaacttgtagctgt

SEQ ID NO: 1600302 - DNA, 15 bp, Homo sapiens
gtgaacttgtagctg

SEQ ID NO: 1600303 - DNA, 15 bp, Homo sapiens
tgtgaacttgtagct

SEQ ID NO: 1600304 - DNA, 15 bp, Homo sapiens
atgtgaacttgtagc

SEQ ID NO: 1600305 - DNA, 15 bp, Homo sapiens
aatgtgaacttgtag

SEQ ID NO: 1600306 - DNA, 15 bp, Homo sapiens
taatgtgaacttgta

SEQ ID NO: 1600307 - DNA, 15 bp, Homo sapiens
ttaatgtgaacttgt

SEQ ID NO: 1600308 - DNA, 15 bp, Homo sapiens
tttaatgtgaacttg

SEQ ID NO: 1600309 - DNA, 15 bp, Homo sapiens
gtttaatgtgaactt

SEQ ID NO: 1600310 - DNA, 15 bp, Homo sapiens
tgtttaatgtgaact

SEQ ID NO: 1600311 - DNA, 15 bp, Homo sapiens
ttgtttaatgtgaac

SEQ ID NO: 1600312 - DNA, 15 bp, Homo sapiens
tttgtttaatgtgaa

SEQ ID NO: 1600313 - DNA, 15 bp, Homo sapiens
gtttgtttaatgtga

SEQ ID NO: 1600314 - DNA, 15 bp, Homo sapiens
agtttgtttaatgtg

SEQ ID NO: 1600315 - DNA, 15 bp, Homo sapiens
tagtttgtttaatgt

SEQ ID NO: 1600316 - DNA, 15 bp, Homo sapiens
atagtttgtttaatg

SEQ ID NO: 1600317 - DNA, 15 bp, Homo sapiens
aatagtttgtttaat

SEQ ID NO: 1600318 - DNA, 15 bp, Homo sapiens
aaatagtttgtttaa

SEQ ID NO: 1600319 - DNA, 15 bp, Homo sapiens
aaaatagtttgttta

SEQ ID NO: 1600320 - DNA, 15 bp, Homo sapiens
gaaaatagtttgttt

SEQ ID NO: 1600321 - DNA, 15 bp, Homo sapiens
cgaaaatagtttgtt

SEQ ID NO: 1600322 - DNA, 15 bp, Homo sapiens
gcgaaaatagtttgt

SEQ ID NO: 1600323 - DNA, 15 bp, Homo sapiens
cgcgaaaatagtttg

SEQ ID NO: 1600324 - DNA, 15 bp, Homo sapiens
ccgcgaaaatagttt

SEQ ID NO: 1600325 - DNA, 15 bp, Homo sapiens
tccgcgaaaatagtt

SEQ ID NO: 1600326 - DNA, 15 bp, Homo sapiens
ctccgcgaaaatagt

SEQ ID NO: 1600327 - DNA, 15 bp, Homo sapiens
cctccgcgaaaatag

SEQ ID NO: 1600328 - DNA, 15 bp, Homo sapiens
ccctccgcgaaaata

SEQ ID NO: 1600329 - DNA, 15 bp, Homo sapiens
gccctccgcgaaaat

SEQ ID NO: 1600330 - DNA, 15 bp, Homo sapiens
cgccctccgcgaaaa

SEQ ID NO: 1600331 - DNA, 15 bp, Homo sapiens
ccgccctccgcgaaa

SEQ ID NO: 1600332 - DNA, 15 bp, Homo sapiens
accgccctccgcgaa

SEQ ID NO: 1600333 - DNA, 15 bp, Homo sapiens
gaccgccctccgcga

SEQ ID NO: 1600334 - DNA, 15 bp, Homo sapiens
cgaccgccctccgcg

SEQ ID NO: 1600335 - DNA, 15 bp, Homo sapiens
gcgaccgccctccgc

SEQ ID NO: 1600336 - DNA, 15 bp, Homo sapiens
ggcgaccgccctccg

SEQ ID NO: 1600337 - DNA, 15 bp, Homo sapiens
cggcgaccgccctcc

SEQ ID NO: 1600338 - DNA, 15 bp, Homo sapiens
gcggcgaccgccctc

SEQ ID NO: 1600339 - DNA, 15 bp, Homo sapiens
agcggcgaccgccct

SEQ ID NO: 1600340 - DNA, 15 bp, Homo sapiens
cagcggcgaccgccc

SEQ ID NO: 1600341 - DNA, 15 bp, Homo sapiens
tcagcggcgaccgcc

SEQ ID NO: 1600342 - DNA, 15 bp, Homo sapiens
ctcagcggcgaccgc

SEQ ID NO: 1600343 - DNA, 15 bp, Homo sapiens
gctcagcggcgaccg

SEQ ID NO: 1600344 - DNA, 15 bp, Homo sapiens
ggctcagcggcgacc

SEQ ID NO: 1600345 - DNA, 15 bp, Homo sapiens
aggctcagcggcgac

SEQ ID NO: 1600346 - DNA, 15 bp, Homo sapiens
taggctcagcggcga

SEQ ID NO: 1600347 - DNA, 15 bp, Homo sapiens
ctaggctcagcggcg

SEQ ID NO: 1600348 - DNA, 15 bp, Homo sapiens
cctaggctcagcggc

SEQ ID NO: 1600349 - DNA, 15 bp, Homo sapiens
gcctaggctcagcgg

SEQ ID NO: 1600350 - DNA, 15 bp, Homo sapiens
cgcctaggctcagcg

SEQ ID NO: 1600351 - DNA, 15 bp, Homo sapiens
ccgcctaggctcagc

SEQ ID NO: 1600352 - DNA, 15 bp, Homo sapiens
gccgcctaggctcag

SEQ ID NO: 1600353 - DNA, 15 bp, Homo sapiens
ggccgcctaggctca

SEQ ID NO: 1600354 - DNA, 15 bp, Homo sapiens
tggccgcctaggctc

SEQ ID NO: 1600355 - DNA, 15 bp, Homo sapiens
ctggccgcctaggct

SEQ ID NO: 1600356 - DNA, 15 bp, Homo sapiens
tctggccgcctaggc

SEQ ID NO: 1600357 - DNA, 15 bp, Homo sapiens
ctctggccgcctagg

SEQ ID NO: 1600358 - DNA, 15 bp, Homo sapiens
cctctggccgcctag

SEQ ID NO: 1600359 - DNA, 15 bp, Homo sapiens
ccctctggccgccta

SEQ ID NO: 1600360 - DNA, 15 bp, Homo sapiens
accctctggccgcct

SEQ ID NO: 1600361 - DNA, 15 bp, Homo sapiens
caccctctggccgcc

SEQ ID NO: 1600362 - DNA, 15 bp, Homo sapiens
gcaccctctggccgc

SEQ ID NO: 1600363 - DNA, 15 bp, Homo sapiens
ggcaccctctggccg

SEQ ID NO: 1600364 - DNA, 15 bp, Homo sapiens
cggcaccctctggcc

SEQ ID NO: 1600365 - DNA, 15 bp, Homo sapiens
ccggcaccctctggc

SEQ ID NO: 1600366 - DNA, 15 bp, Homo sapiens
cccggcaccctctgg

SEQ ID NO: 1600367 - DNA, 15 bp, Homo sapiens
ccccggcaccctctg

SEQ ID NO: 1600368 - DNA, 15 bp, Homo sapiens
tccccggcaccctct

SEQ ID NO: 1600369 - DNA, 15 bp, Homo sapiens
ctccccggcaccctc

SEQ ID NO: 1600370 - DNA, 15 bp, Homo sapiens
cctccccggcaccct

SEQ ID NO: 1600371 - DNA, 15 bp, Homo sapiens
ccctccccggcaccc

SEQ ID NO: 1600372 - DNA, 15 bp, Homo sapiens
cccctccccggcacc

SEQ ID NO: 1600373 - DNA, 15 bp, Homo sapiens
ccccctccccggcac

SEQ ID NO: 1600374 - DNA, 15 bp, Homo sapiens
gccccctccccggca

SEQ ID NO: 1600375 - DNA, 15 bp, Homo sapiens
tgccccctccccggc

SEQ ID NO: 1600376 - DNA, 15 bp, Homo sapiens
gtgccccctccccgg

SEQ ID NO: 1600377 - DNA, 15 bp, Homo sapiens
agtgccccctccccg

SEQ ID NO: 1600378 - DNA, 15 bp, Homo sapiens
aagtgccccctcccc

SEQ ID NO: 1600379 - DNA, 15 bp, Homo sapiens
gaagtgccccctccc

SEQ ID NO: 1600380 - DNA, 15 bp, Homo sapiens
ggaagtgccccctcc

SEQ ID NO: 1600381 - DNA, 15 bp, Homo sapiens
aggaagtgccccctc

SEQ ID NO: 1600382 - DNA, 15 bp, Homo sapiens
aaggaagtgccccct

SEQ ID NO: 1600383 - DNA, 15 bp, Homo sapiens
aaaggaagtgccccc

SEQ ID NO: 1600384 - DNA, 15 bp, Homo sapiens
caaaggaagtgcccc

SEQ ID NO: 1600385 - DNA, 15 bp, Homo sapiens
acaaaggaagtgccc

SEQ ID NO: 1600386 - DNA, 15 bp, Homo sapiens
cacaaaggaagtgcc

SEQ ID NO: 1600387 - DNA, 15 bp, Homo sapiens
acacaaaggaagtgc

SEQ ID NO: 1600388 - DNA, 15 bp, Homo sapiens
gacacaaaggaagtg

SEQ ID NO: 1600389 - DNA, 15 bp, Homo sapiens
tgacacaaaggaagt

SEQ ID NO: 1600390 - DNA, 15 bp, Homo sapiens
ctgacacaaaggaag

SEQ ID NO: 1600391 - DNA, 15 bp, Homo sapiens
actgacacaaaggaa

SEQ ID NO: 1600392 - DNA, 15 bp, Homo sapiens
cactgacacaaagga

SEQ ID NO: 1600393 - DNA, 15 bp, Homo sapiens
tcactgacacaaagg

SEQ ID NO: 1600394 - DNA, 15 bp, Homo sapiens
gtcactgacacaaag

SEQ ID NO: 1600395 - DNA, 15 bp, Homo sapiens
tgtcactgacacaaa

SEQ ID NO: 1600396 - DNA, 15 bp, Homo sapiens
ttgtcactgacacaa

SEQ ID NO: 1600397 - DNA, 15 bp, Homo sapiens
cttgtcactgacaca

SEQ ID NO: 1600398 - DNA, 15 bp, Homo sapiens
acttgtcactgacac

SEQ ID NO: 1600399 - DNA, 15 bp, Homo sapiens
cacttgtcactgaca

SEQ ID NO: 1600400 - DNA, 15 bp, Homo sapiens
ccacttgtcactgac

SEQ ID NO: 1600401 - DNA, 15 bp, Homo sapiens
cccacttgtcactga

SEQ ID NO: 1600402 - DNA, 15 bp, Homo sapiens
acccacttgtcactg

SEQ ID NO: 1600403 - DNA, 15 bp, Homo sapiens
aacccacttgtcact

SEQ ID NO: 1600404 - DNA, 15 bp, Homo sapiens
taacccacttgtcac

SEQ ID NO: 1600405 - DNA, 15 bp, Homo sapiens
ataacccacttgtca

SEQ ID NO: 1600406 - DNA, 15 bp, Homo sapiens
cataacccacttgtc

SEQ ID NO: 1600407 - DNA, 15 bp, Homo sapiens
acataacccacttgt

SEQ ID NO: 1600408 - DNA, 15 bp, Homo sapiens
aacataacccacttg

SEQ ID NO: 1600409 - DNA, 15 bp, Homo sapiens
caacataacccactt

SEQ ID NO: 1600410 - DNA, 15 bp, Homo sapiens
tcaacataacccact

SEQ ID NO: 1600411 - DNA, 15 bp, Homo sapiens
ttcaacataacccac

SEQ ID NO: 1600412 - DNA, 15 bp, Homo sapiens
cttcaacataaccca

SEQ ID NO: 1600413 - DNA, 15 bp, Homo sapiens
tcttcaacataaccc

SEQ ID NO: 1600414 - DNA, 15 bp, Homo sapiens
gtcttcaacataacc

SEQ ID NO: 1600415 - DNA, 15 bp, Homo sapiens
agtcttcaacataac

SEQ ID NO: 1600416 - DNA, 15 bp, Homo sapiens
gagtcttcaacataa

SEQ ID NO: 1600417 - DNA, 15 bp, Homo sapiens
agagtcttcaacata

SEQ ID NO: 1600418 - DNA, 15 bp, Homo sapiens
aagagtcttcaacat

SEQ ID NO: 1600419 - DNA, 15 bp, Homo sapiens
aaagagtcttcaaca

SEQ ID NO: 1600420 - DNA, 15 bp, Homo sapiens
gaaagagtcttcaac

SEQ ID NO: 1600421 - DNA, 15 bp, Homo sapiens
ggaaagagtcttcaa

SEQ ID NO: 1600422 - DNA, 15 bp, Homo sapiens
aggaaagagtcttca

SEQ ID NO: 1600423 - DNA, 15 bp, Homo sapiens
gaggaaagagtcttc

SEQ ID NO: 1600424 - DNA, 15 bp, Homo sapiens
agaggaaagagtctt

SEQ ID NO: 1600425 - DNA, 15 bp, Homo sapiens
gagaggaaagagtct

SEQ ID NO: 1600426 - DNA, 15 bp, Homo sapiens
ggagaggaaagagtc

SEQ ID NO: 1600427 - DNA, 15 bp, Homo sapiens
gggagaggaaagagt

SEQ ID NO: 1600428 - DNA, 15 bp, Homo sapiens
ggggagaggaaagag

SEQ ID NO: 1600429 - DNA, 15 bp, Homo sapiens
tggggagaggaaaga

SEQ ID NO: 1600430 - DNA, 15 bp, Homo sapiens
ctggggagaggaaag

SEQ ID NO: 1600431 - DNA, 15 bp, Homo sapiens
gctggggagaggaaa

SEQ ID NO: 1600432 - DNA, 15 bp, Homo sapiens
agctggggagaggaa

SEQ ID NO: 1600433 - DNA, 15 bp, Homo sapiens
gagctggggagagga

SEQ ID NO: 1600434 - DNA, 15 bp, Homo sapiens
ggagctggggagagg

SEQ ID NO: 1600435 - DNA, 15 bp, Homo sapiens
gggagctggggagag

SEQ ID NO: 1600436 - DNA, 15 bp, Homo sapiens
cgggagctggggaga

SEQ ID NO: 1600437 - DNA, 15 bp, Homo sapiens
acgggagctggggag

SEQ ID NO: 1600438 - DNA, 15 bp, Homo sapiens
gacgggagctgggga

SEQ ID NO: 1600439 - DNA, 15 bp, Homo sapiens
ggacgggagctgggg

SEQ ID NO: 1600440 - DNA, 15 bp, Homo sapiens
aggacgggagctggg

SEQ ID NO: 1600441 - DNA, 15 bp, Homo sapiens
gaggacgggagctgg

SEQ ID NO: 1600442 - DNA, 15 bp, Homo sapiens
ggaggacgggagctg

SEQ ID NO: 1600443 - DNA, 15 bp, Homo sapiens
gggaggacgggagct

SEQ ID NO: 1600444 - DNA, 15 bp, Homo sapiens
agggaggacgggagc

SEQ ID NO: 1600445 - DNA, 15 bp, Homo sapiens
aagggaggacgggag

SEQ ID NO: 1600446 - DNA, 15 bp, Homo sapiens
gaagggaggacggga

SEQ ID NO: 1600447 - DNA, 15 bp, Homo sapiens
tgaagggaggacggg

SEQ ID NO: 1600448 - DNA, 15 bp, Homo sapiens
ttgaagggaggacgg

SEQ ID NO: 1600449 - DNA, 15 bp, Homo sapiens
tttgaagggaggacg

SEQ ID NO: 1600450 - DNA, 15 bp, Homo sapiens
ttttgaagggaggac

SEQ ID NO: 1600451 - DNA, 15 bp, Homo sapiens
tttttgaagggagga

SEQ ID NO: 1600452 - DNA, 15 bp, Homo sapiens
ttttttgaagggagg

SEQ ID NO: 1600453 - DNA, 15 bp, Homo sapiens
tttttttgaagggag

SEQ ID NO: 1600454 - DNA, 15 bp, Homo sapiens
ttttttttgaaggga

SEQ ID NO: 1600455 - DNA, 15 bp, Homo sapiens
tttttttttgaaggg

SEQ ID NO: 1600456 - DNA, 15 bp, Homo sapiens
ttttttttttgaagg

SEQ ID NO: 1600457 - DNA, 15 bp, Homo sapiens
tttttttttttgaag

SEQ ID NO: 1600458 - DNA, 15 bp, Homo sapiens
ttttttttttttgaa

SEQ ID NO: 1600459 - DNA, 15 bp, Homo sapiens
aggattttttttttt

SEQ ID NO: 1600460 - DNA, 15 bp, Homo sapiens
ccaggattttttttt

SEQ ID NO: 1600461 - DNA, 15 bp, Homo sapiens
accaggatttttttt

SEQ ID NO: 1600462 - DNA, 15 bp, Homo sapiens
taccaggattttttt

SEQ ID NO: 1600463 - DNA, 15 bp, Homo sapiens
ataccaggatttttt

SEQ ID NO: 1600464 - DNA, 15 bp, Homo sapiens
aataccaggattttt

SEQ ID NO: 1600465 - DNA, 15 bp, Homo sapiens
aaataccaggatttt

SEQ ID NO: 1600466 - DNA, 15 bp, Homo sapiens
taaataccaggattt

SEQ ID NO: 1600467 - DNA, 15 bp, Homo sapiens
gtaaataccaggatt

SEQ ID NO: 1600468 - DNA, 15 bp, Homo sapiens
tgtaaataccaggat

SEQ ID NO: 1600469 - DNA, 15 bp, Homo sapiens
ttgtaaataccagga

SEQ ID NO: 1600470 - DNA, 15 bp, Homo sapiens
cttgtaaataccagg

SEQ ID NO: 1600471 - DNA, 15 bp, Homo sapiens
gcttgtaaataccag

SEQ ID NO: 1600472 - DNA, 15 bp, Homo sapiens
cgcttgtaaatacca

SEQ ID NO: 1600473 - DNA, 15 bp, Homo sapiens
tcgcttgtaaatacc

SEQ ID NO: 1600474 - DNA, 15 bp, Homo sapiens
ctcgcttgtaaatac

SEQ ID NO: 1600475 - DNA, 15 bp, Homo sapiens
actcgcttgtaaata

SEQ ID NO: 1600476 - DNA, 15 bp, Homo sapiens
gactcgcttgtaaat

SEQ ID NO: 1600477 - DNA, 15 bp, Homo sapiens
ggactcgcttgtaaa

SEQ ID NO: 1600478 - DNA, 15 bp, Homo sapiens
aggactcgcttgtaa

SEQ ID NO: 1600479 - DNA, 15 bp, Homo sapiens
gaggactcgcttgta

SEQ ID NO: 1600480 - DNA, 15 bp, Homo sapiens
agaggactcgcttgt

SEQ ID NO: 1600481 - DNA, 15 bp, Homo sapiens
aagaggactcgcttg

SEQ ID NO: 1600482 - DNA, 15 bp, Homo sapiens
aaagaggactcgctt

SEQ ID NO: 1600483 - DNA, 15 bp, Homo sapiens
caaagaggactcgct

SEQ ID NO: 1600484 - DNA, 15 bp, Homo sapiens
gcaaagaggactcgc

SEQ ID NO: 1600485 - DNA, 15 bp, Homo sapiens
agcaaagaggactcg

SEQ ID NO: 1600486 - DNA, 15 bp, Homo sapiens
cagcaaagaggactc

SEQ ID NO: 1600487 - DNA, 15 bp, Homo sapiens
ccagcaaagaggact

SEQ ID NO: 1600488 - DNA, 15 bp, Homo sapiens
gccagcaaagaggac

SEQ ID NO: 1600489 - DNA, 15 bp, Homo sapiens
tgccagcaaagagga

SEQ ID NO: 1600490 - DNA, 15 bp, Homo sapiens
ctgccagcaaagagg

SEQ ID NO: 1600491 - DNA, 15 bp, Homo sapiens
tctgccagcaaagag

SEQ ID NO: 1600492 - DNA, 15 bp, Homo sapiens
ctctgccagcaaaga

SEQ ID NO: 1600493 - DNA, 15 bp, Homo sapiens
actctgccagcaaag

SEQ ID NO: 1600494 - DNA, 15 bp, Homo sapiens
cactctgccagcaaa

SEQ ID NO: 1600495 - DNA, 15 bp, Homo sapiens
acactctgccagcaa

SEQ ID NO: 1600496 - DNA, 15 bp, Homo sapiens
cacactctgccagca

SEQ ID NO: 1600497 - DNA, 15 bp, Homo sapiens
gcacactctgccagc

SEQ ID NO: 1600498 - DNA, 15 bp, Homo sapiens
ggcacactctgccag

SEQ ID NO: 1600499 - DNA, 15 bp, Homo sapiens
gggcacactctgcca

SEQ ID NO: 1600500 - DNA, 15 bp, Homo sapiens
tgggcacactctgcc

SEQ ID NO: 1600501 - DNA, 15 bp, Homo sapiens
ctgggcacactctgc

SEQ ID NO: 1600502 - DNA, 15 bp, Homo sapiens
tctgggcacactctg

SEQ ID NO: 1600503 - DNA, 15 bp, Homo sapiens
ctctgggcacactct

SEQ ID NO: 1600504 - DNA, 15 bp, Homo sapiens
actctgggcacactc

SEQ ID NO: 1600505 - DNA, 15 bp, Homo sapiens
cactctgggcacact

SEQ ID NO: 1600506 - DNA, 15 bp, Homo sapiens
tcactctgggcacac

SEQ ID NO: 1600507 - DNA, 15 bp, Homo sapiens
ttcactctgggcaca

SEQ ID NO: 1600508 - DNA, 15 bp, Homo sapiens
cttcactctgggcac

SEQ ID NO: 1600509 - DNA, 15 bp, Homo sapiens
acttcactctgggca

SEQ ID NO: 1600510 - DNA, 15 bp, Homo sapiens
aacttcactctgggc

SEQ ID NO: 1600511 - DNA, 15 bp, Homo sapiens
aaacttcactctggg

SEQ ID NO: 1600512 - DNA, 15 bp, Homo sapiens
caaacttcactctgg

SEQ ID NO: 1600513 - DNA, 15 bp, Homo sapiens
ccaaacttcactctg

SEQ ID NO: 1600514 - DNA, 15 bp, Homo sapiens
accaaacttcactct

SEQ ID NO: 1600515 - DNA, 15 bp, Homo sapiens
gaccaaacttcactc

SEQ ID NO: 1600516 - DNA, 15 bp, Homo sapiens
agaccaaacttcact

SEQ ID NO: 1600517 - DNA, 15 bp, Homo sapiens
aagaccaaacttcac

SEQ ID NO: 1600518 - DNA, 15 bp, Homo sapiens
aaagaccaaacttca

SEQ ID NO: 1600519 - DNA, 15 bp, Homo sapiens
taaagaccaaacttc

SEQ ID NO: 1600520 - DNA, 15 bp, Homo sapiens
ctaaagaccaaactt

SEQ ID NO: 1600521 - DNA, 15 bp, Homo sapiens
tctaaagaccaaact

SEQ ID NO: 1600522 - DNA, 15 bp, Homo sapiens
ctctaaagaccaaac

SEQ ID NO: 1600523 - DNA, 15 bp, Homo sapiens
actctaaagaccaaa

SEQ ID NO: 1600524 - DNA, 15 bp, Homo sapiens
gactctaaagaccaa

SEQ ID NO: 1600525 - DNA, 15 bp, Homo sapiens
ggactctaaagacca

SEQ ID NO: 1600526 - DNA, 15 bp, Homo sapiens
tggactctaaagacc

SEQ ID NO: 1600527 - DNA, 15 bp, Homo sapiens
ctggactctaaagac

SEQ ID NO: 1600528 - DNA, 15 bp, Homo sapiens
tctggactctaaaga

SEQ ID NO: 1600529 - DNA, 15 bp, Homo sapiens
ctctggactctaaag

SEQ ID NO: 1600530 - DNA, 15 bp, Homo sapiens
gctctggactctaaa

SEQ ID NO: 1600531 - DNA, 15 bp, Homo sapiens
ggctctggactctaa

SEQ ID NO: 1600532 - DNA, 15 bp, Homo sapiens
tggctctggactcta

SEQ ID NO: 1600533 - DNA, 15 bp, Homo sapiens
atggctctggactct

SEQ ID NO: 1600534 - DNA, 15 bp, Homo sapiens
catggctctggactc

SEQ ID NO: 1600535 - DNA, 15 bp, Homo sapiens
acatggctctggact

SEQ ID NO: 1600536 - DNA, 15 bp, Homo sapiens
gacatggctctggac

SEQ ID NO: 1600537 - DNA, 15 bp, Homo sapiens
tgacatggctctgga

SEQ ID NO: 1600538 - DNA, 15 bp, Homo sapiens
ctgacatggctctgg

SEQ ID NO: 1600539 - DNA, 15 bp, Homo sapiens
gctgacatggctctg

SEQ ID NO: 1600540 - DNA, 15 bp, Homo sapiens
tgctgacatggctct

SEQ ID NO: 1600541 - DNA, 15 bp, Homo sapiens
gtgctgacatggctc

SEQ ID NO: 1600542 - DNA, 15 bp, Homo sapiens
tgtgctgacatggct

SEQ ID NO: 1600543 - DNA, 15 bp, Homo sapiens
ctgtgctgacatggc

SEQ ID NO: 1600544 - DNA, 15 bp, Homo sapiens
tctgtgctgacatgg

SEQ ID NO: 1600545 - DNA, 15 bp, Homo sapiens
ctctgtgctgacatg

SEQ ID NO: 1600546 - DNA, 15 bp, Homo sapiens
gctctgtgctgacat

SEQ ID NO: 1600547 - DNA, 15 bp, Homo sapiens
ggctctgtgctgaca

SEQ ID NO: 1600548 - DNA, 15 bp, Homo sapiens
gggctctgtgctgac

SEQ ID NO: 1600549 - DNA, 15 bp, Homo sapiens
agggctctgtgctga

SEQ ID NO: 1600550 - DNA, 15 bp, Homo sapiens
gagggctctgtgctg

SEQ ID NO: 1600551 - DNA, 15 bp, Homo sapiens
agagggctctgtgct

SEQ ID NO: 1600552 - DNA, 15 bp, Homo sapiens
gagagggctctgtgc

SEQ ID NO: 1600553 - DNA, 15 bp, Homo sapiens
ggagagggctctgtg

SEQ ID NO: 1600554 - DNA, 15 bp, Homo sapiens
tggagagggctctgt

SEQ ID NO: 1600555 - DNA, 15 bp, Homo sapiens
ttggagagggctctg

SEQ ID NO: 1600556 - DNA, 15 bp, Homo sapiens
attggagagggctct

SEQ ID NO: 1600557 - DNA, 15 bp, Homo sapiens
gattggagagggctc

SEQ ID NO: 1600558 - DNA, 15 bp, Homo sapiens
agattggagagggct

SEQ ID NO: 1600559 - DNA, 15 bp, Homo sapiens
cagattggagagggc

SEQ ID NO: 1600560 - DNA, 15 bp, Homo sapiens
acagattggagaggg

SEQ ID NO: 1600561 - DNA, 15 bp, Homo sapiens
cacagattggagagg

SEQ ID NO: 1600562 - DNA, 15 bp, Homo sapiens
gcacagattggagag

SEQ ID NO: 1600563 - DNA, 15 bp, Homo sapiens
ggcacagattggaga

SEQ ID NO: 1600564 - DNA, 15 bp, Homo sapiens
gggcacagattggag

SEQ ID NO: 1600565 - DNA, 15 bp, Homo sapiens
ggggcacagattgga

SEQ ID NO: 1600566 - DNA, 15 bp, Homo sapiens
cggggcacagattgg

SEQ ID NO: 1600567 - DNA, 15 bp, Homo sapiens
gcggggcacagattg

SEQ ID NO: 1600568 - DNA, 15 bp, Homo sapiens
ggcggggcacagatt

SEQ ID NO: 1600569 - DNA, 15 bp, Homo sapiens
gggcggggcacagat

SEQ ID NO: 1600570 - DNA, 15 bp, Homo sapiens
agggcggggcacaga

SEQ ID NO: 1600571 - DNA, 15 bp, Homo sapiens
tagggcggggcacag

SEQ ID NO: 1600572 - DNA, 15 bp, Homo sapiens
ctagggcggggcaca

SEQ ID NO: 1600573 - DNA, 15 bp, Homo sapiens
gctagggcggggcac

SEQ ID NO: 1600574 - DNA, 15 bp, Homo sapiens
cgctagggcggggca

SEQ ID NO: 1600575 - DNA, 15 bp, Homo sapiens
acgctagggcggggc

SEQ ID NO: 1600576 - DNA, 15 bp, Homo sapiens
cacgctagggcgggg

SEQ ID NO: 1600577 - DNA, 15 bp, Homo sapiens
ccacgctagggcggg

SEQ ID NO: 1600578 - DNA, 15 bp, Homo sapiens
tccacgctagggcgg

SEQ ID NO: 1600579 - DNA, 15 bp, Homo sapiens
ttccacgctagggcg

SEQ ID NO: 1600580 - DNA, 15 bp, Homo sapiens
tttccacgctagggc

SEQ ID NO: 1600581 - DNA, 15 bp, Homo sapiens
ttttccacgctaggg

SEQ ID NO: 1600582 - DNA, 15 bp, Homo sapiens
gttttccacgctagg

SEQ ID NO: 1600583 - DNA, 15 bp, Homo sapiens
ggttttccacgctag

SEQ ID NO: 1600584 - DNA, 15 bp, Homo sapiens
gggttttccacgcta

SEQ ID NO: 1600585 - DNA, 15 bp, Homo sapiens
tgggttttccacgct

SEQ ID NO: 1600586 - DNA, 15 bp, Homo sapiens
atgggttttccacgc

SEQ ID NO: 1600587 - DNA, 15 bp, Homo sapiens
aatgggttttccacg

SEQ ID NO: 1600588 - DNA, 15 bp, Homo sapiens
aaatgggttttccac

SEQ ID NO: 1600589 - DNA, 15 bp, Homo sapiens
caaatgggttttcca

SEQ ID NO: 1600590 - DNA, 15 bp, Homo sapiens
tcaaatgggttttcc

SEQ ID NO: 1600591 - DNA, 15 bp, Homo sapiens
ttcaaatgggttttc

SEQ ID NO: 1600592 - DNA, 15 bp, Homo sapiens
attcaaatgggtttt

SEQ ID NO: 1600593 - DNA, 15 bp, Homo sapiens
gattcaaatgggttt

SEQ ID NO: 1600594 - DNA, 15 bp, Homo sapiens
tgattcaaatgggtt

SEQ ID NO: 1600595 - DNA, 15 bp, Homo sapiens
gtgattcaaatgggt

SEQ ID NO: 1600596 - DNA, 15 bp, Homo sapiens
ggtgattcaaatggg

SEQ ID NO: 1600597 - DNA, 15 bp, Homo sapiens
tggtgattcaaatgg

SEQ ID NO: 1600598 - DNA, 15 bp, Homo sapiens
ttggtgattcaaatg

SEQ ID NO: 1600599 - DNA, 15 bp, Homo sapiens
tttggtgattcaaat

SEQ ID NO: 1600600 - DNA, 15 bp, Homo sapiens
ttttggtgattcaaa

SEQ ID NO: 1600601 - DNA, 15 bp, Homo sapiens
tttttggtgattcaa

SEQ ID NO: 1600602 - DNA, 15 bp, Homo sapiens
ttttttggtgattca

SEQ ID NO: 1600603 - DNA, 15 bp, Homo sapiens
tttttttggtgattc

SEQ ID NO: 1600604 - DNA, 15 bp, Homo sapiens
ctttttttggtgatt

SEQ ID NO: 1600605 - DNA, 15 bp, Homo sapiens
tctttttttggtgat

SEQ ID NO: 1600606 - DNA, 15 bp, Homo sapiens
gtctttttttggtga

SEQ ID NO: 1600607 - DNA, 15 bp, Homo sapiens
tgtctttttttggtg

SEQ ID NO: 1600608 - DNA, 15 bp, Homo sapiens
gtgtctttttttggt

SEQ ID NO: 1600609 - DNA, 15 bp, Homo sapiens
ggtgtctttttttgg

SEQ ID NO: 1600610 - DNA, 15 bp, Homo sapiens
gggtgtctttttttg

SEQ ID NO: 1600611 - DNA, 15 bp, Homo sapiens
ggggtgtcttttttt

SEQ ID NO: 1600612 - DNA, 15 bp, Homo sapiens
tggggtgtctttttt

SEQ ID NO: 1600613 - DNA, 15 bp, Homo sapiens
ttggggtgtcttttt

SEQ ID NO: 1600614 - DNA, 15 bp, Homo sapiens
tttggggtgtctttt

SEQ ID NO: 1600615 - DNA, 15 bp, Homo sapiens
ctttggggtgtcttt

SEQ ID NO: 1600616 - DNA, 15 bp, Homo sapiens
gctttggggtgtctt

SEQ ID NO: 1600617 - DNA, 15 bp, Homo sapiens
agctttggggtgtct

SEQ ID NO: 1600618 - DNA, 15 bp, Homo sapiens
cagctttggggtgtc

SEQ ID NO: 1600619 - DNA, 15 bp, Homo sapiens
acagctttggggtgt

SEQ ID NO: 1600620 - DNA, 15 bp, Homo sapiens
aacagctttggggtg

SEQ ID NO: 1600621 - DNA, 15 bp, Homo sapiens
aaacagctttggggt

SEQ ID NO: 1600622 - DNA, 15 bp, Homo sapiens
aaaacagctttgggg

SEQ ID NO: 1600623 - DNA, 15 bp, Homo sapiens
taaaacagctttggg

SEQ ID NO: 1600624 - DNA, 15 bp, Homo sapiens
ataaaacagctttgg

SEQ ID NO: 1600625 - DNA, 15 bp, Homo sapiens
cataaaacagctttg

SEQ ID NO: 1600626 - DNA, 15 bp, Homo sapiens
gcataaaacagcttt

SEQ ID NO: 1600627 - DNA, 15 bp, Homo sapiens
ggcataaaacagctt

SEQ ID NO: 1600628 - DNA, 15 bp, Homo sapiens
gggcataaaacagct

SEQ ID NO: 1600629 - DNA, 15 bp, Homo sapiens
agggcataaaacagc

SEQ ID NO: 1600630 - DNA, 15 bp, Homo sapiens
aagggcataaaacag

SEQ ID NO: 1600631 - DNA, 15 bp, Homo sapiens
gaagggcataaaaca

SEQ ID NO: 1600632 - DNA, 15 bp, Homo sapiens
agaagggcataaaac

SEQ ID NO: 1600633 - DNA, 15 bp, Homo sapiens
gagaagggcataaaa

SEQ ID NO: 1600634 - DNA, 15 bp, Homo sapiens
agagaagggcataaa

SEQ ID NO: 1600635 - DNA, 15 bp, Homo sapiens
cagagaagggcataa

SEQ ID NO: 1600636 - DNA, 15 bp, Homo sapiens
gcagagaagggcata

SEQ ID NO: 1600637 - DNA, 15 bp, Homo sapiens
agcagagaagggcat

SEQ ID NO: 1600638 - DNA, 15 bp, Homo sapiens
aagcagagaagggca

SEQ ID NO: 1600639 - DNA, 15 bp, Homo sapiens
taagcagagaagggc

SEQ ID NO: 1600640 - DNA, 15 bp, Homo sapiens
ttaagcagagaaggg

SEQ ID NO: 1600641 - DNA, 15 bp, Homo sapiens
tttaagcagagaagg

SEQ ID NO: 1600642 - DNA, 15 bp, Homo sapiens
ctttaagcagagaag

SEQ ID NO: 1600643 - DNA, 15 bp, Homo sapiens
tctttaagcagagaa

SEQ ID NO: 1600644 - DNA, 15 bp, Homo sapiens
atctttaagcagaga

SEQ ID NO: 1600645 - DNA, 15 bp, Homo sapiens
aatctttaagcagag

SEQ ID NO: 1600646 - DNA, 15 bp, Homo sapiens
gaatctttaagcaga

SEQ ID NO: 1600647 - DNA, 15 bp, Homo sapiens
ggaatctttaagcag

SEQ ID NO: 1600648 - DNA, 15 bp, Homo sapiens
aggaatctttaagca

SEQ ID NO: 1600649 - DNA, 15 bp, Homo sapiens
aaggaatctttaagc

SEQ ID NO: 1600650 - DNA, 15 bp, Homo sapiens
caaggaatctttaag

SEQ ID NO: 1600651 - DNA, 15 bp, Homo sapiens
tcaaggaatctttaa

SEQ ID NO: 1600652 - DNA, 15 bp, Homo sapiens
ctcaaggaatcttta

SEQ ID NO: 1600653 - DNA, 15 bp, Homo sapiens
tctcaaggaatcttt

SEQ ID NO: 1600654 - DNA, 15 bp, Homo sapiens
atctcaaggaatctt

SEQ ID NO: 1600655 - DNA, 15 bp, Homo sapiens
aatctcaaggaatct

SEQ ID NO: 1600656 - DNA, 15 bp, Homo sapiens
caatctcaaggaatc

SEQ ID NO: 1600657 - DNA, 15 bp, Homo sapiens
ccaatctcaaggaat

SEQ ID NO: 1600658 - DNA, 15 bp, Homo sapiens
tccaatctcaaggaa

SEQ ID NO: 1600659 - DNA, 15 bp, Homo sapiens
atccaatctcaagga

SEQ ID NO: 1600660 - DNA, 15 bp, Homo sapiens
catccaatctcaagg

SEQ ID NO: 1600661 - DNA, 15 bp, Homo sapiens
gcatccaatctcaag

SEQ ID NO: 1600662 - DNA, 15 bp, Homo sapiens
cgcatccaatctcaa

SEQ ID NO: 1600663 - DNA, 15 bp, Homo sapiens
gcgcatccaatctca

SEQ ID NO: 1600664 - DNA, 15 bp, Homo sapiens
agcgcatccaatctc

SEQ ID NO: 1600665 - DNA, 15 bp, Homo sapiens
aagcgcatccaatct

SEQ ID NO: 1600666 - DNA, 15 bp, Homo sapiens
caagcgcatccaatc

SEQ ID NO: 1600667 - DNA, 15 bp, Homo sapiens
ccaagcgcatccaat

SEQ ID NO: 1600668 - DNA, 15 bp, Homo sapiens
accaagcgcatccaa

SEQ ID NO: 1600669 - DNA, 15 bp, Homo sapiens
aaccaagcgcatcca

SEQ ID NO: 1600670 - DNA, 15 bp, Homo sapiens
caaccaagcgcatcc

SEQ ID NO: 1600671 - DNA, 15 bp, Homo sapiens
acaaccaagcgcatc

SEQ ID NO: 1600672 - DNA, 15 bp, Homo sapiens
aacaaccaagcgcat

SEQ ID NO: 1600673 - DNA, 15 bp, Homo sapiens
aaacaaccaagcgca

SEQ ID NO: 1600674 - DNA, 15 bp, Homo sapiens
aaaacaaccaagcgc

SEQ ID NO: 1600675 - DNA, 15 bp, Homo sapiens
aaaaacaaccaagcg

SEQ ID NO: 1600676 - DNA, 15 bp, Homo sapiens
gaaaaacaaccaagc

SEQ ID NO: 1600677 - DNA, 15 bp, Homo sapiens
tgaaaaacaaccaag

SEQ ID NO: 1600678 - DNA, 15 bp, Homo sapiens
atgaaaaacaaccaa

SEQ ID NO: 1600679 - DNA, 15 bp, Homo sapiens
gaaaatgaaaaacaa

SEQ ID NO: 1600680 - DNA, 15 bp, Homo sapiens
agaaaatgaaaaaca

SEQ ID NO: 1600681 - DNA, 15 bp, Homo sapiens
aagaaaatgaaaaac

SEQ ID NO: 1600682 - DNA, 15 bp, Homo sapiens
aaagaaaatgaaaaa

SEQ ID NO: 1600683 - DNA, 15 bp, Homo sapiens
aaaagaaaatgaaaa

SEQ ID NO: 1600684 - DNA, 15 bp, Homo sapiens
aaaaagaaaatgaaa

SEQ ID NO: 1600685 - DNA, 15 bp, Homo sapiens
aaaaaagaaaatgaa

SEQ ID NO: 1600686 - DNA, 15 bp, Homo sapiens
aaaaaaagaaaatga

SEQ ID NO: 1600687 - DNA, 15 bp, Homo sapiens
taaaaaaagaaaatg

SEQ ID NO: 1600688 - DNA, 15 bp, Homo sapiens
gtttttttttttaaa

SEQ ID NO: 1600689 - DNA, 15 bp, Homo sapiens
ggtttttttttttaa

SEQ ID NO: 1600690 - DNA, 15 bp, Homo sapiens
gggttttttttttta

SEQ ID NO: 1600691 - DNA, 15 bp, Homo sapiens
tttgtgggttttttt

SEQ ID NO: 1600692 - DNA, 15 bp, Homo sapiens
atttgtgggtttttt

SEQ ID NO: 1600693 - DNA, 15 bp, Homo sapiens
aatttgtgggttttt

SEQ ID NO: 1600694 - DNA, 15 bp, Homo sapiens
aaatttgtgggtttt

SEQ ID NO: 1600695 - DNA, 15 bp, Homo sapiens
aaaatttgtgggttt

SEQ ID NO: 1600696 - DNA, 15 bp, Homo sapiens
taaaatttgtgggtt

SEQ ID NO: 1600697 - DNA, 15 bp, Homo sapiens
ctaaaatttgtgggt

SEQ ID NO: 1600698 - DNA, 15 bp, Homo sapiens
cctaaaatttgtggg

SEQ ID NO: 1600699 - DNA, 15 bp, Homo sapiens
ccctaaaatttgtgg

SEQ ID NO: 1600700 - DNA, 15 bp, Homo sapiens
cccctaaaatttgtg

SEQ ID NO: 1600701 - DNA, 15 bp, Homo sapiens
ccccctaaaatttgt

SEQ ID NO: 1600702 - DNA, 15 bp, Homo sapiens
cccccctaaaatttg

SEQ ID NO: 1600703 - DNA, 15 bp, Homo sapiens
ccccccctaaaattt

SEQ ID NO: 1600704 - DNA, 15 bp, Homo sapiens
tccccccctaaaatt

SEQ ID NO: 1600705 - DNA, 15 bp, Homo sapiens
ttccccccctaaaat

SEQ ID NO: 1600706 - DNA, 15 bp, Homo sapiens
tttccccccctaaaa

SEQ ID NO: 1600707 - DNA, 15 bp, Homo sapiens
ttttccccccctaaa

SEQ ID NO: 1600708 - DNA, 15 bp, Homo sapiens
tttttccccccctaa

SEQ ID NO: 1600709 - DNA, 15 bp, Homo sapiens
ttttttcccccccta

SEQ ID NO: 1600710 - DNA, 15 bp, Homo sapiens
tttttttccccccct

SEQ ID NO: 1600711 - DNA, 15 bp, Homo sapiens
ctttttttccccccc

SEQ ID NO: 1600712 - DNA, 15 bp, Homo sapiens
tctttttttcccccc

SEQ ID NO: 1600713 - DNA, 15 bp, Homo sapiens
ttctttttttccccc

SEQ ID NO: 1600714 - DNA, 15 bp, Homo sapiens
tttctttttttcccc

SEQ ID NO: 1600715 - DNA, 15 bp, Homo sapiens
ctttctttttttccc

SEQ ID NO: 1600716 - DNA, 15 bp, Homo sapiens
tctttctttttttcc

SEQ ID NO: 1600717 - DNA, 15 bp, Homo sapiens
gtctttctttttttc

SEQ ID NO: 1600718 - DNA, 15 bp, Homo sapiens
cgtctttcttttttt

SEQ ID NO: 1600719 - DNA, 15 bp, Homo sapiens
acgtctttctttttt

SEQ ID NO: 1600720 - DNA, 15 bp, Homo sapiens
gacgtctttcttttt

SEQ ID NO: 1600721 - DNA, 15 bp, Homo sapiens
ggacgtctttctttt

SEQ ID NO: 1600722 - DNA, 15 bp, Homo sapiens
tggacgtctttcttt

SEQ ID NO: 1600723 - DNA, 15 bp, Homo sapiens
ctggacgtctttctt

SEQ ID NO: 1600724 - DNA, 15 bp, Homo sapiens
gctggacgtctttct

SEQ ID NO: 1600725 - DNA, 15 bp, Homo sapiens
tgctggacgtctttc

SEQ ID NO: 1600726 - DNA, 15 bp, Homo sapiens
ctgctggacgtcttt

SEQ ID NO: 1600727 - DNA, 15 bp, Homo sapiens
actgctggacgtctt

SEQ ID NO: 1600728 - DNA, 15 bp, Homo sapiens
aactgctggacgtct

SEQ ID NO: 1600729 - DNA, 15 bp, Homo sapiens
aaactgctggacgtc

SEQ ID NO: 1600730 - DNA, 15 bp, Homo sapiens
caaactgctggacgt

SEQ ID NO: 1600731 - DNA, 15 bp, Homo sapiens
ccaaactgctggacg

SEQ ID NO: 1600732 - DNA, 15 bp, Homo sapiens
gccaaactgctggac

SEQ ID NO: 1600733 - DNA, 15 bp, Homo sapiens
ggccaaactgctgga

SEQ ID NO: 1600734 - DNA, 15 bp, Homo sapiens
aggccaaactgctgg

SEQ ID NO: 1600735 - DNA, 15 bp, Homo sapiens
aaggccaaactgctg

SEQ ID NO: 1600736 - DNA, 15 bp, Homo sapiens
aaaggccaaactgct

SEQ ID NO: 1600737 - DNA, 15 bp, Homo sapiens
caaaggccaaactgc

SEQ ID NO: 1600738 - DNA, 15 bp, Homo sapiens
acaaaggccaaactg

SEQ ID NO: 1600739 - DNA, 15 bp, Homo sapiens
cacaaaggccaaact

SEQ ID NO: 1600740 - DNA, 15 bp, Homo sapiens
ccacaaaggccaaac

SEQ ID NO: 1600741 - DNA, 15 bp, Homo sapiens
accacaaaggccaaa

SEQ ID NO: 1600742 - DNA, 15 bp, Homo sapiens
aaccacaaaggccaa

SEQ ID NO: 1600743 - DNA, 15 bp, Homo sapiens
aaaccacaaaggcca

SEQ ID NO: 1600744 - DNA, 15 bp, Homo sapiens
aaaaccacaaaggcc

SEQ ID NO: 1600745 - DNA, 15 bp, Homo sapiens
aaaaaccacaaaggc

SEQ ID NO: 1600746 - DNA, 15 bp, Homo sapiens
aaaaaaccacaaagg

SEQ ID NO: 1600747 - DNA, 15 bp, Homo sapiens
aaaaaaaccacaaag

SEQ ID NO: 1600748 - DNA, 15 bp, Homo sapiens
caaaaaaaccacaaa

SEQ ID NO: 1600749 - DNA, 15 bp, Homo sapiens
acaaaaaaaccacaa

SEQ ID NO: 1600750 - DNA, 15 bp, Homo sapiens
aacaaaaaaaccaca

SEQ ID NO: 1600751 - DNA, 15 bp, Homo sapiens
gaacaaaaaaaccac

SEQ ID NO: 1600752 - DNA, 15 bp, Homo sapiens
ggaacaaaaaaacca

SEQ ID NO: 1600753 - DNA, 15 bp, Homo sapiens
aggaacaaaaaaacc

SEQ ID NO: 1600754 - DNA, 15 bp, Homo sapiens
aaggaacaaaaaaac

SEQ ID NO: 1600755 - DNA, 15 bp, Homo sapiens
caaggaacaaaaaaa

SEQ ID NO: 1600756 - DNA, 15 bp, Homo sapiens
ccaaggaacaaaaaa

SEQ ID NO: 1600757 - DNA, 15 bp, Homo sapiens
accaaggaacaaaaa

SEQ ID NO: 1600758 - DNA, 15 bp, Homo sapiens
gaccaaggaacaaaa

SEQ ID NO: 1600759 - DNA, 15 bp, Homo sapiens
agaccaaggaacaaa

SEQ ID NO: 1600760 - DNA, 15 bp, Homo sapiens
tagaccaaggaacaa

SEQ ID NO: 1600761 - DNA, 15 bp, Homo sapiens
ttagaccaaggaaca

SEQ ID NO: 1600762 - DNA, 15 bp, Homo sapiens
tttagaccaaggaac

SEQ ID NO: 1600763 - DNA, 15 bp, Homo sapiens
gtttagaccaaggaa

SEQ ID NO: 1600764 - DNA, 15 bp, Homo sapiens
cgtttagaccaagga

SEQ ID NO: 1600765 - DNA, 15 bp, Homo sapiens
gcgtttagaccaagg

SEQ ID NO: 1600766 - DNA, 15 bp, Homo sapiens
cgcgtttagaccaag

SEQ ID NO: 1600767 - DNA, 15 bp, Homo sapiens
ccgcgtttagaccaa

SEQ ID NO: 1600768 - DNA, 15 bp, Homo sapiens
gccgcgtttagacca

SEQ ID NO: 1600769 - DNA, 15 bp, Homo sapiens
ggccgcgtttagacc

SEQ ID NO: 1600770 - DNA, 15 bp, Homo sapiens
tggccgcgtttagac

SEQ ID NO: 1600771 - DNA, 15 bp, Homo sapiens
ctggccgcgtttaga

SEQ ID NO: 1600772 - DNA, 15 bp, Homo sapiens
cctggccgcgtttag

SEQ ID NO: 1600773 - DNA, 15 bp, Homo sapiens
acctggccgcgttta

SEQ ID NO: 1600774 - DNA, 15 bp, Homo sapiens
aacctggccgcgttt

SEQ ID NO: 1600775 - DNA, 15 bp, Homo sapiens
caacctggccgcgtt

SEQ ID NO: 1600776 - DNA, 15 bp, Homo sapiens
acaacctggccgcgt

SEQ ID NO: 1600777 - DNA, 15 bp, Homo sapiens
aacaacctggccgcg

SEQ ID NO: 1600778 - DNA, 15 bp, Homo sapiens
taacaacctggccgc

SEQ ID NO: 1600779 - DNA, 15 bp, Homo sapiens
ttaacaacctggccg

SEQ ID NO: 1600780 - DNA, 15 bp, Homo sapiens
cttaacaacctggcc

SEQ ID NO: 1600781 - DNA, 15 bp, Homo sapiens
tcttaacaacctggc

SEQ ID NO: 1600782 - DNA, 15 bp, Homo sapiens
ttcttaacaacctgg

SEQ ID NO: 1600783 - DNA, 15 bp, Homo sapiens
tttcttaacaacctg

SEQ ID NO: 1600784 - DNA, 15 bp, Homo sapiens
ttttcttaacaacct

SEQ ID NO: 1600785 - DNA, 15 bp, Homo sapiens
cttttcttaacaacc

SEQ ID NO: 1600786 - DNA, 15 bp, Homo sapiens
acttttcttaacaac

SEQ ID NO: 1600787 - DNA, 15 bp, Homo sapiens
gacttttcttaacaa

SEQ ID NO: 1600788 - DNA, 15 bp, Homo sapiens
cgacttttcttaaca

SEQ ID NO: 1600789 - DNA, 15 bp, Homo sapiens
tcgacttttcttaac

SEQ ID NO: 1600790 - DNA, 15 bp, Homo sapiens
ttcgacttttcttaa

SEQ ID NO: 1600791 - DNA, 15 bp, Homo sapiens
cttcgacttttctta

SEQ ID NO: 1600792 - DNA, 15 bp, Homo sapiens
gcttcgacttttctt

SEQ ID NO: 1600793 - DNA, 15 bp, Homo sapiens
cgcttcgacttttct

SEQ ID NO: 1600794 - DNA, 15 bp, Homo sapiens
gcgcttcgacttttc

SEQ ID NO: 1600795 - DNA, 15 bp, Homo sapiens
cgcgcttcgactttt

SEQ ID NO: 1600796 - DNA, 15 bp, Homo sapiens
acgcgcttcgacttt

SEQ ID NO: 1600797 - DNA, 15 bp, Homo sapiens
cacgcgcttcgactt

SEQ ID NO: 1600798 - DNA, 15 bp, Homo sapiens
ccacgcgcttcgact

SEQ ID NO: 1600799 - DNA, 15 bp, Homo sapiens
tccacgcgcttcgac

SEQ ID NO: 1600800 - DNA, 15 bp, Homo sapiens
ctccacgcgcttcga

SEQ ID NO: 1600801 - DNA, 15 bp, Homo sapiens
gctccacgcgcttcg

SEQ ID NO: 1600802 - DNA, 15 bp, Homo sapiens
tgctccacgcgcttc

SEQ ID NO: 1600803 - DNA, 15 bp, Homo sapiens
ctgctccacgcgctt

SEQ ID NO: 1600804 - DNA, 15 bp, Homo sapiens
gctgctccacgcgct

SEQ ID NO: 1600805 - DNA, 15 bp, Homo sapiens
cgctgctccacgcgc

SEQ ID NO: 1600806 - DNA, 15 bp, Homo sapiens
ccgctgctccacgcg

SEQ ID NO: 1600807 - DNA, 15 bp, Homo sapiens
accgctgctccacgc

SEQ ID NO: 1600808 - DNA, 15 bp, Homo sapiens
caccgctgctccacg

SEQ ID NO: 1600809 - DNA, 15 bp, Homo sapiens
ccaccgctgctccac

SEQ ID NO: 1600810 - DNA, 15 bp, Homo sapiens
tccaccgctgctcca

SEQ ID NO: 1600811 - DNA, 15 bp, Homo sapiens
atccaccgctgctcc

SEQ ID NO: 1600812 - DNA, 15 bp, Homo sapiens
catccaccgctgctc

SEQ ID NO: 1600813 - DNA, 15 bp, Homo sapiens
ccatccaccgctgct

SEQ ID NO: 1600814 - DNA, 15 bp, Homo sapiens
accatccaccgctgc

SEQ ID NO: 1600815 - DNA, 15 bp, Homo sapiens
caccatccaccgctg

SEQ ID NO: 1600816 - DNA, 15 bp, Homo sapiens
ccaccatccaccgct

SEQ ID NO: 1600817 - DNA, 15 bp, Homo sapiens
accaccatccaccgc

SEQ ID NO: 1600818 - DNA, 15 bp, Homo sapiens
gaccaccatccaccg

SEQ ID NO: 1600819 - DNA, 15 bp, Homo sapiens
agaccaccatccacc

SEQ ID NO: 1600820 - DNA, 15 bp, Homo sapiens
cagaccaccatccac

SEQ ID NO: 1600821 - DNA, 15 bp, Homo sapiens
acagaccaccatcca

SEQ ID NO: 1600822 - DNA, 15 bp, Homo sapiens
cacagaccaccatcc

SEQ ID NO: 1600823 - DNA, 15 bp, Homo sapiens
acacagaccaccatc

SEQ ID NO: 1600824 - DNA, 15 bp, Homo sapiens
cacacagaccaccat

SEQ ID NO: 1600825 - DNA, 15 bp, Homo sapiens
ccacacagaccacca

SEQ ID NO: 1600826 - DNA, 15 bp, Homo sapiens
gccacacagaccacc

SEQ ID NO: 1600827 - DNA, 15 bp, Homo sapiens
cgccacacagaccac

SEQ ID NO: 1600828 - DNA, 15 bp, Homo sapiens
ccgccacacagacca

SEQ ID NO: 1600829 - DNA, 15 bp, Homo sapiens
cccgccacacagacc

SEQ ID NO: 1600830 - DNA, 15 bp, Homo sapiens
gcccgccacacagac

SEQ ID NO: 1600831 - DNA, 15 bp, Homo sapiens
tgcccgccacacaga

SEQ ID NO: 1600832 - DNA, 15 bp, Homo sapiens
ctgcccgccacacag

SEQ ID NO: 1600833 - DNA, 15 bp, Homo sapiens
cctgcccgccacaca

SEQ ID NO: 1600834 - DNA, 15 bp, Homo sapiens
tcctgcccgccacac

SEQ ID NO: 1600835 - DNA, 15 bp, Homo sapiens
ctcctgcccgccaca

SEQ ID NO: 1600836 - DNA, 15 bp, Homo sapiens
cctcctgcccgccac

SEQ ID NO: 1600837 - DNA, 15 bp, Homo sapiens
ccctcctgcccgcca

SEQ ID NO: 1600838 - DNA, 15 bp, Homo sapiens
tccctcctgcccgcc

SEQ ID NO: 1600839 - DNA, 15 bp, Homo sapiens
ttccctcctgcccgc

SEQ ID NO: 1600840 - DNA, 15 bp, Homo sapiens
cttccctcctgcccg

SEQ ID NO: 1600841 - DNA, 15 bp, Homo sapiens
gcttccctcctgccc

SEQ ID NO: 1600842 - DNA, 15 bp, Homo sapiens
cgcttccctcctgcc

SEQ ID NO: 1600843 - DNA, 15 bp, Homo sapiens
ccgcttccctcctgc

SEQ ID NO: 1600844 - DNA, 15 bp, Homo sapiens
accgcttccctcctg

SEQ ID NO: 1600845 - DNA, 15 bp, Homo sapiens
caccgcttccctcct

SEQ ID NO: 1600846 - DNA, 15 bp, Homo sapiens
tcaccgcttccctcc

SEQ ID NO: 1600847 - DNA, 15 bp, Homo sapiens
ctcaccgcttccctc

SEQ ID NO: 1600848 - DNA, 15 bp, Homo sapiens
cctcaccgcttccct

SEQ ID NO: 1600849 - DNA, 15 bp, Homo sapiens
gcctcaccgcttccc

SEQ ID NO: 1600850 - DNA, 15 bp, Homo sapiens
tgcctcaccgcttcc

SEQ ID NO: 1600851 - DNA, 15 bp, Homo sapiens
ctgcctcaccgcttc

SEQ ID NO: 1600852 - DNA, 15 bp, Homo sapiens
tctgcctcaccgctt

SEQ ID NO: 1600853 - DNA, 15 bp, Homo sapiens
ctctgcctcaccgct

SEQ ID NO: 1600854 - DNA, 15 bp, Homo sapiens
gctctgcctcaccgc

SEQ ID NO: 1600855 - DNA, 15 bp, Homo sapiens
cgctctgcctcaccg

SEQ ID NO: 1600856 - DNA, 15 bp, Homo sapiens
gcgctctgcctcacc

SEQ ID NO: 1600857 - DNA, 15 bp, Homo sapiens
agcgctctgcctcac

SEQ ID NO: 1600858 - DNA, 15 bp, Homo sapiens
cagcgctctgcctca

SEQ ID NO: 1600859 - DNA, 15 bp, Homo sapiens
ccagcgctctgcctc

SEQ ID NO: 1600860 - DNA, 15 bp, Homo sapiens
cccagcgctctgcct

SEQ ID NO: 1600861 - DNA, 15 bp, Homo sapiens
gcccagcgctctgcc

SEQ ID NO: 1600862 - DNA, 15 bp, Homo sapiens
agcccagcgctctgc

SEQ ID NO: 1600863 - DNA, 15 bp, Homo sapiens
tagcccagcgctctg

SEQ ID NO: 1600864 - DNA, 15 bp, Homo sapiens
ctagcccagcgctct

SEQ ID NO: 1600865 - DNA, 15 bp, Homo sapiens
cctagcccagcgctc

SEQ ID NO: 1600866 - DNA, 15 bp, Homo sapiens
ccctagcccagcgct

SEQ ID NO: 1600867 - DNA, 15 bp, Homo sapiens
gccctagcccagcgc

SEQ ID NO: 1600868 - DNA, 15 bp, Homo sapiens
ggccctagcccagcg

SEQ ID NO: 1600869 - DNA, 15 bp, Homo sapiens
cggccctagcccagc

SEQ ID NO: 1600870 - DNA, 15 bp, Homo sapiens
ccggccctagcccag

SEQ ID NO: 1600871 - DNA, 15 bp, Homo sapiens
gccggccctagccca

SEQ ID NO: 1600872 - DNA, 15 bp, Homo sapiens
ggccggccctagccc

SEQ ID NO: 1600873 - DNA, 15 bp, Homo sapiens
gggccggccctagcc

SEQ ID NO: 1600874 - DNA, 15 bp, Homo sapiens
cgggccggccctagc

SEQ ID NO: 1600875 - DNA, 15 bp, Homo sapiens
ccgggccggccctag

SEQ ID NO: 1600876 - DNA, 15 bp, Homo sapiens
gccgggccggcccta

SEQ ID NO: 1600877 - DNA, 15 bp, Homo sapiens
cgccgggccggccct

SEQ ID NO: 1600878 - DNA, 15 bp, Homo sapiens
acgccgggccggccc

SEQ ID NO: 1600879 - DNA, 15 bp, Homo sapiens
gacgccgggccggcc

SEQ ID NO: 1600880 - DNA, 15 bp, Homo sapiens
ggacgccgggccggc

SEQ ID NO: 1600881 - DNA, 15 bp, Homo sapiens
aggacgccgggccgg

SEQ ID NO: 1600882 - DNA, 15 bp, Homo sapiens
gaggacgccgggccg

SEQ ID NO: 1600883 - DNA, 15 bp, Homo sapiens
agaggacgccgggcc

SEQ ID NO: 1600884 - DNA, 15 bp, Homo sapiens
gagaggacgccgggc

SEQ ID NO: 1600885 - DNA, 15 bp, Homo sapiens
tgagaggacgccggg

SEQ ID NO: 1600886 - DNA, 15 bp, Homo sapiens
gtgagaggacgccgg

SEQ ID NO: 1600887 - DNA, 15 bp, Homo sapiens
ggtgagaggacgccg

SEQ ID NO: 1600888 - DNA, 15 bp, Homo sapiens
tggtgagaggacgcc

SEQ ID NO: 1600889 - DNA, 15 bp, Homo sapiens
ctggtgagaggacgc

SEQ ID NO: 1600890 - DNA, 15 bp, Homo sapiens
cctggtgagaggacg

SEQ ID NO: 1600891 - DNA, 15 bp, Homo sapiens
acctggtgagaggac

SEQ ID NO: 1600892 - DNA, 15 bp, Homo sapiens
gacctggtgagagga

SEQ ID NO: 1600893 - DNA, 15 bp, Homo sapiens
ggacctggtgagagg

SEQ ID NO: 1600894 - DNA, 15 bp, Homo sapiens
cggacctggtgagag

SEQ ID NO: 1600895 - DNA, 15 bp, Homo sapiens
tcggacctggtgaga

SEQ ID NO: 1600896 - DNA, 15 bp, Homo sapiens
gtcggacctggtgag

SEQ ID NO: 1600897 - DNA, 15 bp, Homo sapiens
ggtcggacctggtga

SEQ ID NO: 1600898 - DNA, 15 bp, Homo sapiens
cggtcggacctggtg

SEQ ID NO: 1600899 - DNA, 15 bp, Homo sapiens
acggtcggacctggt

SEQ ID NO: 1600900 - DNA, 15 bp, Homo sapiens
tacggtcggacctgg

SEQ ID NO: 1600901 - DNA, 15 bp, Homo sapiens
atacggtcggacctg

SEQ ID NO: 1600902 - DNA, 15 bp, Homo sapiens
tatacggtcggacct

SEQ ID NO: 1600903 - DNA, 15 bp, Homo sapiens
ctatacggtcggacc

SEQ ID NO: 1600904 - DNA, 15 bp, Homo sapiens
gctatacggtcggac

SEQ ID NO: 1600905 - DNA, 15 bp, Homo sapiens
tgctatacggtcgga

SEQ ID NO: 1600906 - DNA, 15 bp, Homo sapiens
ttgctatacggtcgg

SEQ ID NO: 1600907 - DNA, 15 bp, Homo sapiens
cttgctatacggtcg

SEQ ID NO: 1600908 - DNA, 15 bp, Homo sapiens
ccttgctatacggtc

SEQ ID NO: 1600909 - DNA, 15 bp, Homo sapiens
accttgctatacggt

SEQ ID NO: 1600910 - DNA, 15 bp, Homo sapiens
caccttgctatacgg

SEQ ID NO: 1600911 - DNA, 15 bp, Homo sapiens
ccaccttgctatacg

SEQ ID NO: 1600912 - DNA, 15 bp, Homo sapiens
tccaccttgctatac

SEQ ID NO: 1600913 - DNA, 15 bp, Homo sapiens
ctccaccttgctata

SEQ ID NO: 1600914 - DNA, 15 bp, Homo sapiens
gctccaccttgctat

SEQ ID NO: 1600915 - DNA, 15 bp, Homo sapiens
tgctccaccttgcta

SEQ ID NO: 1600916 - DNA, 15 bp, Homo sapiens
ctgctccaccttgct

SEQ ID NO: 1600917 - DNA, 15 bp, Homo sapiens
cctgctccaccttgc

SEQ ID NO: 1600918 - DNA, 15 bp, Homo sapiens
tcctgctccaccttg

SEQ ID NO: 1600919 - DNA, 15 bp, Homo sapiens
gtcctgctccacctt

SEQ ID NO: 1600920 - DNA, 15 bp, Homo sapiens
tgtcctgctccacct

SEQ ID NO: 1600921 - DNA, 15 bp, Homo sapiens
atgtcctgctccacc

SEQ ID NO: 1600922 - DNA, 15 bp, Homo sapiens
catgtcctgctccac

SEQ ID NO: 1600923 - DNA, 15 bp, Homo sapiens
ccatgtcctgctcca

SEQ ID NO: 1600924 - DNA, 15 bp, Homo sapiens
accatgtcctgctcc

SEQ ID NO: 1600925 - DNA, 15 bp, Homo sapiens
caccatgtcctgctc

SEQ ID NO: 1600926 - DNA, 15 bp, Homo sapiens
gcaccatgtcctgct

SEQ ID NO: 1600927 - DNA, 15 bp, Homo sapiens
ggcaccatgtcctgc

SEQ ID NO: 1600928 - DNA, 15 bp, Homo sapiens
cggcaccatgtcctg

SEQ ID NO: 1600929 - DNA, 15 bp, Homo sapiens
acggcaccatgtcct

SEQ ID NO: 1600930 - DNA, 15 bp, Homo sapiens
tacggcaccatgtcc

SEQ ID NO: 1600931 - DNA, 15 bp, Homo sapiens
ctacggcaccatgtc

SEQ ID NO: 1600932 - DNA, 15 bp, Homo sapiens
actacggcaccatgt

SEQ ID NO: 1600933 - DNA, 15 bp, Homo sapiens
gactacggcaccatg

SEQ ID NO: 1600934 - DNA, 15 bp, Homo sapiens
ggactacggcaccat

SEQ ID NO: 1600935 - DNA, 15 bp, Homo sapiens
cggactacggcacca

SEQ ID NO: 1600936 - DNA, 15 bp, Homo sapiens
tcggactacggcacc

SEQ ID NO: 1600937 - DNA, 15 bp, Homo sapiens
ctcggactacggcac

SEQ ID NO: 1600938 - DNA, 15 bp, Homo sapiens
gctcggactacggca

SEQ ID NO: 1600939 - DNA, 15 bp, Homo sapiens
ggctcggactacggc

SEQ ID NO: 1600940 - DNA, 15 bp, Homo sapiens
gggctcggactacgg

SEQ ID NO: 1600941 - DNA, 15 bp, Homo sapiens
cgggctcggactacg

SEQ ID NO: 1600942 - DNA, 15 bp, Homo sapiens
tcgggctcggactac

SEQ ID NO: 1600943 - DNA, 15 bp, Homo sapiens
ctcgggctcggacta

SEQ ID NO: 1600944 - DNA, 15 bp, Homo sapiens
cctcgggctcggact

SEQ ID NO: 1600945 - DNA, 15 bp, Homo sapiens
tcctcgggctcggac

SEQ ID NO: 1600946 - DNA, 15 bp, Homo sapiens
ctcctcgggctcgga

SEQ ID NO: 1600947 - DNA, 15 bp, Homo sapiens
actcctcgggctcgg

SEQ ID NO: 1600948 - DNA, 15 bp, Homo sapiens
aactcctcgggctcg

SEQ ID NO: 1600949 - DNA, 15 bp, Homo sapiens
gaactcctcgggctc

SEQ ID NO: 1600950 - DNA, 15 bp, Homo sapiens
tgaactcctcgggct

SEQ ID NO: 1600951 - DNA, 15 bp, Homo sapiens
ctgaactcctcgggc

SEQ ID NO: 1600952 - DNA, 15 bp, Homo sapiens
cctgaactcctcggg

SEQ ID NO: 1600953 - DNA, 15 bp, Homo sapiens
acctgaactcctcgg

SEQ ID NO: 1600954 - DNA, 15 bp, Homo sapiens
cacctgaactcctcg

SEQ ID NO: 1600955 - DNA, 15 bp, Homo sapiens
ccacctgaactcctc

SEQ ID NO: 1600956 - DNA, 15 bp, Homo sapiens
cccacctgaactcct

SEQ ID NO: 1600957 - DNA, 15 bp, Homo sapiens
tcccacctgaactcc

SEQ ID NO: 1600958 - DNA, 15 bp, Homo sapiens
gtcccacctgaactc

SEQ ID NO: 1600959 - DNA, 15 bp, Homo sapiens
tgtcccacctgaact

SEQ ID NO: 1600960 - DNA, 15 bp, Homo sapiens
ctgtcccacctgaac

SEQ ID NO: 1600961 - DNA, 15 bp, Homo sapiens
cctgtcccacctgaa

SEQ ID NO: 1600962 - DNA, 15 bp, Homo sapiens
gcctgtcccacctga

SEQ ID NO: 1600963 - DNA, 15 bp, Homo sapiens
agcctgtcccacctg

SEQ ID NO: 1600964 - DNA, 15 bp, Homo sapiens
cagcctgtcccacct

SEQ ID NO: 1600965 - DNA, 15 bp, Homo sapiens
ccagcctgtcccacc

SEQ ID NO: 1600966 - DNA, 15 bp, Homo sapiens
tccagcctgtcccac

SEQ ID NO: 1600967 - DNA, 15 bp, Homo sapiens
atccagcctgtccca

SEQ ID NO: 1600968 - DNA, 15 bp, Homo sapiens
tatccagcctgtccc

SEQ ID NO: 1600969 - DNA, 15 bp, Homo sapiens
gtatccagcctgtcc

SEQ ID NO: 1600970 - DNA, 15 bp, Homo sapiens
ggtatccagcctgtc

SEQ ID NO: 1600971 - DNA, 15 bp, Homo sapiens
aggtatccagcctgt

SEQ ID NO: 1600972 - DNA, 15 bp, Homo sapiens
caggtatccagcctg

SEQ ID NO: 1600973 - DNA, 15 bp, Homo sapiens
ccaggtatccagcct

SEQ ID NO: 1600974 - DNA, 15 bp, Homo sapiens
gccaggtatccagcc

SEQ ID NO: 1600975 - DNA, 15 bp, Homo sapiens
ggccaggtatccagc

SEQ ID NO: 1600976 - DNA, 15 bp, Homo sapiens
gggccaggtatccag

SEQ ID NO: 1600977 - DNA, 15 bp, Homo sapiens
agggccaggtatcca

SEQ ID NO: 1600978 - DNA, 15 bp, Homo sapiens
cagggccaggtatcc

SEQ ID NO: 1600979 - DNA, 15 bp, Homo sapiens
gcagggccaggtatc

SEQ ID NO: 1600980 - DNA, 15 bp, Homo sapiens
tgcagggccaggtat

SEQ ID NO: 1600981 - DNA, 15 bp, Homo sapiens
ctgcagggccaggta

SEQ ID NO: 1600982 - DNA, 15 bp, Homo sapiens
gctgcagggccaggt

SEQ ID NO: 1600983 - DNA, 15 bp, Homo sapiens
cgctgcagggccagg

SEQ ID NO: 1600984 - DNA, 15 bp, Homo sapiens
gcgctgcagggccag

SEQ ID NO: 1600985 - DNA, 15 bp, Homo sapiens
ggcgctgcagggcca

SEQ ID NO: 1600986 - DNA, 15 bp, Homo sapiens
cggcgctgcagggcc

SEQ ID NO: 1600987 - DNA, 15 bp, Homo sapiens
gcggcgctgcagggc

SEQ ID NO: 1600988 - DNA, 15 bp, Homo sapiens
cgcggcgctgcaggg

SEQ ID NO: 1600989 - DNA, 15 bp, Homo sapiens
ccgcggcgctgcagg

SEQ ID NO: 1600990 - DNA, 15 bp, Homo sapiens
cccgcggcgctgcag

SEQ ID NO: 1600991 - DNA, 15 bp, Homo sapiens
ccccgcggcgctgca

SEQ ID NO: 1600992 - DNA, 15 bp, Homo sapiens
gccccgcggcgctgc

SEQ ID NO: 1600993 - DNA, 15 bp, Homo sapiens
agccccgcggcgctg

SEQ ID NO: 1600994 - DNA, 15 bp, Homo sapiens
cagccccgcggcgct

SEQ ID NO: 1600995 - DNA, 15 bp, Homo sapiens
ccagccccgcggcgc

SEQ ID NO: 1600996 - DNA, 15 bp, Homo sapiens
gccagccccgcggcg

SEQ ID NO: 1600997 - DNA, 15 bp, Homo sapiens
cgccagccccgcggc

SEQ ID NO: 1600998 - DNA, 15 bp, Homo sapiens
ccgccagccccgcgg

SEQ ID NO: 1600999 - DNA, 15 bp, Homo sapiens
gccgccagccccgcg

SEQ ID NO: 1601000 - DNA, 15 bp, Homo sapiens
cgccgccagccccgc

SEQ ID NO: 1601001 - DNA, 15 bp, Homo sapiens
acgccgccagccccg

SEQ ID NO: 1601002 - DNA, 15 bp, Homo sapiens
cacgccgccagcccc

SEQ ID NO: 1601003 - DNA, 15 bp, Homo sapiens
ccacgccgccagccc

SEQ ID NO: 1601004 - DNA, 15 bp, Homo sapiens
accacgccgccagcc

SEQ ID NO: 1601005 - DNA, 15 bp, Homo sapiens
caccacgccgccagc

SEQ ID NO: 1601006 - DNA, 15 bp, Homo sapiens
gcaccacgccgccag

SEQ ID NO: 1601007 - DNA, 15 bp, Homo sapiens
cgcaccacgccgcca

SEQ ID NO: 1601008 - DNA, 15 bp, Homo sapiens
gcgcaccacgccgcc

SEQ ID NO: 1601009 - DNA, 15 bp, Homo sapiens
ggcgcaccacgccgc

SEQ ID NO: 1601010 - DNA, 15 bp, Homo sapiens
tggcgcaccacgccg

SEQ ID NO: 1601011 - DNA, 15 bp, Homo sapiens
ctggcgcaccacgcc

SEQ ID NO: 1601012 - DNA, 15 bp, Homo sapiens
cctggcgcaccacgc

SEQ ID NO: 1601013 - DNA, 15 bp, Homo sapiens
acctggcgcaccacg

SEQ ID NO: 1601014 - DNA, 15 bp, Homo sapiens
gacctggcgcaccac

SEQ ID NO: 1601015 - DNA, 15 bp, Homo sapiens
ggacctggcgcacca

SEQ ID NO: 1601016 - DNA, 15 bp, Homo sapiens
cggacctggcgcacc

SEQ ID NO: 1601017 - DNA, 15 bp, Homo sapiens
ccggacctggcgcac

SEQ ID NO: 1601018 - DNA, 15 bp, Homo sapiens
tccggacctggcgca

SEQ ID NO: 1601019 - DNA, 15 bp, Homo sapiens
ctccggacctggcgc

SEQ ID NO: 1601020 - DNA, 15 bp, Homo sapiens
tctccggacctggcg

SEQ ID NO: 1601021 - DNA, 15 bp, Homo sapiens
gtctccggacctggc

SEQ ID NO: 1601022 - DNA, 15 bp, Homo sapiens
agtctccggacctgg

SEQ ID NO: 1601023 - DNA, 15 bp, Homo sapiens
cagtctccggacctg

SEQ ID NO: 1601024 - DNA, 15 bp, Homo sapiens
ccagtctccggacct

SEQ ID NO: 1601025 - DNA, 15 bp, Homo sapiens
gccagtctccggacc

SEQ ID NO: 1601026 - DNA, 15 bp, Homo sapiens
ggccagtctccggac

SEQ ID NO: 1601027 - DNA, 15 bp, Homo sapiens
aggccagtctccgga

SEQ ID NO: 1601028 - DNA, 15 bp, Homo sapiens
caggccagtctccgg

SEQ ID NO: 1601029 - DNA, 15 bp, Homo sapiens
gcaggccagtctccg

SEQ ID NO: 1601030 - DNA, 15 bp, Homo sapiens
cgcaggccagtctcc

SEQ ID NO: 1601031 - DNA, 15 bp, Homo sapiens
gcgcaggccagtctc

SEQ ID NO: 1601032 - DNA, 15 bp, Homo sapiens
agcgcaggccagtct

SEQ ID NO: 1601033 - DNA, 15 bp, Homo sapiens
cagcgcaggccagtc

SEQ ID NO: 1601034 - DNA, 15 bp, Homo sapiens
gcagcgcaggccagt

SEQ ID NO: 1601035 - DNA, 15 bp, Homo sapiens
ggcagcgcaggccag

SEQ ID NO: 1601036 - DNA, 15 bp, Homo sapiens
aggcagcgcaggcca

SEQ ID NO: 1601037 - DNA, 15 bp, Homo sapiens
caggcagcgcaggcc

SEQ ID NO: 1601038 - DNA, 15 bp, Homo sapiens
ccaggcagcgcaggc

SEQ ID NO: 1601039 - DNA, 15 bp, Homo sapiens
gccaggcagcgcagg

SEQ ID NO: 1601040 - DNA, 15 bp, Homo sapiens
agccaggcagcgcag

SEQ ID NO: 1601041 - DNA, 15 bp, Homo sapiens
cagccaggcagcgca

SEQ ID NO: 1601042 - DNA, 15 bp, Homo sapiens
ccagccaggcagcgc

SEQ ID NO: 1601043 - DNA, 15 bp, Homo sapiens
accagccaggcagcg

SEQ ID NO: 1601044 - DNA, 15 bp, Homo sapiens
caccagccaggcagc

SEQ ID NO: 1601045 - DNA, 15 bp, Homo sapiens
ccaccagccaggcag

SEQ ID NO: 1601046 - DNA, 15 bp, Homo sapiens
gccaccagccaggca

SEQ ID NO: 1601047 - DNA, 15 bp, Homo sapiens
ggccaccagccaggc

SEQ ID NO: 1601048 - DNA, 15 bp, Homo sapiens
gggccaccagccagg

SEQ ID NO: 1601049 - DNA, 15 bp, Homo sapiens
cgggccaccagccag

SEQ ID NO: 1601050 - DNA, 15 bp, Homo sapiens
ccgggccaccagcca

SEQ ID NO: 1601051 - DNA, 15 bp, Homo sapiens
cccgggccaccagcc

SEQ ID NO: 1601052 - DNA, 15 bp, Homo sapiens
acccgggccaccagc

SEQ ID NO: 1601053 - DNA, 15 bp, Homo sapiens
cacccgggccaccag

SEQ ID NO: 1601054 - DNA, 15 bp, Homo sapiens
acacccgggccacca

SEQ ID NO: 1601055 - DNA, 15 bp, Homo sapiens
cacacccgggccacc

SEQ ID NO: 1601056 - DNA, 15 bp, Homo sapiens
gcacacccgggccac

SEQ ID NO: 1601057 - DNA, 15 bp, Homo sapiens
cgcacacccgggcca

SEQ ID NO: 1601058 - DNA, 15 bp, Homo sapiens
gcgcacacccgggcc

SEQ ID NO: 1601059 - DNA, 15 bp, Homo sapiens
ggcgcacacccgggc

SEQ ID NO: 1601060 - DNA, 15 bp, Homo sapiens
tggcgcacacccggg

SEQ ID NO: 1601061 - DNA, 15 bp, Homo sapiens
ttggcgcacacccgg

SEQ ID NO: 1601062 - DNA, 15 bp, Homo sapiens
cttggcgcacacccg

SEQ ID NO: 1601063 - DNA, 15 bp, Homo sapiens
ccttggcgcacaccc

SEQ ID NO: 1601064 - DNA, 15 bp, Homo sapiens
gccttggcgcacacc

SEQ ID NO: 1601065 - DNA, 15 bp, Homo sapiens
ggccttggcgcacac

SEQ ID NO: 1601066 - DNA, 15 bp, Homo sapiens
cggccttggcgcaca

SEQ ID NO: 1601067 - DNA, 15 bp, Homo sapiens
ccggccttggcgcac

SEQ ID NO: 1601068 - DNA, 15 bp, Homo sapiens
gccggccttggcgca

SEQ ID NO: 1601069 - DNA, 15 bp, Homo sapiens
cgccggccttggcgc

SEQ ID NO: 1601070 - DNA, 15 bp, Homo sapiens
gcgccggccttggcg

SEQ ID NO: 1601071 - DNA, 15 bp, Homo sapiens
ggcgccggccttggc

SEQ ID NO: 1601072 - DNA, 15 bp, Homo sapiens
tggcgccggccttgg

SEQ ID NO: 1601073 - DNA, 15 bp, Homo sapiens
gtggcgccggccttg

SEQ ID NO: 1601074 - DNA, 15 bp, Homo sapiens
ggtggcgccggcctt

SEQ ID NO: 1601075 - DNA, 15 bp, Homo sapiens
cggtggcgccggcct

SEQ ID NO: 1601076 - DNA, 15 bp, Homo sapiens
gcggtggcgccggcc

SEQ ID NO: 1601077 - DNA, 15 bp, Homo sapiens
agcggtggcgccggc

SEQ ID NO: 1601078 - DNA, 15 bp, Homo sapiens
cagcggtggcgccgg

SEQ ID NO: 1601079 - DNA, 15 bp, Homo sapiens
gcagcggtggcgccg

SEQ ID NO: 1601080 - DNA, 15 bp, Homo sapiens
ggcagcggtggcgcc

SEQ ID NO: 1601081 - DNA, 15 bp, Homo sapiens
gggcagcggtggcgc

SEQ ID NO: 1601082 - DNA, 15 bp, Homo sapiens
tgggcagcggtggcg

SEQ ID NO: 1601083 - DNA, 15 bp, Homo sapiens
gtgggcagcggtggc

SEQ ID NO: 1601084 - DNA, 15 bp, Homo sapiens
cgtgggcagcggtgg

SEQ ID NO: 1601085 - DNA, 15 bp, Homo sapiens
ccgtgggcagcggtg

SEQ ID NO: 1601086 - DNA, 15 bp, Homo sapiens
tccgtgggcagcggt

SEQ ID NO: 1601087 - DNA, 15 bp, Homo sapiens
ctccgtgggcagcgg

SEQ ID NO: 1601088 - DNA, 15 bp, Homo sapiens
tctccgtgggcagcg

SEQ ID NO: 1601089 - DNA, 15 bp, Homo sapiens
atctccgtgggcagc

SEQ ID NO: 1601090 - DNA, 15 bp, Homo sapiens
catctccgtgggcag

SEQ ID NO: 1601091 - DNA, 15 bp, Homo sapiens
gccatctccgtgggc

SEQ ID NO: 1601092 - DNA, 15 bp, Homo sapiens
ggccatctccgtggg

SEQ ID NO: 1601093 - DNA, 15 bp, Homo sapiens
cggccatctccgtgg

SEQ ID NO: 1601094 - DNA, 15 bp, Homo sapiens
gcggccatctccgtg

SEQ ID NO: 1601095 - DNA, 15 bp, Homo sapiens
agcggccatctccgt

SEQ ID NO: 1601096 - DNA, 15 bp, Homo sapiens
cagcggccatctccg

SEQ ID NO: 1601097 - DNA, 15 bp, Homo sapiens
gcagcggccatctcc

SEQ ID NO: 1601098 - DNA, 15 bp, Homo sapiens
ggcagcggccatctc

SEQ ID NO: 1601099 - DNA, 15 bp, Homo sapiens
cggcagcggccatct

SEQ ID NO: 1601100 - DNA, 15 bp, Homo sapiens
gcggcagcggccatc

SEQ ID NO: 1601101 - DNA, 15 bp, Homo sapiens
ggcggcagcggccat

SEQ ID NO: 1601102 - DNA, 15 bp, Homo sapiens
cggcggcagcggcca

SEQ ID NO: 1601103 - DNA, 15 bp, Homo sapiens
gcggcggcagcggcc

SEQ ID NO: 1601104 - DNA, 15 bp, Homo sapiens
ggcggcggcagcggc

SEQ ID NO: 1601105 - DNA, 15 bp, Homo sapiens
aggcggcggcagcgg

SEQ ID NO: 1601106 - DNA, 15 bp, Homo sapiens
caggcggcggcagcg

SEQ ID NO: 1601107 - DNA, 15 bp, Homo sapiens
gcaggcggcggcagc

SEQ ID NO: 1601108 - DNA, 15 bp, Homo sapiens
cgcaggcggcggcag

SEQ ID NO: 1601109 - DNA, 15 bp, Homo sapiens
gcgcaggcggcggca

SEQ ID NO: 1601110 - DNA, 15 bp, Homo sapiens
cgcgcaggcggcggc

SEQ ID NO: 1601111 - DNA, 15 bp, Homo sapiens
ccgcgcaggcggcgg

SEQ ID NO: 1601112 - DNA, 15 bp, Homo sapiens
gccgcgcaggcggcg

SEQ ID NO: 1601113 - DNA, 15 bp, Homo sapiens
ggccgcgcaggcggc

SEQ ID NO: 1601114 - DNA, 15 bp, Homo sapiens
aggccgcgcaggcgg

SEQ ID NO: 1601115 - DNA, 15 bp, Homo sapiens
caggccgcgcaggcg

SEQ ID NO: 1601116 - DNA, 15 bp, Homo sapiens
gcaggccgcgcaggc

SEQ ID NO: 1601117 - DNA, 15 bp, Homo sapiens
cgcaggccgcgcagg

SEQ ID NO: 1601118 - DNA, 15 bp, Homo sapiens
gcgcaggccgcgcag

SEQ ID NO: 1601119 - DNA, 15 bp, Homo sapiens
ggcgcaggccgcgca

SEQ ID NO: 1601120 - DNA, 15 bp, Homo sapiens
aggcgcaggccgcgc

SEQ ID NO: 1601121 - DNA, 15 bp, Homo sapiens
caggcgcaggccgcg

SEQ ID NO: 1601122 - DNA, 15 bp, Homo sapiens
ccaggcgcaggccgc

SEQ ID NO: 1601123 - DNA, 15 bp, Homo sapiens
accaggcgcaggccg

SEQ ID NO: 1601124 - DNA, 15 bp, Homo sapiens
caccaggcgcaggcc

SEQ ID NO: 1601125 - DNA, 15 bp, Homo sapiens
gcaccaggcgcaggc

SEQ ID NO: 1601126 - DNA, 15 bp, Homo sapiens
agcaccaggcgcagg

SEQ ID NO: 1601127 - DNA, 15 bp, Homo sapiens
cagcaccaggcgcag

SEQ ID NO: 1601128 - DNA, 15 bp, Homo sapiens
gcagcaccaggcgca

SEQ ID NO: 1601129 - DNA, 15 bp, Homo sapiens
cgcagcaccaggcgc

SEQ ID NO: 1601130 - DNA, 15 bp, Homo sapiens
gcgcagcaccaggcg

SEQ ID NO: 1601131 - DNA, 15 bp, Homo sapiens
ggcgcagcaccaggc

SEQ ID NO: 1601132 - DNA, 15 bp, Homo sapiens
aggcgcagcaccagg

SEQ ID NO: 1601133 - DNA, 15 bp, Homo sapiens
caggcgcagcaccag

SEQ ID NO: 1601134 - DNA, 15 bp, Homo sapiens
gcaggcgcagcacca

SEQ ID NO: 1601135 - DNA, 15 bp, Homo sapiens
agcaggcgcagcacc

SEQ ID NO: 1601136 - DNA, 15 bp, Homo sapiens
cagcaggcgcagcac

SEQ ID NO: 1601137 - DNA, 15 bp, Homo sapiens
gcagcaggcgcagca

SEQ ID NO: 1601138 - DNA, 15 bp, Homo sapiens
agcagcaggcgcagc

SEQ ID NO: 1601139 - DNA, 15 bp, Homo sapiens
cagcagcaggcgcag

SEQ ID NO: 1601140 - DNA, 15 bp, Homo sapiens
gcagcagcaggcgca

SEQ ID NO: 1601141 - DNA, 15 bp, Homo sapiens
cgcagcagcaggcgc

SEQ ID NO: 1601142 - DNA, 15 bp, Homo sapiens
gcgcagcagcaggcg

SEQ ID NO: 1601143 - DNA, 15 bp, Homo sapiens
cgcgcagcagcaggc

SEQ ID NO: 1601144 - DNA, 15 bp, Homo sapiens
acgcgcagcagcagg

SEQ ID NO: 1601145 - DNA, 15 bp, Homo sapiens
cacgcgcagcagcag

SEQ ID NO: 1601146 - DNA, 15 bp, Homo sapiens
ccacgcgcagcagca

SEQ ID NO: 1601147 - DNA, 15 bp, Homo sapiens
gccacgcgcagcagc

SEQ ID NO: 1601148 - DNA, 15 bp, Homo sapiens
ggccacgcgcagcag

SEQ ID NO: 1601149 - DNA, 15 bp, Homo sapiens
aggccacgcgcagca

SEQ ID NO: 1601150 - DNA, 15 bp, Homo sapiens
aaggccacgcgcagc

SEQ ID NO: 1601151 - DNA, 15 bp, Homo sapiens
caaggccacgcgcag

SEQ ID NO: 1601152 - DNA, 15 bp, Homo sapiens
acaaggccacgcgca

SEQ ID NO: 1601153 - DNA, 15 bp, Homo sapiens
tacaaggccacgcgc

SEQ ID NO: 1601154 - DNA, 15 bp, Homo sapiens
ctacaaggccacgcg

SEQ ID NO: 1601155 - DNA, 15 bp, Homo sapiens
cctacaaggccacgc

SEQ ID NO: 1601156 - DNA, 15 bp, Homo sapiens
gcctacaaggccacg

SEQ ID NO: 1601157 - DNA, 15 bp, Homo sapiens
agcctacaaggccac

SEQ ID NO: 1601158 - DNA, 15 bp, Homo sapiens
cagcctacaaggcca

SEQ ID NO: 1601159 - DNA, 15 bp, Homo sapiens
ccagcctacaaggcc

SEQ ID NO: 1601160 - DNA, 15 bp, Homo sapiens
gccagcctacaaggc

SEQ ID NO: 1601161 - DNA, 15 bp, Homo sapiens
cgccagcctacaagg

SEQ ID NO: 1601162 - DNA, 15 bp, Homo sapiens
ccgccagcctacaag

SEQ ID NO: 1601163 - DNA, 15 bp, Homo sapiens
gccgccagcctacaa

SEQ ID NO: 1601164 - DNA, 15 bp, Homo sapiens
cgccgccagcctaca

SEQ ID NO: 1601165 - DNA, 15 bp, Homo sapiens
gcgccgccagcctac

SEQ ID NO: 1601166 - DNA, 15 bp, Homo sapiens
ggcgccgccagccta

SEQ ID NO: 1601167 - DNA, 15 bp, Homo sapiens
gggcgccgccagcct

SEQ ID NO: 1601168 - DNA, 15 bp, Homo sapiens
cgggcgccgccagcc

SEQ ID NO: 1601169 - DNA, 15 bp, Homo sapiens
ccgggcgccgccagc

SEQ ID NO: 1601170 - DNA, 15 bp, Homo sapiens
gccgggcgccgccag

SEQ ID NO: 1601171 - DNA, 15 bp, Homo sapiens
cgccgggcgccgcca

SEQ ID NO: 1601172 - DNA, 15 bp, Homo sapiens
gcgccgggcgccgcc

SEQ ID NO: 1601173 - DNA, 15 bp, Homo sapiens
cgcgccgggcgccgc

SEQ ID NO: 1601174 - DNA, 15 bp, Homo sapiens
ccgcgccgggcgccg

SEQ ID NO: 1601175 - DNA, 15 bp, Homo sapiens
cccgcgccgggcgcc

SEQ ID NO: 1601176 - DNA, 15 bp, Homo sapiens
ccccgcgccgggcgc

SEQ ID NO: 1601177 - DNA, 15 bp, Homo sapiens
cccccgcgccgggcg

SEQ ID NO: 1601178 - DNA, 15 bp, Homo sapiens
gcccccgcgccgggc

SEQ ID NO: 1601179 - DNA, 15 bp, Homo sapiens
tgcccccgcgccggg

SEQ ID NO: 1601180 - DNA, 15 bp, Homo sapiens
gtgcccccgcgccgg

SEQ ID NO: 1601181 - DNA, 15 bp, Homo sapiens
ggtgcccccgcgccg

SEQ ID NO: 1601182 - DNA, 15 bp, Homo sapiens
gggtgcccccgcgcc

SEQ ID NO: 1601183 - DNA, 15 bp, Homo sapiens
cgggtgcccccgcgc

SEQ ID NO: 1601184 - DNA, 15 bp, Homo sapiens
gcgggtgcccccgcg

SEQ ID NO: 1601185 - DNA, 15 bp, Homo sapiens
ggcgggtgcccccgc

SEQ ID NO: 1601186 - DNA, 15 bp, Homo sapiens
aggcgggtgcccccg

SEQ ID NO: 1601187 - DNA, 15 bp, Homo sapiens
caggcgggtgccccc

SEQ ID NO: 1601188 - DNA, 15 bp, Homo sapiens
ccaggcgggtgcccc

SEQ ID NO: 1601189 - DNA, 15 bp, Homo sapiens
gccaggcgggtgccc

SEQ ID NO: 1601190 - DNA, 15 bp, Homo sapiens
tgccaggcgggtgcc

SEQ ID NO: 1601191 - DNA, 15 bp, Homo sapiens
gtgccaggcgggtgc

SEQ ID NO: 1601192 - DNA, 15 bp, Homo sapiens
cgtgccaggcgggtg

SEQ ID NO: 1601193 - DNA, 15 bp, Homo sapiens
ccgtgccaggcgggt

SEQ ID NO: 1601194 - DNA, 15 bp, Homo sapiens
accgtgccaggcggg

SEQ ID NO: 1601195 - DNA, 15 bp, Homo sapiens
aaccgtgccaggcgg

SEQ ID NO: 1601196 - DNA, 15 bp, Homo sapiens
aaaccgtgccaggcg

SEQ ID NO: 1601197 - DNA, 15 bp, Homo sapiens
caaaccgtgccaggc

SEQ ID NO: 1601198 - DNA, 15 bp, Homo sapiens
gcaaaccgtgccagg

SEQ ID NO: 1601199 - DNA, 15 bp, Homo sapiens
ggcaaaccgtgccag

SEQ ID NO: 1601200 - DNA, 15 bp, Homo sapiens
cggcaaaccgtgcca

SEQ ID NO: 1601201 - DNA, 15 bp, Homo sapiens
acggcaaaccgtgcc

SEQ ID NO: 1601202 - DNA, 15 bp, Homo sapiens
gacggcaaaccgtgc

SEQ ID NO: 1601203 - DNA, 15 bp, Homo sapiens
agacggcaaaccgtg

SEQ ID NO: 1601204 - DNA, 15 bp, Homo sapiens
aagacggcaaaccgt

SEQ ID NO: 1601205 - DNA, 15 bp, Homo sapiens
aaagacggcaaaccg

SEQ ID NO: 1601206 - DNA, 15 bp, Homo sapiens
gaaagacggcaaacc

SEQ ID NO: 1601207 - DNA, 15 bp, Homo sapiens
tgaaagacggcaaac

SEQ ID NO: 1601208 - DNA, 15 bp, Homo sapiens
gtgaaagacggcaaa

SEQ ID NO: 1601209 - DNA, 15 bp, Homo sapiens
ggtgaaagacggcaa

SEQ ID NO: 1601210 - DNA, 15 bp, Homo sapiens
tggtgaaagacggca

SEQ ID NO: 1601211 - DNA, 15 bp, Homo sapiens
ctggtgaaagacggc

SEQ ID NO: 1601212 - DNA, 15 bp, Homo sapiens
cctggtgaaagacgg

SEQ ID NO: 1601213 - DNA, 15 bp, Homo sapiens
tcctggtgaaagacg

SEQ ID NO: 1601214 - DNA, 15 bp, Homo sapiens
gtcctggtgaaagac

SEQ ID NO: 1601215 - DNA, 15 bp, Homo sapiens
ggtcctggtgaaaga

SEQ ID NO: 1601216 - DNA, 15 bp, Homo sapiens
cggtcctggtgaaag

SEQ ID NO: 1601217 - DNA, 15 bp, Homo sapiens
ccggtcctggtgaaa

SEQ ID NO: 1601218 - DNA, 15 bp, Homo sapiens
gccggtcctggtgaa

SEQ ID NO: 1601219 - DNA, 15 bp, Homo sapiens
tgccggtcctggtga

SEQ ID NO: 1601220 - DNA, 15 bp, Homo sapiens
gtgccggtcctggtg

SEQ ID NO: 1601221 - DNA, 15 bp, Homo sapiens
ggtgccggtcctggt

SEQ ID NO: 1601222 - DNA, 15 bp, Homo sapiens
cggtgccggtcctgg

SEQ ID NO: 1601223 - DNA, 15 bp, Homo sapiens
gcggtgccggtcctg

SEQ ID NO: 1601224 - DNA, 15 bp, Homo sapiens
ggcggtgccggtcct

SEQ ID NO: 1601225 - DNA, 15 bp, Homo sapiens
tggcggtgccggtcc

SEQ ID NO: 1601226 - DNA, 15 bp, Homo sapiens
gtggcggtgccggtc

SEQ ID NO: 1601227 - DNA, 15 bp, Homo sapiens
cgtggcggtgccggt

SEQ ID NO: 1601228 - DNA, 15 bp, Homo sapiens
gcgtggcggtgccgg

SEQ ID NO: 1601229 - DNA, 15 bp, Homo sapiens
cgcgtggcggtgccg

SEQ ID NO: 1601230 - DNA, 15 bp, Homo sapiens
acgcgtggcggtgcc

SEQ ID NO: 1601231 - DNA, 15 bp, Homo sapiens
gacgcgtggcggtgc

SEQ ID NO: 1601232 - DNA, 15 bp, Homo sapiens
cgacgcgtggcggtg

SEQ ID NO: 1601233 - DNA, 15 bp, Homo sapiens
gcgacgcgtggcggt

SEQ ID NO: 1601234 - DNA, 15 bp, Homo sapiens
cgcgacgcgtggcgg

SEQ ID NO: 1601235 - DNA, 15 bp, Homo sapiens
ccgcgacgcgtggcg

SEQ ID NO: 1601236 - DNA, 15 bp, Homo sapiens
gccgcgacgcgtggc

SEQ ID NO: 1601237 - DNA, 15 bp, Homo sapiens
cgccgcgacgcgtgg

SEQ ID NO: 1601238 - DNA, 15 bp, Homo sapiens
tcgccgcgacgcgtg

SEQ ID NO: 1601239 - DNA, 15 bp, Homo sapiens
gtcgccgcgacgcgt

SEQ ID NO: 1601240 - DNA, 15 bp, Homo sapiens
agtcgccgcgacgcg

SEQ ID NO: 1601241 - DNA, 15 bp, Homo sapiens
cagtcgccgcgacgc

SEQ ID NO: 1601242 - DNA, 15 bp, Homo sapiens
gcagtcgccgcgacg

SEQ ID NO: 1601243 - DNA, 15 bp, Homo sapiens
agcagtcgccgcgac

SEQ ID NO: 1601244 - DNA, 15 bp, Homo sapiens
cagcagtcgccgcga

SEQ ID NO: 1601245 - DNA, 15 bp, Homo sapiens
gcagcagtcgccgcg

SEQ ID NO: 1601246 - DNA, 15 bp, Homo sapiens
agcagcagtcgccgc

SEQ ID NO: 1601247 - DNA, 15 bp, Homo sapiens
cagcagcagtcgccg

SEQ ID NO: 1601248 - DNA, 15 bp, Homo sapiens
tcagcagcagtcgcc

SEQ ID NO: 1601249 - DNA, 15 bp, Homo sapiens
ctcagcagcagtcgc

SEQ ID NO: 1601250 - DNA, 15 bp, Homo sapiens
gctcagcagcagtcg

SEQ ID NO: 1601251 - DNA, 15 bp, Homo sapiens
ggctcagcagcagtc

SEQ ID NO: 1601252 - DNA, 15 bp, Homo sapiens
aggctcagcagcagt

SEQ ID NO: 1601253 - DNA, 15 bp, Homo sapiens
caggctcagcagcag

SEQ ID NO: 1601254 - DNA, 15 bp, Homo sapiens
acaggctcagcagca

SEQ ID NO: 1601255 - DNA, 15 bp, Homo sapiens
aacaggctcagcagc

SEQ ID NO: 1601256 - DNA, 15 bp, Homo sapiens
caacaggctcagcag

SEQ ID NO: 1601257 - DNA, 15 bp, Homo sapiens
gcaacaggctcagca

SEQ ID NO: 1601258 - DNA, 15 bp, Homo sapiens
agcaacaggctcagc

SEQ ID NO: 1601259 - DNA, 15 bp, Homo sapiens
cagcaacaggctcag

SEQ ID NO: 1601260 - DNA, 15 bp, Homo sapiens
gcagcaacaggctca

SEQ ID NO: 1601261 - DNA, 15 bp, Homo sapiens
agcagcaacaggctc

SEQ ID NO: 1601262 - DNA, 15 bp, Homo sapiens
cagcagcaacaggct

SEQ ID NO: 1601263 - DNA, 15 bp, Homo sapiens
gcagcagcaacaggc

SEQ ID NO: 1601264 - DNA, 15 bp, Homo sapiens
cgcagcagcaacagg

SEQ ID NO: 1601265 - DNA, 15 bp, Homo sapiens
ccgcagcagcaacag

SEQ ID NO: 1601266 - DNA, 15 bp, Homo sapiens
cccgcagcagcaaca

SEQ ID NO: 1601267 - DNA, 15 bp, Homo sapiens
gcccgcagcagcaac

SEQ ID NO: 1601268 - DNA, 15 bp, Homo sapiens
tgcccgcagcagcaa

SEQ ID NO: 1601269 - DNA, 15 bp, Homo sapiens
gtgcccgcagcagca

SEQ ID NO: 1601270 - DNA, 15 bp, Homo sapiens
ggtgcccgcagcagc

SEQ ID NO: 1601271 - DNA, 15 bp, Homo sapiens
gggtgcccgcagcag

SEQ ID NO: 1601272 - DNA, 15 bp, Homo sapiens
cgggtgcccgcagca

SEQ ID NO: 1601273 - DNA, 15 bp, Homo sapiens
ccgggtgcccgcagc

SEQ ID NO: 1601274 - DNA, 15 bp, Homo sapiens
accgggtgcccgcag

SEQ ID NO: 1601275 - DNA, 15 bp, Homo sapiens
caccgggtgcccgca

SEQ ID NO: 1601276 - DNA, 15 bp, Homo sapiens
gcaccgggtgcccgc

SEQ ID NO: 1601277 - DNA, 15 bp, Homo sapiens
ggcaccgggtgcccg

SEQ ID NO: 1601278 - DNA, 15 bp, Homo sapiens
gggcaccgggtgccc

SEQ ID NO: 1601279 - DNA, 15 bp, Homo sapiens
ggggcaccgggtgcc

SEQ ID NO: 1601280 - DNA, 15 bp, Homo sapiens
gggggcaccgggtgc

SEQ ID NO: 1601281 - DNA, 15 bp, Homo sapiens
cgggggcaccgggtg

SEQ ID NO: 1601282 - DNA, 15 bp, Homo sapiens
gcgggggcaccgggt

SEQ ID NO: 1601283 - DNA, 15 bp, Homo sapiens
ggcgggggcaccggg

SEQ ID NO: 1601284 - DNA, 15 bp, Homo sapiens
cggcgggggcaccgg

SEQ ID NO: 1601285 - DNA, 15 bp, Homo sapiens
gcggcgggggcaccg

SEQ ID NO: 1601286 - DNA, 15 bp, Homo sapiens
ggcggcgggggcacc

SEQ ID NO: 1601287 - DNA, 15 bp, Homo sapiens
gggcggcgggggcac

SEQ ID NO: 1601288 - DNA, 15 bp, Homo sapiens
ggggcggcgggggca

SEQ ID NO: 1601289 - DNA, 15 bp, Homo sapiens
gggggcggcgggggc

SEQ ID NO: 1601290 - DNA, 15 bp, Homo sapiens
cgggggcggcggggg

SEQ ID NO: 1601291 - DNA, 15 bp, Homo sapiens
gcgggggcggcgggg

SEQ ID NO: 1601292 - DNA, 15 bp, Homo sapiens
ggcgggggcggcggg

SEQ ID NO: 1601293 - DNA, 15 bp, Homo sapiens
cggcgggggcggcgg

SEQ ID NO: 1601294 - DNA, 15 bp, Homo sapiens
gcggcgggggcggcg

SEQ ID NO: 1601295 - DNA, 15 bp, Homo sapiens
ggcggcgggggcggc

SEQ ID NO: 1601296 - DNA, 15 bp, Homo sapiens
cggcggcgggggcgg

SEQ ID NO: 1601297 - DNA, 15 bp, Homo sapiens
gcggcggcgggggcg

SEQ ID NO: 1601298 - DNA, 15 bp, Homo sapiens
ggcggcggcgggggc

SEQ ID NO: 1601299 - DNA, 15 bp, Homo sapiens
cggcggcggcggggg

SEQ ID NO: 1601300 - DNA, 15 bp, Homo sapiens
gcggcggcggcgggg

SEQ ID NO: 1601301 - DNA, 15 bp, Homo sapiens
agcggcggcggcggg

SEQ ID NO: 1601302 - DNA, 15 bp, Homo sapiens
acagcggcggcggcg

SEQ ID NO: 1601303 - DNA, 15 bp, Homo sapiens
gacagcggcggcggc

SEQ ID NO: 1601304 - DNA, 15 bp, Homo sapiens
ggacagcggcggcgg

SEQ ID NO: 1601305 - DNA, 15 bp, Homo sapiens
aggacagcggcggcg

SEQ ID NO: 1601306 - DNA, 15 bp, Homo sapiens
caggacagcggcggc

SEQ ID NO: 1601307 - DNA, 15 bp, Homo sapiens
gcaggacagcggcgg

SEQ ID NO: 1601308 - DNA, 15 bp, Homo sapiens
agcaggacagcggcg

SEQ ID NO: 1601309 - DNA, 15 bp, Homo sapiens
cagcaggacagcggc

SEQ ID NO: 1601310 - DNA, 15 bp, Homo sapiens
gcagcaggacagcgg

SEQ ID NO: 1601311 - DNA, 15 bp, Homo sapiens
tgcagcaggacagcg

SEQ ID NO: 1601312 - DNA, 15 bp, Homo sapiens
ctgcagcaggacagc

SEQ ID NO: 1601313 - DNA, 15 bp, Homo sapiens
actgcagcaggacag

SEQ ID NO: 1601314 - DNA, 15 bp, Homo sapiens
aactgcagcaggaca

SEQ ID NO: 1601315 - DNA, 15 bp, Homo sapiens
caactgcagcaggac

SEQ ID NO: 1601316 - DNA, 15 bp, Homo sapiens
gcaactgcagcagga

SEQ ID NO: 1601317 - DNA, 15 bp, Homo sapiens
agcaactgcagcagg

SEQ ID NO: 1601318 - DNA, 15 bp, Homo sapiens
cagcaactgcagcag

SEQ ID NO: 1601319 - DNA, 15 bp, Homo sapiens
gcagcaactgcagca

SEQ ID NO: 1601320 - DNA, 15 bp, Homo sapiens
agcagcaactgcagc

SEQ ID NO: 1601321 - DNA, 15 bp, Homo sapiens
cagcagcaactgcag

SEQ ID NO: 1601322 - DNA, 15 bp, Homo sapiens
gcagcagcaactgca

SEQ ID NO: 1601323 - DNA, 15 bp, Homo sapiens
cgcagcagcaactgc

SEQ ID NO: 1601324 - DNA, 15 bp, Homo sapiens
gcgcagcagcaactg

SEQ ID NO: 1601325 - DNA, 15 bp, Homo sapiens
ggcgcagcagcaact

SEQ ID NO: 1601326 - DNA, 15 bp, Homo sapiens
cggcgcagcagcaac

SEQ ID NO: 1601327 - DNA, 15 bp, Homo sapiens
gcggcgcagcagcaa

SEQ ID NO: 1601328 - DNA, 15 bp, Homo sapiens
ggcggcgcagcagca

SEQ ID NO: 1601329 - DNA, 15 bp, Homo sapiens
aggcggcgcagcagc

SEQ ID NO: 1601330 - DNA, 15 bp, Homo sapiens
aaggcggcgcagcag

SEQ ID NO: 1601331 - DNA, 15 bp, Homo sapiens
caaggcggcgcagca

SEQ ID NO: 1601332 - DNA, 15 bp, Homo sapiens
acaaggcggcgcagc

SEQ ID NO: 1601333 - DNA, 15 bp, Homo sapiens
gacaaggcggcgcag

SEQ ID NO: 1601334 - DNA, 15 bp, Homo sapiens
ggacaaggcggcgca

SEQ ID NO: 1601335 - DNA, 15 bp, Homo sapiens
aggacaaggcggcgc

SEQ ID NO: 1601336 - DNA, 15 bp, Homo sapiens
aaggacaaggcggcg

SEQ ID NO: 1601337 - DNA, 15 bp, Homo sapiens
caaggacaaggcggc

SEQ ID NO: 1601338 - DNA, 15 bp, Homo sapiens
ccaaggacaaggcgg

SEQ ID NO: 1601339 - DNA, 15 bp, Homo sapiens
gccaaggacaaggcg

SEQ ID NO: 1601340 - DNA, 15 bp, Homo sapiens
ggccaaggacaaggc

SEQ ID NO: 1601341 - DNA, 15 bp, Homo sapiens
aggccaaggacaagg

SEQ ID NO: 1601342 - DNA, 15 bp, Homo sapiens
caggccaaggacaag

SEQ ID NO: 1601343 - DNA, 15 bp, Homo sapiens
ccaggccaaggacaa

SEQ ID NO: 1601344 - DNA, 15 bp, Homo sapiens
gccaggccaaggaca

SEQ ID NO: 1601345 - DNA, 15 bp, Homo sapiens
cgccaggccaaggac

SEQ ID NO: 1601346 - DNA, 15 bp, Homo sapiens
gcgccaggccaagga

SEQ ID NO: 1601347 - DNA, 15 bp, Homo sapiens
agcgccaggccaagg

SEQ ID NO: 1601348 - DNA, 15 bp, Homo sapiens
aagcgccaggccaag

SEQ ID NO: 1601349 - DNA, 15 bp, Homo sapiens
gaagcgccaggccaa

SEQ ID NO: 1601350 - DNA, 15 bp, Homo sapiens
tgaagcgccaggcca

SEQ ID NO: 1601351 - DNA, 15 bp, Homo sapiens
atgaagcgccaggcc

SEQ ID NO: 1601352 - DNA, 15 bp, Homo sapiens
aatgaagcgccaggc

SEQ ID NO: 1601353 - DNA, 15 bp, Homo sapiens
aaatgaagcgccagg

SEQ ID NO: 1601354 - DNA, 15 bp, Homo sapiens
aaaatgaagcgccag

SEQ ID NO: 1601355 - DNA, 15 bp, Homo sapiens
caaaatgaagcgcca

SEQ ID NO: 1601356 - DNA, 15 bp, Homo sapiens
acaaaatgaagcgcc

SEQ ID NO: 1601357 - DNA, 15 bp, Homo sapiens
tacaaaatgaagcgc

SEQ ID NO: 1601358 - DNA, 15 bp, Homo sapiens
ctacaaaatgaagcg

SEQ ID NO: 1601359 - DNA, 15 bp, Homo sapiens
gctacaaaatgaagc

SEQ ID NO: 1601360 - DNA, 15 bp, Homo sapiens
cgctacaaaatgaag

SEQ ID NO: 1601361 - DNA, 15 bp, Homo sapiens
ccgctacaaaatgaa

SEQ ID NO: 1601362 - DNA, 15 bp, Homo sapiens
accgctacaaaatga

SEQ ID NO: 1601363 - DNA, 15 bp, Homo sapiens
caccgctacaaaatg

SEQ ID NO: 1601364 - DNA, 15 bp, Homo sapiens
ccaccgctacaaaat

SEQ ID NO: 1601365 - DNA, 15 bp, Homo sapiens
accaccgctacaaaa

SEQ ID NO: 1601366 - DNA, 15 bp, Homo sapiens
aaccaccgctacaaa

SEQ ID NO: 1601367 - DNA, 15 bp, Homo sapiens
gaaccaccgctacaa

SEQ ID NO: 1601368 - DNA, 15 bp, Homo sapiens
agaaccaccgctaca

SEQ ID NO: 1601369 - DNA, 15 bp, Homo sapiens
cagaaccaccgctac

SEQ ID NO: 1601370 - DNA, 15 bp, Homo sapiens
ccagaaccaccgcta

SEQ ID NO: 1601371 - DNA, 15 bp, Homo sapiens
tccagaaccaccgct

SEQ ID NO: 1601372 - DNA, 15 bp, Homo sapiens
ttccagaaccaccgc

SEQ ID NO: 1601373 - DNA, 15 bp, Homo sapiens
gttccagaaccaccg

SEQ ID NO: 1601374 - DNA, 15 bp, Homo sapiens
ggttccagaaccacc

SEQ ID NO: 1601375 - DNA, 15 bp, Homo sapiens
tggttccagaaccac

SEQ ID NO: 1601376 - DNA, 15 bp, Homo sapiens
ctggttccagaacca

SEQ ID NO: 1601377 - DNA, 15 bp, Homo sapiens
gatctggttccagaa

SEQ ID NO: 1601378 - DNA, 15 bp, Homo sapiens
agatctggttccaga

SEQ ID NO: 1601379 - DNA, 15 bp, Homo sapiens
aagatctggttccag

SEQ ID NO: 1601380 - DNA, 15 bp, Homo sapiens
caagatctggttcca

SEQ ID NO: 1601381 - DNA, 15 bp, Homo sapiens
tcaagatctggttcc

SEQ ID NO: 1601382 - DNA, 15 bp, Homo sapiens
gtcaagatctggttc

SEQ ID NO: 1601383 - DNA, 15 bp, Homo sapiens
ggtcaagatctggtt

SEQ ID NO: 1601384 - DNA, 15 bp, Homo sapiens
aggtcaagatctggt

SEQ ID NO: 1601385 - DNA, 15 bp, Homo sapiens
caggtcaagatctgg

SEQ ID NO: 1601386 - DNA, 15 bp, Homo sapiens
gcaggtcaagatctg

SEQ ID NO: 1601387 - DNA, 15 bp, Homo sapiens
cgcaggtcaagatct

SEQ ID NO: 1601388 - DNA, 15 bp, Homo sapiens
acgcaggtcaagatc

SEQ ID NO: 1601389 - DNA, 15 bp, Homo sapiens
cacgcaggtcaagat

SEQ ID NO: 1601390 - DNA, 15 bp, Homo sapiens
ccacgcaggtcaaga

SEQ ID NO: 1601391 - DNA, 15 bp, Homo sapiens
cccacgcaggtcaag

SEQ ID NO: 1601392 - DNA, 15 bp, Homo sapiens
gcccacgcaggtcaa

SEQ ID NO: 1601393 - DNA, 15 bp, Homo sapiens
cgcccacgcaggtca

SEQ ID NO: 1601394 - DNA, 15 bp, Homo sapiens
acgcccacgcaggtc

SEQ ID NO: 1601395 - DNA, 15 bp, Homo sapiens
gacgcccacgcaggt

SEQ ID NO: 1601396 - DNA, 15 bp, Homo sapiens
tgacgcccacgcagg

SEQ ID NO: 1601397 - DNA, 15 bp, Homo sapiens
ctgacgcccacgcag

SEQ ID NO: 1601398 - DNA, 15 bp, Homo sapiens
cctgacgcccacgca

SEQ ID NO: 1601399 - DNA, 15 bp, Homo sapiens
acctgacgcccacgc

SEQ ID NO: 1601400 - DNA, 15 bp, Homo sapiens
cacctgacgcccacg

SEQ ID NO: 1601401 - DNA, 15 bp, Homo sapiens
ccacctgacgcccac

SEQ ID NO: 1601402 - DNA, 15 bp, Homo sapiens
tccacctgacgccca

SEQ ID NO: 1601403 - DNA, 15 bp, Homo sapiens
atccacctgacgccc

SEQ ID NO: 1601404 - DNA, 15 bp, Homo sapiens
gatccacctgacgcc

SEQ ID NO: 1601405 - DNA, 15 bp, Homo sapiens
tgatccacctgacgc

SEQ ID NO: 1601406 - DNA, 15 bp, Homo sapiens
atgatccacctgacg

SEQ ID NO: 1601407 - DNA, 15 bp, Homo sapiens
catgatccacctgac

SEQ ID NO: 1601408 - DNA, 15 bp, Homo sapiens
gcatgatccacctga

SEQ ID NO: 1601409 - DNA, 15 bp, Homo sapiens
agcatgatccacctg

SEQ ID NO: 1601410 - DNA, 15 bp, Homo sapiens
cagcatgatccacct

SEQ ID NO: 1601411 - DNA, 15 bp, Homo sapiens
ccagcatgatccacc

SEQ ID NO: 1601412 - DNA, 15 bp, Homo sapiens
gccagcatgatccac

SEQ ID NO: 1601413 - DNA, 15 bp, Homo sapiens
ggccagcatgatcca

SEQ ID NO: 1601414 - DNA, 15 bp, Homo sapiens
tggccagcatgatcc

SEQ ID NO: 1601415 - DNA, 15 bp, Homo sapiens
ctggccagcatgatc

SEQ ID NO: 1601416 - DNA, 15 bp, Homo sapiens
cctggccagcatgat

SEQ ID NO: 1601417 - DNA, 15 bp, Homo sapiens
acctggccagcatga

SEQ ID NO: 1601418 - DNA, 15 bp, Homo sapiens
cacctggccagcatg

SEQ ID NO: 1601419 - DNA, 15 bp, Homo sapiens
gcacctggccagcat

SEQ ID NO: 1601420 - DNA, 15 bp, Homo sapiens
agcacctggccagca

SEQ ID NO: 1601421 - DNA, 15 bp, Homo sapiens
gagcacctggccagc

SEQ ID NO: 1601422 - DNA, 15 bp, Homo sapiens
cgagcacctggccag

SEQ ID NO: 1601423 - DNA, 15 bp, Homo sapiens
gcgagcacctggcca

SEQ ID NO: 1601424 - DNA, 15 bp, Homo sapiens
cgcgagcacctggcc

SEQ ID NO: 1601425 - DNA, 15 bp, Homo sapiens
gcgcgagcacctggc

SEQ ID NO: 1601426 - DNA, 15 bp, Homo sapiens
agcgcgagcacctgg

SEQ ID NO: 1601427 - DNA, 15 bp, Homo sapiens
gagcgcgagcacctg

SEQ ID NO: 1601428 - DNA, 15 bp, Homo sapiens
ggagcgcgagcacct

SEQ ID NO: 1601429 - DNA, 15 bp, Homo sapiens
cggagcgcgagcacc

SEQ ID NO: 1601430 - DNA, 15 bp, Homo sapiens
ccggagcgcgagcac

SEQ ID NO: 1601431 - DNA, 15 bp, Homo sapiens
gccggagcgcgagca

SEQ ID NO: 1601432 - DNA, 15 bp, Homo sapiens
cgccggagcgcgagc

SEQ ID NO: 1601433 - DNA, 15 bp, Homo sapiens
gcgccggagcgcgag

SEQ ID NO: 1601434 - DNA, 15 bp, Homo sapiens
ggcgccggagcgcga

SEQ ID NO: 1601435 - DNA, 15 bp, Homo sapiens
cggcgccggagcgcg

SEQ ID NO: 1601436 - DNA, 15 bp, Homo sapiens
tcggcgccggagcgc

SEQ ID NO: 1601437 - DNA, 15 bp, Homo sapiens
gtcggcgccggagcg

SEQ ID NO: 1601438 - DNA, 15 bp, Homo sapiens
tgtcggcgccggagc

SEQ ID NO: 1601439 - DNA, 15 bp, Homo sapiens
ctgtcggcgccggag

SEQ ID NO: 1601440 - DNA, 15 bp, Homo sapiens
cctgtcggcgccgga

SEQ ID NO: 1601441 - DNA, 15 bp, Homo sapiens
acctgtcggcgccgg

SEQ ID NO: 1601442 - DNA, 15 bp, Homo sapiens
tacctgtcggcgccg

SEQ ID NO: 1601443 - DNA, 15 bp, Homo sapiens
gtacctgtcggcgcc

SEQ ID NO: 1601444 - DNA, 15 bp, Homo sapiens
agtacctgtcggcgc

SEQ ID NO: 1601445 - DNA, 15 bp, Homo sapiens
aagtacctgtcggcg

SEQ ID NO: 1601446 - DNA, 15 bp, Homo sapiens
gaagtacctgtcggc

SEQ ID NO: 1601447 - DNA, 15 bp, Homo sapiens
agaagtacctgtcgg

SEQ ID NO: 1601448 - DNA, 15 bp, Homo sapiens
cagaagtacctgtcg

SEQ ID NO: 1601449 - DNA, 15 bp, Homo sapiens
acagaagtacctgtc

SEQ ID NO: 1601450 - DNA, 15 bp, Homo sapiens
aacagaagtacctgt

SEQ ID NO: 1601451 - DNA, 15 bp, Homo sapiens
caacagaagtacctg

SEQ ID NO: 1601452 - DNA, 15 bp, Homo sapiens
gcaacagaagtacct

SEQ ID NO: 1601453 - DNA, 15 bp, Homo sapiens
agcaacagaagtacc

SEQ ID NO: 1601454 - DNA, 15 bp, Homo sapiens
aagcaacagaagtac

SEQ ID NO: 1601455 - DNA, 15 bp, Homo sapiens
caagcaacagaagta

SEQ ID NO: 1601456 - DNA, 15 bp, Homo sapiens
tcaagcaacagaagt

SEQ ID NO: 1601457 - DNA, 15 bp, Homo sapiens
ttcaagcaacagaag

SEQ ID NO: 1601458 - DNA, 15 bp, Homo sapiens
cttcaagcaacagaa

SEQ ID NO: 1601459 - DNA, 15 bp, Homo sapiens
gcttcaagcaacaga

SEQ ID NO: 1601460 - DNA, 15 bp, Homo sapiens
cgcttcaagcaacag

SEQ ID NO: 1601461 - DNA, 15 bp, Homo sapiens
acgcttcaagcaaca

SEQ ID NO: 1601462 - DNA, 15 bp, Homo sapiens
gacgcttcaagcaac

SEQ ID NO: 1601463 - DNA, 15 bp, Homo sapiens
cgacgcttcaagcaa

SEQ ID NO: 1601464 - DNA, 15 bp, Homo sapiens
gcgacgcttcaagca

SEQ ID NO: 1601465 - DNA, 15 bp, Homo sapiens
agcgacgcttcaagc

SEQ ID NO: 1601466 - DNA, 15 bp, Homo sapiens
gagcgacgcttcaag

SEQ ID NO: 1601467 - DNA, 15 bp, Homo sapiens
ggagcgacgcttcaa

SEQ ID NO: 1601468 - DNA, 15 bp, Homo sapiens
tggagcgacgcttca

SEQ ID NO: 1601469 - DNA, 15 bp, Homo sapiens
ctggagcgacgcttc

SEQ ID NO: 1601470 - DNA, 15 bp, Homo sapiens
gctggagcgacgctt

SEQ ID NO: 1601471 - DNA, 15 bp, Homo sapiens
agctggagcgacgct

SEQ ID NO: 1601472 - DNA, 15 bp, Homo sapiens
gagctggagcgacgc

SEQ ID NO: 1601473 - DNA, 15 bp, Homo sapiens
cgagctggagcgacg

SEQ ID NO: 1601474 - DNA, 15 bp, Homo sapiens
acgagctggagcgac

SEQ ID NO: 1601475 - DNA, 15 bp, Homo sapiens
tacgagctggagcga

SEQ ID NO: 1601476 - DNA, 15 bp, Homo sapiens
gtacgagctggagcg

SEQ ID NO: 1601477 - DNA, 15 bp, Homo sapiens
tgtacgagctggagc

SEQ ID NO: 1601478 - DNA, 15 bp, Homo sapiens
gtgtacgagctggag

SEQ ID NO: 1601479 - DNA, 15 bp, Homo sapiens
ggtgtacgagctgga

SEQ ID NO: 1601480 - DNA, 15 bp, Homo sapiens
aggtgtacgagctgg

SEQ ID NO: 1601481 - DNA, 15 bp, Homo sapiens
caggtgtacgagctg

SEQ ID NO: 1601482 - DNA, 15 bp, Homo sapiens
gcaggtgtacgagct

SEQ ID NO: 1601483 - DNA, 15 bp, Homo sapiens
cgcaggtgtacgagc

SEQ ID NO: 1601484 - DNA, 15 bp, Homo sapiens
gcgcaggtgtacgag

SEQ ID NO: 1601485 - DNA, 15 bp, Homo sapiens
ggcgcaggtgtacga

SEQ ID NO: 1601486 - DNA, 15 bp, Homo sapiens
aggcgcaggtgtacg

SEQ ID NO: 1601487 - DNA, 15 bp, Homo sapiens
caggcgcaggtgtac

SEQ ID NO: 1601488 - DNA, 15 bp, Homo sapiens
gcaggcgcaggtgta

SEQ ID NO: 1601489 - DNA, 15 bp, Homo sapiens
cgcaggcgcaggtgt

SEQ ID NO: 1601490 - DNA, 15 bp, Homo sapiens
tcgcaggcgcaggtg

SEQ ID NO: 1601491 - DNA, 15 bp, Homo sapiens
ctcgcaggcgcaggt

SEQ ID NO: 1601492 - DNA, 15 bp, Homo sapiens
tctcgcaggcgcagg

SEQ ID NO: 1601493 - DNA, 15 bp, Homo sapiens
ttctcgcaggcgcag

SEQ ID NO: 1601494 - DNA, 15 bp, Homo sapiens
cttctcgcaggcgca

SEQ ID NO: 1601495 - DNA, 15 bp, Homo sapiens
tcttctcgcaggcgc

SEQ ID NO: 1601496 - DNA, 15 bp, Homo sapiens
ctcttctcgcaggcg

SEQ ID NO: 1601497 - DNA, 15 bp, Homo sapiens
gctcttctcgcaggc

SEQ ID NO: 1601498 - DNA, 15 bp, Homo sapiens
tgctcttctcgcagg

SEQ ID NO: 1601499 - DNA, 15 bp, Homo sapiens
gtgctcttctcgcag

SEQ ID NO: 1601500 - DNA, 15 bp, Homo sapiens
ggtgctcttctcgca

SEQ ID NO: 1601501 - DNA, 15 bp, Homo sapiens
gggtgctcttctcgc

SEQ ID NO: 1601502 - DNA, 15 bp, Homo sapiens
cgggtgctcttctcg

SEQ ID NO: 1601503 - DNA, 15 bp, Homo sapiens
ccgggtgctcttctc

SEQ ID NO: 1601504 - DNA, 15 bp, Homo sapiens
gccgggtgctcttct

SEQ ID NO: 1601505 - DNA, 15 bp, Homo sapiens
cgccgggtgctcttc

SEQ ID NO: 1601506 - DNA, 15 bp, Homo sapiens
gcgccgggtgctctt

SEQ ID NO: 1601507 - DNA, 15 bp, Homo sapiens
agcgccgggtgctct

SEQ ID NO: 1601508 - DNA, 15 bp, Homo sapiens
aagcgccgggtgctc

SEQ ID NO: 1601509 - DNA, 15 bp, Homo sapiens
gaagcgccgggtgct

SEQ ID NO: 1601510 - DNA, 15 bp, Homo sapiens
ggaagcgccgggtgc

SEQ ID NO: 1601511 - DNA, 15 bp, Homo sapiens
aggaagcgccgggtg

SEQ ID NO: 1601512 - DNA, 15 bp, Homo sapiens
caggaagcgccgggt

SEQ ID NO: 1601513 - DNA, 15 bp, Homo sapiens
gcaggaagcgccggg

SEQ ID NO: 1601514 - DNA, 15 bp, Homo sapiens
cgcaggaagcgccgg

SEQ ID NO: 1601515 - DNA, 15 bp, Homo sapiens
gcgcaggaagcgccg

SEQ ID NO: 1601516 - DNA, 15 bp, Homo sapiens
cgcgcaggaagcgcc

SEQ ID NO: 1601517 - DNA, 15 bp, Homo sapiens
ccgcgcaggaagcgc

SEQ ID NO: 1601518 - DNA, 15 bp, Homo sapiens
gccgcgcaggaagcg

SEQ ID NO: 1601519 - DNA, 15 bp, Homo sapiens
cgccgcgcaggaagc

SEQ ID NO: 1601520 - DNA, 15 bp, Homo sapiens
gcgccgcgcaggaag

SEQ ID NO: 1601521 - DNA, 15 bp, Homo sapiens
cgcgccgcgcaggaa

SEQ ID NO: 1601522 - DNA, 15 bp, Homo sapiens
gcgcgccgcgcagga

SEQ ID NO: 1601523 - DNA, 15 bp, Homo sapiens
agcgcgccgcgcagg

SEQ ID NO: 1601524 - DNA, 15 bp, Homo sapiens
aagcgcgccgcgcag

SEQ ID NO: 1601525 - DNA, 15 bp, Homo sapiens
caagcgcgccgcgca

SEQ ID NO: 1601526 - DNA, 15 bp, Homo sapiens
ccaagcgcgccgcgc

SEQ ID NO: 1601527 - DNA, 15 bp, Homo sapiens
gccaagcgcgccgcg

SEQ ID NO: 1601528 - DNA, 15 bp, Homo sapiens
tgccaagcgcgccgc

SEQ ID NO: 1601529 - DNA, 15 bp, Homo sapiens
ctgccaagcgcgccg

SEQ ID NO: 1601530 - DNA, 15 bp, Homo sapiens
gctgccaagcgcgcc

SEQ ID NO: 1601531 - DNA, 15 bp, Homo sapiens
cgctgccaagcgcgc

SEQ ID NO: 1601532 - DNA, 15 bp, Homo sapiens
ccgctgccaagcgcg

SEQ ID NO: 1601533 - DNA, 15 bp, Homo sapiens
cccgctgccaagcgc

SEQ ID NO: 1601534 - DNA, 15 bp, Homo sapiens
ccccgctgccaagcg

SEQ ID NO: 1601535 - DNA, 15 bp, Homo sapiens
gccccgctgccaagc

SEQ ID NO: 1601536 - DNA, 15 bp, Homo sapiens
ggccccgctgccaag

SEQ ID NO: 1601537 - DNA, 15 bp, Homo sapiens
tggccccgctgccaa

SEQ ID NO: 1601538 - DNA, 15 bp, Homo sapiens
atggccccgctgcca

SEQ ID NO: 1601539 - DNA, 15 bp, Homo sapiens
catggccccgctgcc

SEQ ID NO: 1601540 - DNA, 15 bp, Homo sapiens
acatggccccgctgc

SEQ ID NO: 1601541 - DNA, 15 bp, Homo sapiens
aacatggccccgctg

SEQ ID NO: 1601542 - DNA, 15 bp, Homo sapiens
gaacatggccccgct

SEQ ID NO: 1601543 - DNA, 15 bp, Homo sapiens
agaacatggccccgc

SEQ ID NO: 1601544 - DNA, 15 bp, Homo sapiens
aagaacatggccccg

SEQ ID NO: 1601545 - DNA, 15 bp, Homo sapiens
caagaacatggcccc

SEQ ID NO: 1601546 - DNA, 15 bp, Homo sapiens
gcaagaacatggccc

SEQ ID NO: 1601547 - DNA, 15 bp, Homo sapiens
agcaagaacatggcc

SEQ ID NO: 1601548 - DNA, 15 bp, Homo sapiens
gagcaagaacatggc

SEQ ID NO: 1601549 - DNA, 15 bp, Homo sapiens
tgagcaagaacatgg

SEQ ID NO: 1601550 - DNA, 15 bp, Homo sapiens
gtgagcaagaacatg

SEQ ID NO: 1601551 - DNA, 15 bp, Homo sapiens
cgtgagcaagaacat

SEQ ID NO: 1601552 - DNA, 15 bp, Homo sapiens
acgtgagcaagaaca

SEQ ID NO: 1601553 - DNA, 15 bp, Homo sapiens
gacgtgagcaagaac

SEQ ID NO: 1601554 - DNA, 15 bp, Homo sapiens
ggacgtgagcaagaa

SEQ ID NO: 1601555 - DNA, 15 bp, Homo sapiens
gggacgtgagcaaga

SEQ ID NO: 1601556 - DNA, 15 bp, Homo sapiens
ggggacgtgagcaag

SEQ ID NO: 1601557 - DNA, 15 bp, Homo sapiens
gggggacgtgagcaa

SEQ ID NO: 1601558 - DNA, 15 bp, Homo sapiens
tgggggacgtgagca

SEQ ID NO: 1601559 - DNA, 15 bp, Homo sapiens
ctgggggacgtgagc

SEQ ID NO: 1601560 - DNA, 15 bp, Homo sapiens
gctgggggacgtgag

SEQ ID NO: 1601561 - DNA, 15 bp, Homo sapiens
cgctgggggacgtga

SEQ ID NO: 1601562 - DNA, 15 bp, Homo sapiens
tcgctgggggacgtg

SEQ ID NO: 1601563 - DNA, 15 bp, Homo sapiens
ctcgctgggggacgt

SEQ ID NO: 1601564 - DNA, 15 bp, Homo sapiens
gctcgctgggggacg

SEQ ID NO: 1601565 - DNA, 15 bp, Homo sapiens
ggctcgctgggggac

SEQ ID NO: 1601566 - DNA, 15 bp, Homo sapiens
gggctcgctggggga

SEQ ID NO: 1601567 - DNA, 15 bp, Homo sapiens
tgggctcgctggggg

SEQ ID NO: 1601568 - DNA, 15 bp, Homo sapiens
ctgggctcgctgggg

SEQ ID NO: 1601569 - DNA, 15 bp, Homo sapiens
cctgggctcgctggg

SEQ ID NO: 1601570 - DNA, 15 bp, Homo sapiens
gcctgggctcgctgg

SEQ ID NO: 1601571 - DNA, 15 bp, Homo sapiens
ggcctgggctcgctg

SEQ ID NO: 1601572 - DNA, 15 bp, Homo sapiens
cggcctgggctcgct

SEQ ID NO: 1601573 - DNA, 15 bp, Homo sapiens
gcggcctgggctcgc

SEQ ID NO: 1601574 - DNA, 15 bp, Homo sapiens
ggcggcctgggctcg

SEQ ID NO: 1601575 - DNA, 15 bp, Homo sapiens
gggcggcctgggctc

SEQ ID NO: 1601576 - DNA, 15 bp, Homo sapiens
tgggcggcctgggct

SEQ ID NO: 1601577 - DNA, 15 bp, Homo sapiens
atgggcggcctgggc

SEQ ID NO: 1601578 - DNA, 15 bp, Homo sapiens
catgggcggcctggg

SEQ ID NO: 1601579 - DNA, 15 bp, Homo sapiens
gcatgggcggcctgg

SEQ ID NO: 1601580 - DNA, 15 bp, Homo sapiens
ggcatgggcggcctg

SEQ ID NO: 1601581 - DNA, 15 bp, Homo sapiens
cggcatgggcggcct

SEQ ID NO: 1601582 - DNA, 15 bp, Homo sapiens
gcggcatgggcggcc

SEQ ID NO: 1601583 - DNA, 15 bp, Homo sapiens
agcggcatgggcggc

SEQ ID NO: 1601584 - DNA, 15 bp, Homo sapiens
gagcggcatgggcgg

SEQ ID NO: 1601585 - DNA, 15 bp, Homo sapiens
tgagcggcatgggcg

SEQ ID NO: 1601586 - DNA, 15 bp, Homo sapiens
atgagcggcatgggc

SEQ ID NO: 1601587 - DNA, 15 bp, Homo sapiens
catgagcggcatggg

SEQ ID NO: 1601588 - DNA, 15 bp, Homo sapiens
acatgagcggcatgg

SEQ ID NO: 1601589 - DNA, 15 bp, Homo sapiens
aacatgagcggcatg

SEQ ID NO: 1601590 - DNA, 15 bp, Homo sapiens
gaacatgagcggcat

SEQ ID NO: 1601591 - DNA, 15 bp, Homo sapiens
tgaacatgagcggca

SEQ ID NO: 1601592 - DNA, 15 bp, Homo sapiens
atgaacatgagcggc

SEQ ID NO: 1601593 - DNA, 15 bp, Homo sapiens
catgaacatgagcgg

SEQ ID NO: 1601594 - DNA, 15 bp, Homo sapiens
gcatgaacatgagcg

SEQ ID NO: 1601595 - DNA, 15 bp, Homo sapiens
ggcatgaacatgagc

SEQ ID NO: 1601596 - DNA, 15 bp, Homo sapiens
cggcatgaacatgag

SEQ ID NO: 1601597 - DNA, 15 bp, Homo sapiens
gcggcatgaacatga

SEQ ID NO: 1601598 - DNA, 15 bp, Homo sapiens
agcggcatgaacatg

SEQ ID NO: 1601599 - DNA, 15 bp, Homo sapiens
gagcggcatgaacat

SEQ ID NO: 1601600 - DNA, 15 bp, Homo sapiens
cgagcggcatgaaca

SEQ ID NO: 1601601 - DNA, 15 bp, Homo sapiens
gcgagcggcatgaac

SEQ ID NO: 1601602 - DNA, 15 bp, Homo sapiens
ggcgagcggcatgaa

SEQ ID NO: 1601603 - DNA, 15 bp, Homo sapiens
cggcgagcggcatga

SEQ ID NO: 1601604 - DNA, 15 bp, Homo sapiens
ccggcgagcggcatg

SEQ ID NO: 1601605 - DNA, 15 bp, Homo sapiens
cccggcgagcggcat

SEQ ID NO: 1601606 - DNA, 15 bp, Homo sapiens
gcccggcgagcggca

SEQ ID NO: 1601607 - DNA, 15 bp, Homo sapiens
ggcccggcgagcggc

SEQ ID NO: 1601608 - DNA, 15 bp, Homo sapiens
gggcccggcgagcgg

SEQ ID NO: 1601609 - DNA, 15 bp, Homo sapiens
tgggcccggcgagcg

SEQ ID NO: 1601610 - DNA, 15 bp, Homo sapiens
atgggcccggcgagc

SEQ ID NO: 1601611 - DNA, 15 bp, Homo sapiens
catgggcccggcgag

SEQ ID NO: 1601612 - DNA, 15 bp, Homo sapiens
tcatgggcccggcga

SEQ ID NO: 1601613 - DNA, 15 bp, Homo sapiens
ttcatgggcccggcg

SEQ ID NO: 1601614 - DNA, 15 bp, Homo sapiens
cttcatgggcccggc

SEQ ID NO: 1601615 - DNA, 15 bp, Homo sapiens
gcttcatgggcccgg

SEQ ID NO: 1601616 - DNA, 15 bp, Homo sapiens
cgcttcatgggcccg

SEQ ID NO: 1601617 - DNA, 15 bp, Homo sapiens
ccgcttcatgggccc

SEQ ID NO: 1601618 - DNA, 15 bp, Homo sapiens
cccgcttcatgggcc

SEQ ID NO: 1601619 - DNA, 15 bp, Homo sapiens
tcccgcttcatgggc

SEQ ID NO: 1601620 - DNA, 15 bp, Homo sapiens
ctcccgcttcatggg

SEQ ID NO: 1601621 - DNA, 15 bp, Homo sapiens
tctcccgcttcatgg

SEQ ID NO: 1601622 - DNA, 15 bp, Homo sapiens
gtctcccgcttcatg

SEQ ID NO: 1601623 - DNA, 15 bp, Homo sapiens
agtctcccgcttcat

SEQ ID NO: 1601624 - DNA, 15 bp, Homo sapiens
cagtctcccgcttca

SEQ ID NO: 1601625 - DNA, 15 bp, Homo sapiens
acagtctcccgcttc

SEQ ID NO: 1601626 - DNA, 15 bp, Homo sapiens
tacagtctcccgctt

SEQ ID NO: 1601627 - DNA, 15 bp, Homo sapiens
ttacagtctcccgct

SEQ ID NO: 1601628 - DNA, 15 bp, Homo sapiens
cttacagtctcccgc

SEQ ID NO: 1601629 - DNA, 15 bp, Homo sapiens
gcttacagtctcccg

SEQ ID NO: 1601630 - DNA, 15 bp, Homo sapiens
cgcttacagtctccc

SEQ ID NO: 1601631 - DNA, 15 bp, Homo sapiens
tcgcttacagtctcc

SEQ ID NO: 1601632 - DNA, 15 bp, Homo sapiens
gtcgcttacagtctc

SEQ ID NO: 1601633 - DNA, 15 bp, Homo sapiens
tgtcgcttacagtct

SEQ ID NO: 1601634 - DNA, 15 bp, Homo sapiens
ttgtcgcttacagtc

SEQ ID NO: 1601635 - DNA, 15 bp, Homo sapiens
tttgtcgcttacagt

SEQ ID NO: 1601636 - DNA, 15 bp, Homo sapiens
gtttgtcgcttacag

SEQ ID NO: 1601637 - DNA, 15 bp, Homo sapiens
cgtttgtcgcttaca

SEQ ID NO: 1601638 - DNA, 15 bp, Homo sapiens
gcgtttgtcgcttac

SEQ ID NO: 1601639 - DNA, 15 bp, Homo sapiens
tgcgtttgtcgctta

SEQ ID NO: 1601640 - DNA, 15 bp, Homo sapiens
gtgcgtttgtcgctt

SEQ ID NO: 1601641 - DNA, 15 bp, Homo sapiens
tgtgcgtttgtcgct

SEQ ID NO: 1601642 - DNA, 15 bp, Homo sapiens
ctgtgcgtttgtcgc

SEQ ID NO: 1601643 - DNA, 15 bp, Homo sapiens
gctgtgcgtttgtcg

SEQ ID NO: 1601644 - DNA, 15 bp, Homo sapiens
cgctgtgcgtttgtc

SEQ ID NO: 1601645 - DNA, 15 bp, Homo sapiens
acgctgtgcgtttgt

SEQ ID NO: 1601646 - DNA, 15 bp, Homo sapiens
gacgctgtgcgtttg

SEQ ID NO: 1601647 - DNA, 15 bp, Homo sapiens
cgacgctgtgcgttt

SEQ ID NO: 1601648 - DNA, 15 bp, Homo sapiens
ccgacgctgtgcgtt

SEQ ID NO: 1601649 - DNA, 15 bp, Homo sapiens
gccgacgctgtgcgt

SEQ ID NO: 1601650 - DNA, 15 bp, Homo sapiens
ggccgacgctgtgcg

SEQ ID NO: 1601651 - DNA, 15 bp, Homo sapiens
cggccgacgctgtgc

SEQ ID NO: 1601652 - DNA, 15 bp, Homo sapiens
ccggccgacgctgtg

SEQ ID NO: 1601653 - DNA, 15 bp, Homo sapiens
cccggccgacgctgt

SEQ ID NO: 1601654 - DNA, 15 bp, Homo sapiens
ccccggccgacgctg

SEQ ID NO: 1601655 - DNA, 15 bp, Homo sapiens
gccccggccgacgct

SEQ ID NO: 1601656 - DNA, 15 bp, Homo sapiens
ggccccggccgacgc

SEQ ID NO: 1601657 - DNA, 15 bp, Homo sapiens
tggccccggccgacg

SEQ ID NO: 1601658 - DNA, 15 bp, Homo sapiens
ctggccccggccgac

SEQ ID NO: 1601659 - DNA, 15 bp, Homo sapiens
cctggccccggccga

SEQ ID NO: 1601660 - DNA, 15 bp, Homo sapiens
gcctggccccggccg

SEQ ID NO: 1601661 - DNA, 15 bp, Homo sapiens
ggcctggccccggcc

SEQ ID NO: 1601662 - DNA, 15 bp, Homo sapiens
cggcctggccccggc

SEQ ID NO: 1601663 - DNA, 15 bp, Homo sapiens
tcggcctggccccgg

SEQ ID NO: 1601664 - DNA, 15 bp, Homo sapiens
ctcggcctggccccg

SEQ ID NO: 1601665 - DNA, 15 bp, Homo sapiens
gctcggcctggcccc

SEQ ID NO: 1601666 - DNA, 15 bp, Homo sapiens
ggctcggcctggccc

SEQ ID NO: 1601667 - DNA, 15 bp, Homo sapiens
tggctcggcctggcc

SEQ ID NO: 1601668 - DNA, 15 bp, Homo sapiens
ctggctcggcctggc

SEQ ID NO: 1601669 - DNA, 15 bp, Homo sapiens
cctggctcggcctgg

SEQ ID NO: 1601670 - DNA, 15 bp, Homo sapiens
gcctggctcggcctg

SEQ ID NO: 1601671 - DNA, 15 bp, Homo sapiens
ggcctggctcggcct

SEQ ID NO: 1601672 - DNA, 15 bp, Homo sapiens
tggcctggctcggcc

SEQ ID NO: 1601673 - DNA, 15 bp, Homo sapiens
gtggcctggctcggc

SEQ ID NO: 1601674 - DNA, 15 bp, Homo sapiens
ggtggcctggctcgg

SEQ ID NO: 1601675 - DNA, 15 bp, Homo sapiens
gggtggcctggctcg

SEQ ID NO: 1601676 - DNA, 15 bp, Homo sapiens
ggggtggcctggctc

SEQ ID NO: 1601677 - DNA, 15 bp, Homo sapiens
aggggtggcctggct

SEQ ID NO: 1601678 - DNA, 15 bp, Homo sapiens
caggggtggcctggc

SEQ ID NO: 1601679 - DNA, 15 bp, Homo sapiens
acaggggtggcctgg

SEQ ID NO: 1601680 - DNA, 15 bp, Homo sapiens
aacaggggtggcctg

SEQ ID NO: 1601681 - DNA, 15 bp, Homo sapiens
aaacaggggtggcct

SEQ ID NO: 1601682 - DNA, 15 bp, Homo sapiens
aaaacaggggtggcc

SEQ ID NO: 1601683 - DNA, 15 bp, Homo sapiens
gaaaacaggggtggc

SEQ ID NO: 1601684 - DNA, 15 bp, Homo sapiens
ggaaaacaggggtgg

SEQ ID NO: 1601685 - DNA, 15 bp, Homo sapiens
cggaaaacaggggtg

SEQ ID NO: 1601686 - DNA, 15 bp, Homo sapiens
gcggaaaacaggggt

SEQ ID NO: 1601687 - DNA, 15 bp, Homo sapiens
cgcggaaaacagggg

SEQ ID NO: 1601688 - DNA, 15 bp, Homo sapiens
gcgcggaaaacaggg

SEQ ID NO: 1601689 - DNA, 15 bp, Homo sapiens
ggcgcggaaaacagg

SEQ ID NO: 1601690 - DNA, 15 bp, Homo sapiens
tggcgcggaaaacag

SEQ ID NO: 1601691 - DNA, 15 bp, Homo sapiens
atggcgcggaaaaca

SEQ ID NO: 1601692 - DNA, 15 bp, Homo sapiens
aatggcgcggaaaac

SEQ ID NO: 1601693 - DNA, 15 bp, Homo sapiens
caatggcgcggaaaa

SEQ ID NO: 1601694 - DNA, 15 bp, Homo sapiens
ccaatggcgcggaaa

SEQ ID NO: 1601695 - DNA, 15 bp, Homo sapiens
gccaatggcgcggaa

SEQ ID NO: 1601696 - DNA, 15 bp, Homo sapiens
ggccaatggcgcgga

SEQ ID NO: 1601697 - DNA, 15 bp, Homo sapiens
gggccaatggcgcgg

SEQ ID NO: 1601698 - DNA, 15 bp, Homo sapiens
cgggccaatggcgcg

SEQ ID NO: 1601699 - DNA, 15 bp, Homo sapiens
gcgggccaatggcgc

SEQ ID NO: 1601700 - DNA, 15 bp, Homo sapiens
ggcgggccaatggcg

SEQ ID NO: 1601701 - DNA, 15 bp, Homo sapiens
gggcgggccaatggc

SEQ ID NO: 1601702 - DNA, 15 bp, Homo sapiens
cgggcgggccaatgg

SEQ ID NO: 1601703 - DNA, 15 bp, Homo sapiens
ccgggcgggccaatg

SEQ ID NO: 1601704 - DNA, 15 bp, Homo sapiens
gccgggcgggccaat

SEQ ID NO: 1601705 - DNA, 15 bp, Homo sapiens
ggccgggcgggccaa

SEQ ID NO: 1601706 - DNA, 15 bp, Homo sapiens
gggccgggcgggcca

SEQ ID NO: 1601707 - DNA, 15 bp, Homo sapiens
cgggccgggcgggcc

SEQ ID NO: 1601708 - DNA, 15 bp, Homo sapiens
gcgggccgggcgggc

SEQ ID NO: 1601709 - DNA, 15 bp, Homo sapiens
ggcgggccgggcggg

SEQ ID NO: 1601710 - DNA, 15 bp, Homo sapiens
gggcgggccgggcgg

SEQ ID NO: 1601711 - DNA, 15 bp, Homo sapiens
ggggcgggccgggcg

SEQ ID NO: 1601712 - DNA, 15 bp, Homo sapiens
tggggcgggccgggc

SEQ ID NO: 1601713 - DNA, 15 bp, Homo sapiens
ttggggcgggccggg

SEQ ID NO: 1601714 - DNA, 15 bp, Homo sapiens
gttggggcgggccgg

SEQ ID NO: 1601715 - DNA, 15 bp, Homo sapiens
ggttggggcgggccg

SEQ ID NO: 1601716 - DNA, 15 bp, Homo sapiens
cggttggggcgggcc

SEQ ID NO: 1601717 - DNA, 15 bp, Homo sapiens
tcggttggggcgggc

SEQ ID NO: 1601718 - DNA, 15 bp, Homo sapiens
gtcggttggggcggg

SEQ ID NO: 1601719 - DNA, 15 bp, Homo sapiens
cgtcggttggggcgg

SEQ ID NO: 1601720 - DNA, 15 bp, Homo sapiens
ccgtcggttggggcg

SEQ ID NO: 1601721 - DNA, 15 bp, Homo sapiens
gccgtcggttggggc

SEQ ID NO: 1601722 - DNA, 15 bp, Homo sapiens
cgccgtcggttgggg

SEQ ID NO: 1601723 - DNA, 15 bp, Homo sapiens
gcgccgtcggttggg

SEQ ID NO: 1601724 - DNA, 15 bp, Homo sapiens
ggcgccgtcggttgg

SEQ ID NO: 1601725 - DNA, 15 bp, Homo sapiens
gggcgccgtcggttg

SEQ ID NO: 1601726 - DNA, 15 bp, Homo sapiens
agggcgccgtcggtt

SEQ ID NO: 1601727 - DNA, 15 bp, Homo sapiens
gagggcgccgtcggt

SEQ ID NO: 1601728 - DNA, 15 bp, Homo sapiens
ggagggcgccgtcgg

SEQ ID NO: 1601729 - DNA, 15 bp, Homo sapiens
aggagggcgccgtcg

SEQ ID NO: 1601730 - DNA, 15 bp, Homo sapiens
caggagggcgccgtc

SEQ ID NO: 1601731 - DNA, 15 bp, Homo sapiens
tcaggagggcgccgt

SEQ ID NO: 1601732 - DNA, 15 bp, Homo sapiens
gtcaggagggcgccg

SEQ ID NO: 1601733 - DNA, 15 bp, Homo sapiens
ggtcaggagggcgcc

SEQ ID NO: 1601734 - DNA, 15 bp, Homo sapiens
gggtcaggagggcgc

SEQ ID NO: 1601735 - DNA, 15 bp, Homo sapiens
tgggtcaggagggcg

SEQ ID NO: 1601736 - DNA, 15 bp, Homo sapiens
ctgggtcaggagggc

SEQ ID NO: 1601737 - DNA, 15 bp, Homo sapiens
cctgggtcaggaggg

SEQ ID NO: 1601738 - DNA, 15 bp, Homo sapiens
gcctgggtcaggagg

SEQ ID NO: 1601739 - DNA, 15 bp, Homo sapiens
tgcctgggtcaggag

SEQ ID NO: 1601740 - DNA, 15 bp, Homo sapiens
ctgcctgggtcagga

SEQ ID NO: 1601741 - DNA, 15 bp, Homo sapiens
gctgcctgggtcagg

SEQ ID NO: 1601742 - DNA, 15 bp, Homo sapiens
ggctgcctgggtcag

SEQ ID NO: 1601743 - DNA, 15 bp, Homo sapiens
aggctgcctgggtca

SEQ ID NO: 1601744 - DNA, 15 bp, Homo sapiens
taggctgcctgggtc

SEQ ID NO: 1601745 - DNA, 15 bp, Homo sapiens
ctaggctgcctgggt

SEQ ID NO: 1601746 - DNA, 15 bp, Homo sapiens
gctaggctgcctggg

SEQ ID NO: 1601747 - DNA, 15 bp, Homo sapiens
cgctaggctgcctgg

SEQ ID NO: 1601748 - DNA, 15 bp, Homo sapiens
gcgctaggctgcctg

SEQ ID NO: 1601749 - DNA, 15 bp, Homo sapiens
agcgctaggctgcct

SEQ ID NO: 1601750 - DNA, 15 bp, Homo sapiens
cagcgctaggctgcc

SEQ ID NO: 1601751 - DNA, 15 bp, Homo sapiens
ccagcgctaggctgc

SEQ ID NO: 1601752 - DNA, 15 bp, Homo sapiens
cccagcgctaggctg

SEQ ID NO: 1601753 - DNA, 15 bp, Homo sapiens
ccccagcgctaggct

SEQ ID NO: 1601754 - DNA, 15 bp, Homo sapiens
gccccagcgctaggc

SEQ ID NO: 1601755 - DNA, 15 bp, Homo sapiens
ggccccagcgctagg

SEQ ID NO: 1601756 - DNA, 15 bp, Homo sapiens
gggccccagcgctag

SEQ ID NO: 1601757 - DNA, 15 bp, Homo sapiens
tgggccccagcgcta

SEQ ID NO: 1601758 - DNA, 15 bp, Homo sapiens
ttgggccccagcgct

SEQ ID NO: 1601759 - DNA, 15 bp, Homo sapiens
cttgggccccagcgc

SEQ ID NO: 1601760 - DNA, 15 bp, Homo sapiens
tcttgggccccagcg

SEQ ID NO: 1601761 - DNA, 15 bp, Homo sapiens
ctcttgggccccagc

SEQ ID NO: 1601762 - DNA, 15 bp, Homo sapiens
cctcttgggccccag

SEQ ID NO: 1601763 - DNA, 15 bp, Homo sapiens
gcctcttgggcccca

SEQ ID NO: 1601764 - DNA, 15 bp, Homo sapiens
ggcctcttgggcccc

SEQ ID NO: 1601765 - DNA, 15 bp, Homo sapiens
gggcctcttgggccc

SEQ ID NO: 1601766 - DNA, 15 bp, Homo sapiens
tgggcctcttgggcc

SEQ ID NO: 1601767 - DNA, 15 bp, Homo sapiens
atgggcctcttgggc

SEQ ID NO: 1601768 - DNA, 15 bp, Homo sapiens
gatgggcctcttggg

SEQ ID NO: 1601769 - DNA, 15 bp, Homo sapiens
ggatgggcctcttgg

SEQ ID NO: 1601770 - DNA, 15 bp, Homo sapiens
cggatgggcctcttg

SEQ ID NO: 1601771 - DNA, 15 bp, Homo sapiens
gcggatgggcctctt

SEQ ID NO: 1601772 - DNA, 15 bp, Homo sapiens
cgcggatgggcctct

SEQ ID NO: 1601773 - DNA, 15 bp, Homo sapiens
ccgcggatgggcctc

SEQ ID NO: 1601774 - DNA, 15 bp, Homo sapiens
cccgcggatgggcct

SEQ ID NO: 1601775 - DNA, 15 bp, Homo sapiens
ccccgcggatgggcc

SEQ ID NO: 1601776 - DNA, 15 bp, Homo sapiens
tccccgcggatgggc

SEQ ID NO: 1601777 - DNA, 15 bp, Homo sapiens
ttccccgcggatggg

SEQ ID NO: 1601778 - DNA, 15 bp, Homo sapiens
gttccccgcggatgg

SEQ ID NO: 1601779 - DNA, 15 bp, Homo sapiens
agttccccgcggatg

SEQ ID NO: 1601780 - DNA, 15 bp, Homo sapiens
cagttccccgcggat

SEQ ID NO: 1601781 - DNA, 15 bp, Homo sapiens
gcagttccccgcgga

SEQ ID NO: 1601782 - DNA, 15 bp, Homo sapiens
ggcagttccccgcgg

SEQ ID NO: 1601783 - DNA, 15 bp, Homo sapiens
tggcagttccccgcg

SEQ ID NO: 1601784 - DNA, 15 bp, Homo sapiens
ctggcagttccccgc

SEQ ID NO: 1601785 - DNA, 15 bp, Homo sapiens
gctggcagttccccg

SEQ ID NO: 1601786 - DNA, 15 bp, Homo sapiens
cgctggcagttcccc

SEQ ID NO: 1601787 - DNA, 15 bp, Homo sapiens
gcgctggcagttccc

SEQ ID NO: 1601788 - DNA, 15 bp, Homo sapiens
ggcgctggcagttcc

SEQ ID NO: 1601789 - DNA, 15 bp, Homo sapiens
aggcgctggcagttc

SEQ ID NO: 1601790 - DNA, 15 bp, Homo sapiens
caggcgctggcagtt

SEQ ID NO: 1601791 - DNA, 15 bp, Homo sapiens
gcaggcgctggcagt

SEQ ID NO: 1601792 - DNA, 15 bp, Homo sapiens
ggcaggcgctggcag

SEQ ID NO: 1601793 - DNA, 15 bp, Homo sapiens
gggcaggcgctggca

SEQ ID NO: 1601794 - DNA, 15 bp, Homo sapiens
ggggcaggcgctggc

SEQ ID NO: 1601795 - DNA, 15 bp, Homo sapiens
tggggcaggcgctgg

SEQ ID NO: 1601796 - DNA, 15 bp, Homo sapiens
ctggggcaggcgctg

SEQ ID NO: 1601797 - DNA, 15 bp, Homo sapiens
cctggggcaggcgct

SEQ ID NO: 1601798 - DNA, 15 bp, Homo sapiens
gcctggggcaggcgc

SEQ ID NO: 1601799 - DNA, 15 bp, Homo sapiens
ggcctggggcaggcg

SEQ ID NO: 1601800 - DNA, 15 bp, Homo sapiens
cggcctggggcaggc

SEQ ID NO: 1601801 - DNA, 15 bp, Homo sapiens
acggcctggggcagg

SEQ ID NO: 1601802 - DNA, 15 bp, Homo sapiens
tacggcctggggcag

SEQ ID NO: 1601803 - DNA, 15 bp, Homo sapiens
gtacggcctggggca

SEQ ID NO: 1601804 - DNA, 15 bp, Homo sapiens
ggtacggcctggggc

SEQ ID NO: 1601805 - DNA, 15 bp, Homo sapiens
cggtacggcctgggg

SEQ ID NO: 1601806 - DNA, 15 bp, Homo sapiens
acggtacggcctggg

SEQ ID NO: 1601807 - DNA, 15 bp, Homo sapiens
gacggtacggcctgg

SEQ ID NO: 1601808 - DNA, 15 bp, Homo sapiens
cgacggtacggcctg

SEQ ID NO: 1601809 - DNA, 15 bp, Homo sapiens
tcgacggtacggcct

SEQ ID NO: 1601810 - DNA, 15 bp, Homo sapiens
ctcgacggtacggcc

SEQ ID NO: 1601811 - DNA, 15 bp, Homo sapiens
cctcgacggtacggc

SEQ ID NO: 1601812 - DNA, 15 bp, Homo sapiens
ccctcgacggtacgg

SEQ ID NO: 1601813 - DNA, 15 bp, Homo sapiens
cccctcgacggtacg

SEQ ID NO: 1601814 - DNA, 15 bp, Homo sapiens
ccccctcgacggtac

SEQ ID NO: 1601815 - DNA, 15 bp, Homo sapiens
gccccctcgacggta

SEQ ID NO: 1601816 - DNA, 15 bp, Homo sapiens
agccccctcgacggt

SEQ ID NO: 1601817 - DNA, 15 bp, Homo sapiens
cagccccctcgacgg

SEQ ID NO: 1601818 - DNA, 15 bp, Homo sapiens
acagccccctcgacg

SEQ ID NO: 1601819 - DNA, 15 bp, Homo sapiens
tacagccccctcgac

SEQ ID NO: 1601820 - DNA, 15 bp, Homo sapiens
gtacagccccctcga

SEQ ID NO: 1601821 - DNA, 15 bp, Homo sapiens
agtacagccccctcg

SEQ ID NO: 1601822 - DNA, 15 bp, Homo sapiens
cagtacagccccctc

SEQ ID NO: 1601823 - DNA, 15 bp, Homo sapiens
ccagtacagccccct

SEQ ID NO: 1601824 - DNA, 15 bp, Homo sapiens
tccagtacagccccc

SEQ ID NO: 1601825 - DNA, 15 bp, Homo sapiens
ctccagtacagcccc

SEQ ID NO: 1601826 - DNA, 15 bp, Homo sapiens
gctccagtacagccc

SEQ ID NO: 1601827 - DNA, 15 bp, Homo sapiens
cgctccagtacagcc

SEQ ID NO: 1601828 - DNA, 15 bp, Homo sapiens
gcgctccagtacagc

SEQ ID NO: 1601829 - DNA, 15 bp, Homo sapiens
agcgctccagtacag

SEQ ID NO: 1601830 - DNA, 15 bp, Homo sapiens
gagcgctccagtaca

SEQ ID NO: 1601831 - DNA, 15 bp, Homo sapiens
tgagcgctccagtac

SEQ ID NO: 1601832 - DNA, 15 bp, Homo sapiens
gtgagcgctccagta

SEQ ID NO: 1601833 - DNA, 15 bp, Homo sapiens
tgtgagcgctccagt

SEQ ID NO: 1601834 - DNA, 15 bp, Homo sapiens
ctgtgagcgctccag

SEQ ID NO: 1601835 - DNA, 15 bp, Homo sapiens
gctgtgagcgctcca

SEQ ID NO: 1601836 - DNA, 15 bp, Homo sapiens
ggctgtgagcgctcc

SEQ ID NO: 1601837 - DNA, 15 bp, Homo sapiens
gggctgtgagcgctc

SEQ ID NO: 1601838 - DNA, 15 bp, Homo sapiens
ggggctgtgagcgct

SEQ ID NO: 1601839 - DNA, 15 bp, Homo sapiens
tggggctgtgagcgc

SEQ ID NO: 1601840 - DNA, 15 bp, Homo sapiens
ttggggctgtgagcg

SEQ ID NO: 1601841 - DNA, 15 bp, Homo sapiens
gttggggctgtgagc

SEQ ID NO: 1601842 - DNA, 15 bp, Homo sapiens
ggttggggctgtgag

SEQ ID NO: 1601843 - DNA, 15 bp, Homo sapiens
gggttggggctgtga

SEQ ID NO: 1601844 - DNA, 15 bp, Homo sapiens
agggttggggctgtg

SEQ ID NO: 1601845 - DNA, 15 bp, Homo sapiens
cagggttggggctgt

SEQ ID NO: 1601846 - DNA, 15 bp, Homo sapiens
ccagggttggggctg

SEQ ID NO: 1601847 - DNA, 15 bp, Homo sapiens
gccagggttggggct

SEQ ID NO: 1601848 - DNA, 15 bp, Homo sapiens
agccagggttggggc

SEQ ID NO: 1601849 - DNA, 15 bp, Homo sapiens
cagccagggttgggg

SEQ ID NO: 1601850 - DNA, 15 bp, Homo sapiens
gcagccagggttggg

SEQ ID NO: 1601851 - DNA, 15 bp, Homo sapiens
ggcagccagggttgg

SEQ ID NO: 1601852 - DNA, 15 bp, Homo sapiens
gggcagccagggttg

SEQ ID NO: 1601853 - DNA, 15 bp, Homo sapiens
agggcagccagggtt

SEQ ID NO: 1601854 - DNA, 15 bp, Homo sapiens
gagggcagccagggt

SEQ ID NO: 1601855 - DNA, 15 bp, Homo sapiens
ggagggcagccaggg

SEQ ID NO: 1601856 - DNA, 15 bp, Homo sapiens
gggagggcagccagg

SEQ ID NO: 1601857 - DNA, 15 bp, Homo sapiens
agggagggcagccag

SEQ ID NO: 1601858 - DNA, 15 bp, Homo sapiens
gagggagggcagcca

SEQ ID NO: 1601859 - DNA, 15 bp, Homo sapiens
tgagggagggcagcc

SEQ ID NO: 1601860 - DNA, 15 bp, Homo sapiens
ctgagggagggcagc

SEQ ID NO: 1601861 - DNA, 15 bp, Homo sapiens
actgagggagggcag

SEQ ID NO: 1601862 - DNA, 15 bp, Homo sapiens
gactgagggagggca

SEQ ID NO: 1601863 - DNA, 15 bp, Homo sapiens
agactgagggagggc

SEQ ID NO: 1601864 - DNA, 15 bp, Homo sapiens
gagactgagggaggg

SEQ ID NO: 1601865 - DNA, 15 bp, Homo sapiens
tgagactgagggagg

SEQ ID NO: 1601866 - DNA, 15 bp, Homo sapiens
ctgagactgagggag

SEQ ID NO: 1601867 - DNA, 15 bp, Homo sapiens
actgagactgaggga

SEQ ID NO: 1601868 - DNA, 15 bp, Homo sapiens
aactgagactgaggg

SEQ ID NO: 1601869 - DNA, 15 bp, Homo sapiens
gaactgagactgagg

SEQ ID NO: 1601870 - DNA, 15 bp, Homo sapiens
ggaactgagactgag

SEQ ID NO: 1601871 - DNA, 15 bp, Homo sapiens
gggaactgagactga

SEQ ID NO: 1601872 - DNA, 15 bp, Homo sapiens
agggaactgagactg

SEQ ID NO: 1601873 - DNA, 15 bp, Homo sapiens
gagggaactgagact

SEQ ID NO: 1601874 - DNA, 15 bp, Homo sapiens
agagggaactgagac

SEQ ID NO: 1601875 - DNA, 15 bp, Homo sapiens
aagagggaactgaga

SEQ ID NO: 1601876 - DNA, 15 bp, Homo sapiens
aaagagggaactgag

SEQ ID NO: 1601877 - DNA, 15 bp, Homo sapiens
gaaagagggaactga

SEQ ID NO: 1601878 - DNA, 15 bp, Homo sapiens
cgaaagagggaactg

SEQ ID NO: 1601879 - DNA, 15 bp, Homo sapiens
tcgaaagagggaact

SEQ ID NO: 1601880 - DNA, 15 bp, Homo sapiens
ttcgaaagagggaac

SEQ ID NO: 1601881 - DNA, 15 bp, Homo sapiens
gttcgaaagagggaa

SEQ ID NO: 1601882 - DNA, 15 bp, Homo sapiens
ggttcgaaagaggga

SEQ ID NO: 1601883 - DNA, 15 bp, Homo sapiens
tggttcgaaagaggg

SEQ ID NO: 1601884 - DNA, 15 bp, Homo sapiens
ttggttcgaaagagg

SEQ ID NO: 1601885 - DNA, 15 bp, Homo sapiens
tttggttcgaaagag

SEQ ID NO: 1601886 - DNA, 15 bp, Homo sapiens
ttttggttcgaaaga

SEQ ID NO: 1601887 - DNA, 15 bp, Homo sapiens
cttttggttcgaaag

SEQ ID NO: 1601888 - DNA, 15 bp, Homo sapiens
tcttttggttcgaaa

SEQ ID NO: 1601889 - DNA, 15 bp, Homo sapiens
gtcttttggttcgaa

SEQ ID NO: 1601890 - DNA, 15 bp, Homo sapiens
cgtcttttggttcga

SEQ ID NO: 1601891 - DNA, 15 bp, Homo sapiens
gcgtcttttggttcg

SEQ ID NO: 1601892 - DNA, 15 bp, Homo sapiens
tgcgtcttttggttc

SEQ ID NO: 1601893 - DNA, 15 bp, Homo sapiens
ctgcgtcttttggtt

SEQ ID NO: 1601894 - DNA, 15 bp, Homo sapiens
actgcgtcttttggt

SEQ ID NO: 1601895 - DNA, 15 bp, Homo sapiens
cactgcgtcttttgg

SEQ ID NO: 1601896 - DNA, 15 bp, Homo sapiens
ccactgcgtcttttg

SEQ ID NO: 1601897 - DNA, 15 bp, Homo sapiens
cccactgcgtctttt

SEQ ID NO: 1601898 - DNA, 15 bp, Homo sapiens
ccccactgcgtcttt

SEQ ID NO: 1601899 - DNA, 15 bp, Homo sapiens
cccccactgcgtctt

SEQ ID NO: 1601900 - DNA, 15 bp, Homo sapiens
tcccccactgcgtct

SEQ ID NO: 1601901 - DNA, 15 bp, Homo sapiens
ttcccccactgcgtc

SEQ ID NO: 1601902 - DNA, 15 bp, Homo sapiens
tttcccccactgcgt

SEQ ID NO: 1601903 - DNA, 15 bp, Homo sapiens
ctttcccccactgcg

SEQ ID NO: 1601904 - DNA, 15 bp, Homo sapiens
cctttcccccactgc

SEQ ID NO: 1601905 - DNA, 15 bp, Homo sapiens
gcctttcccccactg

SEQ ID NO: 1601906 - DNA, 15 bp, Homo sapiens
ggcctttcccccact

SEQ ID NO: 1601907 - DNA, 15 bp, Homo sapiens
cggcctttcccccac

SEQ ID NO: 1601908 - DNA, 15 bp, Homo sapiens
gcggcctttccccca

SEQ ID NO: 1601909 - DNA, 15 bp, Homo sapiens
agcggcctttccccc

SEQ ID NO: 1601910 - DNA, 15 bp, Homo sapiens
aagcggcctttcccc

SEQ ID NO: 1601911 - DNA, 15 bp, Homo sapiens
gaagcggcctttccc

SEQ ID NO: 1601912 - DNA, 15 bp, Homo sapiens
agaagcggcctttcc

SEQ ID NO: 1601913 - DNA, 15 bp, Homo sapiens
cagaagcggcctttc

SEQ ID NO: 1601914 - DNA, 15 bp, Homo sapiens
gcagaagcggccttt

SEQ ID NO: 1601915 - DNA, 15 bp, Homo sapiens
agcagaagcggcctt

SEQ ID NO: 1601916 - DNA, 15 bp, Homo sapiens
gagcagaagcggcct

SEQ ID NO: 1601917 - DNA, 15 bp, Homo sapiens
ggagcagaagcggcc

SEQ ID NO: 1601918 - DNA, 15 bp, Homo sapiens
aggagcagaagcggc

SEQ ID NO: 1601919 - DNA, 15 bp, Homo sapiens
aaggagcagaagcgg

SEQ ID NO: 1601920 - DNA, 15 bp, Homo sapiens
aaaggagcagaagcg

SEQ ID NO: 1601921 - DNA, 15 bp, Homo sapiens
gaaaggagcagaagc

SEQ ID NO: 1601922 - DNA, 15 bp, Homo sapiens
cgaaaggagcagaag

SEQ ID NO: 1601923 - DNA, 15 bp, Homo sapiens
acgaaaggagcagaa

SEQ ID NO: 1601924 - DNA, 15 bp, Homo sapiens
cacgaaaggagcaga

SEQ ID NO: 1601925 - DNA, 15 bp, Homo sapiens
gcacgaaaggagcag

SEQ ID NO: 1601926 - DNA, 15 bp, Homo sapiens
ggcacgaaaggagca

SEQ ID NO: 1601927 - DNA, 15 bp, Homo sapiens
gggcacgaaaggagc

SEQ ID NO: 1601928 - DNA, 15 bp, Homo sapiens
tgggcacgaaaggag

SEQ ID NO: 1601929 - DNA, 15 bp, Homo sapiens
ctgggcacgaaagga

SEQ ID NO: 1601930 - DNA, 15 bp, Homo sapiens
gctgggcacgaaagg

SEQ ID NO: 1601931 - DNA, 15 bp, Homo sapiens
ggctgggcacgaaag

SEQ ID NO: 1601932 - DNA, 15 bp, Homo sapiens
gggctgggcacgaaa

SEQ ID NO: 1601933 - DNA, 15 bp, Homo sapiens
cgggctgggcacgaa

SEQ ID NO: 1601934 - DNA, 15 bp, Homo sapiens
ccgggctgggcacga

SEQ ID NO: 1601935 - DNA, 15 bp, Homo sapiens
cccgggctgggcacg

SEQ ID NO: 1601936 - DNA, 15 bp, Homo sapiens
acccgggctgggcac

SEQ ID NO: 1601937 - DNA, 15 bp, Homo sapiens
gacccgggctgggca

SEQ ID NO: 1601938 - DNA, 15 bp, Homo sapiens
tgacccgggctgggc

SEQ ID NO: 1601939 - DNA, 15 bp, Homo sapiens
ctgacccgggctggg

SEQ ID NO: 1601940 - DNA, 15 bp, Homo sapiens
tctgacccgggctgg

SEQ ID NO: 1601941 - DNA, 15 bp, Homo sapiens
ctctgacccgggctg

SEQ ID NO: 1601942 - DNA, 15 bp, Homo sapiens
gctctgacccgggct

SEQ ID NO: 1601943 - DNA, 15 bp, Homo sapiens
tgctctgacccgggc

SEQ ID NO: 1601944 - DNA, 15 bp, Homo sapiens
atgctctgacccggg

SEQ ID NO: 1601945 - DNA, 15 bp, Homo sapiens
aatgctctgacccgg

SEQ ID NO: 1601946 - DNA, 15 bp, Homo sapiens
taatgctctgacccg

SEQ ID NO: 1601947 - DNA, 15 bp, Homo sapiens
ctaatgctctgaccc

SEQ ID NO: 1601948 - DNA, 15 bp, Homo sapiens
cctaatgctctgacc

SEQ ID NO: 1601949 - DNA, 15 bp, Homo sapiens
tcctaatgctctgac

SEQ ID NO: 1601950 - DNA, 15 bp, Homo sapiens
atcctaatgctctga

SEQ ID NO: 1601951 - DNA, 15 bp, Homo sapiens
aatcctaatgctctg

SEQ ID NO: 1601952 - DNA, 15 bp, Homo sapiens
taatcctaatgctct

SEQ ID NO: 1601953 - DNA, 15 bp, Homo sapiens
ctaatcctaatgctc

SEQ ID NO: 1601954 - DNA, 15 bp, Homo sapiens
gctaatcctaatgct

SEQ ID NO: 1601955 - DNA, 15 bp, Homo sapiens
agctaatcctaatgc

SEQ ID NO: 1601956 - DNA, 15 bp, Homo sapiens
cagctaatcctaatg

SEQ ID NO: 1601957 - DNA, 15 bp, Homo sapiens
ccagctaatcctaat

SEQ ID NO: 1601958 - DNA, 15 bp, Homo sapiens
gccagctaatcctaa

SEQ ID NO: 1601959 - DNA, 15 bp, Homo sapiens
ggccagctaatccta

SEQ ID NO: 1601960 - DNA, 15 bp, Homo sapiens
tggccagctaatcct

SEQ ID NO: 1601961 - DNA, 15 bp, Homo sapiens
gtggccagctaatcc

SEQ ID NO: 1601962 - DNA, 15 bp, Homo sapiens
tgtggccagctaatc

SEQ ID NO: 1601963 - DNA, 15 bp, Homo sapiens
ctgtggccagctaat

SEQ ID NO: 1601964 - DNA, 15 bp, Homo sapiens
cctgtggccagctaa

SEQ ID NO: 1601965 - DNA, 15 bp, Homo sapiens
gcctgtggccagcta

SEQ ID NO: 1601966 - DNA, 15 bp, Homo sapiens
cgcctgtggccagct

SEQ ID NO: 1601967 - DNA, 15 bp, Homo sapiens
ccgcctgtggccagc

SEQ ID NO: 1601968 - DNA, 15 bp, Homo sapiens
gccgcctgtggccag

SEQ ID NO: 1601969 - DNA, 15 bp, Homo sapiens
cgccgcctgtggcca

SEQ ID NO: 1601970 - DNA, 15 bp, Homo sapiens
tcgccgcctgtggcc

SEQ ID NO: 1601971 - DNA, 15 bp, Homo sapiens
ttcgccgcctgtggc

SEQ ID NO: 1601972 - DNA, 15 bp, Homo sapiens
gttcgccgcctgtgg

SEQ ID NO: 1601973 - DNA, 15 bp, Homo sapiens
agttcgccgcctgtg

SEQ ID NO: 1601974 - DNA, 15 bp, Homo sapiens
cagttcgccgcctgt

SEQ ID NO: 1601975 - DNA, 15 bp, Homo sapiens
ccagttcgccgcctg

SEQ ID NO: 1601976 - DNA, 15 bp, Homo sapiens
cccagttcgccgcct

SEQ ID NO: 1601977 - DNA, 15 bp, Homo sapiens
gcccagttcgccgcc

SEQ ID NO: 1601978 - DNA, 15 bp, Homo sapiens
agcccagttcgccgc

SEQ ID NO: 1601979 - DNA, 15 bp, Homo sapiens
gagcccagttcgccg

SEQ ID NO: 1601980 - DNA, 15 bp, Homo sapiens
tgagcccagttcgcc

SEQ ID NO: 1601981 - DNA, 15 bp, Homo sapiens
ctgagcccagttcgc

SEQ ID NO: 1601982 - DNA, 15 bp, Homo sapiens
cctgagcccagttcg

SEQ ID NO: 1601983 - DNA, 15 bp, Homo sapiens
gcctgagcccagttc

SEQ ID NO: 1601984 - DNA, 15 bp, Homo sapiens
ggcctgagcccagtt

SEQ ID NO: 1601985 - DNA, 15 bp, Homo sapiens
cggcctgagcccagt

SEQ ID NO: 1601986 - DNA, 15 bp, Homo sapiens
ccggcctgagcccag

SEQ ID NO: 1601987 - DNA, 15 bp, Homo sapiens
cccggcctgagccca

SEQ ID NO: 1601988 - DNA, 15 bp, Homo sapiens
tcccggcctgagccc

SEQ ID NO: 1601989 - DNA, 15 bp, Homo sapiens
ctcccggcctgagcc

SEQ ID NO: 1601990 - DNA, 15 bp, Homo sapiens
gctcccggcctgagc

SEQ ID NO: 1601991 - DNA, 15 bp, Homo sapiens
agctcccggcctgag

SEQ ID NO: 1601992 - DNA, 15 bp, Homo sapiens
cagctcccggcctga

SEQ ID NO: 1601993 - DNA, 15 bp, Homo sapiens
ccagctcccggcctg

SEQ ID NO: 1601994 - DNA, 15 bp, Homo sapiens
cccagctcccggcct

SEQ ID NO: 1601995 - DNA, 15 bp, Homo sapiens
ccccagctcccggcc

SEQ ID NO: 1601996 - DNA, 15 bp, Homo sapiens
accccagctcccggc

SEQ ID NO: 1601997 - DNA, 15 bp, Homo sapiens
gaccccagctcccgg

SEQ ID NO: 1601998 - DNA, 15 bp, Homo sapiens
ggaccccagctcccg

SEQ ID NO: 1601999 - DNA, 15 bp, Homo sapiens
aggaccccagctccc

SEQ ID NO: 1602000 - DNA, 15 bp, Homo sapiens
taggaccccagctcc

SEQ ID NO: 1602001 - DNA, 15 bp, Homo sapiens
gtaggaccccagctc

SEQ ID NO: 1602002 - DNA, 15 bp, Homo sapiens
cgtaggaccccagct

SEQ ID NO: 1602003 - DNA, 15 bp, Homo sapiens
ccgtaggaccccagc

SEQ ID NO: 1602004 - DNA, 15 bp, Homo sapiens
accgtaggaccccag

SEQ ID NO: 1602005 - DNA, 15 bp, Homo sapiens
taccgtaggacccca

SEQ ID NO: 1602006 - DNA, 15 bp, Homo sapiens
ctaccgtaggacccc

SEQ ID NO: 1602007 - DNA, 15 bp, Homo sapiens
tctaccgtaggaccc

SEQ ID NO: 1602008 - DNA, 15 bp, Homo sapiens
gtctaccgtaggacc

SEQ ID NO: 1602009 - DNA, 15 bp, Homo sapiens
ggtctaccgtaggac

SEQ ID NO: 1602010 - DNA, 15 bp, Homo sapiens
gggtctaccgtagga

SEQ ID NO: 1602011 - DNA, 15 bp, Homo sapiens
ggggtctaccgtagg

SEQ ID NO: 1602012 - DNA, 15 bp, Homo sapiens
tggggtctaccgtag

SEQ ID NO: 1602013 - DNA, 15 bp, Homo sapiens
ctggggtctaccgta

SEQ ID NO: 1602014 - DNA, 15 bp, Homo sapiens
actggggtctaccgt

SEQ ID NO: 1602015 - DNA, 15 bp, Homo sapiens
aactggggtctaccg

SEQ ID NO: 1602016 - DNA, 15 bp, Homo sapiens
aaactggggtctacc

SEQ ID NO: 1602017 - DNA, 15 bp, Homo sapiens
caaactggggtctac

SEQ ID NO: 1602018 - DNA, 15 bp, Homo sapiens
ccaaactggggtcta

SEQ ID NO: 1602019 - DNA, 15 bp, Homo sapiens
tccaaactggggtct

SEQ ID NO: 1602020 - DNA, 15 bp, Homo sapiens
ctccaaactggggtc

SEQ ID NO: 1602021 - DNA, 15 bp, Homo sapiens
tctccaaactggggt

SEQ ID NO: 1602022 - DNA, 15 bp, Homo sapiens
ctctccaaactgggg

SEQ ID NO: 1602023 - DNA, 15 bp, Homo sapiens
cctctccaaactggg

SEQ ID NO: 1602024 - DNA, 15 bp, Homo sapiens
acctctccaaactgg

SEQ ID NO: 1602025 - DNA, 15 bp, Homo sapiens
aacctctccaaactg

SEQ ID NO: 1602026 - DNA, 15 bp, Homo sapiens
taacctctccaaact

SEQ ID NO: 1602027 - DNA, 15 bp, Homo sapiens
ctaacctctccaaac

SEQ ID NO: 1602028 - DNA, 15 bp, Homo sapiens
cctaacctctccaaa

SEQ ID NO: 1602029 - DNA, 15 bp, Homo sapiens
tcctaacctctccaa

SEQ ID NO: 1602030 - DNA, 15 bp, Homo sapiens
ctcctaacctctcca

SEQ ID NO: 1602031 - DNA, 15 bp, Homo sapiens
tctcctaacctctcc

SEQ ID NO: 1602032 - DNA, 15 bp, Homo sapiens
ctctcctaacctctc

SEQ ID NO: 1602033 - DNA, 15 bp, Homo sapiens
cctctcctaacctct

SEQ ID NO: 1602034 - DNA, 15 bp, Homo sapiens
ccctctcctaacctc

SEQ ID NO: 1602035 - DNA, 15 bp, Homo sapiens
cccctctcctaacct

SEQ ID NO: 1602036 - DNA, 15 bp, Homo sapiens
ccccctctcctaacc

SEQ ID NO: 1602037 - DNA, 15 bp, Homo sapiens
accccctctcctaac

SEQ ID NO: 1602038 - DNA, 15 bp, Homo sapiens
caccccctctcctaa

SEQ ID NO: 1602039 - DNA, 15 bp, Homo sapiens
acaccccctctccta

SEQ ID NO: 1602040 - DNA, 15 bp, Homo sapiens
aacaccccctctcct

SEQ ID NO: 1602041 - DNA, 15 bp, Homo sapiens
caacaccccctctcc

SEQ ID NO: 1602042 - DNA, 15 bp, Homo sapiens
tcaacaccccctctc

SEQ ID NO: 1602043 - DNA, 15 bp, Homo sapiens
gtcaacaccccctct

SEQ ID NO: 1602044 - DNA, 15 bp, Homo sapiens
agtcaacaccccctc

SEQ ID NO: 1602045 - DNA, 15 bp, Homo sapiens
aagtcaacaccccct

SEQ ID NO: 1602046 - DNA, 15 bp, Homo sapiens
gaagtcaacaccccc

SEQ ID NO: 1602047 - DNA, 15 bp, Homo sapiens
ggaagtcaacacccc

SEQ ID NO: 1602048 - DNA, 15 bp, Homo sapiens
tggaagtcaacaccc

SEQ ID NO: 1602049 - DNA, 15 bp, Homo sapiens
ttggaagtcaacacc

SEQ ID NO: 1602050 - DNA, 15 bp, Homo sapiens
tttggaagtcaacac

SEQ ID NO: 1602051 - DNA, 15 bp, Homo sapiens
ttttggaagtcaaca

SEQ ID NO: 1602052 - DNA, 15 bp, Homo sapiens
cttttggaagtcaac

SEQ ID NO: 1602053 - DNA, 15 bp, Homo sapiens
gcttttggaagtcaa

SEQ ID NO: 1602054 - DNA, 15 bp, Homo sapiens
agcttttggaagtca

SEQ ID NO: 1602055 - DNA, 15 bp, Homo sapiens
cagcttttggaagtc

SEQ ID NO: 1602056 - DNA, 15 bp, Homo sapiens
ccagcttttggaagt

SEQ ID NO: 1602057 - DNA, 15 bp, Homo sapiens
tccagcttttggaag

SEQ ID NO: 1602058 - DNA, 15 bp, Homo sapiens
ctccagcttttggaa

SEQ ID NO: 1602059 - DNA, 15 bp, Homo sapiens
gctccagcttttgga

SEQ ID NO: 1602060 - DNA, 15 bp, Homo sapiens
ggctccagcttttgg

SEQ ID NO: 1602061 - DNA, 15 bp, Homo sapiens
gggctccagcttttg

SEQ ID NO: 1602062 - DNA, 15 bp, Homo sapiens
ggggctccagctttt

SEQ ID NO: 1602063 - DNA, 15 bp, Homo sapiens
gggggctccagcttt

SEQ ID NO: 1602064 - DNA, 15 bp, Homo sapiens
tgggggctccagctt

SEQ ID NO: 1602065 - DNA, 15 bp, Homo sapiens
ctgggggctccagct

SEQ ID NO: 1602066 - DNA, 15 bp, Homo sapiens
tctgggggctccagc

SEQ ID NO: 1602067 - DNA, 15 bp, Homo sapiens
gtctgggggctccag

SEQ ID NO: 1602068 - DNA, 15 bp, Homo sapiens
cgtctgggggctcca

SEQ ID NO: 1602069 - DNA, 15 bp, Homo sapiens
gcgtctgggggctcc

SEQ ID NO: 1602070 - DNA, 15 bp, Homo sapiens
agcgtctgggggctc

SEQ ID NO: 1602071 - DNA, 15 bp, Homo sapiens
aagcgtctgggggct

SEQ ID NO: 1602072 - DNA, 15 bp, Homo sapiens
aaagcgtctgggggc

SEQ ID NO: 1602073 - DNA, 15 bp, Homo sapiens
caaagcgtctggggg

SEQ ID NO: 1602074 - DNA, 15 bp, Homo sapiens
gcaaagcgtctgggg

SEQ ID NO: 1602075 - DNA, 15 bp, Homo sapiens
ggcaaagcgtctggg

SEQ ID NO: 1602076 - DNA, 15 bp, Homo sapiens
aggcaaagcgtctgg

SEQ ID NO: 1602077 - DNA, 15 bp, Homo sapiens
gaggcaaagcgtctg

SEQ ID NO: 1602078 - DNA, 15 bp, Homo sapiens
agaggcaaagcgtct

SEQ ID NO: 1602079 - DNA, 15 bp, Homo sapiens
aagaggcaaagcgtc

SEQ ID NO: 1602080 - DNA, 15 bp, Homo sapiens
caagaggcaaagcgt

SEQ ID NO: 1602081 - DNA, 15 bp, Homo sapiens
ccaagaggcaaagcg

SEQ ID NO: 1602082 - DNA, 15 bp, Homo sapiens
gccaagaggcaaagc

SEQ ID NO: 1602083 - DNA, 15 bp, Homo sapiens
agccaagaggcaaag

SEQ ID NO: 1602084 - DNA, 15 bp, Homo sapiens
aagccaagaggcaaa

SEQ ID NO: 1602085 - DNA, 15 bp, Homo sapiens
gaagccaagaggcaa

SEQ ID NO: 1602086 - DNA, 15 bp, Homo sapiens
agaagccaagaggca

SEQ ID NO: 1602087 - DNA, 15 bp, Homo sapiens
gagaagccaagaggc

SEQ ID NO: 1602088 - DNA, 15 bp, Homo sapiens
agagaagccaagagg

SEQ ID NO: 1602089 - DNA, 15 bp, Homo sapiens
gagagaagccaagag

SEQ ID NO: 1602090 - DNA, 15 bp, Homo sapiens
ggagagaagccaaga

SEQ ID NO: 1602091 - DNA, 15 bp, Homo sapiens
aggagagaagccaag

SEQ ID NO: 1602092 - DNA, 15 bp, Homo sapiens
caggagagaagccaa

SEQ ID NO: 1602093 - DNA, 15 bp, Homo sapiens
acaggagagaagcca

SEQ ID NO: 1602094 - DNA, 15 bp, Homo sapiens
gacaggagagaagcc

SEQ ID NO: 1602095 - DNA, 15 bp, Homo sapiens
tgacaggagagaagc

SEQ ID NO: 1602096 - DNA, 15 bp, Homo sapiens
ctgacaggagagaag

SEQ ID NO: 1602097 - DNA, 15 bp, Homo sapiens
cctgacaggagagaa

SEQ ID NO: 1602098 - DNA, 15 bp, Homo sapiens
gcctgacaggagaga

SEQ ID NO: 1602099 - DNA, 15 bp, Homo sapiens
ggcctgacaggagag

SEQ ID NO: 1602100 - DNA, 15 bp, Homo sapiens
gggcctgacaggaga

SEQ ID NO: 1602101 - DNA, 15 bp, Homo sapiens
ggggcctgacaggag

SEQ ID NO: 1602102 - DNA, 15 bp, Homo sapiens
tggggcctgacagga

SEQ ID NO: 1602103 - DNA, 15 bp, Homo sapiens
ctggggcctgacagg

SEQ ID NO: 1602104 - DNA, 15 bp, Homo sapiens
actggggcctgacag

SEQ ID NO: 1602105 - DNA, 15 bp, Homo sapiens
cactggggcctgaca

SEQ ID NO: 1602106 - DNA, 15 bp, Homo sapiens
tcactggggcctgac

SEQ ID NO: 1602107 - DNA, 15 bp, Homo sapiens
ctcactggggcctga

SEQ ID NO: 1602108 - DNA, 15 bp, Homo sapiens
cctcactggggcctg

SEQ ID NO: 1602109 - DNA, 15 bp, Homo sapiens
ccctcactggggcct

SEQ ID NO: 1602110 - DNA, 15 bp, Homo sapiens
gccctcactggggcc

SEQ ID NO: 1602111 - DNA, 15 bp, Homo sapiens
tgccctcactggggc

SEQ ID NO: 1602112 - DNA, 15 bp, Homo sapiens
gtctcgcaaagtgac

SEQ ID NO: 1602113 - DNA, 15 bp, Homo sapiens
tgtctcgcaaagtga

SEQ ID NO: 1602114 - DNA, 15 bp, Homo sapiens
ttgtctcgcaaagtg

SEQ ID NO: 1602115 - DNA, 15 bp, Homo sapiens
cttgtctcgcaaagt

SEQ ID NO: 1602116 - DNA, 15 bp, Homo sapiens
tcttgtctcgcaaag

SEQ ID NO: 1602117 - DNA, 15 bp, Homo sapiens
ttcttgtctcgcaaa

SEQ ID NO: 1602118 - DNA, 15 bp, Homo sapiens
gttcttgtctcgcaa

SEQ ID NO: 1602119 - DNA, 15 bp, Homo sapiens
tgttcttgtctcgca

SEQ ID NO: 1602120 - DNA, 15 bp, Homo sapiens
ctgttcttgtctcgc

SEQ ID NO: 1602121 - DNA, 15 bp, Homo sapiens
tctgttcttgtctcg

SEQ ID NO: 1602122 - DNA, 15 bp, Homo sapiens
ctctgttcttgtctc

SEQ ID NO: 1602123 - DNA, 15 bp, Homo sapiens
cctctgttcttgtct

SEQ ID NO: 1602124 - DNA, 15 bp, Homo sapiens
ccctctgttcttgtc

SEQ ID NO: 1602125 - DNA, 15 bp, Homo sapiens
gccctctgttcttgt

SEQ ID NO: 1602126 - DNA, 15 bp, Homo sapiens
agccctctgttcttg

SEQ ID NO: 1602127 - DNA, 15 bp, Homo sapiens
gagccctctgttctt

SEQ ID NO: 1602128 - DNA, 15 bp, Homo sapiens
tgagccctctgttct

SEQ ID NO: 1602129 - DNA, 15 bp, Homo sapiens
atgagccctctgttc

SEQ ID NO: 1602130 - DNA, 15 bp, Homo sapiens
tatgagccctctgtt

SEQ ID NO: 1602131 - DNA, 15 bp, Homo sapiens
gtatgagccctctgt

SEQ ID NO: 1602132 - DNA, 15 bp, Homo sapiens
tgtatgagccctctg

SEQ ID NO: 1602133 - DNA, 15 bp, Homo sapiens
ttgtatgagccctct

SEQ ID NO: 1602134 - DNA, 15 bp, Homo sapiens
tttgtatgagccctc

SEQ ID NO: 1602135 - DNA, 15 bp, Homo sapiens
ttttgtatgagccct

SEQ ID NO: 1602136 - DNA, 15 bp, Homo sapiens
cttttgtatgagccc

SEQ ID NO: 1602137 - DNA, 15 bp, Homo sapiens
tcttttgtatgagcc

SEQ ID NO: 1602138 - DNA, 15 bp, Homo sapiens
ttcttttgtatgagc

SEQ ID NO: 1602139 - DNA, 15 bp, Homo sapiens
cttcttttgtatgag

SEQ ID NO: 1602140 - DNA, 15 bp, Homo sapiens
ccttcttttgtatga

SEQ ID NO: 1602141 - DNA, 15 bp, Homo sapiens
gccttcttttgtatg

SEQ ID NO: 1602142 - DNA, 15 bp, Homo sapiens
agccttcttttgtat

SEQ ID NO: 1602143 - DNA, 15 bp, Homo sapiens
tagccttcttttgta

SEQ ID NO: 1602144 - DNA, 15 bp, Homo sapiens
ttagccttcttttgt

SEQ ID NO: 1602145 - DNA, 15 bp, Homo sapiens
attagccttcttttg

SEQ ID NO: 1602146 - DNA, 15 bp, Homo sapiens
aattagccttctttt

SEQ ID NO: 1602147 - DNA, 15 bp, Homo sapiens
aaattagccttcttt

SEQ ID NO: 1602148 - DNA, 15 bp, Homo sapiens
caaattagccttctt

SEQ ID NO: 1602149 - DNA, 15 bp, Homo sapiens
ccaaattagccttct

SEQ ID NO: 1602150 - DNA, 15 bp, Homo sapiens
cccaaattagccttc

SEQ ID NO: 1602151 - DNA, 15 bp, Homo sapiens
ccccaaattagcctt

SEQ ID NO: 1602152 - DNA, 15 bp, Homo sapiens
accccaaattagcct

SEQ ID NO: 1602153 - DNA, 15 bp, Homo sapiens
gaccccaaattagcc

SEQ ID NO: 1602154 - DNA, 15 bp, Homo sapiens
agaccccaaattagc

SEQ ID NO: 1602155 - DNA, 15 bp, Homo sapiens
cagaccccaaattag

SEQ ID NO: 1602156 - DNA, 15 bp, Homo sapiens
acagaccccaaatta

SEQ ID NO: 1602157 - DNA, 15 bp, Homo sapiens
tacagaccccaaatt

SEQ ID NO: 1602158 - DNA, 15 bp, Homo sapiens
ctacagaccccaaat

SEQ ID NO: 1602159 - DNA, 15 bp, Homo sapiens
gctacagaccccaaa

SEQ ID NO: 1602160 - DNA, 15 bp, Homo sapiens
agctacagaccccaa

SEQ ID NO: 1602161 - DNA, 15 bp, Homo sapiens
aagctacagacccca

SEQ ID NO: 1602162 - DNA, 15 bp, Homo sapiens
caagctacagacccc

SEQ ID NO: 1602163 - DNA, 15 bp, Homo sapiens
ccaagctacagaccc

SEQ ID NO: 1602164 - DNA, 15 bp, Homo sapiens
tccaagctacagacc

SEQ ID NO: 1602165 - DNA, 15 bp, Homo sapiens
gtccaagctacagac

SEQ ID NO: 1602166 - DNA, 15 bp, Homo sapiens
ggtccaagctacaga

SEQ ID NO: 1602167 - DNA, 15 bp, Homo sapiens
tggtccaagctacag

SEQ ID NO: 1602168 - DNA, 15 bp, Homo sapiens
ctggtccaagctaca

SEQ ID NO: 1602169 - DNA, 15 bp, Homo sapiens
cctggtccaagctac

SEQ ID NO: 1602170 - DNA, 15 bp, Homo sapiens
acctggtccaagcta

SEQ ID NO: 1602171 - DNA, 15 bp, Homo sapiens
cacctggtccaagct

SEQ ID NO: 1602172 - DNA, 15 bp, Homo sapiens
ccacctggtccaagc

SEQ ID NO: 1602173 - DNA, 15 bp, Homo sapiens
tccacctggtccaag

SEQ ID NO: 1602174 - DNA, 15 bp, Homo sapiens
ttccacctggtccaa

SEQ ID NO: 1602175 - DNA, 15 bp, Homo sapiens
gttccacctggtcca

SEQ ID NO: 1602176 - DNA, 15 bp, Homo sapiens
agttccacctggtcc

SEQ ID NO: 1602177 - DNA, 15 bp, Homo sapiens
cagttccacctggtc

SEQ ID NO: 1602178 - DNA, 15 bp, Homo sapiens
acagttccacctggt

SEQ ID NO: 1602179 - DNA, 15 bp, Homo sapiens
cacagttccacctgg

SEQ ID NO: 1602180 - DNA, 15 bp, Homo sapiens
tcacagttccacctg

SEQ ID NO: 1602181 - DNA, 15 bp, Homo sapiens
ctcacagttccacct

SEQ ID NO: 1602182 - DNA, 15 bp, Homo sapiens
cctcacagttccacc

SEQ ID NO: 1602183 - DNA, 15 bp, Homo sapiens
tcctcacagttccac

SEQ ID NO: 1602184 - DNA, 15 bp, Homo sapiens
ctcctcacagttcca

SEQ ID NO: 1602185 - DNA, 15 bp, Homo sapiens
cctcctcacagttcc

SEQ ID NO: 1602186 - DNA, 15 bp, Homo sapiens
tcctcctcacagttc

SEQ ID NO: 1602187 - DNA, 15 bp, Homo sapiens
ttcctcctcacagtt

SEQ ID NO: 1602188 - DNA, 15 bp, Homo sapiens
gttcctcctcacagt

SEQ ID NO: 1602189 - DNA, 15 bp, Homo sapiens
ggttcctcctcacag

SEQ ID NO: 1602190 - DNA, 15 bp, Homo sapiens
tggttcctcctcaca

SEQ ID NO: 1602191 - DNA, 15 bp, Homo sapiens
gtggttcctcctcac

SEQ ID NO: 1602192 - DNA, 15 bp, Homo sapiens
ggtggttcctcctca

SEQ ID NO: 1602193 - DNA, 15 bp, Homo sapiens
aggtggttcctcctc

SEQ ID NO: 1602194 - DNA, 15 bp, Homo sapiens
caggtggttcctcct

SEQ ID NO: 1602195 - DNA, 15 bp, Homo sapiens
acaggtggttcctcc

SEQ ID NO: 1602196 - DNA, 15 bp, Homo sapiens
gacaggtggttcctc

SEQ ID NO: 1602197 - DNA, 15 bp, Homo sapiens
agacaggtggttcct

SEQ ID NO: 1602198 - DNA, 15 bp, Homo sapiens
gagacaggtggttcc

SEQ ID NO: 1602199 - DNA, 15 bp, Homo sapiens
tgagacaggtggttc

SEQ ID NO: 1602200 - DNA, 15 bp, Homo sapiens
gtgagacaggtggtt

SEQ ID NO: 1602201 - DNA, 15 bp, Homo sapiens
ggtgagacaggtggt

SEQ ID NO: 1602202 - DNA, 15 bp, Homo sapiens
cggtgagacaggtgg

SEQ ID NO: 1602203 - DNA, 15 bp, Homo sapiens
gcggtgagacaggtg

SEQ ID NO: 1602204 - DNA, 15 bp, Homo sapiens
ggcggtgagacaggt

SEQ ID NO: 1602205 - DNA, 15 bp, Homo sapiens
gggcggtgagacagg

SEQ ID NO: 1602206 - DNA, 15 bp, Homo sapiens
ggggcggtgagacag

SEQ ID NO: 1602207 - DNA, 15 bp, Homo sapiens
tggggcggtgagaca

SEQ ID NO: 1602208 - DNA, 15 bp, Homo sapiens
gtggggcggtgagac

SEQ ID NO: 1602209 - DNA, 15 bp, Homo sapiens
ggtggggcggtgaga

SEQ ID NO: 1602210 - DNA, 15 bp, Homo sapiens
gggtggggcggtgag

SEQ ID NO: 1602211 - DNA, 15 bp, Homo sapiens
ggggtggggcggtga

SEQ ID NO: 1602212 - DNA, 15 bp, Homo sapiens
gggggtggggcggtg

SEQ ID NO: 1602213 - DNA, 15 bp, Homo sapiens
ggggggtggggcggt

SEQ ID NO: 1602214 - DNA, 15 bp, Homo sapiens
tggggggtggggcgg

SEQ ID NO: 1602215 - DNA, 15 bp, Homo sapiens
ttggggggtggggcg

SEQ ID NO: 1602216 - DNA, 15 bp, Homo sapiens
gttggggggtggggc

SEQ ID NO: 1602217 - DNA, 15 bp, Homo sapiens
agttggggggtgggg

SEQ ID NO: 1602218 - DNA, 15 bp, Homo sapiens
cagttggggggtggg

SEQ ID NO: 1602219 - DNA, 15 bp, Homo sapiens
gcagttggggggtgg

SEQ ID NO: 1602220 - DNA, 15 bp, Homo sapiens
agcagttggggggtg

SEQ ID NO: 1602221 - DNA, 15 bp, Homo sapiens
aagcagttggggggt

SEQ ID NO: 1602222 - DNA, 15 bp, Homo sapiens
aaagcagttgggggg

SEQ ID NO: 1602223 - DNA, 15 bp, Homo sapiens
aaaagcagttggggg

SEQ ID NO: 1602224 - DNA, 15 bp, Homo sapiens
aaaaagcagttgggg

SEQ ID NO: 1602225 - DNA, 15 bp, Homo sapiens
gaaaaagcagttggg

SEQ ID NO: 1602226 - DNA, 15 bp, Homo sapiens
agaaaaagcagttgg

SEQ ID NO: 1602227 - DNA, 15 bp, Homo sapiens
tagaaaaagcagttg

SEQ ID NO: 1602228 - DNA, 15 bp, Homo sapiens
ttagaaaaagcagtt

SEQ ID NO: 1602229 - DNA, 15 bp, Homo sapiens
gttagaaaaagcagt

SEQ ID NO: 1602230 - DNA, 15 bp, Homo sapiens
agttagaaaaagcag

SEQ ID NO: 1602231 - DNA, 15 bp, Homo sapiens
gagttagaaaaagca

SEQ ID NO: 1602232 - DNA, 15 bp, Homo sapiens
ggagttagaaaaagc

SEQ ID NO: 1602233 - DNA, 15 bp, Homo sapiens
gggagttagaaaaag

SEQ ID NO: 1602234 - DNA, 15 bp, Homo sapiens
agggagttagaaaaa

SEQ ID NO: 1602235 - DNA, 15 bp, Homo sapiens
aagggagttagaaaa

SEQ ID NO: 1602236 - DNA, 15 bp, Homo sapiens
aaagggagttagaaa

SEQ ID NO: 1602237 - DNA, 15 bp, Homo sapiens
caaagggagttagaa

SEQ ID NO: 1602238 - DNA, 15 bp, Homo sapiens
acaaagggagttaga

SEQ ID NO: 1602239 - DNA, 15 bp, Homo sapiens
cacaaagggagttag

SEQ ID NO: 1602240 - DNA, 15 bp, Homo sapiens
ccacaaagggagtta

SEQ ID NO: 1602241 - DNA, 15 bp, Homo sapiens
accacaaagggagtt

SEQ ID NO: 1602242 - DNA, 15 bp, Homo sapiens
gaccacaaagggagt

SEQ ID NO: 1602243 - DNA, 15 bp, Homo sapiens
ggaccacaaagggag

SEQ ID NO: 1602244 - DNA, 15 bp, Homo sapiens
aggaccacaaaggga

SEQ ID NO: 1602245 - DNA, 15 bp, Homo sapiens
gaggaccacaaaggg

SEQ ID NO: 1602246 - DNA, 15 bp, Homo sapiens
ggaggaccacaaagg

SEQ ID NO: 1602247 - DNA, 15 bp, Homo sapiens
tggaggaccacaaag

SEQ ID NO: 1602248 - DNA, 15 bp, Homo sapiens
gtggaggaccacaaa

SEQ ID NO: 1602249 - DNA, 15 bp, Homo sapiens
tgtggaggaccacaa

SEQ ID NO: 1602250 - DNA, 15 bp, Homo sapiens
gtgtggaggaccaca

SEQ ID NO: 1602251 - DNA, 15 bp, Homo sapiens
ggtgtggaggaccac

SEQ ID NO: 1602252 - DNA, 15 bp, Homo sapiens
aggtgtggaggacca

SEQ ID NO: 1602253 - DNA, 15 bp, Homo sapiens
caggtgtggaggacc

SEQ ID NO: 1602254 - DNA, 15 bp, Homo sapiens
acaggtgtggaggac

SEQ ID NO: 1602255 - DNA, 15 bp, Homo sapiens
aacaggtgtggagga

SEQ ID NO: 1602256 - DNA, 15 bp, Homo sapiens
aaacaggtgtggagg

SEQ ID NO: 1602257 - DNA, 15 bp, Homo sapiens
taaacaggtgtggag

SEQ ID NO: 1602258 - DNA, 15 bp, Homo sapiens
ctaaacaggtgtgga

SEQ ID NO: 1602259 - DNA, 15 bp, Homo sapiens
cctaaacaggtgtgg

SEQ ID NO: 1602260 - DNA, 15 bp, Homo sapiens
ccctaaacaggtgtg

SEQ ID NO: 1602261 - DNA, 15 bp, Homo sapiens
gccctaaacaggtgt

SEQ ID NO: 1602262 - DNA, 15 bp, Homo sapiens
cgccctaaacaggtg

SEQ ID NO: 1602263 - DNA, 15 bp, Homo sapiens
gcgccctaaacaggt

SEQ ID NO: 1602264 - DNA, 15 bp, Homo sapiens
agcgccctaaacagg

SEQ ID NO: 1602265 - DNA, 15 bp, Homo sapiens
cagcgccctaaacag

SEQ ID NO: 1602266 - DNA, 15 bp, Homo sapiens
tcagcgccctaaaca

SEQ ID NO: 1602267 - DNA, 15 bp, Homo sapiens
ctcagcgccctaaac

SEQ ID NO: 1602268 - DNA, 15 bp, Homo sapiens
gctcagcgccctaaa

SEQ ID NO: 1602269 - DNA, 15 bp, Homo sapiens
ggctcagcgccctaa

SEQ ID NO: 1602270 - DNA, 15 bp, Homo sapiens
tggctcagcgcccta

SEQ ID NO: 1602271 - DNA, 15 bp, Homo sapiens
gtggctcagcgccct

SEQ ID NO: 1602272 - DNA, 15 bp, Homo sapiens
agtggctcagcgccc

SEQ ID NO: 1602273 - DNA, 15 bp, Homo sapiens
gagtggctcagcgcc

SEQ ID NO: 1602274 - DNA, 15 bp, Homo sapiens
agagtggctcagcgc

SEQ ID NO: 1602275 - DNA, 15 bp, Homo sapiens
cagagtggctcagcg

SEQ ID NO: 1602276 - DNA, 15 bp, Homo sapiens
acagagtggctcagc

SEQ ID NO: 1602277 - DNA, 15 bp, Homo sapiens
gacagagtggctcag

SEQ ID NO: 1602278 - DNA, 15 bp, Homo sapiens
agacagagtggctca

SEQ ID NO: 1602279 - DNA, 15 bp, Homo sapiens
gagacagagtggctc

SEQ ID NO: 1602280 - DNA, 15 bp, Homo sapiens
ggagacagagtggct

SEQ ID NO: 1602281 - DNA, 15 bp, Homo sapiens
aggagacagagtggc

SEQ ID NO: 1602282 - DNA, 15 bp, Homo sapiens
caggagacagagtgg

SEQ ID NO: 1602283 - DNA, 15 bp, Homo sapiens
ccaggagacagagtg

SEQ ID NO: 1602284 - DNA, 15 bp, Homo sapiens
accaggagacagagt

SEQ ID NO: 1602285 - DNA, 15 bp, Homo sapiens
taccaggagacagag

SEQ ID NO: 1602286 - DNA, 15 bp, Homo sapiens
ctaccaggagacaga

SEQ ID NO: 1602287 - DNA, 15 bp, Homo sapiens
actaccaggagacag

SEQ ID NO: 1602288 - DNA, 15 bp, Homo sapiens
cactaccaggagaca

SEQ ID NO: 1602289 - DNA, 15 bp, Homo sapiens
acactaccaggagac

SEQ ID NO: 1602290 - DNA, 15 bp, Homo sapiens
aacactaccaggaga

SEQ ID NO: 1602291 - DNA, 15 bp, Homo sapiens
taacactaccaggag

SEQ ID NO: 1602292 - DNA, 15 bp, Homo sapiens
ataacactaccagga

SEQ ID NO: 1602293 - DNA, 15 bp, Homo sapiens
aataacactaccagg

SEQ ID NO: 1602294 - DNA, 15 bp, Homo sapiens
aaataacactaccag

SEQ ID NO: 1602295 - DNA, 15 bp, Homo sapiens
aaaataacactacca

SEQ ID NO: 1602296 - DNA, 15 bp, Homo sapiens
caaaataacactacc

SEQ ID NO: 1602297 - DNA, 15 bp, Homo sapiens
gcaaaataacactac

SEQ ID NO: 1602298 - DNA, 15 bp, Homo sapiens
agcaaaataacacta

SEQ ID NO: 1602299 - DNA, 15 bp, Homo sapiens
gagcaaaataacact

SEQ ID NO: 1602300 - DNA, 15 bp, Homo sapiens
ggagcaaaataacac

SEQ ID NO: 1602301 - DNA, 15 bp, Homo sapiens
tggagcaaaataaca

SEQ ID NO: 1602302 - DNA, 15 bp, Homo sapiens
ttggagcaaaataac

SEQ ID NO: 1602303 - DNA, 15 bp, Homo sapiens
cttggagcaaaataa

SEQ ID NO: 1602304 - DNA, 15 bp, Homo sapiens
acttggagcaaaata

SEQ ID NO: 1602305 - DNA, 15 bp, Homo sapiens
aacttggagcaaaat

SEQ ID NO: 1602306 - DNA, 15 bp, Homo sapiens
aaacttggagcaaaa

SEQ ID NO: 1602307 - DNA, 15 bp, Homo sapiens
aaaacttggagcaaa

SEQ ID NO: 1602308 - DNA, 15 bp, Homo sapiens
taaaacttggagcaa

SEQ ID NO: 1602309 - DNA, 15 bp, Homo sapiens
ataaaacttggagca

SEQ ID NO: 1602310 - DNA, 15 bp, Homo sapiens
gataaaacttggagc

SEQ ID NO: 1602311 - DNA, 15 bp, Homo sapiens
cgataaaacttggag

SEQ ID NO: 1602312 - DNA, 15 bp, Homo sapiens
gcgataaaacttgga

SEQ ID NO: 1602313 - DNA, 15 bp, Homo sapiens
tgcgataaaacttgg

SEQ ID NO: 1602314 - DNA, 15 bp, Homo sapiens
ttgcgataaaacttg

SEQ ID NO: 1602315 - DNA, 15 bp, Homo sapiens
attgcgataaaactt

SEQ ID NO: 1602316 - DNA, 15 bp, Homo sapiens
aattgcgataaaact

SEQ ID NO: 1602317 - DNA, 15 bp, Homo sapiens
aaattgcgataaaac

SEQ ID NO: 1602318 - DNA, 15 bp, Homo sapiens
aaaattgcgataaaa

SEQ ID NO: 1602319 - DNA, 15 bp, Homo sapiens
aaaaattgcgataaa

SEQ ID NO: 1602320 - DNA, 15 bp, Homo sapiens
caaaaattgcgataa

SEQ ID NO: 1602321 - DNA, 15 bp, Homo sapiens
tcaaaaattgcgata

SEQ ID NO: 1602322 - DNA, 15 bp, Homo sapiens
atcaaaaattgcgat

SEQ ID NO: 1602323 - DNA, 15 bp, Homo sapiens
aatcaaaaattgcga

SEQ ID NO: 1602324 - DNA, 15 bp, Homo sapiens
gaatcaaaaattgcg

SEQ ID NO: 1602325 - DNA, 15 bp, Homo sapiens
tgaatcaaaaattgc

SEQ ID NO: 1602326 - DNA, 15 bp, Homo sapiens
gtgaatcaaaaattg

SEQ ID NO: 1602327 - DNA, 15 bp, Homo sapiens
agtgaatcaaaaatt

SEQ ID NO: 1602328 - DNA, 15 bp, Homo sapiens
gagtgaatcaaaaat

SEQ ID NO: 1602329 - DNA, 15 bp, Homo sapiens
cgagtgaatcaaaaa

SEQ ID NO: 1602330 - DNA, 15 bp, Homo sapiens
tcgagtgaatcaaaa

SEQ ID NO: 1602331 - DNA, 15 bp, Homo sapiens
gtcgagtgaatcaaa

SEQ ID NO: 1602332 - DNA, 15 bp, Homo sapiens
tgtcgagtgaatcaa

SEQ ID NO: 1602333 - DNA, 15 bp, Homo sapiens
ctgtcgagtgaatca

SEQ ID NO: 1602334 - DNA, 15 bp, Homo sapiens
actgtcgagtgaatc

SEQ ID NO: 1602335 - DNA, 15 bp, Homo sapiens
tactgtcgagtgaat

SEQ ID NO: 1602336 - DNA, 15 bp, Homo sapiens
atactgtcgagtgaa

SEQ ID NO: 1602337 - DNA, 15 bp, Homo sapiens
aatactgtcgagtga

SEQ ID NO: 1602338 - DNA, 15 bp, Homo sapiens
aaatactgtcgagtg

SEQ ID NO: 1602339 - DNA, 15 bp, Homo sapiens
taaatactgtcgagt

SEQ ID NO: 1602340 - DNA, 15 bp, Homo sapiens
ataaatactgtcgag

SEQ ID NO: 1602341 - DNA, 15 bp, Homo sapiens
aataaatactgtcga

SEQ ID NO: 1602342 - DNA, 15 bp, Homo sapiens
gaataaatactgtcg

SEQ ID NO: 1602343 - DNA, 15 bp, Homo sapiens
tgaataaatactgtc

SEQ ID NO: 1602344 - DNA, 15 bp, Homo sapiens
ctgaataaatactgt

SEQ ID NO: 1602345 - DNA, 15 bp, Homo sapiens
gctgaataaatactg

SEQ ID NO: 1602346 - DNA, 15 bp, Homo sapiens
agctgaataaatact

SEQ ID NO: 1602347 - DNA, 15 bp, Homo sapiens
tagctgaataaatac

SEQ ID NO: 1602348 - DNA, 15 bp, Homo sapiens
ctagctgaataaata

SEQ ID NO: 1602349 - DNA, 15 bp, Homo sapiens
cctagctgaataaat

SEQ ID NO: 1602350 - DNA, 15 bp, Homo sapiens
ccctagctgaataaa

SEQ ID NO: 1602351 - DNA, 15 bp, Homo sapiens
gccctagctgaataa

SEQ ID NO: 1602352 - DNA, 15 bp, Homo sapiens
agccctagctgaata

SEQ ID NO: 1602353 - DNA, 15 bp, Homo sapiens
gagccctagctgaat

SEQ ID NO: 1602354 - DNA, 15 bp, Homo sapiens
agagccctagctgaa

SEQ ID NO: 1602355 - DNA, 15 bp, Homo sapiens
cagagccctagctga

SEQ ID NO: 1602356 - DNA, 15 bp, Homo sapiens
acagagccctagctg

SEQ ID NO: 1602357 - DNA, 15 bp, Homo sapiens
cacagagccctagct

SEQ ID NO: 1602358 - DNA, 15 bp, Homo sapiens
gcacagagccctagc

SEQ ID NO: 1602359 - DNA, 15 bp, Homo sapiens
ggcacagagccctag

SEQ ID NO: 1602360 - DNA, 15 bp, Homo sapiens
tggcacagagcccta

SEQ ID NO: 1602361 - DNA, 15 bp, Homo sapiens
ctggcacagagccct

SEQ ID NO: 1602362 - DNA, 15 bp, Homo sapiens
cctggcacagagccc

SEQ ID NO: 1602363 - DNA, 15 bp, Homo sapiens
ccctggcacagagcc

SEQ ID NO: 1602364 - DNA, 15 bp, Homo sapiens
tccctggcacagagc

SEQ ID NO: 1602365 - DNA, 15 bp, Homo sapiens
gtccctggcacagag

SEQ ID NO: 1602366 - DNA, 15 bp, Homo sapiens
agtccctggcacaga

SEQ ID NO: 1602367 - DNA, 15 bp, Homo sapiens
tagtccctggcacag

SEQ ID NO: 1602368 - DNA, 15 bp, Homo sapiens
gtagtccctggcaca

SEQ ID NO: 1602369 - DNA, 15 bp, Homo sapiens
cgtagtccctggcac

SEQ ID NO: 1602370 - DNA, 15 bp, Homo sapiens
gcgtagtccctggca

SEQ ID NO: 1602371 - DNA, 15 bp, Homo sapiens
tgcgtagtccctggc

SEQ ID NO: 1602372 - DNA, 15 bp, Homo sapiens
ttgcgtagtccctgg

SEQ ID NO: 1602373 - DNA, 15 bp, Homo sapiens
cttgcgtagtccctg

SEQ ID NO: 1602374 - DNA, 15 bp, Homo sapiens
ccttgcgtagtccct

SEQ ID NO: 1602375 - DNA, 15 bp, Homo sapiens
gccttgcgtagtccc

SEQ ID NO: 1602376 - DNA, 15 bp, Homo sapiens
ggccttgcgtagtcc

SEQ ID NO: 1602377 - DNA, 15 bp, Homo sapiens
aggccttgcgtagtc

SEQ ID NO: 1602378 - DNA, 15 bp, Homo sapiens
caggccttgcgtagt

SEQ ID NO: 1602379 - DNA, 15 bp, Homo sapiens
tcaggccttgcgtag

SEQ ID NO: 1602380 - DNA, 15 bp, Homo sapiens
ttcaggccttgcgta

SEQ ID NO: 1602381 - DNA, 15 bp, Homo sapiens
tttcaggccttgcgt

SEQ ID NO: 1602382 - DNA, 15 bp, Homo sapiens
ttttcaggccttgcg

SEQ ID NO: 1602383 - DNA, 15 bp, Homo sapiens
attttcaggccttgc

SEQ ID NO: 1602384 - DNA, 15 bp, Homo sapiens
aattttcaggccttg

SEQ ID NO: 1602385 - DNA, 15 bp, Homo sapiens
gaattttcaggcctt

SEQ ID NO: 1602386 - DNA, 15 bp, Homo sapiens
tgaattttcaggcct

SEQ ID NO: 1602387 - DNA, 15 bp, Homo sapiens
ttgaattttcaggcc

SEQ ID NO: 1602388 - DNA, 15 bp, Homo sapiens
tttgaattttcaggc

SEQ ID NO: 1602389 - DNA, 15 bp, Homo sapiens
gtttgaattttcagg

SEQ ID NO: 1602390 - DNA, 15 bp, Homo sapiens
agtttgaattttcag

SEQ ID NO: 1602391 - DNA, 15 bp, Homo sapiens
aagtttgaattttca

SEQ ID NO: 1602392 - DNA, 15 bp, Homo sapiens
taagtttgaattttc

SEQ ID NO: 1602393 - DNA, 15 bp, Homo sapiens
ttaagtttgaatttt

SEQ ID NO: 1602394 - DNA, 15 bp, Homo sapiens
attaagtttgaattt

SEQ ID NO: 1602395 - DNA, 15 bp, Homo sapiens
gattaagtttgaatt

SEQ ID NO: 1602396 - DNA, 15 bp, Homo sapiens
agattaagtttgaat

SEQ ID NO: 1602397 - DNA, 15 bp, Homo sapiens
tagattaagtttgaa

SEQ ID NO: 1602398 - DNA, 15 bp, Homo sapiens
ctagattaagtttga

SEQ ID NO: 1602399 - DNA, 15 bp, Homo sapiens
tctagattaagtttg

SEQ ID NO: 1602400 - DNA, 15 bp, Homo sapiens
atctagattaagttt

SEQ ID NO: 1602401 - DNA, 15 bp, Homo sapiens
catctagattaagtt

SEQ ID NO: 1602402 - DNA, 15 bp, Homo sapiens
gcatctagattaagt

SEQ ID NO: 1602403 - DNA, 15 bp, Homo sapiens
tgcatctagattaag

SEQ ID NO: 1602404 - DNA, 15 bp, Homo sapiens
ctgcatctagattaa

SEQ ID NO: 1602405 - DNA, 15 bp, Homo sapiens
gctgcatctagatta

SEQ ID NO: 1602406 - DNA, 15 bp, Homo sapiens
agctgcatctagatt

SEQ ID NO: 1602407 - DNA, 15 bp, Homo sapiens
gagctgcatctagat

SEQ ID NO: 1602408 - DNA, 15 bp, Homo sapiens
ggagctgcatctaga

SEQ ID NO: 1602409 - DNA, 15 bp, Homo sapiens
aggagctgcatctag

SEQ ID NO: 1602410 - DNA, 15 bp, Homo sapiens
taggagctgcatcta

SEQ ID NO: 1602411 - DNA, 15 bp, Homo sapiens
gtaggagctgcatct

SEQ ID NO: 1602412 - DNA, 15 bp, Homo sapiens
agtaggagctgcatc

SEQ ID NO: 1602413 - DNA, 15 bp, Homo sapiens
gagtaggagctgcat

SEQ ID NO: 1602414 - DNA, 15 bp, Homo sapiens
tgagtaggagctgca

SEQ ID NO: 1602415 - DNA, 15 bp, Homo sapiens
gtgagtaggagctgc

SEQ ID NO: 1602416 - DNA, 15 bp, Homo sapiens
tgtgagtaggagctg

SEQ ID NO: 1602417 - DNA, 15 bp, Homo sapiens
gtgtgagtaggagct

SEQ ID NO: 1602418 - DNA, 15 bp, Homo sapiens
cgtgtgagtaggagc

SEQ ID NO: 1602419 - DNA, 15 bp, Homo sapiens
ccgtgtgagtaggag

SEQ ID NO: 1602420 - DNA, 15 bp, Homo sapiens
tccgtgtgagtagga

SEQ ID NO: 1602421 - DNA, 15 bp, Homo sapiens
ttccgtgtgagtagg

SEQ ID NO: 1602422 - DNA, 15 bp, Homo sapiens
gttccgtgtgagtag

SEQ ID NO: 1602423 - DNA, 15 bp, Homo sapiens
agttccgtgtgagta

SEQ ID NO: 1602424 - DNA, 15 bp, Homo sapiens
aagttccgtgtgagt

SEQ ID NO: 1602425 - DNA, 15 bp, Homo sapiens
taagttccgtgtgag

SEQ ID NO: 1602426 - DNA, 15 bp, Homo sapiens
gtaagttccgtgtga

SEQ ID NO: 1602427 - DNA, 15 bp, Homo sapiens
tgtaagttccgtgtg

SEQ ID NO: 1602428 - DNA, 15 bp, Homo sapiens
gtgtaagttccgtgt

SEQ ID NO: 1602429 - DNA, 15 bp, Homo sapiens
tgtgtaagttccgtg

SEQ ID NO: 1602430 - DNA, 15 bp, Homo sapiens
atgtgtaagttccgt

SEQ ID NO: 1602431 - DNA, 15 bp, Homo sapiens
aatgtgtaagttccg

SEQ ID NO: 1602432 - DNA, 15 bp, Homo sapiens
gaatgtgtaagttcc

SEQ ID NO: 1602433 - DNA, 15 bp, Homo sapiens
tgaatgtgtaagttc

SEQ ID NO: 1602434 - DNA, 15 bp, Homo sapiens
gtgaatgtgtaagtt

SEQ ID NO: 1602435 - DNA, 15 bp, Homo sapiens
tgtgaatgtgtaagt

SEQ ID NO: 1602436 - DNA, 15 bp, Homo sapiens
attgtgaatgtgtaa

SEQ ID NO: 1602437 - DNA, 15 bp, Homo sapiens
tattgtgaatgtgta

SEQ ID NO: 1602438 - DNA, 15 bp, Homo sapiens
ttattgtgaatgtgt

SEQ ID NO: 1602439 - DNA, 15 bp, Homo sapiens
tttattgtgaatgtg

SEQ ID NO: 1602440 - DNA, 15 bp, Homo sapiens
atttattgtgaatgt

SEQ ID NO: 1602441 - DNA, 15 bp, Homo sapiens
gatttattgtgaatg

SEQ ID NO: 1602442 - DNA, 15 bp, Homo sapiens
tgatttattgtgaat

SEQ ID NO: 1602443 - DNA, 15 bp, Homo sapiens
gtgatttattgtgaa

SEQ ID NO: 1602444 - DNA, 15 bp, Homo sapiens
ggtgatttattgtga

SEQ ID NO: 1602445 - DNA, 15 bp, Homo sapiens
gggtgatttattgtg

SEQ ID NO: 1602446 - DNA, 15 bp, Homo sapiens
tgggtgatttattgt

SEQ ID NO: 1602447 - DNA, 15 bp, Homo sapiens
ttgggtgatttattg

SEQ ID NO: 1602448 - DNA, 15 bp, Homo sapiens
tttgggtgatttatt

SEQ ID NO: 1602449 - DNA, 15 bp, Homo sapiens
atttgggtgatttat

SEQ ID NO: 1602450 - DNA, 15 bp, Homo sapiens
tatttgggtgattta

SEQ ID NO: 1602451 - DNA, 15 bp, Homo sapiens
ttatttgggtgattt

SEQ ID NO: 1602452 - DNA, 15 bp, Homo sapiens
attatttgggtgatt

SEQ ID NO: 1602453 - DNA, 15 bp, Homo sapiens
tattatttgggtgat

SEQ ID NO: 1602454 - DNA, 15 bp, Homo sapiens
atattatttgggtga

SEQ ID NO: 1602455 - DNA, 15 bp, Homo sapiens
catattatttgggtg

SEQ ID NO: 1602456 - DNA, 15 bp, Homo sapiens
acatattatttgggt

SEQ ID NO: 1602457 - DNA, 15 bp, Homo sapiens
tacatattatttggg

SEQ ID NO: 1602458 - DNA, 15 bp, Homo sapiens
ctacatattatttgg

SEQ ID NO: 1602459 - DNA, 15 bp, Homo sapiens
actacatattatttg

SEQ ID NO: 1602460 - DNA, 15 bp, Homo sapiens
aactacatattattt

SEQ ID NO: 1602461 - DNA, 15 bp, Homo sapiens
taactacatattatt

SEQ ID NO: 1602462 - DNA, 15 bp, Homo sapiens
gtaactacatattat

SEQ ID NO: 1602463 - DNA, 15 bp, Homo sapiens
agtaactacatatta

SEQ ID NO: 1602464 - DNA, 15 bp, Homo sapiens
aagtaactacatatt

SEQ ID NO: 1602465 - DNA, 15 bp, Homo sapiens
aaagtaactacatat

SEQ ID NO: 1602466 - DNA, 15 bp, Homo sapiens
gaaagtaactacata

SEQ ID NO: 1602467 - DNA, 15 bp, Homo sapiens
agaaagtaactacat

SEQ ID NO: 1602468 - DNA, 15 bp, Homo sapiens
cagaaagtaactaca

SEQ ID NO: 1602469 - DNA, 15 bp, Homo sapiens
tcagaaagtaactac

SEQ ID NO: 1602470 - DNA, 15 bp, Homo sapiens
gtcagaaagtaacta

SEQ ID NO: 1602471 - DNA, 15 bp, Homo sapiens
tgtcagaaagtaact

SEQ ID NO: 1602472 - DNA, 15 bp, Homo sapiens
ctgtcagaaagtaac

SEQ ID NO: 1602473 - DNA, 15 bp, Homo sapiens
tctgtcagaaagtaa

SEQ ID NO: 1602474 - DNA, 15 bp, Homo sapiens
atctgtcagaaagta

SEQ ID NO: 1602475 - DNA, 15 bp, Homo sapiens
catctgtcagaaagt

SEQ ID NO: 1602476 - DNA, 15 bp, Homo sapiens
acatctgtcagaaag

SEQ ID NO: 1602477 - DNA, 15 bp, Homo sapiens
aacatctgtcagaaa

SEQ ID NO: 1602478 - DNA, 15 bp, Homo sapiens
taacatctgtcagaa

SEQ ID NO: 1602479 - DNA, 15 bp, Homo sapiens
gtaacatctgtcaga

SEQ ID NO: 1602480 - DNA, 15 bp, Homo sapiens
agtaacatctgtcag

SEQ ID NO: 1602481 - DNA, 15 bp, Homo sapiens
gagtaacatctgtca

SEQ ID NO: 1602482 - DNA, 15 bp, Homo sapiens
agagtaacatctgtc

SEQ ID NO: 1602483 - DNA, 15 bp, Homo sapiens
tagagtaacatctgt

SEQ ID NO: 1602484 - DNA, 15 bp, Homo sapiens
ctagagtaacatctg

SEQ ID NO: 1602485 - DNA, 15 bp, Homo sapiens
cctagagtaacatct

SEQ ID NO: 1602486 - DNA, 15 bp, Homo sapiens
tcctagagtaacatc

SEQ ID NO: 1602487 - DNA, 15 bp, Homo sapiens
atcctagagtaacat

SEQ ID NO: 1602488 - DNA, 15 bp, Homo sapiens
gatcctagagtaaca

SEQ ID NO: 1602489 - DNA, 15 bp, Homo sapiens
ggatcctagagtaac

SEQ ID NO: 1602490 - DNA, 15 bp, Homo sapiens
tggatcctagagtaa

SEQ ID NO: 1602491 - DNA, 15 bp, Homo sapiens
ctggatcctagagta

SEQ ID NO: 1602492 - DNA, 15 bp, Homo sapiens
actggatcctagagt

SEQ ID NO: 1602493 - DNA, 15 bp, Homo sapiens
cactggatcctagag

SEQ ID NO: 1602494 - DNA, 15 bp, Homo sapiens
tcactggatcctaga

SEQ ID NO: 1602495 - DNA, 15 bp, Homo sapiens
ctcactggatcctag

SEQ ID NO: 1602496 - DNA, 15 bp, Homo sapiens
tctcactggatccta

SEQ ID NO: 1602497 - DNA, 15 bp, Homo sapiens
atctcactggatcct

SEQ ID NO: 1602498 - DNA, 15 bp, Homo sapiens
tatctcactggatcc

SEQ ID NO: 1602499 - DNA, 15 bp, Homo sapiens
ctatctcactggatc

SEQ ID NO: 1602500 - DNA, 15 bp, Homo sapiens
tctatctcactggat

SEQ ID NO: 1602501 - DNA, 15 bp, Homo sapiens
ctctatctcactgga

SEQ ID NO: 1602502 - DNA, 15 bp, Homo sapiens
tctctatctcactgg

SEQ ID NO: 1602503 - DNA, 15 bp, Homo sapiens
ctctctatctcactg

SEQ ID NO: 1602504 - DNA, 15 bp, Homo sapiens
cctctctatctcact

SEQ ID NO: 1602505 - DNA, 15 bp, Homo sapiens
ccctctctatctcac

SEQ ID NO: 1602506 - DNA, 15 bp, Homo sapiens
accctctctatctca

SEQ ID NO: 1602507 - DNA, 15 bp, Homo sapiens
aaccctctctatctc

SEQ ID NO: 1602508 - DNA, 15 bp, Homo sapiens
caaccctctctatct

SEQ ID NO: 1602509 - DNA, 15 bp, Homo sapiens
acaaccctctctatc

SEQ ID NO: 1602510 - DNA, 15 bp, Homo sapiens
tacaaccctctctat

SEQ ID NO: 1602511 - DNA, 15 bp, Homo sapiens
ttacaaccctctcta

SEQ ID NO: 1602512 - DNA, 15 bp, Homo sapiens
attacaaccctctct

SEQ ID NO: 1602513 - DNA, 15 bp, Homo sapiens
cattacaaccctctc

SEQ ID NO: 1602514 - DNA, 15 bp, Homo sapiens
ccattacaaccctct

SEQ ID NO: 1602515 - DNA, 15 bp, Homo sapiens
tccattacaaccctc

SEQ ID NO: 1602516 - DNA, 15 bp, Homo sapiens
ctccattacaaccct

SEQ ID NO: 1602517 - DNA, 15 bp, Homo sapiens
tctccattacaaccc

SEQ ID NO: 1602518 - DNA, 15 bp, Homo sapiens
atctccattacaacc

SEQ ID NO: 1602519 - DNA, 15 bp, Homo sapiens
aatctccattacaac

SEQ ID NO: 1602520 - DNA, 15 bp, Homo sapiens
gaatctccattacaa

SEQ ID NO: 1602521 - DNA, 15 bp, Homo sapiens
cgaatctccattaca

SEQ ID NO: 1602522 - DNA, 15 bp, Homo sapiens
acgaatctccattac

SEQ ID NO: 1602523 - DNA, 15 bp, Homo sapiens
cacgaatctccatta

SEQ ID NO: 1602524 - DNA, 15 bp, Homo sapiens
acacgaatctccatt

SEQ ID NO: 1602525 - DNA, 15 bp, Homo sapiens
cacacgaatctccat

SEQ ID NO: 1602526 - DNA, 15 bp, Homo sapiens
acacacgaatctcca

SEQ ID NO: 1602527 - DNA, 15 bp, Homo sapiens
cacacacgaatctcc

SEQ ID NO: 1602528 - DNA, 15 bp, Homo sapiens
ccacacacgaatctc

SEQ ID NO: 1602529 - DNA, 15 bp, Homo sapiens
cccacacacgaatct

SEQ ID NO: 1602530 - DNA, 15 bp, Homo sapiens
acccacacacgaatc

SEQ ID NO: 1602531 - DNA, 15 bp, Homo sapiens
aacccacacacgaat

SEQ ID NO: 1602532 - DNA, 15 bp, Homo sapiens
aaacccacacacgaa

SEQ ID NO: 1602533 - DNA, 15 bp, Homo sapiens
aaaacccacacacga

SEQ ID NO: 1602534 - DNA, 15 bp, Homo sapiens
aaaaacccacacacg

SEQ ID NO: 1602535 - DNA, 15 bp, Homo sapiens
caaaaacccacacac

SEQ ID NO: 1602536 - DNA, 15 bp, Homo sapiens
gcaaaaacccacaca

SEQ ID NO: 1602537 - DNA, 15 bp, Homo sapiens
tgcaaaaacccacac

SEQ ID NO: 1602538 - DNA, 15 bp, Homo sapiens
gtgcaaaaacccaca

SEQ ID NO: 1602539 - DNA, 15 bp, Homo sapiens
ggtgcaaaaacccac

SEQ ID NO: 1602540 - DNA, 15 bp, Homo sapiens
tggtgcaaaaaccca

SEQ ID NO: 1602541 - DNA, 15 bp, Homo sapiens
atggtgcaaaaaccc

SEQ ID NO: 1602542 - DNA, 15 bp, Homo sapiens
aatggtgcaaaaacc

SEQ ID NO: 1602543 - DNA, 15 bp, Homo sapiens
aaatggtgcaaaaac

SEQ ID NO: 1602544 - DNA, 15 bp, Homo sapiens
gaaatggtgcaaaaa

SEQ ID NO: 1602545 - DNA, 15 bp, Homo sapiens
agaaatggtgcaaaa

SEQ ID NO: 1602546 - DNA, 15 bp, Homo sapiens
aagaaatggtgcaaa

SEQ ID NO: 1602547 - DNA, 15 bp, Homo sapiens
caagaaatggtgcaa

SEQ ID NO: 1602548 - DNA, 15 bp, Homo sapiens
tcaagaaatggtgca

SEQ ID NO: 1602549 - DNA, 15 bp, Homo sapiens
atcaagaaatggtgc

SEQ ID NO: 1602550 - DNA, 15 bp, Homo sapiens
gatcaagaaatggtg

SEQ ID NO: 1602551 - DNA, 15 bp, Homo sapiens
agatcaagaaatggt

SEQ ID NO: 1602552 - DNA, 15 bp, Homo sapiens
gagatcaagaaatgg

SEQ ID NO: 1602553 - DNA, 15 bp, Homo sapiens
agagatcaagaaatg

SEQ ID NO: 1602554 - DNA, 15 bp, Homo sapiens
gagagatcaagaaat

SEQ ID NO: 1602555 - DNA, 15 bp, Homo sapiens
tgagagatcaagaaa

SEQ ID NO: 1602556 - DNA, 15 bp, Homo sapiens
ctgagagatcaagaa

SEQ ID NO: 1602557 - DNA, 15 bp, Homo sapiens
gctgagagatcaaga

SEQ ID NO: 1602558 - DNA, 15 bp, Homo sapiens
tgctgagagatcaag

SEQ ID NO: 1602559 - DNA, 15 bp, Homo sapiens
atgctgagagatcaa

SEQ ID NO: 1602560 - DNA, 15 bp, Homo sapiens
aatgctgagagatca

SEQ ID NO: 1602561 - DNA, 15 bp, Homo sapiens
gaatgctgagagatc

SEQ ID NO: 1602562 - DNA, 15 bp, Homo sapiens
ggaatgctgagagat

SEQ ID NO: 1602563 - DNA, 15 bp, Homo sapiens
tggaatgctgagaga

SEQ ID NO: 1602564 - DNA, 15 bp, Homo sapiens
ttggaatgctgagag

SEQ ID NO: 1602565 - DNA, 15 bp, Homo sapiens
cttggaatgctgaga

SEQ ID NO: 1602566 - DNA, 15 bp, Homo sapiens
ccttggaatgctgag

SEQ ID NO: 1602567 - DNA, 15 bp, Homo sapiens
accttggaatgctga

SEQ ID NO: 1602568 - DNA, 15 bp, Homo sapiens
gaccttggaatgctg

SEQ ID NO: 1602569 - DNA, 15 bp, Homo sapiens
cgaccttggaatgct

SEQ ID NO: 1602570 - DNA, 15 bp, Homo sapiens
acgaccttggaatgc

SEQ ID NO: 1602571 - DNA, 15 bp, Homo sapiens
cacgaccttggaatg

SEQ ID NO: 1602572 - DNA, 15 bp, Homo sapiens
tcacgaccttggaat

SEQ ID NO: 1602573 - DNA, 15 bp, Homo sapiens
ctcacgaccttggaa

SEQ ID NO: 1602574 - DNA, 15 bp, Homo sapiens
tctcacgaccttgga

SEQ ID NO: 1602575 - DNA, 15 bp, Homo sapiens
ctctcacgaccttgg

SEQ ID NO: 1602576 - DNA, 15 bp, Homo sapiens
cctctcacgaccttg

SEQ ID NO: 1602577 - DNA, 15 bp, Homo sapiens
tcctctcacgacctt

SEQ ID NO: 1602578 - DNA, 15 bp, Homo sapiens
ctcctctcacgacct

SEQ ID NO: 1602579 - DNA, 15 bp, Homo sapiens
actcctctcacgacc

SEQ ID NO: 1602580 - DNA, 15 bp, Homo sapiens
gactcctctcacgac

SEQ ID NO: 1602581 - DNA, 15 bp, Homo sapiens
ggactcctctcacga

SEQ ID NO: 1602582 - DNA, 15 bp, Homo sapiens
aggactcctctcacg

SEQ ID NO: 1602583 - DNA, 15 bp, Homo sapiens
aaggactcctctcac

SEQ ID NO: 1602584 - DNA, 15 bp, Homo sapiens
caaggactcctctca

SEQ ID NO: 1602585 - DNA, 15 bp, Homo sapiens
tcaaggactcctctc

SEQ ID NO: 1602586 - DNA, 15 bp, Homo sapiens
ctcaaggactcctct

SEQ ID NO: 1602587 - DNA, 15 bp, Homo sapiens
actcaaggactcctc

SEQ ID NO: 1602588 - DNA, 15 bp, Homo sapiens
cactcaaggactcct

SEQ ID NO: 1602589 - DNA, 15 bp, Homo sapiens
ccactcaaggactcc

SEQ ID NO: 1602590 - DNA, 15 bp, Homo sapiens
tccactcaaggactc

SEQ ID NO: 1602591 - DNA, 15 bp, Homo sapiens
ttccactcaaggact

SEQ ID NO: 1602592 - DNA, 15 bp, Homo sapiens
cttccactcaaggac

SEQ ID NO: 1602593 - DNA, 15 bp, Homo sapiens
acttccactcaagga

SEQ ID NO: 1602594 - DNA, 15 bp, Homo sapiens
gacttccactcaagg

SEQ ID NO: 1602595 - DNA, 15 bp, Homo sapiens
ggacttccactcaag

SEQ ID NO: 1602596 - DNA, 15 bp, Homo sapiens
cggacttccactcaa

SEQ ID NO: 1602597 - DNA, 15 bp, Homo sapiens
acggacttccactca

SEQ ID NO: 1602598 - DNA, 15 bp, Homo sapiens
gacggacttccactc

SEQ ID NO: 1602599 - DNA, 15 bp, Homo sapiens
ggacggacttccact

SEQ ID NO: 1602600 - DNA, 15 bp, Homo sapiens
aggacggacttccac

SEQ ID NO: 1602601 - DNA, 15 bp, Homo sapiens
taggacggacttcca

SEQ ID NO: 1602602 - DNA, 15 bp, Homo sapiens
ctaggacggacttcc

SEQ ID NO: 1602603 - DNA, 15 bp, Homo sapiens
cctaggacggacttc

SEQ ID NO: 1602604 - DNA, 15 bp, Homo sapiens
acctaggacggactt

SEQ ID NO: 1602605 - DNA, 15 bp, Homo sapiens
aacctaggacggact

SEQ ID NO: 1602606 - DNA, 15 bp, Homo sapiens
aaacctaggacggac

SEQ ID NO: 1602607 - DNA, 15 bp, Homo sapiens
caaacctaggacgga

SEQ ID NO: 1602608 - DNA, 15 bp, Homo sapiens
tcaaacctaggacgg

SEQ ID NO: 1602609 - DNA, 15 bp, Homo sapiens
ttcaaacctaggacg

SEQ ID NO: 1602610 - DNA, 15 bp, Homo sapiens
gttcaaacctaggac

SEQ ID NO: 1602611 - DNA, 15 bp, Homo sapiens
ggttcaaacctagga

SEQ ID NO: 1602612 - DNA, 15 bp, Homo sapiens
gggttcaaacctagg

SEQ ID NO: 1602613 - DNA, 15 bp, Homo sapiens
agggttcaaacctag

SEQ ID NO: 1602614 - DNA, 15 bp, Homo sapiens
cagggttcaaaccta

SEQ ID NO: 1602615 - DNA, 15 bp, Homo sapiens
ccagggttcaaacct

SEQ ID NO: 1602616 - DNA, 15 bp, Homo sapiens
gccagggttcaaacc

SEQ ID NO: 1602617 - DNA, 15 bp, Homo sapiens
agccagggttcaaac

SEQ ID NO: 1602618 - DNA, 15 bp, Homo sapiens
aagccagggttcaaa

SEQ ID NO: 1602619 - DNA, 15 bp, Homo sapiens
aaagccagggttcaa

SEQ ID NO: 1602620 - DNA, 15 bp, Homo sapiens
caaagccagggttca

SEQ ID NO: 1602621 - DNA, 15 bp, Homo sapiens
gcaaagccagggttc

SEQ ID NO: 1602622 - DNA, 15 bp, Homo sapiens
ggcaaagccagggtt

SEQ ID NO: 1602623 - DNA, 15 bp, Homo sapiens
aggcaaagccagggt

SEQ ID NO: 1602624 - DNA, 15 bp, Homo sapiens
aaggcaaagccaggg

SEQ ID NO: 1602625 - DNA, 15 bp, Homo sapiens
aaaggcaaagccagg

SEQ ID NO: 1602626 - DNA, 15 bp, Homo sapiens
aaaaggcaaagccag

SEQ ID NO: 1602627 - DNA, 15 bp, Homo sapiens
aaaaaggcaaagcca

SEQ ID NO: 1602628 - DNA, 15 bp, Homo sapiens
gaaaaaggcaaagcc

SEQ ID NO: 1602629 - DNA, 15 bp, Homo sapiens
ggaaaaaggcaaagc

SEQ ID NO: 1602630 - DNA, 15 bp, Homo sapiens
tggaaaaaggcaaag

SEQ ID NO: 1602631 - DNA, 15 bp, Homo sapiens
ctggaaaaaggcaaa

SEQ ID NO: 1602632 - DNA, 15 bp, Homo sapiens
gctggaaaaaggcaa

SEQ ID NO: 1602633 - DNA, 15 bp, Homo sapiens
agctggaaaaaggca

SEQ ID NO: 1602634 - DNA, 15 bp, Homo sapiens
cagctggaaaaaggc

SEQ ID NO: 1602635 - DNA, 15 bp, Homo sapiens
acagctggaaaaagg

SEQ ID NO: 1602636 - DNA, 15 bp, Homo sapiens
cacagctggaaaaag

SEQ ID NO: 1602637 - DNA, 15 bp, Homo sapiens
gcacagctggaaaaa

SEQ ID NO: 1602638 - DNA, 15 bp, Homo sapiens
tgcacagctggaaaa

SEQ ID NO: 1602639 - DNA, 15 bp, Homo sapiens
ctgcacagctggaaa

SEQ ID NO: 1602640 - DNA, 15 bp, Homo sapiens
actgcacagctggaa

SEQ ID NO: 1602641 - DNA, 15 bp, Homo sapiens
tactgcacagctgga

SEQ ID NO: 1602642 - DNA, 15 bp, Homo sapiens
gtactgcacagctgg

SEQ ID NO: 1602643 - DNA, 15 bp, Homo sapiens
ggtactgcacagctg

SEQ ID NO: 1602644 - DNA, 15 bp, Homo sapiens
cggtactgcacagct

SEQ ID NO: 1602645 - DNA, 15 bp, Homo sapiens
gcggtactgcacagc

SEQ ID NO: 1602646 - DNA, 15 bp, Homo sapiens
agcggtactgcacag

SEQ ID NO: 1602647 - DNA, 15 bp, Homo sapiens
gagcggtactgcaca

SEQ ID NO: 1602648 - DNA, 15 bp, Homo sapiens
agagcggtactgcac

SEQ ID NO: 1602649 - DNA, 15 bp, Homo sapiens
aagagcggtactgca

SEQ ID NO: 1602650 - DNA, 15 bp, Homo sapiens
caagagcggtactgc

SEQ ID NO: 1602651 - DNA, 15 bp, Homo sapiens
acaagagcggtactg

SEQ ID NO: 1602652 - DNA, 15 bp, Homo sapiens
cacaagagcggtact

SEQ ID NO: 1602653 - DNA, 15 bp, Homo sapiens
ccacaagagcggtac

SEQ ID NO: 1602654 - DNA, 15 bp, Homo sapiens
cccacaagagcggta

SEQ ID NO: 1602655 - DNA, 15 bp, Homo sapiens
gcccacaagagcggt

SEQ ID NO: 1602656 - DNA, 15 bp, Homo sapiens
agcccacaagagcgg

SEQ ID NO: 1602657 - DNA, 15 bp, Homo sapiens
gagcccacaagagcg

SEQ ID NO: 1602658 - DNA, 15 bp, Homo sapiens
ggagcccacaagagc

SEQ ID NO: 1602659 - DNA, 15 bp, Homo sapiens
gggagcccacaagag

SEQ ID NO: 1602660 - DNA, 15 bp, Homo sapiens
cgggagcccacaaga

SEQ ID NO: 1602661 - DNA, 15 bp, Homo sapiens
gcgggagcccacaag

SEQ ID NO: 1602662 - DNA, 15 bp, Homo sapiens
ggcgggagcccacaa

SEQ ID NO: 1602663 - DNA, 15 bp, Homo sapiens
tggcgggagcccaca

SEQ ID NO: 1602664 - DNA, 15 bp, Homo sapiens
gtggcgggagcccac

SEQ ID NO: 1602665 - DNA, 15 bp, Homo sapiens
tgtggcgggagccca

SEQ ID NO: 1602666 - DNA, 15 bp, Homo sapiens
gtgtggcgggagccc

SEQ ID NO: 1602667 - DNA, 15 bp, Homo sapiens
ggtgtggcgggagcc

SEQ ID NO: 1602668 - DNA, 15 bp, Homo sapiens
gggtgtggcgggagc

SEQ ID NO: 1602669 - DNA, 15 bp, Homo sapiens
agggtgtggcgggag

SEQ ID NO: 1602670 - DNA, 15 bp, Homo sapiens
cagggtgtggcggga

SEQ ID NO: 1602671 - DNA, 15 bp, Homo sapiens
ccagggtgtggcggg

SEQ ID NO: 1602672 - DNA, 15 bp, Homo sapiens
tccagggtgtggcgg

SEQ ID NO: 1602673 - DNA, 15 bp, Homo sapiens
ctccagggtgtggcg

SEQ ID NO: 1602674 - DNA, 15 bp, Homo sapiens
actccagggtgtggc

SEQ ID NO: 1602675 - DNA, 15 bp, Homo sapiens
gactccagggtgtgg

SEQ ID NO: 1602676 - DNA, 15 bp, Homo sapiens
tgactccagggtgtg

SEQ ID NO: 1602677 - DNA, 15 bp, Homo sapiens
gtgactccagggtgt

SEQ ID NO: 1602678 - DNA, 15 bp, Homo sapiens
agtgactccagggtg

SEQ ID NO: 1602679 - DNA, 15 bp, Homo sapiens
gagtgactccagggt

SEQ ID NO: 1602680 - DNA, 15 bp, Homo sapiens
ggagtgactccaggg

SEQ ID NO: 1602681 - DNA, 15 bp, Homo sapiens
gggagtgactccagg

SEQ ID NO: 1602682 - DNA, 15 bp, Homo sapiens
tgggagtgactccag

SEQ ID NO: 1602683 - DNA, 15 bp, Homo sapiens
atgggagtgactcca

SEQ ID NO: 1602684 - DNA, 15 bp, Homo sapiens
gatgggagtgactcc

SEQ ID NO: 1602685 - DNA, 15 bp, Homo sapiens
tgatgggagtgactc

SEQ ID NO: 1602686 - DNA, 15 bp, Homo sapiens
gtgatgggagtgact

SEQ ID NO: 1602687 - DNA, 15 bp, Homo sapiens
tgtgatgggagtgac

SEQ ID NO: 1602688 - DNA, 15 bp, Homo sapiens
ctgtgatgggagtga

SEQ ID NO: 1602689 - DNA, 15 bp, Homo sapiens
gctgtgatgggagtg

SEQ ID NO: 1602690 - DNA, 15 bp, Homo sapiens
ggctgtgatgggagt

SEQ ID NO: 1602691 - DNA, 15 bp, Homo sapiens
tggctgtgatgggag

SEQ ID NO: 1602692 - DNA, 15 bp, Homo sapiens
ctggctgtgatggga

SEQ ID NO: 1602693 - DNA, 15 bp, Homo sapiens
tctggctgtgatggg

SEQ ID NO: 1602694 - DNA, 15 bp, Homo sapiens
ctctggctgtgatgg

SEQ ID NO: 1602695 - DNA, 15 bp, Homo sapiens
actctggctgtgatg

SEQ ID NO: 1602696 - DNA, 15 bp, Homo sapiens
tactctggctgtgat

SEQ ID NO: 1602697 - DNA, 15 bp, Homo sapiens
ttactctggctgtga

SEQ ID NO: 1602698 - DNA, 15 bp, Homo sapiens
tttactctggctgtg

SEQ ID NO: 1602699 - DNA, 15 bp, Homo sapiens
gtttactctggctgt

SEQ ID NO: 1602700 - DNA, 15 bp, Homo sapiens
ggtttactctggctg

SEQ ID NO: 1602701 - DNA, 15 bp, Homo sapiens
tggtttactctggct

SEQ ID NO: 1602702 - DNA, 15 bp, Homo sapiens
ctggtttactctggc

SEQ ID NO: 1602703 - DNA, 15 bp, Homo sapiens
actggtttactctgg

SEQ ID NO: 1602704 - DNA, 15 bp, Homo sapiens
cactggtttactctg

SEQ ID NO: 1602705 - DNA, 15 bp, Homo sapiens
acactggtttactct

SEQ ID NO: 1602706 - DNA, 15 bp, Homo sapiens
cacactggtttactc

SEQ ID NO: 1602707 - DNA, 15 bp, Homo sapiens
acacactggtttact

SEQ ID NO: 1602708 - DNA, 15 bp, Homo sapiens
cacacactggtttac

SEQ ID NO: 1602709 - DNA, 15 bp, Homo sapiens
acacacactggttta

SEQ ID NO: 1602710 - DNA, 15 bp, Homo sapiens
aacacacactggttt

SEQ ID NO: 1602711 - DNA, 15 bp, Homo sapiens
aaacacacactggtt

SEQ ID NO: 1602712 - DNA, 15 bp, Homo sapiens
aaaacacacactggt

SEQ ID NO: 1602713 - DNA, 15 bp, Homo sapiens
gaaaacacacactgg

SEQ ID NO: 1602714 - DNA, 15 bp, Homo sapiens
agaaaacacacactg

SEQ ID NO: 1602715 - DNA, 15 bp, Homo sapiens
cagaaaacacacact

SEQ ID NO: 1602716 - DNA, 15 bp, Homo sapiens
ccagaaaacacacac

SEQ ID NO: 1602717 - DNA, 15 bp, Homo sapiens
gccagaaaacacaca

SEQ ID NO: 1602718 - DNA, 15 bp, Homo sapiens
agccagaaaacacac

SEQ ID NO: 1602719 - DNA, 15 bp, Homo sapiens
aagccagaaaacaca

SEQ ID NO: 1602720 - DNA, 15 bp, Homo sapiens
gaagccagaaaacac

SEQ ID NO: 1602721 - DNA, 15 bp, Homo sapiens
ggaagccagaaaaca

SEQ ID NO: 1602722 - DNA, 15 bp, Homo sapiens
gggaagccagaaaac

SEQ ID NO: 1602723 - DNA, 15 bp, Homo sapiens
agggaagccagaaaa

SEQ ID NO: 1602724 - DNA, 15 bp, Homo sapiens
gagggaagccagaaa

SEQ ID NO: 1602725 - DNA, 15 bp, Homo sapiens
ggagggaagccagaa

SEQ ID NO: 1602726 - DNA, 15 bp, Homo sapiens
aggagggaagccaga

SEQ ID NO: 1602727 - DNA, 15 bp, Homo sapiens
aaggagggaagccag

SEQ ID NO: 1602728 - DNA, 15 bp, Homo sapiens
caaggagggaagcca

SEQ ID NO: 1602729 - DNA, 15 bp, Homo sapiens
tcaaggagggaagcc

SEQ ID NO: 1602730 - DNA, 15 bp, Homo sapiens
ctcaaggagggaagc

SEQ ID NO: 1602731 - DNA, 15 bp, Homo sapiens
cctcaaggagggaag

SEQ ID NO: 1602732 - DNA, 15 bp, Homo sapiens
ccctcaaggagggaa

SEQ ID NO: 1602733 - DNA, 15 bp, Homo sapiens
accctcaaggaggga

SEQ ID NO: 1602734 - DNA, 15 bp, Homo sapiens
caccctcaaggaggg

SEQ ID NO: 1602735 - DNA, 15 bp, Homo sapiens
tcaccctcaaggagg

SEQ ID NO: 1602736 - DNA, 15 bp, Homo sapiens
ctcaccctcaaggag

SEQ ID NO: 1602737 - DNA, 15 bp, Homo sapiens
gctcaccctcaagga

SEQ ID NO: 1602738 - DNA, 15 bp, Homo sapiens
ggctcaccctcaagg

SEQ ID NO: 1602739 - DNA, 15 bp, Homo sapiens
gggctcaccctcaag

SEQ ID NO: 1602740 - DNA, 15 bp, Homo sapiens
ggggctcaccctcaa

SEQ ID NO: 1602741 - DNA, 15 bp, Homo sapiens
aggggctcaccctca

SEQ ID NO: 1602742 - DNA, 15 bp, Homo sapiens
caggggctcaccctc

SEQ ID NO: 1602743 - DNA, 15 bp, Homo sapiens
acaggggctcaccct

SEQ ID NO: 1602744 - DNA, 15 bp, Homo sapiens
aacaggggctcaccc

SEQ ID NO: 1602745 - DNA, 15 bp, Homo sapiens
aaacaggggctcacc

SEQ ID NO: 1602746 - DNA, 15 bp, Homo sapiens
aaaacaggggctcac

SEQ ID NO: 1602747 - DNA, 15 bp, Homo sapiens
taaaacaggggctca

SEQ ID NO: 1602748 - DNA, 15 bp, Homo sapiens
ataaaacaggggctc

SEQ ID NO: 1602749 - DNA, 15 bp, Homo sapiens
gataaaacaggggct

SEQ ID NO: 1602750 - DNA, 15 bp, Homo sapiens
agataaaacaggggc

SEQ ID NO: 1602751 - DNA, 15 bp, Homo sapiens
tagataaaacagggg

SEQ ID NO: 1602752 - DNA, 15 bp, Homo sapiens
atagataaaacaggg

SEQ ID NO: 1602753 - DNA, 15 bp, Homo sapiens
gatagataaaacagg

SEQ ID NO: 1602754 - DNA, 15 bp, Homo sapiens
agatagataaaacag

SEQ ID NO: 1602755 - DNA, 15 bp, Homo sapiens
aagatagataaaaca

SEQ ID NO: 1602756 - DNA, 15 bp, Homo sapiens
aaagatagataaaac

SEQ ID NO: 1602757 - DNA, 15 bp, Homo sapiens
caaagatagataaaa

SEQ ID NO: 1602758 - DNA, 15 bp, Homo sapiens
tcaaagatagataaa

SEQ ID NO: 1602759 - DNA, 15 bp, Homo sapiens
ttcaaagatagataa

SEQ ID NO: 1602760 - DNA, 15 bp, Homo sapiens
gttcaaagatagata

SEQ ID NO: 1602761 - DNA, 15 bp, Homo sapiens
ggttcaaagatagat

SEQ ID NO: 1602762 - DNA, 15 bp, Homo sapiens
gggttcaaagataga

SEQ ID NO: 1602763 - DNA, 15 bp, Homo sapiens
ggggttcaaagatag

SEQ ID NO: 1602764 - DNA, 15 bp, Homo sapiens
gggggttcaaagata

SEQ ID NO: 1602765 - DNA, 15 bp, Homo sapiens
ggggggttcaaagat

SEQ ID NO: 1602766 - DNA, 15 bp, Homo sapiens
tggggggttcaaaga

SEQ ID NO: 1602767 - DNA, 15 bp, Homo sapiens
ctggggggttcaaag

SEQ ID NO: 1602768 - DNA, 15 bp, Homo sapiens
actggggggttcaaa

SEQ ID NO: 1602769 - DNA, 15 bp, Homo sapiens
cactggggggttcaa

SEQ ID NO: 1602770 - DNA, 15 bp, Homo sapiens
gcactggggggttca

SEQ ID NO: 1602771 - DNA, 15 bp, Homo sapiens
ggcactggggggttc

SEQ ID NO: 1602772 - DNA, 15 bp, Homo sapiens
aggcactggggggtt

SEQ ID NO: 1602773 - DNA, 15 bp, Homo sapiens
gaggcactggggggt

SEQ ID NO: 1602774 - DNA, 15 bp, Homo sapiens
cgaggcactgggggg

SEQ ID NO: 1602775 - DNA, 15 bp, Homo sapiens
tcgaggcactggggg

SEQ ID NO: 1602776 - DNA, 15 bp, Homo sapiens
ctcgaggcactgggg

SEQ ID NO: 1602777 - DNA, 15 bp, Homo sapiens
tctcgaggcactggg

SEQ ID NO: 1602778 - DNA, 15 bp, Homo sapiens
ttctcgaggcactgg

SEQ ID NO: 1602779 - DNA, 15 bp, Homo sapiens
tttctcgaggcactg

SEQ ID NO: 1602780 - DNA, 15 bp, Homo sapiens
gtttctcgaggcact

SEQ ID NO: 1602781 - DNA, 15 bp, Homo sapiens
cgtttctcgaggcac

SEQ ID NO: 1602782 - DNA, 15 bp, Homo sapiens
gcgtttctcgaggca

SEQ ID NO: 1602783 - DNA, 15 bp, Homo sapiens
agcgtttctcgaggc

SEQ ID NO: 1602784 - DNA, 15 bp, Homo sapiens
cagcgtttctcgagg

SEQ ID NO: 1602785 - DNA, 15 bp, Homo sapiens
tcagcgtttctcgag

SEQ ID NO: 1602786 - DNA, 15 bp, Homo sapiens
ctcagcgtttctcga

SEQ ID NO: 1602787 - DNA, 15 bp, Homo sapiens
cctcagcgtttctcg

SEQ ID NO: 1602788 - DNA, 15 bp, Homo sapiens
tcctcagcgtttctc

SEQ ID NO: 1602789 - DNA, 15 bp, Homo sapiens
ttcctcagcgtttct

SEQ ID NO: 1602790 - DNA, 15 bp, Homo sapiens
tttcctcagcgtttc

SEQ ID NO: 1602791 - DNA, 15 bp, Homo sapiens
gtttcctcagcgttt

SEQ ID NO: 1602792 - DNA, 15 bp, Homo sapiens
tgtttcctcagcgtt

SEQ ID NO: 1602793 - DNA, 15 bp, Homo sapiens
gtgtttcctcagcgt

SEQ ID NO: 1602794 - DNA, 15 bp, Homo sapiens
tgtgtttcctcagcg

SEQ ID NO: 1602795 - DNA, 15 bp, Homo sapiens
ctgtgtttcctcagc

SEQ ID NO: 1602796 - DNA, 15 bp, Homo sapiens
gctgtgtttcctcag

SEQ ID NO: 1602797 - DNA, 15 bp, Homo sapiens
ggctgtgtttcctca

SEQ ID NO: 1602798 - DNA, 15 bp, Homo sapiens
aggctgtgtttcctc

SEQ ID NO: 1602799 - DNA, 15 bp, Homo sapiens
gaggctgtgtttcct

SEQ ID NO: 1602800 - DNA, 15 bp, Homo sapiens
ggaggctgtgtttcc

SEQ ID NO: 1602801 - DNA, 15 bp, Homo sapiens
cggaggctgtgtttc

SEQ ID NO: 1602802 - DNA, 15 bp, Homo sapiens
tcggaggctgtgttt

SEQ ID NO: 1602803 - DNA, 15 bp, Homo sapiens
ctcggaggctgtgtt

SEQ ID NO: 1602804 - DNA, 15 bp, Homo sapiens
gctcggaggctgtgt

SEQ ID NO: 1602805 - DNA, 15 bp, Homo sapiens
tgctcggaggctgtg

SEQ ID NO: 1602806 - DNA, 15 bp, Homo sapiens
gtgctcggaggctgt

SEQ ID NO: 1602807 - DNA, 15 bp, Homo sapiens
ggtgctcggaggctg

SEQ ID NO: 1602808 - DNA, 15 bp, Homo sapiens
aggtgctcggaggct

SEQ ID NO: 1602809 - DNA, 15 bp, Homo sapiens
caggtgctcggaggc

SEQ ID NO: 1602810 - DNA, 15 bp, Homo sapiens
acaggtgctcggagg

SEQ ID NO: 1602811 - DNA, 15 bp, Homo sapiens
aacaggtgctcggag

SEQ ID NO: 1602812 - DNA, 15 bp, Homo sapiens
aaacaggtgctcgga

SEQ ID NO: 1602813 - DNA, 15 bp, Homo sapiens
gaaacaggtgctcgg

SEQ ID NO: 1602814 - DNA, 15 bp, Homo sapiens
ggaaacaggtgctcg

SEQ ID NO: 1602815 - DNA, 15 bp, Homo sapiens
aggaaacaggtgctc

SEQ ID NO: 1602816 - DNA, 15 bp, Homo sapiens
caggaaacaggtgct

SEQ ID NO: 1602817 - DNA, 15 bp, Homo sapiens
tcaggaaacaggtgc

SEQ ID NO: 1602818 - DNA, 15 bp, Homo sapiens
ctcaggaaacaggtg

SEQ ID NO: 1602819 - DNA, 15 bp, Homo sapiens
gctcaggaaacaggt

SEQ ID NO: 1602820 - DNA, 15 bp, Homo sapiens
agctcaggaaacagg

SEQ ID NO: 1602821 - DNA, 15 bp, Homo sapiens
cagctcaggaaacag

SEQ ID NO: 1602822 - DNA, 15 bp, Homo sapiens
acagctcaggaaaca

SEQ ID NO: 1602823 - DNA, 15 bp, Homo sapiens
tacagctcaggaaac

SEQ ID NO: 1602824 - DNA, 15 bp, Homo sapiens
ttacagctcaggaaa

SEQ ID NO: 1602825 - DNA, 15 bp, Homo sapiens
tttacagctcaggaa

SEQ ID NO: 1602826 - DNA, 15 bp, Homo sapiens
ttttacagctcagga

SEQ ID NO: 1602827 - DNA, 15 bp, Homo sapiens
tttttacagctcagg

SEQ ID NO: 1602828 - DNA, 15 bp, Homo sapiens
ttttttacagctcag

SEQ ID NO: 1602829 - DNA, 15 bp, Homo sapiens
attttttacagctca

SEQ ID NO: 1602830 - DNA, 15 bp, Homo sapiens
cattttttacagctc

SEQ ID NO: 1602831 - DNA, 15 bp, Homo sapiens
ccattttttacagct

SEQ ID NO: 1602832 - DNA, 15 bp, Homo sapiens
accattttttacagc

SEQ ID NO: 1602833 - DNA, 15 bp, Homo sapiens
gaccattttttacag

SEQ ID NO: 1602834 - DNA, 15 bp, Homo sapiens
tgaccattttttaca

SEQ ID NO: 1602835 - DNA, 15 bp, Homo sapiens
gtgaccattttttac

SEQ ID NO: 1602836 - DNA, 15 bp, Homo sapiens
tgtgaccatttttta

SEQ ID NO: 1602837 - DNA, 15 bp, Homo sapiens
ttgtgaccatttttt

SEQ ID NO: 1602838 - DNA, 15 bp, Homo sapiens
gttgtgaccattttt

SEQ ID NO: 1602839 - DNA, 15 bp, Homo sapiens
ggttgtgaccatttt

SEQ ID NO: 1602840 - DNA, 15 bp, Homo sapiens
aggttgtgaccattt

SEQ ID NO: 1602841 - DNA, 15 bp, Homo sapiens
caggttgtgaccatt

SEQ ID NO: 1602842 - DNA, 15 bp, Homo sapiens
gcaggttgtgaccat

SEQ ID NO: 1602843 - DNA, 15 bp, Homo sapiens
ggcaggttgtgacca

SEQ ID NO: 1602844 - DNA, 15 bp, Homo sapiens
gggcaggttgtgacc

SEQ ID NO: 1602845 - DNA, 15 bp, Homo sapiens
agggcaggttgtgac

SEQ ID NO: 1602846 - DNA, 15 bp, Homo sapiens
cagggcaggttgtga

SEQ ID NO: 1602847 - DNA, 15 bp, Homo sapiens
acagggcaggttgtg

SEQ ID NO: 1602848 - DNA, 15 bp, Homo sapiens
cacagggcaggttgt

SEQ ID NO: 1602849 - DNA, 15 bp, Homo sapiens
acacagggcaggttg

SEQ ID NO: 1602850 - DNA, 15 bp, Homo sapiens
tacacagggcaggtt

SEQ ID NO: 1602851 - DNA, 15 bp, Homo sapiens
gtacacagggcaggt

SEQ ID NO: 1602852 - DNA, 15 bp, Homo sapiens
agtacacagggcagg

SEQ ID NO: 1602853 - DNA, 15 bp, Homo sapiens
cagtacacagggcag

SEQ ID NO: 1602854 - DNA, 15 bp, Homo sapiens
ccagtacacagggca

SEQ ID NO: 1602855 - DNA, 15 bp, Homo sapiens
gccagtacacagggc

SEQ ID NO: 1602856 - DNA, 15 bp, Homo sapiens
agccagtacacaggg

SEQ ID NO: 1602857 - DNA, 15 bp, Homo sapiens
aagccagtacacagg

SEQ ID NO: 1602858 - DNA, 15 bp, Homo sapiens
caagccagtacacag

SEQ ID NO: 1602859 - DNA, 15 bp, Homo sapiens
ccaagccagtacaca

SEQ ID NO: 1602860 - DNA, 15 bp, Homo sapiens
accaagccagtacac

SEQ ID NO: 1602861 - DNA, 15 bp, Homo sapiens
aaccaagccagtaca

SEQ ID NO: 1602862 - DNA, 15 bp, Homo sapiens
aaaccaagccagtac

SEQ ID NO: 1602863 - DNA, 15 bp, Homo sapiens
caaaccaagccagta

SEQ ID NO: 1602864 - DNA, 15 bp, Homo sapiens
acaaaccaagccagt

SEQ ID NO: 1602865 - DNA, 15 bp, Homo sapiens
cacaaaccaagccag

SEQ ID NO: 1602866 - DNA, 15 bp, Homo sapiens
gcacaaaccaagcca

SEQ ID NO: 1602867 - DNA, 15 bp, Homo sapiens
agcacaaaccaagcc

SEQ ID NO: 1602868 - DNA, 15 bp, Homo sapiens
tagcacaaaccaagc

SEQ ID NO: 1602869 - DNA, 15 bp, Homo sapiens
ctagcacaaaccaag

SEQ ID NO: 1602870 - DNA, 15 bp, Homo sapiens
cctagcacaaaccaa

SEQ ID NO: 1602871 - DNA, 15 bp, Homo sapiens
ccctagcacaaacca

SEQ ID NO: 1602872 - DNA, 15 bp, Homo sapiens
tccctagcacaaacc

SEQ ID NO: 1602873 - DNA, 15 bp, Homo sapiens
atccctagcacaaac

SEQ ID NO: 1602874 - DNA, 15 bp, Homo sapiens
gatccctagcacaaa

SEQ ID NO: 1602875 - DNA, 15 bp, Homo sapiens
ggatccctagcacaa

SEQ ID NO: 1602876 - DNA, 15 bp, Homo sapiens
tggatccctagcaca

SEQ ID NO: 1602877 - DNA, 15 bp, Homo sapiens
ttggatccctagcac

SEQ ID NO: 1602878 - DNA, 15 bp, Homo sapiens
tttggatccctagca

SEQ ID NO: 1602879 - DNA, 15 bp, Homo sapiens
gtttggatccctagc

SEQ ID NO: 1602880 - DNA, 15 bp, Homo sapiens
tgtttggatccctag

SEQ ID NO: 1602881 - DNA, 15 bp, Homo sapiens
ttgtttggatcccta

SEQ ID NO: 1602882 - DNA, 15 bp, Homo sapiens
attgtttggatccct

SEQ ID NO: 1602883 - DNA, 15 bp, Homo sapiens
aattgtttggatccc

SEQ ID NO: 1602884 - DNA, 15 bp, Homo sapiens
gaattgtttggatcc

SEQ ID NO: 1602885 - DNA, 15 bp, Homo sapiens
tgaattgtttggatc

SEQ ID NO: 1602886 - DNA, 15 bp, Homo sapiens
ctgaattgtttggat

SEQ ID NO: 1602887 - DNA, 15 bp, Homo sapiens
cctgaattgtttgga

SEQ ID NO: 1602888 - DNA, 15 bp, Homo sapiens
tcctgaattgtttgg

SEQ ID NO: 1602889 - DNA, 15 bp, Homo sapiens
atcctgaattgtttg

SEQ ID NO: 1602890 - DNA, 15 bp, Homo sapiens
catcctgaattgttt

SEQ ID NO: 1602891 - DNA, 15 bp, Homo sapiens
tcatcctgaattgtt

SEQ ID NO: 1602892 - DNA, 15 bp, Homo sapiens
ctcatcctgaattgt

SEQ ID NO: 1602893 - DNA, 15 bp, Homo sapiens
tctcatcctgaattg

SEQ ID NO: 1602894 - DNA, 15 bp, Homo sapiens
atctcatcctgaatt

SEQ ID NO: 1602895 - DNA, 15 bp, Homo sapiens
gatctcatcctgaat

SEQ ID NO: 1602896 - DNA, 15 bp, Homo sapiens
tgatctcatcctgaa

SEQ ID NO: 1602897 - DNA, 15 bp, Homo sapiens
atgatctcatcctga

SEQ ID NO: 1602898 - DNA, 15 bp, Homo sapiens
catgatctcatcctg

SEQ ID NO: 1602899 - DNA, 15 bp, Homo sapiens
acatgatctcatcct

SEQ ID NO: 1602900 - DNA, 15 bp, Homo sapiens
cacatgatctcatcc

SEQ ID NO: 1602901 - DNA, 15 bp, Homo sapiens
gcacatgatctcatc

SEQ ID NO: 1602902 - DNA, 15 bp, Homo sapiens
ggcacatgatctcat

SEQ ID NO: 1602903 - DNA, 15 bp, Homo sapiens
aggcacatgatctca

SEQ ID NO: 1602904 - DNA, 15 bp, Homo sapiens
caggcacatgatctc

SEQ ID NO: 1602905 - DNA, 15 bp, Homo sapiens
tcaggcacatgatct

SEQ ID NO: 1602906 - DNA, 15 bp, Homo sapiens
ctcaggcacatgatc

SEQ ID NO: 1602907 - DNA, 15 bp, Homo sapiens
actcaggcacatgat

SEQ ID NO: 1602908 - DNA, 15 bp, Homo sapiens
aactcaggcacatga

SEQ ID NO: 1602909 - DNA, 15 bp, Homo sapiens
aaactcaggcacatg

SEQ ID NO: 1602910 - DNA, 15 bp, Homo sapiens
caaactcaggcacat

SEQ ID NO: 1602911 - DNA, 15 bp, Homo sapiens
acaaactcaggcaca

SEQ ID NO: 1602912 - DNA, 15 bp, Homo sapiens
tacaaactcaggcac

SEQ ID NO: 1602913 - DNA, 15 bp, Homo sapiens
ctacaaactcaggca

SEQ ID NO: 1602914 - DNA, 15 bp, Homo sapiens
tctacaaactcaggc

SEQ ID NO: 1602915 - DNA, 15 bp, Homo sapiens
atctacaaactcagg

SEQ ID NO: 1602916 - DNA, 15 bp, Homo sapiens
gatctacaaactcag

SEQ ID NO: 1602917 - DNA, 15 bp, Homo sapiens
tgatctacaaactca

SEQ ID NO: 1602918 - DNA, 15 bp, Homo sapiens
gtgatctacaaactc

SEQ ID NO: 1602919 - DNA, 15 bp, Homo sapiens
tgtgatctacaaact

SEQ ID NO: 1602920 - DNA, 15 bp, Homo sapiens
ttgtgatctacaaac

SEQ ID NO: 1602921 - DNA, 15 bp, Homo sapiens
tttgtgatctacaaa

SEQ ID NO: 1602922 - DNA, 15 bp, Homo sapiens
ttttgtgatctacaa

SEQ ID NO: 1602923 - DNA, 15 bp, Homo sapiens
cttttgtgatctaca

SEQ ID NO: 1602924 - DNA, 15 bp, Homo sapiens
acttttgtgatctac

SEQ ID NO: 1602925 - DNA, 15 bp, Homo sapiens
gacttttgtgatcta

SEQ ID NO: 1602926 - DNA, 15 bp, Homo sapiens
cgacttttgtgatct

SEQ ID NO: 1602927 - DNA, 15 bp, Homo sapiens
gcgacttttgtgatc

SEQ ID NO: 1602928 - DNA, 15 bp, Homo sapiens
agcgacttttgtgat

SEQ ID NO: 1602929 - DNA, 15 bp, Homo sapiens
tagcgacttttgtga

SEQ ID NO: 1602930 - DNA, 15 bp, Homo sapiens
ttagcgacttttgtg

SEQ ID NO: 1602931 - DNA, 15 bp, Homo sapiens
attagcgacttttgt

SEQ ID NO: 1602932 - DNA, 15 bp, Homo sapiens
tattagcgacttttg

SEQ ID NO: 1602933 - DNA, 15 bp, Homo sapiens
ctattagcgactttt

SEQ ID NO: 1602934 - DNA, 15 bp, Homo sapiens
tctattagcgacttt

SEQ ID NO: 1602935 - DNA, 15 bp, Homo sapiens
ttctattagcgactt

SEQ ID NO: 1602936 - DNA, 15 bp, Homo sapiens
cttctattagcgact

SEQ ID NO: 1602937 - DNA, 15 bp, Homo sapiens
ccttctattagcgac

SEQ ID NO: 1602938 - DNA, 15 bp, Homo sapiens
tccttctattagcga

SEQ ID NO: 1602939 - DNA, 15 bp, Homo sapiens
ctccttctattagcg

SEQ ID NO: 1602940 - DNA, 15 bp, Homo sapiens
actccttctattagc

SEQ ID NO: 1602941 - DNA, 15 bp, Homo sapiens
aactccttctattag

SEQ ID NO: 1602942 - DNA, 15 bp, Homo sapiens
taactccttctatta

SEQ ID NO: 1602943 - DNA, 15 bp, Homo sapiens
ataactccttctatt

SEQ ID NO: 1602944 - DNA, 15 bp, Homo sapiens
aataactccttctat

SEQ ID NO: 1602945 - DNA, 15 bp, Homo sapiens
gaataactccttcta

SEQ ID NO: 1602946 - DNA, 15 bp, Homo sapiens
ggaataactccttct

SEQ ID NO: 1602947 - DNA, 15 bp, Homo sapiens
aggaataactccttc

SEQ ID NO: 1602948 - DNA, 15 bp, Homo sapiens
aaggaataactcctt

SEQ ID NO: 1602949 - DNA, 15 bp, Homo sapiens
gaaggaataactcct

SEQ ID NO: 1602950 - DNA, 15 bp, Homo sapiens
agaaggaataactcc

SEQ ID NO: 1602951 - DNA, 15 bp, Homo sapiens
cagaaggaataactc

SEQ ID NO: 1602952 - DNA, 15 bp, Homo sapiens
tcagaaggaataact

SEQ ID NO: 1602953 - DNA, 15 bp, Homo sapiens
atcagaaggaataac

SEQ ID NO: 1602954 - DNA, 15 bp, Homo sapiens
aatcagaaggaataa

SEQ ID NO: 1602955 - DNA, 15 bp, Homo sapiens
gaatcagaaggaata

SEQ ID NO: 1602956 - DNA, 15 bp, Homo sapiens
agaatcagaaggaat

SEQ ID NO: 1602957 - DNA, 15 bp, Homo sapiens
cagaatcagaaggaa

SEQ ID NO: 1602958 - DNA, 15 bp, Homo sapiens
acagaatcagaagga

SEQ ID NO: 1602959 - DNA, 15 bp, Homo sapiens
tacagaatcagaagg

SEQ ID NO: 1602960 - DNA, 15 bp, Homo sapiens
atacagaatcagaag

SEQ ID NO: 1602961 - DNA, 15 bp, Homo sapiens
aatacagaatcagaa

SEQ ID NO: 1602962 - DNA, 15 bp, Homo sapiens
aaatacagaatcaga

SEQ ID NO: 1602963 - DNA, 15 bp, Homo sapiens
aaaatacagaatcag

SEQ ID NO: 1602964 - DNA, 15 bp, Homo sapiens
caaaatacagaatca

SEQ ID NO: 1602965 - DNA, 15 bp, Homo sapiens
ccaaaatacagaatc

SEQ ID NO: 1602966 - DNA, 15 bp, Homo sapiens
tccaaaatacagaat

SEQ ID NO: 1602967 - DNA, 15 bp, Homo sapiens
atccaaaatacagaa

SEQ ID NO: 1602968 - DNA, 15 bp, Homo sapiens
aatccaaaatacaga

SEQ ID NO: 1602969 - DNA, 15 bp, Homo sapiens
aaatccaaaatacag

SEQ ID NO: 1602970 - DNA, 15 bp, Homo sapiens
taaatccaaaataca

SEQ ID NO: 1602971 - DNA, 15 bp, Homo sapiens
ctaaatccaaaatac

SEQ ID NO: 1602972 - DNA, 15 bp, Homo sapiens
tctaaatccaaaata

SEQ ID NO: 1602973 - DNA, 15 bp, Homo sapiens
ctctaaatccaaaat

SEQ ID NO: 1602974 - DNA, 15 bp, Homo sapiens
tctctaaatccaaaa

SEQ ID NO: 1602975 - DNA, 15 bp, Homo sapiens
ttctctaaatccaaa

SEQ ID NO: 1602976 - DNA, 15 bp, Homo sapiens
tttctctaaatccaa

SEQ ID NO: 1602977 - DNA, 15 bp, Homo sapiens
gtttctctaaatcca

SEQ ID NO: 1602978 - DNA, 15 bp, Homo sapiens
agtttctctaaatcc

SEQ ID NO: 1602979 - DNA, 15 bp, Homo sapiens
cagtttctctaaatc

SEQ ID NO: 1602980 - DNA, 15 bp, Homo sapiens
acagtttctctaaat

SEQ ID NO: 1602981 - DNA, 15 bp, Homo sapiens
cacagtttctctaaa

SEQ ID NO: 1602982 - DNA, 15 bp, Homo sapiens
tcacagtttctctaa

SEQ ID NO: 1602983 - DNA, 15 bp, Homo sapiens
gtcacagtttctcta

SEQ ID NO: 1602984 - DNA, 15 bp, Homo sapiens
agtcacagtttctct

SEQ ID NO: 1602985 - DNA, 15 bp, Homo sapiens
gagtcacagtttctc

SEQ ID NO: 1602986 - DNA, 15 bp, Homo sapiens
agagtcacagtttct

SEQ ID NO: 1602987 - DNA, 15 bp, Homo sapiens
tagagtcacagtttc

SEQ ID NO: 1602988 - DNA, 15 bp, Homo sapiens
ctagagtcacagttt

SEQ ID NO: 1602989 - DNA, 15 bp, Homo sapiens
cctagagtcacagtt

SEQ ID NO: 1602990 - DNA, 15 bp, Homo sapiens
gcctagagtcacagt

SEQ ID NO: 1602991 - DNA, 15 bp, Homo sapiens
ggcctagagtcacag

SEQ ID NO: 1602992 - DNA, 15 bp, Homo sapiens
aggcctagagtcaca

SEQ ID NO: 1602993 - DNA, 15 bp, Homo sapiens
gaggcctagagtcac

SEQ ID NO: 1602994 - DNA, 15 bp, Homo sapiens
agaggcctagagtca

SEQ ID NO: 1602995 - DNA, 15 bp, Homo sapiens
cagaggcctagagtc

SEQ ID NO: 1602996 - DNA, 15 bp, Homo sapiens
tcagaggcctagagt

SEQ ID NO: 1602997 - DNA, 15 bp, Homo sapiens
gtcagaggcctagag

SEQ ID NO: 1602998 - DNA, 15 bp, Homo sapiens
ggtcagaggcctaga

SEQ ID NO: 1602999 - DNA, 15 bp, Homo sapiens
aggtcagaggcctag

SEQ ID NO: 1603000 - DNA, 15 bp, Homo sapiens
aaggtcagaggccta

SEQ ID NO: 1603001 - DNA, 15 bp, Homo sapiens
gaaggtcagaggcct

SEQ ID NO: 1603002 - DNA, 15 bp, Homo sapiens
tgaaggtcagaggcc

SEQ ID NO: 1603003 - DNA, 15 bp, Homo sapiens
ttgaaggtcagaggc

SEQ ID NO: 1603004 - DNA, 15 bp, Homo sapiens
gttgaaggtcagagg

SEQ ID NO: 1603005 - DNA, 15 bp, Homo sapiens
tgttgaaggtcagag

SEQ ID NO: 1603006 - DNA, 15 bp, Homo sapiens
ttgttgaaggtcaga

SEQ ID NO: 1603007 - DNA, 15 bp, Homo sapiens
cttgttgaaggtcag

SEQ ID NO: 1603008 - DNA, 15 bp, Homo sapiens
tcttgttgaaggtca

SEQ ID NO: 1603009 - DNA, 15 bp, Homo sapiens
ttcttgttgaaggtc

SEQ ID NO: 1603010 - DNA, 15 bp, Homo sapiens
tttcttgttgaaggt

SEQ ID NO: 1603011 - DNA, 15 bp, Homo sapiens
gtttcttgttgaagg

SEQ ID NO: 1603012 - DNA, 15 bp, Homo sapiens
tgtttcttgttgaag

SEQ ID NO: 1603013 - DNA, 15 bp, Homo sapiens
gtgtttcttgttgaa

SEQ ID NO: 1603014 - DNA, 15 bp, Homo sapiens
agtgtttcttgttga

SEQ ID NO: 1603015 - DNA, 15 bp, Homo sapiens
aagtgtttcttgttg

SEQ ID NO: 1603016 - DNA, 15 bp, Homo sapiens
caagtgtttcttgtt

SEQ ID NO: 1603017 - DNA, 15 bp, Homo sapiens
ccaagtgtttcttgt

SEQ ID NO: 1603018 - DNA, 15 bp, Homo sapiens
cccaagtgtttcttg

SEQ ID NO: 1603019 - DNA, 15 bp, Homo sapiens
gcccaagtgtttctt

SEQ ID NO: 1603020 - DNA, 15 bp, Homo sapiens
ggcccaagtgtttct

SEQ ID NO: 1603021 - DNA, 15 bp, Homo sapiens
gggcccaagtgtttc

SEQ ID NO: 1603022 - DNA, 15 bp, Homo sapiens
ggggcccaagtgttt

SEQ ID NO: 1603023 - DNA, 15 bp, Homo sapiens
aggggcccaagtgtt

SEQ ID NO: 1603024 - DNA, 15 bp, Homo sapiens
gaggggcccaagtgt

SEQ ID NO: 1603025 - DNA, 15 bp, Homo sapiens
tgaggggcccaagtg

SEQ ID NO: 1603026 - DNA, 15 bp, Homo sapiens
ctgaggggcccaagt

SEQ ID NO: 1603027 - DNA, 15 bp, Homo sapiens
actgaggggcccaag

SEQ ID NO: 1603028 - DNA, 15 bp, Homo sapiens
aactgaggggcccaa

SEQ ID NO: 1603029 - DNA, 15 bp, Homo sapiens
caactgaggggccca

SEQ ID NO: 1603030 - DNA, 15 bp, Homo sapiens
gcaactgaggggccc

SEQ ID NO: 1603031 - DNA, 15 bp, Homo sapiens
agcaactgaggggcc

SEQ ID NO: 1603032 - DNA, 15 bp, Homo sapiens
gagcaactgaggggc

SEQ ID NO: 1603033 - DNA, 15 bp, Homo sapiens
ggagcaactgagggg

SEQ ID NO: 1603034 - DNA, 15 bp, Homo sapiens
gggagcaactgaggg

SEQ ID NO: 1603035 - DNA, 15 bp, Homo sapiens
cgggagcaactgagg

SEQ ID NO: 1603036 - DNA, 15 bp, Homo sapiens
gcgggagcaactgag

SEQ ID NO: 1603037 - DNA, 15 bp, Homo sapiens
tgcgggagcaactga

SEQ ID NO: 1603038 - DNA, 15 bp, Homo sapiens
ctgcgggagcaactg

SEQ ID NO: 1603039 - DNA, 15 bp, Homo sapiens
actgcgggagcaact

SEQ ID NO: 1603040 - DNA, 15 bp, Homo sapiens
gactgcgggagcaac

SEQ ID NO: 1603041 - DNA, 15 bp, Homo sapiens
agactgcgggagcaa

SEQ ID NO: 1603042 - DNA, 15 bp, Homo sapiens
gagactgcgggagca

SEQ ID NO: 1603043 - DNA, 15 bp, Homo sapiens
ggagactgcgggagc

SEQ ID NO: 1603044 - DNA, 15 bp, Homo sapiens
gggagactgcgggag

SEQ ID NO: 1603045 - DNA, 15 bp, Homo sapiens
tgggagactgcggga

SEQ ID NO: 1603046 - DNA, 15 bp, Homo sapiens
gtgggagactgcggg

SEQ ID NO: 1603047 - DNA, 15 bp, Homo sapiens
tgtgggagactgcgg

SEQ ID NO: 1603048 - DNA, 15 bp, Homo sapiens
ctgtgggagactgcg

SEQ ID NO: 1603049 - DNA, 15 bp, Homo sapiens
gctgtgggagactgc

SEQ ID NO: 1603050 - DNA, 15 bp, Homo sapiens
agctgtgggagactg

SEQ ID NO: 1603051 - DNA, 15 bp, Homo sapiens
tagctgtgggagact

SEQ ID NO: 1603052 - DNA, 15 bp, Homo sapiens
ctagctgtgggagac

SEQ ID NO: 1603053 - DNA, 15 bp, Homo sapiens
cctagctgtgggaga

SEQ ID NO: 1603054 - DNA, 15 bp, Homo sapiens
gcctagctgtgggag

SEQ ID NO: 1603055 - DNA, 15 bp, Homo sapiens
tgcctagctgtggga

SEQ ID NO: 1603056 - DNA, 15 bp, Homo sapiens
gtgcctagctgtggg

SEQ ID NO: 1603057 - DNA, 15 bp, Homo sapiens
tgtgcctagctgtgg

SEQ ID NO: 1603058 - DNA, 15 bp, Homo sapiens
ctgtgcctagctgtg

SEQ ID NO: 1603059 - DNA, 15 bp, Homo sapiens
cctgtgcctagctgt

SEQ ID NO: 1603060 - DNA, 15 bp, Homo sapiens
gcctgtgcctagctg

SEQ ID NO: 1603061 - DNA, 15 bp, Homo sapiens
agcctgtgcctagct

SEQ ID NO: 1603062 - DNA, 15 bp, Homo sapiens
aagcctgtgcctagc

SEQ ID NO: 1603063 - DNA, 15 bp, Homo sapiens
gaagcctgtgcctag

SEQ ID NO: 1603064 - DNA, 15 bp, Homo sapiens
agaagcctgtgccta

SEQ ID NO: 1603065 - DNA, 15 bp, Homo sapiens
tagaagcctgtgcct

SEQ ID NO: 1603066 - DNA, 15 bp, Homo sapiens
ttagaagcctgtgcc

SEQ ID NO: 1603067 - DNA, 15 bp, Homo sapiens
cttagaagcctgtgc

SEQ ID NO: 1603068 - DNA, 15 bp, Homo sapiens
gcttagaagcctgtg

SEQ ID NO: 1603069 - DNA, 15 bp, Homo sapiens
ggcttagaagcctgt

SEQ ID NO: 1603070 - DNA, 15 bp, Homo sapiens
cggcttagaagcctg

SEQ ID NO: 1603071 - DNA, 15 bp, Homo sapiens
ccggcttagaagcct

SEQ ID NO: 1603072 - DNA, 15 bp, Homo sapiens
cccggcttagaagcc

SEQ ID NO: 1603073 - DNA, 15 bp, Homo sapiens
gcccggcttagaagc

SEQ ID NO: 1603074 - DNA, 15 bp, Homo sapiens
agcccggcttagaag

SEQ ID NO: 1603075 - DNA, 15 bp, Homo sapiens
cagcccggcttagaa

SEQ ID NO: 1603076 - DNA, 15 bp, Homo sapiens
tcagcccggcttaga

SEQ ID NO: 1603077 - DNA, 15 bp, Homo sapiens
ctcagcccggcttag

SEQ ID NO: 1603078 - DNA, 15 bp, Homo sapiens
gctcagcccggctta

SEQ ID NO: 1603079 - DNA, 15 bp, Homo sapiens
agctcagcccggctt

SEQ ID NO: 1603080 - DNA, 15 bp, Homo sapiens
cagctcagcccggct

SEQ ID NO: 1603081 - DNA, 15 bp, Homo sapiens
ccagctcagcccggc

SEQ ID NO: 1603082 - DNA, 15 bp, Homo sapiens
cccagctcagcccgg

SEQ ID NO: 1603083 - DNA, 15 bp, Homo sapiens
gcccagctcagcccg

SEQ ID NO: 1603084 - DNA, 15 bp, Homo sapiens
agcccagctcagccc

SEQ ID NO: 1603085 - DNA, 15 bp, Homo sapiens
gagcccagctcagcc

SEQ ID NO: 1603086 - DNA, 15 bp, Homo sapiens
cgagcccagctcagc

SEQ ID NO: 1603087 - DNA, 15 bp, Homo sapiens
gcgagcccagctcag

SEQ ID NO: 1603088 - DNA, 15 bp, Homo sapiens
cgcgagcccagctca

SEQ ID NO: 1603089 - DNA, 15 bp, Homo sapiens
tcgcgagcccagctc

SEQ ID NO: 1603090 - DNA, 15 bp, Homo sapiens
ctcgcgagcccagct

SEQ ID NO: 1603091 - DNA, 15 bp, Homo sapiens
actcgcgagcccagc

SEQ ID NO: 1603092 - DNA, 15 bp, Homo sapiens
cactcgcgagcccag

SEQ ID NO: 1603093 - DNA, 15 bp, Homo sapiens
gcactcgcgagccca

SEQ ID NO: 1603094 - DNA, 15 bp, Homo sapiens
ggcactcgcgagccc

SEQ ID NO: 1603095 - DNA, 15 bp, Homo sapiens
tggcactcgcgagcc

SEQ ID NO: 1603096 - DNA, 15 bp, Homo sapiens
atggcactcgcgagc

SEQ ID NO: 1603097 - DNA, 15 bp, Homo sapiens
gatggcactcgcgag

SEQ ID NO: 1603098 - DNA, 15 bp, Homo sapiens
cgatggcactcgcga

SEQ ID NO: 1603099 - DNA, 15 bp, Homo sapiens
tcgatggcactcgcg

SEQ ID NO: 1603100 - DNA, 15 bp, Homo sapiens
ctcgatggcactcgc

SEQ ID NO: 1603101 - DNA, 15 bp, Homo sapiens
cctcgatggcactcg

SEQ ID NO: 1603102 - DNA, 15 bp, Homo sapiens
gcctcgatggcactc

SEQ ID NO: 1603103 - DNA, 15 bp, Homo sapiens
tgcctcgatggcact

SEQ ID NO: 1603104 - DNA, 15 bp, Homo sapiens
ttgcctcgatggcac

SEQ ID NO: 1603105 - DNA, 15 bp, Homo sapiens
gttgcctcgatggca

SEQ ID NO: 1603106 - DNA, 15 bp, Homo sapiens
ggttgcctcgatggc

SEQ ID NO: 1603107 - DNA, 15 bp, Homo sapiens
tggttgcctcgatgg

SEQ ID NO: 1603108 - DNA, 15 bp, Homo sapiens
ctggttgcctcgatg

SEQ ID NO: 1603109 - DNA, 15 bp, Homo sapiens
cctggttgcctcgat

SEQ ID NO: 1603110 - DNA, 15 bp, Homo sapiens
gcctggttgcctcga

SEQ ID NO: 1603111 - DNA, 15 bp, Homo sapiens
cgcctggttgcctcg

SEQ ID NO: 1603112 - DNA, 15 bp, Homo sapiens
gcgcctggttgcctc

SEQ ID NO: 1603113 - DNA, 15 bp, Homo sapiens
tgcgcctggttgcct

SEQ ID NO: 1603114 - DNA, 15 bp, Homo sapiens
ctgcgcctggttgcc

SEQ ID NO: 1603115 - DNA, 15 bp, Homo sapiens
cctgcgcctggttgc

SEQ ID NO: 1603116 - DNA, 15 bp, Homo sapiens
ccctgcgcctggttg

SEQ ID NO: 1603117 - DNA, 15 bp, Homo sapiens
tccctgcgcctggtt

SEQ ID NO: 1603118 - DNA, 15 bp, Homo sapiens
ctccctgcgcctggt

SEQ ID NO: 1603119 - DNA, 15 bp, Homo sapiens
gctccctgcgcctgg

SEQ ID NO: 1603120 - DNA, 15 bp, Homo sapiens
cgctccctgcgcctg

SEQ ID NO: 1603121 - DNA, 15 bp, Homo sapiens
ccgctccctgcgcct

SEQ ID NO: 1603122 - DNA, 15 bp, Homo sapiens
tccgctccctgcgcc

SEQ ID NO: 1603123 - DNA, 15 bp, Homo sapiens
ttccgctccctgcgc

SEQ ID NO: 1603124 - DNA, 15 bp, Homo sapiens
cttccgctccctgcg

SEQ ID NO: 1603125 - DNA, 15 bp, Homo sapiens
ccttccgctccctgc

SEQ ID NO: 1603126 - DNA, 15 bp, Homo sapiens
gccttccgctccctg

SEQ ID NO: 1603127 - DNA, 15 bp, Homo sapiens
tgccttccgctccct

SEQ ID NO: 1603128 - DNA, 15 bp, Homo sapiens
ctgccttccgctccc

SEQ ID NO: 1603129 - DNA, 15 bp, Homo sapiens
cctgccttccgctcc

SEQ ID NO: 1603130 - DNA, 15 bp, Homo sapiens
tcctgccttccgctc

SEQ ID NO: 1603131 - DNA, 15 bp, Homo sapiens
ctcctgccttccgct

SEQ ID NO: 1603132 - DNA, 15 bp, Homo sapiens
actcctgccttccgc

SEQ ID NO: 1603133 - DNA, 15 bp, Homo sapiens
cactcctgccttccg

SEQ ID NO: 1603134 - DNA, 15 bp, Homo sapiens
acactcctgccttcc

SEQ ID NO: 1603135 - DNA, 15 bp, Homo sapiens
tacactcctgccttc

SEQ ID NO: 1603136 - DNA, 15 bp, Homo sapiens
ttacactcctgcctt

SEQ ID NO: 1603137 - DNA, 15 bp, Homo sapiens
gttacactcctgcct

SEQ ID NO: 1603138 - DNA, 15 bp, Homo sapiens
agttacactcctgcc

SEQ ID NO: 1603139 - DNA, 15 bp, Homo sapiens
cagttacactcctgc

SEQ ID NO: 1603140 - DNA, 15 bp, Homo sapiens
ccagttacactcctg

SEQ ID NO: 1603141 - DNA, 15 bp, Homo sapiens
cccagttacactcct

SEQ ID NO: 1603142 - DNA, 15 bp, Homo sapiens
gcccagttacactcc

SEQ ID NO: 1603143 - DNA, 15 bp, Homo sapiens
cgcccagttacactc

SEQ ID NO: 1603144 - DNA, 15 bp, Homo sapiens
gcgcccagttacact

SEQ ID NO: 1603145 - DNA, 15 bp, Homo sapiens
agcgcccagttacac

SEQ ID NO: 1603146 - DNA, 15 bp, Homo sapiens
cagcgcccagttaca

SEQ ID NO: 1603147 - DNA, 15 bp, Homo sapiens
ccagcgcccagttac

SEQ ID NO: 1603148 - DNA, 15 bp, Homo sapiens
cccagcgcccagtta

SEQ ID NO: 1603149 - DNA, 15 bp, Homo sapiens
ccccagcgcccagtt

SEQ ID NO: 1603150 - DNA, 15 bp, Homo sapiens
cccccagcgcccagt

SEQ ID NO: 1603151 - DNA, 15 bp, Homo sapiens
ccccccagcgcccag

SEQ ID NO: 1603152 - DNA, 15 bp, Homo sapiens
gccccccagcgccca

SEQ ID NO: 1603153 - DNA, 15 bp, Homo sapiens
cgccccccagcgccc

SEQ ID NO: 1603154 - DNA, 15 bp, Homo sapiens
gcgccccccagcgcc

SEQ ID NO: 1603155 - DNA, 15 bp, Homo sapiens
agcgccccccagcgc

SEQ ID NO: 1603156 - DNA, 15 bp, Homo sapiens
cagcgccccccagcg

SEQ ID NO: 1603157 - DNA, 15 bp, Homo sapiens
gcagcgccccccagc

SEQ ID NO: 1603158 - DNA, 15 bp, Homo sapiens
agcagcgccccccag

SEQ ID NO: 1603159 - DNA, 15 bp, Homo sapiens
gagcagcgcccccca

SEQ ID NO: 1603160 - DNA, 15 bp, Homo sapiens
ggagcagcgcccccc

SEQ ID NO: 1603161 - DNA, 15 bp, Homo sapiens
cggagcagcgccccc

SEQ ID NO: 1603162 - DNA, 15 bp, Homo sapiens
gcggagcagcgcccc

SEQ ID NO: 1603163 - DNA, 15 bp, Homo sapiens
tgcggagcagcgccc

SEQ ID NO: 1603164 - DNA, 15 bp, Homo sapiens
ttgcggagcagcgcc

SEQ ID NO: 1603165 - DNA, 15 bp, Homo sapiens
gttgcggagcagcgc

SEQ ID NO: 1603166 - DNA, 15 bp, Homo sapiens
ggttgcggagcagcg

SEQ ID NO: 1603167 - DNA, 15 bp, Homo sapiens
gggttgcggagcagc

SEQ ID NO: 1603168 - DNA, 15 bp, Homo sapiens
ggggttgcggagcag

SEQ ID NO: 1603169 - DNA, 15 bp, Homo sapiens
tggggttgcggagca

SEQ ID NO: 1603170 - DNA, 15 bp, Homo sapiens
ttggggttgcggagc

SEQ ID NO: 1603171 - DNA, 15 bp, Homo sapiens
cttggggttgcggag

SEQ ID NO: 1603172 - DNA, 15 bp, Homo sapiens
tcttggggttgcgga

SEQ ID NO: 1603173 - DNA, 15 bp, Homo sapiens
atcttggggttgcgg

SEQ ID NO: 1603174 - DNA, 15 bp, Homo sapiens
gatcttggggttgcg

SEQ ID NO: 1603175 - DNA, 15 bp, Homo sapiens
ggatcttggggttgc

SEQ ID NO: 1603176 - DNA, 15 bp, Homo sapiens
cggatcttggggttg

SEQ ID NO: 1603177 - DNA, 15 bp, Homo sapiens
tcggatcttggggtt

SEQ ID NO: 1603178 - DNA, 15 bp, Homo sapiens
ctcggatcttggggt

SEQ ID NO: 1603179 - DNA, 15 bp, Homo sapiens
cctcggatcttgggg

SEQ ID NO: 1603180 - DNA, 15 bp, Homo sapiens
tcctcggatcttggg

SEQ ID NO: 1603181 - DNA, 15 bp, Homo sapiens
ttcctcggatcttgg

SEQ ID NO: 1603182 - DNA, 15 bp, Homo sapiens
attcctcggatcttg

SEQ ID NO: 1603183 - DNA, 15 bp, Homo sapiens
cattcctcggatctt

SEQ ID NO: 1603184 - DNA, 15 bp, Homo sapiens
gcattcctcggatct

SEQ ID NO: 1603185 - DNA, 15 bp, Homo sapiens
ggcattcctcggatc

SEQ ID NO: 1603186 - DNA, 15 bp, Homo sapiens
aggcattcctcggat

SEQ ID NO: 1603187 - DNA, 15 bp, Homo sapiens
gaggcattcctcgga

SEQ ID NO: 1603188 - DNA, 15 bp, Homo sapiens
ggaggcattcctcgg

SEQ ID NO: 1603189 - DNA, 15 bp, Homo sapiens
cggaggcattcctcg

SEQ ID NO: 1603190 - DNA, 15 bp, Homo sapiens
ccggaggcattcctc

SEQ ID NO: 1603191 - DNA, 15 bp, Homo sapiens
cccggaggcattcct

SEQ ID NO: 1603192 - DNA, 15 bp, Homo sapiens
ccccggaggcattcc

SEQ ID NO: 1603193 - DNA, 15 bp, Homo sapiens
cccccggaggcattc

SEQ ID NO: 1603194 - DNA, 15 bp, Homo sapiens
tcccccggaggcatt

SEQ ID NO: 1603195 - DNA, 15 bp, Homo sapiens
atcccccggaggcat

SEQ ID NO: 1603196 - DNA, 15 bp, Homo sapiens
catcccccggaggca

SEQ ID NO: 1603197 - DNA, 15 bp, Homo sapiens
tcatcccccggaggc

SEQ ID NO: 1603198 - DNA, 15 bp, Homo sapiens
atcatcccccggagg

SEQ ID NO: 1603199 - DNA, 15 bp, Homo sapiens
aatcatcccccggag

SEQ ID NO: 1603200 - DNA, 15 bp, Homo sapiens
aaatcatcccccgga

SEQ ID NO: 1603201 - DNA, 15 bp, Homo sapiens
gaaatcatcccccgg

SEQ ID NO: 1603202 - DNA, 15 bp, Homo sapiens
agaaatcatcccccg

SEQ ID NO: 1603203 - DNA, 15 bp, Homo sapiens
gagaaatcatccccc

SEQ ID NO: 1603204 - DNA, 15 bp, Homo sapiens
agagaaatcatcccc

SEQ ID NO: 1603205 - DNA, 15 bp, Homo sapiens
cagagaaatcatccc

SEQ ID NO: 1603206 - DNA, 15 bp, Homo sapiens
ccagagaaatcatcc

SEQ ID NO: 1603207 - DNA, 15 bp, Homo sapiens
tccagagaaatcatc

SEQ ID NO: 1603208 - DNA, 15 bp, Homo sapiens
ctccagagaaatcat

SEQ ID NO: 1603209 - DNA, 15 bp, Homo sapiens
cctccagagaaatca

SEQ ID NO: 1603210 - DNA, 15 bp, Homo sapiens
ccctccagagaaatc

SEQ ID NO: 1603211 - DNA, 15 bp, Homo sapiens
cccctccagagaaat

SEQ ID NO: 1603212 - DNA, 15 bp, Homo sapiens
acccctccagagaaa

SEQ ID NO: 1603213 - DNA, 15 bp, Homo sapiens
gacccctccagagaa

SEQ ID NO: 1603214 - DNA, 15 bp, Homo sapiens
agacccctccagaga

SEQ ID NO: 1603215 - DNA, 15 bp, Homo sapiens
gagacccctccagag

SEQ ID NO: 1603216 - DNA, 15 bp, Homo sapiens
cgagacccctccaga

SEQ ID NO: 1603217 - DNA, 15 bp, Homo sapiens
gcgagacccctccag

SEQ ID NO: 1603218 - DNA, 15 bp, Homo sapiens
tgcgagacccctcca

SEQ ID NO: 1603219 - DNA, 15 bp, Homo sapiens
ctgcgagacccctcc

SEQ ID NO: 1603220 - DNA, 15 bp, Homo sapiens
cctgcgagacccctc

SEQ ID NO: 1603221 - DNA, 15 bp, Homo sapiens
ccctgcgagacccct

SEQ ID NO: 1603222 - DNA, 15 bp, Homo sapiens
gccctgcgagacccc

SEQ ID NO: 1603223 - DNA, 15 bp, Homo sapiens
ggccctgcgagaccc

SEQ ID NO: 1603224 - DNA, 15 bp, Homo sapiens
gggccctgcgagacc

SEQ ID NO: 1603225 - DNA, 15 bp, Homo sapiens
ggggccctgcgagac

SEQ ID NO: 1603226 - DNA, 15 bp, Homo sapiens
gggggccctgcgaga

SEQ ID NO: 1603227 - DNA, 15 bp, Homo sapiens
agggggccctgcgag

SEQ ID NO: 1603228 - DNA, 15 bp, Homo sapiens
gagggggccctgcga

SEQ ID NO: 1603229 - DNA, 15 bp, Homo sapiens
agagggggccctgcg

SEQ ID NO: 1603230 - DNA, 15 bp, Homo sapiens
cagagggggccctgc

SEQ ID NO: 1603231 - DNA, 15 bp, Homo sapiens
gcagagggggccctg

SEQ ID NO: 1603232 - DNA, 15 bp, Homo sapiens
cgcagagggggccct

SEQ ID NO: 1603233 - DNA, 15 bp, Homo sapiens
gcgcagagggggccc

SEQ ID NO: 1603234 - DNA, 15 bp, Homo sapiens
agcgcagagggggcc

SEQ ID NO: 1603235 - DNA, 15 bp, Homo sapiens
cagcgcagagggggc

SEQ ID NO: 1603236 - DNA, 15 bp, Homo sapiens
gcagcgcagaggggg

SEQ ID NO: 1603237 - DNA, 15 bp, Homo sapiens
agcagcgcagagggg

SEQ ID NO: 1603238 - DNA, 15 bp, Homo sapiens
aagcagcgcagaggg

SEQ ID NO: 1603239 - DNA, 15 bp, Homo sapiens
aaagcagcgcagagg

SEQ ID NO: 1603240 - DNA, 15 bp, Homo sapiens
gaaagcagcgcagag

SEQ ID NO: 1603241 - DNA, 15 bp, Homo sapiens
agaaagcagcgcaga

SEQ ID NO: 1603242 - DNA, 15 bp, Homo sapiens
gagaaagcagcgcag

SEQ ID NO: 1603243 - DNA, 15 bp, Homo sapiens
tgagaaagcagcgca

SEQ ID NO: 1603244 - DNA, 15 bp, Homo sapiens
ctgagaaagcagcgc

SEQ ID NO: 1603245 - DNA, 15 bp, Homo sapiens
cctgagaaagcagcg

SEQ ID NO: 1603246 - DNA, 15 bp, Homo sapiens
gcctgagaaagcagc

SEQ ID NO: 1603247 - DNA, 15 bp, Homo sapiens
tgcctgagaaagcag

SEQ ID NO: 1603248 - DNA, 15 bp, Homo sapiens
gtgcctgagaaagca

SEQ ID NO: 1603249 - DNA, 15 bp, Homo sapiens
ggtgcctgagaaagc

SEQ ID NO: 1603250 - DNA, 15 bp, Homo sapiens
tggtgcctgagaaag

SEQ ID NO: 1603251 - DNA, 15 bp, Homo sapiens
ctggtgcctgagaaa

SEQ ID NO: 1603252 - DNA, 15 bp, Homo sapiens
tctggtgcctgagaa

SEQ ID NO: 1603253 - DNA, 15 bp, Homo sapiens
ttctggtgcctgaga

SEQ ID NO: 1603254 - DNA, 15 bp, Homo sapiens
gttctggtgcctgag

SEQ ID NO: 1603255 - DNA, 15 bp, Homo sapiens
ggttctggtgcctga

SEQ ID NO: 1603256 - DNA, 15 bp, Homo sapiens
cggttctggtgcctg

SEQ ID NO: 1603257 - DNA, 15 bp, Homo sapiens
tcggttctggtgcct

SEQ ID NO: 1603258 - DNA, 15 bp, Homo sapiens
ttcggttctggtgcc

SEQ ID NO: 1603259 - DNA, 15 bp, Homo sapiens
tttcggttctggtgc

SEQ ID NO: 1603260 - DNA, 15 bp, Homo sapiens
atttcggttctggtg

SEQ ID NO: 1603261 - DNA, 15 bp, Homo sapiens
gatttcggttctggt

SEQ ID NO: 1603262 - DNA, 15 bp, Homo sapiens
ggatttcggttctgg

SEQ ID NO: 1603263 - DNA, 15 bp, Homo sapiens
aggatttcggttctg

SEQ ID NO: 1603264 - DNA, 15 bp, Homo sapiens
gaggatttcggttct

SEQ ID NO: 1603265 - DNA, 15 bp, Homo sapiens
cgaggatttcggttc

SEQ ID NO: 1603266 - DNA, 15 bp, Homo sapiens
ccgaggatttcggtt

SEQ ID NO: 1603267 - DNA, 15 bp, Homo sapiens
cccgaggatttcggt

SEQ ID NO: 1603268 - DNA, 15 bp, Homo sapiens
tcccgaggatttcgg

SEQ ID NO: 1603269 - DNA, 15 bp, Homo sapiens
ctcccgaggatttcg

SEQ ID NO: 1603270 - DNA, 15 bp, Homo sapiens
cctcccgaggatttc

SEQ ID NO: 1603271 - DNA, 15 bp, Homo sapiens
ccctcccgaggattt

SEQ ID NO: 1603272 - DNA, 15 bp, Homo sapiens
tccctcccgaggatt

SEQ ID NO: 1603273 - DNA, 15 bp, Homo sapiens
gtccctcccgaggat

SEQ ID NO: 1603274 - DNA, 15 bp, Homo sapiens
ggtccctcccgagga

SEQ ID NO: 1603275 - DNA, 15 bp, Homo sapiens
cggtccctcccgagg

SEQ ID NO: 1603276 - DNA, 15 bp, Homo sapiens
gcggtccctcccgag

SEQ ID NO: 1603277 - DNA, 15 bp, Homo sapiens
cgcggtccctcccga

SEQ ID NO: 1603278 - DNA, 15 bp, Homo sapiens
ccgcggtccctcccg

SEQ ID NO: 1603279 - DNA, 15 bp, Homo sapiens
cccgcggtccctccc

SEQ ID NO: 1603280 - DNA, 15 bp, Homo sapiens
tcccgcggtccctcc

SEQ ID NO: 1603281 - DNA, 15 bp, Homo sapiens
ctcccgcggtccctc

SEQ ID NO: 1603282 - DNA, 15 bp, Homo sapiens
gctcccgcggtccct

SEQ ID NO: 1603283 - DNA, 15 bp, Homo sapiens
ggctcccgcggtccc

SEQ ID NO: 1603284 - DNA, 15 bp, Homo sapiens
gggctcccgcggtcc

SEQ ID NO: 1603285 - DNA, 15 bp, Homo sapiens
cgggctcccgcggtc

SEQ ID NO: 1603286 - DNA, 15 bp, Homo sapiens
ccgggctcccgcggt

SEQ ID NO: 1603287 - DNA, 15 bp, Homo sapiens
cccgggctcccgcgg

SEQ ID NO: 1603288 - DNA, 15 bp, Homo sapiens
ccccgggctcccgcg

SEQ ID NO: 1603289 - DNA, 15 bp, Homo sapiens
gccccgggctcccgc

SEQ ID NO: 1603290 - DNA, 15 bp, Homo sapiens
cgccccgggctcccg

SEQ ID NO: 1603291 - DNA, 15 bp, Homo sapiens
acgccccgggctccc

SEQ ID NO: 1603292 - DNA, 15 bp, Homo sapiens
cacgccccgggctcc

SEQ ID NO: 1603293 - DNA, 15 bp, Homo sapiens
gcacgccccgggctc

SEQ ID NO: 1603294 - DNA, 15 bp, Homo sapiens
tgcacgccccgggct

SEQ ID NO: 1603295 - DNA, 15 bp, Homo sapiens
ctgcacgccccgggc

SEQ ID NO: 1603296 - DNA, 15 bp, Homo sapiens
tctgcacgccccggg

SEQ ID NO: 1603297 - DNA, 15 bp, Homo sapiens
gtctgcacgccccgg

SEQ ID NO: 1603298 - DNA, 15 bp, Homo sapiens
tgtctgcacgccccg

SEQ ID NO: 1603299 - DNA, 15 bp, Homo sapiens
ctgtctgcacgcccc

SEQ ID NO: 1603300 - DNA, 15 bp, Homo sapiens
cctgtctgcacgccc

SEQ ID NO: 1603301 - DNA, 15 bp, Homo sapiens
gcctgtctgcacgcc

SEQ ID NO: 1603302 - DNA, 15 bp, Homo sapiens
cgcctgtctgcacgc

SEQ ID NO: 1603303 - DNA, 15 bp, Homo sapiens
ccgcctgtctgcacg

SEQ ID NO: 1603304 - DNA, 15 bp, Homo sapiens
gccgcctgtctgcac

SEQ ID NO: 1603305 - DNA, 15 bp, Homo sapiens
agccgcctgtctgca

SEQ ID NO: 1603306 - DNA, 15 bp, Homo sapiens
aagccgcctgtctgc

SEQ ID NO: 1603307 - DNA, 15 bp, Homo sapiens
aaagccgcctgtctg

SEQ ID NO: 1603308 - DNA, 15 bp, Homo sapiens
gaaagccgcctgtct

SEQ ID NO: 1603309 - DNA, 15 bp, Homo sapiens
tgaaagccgcctgtc

SEQ ID NO: 1603310 - DNA, 15 bp, Homo sapiens
gtgaaagccgcctgt

SEQ ID NO: 1603311 - DNA, 15 bp, Homo sapiens
tgtgaaagccgcctg

SEQ ID NO: 1603312 - DNA, 15 bp, Homo sapiens
ctgtgaaagccgcct

SEQ ID NO: 1603313 - DNA, 15 bp, Homo sapiens
tctgtgaaagccgcc

SEQ ID NO: 1603314 - DNA, 15 bp, Homo sapiens
gtctgtgaaagccgc

SEQ ID NO: 1603315 - DNA, 15 bp, Homo sapiens
cgtctgtgaaagccg

SEQ ID NO: 1603316 - DNA, 15 bp, Homo sapiens
gcgtctgtgaaagcc

SEQ ID NO: 1603317 - DNA, 15 bp, Homo sapiens
tgcgtctgtgaaagc

SEQ ID NO: 1603318 - DNA, 15 bp, Homo sapiens
ctgcgtctgtgaaag

SEQ ID NO: 1603319 - DNA, 15 bp, Homo sapiens
gctgcgtctgtgaaa

SEQ ID NO: 1603320 - DNA, 15 bp, Homo sapiens
cgctgcgtctgtgaa

SEQ ID NO: 1603321 - DNA, 15 bp, Homo sapiens
ccgctgcgtctgtga

SEQ ID NO: 1603322 - DNA, 15 bp, Homo sapiens
cccgctgcgtctgtg

SEQ ID NO: 1603323 - DNA, 15 bp, Homo sapiens
tcccgctgcgtctgt

SEQ ID NO: 1603324 - DNA, 15 bp, Homo sapiens
ctcccgctgcgtctg

SEQ ID NO: 1603325 - DNA, 15 bp, Homo sapiens
cctcccgctgcgtct

SEQ ID NO: 1603326 - DNA, 15 bp, Homo sapiens
tcctcccgctgcgtc

SEQ ID NO: 1603327 - DNA, 15 bp, Homo sapiens
ttcctcccgctgcgt

SEQ ID NO: 1603328 - DNA, 15 bp, Homo sapiens
cttcctcccgctgcg

SEQ ID NO: 1603329 - DNA, 15 bp, Homo sapiens
ccttcctcccgctgc

SEQ ID NO: 1603330 - DNA, 15 bp, Homo sapiens
tccttcctcccgctg

SEQ ID NO: 1603331 - DNA, 15 bp, Homo sapiens
atccttcctcccgct

SEQ ID NO: 1603332 - DNA, 15 bp, Homo sapiens
gatccttcctcccgc

SEQ ID NO: 1603333 - DNA, 15 bp, Homo sapiens
ggatccttcctcccg

SEQ ID NO: 1603334 - DNA, 15 bp, Homo sapiens
gggatccttcctccc

SEQ ID NO: 1603335 - DNA, 15 bp, Homo sapiens
agggatccttcctcc

SEQ ID NO: 1603336 - DNA, 15 bp, Homo sapiens
gagggatccttcctc

SEQ ID NO: 1603337 - DNA, 15 bp, Homo sapiens
agagggatccttcct

SEQ ID NO: 1603338 - DNA, 15 bp, Homo sapiens
tagagggatccttcc

SEQ ID NO: 1603339 - DNA, 15 bp, Homo sapiens
gtagagggatccttc

SEQ ID NO: 1603340 - DNA, 15 bp, Homo sapiens
agtagagggatcctt

SEQ ID NO: 1603341 - DNA, 15 bp, Homo sapiens
cagtagagggatcct

SEQ ID NO: 1603342 - DNA, 15 bp, Homo sapiens
gcagtagagggatcc

SEQ ID NO: 1603343 - DNA, 15 bp, Homo sapiens
agcagtagagggatc

SEQ ID NO: 1603344 - DNA, 15 bp, Homo sapiens
gagcagtagagggat

SEQ ID NO: 1603345 - DNA, 15 bp, Homo sapiens
ggagcagtagaggga

SEQ ID NO: 1603346 - DNA, 15 bp, Homo sapiens
gggagcagtagaggg

SEQ ID NO: 1603347 - DNA, 15 bp, Homo sapiens
agggagcagtagagg

SEQ ID NO: 1603348 - DNA, 15 bp, Homo sapiens
aagggagcagtagag

SEQ ID NO: 1603349 - DNA, 15 bp, Homo sapiens
aaagggagcagtaga

SEQ ID NO: 1603350 - DNA, 15 bp, Homo sapiens
gaaagggagcagtag

SEQ ID NO: 1603351 - DNA, 15 bp, Homo sapiens
ggaaagggagcagta

SEQ ID NO: 1603352 - DNA, 15 bp, Homo sapiens
gggaaagggagcagt

SEQ ID NO: 1603353 - DNA, 15 bp, Homo sapiens
cgggaaagggagcag

SEQ ID NO: 1603354 - DNA, 15 bp, Homo sapiens
tcgggaaagggagca

SEQ ID NO: 1603355 - DNA, 15 bp, Homo sapiens
atcgggaaagggagc

SEQ ID NO: 1603356 - DNA, 15 bp, Homo sapiens
aatcgggaaagggag

SEQ ID NO: 1603357 - DNA, 15 bp, Homo sapiens
aaatcgggaaaggga

SEQ ID NO: 1603358 - DNA, 15 bp, Homo sapiens
caaatcgggaaaggg

SEQ ID NO: 1603359 - DNA, 15 bp, Homo sapiens
tcaaatcgggaaagg

SEQ ID NO: 1603360 - DNA, 15 bp, Homo sapiens
gtcaaatcgggaaag

SEQ ID NO: 1603361 - DNA, 15 bp, Homo sapiens
ggtcaaatcgggaaa

SEQ ID NO: 1603362 - DNA, 15 bp, Homo sapiens
cggtcaaatcgggaa

SEQ ID NO: 1603363 - DNA, 15 bp, Homo sapiens
acggtcaaatcggga

SEQ ID NO: 1603364 - DNA, 15 bp, Homo sapiens
gacggtcaaatcggg

SEQ ID NO: 1603365 - DNA, 15 bp, Homo sapiens
agacggtcaaatcgg

SEQ ID NO: 1603366 - DNA, 15 bp, Homo sapiens
tagacggtcaaatcg

SEQ ID NO: 1603367 - DNA, 15 bp, Homo sapiens
ctagacggtcaaatc

SEQ ID NO: 1603368 - DNA, 15 bp, Homo sapiens
cctagacggtcaaat

SEQ ID NO: 1603369 - DNA, 15 bp, Homo sapiens
ccctagacggtcaaa

SEQ ID NO: 1603370 - DNA, 15 bp, Homo sapiens
gccctagacggtcaa

SEQ ID NO: 1603371 - DNA, 15 bp, Homo sapiens
ggccctagacggtca

SEQ ID NO: 1603372 - DNA, 15 bp, Homo sapiens
aggccctagacggtc

SEQ ID NO: 1603373 - DNA, 15 bp, Homo sapiens
aaggccctagacggt

SEQ ID NO: 1603374 - DNA, 15 bp, Homo sapiens
aaaggccctagacgg

SEQ ID NO: 1603375 - DNA, 15 bp, Homo sapiens
caaaggccctagacg

SEQ ID NO: 1603376 - DNA, 15 bp, Homo sapiens
tcaaaggccctagac

SEQ ID NO: 1603377 - DNA, 15 bp, Homo sapiens
ctcaaaggccctaga

SEQ ID NO: 1603378 - DNA, 15 bp, Homo sapiens
tctcaaaggccctag

SEQ ID NO: 1603379 - DNA, 15 bp, Homo sapiens
ctctcaaaggcccta

SEQ ID NO: 1603380 - DNA, 15 bp, Homo sapiens
cctctcaaaggccct

SEQ ID NO: 1603381 - DNA, 15 bp, Homo sapiens
tcctctcaaaggccc

SEQ ID NO: 1603382 - DNA, 15 bp, Homo sapiens
gtcctctcaaaggcc

SEQ ID NO: 1603383 - DNA, 15 bp, Homo sapiens
agtcctctcaaaggc

SEQ ID NO: 1603384 - DNA, 15 bp, Homo sapiens
aagtcctctcaaagg

SEQ ID NO: 1603385 - DNA, 15 bp, Homo sapiens
gaaagtcctctcaaa

SEQ ID NO: 1603386 - DNA, 15 bp, Homo sapiens
ggaaagtcctctcaa

SEQ ID NO: 1603387 - DNA, 15 bp, Homo sapiens
aggaaagtcctctca

SEQ ID NO: 1603388 - DNA, 15 bp, Homo sapiens
aaggaaagtcctctc

SEQ ID NO: 1603389 - DNA, 15 bp, Homo sapiens
aaaggaaagtcctct

SEQ ID NO: 1603390 - DNA, 15 bp, Homo sapiens
aaaaggaaagtcctc

SEQ ID NO: 1603391 - DNA, 15 bp, Homo sapiens
caaaaggaaagtcct

SEQ ID NO: 1603392 - DNA, 15 bp, Homo sapiens
ccaaaaggaaagtcc

SEQ ID NO: 1603393 - DNA, 15 bp, Homo sapiens
cccaaaaggaaagtc

SEQ ID NO: 1603394 - DNA, 15 bp, Homo sapiens
tcccaaaaggaaagt

SEQ ID NO: 1603395 - DNA, 15 bp, Homo sapiens
ttcccaaaaggaaag

SEQ ID NO: 1603396 - DNA, 15 bp, Homo sapiens
tttcccaaaaggaaa

SEQ ID NO: 1603397 - DNA, 15 bp, Homo sapiens
ctttcccaaaaggaa

SEQ ID NO: 1603398 - DNA, 15 bp, Homo sapiens
gctttcccaaaagga

SEQ ID NO: 1603399 - DNA, 15 bp, Homo sapiens
agctttcccaaaagg

SEQ ID NO: 1603400 - DNA, 15 bp, Homo sapiens
aagctttcccaaaag

SEQ ID NO: 1603401 - DNA, 15 bp, Homo sapiens
aaagctttcccaaaa

SEQ ID NO: 1603402 - DNA, 15 bp, Homo sapiens
aaaagctttcccaaa

SEQ ID NO: 1603403 - DNA, 15 bp, Homo sapiens
gaaaagctttcccaa

SEQ ID NO: 1603404 - DNA, 15 bp, Homo sapiens
agaaaagctttccca

SEQ ID NO: 1603405 - DNA, 15 bp, Homo sapiens
gagaaaagctttccc

SEQ ID NO: 1603406 - DNA, 15 bp, Homo sapiens
ttgagaaaagctttc

SEQ ID NO: 1603407 - DNA, 15 bp, Homo sapiens
attgagaaaagcttt

SEQ ID NO: 1603408 - DNA, 15 bp, Homo sapiens
aattgagaaaagctt

SEQ ID NO: 1603409 - DNA, 15 bp, Homo sapiens
gaattgagaaaagct

SEQ ID NO: 1603410 - DNA, 15 bp, Homo sapiens
cgaattgagaaaagc

SEQ ID NO: 1603411 - DNA, 15 bp, Homo sapiens
acgaattgagaaaag

SEQ ID NO: 1603412 - DNA, 15 bp, Homo sapiens
cacgaattgagaaaa

SEQ ID NO: 1603413 - DNA, 15 bp, Homo sapiens
ccacgaattgagaaa

SEQ ID NO: 1603414 - DNA, 15 bp, Homo sapiens
gccacgaattgagaa

SEQ ID NO: 1603415 - DNA, 15 bp, Homo sapiens
ggccacgaattgaga

SEQ ID NO: 1603416 - DNA, 15 bp, Homo sapiens
aggccacgaattgag

SEQ ID NO: 1603417 - DNA, 15 bp, Homo sapiens
caggccacgaattga

SEQ ID NO: 1603418 - DNA, 15 bp, Homo sapiens
acaggccacgaattg

SEQ ID NO: 1603419 - DNA, 15 bp, Homo sapiens
cacaggccacgaatt

SEQ ID NO: 1603420 - DNA, 15 bp, Homo sapiens
ccacaggccacgaat

SEQ ID NO: 1603421 - DNA, 15 bp, Homo sapiens
cccacaggccacgaa

SEQ ID NO: 1603422 - DNA, 15 bp, Homo sapiens
gcccacaggccacga

SEQ ID NO: 1603423 - DNA, 15 bp, Homo sapiens
tgcccacaggccacg

SEQ ID NO: 1603424 - DNA, 15 bp, Homo sapiens
ctgcccacaggccac

SEQ ID NO: 1603425 - DNA, 15 bp, Homo sapiens
cctgcccacaggcca

SEQ ID NO: 1603426 - DNA, 15 bp, Homo sapiens
gcctgcccacaggcc

SEQ ID NO: 1603427 - DNA, 15 bp, Homo sapiens
agcctgcccacaggc

SEQ ID NO: 1603428 - DNA, 15 bp, Homo sapiens
cagcctgcccacagg

SEQ ID NO: 1603429 - DNA, 15 bp, Homo sapiens
ccagcctgcccacag

SEQ ID NO: 1603430 - DNA, 15 bp, Homo sapiens
cccagcctgcccaca

SEQ ID NO: 1603431 - DNA, 15 bp, Homo sapiens
ccccagcctgcccac

SEQ ID NO: 1603432 - DNA, 15 bp, Homo sapiens
cccccagcctgccca

SEQ ID NO: 1603433 - DNA, 15 bp, Homo sapiens
ccccccagcctgccc

SEQ ID NO: 1603434 - DNA, 15 bp, Homo sapiens
accccccagcctgcc

SEQ ID NO: 1603435 - DNA, 15 bp, Homo sapiens
caccccccagcctgc

SEQ ID NO: 1603436 - DNA, 15 bp, Homo sapiens
ccaccccccagcctg

SEQ ID NO: 1603437 - DNA, 15 bp, Homo sapiens
cccaccccccagcct

SEQ ID NO: 1603438 - DNA, 15 bp, Homo sapiens
ccccaccccccagcc

SEQ ID NO: 1603439 - DNA, 15 bp, Homo sapiens
gccccaccccccagc

SEQ ID NO: 1603440 - DNA, 15 bp, Homo sapiens
cgccccaccccccag

SEQ ID NO: 1603441 - DNA, 15 bp, Homo sapiens
gcgccccacccccca

SEQ ID NO: 1603442 - DNA, 15 bp, Homo sapiens
ggcgccccacccccc

SEQ ID NO: 1603443 - DNA, 15 bp, Homo sapiens
tggcgccccaccccc

SEQ ID NO: 1603444 - DNA, 15 bp, Homo sapiens
ttggcgccccacccc

SEQ ID NO: 1603445 - DNA, 15 bp, Homo sapiens
cttggcgccccaccc

SEQ ID NO: 1603446 - DNA, 15 bp, Homo sapiens
acttggcgccccacc

SEQ ID NO: 1603447 - DNA, 15 bp, Homo sapiens
gacttggcgccccac

SEQ ID NO: 1603448 - DNA, 15 bp, Homo sapiens
tgacttggcgcccca

SEQ ID NO: 1603449 - DNA, 15 bp, Homo sapiens
atgacttggcgcccc

SEQ ID NO: 1603450 - DNA, 15 bp, Homo sapiens
gatgacttggcgccc

SEQ ID NO: 1603451 - DNA, 15 bp, Homo sapiens
ggatgacttggcgcc

SEQ ID NO: 1603452 - DNA, 15 bp, Homo sapiens
cggatgacttggcgc

SEQ ID NO: 1603453 - DNA, 15 bp, Homo sapiens
tcggatgacttggcg

SEQ ID NO: 1603454 - DNA, 15 bp, Homo sapiens
ctcggatgacttggc

SEQ ID NO: 1603455 - DNA, 15 bp, Homo sapiens
gctcggatgacttgg

SEQ ID NO: 1603456 - DNA, 15 bp, Homo sapiens
cgctcggatgacttg

SEQ ID NO: 1603457 - DNA, 15 bp, Homo sapiens
gcgctcggatgactt

SEQ ID NO: 1603458 - DNA, 15 bp, Homo sapiens
cgcgctcggatgact

SEQ ID NO: 1603459 - DNA, 15 bp, Homo sapiens
ccgcgctcggatgac

SEQ ID NO: 1603460 - DNA, 15 bp, Homo sapiens
gccgcgctcggatga

SEQ ID NO: 1603461 - DNA, 15 bp, Homo sapiens
agccgcgctcggatg

SEQ ID NO: 1603462 - DNA, 15 bp, Homo sapiens
aagccgcgctcggat

SEQ ID NO: 1603463 - DNA, 15 bp, Homo sapiens
gaagccgcgctcgga

SEQ ID NO: 1603464 - DNA, 15 bp, Homo sapiens
agaagccgcgctcgg

SEQ ID NO: 1603465 - DNA, 15 bp, Homo sapiens
cagaagccgcgctcg

SEQ ID NO: 1603466 - DNA, 15 bp, Homo sapiens
gcagaagccgcgctc

SEQ ID NO: 1603467 - DNA, 15 bp, Homo sapiens
agcagaagccgcgct

SEQ ID NO: 1603468 - DNA, 15 bp, Homo sapiens
aagcagaagccgcgc

SEQ ID NO: 1603469 - DNA, 15 bp, Homo sapiens
gaagcagaagccgcg

SEQ ID NO: 1603470 - DNA, 15 bp, Homo sapiens
agaagcagaagccgc

SEQ ID NO: 1603471 - DNA, 15 bp, Homo sapiens
gagaagcagaagccg

SEQ ID NO: 1603472 - DNA, 15 bp, Homo sapiens
ggagaagcagaagcc

SEQ ID NO: 1603473 - DNA, 15 bp, Homo sapiens
gggagaagcagaagc

SEQ ID NO: 1603474 - DNA, 15 bp, Homo sapiens
agggagaagcagaag

SEQ ID NO: 1603475 - DNA, 15 bp, Homo sapiens
aagggagaagcagaa

SEQ ID NO: 1603476 - DNA, 15 bp, Homo sapiens
aaagggagaagcaga

SEQ ID NO: 1603477 - DNA, 15 bp, Homo sapiens
gaaagggagaagcag

SEQ ID NO: 1603478 - DNA, 15 bp, Homo sapiens
ggaaagggagaagca

SEQ ID NO: 1603479 - DNA, 15 bp, Homo sapiens
gggaaagggagaagc

SEQ ID NO: 1603480 - DNA, 15 bp, Homo sapiens
agggaaagggagaag

SEQ ID NO: 1603481 - DNA, 15 bp, Homo sapiens
gagggaaagggagaa

SEQ ID NO: 1603482 - DNA, 15 bp, Homo sapiens
tgagggaaagggaga

SEQ ID NO: 1603483 - DNA, 15 bp, Homo sapiens
gtgagggaaagggag

SEQ ID NO: 1603484 - DNA, 15 bp, Homo sapiens
tgtgagggaaaggga

SEQ ID NO: 1603485 - DNA, 15 bp, Homo sapiens
ctgtgagggaaaggg

SEQ ID NO: 1603486 - DNA, 15 bp, Homo sapiens
cctgtgagggaaagg

SEQ ID NO: 1603487 - DNA, 15 bp, Homo sapiens
gcctgtgagggaaag

SEQ ID NO: 1603488 - DNA, 15 bp, Homo sapiens
tgcctgtgagggaaa

SEQ ID NO: 1603489 - DNA, 15 bp, Homo sapiens
atgcctgtgagggaa

SEQ ID NO: 1603490 - DNA, 15 bp, Homo sapiens
catgcctgtgaggga

SEQ ID NO: 1603491 - DNA, 15 bp, Homo sapiens
gcatgcctgtgaggg

SEQ ID NO: 1603492 - DNA, 15 bp, Homo sapiens
agcatgcctgtgagg

SEQ ID NO: 1603493 - DNA, 15 bp, Homo sapiens
gagcatgcctgtgag

SEQ ID NO: 1603494 - DNA, 15 bp, Homo sapiens
agagcatgcctgtga

SEQ ID NO: 1603495 - DNA, 15 bp, Homo sapiens
tagagcatgcctgtg

SEQ ID NO: 1603496 - DNA, 15 bp, Homo sapiens
gtagagcatgcctgt

SEQ ID NO: 1603497 - DNA, 15 bp, Homo sapiens
cgtagagcatgcctg

SEQ ID NO: 1603498 - DNA, 15 bp, Homo sapiens
ccgtagagcatgcct

SEQ ID NO: 1603499 - DNA, 15 bp, Homo sapiens
tccgtagagcatgcc

SEQ ID NO: 1603500 - DNA, 15 bp, Homo sapiens
ctccgtagagcatgc

SEQ ID NO: 1603501 - DNA, 15 bp, Homo sapiens
cctccgtagagcatg

SEQ ID NO: 1603502 - DNA, 15 bp, Homo sapiens
ccctccgtagagcat

SEQ ID NO: 1603503 - DNA, 15 bp, Homo sapiens
accctccgtagagca

SEQ ID NO: 1603504 - DNA, 15 bp, Homo sapiens
taccctccgtagagc

SEQ ID NO: 1603505 - DNA, 15 bp, Homo sapiens
ataccctccgtagag

SEQ ID NO: 1603506 - DNA, 15 bp, Homo sapiens
cataccctccgtaga

SEQ ID NO: 1603507 - DNA, 15 bp, Homo sapiens
ccataccctccgtag

SEQ ID NO: 1603508 - DNA, 15 bp, Homo sapiens
cccataccctccgta

SEQ ID NO: 1603509 - DNA, 15 bp, Homo sapiens
tcccataccctccgt

SEQ ID NO: 1603510 - DNA, 15 bp, Homo sapiens
ctcccataccctccg

SEQ ID NO: 1603511 - DNA, 15 bp, Homo sapiens
cctcccataccctcc

SEQ ID NO: 1603512 - DNA, 15 bp, Homo sapiens
gcctcccataccctc

SEQ ID NO: 1603513 - DNA, 15 bp, Homo sapiens
cgcctcccataccct

SEQ ID NO: 1603514 - DNA, 15 bp, Homo sapiens
tcgcctcccataccc

SEQ ID NO: 1603515 - DNA, 15 bp, Homo sapiens
ctcgcctcccatacc

SEQ ID NO: 1603516 - DNA, 15 bp, Homo sapiens
cctcgcctcccatac

SEQ ID NO: 1603517 - DNA, 15 bp, Homo sapiens
ccctcgcctcccata

SEQ ID NO: 1603518 - DNA, 15 bp, Homo sapiens
gccctcgcctcccat

SEQ ID NO: 1603519 - DNA, 15 bp, Homo sapiens
cgccctcgcctccca

SEQ ID NO: 1603520 - DNA, 15 bp, Homo sapiens
gcgccctcgcctccc

SEQ ID NO: 1603521 - DNA, 15 bp, Homo sapiens
cgcgccctcgcctcc

SEQ ID NO: 1603522 - DNA, 15 bp, Homo sapiens
acgcgccctcgcctc

SEQ ID NO: 1603523 - DNA, 15 bp, Homo sapiens
gacgcgccctcgcct

SEQ ID NO: 1603524 - DNA, 15 bp, Homo sapiens
agacgcgccctcgcc

SEQ ID NO: 1603525 - DNA, 15 bp, Homo sapiens
tagacgcgccctcgc

SEQ ID NO: 1603526 - DNA, 15 bp, Homo sapiens
atagacgcgccctcg

SEQ ID NO: 1603527 - DNA, 15 bp, Homo sapiens
catagacgcgccctc

SEQ ID NO: 1603528 - DNA, 15 bp, Homo sapiens
tcatagacgcgccct

SEQ ID NO: 1603529 - DNA, 15 bp, Homo sapiens
ctcatagacgcgccc

SEQ ID NO: 1603530 - DNA, 15 bp, Homo sapiens
cctcatagacgcgcc

SEQ ID NO: 1603531 - DNA, 15 bp, Homo sapiens
ccctcatagacgcgc

SEQ ID NO: 1603532 - DNA, 15 bp, Homo sapiens
gccctcatagacgcg

SEQ ID NO: 1603533 - DNA, 15 bp, Homo sapiens
ggccctcatagacgc

SEQ ID NO: 1603534 - DNA, 15 bp, Homo sapiens
tggccctcatagacg

SEQ ID NO: 1603535 - DNA, 15 bp, Homo sapiens
ctggccctcatagac

SEQ ID NO: 1603536 - DNA, 15 bp, Homo sapiens
tctggccctcataga

SEQ ID NO: 1603537 - DNA, 15 bp, Homo sapiens
ctctggccctcatag

SEQ ID NO: 1603538 - DNA, 15 bp, Homo sapiens
actctggccctcata

SEQ ID NO: 1603539 - DNA, 15 bp, Homo sapiens
gactctggccctcat

SEQ ID NO: 1603540 - DNA, 15 bp, Homo sapiens
ggactctggccctca

SEQ ID NO: 1603541 - DNA, 15 bp, Homo sapiens
cggactctggccctc

SEQ ID NO: 1603542 - DNA, 15 bp, Homo sapiens
gcggactctggccct

SEQ ID NO: 1603543 - DNA, 15 bp, Homo sapiens
cgcggactctggccc

SEQ ID NO: 1603544 - DNA, 15 bp, Homo sapiens
tcgcggactctggcc

SEQ ID NO: 1603545 - DNA, 15 bp, Homo sapiens
ttcgcggactctggc

SEQ ID NO: 1603546 - DNA, 15 bp, Homo sapiens
cttcgcggactctgg

SEQ ID NO: 1603547 - DNA, 15 bp, Homo sapiens
tcttcgcggactctg

SEQ ID NO: 1603548 - DNA, 15 bp, Homo sapiens
ctcttcgcggactct

SEQ ID NO: 1603549 - DNA, 15 bp, Homo sapiens
tctcttcgcggactc

SEQ ID NO: 1603550 - DNA, 15 bp, Homo sapiens
ctctcttcgcggact

SEQ ID NO: 1603551 - DNA, 15 bp, Homo sapiens
actctcttcgcggac

SEQ ID NO: 1603552 - DNA, 15 bp, Homo sapiens
gactctcttcgcgga

SEQ ID NO: 1603553 - DNA, 15 bp, Homo sapiens
ggactctcttcgcgg

SEQ ID NO: 1603554 - DNA, 15 bp, Homo sapiens
cggactctcttcgcg

SEQ ID NO: 1603555 - DNA, 15 bp, Homo sapiens
ccggactctcttcgc

SEQ ID NO: 1603556 - DNA, 15 bp, Homo sapiens
gccggactctcttcg

SEQ ID NO: 1603557 - DNA, 15 bp, Homo sapiens
ggccggactctcttc

SEQ ID NO: 1603558 - DNA, 15 bp, Homo sapiens
gggccggactctctt

SEQ ID NO: 1603559 - DNA, 15 bp, Homo sapiens
agggccggactctct

SEQ ID NO: 1603560 - DNA, 15 bp, Homo sapiens
aagggccggactctc

SEQ ID NO: 1603561 - DNA, 15 bp, Homo sapiens
taagggccggactct

SEQ ID NO: 1603562 - DNA, 15 bp, Homo sapiens
ctaagggccggactc

SEQ ID NO: 1603563 - DNA, 15 bp, Homo sapiens
cctaagggccggact

SEQ ID NO: 1603564 - DNA, 15 bp, Homo sapiens
gcctaagggccggac

SEQ ID NO: 1603565 - DNA, 15 bp, Homo sapiens
ggcctaagggccgga

SEQ ID NO: 1603566 - DNA, 15 bp, Homo sapiens
aggcctaagggccgg

SEQ ID NO: 1603567 - DNA, 15 bp, Homo sapiens
aaggcctaagggccg

SEQ ID NO: 1603568 - DNA, 15 bp, Homo sapiens
aaaggcctaagggcc

SEQ ID NO: 1603569 - DNA, 15 bp, Homo sapiens
caaaggcctaagggc

SEQ ID NO: 1603570 - DNA, 15 bp, Homo sapiens
ccaaaggcctaaggg

SEQ ID NO: 1603571 - DNA, 15 bp, Homo sapiens
accaaaggcctaagg

SEQ ID NO: 1603572 - DNA, 15 bp, Homo sapiens
caccaaaggcctaag

SEQ ID NO: 1603573 - DNA, 15 bp, Homo sapiens
acaccaaaggcctaa

SEQ ID NO: 1603574 - DNA, 15 bp, Homo sapiens
aacaccaaaggccta

SEQ ID NO: 1603575 - DNA, 15 bp, Homo sapiens
caacaccaaaggcct

SEQ ID NO: 1603576 - DNA, 15 bp, Homo sapiens
tcaacaccaaaggcc

SEQ ID NO: 1603577 - DNA, 15 bp, Homo sapiens
ttcaacaccaaaggc

SEQ ID NO: 1603578 - DNA, 15 bp, Homo sapiens
cttcaacaccaaagg

SEQ ID NO: 1603579 - DNA, 15 bp, Homo sapiens
tcttcaacaccaaag

SEQ ID NO: 1603580 - DNA, 15 bp, Homo sapiens
ttcttcaacaccaaa

SEQ ID NO: 1603581 - DNA, 15 bp, Homo sapiens
attcttcaacaccaa

SEQ ID NO: 1603582 - DNA, 15 bp, Homo sapiens
gattcttcaacacca

SEQ ID NO: 1603583 - DNA, 15 bp, Homo sapiens
agattcttcaacacc

SEQ ID NO: 1603584 - DNA, 15 bp, Homo sapiens
cagattcttcaacac

SEQ ID NO: 1603585 - DNA, 15 bp, Homo sapiens
gcagattcttcaaca

SEQ ID NO: 1603586 - DNA, 15 bp, Homo sapiens
agcagattcttcaac

SEQ ID NO: 1603587 - DNA, 15 bp, Homo sapiens
gagcagattcttcaa

SEQ ID NO: 1603588 - DNA, 15 bp, Homo sapiens
ggagcagattcttca

SEQ ID NO: 1603589 - DNA, 15 bp, Homo sapiens
aggagcagattcttc

SEQ ID NO: 1603590 - DNA, 15 bp, Homo sapiens
gaggagcagattctt

SEQ ID NO: 1603591 - DNA, 15 bp, Homo sapiens
agaggagcagattct

SEQ ID NO: 1603592 - DNA, 15 bp, Homo sapiens
cagaggagcagattc

SEQ ID NO: 1603593 - DNA, 15 bp, Homo sapiens
acagaggagcagatt

SEQ ID NO: 1603594 - DNA, 15 bp, Homo sapiens
gacagaggagcagat

SEQ ID NO: 1603595 - DNA, 15 bp, Homo sapiens
cgacagaggagcaga

SEQ ID NO: 1603596 - DNA, 15 bp, Homo sapiens
ccgacagaggagcag

SEQ ID NO: 1603597 - DNA, 15 bp, Homo sapiens
cccgacagaggagca

SEQ ID NO: 1603598 - DNA, 15 bp, Homo sapiens
acccgacagaggagc

SEQ ID NO: 1603599 - DNA, 15 bp, Homo sapiens
gacccgacagaggag

SEQ ID NO: 1603600 - DNA, 15 bp, Homo sapiens
tgacccgacagagga

SEQ ID NO: 1603601 - DNA, 15 bp, Homo sapiens
ttgacccgacagagg

SEQ ID NO: 1603602 - DNA, 15 bp, Homo sapiens
cttgacccgacagag

SEQ ID NO: 1603603 - DNA, 15 bp, Homo sapiens
gcttgacccgacaga

SEQ ID NO: 1603604 - DNA, 15 bp, Homo sapiens
ggcttgacccgacag

SEQ ID NO: 1603605 - DNA, 15 bp, Homo sapiens
gggcttgacccgaca

SEQ ID NO: 1603606 - DNA, 15 bp, Homo sapiens
ggggcttgacccgac

SEQ ID NO: 1603607 - DNA, 15 bp, Homo sapiens
tggggcttgacccga

SEQ ID NO: 1603608 - DNA, 15 bp, Homo sapiens
gtggggcttgacccg

SEQ ID NO: 1603609 - DNA, 15 bp, Homo sapiens
agtggggcttgaccc

SEQ ID NO: 1603610 - DNA, 15 bp, Homo sapiens
tagtggggcttgacc

SEQ ID NO: 1603611 - DNA, 15 bp, Homo sapiens
ctagtggggcttgac

SEQ ID NO: 1603612 - DNA, 15 bp, Homo sapiens
tctagtggggcttga

SEQ ID NO: 1603613 - DNA, 15 bp, Homo sapiens
ttctagtggggcttg

SEQ ID NO: 1603614 - DNA, 15 bp, Homo sapiens
cttctagtggggctt

SEQ ID NO: 1603615 - DNA, 15 bp, Homo sapiens
acttctagtggggct

SEQ ID NO: 1603616 - DNA, 15 bp, Homo sapiens
aacttctagtggggc

SEQ ID NO: 1603617 - DNA, 15 bp, Homo sapiens
taacttctagtgggg

SEQ ID NO: 1603618 - DNA, 15 bp, Homo sapiens
ttaacttctagtggg

SEQ ID NO: 1603619 - DNA, 15 bp, Homo sapiens
gttaacttctagtgg

SEQ ID NO: 1603620 - DNA, 15 bp, Homo sapiens
tgttaacttctagtg

SEQ ID NO: 1603621 - DNA, 15 bp, Homo sapiens
gtgttaacttctagt

SEQ ID NO: 1603622 - DNA, 15 bp, Homo sapiens
ggtgttaacttctag

SEQ ID NO: 1603623 - DNA, 15 bp, Homo sapiens
aggtgttaacttcta

SEQ ID NO: 1603624 - DNA, 15 bp, Homo sapiens
caggtgttaacttct

SEQ ID NO: 1603625 - DNA, 15 bp, Homo sapiens
acaggtgttaacttc

SEQ ID NO: 1603626 - DNA, 15 bp, Homo sapiens
cacaggtgttaactt

SEQ ID NO: 1603627 - DNA, 15 bp, Homo sapiens
ccacaggtgttaact

SEQ ID NO: 1603628 - DNA, 15 bp, Homo sapiens
accacaggtgttaac

SEQ ID NO: 1603629 - DNA, 15 bp, Homo sapiens
gaccacaggtgttaa

SEQ ID NO: 1603630 - DNA, 15 bp, Homo sapiens
agaccacaggtgtta

SEQ ID NO: 1603631 - DNA, 15 bp, Homo sapiens
gagaccacaggtgtt

SEQ ID NO: 1603632 - DNA, 15 bp, Homo sapiens
ggagaccacaggtgt

SEQ ID NO: 1603633 - DNA, 15 bp, Homo sapiens
tggagaccacaggtg

SEQ ID NO: 1603634 - DNA, 15 bp, Homo sapiens
ttggagaccacaggt

SEQ ID NO: 1603635 - DNA, 15 bp, Homo sapiens
tttggagaccacagg

SEQ ID NO: 1603636 - DNA, 15 bp, Homo sapiens
gtttggagaccacag

SEQ ID NO: 1603637 - DNA, 15 bp, Homo sapiens
agtttggagaccaca

SEQ ID NO: 1603638 - DNA, 15 bp, Homo sapiens
aagtttggagaccac

SEQ ID NO: 1603639 - DNA, 15 bp, Homo sapiens
caagtttggagacca

SEQ ID NO: 1603640 - DNA, 15 bp, Homo sapiens
gcaagtttggagacc

SEQ ID NO: 1603641 - DNA, 15 bp, Homo sapiens
ggcaagtttggagac

SEQ ID NO: 1603642 - DNA, 15 bp, Homo sapiens
aggcaagtttggaga

SEQ ID NO: 1603643 - DNA, 15 bp, Homo sapiens
taggcaagtttggag

SEQ ID NO: 1603644 - DNA, 15 bp, Homo sapiens
ataggcaagtttgga

SEQ ID NO: 1603645 - DNA, 15 bp, Homo sapiens
aataggcaagtttgg

SEQ ID NO: 1603646 - DNA, 15 bp, Homo sapiens
aaataggcaagtttg

SEQ ID NO: 1603647 - DNA, 15 bp, Homo sapiens
aaaataggcaagttt

SEQ ID NO: 1603648 - DNA, 15 bp, Homo sapiens
gaaaataggcaagtt

SEQ ID NO: 1603649 - DNA, 15 bp, Homo sapiens
ggaaaataggcaagt

SEQ ID NO: 1603650 - DNA, 15 bp, Homo sapiens
aggaaaataggcaag

SEQ ID NO: 1603651 - DNA, 15 bp, Homo sapiens
caggaaaataggcaa

SEQ ID NO: 1603652 - DNA, 15 bp, Homo sapiens
acaggaaaataggca

SEQ ID NO: 1603653 - DNA, 15 bp, Homo sapiens
gacaggaaaataggc

SEQ ID NO: 1603654 - DNA, 15 bp, Homo sapiens
tgacaggaaaatagg

SEQ ID NO: 1603655 - DNA, 15 bp, Homo sapiens
gtgacaggaaaatag

SEQ ID NO: 1603656 - DNA, 15 bp, Homo sapiens
cgtgacaggaaaata

SEQ ID NO: 1603657 - DNA, 15 bp, Homo sapiens
gcgtgacaggaaaat

SEQ ID NO: 1603658 - DNA, 15 bp, Homo sapiens
tgcgtgacaggaaaa

SEQ ID NO: 1603659 - DNA, 15 bp, Homo sapiens
ctgcgtgacaggaaa

SEQ ID NO: 1603660 - DNA, 15 bp, Homo sapiens
actgcgtgacaggaa

SEQ ID NO: 1603661 - DNA, 15 bp, Homo sapiens
aactgcgtgacagga

SEQ ID NO: 1603662 - DNA, 15 bp, Homo sapiens
gaactgcgtgacagg

SEQ ID NO: 1603663 - DNA, 15 bp, Homo sapiens
tgaactgcgtgacag

SEQ ID NO: 1603664 - DNA, 15 bp, Homo sapiens
ttgaactgcgtgaca

SEQ ID NO: 1603665 - DNA, 15 bp, Homo sapiens
cttgaactgcgtgac

SEQ ID NO: 1603666 - DNA, 15 bp, Homo sapiens
gcttgaactgcgtga

SEQ ID NO: 1603667 - DNA, 15 bp, Homo sapiens
ggcttgaactgcgtg

SEQ ID NO: 1603668 - DNA, 15 bp, Homo sapiens
tggcttgaactgcgt

SEQ ID NO: 1603669 - DNA, 15 bp, Homo sapiens
ttggcttgaactgcg

SEQ ID NO: 1603670 - DNA, 15 bp, Homo sapiens
cttggcttgaactgc

SEQ ID NO: 1603671 - DNA, 15 bp, Homo sapiens
tcttggcttgaactg

SEQ ID NO: 1603672 - DNA, 15 bp, Homo sapiens
atcttggcttgaact

SEQ ID NO: 1603673 - DNA, 15 bp, Homo sapiens
aatcttggcttgaac

SEQ ID NO: 1603674 - DNA, 15 bp, Homo sapiens
gaatcttggcttgaa

SEQ ID NO: 1603675 - DNA, 15 bp, Homo sapiens
tgaatcttggcttga

SEQ ID NO: 1603676 - DNA, 15 bp, Homo sapiens
ttgaatcttggcttg

SEQ ID NO: 1603677 - DNA, 15 bp, Homo sapiens
gttgaatcttggctt

SEQ ID NO: 1603678 - DNA, 15 bp, Homo sapiens
agttgaatcttggct

SEQ ID NO: 1603679 - DNA, 15 bp, Homo sapiens
gagttgaatcttggc

SEQ ID NO: 1603680 - DNA, 15 bp, Homo sapiens
cgagttgaatcttgg

SEQ ID NO: 1603681 - DNA, 15 bp, Homo sapiens
acgagttgaatcttg

SEQ ID NO: 1603682 - DNA, 15 bp, Homo sapiens
gacgagttgaatctt

SEQ ID NO: 1603683 - DNA, 15 bp, Homo sapiens
agacgagttgaatct

SEQ ID NO: 1603684 - DNA, 15 bp, Homo sapiens
aagacgagttgaatc

SEQ ID NO: 1603685 - DNA, 15 bp, Homo sapiens
caagacgagttgaat

SEQ ID NO: 1603686 - DNA, 15 bp, Homo sapiens
tcaagacgagttgaa

SEQ ID NO: 1603687 - DNA, 15 bp, Homo sapiens
ttcaagacgagttga

SEQ ID NO: 1603688 - DNA, 15 bp, Homo sapiens
attcaagacgagttg

SEQ ID NO: 1603689 - DNA, 15 bp, Homo sapiens
aattcaagacgagtt

SEQ ID NO: 1603690 - DNA, 15 bp, Homo sapiens
aaattcaagacgagt

SEQ ID NO: 1603691 - DNA, 15 bp, Homo sapiens
aaaattcaagacgag

SEQ ID NO: 1603692 - DNA, 15 bp, Homo sapiens
aaaaattcaagacga

SEQ ID NO: 1603693 - DNA, 15 bp, Homo sapiens
caaaaattcaagacg

SEQ ID NO: 1603694 - DNA, 15 bp, Homo sapiens
acaaaaattcaagac

SEQ ID NO: 1603695 - DNA, 15 bp, Homo sapiens
tacaaaaattcaaga

SEQ ID NO: 1603696 - DNA, 15 bp, Homo sapiens
atacaaaaattcaag

SEQ ID NO: 1603697 - DNA, 15 bp, Homo sapiens
aatacaaaaattcaa

SEQ ID NO: 1603698 - DNA, 15 bp, Homo sapiens
aaatacaaaaattca

SEQ ID NO: 1603699 - DNA, 15 bp, Homo sapiens
taaatacaaaaattc

SEQ ID NO: 1603700 - DNA, 15 bp, Homo sapiens
ctaaatacaaaaatt

SEQ ID NO: 1603701 - DNA, 15 bp, Homo sapiens
tctaaatacaaaaat

SEQ ID NO: 1603702 - DNA, 15 bp, Homo sapiens
ctctaaatacaaaaa

SEQ ID NO: 1603703 - DNA, 15 bp, Homo sapiens
gctctaaatacaaaa

SEQ ID NO: 1603704 - DNA, 15 bp, Homo sapiens
ggctctaaatacaaa

SEQ ID NO: 1603705 - DNA, 15 bp, Homo sapiens
gggctctaaatacaa

SEQ ID NO: 1603706 - DNA, 15 bp, Homo sapiens
ggggctctaaataca

SEQ ID NO: 1603707 - DNA, 15 bp, Homo sapiens
aggggctctaaatac

SEQ ID NO: 1603708 - DNA, 15 bp, Homo sapiens
taggggctctaaata

SEQ ID NO: 1603709 - DNA, 15 bp, Homo sapiens
gtaggggctctaaat

SEQ ID NO: 1603710 - DNA, 15 bp, Homo sapiens
ggtaggggctctaaa

SEQ ID NO: 1603711 - DNA, 15 bp, Homo sapiens
aggtaggggctctaa

SEQ ID NO: 1603712 - DNA, 15 bp, Homo sapiens
aaggtaggggctcta

SEQ ID NO: 1603713 - DNA, 15 bp, Homo sapiens
gaaggtaggggctct

SEQ ID NO: 1603714 - DNA, 15 bp, Homo sapiens
agaaggtaggggctc

SEQ ID NO: 1603715 - DNA, 15 bp, Homo sapiens
gagaaggtaggggct

SEQ ID NO: 1603716 - DNA, 15 bp, Homo sapiens
ggagaaggtaggggc

SEQ ID NO: 1603717 - DNA, 15 bp, Homo sapiens
tggagaaggtagggg

SEQ ID NO: 1603718 - DNA, 15 bp, Homo sapiens
gtggagaaggtaggg

SEQ ID NO: 1603719 - DNA, 15 bp, Homo sapiens
ggtggagaaggtagg

SEQ ID NO: 1603720 - DNA, 15 bp, Homo sapiens
cggtggagaaggtag

SEQ ID NO: 1603721 - DNA, 15 bp, Homo sapiens
tcggtggagaaggta

SEQ ID NO: 1603722 - DNA, 15 bp, Homo sapiens
gtcggtggagaaggt

SEQ ID NO: 1603723 - DNA, 15 bp, Homo sapiens
agtcggtggagaagg

SEQ ID NO: 1603724 - DNA, 15 bp, Homo sapiens
gagtcggtggagaag

SEQ ID NO: 1603725 - DNA, 15 bp, Homo sapiens
ggagtcggtggagaa

SEQ ID NO: 1603726 - DNA, 15 bp, Homo sapiens
tggagtcggtggaga

SEQ ID NO: 1603727 - DNA, 15 bp, Homo sapiens
ctggagtcggtggag

SEQ ID NO: 1603728 - DNA, 15 bp, Homo sapiens
cctggagtcggtgga

SEQ ID NO: 1603729 - DNA, 15 bp, Homo sapiens
ccctggagtcggtgg

SEQ ID NO: 1603730 - DNA, 15 bp, Homo sapiens
cccctggagtcggtg

SEQ ID NO: 1603731 - DNA, 15 bp, Homo sapiens
gcccctggagtcggt

SEQ ID NO: 1603732 - DNA, 15 bp, Homo sapiens
cgcccctggagtcgg

SEQ ID NO: 1603733 - DNA, 15 bp, Homo sapiens
gcgcccctggagtcg

SEQ ID NO: 1603734 - DNA, 15 bp, Homo sapiens
ggcgcccctggagtc

SEQ ID NO: 1603735 - DNA, 15 bp, Homo sapiens
gggcgcccctggagt

SEQ ID NO: 1603736 - DNA, 15 bp, Homo sapiens
agggcgcccctggag

SEQ ID NO: 1603737 - DNA, 15 bp, Homo sapiens
gagggcgcccctgga

SEQ ID NO: 1603738 - DNA, 15 bp, Homo sapiens
agagggcgcccctgg

SEQ ID NO: 1603739 - DNA, 15 bp, Homo sapiens
cagagggcgcccctg

SEQ ID NO: 1603740 - DNA, 15 bp, Homo sapiens
ccagagggcgcccct

SEQ ID NO: 1603741 - DNA, 15 bp, Homo sapiens
gccagagggcgcccc

SEQ ID NO: 1603742 - DNA, 15 bp, Homo sapiens
cgccagagggcgccc

SEQ ID NO: 1603743 - DNA, 15 bp, Homo sapiens
ccgccagagggcgcc

SEQ ID NO: 1603744 - DNA, 15 bp, Homo sapiens
cccgccagagggcgc

SEQ ID NO: 1603745 - DNA, 15 bp, Homo sapiens
tcccgccagagggcg

SEQ ID NO: 1603746 - DNA, 15 bp, Homo sapiens
ttcccgccagagggc

SEQ ID NO: 1603747 - DNA, 15 bp, Homo sapiens
cttcccgccagaggg

SEQ ID NO: 1603748 - DNA, 15 bp, Homo sapiens
ccttcccgccagagg

SEQ ID NO: 1603749 - DNA, 15 bp, Homo sapiens
cccttcccgccagag

SEQ ID NO: 1603750 - DNA, 15 bp, Homo sapiens
ccccttcccgccaga

SEQ ID NO: 1603751 - DNA, 15 bp, Homo sapiens
gccccttcccgccag

SEQ ID NO: 1603752 - DNA, 15 bp, Homo sapiens
ggccccttcccgcca

SEQ ID NO: 1603753 - DNA, 15 bp, Homo sapiens
aggccccttcccgcc

SEQ ID NO: 1603754 - DNA, 15 bp, Homo sapiens
caggccccttcccgc

SEQ ID NO: 1603755 - DNA, 15 bp, Homo sapiens
ccaggccccttcccg

SEQ ID NO: 1603756 - DNA, 15 bp, Homo sapiens
cccaggccccttccc

SEQ ID NO: 1603757 - DNA, 15 bp, Homo sapiens
ccccaggccccttcc

SEQ ID NO: 1603758 - DNA, 15 bp, Homo sapiens
accccaggccccttc

SEQ ID NO: 1603759 - DNA, 15 bp, Homo sapiens
taccccaggcccctt

SEQ ID NO: 1603760 - DNA, 15 bp, Homo sapiens
ctaccccaggcccct

SEQ ID NO: 1603761 - DNA, 15 bp, Homo sapiens
cctaccccaggcccc

SEQ ID NO: 1603762 - DNA, 15 bp, Homo sapiens
tcctaccccaggccc

SEQ ID NO: 1603763 - DNA, 15 bp, Homo sapiens
ctcctaccccaggcc

SEQ ID NO: 1603764 - DNA, 15 bp, Homo sapiens
cctcctaccccaggc

SEQ ID NO: 1603765 - DNA, 15 bp, Homo sapiens
ccctcctaccccagg

SEQ ID NO: 1603766 - DNA, 15 bp, Homo sapiens
tccctcctaccccag

SEQ ID NO: 1603767 - DNA, 15 bp, Homo sapiens
ttccctcctacccca

SEQ ID NO: 1603768 - DNA, 15 bp, Homo sapiens
gttccctcctacccc

SEQ ID NO: 1603769 - DNA, 15 bp, Homo sapiens
ggttccctcctaccc

SEQ ID NO: 1603770 - DNA, 15 bp, Homo sapiens
aggttccctcctacc

SEQ ID NO: 1603771 - DNA, 15 bp, Homo sapiens
caggttccctcctac

SEQ ID NO: 1603772 - DNA, 15 bp, Homo sapiens
tcaggttccctccta

SEQ ID NO: 1603773 - DNA, 15 bp, Homo sapiens
ctcaggttccctcct

SEQ ID NO: 1603774 - DNA, 15 bp, Homo sapiens
cctcaggttccctcc

SEQ ID NO: 1603775 - DNA, 15 bp, Homo sapiens
ccctcaggttccctc

SEQ ID NO: 1603776 - DNA, 15 bp, Homo sapiens
tccctcaggttccct

SEQ ID NO: 1603777 - DNA, 15 bp, Homo sapiens
ctccctcaggttccc

SEQ ID NO: 1603778 - DNA, 15 bp, Homo sapiens
gctccctcaggttcc

SEQ ID NO: 1603779 - DNA, 15 bp, Homo sapiens
cgctccctcaggttc

SEQ ID NO: 1603780 - DNA, 15 bp, Homo sapiens
ccgctccctcaggtt

SEQ ID NO: 1603781 - DNA, 15 bp, Homo sapiens
cccgctccctcaggt

SEQ ID NO: 1603782 - DNA, 15 bp, Homo sapiens
acccgctccctcagg

SEQ ID NO: 1603783 - DNA, 15 bp, Homo sapiens
aacccgctccctcag

SEQ ID NO: 1603784 - DNA, 15 bp, Homo sapiens
taacccgctccctca

SEQ ID NO: 1603785 - DNA, 15 bp, Homo sapiens
gtaacccgctccctc

SEQ ID NO: 1603786 - DNA, 15 bp, Homo sapiens
tgtaacccgctccct

SEQ ID NO: 1603787 - DNA, 15 bp, Homo sapiens
ttgtaacccgctccc

SEQ ID NO: 1603788 - DNA, 15 bp, Homo sapiens
tttgtaacccgctcc

SEQ ID NO: 1603789 - DNA, 15 bp, Homo sapiens
ctttgtaacccgctc

SEQ ID NO: 1603790 - DNA, 15 bp, Homo sapiens
gctttgtaacccgct

SEQ ID NO: 1603791 - DNA, 15 bp, Homo sapiens
tgctttgtaacccgc

SEQ ID NO: 1603792 - DNA, 15 bp, Homo sapiens
ctgctttgtaacccg

SEQ ID NO: 1603793 - DNA, 15 bp, Homo sapiens
tctgctttgtaaccc

SEQ ID NO: 1603794 - DNA, 15 bp, Homo sapiens
ctctgctttgtaacc

SEQ ID NO: 1603795 - DNA, 15 bp, Homo sapiens
tctctgctttgtaac

SEQ ID NO: 1603796 - DNA, 15 bp, Homo sapiens
ttctctgctttgtaa

SEQ ID NO: 1603797 - DNA, 15 bp, Homo sapiens
gttctctgctttgta

SEQ ID NO: 1603798 - DNA, 15 bp, Homo sapiens
tgttctctgctttgt

SEQ ID NO: 1603799 - DNA, 15 bp, Homo sapiens
ctgttctctgctttg

SEQ ID NO: 1603800 - DNA, 15 bp, Homo sapiens
gctgttctctgcttt

SEQ ID NO: 1603801 - DNA, 15 bp, Homo sapiens
cgctgttctctgctt

SEQ ID NO: 1603802 - DNA, 15 bp, Homo sapiens
ccgctgttctctgct

SEQ ID NO: 1603803 - DNA, 15 bp, Homo sapiens
cccgctgttctctgc

SEQ ID NO: 1603804 - DNA, 15 bp, Homo sapiens
tcccgctgttctctg

SEQ ID NO: 1603805 - DNA, 15 bp, Homo sapiens
ctcccgctgttctct

SEQ ID NO: 1603806 - DNA, 15 bp, Homo sapiens
gctcccgctgttctc

SEQ ID NO: 1603807 - DNA, 15 bp, Homo sapiens
agctcccgctgttct

SEQ ID NO: 1603808 - DNA, 15 bp, Homo sapiens
gagctcccgctgttc

SEQ ID NO: 1603809 - DNA, 15 bp, Homo sapiens
tgagctcccgctgtt

SEQ ID NO: 1603810 - DNA, 15 bp, Homo sapiens
ctgagctcccgctgt

SEQ ID NO: 1603811 - DNA, 15 bp, Homo sapiens
gctgagctcccgctg

SEQ ID NO: 1603812 - DNA, 15 bp, Homo sapiens
tgctgagctcccgct

SEQ ID NO: 1603813 - DNA, 15 bp, Homo sapiens
ctgctgagctcccgc

SEQ ID NO: 1603814 - DNA, 15 bp, Homo sapiens
gctgctgagctcccg

SEQ ID NO: 1603815 - DNA, 15 bp, Homo sapiens
agctgctgagctccc

SEQ ID NO: 1603816 - DNA, 15 bp, Homo sapiens
gagctgctgagctcc

SEQ ID NO: 1603817 - DNA, 15 bp, Homo sapiens
ggagctgctgagctc

SEQ ID NO: 1603818 - DNA, 15 bp, Homo sapiens
gggagctgctgagct

SEQ ID NO: 1603819 - DNA, 15 bp, Homo sapiens
agggagctgctgagc

SEQ ID NO: 1603820 - DNA, 15 bp, Homo sapiens
aagggagctgctgag

SEQ ID NO: 1603821 - DNA, 15 bp, Homo sapiens
aaagggagctgctga

SEQ ID NO: 1603822 - DNA, 15 bp, Homo sapiens
caaagggagctgctg

SEQ ID NO: 1603823 - DNA, 15 bp, Homo sapiens
tcaaagggagctgct

SEQ ID NO: 1603824 - DNA, 15 bp, Homo sapiens
ttcaaagggagctgc

SEQ ID NO: 1603825 - DNA, 15 bp, Homo sapiens
attcaaagggagctg

SEQ ID NO: 1603826 - DNA, 15 bp, Homo sapiens
aattcaaagggagct

SEQ ID NO: 1603827 - DNA, 15 bp, Homo sapiens
caattcaaagggagc

SEQ ID NO: 1603828 - DNA, 15 bp, Homo sapiens
gcaattcaaagggag

SEQ ID NO: 1603829 - DNA, 15 bp, Homo sapiens
cgcaattcaaaggga

SEQ ID NO: 1603830 - DNA, 15 bp, Homo sapiens
tcgcaattcaaaggg

SEQ ID NO: 1603831 - DNA, 15 bp, Homo sapiens
ctcgcaattcaaagg

SEQ ID NO: 1603832 - DNA, 15 bp, Homo sapiens
cctcgcaattcaaag

SEQ ID NO: 1603833 - DNA, 15 bp, Homo sapiens
tcctcgcaattcaaa

SEQ ID NO: 1603834 - DNA, 15 bp, Homo sapiens
ttcctcgcaattcaa

SEQ ID NO: 1603835 - DNA, 15 bp, Homo sapiens
tttcctcgcaattca

SEQ ID NO: 1603836 - DNA, 15 bp, Homo sapiens
gtttcctcgcaattc

SEQ ID NO: 1603837 - DNA, 15 bp, Homo sapiens
ggtttcctcgcaatt

SEQ ID NO: 1603838 - DNA, 15 bp, Homo sapiens
tggtttcctcgcaat

SEQ ID NO: 1603839 - DNA, 15 bp, Homo sapiens
ttggtttcctcgcaa

SEQ ID NO: 1603840 - DNA, 15 bp, Homo sapiens
cttggtttcctcgca

SEQ ID NO: 1603841 - DNA, 15 bp, Homo sapiens
tcttggtttcctcgc

SEQ ID NO: 1603842 - DNA, 15 bp, Homo sapiens
gtcttggtttcctcg

SEQ ID NO: 1603843 - DNA, 15 bp, Homo sapiens
cgtcttggtttcctc

SEQ ID NO: 1603844 - DNA, 15 bp, Homo sapiens
ccgtcttggtttcct

SEQ ID NO: 1603845 - DNA, 15 bp, Homo sapiens
tccgtcttggtttcc

SEQ ID NO: 1603846 - DNA, 15 bp, Homo sapiens
ctccgtcttggtttc

SEQ ID NO: 1603847 - DNA, 15 bp, Homo sapiens
tctccgtcttggttt

SEQ ID NO: 1603848 - DNA, 15 bp, Homo sapiens
gtctccgtcttggtt

SEQ ID NO: 1603849 - DNA, 15 bp, Homo sapiens
cgtctccgtcttggt

SEQ ID NO: 1603850 - DNA, 15 bp, Homo sapiens
ccgtctccgtcttgg

SEQ ID NO: 1603851 - DNA, 15 bp, Homo sapiens
cccgtctccgtcttg

SEQ ID NO: 1603852 - DNA, 15 bp, Homo sapiens
tcccgtctccgtctt

SEQ ID NO: 1603853 - DNA, 15 bp, Homo sapiens
ctcccgtctccgtct

SEQ ID NO: 1603854 - DNA, 15 bp, Homo sapiens
cctcccgtctccgtc

SEQ ID NO: 1603855 - DNA, 15 bp, Homo sapiens
acctcccgtctccgt

SEQ ID NO: 1603856 - DNA, 15 bp, Homo sapiens
tacctcccgtctccg

SEQ ID NO: 1603857 - DNA, 15 bp, Homo sapiens
ctacctcccgtctcc

SEQ ID NO: 1603858 - DNA, 15 bp, Homo sapiens
cctacctcccgtctc

SEQ ID NO: 1603859 - DNA, 15 bp, Homo sapiens
tcctacctcccgtct

SEQ ID NO: 1603860 - DNA, 15 bp, Homo sapiens
ctcctacctcccgtc

SEQ ID NO: 1603861 - DNA, 15 bp, Homo sapiens
gctcctacctcccgt

SEQ ID NO: 1603862 - DNA, 15 bp, Homo sapiens
tgctcctacctcccg

SEQ ID NO: 1603863 - DNA, 15 bp, Homo sapiens
gtgctcctacctccc

SEQ ID NO: 1603864 - DNA, 15 bp, Homo sapiens
cgtgctcctacctcc

SEQ ID NO: 1603865 - DNA, 15 bp, Homo sapiens
ccgtgctcctacctc

SEQ ID NO: 1603866 - DNA, 15 bp, Homo sapiens
cccgtgctcctacct

SEQ ID NO: 1603867 - DNA, 15 bp, Homo sapiens
gcccgtgctcctacc

SEQ ID NO: 1603868 - DNA, 15 bp, Homo sapiens
ggcccgtgctcctac

SEQ ID NO: 1603869 - DNA, 15 bp, Homo sapiens
aggcccgtgctccta

SEQ ID NO: 1603870 - DNA, 15 bp, Homo sapiens
caggcccgtgctcct

SEQ ID NO: 1603871 - DNA, 15 bp, Homo sapiens
tcaggcccgtgctcc

SEQ ID NO: 1603872 - DNA, 15 bp, Homo sapiens
ttcaggcccgtgctc

SEQ ID NO: 1603873 - DNA, 15 bp, Homo sapiens
cttcaggcccgtgct

SEQ ID NO: 1603874 - DNA, 15 bp, Homo sapiens
gcttcaggcccgtgc

SEQ ID NO: 1603875 - DNA, 15 bp, Homo sapiens
cgcttcaggcccgtg

SEQ ID NO: 1603876 - DNA, 15 bp, Homo sapiens
ccgcttcaggcccgt

SEQ ID NO: 1603877 - DNA, 15 bp, Homo sapiens
accgcttcaggcccg

SEQ ID NO: 1603878 - DNA, 15 bp, Homo sapiens
gaccgcttcaggccc

SEQ ID NO: 1603879 - DNA, 15 bp, Homo sapiens
tgaccgcttcaggcc

SEQ ID NO: 1603880 - DNA, 15 bp, Homo sapiens
ctgaccgcttcaggc

SEQ ID NO: 1603881 - DNA, 15 bp, Homo sapiens
gctgaccgcttcagg

SEQ ID NO: 1603882 - DNA, 15 bp, Homo sapiens
ggctgaccgcttcag

SEQ ID NO: 1603883 - DNA, 15 bp, Homo sapiens
cggctgaccgcttca

SEQ ID NO: 1603884 - DNA, 15 bp, Homo sapiens
tcggctgaccgcttc

SEQ ID NO: 1603885 - DNA, 15 bp, Homo sapiens
gtcggctgaccgctt

SEQ ID NO: 1603886 - DNA, 15 bp, Homo sapiens
ggtcggctgaccgct

SEQ ID NO: 1603887 - DNA, 15 bp, Homo sapiens
gggtcggctgaccgc

SEQ ID NO: 1603888 - DNA, 15 bp, Homo sapiens
agggtcggctgaccg

SEQ ID NO: 1603889 - DNA, 15 bp, Homo sapiens
cagggtcggctgacc

SEQ ID NO: 1603890 - DNA, 15 bp, Homo sapiens
acagggtcggctgac

SEQ ID NO: 1603891 - DNA, 15 bp, Homo sapiens
cacagggtcggctga

SEQ ID NO: 1603892 - DNA, 15 bp, Homo sapiens
tcacagggtcggctg

SEQ ID NO: 1603893 - DNA, 15 bp, Homo sapiens
ctcacagggtcggct

SEQ ID NO: 1603894 - DNA, 15 bp, Homo sapiens
cctcacagggtcggc

SEQ ID NO: 1603895 - DNA, 15 bp, Homo sapiens
gcctcacagggtcgg

SEQ ID NO: 1603896 - DNA, 15 bp, Homo sapiens
ggcctcacagggtcg

SEQ ID NO: 1603897 - DNA, 15 bp, Homo sapiens
gggcctcacagggtc

SEQ ID NO: 1603898 - DNA, 15 bp, Homo sapiens
cgggcctcacagggt

SEQ ID NO: 1603899 - DNA, 15 bp, Homo sapiens
gcgggcctcacaggg

SEQ ID NO: 1603900 - DNA, 15 bp, Homo sapiens
cgcgggcctcacagg

SEQ ID NO: 1603901 - DNA, 15 bp, Homo sapiens
gcgcgggcctcacag

SEQ ID NO: 1603902 - DNA, 15 bp, Homo sapiens
agcgcgggcctcaca

SEQ ID NO: 1603903 - DNA, 15 bp, Homo sapiens
cagcgcgggcctcac

SEQ ID NO: 1603904 - DNA, 15 bp, Homo sapiens
gcagcgcgggcctca

SEQ ID NO: 1603905 - DNA, 15 bp, Homo sapiens
ggcagcgcgggcctc

SEQ ID NO: 1603906 - DNA, 15 bp, Homo sapiens
cggcagcgcgggcct

SEQ ID NO: 1603907 - DNA, 15 bp, Homo sapiens
acggcagcgcgggcc

SEQ ID NO: 1603908 - DNA, 15 bp, Homo sapiens
cacggcagcgcgggc

SEQ ID NO: 1603909 - DNA, 15 bp, Homo sapiens
gcacggcagcgcggg

SEQ ID NO: 1603910 - DNA, 15 bp, Homo sapiens
agcacggcagcgcgg

SEQ ID NO: 1603911 - DNA, 15 bp, Homo sapiens
tagcacggcagcgcg

SEQ ID NO: 1603912 - DNA, 15 bp, Homo sapiens
gtagcacggcagcgc

SEQ ID NO: 1603913 - DNA, 15 bp, Homo sapiens
cgtagcacggcagcg

SEQ ID NO: 1603914 - DNA, 15 bp, Homo sapiens
gcgtagcacggcagc

SEQ ID NO: 1603915 - DNA, 15 bp, Homo sapiens
ggcgtagcacggcag

SEQ ID NO: 1603916 - DNA, 15 bp, Homo sapiens
cggcgtagcacggca

SEQ ID NO: 1603917 - DNA, 15 bp, Homo sapiens
gcggcgtagcacggc

SEQ ID NO: 1603918 - DNA, 15 bp, Homo sapiens
cgcggcgtagcacgg

SEQ ID NO: 1603919 - DNA, 15 bp, Homo sapiens
tcgcggcgtagcacg

SEQ ID NO: 1603920 - DNA, 15 bp, Homo sapiens
ttcgcggcgtagcac

SEQ ID NO: 1603921 - DNA, 15 bp, Homo sapiens
attcgcggcgtagca

SEQ ID NO: 1603922 - DNA, 15 bp, Homo sapiens
gattcgcggcgtagc

SEQ ID NO: 1603923 - DNA, 15 bp, Homo sapiens
ggattcgcggcgtag

SEQ ID NO: 1603924 - DNA, 15 bp, Homo sapiens
cggattcgcggcgta

SEQ ID NO: 1603925 - DNA, 15 bp, Homo sapiens
gcggattcgcggcgt

SEQ ID NO: 1603926 - DNA, 15 bp, Homo sapiens
ggcggattcgcggcg

SEQ ID NO: 1603927 - DNA, 15 bp, Homo sapiens
tggcggattcgcggc

SEQ ID NO: 1603928 - DNA, 15 bp, Homo sapiens
ctggcggattcgcgg

SEQ ID NO: 1603929 - DNA, 15 bp, Homo sapiens
tctggcggattcgcg

SEQ ID NO: 1603930 - DNA, 15 bp, Homo sapiens
gtctggcggattcgc

SEQ ID NO: 1603931 - DNA, 15 bp, Homo sapiens
cgtctggcggattcg

SEQ ID NO: 1603932 - DNA, 15 bp, Homo sapiens
gcgtctggcggattc

SEQ ID NO: 1603933 - DNA, 15 bp, Homo sapiens
ggcgtctggcggatt

SEQ ID NO: 1603934 - DNA, 15 bp, Homo sapiens
gggcgtctggcggat

SEQ ID NO: 1603935 - DNA, 15 bp, Homo sapiens
ggggcgtctggcgga

SEQ ID NO: 1603936 - DNA, 15 bp, Homo sapiens
gggggcgtctggcgg

SEQ ID NO: 1603937 - DNA, 15 bp, Homo sapiens
cgggggcgtctggcg

SEQ ID NO: 1603938 - DNA, 15 bp, Homo sapiens
acgggggcgtctggc

SEQ ID NO: 1603939 - DNA, 15 bp, Homo sapiens
gacgggggcgtctgg

SEQ ID NO: 1603940 - DNA, 15 bp, Homo sapiens
cgacgggggcgtctg

SEQ ID NO: 1603941 - DNA, 15 bp, Homo sapiens
ccgacgggggcgtct

SEQ ID NO: 1603942 - DNA, 15 bp, Homo sapiens
tccgacgggggcgtc

SEQ ID NO: 1603943 - DNA, 15 bp, Homo sapiens
ttccgacgggggcgt

SEQ ID NO: 1603944 - DNA, 15 bp, Homo sapiens
cttccgacgggggcg

SEQ ID NO: 1603945 - DNA, 15 bp, Homo sapiens
ccttccgacgggggc

SEQ ID NO: 1603946 - DNA, 15 bp, Homo sapiens
cccttccgacggggg

SEQ ID NO: 1603947 - DNA, 15 bp, Homo sapiens
ccccttccgacgggg

SEQ ID NO: 1603948 - DNA, 15 bp, Homo sapiens
gccccttccgacggg

SEQ ID NO: 1603949 - DNA, 15 bp, Homo sapiens
tgccccttccgacgg

SEQ ID NO: 1603950 - DNA, 15 bp, Homo sapiens
ctgccccttccgacg

SEQ ID NO: 1603951 - DNA, 15 bp, Homo sapiens
cctgccccttccgac

SEQ ID NO: 1603952 - DNA, 15 bp, Homo sapiens
ccctgccccttccga

SEQ ID NO: 1603953 - DNA, 15 bp, Homo sapiens
tccctgccccttccg

SEQ ID NO: 1603954 - DNA, 15 bp, Homo sapiens
gtccctgccccttcc

SEQ ID NO: 1603955 - DNA, 15 bp, Homo sapiens
tgtccctgccccttc

SEQ ID NO: 1603956 - DNA, 15 bp, Homo sapiens
gtgtccctgcccctt

SEQ ID NO: 1603957 - DNA, 15 bp, Homo sapiens
ggtgtccctgcccct

SEQ ID NO: 1603958 - DNA, 15 bp, Homo sapiens
gggtgtccctgcccc

SEQ ID NO: 1603959 - DNA, 15 bp, Homo sapiens
agggtgtccctgccc

SEQ ID NO: 1603960 - DNA, 15 bp, Homo sapiens
gagggtgtccctgcc

SEQ ID NO: 1603961 - DNA, 15 bp, Homo sapiens
cgagggtgtccctgc

SEQ ID NO: 1603962 - DNA, 15 bp, Homo sapiens
ccgagggtgtccctg

SEQ ID NO: 1603963 - DNA, 15 bp, Homo sapiens
cccgagggtgtccct

SEQ ID NO: 1603964 - DNA, 15 bp, Homo sapiens
ccccgagggtgtccc

SEQ ID NO: 1603965 - DNA, 15 bp, Homo sapiens
cccccgagggtgtcc

SEQ ID NO: 1603966 - DNA, 15 bp, Homo sapiens
gcccccgagggtgtc

SEQ ID NO: 1603967 - DNA, 15 bp, Homo sapiens
cgcccccgagggtgt

SEQ ID NO: 1603968 - DNA, 15 bp, Homo sapiens
gcgcccccgagggtg

SEQ ID NO: 1603969 - DNA, 15 bp, Homo sapiens
agcgcccccgagggt

SEQ ID NO: 1603970 - DNA, 15 bp, Homo sapiens
gagcgcccccgaggg

SEQ ID NO: 1603971 - DNA, 15 bp, Homo sapiens
agagcgcccccgagg

SEQ ID NO: 1603972 - DNA, 15 bp, Homo sapiens
tagagcgcccccgag

SEQ ID NO: 1603973 - DNA, 15 bp, Homo sapiens
ctagagcgcccccga

SEQ ID NO: 1603974 - DNA, 15 bp, Homo sapiens
cctagagcgcccccg

SEQ ID NO: 1603975 - DNA, 15 bp, Homo sapiens
ccctagagcgccccc

SEQ ID NO: 1603976 - DNA, 15 bp, Homo sapiens
accctagagcgcccc

SEQ ID NO: 1603977 - DNA, 15 bp, Homo sapiens
aaccctagagcgccc

SEQ ID NO: 1603978 - DNA, 15 bp, Homo sapiens
gaaccctagagcgcc

SEQ ID NO: 1603979 - DNA, 15 bp, Homo sapiens
cgaaccctagagcgc

SEQ ID NO: 1603980 - DNA, 15 bp, Homo sapiens
acgaaccctagagcg

SEQ ID NO: 1603981 - DNA, 15 bp, Homo sapiens
cacgaaccctagagc

SEQ ID NO: 1603982 - DNA, 15 bp, Homo sapiens
gcacgaaccctagag

SEQ ID NO: 1603983 - DNA, 15 bp, Homo sapiens
agcacgaaccctaga

SEQ ID NO: 1603984 - DNA, 15 bp, Homo sapiens
cagcacgaaccctag

SEQ ID NO: 1603985 - DNA, 15 bp, Homo sapiens
gcagcacgaacccta

SEQ ID NO: 1603986 - DNA, 15 bp, Homo sapiens
cgcagcacgaaccct

SEQ ID NO: 1603987 - DNA, 15 bp, Homo sapiens
gcgcagcacgaaccc

SEQ ID NO: 1603988 - DNA, 15 bp, Homo sapiens
agcgcagcacgaacc

SEQ ID NO: 1603989 - DNA, 15 bp, Homo sapiens
tagcgcagcacgaac

SEQ ID NO: 1603990 - DNA, 15 bp, Homo sapiens
ttagcgcagcacgaa

SEQ ID NO: 1603991 - DNA, 15 bp, Homo sapiens
cttagcgcagcacga

SEQ ID NO: 1603992 - DNA, 15 bp, Homo sapiens
ccttagcgcagcacg

SEQ ID NO: 1603993 - DNA, 15 bp, Homo sapiens
accttagcgcagcac

SEQ ID NO: 1603994 - DNA, 15 bp, Homo sapiens
taccttagcgcagca

SEQ ID NO: 1603995 - DNA, 15 bp, Homo sapiens
ttaccttagcgcagc

SEQ ID NO: 1603996 - DNA, 15 bp, Homo sapiens
cttaccttagcgcag

SEQ ID NO: 1603997 - DNA, 15 bp, Homo sapiens
acttaccttagcgca

SEQ ID NO: 1603998 - DNA, 15 bp, Homo sapiens
aacttaccttagcgc

SEQ ID NO: 1603999 - DNA, 15 bp, Homo sapiens
aaacttaccttagcg

SEQ ID NO: 1604000 - DNA, 15 bp, Homo sapiens
gaaacttaccttagc

SEQ ID NO: 1604001 - DNA, 15 bp, Homo sapiens
cgaaacttaccttag

SEQ ID NO: 1604002 - DNA, 15 bp, Homo sapiens
gcgaaacttacctta

SEQ ID NO: 1604003 - DNA, 15 bp, Homo sapiens
tgcgaaacttacctt

SEQ ID NO: 1604004 - DNA, 15 bp, Homo sapiens
ctgcgaaacttacct

SEQ ID NO: 1604005 - DNA, 15 bp, Homo sapiens
gctgcgaaacttacc

SEQ ID NO: 1604006 - DNA, 15 bp, Homo sapiens
agctgcgaaacttac

SEQ ID NO: 1604007 - DNA, 15 bp, Homo sapiens
cagctgcgaaactta

SEQ ID NO: 1604008 - DNA, 15 bp, Homo sapiens
gcagctgcgaaactt

SEQ ID NO: 1604009 - DNA, 15 bp, Homo sapiens
agcagctgcgaaact

SEQ ID NO: 1604010 - DNA, 15 bp, Homo sapiens
gagcagctgcgaaac

SEQ ID NO: 1604011 - DNA, 15 bp, Homo sapiens
ggagcagctgcgaaa

SEQ ID NO: 1604012 - DNA, 15 bp, Homo sapiens
aggagcagctgcgaa

SEQ ID NO: 1604013 - DNA, 15 bp, Homo sapiens
caggagcagctgcga

SEQ ID NO: 1604014 - DNA, 15 bp, Homo sapiens
tcaggagcagctgcg

SEQ ID NO: 1604015 - DNA, 15 bp, Homo sapiens
atcaggagcagctgc

SEQ ID NO: 1604016 - DNA, 15 bp, Homo sapiens
tatcaggagcagctg

SEQ ID NO: 1604017 - DNA, 15 bp, Homo sapiens
ttatcaggagcagct

SEQ ID NO: 1604018 - DNA, 15 bp, Homo sapiens
attatcaggagcagc

SEQ ID NO: 1604019 - DNA, 15 bp, Homo sapiens
aattatcaggagcag

SEQ ID NO: 1604020 - DNA, 15 bp, Homo sapiens
taattatcaggagca

SEQ ID NO: 1604021 - DNA, 15 bp, Homo sapiens
ttaattatcaggagc

SEQ ID NO: 1604022 - DNA, 15 bp, Homo sapiens
tttaattatcaggag

SEQ ID NO: 1604023 - DNA, 15 bp, Homo sapiens
ctttaattatcagga

SEQ ID NO: 1604024 - DNA, 15 bp, Homo sapiens
cctttaattatcagg

SEQ ID NO: 1604025 - DNA, 15 bp, Homo sapiens
tcctttaattatcag

SEQ ID NO: 1604026 - DNA, 15 bp, Homo sapiens
gtcctttaattatca

SEQ ID NO: 1604027 - DNA, 15 bp, Homo sapiens
tgtcctttaattatc

SEQ ID NO: 1604028 - DNA, 15 bp, Homo sapiens
ctgtcctttaattat

SEQ ID NO: 1604029 - DNA, 15 bp, Homo sapiens
tctgtcctttaatta

SEQ ID NO: 1604030 - DNA, 15 bp, Homo sapiens
atctgtcctttaatt

SEQ ID NO: 1604031 - DNA, 15 bp, Homo sapiens
aatctgtcctttaat

SEQ ID NO: 1604032 - DNA, 15 bp, Homo sapiens
gaatctgtcctttaa

SEQ ID NO: 1604033 - DNA, 15 bp, Homo sapiens
ggaatctgtccttta

SEQ ID NO: 1604034 - DNA, 15 bp, Homo sapiens
gggaatctgtccttt

SEQ ID NO: 1604035 - DNA, 15 bp, Homo sapiens
cgggaatctgtcctt

SEQ ID NO: 1604036 - DNA, 15 bp, Homo sapiens
tcgggaatctgtcct

SEQ ID NO: 1604037 - DNA, 15 bp, Homo sapiens
ttcgggaatctgtcc

SEQ ID NO: 1604038 - DNA, 15 bp, Homo sapiens
cttcgggaatctgtc

SEQ ID NO: 1604039 - DNA, 15 bp, Homo sapiens
gcttcgggaatctgt

SEQ ID NO: 1604040 - DNA, 15 bp, Homo sapiens
tgcttcgggaatctg

SEQ ID NO: 1604041 - DNA, 15 bp, Homo sapiens
atgcttcgggaatct

SEQ ID NO: 1604042 - DNA, 15 bp, Homo sapiens
gatgcttcgggaatc

SEQ ID NO: 1604043 - DNA, 15 bp, Homo sapiens
ggatgcttcgggaat

SEQ ID NO: 1604044 - DNA, 15 bp, Homo sapiens
aggatgcttcgggaa

SEQ ID NO: 1604045 - DNA, 15 bp, Homo sapiens
aaggatgcttcggga

SEQ ID NO: 1604046 - DNA, 15 bp, Homo sapiens
caaggatgcttcggg

SEQ ID NO: 1604047 - DNA, 15 bp, Homo sapiens
acaaggatgcttcgg

SEQ ID NO: 1604048 - DNA, 15 bp, Homo sapiens
cacaaggatgcttcg

SEQ ID NO: 1604049 - DNA, 15 bp, Homo sapiens
ccacaaggatgcttc

SEQ ID NO: 1604050 - DNA, 15 bp, Homo sapiens
gccacaaggatgctt

SEQ ID NO: 1604051 - DNA, 15 bp, Homo sapiens
cgccacaaggatgct

SEQ ID NO: 1604052 - DNA, 15 bp, Homo sapiens
ccgccacaaggatgc

SEQ ID NO: 1604053 - DNA, 15 bp, Homo sapiens
gccgccacaaggatg

SEQ ID NO: 1604054 - DNA, 15 bp, Homo sapiens
cgccgccacaaggat

SEQ ID NO: 1604055 - DNA, 15 bp, Homo sapiens
gcgccgccacaagga

SEQ ID NO: 1604056 - DNA, 15 bp, Homo sapiens
cgcgccgccacaagg

SEQ ID NO: 1604057 - DNA, 15 bp, Homo sapiens
ccgcgccgccacaag

SEQ ID NO: 1604058 - DNA, 15 bp, Homo sapiens
gccgcgccgccacaa

SEQ ID NO: 1604059 - DNA, 15 bp, Homo sapiens
agccgcgccgccaca

SEQ ID NO: 1604060 - DNA, 15 bp, Homo sapiens
cagccgcgccgccac

SEQ ID NO: 1604061 - DNA, 15 bp, Homo sapiens
acagccgcgccgcca

SEQ ID NO: 1604062 - DNA, 15 bp, Homo sapiens
aacagccgcgccgcc

SEQ ID NO: 1604063 - DNA, 15 bp, Homo sapiens
aaacagccgcgccgc

SEQ ID NO: 1604064 - DNA, 15 bp, Homo sapiens
aaaacagccgcgccg

SEQ ID NO: 1604065 - DNA, 15 bp, Homo sapiens
gaaaacagccgcgcc

SEQ ID NO: 1604066 - DNA, 15 bp, Homo sapiens
cgaaaacagccgcgc

SEQ ID NO: 1604067 - DNA, 15 bp, Homo sapiens
gcgaaaacagccgcg

SEQ ID NO: 1604068 - DNA, 15 bp, Homo sapiens
ggcgaaaacagccgc

SEQ ID NO: 1604069 - DNA, 15 bp, Homo sapiens
gggcgaaaacagccg

SEQ ID NO: 1604070 - DNA, 15 bp, Homo sapiens
ggggcgaaaacagcc

SEQ ID NO: 1604071 - DNA, 15 bp, Homo sapiens
tggggcgaaaacagc

SEQ ID NO: 1604072 - DNA, 15 bp, Homo sapiens
ctggggcgaaaacag

SEQ ID NO: 1604073 - DNA, 15 bp, Homo sapiens
cctggggcgaaaaca

SEQ ID NO: 1604074 - DNA, 15 bp, Homo sapiens
tcctggggcgaaaac

SEQ ID NO: 1604075 - DNA, 15 bp, Homo sapiens
gtcctggggcgaaaa

SEQ ID NO: 1604076 - DNA, 15 bp, Homo sapiens
ggtcctggggcgaaa

SEQ ID NO: 1604077 - DNA, 15 bp, Homo sapiens
aggtcctggggcgaa

SEQ ID NO: 1604078 - DNA, 15 bp, Homo sapiens
caggtcctggggcga

SEQ ID NO: 1604079 - DNA, 15 bp, Homo sapiens
acaggtcctggggcg

SEQ ID NO: 1604080 - DNA, 15 bp, Homo sapiens
cacaggtcctggggc

SEQ ID NO: 1604081 - DNA, 15 bp, Homo sapiens
gcacaggtcctgggg

SEQ ID NO: 1604082 - DNA, 15 bp, Homo sapiens
tgcacaggtcctggg

SEQ ID NO: 1604083 - DNA, 15 bp, Homo sapiens
ctgcacaggtcctgg

SEQ ID NO: 1604084 - DNA, 15 bp, Homo sapiens
gctgcacaggtcctg

SEQ ID NO: 1604085 - DNA, 15 bp, Homo sapiens
ggctgcacaggtcct

SEQ ID NO: 1604086 - DNA, 15 bp, Homo sapiens
aggctgcacaggtcc

SEQ ID NO: 1604087 - DNA, 15 bp, Homo sapiens
gaggctgcacaggtc

SEQ ID NO: 1604088 - DNA, 15 bp, Homo sapiens
tgaggctgcacaggt

SEQ ID NO: 1604089 - DNA, 15 bp, Homo sapiens
atgaggctgcacagg

SEQ ID NO: 1604090 - DNA, 15 bp, Homo sapiens
aatgaggctgcacag

SEQ ID NO: 1604091 - DNA, 15 bp, Homo sapiens
gaatgaggctgcaca

SEQ ID NO: 1604092 - DNA, 15 bp, Homo sapiens
tgaatgaggctgcac

SEQ ID NO: 1604093 - DNA, 15 bp, Homo sapiens
ctgaatgaggctgca

SEQ ID NO: 1604094 - DNA, 15 bp, Homo sapiens
gctgaatgaggctgc

SEQ ID NO: 1604095 - DNA, 15 bp, Homo sapiens
agctgaatgaggctg

SEQ ID NO: 1604096 - DNA, 15 bp, Homo sapiens
aagctgaatgaggct

SEQ ID NO: 1604097 - DNA, 15 bp, Homo sapiens
aaagctgaatgaggc

SEQ ID NO: 1604098 - DNA, 15 bp, Homo sapiens
taaagctgaatgagg

SEQ ID NO: 1604099 - DNA, 15 bp, Homo sapiens
ctaaagctgaatgag

SEQ ID NO: 1604100 - DNA, 15 bp, Homo sapiens
cctaaagctgaatga

SEQ ID NO: 1604101 - DNA, 15 bp, Homo sapiens
acctaaagctgaatg

SEQ ID NO: 1604102 - DNA, 15 bp, Homo sapiens
tacctaaagctgaat

SEQ ID NO: 1604103 - DNA, 15 bp, Homo sapiens
ctacctaaagctgaa

SEQ ID NO: 1604104 - DNA, 15 bp, Homo sapiens
actacctaaagctga

SEQ ID NO: 1604105 - DNA, 15 bp, Homo sapiens
gactacctaaagctg

SEQ ID NO: 1604106 - DNA, 15 bp, Homo sapiens
cgactacctaaagct

SEQ ID NO: 1604107 - DNA, 15 bp, Homo sapiens
tcgactacctaaagc

SEQ ID NO: 1604108 - DNA, 15 bp, Homo sapiens
ttcgactacctaaag

SEQ ID NO: 1604109 - DNA, 15 bp, Homo sapiens
tttcgactacctaaa

SEQ ID NO: 1604110 - DNA, 15 bp, Homo sapiens
gtttcgactacctaa

SEQ ID NO: 1604111 - DNA, 15 bp, Homo sapiens
ggtttcgactaccta

SEQ ID NO: 1604112 - DNA, 15 bp, Homo sapiens
aggtttcgactacct

SEQ ID NO: 1604113 - DNA, 15 bp, Homo sapiens
taggtttcgactacc

SEQ ID NO: 1604114 - DNA, 15 bp, Homo sapiens
ataggtttcgactac

SEQ ID NO: 1604115 - DNA, 15 bp, Homo sapiens
tataggtttcgacta

SEQ ID NO: 1604116 - DNA, 15 bp, Homo sapiens
ctataggtttcgact

SEQ ID NO: 1604117 - DNA, 15 bp, Homo sapiens
gctataggtttcgac

SEQ ID NO: 1604118 - DNA, 15 bp, Homo sapiens
agctataggtttcga

SEQ ID NO: 1604119 - DNA, 15 bp, Homo sapiens
gagctataggtttcg

SEQ ID NO: 1604120 - DNA, 15 bp, Homo sapiens
agagctataggtttc

SEQ ID NO: 1604121 - DNA, 15 bp, Homo sapiens
aagagctataggttt

SEQ ID NO: 1604122 - DNA, 15 bp, Homo sapiens
aaagagctataggtt

SEQ ID NO: 1604123 - DNA, 15 bp, Homo sapiens
gaaagagctataggt

SEQ ID NO: 1604124 - DNA, 15 bp, Homo sapiens
agaaagagctatagg

SEQ ID NO: 1604125 - DNA, 15 bp, Homo sapiens
cagaaagagctatag

SEQ ID NO: 1604126 - DNA, 15 bp, Homo sapiens
gcagaaagagctata

SEQ ID NO: 1604127 - DNA, 15 bp, Homo sapiens
ggcagaaagagctat

SEQ ID NO: 1604128 - DNA, 15 bp, Homo sapiens
gggcagaaagagcta

SEQ ID NO: 1604129 - DNA, 15 bp, Homo sapiens
agggcagaaagagct

SEQ ID NO: 1604130 - DNA, 15 bp, Homo sapiens
gagggcagaaagagc

SEQ ID NO: 1604131 - DNA, 15 bp, Homo sapiens
agagggcagaaagag

SEQ ID NO: 1604132 - DNA, 15 bp, Homo sapiens
cagagggcagaaaga

SEQ ID NO: 1604133 - DNA, 15 bp, Homo sapiens
acagagggcagaaag

SEQ ID NO: 1604134 - DNA, 15 bp, Homo sapiens
aacagagggcagaaa

SEQ ID NO: 1604135 - DNA, 15 bp, Homo sapiens
gaacagagggcagaa

SEQ ID NO: 1604136 - DNA, 15 bp, Homo sapiens
ggaacagagggcaga

SEQ ID NO: 1604137 - DNA, 15 bp, Homo sapiens
gggaacagagggcag

SEQ ID NO: 1604138 - DNA, 15 bp, Homo sapiens
ggggaacagagggca

SEQ ID NO: 1604139 - DNA, 15 bp, Homo sapiens
tggggaacagagggc

SEQ ID NO: 1604140 - DNA, 15 bp, Homo sapiens
ttggggaacagaggg

SEQ ID NO: 1604141 - DNA, 15 bp, Homo sapiens
gttggggaacagagg

SEQ ID NO: 1604142 - DNA, 15 bp, Homo sapiens
tgttggggaacagag

SEQ ID NO: 1604143 - DNA, 15 bp, Homo sapiens
ttgttggggaacaga

SEQ ID NO: 1604144 - DNA, 15 bp, Homo sapiens
tttgttggggaacag

SEQ ID NO: 1604145 - DNA, 15 bp, Homo sapiens
atttgttggggaaca

SEQ ID NO: 1604146 - DNA, 15 bp, Homo sapiens
gatttgttggggaac

SEQ ID NO: 1604147 - DNA, 15 bp, Homo sapiens
agatttgttggggaa

SEQ ID NO: 1604148 - DNA, 15 bp, Homo sapiens
gagatttgttgggga

SEQ ID NO: 1604149 - DNA, 15 bp, Homo sapiens
tgagatttgttgggg

SEQ ID NO: 1604150 - DNA, 15 bp, Homo sapiens
ctgagatttgttggg

SEQ ID NO: 1604151 - DNA, 15 bp, Homo sapiens
actgagatttgttgg

SEQ ID NO: 1604152 - DNA, 15 bp, Homo sapiens
gactgagatttgttg

SEQ ID NO: 1604153 - DNA, 15 bp, Homo sapiens
ggactgagatttgtt

SEQ ID NO: 1604154 - DNA, 15 bp, Homo sapiens
gggactgagatttgt

SEQ ID NO: 1604155 - DNA, 15 bp, Homo sapiens
tgggactgagatttg

SEQ ID NO: 1604156 - DNA, 15 bp, Homo sapiens
ttgggactgagattt

SEQ ID NO: 1604157 - DNA, 15 bp, Homo sapiens
gttgggactgagatt

SEQ ID NO: 1604158 - DNA, 15 bp, Homo sapiens
tgttgggactgagat

SEQ ID NO: 1604159 - DNA, 15 bp, Homo sapiens
ctgttgggactgaga

SEQ ID NO: 1604160 - DNA, 15 bp, Homo sapiens
actgttgggactgag

SEQ ID NO: 1604161 - DNA, 15 bp, Homo sapiens
cactgttgggactga

SEQ ID NO: 1604162 - DNA, 15 bp, Homo sapiens
ccactgttgggactg

SEQ ID NO: 1604163 - DNA, 15 bp, Homo sapiens
cccactgttgggact

SEQ ID NO: 1604164 - DNA, 15 bp, Homo sapiens
tcccactgttgggac

SEQ ID NO: 1604165 - DNA, 15 bp, Homo sapiens
ctcccactgttggga

SEQ ID NO: 1604166 - DNA, 15 bp, Homo sapiens
gctcccactgttggg

SEQ ID NO: 1604167 - DNA, 15 bp, Homo sapiens
ggctcccactgttgg

SEQ ID NO: 1604168 - DNA, 15 bp, Homo sapiens
gggctcccactgttg

SEQ ID NO: 1604169 - DNA, 15 bp, Homo sapiens
cgggctcccactgtt

SEQ ID NO: 1604170 - DNA, 15 bp, Homo sapiens
acgggctcccactgt

SEQ ID NO: 1604171 - DNA, 15 bp, Homo sapiens
cacgggctcccactg

SEQ ID NO: 1604172 - DNA, 15 bp, Homo sapiens
ccacgggctcccact

SEQ ID NO: 1604173 - DNA, 15 bp, Homo sapiens
cccacgggctcccac

SEQ ID NO: 1604174 - DNA, 15 bp, Homo sapiens
gcccacgggctccca

SEQ ID NO: 1604175 - DNA, 15 bp, Homo sapiens
ggcccacgggctccc

SEQ ID NO: 1604176 - DNA, 15 bp, Homo sapiens
aggcccacgggctcc

SEQ ID NO: 1604177 - DNA, 15 bp, Homo sapiens
aaggcccacgggctc

SEQ ID NO: 1604178 - DNA, 15 bp, Homo sapiens
caaggcccacgggct

SEQ ID NO: 1604179 - DNA, 15 bp, Homo sapiens
ccaaggcccacgggc

SEQ ID NO: 1604180 - DNA, 15 bp, Homo sapiens
cccaaggcccacggg

SEQ ID NO: 1604181 - DNA, 15 bp, Homo sapiens
acccaaggcccacgg

SEQ ID NO: 1604182 - DNA, 15 bp, Homo sapiens
cacccaaggcccacg

SEQ ID NO: 1604183 - DNA, 15 bp, Homo sapiens
acacccaaggcccac

SEQ ID NO: 1604184 - DNA, 15 bp, Homo sapiens
aacacccaaggccca

SEQ ID NO: 1604185 - DNA, 15 bp, Homo sapiens
gaacacccaaggccc

SEQ ID NO: 1604186 - DNA, 15 bp, Homo sapiens
cgaacacccaaggcc

SEQ ID NO: 1604187 - DNA, 15 bp, Homo sapiens
tcgaacacccaaggc

SEQ ID NO: 1604188 - DNA, 15 bp, Homo sapiens
ctcgaacacccaagg

SEQ ID NO: 1604189 - DNA, 15 bp, Homo sapiens
actcgaacacccaag

SEQ ID NO: 1604190 - DNA, 15 bp, Homo sapiens
aactcgaacacccaa

SEQ ID NO: 1604191 - DNA, 15 bp, Homo sapiens
aaactcgaacaccca

SEQ ID NO: 1604192 - DNA, 15 bp, Homo sapiens
gaaactcgaacaccc

SEQ ID NO: 1604193 - DNA, 15 bp, Homo sapiens
ggaaactcgaacacc

SEQ ID NO: 1604194 - DNA, 15 bp, Homo sapiens
gggaaactcgaacac

SEQ ID NO: 1604195 - DNA, 15 bp, Homo sapiens
cgggaaactcgaaca

SEQ ID NO: 1604196 - DNA, 15 bp, Homo sapiens
gcgggaaactcgaac

SEQ ID NO: 1604197 - DNA, 15 bp, Homo sapiens
cgcgggaaactcgaa

SEQ ID NO: 1604198 - DNA, 15 bp, Homo sapiens
ccgcgggaaactcga

SEQ ID NO: 1604199 - DNA, 15 bp, Homo sapiens
cccgcgggaaactcg

SEQ ID NO: 1604200 - DNA, 15 bp, Homo sapiens
gcccgcgggaaactc

SEQ ID NO: 1604201 - DNA, 15 bp, Homo sapiens
agcccgcgggaaact

SEQ ID NO: 1604202 - DNA, 15 bp, Homo sapiens
aagcccgcgggaaac

SEQ ID NO: 1604203 - DNA, 15 bp, Homo sapiens
caagcccgcgggaaa

SEQ ID NO: 1604204 - DNA, 15 bp, Homo sapiens
gcaagcccgcgggaa

SEQ ID NO: 1604205 - DNA, 15 bp, Homo sapiens
ggcaagcccgcggga

SEQ ID NO: 1604206 - DNA, 15 bp, Homo sapiens
tggcaagcccgcggg

SEQ ID NO: 1604207 - DNA, 15 bp, Homo sapiens
ctggcaagcccgcgg

SEQ ID NO: 1604208 - DNA, 15 bp, Homo sapiens
gctggcaagcccgcg

SEQ ID NO: 1604209 - DNA, 15 bp, Homo sapiens
tgctggcaagcccgc

SEQ ID NO: 1604210 - DNA, 15 bp, Homo sapiens
ctgctggcaagcccg

SEQ ID NO: 1604211 - DNA, 15 bp, Homo sapiens
gctgctggcaagccc

SEQ ID NO: 1604212 - DNA, 15 bp, Homo sapiens
cgctgctggcaagcc

SEQ ID NO: 1604213 - DNA, 15 bp, Homo sapiens
gcgctgctggcaagc

SEQ ID NO: 1604214 - DNA, 15 bp, Homo sapiens
agcgctgctggcaag

SEQ ID NO: 1604215 - DNA, 15 bp, Homo sapiens
cagcgctgctggcaa

SEQ ID NO: 1604216 - DNA, 15 bp, Homo sapiens
ccagcgctgctggca

SEQ ID NO: 1604217 - DNA, 15 bp, Homo sapiens
cccagcgctgctggc

SEQ ID NO: 1604218 - DNA, 15 bp, Homo sapiens
ccccagcgctgctgg

SEQ ID NO: 1604219 - DNA, 15 bp, Homo sapiens
accccagcgctgctg

SEQ ID NO: 1604220 - DNA, 15 bp, Homo sapiens
aaccccagcgctgct

SEQ ID NO: 1604221 - DNA, 15 bp, Homo sapiens
gaaccccagcgctgc

SEQ ID NO: 1604222 - DNA, 15 bp, Homo sapiens
ggaaccccagcgctg

SEQ ID NO: 1604223 - DNA, 15 bp, Homo sapiens
gggaaccccagcgct

SEQ ID NO: 1604224 - DNA, 15 bp, Homo sapiens
agggaaccccagcgc

SEQ ID NO: 1604225 - DNA, 15 bp, Homo sapiens
gagggaaccccagcg

SEQ ID NO: 1604226 - DNA, 15 bp, Homo sapiens
ggagggaaccccagc

SEQ ID NO: 1604227 - DNA, 15 bp, Homo sapiens
aggagggaaccccag

SEQ ID NO: 1604228 - DNA, 15 bp, Homo sapiens
gaggagggaacccca

SEQ ID NO: 1604229 - DNA, 15 bp, Homo sapiens
ggaggagggaacccc

SEQ ID NO: 1604230 - DNA, 15 bp, Homo sapiens
cggaggagggaaccc

SEQ ID NO: 1604231 - DNA, 15 bp, Homo sapiens
gcggaggagggaacc

SEQ ID NO: 1604232 - DNA, 15 bp, Homo sapiens
agcggaggagggaac

SEQ ID NO: 1604233 - DNA, 15 bp, Homo sapiens
gagcggaggagggaa

SEQ ID NO: 1604234 - DNA, 15 bp, Homo sapiens
ggagcggaggaggga

SEQ ID NO: 1604235 - DNA, 15 bp, Homo sapiens
aggagcggaggaggg

SEQ ID NO: 1604236 - DNA, 15 bp, Homo sapiens
aaggagcggaggagg

SEQ ID NO: 1604237 - DNA, 15 bp, Homo sapiens
aaaggagcggaggag

SEQ ID NO: 1604238 - DNA, 15 bp, Homo sapiens
gaaaggagcggagga

SEQ ID NO: 1604239 - DNA, 15 bp, Homo sapiens
ggaaaggagcggagg

SEQ ID NO: 1604240 - DNA, 15 bp, Homo sapiens
aggaaaggagcggag

SEQ ID NO: 1604241 - DNA, 15 bp, Homo sapiens
gaggaaaggagcgga

SEQ ID NO: 1604242 - DNA, 15 bp, Homo sapiens
ggaggaaaggagcgg

SEQ ID NO: 1604243 - DNA, 15 bp, Homo sapiens
aggaggaaaggagcg

SEQ ID NO: 1604244 - DNA, 15 bp, Homo sapiens
gaggaggaaaggagc

SEQ ID NO: 1604245 - DNA, 15 bp, Homo sapiens
agaggaggaaaggag

SEQ ID NO: 1604246 - DNA, 15 bp, Homo sapiens
gagaggaggaaagga

SEQ ID NO: 1604247 - DNA, 15 bp, Homo sapiens
ggagaggaggaaagg

SEQ ID NO: 1604248 - DNA, 15 bp, Homo sapiens
tggagaggaggaaag

SEQ ID NO: 1604249 - DNA, 15 bp, Homo sapiens
ttggagaggaggaaa

SEQ ID NO: 1604250 - DNA, 15 bp, Homo sapiens
gttggagaggaggaa

SEQ ID NO: 1604251 - DNA, 15 bp, Homo sapiens
ggttggagaggagga

SEQ ID NO: 1604252 - DNA, 15 bp, Homo sapiens
aggttggagaggagg

SEQ ID NO: 1604253 - DNA, 15 bp, Homo sapiens
gaggttggagaggag

SEQ ID NO: 1604254 - DNA, 15 bp, Homo sapiens
ggaggttggagagga

SEQ ID NO: 1604255 - DNA, 15 bp, Homo sapiens
gggaggttggagagg

SEQ ID NO: 1604256 - DNA, 15 bp, Homo sapiens
tgggaggttggagag

SEQ ID NO: 1604257 - DNA, 15 bp, Homo sapiens
gtgggaggttggaga

SEQ ID NO: 1604258 - DNA, 15 bp, Homo sapiens
ggtgggaggttggag

SEQ ID NO: 1604259 - DNA, 15 bp, Homo sapiens
tggtgggaggttgga

SEQ ID NO: 1604260 - DNA, 15 bp, Homo sapiens
gtggtgggaggttgg

SEQ ID NO: 1604261 - DNA, 15 bp, Homo sapiens
tgtggtgggaggttg

SEQ ID NO: 1604262 - DNA, 15 bp, Homo sapiens
ctgtggtgggaggtt

SEQ ID NO: 1604263 - DNA, 15 bp, Homo sapiens
gctgtggtgggaggt

SEQ ID NO: 1604264 - DNA, 15 bp, Homo sapiens
ggctgtggtgggagg

SEQ ID NO: 1604265 - DNA, 15 bp, Homo sapiens
gggctgtggtgggag

SEQ ID NO: 1604266 - DNA, 15 bp, Homo sapiens
cgggctgtggtggga

SEQ ID NO: 1604267 - DNA, 15 bp, Homo sapiens
acgggctgtggtggg

SEQ ID NO: 1604268 - DNA, 15 bp, Homo sapiens
gacgggctgtggtgg

SEQ ID NO: 1604269 - DNA, 15 bp, Homo sapiens
agacgggctgtggtg

SEQ ID NO: 1604270 - DNA, 15 bp, Homo sapiens
gagacgggctgtggt

SEQ ID NO: 1604271 - DNA, 15 bp, Homo sapiens
ggagacgggctgtgg

SEQ ID NO: 1604272 - DNA, 15 bp, Homo sapiens
gggagacgggctgtg

SEQ ID NO: 1604273 - DNA, 15 bp, Homo sapiens
ggggagacgggctgt

SEQ ID NO: 1604274 - DNA, 15 bp, Homo sapiens
gggggagacgggctg

SEQ ID NO: 1604275 - DNA, 15 bp, Homo sapiens
tgggggagacgggct

SEQ ID NO: 1604276 - DNA, 15 bp, Homo sapiens
gtgggggagacgggc

SEQ ID NO: 1604277 - DNA, 15 bp, Homo sapiens
tgtgggggagacggg

SEQ ID NO: 1604278 - DNA, 15 bp, Homo sapiens
atgtgggggagacgg

SEQ ID NO: 1604279 - DNA, 15 bp, Homo sapiens
gatgtgggggagacg

SEQ ID NO: 1604280 - DNA, 15 bp, Homo sapiens
ggatgtgggggagac

SEQ ID NO: 1604281 - DNA, 15 bp, Homo sapiens
gggatgtgggggaga

SEQ ID NO: 1604282 - DNA, 15 bp, Homo sapiens
ggggatgtgggggag

SEQ ID NO: 1604283 - DNA, 15 bp, Homo sapiens
tggggatgtggggga

SEQ ID NO: 1604284 - DNA, 15 bp, Homo sapiens
ttggggatgtggggg

SEQ ID NO: 1604285 - DNA, 15 bp, Homo sapiens
gttggggatgtgggg

SEQ ID NO: 1604286 - DNA, 15 bp, Homo sapiens
tgttggggatgtggg

SEQ ID NO: 1604287 - DNA, 15 bp, Homo sapiens
agtgttggggatgtg

SEQ ID NO: 1604288 - DNA, 15 bp, Homo sapiens
aagtgttggggatgt

SEQ ID NO: 1604289 - DNA, 15 bp, Homo sapiens
caagtgttggggatg

SEQ ID NO: 1604290 - DNA, 15 bp, Homo sapiens
acaagtgttggggat

SEQ ID NO: 1604291 - DNA, 15 bp, Homo sapiens
gacaagtgttgggga

SEQ ID NO: 1604292 - DNA, 15 bp, Homo sapiens
ggacaagtgttgggg

SEQ ID NO: 1604293 - DNA, 15 bp, Homo sapiens
gggacaagtgttggg

SEQ ID NO: 1604294 - DNA, 15 bp, Homo sapiens
tgggacaagtgttgg

SEQ ID NO: 1604295 - DNA, 15 bp, Homo sapiens
ctgggacaagtgttg

SEQ ID NO: 1604296 - DNA, 15 bp, Homo sapiens
cctgggacaagtgtt

SEQ ID NO: 1604297 - DNA, 15 bp, Homo sapiens
gcctgggacaagtgt

SEQ ID NO: 1604298 - DNA, 15 bp, Homo sapiens
tgcctgggacaagtg

SEQ ID NO: 1604299 - DNA, 15 bp, Homo sapiens
ctgcctgggacaagt

SEQ ID NO: 1604300 - DNA, 15 bp, Homo sapiens
actgcctgggacaag

SEQ ID NO: 1604301 - DNA, 15 bp, Homo sapiens
aactgcctgggacaa

SEQ ID NO: 1604302 - DNA, 15 bp, Homo sapiens
aaactgcctgggaca

SEQ ID NO: 1604303 - DNA, 15 bp, Homo sapiens
gaaactgcctgggac

SEQ ID NO: 1604304 - DNA, 15 bp, Homo sapiens
ggaaactgcctggga

SEQ ID NO: 1604305 - DNA, 15 bp, Homo sapiens
cggaaactgcctggg

SEQ ID NO: 1604306 - DNA, 15 bp, Homo sapiens
ccggaaactgcctgg

SEQ ID NO: 1604307 - DNA, 15 bp, Homo sapiens
accggaaactgcctg

SEQ ID NO: 1604308 - DNA, 15 bp, Homo sapiens
caccggaaactgcct

SEQ ID NO: 1604309 - DNA, 15 bp, Homo sapiens
ccaccggaaactgcc

SEQ ID NO: 1604310 - DNA, 15 bp, Homo sapiens
gccaccggaaactgc

SEQ ID NO: 1604311 - DNA, 15 bp, Homo sapiens
ggccaccggaaactg

SEQ ID NO: 1604312 - DNA, 15 bp, Homo sapiens
cggccaccggaaact

SEQ ID NO: 1604313 - DNA, 15 bp, Homo sapiens
gcggccaccggaaac

SEQ ID NO: 1604314 - DNA, 15 bp, Homo sapiens
tgcggccaccggaaa

SEQ ID NO: 1604315 - DNA, 15 bp, Homo sapiens
ctgcggccaccggaa

SEQ ID NO: 1604316 - DNA, 15 bp, Homo sapiens
actgcggccaccgga

SEQ ID NO: 1604317 - DNA, 15 bp, Homo sapiens
tactgcggccaccgg

SEQ ID NO: 1604318 - DNA, 15 bp, Homo sapiens
atactgcggccaccg

SEQ ID NO: 1604319 - DNA, 15 bp, Homo sapiens
gatactgcggccacc

SEQ ID NO: 1604320 - DNA, 15 bp, Homo sapiens
cgatactgcggccac

SEQ ID NO: 1604321 - DNA, 15 bp, Homo sapiens
tcgatactgcggcca

SEQ ID NO: 1604322 - DNA, 15 bp, Homo sapiens
gtcgatactgcggcc

SEQ ID NO: 1604323 - DNA, 15 bp, Homo sapiens
ggtcgatactgcggc

SEQ ID NO: 1604324 - DNA, 15 bp, Homo sapiens
gggtcgatactgcgg

SEQ ID NO: 1604325 - DNA, 15 bp, Homo sapiens
ggggtcgatactgcg

SEQ ID NO: 1604326 - DNA, 15 bp, Homo sapiens
tggggtcgatactgc

SEQ ID NO: 1604327 - DNA, 15 bp, Homo sapiens
ctggggtcgatactg

SEQ ID NO: 1604328 - DNA, 15 bp, Homo sapiens
cctggggtcgatact

SEQ ID NO: 1604329 - DNA, 15 bp, Homo sapiens
gcctggggtcgatac

SEQ ID NO: 1604330 - DNA, 15 bp, Homo sapiens
ggcctggggtcgata

SEQ ID NO: 1604331 - DNA, 15 bp, Homo sapiens
tggcctggggtcgat

SEQ ID NO: 1604332 - DNA, 15 bp, Homo sapiens
atggcctggggtcga

SEQ ID NO: 1604333 - DNA, 15 bp, Homo sapiens
aatggcctggggtcg

SEQ ID NO: 1604334 - DNA, 15 bp, Homo sapiens
caatggcctggggtc

SEQ ID NO: 1604335 - DNA, 15 bp, Homo sapiens
ccaatggcctggggt

SEQ ID NO: 1604336 - DNA, 15 bp, Homo sapiens
cccaatggcctgggg

SEQ ID NO: 1604337 - DNA, 15 bp, Homo sapiens
ccccaatggcctggg

SEQ ID NO: 1604338 - DNA, 15 bp, Homo sapiens
accccaatggcctgg

SEQ ID NO: 1604339 - DNA, 15 bp, Homo sapiens
caccccaatggcctg

SEQ ID NO: 1604340 - DNA, 15 bp, Homo sapiens
ccaccccaatggcct

SEQ ID NO: 1604341 - DNA, 15 bp, Homo sapiens
cccaccccaatggcc

SEQ ID NO: 1604342 - DNA, 15 bp, Homo sapiens
acccaccccaatggc

SEQ ID NO: 1604343 - DNA, 15 bp, Homo sapiens
cacccaccccaatgg

SEQ ID NO: 1604344 - DNA, 15 bp, Homo sapiens
acacccaccccaatg

SEQ ID NO: 1604345 - DNA, 15 bp, Homo sapiens
cacacccaccccaat

SEQ ID NO: 1604346 - DNA, 15 bp, Homo sapiens
tcacacccaccccaa

SEQ ID NO: 1604347 - DNA, 15 bp, Homo sapiens
ctcacacccacccca

SEQ ID NO: 1604348 - DNA, 15 bp, Homo sapiens
cctcacacccacccc

SEQ ID NO: 1604349 - DNA, 15 bp, Homo sapiens
ccctcacacccaccc

SEQ ID NO: 1604350 - DNA, 15 bp, Homo sapiens
tccctcacacccacc

SEQ ID NO: 1604351 - DNA, 15 bp, Homo sapiens
ttccctcacacccac

SEQ ID NO: 1604352 - DNA, 15 bp, Homo sapiens
cttccctcacaccca

SEQ ID NO: 1604353 - DNA, 15 bp, Homo sapiens
ccttccctcacaccc

SEQ ID NO: 1604354 - DNA, 15 bp, Homo sapiens
cccttccctcacacc

SEQ ID NO: 1604355 - DNA, 15 bp, Homo sapiens
acccttccctcacac

SEQ ID NO: 1604356 - DNA, 15 bp, Homo sapiens
cacccttccctcaca

SEQ ID NO: 1604357 - DNA, 15 bp, Homo sapiens
ccacccttccctcac

SEQ ID NO: 1604358 - DNA, 15 bp, Homo sapiens
tccacccttccctca

SEQ ID NO: 1604359 - DNA, 15 bp, Homo sapiens
ctccacccttccctc

SEQ ID NO: 1604360 - DNA, 15 bp, Homo sapiens
cctccacccttccct

SEQ ID NO: 1604361 - DNA, 15 bp, Homo sapiens
ccctccacccttccc

SEQ ID NO: 1604362 - DNA, 15 bp, Homo sapiens
cccctccacccttcc

SEQ ID NO: 1604363 - DNA, 15 bp, Homo sapiens
ccccctccacccttc

SEQ ID NO: 1604364 - DNA, 15 bp, Homo sapiens
tccccctccaccctt

SEQ ID NO: 1604365 - DNA, 15 bp, Homo sapiens
ttccccctccaccct

SEQ ID NO: 1604366 - DNA, 15 bp, Homo sapiens
attccccctccaccc

SEQ ID NO: 1604367 - DNA, 15 bp, Homo sapiens
gattccccctccacc

SEQ ID NO: 1604368 - DNA, 15 bp, Homo sapiens
agattccccctccac

SEQ ID NO: 1604369 - DNA, 15 bp, Homo sapiens
gagattccccctcca

SEQ ID NO: 1604370 - DNA, 15 bp, Homo sapiens
ggagattccccctcc

SEQ ID NO: 1604371 - DNA, 15 bp, Homo sapiens
cggagattccccctc

SEQ ID NO: 1604372 - DNA, 15 bp, Homo sapiens
tcggagattccccct

SEQ ID NO: 1604373 - DNA, 15 bp, Homo sapiens
ctcggagattccccc

SEQ ID NO: 1604374 - DNA, 15 bp, Homo sapiens
cctcggagattcccc

SEQ ID NO: 1604375 - DNA, 15 bp, Homo sapiens
gcctcggagattccc

SEQ ID NO: 1604376 - DNA, 15 bp, Homo sapiens
ggcctcggagattcc

SEQ ID NO: 1604377 - DNA, 15 bp, Homo sapiens
gggcctcggagattc

SEQ ID NO: 1604378 - DNA, 15 bp, Homo sapiens
tgggcctcggagatt

SEQ ID NO: 1604379 - DNA, 15 bp, Homo sapiens
ttgggcctcggagat

SEQ ID NO: 1604380 - DNA, 15 bp, Homo sapiens
attgggcctcggaga

SEQ ID NO: 1604381 - DNA, 15 bp, Homo sapiens
cattgggcctcggag

SEQ ID NO: 1604382 - DNA, 15 bp, Homo sapiens
acattgggcctcgga

SEQ ID NO: 1604383 - DNA, 15 bp, Homo sapiens
aacattgggcctcgg

SEQ ID NO: 1604384 - DNA, 15 bp, Homo sapiens
aaacattgggcctcg

SEQ ID NO: 1604385 - DNA, 15 bp, Homo sapiens
aaaacattgggcctc

SEQ ID NO: 1604386 - DNA, 15 bp, Homo sapiens
gaaaacattgggcct

SEQ ID NO: 1604387 - DNA, 15 bp, Homo sapiens
agaaaacattgggcc

SEQ ID NO: 1604388 - DNA, 15 bp, Homo sapiens
cagaaaacattgggc

SEQ ID NO: 1604389 - DNA, 15 bp, Homo sapiens
ccagaaaacattggg

SEQ ID NO: 1604390 - DNA, 15 bp, Homo sapiens
cccagaaaacattgg

SEQ ID NO: 1604391 - DNA, 15 bp, Homo sapiens
tcccagaaaacattg

SEQ ID NO: 1604392 - DNA, 15 bp, Homo sapiens
gtcccagaaaacatt

SEQ ID NO: 1604393 - DNA, 15 bp, Homo sapiens
agtcccagaaaacat

SEQ ID NO: 1604394 - DNA, 15 bp, Homo sapiens
aagtcccagaaaaca

SEQ ID NO: 1604395 - DNA, 15 bp, Homo sapiens
caagtcccagaaaac

SEQ ID NO: 1604396 - DNA, 15 bp, Homo sapiens
tcaagtcccagaaaa

SEQ ID NO: 1604397 - DNA, 15 bp, Homo sapiens
ctcaagtcccagaaa

SEQ ID NO: 1604398 - DNA, 15 bp, Homo sapiens
cctcaagtcccagaa

SEQ ID NO: 1604399 - DNA, 15 bp, Homo sapiens
ccctcaagtcccaga

SEQ ID NO: 1604400 - DNA, 15 bp, Homo sapiens
tccctcaagtcccag

SEQ ID NO: 1604401 - DNA, 15 bp, Homo sapiens
ctccctcaagtccca

SEQ ID NO: 1604402 - DNA, 15 bp, Homo sapiens
cctccctcaagtccc

SEQ ID NO: 1604403 - DNA, 15 bp, Homo sapiens
gcctccctcaagtcc

SEQ ID NO: 1604404 - DNA, 15 bp, Homo sapiens
agcctccctcaagtc

SEQ ID NO: 1604405 - DNA, 15 bp, Homo sapiens
cagcctccctcaagt

SEQ ID NO: 1604406 - DNA, 15 bp, Homo sapiens
tcagcctccctcaag

SEQ ID NO: 1604407 - DNA, 15 bp, Homo sapiens
ttcagcctccctcaa

SEQ ID NO: 1604408 - DNA, 15 bp, Homo sapiens
attcagcctccctca

SEQ ID NO: 1604409 - DNA, 15 bp, Homo sapiens
aattcagcctccctc

SEQ ID NO: 1604410 - DNA, 15 bp, Homo sapiens
gaattcagcctccct

SEQ ID NO: 1604411 - DNA, 15 bp, Homo sapiens
agaattcagcctccc

SEQ ID NO: 1604412 - DNA, 15 bp, Homo sapiens
gagaattcagcctcc

SEQ ID NO: 1604413 - DNA, 15 bp, Homo sapiens
ggagaattcagcctc

SEQ ID NO: 1604414 - DNA, 15 bp, Homo sapiens
gggagaattcagcct

SEQ ID NO: 1604415 - DNA, 15 bp, Homo sapiens
agggagaattcagcc

SEQ ID NO: 1604416 - DNA, 15 bp, Homo sapiens
gagggagaattcagc

SEQ ID NO: 1604417 - DNA, 15 bp, Homo sapiens
cgagggagaattcag

SEQ ID NO: 1604418 - DNA, 15 bp, Homo sapiens
gcgagggagaattca

SEQ ID NO: 1604419 - DNA, 15 bp, Homo sapiens
agcgagggagaattc

SEQ ID NO: 1604420 - DNA, 15 bp, Homo sapiens
cagcgagggagaatt

SEQ ID NO: 1604421 - DNA, 15 bp, Homo sapiens
gcagcgagggagaat

SEQ ID NO: 1604422 - DNA, 15 bp, Homo sapiens
ggcagcgagggagaa

SEQ ID NO: 1604423 - DNA, 15 bp, Homo sapiens
aggcagcgagggaga

SEQ ID NO: 1604424 - DNA, 15 bp, Homo sapiens
taggcagcgagggag

SEQ ID NO: 1604425 - DNA, 15 bp, Homo sapiens
ctaggcagcgaggga

SEQ ID NO: 1604426 - DNA, 15 bp, Homo sapiens
cctaggcagcgaggg

SEQ ID NO: 1604427 - DNA, 15 bp, Homo sapiens
tcctaggcagcgagg

SEQ ID NO: 1604428 - DNA, 15 bp, Homo sapiens
gtcctaggcagcgag

SEQ ID NO: 1604429 - DNA, 15 bp, Homo sapiens
agtcctaggcagcga

SEQ ID NO: 1604430 - DNA, 15 bp, Homo sapiens
aagtcctaggcagcg

SEQ ID NO: 1604431 - DNA, 15 bp, Homo sapiens
caagtcctaggcagc

SEQ ID NO: 1604432 - DNA, 15 bp, Homo sapiens
ccaagtcctaggcag

SEQ ID NO: 1604433 - DNA, 15 bp, Homo sapiens
cccaagtcctaggca

SEQ ID NO: 1604434 - DNA, 15 bp, Homo sapiens
ccccaagtcctaggc

SEQ ID NO: 1604435 - DNA, 15 bp, Homo sapiens
accccaagtcctagg

SEQ ID NO: 1604436 - DNA, 15 bp, Homo sapiens
gaccccaagtcctag

SEQ ID NO: 1604437 - DNA, 15 bp, Homo sapiens
agaccccaagtccta

SEQ ID NO: 1604438 - DNA, 15 bp, Homo sapiens
cagaccccaagtcct

SEQ ID NO: 1604439 - DNA, 15 bp, Homo sapiens
tcagaccccaagtcc

SEQ ID NO: 1604440 - DNA, 15 bp, Homo sapiens
ttcagaccccaagtc

SEQ ID NO: 1604441 - DNA, 15 bp, Homo sapiens
cttcagaccccaagt

SEQ ID NO: 1604442 - DNA, 15 bp, Homo sapiens
ccttcagaccccaag

SEQ ID NO: 1604443 - DNA, 15 bp, Homo sapiens
accttcagaccccaa

SEQ ID NO: 1604444 - DNA, 15 bp, Homo sapiens
aaccttcagacccca

SEQ ID NO: 1604445 - DNA, 15 bp, Homo sapiens
caaccttcagacccc

SEQ ID NO: 1604446 - DNA, 15 bp, Homo sapiens
gcaaccttcagaccc

SEQ ID NO: 1604447 - DNA, 15 bp, Homo sapiens
tgcaaccttcagacc

SEQ ID NO: 1604448 - DNA, 15 bp, Homo sapiens
ctgcaaccttcagac

SEQ ID NO: 1604449 - DNA, 15 bp, Homo sapiens
tctgcaaccttcaga

SEQ ID NO: 1604450 - DNA, 15 bp, Homo sapiens
gtctgcaaccttcag

SEQ ID NO: 1604451 - DNA, 15 bp, Homo sapiens
ggtctgcaaccttca

SEQ ID NO: 1604452 - DNA, 15 bp, Homo sapiens
cggtctgcaaccttc

SEQ ID NO: 1604453 - DNA, 15 bp, Homo sapiens
tcggtctgcaacctt

SEQ ID NO: 1604454 - DNA, 15 bp, Homo sapiens
ctcggtctgcaacct

SEQ ID NO: 1604455 - DNA, 15 bp, Homo sapiens
cctcggtctgcaacc

SEQ ID NO: 1604456 - DNA, 15 bp, Homo sapiens
gcctcggtctgcaac

SEQ ID NO: 1604457 - DNA, 15 bp, Homo sapiens
cgcctcggtctgcaa

SEQ ID NO: 1604458 - DNA, 15 bp, Homo sapiens
tcgcctcggtctgca

SEQ ID NO: 1604459 - DNA, 15 bp, Homo sapiens
atcgcctcggtctgc

SEQ ID NO: 1604460 - DNA, 15 bp, Homo sapiens
gatcgcctcggtctg

SEQ ID NO: 1604461 - DNA, 15 bp, Homo sapiens
ggatcgcctcggtct

SEQ ID NO: 1604462 - DNA, 15 bp, Homo sapiens
cggatcgcctcggtc

SEQ ID NO: 1604463 - DNA, 15 bp, Homo sapiens
gcggatcgcctcggt

SEQ ID NO: 1604464 - DNA, 15 bp, Homo sapiens
tgcggatcgcctcgg

SEQ ID NO: 1604465 - DNA, 15 bp, Homo sapiens
ctgcggatcgcctcg

SEQ ID NO: 1604466 - DNA, 15 bp, Homo sapiens
gctgcggatcgcctc

SEQ ID NO: 1604467 - DNA, 15 bp, Homo sapiens
cgctgcggatcgcct

SEQ ID NO: 1604468 - DNA, 15 bp, Homo sapiens
gcgctgcggatcgcc

SEQ ID NO: 1604469 - DNA, 15 bp, Homo sapiens
ggcgctgcggatcgc

SEQ ID NO: 1604470 - DNA, 15 bp, Homo sapiens
gggcgctgcggatcg

SEQ ID NO: 1604471 - DNA, 15 bp, Homo sapiens
agggcgctgcggatc

SEQ ID NO: 1604472 - DNA, 15 bp, Homo sapiens
gagggcgctgcggat

SEQ ID NO: 1604473 - DNA, 15 bp, Homo sapiens
agagggcgctgcgga

SEQ ID NO: 1604474 - DNA, 15 bp, Homo sapiens
aagagggcgctgcgg

SEQ ID NO: 1604475 - DNA, 15 bp, Homo sapiens
gaagagggcgctgcg

SEQ ID NO: 1604476 - DNA, 15 bp, Homo sapiens
ggaagagggcgctgc

SEQ ID NO: 1604477 - DNA, 15 bp, Homo sapiens
cggaagagggcgctg

SEQ ID NO: 1604478 - DNA, 15 bp, Homo sapiens
ccggaagagggcgct

SEQ ID NO: 1604479 - DNA, 15 bp, Homo sapiens
gccggaagagggcgc

SEQ ID NO: 1604480 - DNA, 15 bp, Homo sapiens
cgccggaagagggcg

SEQ ID NO: 1604481 - DNA, 15 bp, Homo sapiens
ccgccggaagagggc

SEQ ID NO: 1604482 - DNA, 15 bp, Homo sapiens
gccgccggaagaggg

SEQ ID NO: 1604483 - DNA, 15 bp, Homo sapiens
ggccgccggaagagg

SEQ ID NO: 1604484 - DNA, 15 bp, Homo sapiens
cggccgccggaagag

SEQ ID NO: 1604485 - DNA, 15 bp, Homo sapiens
acggccgccggaaga

SEQ ID NO: 1604486 - DNA, 15 bp, Homo sapiens
gacggccgccggaag

SEQ ID NO: 1604487 - DNA, 15 bp, Homo sapiens
agacggccgccggaa

SEQ ID NO: 1604488 - DNA, 15 bp, Homo sapiens
cagacggccgccgga

SEQ ID NO: 1604489 - DNA, 15 bp, Homo sapiens
ccagacggccgccgg

SEQ ID NO: 1604490 - DNA, 15 bp, Homo sapiens
tccagacggccgccg

SEQ ID NO: 1604491 - DNA, 15 bp, Homo sapiens
ctccagacggccgcc

SEQ ID NO: 1604492 - DNA, 15 bp, Homo sapiens
tctccagacggccgc

SEQ ID NO: 1604493 - DNA, 15 bp, Homo sapiens
ttctccagacggccg

SEQ ID NO: 1604494 - DNA, 15 bp, Homo sapiens
gttctccagacggcc

SEQ ID NO: 1604495 - DNA, 15 bp, Homo sapiens
agttctccagacggc

SEQ ID NO: 1604496 - DNA, 15 bp, Homo sapiens
cagttctccagacgg

SEQ ID NO: 1604497 - DNA, 15 bp, Homo sapiens
gcagttctccagacg

SEQ ID NO: 1604498 - DNA, 15 bp, Homo sapiens
tgcagttctccagac

SEQ ID NO: 1604499 - DNA, 15 bp, Homo sapiens
ctgcagttctccaga

SEQ ID NO: 1604500 - DNA, 15 bp, Homo sapiens
gctgcagttctccag

SEQ ID NO: 1604501 - DNA, 15 bp, Homo sapiens
agctgcagttctcca

SEQ ID NO: 1604502 - DNA, 15 bp, Homo sapiens
aagctgcagttctcc

SEQ ID NO: 1604503 - DNA, 15 bp, Homo sapiens
aaagctgcagttctc

SEQ ID NO: 1604504 - DNA, 15 bp, Homo sapiens
taaagctgcagttct

SEQ ID NO: 1604505 - DNA, 15 bp, Homo sapiens
ctaaagctgcagttc

SEQ ID NO: 1604506 - DNA, 15 bp, Homo sapiens
tctaaagctgcagtt

SEQ ID NO: 1604507 - DNA, 15 bp, Homo sapiens
ctctaaagctgcagt

SEQ ID NO: 1604508 - DNA, 15 bp, Homo sapiens
gctctaaagctgcag

SEQ ID NO: 1604509 - DNA, 15 bp, Homo sapiens
cgctctaaagctgca

SEQ ID NO: 1604510 - DNA, 15 bp, Homo sapiens
ccgctctaaagctgc

SEQ ID NO: 1604511 - DNA, 15 bp, Homo sapiens
accgctctaaagctg

SEQ ID NO: 1604512 - DNA, 15 bp, Homo sapiens
gaccgctctaaagct

SEQ ID NO: 1604513 - DNA, 15 bp, Homo sapiens
agaccgctctaaagc

SEQ ID NO: 1604514 - DNA, 15 bp, Homo sapiens
gagaccgctctaaag

SEQ ID NO: 1604515 - DNA, 15 bp, Homo sapiens
cgagaccgctctaaa

SEQ ID NO: 1604516 - DNA, 15 bp, Homo sapiens
ccgagaccgctctaa

SEQ ID NO: 1604517 - DNA, 15 bp, Homo sapiens
cccgagaccgctcta

SEQ ID NO: 1604518 - DNA, 15 bp, Homo sapiens
ccccgagaccgctct

SEQ ID NO: 1604519 - DNA, 15 bp, Homo sapiens
tccccgagaccgctc

SEQ ID NO: 1604520 - DNA, 15 bp, Homo sapiens
ttccccgagaccgct

SEQ ID NO: 1604521 - DNA, 15 bp, Homo sapiens
cttccccgagaccgc

SEQ ID NO: 1604522 - DNA, 15 bp, Homo sapiens
gcttccccgagaccg

SEQ ID NO: 1604523 - DNA, 15 bp, Homo sapiens
agcttccccgagacc

SEQ ID NO: 1604524 - DNA, 15 bp, Homo sapiens
aagcttccccgagac

SEQ ID NO: 1604525 - DNA, 15 bp, Homo sapiens
aaagcttccccgaga

SEQ ID NO: 1604526 - DNA, 15 bp, Homo sapiens
caaagcttccccgag

SEQ ID NO: 1604527 - DNA, 15 bp, Homo sapiens
gcaaagcttccccga

SEQ ID NO: 1604528 - DNA, 15 bp, Homo sapiens
agcaaagcttccccg

SEQ ID NO: 1604529 - DNA, 15 bp, Homo sapiens
tagcaaagcttcccc

SEQ ID NO: 1604530 - DNA, 15 bp, Homo sapiens
gtagcaaagcttccc

SEQ ID NO: 1604531 - DNA, 15 bp, Homo sapiens
agtagcaaagcttcc

SEQ ID NO: 1604532 - DNA, 15 bp, Homo sapiens
tagtagcaaagcttc

SEQ ID NO: 1604533 - DNA, 15 bp, Homo sapiens
ctagtagcaaagctt

SEQ ID NO: 1604534 - DNA, 15 bp, Homo sapiens
actagtagcaaagct

SEQ ID NO: 1604535 - DNA, 15 bp, Homo sapiens
aactagtagcaaagc

SEQ ID NO: 1604536 - DNA, 15 bp, Homo sapiens
aaactagtagcaaag

SEQ ID NO: 1604537 - DNA, 15 bp, Homo sapiens
gaaactagtagcaaa

SEQ ID NO: 1604538 - DNA, 15 bp, Homo sapiens
ggaaactagtagcaa

SEQ ID NO: 1604539 - DNA, 15 bp, Homo sapiens
cggaaactagtagca

SEQ ID NO: 1604540 - DNA, 15 bp, Homo sapiens
ccggaaactagtagc

SEQ ID NO: 1604541 - DNA, 15 bp, Homo sapiens
gccggaaactagtag

SEQ ID NO: 1604542 - DNA, 15 bp, Homo sapiens
agccggaaactagta

SEQ ID NO: 1604543 - DNA, 15 bp, Homo sapiens
tagccggaaactagt

SEQ ID NO: 1604544 - DNA, 15 bp, Homo sapiens
ctagccggaaactag

SEQ ID NO: 1604545 - DNA, 15 bp, Homo sapiens
cctagccggaaacta

SEQ ID NO: 1604546 - DNA, 15 bp, Homo sapiens
ccctagccggaaact

SEQ ID NO: 1604547 - DNA, 15 bp, Homo sapiens
tccctagccggaaac

SEQ ID NO: 1604548 - DNA, 15 bp, Homo sapiens
ttccctagccggaaa

SEQ ID NO: 1604549 - DNA, 15 bp, Homo sapiens
tttccctagccggaa

SEQ ID NO: 1604550 - DNA, 15 bp, Homo sapiens
ttttccctagccgga

SEQ ID NO: 1604551 - DNA, 15 bp, Homo sapiens
gttttccctagccgg

SEQ ID NO: 1604552 - DNA, 15 bp, Homo sapiens
agttttccctagccg

SEQ ID NO: 1604553 - DNA, 15 bp, Homo sapiens
cagttttccctagcc

SEQ ID NO: 1604554 - DNA, 15 bp, Homo sapiens
ccagttttccctagc

SEQ ID NO: 1604555 - DNA, 15 bp, Homo sapiens
accagttttccctag

SEQ ID NO: 1604556 - DNA, 15 bp, Homo sapiens
caccagttttcccta

SEQ ID NO: 1604557 - DNA, 15 bp, Homo sapiens
ccaccagttttccct

SEQ ID NO: 1604558 - DNA, 15 bp, Homo sapiens
accaccagttttccc

SEQ ID NO: 1604559 - DNA, 15 bp, Homo sapiens
caccaccagttttcc

SEQ ID NO: 1604560 - DNA, 15 bp, Homo sapiens
ccaccaccagttttc

SEQ ID NO: 1604561 - DNA, 15 bp, Homo sapiens
accaccaccagtttt

SEQ ID NO: 1604562 - DNA, 15 bp, Homo sapiens
gaccaccaccagttt

SEQ ID NO: 1604563 - DNA, 15 bp, Homo sapiens
cgaccaccaccagtt

SEQ ID NO: 1604564 - DNA, 15 bp, Homo sapiens
ccgaccaccaccagt

SEQ ID NO: 1604565 - DNA, 15 bp, Homo sapiens
tccgaccaccaccag

SEQ ID NO: 1604566 - DNA, 15 bp, Homo sapiens
ctccgaccaccacca

SEQ ID NO: 1604567 - DNA, 15 bp, Homo sapiens
tctccgaccaccacc

SEQ ID NO: 1604568 - DNA, 15 bp, Homo sapiens
gtctccgaccaccac

SEQ ID NO: 1604569 - DNA, 15 bp, Homo sapiens
agtctccgaccacca

SEQ ID NO: 1604570 - DNA, 15 bp, Homo sapiens
cagtctccgaccacc

SEQ ID NO: 1604571 - DNA, 15 bp, Homo sapiens
ccagtctccgaccac

SEQ ID NO: 1604572 - DNA, 15 bp, Homo sapiens
accagtctccgacca

SEQ ID NO: 1604573 - DNA, 15 bp, Homo sapiens
taccagtctccgacc

SEQ ID NO: 1604574 - DNA, 15 bp, Homo sapiens
ctaccagtctccgac

SEQ ID NO: 1604575 - DNA, 15 bp, Homo sapiens
actaccagtctccga

SEQ ID NO: 1604576 - DNA, 15 bp, Homo sapiens
tactaccagtctccg

SEQ ID NO: 1604577 - DNA, 15 bp, Homo sapiens
gtactaccagtctcc

SEQ ID NO: 1604578 - DNA, 15 bp, Homo sapiens
tgtactaccagtctc

SEQ ID NO: 1604579 - DNA, 15 bp, Homo sapiens
atgtactaccagtct

SEQ ID NO: 1604580 - DNA, 15 bp, Homo sapiens
gatgtactaccagtc

SEQ ID NO: 1604581 - DNA, 15 bp, Homo sapiens
tgatgtactaccagt

SEQ ID NO: 1604582 - DNA, 15 bp, Homo sapiens
atgatgtactaccag

SEQ ID NO: 1604583 - DNA, 15 bp, Homo sapiens
gatgatgtactacca

SEQ ID NO: 1604584 - DNA, 15 bp, Homo sapiens
ggatgatgtactacc

SEQ ID NO: 1604585 - DNA, 15 bp, Homo sapiens
tggatgatgtactac

SEQ ID NO: 1604586 - DNA, 15 bp, Homo sapiens
gtggatgatgtacta

SEQ ID NO: 1604587 - DNA, 15 bp, Homo sapiens
cgtggatgatgtact

SEQ ID NO: 1604588 - DNA, 15 bp, Homo sapiens
gcgtggatgatgtac

SEQ ID NO: 1604589 - DNA, 15 bp, Homo sapiens
tgcgtggatgatgta

SEQ ID NO: 1604590 - DNA, 15 bp, Homo sapiens
atgcgtggatgatgt

SEQ ID NO: 1604591 - DNA, 15 bp, Homo sapiens
aatgcgtggatgatg

SEQ ID NO: 1604592 - DNA, 15 bp, Homo sapiens
gaatgcgtggatgat

SEQ ID NO: 1604593 - DNA, 15 bp, Homo sapiens
cgaatgcgtggatga

SEQ ID NO: 1604594 - DNA, 15 bp, Homo sapiens
gcgaatgcgtggatg

SEQ ID NO: 1604595 - DNA, 15 bp, Homo sapiens
agcgaatgcgtggat

SEQ ID NO: 1604596 - DNA, 15 bp, Homo sapiens
gagcgaatgcgtgga

SEQ ID NO: 1604597 - DNA, 15 bp, Homo sapiens
tgagcgaatgcgtgg

SEQ ID NO: 1604598 - DNA, 15 bp, Homo sapiens
atgagcgaatgcgtg

SEQ ID NO: 1604599 - DNA, 15 bp, Homo sapiens
aatgagcgaatgcgt

SEQ ID NO: 1604600 - DNA, 15 bp, Homo sapiens
gaatgagcgaatgcg

SEQ ID NO: 1604601 - DNA, 15 bp, Homo sapiens
agaatgagcgaatgc

SEQ ID NO: 1604602 - DNA, 15 bp, Homo sapiens
tagaatgagcgaatg

SEQ ID NO: 1604603 - DNA, 15 bp, Homo sapiens
ttagaatgagcgaat

SEQ ID NO: 1604604 - DNA, 15 bp, Homo sapiens
gttagaatgagcgaa

SEQ ID NO: 1604605 - DNA, 15 bp, Homo sapiens
agttagaatgagcga

SEQ ID NO: 1604606 - DNA, 15 bp, Homo sapiens
cagttagaatgagcg

SEQ ID NO: 1604607 - DNA, 15 bp, Homo sapiens
acagttagaatgagc

SEQ ID NO: 1604608 - DNA, 15 bp, Homo sapiens
gacagttagaatgag

SEQ ID NO: 1604609 - DNA, 15 bp, Homo sapiens
ggacagttagaatga

SEQ ID NO: 1604610 - DNA, 15 bp, Homo sapiens
cggacagttagaatg

SEQ ID NO: 1604611 - DNA, 15 bp, Homo sapiens
gcggacagttagaat

SEQ ID NO: 1604612 - DNA, 15 bp, Homo sapiens
ggcggacagttagaa

SEQ ID NO: 1604613 - DNA, 15 bp, Homo sapiens
gggcggacagttaga

SEQ ID NO: 1604614 - DNA, 15 bp, Homo sapiens
cgggcggacagttag

SEQ ID NO: 1604615 - DNA, 15 bp, Homo sapiens
tcgggcggacagtta

SEQ ID NO: 1604616 - DNA, 15 bp, Homo sapiens
gtcgggcggacagtt

SEQ ID NO: 1604617 - DNA, 15 bp, Homo sapiens
ggtcgggcggacagt

SEQ ID NO: 1604618 - DNA, 15 bp, Homo sapiens
tggtcgggcggacag

SEQ ID NO: 1604619 - DNA, 15 bp, Homo sapiens
atggtcgggcggaca

SEQ ID NO: 1604620 - DNA, 15 bp, Homo sapiens
tatggtcgggcggac

SEQ ID NO: 1604621 - DNA, 15 bp, Homo sapiens
gtatggtcgggcgga

SEQ ID NO: 1604622 - DNA, 15 bp, Homo sapiens
cgtatggtcgggcgg

SEQ ID NO: 1604623 - DNA, 15 bp, Homo sapiens
acgtatggtcgggcg

SEQ ID NO: 1604624 - DNA, 15 bp, Homo sapiens
gacgtatggtcgggc

SEQ ID NO: 1604625 - DNA, 15 bp, Homo sapiens
tgacgtatggtcggg

SEQ ID NO: 1604626 - DNA, 15 bp, Homo sapiens
ctgacgtatggtcgg

SEQ ID NO: 1604627 - DNA, 15 bp, Homo sapiens
cctgacgtatggtcg

SEQ ID NO: 1604628 - DNA, 15 bp, Homo sapiens
gcctgacgtatggtc

SEQ ID NO: 1604629 - DNA, 15 bp, Homo sapiens
agcctgacgtatggt

SEQ ID NO: 1604630 - DNA, 15 bp, Homo sapiens
cagcctgacgtatgg

SEQ ID NO: 1604631 - DNA, 15 bp, Homo sapiens
acagcctgacgtatg

SEQ ID NO: 1604632 - DNA, 15 bp, Homo sapiens
gacagcctgacgtat

SEQ ID NO: 1604633 - DNA, 15 bp, Homo sapiens
agacagcctgacgta

SEQ ID NO: 1604634 - DNA, 15 bp, Homo sapiens
tagacagcctgacgt

SEQ ID NO: 1604635 - DNA, 15 bp, Homo sapiens
atagacagcctgacg

SEQ ID NO: 1604636 - DNA, 15 bp, Homo sapiens
gatagacagcctgac

SEQ ID NO: 1604637 - DNA, 15 bp, Homo sapiens
cgatagacagcctga

SEQ ID NO: 1604638 - DNA, 15 bp, Homo sapiens
ccgatagacagcctg

SEQ ID NO: 1604639 - DNA, 15 bp, Homo sapiens
accgatagacagcct

SEQ ID NO: 1604640 - DNA, 15 bp, Homo sapiens
gaccgatagacagcc

SEQ ID NO: 1604641 - DNA, 15 bp, Homo sapiens
ggaccgatagacagc

SEQ ID NO: 1604642 - DNA, 15 bp, Homo sapiens
tggaccgatagacag

SEQ ID NO: 1604643 - DNA, 15 bp, Homo sapiens
gtggaccgatagaca

SEQ ID NO: 1604644 - DNA, 15 bp, Homo sapiens
ggtggaccgatagac

SEQ ID NO: 1604645 - DNA, 15 bp, Homo sapiens
gggtggaccgataga

SEQ ID NO: 1604646 - DNA, 15 bp, Homo sapiens
tgggtggaccgatag

SEQ ID NO: 1604647 - DNA, 15 bp, Homo sapiens
ttgggtggaccgata

SEQ ID NO: 1604648 - DNA, 15 bp, Homo sapiens
tttgggtggaccgat

SEQ ID NO: 1604649 - DNA, 15 bp, Homo sapiens
ctttgggtggaccga

SEQ ID NO: 1604650 - DNA, 15 bp, Homo sapiens
gctttgggtggaccg

SEQ ID NO: 1604651 - DNA, 15 bp, Homo sapiens
ggctttgggtggacc

SEQ ID NO: 1604652 - DNA, 15 bp, Homo sapiens
tggctttgggtggac

SEQ ID NO: 1604653 - DNA, 15 bp, Homo sapiens
ttggctttgggtgga

SEQ ID NO: 1604654 - DNA, 15 bp, Homo sapiens
attggctttgggtgg

SEQ ID NO: 1604655 - DNA, 15 bp, Homo sapiens
tattggctttgggtg

SEQ ID NO: 1604656 - DNA, 15 bp, Homo sapiens
atattggctttgggt

SEQ ID NO: 1604657 - DNA, 15 bp, Homo sapiens
tatattggctttggg

SEQ ID NO: 1604658 - DNA, 15 bp, Homo sapiens
ttatattggctttgg

SEQ ID NO: 1604659 - DNA, 15 bp, Homo sapiens
cttatattggctttg

SEQ ID NO: 1604660 - DNA, 15 bp, Homo sapiens
acttatattggcttt

SEQ ID NO: 1604661 - DNA, 15 bp, Homo sapiens
aacttatattggctt

SEQ ID NO: 1604662 - DNA, 15 bp, Homo sapiens
taacttatattggct

SEQ ID NO: 1604663 - DNA, 15 bp, Homo sapiens
ataacttatattggc

SEQ ID NO: 1604664 - DNA, 15 bp, Homo sapiens
cataacttatattgg

SEQ ID NO: 1604665 - DNA, 15 bp, Homo sapiens
tcataacttatattg

SEQ ID NO: 1604666 - DNA, 15 bp, Homo sapiens
atcataacttatatt

SEQ ID NO: 1604667 - DNA, 15 bp, Homo sapiens
aatcataacttatat

SEQ ID NO: 1604668 - DNA, 15 bp, Homo sapiens
caatcataacttata

SEQ ID NO: 1604669 - DNA, 15 bp, Homo sapiens
tcaatcataacttat

SEQ ID NO: 1604670 - DNA, 15 bp, Homo sapiens
gtcaatcataactta

SEQ ID NO: 1604671 - DNA, 15 bp, Homo sapiens
agtcaatcataactt

SEQ ID NO: 1604672 - DNA, 15 bp, Homo sapiens
gagtcaatcataact

SEQ ID NO: 1604673 - DNA, 15 bp, Homo sapiens
agagtcaatcataac

SEQ ID NO: 1604674 - DNA, 15 bp, Homo sapiens
aagagtcaatcataa

SEQ ID NO: 1604675 - DNA, 15 bp, Homo sapiens
aaagagtcaatcata

SEQ ID NO: 1604676 - DNA, 15 bp, Homo sapiens
caaagagtcaatcat

SEQ ID NO: 1604677 - DNA, 15 bp, Homo sapiens
tcaaagagtcaatca

SEQ ID NO: 1604678 - DNA, 15 bp, Homo sapiens
ttcaaagagtcaatc

SEQ ID NO: 1604679 - DNA, 15 bp, Homo sapiens
attcaaagagtcaat

SEQ ID NO: 1604680 - DNA, 15 bp, Homo sapiens
gattcaaagagtcaa

SEQ ID NO: 1604681 - DNA, 15 bp, Homo sapiens
tgattcaaagagtca

SEQ ID NO: 1604682 - DNA, 15 bp, Homo sapiens
gtgattcaaagagtc

SEQ ID NO: 1604683 - DNA, 15 bp, Homo sapiens
ggtgattcaaagagt

SEQ ID NO: 1604684 - DNA, 15 bp, Homo sapiens
gggtgattcaaagag

SEQ ID NO: 1604685 - DNA, 15 bp, Homo sapiens
tgggtgattcaaaga

SEQ ID NO: 1604686 - DNA, 15 bp, Homo sapiens
ctgggtgattcaaag

SEQ ID NO: 1604687 - DNA, 15 bp, Homo sapiens
actgggtgattcaaa

SEQ ID NO: 1604688 - DNA, 15 bp, Homo sapiens
gactgggtgattcaa

SEQ ID NO: 1604689 - DNA, 15 bp, Homo sapiens
agactgggtgattca

SEQ ID NO: 1604690 - DNA, 15 bp, Homo sapiens
gagactgggtgattc

SEQ ID NO: 1604691 - DNA, 15 bp, Homo sapiens
ggagactgggtgatt

SEQ ID NO: 1604692 - DNA, 15 bp, Homo sapiens
aggagactgggtgat

SEQ ID NO: 1604693 - DNA, 15 bp, Homo sapiens
aaggagactgggtga

SEQ ID NO: 1604694 - DNA, 15 bp, Homo sapiens
caaggagactgggtg

SEQ ID NO: 1604695 - DNA, 15 bp, Homo sapiens
gcaaggagactgggt

SEQ ID NO: 1604696 - DNA, 15 bp, Homo sapiens
tgcaaggagactggg

SEQ ID NO: 1604697 - DNA, 15 bp, Homo sapiens
gtgcaaggagactgg

SEQ ID NO: 1604698 - DNA, 15 bp, Homo sapiens
ggtgcaaggagactg

SEQ ID NO: 1604699 - DNA, 15 bp, Homo sapiens
aggtgcaaggagact

SEQ ID NO: 1604700 - DNA, 15 bp, Homo sapiens
caggtgcaaggagac

SEQ ID NO: 1604701 - DNA, 15 bp, Homo sapiens
gcaggtgcaaggaga

SEQ ID NO: 1604702 - DNA, 15 bp, Homo sapiens
agcaggtgcaaggag

SEQ ID NO: 1604703 - DNA, 15 bp, Homo sapiens
aatagcaggtgcaag

SEQ ID NO: 1604704 - DNA, 15 bp, Homo sapiens
aaatagcaggtgcaa

SEQ ID NO: 1604705 - DNA, 15 bp, Homo sapiens
caaatagcaggtgca

SEQ ID NO: 1604706 - DNA, 15 bp, Homo sapiens
tcaaatagcaggtgc

SEQ ID NO: 1604707 - DNA, 15 bp, Homo sapiens
ttcaaatagcaggtg

SEQ ID NO: 1604708 - DNA, 15 bp, Homo sapiens
tttcaaatagcaggt

SEQ ID NO: 1604709 - DNA, 15 bp, Homo sapiens
ctttcaaatagcagg

SEQ ID NO: 1604710 - DNA, 15 bp, Homo sapiens
tctttcaaatagcag

SEQ ID NO: 1604711 - DNA, 15 bp, Homo sapiens
ctctttcaaatagca

SEQ ID NO: 1604712 - DNA, 15 bp, Homo sapiens
gctctttcaaatagc

SEQ ID NO: 1604713 - DNA, 15 bp, Homo sapiens
ggctctttcaaatag

SEQ ID NO: 1604714 - DNA, 15 bp, Homo sapiens
gggctctttcaaata

SEQ ID NO: 1604715 - DNA, 15 bp, Homo sapiens
tgggctctttcaaat

SEQ ID NO: 1604716 - DNA, 15 bp, Homo sapiens
ctgggctctttcaaa

SEQ ID NO: 1604717 - DNA, 15 bp, Homo sapiens
cctgggctctttcaa

SEQ ID NO: 1604718 - DNA, 15 bp, Homo sapiens
acctgggctctttca

SEQ ID NO: 1604719 - DNA, 15 bp, Homo sapiens
cacctgggctctttc

SEQ ID NO: 1604720 - DNA, 15 bp, Homo sapiens
acacctgggctcttt

SEQ ID NO: 1604721 - DNA, 15 bp, Homo sapiens
tacacctgggctctt

SEQ ID NO: 1604722 - DNA, 15 bp, Homo sapiens
ctacacctgggctct

SEQ ID NO: 1604723 - DNA, 15 bp, Homo sapiens
tctacacctgggctc

SEQ ID NO: 1604724 - DNA, 15 bp, Homo sapiens
atctacacctgggct

SEQ ID NO: 1604725 - DNA, 15 bp, Homo sapiens
gatctacacctgggc

SEQ ID NO: 1604726 - DNA, 15 bp, Homo sapiens
tgatctacacctggg

SEQ ID NO: 1604727 - DNA, 15 bp, Homo sapiens
ctgatctacacctgg

SEQ ID NO: 1604728 - DNA, 15 bp, Homo sapiens
cctgatctacacctg

SEQ ID NO: 1604729 - DNA, 15 bp, Homo sapiens
ccctgatctacacct

SEQ ID NO: 1604730 - DNA, 15 bp, Homo sapiens
gccctgatctacacc

SEQ ID NO: 1604731 - DNA, 15 bp, Homo sapiens
agccctgatctacac

SEQ ID NO: 1604732 - DNA, 15 bp, Homo sapiens
aagccctgatctaca

SEQ ID NO: 1604733 - DNA, 15 bp, Homo sapiens
caagccctgatctac

SEQ ID NO: 1604734 - DNA, 15 bp, Homo sapiens
ccaagccctgatcta

SEQ ID NO: 1604735 - DNA, 15 bp, Homo sapiens
tccaagccctgatct

SEQ ID NO: 1604736 - DNA, 15 bp, Homo sapiens
ttccaagccctgatc

SEQ ID NO: 1604737 - DNA, 15 bp, Homo sapiens
cttccaagccctgat

SEQ ID NO: 1604738 - DNA, 15 bp, Homo sapiens
gcttccaagccctga

SEQ ID NO: 1604739 - DNA, 15 bp, Homo sapiens
agcttccaagccctg

SEQ ID NO: 1604740 - DNA, 15 bp, Homo sapiens
cagcttccaagccct

SEQ ID NO: 1604741 - DNA, 15 bp, Homo sapiens
agcagcttccaagcc

SEQ ID NO: 1604742 - DNA, 15 bp, Homo sapiens
gagcagcttccaagc

SEQ ID NO: 1604743 - DNA, 15 bp, Homo sapiens
agagcagcttccaag

SEQ ID NO: 1604744 - DNA, 15 bp, Homo sapiens
aagagcagcttccaa

SEQ ID NO: 1604745 - DNA, 15 bp, Homo sapiens
caagagcagcttcca

SEQ ID NO: 1604746 - DNA, 15 bp, Homo sapiens
acaagagcagcttcc

SEQ ID NO: 1604747 - DNA, 15 bp, Homo sapiens
tacaagagcagcttc

SEQ ID NO: 1604748 - DNA, 15 bp, Homo sapiens
gtacaagagcagctt

SEQ ID NO: 1604749 - DNA, 15 bp, Homo sapiens
ggtacaagagcagct

SEQ ID NO: 1604750 - DNA, 15 bp, Homo sapiens
aggtacaagagcagc

SEQ ID NO: 1604751 - DNA, 15 bp, Homo sapiens
taggtacaagagcag

SEQ ID NO: 1604752 - DNA, 15 bp, Homo sapiens
ttaggtacaagagca

SEQ ID NO: 1604753 - DNA, 15 bp, Homo sapiens
tttaggtacaagagc

SEQ ID NO: 1604754 - DNA, 15 bp, Homo sapiens
ttttaggtacaagag

SEQ ID NO: 1604755 - DNA, 15 bp, Homo sapiens
gttttaggtacaaga

SEQ ID NO: 1604756 - DNA, 15 bp, Homo sapiens
ggttttaggtacaag

SEQ ID NO: 1604757 - DNA, 15 bp, Homo sapiens
gggttttaggtacaa

SEQ ID NO: 1604758 - DNA, 15 bp, Homo sapiens
agggttttaggtaca

SEQ ID NO: 1604759 - DNA, 15 bp, Homo sapiens
gagggttttaggtac

SEQ ID NO: 1604760 - DNA, 15 bp, Homo sapiens
agagggttttaggta

SEQ ID NO: 1604761 - DNA, 15 bp, Homo sapiens
aagagggttttaggt

SEQ ID NO: 1604762 - DNA, 15 bp, Homo sapiens
aaagagggttttagg

SEQ ID NO: 1604763 - DNA, 15 bp, Homo sapiens
aaaagagggttttag

SEQ ID NO: 1604764 - DNA, 15 bp, Homo sapiens
taaaagagggtttta

SEQ ID NO: 1604765 - DNA, 15 bp, Homo sapiens
ttaaaagagggtttt

SEQ ID NO: 1604766 - DNA, 15 bp, Homo sapiens
attaaaagagggttt

SEQ ID NO: 1604767 - DNA, 15 bp, Homo sapiens
aattaaaagagggtt

SEQ ID NO: 1604768 - DNA, 15 bp, Homo sapiens
taattaaaagagggt

SEQ ID NO: 1604769 - DNA, 15 bp, Homo sapiens
ataattaaaagaggg

SEQ ID NO: 1604770 - DNA, 15 bp, Homo sapiens
cataattaaaagagg

SEQ ID NO: 1604771 - DNA, 15 bp, Homo sapiens
gcataattaaaagag

SEQ ID NO: 1604772 - DNA, 15 bp, Homo sapiens
agcataattaaaaga

SEQ ID NO: 1604773 - DNA, 15 bp, Homo sapiens
aagcataattaaaag

SEQ ID NO: 1604774 - DNA, 15 bp, Homo sapiens
aaagcataattaaaa

SEQ ID NO: 1604775 - DNA, 15 bp, Homo sapiens
caaagcataattaaa

SEQ ID NO: 1604776 - DNA, 15 bp, Homo sapiens
gcaaagcataattaa

SEQ ID NO: 1604777 - DNA, 15 bp, Homo sapiens
agcaaagcataatta

SEQ ID NO: 1604778 - DNA, 15 bp, Homo sapiens
aagcaaagcataatt

SEQ ID NO: 1604779 - DNA, 15 bp, Homo sapiens
gaagcaaagcataat

SEQ ID NO: 1604780 - DNA, 15 bp, Homo sapiens
cgaagcaaagcataa

SEQ ID NO: 1604781 - DNA, 15 bp, Homo sapiens
ccgaagcaaagcata

SEQ ID NO: 1604782 - DNA, 15 bp, Homo sapiens
tccgaagcaaagcat

SEQ ID NO: 1604783 - DNA, 15 bp, Homo sapiens
ttccgaagcaaagca

SEQ ID NO: 1604784 - DNA, 15 bp, Homo sapiens
attccgaagcaaagc

SEQ ID NO: 1604785 - DNA, 15 bp, Homo sapiens
aattccgaagcaaag

SEQ ID NO: 1604786 - DNA, 15 bp, Homo sapiens
aaattccgaagcaaa

SEQ ID NO: 1604787 - DNA, 15 bp, Homo sapiens
aaaattccgaagcaa

SEQ ID NO: 1604788 - DNA, 15 bp, Homo sapiens
caaaattccgaagca

SEQ ID NO: 1604789 - DNA, 15 bp, Homo sapiens
acaaaattccgaagc

SEQ ID NO: 1604790 - DNA, 15 bp, Homo sapiens
aacaaaattccgaag

SEQ ID NO: 1604791 - DNA, 15 bp, Homo sapiens
taacaaaattccgaa

SEQ ID NO: 1604792 - DNA, 15 bp, Homo sapiens
ataacaaaattccga

SEQ ID NO: 1604793 - DNA, 15 bp, Homo sapiens
cataacaaaattccg

SEQ ID NO: 1604794 - DNA, 15 bp, Homo sapiens
gcataacaaaattcc

SEQ ID NO: 1604795 - DNA, 15 bp, Homo sapiens
cgcataacaaaattc

SEQ ID NO: 1604796 - DNA, 15 bp, Homo sapiens
tcgcataacaaaatt

SEQ ID NO: 1604797 - DNA, 15 bp, Homo sapiens
ttcgcataacaaaat

SEQ ID NO: 1604798 - DNA, 15 bp, Homo sapiens
attcgcataacaaaa

SEQ ID NO: 1604799 - DNA, 15 bp, Homo sapiens
cattcgcataacaaa

SEQ ID NO: 1604800 - DNA, 15 bp, Homo sapiens
acattcgcataacaa

SEQ ID NO: 1604801 - DNA, 15 bp, Homo sapiens
gacattcgcataaca

SEQ ID NO: 1604802 - DNA, 15 bp, Homo sapiens
ggacattcgcataac

SEQ ID NO: 1604803 - DNA, 15 bp, Homo sapiens
aggacattcgcataa

SEQ ID NO: 1604804 - DNA, 15 bp, Homo sapiens
caggacattcgcata

SEQ ID NO: 1604805 - DNA, 15 bp, Homo sapiens
acaggacattcgcat

SEQ ID NO: 1604806 - DNA, 15 bp, Homo sapiens
gacaggacattcgca

SEQ ID NO: 1604807 - DNA, 15 bp, Homo sapiens
ggacaggacattcgc

SEQ ID NO: 1604808 - DNA, 15 bp, Homo sapiens
tggacaggacattcg

SEQ ID NO: 1604809 - DNA, 15 bp, Homo sapiens
ttggacaggacattc

SEQ ID NO: 1604810 - DNA, 15 bp, Homo sapiens
cttggacaggacatt

SEQ ID NO: 1604811 - DNA, 15 bp, Homo sapiens
acttggacaggacat

SEQ ID NO: 1604812 - DNA, 15 bp, Homo sapiens
gacttggacaggaca

SEQ ID NO: 1604813 - DNA, 15 bp, Homo sapiens
tgacttggacaggac

SEQ ID NO: 1604814 - DNA, 15 bp, Homo sapiens
ctgacttggacagga

SEQ ID NO: 1604815 - DNA, 15 bp, Homo sapiens
tctgacttggacagg

SEQ ID NO: 1604816 - DNA, 15 bp, Homo sapiens
ctctgacttggacag

SEQ ID NO: 1604817 - DNA, 15 bp, Homo sapiens
cctctgacttggaca

SEQ ID NO: 1604818 - DNA, 15 bp, Homo sapiens
ccctctgacttggac

SEQ ID NO: 1604819 - DNA, 15 bp, Homo sapiens
gccctctgacttgga

SEQ ID NO: 1604820 - DNA, 15 bp, Homo sapiens
tgccctctgacttgg

SEQ ID NO: 1604821 - DNA, 15 bp, Homo sapiens
atgccctctgacttg

SEQ ID NO: 1604822 - DNA, 15 bp, Homo sapiens
aatgccctctgactt

SEQ ID NO: 1604823 - DNA, 15 bp, Homo sapiens
aaatgccctctgact

SEQ ID NO: 1604824 - DNA, 15 bp, Homo sapiens
caaatgccctctgac

SEQ ID NO: 1604825 - DNA, 15 bp, Homo sapiens
ccaaatgccctctga

SEQ ID NO: 1604826 - DNA, 15 bp, Homo sapiens
tccaaatgccctctg

SEQ ID NO: 1604827 - DNA, 15 bp, Homo sapiens
ctccaaatgccctct

SEQ ID NO: 1604828 - DNA, 15 bp, Homo sapiens
cctccaaatgccctc

SEQ ID NO: 1604829 - DNA, 15 bp, Homo sapiens
gcctccaaatgccct

SEQ ID NO: 1604830 - DNA, 15 bp, Homo sapiens
tgcctccaaatgccc

SEQ ID NO: 1604831 - DNA, 15 bp, Homo sapiens
atgcctccaaatgcc

SEQ ID NO: 1604832 - DNA, 15 bp, Homo sapiens
tatgcctccaaatgc

SEQ ID NO: 1604833 - DNA, 15 bp, Homo sapiens
atatgcctccaaatg

SEQ ID NO: 1604834 - DNA, 15 bp, Homo sapiens
aatatgcctccaaat

SEQ ID NO: 1604835 - DNA, 15 bp, Homo sapiens
aaatatgcctccaaa

SEQ ID NO: 1604836 - DNA, 15 bp, Homo sapiens
caaatatgcctccaa

SEQ ID NO: 1604837 - DNA, 15 bp, Homo sapiens
ccaaatatgcctcca

SEQ ID NO: 1604838 - DNA, 15 bp, Homo sapiens
accaaatatgcctcc

SEQ ID NO: 1604839 - DNA, 15 bp, Homo sapiens
caccaaatatgcctc

SEQ ID NO: 1604840 - DNA, 15 bp, Homo sapiens
tcaccaaatatgcct

SEQ ID NO: 1604841 - DNA, 15 bp, Homo sapiens
gtcaccaaatatgcc

SEQ ID NO: 1604842 - DNA, 15 bp, Homo sapiens
ggtcaccaaatatgc

SEQ ID NO: 1604843 - DNA, 15 bp, Homo sapiens
tggtcaccaaatatg

SEQ ID NO: 1604844 - DNA, 15 bp, Homo sapiens
ttggtcaccaaatat

SEQ ID NO: 1604845 - DNA, 15 bp, Homo sapiens
attggtcaccaaata

SEQ ID NO: 1604846 - DNA, 15 bp, Homo sapiens
cattggtcaccaaat

SEQ ID NO: 1604847 - DNA, 15 bp, Homo sapiens
ccattggtcaccaaa

SEQ ID NO: 1604848 - DNA, 15 bp, Homo sapiens
tccattggtcaccaa

SEQ ID NO: 1604849 - DNA, 15 bp, Homo sapiens
ctccattggtcacca

SEQ ID NO: 1604850 - DNA, 15 bp, Homo sapiens
actccattggtcacc

SEQ ID NO: 1604851 - DNA, 15 bp, Homo sapiens
tactccattggtcac

SEQ ID NO: 1604852 - DNA, 15 bp, Homo sapiens
ctactccattggtca

SEQ ID NO: 1604853 - DNA, 15 bp, Homo sapiens
gctactccattggtc

SEQ ID NO: 1604854 - DNA, 15 bp, Homo sapiens
agctactccattggt

SEQ ID NO: 1604855 - DNA, 15 bp, Homo sapiens
aagctactccattgg

SEQ ID NO: 1604856 - DNA, 15 bp, Homo sapiens
caagctactccattg

SEQ ID NO: 1604857 - DNA, 15 bp, Homo sapiens
gcaagctactccatt

SEQ ID NO: 1604858 - DNA, 15 bp, Homo sapiens
tgcaagctactccat

SEQ ID NO: 1604859 - DNA, 15 bp, Homo sapiens
gtgcaagctactcca

SEQ ID NO: 1604860 - DNA, 15 bp, Homo sapiens
agtgcaagctactcc

SEQ ID NO: 1604861 - DNA, 15 bp, Homo sapiens
aagtgcaagctactc

SEQ ID NO: 1604862 - DNA, 15 bp, Homo sapiens
aaagtgcaagctact

SEQ ID NO: 1604863 - DNA, 15 bp, Homo sapiens
gaaagtgcaagctac

SEQ ID NO: 1604864 - DNA, 15 bp, Homo sapiens
agaaagtgcaagcta

SEQ ID NO: 1604865 - DNA, 15 bp, Homo sapiens
cagaaagtgcaagct

SEQ ID NO: 1604866 - DNA, 15 bp, Homo sapiens
gcagaaagtgcaagc

SEQ ID NO: 1604867 - DNA, 15 bp, Homo sapiens
tgcagaaagtgcaag

SEQ ID NO: 1604868 - DNA, 15 bp, Homo sapiens
atgcagaaagtgcaa

SEQ ID NO: 1604869 - DNA, 15 bp, Homo sapiens
catgcagaaagtgca

SEQ ID NO: 1604870 - DNA, 15 bp, Homo sapiens
acatgcagaaagtgc

SEQ ID NO: 1604871 - DNA, 15 bp, Homo sapiens
gacatgcagaaagtg

SEQ ID NO: 1604872 - DNA, 15 bp, Homo sapiens
ggacatgcagaaagt

SEQ ID NO: 1604873 - DNA, 15 bp, Homo sapiens
aggacatgcagaaag

SEQ ID NO: 1604874 - DNA, 15 bp, Homo sapiens
aaggacatgcagaaa

SEQ ID NO: 1604875 - DNA, 15 bp, Homo sapiens
aaaggacatgcagaa

SEQ ID NO: 1604876 - DNA, 15 bp, Homo sapiens
gaaaggacatgcaga

SEQ ID NO: 1604877 - DNA, 15 bp, Homo sapiens
agaaaggacatgcag

SEQ ID NO: 1604878 - DNA, 15 bp, Homo sapiens
cagaaaggacatgca

SEQ ID NO: 1604879 - DNA, 15 bp, Homo sapiens
ccagaaaggacatgc

SEQ ID NO: 1604880 - DNA, 15 bp, Homo sapiens
tccagaaaggacatg

SEQ ID NO: 1604881 - DNA, 15 bp, Homo sapiens
ctccagaaaggacat

SEQ ID NO: 1604882 - DNA, 15 bp, Homo sapiens
cctccagaaaggaca

SEQ ID NO: 1604883 - DNA, 15 bp, Homo sapiens
tcctccagaaaggac

SEQ ID NO: 1604884 - DNA, 15 bp, Homo sapiens
ctcctccagaaagga

SEQ ID NO: 1604885 - DNA, 15 bp, Homo sapiens
cctcctccagaaagg

SEQ ID NO: 1604886 - DNA, 15 bp, Homo sapiens
actgcctcctccaga

SEQ ID NO: 1604887 - DNA, 15 bp, Homo sapiens
cactgcctcctccag

SEQ ID NO: 1604888 - DNA, 15 bp, Homo sapiens
ccactgcctcctcca

SEQ ID NO: 1604889 - DNA, 15 bp, Homo sapiens
gccactgcctcctcc

SEQ ID NO: 1604890 - DNA, 15 bp, Homo sapiens
ggccactgcctcctc

SEQ ID NO: 1604891 - DNA, 15 bp, Homo sapiens
gggccactgcctcct

SEQ ID NO: 1604892 - DNA, 15 bp, Homo sapiens
agggccactgcctcc

SEQ ID NO: 1604893 - DNA, 15 bp, Homo sapiens
tagggccactgcctc

SEQ ID NO: 1604894 - DNA, 15 bp, Homo sapiens
atagggccactgcct

SEQ ID NO: 1604895 - DNA, 15 bp, Homo sapiens
aatagggccactgcc

SEQ ID NO: 1604896 - DNA, 15 bp, Homo sapiens
taatagggccactgc

SEQ ID NO: 1604897 - DNA, 15 bp, Homo sapiens
ctaatagggccactg

SEQ ID NO: 1604898 - DNA, 15 bp, Homo sapiens
gctaatagggccact

SEQ ID NO: 1604899 - DNA, 15 bp, Homo sapiens
agctaatagggccac

SEQ ID NO: 1604900 - DNA, 15 bp, Homo sapiens
aagctaatagggcca

SEQ ID NO: 1604901 - DNA, 15 bp, Homo sapiens
caagctaatagggcc

SEQ ID NO: 1604902 - DNA, 15 bp, Homo sapiens
tcaagctaatagggc

SEQ ID NO: 1604903 - DNA, 15 bp, Homo sapiens
gtcaagctaataggg

SEQ ID NO: 1604904 - DNA, 15 bp, Homo sapiens
tgtcaagctaatagg

SEQ ID NO: 1604905 - DNA, 15 bp, Homo sapiens
ctgtcaagctaatag

SEQ ID NO: 1604906 - DNA, 15 bp, Homo sapiens
gctgtcaagctaata

SEQ ID NO: 1604907 - DNA, 15 bp, Homo sapiens
ggctgtcaagctaat

SEQ ID NO: 1604908 - DNA, 15 bp, Homo sapiens
aggctgtcaagctaa

SEQ ID NO: 1604909 - DNA, 15 bp, Homo sapiens
caggctgtcaagcta

SEQ ID NO: 1604910 - DNA, 15 bp, Homo sapiens
tcaggctgtcaagct

SEQ ID NO: 1604911 - DNA, 15 bp, Homo sapiens
gtcaggctgtcaagc

SEQ ID NO: 1604912 - DNA, 15 bp, Homo sapiens
tgtcaggctgtcaag

SEQ ID NO: 1604913 - DNA, 15 bp, Homo sapiens
gtgtcaggctgtcaa

SEQ ID NO: 1604914 - DNA, 15 bp, Homo sapiens
ttgtgtcaggctgtc

SEQ ID NO: 1604915 - DNA, 15 bp, Homo sapiens
cttgtgtcaggctgt

SEQ ID NO: 1604916 - DNA, 15 bp, Homo sapiens
ccttgtgtcaggctg

SEQ ID NO: 1604917 - DNA, 15 bp, Homo sapiens
cccttgtgtcaggct

SEQ ID NO: 1604918 - DNA, 15 bp, Homo sapiens
ccccttgtgtcaggc

SEQ ID NO: 1604919 - DNA, 15 bp, Homo sapiens
cccccttgtgtcagg

SEQ ID NO: 1604920 - DNA, 15 bp, Homo sapiens
acccccttgtgtcag

SEQ ID NO: 1604921 - DNA, 15 bp, Homo sapiens
aacccccttgtgtca

SEQ ID NO: 1604922 - DNA, 15 bp, Homo sapiens
gaacccccttgtgtc

SEQ ID NO: 1604923 - DNA, 15 bp, Homo sapiens
agaacccccttgtgt

SEQ ID NO: 1604924 - DNA, 15 bp, Homo sapiens
cagaacccccttgtg

SEQ ID NO: 1604925 - DNA, 15 bp, Homo sapiens
gcagaacccccttgt

SEQ ID NO: 1604926 - DNA, 15 bp, Homo sapiens
ggcagaacccccttg

SEQ ID NO: 1604927 - DNA, 15 bp, Homo sapiens
aggcagaaccccctt

SEQ ID NO: 1604928 - DNA, 15 bp, Homo sapiens
aaggcagaaccccct

SEQ ID NO: 1604929 - DNA, 15 bp, Homo sapiens
caaggcagaaccccc

SEQ ID NO: 1604930 - DNA, 15 bp, Homo sapiens
acaaggcagaacccc

SEQ ID NO: 1604931 - DNA, 15 bp, Homo sapiens
cacaaggcagaaccc

SEQ ID NO: 1604932 - DNA, 15 bp, Homo sapiens
acacaaggcagaacc

SEQ ID NO: 1604933 - DNA, 15 bp, Homo sapiens
aacacaaggcagaac

SEQ ID NO: 1604934 - DNA, 15 bp, Homo sapiens
caacacaaggcagaa

SEQ ID NO: 1604935 - DNA, 15 bp, Homo sapiens
gcaacacaaggcaga

SEQ ID NO: 1604936 - DNA, 15 bp, Homo sapiens
tgcaacacaaggcag

SEQ ID NO: 1604937 - DNA, 15 bp, Homo sapiens
ctgcaacacaaggca

SEQ ID NO: 1604938 - DNA, 15 bp, Homo sapiens
gctgcaacacaaggc

SEQ ID NO: 1604939 - DNA, 15 bp, Homo sapiens
tgctgcaacacaagg

SEQ ID NO: 1604940 - DNA, 15 bp, Homo sapiens
ctgctgcaacacaag

SEQ ID NO: 1604941 - DNA, 15 bp, Homo sapiens
actgctgcaacacaa

SEQ ID NO: 1604942 - DNA, 15 bp, Homo sapiens
tactgctgcaacaca

SEQ ID NO: 1604943 - DNA, 15 bp, Homo sapiens
ctactgctgcaacac

SEQ ID NO: 1604944 - DNA, 15 bp, Homo sapiens
cctactgctgcaaca

SEQ ID NO: 1604945 - DNA, 15 bp, Homo sapiens
tcctactgctgcaac

SEQ ID NO: 1604946 - DNA, 15 bp, Homo sapiens
ctcctactgctgcaa

SEQ ID NO: 1604947 - DNA, 15 bp, Homo sapiens
gctcctactgctgca

SEQ ID NO: 1604948 - DNA, 15 bp, Homo sapiens
tgctcctactgctgc

SEQ ID NO: 1604949 - DNA, 15 bp, Homo sapiens
atgctcctactgctg

SEQ ID NO: 1604950 - DNA, 15 bp, Homo sapiens
tatgctcctactgct

SEQ ID NO: 1604951 - DNA, 15 bp, Homo sapiens
ttatgctcctactgc

SEQ ID NO: 1604952 - DNA, 15 bp, Homo sapiens
gttatgctcctactg

SEQ ID NO: 1604953 - DNA, 15 bp, Homo sapiens
ggttatgctcctact

SEQ ID NO: 1604954 - DNA, 15 bp, Homo sapiens
aggttatgctcctac

SEQ ID NO: 1604955 - DNA, 15 bp, Homo sapiens
aaggttatgctccta

SEQ ID NO: 1604956 - DNA, 15 bp, Homo sapiens
aaaggttatgctcct

SEQ ID NO: 1604957 - DNA, 15 bp, Homo sapiens
taaaggttatgctcc

SEQ ID NO: 1604958 - DNA, 15 bp, Homo sapiens
ctaaaggttatgctc

SEQ ID NO: 1604959 - DNA, 15 bp, Homo sapiens
tctaaaggttatgct

SEQ ID NO: 1604960 - DNA, 15 bp, Homo sapiens
ttctaaaggttatgc

SEQ ID NO: 1604961 - DNA, 15 bp, Homo sapiens
tttctaaaggttatg

SEQ ID NO: 1604962 - DNA, 15 bp, Homo sapiens
ttttctaaaggttat

SEQ ID NO: 1604963 - DNA, 15 bp, Homo sapiens
attttctaaaggtta

SEQ ID NO: 1604964 - DNA, 15 bp, Homo sapiens
tattttctaaaggtt

SEQ ID NO: 1604965 - DNA, 15 bp, Homo sapiens
atattttctaaaggt

SEQ ID NO: 1604966 - DNA, 15 bp, Homo sapiens
aatattttctaaagg

SEQ ID NO: 1604967 - DNA, 15 bp, Homo sapiens
caatattttctaaag

SEQ ID NO: 1604968 - DNA, 15 bp, Homo sapiens
ccaatattttctaaa

SEQ ID NO: 1604969 - DNA, 15 bp, Homo sapiens
tccaatattttctaa

SEQ ID NO: 1604970 - DNA, 15 bp, Homo sapiens
ctccaatattttcta

SEQ ID NO: 1604971 - DNA, 15 bp, Homo sapiens
actccaatattttct

SEQ ID NO: 1604972 - DNA, 15 bp, Homo sapiens
tactccaatattttc

SEQ ID NO: 1604973 - DNA, 15 bp, Homo sapiens
ctactccaatatttt

SEQ ID NO: 1604974 - DNA, 15 bp, Homo sapiens
cctactccaatattt

SEQ ID NO: 1604975 - DNA, 15 bp, Homo sapiens
tcctactccaatatt

SEQ ID NO: 1604976 - DNA, 15 bp, Homo sapiens
ttcctactccaatat

SEQ ID NO: 1604977 - DNA, 15 bp, Homo sapiens
tttcctactccaata

SEQ ID NO: 1604978 - DNA, 15 bp, Homo sapiens
ttttcctactccaat

SEQ ID NO: 1604979 - DNA, 15 bp, Homo sapiens
gttttcctactccaa

SEQ ID NO: 1604980 - DNA, 15 bp, Homo sapiens
agttttcctactcca

SEQ ID NO: 1604981 - DNA, 15 bp, Homo sapiens
aagttttcctactcc

SEQ ID NO: 1604982 - DNA, 15 bp, Homo sapiens
gaagttttcctactc

SEQ ID NO: 1604983 - DNA, 15 bp, Homo sapiens
agaagttttcctact

SEQ ID NO: 1604984 - DNA, 15 bp, Homo sapiens
cagaagttttcctac

SEQ ID NO: 1604985 - DNA, 15 bp, Homo sapiens
ccagaagttttccta

SEQ ID NO: 1604986 - DNA, 15 bp, Homo sapiens
cccagaagttttcct

SEQ ID NO: 1604987 - DNA, 15 bp, Homo sapiens
tcccagaagttttcc

SEQ ID NO: 1604988 - DNA, 15 bp, Homo sapiens
gtcccagaagttttc

SEQ ID NO: 1604989 - DNA, 15 bp, Homo sapiens
agtcccagaagtttt

SEQ ID NO: 1604990 - DNA, 15 bp, Homo sapiens
tagtcccagaagttt

SEQ ID NO: 1604991 - DNA, 15 bp, Homo sapiens
ctagtcccagaagtt

SEQ ID NO: 1604992 - DNA, 15 bp, Homo sapiens
agctagtcccagaag

SEQ ID NO: 1604993 - DNA, 15 bp, Homo sapiens
tagctagtcccagaa

SEQ ID NO: 1604994 - DNA, 15 bp, Homo sapiens
gtagctagtcccaga

SEQ ID NO: 1604995 - DNA, 15 bp, Homo sapiens
tgtagctagtcccag

SEQ ID NO: 1604996 - DNA, 15 bp, Homo sapiens
gtgtagctagtccca

SEQ ID NO: 1604997 - DNA, 15 bp, Homo sapiens
agtgtagctagtccc

SEQ ID NO: 1604998 - DNA, 15 bp, Homo sapiens
gagtgtagctagtcc

SEQ ID NO: 1604999 - DNA, 15 bp, Homo sapiens
cgagtgtagctagtc

SEQ ID NO: 1605000 - DNA, 15 bp, Homo sapiens
tcgagtgtagctagt

SEQ ID NO: 1605001 - DNA, 15 bp, Homo sapiens
atcgagtgtagctag

SEQ ID NO: 1605002 - DNA, 15 bp, Homo sapiens
catcgagtgtagcta

SEQ ID NO: 1605003 - DNA, 15 bp, Homo sapiens
ccatcgagtgtagct

SEQ ID NO: 1605004 - DNA, 15 bp, Homo sapiens
cccatcgagtgtagc

SEQ ID NO: 1605005 - DNA, 15 bp, Homo sapiens
acccatcgagtgtag

SEQ ID NO: 1605006 - DNA, 15 bp, Homo sapiens
cacccatcgagtgta

SEQ ID NO: 1605007 - DNA, 15 bp, Homo sapiens
gcacccatcgagtgt

SEQ ID NO: 1605008 - DNA, 15 bp, Homo sapiens
ggcacccatcgagtg

SEQ ID NO: 1605009 - DNA, 15 bp, Homo sapiens
aggcacccatcgagt

SEQ ID NO: 1605010 - DNA, 15 bp, Homo sapiens
aaggcacccatcgag

SEQ ID NO: 1605011 - DNA, 15 bp, Homo sapiens
gaaggcacccatcga

SEQ ID NO: 1605012 - DNA, 15 bp, Homo sapiens
ggaaggcacccatcg

SEQ ID NO: 1605013 - DNA, 15 bp, Homo sapiens
tggaaggcacccatc

SEQ ID NO: 1605014 - DNA, 15 bp, Homo sapiens
ctggaaggcacccat

SEQ ID NO: 1605015 - DNA, 15 bp, Homo sapiens
gctggaaggcaccca

SEQ ID NO: 1605016 - DNA, 15 bp, Homo sapiens
agctggaaggcaccc

SEQ ID NO: 1605017 - DNA, 15 bp, Homo sapiens
gagctggaaggcacc

SEQ ID NO: 1605018 - DNA, 15 bp, Homo sapiens
agagctggaaggcac

SEQ ID NO: 1605019 - DNA, 15 bp, Homo sapiens
gagagctggaaggca

SEQ ID NO: 1605020 - DNA, 15 bp, Homo sapiens
ggagagctggaaggc

SEQ ID NO: 1605021 - DNA, 15 bp, Homo sapiens
tggagagctggaagg

SEQ ID NO: 1605022 - DNA, 15 bp, Homo sapiens
ttggagagctggaag

SEQ ID NO: 1605023 - DNA, 15 bp, Homo sapiens
attggagagctggaa

SEQ ID NO: 1605024 - DNA, 15 bp, Homo sapiens
gattggagagctgga

SEQ ID NO: 1605025 - DNA, 15 bp, Homo sapiens
agattggagagctgg

SEQ ID NO: 1605026 - DNA, 15 bp, Homo sapiens
tagattggagagctg

SEQ ID NO: 1605027 - DNA, 15 bp, Homo sapiens
gtagattggagagct

SEQ ID NO: 1605028 - DNA, 15 bp, Homo sapiens
cgtagattggagagc

SEQ ID NO: 1605029 - DNA, 15 bp, Homo sapiens
ccgtagattggagag

SEQ ID NO: 1605030 - DNA, 15 bp, Homo sapiens
accgtagattggaga

SEQ ID NO: 1605031 - DNA, 15 bp, Homo sapiens
taccgtagattggag

SEQ ID NO: 1605032 - DNA, 15 bp, Homo sapiens
gtaccgtagattgga

SEQ ID NO: 1605033 - DNA, 15 bp, Homo sapiens
ggtaccgtagattgg

SEQ ID NO: 1605034 - DNA, 15 bp, Homo sapiens
tggtaccgtagattg

SEQ ID NO: 1605035 - DNA, 15 bp, Homo sapiens
ttggtaccgtagatt

SEQ ID NO: 1605036 - DNA, 15 bp, Homo sapiens
gttggtaccgtagat

SEQ ID NO: 1605037 - DNA, 15 bp, Homo sapiens
agttggtaccgtaga

SEQ ID NO: 1605038 - DNA, 15 bp, Homo sapiens
gagttggtaccgtag

SEQ ID NO: 1605039 - DNA, 15 bp, Homo sapiens
tgagttggtaccgta

SEQ ID NO: 1605040 - DNA, 15 bp, Homo sapiens
gtgagttggtaccgt

SEQ ID NO: 1605041 - DNA, 15 bp, Homo sapiens
agtgagttggtaccg

SEQ ID NO: 1605042 - DNA, 15 bp, Homo sapiens
gagtgagttggtacc

SEQ ID NO: 1605043 - DNA, 15 bp, Homo sapiens
tgagtgagttggtac

SEQ ID NO: 1605044 - DNA, 15 bp, Homo sapiens
ctgagtgagttggta

SEQ ID NO: 1605045 - DNA, 15 bp, Homo sapiens
cctgagtgagttggt

SEQ ID NO: 1605046 - DNA, 15 bp, Homo sapiens
gcctgagtgagttgg

SEQ ID NO: 1605047 - DNA, 15 bp, Homo sapiens
tgcctgagtgagttg

SEQ ID NO: 1605048 - DNA, 15 bp, Homo sapiens
ctgcctgagtgagtt

SEQ ID NO: 1605049 - DNA, 15 bp, Homo sapiens
cctgcctgagtgagt

SEQ ID NO: 1605050 - DNA, 15 bp, Homo sapiens
gcctgcctgagtgag

SEQ ID NO: 1605051 - DNA, 15 bp, Homo sapiens
agcctgcctgagtga

SEQ ID NO: 1605052 - DNA, 15 bp, Homo sapiens
aagcctgcctgagtg

SEQ ID NO: 1605053 - DNA, 15 bp, Homo sapiens
aaagcctgcctgagt

SEQ ID NO: 1605054 - DNA, 15 bp, Homo sapiens
gaaagcctgcctgag

SEQ ID NO: 1605055 - DNA, 15 bp, Homo sapiens
ggaaagcctgcctga

SEQ ID NO: 1605056 - DNA, 15 bp, Homo sapiens
gggaaagcctgcctg

SEQ ID NO: 1605057 - DNA, 15 bp, Homo sapiens
ggggaaagcctgcct

SEQ ID NO: 1605058 - DNA, 15 bp, Homo sapiens
gggggaaagcctgcc

SEQ ID NO: 1605059 - DNA, 15 bp, Homo sapiens
tgggggaaagcctgc

SEQ ID NO: 1605060 - DNA, 15 bp, Homo sapiens
ttgggggaaagcctg

SEQ ID NO: 1605061 - DNA, 15 bp, Homo sapiens
tttgggggaaagcct

SEQ ID NO: 1605062 - DNA, 15 bp, Homo sapiens
atttgggggaaagcc

SEQ ID NO: 1605063 - DNA, 15 bp, Homo sapiens
aatttgggggaaagc

SEQ ID NO: 1605064 - DNA, 15 bp, Homo sapiens
taatttgggggaaag

SEQ ID NO: 1605065 - DNA, 15 bp, Homo sapiens
ataatttgggggaaa

SEQ ID NO: 1605066 - DNA, 15 bp, Homo sapiens
aataatttgggggaa

SEQ ID NO: 1605067 - DNA, 15 bp, Homo sapiens
gaataatttggggga

SEQ ID NO: 1605068 - DNA, 15 bp, Homo sapiens
ggaataatttggggg

SEQ ID NO: 1605069 - DNA, 15 bp, Homo sapiens
gggaataatttgggg

SEQ ID NO: 1605070 - DNA, 15 bp, Homo sapiens
ggggaataatttggg

SEQ ID NO: 1605071 - DNA, 15 bp, Homo sapiens
gggggaataatttgg

SEQ ID NO: 1605072 - DNA, 15 bp, Homo sapiens
agggggaataatttg

SEQ ID NO: 1605073 - DNA, 15 bp, Homo sapiens
aagggggaataattt

SEQ ID NO: 1605074 - DNA, 15 bp, Homo sapiens
gaagggggaataatt

SEQ ID NO: 1605075 - DNA, 15 bp, Homo sapiens
agaagggggaataat

SEQ ID NO: 1605076 - DNA, 15 bp, Homo sapiens
aagaagggggaataa

SEQ ID NO: 1605077 - DNA, 15 bp, Homo sapiens
aaagaagggggaata

SEQ ID NO: 1605078 - DNA, 15 bp, Homo sapiens
caaagaagggggaat

SEQ ID NO: 1605079 - DNA, 15 bp, Homo sapiens
ccaaagaagggggaa

SEQ ID NO: 1605080 - DNA, 15 bp, Homo sapiens
tccaaagaaggggga

SEQ ID NO: 1605081 - DNA, 15 bp, Homo sapiens
gtccaaagaaggggg

SEQ ID NO: 1605082 - DNA, 15 bp, Homo sapiens
agtccaaagaagggg

SEQ ID NO: 1605083 - DNA, 15 bp, Homo sapiens
gagtccaaagaaggg

SEQ ID NO: 1605084 - DNA, 15 bp, Homo sapiens
agagtccaaagaagg

SEQ ID NO: 1605085 - DNA, 15 bp, Homo sapiens
cagagtccaaagaag

SEQ ID NO: 1605086 - DNA, 15 bp, Homo sapiens
ccagagtccaaagaa

SEQ ID NO: 1605087 - DNA, 15 bp, Homo sapiens
accagagtccaaaga

SEQ ID NO: 1605088 - DNA, 15 bp, Homo sapiens
gaccagagtccaaag

SEQ ID NO: 1605089 - DNA, 15 bp, Homo sapiens
tgaccagagtccaaa

SEQ ID NO: 1605090 - DNA, 15 bp, Homo sapiens
ttgaccagagtccaa

SEQ ID NO: 1605091 - DNA, 15 bp, Homo sapiens
tttgaccagagtcca

SEQ ID NO: 1605092 - DNA, 15 bp, Homo sapiens
ttttgaccagagtcc

SEQ ID NO: 1605093 - DNA, 15 bp, Homo sapiens
gttttgaccagagtc

SEQ ID NO: 1605094 - DNA, 15 bp, Homo sapiens
ggttttgaccagagt

SEQ ID NO: 1605095 - DNA, 15 bp, Homo sapiens
tggttttgaccagag

SEQ ID NO: 1605096 - DNA, 15 bp, Homo sapiens
ctggttttgaccaga

SEQ ID NO: 1605097 - DNA, 15 bp, Homo sapiens
tctggttttgaccag

SEQ ID NO: 1605098 - DNA, 15 bp, Homo sapiens
atctggttttgacca

SEQ ID NO: 1605099 - DNA, 15 bp, Homo sapiens
gatctggttttgacc

SEQ ID NO: 1605100 - DNA, 15 bp, Homo sapiens
ggatctggttttgac

SEQ ID NO: 1605101 - DNA, 15 bp, Homo sapiens
aggatctggttttga

SEQ ID NO: 1605102 - DNA, 15 bp, Homo sapiens
gaggatctggttttg

SEQ ID NO: 1605103 - DNA, 15 bp, Homo sapiens
agaggatctggtttt

SEQ ID NO: 1605104 - DNA, 15 bp, Homo sapiens
gagaggatctggttt

SEQ ID NO: 1605105 - DNA, 15 bp, Homo sapiens
ggagaggatctggtt

SEQ ID NO: 1605106 - DNA, 15 bp, Homo sapiens
tggagaggatctggt

SEQ ID NO: 1605107 - DNA, 15 bp, Homo sapiens
gtggagaggatctgg

SEQ ID NO: 1605108 - DNA, 15 bp, Homo sapiens
ggtggagaggatctg

SEQ ID NO: 1605109 - DNA, 15 bp, Homo sapiens
gggtggagaggatct

SEQ ID NO: 1605110 - DNA, 15 bp, Homo sapiens
agggtggagaggatc

SEQ ID NO: 1605111 - DNA, 15 bp, Homo sapiens
gagggtggagaggat

SEQ ID NO: 1605112 - DNA, 15 bp, Homo sapiens
tgggagggtggagag

SEQ ID NO: 1605113 - DNA, 15 bp, Homo sapiens
ttgggagggtggaga

SEQ ID NO: 1605114 - DNA, 15 bp, Homo sapiens
tttgggagggtggag

SEQ ID NO: 1605115 - DNA, 15 bp, Homo sapiens
gtttgggagggtgga

SEQ ID NO: 1605116 - DNA, 15 bp, Homo sapiens
ggtttgggagggtgg

SEQ ID NO: 1605117 - DNA, 15 bp, Homo sapiens
gggtttgggagggtg

SEQ ID NO: 1605118 - DNA, 15 bp, Homo sapiens
tgggtttgggagggt

SEQ ID NO: 1605119 - DNA, 15 bp, Homo sapiens
atgggtttgggaggg

SEQ ID NO: 1605120 - DNA, 15 bp, Homo sapiens
gatgggtttgggagg

SEQ ID NO: 1605121 - DNA, 15 bp, Homo sapiens
ggatgggtttgggag

SEQ ID NO: 1605122 - DNA, 15 bp, Homo sapiens
gggatgggtttggga

SEQ ID NO: 1605123 - DNA, 15 bp, Homo sapiens
tgggatgggtttggg

SEQ ID NO: 1605124 - DNA, 15 bp, Homo sapiens
ctgggatgggtttgg

SEQ ID NO: 1605125 - DNA, 15 bp, Homo sapiens
gctgggatgggtttg

SEQ ID NO: 1605126 - DNA, 15 bp, Homo sapiens
ggctgggatgggttt

SEQ ID NO: 1605127 - DNA, 15 bp, Homo sapiens
tggctgggatgggtt

SEQ ID NO: 1605128 - DNA, 15 bp, Homo sapiens
ttggctgggatgggt

SEQ ID NO: 1605129 - DNA, 15 bp, Homo sapiens
attggctgggatggg

SEQ ID NO: 1605130 - DNA, 15 bp, Homo sapiens
tattggctgggatgg

SEQ ID NO: 1605131 - DNA, 15 bp, Homo sapiens
atattggctgggatg

SEQ ID NO: 1605132 - DNA, 15 bp, Homo sapiens
catattggctgggat

SEQ ID NO: 1605133 - DNA, 15 bp, Homo sapiens
gcatattggctggga

SEQ ID NO: 1605134 - DNA, 15 bp, Homo sapiens
ggcatattggctggg

SEQ ID NO: 1605135 - DNA, 15 bp, Homo sapiens
gggcatattggctgg

SEQ ID NO: 1605136 - DNA, 15 bp, Homo sapiens
tgggcatattggctg

SEQ ID NO: 1605137 - DNA, 15 bp, Homo sapiens
atgggcatattggct

SEQ ID NO: 1605138 - DNA, 15 bp, Homo sapiens
catgggcatattggc

SEQ ID NO: 1605139 - DNA, 15 bp, Homo sapiens
acatgggcatattgg

SEQ ID NO: 1605140 - DNA, 15 bp, Homo sapiens
aacatgggcatattg

SEQ ID NO: 1605141 - DNA, 15 bp, Homo sapiens
taacatgggcatatt

SEQ ID NO: 1605142 - DNA, 15 bp, Homo sapiens
gtaacatgggcatat

SEQ ID NO: 1605143 - DNA, 15 bp, Homo sapiens
agtaacatgggcata

SEQ ID NO: 1605144 - DNA, 15 bp, Homo sapiens
gagtaacatgggcat

SEQ ID NO: 1605145 - DNA, 15 bp, Homo sapiens
agagtaacatgggca

SEQ ID NO: 1605146 - DNA, 15 bp, Homo sapiens
cagagtaacatgggc

SEQ ID NO: 1605147 - DNA, 15 bp, Homo sapiens
gcagagtaacatggg

SEQ ID NO: 1605148 - DNA, 15 bp, Homo sapiens
agcagagtaacatgg

SEQ ID NO: 1605149 - DNA, 15 bp, Homo sapiens
tagcagagtaacatg

SEQ ID NO: 1605150 - DNA, 15 bp, Homo sapiens
atagcagagtaacat

SEQ ID NO: 1605151 - DNA, 15 bp, Homo sapiens
aatagcagagtaaca

SEQ ID NO: 1605152 - DNA, 15 bp, Homo sapiens
gaatagcagagtaac

SEQ ID NO: 1605153 - DNA, 15 bp, Homo sapiens
agaatagcagagtaa

SEQ ID NO: 1605154 - DNA, 15 bp, Homo sapiens
aagaatagcagagta

SEQ ID NO: 1605155 - DNA, 15 bp, Homo sapiens
aaagaatagcagagt

SEQ ID NO: 1605156 - DNA, 15 bp, Homo sapiens
aaaagaatagcagag

SEQ ID NO: 1605157 - DNA, 15 bp, Homo sapiens
aaaaagaatagcaga

SEQ ID NO: 1605158 - DNA, 15 bp, Homo sapiens
gaaaaagaatagcag

SEQ ID NO: 1605159 - DNA, 15 bp, Homo sapiens
tgaaaaagaatagca

SEQ ID NO: 1605160 - DNA, 15 bp, Homo sapiens
gtgaaaaagaatagc

SEQ ID NO: 1605161 - DNA, 15 bp, Homo sapiens
agtgaaaaagaatag

SEQ ID NO: 1605162 - DNA, 15 bp, Homo sapiens
aagtgaaaaagaata

SEQ ID NO: 1605163 - DNA, 15 bp, Homo sapiens
taagtgaaaaagaat

SEQ ID NO: 1605164 - DNA, 15 bp, Homo sapiens
ctaagtgaaaaagaa

SEQ ID NO: 1605165 - DNA, 15 bp, Homo sapiens
gctaagtgaaaaaga

SEQ ID NO: 1605166 - DNA, 15 bp, Homo sapiens
ggctaagtgaaaaag

SEQ ID NO: 1605167 - DNA, 15 bp, Homo sapiens
tggctaagtgaaaaa

SEQ ID NO: 1605168 - DNA, 15 bp, Homo sapiens
ctggctaagtgaaaa

SEQ ID NO: 1605169 - DNA, 15 bp, Homo sapiens
tctggctaagtgaaa

SEQ ID NO: 1605170 - DNA, 15 bp, Homo sapiens
ttctggctaagtgaa

SEQ ID NO: 1605171 - DNA, 15 bp, Homo sapiens
tttctggctaagtga

SEQ ID NO: 1605172 - DNA, 15 bp, Homo sapiens
ttttctggctaagtg

SEQ ID NO: 1605173 - DNA, 15 bp, Homo sapiens
tttttctggctaagt

SEQ ID NO: 1605174 - DNA, 15 bp, Homo sapiens
atttttctggctaag

SEQ ID NO: 1605175 - DNA, 15 bp, Homo sapiens
gatttttctggctaa

SEQ ID NO: 1605176 - DNA, 15 bp, Homo sapiens
tgatttttctggcta

SEQ ID NO: 1605177 - DNA, 15 bp, Homo sapiens
atgatttttctggct

SEQ ID NO: 1605178 - DNA, 15 bp, Homo sapiens
aatgatttttctggc

SEQ ID NO: 1605179 - DNA, 15 bp, Homo sapiens
gaatgatttttctgg

SEQ ID NO: 1605180 - DNA, 15 bp, Homo sapiens
agaatgatttttctg

SEQ ID NO: 1605181 - DNA, 15 bp, Homo sapiens
aagaatgatttttct

SEQ ID NO: 1605182 - DNA, 15 bp, Homo sapiens
aaagaatgatttttc

SEQ ID NO: 1605183 - DNA, 15 bp, Homo sapiens
gaaagaatgattttt

SEQ ID NO: 1605184 - DNA, 15 bp, Homo sapiens
ggaaagaatgatttt

SEQ ID NO: 1605185 - DNA, 15 bp, Homo sapiens
tggaaagaatgattt

SEQ ID NO: 1605186 - DNA, 15 bp, Homo sapiens
ctggaaagaatgatt

SEQ ID NO: 1605187 - DNA, 15 bp, Homo sapiens
gctggaaagaatgat

SEQ ID NO: 1605188 - DNA, 15 bp, Homo sapiens
ggctggaaagaatga

SEQ ID NO: 1605189 - DNA, 15 bp, Homo sapiens
gggctggaaagaatg

SEQ ID NO: 1605190 - DNA, 15 bp, Homo sapiens
ggggctggaaagaat

SEQ ID NO: 1605191 - DNA, 15 bp, Homo sapiens
tggggctggaaagaa

SEQ ID NO: 1605192 - DNA, 15 bp, Homo sapiens
gtggggctggaaaga

SEQ ID NO: 1605193 - DNA, 15 bp, Homo sapiens
tgtggggctggaaag

SEQ ID NO: 1605194 - DNA, 15 bp, Homo sapiens
ttgtggggctggaaa

SEQ ID NO: 1605195 - DNA, 15 bp, Homo sapiens
gttgtggggctggaa

SEQ ID NO: 1605196 - DNA, 15 bp, Homo sapiens
agttgtggggctgga

SEQ ID NO: 1605197 - DNA, 15 bp, Homo sapiens
tagttgtggggctgg

SEQ ID NO: 1605198 - DNA, 15 bp, Homo sapiens
ttagttgtggggctg

SEQ ID NO: 1605199 - DNA, 15 bp, Homo sapiens
cttagttgtggggct

SEQ ID NO: 1605200 - DNA, 15 bp, Homo sapiens
acttagttgtggggc

SEQ ID NO: 1605201 - DNA, 15 bp, Homo sapiens
gacttagttgtgggg

SEQ ID NO: 1605202 - DNA, 15 bp, Homo sapiens
tgacttagttgtggg

SEQ ID NO: 1605203 - DNA, 15 bp, Homo sapiens
atgacttagttgtgg

SEQ ID NO: 1605204 - DNA, 15 bp, Homo sapiens
tatgacttagttgtg

SEQ ID NO: 1605205 - DNA, 15 bp, Homo sapiens
atatgacttagttgt

SEQ ID NO: 1605206 - DNA, 15 bp, Homo sapiens
gatatgacttagttg

SEQ ID NO: 1605207 - DNA, 15 bp, Homo sapiens
ggatatgacttagtt

SEQ ID NO: 1605208 - DNA, 15 bp, Homo sapiens
aggatatgacttagt

SEQ ID NO: 1605209 - DNA, 15 bp, Homo sapiens
aaggatatgacttag

SEQ ID NO: 1605210 - DNA, 15 bp, Homo sapiens
gaaggatatgactta

SEQ ID NO: 1605211 - DNA, 15 bp, Homo sapiens
agaaggatatgactt

SEQ ID NO: 1605212 - DNA, 15 bp, Homo sapiens
gagaaggatatgact

SEQ ID NO: 1605213 - DNA, 15 bp, Homo sapiens
agagaaggatatgac

SEQ ID NO: 1605214 - DNA, 15 bp, Homo sapiens
aagagaaggatatga

SEQ ID NO: 1605215 - DNA, 15 bp, Homo sapiens
aaagagaaggatatg

SEQ ID NO: 1605216 - DNA, 15 bp, Homo sapiens
taaagagaaggatat

SEQ ID NO: 1605217 - DNA, 15 bp, Homo sapiens
ttaaagagaaggata

SEQ ID NO: 1605218 - DNA, 15 bp, Homo sapiens
tttaaagagaaggat

SEQ ID NO: 1605219 - DNA, 15 bp, Homo sapiens
ttttaaagagaagga

SEQ ID NO: 1605220 - DNA, 15 bp, Homo sapiens
tttttaaagagaagg

SEQ ID NO: 1605221 - DNA, 15 bp, Homo sapiens
gatttttaaagagaa

SEQ ID NO: 1605222 - DNA, 15 bp, Homo sapiens
ggatttttaaagaga

SEQ ID NO: 1605223 - DNA, 15 bp, Homo sapiens
tggatttttaaagag

SEQ ID NO: 1605224 - DNA, 15 bp, Homo sapiens
ttggatttttaaaga

SEQ ID NO: 1605225 - DNA, 15 bp, Homo sapiens
attggatttttaaag

SEQ ID NO: 1605226 - DNA, 15 bp, Homo sapiens
aattggatttttaaa

SEQ ID NO: 1605227 - DNA, 15 bp, Homo sapiens
caattggatttttaa

SEQ ID NO: 1605228 - DNA, 15 bp, Homo sapiens
gcaattggattttta

SEQ ID NO: 1605229 - DNA, 15 bp, Homo sapiens
ggcaattggattttt

SEQ ID NO: 1605230 - DNA, 15 bp, Homo sapiens
aggcaattggatttt

SEQ ID NO: 1605231 - DNA, 15 bp, Homo sapiens
gaggcaattggattt

SEQ ID NO: 1605232 - DNA, 15 bp, Homo sapiens
agaggcaattggatt

SEQ ID NO: 1605233 - DNA, 15 bp, Homo sapiens
aagaggcaattggat

SEQ ID NO: 1605234 - DNA, 15 bp, Homo sapiens
gaagaggcaattgga

SEQ ID NO: 1605235 - DNA, 15 bp, Homo sapiens
agaagaggcaattgg

SEQ ID NO: 1605236 - DNA, 15 bp, Homo sapiens
cagaagaggcaattg

SEQ ID NO: 1605237 - DNA, 15 bp, Homo sapiens
tcagaagaggcaatt

SEQ ID NO: 1605238 - DNA, 15 bp, Homo sapiens
gtcagaagaggcaat

SEQ ID NO: 1605239 - DNA, 15 bp, Homo sapiens
tgtcagaagaggcaa

SEQ ID NO: 1605240 - DNA, 15 bp, Homo sapiens
ttgtcagaagaggca

SEQ ID NO: 1605241 - DNA, 15 bp, Homo sapiens
gttgtcagaagaggc

SEQ ID NO: 1605242 - DNA, 15 bp, Homo sapiens
agttgtcagaagagg

SEQ ID NO: 1605243 - DNA, 15 bp, Homo sapiens
tagttgtcagaagag

SEQ ID NO: 1605244 - DNA, 15 bp, Homo sapiens
ttagttgtcagaaga

SEQ ID NO: 1605245 - DNA, 15 bp, Homo sapiens
tttagttgtcagaag

SEQ ID NO: 1605246 - DNA, 15 bp, Homo sapiens
atttagttgtcagaa

SEQ ID NO: 1605247 - DNA, 15 bp, Homo sapiens
catttagttgtcaga

SEQ ID NO: 1605248 - DNA, 15 bp, Homo sapiens
gcatttagttgtcag

SEQ ID NO: 1605249 - DNA, 15 bp, Homo sapiens
ggcatttagttgtca

SEQ ID NO: 1605250 - DNA, 15 bp, Homo sapiens
aggcatttagttgtc

SEQ ID NO: 1605251 - DNA, 15 bp, Homo sapiens
caggcatttagttgt

SEQ ID NO: 1605252 - DNA, 15 bp, Homo sapiens
tcaggcatttagttg

SEQ ID NO: 1605253 - DNA, 15 bp, Homo sapiens
gtcaggcatttagtt

SEQ ID NO: 1605254 - DNA, 15 bp, Homo sapiens
tgtcaggcatttagt

SEQ ID NO: 1605255 - DNA, 15 bp, Homo sapiens
gtgtcaggcatttag

SEQ ID NO: 1605256 - DNA, 15 bp, Homo sapiens
tgtgtcaggcattta

SEQ ID NO: 1605257 - DNA, 15 bp, Homo sapiens
atgtgtcaggcattt

SEQ ID NO: 1605258 - DNA, 15 bp, Homo sapiens
tatgtgtcaggcatt

SEQ ID NO: 1605259 - DNA, 15 bp, Homo sapiens
ctatgtgtcaggcat

SEQ ID NO: 1605260 - DNA, 15 bp, Homo sapiens
actatgtgtcaggca

SEQ ID NO: 1605261 - DNA, 15 bp, Homo sapiens
cactatgtgtcaggc

SEQ ID NO: 1605262 - DNA, 15 bp, Homo sapiens
ccactatgtgtcagg

SEQ ID NO: 1605263 - DNA, 15 bp, Homo sapiens
cccactatgtgtcag

SEQ ID NO: 1605264 - DNA, 15 bp, Homo sapiens
tcccactatgtgtca

SEQ ID NO: 1605265 - DNA, 15 bp, Homo sapiens
ctcccactatgtgtc

SEQ ID NO: 1605266 - DNA, 15 bp, Homo sapiens
gctcccactatgtgt

SEQ ID NO: 1605267 - DNA, 15 bp, Homo sapiens
agctcccactatgtg

SEQ ID NO: 1605268 - DNA, 15 bp, Homo sapiens
gagctcccactatgt

SEQ ID NO: 1605269 - DNA, 15 bp, Homo sapiens
tgagctcccactatg

SEQ ID NO: 1605270 - DNA, 15 bp, Homo sapiens
ttgagctcccactat

SEQ ID NO: 1605271 - DNA, 15 bp, Homo sapiens
attgagctcccacta

SEQ ID NO: 1605272 - DNA, 15 bp, Homo sapiens
tattgagctcccact

SEQ ID NO: 1605273 - DNA, 15 bp, Homo sapiens
atattgagctcccac

SEQ ID NO: 1605274 - DNA, 15 bp, Homo sapiens
tatattgagctccca

SEQ ID NO: 1605275 - DNA, 15 bp, Homo sapiens
atatattgagctccc

SEQ ID NO: 1605276 - DNA, 15 bp, Homo sapiens
catatattgagctcc

SEQ ID NO: 1605277 - DNA, 15 bp, Homo sapiens
acatatattgagctc

SEQ ID NO: 1605278 - DNA, 15 bp, Homo sapiens
cacatatattgagct

SEQ ID NO: 1605279 - DNA, 15 bp, Homo sapiens
acacatatattgagc

SEQ ID NO: 1605280 - DNA, 15 bp, Homo sapiens
cacacatatattgag

SEQ ID NO: 1605281 - DNA, 15 bp, Homo sapiens
gcacacatatattga

SEQ ID NO: 1605282 - DNA, 15 bp, Homo sapiens
tgcacacatatattg

SEQ ID NO: 1605283 - DNA, 15 bp, Homo sapiens
ctgcacacatatatt

SEQ ID NO: 1605284 - DNA, 15 bp, Homo sapiens
tctgcacacatatat

SEQ ID NO: 1605285 - DNA, 15 bp, Homo sapiens
ttctgcacacatata

SEQ ID NO: 1605286 - DNA, 15 bp, Homo sapiens
attctgcacacatat

SEQ ID NO: 1605287 - DNA, 15 bp, Homo sapiens
tattctgcacacata

SEQ ID NO: 1605288 - DNA, 15 bp, Homo sapiens
ttattctgcacacat

SEQ ID NO: 1605289 - DNA, 15 bp, Homo sapiens
tttattctgcacaca

SEQ ID NO: 1605290 - DNA, 15 bp, Homo sapiens
atttattctgcacac

SEQ ID NO: 1605291 - DNA, 15 bp, Homo sapiens
catttattctgcaca

SEQ ID NO: 1605292 - DNA, 15 bp, Homo sapiens
ccatttattctgcac

SEQ ID NO: 1605293 - DNA, 15 bp, Homo sapiens
tccatttattctgca

SEQ ID NO: 1605294 - DNA, 15 bp, Homo sapiens
atccatttattctgc

SEQ ID NO: 1605295 - DNA, 15 bp, Homo sapiens
catccatttattctg

SEQ ID NO: 1605296 - DNA, 15 bp, Homo sapiens
tcatccatttattct

SEQ ID NO: 1605297 - DNA, 15 bp, Homo sapiens
ttcatccatttattc

SEQ ID NO: 1605298 - DNA, 15 bp, Homo sapiens
attcatccatttatt

SEQ ID NO: 1605299 - DNA, 15 bp, Homo sapiens
gattcatccatttat

SEQ ID NO: 1605300 - DNA, 15 bp, Homo sapiens
agattcatccattta

SEQ ID NO: 1605301 - DNA, 15 bp, Homo sapiens
gagattcatccattt

SEQ ID NO: 1605302 - DNA, 15 bp, Homo sapiens
agagattcatccatt

SEQ ID NO: 1605303 - DNA, 15 bp, Homo sapiens
tagagattcatccat

SEQ ID NO: 1605304 - DNA, 15 bp, Homo sapiens
atagagattcatcca

SEQ ID NO: 1605305 - DNA, 15 bp, Homo sapiens
aatagagattcatcc

SEQ ID NO: 1605306 - DNA, 15 bp, Homo sapiens
taatagagattcatc

SEQ ID NO: 1605307 - DNA, 15 bp, Homo sapiens
gtaatagagattcat

SEQ ID NO: 1605308 - DNA, 15 bp, Homo sapiens
tgtaatagagattca

SEQ ID NO: 1605309 - DNA, 15 bp, Homo sapiens
gtgtaatagagattc

SEQ ID NO: 1605310 - DNA, 15 bp, Homo sapiens
agtgtaatagagatt

SEQ ID NO: 1605311 - DNA, 15 bp, Homo sapiens
aagtgtaatagagat

SEQ ID NO: 1605312 - DNA, 15 bp, Homo sapiens
aaagtgtaatagaga

SEQ ID NO: 1605313 - DNA, 15 bp, Homo sapiens
aaaagtgtaatagag

SEQ ID NO: 1605314 - DNA, 15 bp, Homo sapiens
gaaaagtgtaataga

SEQ ID NO: 1605315 - DNA, 15 bp, Homo sapiens
agaaaagtgtaatag

SEQ ID NO: 1605316 - DNA, 15 bp, Homo sapiens
cagaaaagtgtaata

SEQ ID NO: 1605317 - DNA, 15 bp, Homo sapiens
acagaaaagtgtaat

SEQ ID NO: 1605318 - DNA, 15 bp, Homo sapiens
aacagaaaagtgtaa

SEQ ID NO: 1605319 - DNA, 15 bp, Homo sapiens
taacagaaaagtgta

SEQ ID NO: 1605320 - DNA, 15 bp, Homo sapiens
gtaacagaaaagtgt

SEQ ID NO: 1605321 - DNA, 15 bp, Homo sapiens
tgtaacagaaaagtg

SEQ ID NO: 1605322 - DNA, 15 bp, Homo sapiens
atgtaacagaaaagt

SEQ ID NO: 1605323 - DNA, 15 bp, Homo sapiens
aatgtaacagaaaag

SEQ ID NO: 1605324 - DNA, 15 bp, Homo sapiens
caatgtaacagaaaa

SEQ ID NO: 1605325 - DNA, 15 bp, Homo sapiens
tcaatgtaacagaaa

SEQ ID NO: 1605326 - DNA, 15 bp, Homo sapiens
atcaatgtaacagaa

SEQ ID NO: 1605327 - DNA, 15 bp, Homo sapiens
tatcaatgtaacaga

SEQ ID NO: 1605328 - DNA, 15 bp, Homo sapiens
ttatcaatgtaacag

SEQ ID NO: 1605329 - DNA, 15 bp, Homo sapiens
cttatcaatgtaaca

SEQ ID NO: 1605330 - DNA, 15 bp, Homo sapiens
gcttatcaatgtaac

SEQ ID NO: 1605331 - DNA, 15 bp, Homo sapiens
tgcttatcaatgtaa

SEQ ID NO: 1605332 - DNA, 15 bp, Homo sapiens
ttgcttatcaatgta

SEQ ID NO: 1605333 - DNA, 15 bp, Homo sapiens
attgcttatcaatgt

SEQ ID NO: 1605334 - DNA, 15 bp, Homo sapiens
aattgcttatcaatg

SEQ ID NO: 1605335 - DNA, 15 bp, Homo sapiens
aaattgcttatcaat

SEQ ID NO: 1605336 - DNA, 15 bp, Homo sapiens
gaaattgcttatcaa

SEQ ID NO: 1605337 - DNA, 15 bp, Homo sapiens
agaaattgcttatca

SEQ ID NO: 1605338 - DNA, 15 bp, Homo sapiens
aagaaattgcttatc

SEQ ID NO: 1605339 - DNA, 15 bp, Homo sapiens
taagaaattgcttat

SEQ ID NO: 1605340 - DNA, 15 bp, Homo sapiens
ttaagaaattgctta

SEQ ID NO: 1605341 - DNA, 15 bp, Homo sapiens
attaagaaattgctt

SEQ ID NO: 1605342 - DNA, 15 bp, Homo sapiens
aattaagaaattgct

SEQ ID NO: 1605343 - DNA, 15 bp, Homo sapiens
caattaagaaattgc

SEQ ID NO: 1605344 - DNA, 15 bp, Homo sapiens
tcaattaagaaattg

SEQ ID NO: 1605345 - DNA, 15 bp, Homo sapiens
ctcaattaagaaatt

SEQ ID NO: 1605346 - DNA, 15 bp, Homo sapiens
actcaattaagaaat

SEQ ID NO: 1605347 - DNA, 15 bp, Homo sapiens
cactcaattaagaaa

SEQ ID NO: 1605348 - DNA, 15 bp, Homo sapiens
tcactcaattaagaa

SEQ ID NO: 1605349 - DNA, 15 bp, Homo sapiens
atcactcaattaaga

SEQ ID NO: 1605350 - DNA, 15 bp, Homo sapiens
aatcactcaattaag

SEQ ID NO: 1605351 - DNA, 15 bp, Homo sapiens
aaatcactcaattaa

SEQ ID NO: 1605352 - DNA, 15 bp, Homo sapiens
gaaatcactcaatta

SEQ ID NO: 1605353 - DNA, 15 bp, Homo sapiens
ggaaatcactcaatt

SEQ ID NO: 1605354 - DNA, 15 bp, Homo sapiens
aggaaatcactcaat

SEQ ID NO: 1605355 - DNA, 15 bp, Homo sapiens
taggaaatcactcaa

SEQ ID NO: 1605356 - DNA, 15 bp, Homo sapiens
ttaggaaatcactca

SEQ ID NO: 1605357 - DNA, 15 bp, Homo sapiens
attaggaaatcactc

SEQ ID NO: 1605358 - DNA, 15 bp, Homo sapiens
aattaggaaatcact

SEQ ID NO: 1605359 - DNA, 15 bp, Homo sapiens
caattaggaaatcac

SEQ ID NO: 1605360 - DNA, 15 bp, Homo sapiens
gcaattaggaaatca

SEQ ID NO: 1605361 - DNA, 15 bp, Homo sapiens
ggcaattaggaaatc

SEQ ID NO: 1605362 - DNA, 15 bp, Homo sapiens
tggcaattaggaaat

SEQ ID NO: 1605363 - DNA, 15 bp, Homo sapiens
atggcaattaggaaa

SEQ ID NO: 1605364 - DNA, 15 bp, Homo sapiens
catggcaattaggaa

SEQ ID NO: 1605365 - DNA, 15 bp, Homo sapiens
acatggcaattagga

SEQ ID NO: 1605366 - DNA, 15 bp, Homo sapiens
cacatggcaattagg

SEQ ID NO: 1605367 - DNA, 15 bp, Homo sapiens
acacatggcaattag

SEQ ID NO: 1605368 - DNA, 15 bp, Homo sapiens
aacacatggcaatta

SEQ ID NO: 1605369 - DNA, 15 bp, Homo sapiens
aaacacatggcaatt

SEQ ID NO: 1605370 - DNA, 15 bp, Homo sapiens
caaacacatggcaat

SEQ ID NO: 1605371 - DNA, 15 bp, Homo sapiens
acaaacacatggcaa

SEQ ID NO: 1605372 - DNA, 15 bp, Homo sapiens
cacaaacacatggca

SEQ ID NO: 1605373 - DNA, 15 bp, Homo sapiens
acacaaacacatggc

SEQ ID NO: 1605374 - DNA, 15 bp, Homo sapiens
aacacaaacacatgg

SEQ ID NO: 1605375 - DNA, 15 bp, Homo sapiens
gaacacaaacacatg

SEQ ID NO: 1605376 - DNA, 15 bp, Homo sapiens
agaacacaaacacat

SEQ ID NO: 1605377 - DNA, 15 bp, Homo sapiens
aagaacacaaacaca

SEQ ID NO: 1605378 - DNA, 15 bp, Homo sapiens
aaagaacacaaacac

SEQ ID NO: 1605379 - DNA, 15 bp, Homo sapiens
aaaagaacacaaaca

SEQ ID NO: 1605380 - DNA, 15 bp, Homo sapiens
aaaaagaacacaaac

SEQ ID NO: 1605381 - DNA, 15 bp, Homo sapiens
taaaaagaacacaaa

SEQ ID NO: 1605382 - DNA, 15 bp, Homo sapiens
ctaaaaagaacacaa

SEQ ID NO: 1605383 - DNA, 15 bp, Homo sapiens
cctaaaaagaacaca

SEQ ID NO: 1605384 - DNA, 15 bp, Homo sapiens
gcctaaaaagaacac

SEQ ID NO: 1605385 - DNA, 15 bp, Homo sapiens
tgcctaaaaagaaca

SEQ ID NO: 1605386 - DNA, 15 bp, Homo sapiens
ctgcctaaaaagaac

SEQ ID NO: 1605387 - DNA, 15 bp, Homo sapiens
tctgcctaaaaagaa

SEQ ID NO: 1605388 - DNA, 15 bp, Homo sapiens
gtctgcctaaaaaga

SEQ ID NO: 1605389 - DNA, 15 bp, Homo sapiens
ggtctgcctaaaaag

SEQ ID NO: 1605390 - DNA, 15 bp, Homo sapiens
cggtctgcctaaaaa

SEQ ID NO: 1605391 - DNA, 15 bp, Homo sapiens
acggtctgcctaaaa

SEQ ID NO: 1605392 - DNA, 15 bp, Homo sapiens
tacggtctgcctaaa

SEQ ID NO: 1605393 - DNA, 15 bp, Homo sapiens
ttacggtctgcctaa

SEQ ID NO: 1605394 - DNA, 15 bp, Homo sapiens
cttacggtctgccta

SEQ ID NO: 1605395 - DNA, 15 bp, Homo sapiens
gcttacggtctgcct

SEQ ID NO: 1605396 - DNA, 15 bp, Homo sapiens
agcttacggtctgcc

SEQ ID NO: 1605397 - DNA, 15 bp, Homo sapiens
gagcttacggtctgc

SEQ ID NO: 1605398 - DNA, 15 bp, Homo sapiens
ggagcttacggtctg

SEQ ID NO: 1605399 - DNA, 15 bp, Homo sapiens
aggagcttacggtct

SEQ ID NO: 1605400 - DNA, 15 bp, Homo sapiens
aaggagcttacggtc

SEQ ID NO: 1605401 - DNA, 15 bp, Homo sapiens
taaggagcttacggt

SEQ ID NO: 1605402 - DNA, 15 bp, Homo sapiens
ataaggagcttacgg

SEQ ID NO: 1605403 - DNA, 15 bp, Homo sapiens
aataaggagcttacg

SEQ ID NO: 1605404 - DNA, 15 bp, Homo sapiens
aaataaggagcttac

SEQ ID NO: 1605405 - DNA, 15 bp, Homo sapiens
aaaataaggagctta

SEQ ID NO: 1605406 - DNA, 15 bp, Homo sapiens
gaaaataaggagctt

SEQ ID NO: 1605407 - DNA, 15 bp, Homo sapiens
agaaaataaggagct

SEQ ID NO: 1605408 - DNA, 15 bp, Homo sapiens
cagaaaataaggagc

SEQ ID NO: 1605409 - DNA, 15 bp, Homo sapiens
acagaaaataaggag

SEQ ID NO: 1605410 - DNA, 15 bp, Homo sapiens
aacagaaaataagga

SEQ ID NO: 1605411 - DNA, 15 bp, Homo sapiens
aaacagaaaataagg

SEQ ID NO: 1605412 - DNA, 15 bp, Homo sapiens
aaaacagaaaataag

SEQ ID NO: 1605413 - DNA, 15 bp, Homo sapiens
aaaaacagaaaataa

SEQ ID NO: 1605414 - DNA, 15 bp, Homo sapiens
aaaaaacagaaaata

SEQ ID NO: 1605415 - DNA, 15 bp, Homo sapiens
caaaaaacagaaaat

SEQ ID NO: 1605416 - DNA, 15 bp, Homo sapiens
acaaaaaacagaaaa

SEQ ID NO: 1605417 - DNA, 15 bp, Homo sapiens
aacaaaaaacagaaa

SEQ ID NO: 1605418 - DNA, 15 bp, Homo sapiens
caacaaaaaacagaa

SEQ ID NO: 1605419 - DNA, 15 bp, Homo sapiens
acaacaaaaaacaga

SEQ ID NO: 1605420 - DNA, 15 bp, Homo sapiens
aacaacaaaaaacag

SEQ ID NO: 1605421 - DNA, 15 bp, Homo sapiens
aaacaacaaaaaaca

SEQ ID NO: 1605422 - DNA, 15 bp, Homo sapiens
aaaacaacaaaaaac

SEQ ID NO: 1605423 - DNA, 15 bp, Homo sapiens
caaaacaacaaaaaa

SEQ ID NO: 1605424 - DNA, 15 bp, Homo sapiens
acaaaacaacaaaaa

SEQ ID NO: 1605425 - DNA, 15 bp, Homo sapiens
aacaaaacaacaaaa

SEQ ID NO: 1605426 - DNA, 15 bp, Homo sapiens
aaacaaaacaacaaa

SEQ ID NO: 1605427 - DNA, 15 bp, Homo sapiens
gaaaaaacaaaacaa

SEQ ID NO: 1605428 - DNA, 15 bp, Homo sapiens
ggaaaaaacaaaaca

SEQ ID NO: 1605429 - DNA, 15 bp, Homo sapiens
gggaaaaaacaaaac

SEQ ID NO: 1605430 - DNA, 15 bp, Homo sapiens
ggggaaaaaacaaaa

SEQ ID NO: 1605431 - DNA, 15 bp, Homo sapiens
gggggaaaaaacaaa

SEQ ID NO: 1605432 - DNA, 15 bp, Homo sapiens
ggggggaaaaaacaa

SEQ ID NO: 1605433 - DNA, 15 bp, Homo sapiens
tggggggaaaaaaca

SEQ ID NO: 1605434 - DNA, 15 bp, Homo sapiens
ttggggggaaaaaac

SEQ ID NO: 1605435 - DNA, 15 bp, Homo sapiens
cttggggggaaaaaa

SEQ ID NO: 1605436 - DNA, 15 bp, Homo sapiens
tcttggggggaaaaa

SEQ ID NO: 1605437 - DNA, 15 bp, Homo sapiens
gtcttggggggaaaa

SEQ ID NO: 1605438 - DNA, 15 bp, Homo sapiens
tgtcttggggggaaa

SEQ ID NO: 1605439 - DNA, 15 bp, Homo sapiens
ctgtcttggggggaa

SEQ ID NO: 1605440 - DNA, 15 bp, Homo sapiens
cctgtcttgggggga

SEQ ID NO: 1605441 - DNA, 15 bp, Homo sapiens
ccctgtcttgggggg

SEQ ID NO: 1605442 - DNA, 15 bp, Homo sapiens
accctgtcttggggg

SEQ ID NO: 1605443 - DNA, 15 bp, Homo sapiens
gaccctgtcttgggg

SEQ ID NO: 1605444 - DNA, 15 bp, Homo sapiens
agaccctgtcttggg

SEQ ID NO: 1605445 - DNA, 15 bp, Homo sapiens
gagaccctgtcttgg

SEQ ID NO: 1605446 - DNA, 15 bp, Homo sapiens
agagaccctgtcttg

SEQ ID NO: 1605447 - DNA, 15 bp, Homo sapiens
gagagaccctgtctt

SEQ ID NO: 1605448 - DNA, 15 bp, Homo sapiens
agagagaccctgtct

SEQ ID NO: 1605449 - DNA, 15 bp, Homo sapiens
gagagagaccctgtc

SEQ ID NO: 1605450 - DNA, 15 bp, Homo sapiens
agagagagaccctgt

SEQ ID NO: 1605451 - DNA, 15 bp, Homo sapiens
cagagagagaccctg

SEQ ID NO: 1605452 - DNA, 15 bp, Homo sapiens
acagagagagaccct

SEQ ID NO: 1605453 - DNA, 15 bp, Homo sapiens
aacagagagagaccc

SEQ ID NO: 1605454 - DNA, 15 bp, Homo sapiens
caacagagagagacc

SEQ ID NO: 1605455 - DNA, 15 bp, Homo sapiens
tggcctgggcaacag

SEQ ID NO: 1605456 - DNA, 15 bp, Homo sapiens
ctggcctgggcaaca

SEQ ID NO: 1605457 - DNA, 15 bp, Homo sapiens
tctggcctgggcaac

SEQ ID NO: 1605458 - DNA, 15 bp, Homo sapiens
ctctggcctgggcaa

SEQ ID NO: 1605459 - DNA, 15 bp, Homo sapiens
actctggcctgggca

SEQ ID NO: 1605460 - DNA, 15 bp, Homo sapiens
tactctggcctgggc

SEQ ID NO: 1605461 - DNA, 15 bp, Homo sapiens
atactctggcctggg

SEQ ID NO: 1605462 - DNA, 15 bp, Homo sapiens
tatactctggcctgg

SEQ ID NO: 1605463 - DNA, 15 bp, Homo sapiens
ctatactctggcctg

SEQ ID NO: 1605464 - DNA, 15 bp, Homo sapiens
gctatactctggcct

SEQ ID NO: 1605465 - DNA, 15 bp, Homo sapiens
cgctatactctggcc

SEQ ID NO: 1605466 - DNA, 15 bp, Homo sapiens
ccgctatactctggc

SEQ ID NO: 1605467 - DNA, 15 bp, Homo sapiens
accgctatactctgg

SEQ ID NO: 1605468 - DNA, 15 bp, Homo sapiens
caccgctatactctg

SEQ ID NO: 1605469 - DNA, 15 bp, Homo sapiens
acaccgctatactct

SEQ ID NO: 1605470 - DNA, 15 bp, Homo sapiens
tacaccgctatactc

SEQ ID NO: 1605471 - DNA, 15 bp, Homo sapiens
ttacaccgctatact

SEQ ID NO: 1605472 - DNA, 15 bp, Homo sapiens
attacaccgctatac

SEQ ID NO: 1605473 - DNA, 15 bp, Homo sapiens
gattacaccgctata

SEQ ID NO: 1605474 - DNA, 15 bp, Homo sapiens
tgattacaccgctat

SEQ ID NO: 1605475 - DNA, 15 bp, Homo sapiens
atgattacaccgcta

SEQ ID NO: 1605476 - DNA, 15 bp, Homo sapiens
tatgattacaccgct

SEQ ID NO: 1605477 - DNA, 15 bp, Homo sapiens
ctatgattacaccgc

SEQ ID NO: 1605478 - DNA, 15 bp, Homo sapiens
gctatgattacaccg

SEQ ID NO: 1605479 - DNA, 15 bp, Homo sapiens
agctatgattacacc

SEQ ID NO: 1605480 - DNA, 15 bp, Homo sapiens
gagctatgattacac

SEQ ID NO: 1605481 - DNA, 15 bp, Homo sapiens
tgagctatgattaca

SEQ ID NO: 1605482 - DNA, 15 bp, Homo sapiens
gtgagctatgattac

SEQ ID NO: 1605483 - DNA, 15 bp, Homo sapiens
agtgagctatgatta

SEQ ID NO: 1605484 - DNA, 15 bp, Homo sapiens
ggcagtgagctatga

SEQ ID NO: 1605485 - DNA, 15 bp, Homo sapiens
tggcagtgagctatg

SEQ ID NO: 1605486 - DNA, 15 bp, Homo sapiens
gtggcagtgagctat

SEQ ID NO: 1605487 - DNA, 15 bp, Homo sapiens
ggtggcagtgagcta

SEQ ID NO: 1605488 - DNA, 15 bp, Homo sapiens
aggtggcagtgagct

SEQ ID NO: 1605489 - DNA, 15 bp, Homo sapiens
gaggtggcagtgagc

SEQ ID NO: 1605490 - DNA, 15 bp, Homo sapiens
tgaggtggcagtgag

SEQ ID NO: 1605491 - DNA, 15 bp, Homo sapiens
ttgaggtggcagtga

SEQ ID NO: 1605492 - DNA, 15 bp, Homo sapiens
tttgaggtggcagtg

SEQ ID NO: 1605493 - DNA, 15 bp, Homo sapiens
gtttgaggtggcagt

SEQ ID NO: 1605494 - DNA, 15 bp, Homo sapiens
agtttgaggtggcag

SEQ ID NO: 1605495 - DNA, 15 bp, Homo sapiens
gagtttgaggtggca

SEQ ID NO: 1605496 - DNA, 15 bp, Homo sapiens
ggagtttgaggtggc

SEQ ID NO: 1605497 - DNA, 15 bp, Homo sapiens
aggagtttgaggtgg

SEQ ID NO: 1605498 - DNA, 15 bp, Homo sapiens
taggagtttgaggtg

SEQ ID NO: 1605499 - DNA, 15 bp, Homo sapiens
ctaggagtttgaggt

SEQ ID NO: 1605500 - DNA, 15 bp, Homo sapiens
cctaggagtttgagg

SEQ ID NO: 1605501 - DNA, 15 bp, Homo sapiens
gcctaggagtttgag

SEQ ID NO: 1605502 - DNA, 15 bp, Homo sapiens
agcctaggagtttga

SEQ ID NO: 1605503 - DNA, 15 bp, Homo sapiens
gagcctaggagtttg

SEQ ID NO: 1605504 - DNA, 15 bp, Homo sapiens
tgagcctaggagttt

SEQ ID NO: 1605505 - DNA, 15 bp, Homo sapiens
ttgagcctaggagtt

SEQ ID NO: 1605506 - DNA, 15 bp, Homo sapiens
cttgagcctaggagt

SEQ ID NO: 1605507 - DNA, 15 bp, Homo sapiens
ttgcttgagcctagg

SEQ ID NO: 1605508 - DNA, 15 bp, Homo sapiens
attgcttgagcctag

SEQ ID NO: 1605509 - DNA, 15 bp, Homo sapiens
gattgcttgagccta

SEQ ID NO: 1605510 - DNA, 15 bp, Homo sapiens
agggaggattgcttg

SEQ ID NO: 1605511 - DNA, 15 bp, Homo sapiens
cagggaggattgctt

SEQ ID NO: 1605512 - DNA, 15 bp, Homo sapiens
gcagggaggattgct

SEQ ID NO: 1605513 - DNA, 15 bp, Homo sapiens
agcagggaggattgc

SEQ ID NO: 1605514 - DNA, 15 bp, Homo sapiens
gagcagggaggattg

SEQ ID NO: 1605515 - DNA, 15 bp, Homo sapiens
cgagcagggaggatt

SEQ ID NO: 1605516 - DNA, 15 bp, Homo sapiens
ccgagcagggaggat

SEQ ID NO: 1605517 - DNA, 15 bp, Homo sapiens
accgagcagggagga

SEQ ID NO: 1605518 - DNA, 15 bp, Homo sapiens
gaccgagcagggagg

SEQ ID NO: 1605519 - DNA, 15 bp, Homo sapiens
agaccgagcagggag

SEQ ID NO: 1605520 - DNA, 15 bp, Homo sapiens
gagaccgagcaggga

SEQ ID NO: 1605521 - DNA, 15 bp, Homo sapiens
ggagaccgagcaggg

SEQ ID NO: 1605522 - DNA, 15 bp, Homo sapiens
gggagaccgagcagg

SEQ ID NO: 1605523 - DNA, 15 bp, Homo sapiens
tgggagaccgagcag

SEQ ID NO: 1605524 - DNA, 15 bp, Homo sapiens
ttgggagaccgagca

SEQ ID NO: 1605525 - DNA, 15 bp, Homo sapiens
tttgggagaccgagc

SEQ ID NO: 1605526 - DNA, 15 bp, Homo sapiens
tccagcactttggga

SEQ ID NO: 1605527 - DNA, 15 bp, Homo sapiens
ttccagcactttggg

SEQ ID NO: 1605528 - DNA, 15 bp, Homo sapiens
gtaattccagcactt

SEQ ID NO: 1605529 - DNA, 15 bp, Homo sapiens
cgtaattccagcact

SEQ ID NO: 1605530 - DNA, 15 bp, Homo sapiens
ccgtaattccagcac

SEQ ID NO: 1605531 - DNA, 15 bp, Homo sapiens
cccgtaattccagca

SEQ ID NO: 1605532 - DNA, 15 bp, Homo sapiens
gcccgtaattccagc

SEQ ID NO: 1605533 - DNA, 15 bp, Homo sapiens
tgcccgtaattccag

SEQ ID NO: 1605534 - DNA, 15 bp, Homo sapiens
atgcccgtaattcca

SEQ ID NO: 1605535 - DNA, 15 bp, Homo sapiens
catgcccgtaattcc

SEQ ID NO: 1605536 - DNA, 15 bp, Homo sapiens
tcatgcccgtaattc

SEQ ID NO: 1605537 - DNA, 15 bp, Homo sapiens
ctcatgcccgtaatt

SEQ ID NO: 1605538 - DNA, 15 bp, Homo sapiens
gctcatgcccgtaat

SEQ ID NO: 1605539 - DNA, 15 bp, Homo sapiens
ggctcatgcccgtaa

SEQ ID NO: 1605540 - DNA, 15 bp, Homo sapiens
tggctcatgcccgta

SEQ ID NO: 1605541 - DNA, 15 bp, Homo sapiens
atggctcatgcccgt

SEQ ID NO: 1605542 - DNA, 15 bp, Homo sapiens
gatggctcatgcccg

SEQ ID NO: 1605543 - DNA, 15 bp, Homo sapiens
cgatggctcatgccc

SEQ ID NO: 1605544 - DNA, 15 bp, Homo sapiens
acgatggctcatgcc

SEQ ID NO: 1605545 - DNA, 15 bp, Homo sapiens
cacgatggctcatgc

SEQ ID NO: 1605546 - DNA, 15 bp, Homo sapiens
gcacgatggctcatg

SEQ ID NO: 1605547 - DNA, 15 bp, Homo sapiens
ggcacgatggctcat

SEQ ID NO: 1605548 - DNA, 15 bp, Homo sapiens
gggcacgatggctca

SEQ ID NO: 1605549 - DNA, 15 bp, Homo sapiens
cgggcacgatggctc

SEQ ID NO: 1605550 - DNA, 15 bp, Homo sapiens
acgggcacgatggct

SEQ ID NO: 1605551 - DNA, 15 bp, Homo sapiens
gacgggcacgatggc

SEQ ID NO: 1605552 - DNA, 15 bp, Homo sapiens
ggacgggcacgatgg

SEQ ID NO: 1605553 - DNA, 15 bp, Homo sapiens
tggacgggcacgatg

SEQ ID NO: 1605554 - DNA, 15 bp, Homo sapiens
ctggacgggcacgat

SEQ ID NO: 1605555 - DNA, 15 bp, Homo sapiens
gctggacgggcacga

SEQ ID NO: 1605556 - DNA, 15 bp, Homo sapiens
agctggacgggcacg

SEQ ID NO: 1605557 - DNA, 15 bp, Homo sapiens
gagctggacgggcac

SEQ ID NO: 1605558 - DNA, 15 bp, Homo sapiens
ggagctggacgggca

SEQ ID NO: 1605559 - DNA, 15 bp, Homo sapiens
aggagctggacgggc

SEQ ID NO: 1605560 - DNA, 15 bp, Homo sapiens
aaggagctggacggg

SEQ ID NO: 1605561 - DNA, 15 bp, Homo sapiens
caaggagctggacgg

SEQ ID NO: 1605562 - DNA, 15 bp, Homo sapiens
tcaaggagctggacg

SEQ ID NO: 1605563 - DNA, 15 bp, Homo sapiens
atcaaggagctggac

SEQ ID NO: 1605564 - DNA, 15 bp, Homo sapiens
aatcaaggagctgga

SEQ ID NO: 1605565 - DNA, 15 bp, Homo sapiens
aaatcaaggagctgg

SEQ ID NO: 1605566 - DNA, 15 bp, Homo sapiens
aaaatcaaggagctg

SEQ ID NO: 1605567 - DNA, 15 bp, Homo sapiens
taaaatcaaggagct

SEQ ID NO: 1605568 - DNA, 15 bp, Homo sapiens
ttaaaatcaaggagc

SEQ ID NO: 1605569 - DNA, 15 bp, Homo sapiens
gttaaaatcaaggag

SEQ ID NO: 1605570 - DNA, 15 bp, Homo sapiens
tgttaaaatcaagga

SEQ ID NO: 1605571 - DNA, 15 bp, Homo sapiens
ctgttaaaatcaagg

SEQ ID NO: 1605572 - DNA, 15 bp, Homo sapiens
gctgttaaaatcaag

SEQ ID NO: 1605573 - DNA, 15 bp, Homo sapiens
ggctgttaaaatcaa

SEQ ID NO: 1605574 - DNA, 15 bp, Homo sapiens
tggctgttaaaatca

SEQ ID NO: 1605575 - DNA, 15 bp, Homo sapiens
atggctgttaaaatc

SEQ ID NO: 1605576 - DNA, 15 bp, Homo sapiens
gatggctgttaaaat

SEQ ID NO: 1605577 - DNA, 15 bp, Homo sapiens
agatggctgttaaaa

SEQ ID NO: 1605578 - DNA, 15 bp, Homo sapiens
gagatggctgttaaa

SEQ ID NO: 1605579 - DNA, 15 bp, Homo sapiens
tgagatggctgttaa

SEQ ID NO: 1605580 - DNA, 15 bp, Homo sapiens
ttgagatggctgtta

SEQ ID NO: 1605581 - DNA, 15 bp, Homo sapiens
tttgagatggctgtt

SEQ ID NO: 1605582 - DNA, 15 bp, Homo sapiens
ttttgagatggctgt

SEQ ID NO: 1605583 - DNA, 15 bp, Homo sapiens
tttttgagatggctg

SEQ ID NO: 1605584 - DNA, 15 bp, Homo sapiens
gtttttgagatggct

SEQ ID NO: 1605585 - DNA, 15 bp, Homo sapiens
tgtttttgagatggc

SEQ ID NO: 1605586 - DNA, 15 bp, Homo sapiens
gtgtttttgagatgg

SEQ ID NO: 1605587 - DNA, 15 bp, Homo sapiens
agtgtttttgagatg

SEQ ID NO: 1605588 - DNA, 15 bp, Homo sapiens
aagtgtttttgagat

SEQ ID NO: 1605589 - DNA, 15 bp, Homo sapiens
taagtgtttttgaga

SEQ ID NO: 1605590 - DNA, 15 bp, Homo sapiens
ctaagtgtttttgag

SEQ ID NO: 1605591 - DNA, 15 bp, Homo sapiens
tctaagtgtttttga

SEQ ID NO: 1605592 - DNA, 15 bp, Homo sapiens
gtctaagtgtttttg

SEQ ID NO: 1605593 - DNA, 15 bp, Homo sapiens
tgtctaagtgttttt

SEQ ID NO: 1605594 - DNA, 15 bp, Homo sapiens
atgtctaagtgtttt

SEQ ID NO: 1605595 - DNA, 15 bp, Homo sapiens
catgtctaagtgttt

SEQ ID NO: 1605596 - DNA, 15 bp, Homo sapiens
acatgtctaagtgtt

SEQ ID NO: 1605597 - DNA, 15 bp, Homo sapiens
aacatgtctaagtgt

SEQ ID NO: 1605598 - DNA, 15 bp, Homo sapiens
gaacatgtctaagtg

SEQ ID NO: 1605599 - DNA, 15 bp, Homo sapiens
ggaacatgtctaagt

SEQ ID NO: 1605600 - DNA, 15 bp, Homo sapiens
aggaacatgtctaag

SEQ ID NO: 1605601 - DNA, 15 bp, Homo sapiens
taggaacatgtctaa

SEQ ID NO: 1605602 - DNA, 15 bp, Homo sapiens
ctaggaacatgtcta

SEQ ID NO: 1605603 - DNA, 15 bp, Homo sapiens
tctaggaacatgtct

SEQ ID NO: 1605604 - DNA, 15 bp, Homo sapiens
ttctaggaacatgtc

SEQ ID NO: 1605605 - DNA, 15 bp, Homo sapiens
tttctaggaacatgt

SEQ ID NO: 1605606 - DNA, 15 bp, Homo sapiens
atttctaggaacatg

SEQ ID NO: 1605607 - DNA, 15 bp, Homo sapiens
catttctaggaacat

SEQ ID NO: 1605608 - DNA, 15 bp, Homo sapiens
acatttctaggaaca

SEQ ID NO: 1605609 - DNA, 15 bp, Homo sapiens
cacatttctaggaac

SEQ ID NO: 1605610 - DNA, 15 bp, Homo sapiens
gcacatttctaggaa

SEQ ID NO: 1605611 - DNA, 15 bp, Homo sapiens
ggcacatttctagga

SEQ ID NO: 1605612 - DNA, 15 bp, Homo sapiens
gggcacatttctagg

SEQ ID NO: 1605613 - DNA, 15 bp, Homo sapiens
tgggcacatttctag

SEQ ID NO: 1605614 - DNA, 15 bp, Homo sapiens
ctgggcacatttcta

SEQ ID NO: 1605615 - DNA, 15 bp, Homo sapiens
actgggcacatttct

SEQ ID NO: 1605616 - DNA, 15 bp, Homo sapiens
cactgggcacatttc

SEQ ID NO: 1605617 - DNA, 15 bp, Homo sapiens
gcactgggcacattt

SEQ ID NO: 1605618 - DNA, 15 bp, Homo sapiens
agcactgggcacatt

SEQ ID NO: 1605619 - DNA, 15 bp, Homo sapiens
gagcactgggcacat

SEQ ID NO: 1605620 - DNA, 15 bp, Homo sapiens
agagcactgggcaca

SEQ ID NO: 1605621 - DNA, 15 bp, Homo sapiens
cagagcactgggcac

SEQ ID NO: 1605622 - DNA, 15 bp, Homo sapiens
tcagagcactgggca

SEQ ID NO: 1605623 - DNA, 15 bp, Homo sapiens
ctcagagcactgggc

SEQ ID NO: 1605624 - DNA, 15 bp, Homo sapiens
cctcagagcactggg

SEQ ID NO: 1605625 - DNA, 15 bp, Homo sapiens
gcctcagagcactgg

SEQ ID NO: 1605626 - DNA, 15 bp, Homo sapiens
tgcctcagagcactg

SEQ ID NO: 1605627 - DNA, 15 bp, Homo sapiens
atgcctcagagcact

SEQ ID NO: 1605628 - DNA, 15 bp, Homo sapiens
aatgcctcagagcac

SEQ ID NO: 1605629 - DNA, 15 bp, Homo sapiens
aaatgcctcagagca

SEQ ID NO: 1605630 - DNA, 15 bp, Homo sapiens
caaatgcctcagagc

SEQ ID NO: 1605631 - DNA, 15 bp, Homo sapiens
tcaaatgcctcagag

SEQ ID NO: 1605632 - DNA, 15 bp, Homo sapiens
atcaaatgcctcaga

SEQ ID NO: 1605633 - DNA, 15 bp, Homo sapiens
tatcaaatgcctcag

SEQ ID NO: 1605634 - DNA, 15 bp, Homo sapiens
ttatcaaatgcctca

SEQ ID NO: 1605635 - DNA, 15 bp, Homo sapiens
attatcaaatgcctc

SEQ ID NO: 1605636 - DNA, 15 bp, Homo sapiens
cattatcaaatgcct

SEQ ID NO: 1605637 - DNA, 15 bp, Homo sapiens
acattatcaaatgcc

SEQ ID NO: 1605638 - DNA, 15 bp, Homo sapiens
aacattatcaaatgc

SEQ ID NO: 1605639 - DNA, 15 bp, Homo sapiens
taacattatcaaatg

SEQ ID NO: 1605640 - DNA, 15 bp, Homo sapiens
ttaacattatcaaat

SEQ ID NO: 1605641 - DNA, 15 bp, Homo sapiens
attaacattatcaaa

SEQ ID NO: 1605642 - DNA, 15 bp, Homo sapiens
gattaacattatcaa

SEQ ID NO: 1605643 - DNA, 15 bp, Homo sapiens
tgattaacattatca

SEQ ID NO: 1605644 - DNA, 15 bp, Homo sapiens
gtgattaacattatc

SEQ ID NO: 1605645 - DNA, 15 bp, Homo sapiens
ggtgattaacattat

SEQ ID NO: 1605646 - DNA, 15 bp, Homo sapiens
gggtgattaacatta

SEQ ID NO: 1605647 - DNA, 15 bp, Homo sapiens
ggggtgattaacatt

SEQ ID NO: 1605648 - DNA, 15 bp, Homo sapiens
aggggtgattaacat

SEQ ID NO: 1605649 - DNA, 15 bp, Homo sapiens
aaggggtgattaaca

SEQ ID NO: 1605650 - DNA, 15 bp, Homo sapiens
aaaggggtgattaac

SEQ ID NO: 1605651 - DNA, 15 bp, Homo sapiens
gaaaggggtgattaa

SEQ ID NO: 1605652 - DNA, 15 bp, Homo sapiens
agaaaggggtgatta

SEQ ID NO: 1605653 - DNA, 15 bp, Homo sapiens
tagaaaggggtgatt

SEQ ID NO: 1605654 - DNA, 15 bp, Homo sapiens
ttagaaaggggtgat

SEQ ID NO: 1605655 - DNA, 15 bp, Homo sapiens
tttagaaaggggtga

SEQ ID NO: 1605656 - DNA, 15 bp, Homo sapiens
ttttagaaaggggtg

SEQ ID NO: 1605657 - DNA, 15 bp, Homo sapiens
attttagaaaggggt

SEQ ID NO: 1605658 - DNA, 15 bp, Homo sapiens
aattttagaaagggg

SEQ ID NO: 1605659 - DNA, 15 bp, Homo sapiens
gaattttagaaaggg

SEQ ID NO: 1605660 - DNA, 15 bp, Homo sapiens
agaattttagaaagg

SEQ ID NO: 1605661 - DNA, 15 bp, Homo sapiens
gagaattttagaaag

SEQ ID NO: 1605662 - DNA, 15 bp, Homo sapiens
agagaattttagaaa

SEQ ID NO: 1605663 - DNA, 15 bp, Homo sapiens
gagagaattttagaa

SEQ ID NO: 1605664 - DNA, 15 bp, Homo sapiens
tgagagaattttaga

SEQ ID NO: 1605665 - DNA, 15 bp, Homo sapiens
atgagagaattttag

SEQ ID NO: 1605666 - DNA, 15 bp, Homo sapiens
aatgagagaatttta

SEQ ID NO: 1605667 - DNA, 15 bp, Homo sapiens
caatgagagaatttt

SEQ ID NO: 1605668 - DNA, 15 bp, Homo sapiens
ccaatgagagaattt

SEQ ID NO: 1605669 - DNA, 15 bp, Homo sapiens
gccaatgagagaatt

SEQ ID NO: 1605670 - DNA, 15 bp, Homo sapiens
agccaatgagagaat

SEQ ID NO: 1605671 - DNA, 15 bp, Homo sapiens
cagccaatgagagaa

SEQ ID NO: 1605672 - DNA, 15 bp, Homo sapiens
gcagccaatgagaga

SEQ ID NO: 1605673 - DNA, 15 bp, Homo sapiens
tgcagccaatgagag

SEQ ID NO: 1605674 - DNA, 15 bp, Homo sapiens
ctgcagccaatgaga

SEQ ID NO: 1605675 - DNA, 15 bp, Homo sapiens
tctgcagccaatgag

SEQ ID NO: 1605676 - DNA, 15 bp, Homo sapiens
ctctgcagccaatga

SEQ ID NO: 1605677 - DNA, 15 bp, Homo sapiens
actctgcagccaatg

SEQ ID NO: 1605678 - DNA, 15 bp, Homo sapiens
gactctgcagccaat

SEQ ID NO: 1605679 - DNA, 15 bp, Homo sapiens
tgactctgcagccaa

SEQ ID NO: 1605680 - DNA, 15 bp, Homo sapiens
gtgactctgcagcca

SEQ ID NO: 1605681 - DNA, 15 bp, Homo sapiens
ggtgactctgcagcc

SEQ ID NO: 1605682 - DNA, 15 bp, Homo sapiens
tggtgactctgcagc

SEQ ID NO: 1605683 - DNA, 15 bp, Homo sapiens
gtggtgactctgcag

SEQ ID NO: 1605684 - DNA, 15 bp, Homo sapiens
agtggtgactctgca

SEQ ID NO: 1605685 - DNA, 15 bp, Homo sapiens
gagtggtgactctgc

SEQ ID NO: 1605686 - DNA, 15 bp, Homo sapiens
agagtggtgactctg

SEQ ID NO: 1605687 - DNA, 15 bp, Homo sapiens
tagagtggtgactct

SEQ ID NO: 1605688 - DNA, 15 bp, Homo sapiens
atagagtggtgactc

SEQ ID NO: 1605689 - DNA, 15 bp, Homo sapiens
gatagagtggtgact

SEQ ID NO: 1605690 - DNA, 15 bp, Homo sapiens
tgatagagtggtgac

SEQ ID NO: 1605691 - DNA, 15 bp, Homo sapiens
atgatagagtggtga

SEQ ID NO: 1605692 - DNA, 15 bp, Homo sapiens
catgatagagtggtg

SEQ ID NO: 1605693 - DNA, 15 bp, Homo sapiens
ccatgatagagtggt

SEQ ID NO: 1605694 - DNA, 15 bp, Homo sapiens
accatgatagagtgg

SEQ ID NO: 1605695 - DNA, 15 bp, Homo sapiens
aaccatgatagagtg

SEQ ID NO: 1605696 - DNA, 15 bp, Homo sapiens
gaaccatgatagagt

SEQ ID NO: 1605697 - DNA, 15 bp, Homo sapiens
agaaccatgatagag

SEQ ID NO: 1605698 - DNA, 15 bp, Homo sapiens
gagaaccatgataga

SEQ ID NO: 1605699 - DNA, 15 bp, Homo sapiens
agagaaccatgatag

SEQ ID NO: 1605700 - DNA, 15 bp, Homo sapiens
aagagaaccatgata

SEQ ID NO: 1605701 - DNA, 15 bp, Homo sapiens
gaagagaaccatgat

SEQ ID NO: 1605702 - DNA, 15 bp, Homo sapiens
ggaagagaaccatga

SEQ ID NO: 1605703 - DNA, 15 bp, Homo sapiens
aggaagagaaccatg

SEQ ID NO: 1605704 - DNA, 15 bp, Homo sapiens
gaggaagagaaccat

SEQ ID NO: 1605705 - DNA, 15 bp, Homo sapiens
ggaggaagagaacca

SEQ ID NO: 1605706 - DNA, 15 bp, Homo sapiens
tggaggaagagaacc

SEQ ID NO: 1605707 - DNA, 15 bp, Homo sapiens
atggaggaagagaac

SEQ ID NO: 1605708 - DNA, 15 bp, Homo sapiens
gatggaggaagagaa

SEQ ID NO: 1605709 - DNA, 15 bp, Homo sapiens
agatggaggaagaga

SEQ ID NO: 1605710 - DNA, 15 bp, Homo sapiens
gagatggaggaagag

SEQ ID NO: 1605711 - DNA, 15 bp, Homo sapiens
agagatggaggaaga

SEQ ID NO: 1605712 - DNA, 15 bp, Homo sapiens
cagagatggaggaag

SEQ ID NO: 1605713 - DNA, 15 bp, Homo sapiens
ccagagatggaggaa

SEQ ID NO: 1605714 - DNA, 15 bp, Homo sapiens
tccagagatggagga

SEQ ID NO: 1605715 - DNA, 15 bp, Homo sapiens
gtccagagatggagg

SEQ ID NO: 1605716 - DNA, 15 bp, Homo sapiens
tgtccagagatggag

SEQ ID NO: 1605717 - DNA, 15 bp, Homo sapiens
atgtccagagatgga

SEQ ID NO: 1605718 - DNA, 15 bp, Homo sapiens
aatgtccagagatgg

SEQ ID NO: 1605719 - DNA, 15 bp, Homo sapiens
aaatgtccagagatg

SEQ ID NO: 1605720 - DNA, 15 bp, Homo sapiens
gaaatgtccagagat

SEQ ID NO: 1605721 - DNA, 15 bp, Homo sapiens
agaaatgtccagaga

SEQ ID NO: 1605722 - DNA, 15 bp, Homo sapiens
aagaaatgtccagag

SEQ ID NO: 1605723 - DNA, 15 bp, Homo sapiens
gaagaaatgtccaga

SEQ ID NO: 1605724 - DNA, 15 bp, Homo sapiens
agaagaaatgtccag

SEQ ID NO: 1605725 - DNA, 15 bp, Homo sapiens
gagaagaaatgtcca

SEQ ID NO: 1605726 - DNA, 15 bp, Homo sapiens
tgagaagaaatgtcc

SEQ ID NO: 1605727 - DNA, 15 bp, Homo sapiens
ctgagaagaaatgtc

SEQ ID NO: 1605728 - DNA, 15 bp, Homo sapiens
tctgagaagaaatgt

SEQ ID NO: 1605729 - DNA, 15 bp, Homo sapiens
ctctgagaagaaatg

SEQ ID NO: 1605730 - DNA, 15 bp, Homo sapiens
tctctgagaagaaat

SEQ ID NO: 1605731 - DNA, 15 bp, Homo sapiens
gtctctgagaagaaa

SEQ ID NO: 1605732 - DNA, 15 bp, Homo sapiens
agtctctgagaagaa

SEQ ID NO: 1605733 - DNA, 15 bp, Homo sapiens
tagtctctgagaaga

SEQ ID NO: 1605734 - DNA, 15 bp, Homo sapiens
ctagtctctgagaag

SEQ ID NO: 1605735 - DNA, 15 bp, Homo sapiens
cctagtctctgagaa

SEQ ID NO: 1605736 - DNA, 15 bp, Homo sapiens
ccctagtctctgaga

SEQ ID NO: 1605737 - DNA, 15 bp, Homo sapiens
accctagtctctgag

SEQ ID NO: 1605738 - DNA, 15 bp, Homo sapiens
aaccctagtctctga

SEQ ID NO: 1605739 - DNA, 15 bp, Homo sapiens
caaccctagtctctg

SEQ ID NO: 1605740 - DNA, 15 bp, Homo sapiens
tcaaccctagtctct

SEQ ID NO: 1605741 - DNA, 15 bp, Homo sapiens
ttcaaccctagtctc

SEQ ID NO: 1605742 - DNA, 15 bp, Homo sapiens
attcaaccctagtct

SEQ ID NO: 1605743 - DNA, 15 bp, Homo sapiens
aattcaaccctagtc

SEQ ID NO: 1605744 - DNA, 15 bp, Homo sapiens
gaattcaaccctagt

SEQ ID NO: 1605745 - DNA, 15 bp, Homo sapiens
ggaattcaaccctag

SEQ ID NO: 1605746 - DNA, 15 bp, Homo sapiens
gggaattcaacccta

SEQ ID NO: 1605747 - DNA, 15 bp, Homo sapiens
tgggaattcaaccct

SEQ ID NO: 1605748 - DNA, 15 bp, Homo sapiens
atgggaattcaaccc

SEQ ID NO: 1605749 - DNA, 15 bp, Homo sapiens
gatgggaattcaacc

SEQ ID NO: 1605750 - DNA, 15 bp, Homo sapiens
ggatgggaattcaac

SEQ ID NO: 1605751 - DNA, 15 bp, Homo sapiens
aggatgggaattcaa

SEQ ID NO: 1605752 - DNA, 15 bp, Homo sapiens
caggatgggaattca

SEQ ID NO: 1605753 - DNA, 15 bp, Homo sapiens
gcaggatgggaattc

SEQ ID NO: 1605754 - DNA, 15 bp, Homo sapiens
tgcaggatgggaatt

SEQ ID NO: 1605755 - DNA, 15 bp, Homo sapiens
gtgcaggatgggaat

SEQ ID NO: 1605756 - DNA, 15 bp, Homo sapiens
agtgcaggatgggaa

SEQ ID NO: 1605757 - DNA, 15 bp, Homo sapiens
cagtgcaggatggga

SEQ ID NO: 1605758 - DNA, 15 bp, Homo sapiens
acagtgcaggatggg

SEQ ID NO: 1605759 - DNA, 15 bp, Homo sapiens
tacagtgcaggatgg

SEQ ID NO: 1605760 - DNA, 15 bp, Homo sapiens
atacagtgcaggatg

SEQ ID NO: 1605761 - DNA, 15 bp, Homo sapiens
tatacagtgcaggat

SEQ ID NO: 1605762 - DNA, 15 bp, Homo sapiens
gtatacagtgcagga

SEQ ID NO: 1605763 - DNA, 15 bp, Homo sapiens
ggtatacagtgcagg

SEQ ID NO: 1605764 - DNA, 15 bp, Homo sapiens
gggtatacagtgcag

SEQ ID NO: 1605765 - DNA, 15 bp, Homo sapiens
tgggtatacagtgca

SEQ ID NO: 1605766 - DNA, 15 bp, Homo sapiens
atgggtatacagtgc

SEQ ID NO: 1605767 - DNA, 15 bp, Homo sapiens
gatgggtatacagtg

SEQ ID NO: 1605768 - DNA, 15 bp, Homo sapiens
ggatgggtatacagt

SEQ ID NO: 1605769 - DNA, 15 bp, Homo sapiens
gggatgggtatacag

SEQ ID NO: 1605770 - DNA, 15 bp, Homo sapiens
ggggatgggtataca

SEQ ID NO: 1605771 - DNA, 15 bp, Homo sapiens
cggggatgggtatac

SEQ ID NO: 1605772 - DNA, 15 bp, Homo sapiens
acggggatgggtata

SEQ ID NO: 1605773 - DNA, 15 bp, Homo sapiens
cacggggatgggtat

SEQ ID NO: 1605774 - DNA, 15 bp, Homo sapiens
ccacggggatgggta

SEQ ID NO: 1605775 - DNA, 15 bp, Homo sapiens
gccacggggatgggt

SEQ ID NO: 1605776 - DNA, 15 bp, Homo sapiens
agccacggggatggg

SEQ ID NO: 1605777 - DNA, 15 bp, Homo sapiens
aagccacggggatgg

SEQ ID NO: 1605778 - DNA, 15 bp, Homo sapiens
gaagccacggggatg

SEQ ID NO: 1605779 - DNA, 15 bp, Homo sapiens
tgaagccacggggat

SEQ ID NO: 1605780 - DNA, 15 bp, Homo sapiens
ctgaagccacgggga

SEQ ID NO: 1605781 - DNA, 15 bp, Homo sapiens
gctgaagccacgggg

SEQ ID NO: 1605782 - DNA, 15 bp, Homo sapiens
agctgaagccacggg

SEQ ID NO: 1605783 - DNA, 15 bp, Homo sapiens
cagctgaagccacgg

SEQ ID NO: 1605784 - DNA, 15 bp, Homo sapiens
gcagctgaagccacg

SEQ ID NO: 1605785 - DNA, 15 bp, Homo sapiens
ggcagctgaagccac

SEQ ID NO: 1605786 - DNA, 15 bp, Homo sapiens
tggcagctgaagcca

SEQ ID NO: 1605787 - DNA, 15 bp, Homo sapiens
gtggcagctgaagcc

SEQ ID NO: 1605788 - DNA, 15 bp, Homo sapiens
ggtggcagctgaagc

SEQ ID NO: 1605789 - DNA, 15 bp, Homo sapiens
aggtggcagctgaag

SEQ ID NO: 1605790 - DNA, 15 bp, Homo sapiens
caggtggcagctgaa

SEQ ID NO: 1605791 - DNA, 15 bp, Homo sapiens
acaggtggcagctga

SEQ ID NO: 1605792 - DNA, 15 bp, Homo sapiens
aacaggtggcagctg

SEQ ID NO: 1605793 - DNA, 15 bp, Homo sapiens
caacaggtggcagct

SEQ ID NO: 1605794 - DNA, 15 bp, Homo sapiens
gcaacaggtggcagc

SEQ ID NO: 1605795 - DNA, 15 bp, Homo sapiens
agcaacaggtggcag

SEQ ID NO: 1605796 - DNA, 15 bp, Homo sapiens
cagcaacaggtggca

SEQ ID NO: 1605797 - DNA, 15 bp, Homo sapiens
tcagcaacaggtggc

SEQ ID NO: 1605798 - DNA, 15 bp, Homo sapiens
atcagcaacaggtgg

SEQ ID NO: 1605799 - DNA, 15 bp, Homo sapiens
catcagcaacaggtg

SEQ ID NO: 1605800 - DNA, 15 bp, Homo sapiens
ccatcagcaacaggt

SEQ ID NO: 1605801 - DNA, 15 bp, Homo sapiens
gccatcagcaacagg

SEQ ID NO: 1605802 - DNA, 15 bp, Homo sapiens
agccatcagcaacag

SEQ ID NO: 1605803 - DNA, 15 bp, Homo sapiens
gagccatcagcaaca

SEQ ID NO: 1605804 - DNA, 15 bp, Homo sapiens
ggagccatcagcaac

SEQ ID NO: 1605805 - DNA, 15 bp, Homo sapiens
aggagccatcagcaa

SEQ ID NO: 1605806 - DNA, 15 bp, Homo sapiens
taggagccatcagca

SEQ ID NO: 1605807 - DNA, 15 bp, Homo sapiens
ttaggagccatcagc

SEQ ID NO: 1605808 - DNA, 15 bp, Homo sapiens
tttaggagccatcag

SEQ ID NO: 1605809 - DNA, 15 bp, Homo sapiens
atttaggagccatca

SEQ ID NO: 1605810 - DNA, 15 bp, Homo sapiens
gatttaggagccatc

SEQ ID NO: 1605811 - DNA, 15 bp, Homo sapiens
ggatttaggagccat

SEQ ID NO: 1605812 - DNA, 15 bp, Homo sapiens
tggatttaggagcca

SEQ ID NO: 1605813 - DNA, 15 bp, Homo sapiens
atggatttaggagcc

SEQ ID NO: 1605814 - DNA, 15 bp, Homo sapiens
tatggatttaggagc

SEQ ID NO: 1605815 - DNA, 15 bp, Homo sapiens
gtatggatttaggag

SEQ ID NO: 1605816 - DNA, 15 bp, Homo sapiens
ggtatggatttagga

SEQ ID NO: 1605817 - DNA, 15 bp, Homo sapiens
aggtatggatttagg

SEQ ID NO: 1605818 - DNA, 15 bp, Homo sapiens
gaggtatggatttag

SEQ ID NO: 1605819 - DNA, 15 bp, Homo sapiens
agaggtatggattta

SEQ ID NO: 1605820 - DNA, 15 bp, Homo sapiens
tagaggtatggattt

SEQ ID NO: 1605821 - DNA, 15 bp, Homo sapiens
ctagaggtatggatt

SEQ ID NO: 1605822 - DNA, 15 bp, Homo sapiens
gctagaggtatggat

SEQ ID NO: 1605823 - DNA, 15 bp, Homo sapiens
ggctagaggtatgga

SEQ ID NO: 1605824 - DNA, 15 bp, Homo sapiens
tggctagaggtatgg

SEQ ID NO: 1605825 - DNA, 15 bp, Homo sapiens
ttggctagaggtatg

SEQ ID NO: 1605826 - DNA, 15 bp, Homo sapiens
gttggctagaggtat

SEQ ID NO: 1605827 - DNA, 15 bp, Homo sapiens
ggttggctagaggta

SEQ ID NO: 1605828 - DNA, 15 bp, Homo sapiens
aggttggctagaggt

SEQ ID NO: 1605829 - DNA, 15 bp, Homo sapiens
gaggttggctagagg

SEQ ID NO: 1605830 - DNA, 15 bp, Homo sapiens
agaggttggctagag

SEQ ID NO: 1605831 - DNA, 15 bp, Homo sapiens
gagaggttggctaga

SEQ ID NO: 1605832 - DNA, 15 bp, Homo sapiens
agagaggttggctag

SEQ ID NO: 1605833 - DNA, 15 bp, Homo sapiens
aagagaggttggcta

SEQ ID NO: 1605834 - DNA, 15 bp, Homo sapiens
gaagagaggttggct

SEQ ID NO: 1605835 - DNA, 15 bp, Homo sapiens
tgaagagaggttggc

SEQ ID NO: 1605836 - DNA, 15 bp, Homo sapiens
ctgaagagaggttgg

SEQ ID NO: 1605837 - DNA, 15 bp, Homo sapiens
tctgaagagaggttg

SEQ ID NO: 1605838 - DNA, 15 bp, Homo sapiens
ctctgaagagaggtt

SEQ ID NO: 1605839 - DNA, 15 bp, Homo sapiens
gctctgaagagaggt

SEQ ID NO: 1605840 - DNA, 15 bp, Homo sapiens
agctctgaagagagg

SEQ ID NO: 1605841 - DNA, 15 bp, Homo sapiens
aagctctgaagagag

SEQ ID NO: 1605842 - DNA, 15 bp, Homo sapiens
gaagctctgaagaga

SEQ ID NO: 1605843 - DNA, 15 bp, Homo sapiens
ggaagctctgaagag

SEQ ID NO: 1605844 - DNA, 15 bp, Homo sapiens
tggaagctctgaaga

SEQ ID NO: 1605845 - DNA, 15 bp, Homo sapiens
ttggaagctctgaag

SEQ ID NO: 1605846 - DNA, 15 bp, Homo sapiens
attggaagctctgaa

SEQ ID NO: 1605847 - DNA, 15 bp, Homo sapiens
gattggaagctctga

SEQ ID NO: 1605848 - DNA, 15 bp, Homo sapiens
agattggaagctctg

SEQ ID NO: 1605849 - DNA, 15 bp, Homo sapiens
tagattggaagctct

SEQ ID NO: 1605850 - DNA, 15 bp, Homo sapiens
atagattggaagctc

SEQ ID NO: 1605851 - DNA, 15 bp, Homo sapiens
tatagattggaagct

SEQ ID NO: 1605852 - DNA, 15 bp, Homo sapiens
atatagattggaagc

SEQ ID NO: 1605853 - DNA, 15 bp, Homo sapiens
aatatagattggaag

SEQ ID NO: 1605854 - DNA, 15 bp, Homo sapiens
aaatatagattggaa

SEQ ID NO: 1605855 - DNA, 15 bp, Homo sapiens
aaaatatagattgga

SEQ ID NO: 1605856 - DNA, 15 bp, Homo sapiens
gaaaatatagattgg

SEQ ID NO: 1605857 - DNA, 15 bp, Homo sapiens
tgaaaatatagattg

SEQ ID NO: 1605858 - DNA, 15 bp, Homo sapiens
ctgaaaatatagatt

SEQ ID NO: 1605859 - DNA, 15 bp, Homo sapiens
actgaaaatatagat

SEQ ID NO: 1605860 - DNA, 15 bp, Homo sapiens
aactgaaaatataga

SEQ ID NO: 1605861 - DNA, 15 bp, Homo sapiens
acaactgaaaatata

SEQ ID NO: 1605862 - DNA, 15 bp, Homo sapiens
aacaactgaaaatat

SEQ ID NO: 1605863 - DNA, 15 bp, Homo sapiens
aaacaactgaaaata

SEQ ID NO: 1605864 - DNA, 15 bp, Homo sapiens
taaacaactgaaaat

SEQ ID NO: 1605865 - DNA, 15 bp, Homo sapiens
gtaaacaactgaaaa

SEQ ID NO: 1605866 - DNA, 15 bp, Homo sapiens
ggtaaacaactgaaa

SEQ ID NO: 1605867 - DNA, 15 bp, Homo sapiens
aggtaaacaactgaa

SEQ ID NO: 1605868 - DNA, 15 bp, Homo sapiens
gaggtaaacaactga

SEQ ID NO: 1605869 - DNA, 15 bp, Homo sapiens
ggaggtaaacaactg

SEQ ID NO: 1605870 - DNA, 15 bp, Homo sapiens
aggaggtaaacaact

SEQ ID NO: 1605871 - DNA, 15 bp, Homo sapiens
aaggaggtaaacaac

SEQ ID NO: 1605872 - DNA, 15 bp, Homo sapiens
taaggaggtaaacaa

SEQ ID NO: 1605873 - DNA, 15 bp, Homo sapiens
ataaggaggtaaaca

SEQ ID NO: 1605874 - DNA, 15 bp, Homo sapiens
cataaggaggtaaac

SEQ ID NO: 1605875 - DNA, 15 bp, Homo sapiens
acataaggaggtaaa

SEQ ID NO: 1605876 - DNA, 15 bp, Homo sapiens
cacataaggaggtaa

SEQ ID NO: 1605877 - DNA, 15 bp, Homo sapiens
tcacataaggaggta

SEQ ID NO: 1605878 - DNA, 15 bp, Homo sapiens
ttcacataaggaggt

SEQ ID NO: 1605879 - DNA, 15 bp, Homo sapiens
attcacataaggagg

SEQ ID NO: 1605880 - DNA, 15 bp, Homo sapiens
aattcacataaggag

SEQ ID NO: 1605881 - DNA, 15 bp, Homo sapiens
aaattcacataagga

SEQ ID NO: 1605882 - DNA, 15 bp, Homo sapiens
gaaattcacataagg

SEQ ID NO: 1605883 - DNA, 15 bp, Homo sapiens
agaaattcacataag

SEQ ID NO: 1605884 - DNA, 15 bp, Homo sapiens
cagaaattcacataa

SEQ ID NO: 1605885 - DNA, 15 bp, Homo sapiens
gcagaaattcacata

SEQ ID NO: 1605886 - DNA, 15 bp, Homo sapiens
ggcagaaattcacat

SEQ ID NO: 1605887 - DNA, 15 bp, Homo sapiens
tggcagaaattcaca

SEQ ID NO: 1605888 - DNA, 15 bp, Homo sapiens
ttggcagaaattcac

SEQ ID NO: 1605889 - DNA, 15 bp, Homo sapiens
tttggcagaaattca

SEQ ID NO: 1605890 - DNA, 15 bp, Homo sapiens
gtttggcagaaattc

SEQ ID NO: 1605891 - DNA, 15 bp, Homo sapiens
tgtttggcagaaatt

SEQ ID NO: 1605892 - DNA, 15 bp, Homo sapiens
ttgtttggcagaaat

SEQ ID NO: 1605893 - DNA, 15 bp, Homo sapiens
gttgtttggcagaaa

SEQ ID NO: 1605894 - DNA, 15 bp, Homo sapiens
tgttgtttggcagaa

SEQ ID NO: 1605895 - DNA, 15 bp, Homo sapiens
atgttgtttggcaga

SEQ ID NO: 1605896 - DNA, 15 bp, Homo sapiens
tatgttgtttggcag

SEQ ID NO: 1605897 - DNA, 15 bp, Homo sapiens
atatgttgtttggca

SEQ ID NO: 1605898 - DNA, 15 bp, Homo sapiens
gatatgttgtttggc

SEQ ID NO: 1605899 - DNA, 15 bp, Homo sapiens
ggatatgttgtttgg

SEQ ID NO: 1605900 - DNA, 15 bp, Homo sapiens
tggatatgttgtttg

SEQ ID NO: 1605901 - DNA, 15 bp, Homo sapiens
ttggatatgttgttt

SEQ ID NO: 1605902 - DNA, 15 bp, Homo sapiens
tttggatatgttgtt

SEQ ID NO: 1605903 - DNA, 15 bp, Homo sapiens
atttggatatgttgt

SEQ ID NO: 1605904 - DNA, 15 bp, Homo sapiens
gatttggatatgttg

SEQ ID NO: 1605905 - DNA, 15 bp, Homo sapiens
agatttggatatgtt

SEQ ID NO: 1605906 - DNA, 15 bp, Homo sapiens
cagatttggatatgt

SEQ ID NO: 1605907 - DNA, 15 bp, Homo sapiens
tcagatttggatatg

SEQ ID NO: 1605908 - DNA, 15 bp, Homo sapiens
ttcagatttggatat

SEQ ID NO: 1605909 - DNA, 15 bp, Homo sapiens
gttcagatttggata

SEQ ID NO: 1605910 - DNA, 15 bp, Homo sapiens
agttcagatttggat

SEQ ID NO: 1605911 - DNA, 15 bp, Homo sapiens
aagttcagatttgga

SEQ ID NO: 1605912 - DNA, 15 bp, Homo sapiens
taagttcagatttgg

SEQ ID NO: 1605913 - DNA, 15 bp, Homo sapiens
gtaagttcagatttg

SEQ ID NO: 1605914 - DNA, 15 bp, Homo sapiens
tgtaagttcagattt

SEQ ID NO: 1605915 - DNA, 15 bp, Homo sapiens
gtgtaagttcagatt

SEQ ID NO: 1605916 - DNA, 15 bp, Homo sapiens
agtgtaagttcagat

SEQ ID NO: 1605917 - DNA, 15 bp, Homo sapiens
cagtgtaagttcaga

SEQ ID NO: 1605918 - DNA, 15 bp, Homo sapiens
acagtgtaagttcag

SEQ ID NO: 1605919 - DNA, 15 bp, Homo sapiens
gacagtgtaagttca

SEQ ID NO: 1605920 - DNA, 15 bp, Homo sapiens
ggacagtgtaagttc

SEQ ID NO: 1605921 - DNA, 15 bp, Homo sapiens
gggacagtgtaagtt

SEQ ID NO: 1605922 - DNA, 15 bp, Homo sapiens
tgggacagtgtaagt

SEQ ID NO: 1605923 - DNA, 15 bp, Homo sapiens
ttgggacagtgtaag

SEQ ID NO: 1605924 - DNA, 15 bp, Homo sapiens
attgggacagtgtaa

SEQ ID NO: 1605925 - DNA, 15 bp, Homo sapiens
aattgggacagtgta

SEQ ID NO: 1605926 - DNA, 15 bp, Homo sapiens
aaattgggacagtgt

SEQ ID NO: 1605927 - DNA, 15 bp, Homo sapiens
caaattgggacagtg

SEQ ID NO: 1605928 - DNA, 15 bp, Homo sapiens
gcaaattgggacagt

SEQ ID NO: 1605929 - DNA, 15 bp, Homo sapiens
agcaaattgggacag

SEQ ID NO: 1605930 - DNA, 15 bp, Homo sapiens
aagcaaattgggaca

SEQ ID NO: 1605931 - DNA, 15 bp, Homo sapiens
gaagcaaattgggac

SEQ ID NO: 1605932 - DNA, 15 bp, Homo sapiens
agaagcaaattggga

SEQ ID NO: 1605933 - DNA, 15 bp, Homo sapiens
aagaagcaaattggg

SEQ ID NO: 1605934 - DNA, 15 bp, Homo sapiens
caagaagcaaattgg

SEQ ID NO: 1605935 - DNA, 15 bp, Homo sapiens
acaagaagcaaattg

SEQ ID NO: 1605936 - DNA, 15 bp, Homo sapiens
gacaagaagcaaatt

SEQ ID NO: 1605937 - DNA, 15 bp, Homo sapiens
ggacaagaagcaaat

SEQ ID NO: 1605938 - DNA, 15 bp, Homo sapiens
aggacaagaagcaaa

SEQ ID NO: 1605939 - DNA, 15 bp, Homo sapiens
caggacaagaagcaa

SEQ ID NO: 1605940 - DNA, 15 bp, Homo sapiens
acaggacaagaagca

SEQ ID NO: 1605941 - DNA, 15 bp, Homo sapiens
cacaggacaagaagc

SEQ ID NO: 1605942 - DNA, 15 bp, Homo sapiens
acacaggacaagaag

SEQ ID NO: 1605943 - DNA, 15 bp, Homo sapiens
aacacaggacaagaa

SEQ ID NO: 1605944 - DNA, 15 bp, Homo sapiens
gaacacaggacaaga

SEQ ID NO: 1605945 - DNA, 15 bp, Homo sapiens
agaacacaggacaag

SEQ ID NO: 1605946 - DNA, 15 bp, Homo sapiens
aagaacacaggacaa

SEQ ID NO: 1605947 - DNA, 15 bp, Homo sapiens
caagaacacaggaca

SEQ ID NO: 1605948 - DNA, 15 bp, Homo sapiens
tcaagaacacaggac

SEQ ID NO: 1605949 - DNA, 15 bp, Homo sapiens
atcaagaacacagga

SEQ ID NO: 1605950 - DNA, 15 bp, Homo sapiens
gatcaagaacacagg

SEQ ID NO: 1605951 - DNA, 15 bp, Homo sapiens
agatcaagaacacag

SEQ ID NO: 1605952 - DNA, 15 bp, Homo sapiens
tagatcaagaacaca

SEQ ID NO: 1605953 - DNA, 15 bp, Homo sapiens
ctagatcaagaacac

SEQ ID NO: 1605954 - DNA, 15 bp, Homo sapiens
cctagatcaagaaca

SEQ ID NO: 1605955 - DNA, 15 bp, Homo sapiens
acctagatcaagaac

SEQ ID NO: 1605956 - DNA, 15 bp, Homo sapiens
cacctagatcaagaa

SEQ ID NO: 1605957 - DNA, 15 bp, Homo sapiens
tcacctagatcaaga

SEQ ID NO: 1605958 - DNA, 15 bp, Homo sapiens
ttcacctagatcaag

SEQ ID NO: 1605959 - DNA, 15 bp, Homo sapiens
attcacctagatcaa

SEQ ID NO: 1605960 - DNA, 15 bp, Homo sapiens
cattcacctagatca

SEQ ID NO: 1605961 - DNA, 15 bp, Homo sapiens
ccattcacctagatc

SEQ ID NO: 1605962 - DNA, 15 bp, Homo sapiens
gccattcacctagat

SEQ ID NO: 1605963 - DNA, 15 bp, Homo sapiens
tgccattcacctaga

SEQ ID NO: 1605964 - DNA, 15 bp, Homo sapiens
atgccattcacctag

SEQ ID NO: 1605965 - DNA, 15 bp, Homo sapiens
catgccattcaccta

SEQ ID NO: 1605966 - DNA, 15 bp, Homo sapiens
tcatgccattcacct

SEQ ID NO: 1605967 - DNA, 15 bp, Homo sapiens
ttcatgccattcacc

SEQ ID NO: 1605968 - DNA, 15 bp, Homo sapiens
gttcatgccattcac

SEQ ID NO: 1605969 - DNA, 15 bp, Homo sapiens
tgttcatgccattca

SEQ ID NO: 1605970 - DNA, 15 bp, Homo sapiens
atgttcatgccattc

SEQ ID NO: 1605971 - DNA, 15 bp, Homo sapiens
gatgttcatgccatt

SEQ ID NO: 1605972 - DNA, 15 bp, Homo sapiens
agatgttcatgccat

SEQ ID NO: 1605973 - DNA, 15 bp, Homo sapiens
gagatgttcatgcca

SEQ ID NO: 1605974 - DNA, 15 bp, Homo sapiens
ggagatgttcatgcc

SEQ ID NO: 1605975 - DNA, 15 bp, Homo sapiens
gggagatgttcatgc

SEQ ID NO: 1605976 - DNA, 15 bp, Homo sapiens
tgggagatgttcatg

SEQ ID NO: 1605977 - DNA, 15 bp, Homo sapiens
ttgggagatgttcat

SEQ ID NO: 1605978 - DNA, 15 bp, Homo sapiens
attgggagatgttca

SEQ ID NO: 1605979 - DNA, 15 bp, Homo sapiens
aattgggagatgttc

SEQ ID NO: 1605980 - DNA, 15 bp, Homo sapiens
gaattgggagatgtt

SEQ ID NO: 1605981 - DNA, 15 bp, Homo sapiens
ggaattgggagatgt

SEQ ID NO: 1605982 - DNA, 15 bp, Homo sapiens
aggaattgggagatg

SEQ ID NO: 1605983 - DNA, 15 bp, Homo sapiens
caggaattgggagat

SEQ ID NO: 1605984 - DNA, 15 bp, Homo sapiens
gcaggaattgggaga

SEQ ID NO: 1605985 - DNA, 15 bp, Homo sapiens
ggcaggaattgggag

SEQ ID NO: 1605986 - DNA, 15 bp, Homo sapiens
tggcaggaattggga

SEQ ID NO: 1605987 - DNA, 15 bp, Homo sapiens
gtggcaggaattggg

SEQ ID NO: 1605988 - DNA, 15 bp, Homo sapiens
ggtggcaggaattgg

SEQ ID NO: 1605989 - DNA, 15 bp, Homo sapiens
gggtggcaggaattg

SEQ ID NO: 1605990 - DNA, 15 bp, Homo sapiens
ggggtggcaggaatt

SEQ ID NO: 1605991 - DNA, 15 bp, Homo sapiens
tggggtggcaggaat

SEQ ID NO: 1605992 - DNA, 15 bp, Homo sapiens
gtggggtggcaggaa

SEQ ID NO: 1605993 - DNA, 15 bp, Homo sapiens
agtggggtggcagga

SEQ ID NO: 1605994 - DNA, 15 bp, Homo sapiens
gagtggggtggcagg

SEQ ID NO: 1605995 - DNA, 15 bp, Homo sapiens
ggagtggggtggcag

SEQ ID NO: 1605996 - DNA, 15 bp, Homo sapiens
aggagtggggtggca

SEQ ID NO: 1605997 - DNA, 15 bp, Homo sapiens
aaggagtggggtggc

SEQ ID NO: 1605998 - DNA, 15 bp, Homo sapiens
gaaggagtggggtgg

SEQ ID NO: 1605999 - DNA, 15 bp, Homo sapiens
tgaaggagtggggtg

SEQ ID NO: 1606000 - DNA, 15 bp, Homo sapiens
gtgaaggagtggggt

SEQ ID NO: 1606001 - DNA, 15 bp, Homo sapiens
ggtgaaggagtgggg

SEQ ID NO: 1606002 - DNA, 15 bp, Homo sapiens
tggtgaaggagtggg

SEQ ID NO: 1606003 - DNA, 15 bp, Homo sapiens
ttggtgaaggagtgg

SEQ ID NO: 1606004 - DNA, 15 bp, Homo sapiens
cttggtgaaggagtg

SEQ ID NO: 1606005 - DNA, 15 bp, Homo sapiens
gcttggtgaaggagt

SEQ ID NO: 1606006 - DNA, 15 bp, Homo sapiens
agcttggtgaaggag

SEQ ID NO: 1606007 - DNA, 15 bp, Homo sapiens
gagcttggtgaagga

SEQ ID NO: 1606008 - DNA, 15 bp, Homo sapiens
ggagcttggtgaagg

SEQ ID NO: 1606009 - DNA, 15 bp, Homo sapiens
aggagcttggtgaag

SEQ ID NO: 1606010 - DNA, 15 bp, Homo sapiens
caggagcttggtgaa

SEQ ID NO: 1606011 - DNA, 15 bp, Homo sapiens
acaggagcttggtga

SEQ ID NO: 1606012 - DNA, 15 bp, Homo sapiens
cacaggagcttggtg

SEQ ID NO: 1606013 - DNA, 15 bp, Homo sapiens
gcacaggagcttggt

SEQ ID NO: 1606014 - DNA, 15 bp, Homo sapiens
agcacaggagcttgg

SEQ ID NO: 1606015 - DNA, 15 bp, Homo sapiens
tagcacaggagcttg

SEQ ID NO: 1606016 - DNA, 15 bp, Homo sapiens
ctagcacaggagctt

SEQ ID NO: 1606017 - DNA, 15 bp, Homo sapiens
actagcacaggagct

SEQ ID NO: 1606018 - DNA, 15 bp, Homo sapiens
gactagcacaggagc

SEQ ID NO: 1606019 - DNA, 15 bp, Homo sapiens
tgactagcacaggag

SEQ ID NO: 1606020 - DNA, 15 bp, Homo sapiens
ctgactagcacagga

SEQ ID NO: 1606021 - DNA, 15 bp, Homo sapiens
actgactagcacagg

SEQ ID NO: 1606022 - DNA, 15 bp, Homo sapiens
aactgactagcacag

SEQ ID NO: 1606023 - DNA, 15 bp, Homo sapiens
gaactgactagcaca

SEQ ID NO: 1606024 - DNA, 15 bp, Homo sapiens
agaactgactagcac

SEQ ID NO: 1606025 - DNA, 15 bp, Homo sapiens
cagaactgactagca

SEQ ID NO: 1606026 - DNA, 15 bp, Homo sapiens
acagaactgactagc

SEQ ID NO: 1606027 - DNA, 15 bp, Homo sapiens
gacagaactgactag

SEQ ID NO: 1606028 - DNA, 15 bp, Homo sapiens
agacagaactgacta

SEQ ID NO: 1606029 - DNA, 15 bp, Homo sapiens
cagacagaactgact

SEQ ID NO: 1606030 - DNA, 15 bp, Homo sapiens
gcagacagaactgac

SEQ ID NO: 1606031 - DNA, 15 bp, Homo sapiens
ggcagacagaactga

SEQ ID NO: 1606032 - DNA, 15 bp, Homo sapiens
tggcagacagaactg

SEQ ID NO: 1606033 - DNA, 15 bp, Homo sapiens
atggcagacagaact

SEQ ID NO: 1606034 - DNA, 15 bp, Homo sapiens
tatggcagacagaac

SEQ ID NO: 1606035 - DNA, 15 bp, Homo sapiens
ttatggcagacagaa

SEQ ID NO: 1606036 - DNA, 15 bp, Homo sapiens
gttatggcagacaga

SEQ ID NO: 1606037 - DNA, 15 bp, Homo sapiens
tgttatggcagacag

SEQ ID NO: 1606038 - DNA, 15 bp, Homo sapiens
ttgttatggcagaca

SEQ ID NO: 1606039 - DNA, 15 bp, Homo sapiens
tttgttatggcagac

SEQ ID NO: 1606040 - DNA, 15 bp, Homo sapiens
ttttgttatggcaga

SEQ ID NO: 1606041 - DNA, 15 bp, Homo sapiens
gttttgttatggcag

SEQ ID NO: 1606042 - DNA, 15 bp, Homo sapiens
tgttttgttatggca

SEQ ID NO: 1606043 - DNA, 15 bp, Homo sapiens
gtgttttgttatggc

SEQ ID NO: 1606044 - DNA, 15 bp, Homo sapiens
ggtgttttgttatgg

SEQ ID NO: 1606045 - DNA, 15 bp, Homo sapiens
tggtgttttgttatg

SEQ ID NO: 1606046 - DNA, 15 bp, Homo sapiens
gtggtgttttgttat

SEQ ID NO: 1606047 - DNA, 15 bp, Homo sapiens
tgtggtgttttgtta

SEQ ID NO: 1606048 - DNA, 15 bp, Homo sapiens
ctgtggtgttttgtt

SEQ ID NO: 1606049 - DNA, 15 bp, Homo sapiens
tctgtggtgttttgt

SEQ ID NO: 1606050 - DNA, 15 bp, Homo sapiens
gtctgtggtgttttg

SEQ ID NO: 1606051 - DNA, 15 bp, Homo sapiens
ggtctgtggtgtttt

SEQ ID NO: 1606052 - DNA, 15 bp, Homo sapiens
cggtctgtggtgttt

SEQ ID NO: 1606053 - DNA, 15 bp, Homo sapiens
ccggtctgtggtgtt

SEQ ID NO: 1606054 - DNA, 15 bp, Homo sapiens
cccggtctgtggtgt

SEQ ID NO: 1606055 - DNA, 15 bp, Homo sapiens
acccggtctgtggtg

SEQ ID NO: 1606056 - DNA, 15 bp, Homo sapiens
cacccggtctgtggt

SEQ ID NO: 1606057 - DNA, 15 bp, Homo sapiens
ccacccggtctgtgg

SEQ ID NO: 1606058 - DNA, 15 bp, Homo sapiens
gccacccggtctgtg

SEQ ID NO: 1606059 - DNA, 15 bp, Homo sapiens
agccacccggtctgt

SEQ ID NO: 1606060 - DNA, 15 bp, Homo sapiens
aagccacccggtctg

SEQ ID NO: 1606061 - DNA, 15 bp, Homo sapiens
taagccacccggtct

SEQ ID NO: 1606062 - DNA, 15 bp, Homo sapiens
gtaagccacccggtc

SEQ ID NO: 1606063 - DNA, 15 bp, Homo sapiens
tgtaagccacccggt

SEQ ID NO: 1606064 - DNA, 15 bp, Homo sapiens
gtgtaagccacccgg

SEQ ID NO: 1606065 - DNA, 15 bp, Homo sapiens
tgtgtaagccacccg

SEQ ID NO: 1606066 - DNA, 15 bp, Homo sapiens
ttgtgtaagccaccc

SEQ ID NO: 1606067 - DNA, 15 bp, Homo sapiens
attgtgtaagccacc

SEQ ID NO: 1606068 - DNA, 15 bp, Homo sapiens
cattgtgtaagccac

SEQ ID NO: 1606069 - DNA, 15 bp, Homo sapiens
tcattgtgtaagcca

SEQ ID NO: 1606070 - DNA, 15 bp, Homo sapiens
ttcattgtgtaagcc

SEQ ID NO: 1606071 - DNA, 15 bp, Homo sapiens
tttcattgtgtaagc

SEQ ID NO: 1606072 - DNA, 15 bp, Homo sapiens
ttttcattgtgtaag

SEQ ID NO: 1606073 - DNA, 15 bp, Homo sapiens
attttcattgtgtaa

SEQ ID NO: 1606074 - DNA, 15 bp, Homo sapiens
aattttcattgtgta

SEQ ID NO: 1606075 - DNA, 15 bp, Homo sapiens
caattttcattgtgt

SEQ ID NO: 1606076 - DNA, 15 bp, Homo sapiens
ccaattttcattgtg

SEQ ID NO: 1606077 - DNA, 15 bp, Homo sapiens
accaattttcattgt

SEQ ID NO: 1606078 - DNA, 15 bp, Homo sapiens
aaccaattttcattg

SEQ ID NO: 1606079 - DNA, 15 bp, Homo sapiens
aaaccaattttcatt

SEQ ID NO: 1606080 - DNA, 15 bp, Homo sapiens
aaaaccaattttcat

SEQ ID NO: 1606081 - DNA, 15 bp, Homo sapiens
gaaaaccaattttca

SEQ ID NO: 1606082 - DNA, 15 bp, Homo sapiens
agaaaaccaattttc

SEQ ID NO: 1606083 - DNA, 15 bp, Homo sapiens
aagaaaaccaatttt

SEQ ID NO: 1606084 - DNA, 15 bp, Homo sapiens
taagaaaaccaattt

SEQ ID NO: 1606085 - DNA, 15 bp, Homo sapiens
gtaagaaaaccaatt

SEQ ID NO: 1606086 - DNA, 15 bp, Homo sapiens
tgtaagaaaaccaat

SEQ ID NO: 1606087 - DNA, 15 bp, Homo sapiens
ctgtaagaaaaccaa

SEQ ID NO: 1606088 - DNA, 15 bp, Homo sapiens
actgtaagaaaacca

SEQ ID NO: 1606089 - DNA, 15 bp, Homo sapiens
aactgtaagaaaacc

SEQ ID NO: 1606090 - DNA, 15 bp, Homo sapiens
gaactgtaagaaaac

SEQ ID NO: 1606091 - DNA, 15 bp, Homo sapiens
cagaactgtaagaaa

SEQ ID NO: 1606092 - DNA, 15 bp, Homo sapiens
ccagaactgtaagaa

SEQ ID NO: 1606093 - DNA, 15 bp, Homo sapiens
tccagaactgtaaga

SEQ ID NO: 1606094 - DNA, 15 bp, Homo sapiens
ctccagaactgtaag

SEQ ID NO: 1606095 - DNA, 15 bp, Homo sapiens
cctccagaactgtaa

SEQ ID NO: 1606096 - DNA, 15 bp, Homo sapiens
gcctccagaactgta

SEQ ID NO: 1606097 - DNA, 15 bp, Homo sapiens
agcctccagaactgt

SEQ ID NO: 1606098 - DNA, 15 bp, Homo sapiens
cagcctccagaactg

SEQ ID NO: 1606099 - DNA, 15 bp, Homo sapiens
gcagcctccagaact

SEQ ID NO: 1606100 - DNA, 15 bp, Homo sapiens
tgcagcctccagaac

SEQ ID NO: 1606101 - DNA, 15 bp, Homo sapiens
ttgcagcctccagaa

SEQ ID NO: 1606102 - DNA, 15 bp, Homo sapiens
gttgcagcctccaga

SEQ ID NO: 1606103 - DNA, 15 bp, Homo sapiens
cgttgcagcctccag

SEQ ID NO: 1606104 - DNA, 15 bp, Homo sapiens
acgttgcagcctcca

SEQ ID NO: 1606105 - DNA, 15 bp, Homo sapiens
gacgttgcagcctcc

SEQ ID NO: 1606106 - DNA, 15 bp, Homo sapiens
ggacgttgcagcctc

SEQ ID NO: 1606107 - DNA, 15 bp, Homo sapiens
tggacgttgcagcct

SEQ ID NO: 1606108 - DNA, 15 bp, Homo sapiens
ttggacgttgcagcc

SEQ ID NO: 1606109 - DNA, 15 bp, Homo sapiens
attggacgttgcagc

SEQ ID NO: 1606110 - DNA, 15 bp, Homo sapiens
tattggacgttgcag

SEQ ID NO: 1606111 - DNA, 15 bp, Homo sapiens
atattggacgttgca

SEQ ID NO: 1606112 - DNA, 15 bp, Homo sapiens
gatattggacgttgc

SEQ ID NO: 1606113 - DNA, 15 bp, Homo sapiens
tgatattggacgttg

SEQ ID NO: 1606114 - DNA, 15 bp, Homo sapiens
ttgatattggacgtt

SEQ ID NO: 1606115 - DNA, 15 bp, Homo sapiens
tttgatattggacgt

SEQ ID NO: 1606116 - DNA, 15 bp, Homo sapiens
ctttgatattggacg

SEQ ID NO: 1606117 - DNA, 15 bp, Homo sapiens
gctttgatattggac

SEQ ID NO: 1606118 - DNA, 15 bp, Homo sapiens
ggctttgatattgga

SEQ ID NO: 1606119 - DNA, 15 bp, Homo sapiens
aggctttgatattgg

SEQ ID NO: 1606120 - DNA, 15 bp, Homo sapiens
taggctttgatattg

SEQ ID NO: 1606121 - DNA, 15 bp, Homo sapiens
ctaggctttgatatt

SEQ ID NO: 1606122 - DNA, 15 bp, Homo sapiens
gctaggctttgatat

SEQ ID NO: 1606123 - DNA, 15 bp, Homo sapiens
tgctaggctttgata

SEQ ID NO: 1606124 - DNA, 15 bp, Homo sapiens
ctgctaggctttgat

SEQ ID NO: 1606125 - DNA, 15 bp, Homo sapiens
cctgctaggctttga

SEQ ID NO: 1606126 - DNA, 15 bp, Homo sapiens
tcctgctaggctttg

SEQ ID NO: 1606127 - DNA, 15 bp, Homo sapiens
atcctgctaggcttt

SEQ ID NO: 1606128 - DNA, 15 bp, Homo sapiens
aatcctgctaggctt

SEQ ID NO: 1606129 - DNA, 15 bp, Homo sapiens
aaatcctgctaggct

SEQ ID NO: 1606130 - DNA, 15 bp, Homo sapiens
taaatcctgctaggc

SEQ ID NO: 1606131 - DNA, 15 bp, Homo sapiens
ataaatcctgctagg

SEQ ID NO: 1606132 - DNA, 15 bp, Homo sapiens
aataaatcctgctag

SEQ ID NO: 1606133 - DNA, 15 bp, Homo sapiens
aaataaatcctgcta

SEQ ID NO: 1606134 - DNA, 15 bp, Homo sapiens
caaataaatcctgct

SEQ ID NO: 1606135 - DNA, 15 bp, Homo sapiens
gcaaataaatcctgc

SEQ ID NO: 1606136 - DNA, 15 bp, Homo sapiens
agcaaataaatcctg

SEQ ID NO: 1606137 - DNA, 15 bp, Homo sapiens
cagcaaataaatcct

SEQ ID NO: 1606138 - DNA, 15 bp, Homo sapiens
ccagcaaataaatcc

SEQ ID NO: 1606139 - DNA, 15 bp, Homo sapiens
accagcaaataaatc

SEQ ID NO: 1606140 - DNA, 15 bp, Homo sapiens
caccagcaaataaat

SEQ ID NO: 1606141 - DNA, 15 bp, Homo sapiens
tcaccagcaaataaa

SEQ ID NO: 1606142 - DNA, 15 bp, Homo sapiens
ctcaccagcaaataa

SEQ ID NO: 1606143 - DNA, 15 bp, Homo sapiens
cctcaccagcaaata

SEQ ID NO: 1606144 - DNA, 15 bp, Homo sapiens
ccctcaccagcaaat

SEQ ID NO: 1606145 - DNA, 15 bp, Homo sapiens
gccctcaccagcaaa

SEQ ID NO: 1606146 - DNA, 15 bp, Homo sapiens
tgccctcaccagcaa

SEQ ID NO: 1606147 - DNA, 15 bp, Homo sapiens
gtgccctcaccagca

SEQ ID NO: 1606148 - DNA, 15 bp, Homo sapiens
agtgccctcaccagc

SEQ ID NO: 1606149 - DNA, 15 bp, Homo sapiens
gagtgccctcaccag

SEQ ID NO: 1606150 - DNA, 15 bp, Homo sapiens
agagtgccctcacca

SEQ ID NO: 1606151 - DNA, 15 bp, Homo sapiens
aagagtgccctcacc

SEQ ID NO: 1606152 - DNA, 15 bp, Homo sapiens
taagagtgccctcac

SEQ ID NO: 1606153 - DNA, 15 bp, Homo sapiens
ttaagagtgccctca

SEQ ID NO: 1606154 - DNA, 15 bp, Homo sapiens
gttaagagtgccctc

SEQ ID NO: 1606155 - DNA, 15 bp, Homo sapiens
agttaagagtgccct

SEQ ID NO: 1606156 - DNA, 15 bp, Homo sapiens
cagttaagagtgccc

SEQ ID NO: 1606157 - DNA, 15 bp, Homo sapiens
ccagttaagagtgcc

SEQ ID NO: 1606158 - DNA, 15 bp, Homo sapiens
gccagttaagagtgc

SEQ ID NO: 1606159 - DNA, 15 bp, Homo sapiens
agccagttaagagtg

SEQ ID NO: 1606160 - DNA, 15 bp, Homo sapiens
aagccagttaagagt

SEQ ID NO: 1606161 - DNA, 15 bp, Homo sapiens
caagccagttaagag

SEQ ID NO: 1606162 - DNA, 15 bp, Homo sapiens
gcaagccagttaaga

SEQ ID NO: 1606163 - DNA, 15 bp, Homo sapiens
tgcaagccagttaag

SEQ ID NO: 1606164 - DNA, 15 bp, Homo sapiens
ctgcaagccagttaa

SEQ ID NO: 1606165 - DNA, 15 bp, Homo sapiens
tctgcaagccagtta

SEQ ID NO: 1606166 - DNA, 15 bp, Homo sapiens
ctctgcaagccagtt

SEQ ID NO: 1606167 - DNA, 15 bp, Homo sapiens
tctctgcaagccagt

SEQ ID NO: 1606168 - DNA, 15 bp, Homo sapiens
ctctctgcaagccag

SEQ ID NO: 1606169 - DNA, 15 bp, Homo sapiens
tctctctgcaagcca

SEQ ID NO: 1606170 - DNA, 15 bp, Homo sapiens
gtctctctgcaagcc

SEQ ID NO: 1606171 - DNA, 15 bp, Homo sapiens
cgtctctctgcaagc

SEQ ID NO: 1606172 - DNA, 15 bp, Homo sapiens
gcgtctctctgcaag

SEQ ID NO: 1606173 - DNA, 15 bp, Homo sapiens
ggcgtctctctgcaa

SEQ ID NO: 1606174 - DNA, 15 bp, Homo sapiens
aggcgtctctctgca

SEQ ID NO: 1606175 - DNA, 15 bp, Homo sapiens
aaggcgtctctctgc

SEQ ID NO: 1606176 - DNA, 15 bp, Homo sapiens
gaaggcgtctctctg

SEQ ID NO: 1606177 - DNA, 15 bp, Homo sapiens
agaaggcgtctctct

SEQ ID NO: 1606178 - DNA, 15 bp, Homo sapiens
gagaaggcgtctctc

SEQ ID NO: 1606179 - DNA, 15 bp, Homo sapiens
ggagaaggcgtctct

SEQ ID NO: 1606180 - DNA, 15 bp, Homo sapiens
tggagaaggcgtctc

SEQ ID NO: 1606181 - DNA, 15 bp, Homo sapiens
atggagaaggcgtct

SEQ ID NO: 1606182 - DNA, 15 bp, Homo sapiens
tatggagaaggcgtc

SEQ ID NO: 1606183 - DNA, 15 bp, Homo sapiens
atatggagaaggcgt

SEQ ID NO: 1606184 - DNA, 15 bp, Homo sapiens
catatggagaaggcg

SEQ ID NO: 1606185 - DNA, 15 bp, Homo sapiens
acatatggagaaggc

SEQ ID NO: 1606186 - DNA, 15 bp, Homo sapiens
gacatatggagaagg

SEQ ID NO: 1606187 - DNA, 15 bp, Homo sapiens
agacatatggagaag

SEQ ID NO: 1606188 - DNA, 15 bp, Homo sapiens
aagacatatggagaa

SEQ ID NO: 1606189 - DNA, 15 bp, Homo sapiens
aaagacatatggaga

SEQ ID NO: 1606190 - DNA, 15 bp, Homo sapiens
caaagacatatggag

SEQ ID NO: 1606191 - DNA, 15 bp, Homo sapiens
gcaaagacatatgga

SEQ ID NO: 1606192 - DNA, 15 bp, Homo sapiens
tgcaaagacatatgg

SEQ ID NO: 1606193 - DNA, 15 bp, Homo sapiens
atgcaaagacatatg

SEQ ID NO: 1606194 - DNA, 15 bp, Homo sapiens
tatgcaaagacatat

SEQ ID NO: 1606195 - DNA, 15 bp, Homo sapiens
ctatgcaaagacata

SEQ ID NO: 1606196 - DNA, 15 bp, Homo sapiens
gctatgcaaagacat

SEQ ID NO: 1606197 - DNA, 15 bp, Homo sapiens
tgctatgcaaagaca

SEQ ID NO: 1606198 - DNA, 15 bp, Homo sapiens
ttgctatgcaaagac

SEQ ID NO: 1606199 - DNA, 15 bp, Homo sapiens
tttgctatgcaaaga

SEQ ID NO: 1606200 - DNA, 15 bp, Homo sapiens
ctttgctatgcaaag

SEQ ID NO: 1606201 - DNA, 15 bp, Homo sapiens
tctttgctatgcaaa

SEQ ID NO: 1606202 - DNA, 15 bp, Homo sapiens
ctctttgctatgcaa

SEQ ID NO: 1606203 - DNA, 15 bp, Homo sapiens
tctctttgctatgca

SEQ ID NO: 1606204 - DNA, 15 bp, Homo sapiens
ctctctttgctatgc

SEQ ID NO: 1606205 - DNA, 15 bp, Homo sapiens
tctctctttgctatg

SEQ ID NO: 1606206 - DNA, 15 bp, Homo sapiens
atctctctttgctat

SEQ ID NO: 1606207 - DNA, 15 bp, Homo sapiens
gatctctctttgcta

SEQ ID NO: 1606208 - DNA, 15 bp, Homo sapiens
agatctctctttgct

SEQ ID NO: 1606209 - DNA, 15 bp, Homo sapiens
aagatctctctttgc

SEQ ID NO: 1606210 - DNA, 15 bp, Homo sapiens
aaagatctctctttg

SEQ ID NO: 1606211 - DNA, 15 bp, Homo sapiens
aaaagatctctcttt

SEQ ID NO: 1606212 - DNA, 15 bp, Homo sapiens
aaaaagatctctctt

SEQ ID NO: 1606213 - DNA, 15 bp, Homo sapiens
gaaaaagatctctct

SEQ ID NO: 1606214 - DNA, 15 bp, Homo sapiens
agaaaaagatctctc

SEQ ID NO: 1606215 - DNA, 15 bp, Homo sapiens
tagaaaaagatctct

SEQ ID NO: 1606216 - DNA, 15 bp, Homo sapiens
atagaaaaagatctc

SEQ ID NO: 1606217 - DNA, 15 bp, Homo sapiens
tatagaaaaagatct

SEQ ID NO: 1606218 - DNA, 15 bp, Homo sapiens
atatagaaaaagatc

SEQ ID NO: 1606219 - DNA, 15 bp, Homo sapiens
tatatagaaaaagat

SEQ ID NO: 1606220 - DNA, 15 bp, Homo sapiens
cttatatagaaaaag

SEQ ID NO: 1606221 - DNA, 15 bp, Homo sapiens
gcttatatagaaaaa

SEQ ID NO: 1606222 - DNA, 15 bp, Homo sapiens
ggcttatatagaaaa

SEQ ID NO: 1606223 - DNA, 15 bp, Homo sapiens
tggcttatatagaaa

SEQ ID NO: 1606224 - DNA, 15 bp, Homo sapiens
gtggcttatatagaa

SEQ ID NO: 1606225 - DNA, 15 bp, Homo sapiens
tgtggcttatataga

SEQ ID NO: 1606226 - DNA, 15 bp, Homo sapiens
ctgtggcttatatag

SEQ ID NO: 1606227 - DNA, 15 bp, Homo sapiens
actgtggcttatata

SEQ ID NO: 1606228 - DNA, 15 bp, Homo sapiens
gactgtggcttatat

SEQ ID NO: 1606229 - DNA, 15 bp, Homo sapiens
ggactgtggcttata

SEQ ID NO: 1606230 - DNA, 15 bp, Homo sapiens
aggactgtggcttat

SEQ ID NO: 1606231 - DNA, 15 bp, Homo sapiens
taggactgtggctta

SEQ ID NO: 1606232 - DNA, 15 bp, Homo sapiens
ttaggactgtggctt

SEQ ID NO: 1606233 - DNA, 15 bp, Homo sapiens
attaggactgtggct

SEQ ID NO: 1606234 - DNA, 15 bp, Homo sapiens
tattaggactgtggc

SEQ ID NO: 1606235 - DNA, 15 bp, Homo sapiens
ctattaggactgtgg

SEQ ID NO: 1606236 - DNA, 15 bp, Homo sapiens
tctattaggactgtg

SEQ ID NO: 1606237 - DNA, 15 bp, Homo sapiens
atctattaggactgt

SEQ ID NO: 1606238 - DNA, 15 bp, Homo sapiens
aatctattaggactg

SEQ ID NO: 1606239 - DNA, 15 bp, Homo sapiens
taatctattaggact

SEQ ID NO: 1606240 - DNA, 15 bp, Homo sapiens
ctaatctattaggac

SEQ ID NO: 1606241 - DNA, 15 bp, Homo sapiens
tctaatctattagga

SEQ ID NO: 1606242 - DNA, 15 bp, Homo sapiens
ctctaatctattagg

SEQ ID NO: 1606243 - DNA, 15 bp, Homo sapiens
gctctaatctattag

SEQ ID NO: 1606244 - DNA, 15 bp, Homo sapiens
ggctctaatctatta

SEQ ID NO: 1606245 - DNA, 15 bp, Homo sapiens
gggctctaatctatt

SEQ ID NO: 1606246 - DNA, 15 bp, Homo sapiens
ggggctctaatctat

SEQ ID NO: 1606247 - DNA, 15 bp, Homo sapiens
tggggctctaatcta

SEQ ID NO: 1606248 - DNA, 15 bp, Homo sapiens
gtggggctctaatct

SEQ ID NO: 1606249 - DNA, 15 bp, Homo sapiens
ggtggggctctaatc

SEQ ID NO: 1606250 - DNA, 15 bp, Homo sapiens
gggtggggctctaat

SEQ ID NO: 1606251 - DNA, 15 bp, Homo sapiens
agggtggggctctaa

SEQ ID NO: 1606252 - DNA, 15 bp, Homo sapiens
aagggtggggctcta

SEQ ID NO: 1606253 - DNA, 15 bp, Homo sapiens
taagggtggggctct

SEQ ID NO: 1606254 - DNA, 15 bp, Homo sapiens
ataagggtggggctc

SEQ ID NO: 1606255 - DNA, 15 bp, Homo sapiens
cataagggtggggct

SEQ ID NO: 1606256 - DNA, 15 bp, Homo sapiens
tcataagggtggggc

SEQ ID NO: 1606257 - DNA, 15 bp, Homo sapiens
gtcataagggtgggg

SEQ ID NO: 1606258 - DNA, 15 bp, Homo sapiens
agtcataagggtggg

SEQ ID NO: 1606259 - DNA, 15 bp, Homo sapiens
aagtcataagggtgg

SEQ ID NO: 1606260 - DNA, 15 bp, Homo sapiens
gaagtcataagggtg

SEQ ID NO: 1606261 - DNA, 15 bp, Homo sapiens
agaagtcataagggt

SEQ ID NO: 1606262 - DNA, 15 bp, Homo sapiens
aagaagtcataaggg

SEQ ID NO: 1606263 - DNA, 15 bp, Homo sapiens
aaagaagtcataagg

SEQ ID NO: 1606264 - DNA, 15 bp, Homo sapiens
aaaagaagtcataag

SEQ ID NO: 1606265 - DNA, 15 bp, Homo sapiens
taaaagaagtcataa

SEQ ID NO: 1606266 - DNA, 15 bp, Homo sapiens
ttaaaagaagtcata

SEQ ID NO: 1606267 - DNA, 15 bp, Homo sapiens
gttaaaagaagtcat

SEQ ID NO: 1606268 - DNA, 15 bp, Homo sapiens
ggttaaaagaagtca

SEQ ID NO: 1606269 - DNA, 15 bp, Homo sapiens
aggttaaaagaagtc

SEQ ID NO: 1606270 - DNA, 15 bp, Homo sapiens
aaggttaaaagaagt

SEQ ID NO: 1606271 - DNA, 15 bp, Homo sapiens
taaggttaaaagaag

SEQ ID NO: 1606272 - DNA, 15 bp, Homo sapiens
ttaaggttaaaagaa

SEQ ID NO: 1606273 - DNA, 15 bp, Homo sapiens
attaaggttaaaaga

SEQ ID NO: 1606274 - DNA, 15 bp, Homo sapiens
tattaaggttaaaag

SEQ ID NO: 1606275 - DNA, 15 bp, Homo sapiens
ttattaaggttaaaa

SEQ ID NO: 1606276 - DNA, 15 bp, Homo sapiens
gttattaaggttaaa

SEQ ID NO: 1606277 - DNA, 15 bp, Homo sapiens
ggttattaaggttaa

SEQ ID NO: 1606278 - DNA, 15 bp, Homo sapiens
aggttattaaggtta

SEQ ID NO: 1606279 - DNA, 15 bp, Homo sapiens
aaggttattaaggtt

SEQ ID NO: 1606280 - DNA, 15 bp, Homo sapiens
gaaggttattaaggt

SEQ ID NO: 1606281 - DNA, 15 bp, Homo sapiens
agaaggttattaagg

SEQ ID NO: 1606282 - DNA, 15 bp, Homo sapiens
cagaaggttattaag

SEQ ID NO: 1606283 - DNA, 15 bp, Homo sapiens
gcagaaggttattaa

SEQ ID NO: 1606284 - DNA, 15 bp, Homo sapiens
agcagaaggttatta

SEQ ID NO: 1606285 - DNA, 15 bp, Homo sapiens
tagcagaaggttatt

SEQ ID NO: 1606286 - DNA, 15 bp, Homo sapiens
ctagcagaaggttat

SEQ ID NO: 1606287 - DNA, 15 bp, Homo sapiens
cctagcagaaggtta

SEQ ID NO: 1606288 - DNA, 15 bp, Homo sapiens
ccctagcagaaggtt

SEQ ID NO: 1606289 - DNA, 15 bp, Homo sapiens
accctagcagaaggt

SEQ ID NO: 1606290 - DNA, 15 bp, Homo sapiens
aaccctagcagaagg

SEQ ID NO: 1606291 - DNA, 15 bp, Homo sapiens
aaaccctagcagaag

SEQ ID NO: 1606292 - DNA, 15 bp, Homo sapiens
caaaccctagcagaa

SEQ ID NO: 1606293 - DNA, 15 bp, Homo sapiens
gcaaaccctagcaga

SEQ ID NO: 1606294 - DNA, 15 bp, Homo sapiens
tgcaaaccctagcag

SEQ ID NO: 1606295 - DNA, 15 bp, Homo sapiens
atgcaaaccctagca

SEQ ID NO: 1606296 - DNA, 15 bp, Homo sapiens
catgcaaaccctagc

SEQ ID NO: 1606297 - DNA, 15 bp, Homo sapiens
acatgcaaaccctag

SEQ ID NO: 1606298 - DNA, 15 bp, Homo sapiens
cacatgcaaacccta

SEQ ID NO: 1606299 - DNA, 15 bp, Homo sapiens
acacatgcaaaccct

SEQ ID NO: 1606300 - DNA, 15 bp, Homo sapiens
cacacatgcaaaccc

SEQ ID NO: 1606301 - DNA, 15 bp, Homo sapiens
gcacacatgcaaacc

SEQ ID NO: 1606302 - DNA, 15 bp, Homo sapiens
ggcacacatgcaaac

SEQ ID NO: 1606303 - DNA, 15 bp, Homo sapiens
tggcacacatgcaaa

SEQ ID NO: 1606304 - DNA, 15 bp, Homo sapiens
atggcacacatgcaa

SEQ ID NO: 1606305 - DNA, 15 bp, Homo sapiens
gatggcacacatgca

SEQ ID NO: 1606306 - DNA, 15 bp, Homo sapiens
ggatggcacacatgc

SEQ ID NO: 1606307 - DNA, 15 bp, Homo sapiens
tggatggcacacatg

SEQ ID NO: 1606308 - DNA, 15 bp, Homo sapiens
ttggatggcacacat

SEQ ID NO: 1606309 - DNA, 15 bp, Homo sapiens
tttggatggcacaca

SEQ ID NO: 1606310 - DNA, 15 bp, Homo sapiens
ttttggatggcacac

SEQ ID NO: 1606311 - DNA, 15 bp, Homo sapiens
attttggatggcaca

SEQ ID NO: 1606312 - DNA, 15 bp, Homo sapiens
aattttggatggcac

SEQ ID NO: 1606313 - DNA, 15 bp, Homo sapiens
gaattttggatggca

SEQ ID NO: 1606314 - DNA, 15 bp, Homo sapiens
ggaattttggatggc

SEQ ID NO: 1606315 - DNA, 15 bp, Homo sapiens
tggaattttggatgg

SEQ ID NO: 1606316 - DNA, 15 bp, Homo sapiens
ctggaattttggatg

SEQ ID NO: 1606317 - DNA, 15 bp, Homo sapiens
actggaattttggat

SEQ ID NO: 1606318 - DNA, 15 bp, Homo sapiens
cactggaattttgga

SEQ ID NO: 1606319 - DNA, 15 bp, Homo sapiens
acactggaattttgg

SEQ ID NO: 1606320 - DNA, 15 bp, Homo sapiens
aacactggaattttg

SEQ ID NO: 1606321 - DNA, 15 bp, Homo sapiens
caacactggaatttt

SEQ ID NO: 1606322 - DNA, 15 bp, Homo sapiens
gcaacactggaattt

SEQ ID NO: 1606323 - DNA, 15 bp, Homo sapiens
ggcaacactggaatt

SEQ ID NO: 1606324 - DNA, 15 bp, Homo sapiens
tggcaacactggaat

SEQ ID NO: 1606325 - DNA, 15 bp, Homo sapiens
ttggcaacactggaa

SEQ ID NO: 1606326 - DNA, 15 bp, Homo sapiens
attggcaacactgga

SEQ ID NO: 1606327 - DNA, 15 bp, Homo sapiens
cattggcaacactgg

SEQ ID NO: 1606328 - DNA, 15 bp, Homo sapiens
gcattggcaacactg

SEQ ID NO: 1606329 - DNA, 15 bp, Homo sapiens
cgcattggcaacact

SEQ ID NO: 1606330 - DNA, 15 bp, Homo sapiens
tcgcattggcaacac

SEQ ID NO: 1606331 - DNA, 15 bp, Homo sapiens
atcgcattggcaaca

SEQ ID NO: 1606332 - DNA, 15 bp, Homo sapiens
tatcgcattggcaac

SEQ ID NO: 1606333 - DNA, 15 bp, Homo sapiens
ctatcgcattggcaa

SEQ ID NO: 1606334 - DNA, 15 bp, Homo sapiens
actatcgcattggca

SEQ ID NO: 1606335 - DNA, 15 bp, Homo sapiens
tactatcgcattggc

SEQ ID NO: 1606336 - DNA, 15 bp, Homo sapiens
atactatcgcattgg

SEQ ID NO: 1606337 - DNA, 15 bp, Homo sapiens
aatactatcgcattg

SEQ ID NO: 1606338 - DNA, 15 bp, Homo sapiens
taatactatcgcatt

SEQ ID NO: 1606339 - DNA, 15 bp, Homo sapiens
ttaatactatcgcat

SEQ ID NO: 1606340 - DNA, 15 bp, Homo sapiens
cttaatactatcgca

SEQ ID NO: 1606341 - DNA, 15 bp, Homo sapiens
tcttaatactatcgc

SEQ ID NO: 1606342 - DNA, 15 bp, Homo sapiens
ctcttaatactatcg

SEQ ID NO: 1606343 - DNA, 15 bp, Homo sapiens
cctcttaatactatc

SEQ ID NO: 1606344 - DNA, 15 bp, Homo sapiens
acctcttaatactat

SEQ ID NO: 1606345 - DNA, 15 bp, Homo sapiens
cacctcttaatacta

SEQ ID NO: 1606346 - DNA, 15 bp, Homo sapiens
gcacctcttaatact

SEQ ID NO: 1606347 - DNA, 15 bp, Homo sapiens
tgcacctcttaatac

SEQ ID NO: 1606348 - DNA, 15 bp, Homo sapiens
ctgcacctcttaata

SEQ ID NO: 1606349 - DNA, 15 bp, Homo sapiens
gctgcacctcttaat

SEQ ID NO: 1606350 - DNA, 15 bp, Homo sapiens
ggctgcacctcttaa

SEQ ID NO: 1606351 - DNA, 15 bp, Homo sapiens
aggctgcacctctta

SEQ ID NO: 1606352 - DNA, 15 bp, Homo sapiens
aaggctgcacctctt

SEQ ID NO: 1606353 - DNA, 15 bp, Homo sapiens
aaaggctgcacctct

SEQ ID NO: 1606354 - DNA, 15 bp, Homo sapiens
taaaggctgcacctc

SEQ ID NO: 1606355 - DNA, 15 bp, Homo sapiens
ttaaaggctgcacct

SEQ ID NO: 1606356 - DNA, 15 bp, Homo sapiens
cttaaaggctgcacc

SEQ ID NO: 1606357 - DNA, 15 bp, Homo sapiens
tcttaaaggctgcac

SEQ ID NO: 1606358 - DNA, 15 bp, Homo sapiens
atcttaaaggctgca

SEQ ID NO: 1606359 - DNA, 15 bp, Homo sapiens
catcttaaaggctgc

SEQ ID NO: 1606360 - DNA, 15 bp, Homo sapiens
acatcttaaaggctg

SEQ ID NO: 1606361 - DNA, 15 bp, Homo sapiens
cacatcttaaaggct

SEQ ID NO: 1606362 - DNA, 15 bp, Homo sapiens
tcacatcttaaaggc

SEQ ID NO: 1606363 - DNA, 15 bp, Homo sapiens
atcacatcttaaagg

SEQ ID NO: 1606364 - DNA, 15 bp, Homo sapiens
aatcacatcttaaag

SEQ ID NO: 1606365 - DNA, 15 bp, Homo sapiens
taatcacatcttaaa

SEQ ID NO: 1606366 - DNA, 15 bp, Homo sapiens
ctaatcacatcttaa

SEQ ID NO: 1606367 - DNA, 15 bp, Homo sapiens
cctaatcacatctta

SEQ ID NO: 1606368 - DNA, 15 bp, Homo sapiens
acctaatcacatctt

SEQ ID NO: 1606369 - DNA, 15 bp, Homo sapiens
gacctaatcacatct

SEQ ID NO: 1606370 - DNA, 15 bp, Homo sapiens
tgacctaatcacatc

SEQ ID NO: 1606371 - DNA, 15 bp, Homo sapiens
atgacctaatcacat

SEQ ID NO: 1606372 - DNA, 15 bp, Homo sapiens
catgacctaatcaca

SEQ ID NO: 1606373 - DNA, 15 bp, Homo sapiens
tcatgacctaatcac

SEQ ID NO: 1606374 - DNA, 15 bp, Homo sapiens
ctcatgacctaatca

SEQ ID NO: 1606375 - DNA, 15 bp, Homo sapiens
cctcatgacctaatc

SEQ ID NO: 1606376 - DNA, 15 bp, Homo sapiens
ccctcatgacctaat

SEQ ID NO: 1606377 - DNA, 15 bp, Homo sapiens
tccctcatgacctaa

SEQ ID NO: 1606378 - DNA, 15 bp, Homo sapiens
atccctcatgaccta

SEQ ID NO: 1606379 - DNA, 15 bp, Homo sapiens
gatccctcatgacct

SEQ ID NO: 1606380 - DNA, 15 bp, Homo sapiens
ggatccctcatgacc

SEQ ID NO: 1606381 - DNA, 15 bp, Homo sapiens
aggatccctcatgac

SEQ ID NO: 1606382 - DNA, 15 bp, Homo sapiens
gaggatccctcatga

SEQ ID NO: 1606383 - DNA, 15 bp, Homo sapiens
ggaggatccctcatg

SEQ ID NO: 1606384 - DNA, 15 bp, Homo sapiens
aggaggatccctcat

SEQ ID NO: 1606385 - DNA, 15 bp, Homo sapiens
aaggaggatccctca

SEQ ID NO: 1606386 - DNA, 15 bp, Homo sapiens
gaaggaggatccctc

SEQ ID NO: 1606387 - DNA, 15 bp, Homo sapiens
ggaaggaggatccct

SEQ ID NO: 1606388 - DNA, 15 bp, Homo sapiens
aggaaggaggatccc

SEQ ID NO: 1606389 - DNA, 15 bp, Homo sapiens
aaggaaggaggatcc

SEQ ID NO: 1606390 - DNA, 15 bp, Homo sapiens
taaggaaggaggatc

SEQ ID NO: 1606391 - DNA, 15 bp, Homo sapiens
ttaaggaaggaggat

SEQ ID NO: 1606392 - DNA, 15 bp, Homo sapiens
attaaggaaggagga

SEQ ID NO: 1606393 - DNA, 15 bp, Homo sapiens
cattaaggaaggagg

SEQ ID NO: 1606394 - DNA, 15 bp, Homo sapiens
tcattaaggaaggag

SEQ ID NO: 1606395 - DNA, 15 bp, Homo sapiens
ctcattaaggaagga

SEQ ID NO: 1606396 - DNA, 15 bp, Homo sapiens
tctcattaaggaagg

SEQ ID NO: 1606397 - DNA, 15 bp, Homo sapiens
atctcattaaggaag

SEQ ID NO: 1606398 - DNA, 15 bp, Homo sapiens
aatctcattaaggaa

SEQ ID NO: 1606399 - DNA, 15 bp, Homo sapiens
taatctcattaagga

SEQ ID NO: 1606400 - DNA, 15 bp, Homo sapiens
ttaatctcattaagg

SEQ ID NO: 1606401 - DNA, 15 bp, Homo sapiens
cttaatctcattaag

SEQ ID NO: 1606402 - DNA, 15 bp, Homo sapiens
ccttaatctcattaa

SEQ ID NO: 1606403 - DNA, 15 bp, Homo sapiens
tccttaatctcatta

SEQ ID NO: 1606404 - DNA, 15 bp, Homo sapiens
atccttaatctcatt

SEQ ID NO: 1606405 - DNA, 15 bp, Homo sapiens
gatccttaatctcat

SEQ ID NO: 1606406 - DNA, 15 bp, Homo sapiens
agatccttaatctca

SEQ ID NO: 1606407 - DNA, 15 bp, Homo sapiens
aagatccttaatctc

SEQ ID NO: 1606408 - DNA, 15 bp, Homo sapiens
taagatccttaatct

SEQ ID NO: 1606409 - DNA, 15 bp, Homo sapiens
ataagatccttaatc

SEQ ID NO: 1606410 - DNA, 15 bp, Homo sapiens
tataagatccttaat

SEQ ID NO: 1606411 - DNA, 15 bp, Homo sapiens
ttataagatccttaa

SEQ ID NO: 1606412 - DNA, 15 bp, Homo sapiens
tttataagatcctta

SEQ ID NO: 1606413 - DNA, 15 bp, Homo sapiens
ttttataagatcctt

SEQ ID NO: 1606414 - DNA, 15 bp, Homo sapiens
cttttataagatcct

SEQ ID NO: 1606415 - DNA, 15 bp, Homo sapiens
tcttttataagatcc

SEQ ID NO: 1606416 - DNA, 15 bp, Homo sapiens
ctcttttataagatc

SEQ ID NO: 1606417 - DNA, 15 bp, Homo sapiens
cctcttttataagat

SEQ ID NO: 1606418 - DNA, 15 bp, Homo sapiens
gcctcttttataaga

SEQ ID NO: 1606419 - DNA, 15 bp, Homo sapiens
agcctcttttataag

SEQ ID NO: 1606420 - DNA, 15 bp, Homo sapiens
aagcctcttttataa

SEQ ID NO: 1606421 - DNA, 15 bp, Homo sapiens
gaagcctcttttata

SEQ ID NO: 1606422 - DNA, 15 bp, Homo sapiens
tgaagcctcttttat

SEQ ID NO: 1606423 - DNA, 15 bp, Homo sapiens
gtgaagcctctttta

SEQ ID NO: 1606424 - DNA, 15 bp, Homo sapiens
cgtgaagcctctttt

SEQ ID NO: 1606425 - DNA, 15 bp, Homo sapiens
tcgtgaagcctcttt

SEQ ID NO: 1606426 - DNA, 15 bp, Homo sapiens
ttcgtgaagcctctt

SEQ ID NO: 1606427 - DNA, 15 bp, Homo sapiens
tttcgtgaagcctct

SEQ ID NO: 1606428 - DNA, 15 bp, Homo sapiens
gtttcgtgaagcctc

SEQ ID NO: 1606429 - DNA, 15 bp, Homo sapiens
tgtttcgtgaagcct

SEQ ID NO: 1606430 - DNA, 15 bp, Homo sapiens
atgtttcgtgaagcc

SEQ ID NO: 1606431 - DNA, 15 bp, Homo sapiens
aatgtttcgtgaagc

SEQ ID NO: 1606432 - DNA, 15 bp, Homo sapiens
aaatgtttcgtgaag

SEQ ID NO: 1606433 - DNA, 15 bp, Homo sapiens
caaatgtttcgtgaa

SEQ ID NO: 1606434 - DNA, 15 bp, Homo sapiens
ccaaatgtttcgtga

SEQ ID NO: 1606435 - DNA, 15 bp, Homo sapiens
gccaaatgtttcgtg

SEQ ID NO: 1606436 - DNA, 15 bp, Homo sapiens
agccaaatgtttcgt

SEQ ID NO: 1606437 - DNA, 15 bp, Homo sapiens
tagccaaatgtttcg

SEQ ID NO: 1606438 - DNA, 15 bp, Homo sapiens
ctagccaaatgtttc

SEQ ID NO: 1606439 - DNA, 15 bp, Homo sapiens
gctagccaaatgttt

SEQ ID NO: 1606440 - DNA, 15 bp, Homo sapiens
agctagccaaatgtt

SEQ ID NO: 1606441 - DNA, 15 bp, Homo sapiens
aagctagccaaatgt

SEQ ID NO: 1606442 - DNA, 15 bp, Homo sapiens
caagctagccaaatg

SEQ ID NO: 1606443 - DNA, 15 bp, Homo sapiens
gcaagctagccaaat

SEQ ID NO: 1606444 - DNA, 15 bp, Homo sapiens
tgcaagctagccaaa

SEQ ID NO: 1606445 - DNA, 15 bp, Homo sapiens
ctgcaagctagccaa

SEQ ID NO: 1606446 - DNA, 15 bp, Homo sapiens
actgcaagctagcca

SEQ ID NO: 1606447 - DNA, 15 bp, Homo sapiens
gactgcaagctagcc

SEQ ID NO: 1606448 - DNA, 15 bp, Homo sapiens
agactgcaagctagc

SEQ ID NO: 1606449 - DNA, 15 bp, Homo sapiens
aagactgcaagctag

SEQ ID NO: 1606450 - DNA, 15 bp, Homo sapiens
caagactgcaagcta

SEQ ID NO: 1606451 - DNA, 15 bp, Homo sapiens
gcaagactgcaagct

SEQ ID NO: 1606452 - DNA, 15 bp, Homo sapiens
agcaagactgcaagc

SEQ ID NO: 1606453 - DNA, 15 bp, Homo sapiens
gagcaagactgcaag

SEQ ID NO: 1606454 - DNA, 15 bp, Homo sapiens
agagcaagactgcaa

SEQ ID NO: 1606455 - DNA, 15 bp, Homo sapiens
aagagcaagactgca

SEQ ID NO: 1606456 - DNA, 15 bp, Homo sapiens
gaagagcaagactgc

SEQ ID NO: 1606457 - DNA, 15 bp, Homo sapiens
agaagagcaagactg

SEQ ID NO: 1606458 - DNA, 15 bp, Homo sapiens
gagaagagcaagact

SEQ ID NO: 1606459 - DNA, 15 bp, Homo sapiens
ggagaagagcaagac

SEQ ID NO: 1606460 - DNA, 15 bp, Homo sapiens
gggagaagagcaaga

SEQ ID NO: 1606461 - DNA, 15 bp, Homo sapiens
tgggagaagagcaag

SEQ ID NO: 1606462 - DNA, 15 bp, Homo sapiens
atgggagaagagcaa

SEQ ID NO: 1606463 - DNA, 15 bp, Homo sapiens
catgggagaagagca

SEQ ID NO: 1606464 - DNA, 15 bp, Homo sapiens
acatgggagaagagc

SEQ ID NO: 1606465 - DNA, 15 bp, Homo sapiens
cacatgggagaagag

SEQ ID NO: 1606466 - DNA, 15 bp, Homo sapiens
tcacatgggagaaga

SEQ ID NO: 1606467 - DNA, 15 bp, Homo sapiens
ctcacatgggagaag

SEQ ID NO: 1606468 - DNA, 15 bp, Homo sapiens
cctcacatgggagaa

SEQ ID NO: 1606469 - DNA, 15 bp, Homo sapiens
tcctcacatgggaga

SEQ ID NO: 1606470 - DNA, 15 bp, Homo sapiens
gtcctcacatgggag

SEQ ID NO: 1606471 - DNA, 15 bp, Homo sapiens
tgtcctcacatggga

SEQ ID NO: 1606472 - DNA, 15 bp, Homo sapiens
gtgtcctcacatggg

SEQ ID NO: 1606473 - DNA, 15 bp, Homo sapiens
tgtgtcctcacatgg

SEQ ID NO: 1606474 - DNA, 15 bp, Homo sapiens
ctgtgtcctcacatg

SEQ ID NO: 1606475 - DNA, 15 bp, Homo sapiens
actgtgtcctcacat

SEQ ID NO: 1606476 - DNA, 15 bp, Homo sapiens
cactgtgtcctcaca

SEQ ID NO: 1606477 - DNA, 15 bp, Homo sapiens
acactgtgtcctcac

SEQ ID NO: 1606478 - DNA, 15 bp, Homo sapiens
aacactgtgtcctca

SEQ ID NO: 1606479 - DNA, 15 bp, Homo sapiens
gaacactgtgtcctc

SEQ ID NO: 1606480 - DNA, 15 bp, Homo sapiens
ggaacactgtgtcct

SEQ ID NO: 1606481 - DNA, 15 bp, Homo sapiens
aggaacactgtgtcc

SEQ ID NO: 1606482 - DNA, 15 bp, Homo sapiens
gaggaacactgtgtc

SEQ ID NO: 1606483 - DNA, 15 bp, Homo sapiens
ggaggaacactgtgt

SEQ ID NO: 1606484 - DNA, 15 bp, Homo sapiens
gggaggaacactgtg

SEQ ID NO: 1606485 - DNA, 15 bp, Homo sapiens
agggaggaacactgt

SEQ ID NO: 1606486 - DNA, 15 bp, Homo sapiens
tagggaggaacactg

SEQ ID NO: 1606487 - DNA, 15 bp, Homo sapiens
gtagggaggaacact

SEQ ID NO: 1606488 - DNA, 15 bp, Homo sapiens
tgtagggaggaacac

SEQ ID NO: 1606489 - DNA, 15 bp, Homo sapiens
ttgtagggaggaaca

SEQ ID NO: 1606490 - DNA, 15 bp, Homo sapiens
cttgtagggaggaac

SEQ ID NO: 1606491 - DNA, 15 bp, Homo sapiens
ccttgtagggaggaa

SEQ ID NO: 1606492 - DNA, 15 bp, Homo sapiens
gccttgtagggagga

SEQ ID NO: 1606493 - DNA, 15 bp, Homo sapiens
ggccttgtagggagg

SEQ ID NO: 1606494 - DNA, 15 bp, Homo sapiens
gggccttgtagggag

SEQ ID NO: 1606495 - DNA, 15 bp, Homo sapiens
agggccttgtaggga

SEQ ID NO: 1606496 - DNA, 15 bp, Homo sapiens
aagggccttgtaggg

SEQ ID NO: 1606497 - DNA, 15 bp, Homo sapiens
taagggccttgtagg

SEQ ID NO: 1606498 - DNA, 15 bp, Homo sapiens
gtaagggccttgtag

SEQ ID NO: 1606499 - DNA, 15 bp, Homo sapiens
ggtaagggccttgta

SEQ ID NO: 1606500 - DNA, 15 bp, Homo sapiens
tggtaagggccttgt

SEQ ID NO: 1606501 - DNA, 15 bp, Homo sapiens
ctggtaagggccttg

SEQ ID NO: 1606502 - DNA, 15 bp, Homo sapiens
cctggtaagggcctt

SEQ ID NO: 1606503 - DNA, 15 bp, Homo sapiens
acctggtaagggcct

SEQ ID NO: 1606504 - DNA, 15 bp, Homo sapiens
tacctggtaagggcc

SEQ ID NO: 1606505 - DNA, 15 bp, Homo sapiens
gtacctggtaagggc

SEQ ID NO: 1606506 - DNA, 15 bp, Homo sapiens
ggtacctggtaaggg

SEQ ID NO: 1606507 - DNA, 15 bp, Homo sapiens
tggtacctggtaagg

SEQ ID NO: 1606508 - DNA, 15 bp, Homo sapiens
ctggtacctggtaag

SEQ ID NO: 1606509 - DNA, 15 bp, Homo sapiens
gctggtacctggtaa

SEQ ID NO: 1606510 - DNA, 15 bp, Homo sapiens
cgctggtacctggta

SEQ ID NO: 1606511 - DNA, 15 bp, Homo sapiens
acgctggtacctggt

SEQ ID NO: 1606512 - DNA, 15 bp, Homo sapiens
gacgctggtacctgg

SEQ ID NO: 1606513 - DNA, 15 bp, Homo sapiens
agacgctggtacctg

SEQ ID NO: 1606514 - DNA, 15 bp, Homo sapiens
aagacgctggtacct

SEQ ID NO: 1606515 - DNA, 15 bp, Homo sapiens
caagacgctggtacc

SEQ ID NO: 1606516 - DNA, 15 bp, Homo sapiens
tcaagacgctggtac

SEQ ID NO: 1606517 - DNA, 15 bp, Homo sapiens
gtcaagacgctggta

SEQ ID NO: 1606518 - DNA, 15 bp, Homo sapiens
ggtcaagacgctggt

SEQ ID NO: 1606519 - DNA, 15 bp, Homo sapiens
aggtcaagacgctgg

SEQ ID NO: 1606520 - DNA, 15 bp, Homo sapiens
aaggtcaagacgctg

SEQ ID NO: 1606521 - DNA, 15 bp, Homo sapiens
caaggtcaagacgct

SEQ ID NO: 1606522 - DNA, 15 bp, Homo sapiens
ccaaggtcaagacgc

SEQ ID NO: 1606523 - DNA, 15 bp, Homo sapiens
tccaaggtcaagacg

SEQ ID NO: 1606524 - DNA, 15 bp, Homo sapiens
gtccaaggtcaagac

SEQ ID NO: 1606525 - DNA, 15 bp, Homo sapiens
agtccaaggtcaaga

SEQ ID NO: 1606526 - DNA, 15 bp, Homo sapiens
aagtccaaggtcaag

SEQ ID NO: 1606527 - DNA, 15 bp, Homo sapiens
gaagtccaaggtcaa

SEQ ID NO: 1606528 - DNA, 15 bp, Homo sapiens
ggaagtccaaggtca

SEQ ID NO: 1606529 - DNA, 15 bp, Homo sapiens
cggaagtccaaggtc

SEQ ID NO: 1606530 - DNA, 15 bp, Homo sapiens
tcggaagtccaaggt

SEQ ID NO: 1606531 - DNA, 15 bp, Homo sapiens
ctcggaagtccaagg

SEQ ID NO: 1606532 - DNA, 15 bp, Homo sapiens
gctcggaagtccaag

SEQ ID NO: 1606533 - DNA, 15 bp, Homo sapiens
ggctcggaagtccaa

SEQ ID NO: 1606534 - DNA, 15 bp, Homo sapiens
aggctcggaagtcca

SEQ ID NO: 1606535 - DNA, 15 bp, Homo sapiens
gaggctcggaagtcc

SEQ ID NO: 1606536 - DNA, 15 bp, Homo sapiens
ggaggctcggaagtc

SEQ ID NO: 1606537 - DNA, 15 bp, Homo sapiens
tggaggctcggaagt

SEQ ID NO: 1606538 - DNA, 15 bp, Homo sapiens
ctggaggctcggaag

SEQ ID NO: 1606539 - DNA, 15 bp, Homo sapiens
tctggaggctcggaa

SEQ ID NO: 1606540 - DNA, 15 bp, Homo sapiens
ttctggaggctcgga

SEQ ID NO: 1606541 - DNA, 15 bp, Homo sapiens
gttctggaggctcgg

SEQ ID NO: 1606542 - DNA, 15 bp, Homo sapiens
agttctggaggctcg

SEQ ID NO: 1606543 - DNA, 15 bp, Homo sapiens
cagttctggaggctc

SEQ ID NO: 1606544 - DNA, 15 bp, Homo sapiens
agaaatttatttctc

SEQ ID NO: 1606545 - DNA, 15 bp, Homo sapiens
cagaaatttatttct

SEQ ID NO: 1606546 - DNA, 15 bp, Homo sapiens
acagaaatttatttc

SEQ ID NO: 1606547 - DNA, 15 bp, Homo sapiens
gacagaaatttattt

SEQ ID NO: 1606548 - DNA, 15 bp, Homo sapiens
cgacagaaatttatt

SEQ ID NO: 1606549 - DNA, 15 bp, Homo sapiens
acgacagaaatttat

SEQ ID NO: 1606550 - DNA, 15 bp, Homo sapiens
aacgacagaaattta

SEQ ID NO: 1606551 - DNA, 15 bp, Homo sapiens
aaaacgacagaaatt

SEQ ID NO: 1606552 - DNA, 15 bp, Homo sapiens
aaaaacgacagaaat

SEQ ID NO: 1606553 - DNA, 15 bp, Homo sapiens
taaaaacgacagaaa

SEQ ID NO: 1606554 - DNA, 15 bp, Homo sapiens
ttaaaaacgacagaa

SEQ ID NO: 1606555 - DNA, 15 bp, Homo sapiens
tttaaaaacgacaga

SEQ ID NO: 1606556 - DNA, 15 bp, Homo sapiens
gtttaaaaacgacag

SEQ ID NO: 1606557 - DNA, 15 bp, Homo sapiens
agtttaaaaacgaca

SEQ ID NO: 1606558 - DNA, 15 bp, Homo sapiens
tagtttaaaaacgac

SEQ ID NO: 1606559 - DNA, 15 bp, Homo sapiens
gtagtttaaaaacga

SEQ ID NO: 1606560 - DNA, 15 bp, Homo sapiens
agtagtttaaaaacg

SEQ ID NO: 1606561 - DNA, 15 bp, Homo sapiens
gagtagtttaaaaac

SEQ ID NO: 1606562 - DNA, 15 bp, Homo sapiens
tgagtagtttaaaaa

SEQ ID NO: 1606563 - DNA, 15 bp, Homo sapiens
ctgagtagtttaaaa

SEQ ID NO: 1606564 - DNA, 15 bp, Homo sapiens
actgagtagtttaaa

SEQ ID NO: 1606565 - DNA, 15 bp, Homo sapiens
aactgagtagtttaa

SEQ ID NO: 1606566 - DNA, 15 bp, Homo sapiens
aaactgagtagttta

SEQ ID NO: 1606567 - DNA, 15 bp, Homo sapiens
gaaactgagtagttt

SEQ ID NO: 1606568 - DNA, 15 bp, Homo sapiens
tgaaactgagtagtt

SEQ ID NO: 1606569 - DNA, 15 bp, Homo sapiens
ctgaaactgagtagt

SEQ ID NO: 1606570 - DNA, 15 bp, Homo sapiens
gctgaaactgagtag

SEQ ID NO: 1606571 - DNA, 15 bp, Homo sapiens
agctgaaactgagta

SEQ ID NO: 1606572 - DNA, 15 bp, Homo sapiens
tagctgaaactgagt

SEQ ID NO: 1606573 - DNA, 15 bp, Homo sapiens
gtagctgaaactgag

SEQ ID NO: 1606574 - DNA, 15 bp, Homo sapiens
agtagctgaaactga

SEQ ID NO: 1606575 - DNA, 15 bp, Homo sapiens
gagtagctgaaactg

SEQ ID NO: 1606576 - DNA, 15 bp, Homo sapiens
agagtagctgaaact

SEQ ID NO: 1606577 - DNA, 15 bp, Homo sapiens
cagagtagctgaaac

SEQ ID NO: 1606578 - DNA, 15 bp, Homo sapiens
acagagtagctgaaa

SEQ ID NO: 1606579 - DNA, 15 bp, Homo sapiens
aacagagtagctgaa

SEQ ID NO: 1606580 - DNA, 15 bp, Homo sapiens
taacagagtagctga

SEQ ID NO: 1606581 - DNA, 15 bp, Homo sapiens
ataacagagtagctg

SEQ ID NO: 1606582 - DNA, 15 bp, Homo sapiens
tataacagagtagct

SEQ ID NO: 1606583 - DNA, 15 bp, Homo sapiens
atataacagagtagc

SEQ ID NO: 1606584 - DNA, 15 bp, Homo sapiens
gatataacagagtag

SEQ ID NO: 1606585 - DNA, 15 bp, Homo sapiens
tgatataacagagta

SEQ ID NO: 1606586 - DNA, 15 bp, Homo sapiens
ctgatataacagagt

SEQ ID NO: 1606587 - DNA, 15 bp, Homo sapiens
gctgatataacagag

SEQ ID NO: 1606588 - DNA, 15 bp, Homo sapiens
tgctgatataacaga

SEQ ID NO: 1606589 - DNA, 15 bp, Homo sapiens
gtgctgatataacag

SEQ ID NO: 1606590 - DNA, 15 bp, Homo sapiens
tgtgctgatataaca

SEQ ID NO: 1606591 - DNA, 15 bp, Homo sapiens
ttgtgctgatataac

SEQ ID NO: 1606592 - DNA, 15 bp, Homo sapiens
tttgtgctgatataa

SEQ ID NO: 1606593 - DNA, 15 bp, Homo sapiens
atttgtgctgatata

SEQ ID NO: 1606594 - DNA, 15 bp, Homo sapiens
catttgtgctgatat

SEQ ID NO: 1606595 - DNA, 15 bp, Homo sapiens
ccatttgtgctgata

SEQ ID NO: 1606596 - DNA, 15 bp, Homo sapiens
tccatttgtgctgat

SEQ ID NO: 1606597 - DNA, 15 bp, Homo sapiens
gtccatttgtgctga

SEQ ID NO: 1606598 - DNA, 15 bp, Homo sapiens
agtccatttgtgctg

SEQ ID NO: 1606599 - DNA, 15 bp, Homo sapiens
tagtccatttgtgct

SEQ ID NO: 1606600 - DNA, 15 bp, Homo sapiens
ttagtccatttgtgc

SEQ ID NO: 1606601 - DNA, 15 bp, Homo sapiens
cttagtccatttgtg

SEQ ID NO: 1606602 - DNA, 15 bp, Homo sapiens
tcttagtccatttgt

SEQ ID NO: 1606603 - DNA, 15 bp, Homo sapiens
atcttagtccatttg

SEQ ID NO: 1606604 - DNA, 15 bp, Homo sapiens
tatcttagtccattt

SEQ ID NO: 1606605 - DNA, 15 bp, Homo sapiens
gtatcttagtccatt

SEQ ID NO: 1606606 - DNA, 15 bp, Homo sapiens
ggtatcttagtccat

SEQ ID NO: 1606607 - DNA, 15 bp, Homo sapiens
aggtatcttagtcca

SEQ ID NO: 1606608 - DNA, 15 bp, Homo sapiens
aaggtatcttagtcc

SEQ ID NO: 1606609 - DNA, 15 bp, Homo sapiens
gaaggtatcttagtc

SEQ ID NO: 1606610 - DNA, 15 bp, Homo sapiens
agaaggtatcttagt

SEQ ID NO: 1606611 - DNA, 15 bp, Homo sapiens
tagaaggtatcttag

SEQ ID NO: 1606612 - DNA, 15 bp, Homo sapiens
ttagaaggtatctta

SEQ ID NO: 1606613 - DNA, 15 bp, Homo sapiens
tttagaaggtatctt

SEQ ID NO: 1606614 - DNA, 15 bp, Homo sapiens
ctttagaaggtatct

SEQ ID NO: 1606615 - DNA, 15 bp, Homo sapiens
tctttagaaggtatc

SEQ ID NO: 1606616 - DNA, 15 bp, Homo sapiens
atctttagaaggtat

SEQ ID NO: 1606617 - DNA, 15 bp, Homo sapiens
gatctttagaaggta

SEQ ID NO: 1606618 - DNA, 15 bp, Homo sapiens
ggatctttagaaggt

SEQ ID NO: 1606619 - DNA, 15 bp, Homo sapiens
aggatctttagaagg

SEQ ID NO: 1606620 - DNA, 15 bp, Homo sapiens
taggatctttagaag

SEQ ID NO: 1606621 - DNA, 15 bp, Homo sapiens
ataggatctttagaa

SEQ ID NO: 1606622 - DNA, 15 bp, Homo sapiens
gataggatctttaga

SEQ ID NO: 1606623 - DNA, 15 bp, Homo sapiens
agataggatctttag

SEQ ID NO: 1606624 - DNA, 15 bp, Homo sapiens
gagataggatcttta

SEQ ID NO: 1606625 - DNA, 15 bp, Homo sapiens
ggagataggatcttt

SEQ ID NO: 1606626 - DNA, 15 bp, Homo sapiens
tggagataggatctt

SEQ ID NO: 1606627 - DNA, 15 bp, Homo sapiens
ctggagataggatct

SEQ ID NO: 1606628 - DNA, 15 bp, Homo sapiens
tctggagataggatc

SEQ ID NO: 1606629 - DNA, 15 bp, Homo sapiens
atctggagataggat

SEQ ID NO: 1606630 - DNA, 15 bp, Homo sapiens
tatctggagatagga

SEQ ID NO: 1606631 - DNA, 15 bp, Homo sapiens
ctatctggagatagg

SEQ ID NO: 1606632 - DNA, 15 bp, Homo sapiens
tctatctggagatag

SEQ ID NO: 1606633 - DNA, 15 bp, Homo sapiens
ctctatctggagata

SEQ ID NO: 1606634 - DNA, 15 bp, Homo sapiens
actctatctggagat

SEQ ID NO: 1606635 - DNA, 15 bp, Homo sapiens
tactctatctggaga

SEQ ID NO: 1606636 - DNA, 15 bp, Homo sapiens
ttactctatctggag

SEQ ID NO: 1606637 - DNA, 15 bp, Homo sapiens
gttactctatctgga

SEQ ID NO: 1606638 - DNA, 15 bp, Homo sapiens
tgttactctatctgg

SEQ ID NO: 1606639 - DNA, 15 bp, Homo sapiens
gtgttactctatctg

SEQ ID NO: 1606640 - DNA, 15 bp, Homo sapiens
agtgttactctatct

SEQ ID NO: 1606641 - DNA, 15 bp, Homo sapiens
cagtgttactctatc

SEQ ID NO: 1606642 - DNA, 15 bp, Homo sapiens
ccagtgttactctat

SEQ ID NO: 1606643 - DNA, 15 bp, Homo sapiens
cccagtgttactcta

SEQ ID NO: 1606644 - DNA, 15 bp, Homo sapiens
ccccagtgttactct

SEQ ID NO: 1606645 - DNA, 15 bp, Homo sapiens
cccccagtgttactc

SEQ ID NO: 1606646 - DNA, 15 bp, Homo sapiens
tcccccagtgttact

SEQ ID NO: 1606647 - DNA, 15 bp, Homo sapiens
ctcccccagtgttac

SEQ ID NO: 1606648 - DNA, 15 bp, Homo sapiens
cctcccccagtgtta

SEQ ID NO: 1606649 - DNA, 15 bp, Homo sapiens
ccctcccccagtgtt

SEQ ID NO: 1606650 - DNA, 15 bp, Homo sapiens
cccctcccccagtgt

SEQ ID NO: 1606651 - DNA, 15 bp, Homo sapiens
ccccctcccccagtg

SEQ ID NO: 1606652 - DNA, 15 bp, Homo sapiens
cccccctcccccagt

SEQ ID NO: 1606653 - DNA, 15 bp, Homo sapiens
ccccccctcccccag

SEQ ID NO: 1606654 - DNA, 15 bp, Homo sapiens
accccccctccccca

SEQ ID NO: 1606655 - DNA, 15 bp, Homo sapiens
aaccccccctccccc

SEQ ID NO: 1606656 - DNA, 15 bp, Homo sapiens
taaccccccctcccc

SEQ ID NO: 1606657 - DNA, 15 bp, Homo sapiens
ctaaccccccctccc

SEQ ID NO: 1606658 - DNA, 15 bp, Homo sapiens
cctaaccccccctcc

SEQ ID NO: 1606659 - DNA, 15 bp, Homo sapiens
tcctaaccccccctc

SEQ ID NO: 1606660 - DNA, 15 bp, Homo sapiens
gtcctaaccccccct

SEQ ID NO: 1606661 - DNA, 15 bp, Homo sapiens
agtcctaaccccccc

SEQ ID NO: 1606662 - DNA, 15 bp, Homo sapiens
aagtcctaacccccc

SEQ ID NO: 1606663 - DNA, 15 bp, Homo sapiens
gaagtcctaaccccc

SEQ ID NO: 1606664 - DNA, 15 bp, Homo sapiens
tgaagtcctaacccc

SEQ ID NO: 1606665 - DNA, 15 bp, Homo sapiens
ttgaagtcctaaccc

SEQ ID NO: 1606666 - DNA, 15 bp, Homo sapiens
gttgaagtcctaacc

SEQ ID NO: 1606667 - DNA, 15 bp, Homo sapiens
tgttgaagtcctaac

SEQ ID NO: 1606668 - DNA, 15 bp, Homo sapiens
atgttgaagtcctaa

SEQ ID NO: 1606669 - DNA, 15 bp, Homo sapiens
gatgttgaagtccta

SEQ ID NO: 1606670 - DNA, 15 bp, Homo sapiens
agatgttgaagtcct

SEQ ID NO: 1606671 - DNA, 15 bp, Homo sapiens
cagatgttgaagtcc

SEQ ID NO: 1606672 - DNA, 15 bp, Homo sapiens
tcagatgttgaagtc

SEQ ID NO: 1606673 - DNA, 15 bp, Homo sapiens
ttcagatgttgaagt

SEQ ID NO: 1606674 - DNA, 15 bp, Homo sapiens
attcagatgttgaag

SEQ ID NO: 1606675 - DNA, 15 bp, Homo sapiens
aattcagatgttgaa

SEQ ID NO: 1606676 - DNA, 15 bp, Homo sapiens
aaattcagatgttga

SEQ ID NO: 1606677 - DNA, 15 bp, Homo sapiens
aaaattcagatgttg

SEQ ID NO: 1606678 - DNA, 15 bp, Homo sapiens
taaaattcagatgtt

SEQ ID NO: 1606679 - DNA, 15 bp, Homo sapiens
ctaaaattcagatgt

SEQ ID NO: 1606680 - DNA, 15 bp, Homo sapiens
cctaaaattcagatg

SEQ ID NO: 1606681 - DNA, 15 bp, Homo sapiens
ccctaaaattcagat

SEQ ID NO: 1606682 - DNA, 15 bp, Homo sapiens
cccctaaaattcaga

SEQ ID NO: 1606683 - DNA, 15 bp, Homo sapiens
tcccctaaaattcag

SEQ ID NO: 1606684 - DNA, 15 bp, Homo sapiens
ttcccctaaaattca

SEQ ID NO: 1606685 - DNA, 15 bp, Homo sapiens
gttcccctaaaattc

SEQ ID NO: 1606686 - DNA, 15 bp, Homo sapiens
tgttcccctaaaatt

SEQ ID NO: 1606687 - DNA, 15 bp, Homo sapiens
gtgttcccctaaaat

SEQ ID NO: 1606688 - DNA, 15 bp, Homo sapiens
tgtgttcccctaaaa

SEQ ID NO: 1606689 - DNA, 15 bp, Homo sapiens
ttgtgttcccctaaa

SEQ ID NO: 1606690 - DNA, 15 bp, Homo sapiens
attgtgttcccctaa

SEQ ID NO: 1606691 - DNA, 15 bp, Homo sapiens
aattgtgttccccta

SEQ ID NO: 1606692 - DNA, 15 bp, Homo sapiens
gaattgtgttcccct

SEQ ID NO: 1606693 - DNA, 15 bp, Homo sapiens
tgaattgtgttcccc

SEQ ID NO: 1606694 - DNA, 15 bp, Homo sapiens
ttgaattgtgttccc

SEQ ID NO: 1606695 - DNA, 15 bp, Homo sapiens
attgaattgtgttcc

SEQ ID NO: 1606696 - DNA, 15 bp, Homo sapiens
cattgaattgtgttc

SEQ ID NO: 1606697 - DNA, 15 bp, Homo sapiens
gcattgaattgtgtt

SEQ ID NO: 1606698 - DNA, 15 bp, Homo sapiens
ggcattgaattgtgt

SEQ ID NO: 1606699 - DNA, 15 bp, Homo sapiens
aggcattgaattgtg

SEQ ID NO: 1606700 - DNA, 15 bp, Homo sapiens
caggcattgaattgt

SEQ ID NO: 1606701 - DNA, 15 bp, Homo sapiens
gcaggcattgaattg

SEQ ID NO: 1606702 - DNA, 15 bp, Homo sapiens
agcaggcattgaatt

SEQ ID NO: 1606703 - DNA, 15 bp, Homo sapiens
gagcaggcattgaat

SEQ ID NO: 1606704 - DNA, 15 bp, Homo sapiens
tgagcaggcattgaa

SEQ ID NO: 1606705 - DNA, 15 bp, Homo sapiens
ctgagcaggcattga

SEQ ID NO: 1606706 - DNA, 15 bp, Homo sapiens
tctgagcaggcattg

SEQ ID NO: 1606707 - DNA, 15 bp, Homo sapiens
ttctgagcaggcatt

SEQ ID NO: 1606708 - DNA, 15 bp, Homo sapiens
cttctgagcaggcat

SEQ ID NO: 1606709 - DNA, 15 bp, Homo sapiens
gcttctgagcaggca

SEQ ID NO: 1606710 - DNA, 15 bp, Homo sapiens
ggcttctgagcaggc

SEQ ID NO: 1606711 - DNA, 15 bp, Homo sapiens
tggcttctgagcagg

SEQ ID NO: 1606712 - DNA, 15 bp, Homo sapiens
ttggcttctgagcag

SEQ ID NO: 1606713 - DNA, 15 bp, Homo sapiens
tttggcttctgagca

SEQ ID NO: 1606714 - DNA, 15 bp, Homo sapiens
atttggcttctgagc

SEQ ID NO: 1606715 - DNA, 15 bp, Homo sapiens
tatttggcttctgag

SEQ ID NO: 1606716 - DNA, 15 bp, Homo sapiens
gtatttggcttctga

SEQ ID NO: 1606717 - DNA, 15 bp, Homo sapiens
ggtatttggcttctg

SEQ ID NO: 1606718 - DNA, 15 bp, Homo sapiens
aggtatttggcttct

SEQ ID NO: 1606719 - DNA, 15 bp, Homo sapiens
gaggtatttggcttc

SEQ ID NO: 1606720 - DNA, 15 bp, Homo sapiens
cgaggtatttggctt

SEQ ID NO: 1606721 - DNA, 15 bp, Homo sapiens
tcgaggtatttggct

SEQ ID NO: 1606722 - DNA, 15 bp, Homo sapiens
atcgaggtatttggc

SEQ ID NO: 1606723 - DNA, 15 bp, Homo sapiens
tatcgaggtatttgg

SEQ ID NO: 1606724 - DNA, 15 bp, Homo sapiens
atatcgaggtatttg

SEQ ID NO: 1606725 - DNA, 15 bp, Homo sapiens
gatatcgaggtattt

SEQ ID NO: 1606726 - DNA, 15 bp, Homo sapiens
tgatatcgaggtatt

SEQ ID NO: 1606727 - DNA, 15 bp, Homo sapiens
ttgatatcgaggtat

SEQ ID NO: 1606728 - DNA, 15 bp, Homo sapiens
gttgatatcgaggta

SEQ ID NO: 1606729 - DNA, 15 bp, Homo sapiens
ggttgatatcgaggt

SEQ ID NO: 1606730 - DNA, 15 bp, Homo sapiens
aggttgatatcgagg

SEQ ID NO: 1606731 - DNA, 15 bp, Homo sapiens
aaggttgatatcgag

SEQ ID NO: 1606732 - DNA, 15 bp, Homo sapiens
aaaggttgatatcga

SEQ ID NO: 1606733 - DNA, 15 bp, Homo sapiens
aaaaggttgatatcg

SEQ ID NO: 1606734 - DNA, 15 bp, Homo sapiens
gaaaaggttgatatc

SEQ ID NO: 1606735 - DNA, 15 bp, Homo sapiens
ggaaaaggttgatat

SEQ ID NO: 1606736 - DNA, 15 bp, Homo sapiens
aggaaaaggttgata

SEQ ID NO: 1606737 - DNA, 15 bp, Homo sapiens
gaggaaaaggttgat

SEQ ID NO: 1606738 - DNA, 15 bp, Homo sapiens
agaggaaaaggttga

SEQ ID NO: 1606739 - DNA, 15 bp, Homo sapiens
gagaggaaaaggttg

SEQ ID NO: 1606740 - DNA, 15 bp, Homo sapiens
ggagaggaaaaggtt

SEQ ID NO: 1606741 - DNA, 15 bp, Homo sapiens
gggagaggaaaaggt

SEQ ID NO: 1606742 - DNA, 15 bp, Homo sapiens
agggagaggaaaagg

SEQ ID NO: 1606743 - DNA, 15 bp, Homo sapiens
gagggagaggaaaag

SEQ ID NO: 1606744 - DNA, 15 bp, Homo sapiens
tgagggagaggaaaa

SEQ ID NO: 1606745 - DNA, 15 bp, Homo sapiens
atgagggagaggaaa

SEQ ID NO: 1606746 - DNA, 15 bp, Homo sapiens
gatgagggagaggaa

SEQ ID NO: 1606747 - DNA, 15 bp, Homo sapiens
ggatgagggagagga

SEQ ID NO: 1606748 - DNA, 15 bp, Homo sapiens
tggatgagggagagg

SEQ ID NO: 1606749 - DNA, 15 bp, Homo sapiens
ttggatgagggagag

SEQ ID NO: 1606750 - DNA, 15 bp, Homo sapiens
gttggatgagggaga

SEQ ID NO: 1606751 - DNA, 15 bp, Homo sapiens
agttggatgagggag

SEQ ID NO: 1606752 - DNA, 15 bp, Homo sapiens
cagttggatgaggga

SEQ ID NO: 1606753 - DNA, 15 bp, Homo sapiens
ccagttggatgaggg

SEQ ID NO: 1606754 - DNA, 15 bp, Homo sapiens
accagttggatgagg

SEQ ID NO: 1606755 - DNA, 15 bp, Homo sapiens
gaccagttggatgag

SEQ ID NO: 1606756 - DNA, 15 bp, Homo sapiens
tgaccagttggatga

SEQ ID NO: 1606757 - DNA, 15 bp, Homo sapiens
atgaccagttggatg

SEQ ID NO: 1606758 - DNA, 15 bp, Homo sapiens
tatgaccagttggat

SEQ ID NO: 1606759 - DNA, 15 bp, Homo sapiens
ttatgaccagttgga

SEQ ID NO: 1606760 - DNA, 15 bp, Homo sapiens
tttatgaccagttgg

SEQ ID NO: 1606761 - DNA, 15 bp, Homo sapiens
ctttatgaccagttg

SEQ ID NO: 1606762 - DNA, 15 bp, Homo sapiens
actttatgaccagtt

SEQ ID NO: 1606763 - DNA, 15 bp, Homo sapiens
gactttatgaccagt

SEQ ID NO: 1606764 - DNA, 15 bp, Homo sapiens
tgactttatgaccag

SEQ ID NO: 1606765 - DNA, 15 bp, Homo sapiens
atgactttatgacca

SEQ ID NO: 1606766 - DNA, 15 bp, Homo sapiens
aatgactttatgacc

SEQ ID NO: 1606767 - DNA, 15 bp, Homo sapiens
aaatgactttatgac

SEQ ID NO: 1606768 - DNA, 15 bp, Homo sapiens
gaaatgactttatga

SEQ ID NO: 1606769 - DNA, 15 bp, Homo sapiens
ggaaatgactttatg

SEQ ID NO: 1606770 - DNA, 15 bp, Homo sapiens
tggaaatgactttat

SEQ ID NO: 1606771 - DNA, 15 bp, Homo sapiens
atggaaatgacttta

SEQ ID NO: 1606772 - DNA, 15 bp, Homo sapiens
aatggaaatgacttt

SEQ ID NO: 1606773 - DNA, 15 bp, Homo sapiens
gaatggaaatgactt

SEQ ID NO: 1606774 - DNA, 15 bp, Homo sapiens
ggaatggaaatgact

SEQ ID NO: 1606775 - DNA, 15 bp, Homo sapiens
tggaatggaaatgac

SEQ ID NO: 1606776 - DNA, 15 bp, Homo sapiens
gtggaatggaaatga

SEQ ID NO: 1606777 - DNA, 15 bp, Homo sapiens
tgtggaatggaaatg

SEQ ID NO: 1606778 - DNA, 15 bp, Homo sapiens
atgtggaatggaaat

SEQ ID NO: 1606779 - DNA, 15 bp, Homo sapiens
gatgtggaatggaaa

SEQ ID NO: 1606780 - DNA, 15 bp, Homo sapiens
agatgtggaatggaa

SEQ ID NO: 1606781 - DNA, 15 bp, Homo sapiens
aagatgtggaatgga

SEQ ID NO: 1606782 - DNA, 15 bp, Homo sapiens
taagatgtggaatgg

SEQ ID NO: 1606783 - DNA, 15 bp, Homo sapiens
ctaagatgtggaatg

SEQ ID NO: 1606784 - DNA, 15 bp, Homo sapiens
tctaagatgtggaat

SEQ ID NO: 1606785 - DNA, 15 bp, Homo sapiens
atctaagatgtggaa

SEQ ID NO: 1606786 - DNA, 15 bp, Homo sapiens
catctaagatgtgga

SEQ ID NO: 1606787 - DNA, 15 bp, Homo sapiens
acatctaagatgtgg

SEQ ID NO: 1606788 - DNA, 15 bp, Homo sapiens
aacatctaagatgtg

SEQ ID NO: 1606789 - DNA, 15 bp, Homo sapiens
aaacatctaagatgt

SEQ ID NO: 1606790 - DNA, 15 bp, Homo sapiens
gaaacatctaagatg

SEQ ID NO: 1606791 - DNA, 15 bp, Homo sapiens
ggaaacatctaagat

SEQ ID NO: 1606792 - DNA, 15 bp, Homo sapiens
gggaaacatctaaga

SEQ ID NO: 1606793 - DNA, 15 bp, Homo sapiens
tgggaaacatctaag

SEQ ID NO: 1606794 - DNA, 15 bp, Homo sapiens
ttgggaaacatctaa

SEQ ID NO: 1606795 - DNA, 15 bp, Homo sapiens
tttgggaaacatcta

SEQ ID NO: 1606796 - DNA, 15 bp, Homo sapiens
atttgggaaacatct

SEQ ID NO: 1606797 - DNA, 15 bp, Homo sapiens
gatttgggaaacatc

SEQ ID NO: 1606798 - DNA, 15 bp, Homo sapiens
ggatttgggaaacat

SEQ ID NO: 1606799 - DNA, 15 bp, Homo sapiens
tggatttgggaaaca

SEQ ID NO: 1606800 - DNA, 15 bp, Homo sapiens
ctggatttgggaaac

SEQ ID NO: 1606801 - DNA, 15 bp, Homo sapiens
gctggatttgggaaa

SEQ ID NO: 1606802 - DNA, 15 bp, Homo sapiens
ggctggatttgggaa

SEQ ID NO: 1606803 - DNA, 15 bp, Homo sapiens
gggctggatttggga

SEQ ID NO: 1606804 - DNA, 15 bp, Homo sapiens
ggggctggatttggg

SEQ ID NO: 1606805 - DNA, 15 bp, Homo sapiens
tggggctggatttgg

SEQ ID NO: 1606806 - DNA, 15 bp, Homo sapiens
gtggggctggatttg

SEQ ID NO: 1606807 - DNA, 15 bp, Homo sapiens
agtggggctggattt

SEQ ID NO: 1606808 - DNA, 15 bp, Homo sapiens
aagtggggctggatt

SEQ ID NO: 1606809 - DNA, 15 bp, Homo sapiens
gaagtggggctggat

SEQ ID NO: 1606810 - DNA, 15 bp, Homo sapiens
agaagtggggctgga

SEQ ID NO: 1606811 - DNA, 15 bp, Homo sapiens
aagaagtggggctgg

SEQ ID NO: 1606812 - DNA, 15 bp, Homo sapiens
gaagaagtggggctg

SEQ ID NO: 1606813 - DNA, 15 bp, Homo sapiens
ggaagaagtggggct

SEQ ID NO: 1606814 - DNA, 15 bp, Homo sapiens
aggaagaagtggggc

SEQ ID NO: 1606815 - DNA, 15 bp, Homo sapiens
gaggaagaagtgggg

SEQ ID NO: 1606816 - DNA, 15 bp, Homo sapiens
tgaggaagaagtggg

SEQ ID NO: 1606817 - DNA, 15 bp, Homo sapiens
gtgaggaagaagtgg

SEQ ID NO: 1606818 - DNA, 15 bp, Homo sapiens
ggtgaggaagaagtg

SEQ ID NO: 1606819 - DNA, 15 bp, Homo sapiens
tggtgaggaagaagt

SEQ ID NO: 1606820 - DNA, 15 bp, Homo sapiens
ctggtgaggaagaag

SEQ ID NO: 1606821 - DNA, 15 bp, Homo sapiens
actggtgaggaagaa

SEQ ID NO: 1606822 - DNA, 15 bp, Homo sapiens
aactggtgaggaaga

SEQ ID NO: 1606823 - DNA, 15 bp, Homo sapiens
gaactggtgaggaag

SEQ ID NO: 1606824 - DNA, 15 bp, Homo sapiens
agaactggtgaggaa

SEQ ID NO: 1606825 - DNA, 15 bp, Homo sapiens
gagaactggtgagga

SEQ ID NO: 1606826 - DNA, 15 bp, Homo sapiens
agagaactggtgagg

SEQ ID NO: 1606827 - DNA, 15 bp, Homo sapiens
gagagaactggtgag

SEQ ID NO: 1606828 - DNA, 15 bp, Homo sapiens
ggagagaactggtga

SEQ ID NO: 1606829 - DNA, 15 bp, Homo sapiens
tggagagaactggtg

SEQ ID NO: 1606830 - DNA, 15 bp, Homo sapiens
atggagagaactggt

SEQ ID NO: 1606831 - DNA, 15 bp, Homo sapiens
aatggagagaactgg

SEQ ID NO: 1606832 - DNA, 15 bp, Homo sapiens
gaatggagagaactg

SEQ ID NO: 1606833 - DNA, 15 bp, Homo sapiens
tgaatggagagaact

SEQ ID NO: 1606834 - DNA, 15 bp, Homo sapiens
gtgaatggagagaac

SEQ ID NO: 1606835 - DNA, 15 bp, Homo sapiens
agtgaatggagagaa

SEQ ID NO: 1606836 - DNA, 15 bp, Homo sapiens
cagtgaatggagaga

SEQ ID NO: 1606837 - DNA, 15 bp, Homo sapiens
gcagtgaatggagag

SEQ ID NO: 1606838 - DNA, 15 bp, Homo sapiens
ggcagtgaatggaga

SEQ ID NO: 1606839 - DNA, 15 bp, Homo sapiens
aggcagtgaatggag

SEQ ID NO: 1606840 - DNA, 15 bp, Homo sapiens
gaggcagtgaatgga

SEQ ID NO: 1606841 - DNA, 15 bp, Homo sapiens
tgaggcagtgaatgg

SEQ ID NO: 1606842 - DNA, 15 bp, Homo sapiens
ttgaggcagtgaatg

SEQ ID NO: 1606843 - DNA, 15 bp, Homo sapiens
gttgaggcagtgaat

SEQ ID NO: 1606844 - DNA, 15 bp, Homo sapiens
ggttgaggcagtgaa

SEQ ID NO: 1606845 - DNA, 15 bp, Homo sapiens
cggttgaggcagtga

SEQ ID NO: 1606846 - DNA, 15 bp, Homo sapiens
tcggttgaggcagtg

SEQ ID NO: 1606847 - DNA, 15 bp, Homo sapiens
ctcggttgaggcagt

SEQ ID NO: 1606848 - DNA, 15 bp, Homo sapiens
cctcggttgaggcag

SEQ ID NO: 1606849 - DNA, 15 bp, Homo sapiens
gcctcggttgaggca

SEQ ID NO: 1606850 - DNA, 15 bp, Homo sapiens
ggcctcggttgaggc

SEQ ID NO: 1606851 - DNA, 15 bp, Homo sapiens
tggcctcggttgagg

SEQ ID NO: 1606852 - DNA, 15 bp, Homo sapiens
atggcctcggttgag

SEQ ID NO: 1606853 - DNA, 15 bp, Homo sapiens
gatggcctcggttga

SEQ ID NO: 1606854 - DNA, 15 bp, Homo sapiens
ggatggcctcggttg

SEQ ID NO: 1606855 - DNA, 15 bp, Homo sapiens
tggatggcctcggtt

SEQ ID NO: 1606856 - DNA, 15 bp, Homo sapiens
atggatggcctcggt

SEQ ID NO: 1606857 - DNA, 15 bp, Homo sapiens
gatggatggcctcgg

SEQ ID NO: 1606858 - DNA, 15 bp, Homo sapiens
tgatggatggcctcg

SEQ ID NO: 1606859 - DNA, 15 bp, Homo sapiens
atgatggatggcctc

SEQ ID NO: 1606860 - DNA, 15 bp, Homo sapiens
gatgatggatggcct

SEQ ID NO: 1606861 - DNA, 15 bp, Homo sapiens
agatgatggatggcc

SEQ ID NO: 1606862 - DNA, 15 bp, Homo sapiens
tagatgatggatggc

SEQ ID NO: 1606863 - DNA, 15 bp, Homo sapiens
ttagatgatggatgg

SEQ ID NO: 1606864 - DNA, 15 bp, Homo sapiens
attagatgatggatg

SEQ ID NO: 1606865 - DNA, 15 bp, Homo sapiens
tattagatgatggat

SEQ ID NO: 1606866 - DNA, 15 bp, Homo sapiens
gtattagatgatgga

SEQ ID NO: 1606867 - DNA, 15 bp, Homo sapiens
ggtattagatgatgg

SEQ ID NO: 1606868 - DNA, 15 bp, Homo sapiens
aggtattagatgatg

SEQ ID NO: 1606869 - DNA, 15 bp, Homo sapiens
taggtattagatgat

SEQ ID NO: 1606870 - DNA, 15 bp, Homo sapiens
ttaggtattagatga

SEQ ID NO: 1606871 - DNA, 15 bp, Homo sapiens
attaggtattagatg

SEQ ID NO: 1606872 - DNA, 15 bp, Homo sapiens
aattaggtattagat

SEQ ID NO: 1606873 - DNA, 15 bp, Homo sapiens
caattaggtattaga

SEQ ID NO: 1606874 - DNA, 15 bp, Homo sapiens
acaattaggtattag

SEQ ID NO: 1606875 - DNA, 15 bp, Homo sapiens
gacaattaggtatta

SEQ ID NO: 1606876 - DNA, 15 bp, Homo sapiens
agacaattaggtatt

SEQ ID NO: 1606877 - DNA, 15 bp, Homo sapiens
tagacaattaggtat

SEQ ID NO: 1606878 - DNA, 15 bp, Homo sapiens
ctagacaattaggta

SEQ ID NO: 1606879 - DNA, 15 bp, Homo sapiens
actagacaattaggt

SEQ ID NO: 1606880 - DNA, 15 bp, Homo sapiens
aactagacaattagg

SEQ ID NO: 1606881 - DNA, 15 bp, Homo sapiens
gaactagacaattag

SEQ ID NO: 1606882 - DNA, 15 bp, Homo sapiens
agaactagacaatta

SEQ ID NO: 1606883 - DNA, 15 bp, Homo sapiens
aagaactagacaatt

SEQ ID NO: 1606884 - DNA, 15 bp, Homo sapiens
taagaactagacaat

SEQ ID NO: 1606885 - DNA, 15 bp, Homo sapiens
ataagaactagacaa

SEQ ID NO: 1606886 - DNA, 15 bp, Homo sapiens
aataagaactagaca

SEQ ID NO: 1606887 - DNA, 15 bp, Homo sapiens
gaataagaactagac

SEQ ID NO: 1606888 - DNA, 15 bp, Homo sapiens
ggaataagaactaga

SEQ ID NO: 1606889 - DNA, 15 bp, Homo sapiens
aggaataagaactag

SEQ ID NO: 1606890 - DNA, 15 bp, Homo sapiens
taggaataagaacta

SEQ ID NO: 1606891 - DNA, 15 bp, Homo sapiens
gtaggaataagaact

SEQ ID NO: 1606892 - DNA, 15 bp, Homo sapiens
ggtaggaataagaac

SEQ ID NO: 1606893 - DNA, 15 bp, Homo sapiens
gggtaggaataagaa

SEQ ID NO: 1606894 - DNA, 15 bp, Homo sapiens
agggtaggaataaga

SEQ ID NO: 1606895 - DNA, 15 bp, Homo sapiens
tagggtaggaataag

SEQ ID NO: 1606896 - DNA, 15 bp, Homo sapiens
gcctagggtaggaat

SEQ ID NO: 1606897 - DNA, 15 bp, Homo sapiens
agcctagggtaggaa

SEQ ID NO: 1606898 - DNA, 15 bp, Homo sapiens
gagcctagggtagga

SEQ ID NO: 1606899 - DNA, 15 bp, Homo sapiens
agagcctagggtagg

SEQ ID NO: 1606900 - DNA, 15 bp, Homo sapiens
gagagcctagggtag

SEQ ID NO: 1606901 - DNA, 15 bp, Homo sapiens
ggagagcctagggta

SEQ ID NO: 1606902 - DNA, 15 bp, Homo sapiens
gggagagcctagggt

SEQ ID NO: 1606903 - DNA, 15 bp, Homo sapiens
tgggagagcctaggg

SEQ ID NO: 1606904 - DNA, 15 bp, Homo sapiens
ctgggagagcctagg

SEQ ID NO: 1606905 - DNA, 15 bp, Homo sapiens
actgggagagcctag

SEQ ID NO: 1606906 - DNA, 15 bp, Homo sapiens
gactgggagagccta

SEQ ID NO: 1606907 - DNA, 15 bp, Homo sapiens
agactgggagagcct

SEQ ID NO: 1606908 - DNA, 15 bp, Homo sapiens
tagactgggagagcc

SEQ ID NO: 1606909 - DNA, 15 bp, Homo sapiens
ctagactgggagagc

SEQ ID NO: 1606910 - DNA, 15 bp, Homo sapiens
actagactgggagag

SEQ ID NO: 1606911 - DNA, 15 bp, Homo sapiens
gactagactgggaga

SEQ ID NO: 1606912 - DNA, 15 bp, Homo sapiens
ggactagactgggag

SEQ ID NO: 1606913 - DNA, 15 bp, Homo sapiens
tggactagactggga

SEQ ID NO: 1606914 - DNA, 15 bp, Homo sapiens
gtggactagactggg

SEQ ID NO: 1606915 - DNA, 15 bp, Homo sapiens
tgtggactagactgg

SEQ ID NO: 1606916 - DNA, 15 bp, Homo sapiens
ttgtggactagactg

SEQ ID NO: 1606917 - DNA, 15 bp, Homo sapiens
attgtggactagact

SEQ ID NO: 1606918 - DNA, 15 bp, Homo sapiens
gattgtggactagac

SEQ ID NO: 1606919 - DNA, 15 bp, Homo sapiens
ggattgtggactaga

SEQ ID NO: 1606920 - DNA, 15 bp, Homo sapiens
aggattgtggactag

SEQ ID NO: 1606921 - DNA, 15 bp, Homo sapiens
caggattgtggacta

SEQ ID NO: 1606922 - DNA, 15 bp, Homo sapiens
acaggattgtggact

SEQ ID NO: 1606923 - DNA, 15 bp, Homo sapiens
gacaggattgtggac

SEQ ID NO: 1606924 - DNA, 15 bp, Homo sapiens
ggacaggattgtgga

SEQ ID NO: 1606925 - DNA, 15 bp, Homo sapiens
tggacaggattgtgg

SEQ ID NO: 1606926 - DNA, 15 bp, Homo sapiens
gtggacaggattgtg

SEQ ID NO: 1606927 - DNA, 15 bp, Homo sapiens
tgtggacaggattgt

SEQ ID NO: 1606928 - DNA, 15 bp, Homo sapiens
ctgtggacaggattg

SEQ ID NO: 1606929 - DNA, 15 bp, Homo sapiens
cctgtggacaggatt

SEQ ID NO: 1606930 - DNA, 15 bp, Homo sapiens
tcctgtggacaggat

SEQ ID NO: 1606931 - DNA, 15 bp, Homo sapiens
gtcctgtggacagga

SEQ ID NO: 1606932 - DNA, 15 bp, Homo sapiens
tgtcctgtggacagg

SEQ ID NO: 1606933 - DNA, 15 bp, Homo sapiens
atgtcctgtggacag

SEQ ID NO: 1606934 - DNA, 15 bp, Homo sapiens
tatgtcctgtggaca

SEQ ID NO: 1606935 - DNA, 15 bp, Homo sapiens
ctatgtcctgtggac

SEQ ID NO: 1606936 - DNA, 15 bp, Homo sapiens
actatgtcctgtgga

SEQ ID NO: 1606937 - DNA, 15 bp, Homo sapiens
gactatgtcctgtgg

SEQ ID NO: 1606938 - DNA, 15 bp, Homo sapiens
ggactatgtcctgtg

SEQ ID NO: 1606939 - DNA, 15 bp, Homo sapiens
tggactatgtcctgt

SEQ ID NO: 1606940 - DNA, 15 bp, Homo sapiens
ttggactatgtcctg

SEQ ID NO: 1606941 - DNA, 15 bp, Homo sapiens
gttggactatgtcct

SEQ ID NO: 1606942 - DNA, 15 bp, Homo sapiens
ggttggactatgtcc

SEQ ID NO: 1606943 - DNA, 15 bp, Homo sapiens
aggttggactatgtc

SEQ ID NO: 1606944 - DNA, 15 bp, Homo sapiens
taggttggactatgt

SEQ ID NO: 1606945 - DNA, 15 bp, Homo sapiens
ataggttggactatg

SEQ ID NO: 1606946 - DNA, 15 bp, Homo sapiens
gataggttggactat

SEQ ID NO: 1606947 - DNA, 15 bp, Homo sapiens
agataggttggacta

SEQ ID NO: 1606948 - DNA, 15 bp, Homo sapiens
gagataggttggact

SEQ ID NO: 1606949 - DNA, 15 bp, Homo sapiens
agagataggttggac

SEQ ID NO: 1606950 - DNA, 15 bp, Homo sapiens
gagagataggttgga

SEQ ID NO: 1606951 - DNA, 15 bp, Homo sapiens
ggagagataggttgg

SEQ ID NO: 1606952 - DNA, 15 bp, Homo sapiens
tggagagataggttg

SEQ ID NO: 1606953 - DNA, 15 bp, Homo sapiens
tttggagagataggt

SEQ ID NO: 1606954 - DNA, 15 bp, Homo sapiens
gtttggagagatagg

SEQ ID NO: 1606955 - DNA, 15 bp, Homo sapiens
agtttggagagatag

SEQ ID NO: 1606956 - DNA, 15 bp, Homo sapiens
tagtttggagagata

SEQ ID NO: 1606957 - DNA, 15 bp, Homo sapiens
ttagtttggagagat

SEQ ID NO: 1606958 - DNA, 15 bp, Homo sapiens
attagtttggagaga

SEQ ID NO: 1606959 - DNA, 15 bp, Homo sapiens
aattagtttggagag

SEQ ID NO: 1606960 - DNA, 15 bp, Homo sapiens
aaattagtttggaga

SEQ ID NO: 1606961 - DNA, 15 bp, Homo sapiens
gaaattagtttggag

SEQ ID NO: 1606962 - DNA, 15 bp, Homo sapiens
agaaattagtttgga

SEQ ID NO: 1606963 - DNA, 15 bp, Homo sapiens
aagaaattagtttgg

SEQ ID NO: 1606964 - DNA, 15 bp, Homo sapiens
gaagaaattagtttg

SEQ ID NO: 1606965 - DNA, 15 bp, Homo sapiens
ggaagaaattagttt

SEQ ID NO: 1606966 - DNA, 15 bp, Homo sapiens
aggaagaaattagtt

SEQ ID NO: 1606967 - DNA, 15 bp, Homo sapiens
caggaagaaattagt

SEQ ID NO: 1606968 - DNA, 15 bp, Homo sapiens
gcaggaagaaattag

SEQ ID NO: 1606969 - DNA, 15 bp, Homo sapiens
ggcaggaagaaatta

SEQ ID NO: 1606970 - DNA, 15 bp, Homo sapiens
aggcaggaagaaatt

SEQ ID NO: 1606971 - DNA, 15 bp, Homo sapiens
gaggcaggaagaaat

SEQ ID NO: 1606972 - DNA, 15 bp, Homo sapiens
ggaggcaggaagaaa

SEQ ID NO: 1606973 - DNA, 15 bp, Homo sapiens
gggaggcaggaagaa

SEQ ID NO: 1606974 - DNA, 15 bp, Homo sapiens
agggaggcaggaaga

SEQ ID NO: 1606975 - DNA, 15 bp, Homo sapiens
cagggaggcaggaag

SEQ ID NO: 1606976 - DNA, 15 bp, Homo sapiens
gcagggaggcaggaa

SEQ ID NO: 1606977 - DNA, 15 bp, Homo sapiens
ggcagggaggcagga

SEQ ID NO: 1606978 - DNA, 15 bp, Homo sapiens
aggcagggaggcagg

SEQ ID NO: 1606979 - DNA, 15 bp, Homo sapiens
taggcagggaggcag

SEQ ID NO: 1606980 - DNA, 15 bp, Homo sapiens
gtaggcagggaggca

SEQ ID NO: 1606981 - DNA, 15 bp, Homo sapiens
ggtaggcagggaggc

SEQ ID NO: 1606982 - DNA, 15 bp, Homo sapiens
gggtaggcagggagg

SEQ ID NO: 1606983 - DNA, 15 bp, Homo sapiens
ggggtaggcagggag

SEQ ID NO: 1606984 - DNA, 15 bp, Homo sapiens
gggggtaggcaggga

SEQ ID NO: 1606985 - DNA, 15 bp, Homo sapiens
agggggtaggcaggg

SEQ ID NO: 1606986 - DNA, 15 bp, Homo sapiens
gagggggtaggcagg

SEQ ID NO: 1606987 - DNA, 15 bp, Homo sapiens
tgagggggtaggcag

SEQ ID NO: 1606988 - DNA, 15 bp, Homo sapiens
atgagggggtaggca

SEQ ID NO: 1606989 - DNA, 15 bp, Homo sapiens
tatgagggggtaggc

SEQ ID NO: 1606990 - DNA, 15 bp, Homo sapiens
ttatgagggggtagg

SEQ ID NO: 1606991 - DNA, 15 bp, Homo sapiens
gttatgagggggtag

SEQ ID NO: 1606992 - DNA, 15 bp, Homo sapiens
ggttatgagggggta

SEQ ID NO: 1606993 - DNA, 15 bp, Homo sapiens
aggttatgagggggt

SEQ ID NO: 1606994 - DNA, 15 bp, Homo sapiens
taggttatgaggggg

SEQ ID NO: 1606995 - DNA, 15 bp, Homo sapiens
gtaggttatgagggg

SEQ ID NO: 1606996 - DNA, 15 bp, Homo sapiens
agtaggttatgaggg

SEQ ID NO: 1606997 - DNA, 15 bp, Homo sapiens
aagtaggttatgagg

SEQ ID NO: 1606998 - DNA, 15 bp, Homo sapiens
aaagtaggttatgag

SEQ ID NO: 1606999 - DNA, 15 bp, Homo sapiens
aaaagtaggttatga

SEQ ID NO: 1607000 - DNA, 15 bp, Homo sapiens
aaaaagtaggttatg

SEQ ID NO: 1607001 - DNA, 15 bp, Homo sapiens
taaaaagtaggttat

SEQ ID NO: 1607002 - DNA, 15 bp, Homo sapiens
ctaaaaagtaggtta

SEQ ID NO: 1607003 - DNA, 15 bp, Homo sapiens
gctaaaaagtaggtt

SEQ ID NO: 1607004 - DNA, 15 bp, Homo sapiens
agctaaaaagtaggt

SEQ ID NO: 1607005 - DNA, 15 bp, Homo sapiens
tagctaaaaagtagg

SEQ ID NO: 1607006 - DNA, 15 bp, Homo sapiens
gtagctaaaaagtag

SEQ ID NO: 1607007 - DNA, 15 bp, Homo sapiens
agtagctaaaaagta

SEQ ID NO: 1607008 - DNA, 15 bp, Homo sapiens
gagtagctaaaaagt

SEQ ID NO: 1607009 - DNA, 15 bp, Homo sapiens
agagtagctaaaaag

SEQ ID NO: 1607010 - DNA, 15 bp, Homo sapiens
tagagtagctaaaaa

SEQ ID NO: 1607011 - DNA, 15 bp, Homo sapiens
ttagagtagctaaaa

SEQ ID NO: 1607012 - DNA, 15 bp, Homo sapiens
tttagagtagctaaa

SEQ ID NO: 1607013 - DNA, 15 bp, Homo sapiens
gtttagagtagctaa

SEQ ID NO: 1607014 - DNA, 15 bp, Homo sapiens
agtttagagtagcta

SEQ ID NO: 1607015 - DNA, 15 bp, Homo sapiens
aagtttagagtagct

SEQ ID NO: 1607016 - DNA, 15 bp, Homo sapiens
gaagtttagagtagc

SEQ ID NO: 1607017 - DNA, 15 bp, Homo sapiens
agaagtttagagtag

SEQ ID NO: 1607018 - DNA, 15 bp, Homo sapiens
gagaagtttagagta

SEQ ID NO: 1607019 - DNA, 15 bp, Homo sapiens
tgagaagtttagagt

SEQ ID NO: 1607020 - DNA, 15 bp, Homo sapiens
gtgagaagtttagag

SEQ ID NO: 1607021 - DNA, 15 bp, Homo sapiens
agtgagaagtttaga

SEQ ID NO: 1607022 - DNA, 15 bp, Homo sapiens
aagtgagaagtttag

SEQ ID NO: 1607023 - DNA, 15 bp, Homo sapiens
aaagtgagaagttta

SEQ ID NO: 1607024 - DNA, 15 bp, Homo sapiens
aaaagtgagaagttt

SEQ ID NO: 1607025 - DNA, 15 bp, Homo sapiens
aaaaagtgagaagtt

SEQ ID NO: 1607026 - DNA, 15 bp, Homo sapiens
aaaaaagtgagaagt

SEQ ID NO: 1607027 - DNA, 15 bp, Homo sapiens
gaaaaaagtgagaag

SEQ ID NO: 1607028 - DNA, 15 bp, Homo sapiens
tgaaaaaagtgagaa

SEQ ID NO: 1607029 - DNA, 15 bp, Homo sapiens
atgaaaaaagtgaga

SEQ ID NO: 1607030 - DNA, 15 bp, Homo sapiens
aatgaaaaaagtgag

SEQ ID NO: 1607031 - DNA, 15 bp, Homo sapiens
aaatgaaaaaagtga

SEQ ID NO: 1607032 - DNA, 15 bp, Homo sapiens
aaaatgaaaaaagtg

SEQ ID NO: 1607033 - DNA, 15 bp, Homo sapiens
caaaatgaaaaaagt

SEQ ID NO: 1607034 - DNA, 15 bp, Homo sapiens
acaaaatgaaaaaag

SEQ ID NO: 1607035 - DNA, 15 bp, Homo sapiens
tacaaaatgaaaaaa

SEQ ID NO: 1607036 - DNA, 15 bp, Homo sapiens
gtacaaaatgaaaaa

SEQ ID NO: 1607037 - DNA, 15 bp, Homo sapiens
tgtacaaaatgaaaa

SEQ ID NO: 1607038 - DNA, 15 bp, Homo sapiens
ttgtacaaaatgaaa

SEQ ID NO: 1607039 - DNA, 15 bp, Homo sapiens
gttgtacaaaatgaa

SEQ ID NO: 1607040 - DNA, 15 bp, Homo sapiens
agttgtacaaaatga

SEQ ID NO: 1607041 - DNA, 15 bp, Homo sapiens
aagttgtacaaaatg

SEQ ID NO: 1607042 - DNA, 15 bp, Homo sapiens
aaagttgtacaaaat

SEQ ID NO: 1607043 - DNA, 15 bp, Homo sapiens
taaagttgtacaaaa

SEQ ID NO: 1607044 - DNA, 15 bp, Homo sapiens
ataaagttgtacaaa

SEQ ID NO: 1607045 - DNA, 15 bp, Homo sapiens
aataaagttgtacaa

SEQ ID NO: 1607046 - DNA, 15 bp, Homo sapiens
taataaagttgtaca

SEQ ID NO: 1607047 - DNA, 15 bp, Homo sapiens
ttaataaagttgtac

SEQ ID NO: 1607048 - DNA, 15 bp, Homo sapiens
tttaataaagttgta

SEQ ID NO: 1607049 - DNA, 15 bp, Homo sapiens
ctttaataaagttgt

SEQ ID NO: 1607050 - DNA, 15 bp, Homo sapiens
actttaataaagttg

SEQ ID NO: 1607051 - DNA, 15 bp, Homo sapiens
tactttaataaagtt

SEQ ID NO: 1607052 - DNA, 15 bp, Homo sapiens
atactttaataaagt

SEQ ID NO: 1607053 - DNA, 15 bp, Homo sapiens
tatactttaataaag

SEQ ID NO: 1607054 - DNA, 15 bp, Homo sapiens
ttatactttaataaa

SEQ ID NO: 1607055 - DNA, 15 bp, Homo sapiens
gttatactttaataa

SEQ ID NO: 1607056 - DNA, 15 bp, Homo sapiens
agttatactttaata

SEQ ID NO: 1607057 - DNA, 15 bp, Homo sapiens
cagttatactttaat

SEQ ID NO: 1607058 - DNA, 15 bp, Homo sapiens
tcagttatactttaa

SEQ ID NO: 1607059 - DNA, 15 bp, Homo sapiens
ctcagttatacttta

SEQ ID NO: 1607060 - DNA, 15 bp, Homo sapiens
tctcagttatacttt

SEQ ID NO: 1607061 - DNA, 15 bp, Homo sapiens
ctctcagttatactt

SEQ ID NO: 1607062 - DNA, 15 bp, Homo sapiens
tctctcagttatact

SEQ ID NO: 1607063 - DNA, 15 bp, Homo sapiens
ctctctcagttatac

SEQ ID NO: 1607064 - DNA, 15 bp, Homo sapiens
tctctctcagttata

SEQ ID NO: 1607065 - DNA, 15 bp, Homo sapiens
ctctctctcagttat

SEQ ID NO: 1607066 - DNA, 15 bp, Homo sapiens
tctctctctcagtta

SEQ ID NO: 1607067 - DNA, 15 bp, Homo sapiens
ctctctctctcagtt

SEQ ID NO: 1607068 - DNA, 15 bp, Homo sapiens
actctctctctcagt

SEQ ID NO: 1607069 - DNA, 15 bp, Homo sapiens
cactctctctctcag

SEQ ID NO: 1607070 - DNA, 15 bp, Homo sapiens
tcactctctctctca

SEQ ID NO: 1607071 - DNA, 15 bp, Homo sapiens
ctcactctctctctc

SEQ ID NO: 1607072 - DNA, 15 bp, Homo sapiens
tctcactctctctct

SEQ ID NO: 1607073 - DNA, 15 bp, Homo sapiens
ctctcactctctctc

SEQ ID NO: 1607074 - DNA, 15 bp, Homo sapiens
cctctcactctctct

SEQ ID NO: 1607075 - DNA, 15 bp, Homo sapiens
ccctctcactctctc

SEQ ID NO: 1607076 - DNA, 15 bp, Homo sapiens
tccctctcactctct

SEQ ID NO: 1607077 - DNA, 15 bp, Homo sapiens
ctccctctcactctc

SEQ ID NO: 1607078 - DNA, 15 bp, Homo sapiens
actccctctcactct

SEQ ID NO: 1607079 - DNA, 15 bp, Homo sapiens
aactccctctcactc

SEQ ID NO: 1607080 - DNA, 15 bp, Homo sapiens
caactccctctcact

SEQ ID NO: 1607081 - DNA, 15 bp, Homo sapiens
acaactccctctcac

SEQ ID NO: 1607082 - DNA, 15 bp, Homo sapiens
aacaactccctctca

SEQ ID NO: 1607083 - DNA, 15 bp, Homo sapiens
caacaactccctctc

SEQ ID NO: 1607084 - DNA, 15 bp, Homo sapiens
acaacaactccctct

SEQ ID NO: 1607085 - DNA, 15 bp, Homo sapiens
cacaacaactccctc

SEQ ID NO: 1607086 - DNA, 15 bp, Homo sapiens
acacaacaactccct

SEQ ID NO: 1607087 - DNA, 15 bp, Homo sapiens
cacacaacaactccc

SEQ ID NO: 1607088 - DNA, 15 bp, Homo sapiens
acacacaacaactcc

SEQ ID NO: 1607089 - DNA, 15 bp, Homo sapiens
aacacacaacaactc

SEQ ID NO: 1607090 - DNA, 15 bp, Homo sapiens
aaacacacaacaact

SEQ ID NO: 1607091 - DNA, 15 bp, Homo sapiens
aaaacacacaacaac

SEQ ID NO: 1607092 - DNA, 15 bp, Homo sapiens
aaaaacacacaacaa

SEQ ID NO: 1607093 - DNA, 15 bp, Homo sapiens
aaaaaacacacaaca

SEQ ID NO: 1607094 - DNA, 15 bp, Homo sapiens
aaaaaaacacacaac

SEQ ID NO: 1607095 - DNA, 15 bp, Homo sapiens
caaaaaaacacacaa

SEQ ID NO: 1607096 - DNA, 15 bp, Homo sapiens
acaaaaaaacacaca

SEQ ID NO: 1607097 - DNA, 15 bp, Homo sapiens
aacaaaaaaacacac

SEQ ID NO: 1607098 - DNA, 15 bp, Homo sapiens
aaacaaaaaaacaca

SEQ ID NO: 1607099 - DNA, 15 bp, Homo sapiens
aaaacaaaaaaacac

SEQ ID NO: 1607100 - DNA, 15 bp, Homo sapiens
acaaaacaaaaaaac

SEQ ID NO: 1607101 - DNA, 15 bp, Homo sapiens
aacaaaacaaaaaaa

SEQ ID NO: 1607102 - DNA, 15 bp, Homo sapiens
aaaaaacaaaacaaa

SEQ ID NO: 1607103 - DNA, 15 bp, Homo sapiens
caaaaaacaaaacaa

SEQ ID NO: 1607104 - DNA, 15 bp, Homo sapiens
tcaaaaaacaaaaca

SEQ ID NO: 1607105 - DNA, 15 bp, Homo sapiens
ctcaaaaaacaaaac

SEQ ID NO: 1607106 - DNA, 15 bp, Homo sapiens
atctcaaaaaacaaa

SEQ ID NO: 1607107 - DNA, 15 bp, Homo sapiens
catctcaaaaaacaa

SEQ ID NO: 1607108 - DNA, 15 bp, Homo sapiens
gcatctcaaaaaaca

SEQ ID NO: 1607109 - DNA, 15 bp, Homo sapiens
tgcatctcaaaaaac

SEQ ID NO: 1607110 - DNA, 15 bp, Homo sapiens
ctgcatctcaaaaaa

SEQ ID NO: 1607111 - DNA, 15 bp, Homo sapiens
actgcatctcaaaaa

SEQ ID NO: 1607112 - DNA, 15 bp, Homo sapiens
gactgcatctcaaaa

SEQ ID NO: 1607113 - DNA, 15 bp, Homo sapiens
agactgcatctcaaa

SEQ ID NO: 1607114 - DNA, 15 bp, Homo sapiens
aagactgcatctcaa

SEQ ID NO: 1607115 - DNA, 15 bp, Homo sapiens
caagactgcatctca

SEQ ID NO: 1607116 - DNA, 15 bp, Homo sapiens
gcaagactgcatctc

SEQ ID NO: 1607117 - DNA, 15 bp, Homo sapiens
agcaagactgcatct

SEQ ID NO: 1607118 - DNA, 15 bp, Homo sapiens
aagcaagactgcatc

SEQ ID NO: 1607119 - DNA, 15 bp, Homo sapiens
aaagcaagactgcat

SEQ ID NO: 1607120 - DNA, 15 bp, Homo sapiens
caaagcaagactgca

SEQ ID NO: 1607121 - DNA, 15 bp, Homo sapiens
acaaagcaagactgc

SEQ ID NO: 1607122 - DNA, 15 bp, Homo sapiens
gacaaagcaagactg

SEQ ID NO: 1607123 - DNA, 15 bp, Homo sapiens
tgacaaagcaagact

SEQ ID NO: 1607124 - DNA, 15 bp, Homo sapiens
gtgacaaagcaagac

SEQ ID NO: 1607125 - DNA, 15 bp, Homo sapiens
ggtgacaaagcaaga

SEQ ID NO: 1607126 - DNA, 15 bp, Homo sapiens
gggtgacaaagcaag

SEQ ID NO: 1607127 - DNA, 15 bp, Homo sapiens
tgggtgacaaagcaa

SEQ ID NO: 1607128 - DNA, 15 bp, Homo sapiens
ctgggtgacaaagca

SEQ ID NO: 1607129 - DNA, 15 bp, Homo sapiens
tctgggtgacaaagc

SEQ ID NO: 1607130 - DNA, 15 bp, Homo sapiens
gtctgggtgacaaag

SEQ ID NO: 1607131 - DNA, 15 bp, Homo sapiens
agtctgggtgacaaa

SEQ ID NO: 1607132 - DNA, 15 bp, Homo sapiens
cagtctgggtgacaa

SEQ ID NO: 1607133 - DNA, 15 bp, Homo sapiens
tcactgtactccagt

SEQ ID NO: 1607134 - DNA, 15 bp, Homo sapiens
gtcactgtactccag

SEQ ID NO: 1607135 - DNA, 15 bp, Homo sapiens
ggtcactgtactcca

SEQ ID NO: 1607136 - DNA, 15 bp, Homo sapiens
tggtcactgtactcc

SEQ ID NO: 1607137 - DNA, 15 bp, Homo sapiens
ctggtcactgtactc

SEQ ID NO: 1607138 - DNA, 15 bp, Homo sapiens
tctggtcactgtact

SEQ ID NO: 1607139 - DNA, 15 bp, Homo sapiens
atctggtcactgtac

SEQ ID NO: 1607140 - DNA, 15 bp, Homo sapiens
gatctggtcactgta

SEQ ID NO: 1607141 - DNA, 15 bp, Homo sapiens
tgatctggtcactgt

SEQ ID NO: 1607142 - DNA, 15 bp, Homo sapiens
atgatctggtcactg

SEQ ID NO: 1607143 - DNA, 15 bp, Homo sapiens
tatgatctggtcact

SEQ ID NO: 1607144 - DNA, 15 bp, Homo sapiens
ttatgatctggtcac

SEQ ID NO: 1607145 - DNA, 15 bp, Homo sapiens
cttatgatctggtca

SEQ ID NO: 1607146 - DNA, 15 bp, Homo sapiens
acttatgatctggtc

SEQ ID NO: 1607147 - DNA, 15 bp, Homo sapiens
gacttatgatctggt

SEQ ID NO: 1607148 - DNA, 15 bp, Homo sapiens
ggacttatgatctgg

SEQ ID NO: 1607149 - DNA, 15 bp, Homo sapiens
gggacttatgatctg

SEQ ID NO: 1607150 - DNA, 15 bp, Homo sapiens
agggacttatgatct

SEQ ID NO: 1607151 - DNA, 15 bp, Homo sapiens
cagggacttatgatc

SEQ ID NO: 1607152 - DNA, 15 bp, Homo sapiens
gcagggacttatgat

SEQ ID NO: 1607153 - DNA, 15 bp, Homo sapiens
tgcagggacttatga

SEQ ID NO: 1607154 - DNA, 15 bp, Homo sapiens
ctgcagggacttatg

SEQ ID NO: 1607155 - DNA, 15 bp, Homo sapiens
gctgcagggacttat

SEQ ID NO: 1607156 - DNA, 15 bp, Homo sapiens
ggctgcagggactta

SEQ ID NO: 1607157 - DNA, 15 bp, Homo sapiens
aggctgcagggactt

SEQ ID NO: 1607158 - DNA, 15 bp, Homo sapiens
aaggctgcagggact

SEQ ID NO: 1607159 - DNA, 15 bp, Homo sapiens
caaggctgcagggac

SEQ ID NO: 1607160 - DNA, 15 bp, Homo sapiens
tcaaggctgcaggga

SEQ ID NO: 1607161 - DNA, 15 bp, Homo sapiens
ttcaaggctgcaggg

SEQ ID NO: 1607162 - DNA, 15 bp, Homo sapiens
gttcaaggctgcagg

SEQ ID NO: 1607163 - DNA, 15 bp, Homo sapiens
tagttcaaggctgca

SEQ ID NO: 1607164 - DNA, 15 bp, Homo sapiens
gtagttcaaggctgc

SEQ ID NO: 1607165 - DNA, 15 bp, Homo sapiens
agtagttcaaggctg

SEQ ID NO: 1607166 - DNA, 15 bp, Homo sapiens
cagtagttcaaggct

SEQ ID NO: 1607167 - DNA, 15 bp, Homo sapiens
ccagtagttcaaggc

SEQ ID NO: 1607168 - DNA, 15 bp, Homo sapiens
cccagtagttcaagg

SEQ ID NO: 1607169 - DNA, 15 bp, Homo sapiens
gcccagtagttcaag

SEQ ID NO: 1607170 - DNA, 15 bp, Homo sapiens
agcccagtagttcaa

SEQ ID NO: 1607171 - DNA, 15 bp, Homo sapiens
gagcccagtagttca

SEQ ID NO: 1607172 - DNA, 15 bp, Homo sapiens
tgagcccagtagttc

SEQ ID NO: 1607173 - DNA, 15 bp, Homo sapiens
ttgagcccagtagtt

SEQ ID NO: 1607174 - DNA, 15 bp, Homo sapiens
cttgagcccagtagt

SEQ ID NO: 1607175 - DNA, 15 bp, Homo sapiens
aggaggatctcttga

SEQ ID NO: 1607176 - DNA, 15 bp, Homo sapiens
aaggaggatctcttg

SEQ ID NO: 1607177 - DNA, 15 bp, Homo sapiens
gaaggaggatctctt

SEQ ID NO: 1607178 - DNA, 15 bp, Homo sapiens
ggaaggaggatctct

SEQ ID NO: 1607179 - DNA, 15 bp, Homo sapiens
gggaaggaggatctc

SEQ ID NO: 1607180 - DNA, 15 bp, Homo sapiens
ggggaaggaggatct

SEQ ID NO: 1607181 - DNA, 15 bp, Homo sapiens
tggggaaggaggatc

SEQ ID NO: 1607182 - DNA, 15 bp, Homo sapiens
ctggggaaggaggat

SEQ ID NO: 1607183 - DNA, 15 bp, Homo sapiens
gctggggaaggagga

SEQ ID NO: 1607184 - DNA, 15 bp, Homo sapiens
ggaggctggggaagg

SEQ ID NO: 1607185 - DNA, 15 bp, Homo sapiens
aggaggctggggaag

SEQ ID NO: 1607186 - DNA, 15 bp, Homo sapiens
caggaggctggggaa

SEQ ID NO: 1607187 - DNA, 15 bp, Homo sapiens
tcaggaggctgggga

SEQ ID NO: 1607188 - DNA, 15 bp, Homo sapiens
ttcaggaggctgggg

SEQ ID NO: 1607189 - DNA, 15 bp, Homo sapiens
attcaggaggctggg

SEQ ID NO: 1607190 - DNA, 15 bp, Homo sapiens
cattcaggaggctgg

SEQ ID NO: 1607191 - DNA, 15 bp, Homo sapiens
ccattcaggaggctg

SEQ ID NO: 1607192 - DNA, 15 bp, Homo sapiens
accattcaggaggct

SEQ ID NO: 1607193 - DNA, 15 bp, Homo sapiens
caccattcaggaggc

SEQ ID NO: 1607194 - DNA, 15 bp, Homo sapiens
ccaccattcaggagg

SEQ ID NO: 1607195 - DNA, 15 bp, Homo sapiens
cccaccattcaggag

SEQ ID NO: 1607196 - DNA, 15 bp, Homo sapiens
tcccaccattcagga

SEQ ID NO: 1607197 - DNA, 15 bp, Homo sapiens
gtcccaccattcagg

SEQ ID NO: 1607198 - DNA, 15 bp, Homo sapiens
agtcccaccattcag

SEQ ID NO: 1607199 - DNA, 15 bp, Homo sapiens
tagtcccaccattca

SEQ ID NO: 1607200 - DNA, 15 bp, Homo sapiens
gtagtcccaccattc

SEQ ID NO: 1607201 - DNA, 15 bp, Homo sapiens
tgtagtcccaccatt

SEQ ID NO: 1607202 - DNA, 15 bp, Homo sapiens
ctgtagtcccaccat

SEQ ID NO: 1607203 - DNA, 15 bp, Homo sapiens
cctgtagtcccacca

SEQ ID NO: 1607204 - DNA, 15 bp, Homo sapiens
gtgcacctgtagtcc

SEQ ID NO: 1607205 - DNA, 15 bp, Homo sapiens
tgtgcacctgtagtc

SEQ ID NO: 1607206 - DNA, 15 bp, Homo sapiens
gtgtgcacctgtagt

SEQ ID NO: 1607207 - DNA, 15 bp, Homo sapiens
tgtgtgcacctgtag

SEQ ID NO: 1607208 - DNA, 15 bp, Homo sapiens
ttgtgtgcacctgta

SEQ ID NO: 1607209 - DNA, 15 bp, Homo sapiens
gttgtgtgcacctgt

SEQ ID NO: 1607210 - DNA, 15 bp, Homo sapiens
ggttgtgtgcacctg

SEQ ID NO: 1607211 - DNA, 15 bp, Homo sapiens
tggttgtgtgcacct

SEQ ID NO: 1607212 - DNA, 15 bp, Homo sapiens
atggttgtgtgcacc

SEQ ID NO: 1607213 - DNA, 15 bp, Homo sapiens
catggttgtgtgcac

SEQ ID NO: 1607214 - DNA, 15 bp, Homo sapiens
gcatggttgtgtgca

SEQ ID NO: 1607215 - DNA, 15 bp, Homo sapiens
tgcatggttgtgtgc

SEQ ID NO: 1607216 - DNA, 15 bp, Homo sapiens
gtgcatggttgtgtg

SEQ ID NO: 1607217 - DNA, 15 bp, Homo sapiens
tgtgcatggttgtgt

SEQ ID NO: 1607218 - DNA, 15 bp, Homo sapiens
ctgtgcatggttgtg

SEQ ID NO: 1607219 - DNA, 15 bp, Homo sapiens
actgtgcatggttgt

SEQ ID NO: 1607220 - DNA, 15 bp, Homo sapiens
gactgtgcatggttg

SEQ ID NO: 1607221 - DNA, 15 bp, Homo sapiens
ggactgtgcatggtt

SEQ ID NO: 1607222 - DNA, 15 bp, Homo sapiens
tggactgtgcatggt

SEQ ID NO: 1607223 - DNA, 15 bp, Homo sapiens
ctggactgtgcatgg

SEQ ID NO: 1607224 - DNA, 15 bp, Homo sapiens
actggactgtgcatg

SEQ ID NO: 1607225 - DNA, 15 bp, Homo sapiens
aactggactgtgcat

SEQ ID NO: 1607226 - DNA, 15 bp, Homo sapiens
aaactggactgtgca

SEQ ID NO: 1607227 - DNA, 15 bp, Homo sapiens
taaactggactgtgc

SEQ ID NO: 1607228 - DNA, 15 bp, Homo sapiens
ttaaactggactgtg

SEQ ID NO: 1607229 - DNA, 15 bp, Homo sapiens
tttaaactggactgt

SEQ ID NO: 1607230 - DNA, 15 bp, Homo sapiens
ttttaaactggactg

SEQ ID NO: 1607231 - DNA, 15 bp, Homo sapiens
attttaaactggact

SEQ ID NO: 1607232 - DNA, 15 bp, Homo sapiens
aattttaaactggac

SEQ ID NO: 1607233 - DNA, 15 bp, Homo sapiens
aaattttaaactgga

SEQ ID NO: 1607234 - DNA, 15 bp, Homo sapiens
aaaattttaaactgg

SEQ ID NO: 1607235 - DNA, 15 bp, Homo sapiens
aaaaattttaaactg

SEQ ID NO: 1607236 - DNA, 15 bp, Homo sapiens
aaaaaattttaaact

SEQ ID NO: 1607237 - DNA, 15 bp, Homo sapiens
aaaaaaattttaaac

SEQ ID NO: 1607238 - DNA, 15 bp, Homo sapiens
aaaaaaaattttaaa

SEQ ID NO: 1607239 - DNA, 15 bp, Homo sapiens
aaaaaaaaattttaa

SEQ ID NO: 1607240 - DNA, 15 bp, Homo sapiens
aaaaaaaaaatttta

SEQ ID NO: 1607241 - DNA, 15 bp, Homo sapiens
aaaaaaaaaaatttt

SEQ ID NO: 1607242 - DNA, 15 bp, Homo sapiens
acaacatagtgagac

SEQ ID NO: 1607243 - DNA, 15 bp, Homo sapiens
aacaacatagtgaga

SEQ ID NO: 1607244 - DNA, 15 bp, Homo sapiens
gaacaacatagtgag

SEQ ID NO: 1607245 - DNA, 15 bp, Homo sapiens
tgaacaacatagtga

SEQ ID NO: 1607246 - DNA, 15 bp, Homo sapiens
ctgaacaacatagtg

SEQ ID NO: 1607247 - DNA, 15 bp, Homo sapiens
cctgaacaacatagt

SEQ ID NO: 1607248 - DNA, 15 bp, Homo sapiens
gcctgaacaacatag

SEQ ID NO: 1607249 - DNA, 15 bp, Homo sapiens
agcctgaacaacata

SEQ ID NO: 1607250 - DNA, 15 bp, Homo sapiens
cagcctgaacaacat

SEQ ID NO: 1607251 - DNA, 15 bp, Homo sapiens
ccagcctgaacaaca

SEQ ID NO: 1607252 - DNA, 15 bp, Homo sapiens
accagcctgaacaac

SEQ ID NO: 1607253 - DNA, 15 bp, Homo sapiens
aaccagcctgaacaa

SEQ ID NO: 1607254 - DNA, 15 bp, Homo sapiens
aaaccagcctgaaca

SEQ ID NO: 1607255 - DNA, 15 bp, Homo sapiens
gaaaccagcctgaac

SEQ ID NO: 1607256 - DNA, 15 bp, Homo sapiens
tgaaaccagcctgaa

SEQ ID NO: 1607257 - DNA, 15 bp, Homo sapiens
ttgaaaccagcctga

SEQ ID NO: 1607258 - DNA, 15 bp, Homo sapiens
tttgaaaccagcctg

SEQ ID NO: 1607259 - DNA, 15 bp, Homo sapiens
gtttgaaaccagcct

SEQ ID NO: 1607260 - DNA, 15 bp, Homo sapiens
agtttgaaaccagcc

SEQ ID NO: 1607261 - DNA, 15 bp, Homo sapiens
aagtttgaaaccagc

SEQ ID NO: 1607262 - DNA, 15 bp, Homo sapiens
gaagtttgaaaccag

SEQ ID NO: 1607263 - DNA, 15 bp, Homo sapiens
agaagtttgaaacca

SEQ ID NO: 1607264 - DNA, 15 bp, Homo sapiens
tagaagtttgaaacc

SEQ ID NO: 1607265 - DNA, 15 bp, Homo sapiens
ctagaagtttgaaac

SEQ ID NO: 1607266 - DNA, 15 bp, Homo sapiens
gctagaagtttgaaa

SEQ ID NO: 1607267 - DNA, 15 bp, Homo sapiens
ggctagaagtttgaa

SEQ ID NO: 1607268 - DNA, 15 bp, Homo sapiens
aggctagaagtttga

SEQ ID NO: 1607269 - DNA, 15 bp, Homo sapiens
gaggctagaagtttg

SEQ ID NO: 1607270 - DNA, 15 bp, Homo sapiens
tgaggctagaagttt

SEQ ID NO: 1607271 - DNA, 15 bp, Homo sapiens
ttgaggctagaagtt

SEQ ID NO: 1607272 - DNA, 15 bp, Homo sapiens
cttgaggctagaagt

SEQ ID NO: 1607273 - DNA, 15 bp, Homo sapiens
gcttgaggctagaag

SEQ ID NO: 1607274 - DNA, 15 bp, Homo sapiens
tgcttgaggctagaa

SEQ ID NO: 1607275 - DNA, 15 bp, Homo sapiens
ttgcttgaggctaga

SEQ ID NO: 1607276 - DNA, 15 bp, Homo sapiens
attgcttgaggctag

SEQ ID NO: 1607277 - DNA, 15 bp, Homo sapiens
gattgcttgaggcta

SEQ ID NO: 1607278 - DNA, 15 bp, Homo sapiens
ggattgcttgaggct

SEQ ID NO: 1607279 - DNA, 15 bp, Homo sapiens
aggattgcttgaggc

SEQ ID NO: 1607280 - DNA, 15 bp, Homo sapiens
gaggattgcttgagg

SEQ ID NO: 1607281 - DNA, 15 bp, Homo sapiens
gctttaggaggctga

SEQ ID NO: 1607282 - DNA, 15 bp, Homo sapiens
tgctttaggaggctg

SEQ ID NO: 1607283 - DNA, 15 bp, Homo sapiens
gtgctttaggaggct

SEQ ID NO: 1607284 - DNA, 15 bp, Homo sapiens
agtgctttaggaggc

SEQ ID NO: 1607285 - DNA, 15 bp, Homo sapiens
cagtgctttaggagg

SEQ ID NO: 1607286 - DNA, 15 bp, Homo sapiens
ccagtgctttaggag

SEQ ID NO: 1607287 - DNA, 15 bp, Homo sapiens
cccagtgctttagga

SEQ ID NO: 1607288 - DNA, 15 bp, Homo sapiens
tcccagtgctttagg

SEQ ID NO: 1607289 - DNA, 15 bp, Homo sapiens
gtgtaatcccagtgc

SEQ ID NO: 1607290 - DNA, 15 bp, Homo sapiens
cgtgtaatcccagtg

SEQ ID NO: 1607291 - DNA, 15 bp, Homo sapiens
acgtgtaatcccagt

SEQ ID NO: 1607292 - DNA, 15 bp, Homo sapiens
cacgtgtaatcccag

SEQ ID NO: 1607293 - DNA, 15 bp, Homo sapiens
acacgtgtaatccca

SEQ ID NO: 1607294 - DNA, 15 bp, Homo sapiens
cacacgtgtaatccc

SEQ ID NO: 1607295 - DNA, 15 bp, Homo sapiens
tcacacgtgtaatcc

SEQ ID NO: 1607296 - DNA, 15 bp, Homo sapiens
ttcacacgtgtaatc

SEQ ID NO: 1607297 - DNA, 15 bp, Homo sapiens
attcacacgtgtaat

SEQ ID NO: 1607298 - DNA, 15 bp, Homo sapiens
aattcacacgtgtaa

SEQ ID NO: 1607299 - DNA, 15 bp, Homo sapiens
taattcacacgtgta

SEQ ID NO: 1607300 - DNA, 15 bp, Homo sapiens
gtaattcacacgtgt

SEQ ID NO: 1607301 - DNA, 15 bp, Homo sapiens
agtaattcacacgtg

SEQ ID NO: 1607302 - DNA, 15 bp, Homo sapiens
cagtaattcacacgt

SEQ ID NO: 1607303 - DNA, 15 bp, Homo sapiens
acagtaattcacacg

SEQ ID NO: 1607304 - DNA, 15 bp, Homo sapiens
cacagtaattcacac

SEQ ID NO: 1607305 - DNA, 15 bp, Homo sapiens
gcacagtaattcaca

SEQ ID NO: 1607306 - DNA, 15 bp, Homo sapiens
ggcacagtaattcac

SEQ ID NO: 1607307 - DNA, 15 bp, Homo sapiens
gggcacagtaattca

SEQ ID NO: 1607308 - DNA, 15 bp, Homo sapiens
tgggcacagtaattc

SEQ ID NO: 1607309 - DNA, 15 bp, Homo sapiens
ctgggcacagtaatt

SEQ ID NO: 1607310 - DNA, 15 bp, Homo sapiens
gctgggcacagtaat

SEQ ID NO: 1607311 - DNA, 15 bp, Homo sapiens
agctgggcacagtaa

SEQ ID NO: 1607312 - DNA, 15 bp, Homo sapiens
aagctgggcacagta

SEQ ID NO: 1607313 - DNA, 15 bp, Homo sapiens
caagctgggcacagt

SEQ ID NO: 1607314 - DNA, 15 bp, Homo sapiens
tcaagctgggcacag

SEQ ID NO: 1607315 - DNA, 15 bp, Homo sapiens
atcaagctgggcaca

SEQ ID NO: 1607316 - DNA, 15 bp, Homo sapiens
aatcaagctgggcac

SEQ ID NO: 1607317 - DNA, 15 bp, Homo sapiens
aaatcaagctgggca

SEQ ID NO: 1607318 - DNA, 15 bp, Homo sapiens
aaaatcaagctgggc

SEQ ID NO: 1607319 - DNA, 15 bp, Homo sapiens
gaaaatcaagctggg

SEQ ID NO: 1607320 - DNA, 15 bp, Homo sapiens
agaaaatcaagctgg

SEQ ID NO: 1607321 - DNA, 15 bp, Homo sapiens
tagaaaatcaagctg

SEQ ID NO: 1607322 - DNA, 15 bp, Homo sapiens
atagaaaatcaagct

SEQ ID NO: 1607323 - DNA, 15 bp, Homo sapiens
tatagaaaatcaagc

SEQ ID NO: 1607324 - DNA, 15 bp, Homo sapiens
atatagaaaatcaag

SEQ ID NO: 1607325 - DNA, 15 bp, Homo sapiens
aatatagaaaatcaa

SEQ ID NO: 1607326 - DNA, 15 bp, Homo sapiens
caatatagaaaatca

SEQ ID NO: 1607327 - DNA, 15 bp, Homo sapiens
acaatatagaaaatc

SEQ ID NO: 1607328 - DNA, 15 bp, Homo sapiens
aacaatatagaaaat

SEQ ID NO: 1607329 - DNA, 15 bp, Homo sapiens
aaacaatatagaaaa

SEQ ID NO: 1607330 - DNA, 15 bp, Homo sapiens
aaaacaatatagaaa

SEQ ID NO: 1607331 - DNA, 15 bp, Homo sapiens
aaaaacaatatagaa

SEQ ID NO: 1607332 - DNA, 15 bp, Homo sapiens
gaaaaacaatataga

SEQ ID NO: 1607333 - DNA, 15 bp, Homo sapiens
agaaaaacaatatag

SEQ ID NO: 1607334 - DNA, 15 bp, Homo sapiens
cagaaaaacaatata

SEQ ID NO: 1607335 - DNA, 15 bp, Homo sapiens
acagaaaaacaatat

SEQ ID NO: 1607336 - DNA, 15 bp, Homo sapiens
aacagaaaaacaata

SEQ ID NO: 1607337 - DNA, 15 bp, Homo sapiens
aaacagaaaaacaat

SEQ ID NO: 1607338 - DNA, 15 bp, Homo sapiens
aaaacagaaaaacaa

SEQ ID NO: 1607339 - DNA, 15 bp, Homo sapiens
aaaaacagaaaaaca

SEQ ID NO: 1607340 - DNA, 15 bp, Homo sapiens
gaaaaacagaaaaac

SEQ ID NO: 1607341 - DNA, 15 bp, Homo sapiens
tgaaaaacagaaaaa

SEQ ID NO: 1607342 - DNA, 15 bp, Homo sapiens
atgaaaaacagaaaa

SEQ ID NO: 1607343 - DNA, 15 bp, Homo sapiens
aatgaaaaacagaaa

SEQ ID NO: 1607344 - DNA, 15 bp, Homo sapiens
aaatgaaaaacagaa

SEQ ID NO: 1607345 - DNA, 15 bp, Homo sapiens
gaaatgaaaaacaga

SEQ ID NO: 1607346 - DNA, 15 bp, Homo sapiens
tgaaatgaaaaacag

SEQ ID NO: 1607347 - DNA, 15 bp, Homo sapiens
ttgaaatgaaaaaca

SEQ ID NO: 1607348 - DNA, 15 bp, Homo sapiens
attgaaatgaaaaac

SEQ ID NO: 1607349 - DNA, 15 bp, Homo sapiens
cattgaaatgaaaaa

SEQ ID NO: 1607350 - DNA, 15 bp, Homo sapiens
tcattgaaatgaaaa

SEQ ID NO: 1607351 - DNA, 15 bp, Homo sapiens
atcattgaaatgaaa

SEQ ID NO: 1607352 - DNA, 15 bp, Homo sapiens
aatcattgaaatgaa

SEQ ID NO: 1607353 - DNA, 15 bp, Homo sapiens
aaatcattgaaatga

SEQ ID NO: 1607354 - DNA, 15 bp, Homo sapiens
gaaatcattgaaatg

SEQ ID NO: 1607355 - DNA, 15 bp, Homo sapiens
agaaatcattgaaat

SEQ ID NO: 1607356 - DNA, 15 bp, Homo sapiens
cagaaatcattgaaa

SEQ ID NO: 1607357 - DNA, 15 bp, Homo sapiens
ccagaaatcattgaa

SEQ ID NO: 1607358 - DNA, 15 bp, Homo sapiens
accagaaatcattga

SEQ ID NO: 1607359 - DNA, 15 bp, Homo sapiens
gaccagaaatcattg

SEQ ID NO: 1607360 - DNA, 15 bp, Homo sapiens
agaccagaaatcatt

SEQ ID NO: 1607361 - DNA, 15 bp, Homo sapiens
gagaccagaaatcat

SEQ ID NO: 1607362 - DNA, 15 bp, Homo sapiens
tgagaccagaaatca

SEQ ID NO: 1607363 - DNA, 15 bp, Homo sapiens
atgagaccagaaatc

SEQ ID NO: 1607364 - DNA, 15 bp, Homo sapiens
aatgagaccagaaat

SEQ ID NO: 1607365 - DNA, 15 bp, Homo sapiens
aaatgagaccagaaa

SEQ ID NO: 1607366 - DNA, 15 bp, Homo sapiens
gaaatgagaccagaa

SEQ ID NO: 1607367 - DNA, 15 bp, Homo sapiens
agaaatgagaccaga

SEQ ID NO: 1607368 - DNA, 15 bp, Homo sapiens
cagaaatgagaccag

SEQ ID NO: 1607369 - DNA, 15 bp, Homo sapiens
acagaaatgagacca

SEQ ID NO: 1607370 - DNA, 15 bp, Homo sapiens
aacagaaatgagacc

SEQ ID NO: 1607371 - DNA, 15 bp, Homo sapiens
aaacagaaatgagac

SEQ ID NO: 1607372 - DNA, 15 bp, Homo sapiens
gaaacagaaatgaga

SEQ ID NO: 1607373 - DNA, 15 bp, Homo sapiens
agaaacagaaatgag

SEQ ID NO: 1607374 - DNA, 15 bp, Homo sapiens
aagaaacagaaatga

SEQ ID NO: 1607375 - DNA, 15 bp, Homo sapiens
aaagaaacagaaatg

SEQ ID NO: 1607376 - DNA, 15 bp, Homo sapiens
aaaagaaacagaaat

SEQ ID NO: 1607377 - DNA, 15 bp, Homo sapiens
taaaagaaacagaaa

SEQ ID NO: 1607378 - DNA, 15 bp, Homo sapiens
ataaaagaaacagaa

SEQ ID NO: 1607379 - DNA, 15 bp, Homo sapiens
aataaaagaaacaga

SEQ ID NO: 1607380 - DNA, 15 bp, Homo sapiens
gaataaaagaaacag

SEQ ID NO: 1607381 - DNA, 15 bp, Homo sapiens
ctgcttctcagactg

SEQ ID NO: 1607382 - DNA, 15 bp, Homo sapiens
tctgcttctcagact

SEQ ID NO: 1607383 - DNA, 15 bp, Homo sapiens
ttctgcttctcagac

SEQ ID NO: 1607384 - DNA, 15 bp, Homo sapiens
cttctgcttctcaga

SEQ ID NO: 1607385 - DNA, 15 bp, Homo sapiens
ccttctgcttctcag

SEQ ID NO: 1607386 - DNA, 15 bp, Homo sapiens
tccttctgcttctca

SEQ ID NO: 1607387 - DNA, 15 bp, Homo sapiens
ttccttctgcttctc

SEQ ID NO: 1607388 - DNA, 15 bp, Homo sapiens
attccttctgcttct

SEQ ID NO: 1607389 - DNA, 15 bp, Homo sapiens
tattccttctgcttc

SEQ ID NO: 1607390 - DNA, 15 bp, Homo sapiens
ttattccttctgctt

SEQ ID NO: 1607391 - DNA, 15 bp, Homo sapiens
tttattccttctgct

SEQ ID NO: 1607392 - DNA, 15 bp, Homo sapiens
ttttattccttctgc

SEQ ID NO: 1607393 - DNA, 15 bp, Homo sapiens
tttttattccttctg

SEQ ID NO: 1607394 - DNA, 15 bp, Homo sapiens
atttttattccttct

SEQ ID NO: 1607395 - DNA, 15 bp, Homo sapiens
aatttttattccttc

SEQ ID NO: 1607396 - DNA, 15 bp, Homo sapiens
taatttttattcctt

SEQ ID NO: 1607397 - DNA, 15 bp, Homo sapiens
ttaatttttattcct

SEQ ID NO: 1607398 - DNA, 15 bp, Homo sapiens
tttaatttttattcc

SEQ ID NO: 1607399 - DNA, 15 bp, Homo sapiens
ttttaatttttattc

SEQ ID NO: 1607400 - DNA, 15 bp, Homo sapiens
tttttaatttttatt

SEQ ID NO: 1607401 - DNA, 15 bp, Homo sapiens
gtttttaatttttat

SEQ ID NO: 1607402 - DNA, 15 bp, Homo sapiens
tgtttttaattttta

SEQ ID NO: 1607403 - DNA, 15 bp, Homo sapiens
ctgtttttgttttta

SEQ ID NO: 1607404 - DNA, 15 bp, Homo sapiens
gctgtttttgttttt

SEQ ID NO: 1607405 - DNA, 15 bp, Homo sapiens
ggctgtttttgtttt

SEQ ID NO: 1607406 - DNA, 15 bp, Homo sapiens
gggctgtttttgttt

SEQ ID NO: 1607407 - DNA, 15 bp, Homo sapiens
ggggctgtttttgtt

SEQ ID NO: 1607408 - DNA, 15 bp, Homo sapiens
tggggctgtttttgt

SEQ ID NO: 1607409 - DNA, 15 bp, Homo sapiens
ctggggctgtttttg

SEQ ID NO: 1607410 - DNA, 15 bp, Homo sapiens
actggggctgttttt

SEQ ID NO: 1607411 - DNA, 15 bp, Homo sapiens
cactggggctgtttt

SEQ ID NO: 1607412 - DNA, 15 bp, Homo sapiens
tcactggggctgttt

SEQ ID NO: 1607413 - DNA, 15 bp, Homo sapiens
atcactggggctgtt

SEQ ID NO: 1607414 - DNA, 15 bp, Homo sapiens
gatcactggggctgt

SEQ ID NO: 1607415 - DNA, 15 bp, Homo sapiens
agatcactggggctg

SEQ ID NO: 1607416 - DNA, 15 bp, Homo sapiens
cagatcactggggct

SEQ ID NO: 1607417 - DNA, 15 bp, Homo sapiens
acagatcactggggc

SEQ ID NO: 1607418 - DNA, 15 bp, Homo sapiens
cacagatcactgggg

SEQ ID NO: 1607419 - DNA, 15 bp, Homo sapiens
ccacagatcactggg

SEQ ID NO: 1607420 - DNA, 15 bp, Homo sapiens
cccacagatcactgg

SEQ ID NO: 1607421 - DNA, 15 bp, Homo sapiens
tcccacagatcactg

SEQ ID NO: 1607422 - DNA, 15 bp, Homo sapiens
gtcccacagatcact

SEQ ID NO: 1607423 - DNA, 15 bp, Homo sapiens
tgtcccacagatcac

SEQ ID NO: 1607424 - DNA, 15 bp, Homo sapiens
ttgtcccacagatca

SEQ ID NO: 1607425 - DNA, 15 bp, Homo sapiens
attgtcccacagatc

SEQ ID NO: 1607426 - DNA, 15 bp, Homo sapiens
tattgtcccacagat

SEQ ID NO: 1607427 - DNA, 15 bp, Homo sapiens
atattgtcccacaga

SEQ ID NO: 1607428 - DNA, 15 bp, Homo sapiens
gatattgtcccacag

SEQ ID NO: 1607429 - DNA, 15 bp, Homo sapiens
tgatattgtcccaca

SEQ ID NO: 1607430 - DNA, 15 bp, Homo sapiens
ttgatattgtcccac

SEQ ID NO: 1607431 - DNA, 15 bp, Homo sapiens
tttgatattgtccca

SEQ ID NO: 1607432 - DNA, 15 bp, Homo sapiens
atttgatattgtccc

SEQ ID NO: 1607433 - DNA, 15 bp, Homo sapiens
catttgatattgtcc

SEQ ID NO: 1607434 - DNA, 15 bp, Homo sapiens
tcatttgatattgtc

SEQ ID NO: 1607435 - DNA, 15 bp, Homo sapiens
atcatttgatattgt

SEQ ID NO: 1607436 - DNA, 15 bp, Homo sapiens
gatcatttgatattg

SEQ ID NO: 1607437 - DNA, 15 bp, Homo sapiens
tgatcatttgatatt

SEQ ID NO: 1607438 - DNA, 15 bp, Homo sapiens
ctgatcatttgatat

SEQ ID NO: 1607439 - DNA, 15 bp, Homo sapiens
tctgatcatttgata

SEQ ID NO: 1607440 - DNA, 15 bp, Homo sapiens
ttctgatcatttgat

SEQ ID NO: 1607441 - DNA, 15 bp, Homo sapiens
tttctgatcatttga

SEQ ID NO: 1607442 - DNA, 15 bp, Homo sapiens
gtttctgatcatttg

SEQ ID NO: 1607443 - DNA, 15 bp, Homo sapiens
tgtttctgatcattt

SEQ ID NO: 1607444 - DNA, 15 bp, Homo sapiens
atgtttctgatcatt

SEQ ID NO: 1607445 - DNA, 15 bp, Homo sapiens
tatgtttctgatcat

SEQ ID NO: 1607446 - DNA, 15 bp, Homo sapiens
ttatgtttctgatca

SEQ ID NO: 1607447 - DNA, 15 bp, Homo sapiens
tttatgtttctgatc

SEQ ID NO: 1607448 - DNA, 15 bp, Homo sapiens
ctttatgtttctgat

SEQ ID NO: 1607449 - DNA, 15 bp, Homo sapiens
gctttatgtttctga

SEQ ID NO: 1607450 - DNA, 15 bp, Homo sapiens
tgctttatgtttctg

SEQ ID NO: 1607451 - DNA, 15 bp, Homo sapiens
ttgctttatgtttct

SEQ ID NO: 1607452 - DNA, 15 bp, Homo sapiens
tttgctttatgtttc

SEQ ID NO: 1607453 - DNA, 15 bp, Homo sapiens
atttgctttatgttt

SEQ ID NO: 1607454 - DNA, 15 bp, Homo sapiens
aatttgctttatgtt

SEQ ID NO: 1607455 - DNA, 15 bp, Homo sapiens
aaatttgctttatgt

SEQ ID NO: 1607456 - DNA, 15 bp, Homo sapiens
taaatttgctttatg

SEQ ID NO: 1607457 - DNA, 15 bp, Homo sapiens
ataaatttgctttat

SEQ ID NO: 1607458 - DNA, 15 bp, Homo sapiens
aataaatttgcttta

SEQ ID NO: 1607459 - DNA, 15 bp, Homo sapiens
aaataaatttgcttt

SEQ ID NO: 1607460 - DNA, 15 bp, Homo sapiens
aaaataaatttgctt

SEQ ID NO: 1607461 - DNA, 15 bp, Homo sapiens
taaaataaatttgct

SEQ ID NO: 1607462 - DNA, 15 bp, Homo sapiens
ataaaataaatttgc

SEQ ID NO: 1607463 - DNA, 15 bp, Homo sapiens
cataaaataaatttg

SEQ ID NO: 1607464 - DNA, 15 bp, Homo sapiens
gcataaaataaattt

SEQ ID NO: 1607465 - DNA, 15 bp, Homo sapiens
ggcataaaataaatt

SEQ ID NO: 1607466 - DNA, 15 bp, Homo sapiens
gggcataaaataaat

SEQ ID NO: 1607467 - DNA, 15 bp, Homo sapiens
agggcataaaataaa

SEQ ID NO: 1607468 - DNA, 15 bp, Homo sapiens
tagggcataaaataa

SEQ ID NO: 1607469 - DNA, 15 bp, Homo sapiens
atagggcataaaata

SEQ ID NO: 1607470 - DNA, 15 bp, Homo sapiens
aatagggcataaaat

SEQ ID NO: 1607471 - DNA, 15 bp, Homo sapiens
taatagggcataaaa

SEQ ID NO: 1607472 - DNA, 15 bp, Homo sapiens
ctaatagggcataaa

SEQ ID NO: 1607473 - DNA, 15 bp, Homo sapiens
tctaatagggcataa

SEQ ID NO: 1607474 - DNA, 15 bp, Homo sapiens
atctaatagggcata

SEQ ID NO: 1607475 - DNA, 15 bp, Homo sapiens
gatctaatagggcat

SEQ ID NO: 1607476 - DNA, 15 bp, Homo sapiens
tgatctaatagggca

SEQ ID NO: 1607477 - DNA, 15 bp, Homo sapiens
atgatctaatagggc

SEQ ID NO: 1607478 - DNA, 15 bp, Homo sapiens
aatgatctaataggg

SEQ ID NO: 1607479 - DNA, 15 bp, Homo sapiens
taatgatctaatagg

SEQ ID NO: 1607480 - DNA, 15 bp, Homo sapiens
ttaatgatctaatag

SEQ ID NO: 1607481 - DNA, 15 bp, Homo sapiens
tttaatgatctaata

SEQ ID NO: 1607482 - DNA, 15 bp, Homo sapiens
gtttaatgatctaat

SEQ ID NO: 1607483 - DNA, 15 bp, Homo sapiens
tgtttaatgatctaa

SEQ ID NO: 1607484 - DNA, 15 bp, Homo sapiens
gtgtttaatgatcta

SEQ ID NO: 1607485 - DNA, 15 bp, Homo sapiens
cgtgtttaatgatct

SEQ ID NO: 1607486 - DNA, 15 bp, Homo sapiens
gcgtgtttaatgatc

SEQ ID NO: 1607487 - DNA, 15 bp, Homo sapiens
tgcgtgtttaatgat

SEQ ID NO: 1607488 - DNA, 15 bp, Homo sapiens
ctgcgtgtttaatga

SEQ ID NO: 1607489 - DNA, 15 bp, Homo sapiens
tctgcgtgtttaatg

SEQ ID NO: 1607490 - DNA, 15 bp, Homo sapiens
ctctgcgtgtttaat

SEQ ID NO: 1607491 - DNA, 15 bp, Homo sapiens
tctctgcgtgtttaa

SEQ ID NO: 1607492 - DNA, 15 bp, Homo sapiens
atctctgcgtgttta

SEQ ID NO: 1607493 - DNA, 15 bp, Homo sapiens
gatctctgcgtgttt

SEQ ID NO: 1607494 - DNA, 15 bp, Homo sapiens
cgatctctgcgtgtt

SEQ ID NO: 1607495 - DNA, 15 bp, Homo sapiens
ccgatctctgcgtgt

SEQ ID NO: 1607496 - DNA, 15 bp, Homo sapiens
accgatctctgcgtg

SEQ ID NO: 1607497 - DNA, 15 bp, Homo sapiens
gaccgatctctgcgt

SEQ ID NO: 1607498 - DNA, 15 bp, Homo sapiens
cgaccgatctctgcg

SEQ ID NO: 1607499 - DNA, 15 bp, Homo sapiens
ccgaccgatctctgc

SEQ ID NO: 1607500 - DNA, 15 bp, Homo sapiens
cccgaccgatctctg

SEQ ID NO: 1607501 - DNA, 15 bp, Homo sapiens
gcccgaccgatctct

SEQ ID NO: 1607502 - DNA, 15 bp, Homo sapiens
cgcccgaccgatctc

SEQ ID NO: 1607503 - DNA, 15 bp, Homo sapiens
gcgcccgaccgatct

SEQ ID NO: 1607504 - DNA, 15 bp, Homo sapiens
cgcgcccgaccgatc

SEQ ID NO: 1607505 - DNA, 15 bp, Homo sapiens
ccgcgcccgaccgat

SEQ ID NO: 1607506 - DNA, 15 bp, Homo sapiens
accgcgcccgaccga

SEQ ID NO: 1607507 - DNA, 15 bp, Homo sapiens
caccgcgcccgaccg

SEQ ID NO: 1607508 - DNA, 15 bp, Homo sapiens
ccaccgcgcccgacc

SEQ ID NO: 1607509 - DNA, 15 bp, Homo sapiens
gccaccgcgcccgac

SEQ ID NO: 1607510 - DNA, 15 bp, Homo sapiens
agccaccgcgcccga

SEQ ID NO: 1607511 - DNA, 15 bp, Homo sapiens
ttgggattacaggag

SEQ ID NO: 1607512 - DNA, 15 bp, Homo sapiens
gttgggattacagga

SEQ ID NO: 1607513 - DNA, 15 bp, Homo sapiens
tgttgggattacagg

SEQ ID NO: 1607514 - DNA, 15 bp, Homo sapiens
gtgttgggattacag

SEQ ID NO: 1607515 - DNA, 15 bp, Homo sapiens
agtgttgggattaca

SEQ ID NO: 1607516 - DNA, 15 bp, Homo sapiens
aagtgttgggattac

SEQ ID NO: 1607517 - DNA, 15 bp, Homo sapiens
ctcccaaagtgttgg

SEQ ID NO: 1607518 - DNA, 15 bp, Homo sapiens
cctcccaaagtgttg

SEQ ID NO: 1607519 - DNA, 15 bp, Homo sapiens
gcctcccaaagtgtt

SEQ ID NO: 1607520 - DNA, 15 bp, Homo sapiens
agcctcccaaagtgt

SEQ ID NO: 1607521 - DNA, 15 bp, Homo sapiens
ccgcccgcctcagcc

SEQ ID NO: 1607522 - DNA, 15 bp, Homo sapiens
tccgcccgcctcagc

SEQ ID NO: 1607523 - DNA, 15 bp, Homo sapiens
atccgcccgcctcag

SEQ ID NO: 1607524 - DNA, 15 bp, Homo sapiens
gatccgcccgcctca

SEQ ID NO: 1607525 - DNA, 15 bp, Homo sapiens
ggtgatccgcccgcc

SEQ ID NO: 1607526 - DNA, 15 bp, Homo sapiens
aggtgatccgcccgc

SEQ ID NO: 1607527 - DNA, 15 bp, Homo sapiens
caggtgatccgcccg

SEQ ID NO: 1607528 - DNA, 15 bp, Homo sapiens
cgcctgacctcaggt

SEQ ID NO: 1607529 - DNA, 15 bp, Homo sapiens
acgcctgacctcagg

SEQ ID NO: 1607530 - DNA, 15 bp, Homo sapiens
aacgcctgacctcag

SEQ ID NO: 1607531 - DNA, 15 bp, Homo sapiens
gaacgcctgacctca

SEQ ID NO: 1607532 - DNA, 15 bp, Homo sapiens
ggaacgcctgacctc

SEQ ID NO: 1607533 - DNA, 15 bp, Homo sapiens
tggaacgcctgacct

SEQ ID NO: 1607534 - DNA, 15 bp, Homo sapiens
ctggaacgcctgacc

SEQ ID NO: 1607535 - DNA, 15 bp, Homo sapiens
tctggaacgcctgac

SEQ ID NO: 1607536 - DNA, 15 bp, Homo sapiens
gtctggaacgcctga

SEQ ID NO: 1607537 - DNA, 15 bp, Homo sapiens
ggtctggaacgcctg

SEQ ID NO: 1607538 - DNA, 15 bp, Homo sapiens
tggtctggaacgcct

SEQ ID NO: 1607539 - DNA, 15 bp, Homo sapiens
ctggtctggaacgcc

SEQ ID NO: 1607540 - DNA, 15 bp, Homo sapiens
gctggtctggaacgc

SEQ ID NO: 1607541 - DNA, 15 bp, Homo sapiens
ggctggtctggaacg

SEQ ID NO: 1607542 - DNA, 15 bp, Homo sapiens
tcatgcccggctaat

SEQ ID NO: 1607543 - DNA, 15 bp, Homo sapiens
accatcatgcccggc

SEQ ID NO: 1607544 - DNA, 15 bp, Homo sapiens
caccatcatgcccgg

SEQ ID NO: 1607545 - DNA, 15 bp, Homo sapiens
gcaccatcatgcccg

SEQ ID NO: 1607546 - DNA, 15 bp, Homo sapiens
tgcaccatcatgccc

SEQ ID NO: 1607547 - DNA, 15 bp, Homo sapiens
acatgcaccatcatg

SEQ ID NO: 1607548 - DNA, 15 bp, Homo sapiens
gacatgcaccatcat

SEQ ID NO: 1607549 - DNA, 15 bp, Homo sapiens
agacatgcaccatca

SEQ ID NO: 1607550 - DNA, 15 bp, Homo sapiens
cagacatgcaccatc

SEQ ID NO: 1607551 - DNA, 15 bp, Homo sapiens
acagacatgcaccat

SEQ ID NO: 1607552 - DNA, 15 bp, Homo sapiens
tacagacatgcacca

SEQ ID NO: 1607553 - DNA, 15 bp, Homo sapiens
ttacagacatgcacc

SEQ ID NO: 1607554 - DNA, 15 bp, Homo sapiens
attacagacatgcac

SEQ ID NO: 1607555 - DNA, 15 bp, Homo sapiens
gattacagacatgca

SEQ ID NO: 1607556 - DNA, 15 bp, Homo sapiens
ggattacagacatgc

SEQ ID NO: 1607557 - DNA, 15 bp, Homo sapiens
gggattacagacatg

SEQ ID NO: 1607558 - DNA, 15 bp, Homo sapiens
tgggattacagacat

SEQ ID NO: 1607559 - DNA, 15 bp, Homo sapiens
ctgggattacagaca

SEQ ID NO: 1607560 - DNA, 15 bp, Homo sapiens
agctgggattacaga

SEQ ID NO: 1607561 - DNA, 15 bp, Homo sapiens
agttcaagcgattct

SEQ ID NO: 1607562 - DNA, 15 bp, Homo sapiens
gagttcaagcgattc

SEQ ID NO: 1607563 - DNA, 15 bp, Homo sapiens
tgagttcaagcgatt

SEQ ID NO: 1607564 - DNA, 15 bp, Homo sapiens
ctgagttcaagcgat

SEQ ID NO: 1607565 - DNA, 15 bp, Homo sapiens
cctgagttcaagcga

SEQ ID NO: 1607566 - DNA, 15 bp, Homo sapiens
tcctgagttcaagcg

SEQ ID NO: 1607567 - DNA, 15 bp, Homo sapiens
ctcctgagttcaagc

SEQ ID NO: 1607568 - DNA, 15 bp, Homo sapiens
cctcctgagttcaag

SEQ ID NO: 1607569 - DNA, 15 bp, Homo sapiens
gcctcctgagttcaa

SEQ ID NO: 1607570 - DNA, 15 bp, Homo sapiens
cgcctcctgagttca

SEQ ID NO: 1607571 - DNA, 15 bp, Homo sapiens
ccgcctcctgagttc

SEQ ID NO: 1607572 - DNA, 15 bp, Homo sapiens
tccgcctcctgagtt

SEQ ID NO: 1607573 - DNA, 15 bp, Homo sapiens
ctccgcctcctgagt

SEQ ID NO: 1607574 - DNA, 15 bp, Homo sapiens
cctccgcctcctgag

SEQ ID NO: 1607575 - DNA, 15 bp, Homo sapiens
acctccgcctcctga

SEQ ID NO: 1607576 - DNA, 15 bp, Homo sapiens
ctcactgcaacctcc

SEQ ID NO: 1607577 - DNA, 15 bp, Homo sapiens
ctgctcactgcaacc

SEQ ID NO: 1607578 - DNA, 15 bp, Homo sapiens
tctgctcactgcaac

SEQ ID NO: 1607579 - DNA, 15 bp, Homo sapiens
ccatctctgctcact

SEQ ID NO: 1607580 - DNA, 15 bp, Homo sapiens
gccatctctgctcac

SEQ ID NO: 1607581 - DNA, 15 bp, Homo sapiens
cgccatctctgctca

SEQ ID NO: 1607582 - DNA, 15 bp, Homo sapiens
gcgccatctctgctc

SEQ ID NO: 1607583 - DNA, 15 bp, Homo sapiens
ggcgccatctctgct

SEQ ID NO: 1607584 - DNA, 15 bp, Homo sapiens
tggcgccatctctgc

SEQ ID NO: 1607585 - DNA, 15 bp, Homo sapiens
atggcgccatctctg

SEQ ID NO: 1607586 - DNA, 15 bp, Homo sapiens
aatggcgccatctct

SEQ ID NO: 1607587 - DNA, 15 bp, Homo sapiens
caatggcgccatctc

SEQ ID NO: 1607588 - DNA, 15 bp, Homo sapiens
agagtgcaatggcgc

SEQ ID NO: 1607589 - DNA, 15 bp, Homo sapiens
tagagtgcaatggcg

SEQ ID NO: 1607590 - DNA, 15 bp, Homo sapiens
ctagagtgcaatggc

SEQ ID NO: 1607591 - DNA, 15 bp, Homo sapiens
gctagagtgcaatgg

SEQ ID NO: 1607592 - DNA, 15 bp, Homo sapiens
ggctagagtgcaatg

SEQ ID NO: 1607593 - DNA, 15 bp, Homo sapiens
aggctagagtgcaat

SEQ ID NO: 1607594 - DNA, 15 bp, Homo sapiens
caggctagagtgcaa

SEQ ID NO: 1607595 - DNA, 15 bp, Homo sapiens
ttcaggctagagtgc

SEQ ID NO: 1607596 - DNA, 15 bp, Homo sapiens
attcaggctagagtg

SEQ ID NO: 1607597 - DNA, 15 bp, Homo sapiens
cattcaggctagagt

SEQ ID NO: 1607598 - DNA, 15 bp, Homo sapiens
tcattcaggctagag

SEQ ID NO: 1607599 - DNA, 15 bp, Homo sapiens
gtcattcaggctaga

SEQ ID NO: 1607600 - DNA, 15 bp, Homo sapiens
tgtcattcaggctag

SEQ ID NO: 1607601 - DNA, 15 bp, Homo sapiens
ttgtcattcaggcta

SEQ ID NO: 1607602 - DNA, 15 bp, Homo sapiens
cttgtcattcaggct

SEQ ID NO: 1607603 - DNA, 15 bp, Homo sapiens
tcttgtcattcaggc

SEQ ID NO: 1607604 - DNA, 15 bp, Homo sapiens
ctcttgtcattcagg

SEQ ID NO: 1607605 - DNA, 15 bp, Homo sapiens
actcttgtcattcag

SEQ ID NO: 1607606 - DNA, 15 bp, Homo sapiens
cactcttgtcattca

SEQ ID NO: 1607607 - DNA, 15 bp, Homo sapiens
tcactcttgtcattc

SEQ ID NO: 1607608 - DNA, 15 bp, Homo sapiens
ttcactcttgtcatt

SEQ ID NO: 1607609 - DNA, 15 bp, Homo sapiens
tttcactcttgtcat

SEQ ID NO: 1607610 - DNA, 15 bp, Homo sapiens
gtttcactcttgtca

SEQ ID NO: 1607611 - DNA, 15 bp, Homo sapiens
agtttcactcttgtc

SEQ ID NO: 1607612 - DNA, 15 bp, Homo sapiens
agagtttcactcttg

SEQ ID NO: 1607613 - DNA, 15 bp, Homo sapiens
cagagtttcactctt

SEQ ID NO: 1607614 - DNA, 15 bp, Homo sapiens
acagagtttcactct

SEQ ID NO: 1607615 - DNA, 15 bp, Homo sapiens
gacagagtttcactc

SEQ ID NO: 1607616 - DNA, 15 bp, Homo sapiens
ggacagagtttcact

SEQ ID NO: 1607617 - DNA, 15 bp, Homo sapiens
gggacagagtttcac

SEQ ID NO: 1607618 - DNA, 15 bp, Homo sapiens
tgggacagagtttca

SEQ ID NO: 1607619 - DNA, 15 bp, Homo sapiens
ttgggacagagtttc

SEQ ID NO: 1607620 - DNA, 15 bp, Homo sapiens
tttgggacagagttt

SEQ ID NO: 1607621 - DNA, 15 bp, Homo sapiens
ttttgggacagagtt

SEQ ID NO: 1607622 - DNA, 15 bp, Homo sapiens
tttttgggacagagt

SEQ ID NO: 1607623 - DNA, 15 bp, Homo sapiens
ttttttgggacagag

SEQ ID NO: 1607624 - DNA, 15 bp, Homo sapiens
tttttttgggacaga

SEQ ID NO: 1607625 - DNA, 15 bp, Homo sapiens
ctttttttgggacag

SEQ ID NO: 1607626 - DNA, 15 bp, Homo sapiens
tctttttttgggaca

SEQ ID NO: 1607627 - DNA, 15 bp, Homo sapiens
ttctttttttgggac

SEQ ID NO: 1607628 - DNA, 15 bp, Homo sapiens
tttctttttttggga

SEQ ID NO: 1607629 - DNA, 15 bp, Homo sapiens
ttttctttttttggg

SEQ ID NO: 1607630 - DNA, 15 bp, Homo sapiens
catgttttttttctt

SEQ ID NO: 1607631 - DNA, 15 bp, Homo sapiens
gcatgttttttttct

SEQ ID NO: 1607632 - DNA, 15 bp, Homo sapiens
tgcatgttttttttc

SEQ ID NO: 1607633 - DNA, 15 bp, Homo sapiens
ctgcatgtttttttt

SEQ ID NO: 1607634 - DNA, 15 bp, Homo sapiens
tctgcatgttttttt

SEQ ID NO: 1607635 - DNA, 15 bp, Homo sapiens
ctctgcatgtttttt

SEQ ID NO: 1607636 - DNA, 15 bp, Homo sapiens
tctctgcatgttttt

SEQ ID NO: 1607637 - DNA, 15 bp, Homo sapiens
atctctgcatgtttt

SEQ ID NO: 1607638 - DNA, 15 bp, Homo sapiens
catctctgcatgttt

SEQ ID NO: 1607639 - DNA, 15 bp, Homo sapiens
tcatctctgcatgtt

SEQ ID NO: 1607640 - DNA, 15 bp, Homo sapiens
ttcatctctgcatgt

SEQ ID NO: 1607641 - DNA, 15 bp, Homo sapiens
attcatctctgcatg

SEQ ID NO: 1607642 - DNA, 15 bp, Homo sapiens
aattcatctctgcat

SEQ ID NO: 1607643 - DNA, 15 bp, Homo sapiens
aaattcatctctgca

SEQ ID NO: 1607644 - DNA, 15 bp, Homo sapiens
aaaattcatctctgc

SEQ ID NO: 1607645 - DNA, 15 bp, Homo sapiens
taaaattcatctctg

SEQ ID NO: 1607646 - DNA, 15 bp, Homo sapiens
gtaaaattcatctct

SEQ ID NO: 1607647 - DNA, 15 bp, Homo sapiens
tgtaaaattcatctc

SEQ ID NO: 1607648 - DNA, 15 bp, Homo sapiens
atgtaaaattcatct

SEQ ID NO: 1607649 - DNA, 15 bp, Homo sapiens
aatgtaaaattcatc

SEQ ID NO: 1607650 - DNA, 15 bp, Homo sapiens
aaatgtaaaattcat

SEQ ID NO: 1607651 - DNA, 15 bp, Homo sapiens
taaatgtaaaattca

SEQ ID NO: 1607652 - DNA, 15 bp, Homo sapiens
ataaatgtaaaattc

SEQ ID NO: 1607653 - DNA, 15 bp, Homo sapiens
tataaatgtaaaatt

SEQ ID NO: 1607654 - DNA, 15 bp, Homo sapiens
ttataaatgtaaaat

SEQ ID NO: 1607655 - DNA, 15 bp, Homo sapiens
tttataaatgtaaaa

SEQ ID NO: 1607656 - DNA, 15 bp, Homo sapiens
atttataaatgtaaa

SEQ ID NO: 1607657 - DNA, 15 bp, Homo sapiens
aatttataaatgtaa

SEQ ID NO: 1607658 - DNA, 15 bp, Homo sapiens
taatttataaatgta

SEQ ID NO: 1607659 - DNA, 15 bp, Homo sapiens
ataatttataaatgt

SEQ ID NO: 1607660 - DNA, 15 bp, Homo sapiens
aataatttataaatg

SEQ ID NO: 1607661 - DNA, 15 bp, Homo sapiens
aaataatttataaat

SEQ ID NO: 1607662 - DNA, 15 bp, Homo sapiens
caaataatttataaa

SEQ ID NO: 1607663 - DNA, 15 bp, Homo sapiens
acaaataatttataa

SEQ ID NO: 1607664 - DNA, 15 bp, Homo sapiens
tacaaataatttata

SEQ ID NO: 1607665 - DNA, 15 bp, Homo sapiens
atacaaataatttat

SEQ ID NO: 1607666 - DNA, 15 bp, Homo sapiens
gatacaaataattta

SEQ ID NO: 1607667 - DNA, 15 bp, Homo sapiens
agatacaaataattt

SEQ ID NO: 1607668 - DNA, 15 bp, Homo sapiens
aagatacaaataatt

SEQ ID NO: 1607669 - DNA, 15 bp, Homo sapiens
aaagatacaaataat

SEQ ID NO: 1607670 - DNA, 15 bp, Homo sapiens
gaaagatacaaataa

SEQ ID NO: 1607671 - DNA, 15 bp, Homo sapiens
tgaaagatacaaata

SEQ ID NO: 1607672 - DNA, 15 bp, Homo sapiens
ctgaaagatacaaat

SEQ ID NO: 1607673 - DNA, 15 bp, Homo sapiens
actgaaagatacaaa

SEQ ID NO: 1607674 - DNA, 15 bp, Homo sapiens
cactgaaagatacaa

SEQ ID NO: 1607675 - DNA, 15 bp, Homo sapiens
tcactgaaagataca

SEQ ID NO: 1607676 - DNA, 15 bp, Homo sapiens
ttcactgaaagatac

SEQ ID NO: 1607677 - DNA, 15 bp, Homo sapiens
attcactgaaagata

SEQ ID NO: 1607678 - DNA, 15 bp, Homo sapiens
tattcactgaaagat

SEQ ID NO: 1607679 - DNA, 15 bp, Homo sapiens
atattcactgaaaga

SEQ ID NO: 1607680 - DNA, 15 bp, Homo sapiens
aatattcactgaaag

SEQ ID NO: 1607681 - DNA, 15 bp, Homo sapiens
taatattcactgaaa

SEQ ID NO: 1607682 - DNA, 15 bp, Homo sapiens
ataatattcactgaa

SEQ ID NO: 1607683 - DNA, 15 bp, Homo sapiens
aataatattcactga

SEQ ID NO: 1607684 - DNA, 15 bp, Homo sapiens
taataatattcactg

SEQ ID NO: 1607685 - DNA, 15 bp, Homo sapiens
ataataatattcact

SEQ ID NO: 1607686 - DNA, 15 bp, Homo sapiens
aataataatattcac

SEQ ID NO: 1607687 - DNA, 15 bp, Homo sapiens
caataataatattca

SEQ ID NO: 1607688 - DNA, 15 bp, Homo sapiens
acaataataatattc

SEQ ID NO: 1607689 - DNA, 15 bp, Homo sapiens
aacaataataatatt

SEQ ID NO: 1607690 - DNA, 15 bp, Homo sapiens
caacaataataatat

SEQ ID NO: 1607691 - DNA, 15 bp, Homo sapiens
acaacaataataata

SEQ ID NO: 1607692 - DNA, 15 bp, Homo sapiens
aacaacaataataat

SEQ ID NO: 1607693 - DNA, 15 bp, Homo sapiens
gaacaacaataataa

SEQ ID NO: 1607694 - DNA, 15 bp, Homo sapiens
cgaacaacaataata

SEQ ID NO: 1607695 - DNA, 15 bp, Homo sapiens
gcgaacaacaataat

SEQ ID NO: 1607696 - DNA, 15 bp, Homo sapiens
tgcgaacaacaataa

SEQ ID NO: 1607697 - DNA, 15 bp, Homo sapiens
atgcgaacaacaata

SEQ ID NO: 1607698 - DNA, 15 bp, Homo sapiens
catgcgaacaacaat

SEQ ID NO: 1607699 - DNA, 15 bp, Homo sapiens
ccatgcgaacaacaa

SEQ ID NO: 1607700 - DNA, 15 bp, Homo sapiens
gccatgcgaacaaca

SEQ ID NO: 1607701 - DNA, 15 bp, Homo sapiens
ggccatgcgaacaac

SEQ ID NO: 1607702 - DNA, 15 bp, Homo sapiens
tggccatgcgaacaa

SEQ ID NO: 1607703 - DNA, 15 bp, Homo sapiens
atggccatgcgaaca

SEQ ID NO: 1607704 - DNA, 15 bp, Homo sapiens
gatggccatgcgaac

SEQ ID NO: 1607705 - DNA, 15 bp, Homo sapiens
tgatggccatgcgaa

SEQ ID NO: 1607706 - DNA, 15 bp, Homo sapiens
ttgatggccatgcga

SEQ ID NO: 1607707 - DNA, 15 bp, Homo sapiens
tttgatggccatgcg

SEQ ID NO: 1607708 - DNA, 15 bp, Homo sapiens
ttttgatggccatgc

SEQ ID NO: 1607709 - DNA, 15 bp, Homo sapiens
attttgatggccatg

SEQ ID NO: 1607710 - DNA, 15 bp, Homo sapiens
aattttgatggccat

SEQ ID NO: 1607711 - DNA, 15 bp, Homo sapiens
aaattttgatggcca

SEQ ID NO: 1607712 - DNA, 15 bp, Homo sapiens
aaaattttgatggcc

SEQ ID NO: 1607713 - DNA, 15 bp, Homo sapiens
aaaaattttgatggc

SEQ ID NO: 1607714 - DNA, 15 bp, Homo sapiens
taaaaattttgatgg

SEQ ID NO: 1607715 - DNA, 15 bp, Homo sapiens
gtaaaaattttgatg

SEQ ID NO: 1607716 - DNA, 15 bp, Homo sapiens
ggtaaaaattttgat

SEQ ID NO: 1607717 - DNA, 15 bp, Homo sapiens
aggtaaaaattttga

SEQ ID NO: 1607718 - DNA, 15 bp, Homo sapiens
gaggtaaaaattttg

SEQ ID NO: 1607719 - DNA, 15 bp, Homo sapiens
agaggtaaaaatttt

SEQ ID NO: 1607720 - DNA, 15 bp, Homo sapiens
cagaggtaaaaattt

SEQ ID NO: 1607721 - DNA, 15 bp, Homo sapiens
tcagaggtaaaaatt

SEQ ID NO: 1607722 - DNA, 15 bp, Homo sapiens
ttcagaggtaaaaat

SEQ ID NO: 1607723 - DNA, 15 bp, Homo sapiens
attcagaggtaaaaa

SEQ ID NO: 1607724 - DNA, 15 bp, Homo sapiens
tattcagaggtaaaa

SEQ ID NO: 1607725 - DNA, 15 bp, Homo sapiens
ttattcagaggtaaa

SEQ ID NO: 1607726 - DNA, 15 bp, Homo sapiens
tttattcagaggtaa

SEQ ID NO: 1607727 - DNA, 15 bp, Homo sapiens
ctttattcagaggta

SEQ ID NO: 1607728 - DNA, 15 bp, Homo sapiens
cctttattcagaggt

SEQ ID NO: 1607729 - DNA, 15 bp, Homo sapiens
gcctttattcagagg

SEQ ID NO: 1607730 - DNA, 15 bp, Homo sapiens
tgcctttattcagag

SEQ ID NO: 1607731 - DNA, 15 bp, Homo sapiens
atgcctttattcaga

SEQ ID NO: 1607732 - DNA, 15 bp, Homo sapiens
aatgcctttattcag

SEQ ID NO: 1607733 - DNA, 15 bp, Homo sapiens
aaatgcctttattca

SEQ ID NO: 1607734 - DNA, 15 bp, Homo sapiens
gaaatgcctttattc

SEQ ID NO: 1607735 - DNA, 15 bp, Homo sapiens
agaaatgcctttatt

SEQ ID NO: 1607736 - DNA, 15 bp, Homo sapiens
aagaaatgcctttat

SEQ ID NO: 1607737 - DNA, 15 bp, Homo sapiens
taagaaatgccttta

SEQ ID NO: 1607738 - DNA, 15 bp, Homo sapiens
ttaagaaatgccttt

SEQ ID NO: 1607739 - DNA, 15 bp, Homo sapiens
gttaagaaatgcctt

SEQ ID NO: 1607740 - DNA, 15 bp, Homo sapiens
tgttaagaaatgcct

SEQ ID NO: 1607741 - DNA, 15 bp, Homo sapiens
atgttaagaaatgcc

SEQ ID NO: 1607742 - DNA, 15 bp, Homo sapiens
aatgttaagaaatgc

SEQ ID NO: 1607743 - DNA, 15 bp, Homo sapiens
caatgttaagaaatg

SEQ ID NO: 1607744 - DNA, 15 bp, Homo sapiens
ccaatgttaagaaat

SEQ ID NO: 1607745 - DNA, 15 bp, Homo sapiens
tccaatgttaagaaa

SEQ ID NO: 1607746 - DNA, 15 bp, Homo sapiens
atccaatgttaagaa

SEQ ID NO: 1607747 - DNA, 15 bp, Homo sapiens
aatccaatgttaaga

SEQ ID NO: 1607748 - DNA, 15 bp, Homo sapiens
caatccaatgttaag

SEQ ID NO: 1607749 - DNA, 15 bp, Homo sapiens
ccaatccaatgttaa

SEQ ID NO: 1607750 - DNA, 15 bp, Homo sapiens
accaatccaatgtta

SEQ ID NO: 1607751 - DNA, 15 bp, Homo sapiens
aaccaatccaatgtt

SEQ ID NO: 1607752 - DNA, 15 bp, Homo sapiens
taaccaatccaatgt

SEQ ID NO: 1607753 - DNA, 15 bp, Homo sapiens
ataaccaatccaatg

SEQ ID NO: 1607754 - DNA, 15 bp, Homo sapiens
tataaccaatccaat

SEQ ID NO: 1607755 - DNA, 15 bp, Homo sapiens
ctataaccaatccaa

SEQ ID NO: 1607756 - DNA, 15 bp, Homo sapiens
gctataaccaatcca

SEQ ID NO: 1607757 - DNA, 15 bp, Homo sapiens
cgctataaccaatcc

SEQ ID NO: 1607758 - DNA, 15 bp, Homo sapiens
acgctataaccaatc

SEQ ID NO: 1607759 - DNA, 15 bp, Homo sapiens
cacgctataaccaat

SEQ ID NO: 1607760 - DNA, 15 bp, Homo sapiens
ccacgctataaccaa

SEQ ID NO: 1607761 - DNA, 15 bp, Homo sapiens
tccacgctataacca

SEQ ID NO: 1607762 - DNA, 15 bp, Homo sapiens
ttccacgctataacc

SEQ ID NO: 1607763 - DNA, 15 bp, Homo sapiens
cttccacgctataac

SEQ ID NO: 1607764 - DNA, 15 bp, Homo sapiens
tcttccacgctataa

SEQ ID NO: 1607765 - DNA, 15 bp, Homo sapiens
ttcttccacgctata

SEQ ID NO: 1607766 - DNA, 15 bp, Homo sapiens
tttcttccacgctat

SEQ ID NO: 1607767 - DNA, 15 bp, Homo sapiens
atttcttccacgcta

SEQ ID NO: 1607768 - DNA, 15 bp, Homo sapiens
aatttcttccacgct

SEQ ID NO: 1607769 - DNA, 15 bp, Homo sapiens
gaatttcttccacgc

SEQ ID NO: 1607770 - DNA, 15 bp, Homo sapiens
tgaatttcttccacg

SEQ ID NO: 1607771 - DNA, 15 bp, Homo sapiens
ttgaatttcttccac

SEQ ID NO: 1607772 - DNA, 15 bp, Homo sapiens
attgaatttcttcca

SEQ ID NO: 1607773 - DNA, 15 bp, Homo sapiens
gattgaatttcttcc

SEQ ID NO: 1607774 - DNA, 15 bp, Homo sapiens
tgattgaatttcttc

SEQ ID NO: 1607775 - DNA, 15 bp, Homo sapiens
gtgattgaatttctt

SEQ ID NO: 1607776 - DNA, 15 bp, Homo sapiens
agtgattgaatttct

SEQ ID NO: 1607777 - DNA, 15 bp, Homo sapiens
gagtgattgaatttc

SEQ ID NO: 1607778 - DNA, 15 bp, Homo sapiens
ggagtgattgaattt

SEQ ID NO: 1607779 - DNA, 15 bp, Homo sapiens
tggagtgattgaatt

SEQ ID NO: 1607780 - DNA, 15 bp, Homo sapiens
gtggagtgattgaat

SEQ ID NO: 1607781 - DNA, 15 bp, Homo sapiens
ggtggagtgattgaa

SEQ ID NO: 1607782 - DNA, 15 bp, Homo sapiens
tggtggagtgattga

SEQ ID NO: 1607783 - DNA, 15 bp, Homo sapiens
ttggtggagtgattg

SEQ ID NO: 1607784 - DNA, 15 bp, Homo sapiens
attggtggagtgatt

SEQ ID NO: 1607785 - DNA, 15 bp, Homo sapiens
cattggtggagtgat

SEQ ID NO: 1607786 - DNA, 15 bp, Homo sapiens
acattggtggagtga

SEQ ID NO: 1607787 - DNA, 15 bp, Homo sapiens
aacattggtggagtg

SEQ ID NO: 1607788 - DNA, 15 bp, Homo sapiens
caacattggtggagt

SEQ ID NO: 1607789 - DNA, 15 bp, Homo sapiens
acaacattggtggag

SEQ ID NO: 1607790 - DNA, 15 bp, Homo sapiens
cacaacattggtgga

SEQ ID NO: 1607791 - DNA, 15 bp, Homo sapiens
ccacaacattggtgg

SEQ ID NO: 1607792 - DNA, 15 bp, Homo sapiens
gccacaacattggtg

SEQ ID NO: 1607793 - DNA, 15 bp, Homo sapiens
tgccacaacattggt

SEQ ID NO: 1607794 - DNA, 15 bp, Homo sapiens
ttgccacaacattgg

SEQ ID NO: 1607795 - DNA, 15 bp, Homo sapiens
tttgccacaacattg

SEQ ID NO: 1607796 - DNA, 15 bp, Homo sapiens
atttgccacaacatt

SEQ ID NO: 1607797 - DNA, 15 bp, Homo sapiens
tatttgccacaacat

SEQ ID NO: 1607798 - DNA, 15 bp, Homo sapiens
gtatttgccacaaca

SEQ ID NO: 1607799 - DNA, 15 bp, Homo sapiens
ggtatttgccacaac

SEQ ID NO: 1607800 - DNA, 15 bp, Homo sapiens
aggtatttgccacaa

SEQ ID NO: 1607801 - DNA, 15 bp, Homo sapiens
gaggtatttgccaca

SEQ ID NO: 1607802 - DNA, 15 bp, Homo sapiens
tgaggtatttgccac

SEQ ID NO: 1607803 - DNA, 15 bp, Homo sapiens
ttgaggtatttgcca

SEQ ID NO: 1607804 - DNA, 15 bp, Homo sapiens
tttgaggtatttgcc

SEQ ID NO: 1607805 - DNA, 15 bp, Homo sapiens
ttttgaggtatttgc

SEQ ID NO: 1607806 - DNA, 15 bp, Homo sapiens
cttttgaggtatttg

SEQ ID NO: 1607807 - DNA, 15 bp, Homo sapiens
gcttttgaggtattt

SEQ ID NO: 1607808 - DNA, 15 bp, Homo sapiens
tgcttttgaggtatt

SEQ ID NO: 1607809 - DNA, 15 bp, Homo sapiens
gtgcttttgaggtat

SEQ ID NO: 1607810 - DNA, 15 bp, Homo sapiens
cgtgcttttgaggta

SEQ ID NO: 1607811 - DNA, 15 bp, Homo sapiens
tcgtgcttttgaggt

SEQ ID NO: 1607812 - DNA, 15 bp, Homo sapiens
atcgtgcttttgagg

SEQ ID NO: 1607813 - DNA, 15 bp, Homo sapiens
gatcgtgcttttgag

SEQ ID NO: 1607814 - DNA, 15 bp, Homo sapiens
tgatcgtgcttttga

SEQ ID NO: 1607815 - DNA, 15 bp, Homo sapiens
ctgatcgtgcttttg

SEQ ID NO: 1607816 - DNA, 15 bp, Homo sapiens
actgatcgtgctttt

SEQ ID NO: 1607817 - DNA, 15 bp, Homo sapiens
gactgatcgtgcttt

SEQ ID NO: 1607818 - DNA, 15 bp, Homo sapiens
ggactgatcgtgctt

SEQ ID NO: 1607819 - DNA, 15 bp, Homo sapiens
aggactgatcgtgct

SEQ ID NO: 1607820 - DNA, 15 bp, Homo sapiens
taggactgatcgtgc

SEQ ID NO: 1607821 - DNA, 15 bp, Homo sapiens
ataggactgatcgtg

SEQ ID NO: 1607822 - DNA, 15 bp, Homo sapiens
gataggactgatcgt

SEQ ID NO: 1607823 - DNA, 15 bp, Homo sapiens
tgataggactgatcg

SEQ ID NO: 1607824 - DNA, 15 bp, Homo sapiens
atgataggactgatc

SEQ ID NO: 1607825 - DNA, 15 bp, Homo sapiens
aatgataggactgat

SEQ ID NO: 1607826 - DNA, 15 bp, Homo sapiens
aaatgataggactga

SEQ ID NO: 1607827 - DNA, 15 bp, Homo sapiens
taaatgataggactg

SEQ ID NO: 1607828 - DNA, 15 bp, Homo sapiens
ataaatgataggact

SEQ ID NO: 1607829 - DNA, 15 bp, Homo sapiens
cataaatgataggac

SEQ ID NO: 1607830 - DNA, 15 bp, Homo sapiens
ccataaatgatagga

SEQ ID NO: 1607831 - DNA, 15 bp, Homo sapiens
gccataaatgatagg

SEQ ID NO: 1607832 - DNA, 15 bp, Homo sapiens
agccataaatgatag

SEQ ID NO: 1607833 - DNA, 15 bp, Homo sapiens
cagccataaatgata

SEQ ID NO: 1607834 - DNA, 15 bp, Homo sapiens
gcagccataaatgat

SEQ ID NO: 1607835 - DNA, 15 bp, Homo sapiens
ggcagccataaatga

SEQ ID NO: 1607836 - DNA, 15 bp, Homo sapiens
aggcagccataaatg

SEQ ID NO: 1607837 - DNA, 15 bp, Homo sapiens
aaggcagccataaat

SEQ ID NO: 1607838 - DNA, 15 bp, Homo sapiens
caaggcagccataaa

SEQ ID NO: 1607839 - DNA, 15 bp, Homo sapiens
ccaaggcagccataa

SEQ ID NO: 1607840 - DNA, 15 bp, Homo sapiens
accaaggcagccata

SEQ ID NO: 1607841 - DNA, 15 bp, Homo sapiens
aaccaaggcagccat

SEQ ID NO: 1607842 - DNA, 15 bp, Homo sapiens
taaccaaggcagcca

SEQ ID NO: 1607843 - DNA, 15 bp, Homo sapiens
ttaaccaaggcagcc

SEQ ID NO: 1607844 - DNA, 15 bp, Homo sapiens
cttaaccaaggcagc

SEQ ID NO: 1607845 - DNA, 15 bp, Homo sapiens
gcttaaccaaggcag

SEQ ID NO: 1607846 - DNA, 15 bp, Homo sapiens
agcttaaccaaggca

SEQ ID NO: 1607847 - DNA, 15 bp, Homo sapiens
aagcttaaccaaggc

SEQ ID NO: 1607848 - DNA, 15 bp, Homo sapiens
gaagcttaaccaagg

SEQ ID NO: 1607849 - DNA, 15 bp, Homo sapiens
tgaagcttaaccaag

SEQ ID NO: 1607850 - DNA, 15 bp, Homo sapiens
ttgaagcttaaccaa

SEQ ID NO: 1607851 - DNA, 15 bp, Homo sapiens
cttgaagcttaacca

SEQ ID NO: 1607852 - DNA, 15 bp, Homo sapiens
tcttgaagcttaacc

SEQ ID NO: 1607853 - DNA, 15 bp, Homo sapiens
ttcttgaagcttaac

SEQ ID NO: 1607854 - DNA, 15 bp, Homo sapiens
attcttgaagcttaa

SEQ ID NO: 1607855 - DNA, 15 bp, Homo sapiens
tattcttgaagctta

SEQ ID NO: 1607856 - DNA, 15 bp, Homo sapiens
ttattcttgaagctt

SEQ ID NO: 1607857 - DNA, 15 bp, Homo sapiens
tttattcttgaagct

SEQ ID NO: 1607858 - DNA, 15 bp, Homo sapiens
ttttattcttgaagc

SEQ ID NO: 1607859 - DNA, 15 bp, Homo sapiens
gttttattcttgaag

SEQ ID NO: 1607860 - DNA, 15 bp, Homo sapiens
agttttattcttgaa

SEQ ID NO: 1607861 - DNA, 15 bp, Homo sapiens
aagttttattcttga

SEQ ID NO: 1607862 - DNA, 15 bp, Homo sapiens
taagttttattcttg

SEQ ID NO: 1607863 - DNA, 15 bp, Homo sapiens
ttaagttttattctt

SEQ ID NO: 1607864 - DNA, 15 bp, Homo sapiens
gttaagttttattct

SEQ ID NO: 1607865 - DNA, 15 bp, Homo sapiens
tgttaagttttattc

SEQ ID NO: 1607866 - DNA, 15 bp, Homo sapiens
gtgttaagttttatt

SEQ ID NO: 1607867 - DNA, 15 bp, Homo sapiens
tgtgttaagttttat

SEQ ID NO: 1607868 - DNA, 15 bp, Homo sapiens
gtgtgttaagtttta

SEQ ID NO: 1607869 - DNA, 15 bp, Homo sapiens
agtgtgttaagtttt

SEQ ID NO: 1607870 - DNA, 15 bp, Homo sapiens
aagtgtgttaagttt

SEQ ID NO: 1607871 - DNA, 15 bp, Homo sapiens
gaagtgtgttaagtt

SEQ ID NO: 1607872 - DNA, 15 bp, Homo sapiens
agaagtgtgttaagt

SEQ ID NO: 1607873 - DNA, 15 bp, Homo sapiens
tagaagtgtgttaag

SEQ ID NO: 1607874 - DNA, 15 bp, Homo sapiens
ctagaagtgtgttaa

SEQ ID NO: 1607875 - DNA, 15 bp, Homo sapiens
tctagaagtgtgtta

SEQ ID NO: 1607876 - DNA, 15 bp, Homo sapiens
gtctagaagtgtgtt

SEQ ID NO: 1607877 - DNA, 15 bp, Homo sapiens
tgtctagaagtgtgt

SEQ ID NO: 1607878 - DNA, 15 bp, Homo sapiens
ttgtctagaagtgtg

SEQ ID NO: 1607879 - DNA, 15 bp, Homo sapiens
attgtctagaagtgt

SEQ ID NO: 1607880 - DNA, 15 bp, Homo sapiens
tattgtctagaagtg

SEQ ID NO: 1607881 - DNA, 15 bp, Homo sapiens
atattgtctagaagt

SEQ ID NO: 1607882 - DNA, 15 bp, Homo sapiens
tatattgtctagaag

SEQ ID NO: 1607883 - DNA, 15 bp, Homo sapiens
gtatattgtctagaa

SEQ ID NO: 1607884 - DNA, 15 bp, Homo sapiens
ggtatattgtctaga

SEQ ID NO: 1607885 - DNA, 15 bp, Homo sapiens
aggtatattgtctag

SEQ ID NO: 1607886 - DNA, 15 bp, Homo sapiens
gaggtatattgtcta

SEQ ID NO: 1607887 - DNA, 15 bp, Homo sapiens
tgaggtatattgtct

SEQ ID NO: 1607888 - DNA, 15 bp, Homo sapiens
ttgaggtatattgtc

SEQ ID NO: 1607889 - DNA, 15 bp, Homo sapiens
tttgaggtatattgt

SEQ ID NO: 1607890 - DNA, 15 bp, Homo sapiens
ttttgaggtatattg

SEQ ID NO: 1607891 - DNA, 15 bp, Homo sapiens
cttttgaggtatatt

SEQ ID NO: 1607892 - DNA, 15 bp, Homo sapiens
tcttttgaggtatat

SEQ ID NO: 1607893 - DNA, 15 bp, Homo sapiens
ctcttttgaggtata

SEQ ID NO: 1607894 - DNA, 15 bp, Homo sapiens
tctcttttgaggtat

SEQ ID NO: 1607895 - DNA, 15 bp, Homo sapiens
atctcttttgaggta

SEQ ID NO: 1607896 - DNA, 15 bp, Homo sapiens
aatctcttttgaggt

SEQ ID NO: 1607897 - DNA, 15 bp, Homo sapiens
gaatctcttttgagg

SEQ ID NO: 1607898 - DNA, 15 bp, Homo sapiens
aagaatctcttttga

SEQ ID NO: 1607899 - DNA, 15 bp, Homo sapiens
gaagaatctcttttg

SEQ ID NO: 1607900 - DNA, 15 bp, Homo sapiens
agaagaatctctttt

SEQ ID NO: 1607901 - DNA, 15 bp, Homo sapiens
tagaagaatctcttt

SEQ ID NO: 1607902 - DNA, 15 bp, Homo sapiens
gtagaagaatctctt

SEQ ID NO: 1607903 - DNA, 15 bp, Homo sapiens
agtagaagaatctct

SEQ ID NO: 1607904 - DNA, 15 bp, Homo sapiens
aagtagaagaatctc

SEQ ID NO: 1607905 - DNA, 15 bp, Homo sapiens
caagtagaagaatct

SEQ ID NO: 1607906 - DNA, 15 bp, Homo sapiens
gcaagtagaagaatc

SEQ ID NO: 1607907 - DNA, 15 bp, Homo sapiens
agcaagtagaagaat

SEQ ID NO: 1607908 - DNA, 15 bp, Homo sapiens
aagcaagtagaagaa

SEQ ID NO: 1607909 - DNA, 15 bp, Homo sapiens
gaagcaagtagaaga

SEQ ID NO: 1607910 - DNA, 15 bp, Homo sapiens
tgaagcaagtagaag

SEQ ID NO: 1607911 - DNA, 15 bp, Homo sapiens
gtgaagcaagtagaa

SEQ ID NO: 1607912 - DNA, 15 bp, Homo sapiens
agtgaagcaagtaga

SEQ ID NO: 1607913 - DNA, 15 bp, Homo sapiens
tagtgaagcaagtag

SEQ ID NO: 1607914 - DNA, 15 bp, Homo sapiens
ctagtgaagcaagta

SEQ ID NO: 1607915 - DNA, 15 bp, Homo sapiens
gctagtgaagcaagt

SEQ ID NO: 1607916 - DNA, 15 bp, Homo sapiens
agctagtgaagcaag

SEQ ID NO: 1607917 - DNA, 15 bp, Homo sapiens
tagctagtgaagcaa

SEQ ID NO: 1607918 - DNA, 15 bp, Homo sapiens
ttagctagtgaagca

SEQ ID NO: 1607919 - DNA, 15 bp, Homo sapiens
gttagctagtgaagc

SEQ ID NO: 1607920 - DNA, 15 bp, Homo sapiens
ggttagctagtgaag

SEQ ID NO: 1607921 - DNA, 15 bp, Homo sapiens
tggttagctagtgaa

SEQ ID NO: 1607922 - DNA, 15 bp, Homo sapiens
ttggttagctagtga

SEQ ID NO: 1607923 - DNA, 15 bp, Homo sapiens
tttggttagctagtg

SEQ ID NO: 1607924 - DNA, 15 bp, Homo sapiens
gtttggttagctagt

SEQ ID NO: 1607925 - DNA, 15 bp, Homo sapiens
tgtttggttagctag

SEQ ID NO: 1607926 - DNA, 15 bp, Homo sapiens
ctgtttggttagcta

SEQ ID NO: 1607927 - DNA, 15 bp, Homo sapiens
tctgtttggttagct

SEQ ID NO: 1607928 - DNA, 15 bp, Homo sapiens
ttctgtttggttagc

SEQ ID NO: 1607929 - DNA, 15 bp, Homo sapiens
tttctgtttggttag

SEQ ID NO: 1607930 - DNA, 15 bp, Homo sapiens
atttctgtttggtta

SEQ ID NO: 1607931 - DNA, 15 bp, Homo sapiens
gatttctgtttggtt

SEQ ID NO: 1607932 - DNA, 15 bp, Homo sapiens
tgatttctgtttggt

SEQ ID NO: 1607933 - DNA, 15 bp, Homo sapiens
atgatttctgtttgg

SEQ ID NO: 1607934 - DNA, 15 bp, Homo sapiens
aatgatttctgtttg

SEQ ID NO: 1607935 - DNA, 15 bp, Homo sapiens
taatgatttctgttt

SEQ ID NO: 1607936 - DNA, 15 bp, Homo sapiens
ataatgatttctgtt

SEQ ID NO: 1607937 - DNA, 15 bp, Homo sapiens
aataatgatttctgt

SEQ ID NO: 1607938 - DNA, 15 bp, Homo sapiens
caataatgatttctg

SEQ ID NO: 1607939 - DNA, 15 bp, Homo sapiens
gcaataatgatttct

SEQ ID NO: 1607940 - DNA, 15 bp, Homo sapiens
agcaataatgatttc

SEQ ID NO: 1607941 - DNA, 15 bp, Homo sapiens
aagcaataatgattt

SEQ ID NO: 1607942 - DNA, 15 bp, Homo sapiens
caagcaataatgatt

SEQ ID NO: 1607943 - DNA, 15 bp, Homo sapiens
ccaagcaataatgat

SEQ ID NO: 1607944 - DNA, 15 bp, Homo sapiens
gccaagcaataatga

SEQ ID NO: 1607945 - DNA, 15 bp, Homo sapiens
agccaagcaataatg

SEQ ID NO: 1607946 - DNA, 15 bp, Homo sapiens
aagccaagcaataat

SEQ ID NO: 1607947 - DNA, 15 bp, Homo sapiens
caagccaagcaataa

SEQ ID NO: 1607948 - DNA, 15 bp, Homo sapiens
ccaagccaagcaata

SEQ ID NO: 1607949 - DNA, 15 bp, Homo sapiens
gccaagccaagcaat

SEQ ID NO: 1607950 - DNA, 15 bp, Homo sapiens
agccaagccaagcaa

SEQ ID NO: 1607951 - DNA, 15 bp, Homo sapiens
aagccaagccaagca

SEQ ID NO: 1607952 - DNA, 15 bp, Homo sapiens
gaagccaagccaagc

SEQ ID NO: 1607953 - DNA, 15 bp, Homo sapiens
agaagccaagccaag

SEQ ID NO: 1607954 - DNA, 15 bp, Homo sapiens
gagaagccaagccaa

SEQ ID NO: 1607955 - DNA, 15 bp, Homo sapiens
ggagaagccaagcca

SEQ ID NO: 1607956 - DNA, 15 bp, Homo sapiens
aggagaagccaagcc

SEQ ID NO: 1607957 - DNA, 15 bp, Homo sapiens
aaggagaagccaagc

SEQ ID NO: 1607958 - DNA, 15 bp, Homo sapiens
gaaggagaagccaag

SEQ ID NO: 1607959 - DNA, 15 bp, Homo sapiens
ggaaggagaagccaa

SEQ ID NO: 1607960 - DNA, 15 bp, Homo sapiens
tggaaggagaagcca

SEQ ID NO: 1607961 - DNA, 15 bp, Homo sapiens
ctggaaggagaagcc

SEQ ID NO: 1607962 - DNA, 15 bp, Homo sapiens
gctggaaggagaagc

SEQ ID NO: 1607963 - DNA, 15 bp, Homo sapiens
tgctggaaggagaag

SEQ ID NO: 1607964 - DNA, 15 bp, Homo sapiens
ctgctggaaggagaa

SEQ ID NO: 1607965 - DNA, 15 bp, Homo sapiens
tctgctggaaggaga

SEQ ID NO: 1607966 - DNA, 15 bp, Homo sapiens
ttctgctggaaggag

SEQ ID NO: 1607967 - DNA, 15 bp, Homo sapiens
tttctgctggaagga

SEQ ID NO: 1607968 - DNA, 15 bp, Homo sapiens
ttttctgctggaagg

SEQ ID NO: 1607969 - DNA, 15 bp, Homo sapiens
attttctgctggaag

SEQ ID NO: 1607970 - DNA, 15 bp, Homo sapiens
aattttctgctggaa

SEQ ID NO: 1607971 - DNA, 15 bp, Homo sapiens
taattttctgctgga

SEQ ID NO: 1607972 - DNA, 15 bp, Homo sapiens
ttaattttctgctgg

SEQ ID NO: 1607973 - DNA, 15 bp, Homo sapiens
attaattttctgctg

SEQ ID NO: 1607974 - DNA, 15 bp, Homo sapiens
gattaattttctgct

SEQ ID NO: 1607975 - DNA, 15 bp, Homo sapiens
tgattaattttctgc

SEQ ID NO: 1607976 - DNA, 15 bp, Homo sapiens
ttgattaattttctg

SEQ ID NO: 1607977 - DNA, 15 bp, Homo sapiens
gttgattaattttct

SEQ ID NO: 1607978 - DNA, 15 bp, Homo sapiens
tgttgattaattttc

SEQ ID NO: 1607979 - DNA, 15 bp, Homo sapiens
gtgttgattaatttt

SEQ ID NO: 1607980 - DNA, 15 bp, Homo sapiens
ggtgttgattaattt

SEQ ID NO: 1607981 - DNA, 15 bp, Homo sapiens
aggtgttgattaatt

SEQ ID NO: 1607982 - DNA, 15 bp, Homo sapiens
aaggtgttgattaat

SEQ ID NO: 1607983 - DNA, 15 bp, Homo sapiens
aaaggtgttgattaa

SEQ ID NO: 1607984 - DNA, 15 bp, Homo sapiens
caaaggtgttgatta

SEQ ID NO: 1607985 - DNA, 15 bp, Homo sapiens
acaaaggtgttgatt

SEQ ID NO: 1607986 - DNA, 15 bp, Homo sapiens
aacaaaggtgttgat

SEQ ID NO: 1607987 - DNA, 15 bp, Homo sapiens
taacaaaggtgttga

SEQ ID NO: 1607988 - DNA, 15 bp, Homo sapiens
ttaacaaaggtgttg

SEQ ID NO: 1607989 - DNA, 15 bp, Homo sapiens
tttaacaaaggtgtt

SEQ ID NO: 1607990 - DNA, 15 bp, Homo sapiens
atttaacaaaggtgt

SEQ ID NO: 1607991 - DNA, 15 bp, Homo sapiens
tatttaacaaaggtg

SEQ ID NO: 1607992 - DNA, 15 bp, Homo sapiens
atatttaacaaaggt

SEQ ID NO: 1607993 - DNA, 15 bp, Homo sapiens
catatttaacaaagg

SEQ ID NO: 1607994 - DNA, 15 bp, Homo sapiens
gcatatttaacaaag

SEQ ID NO: 1607995 - DNA, 15 bp, Homo sapiens
agcatatttaacaaa

SEQ ID NO: 1607996 - DNA, 15 bp, Homo sapiens
cagcatatttaacaa

SEQ ID NO: 1607997 - DNA, 15 bp, Homo sapiens
acagcatatttaaca

SEQ ID NO: 1607998 - DNA, 15 bp, Homo sapiens
tacagcatatttaac

SEQ ID NO: 1607999 - DNA, 15 bp, Homo sapiens
atacagcatatttaa

SEQ ID NO: 1608000 - DNA, 15 bp, Homo sapiens
tatacagcatattta

SEQ ID NO: 1608001 - DNA, 15 bp, Homo sapiens
ctatacagcatattt

SEQ ID NO: 1608002 - DNA, 15 bp, Homo sapiens
tctatacagcatatt

SEQ ID NO: 1608003 - DNA, 15 bp, Homo sapiens
atctatacagcatat

SEQ ID NO: 1608004 - DNA, 15 bp, Homo sapiens
aatctatacagcata

SEQ ID NO: 1608005 - DNA, 15 bp, Homo sapiens
aaatctatacagcat

SEQ ID NO: 1608006 - DNA, 15 bp, Homo sapiens
gaaatctatacagca

SEQ ID NO: 1608007 - DNA, 15 bp, Homo sapiens
agaaatctatacagc

SEQ ID NO: 1608008 - DNA, 15 bp, Homo sapiens
gagaaatctatacag

SEQ ID NO: 1608009 - DNA, 15 bp, Homo sapiens
agagaaatctataca

SEQ ID NO: 1608010 - DNA, 15 bp, Homo sapiens
aagagaaatctatac

SEQ ID NO: 1608011 - DNA, 15 bp, Homo sapiens
aaagagaaatctata

SEQ ID NO: 1608012 - DNA, 15 bp, Homo sapiens
aaaagagaaatctat

SEQ ID NO: 1608013 - DNA, 15 bp, Homo sapiens
aaaaagagaaatcta

SEQ ID NO: 1608014 - DNA, 15 bp, Homo sapiens
aaaaaagagaaatct

SEQ ID NO: 1608015 - DNA, 15 bp, Homo sapiens
gaaaaaagagaaatc

SEQ ID NO: 1608016 - DNA, 15 bp, Homo sapiens
agaaaaaagagaaat

SEQ ID NO: 1608017 - DNA, 15 bp, Homo sapiens
cagaaaaaagagaaa

SEQ ID NO: 1608018 - DNA, 15 bp, Homo sapiens
ccagaaaaaagagaa

SEQ ID NO: 1608019 - DNA, 15 bp, Homo sapiens
cccagaaaaaagaga

SEQ ID NO: 1608020 - DNA, 15 bp, Homo sapiens
ccccagaaaaaagag

SEQ ID NO: 1608021 - DNA, 15 bp, Homo sapiens
cccccagaaaaaaga

SEQ ID NO: 1608022 - DNA, 15 bp, Homo sapiens
tcccccagaaaaaag

SEQ ID NO: 1608023 - DNA, 15 bp, Homo sapiens
ctcccccagaaaaaa

SEQ ID NO: 1608024 - DNA, 15 bp, Homo sapiens
actcccccagaaaaa

SEQ ID NO: 1608025 - DNA, 15 bp, Homo sapiens
cactcccccagaaaa

SEQ ID NO: 1608026 - DNA, 15 bp, Homo sapiens
ccactcccccagaaa

SEQ ID NO: 1608027 - DNA, 15 bp, Homo sapiens
cccactcccccagaa

SEQ ID NO: 1608028 - DNA, 15 bp, Homo sapiens
ccccactcccccaga

SEQ ID NO: 1608029 - DNA, 15 bp, Homo sapiens
tccccactcccccag

SEQ ID NO: 1608030 - DNA, 15 bp, Homo sapiens
gtccccactccccca

SEQ ID NO: 1608031 - DNA, 15 bp, Homo sapiens
tgtccccactccccc

SEQ ID NO: 1608032 - DNA, 15 bp, Homo sapiens
gtgtccccactcccc

SEQ ID NO: 1608033 - DNA, 15 bp, Homo sapiens
agtgtccccactccc

SEQ ID NO: 1608034 - DNA, 15 bp, Homo sapiens
cagtgtccccactcc

SEQ ID NO: 1608035 - DNA, 15 bp, Homo sapiens
acagtgtccccactc

SEQ ID NO: 1608036 - DNA, 15 bp, Homo sapiens
aacagtgtccccact

SEQ ID NO: 1608037 - DNA, 15 bp, Homo sapiens
caacagtgtccccac

SEQ ID NO: 1608038 - DNA, 15 bp, Homo sapiens
acaacagtgtcccca

SEQ ID NO: 1608039 - DNA, 15 bp, Homo sapiens
aacaacagtgtcccc

SEQ ID NO: 1608040 - DNA, 15 bp, Homo sapiens
taacaacagtgtccc

SEQ ID NO: 1608041 - DNA, 15 bp, Homo sapiens
ttaacaacagtgtcc

SEQ ID NO: 1608042 - DNA, 15 bp, Homo sapiens
tttaacaacagtgtc

SEQ ID NO: 1608043 - DNA, 15 bp, Homo sapiens
ctttaacaacagtgt

SEQ ID NO: 1608044 - DNA, 15 bp, Homo sapiens
actttaacaacagtg

SEQ ID NO: 1608045 - DNA, 15 bp, Homo sapiens
tactttaacaacagt

SEQ ID NO: 1608046 - DNA, 15 bp, Homo sapiens
ttactttaacaacag

SEQ ID NO: 1608047 - DNA, 15 bp, Homo sapiens
cttactttaacaaca

SEQ ID NO: 1608048 - DNA, 15 bp, Homo sapiens
acttactttaacaac

SEQ ID NO: 1608049 - DNA, 15 bp, Homo sapiens
gacttactttaacaa

SEQ ID NO: 1608050 - DNA, 15 bp, Homo sapiens
tgacttactttaaca

SEQ ID NO: 1608051 - DNA, 15 bp, Homo sapiens
atgacttactttaac

SEQ ID NO: 1608052 - DNA, 15 bp, Homo sapiens
gatgacttactttaa

SEQ ID NO: 1608053 - DNA, 15 bp, Homo sapiens
agatgacttacttta

SEQ ID NO: 1608054 - DNA, 15 bp, Homo sapiens
gagatgacttacttt

SEQ ID NO: 1608055 - DNA, 15 bp, Homo sapiens
tgagatgacttactt

SEQ ID NO: 1608056 - DNA, 15 bp, Homo sapiens
gtgagatgacttact

SEQ ID NO: 1608057 - DNA, 15 bp, Homo sapiens
ggtgagatgacttac

SEQ ID NO: 1608058 - DNA, 15 bp, Homo sapiens
aggtgagatgactta

SEQ ID NO: 1608059 - DNA, 15 bp, Homo sapiens
aaggtgagatgactt

SEQ ID NO: 1608060 - DNA, 15 bp, Homo sapiens
caaggtgagatgact

SEQ ID NO: 1608061 - DNA, 15 bp, Homo sapiens
acaaggtgagatgac

SEQ ID NO: 1608062 - DNA, 15 bp, Homo sapiens
aacaaggtgagatga

SEQ ID NO: 1608063 - DNA, 15 bp, Homo sapiens
aaacaaggtgagatg

SEQ ID NO: 1608064 - DNA, 15 bp, Homo sapiens
aaaacaaggtgagat

SEQ ID NO: 1608065 - DNA, 15 bp, Homo sapiens
aaaaacaaggtgaga

SEQ ID NO: 1608066 - DNA, 15 bp, Homo sapiens
gaaaaacaaggtgag

SEQ ID NO: 1608067 - DNA, 15 bp, Homo sapiens
tgaaaaacaaggtga

SEQ ID NO: 1608068 - DNA, 15 bp, Homo sapiens
ctgaaaaacaaggtg

SEQ ID NO: 1608069 - DNA, 15 bp, Homo sapiens
gctgaaaaacaaggt

SEQ ID NO: 1608070 - DNA, 15 bp, Homo sapiens
agctgaaaaacaagg

SEQ ID NO: 1608071 - DNA, 15 bp, Homo sapiens
aagctgaaaaacaag

SEQ ID NO: 1608072 - DNA, 15 bp, Homo sapiens
gaagctgaaaaacaa

SEQ ID NO: 1608073 - DNA, 15 bp, Homo sapiens
ggaagctgaaaaaca

SEQ ID NO: 1608074 - DNA, 15 bp, Homo sapiens
aggaagctgaaaaac

SEQ ID NO: 1608075 - DNA, 15 bp, Homo sapiens
aaggaagctgaaaaa

SEQ ID NO: 1608076 - DNA, 15 bp, Homo sapiens
aaaggaagctgaaaa

SEQ ID NO: 1608077 - DNA, 15 bp, Homo sapiens
taaaggaagctgaaa

SEQ ID NO: 1608078 - DNA, 15 bp, Homo sapiens
ctaaaggaagctgaa

SEQ ID NO: 1608079 - DNA, 15 bp, Homo sapiens
actaaaggaagctga

SEQ ID NO: 1608080 - DNA, 15 bp, Homo sapiens
aactaaaggaagctg

SEQ ID NO: 1608081 - DNA, 15 bp, Homo sapiens
caactaaaggaagct

SEQ ID NO: 1608082 - DNA, 15 bp, Homo sapiens
tcaactaaaggaagc

SEQ ID NO: 1608083 - DNA, 15 bp, Homo sapiens
ttcaactaaaggaag

SEQ ID NO: 1608084 - DNA, 15 bp, Homo sapiens
attcaactaaaggaa

SEQ ID NO: 1608085 - DNA, 15 bp, Homo sapiens
gattcaactaaagga

SEQ ID NO: 1608086 - DNA, 15 bp, Homo sapiens
agattcaactaaagg

SEQ ID NO: 1608087 - DNA, 15 bp, Homo sapiens
gagattcaactaaag

SEQ ID NO: 1608088 - DNA, 15 bp, Homo sapiens
tgagattcaactaaa

SEQ ID NO: 1608089 - DNA, 15 bp, Homo sapiens
atgagattcaactaa

SEQ ID NO: 1608090 - DNA, 15 bp, Homo sapiens
tatgagattcaacta

SEQ ID NO: 1608091 - DNA, 15 bp, Homo sapiens
atatgagattcaact

SEQ ID NO: 1608092 - DNA, 15 bp, Homo sapiens
aatatgagattcaac

SEQ ID NO: 1608093 - DNA, 15 bp, Homo sapiens
aaatatgagattcaa

SEQ ID NO: 1608094 - DNA, 15 bp, Homo sapiens
aaaatatgagattca

SEQ ID NO: 1608095 - DNA, 15 bp, Homo sapiens
aaaaatatgagattc

SEQ ID NO: 1608096 - DNA, 15 bp, Homo sapiens
caaaaatatgagatt

SEQ ID NO: 1608097 - DNA, 15 bp, Homo sapiens
tcaaaaatatgagat

SEQ ID NO: 1608098 - DNA, 15 bp, Homo sapiens
ttcaaaaatatgaga

SEQ ID NO: 1608099 - DNA, 15 bp, Homo sapiens
tttcaaaaatatgag

SEQ ID NO: 1608100 - DNA, 15 bp, Homo sapiens
atttcaaaaatatga

SEQ ID NO: 1608101 - DNA, 15 bp, Homo sapiens
aatttcaaaaatatg

SEQ ID NO: 1608102 - DNA, 15 bp, Homo sapiens
gaatttcaaaaatat

SEQ ID NO: 1608103 - DNA, 15 bp, Homo sapiens
tgaatttcaaaaata

SEQ ID NO: 1608104 - DNA, 15 bp, Homo sapiens
atgaatttcaaaaat

SEQ ID NO: 1608105 - DNA, 15 bp, Homo sapiens
catgaatttcaaaaa

SEQ ID NO: 1608106 - DNA, 15 bp, Homo sapiens
tcatgaatttcaaaa

SEQ ID NO: 1608107 - DNA, 15 bp, Homo sapiens
ttcatgaatttcaaa

SEQ ID NO: 1608108 - DNA, 15 bp, Homo sapiens
tttcatgaatttcaa

SEQ ID NO: 1608109 - DNA, 15 bp, Homo sapiens
atttcatgaatttca

SEQ ID NO: 1608110 - DNA, 15 bp, Homo sapiens
catttcatgaatttc

SEQ ID NO: 1608111 - DNA, 15 bp, Homo sapiens
gcatttcatgaattt

SEQ ID NO: 1608112 - DNA, 15 bp, Homo sapiens
agcatttcatgaatt

SEQ ID NO: 1608113 - DNA, 15 bp, Homo sapiens
aagcatttcatgaat

SEQ ID NO: 1608114 - DNA, 15 bp, Homo sapiens
gaagcatttcatgaa

SEQ ID NO: 1608115 - DNA, 15 bp, Homo sapiens
agaagcatttcatga

SEQ ID NO: 1608116 - DNA, 15 bp, Homo sapiens
aagaagcatttcatg

SEQ ID NO: 1608117 - DNA, 15 bp, Homo sapiens
aaagaagcatttcat

SEQ ID NO: 1608118 - DNA, 15 bp, Homo sapiens
gaaagaagcatttca

SEQ ID NO: 1608119 - DNA, 15 bp, Homo sapiens
tgaaagaagcatttc

SEQ ID NO: 1608120 - DNA, 15 bp, Homo sapiens
atgaaagaagcattt

SEQ ID NO: 1608121 - DNA, 15 bp, Homo sapiens
gatgaaagaagcatt

SEQ ID NO: 1608122 - DNA, 15 bp, Homo sapiens
tgatgaaagaagcat

SEQ ID NO: 1608123 - DNA, 15 bp, Homo sapiens
ctgatgaaagaagca

SEQ ID NO: 1608124 - DNA, 15 bp, Homo sapiens
actgatgaaagaagc

SEQ ID NO: 1608125 - DNA, 15 bp, Homo sapiens
aactgatgaaagaag

SEQ ID NO: 1608126 - DNA, 15 bp, Homo sapiens
aaactgatgaaagaa

SEQ ID NO: 1608127 - DNA, 15 bp, Homo sapiens
caaactgatgaaaga

SEQ ID NO: 1608128 - DNA, 15 bp, Homo sapiens
acaaactgatgaaag

SEQ ID NO: 1608129 - DNA, 15 bp, Homo sapiens
gacaaactgatgaaa

SEQ ID NO: 1608130 - DNA, 15 bp, Homo sapiens
agacaaactgatgaa

SEQ ID NO: 1608131 - DNA, 15 bp, Homo sapiens
tagacaaactgatga

SEQ ID NO: 1608132 - DNA, 15 bp, Homo sapiens
ctagacaaactgatg

SEQ ID NO: 1608133 - DNA, 15 bp, Homo sapiens
tctagacaaactgat

SEQ ID NO: 1608134 - DNA, 15 bp, Homo sapiens
atctagacaaactga

SEQ ID NO: 1608135 - DNA, 15 bp, Homo sapiens
gatctagacaaactg

SEQ ID NO: 1608136 - DNA, 15 bp, Homo sapiens
agatctagacaaact

SEQ ID NO: 1608137 - DNA, 15 bp, Homo sapiens
tagatctagacaaac

SEQ ID NO: 1608138 - DNA, 15 bp, Homo sapiens
gtagatctagacaaa

SEQ ID NO: 1608139 - DNA, 15 bp, Homo sapiens
agtagatctagacaa

SEQ ID NO: 1608140 - DNA, 15 bp, Homo sapiens
aagtagatctagaca

SEQ ID NO: 1608141 - DNA, 15 bp, Homo sapiens
aaagtagatctagac

SEQ ID NO: 1608142 - DNA, 15 bp, Homo sapiens
aaaagtagatctaga

SEQ ID NO: 1608143 - DNA, 15 bp, Homo sapiens
aaaaagtagatctag

SEQ ID NO: 1608144 - DNA, 15 bp, Homo sapiens
caaaaagtagatcta

SEQ ID NO: 1608145 - DNA, 15 bp, Homo sapiens
acaaaaagtagatct

SEQ ID NO: 1608146 - DNA, 15 bp, Homo sapiens
gacaaaaagtagatc

SEQ ID NO: 1608147 - DNA, 15 bp, Homo sapiens
agacaaaaagtagat

SEQ ID NO: 1608148 - DNA, 15 bp, Homo sapiens
aagacaaaaagtaga

SEQ ID NO: 1608149 - DNA, 15 bp, Homo sapiens
caagacaaaaagtag

SEQ ID NO: 1608150 - DNA, 15 bp, Homo sapiens
tcaagacaaaaagta

SEQ ID NO: 1608151 - DNA, 15 bp, Homo sapiens
ttcaagacaaaaagt

SEQ ID NO: 1608152 - DNA, 15 bp, Homo sapiens
tttcaagacaaaaag

SEQ ID NO: 1608153 - DNA, 15 bp, Homo sapiens
ctttcaagacaaaaa

SEQ ID NO: 1608154 - DNA, 15 bp, Homo sapiens
actttcaagacaaaa

SEQ ID NO: 1608155 - DNA, 15 bp, Homo sapiens
gactttcaagacaaa

SEQ ID NO: 1608156 - DNA, 15 bp, Homo sapiens
ggactttcaagacaa

SEQ ID NO: 1608157 - DNA, 15 bp, Homo sapiens
tggactttcaagaca

SEQ ID NO: 1608158 - DNA, 15 bp, Homo sapiens
ttggactttcaagac

SEQ ID NO: 1608159 - DNA, 15 bp, Homo sapiens
gttggactttcaaga

SEQ ID NO: 1608160 - DNA, 15 bp, Homo sapiens
agttggactttcaag

SEQ ID NO: 1608161 - DNA, 15 bp, Homo sapiens
tagttggactttcaa

SEQ ID NO: 1608162 - DNA, 15 bp, Homo sapiens
ttagttggactttca

SEQ ID NO: 1608163 - DNA, 15 bp, Homo sapiens
cttagttggactttc

SEQ ID NO: 1608164 - DNA, 15 bp, Homo sapiens
tcttagttggacttt

SEQ ID NO: 1608165 - DNA, 15 bp, Homo sapiens
ttcttagttggactt

SEQ ID NO: 1608166 - DNA, 15 bp, Homo sapiens
attcttagttggact

SEQ ID NO: 1608167 - DNA, 15 bp, Homo sapiens
aattcttagttggac

SEQ ID NO: 1608168 - DNA, 15 bp, Homo sapiens
aaattcttagttgga

SEQ ID NO: 1608169 - DNA, 15 bp, Homo sapiens
aaaattcttagttgg

SEQ ID NO: 1608170 - DNA, 15 bp, Homo sapiens
caaaattcttagttg

SEQ ID NO: 1608171 - DNA, 15 bp, Homo sapiens
acaaaattcttagtt

SEQ ID NO: 1608172 - DNA, 15 bp, Homo sapiens
aacaaaattcttagt

SEQ ID NO: 1608173 - DNA, 15 bp, Homo sapiens
aaacaaaattcttag

SEQ ID NO: 1608174 - DNA, 15 bp, Homo sapiens
aaaacaaaattctta

SEQ ID NO: 1608175 - DNA, 15 bp, Homo sapiens
gaaaacaaaattctt

SEQ ID NO: 1608176 - DNA, 15 bp, Homo sapiens
tgaaaacaaaattct

SEQ ID NO: 1608177 - DNA, 15 bp, Homo sapiens
ctgaaaacaaaattc

SEQ ID NO: 1608178 - DNA, 15 bp, Homo sapiens
actgaaaacaaaatt

SEQ ID NO: 1608179 - DNA, 15 bp, Homo sapiens
atactgaaaacaaaa

SEQ ID NO: 1608180 - DNA, 15 bp, Homo sapiens
tatactgaaaacaaa

SEQ ID NO: 1608181 - DNA, 15 bp, Homo sapiens
ttatactgaaaacaa

SEQ ID NO: 1608182 - DNA, 15 bp, Homo sapiens
gttatactgaaaaca

SEQ ID NO: 1608183 - DNA, 15 bp, Homo sapiens
cgttatactgaaaac

SEQ ID NO: 1608184 - DNA, 15 bp, Homo sapiens
ccgttatactgaaaa

SEQ ID NO: 1608185 - DNA, 15 bp, Homo sapiens
tccgttatactgaaa

SEQ ID NO: 1608186 - DNA, 15 bp, Homo sapiens
atccgttatactgaa

SEQ ID NO: 1608187 - DNA, 15 bp, Homo sapiens
tatccgttatactga

SEQ ID NO: 1608188 - DNA, 15 bp, Homo sapiens
atatccgttatactg

SEQ ID NO: 1608189 - DNA, 15 bp, Homo sapiens
tatatccgttatact

SEQ ID NO: 1608190 - DNA, 15 bp, Homo sapiens
ttatatccgttatac

SEQ ID NO: 1608191 - DNA, 15 bp, Homo sapiens
gttatatccgttata

SEQ ID NO: 1608192 - DNA, 15 bp, Homo sapiens
ggttatatccgttat

SEQ ID NO: 1608193 - DNA, 15 bp, Homo sapiens
tggttatatccgtta

SEQ ID NO: 1608194 - DNA, 15 bp, Homo sapiens
atggttatatccgtt

SEQ ID NO: 1608195 - DNA, 15 bp, Homo sapiens
aatggttatatccgt

SEQ ID NO: 1608196 - DNA, 15 bp, Homo sapiens
taatggttatatccg

SEQ ID NO: 1608197 - DNA, 15 bp, Homo sapiens
ctaatggttatatcc

SEQ ID NO: 1608198 - DNA, 15 bp, Homo sapiens
actaatggttatatc

SEQ ID NO: 1608199 - DNA, 15 bp, Homo sapiens
tactaatggttatat

SEQ ID NO: 1608200 - DNA, 15 bp, Homo sapiens
ttactaatggttata

SEQ ID NO: 1608201 - DNA, 15 bp, Homo sapiens
gttactaatggttat

SEQ ID NO: 1608202 - DNA, 15 bp, Homo sapiens
agttactaatggtta

SEQ ID NO: 1608203 - DNA, 15 bp, Homo sapiens
gagttactaatggtt

SEQ ID NO: 1608204 - DNA, 15 bp, Homo sapiens
ggagttactaatggt

SEQ ID NO: 1608205 - DNA, 15 bp, Homo sapiens
tggagttactaatgg

SEQ ID NO: 1608206 - DNA, 15 bp, Homo sapiens
gtggagttactaatg

SEQ ID NO: 1608207 - DNA, 15 bp, Homo sapiens
tgtggagttactaat

SEQ ID NO: 1608208 - DNA, 15 bp, Homo sapiens
ctgtggagttactaa

SEQ ID NO: 1608209 - DNA, 15 bp, Homo sapiens
gctgtggagttacta

SEQ ID NO: 1608210 - DNA, 15 bp, Homo sapiens
cgctgtggagttact

SEQ ID NO: 1608211 - DNA, 15 bp, Homo sapiens
tcgctgtggagttac

SEQ ID NO: 1608212 - DNA, 15 bp, Homo sapiens
atcgctgtggagtta

SEQ ID NO: 1608213 - DNA, 15 bp, Homo sapiens
gatcgctgtggagtt

SEQ ID NO: 1608214 - DNA, 15 bp, Homo sapiens
agatcgctgtggagt

SEQ ID NO: 1608215 - DNA, 15 bp, Homo sapiens
cagatcgctgtggag

SEQ ID NO: 1608216 - DNA, 15 bp, Homo sapiens
acagatcgctgtgga

SEQ ID NO: 1608217 - DNA, 15 bp, Homo sapiens
gacagatcgctgtgg

SEQ ID NO: 1608218 - DNA, 15 bp, Homo sapiens
agacagatcgctgtg

SEQ ID NO: 1608219 - DNA, 15 bp, Homo sapiens
cagacagatcgctgt

SEQ ID NO: 1608220 - DNA, 15 bp, Homo sapiens
acagacagatcgctg

SEQ ID NO: 1608221 - DNA, 15 bp, Homo sapiens
tacagacagatcgct

SEQ ID NO: 1608222 - DNA, 15 bp, Homo sapiens
atacagacagatcgc

SEQ ID NO: 1608223 - DNA, 15 bp, Homo sapiens
gatacagacagatcg

SEQ ID NO: 1608224 - DNA, 15 bp, Homo sapiens
agatacagacagatc

SEQ ID NO: 1608225 - DNA, 15 bp, Homo sapiens
tagatacagacagat

SEQ ID NO: 1608226 - DNA, 15 bp, Homo sapiens
atagatacagacaga

SEQ ID NO: 1608227 - DNA, 15 bp, Homo sapiens
tatagatacagacag

SEQ ID NO: 1608228 - DNA, 15 bp, Homo sapiens
atatagatacagaca

SEQ ID NO: 1608229 - DNA, 15 bp, Homo sapiens
tatatagatacagac

SEQ ID NO: 1608230 - DNA, 15 bp, Homo sapiens
atatatagatacaga

SEQ ID NO: 1608231 - DNA, 15 bp, Homo sapiens
aatatatagatacag

SEQ ID NO: 1608232 - DNA, 15 bp, Homo sapiens
taatatatagataca

SEQ ID NO: 1608233 - DNA, 15 bp, Homo sapiens
gtaatatatagatac

SEQ ID NO: 1608234 - DNA, 15 bp, Homo sapiens
agtaatatatagata

SEQ ID NO: 1608235 - DNA, 15 bp, Homo sapiens
tagtaatatatagat

SEQ ID NO: 1608236 - DNA, 15 bp, Homo sapiens
ctagtaatatataga

SEQ ID NO: 1608237 - DNA, 15 bp, Homo sapiens
gctagtaatatatag

SEQ ID NO: 1608238 - DNA, 15 bp, Homo sapiens
agctagtaatatata

SEQ ID NO: 1608239 - DNA, 15 bp, Homo sapiens
tagctagtaatatat

SEQ ID NO: 1608240 - DNA, 15 bp, Homo sapiens
ctagctagtaatata

SEQ ID NO: 1608241 - DNA, 15 bp, Homo sapiens
actagctagtaatat

SEQ ID NO: 1608242 - DNA, 15 bp, Homo sapiens
aactagctagtaata

SEQ ID NO: 1608243 - DNA, 15 bp, Homo sapiens
taactagctagtaat

SEQ ID NO: 1608244 - DNA, 15 bp, Homo sapiens
ttaactagctagtaa

SEQ ID NO: 1608245 - DNA, 15 bp, Homo sapiens
attaactagctagta

SEQ ID NO: 1608246 - DNA, 15 bp, Homo sapiens
tattaactagctagt

SEQ ID NO: 1608247 - DNA, 15 bp, Homo sapiens
atattaactagctag

SEQ ID NO: 1608248 - DNA, 15 bp, Homo sapiens
aatattaactagcta

SEQ ID NO: 1608249 - DNA, 15 bp, Homo sapiens
aaatattaactagct

SEQ ID NO: 1608250 - DNA, 15 bp, Homo sapiens
gaaatattaactagc

SEQ ID NO: 1608251 - DNA, 15 bp, Homo sapiens
ggaaatattaactag

SEQ ID NO: 1608252 - DNA, 15 bp, Homo sapiens
gggaaatattaacta

SEQ ID NO: 1608253 - DNA, 15 bp, Homo sapiens
tgggaaatattaact

SEQ ID NO: 1608254 - DNA, 15 bp, Homo sapiens
ttgggaaatattaac

SEQ ID NO: 1608255 - DNA, 15 bp, Homo sapiens
gttgggaaatattaa

SEQ ID NO: 1608256 - DNA, 15 bp, Homo sapiens
tgttgggaaatatta

SEQ ID NO: 1608257 - DNA, 15 bp, Homo sapiens
atgttgggaaatatt

SEQ ID NO: 1608258 - DNA, 15 bp, Homo sapiens
tatgttgggaaatat

SEQ ID NO: 1608259 - DNA, 15 bp, Homo sapiens
atatgttgggaaata

SEQ ID NO: 1608260 - DNA, 15 bp, Homo sapiens
gatatgttgggaaat

SEQ ID NO: 1608261 - DNA, 15 bp, Homo sapiens
agatatgttgggaaa

SEQ ID NO: 1608262 - DNA, 15 bp, Homo sapiens
aagatatgttgggaa

SEQ ID NO: 1608263 - DNA, 15 bp, Homo sapiens
taagatatgttggga

SEQ ID NO: 1608264 - DNA, 15 bp, Homo sapiens
ttaagatatgttggg

SEQ ID NO: 1608265 - DNA, 15 bp, Homo sapiens
tttaagatatgttgg

SEQ ID NO: 1608266 - DNA, 15 bp, Homo sapiens
gtttaagatatgttg

SEQ ID NO: 1608267 - DNA, 15 bp, Homo sapiens
tgtttaagatatgtt

SEQ ID NO: 1608268 - DNA, 15 bp, Homo sapiens
ttgtttaagatatgt

SEQ ID NO: 1608269 - DNA, 15 bp, Homo sapiens
cttgtttaagatatg

SEQ ID NO: 1608270 - DNA, 15 bp, Homo sapiens
tcttgtttaagatat

SEQ ID NO: 1608271 - DNA, 15 bp, Homo sapiens
ctcttgtttaagata

SEQ ID NO: 1608272 - DNA, 15 bp, Homo sapiens
tctcttgtttaagat

SEQ ID NO: 1608273 - DNA, 15 bp, Homo sapiens
ttctcttgtttaaga

SEQ ID NO: 1608274 - DNA, 15 bp, Homo sapiens
tttctcttgtttaag

SEQ ID NO: 1608275 - DNA, 15 bp, Homo sapiens
ctttctcttgtttaa

SEQ ID NO: 1608276 - DNA, 15 bp, Homo sapiens
tctttctcttgttta

SEQ ID NO: 1608277 - DNA, 15 bp, Homo sapiens
ttctttctcttgttt

SEQ ID NO: 1608278 - DNA, 15 bp, Homo sapiens
tttctttctcttgtt

SEQ ID NO: 1608279 - DNA, 15 bp, Homo sapiens
atttctttctcttgt

SEQ ID NO: 1608280 - DNA, 15 bp, Homo sapiens
aatttctttctcttg

SEQ ID NO: 1608281 - DNA, 15 bp, Homo sapiens
gaatttctttctctt

SEQ ID NO: 1608282 - DNA, 15 bp, Homo sapiens
tgaatttctttctct

SEQ ID NO: 1608283 - DNA, 15 bp, Homo sapiens
atgaatttctttctc

SEQ ID NO: 1608284 - DNA, 15 bp, Homo sapiens
tatgaatttctttct

SEQ ID NO: 1608285 - DNA, 15 bp, Homo sapiens
ctatgaatttctttc

SEQ ID NO: 1608286 - DNA, 15 bp, Homo sapiens
tctatgaatttcttt

SEQ ID NO: 1608287 - DNA, 15 bp, Homo sapiens
ttctatgaatttctt

SEQ ID NO: 1608288 - DNA, 15 bp, Homo sapiens
cttctatgaatttct

SEQ ID NO: 1608289 - DNA, 15 bp, Homo sapiens
gcttctatgaatttc

SEQ ID NO: 1608290 - DNA, 15 bp, Homo sapiens
ggcttctatgaattt

SEQ ID NO: 1608291 - DNA, 15 bp, Homo sapiens
tggcttctatgaatt

SEQ ID NO: 1608292 - DNA, 15 bp, Homo sapiens
ctggcttctatgaat

SEQ ID NO: 1608293 - DNA, 15 bp, Homo sapiens
tctggcttctatgaa

SEQ ID NO: 1608294 - DNA, 15 bp, Homo sapiens
gtctggcttctatga

SEQ ID NO: 1608295 - DNA, 15 bp, Homo sapiens
tgtctggcttctatg

SEQ ID NO: 1608296 - DNA, 15 bp, Homo sapiens
gtgtctggcttctat

SEQ ID NO: 1608297 - DNA, 15 bp, Homo sapiens
agtgtctggcttcta

SEQ ID NO: 1608298 - DNA, 15 bp, Homo sapiens
gagtgtctggcttct

SEQ ID NO: 1608299 - DNA, 15 bp, Homo sapiens
ggagtgtctggcttc

SEQ ID NO: 1608300 - DNA, 15 bp, Homo sapiens
aggagtgtctggctt

SEQ ID NO: 1608301 - DNA, 15 bp, Homo sapiens
gaggagtgtctggct

SEQ ID NO: 1608302 - DNA, 15 bp, Homo sapiens
ggaggagtgtctggc

SEQ ID NO: 1608303 - DNA, 15 bp, Homo sapiens
tggaggagtgtctgg

SEQ ID NO: 1608304 - DNA, 15 bp, Homo sapiens
ttggaggagtgtctg

SEQ ID NO: 1608305 - DNA, 15 bp, Homo sapiens
attggaggagtgtct

SEQ ID NO: 1608306 - DNA, 15 bp, Homo sapiens
aattggaggagtgtc

SEQ ID NO: 1608307 - DNA, 15 bp, Homo sapiens
taattggaggagtgt

SEQ ID NO: 1608308 - DNA, 15 bp, Homo sapiens
ataattggaggagtg

SEQ ID NO: 1608309 - DNA, 15 bp, Homo sapiens
tataattggaggagt

SEQ ID NO: 1608310 - DNA, 15 bp, Homo sapiens
atataattggaggag

SEQ ID NO: 1608311 - DNA, 15 bp, Homo sapiens
aatataattggagga

SEQ ID NO: 1608312 - DNA, 15 bp, Homo sapiens
gaatataattggagg

SEQ ID NO: 1608313 - DNA, 15 bp, Homo sapiens
agaatataattggag

SEQ ID NO: 1608314 - DNA, 15 bp, Homo sapiens
gagaatataattgga

SEQ ID NO: 1608315 - DNA, 15 bp, Homo sapiens
agagaatataattgg

SEQ ID NO: 1608316 - DNA, 15 bp, Homo sapiens
aagagaatataattg

SEQ ID NO: 1608317 - DNA, 15 bp, Homo sapiens
gaagagaatataatt

SEQ ID NO: 1608318 - DNA, 15 bp, Homo sapiens
tgaagagaatataat

SEQ ID NO: 1608319 - DNA, 15 bp, Homo sapiens
atgaagagaatataa

SEQ ID NO: 1608320 - DNA, 15 bp, Homo sapiens
tatgaagagaatata

SEQ ID NO: 1608321 - DNA, 15 bp, Homo sapiens
atatgaagagaatat

SEQ ID NO: 1608322 - DNA, 15 bp, Homo sapiens
tatatgaagagaata

SEQ ID NO: 1608323 - DNA, 15 bp, Homo sapiens
atatatgaagagaat

SEQ ID NO: 1608324 - DNA, 15 bp, Homo sapiens
catatatgaagagaa

SEQ ID NO: 1608325 - DNA, 15 bp, Homo sapiens
tcatatatgaagaga

SEQ ID NO: 1608326 - DNA, 15 bp, Homo sapiens
atcatatatgaagag

SEQ ID NO: 1608327 - DNA, 15 bp, Homo sapiens
aatcatatatgaaga

SEQ ID NO: 1608328 - DNA, 15 bp, Homo sapiens
caatcatatatgaag

SEQ ID NO: 1608329 - DNA, 15 bp, Homo sapiens
acaatcatatatgaa

SEQ ID NO: 1608330 - DNA, 15 bp, Homo sapiens
tacaatcatatatga

SEQ ID NO: 1608331 - DNA, 15 bp, Homo sapiens
atacaatcatatatg

SEQ ID NO: 1608332 - DNA, 15 bp, Homo sapiens
gatacaatcatatat

SEQ ID NO: 1608333 - DNA, 15 bp, Homo sapiens
agatacaatcatata

SEQ ID NO: 1608334 - DNA, 15 bp, Homo sapiens
gagatacaatcatat

SEQ ID NO: 1608335 - DNA, 15 bp, Homo sapiens
tgagatacaatcata

SEQ ID NO: 1608336 - DNA, 15 bp, Homo sapiens
gtgagatacaatcat

SEQ ID NO: 1608337 - DNA, 15 bp, Homo sapiens
tgtgagatacaatca

SEQ ID NO: 1608338 - DNA, 15 bp, Homo sapiens
ctgtgagatacaatc

SEQ ID NO: 1608339 - DNA, 15 bp, Homo sapiens
cctgtgagatacaat

SEQ ID NO: 1608340 - DNA, 15 bp, Homo sapiens
acctgtgagatacaa

SEQ ID NO: 1608341 - DNA, 15 bp, Homo sapiens
aacctgtgagataca

SEQ ID NO: 1608342 - DNA, 15 bp, Homo sapiens
caacctgtgagatac

SEQ ID NO: 1608343 - DNA, 15 bp, Homo sapiens
ccaacctgtgagata

SEQ ID NO: 1608344 - DNA, 15 bp, Homo sapiens
accaacctgtgagat

SEQ ID NO: 1608345 - DNA, 15 bp, Homo sapiens
aaccaacctgtgaga

SEQ ID NO: 1608346 - DNA, 15 bp, Homo sapiens
caaccaacctgtgag

SEQ ID NO: 1608347 - DNA, 15 bp, Homo sapiens
gcaaccaacctgtga

SEQ ID NO: 1608348 - DNA, 15 bp, Homo sapiens
agcaaccaacctgtg

SEQ ID NO: 1608349 - DNA, 15 bp, Homo sapiens
tagcaaccaacctgt

SEQ ID NO: 1608350 - DNA, 15 bp, Homo sapiens
atagcaaccaacctg

SEQ ID NO: 1608351 - DNA, 15 bp, Homo sapiens
catagcaaccaacct

SEQ ID NO: 1608352 - DNA, 15 bp, Homo sapiens
ccatagcaaccaacc

SEQ ID NO: 1608353 - DNA, 15 bp, Homo sapiens
accatagcaaccaac

SEQ ID NO: 1608354 - DNA, 15 bp, Homo sapiens
taccatagcaaccaa

SEQ ID NO: 1608355 - DNA, 15 bp, Homo sapiens
ataccatagcaacca

SEQ ID NO: 1608356 - DNA, 15 bp, Homo sapiens
aataccatagcaacc

SEQ ID NO: 1608357 - DNA, 15 bp, Homo sapiens
aaataccatagcaac

SEQ ID NO: 1608358 - DNA, 15 bp, Homo sapiens
caaataccatagcaa

SEQ ID NO: 1608359 - DNA, 15 bp, Homo sapiens
tcaaataccatagca

SEQ ID NO: 1608360 - DNA, 15 bp, Homo sapiens
atcaaataccatagc

SEQ ID NO: 1608361 - DNA, 15 bp, Homo sapiens
aatcaaataccatag

SEQ ID NO: 1608362 - DNA, 15 bp, Homo sapiens
gaatcaaataccata

SEQ ID NO: 1608363 - DNA, 15 bp, Homo sapiens
ggaatcaaataccat

SEQ ID NO: 1608364 - DNA, 15 bp, Homo sapiens
aggaatcaaatacca

SEQ ID NO: 1608365 - DNA, 15 bp, Homo sapiens
taggaatcaaatacc

SEQ ID NO: 1608366 - DNA, 15 bp, Homo sapiens
ctaggaatcaaatac

SEQ ID NO: 1608367 - DNA, 15 bp, Homo sapiens
actaggaatcaaata

SEQ ID NO: 1608368 - DNA, 15 bp, Homo sapiens
aactaggaatcaaat

SEQ ID NO: 1608369 - DNA, 15 bp, Homo sapiens
taactaggaatcaaa

SEQ ID NO: 1608370 - DNA, 15 bp, Homo sapiens
gtaactaggaatcaa

SEQ ID NO: 1608371 - DNA, 15 bp, Homo sapiens
ggtaactaggaatca

SEQ ID NO: 1608372 - DNA, 15 bp, Homo sapiens
tggtaactaggaatc

SEQ ID NO: 1608373 - DNA, 15 bp, Homo sapiens
atggtaactaggaat

SEQ ID NO: 1608374 - DNA, 15 bp, Homo sapiens
catggtaactaggaa

SEQ ID NO: 1608375 - DNA, 15 bp, Homo sapiens
tcatggtaactagga

SEQ ID NO: 1608376 - DNA, 15 bp, Homo sapiens
atcatggtaactagg

SEQ ID NO: 1608377 - DNA, 15 bp, Homo sapiens
tatcatggtaactag

SEQ ID NO: 1608378 - DNA, 15 bp, Homo sapiens
gtatcatggtaacta

SEQ ID NO: 1608379 - DNA, 15 bp, Homo sapiens
agtatcatggtaact

SEQ ID NO: 1608380 - DNA, 15 bp, Homo sapiens
tagtatcatggtaac

SEQ ID NO: 1608381 - DNA, 15 bp, Homo sapiens
atagtatcatggtaa

SEQ ID NO: 1608382 - DNA, 15 bp, Homo sapiens
aatagtatcatggta

SEQ ID NO: 1608383 - DNA, 15 bp, Homo sapiens
taatagtatcatggt

SEQ ID NO: 1608384 - DNA, 15 bp, Homo sapiens
ttaatagtatcatgg

SEQ ID NO: 1608385 - DNA, 15 bp, Homo sapiens
cttaatagtatcatg

SEQ ID NO: 1608386 - DNA, 15 bp, Homo sapiens
acttaatagtatcat

SEQ ID NO: 1608387 - DNA, 15 bp, Homo sapiens
cacttaatagtatca

SEQ ID NO: 1608388 - DNA, 15 bp, Homo sapiens
acacttaatagtatc

SEQ ID NO: 1608389 - DNA, 15 bp, Homo sapiens
aacacttaatagtat

SEQ ID NO: 1608390 - DNA, 15 bp, Homo sapiens
aaacacttaatagta

SEQ ID NO: 1608391 - DNA, 15 bp, Homo sapiens
caaacacttaatagt

SEQ ID NO: 1608392 - DNA, 15 bp, Homo sapiens
gcaaacacttaatag

SEQ ID NO: 1608393 - DNA, 15 bp, Homo sapiens
agcaaacacttaata

SEQ ID NO: 1608394 - DNA, 15 bp, Homo sapiens
cagcaaacacttaat

SEQ ID NO: 1608395 - DNA, 15 bp, Homo sapiens
gcagcaaacacttaa

SEQ ID NO: 1608396 - DNA, 15 bp, Homo sapiens
tgcagcaaacactta

SEQ ID NO: 1608397 - DNA, 15 bp, Homo sapiens
ctgcagcaaacactt

SEQ ID NO: 1608398 - DNA, 15 bp, Homo sapiens
tctgcagcaaacact

SEQ ID NO: 1608399 - DNA, 15 bp, Homo sapiens
ttctgcagcaaacac

SEQ ID NO: 1608400 - DNA, 15 bp, Homo sapiens
attctgcagcaaaca

SEQ ID NO: 1608401 - DNA, 15 bp, Homo sapiens
gattctgcagcaaac

SEQ ID NO: 1608402 - DNA, 15 bp, Homo sapiens
agattctgcagcaaa

SEQ ID NO: 1608403 - DNA, 15 bp, Homo sapiens
cagattctgcagcaa

SEQ ID NO: 1608404 - DNA, 15 bp, Homo sapiens
gcagattctgcagca

SEQ ID NO: 1608405 - DNA, 15 bp, Homo sapiens
ggcagattctgcagc

SEQ ID NO: 1608406 - DNA, 15 bp, Homo sapiens
tggcagattctgcag

SEQ ID NO: 1608407 - DNA, 15 bp, Homo sapiens
atggcagattctgca

SEQ ID NO: 1608408 - DNA, 15 bp, Homo sapiens
catggcagattctgc

SEQ ID NO: 1608409 - DNA, 15 bp, Homo sapiens
gcatggcagattctg

SEQ ID NO: 1608410 - DNA, 15 bp, Homo sapiens
agcatggcagattct

SEQ ID NO: 1608411 - DNA, 15 bp, Homo sapiens
aagcatggcagattc

SEQ ID NO: 1608412 - DNA, 15 bp, Homo sapiens
caagcatggcagatt

SEQ ID NO: 1608413 - DNA, 15 bp, Homo sapiens
ccaagcatggcagat

SEQ ID NO: 1608414 - DNA, 15 bp, Homo sapiens
accaagcatggcaga

SEQ ID NO: 1608415 - DNA, 15 bp, Homo sapiens
gaccaagcatggcag

SEQ ID NO: 1608416 - DNA, 15 bp, Homo sapiens
tgaccaagcatggca

SEQ ID NO: 1608417 - DNA, 15 bp, Homo sapiens
gtgaccaagcatggc

SEQ ID NO: 1608418 - DNA, 15 bp, Homo sapiens
tgtgaccaagcatgg

SEQ ID NO: 1608419 - DNA, 15 bp, Homo sapiens
ctgtgaccaagcatg

SEQ ID NO: 1608420 - DNA, 15 bp, Homo sapiens
tctgtgaccaagcat

SEQ ID NO: 1608421 - DNA, 15 bp, Homo sapiens
ttctgtgaccaagca

SEQ ID NO: 1608422 - DNA, 15 bp, Homo sapiens
gttctgtgaccaagc

SEQ ID NO: 1608423 - DNA, 15 bp, Homo sapiens
agttctgtgaccaag

SEQ ID NO: 1608424 - DNA, 15 bp, Homo sapiens
gagttctgtgaccaa

SEQ ID NO: 1608425 - DNA, 15 bp, Homo sapiens
tgagttctgtgacca

SEQ ID NO: 1608426 - DNA, 15 bp, Homo sapiens
ctgagttctgtgacc

SEQ ID NO: 1608427 - DNA, 15 bp, Homo sapiens
actgagttctgtgac

SEQ ID NO: 1608428 - DNA, 15 bp, Homo sapiens
cactgagttctgtga

SEQ ID NO: 1608429 - DNA, 15 bp, Homo sapiens
tcactgagttctgtg

SEQ ID NO: 1608430 - DNA, 15 bp, Homo sapiens
ttcactgagttctgt

SEQ ID NO: 1608431 - DNA, 15 bp, Homo sapiens
tttcactgagttctg

SEQ ID NO: 1608432 - DNA, 15 bp, Homo sapiens
ctttcactgagttct

SEQ ID NO: 1608433 - DNA, 15 bp, Homo sapiens
actttcactgagttc

SEQ ID NO: 1608434 - DNA, 15 bp, Homo sapiens
aactttcactgagtt

SEQ ID NO: 1608435 - DNA, 15 bp, Homo sapiens
gaactttcactgagt

SEQ ID NO: 1608436 - DNA, 15 bp, Homo sapiens
agaactttcactgag

SEQ ID NO: 1608437 - DNA, 15 bp, Homo sapiens
tagaactttcactga

SEQ ID NO: 1608438 - DNA, 15 bp, Homo sapiens
atagaactttcactg

SEQ ID NO: 1608439 - DNA, 15 bp, Homo sapiens
aatagaactttcact

SEQ ID NO: 1608440 - DNA, 15 bp, Homo sapiens
taatagaactttcac

SEQ ID NO: 1608441 - DNA, 15 bp, Homo sapiens
ttaatagaactttca

SEQ ID NO: 1608442 - DNA, 15 bp, Homo sapiens
tttaatagaactttc

SEQ ID NO: 1608443 - DNA, 15 bp, Homo sapiens
ttttaatagaacttt

SEQ ID NO: 1608444 - DNA, 15 bp, Homo sapiens
cttttaatagaactt

SEQ ID NO: 1608445 - DNA, 15 bp, Homo sapiens
tcttttaatagaact

SEQ ID NO: 1608446 - DNA, 15 bp, Homo sapiens
gtcttttaatagaac

SEQ ID NO: 1608447 - DNA, 15 bp, Homo sapiens
agtcttttaatagaa

SEQ ID NO: 1608448 - DNA, 15 bp, Homo sapiens
aagtcttttaataga

SEQ ID NO: 1608449 - DNA, 15 bp, Homo sapiens
taagtcttttaatag

SEQ ID NO: 1608450 - DNA, 15 bp, Homo sapiens
ataagtcttttaata

SEQ ID NO: 1608451 - DNA, 15 bp, Homo sapiens
gataagtcttttaat

SEQ ID NO: 1608452 - DNA, 15 bp, Homo sapiens
tgataagtcttttaa

SEQ ID NO: 1608453 - DNA, 15 bp, Homo sapiens
ttgataagtctttta

SEQ ID NO: 1608454 - DNA, 15 bp, Homo sapiens
attgataagtctttt

SEQ ID NO: 1608455 - DNA, 15 bp, Homo sapiens
aattgataagtcttt

SEQ ID NO: 1608456 - DNA, 15 bp, Homo sapiens
aaattgataagtctt

SEQ ID NO: 1608457 - DNA, 15 bp, Homo sapiens
caaattgataagtct

SEQ ID NO: 1608458 - DNA, 15 bp, Homo sapiens
tcaaattgataagtc

SEQ ID NO: 1608459 - DNA, 15 bp, Homo sapiens
atcaaattgataagt

SEQ ID NO: 1608460 - DNA, 15 bp, Homo sapiens
catcaaattgataag

SEQ ID NO: 1608461 - DNA, 15 bp, Homo sapiens
gcatcaaattgataa

SEQ ID NO: 1608462 - DNA, 15 bp, Homo sapiens
ggcatcaaattgata

SEQ ID NO: 1608463 - DNA, 15 bp, Homo sapiens
aggcatcaaattgat

SEQ ID NO: 1608464 - DNA, 15 bp, Homo sapiens
caggcatcaaattga

SEQ ID NO: 1608465 - DNA, 15 bp, Homo sapiens
acaggcatcaaattg

SEQ ID NO: 1608466 - DNA, 15 bp, Homo sapiens
aacaggcatcaaatt

SEQ ID NO: 1608467 - DNA, 15 bp, Homo sapiens
gaacaggcatcaaat

SEQ ID NO: 1608468 - DNA, 15 bp, Homo sapiens
tgaacaggcatcaaa

SEQ ID NO: 1608469 - DNA, 15 bp, Homo sapiens
ctgaacaggcatcaa

SEQ ID NO: 1608470 - DNA, 15 bp, Homo sapiens
actgaacaggcatca

SEQ ID NO: 1608471 - DNA, 15 bp, Homo sapiens
gactgaacaggcatc

SEQ ID NO: 1608472 - DNA, 15 bp, Homo sapiens
tgactgaacaggcat

SEQ ID NO: 1608473 - DNA, 15 bp, Homo sapiens
ttgactgaacaggca

SEQ ID NO: 1608474 - DNA, 15 bp, Homo sapiens
gttgactgaacaggc

SEQ ID NO: 1608475 - DNA, 15 bp, Homo sapiens
cgttgactgaacagg

SEQ ID NO: 1608476 - DNA, 15 bp, Homo sapiens
acgttgactgaacag

SEQ ID NO: 1608477 - DNA, 15 bp, Homo sapiens
gacgttgactgaaca

SEQ ID NO: 1608478 - DNA, 15 bp, Homo sapiens
agacgttgactgaac

SEQ ID NO: 1608479 - DNA, 15 bp, Homo sapiens
aagacgttgactgaa

SEQ ID NO: 1608480 - DNA, 15 bp, Homo sapiens
gaagacgttgactga

SEQ ID NO: 1608481 - DNA, 15 bp, Homo sapiens
ggaagacgttgactg

SEQ ID NO: 1608482 - DNA, 15 bp, Homo sapiens
tggaagacgttgact

SEQ ID NO: 1608483 - DNA, 15 bp, Homo sapiens
atggaagacgttgac

SEQ ID NO: 1608484 - DNA, 15 bp, Homo sapiens
aatggaagacgttga

SEQ ID NO: 1608485 - DNA, 15 bp, Homo sapiens
aaatggaagacgttg

SEQ ID NO: 1608486 - DNA, 15 bp, Homo sapiens
aaaatggaagacgtt

SEQ ID NO: 1608487 - DNA, 15 bp, Homo sapiens
caaaatggaagacgt

SEQ ID NO: 1608488 - DNA, 15 bp, Homo sapiens
acaaaatggaagacg

SEQ ID NO: 1608489 - DNA, 15 bp, Homo sapiens
aacaaaatggaagac

SEQ ID NO: 1608490 - DNA, 15 bp, Homo sapiens
caacaaaatggaaga

SEQ ID NO: 1608491 - DNA, 15 bp, Homo sapiens
tcaacaaaatggaag

SEQ ID NO: 1608492 - DNA, 15 bp, Homo sapiens
ctcaacaaaatggaa

SEQ ID NO: 1608493 - DNA, 15 bp, Homo sapiens
cctcaacaaaatgga

SEQ ID NO: 1608494 - DNA, 15 bp, Homo sapiens
gcctcaacaaaatgg

SEQ ID NO: 1608495 - DNA, 15 bp, Homo sapiens
agcctcaacaaaatg

SEQ ID NO: 1608496 - DNA, 15 bp, Homo sapiens
cagcctcaacaaaat

SEQ ID NO: 1608497 - DNA, 15 bp, Homo sapiens
ccagcctcaacaaaa

SEQ ID NO: 1608498 - DNA, 15 bp, Homo sapiens
tccagcctcaacaaa

SEQ ID NO: 1608499 - DNA, 15 bp, Homo sapiens
ctccagcctcaacaa

SEQ ID NO: 1608500 - DNA, 15 bp, Homo sapiens
tctccagcctcaaca

SEQ ID NO: 1608501 - DNA, 15 bp, Homo sapiens
ttctccagcctcaac

SEQ ID NO: 1608502 - DNA, 15 bp, Homo sapiens
gttctccagcctcaa

SEQ ID NO: 1608503 - DNA, 15 bp, Homo sapiens
ggttctccagcctca

SEQ ID NO: 1608504 - DNA, 15 bp, Homo sapiens
aggttctccagcctc

SEQ ID NO: 1608505 - DNA, 15 bp, Homo sapiens
gaggttctccagcct

SEQ ID NO: 1608506 - DNA, 15 bp, Homo sapiens
ggaggttctccagcc

SEQ ID NO: 1608507 - DNA, 15 bp, Homo sapiens
tggaggttctccagc

SEQ ID NO: 1608508 - DNA, 15 bp, Homo sapiens
ttggaggttctccag

SEQ ID NO: 1608509 - DNA, 15 bp, Homo sapiens
gttggaggttctcca

SEQ ID NO: 1608510 - DNA, 15 bp, Homo sapiens
tgttggaggttctcc

SEQ ID NO: 1608511 - DNA, 15 bp, Homo sapiens
ctgttggaggttctc

SEQ ID NO: 1608512 - DNA, 15 bp, Homo sapiens
tctgttggaggttct

SEQ ID NO: 1608513 - DNA, 15 bp, Homo sapiens
ttctgttggaggttc

SEQ ID NO: 1608514 - DNA, 15 bp, Homo sapiens
cttctgttggaggtt

SEQ ID NO: 1608515 - DNA, 15 bp, Homo sapiens
acttctgttggaggt

SEQ ID NO: 1608516 - DNA, 15 bp, Homo sapiens
aacttctgttggagg

SEQ ID NO: 1608517 - DNA, 15 bp, Homo sapiens
taacttctgttggag

SEQ ID NO: 1608518 - DNA, 15 bp, Homo sapiens
ttaacttctgttgga

SEQ ID NO: 1608519 - DNA, 15 bp, Homo sapiens
cttaacttctgttgg

SEQ ID NO: 1608520 - DNA, 15 bp, Homo sapiens
gcttaacttctgttg

SEQ ID NO: 1608521 - DNA, 15 bp, Homo sapiens
tgcttaacttctgtt

SEQ ID NO: 1608522 - DNA, 15 bp, Homo sapiens
ttgcttaacttctgt

SEQ ID NO: 1608523 - DNA, 15 bp, Homo sapiens
tttgcttaacttctg

SEQ ID NO: 1608524 - DNA, 15 bp, Homo sapiens
ctttgcttaacttct

SEQ ID NO: 1608525 - DNA, 15 bp, Homo sapiens
actttgcttaacttc

SEQ ID NO: 1608526 - DNA, 15 bp, Homo sapiens
aactttgcttaactt

SEQ ID NO: 1608527 - DNA, 15 bp, Homo sapiens
gaactttgcttaact

SEQ ID NO: 1608528 - DNA, 15 bp, Homo sapiens
tgaactttgcttaac

SEQ ID NO: 1608529 - DNA, 15 bp, Homo sapiens
ctgaactttgcttaa

SEQ ID NO: 1608530 - DNA, 15 bp, Homo sapiens
actgaactttgctta

SEQ ID NO: 1608531 - DNA, 15 bp, Homo sapiens
tactgaactttgctt

SEQ ID NO: 1608532 - DNA, 15 bp, Homo sapiens
ctactgaactttgct

SEQ ID NO: 1608533 - DNA, 15 bp, Homo sapiens
cctactgaactttgc

SEQ ID NO: 1608534 - DNA, 15 bp, Homo sapiens
acctactgaactttg

SEQ ID NO: 1608535 - DNA, 15 bp, Homo sapiens
tacctactgaacttt

SEQ ID NO: 1608536 - DNA, 15 bp, Homo sapiens
atacctactgaactt

SEQ ID NO: 1608537 - DNA, 15 bp, Homo sapiens
aatacctactgaact

SEQ ID NO: 1608538 - DNA, 15 bp, Homo sapiens
taatacctactgaac

SEQ ID NO: 1608539 - DNA, 15 bp, Homo sapiens
ttaatacctactgaa

SEQ ID NO: 1608540 - DNA, 15 bp, Homo sapiens
cttaatacctactga

SEQ ID NO: 1608541 - DNA, 15 bp, Homo sapiens
gcttaatacctactg

SEQ ID NO: 1608542 - DNA, 15 bp, Homo sapiens
agcttaatacctact

SEQ ID NO: 1608543 - DNA, 15 bp, Homo sapiens
cagcttaatacctac

SEQ ID NO: 1608544 - DNA, 15 bp, Homo sapiens
ccagcttaataccta

SEQ ID NO: 1608545 - DNA, 15 bp, Homo sapiens
cccagcttaatacct

SEQ ID NO: 1608546 - DNA, 15 bp, Homo sapiens
acccagcttaatacc

SEQ ID NO: 1608547 - DNA, 15 bp, Homo sapiens
gacccagcttaatac

SEQ ID NO: 1608548 - DNA, 15 bp, Homo sapiens
ggacccagcttaata

SEQ ID NO: 1608549 - DNA, 15 bp, Homo sapiens
aggacccagcttaat

SEQ ID NO: 1608550 - DNA, 15 bp, Homo sapiens
caggacccagcttaa

SEQ ID NO: 1608551 - DNA, 15 bp, Homo sapiens
gcaggacccagctta

SEQ ID NO: 1608552 - DNA, 15 bp, Homo sapiens
agcaggacccagctt

SEQ ID NO: 1608553 - DNA, 15 bp, Homo sapiens
aagcaggacccagct

SEQ ID NO: 1608554 - DNA, 15 bp, Homo sapiens
taagcaggacccagc

SEQ ID NO: 1608555 - DNA, 15 bp, Homo sapiens
ttaagcaggacccag

SEQ ID NO: 1608556 - DNA, 15 bp, Homo sapiens
tttaagcaggaccca

SEQ ID NO: 1608557 - DNA, 15 bp, Homo sapiens
gtttaagcaggaccc

SEQ ID NO: 1608558 - DNA, 15 bp, Homo sapiens
agtttaagcaggacc

SEQ ID NO: 1608559 - DNA, 15 bp, Homo sapiens
cagtttaagcaggac

SEQ ID NO: 1608560 - DNA, 15 bp, Homo sapiens
ccagtttaagcagga

SEQ ID NO: 1608561 - DNA, 15 bp, Homo sapiens
accagtttaagcagg

SEQ ID NO: 1608562 - DNA, 15 bp, Homo sapiens
caccagtttaagcag

SEQ ID NO: 1608563 - DNA, 15 bp, Homo sapiens
ccaccagtttaagca

SEQ ID NO: 1608564 - DNA, 15 bp, Homo sapiens
tccaccagtttaagc

SEQ ID NO: 1608565 - DNA, 15 bp, Homo sapiens
gtccaccagtttaag

SEQ ID NO: 1608566 - DNA, 15 bp, Homo sapiens
agtccaccagtttaa

SEQ ID NO: 1608567 - DNA, 15 bp, Homo sapiens
aagtccaccagttta

SEQ ID NO: 1608568 - DNA, 15 bp, Homo sapiens
aaagtccaccagttt

SEQ ID NO: 1608569 - DNA, 15 bp, Homo sapiens
taaagtccaccagtt

SEQ ID NO: 1608570 - DNA, 15 bp, Homo sapiens
ataaagtccaccagt

SEQ ID NO: 1608571 - DNA, 15 bp, Homo sapiens
gataaagtccaccag

SEQ ID NO: 1608572 - DNA, 15 bp, Homo sapiens
tgataaagtccacca

SEQ ID NO: 1608573 - DNA, 15 bp, Homo sapiens
ttgataaagtccacc

SEQ ID NO: 1608574 - DNA, 15 bp, Homo sapiens
gttgataaagtccac

SEQ ID NO: 1608575 - DNA, 15 bp, Homo sapiens
ggttgataaagtcca

SEQ ID NO: 1608576 - DNA, 15 bp, Homo sapiens
aggttgataaagtcc

SEQ ID NO: 1608577 - DNA, 15 bp, Homo sapiens
caggttgataaagtc

SEQ ID NO: 1608578 - DNA, 15 bp, Homo sapiens
tcaggttgataaagt

SEQ ID NO: 1608579 - DNA, 15 bp, Homo sapiens
atcaggttgataaag

SEQ ID NO: 1608580 - DNA, 15 bp, Homo sapiens
catcaggttgataaa

SEQ ID NO: 1608581 - DNA, 15 bp, Homo sapiens
gcatcaggttgataa

SEQ ID NO: 1608582 - DNA, 15 bp, Homo sapiens
tgcatcaggttgata

SEQ ID NO: 1608583 - DNA, 15 bp, Homo sapiens
atgcatcaggttgat

SEQ ID NO: 1608584 - DNA, 15 bp, Homo sapiens
catgcatcaggttga

SEQ ID NO: 1608585 - DNA, 15 bp, Homo sapiens
gcatgcatcaggttg

SEQ ID NO: 1608586 - DNA, 15 bp, Homo sapiens
tgcatgcatcaggtt

SEQ ID NO: 1608587 - DNA, 15 bp, Homo sapiens
ttgcatgcatcaggt

SEQ ID NO: 1608588 - DNA, 15 bp, Homo sapiens
gttgcatgcatcagg

SEQ ID NO: 1608589 - DNA, 15 bp, Homo sapiens
tgttgcatgcatcag

SEQ ID NO: 1608590 - DNA, 15 bp, Homo sapiens
ctgttgcatgcatca

SEQ ID NO: 1608591 - DNA, 15 bp, Homo sapiens
tctgttgcatgcatc

SEQ ID NO: 1608592 - DNA, 15 bp, Homo sapiens
ttctgttgcatgcat

SEQ ID NO: 1608593 - DNA, 15 bp, Homo sapiens
tttctgttgcatgca

SEQ ID NO: 1608594 - DNA, 15 bp, Homo sapiens
ctttctgttgcatgc

SEQ ID NO: 1608595 - DNA, 15 bp, Homo sapiens
cctttctgttgcatg

SEQ ID NO: 1608596 - DNA, 15 bp, Homo sapiens
tcctttctgttgcat

SEQ ID NO: 1608597 - DNA, 15 bp, Homo sapiens
ttcctttctgttgca

SEQ ID NO: 1608598 - DNA, 15 bp, Homo sapiens
gttcctttctgttgc

SEQ ID NO: 1608599 - DNA, 15 bp, Homo sapiens
tgttcctttctgttg

SEQ ID NO: 1608600 - DNA, 15 bp, Homo sapiens
ttgttcctttctgtt

SEQ ID NO: 1608601 - DNA, 15 bp, Homo sapiens
gttgttcctttctgt

SEQ ID NO: 1608602 - DNA, 15 bp, Homo sapiens
agttgttcctttctg

SEQ ID NO: 1608603 - DNA, 15 bp, Homo sapiens
gagttgttcctttct

SEQ ID NO: 1608604 - DNA, 15 bp, Homo sapiens
agagttgttcctttc

SEQ ID NO: 1608605 - DNA, 15 bp, Homo sapiens
gagagttgttccttt

SEQ ID NO: 1608606 - DNA, 15 bp, Homo sapiens
tgagagttgttcctt

SEQ ID NO: 1608607 - DNA, 15 bp, Homo sapiens
atgagagttgttcct

SEQ ID NO: 1608608 - DNA, 15 bp, Homo sapiens
tatgagagttgttcc

SEQ ID NO: 1608609 - DNA, 15 bp, Homo sapiens
gtatgagagttgttc

SEQ ID NO: 1608610 - DNA, 15 bp, Homo sapiens
tgtatgagagttgtt

SEQ ID NO: 1608611 - DNA, 15 bp, Homo sapiens
atgtatgagagttgt

SEQ ID NO: 1608612 - DNA, 15 bp, Homo sapiens
aatgtatgagagttg

SEQ ID NO: 1608613 - DNA, 15 bp, Homo sapiens
aaatgtatgagagtt

SEQ ID NO: 1608614 - DNA, 15 bp, Homo sapiens
aaaatgtatgagagt

SEQ ID NO: 1608615 - DNA, 15 bp, Homo sapiens
taaaatgtatgagag

SEQ ID NO: 1608616 - DNA, 15 bp, Homo sapiens
ttaaaatgtatgaga

SEQ ID NO: 1608617 - DNA, 15 bp, Homo sapiens
tttaaaatgtatgag

SEQ ID NO: 1608618 - DNA, 15 bp, Homo sapiens
ctttaaaatgtatga

SEQ ID NO: 1608619 - DNA, 15 bp, Homo sapiens
gctttaaaatgtatg

SEQ ID NO: 1608620 - DNA, 15 bp, Homo sapiens
agctttaaaatgtat

SEQ ID NO: 1608621 - DNA, 15 bp, Homo sapiens
cagctttaaaatgta

SEQ ID NO: 1608622 - DNA, 15 bp, Homo sapiens
ccagctttaaaatgt

SEQ ID NO: 1608623 - DNA, 15 bp, Homo sapiens
cccagctttaaaatg

SEQ ID NO: 1608624 - DNA, 15 bp, Homo sapiens
gcccagctttaaaat

SEQ ID NO: 1608625 - DNA, 15 bp, Homo sapiens
agcccagctttaaaa

SEQ ID NO: 1608626 - DNA, 15 bp, Homo sapiens
gagcccagctttaaa

SEQ ID NO: 1608627 - DNA, 15 bp, Homo sapiens
tgagcccagctttaa

SEQ ID NO: 1608628 - DNA, 15 bp, Homo sapiens
atgagcccagcttta

SEQ ID NO: 1608629 - DNA, 15 bp, Homo sapiens
catgagcccagcttt

SEQ ID NO: 1608630 - DNA, 15 bp, Homo sapiens
ccatgagcccagctt

SEQ ID NO: 1608631 - DNA, 15 bp, Homo sapiens
cccatgagcccagct

SEQ ID NO: 1608632 - DNA, 15 bp, Homo sapiens
acccatgagcccagc

SEQ ID NO: 1608633 - DNA, 15 bp, Homo sapiens
gacccatgagcccag

SEQ ID NO: 1608634 - DNA, 15 bp, Homo sapiens
ggacccatgagccca

SEQ ID NO: 1608635 - DNA, 15 bp, Homo sapiens
aggacccatgagccc

SEQ ID NO: 1608636 - DNA, 15 bp, Homo sapiens
aaggacccatgagcc

SEQ ID NO: 1608637 - DNA, 15 bp, Homo sapiens
gaaggacccatgagc

SEQ ID NO: 1608638 - DNA, 15 bp, Homo sapiens
ggaaggacccatgag

SEQ ID NO: 1608639 - DNA, 15 bp, Homo sapiens
aggaaggacccatga

SEQ ID NO: 1608640 - DNA, 15 bp, Homo sapiens
caggaaggacccatg

SEQ ID NO: 1608641 - DNA, 15 bp, Homo sapiens
ccaggaaggacccat

SEQ ID NO: 1608642 - DNA, 15 bp, Homo sapiens
accaggaaggaccca

SEQ ID NO: 1608643 - DNA, 15 bp, Homo sapiens
gaccaggaaggaccc

SEQ ID NO: 1608644 - DNA, 15 bp, Homo sapiens
tgaccaggaaggacc

SEQ ID NO: 1608645 - DNA, 15 bp, Homo sapiens
atgaccaggaaggac

SEQ ID NO: 1608646 - DNA, 15 bp, Homo sapiens
gatgaccaggaagga

SEQ ID NO: 1608647 - DNA, 15 bp, Homo sapiens
tgatgaccaggaagg

SEQ ID NO: 1608648 - DNA, 15 bp, Homo sapiens
atgatgaccaggaag

SEQ ID NO: 1608649 - DNA, 15 bp, Homo sapiens
aatgatgaccaggaa

SEQ ID NO: 1608650 - DNA, 15 bp, Homo sapiens
taatgatgaccagga

SEQ ID NO: 1608651 - DNA, 15 bp, Homo sapiens
ttaatgatgaccagg

SEQ ID NO: 1608652 - DNA, 15 bp, Homo sapiens
attaatgatgaccag

SEQ ID NO: 1608653 - DNA, 15 bp, Homo sapiens
cattaatgatgacca

SEQ ID NO: 1608654 - DNA, 15 bp, Homo sapiens
tcattaatgatgacc

SEQ ID NO: 1608655 - DNA, 15 bp, Homo sapiens
ctcattaatgatgac

SEQ ID NO: 1608656 - DNA, 15 bp, Homo sapiens
gctcattaatgatga

SEQ ID NO: 1608657 - DNA, 15 bp, Homo sapiens
ggctcattaatgatg

SEQ ID NO: 1608658 - DNA, 15 bp, Homo sapiens
aggctcattaatgat

SEQ ID NO: 1608659 - DNA, 15 bp, Homo sapiens
aaggctcattaatga

SEQ ID NO: 1608660 - DNA, 15 bp, Homo sapiens
aaaggctcattaatg

SEQ ID NO: 1608661 - DNA, 15 bp, Homo sapiens
taaaggctcattaat

SEQ ID NO: 1608662 - DNA, 15 bp, Homo sapiens
ataaaggctcattaa

SEQ ID NO: 1608663 - DNA, 15 bp, Homo sapiens
cataaaggctcatta

SEQ ID NO: 1608664 - DNA, 15 bp, Homo sapiens
acataaaggctcatt

SEQ ID NO: 1608665 - DNA, 15 bp, Homo sapiens
cacataaaggctcat

SEQ ID NO: 1608666 - DNA, 15 bp, Homo sapiens
tcacataaaggctca

SEQ ID NO: 1608667 - DNA, 15 bp, Homo sapiens
ttcacataaaggctc

SEQ ID NO: 1608668 - DNA, 15 bp, Homo sapiens
tttcacataaaggct

SEQ ID NO: 1608669 - DNA, 15 bp, Homo sapiens
ctttcacataaaggc

SEQ ID NO: 1608670 - DNA, 15 bp, Homo sapiens
actttcacataaagg

SEQ ID NO: 1608671 - DNA, 15 bp, Homo sapiens
aactttcacataaag

SEQ ID NO: 1608672 - DNA, 15 bp, Homo sapiens
taactttcacataaa

SEQ ID NO: 1608673 - DNA, 15 bp, Homo sapiens
ttaactttcacataa

SEQ ID NO: 1608674 - DNA, 15 bp, Homo sapiens
tttaactttcacata

SEQ ID NO: 1608675 - DNA, 15 bp, Homo sapiens
ctttaactttcacat

SEQ ID NO: 1608676 - DNA, 15 bp, Homo sapiens
gctttaactttcaca

SEQ ID NO: 1608677 - DNA, 15 bp, Homo sapiens
ggctttaactttcac

SEQ ID NO: 1608678 - DNA, 15 bp, Homo sapiens
gggctttaactttca

SEQ ID NO: 1608679 - DNA, 15 bp, Homo sapiens
tgggctttaactttc

SEQ ID NO: 1608680 - DNA, 15 bp, Homo sapiens
ttgggctttaacttt

SEQ ID NO: 1608681 - DNA, 15 bp, Homo sapiens
cttgggctttaactt

SEQ ID NO: 1608682 - DNA, 15 bp, Homo sapiens
gcttgggctttaact

SEQ ID NO: 1608683 - DNA, 15 bp, Homo sapiens
ggcttgggctttaac

SEQ ID NO: 1608684 - DNA, 15 bp, Homo sapiens
gggcttgggctttaa

SEQ ID NO: 1608685 - DNA, 15 bp, Homo sapiens
agggcttgggcttta

SEQ ID NO: 1608686 - DNA, 15 bp, Homo sapiens
tagggcttgggcttt

SEQ ID NO: 1608687 - DNA, 15 bp, Homo sapiens
ctagggcttgggctt

SEQ ID NO: 1608688 - DNA, 15 bp, Homo sapiens
tctagggcttgggct

SEQ ID NO: 1608689 - DNA, 15 bp, Homo sapiens
ttctagggcttgggc

SEQ ID NO: 1608690 - DNA, 15 bp, Homo sapiens
cttctagggcttggg

SEQ ID NO: 1608691 - DNA, 15 bp, Homo sapiens
gcttctagggcttgg

SEQ ID NO: 1608692 - DNA, 15 bp, Homo sapiens
tgcttctagggcttg

SEQ ID NO: 1608693 - DNA, 15 bp, Homo sapiens
gtgcttctagggctt

SEQ ID NO: 1608694 - DNA, 15 bp, Homo sapiens
tgtgcttctagggct

SEQ ID NO: 1608695 - DNA, 15 bp, Homo sapiens
ctgtgcttctagggc

SEQ ID NO: 1608696 - DNA, 15 bp, Homo sapiens
actgtgcttctaggg

SEQ ID NO: 1608697 - DNA, 15 bp, Homo sapiens
tactgtgcttctagg

SEQ ID NO: 1608698 - DNA, 15 bp, Homo sapiens
atactgtgcttctag

SEQ ID NO: 1608699 - DNA, 15 bp, Homo sapiens
tatactgtgcttcta

SEQ ID NO: 1608700 - DNA, 15 bp, Homo sapiens
ctatactgtgcttct

SEQ ID NO: 1608701 - DNA, 15 bp, Homo sapiens
cctatactgtgcttc

SEQ ID NO: 1608702 - DNA, 15 bp, Homo sapiens
acctatactgtgctt

SEQ ID NO: 1608703 - DNA, 15 bp, Homo sapiens
aacctatactgtgct

SEQ ID NO: 1608704 - DNA, 15 bp, Homo sapiens
caacctatactgtgc

SEQ ID NO: 1608705 - DNA, 15 bp, Homo sapiens
acaacctatactgtg

SEQ ID NO: 1608706 - DNA, 15 bp, Homo sapiens
tacaacctatactgt

SEQ ID NO: 1608707 - DNA, 15 bp, Homo sapiens
gtacaacctatactg

SEQ ID NO: 1608708 - DNA, 15 bp, Homo sapiens
agtacaacctatact

SEQ ID NO: 1608709 - DNA, 15 bp, Homo sapiens
aagtacaacctatac

SEQ ID NO: 1608710 - DNA, 15 bp, Homo sapiens
aaagtacaacctata

SEQ ID NO: 1608711 - DNA, 15 bp, Homo sapiens
taaagtacaacctat

SEQ ID NO: 1608712 - DNA, 15 bp, Homo sapiens
ataaagtacaaccta

SEQ ID NO: 1608713 - DNA, 15 bp, Homo sapiens
gataaagtacaacct

SEQ ID NO: 1608714 - DNA, 15 bp, Homo sapiens
agataaagtacaacc

SEQ ID NO: 1608715 - DNA, 15 bp, Homo sapiens
aagataaagtacaac

SEQ ID NO: 1608716 - DNA, 15 bp, Homo sapiens
caagataaagtacaa

SEQ ID NO: 1608717 - DNA, 15 bp, Homo sapiens
tcaagataaagtaca

SEQ ID NO: 1608718 - DNA, 15 bp, Homo sapiens
atcaagataaagtac

SEQ ID NO: 1608719 - DNA, 15 bp, Homo sapiens
tatcaagataaagta

SEQ ID NO: 1608720 - DNA, 15 bp, Homo sapiens
atatcaagataaagt

SEQ ID NO: 1608721 - DNA, 15 bp, Homo sapiens
aatatcaagataaag

SEQ ID NO: 1608722 - DNA, 15 bp, Homo sapiens
gaatatcaagataaa

SEQ ID NO: 1608723 - DNA, 15 bp, Homo sapiens
agaatatcaagataa

SEQ ID NO: 1608724 - DNA, 15 bp, Homo sapiens
cagaatatcaagata

SEQ ID NO: 1608725 - DNA, 15 bp, Homo sapiens
ccagaatatcaagat

SEQ ID NO: 1608726 - DNA, 15 bp, Homo sapiens
accagaatatcaaga

SEQ ID NO: 1608727 - DNA, 15 bp, Homo sapiens
gaccagaatatcaag

SEQ ID NO: 1608728 - DNA, 15 bp, Homo sapiens
tgaccagaatatcaa

SEQ ID NO: 1608729 - DNA, 15 bp, Homo sapiens
ctgaccagaatatca

SEQ ID NO: 1608730 - DNA, 15 bp, Homo sapiens
gctgaccagaatatc

SEQ ID NO: 1608731 - DNA, 15 bp, Homo sapiens
tgctgaccagaatat

SEQ ID NO: 1608732 - DNA, 15 bp, Homo sapiens
atgctgaccagaata

SEQ ID NO: 1608733 - DNA, 15 bp, Homo sapiens
gatgctgaccagaat

SEQ ID NO: 1608734 - DNA, 15 bp, Homo sapiens
tgatgctgaccagaa

SEQ ID NO: 1608735 - DNA, 15 bp, Homo sapiens
gtgatgctgaccaga

SEQ ID NO: 1608736 - DNA, 15 bp, Homo sapiens
tgtgatgctgaccag

SEQ ID NO: 1608737 - DNA, 15 bp, Homo sapiens
atgtgatgctgacca

SEQ ID NO: 1608738 - DNA, 15 bp, Homo sapiens
catgtgatgctgacc

SEQ ID NO: 1608739 - DNA, 15 bp, Homo sapiens
tcatgtgatgctgac

SEQ ID NO: 1608740 - DNA, 15 bp, Homo sapiens
atcatgtgatgctga

SEQ ID NO: 1608741 - DNA, 15 bp, Homo sapiens
aatcatgtgatgctg

SEQ ID NO: 1608742 - DNA, 15 bp, Homo sapiens
aaatcatgtgatgct

SEQ ID NO: 1608743 - DNA, 15 bp, Homo sapiens
taaatcatgtgatgc

SEQ ID NO: 1608744 - DNA, 15 bp, Homo sapiens
ttaaatcatgtgatg

SEQ ID NO: 1608745 - DNA, 15 bp, Homo sapiens
attaaatcatgtgat

SEQ ID NO: 1608746 - DNA, 15 bp, Homo sapiens
cattaaatcatgtga

SEQ ID NO: 1608747 - DNA, 15 bp, Homo sapiens
ccattaaatcatgtg

SEQ ID NO: 1608748 - DNA, 15 bp, Homo sapiens
cccattaaatcatgt

SEQ ID NO: 1608749 - DNA, 15 bp, Homo sapiens
tcccattaaatcatg

SEQ ID NO: 1608750 - DNA, 15 bp, Homo sapiens
ttcccattaaatcat

SEQ ID NO: 1608751 - DNA, 15 bp, Homo sapiens
tttcccattaaatca

SEQ ID NO: 1608752 - DNA, 15 bp, Homo sapiens
ttttcccattaaatc

SEQ ID NO: 1608753 - DNA, 15 bp, Homo sapiens
tttttcccattaaat

SEQ ID NO: 1608754 - DNA, 15 bp, Homo sapiens
ctttttcccattaaa

SEQ ID NO: 1608755 - DNA, 15 bp, Homo sapiens
tctttttcccattaa

SEQ ID NO: 1608756 - DNA, 15 bp, Homo sapiens
gtctttttcccatta

SEQ ID NO: 1608757 - DNA, 15 bp, Homo sapiens
ggtctttttcccatt

SEQ ID NO: 1608758 - DNA, 15 bp, Homo sapiens
aggtctttttcccat

SEQ ID NO: 1608759 - DNA, 15 bp, Homo sapiens
caggtctttttccca

SEQ ID NO: 1608760 - DNA, 15 bp, Homo sapiens
acaggtctttttccc

SEQ ID NO: 1608761 - DNA, 15 bp, Homo sapiens
cacaggtctttttcc

SEQ ID NO: 1608762 - DNA, 15 bp, Homo sapiens
ccacaggtctttttc

SEQ ID NO: 1608763 - DNA, 15 bp, Homo sapiens
accacaggtcttttt

SEQ ID NO: 1608764 - DNA, 15 bp, Homo sapiens
aaccacaggtctttt

SEQ ID NO: 1608765 - DNA, 15 bp, Homo sapiens
caaccacaggtcttt

SEQ ID NO: 1608766 - DNA, 15 bp, Homo sapiens
ccaaccacaggtctt

SEQ ID NO: 1608767 - DNA, 15 bp, Homo sapiens
tccaaccacaggtct

SEQ ID NO: 1608768 - DNA, 15 bp, Homo sapiens
gtccaaccacaggtc

SEQ ID NO: 1608769 - DNA, 15 bp, Homo sapiens
agtccaaccacaggt

SEQ ID NO: 1608770 - DNA, 15 bp, Homo sapiens
aagtccaaccacagg

SEQ ID NO: 1608771 - DNA, 15 bp, Homo sapiens
aaagtccaaccacag

SEQ ID NO: 1608772 - DNA, 15 bp, Homo sapiens
caaagtccaaccaca

SEQ ID NO: 1608773 - DNA, 15 bp, Homo sapiens
tcaaagtccaaccac

SEQ ID NO: 1608774 - DNA, 15 bp, Homo sapiens
tttcaaagtccaacc

SEQ ID NO: 1608775 - DNA, 15 bp, Homo sapiens
gtttcaaagtccaac

SEQ ID NO: 1608776 - DNA, 15 bp, Homo sapiens
agtttcaaagtccaa

SEQ ID NO: 1608777 - DNA, 15 bp, Homo sapiens
cagtttcaaagtcca

SEQ ID NO: 1608778 - DNA, 15 bp, Homo sapiens
gcagtttcaaagtcc

SEQ ID NO: 1608779 - DNA, 15 bp, Homo sapiens
tgcagtttcaaagtc

SEQ ID NO: 1608780 - DNA, 15 bp, Homo sapiens
ctgcagtttcaaagt

SEQ ID NO: 1608781 - DNA, 15 bp, Homo sapiens
gctgcagtttcaaag

SEQ ID NO: 1608782 - DNA, 15 bp, Homo sapiens
tgctgcagtttcaaa

SEQ ID NO: 1608783 - DNA, 15 bp, Homo sapiens
ttgctgcagtttcaa

SEQ ID NO: 1608784 - DNA, 15 bp, Homo sapiens
attgctgcagtttca

SEQ ID NO: 1608785 - DNA, 15 bp, Homo sapiens
cattgctgcagtttc

SEQ ID NO: 1608786 - DNA, 15 bp, Homo sapiens
acattgctgcagttt

SEQ ID NO: 1608787 - DNA, 15 bp, Homo sapiens
aacattgctgcagtt

SEQ ID NO: 1608788 - DNA, 15 bp, Homo sapiens
caacattgctgcagt

SEQ ID NO: 1608789 - DNA, 15 bp, Homo sapiens
tcaacattgctgcag

SEQ ID NO: 1608790 - DNA, 15 bp, Homo sapiens
ctcaacattgctgca

SEQ ID NO: 1608791 - DNA, 15 bp, Homo sapiens
actcaacattgctgc

SEQ ID NO: 1608792 - DNA, 15 bp, Homo sapiens
aactcaacattgctg

SEQ ID NO: 1608793 - DNA, 15 bp, Homo sapiens
caactcaacattgct

SEQ ID NO: 1608794 - DNA, 15 bp, Homo sapiens
tcaactcaacattgc

SEQ ID NO: 1608795 - DNA, 15 bp, Homo sapiens
gtcaactcaacattg

SEQ ID NO: 1608796 - DNA, 15 bp, Homo sapiens
tgtcaactcaacatt

SEQ ID NO: 1608797 - DNA, 15 bp, Homo sapiens
actgtcaactcaaca

SEQ ID NO: 1608798 - DNA, 15 bp, Homo sapiens
aactgtcaactcaac

SEQ ID NO: 1608799 - DNA, 15 bp, Homo sapiens
taactgtcaactcaa

SEQ ID NO: 1608800 - DNA, 15 bp, Homo sapiens
ataactgtcaactca

SEQ ID NO: 1608801 - DNA, 15 bp, Homo sapiens
aataactgtcaactc

SEQ ID NO: 1608802 - DNA, 15 bp, Homo sapiens
aaataactgtcaact

SEQ ID NO: 1608803 - DNA, 15 bp, Homo sapiens
gaaataactgtcaac

SEQ ID NO: 1608804 - DNA, 15 bp, Homo sapiens
tgaaataactgtcaa

SEQ ID NO: 1608805 - DNA, 15 bp, Homo sapiens
ttgaaataactgtca

SEQ ID NO: 1608806 - DNA, 15 bp, Homo sapiens
tttgaaataactgtc

SEQ ID NO: 1608807 - DNA, 15 bp, Homo sapiens
ttttgaaataactgt

SEQ ID NO: 1608808 - DNA, 15 bp, Homo sapiens
attttgaaataactg

SEQ ID NO: 1608809 - DNA, 15 bp, Homo sapiens
cattttgaaataact

SEQ ID NO: 1608810 - DNA, 15 bp, Homo sapiens
tcattttgaaataac

SEQ ID NO: 1608811 - DNA, 15 bp, Homo sapiens
atcattttgaaataa

SEQ ID NO: 1608812 - DNA, 15 bp, Homo sapiens
gatcattttgaaata

SEQ ID NO: 1608813 - DNA, 15 bp, Homo sapiens
ggatcattttgaaat

SEQ ID NO: 1608814 - DNA, 15 bp, Homo sapiens
tggatcattttgaaa

SEQ ID NO: 1608815 - DNA, 15 bp, Homo sapiens
ctggatcattttgaa

SEQ ID NO: 1608816 - DNA, 15 bp, Homo sapiens
actggatcattttga

SEQ ID NO: 1608817 - DNA, 15 bp, Homo sapiens
aactggatcattttg

SEQ ID NO: 1608818 - DNA, 15 bp, Homo sapiens
aaactggatcatttt

SEQ ID NO: 1608819 - DNA, 15 bp, Homo sapiens
taaactggatcattt

SEQ ID NO: 1608820 - DNA, 15 bp, Homo sapiens
ataaactggatcatt

SEQ ID NO: 1608821 - DNA, 15 bp, Homo sapiens
aataaactggatcat

SEQ ID NO: 1608822 - DNA, 15 bp, Homo sapiens
gaataaactggatca

SEQ ID NO: 1608823 - DNA, 15 bp, Homo sapiens
ggaataaactggatc

SEQ ID NO: 1608824 - DNA, 15 bp, Homo sapiens
tggaataaactggat

SEQ ID NO: 1608825 - DNA, 15 bp, Homo sapiens
gtggaataaactgga

SEQ ID NO: 1608826 - DNA, 15 bp, Homo sapiens
tgtggaataaactgg

SEQ ID NO: 1608827 - DNA, 15 bp, Homo sapiens
gtgtggaataaactg

SEQ ID NO: 1608828 - DNA, 15 bp, Homo sapiens
tgtgtggaataaact

SEQ ID NO: 1608829 - DNA, 15 bp, Homo sapiens
ctgtgtggaataaac

SEQ ID NO: 1608830 - DNA, 15 bp, Homo sapiens
actgtgtggaataaa

SEQ ID NO: 1608831 - DNA, 15 bp, Homo sapiens
cactgtgtggaataa

SEQ ID NO: 1608832 - DNA, 15 bp, Homo sapiens
acactgtgtggaata

SEQ ID NO: 1608833 - DNA, 15 bp, Homo sapiens
aacactgtgtggaat

SEQ ID NO: 1608834 - DNA, 15 bp, Homo sapiens
aaacactgtgtggaa

SEQ ID NO: 1608835 - DNA, 15 bp, Homo sapiens
taaacactgtgtgga

SEQ ID NO: 1608836 - DNA, 15 bp, Homo sapiens
ttaaacactgtgtgg

SEQ ID NO: 1608837 - DNA, 15 bp, Homo sapiens
attaaacactgtgtg

SEQ ID NO: 1608838 - DNA, 15 bp, Homo sapiens
aattaaacactgtgt

SEQ ID NO: 1608839 - DNA, 15 bp, Homo sapiens
taattaaacactgtg

SEQ ID NO: 1608840 - DNA, 15 bp, Homo sapiens
ataattaaacactgt

SEQ ID NO: 1608841 - DNA, 15 bp, Homo sapiens
gataattaaacactg

SEQ ID NO: 1608842 - DNA, 15 bp, Homo sapiens
tgataattaaacact

SEQ ID NO: 1608843 - DNA, 15 bp, Homo sapiens
ctgataattaaacac

SEQ ID NO: 1608844 - DNA, 15 bp, Homo sapiens
tctgataattaaaca

SEQ ID NO: 1608845 - DNA, 15 bp, Homo sapiens
atctgataattaaac

SEQ ID NO: 1608846 - DNA, 15 bp, Homo sapiens
gatctgataattaaa

SEQ ID NO: 1608847 - DNA, 15 bp, Homo sapiens
agatctgataattaa

SEQ ID NO: 1608848 - DNA, 15 bp, Homo sapiens
aagatctgataatta

SEQ ID NO: 1608849 - DNA, 15 bp, Homo sapiens
caagatctgataatt

SEQ ID NO: 1608850 - DNA, 15 bp, Homo sapiens
ccaagatctgataat

SEQ ID NO: 1608851 - DNA, 15 bp, Homo sapiens
tccaagatctgataa

SEQ ID NO: 1608852 - DNA, 15 bp, Homo sapiens
ttccaagatctgata

SEQ ID NO: 1608853 - DNA, 15 bp, Homo sapiens
cttccaagatctgat

SEQ ID NO: 1608854 - DNA, 15 bp, Homo sapiens
tcttccaagatctga

SEQ ID NO: 1608855 - DNA, 15 bp, Homo sapiens
atcttccaagatctg

SEQ ID NO: 1608856 - DNA, 15 bp, Homo sapiens
aatcttccaagatct

SEQ ID NO: 1608857 - DNA, 15 bp, Homo sapiens
taatcttccaagatc

SEQ ID NO: 1608858 - DNA, 15 bp, Homo sapiens
ttaatcttccaagat

SEQ ID NO: 1608859 - DNA, 15 bp, Homo sapiens
attaatcttccaaga

SEQ ID NO: 1608860 - DNA, 15 bp, Homo sapiens
aattaatcttccaag

SEQ ID NO: 1608861 - DNA, 15 bp, Homo sapiens
taattaatcttccaa

SEQ ID NO: 1608862 - DNA, 15 bp, Homo sapiens
ataattaatcttcca

SEQ ID NO: 1608863 - DNA, 15 bp, Homo sapiens
aataattaatcttcc

SEQ ID NO: 1608864 - DNA, 15 bp, Homo sapiens
aaataattaatcttc

SEQ ID NO: 1608865 - DNA, 15 bp, Homo sapiens
aaaataattaatctt

SEQ ID NO: 1608866 - DNA, 15 bp, Homo sapiens
taaaataattaatct

SEQ ID NO: 1608867 - DNA, 15 bp, Homo sapiens
ttaaaataattaatc

SEQ ID NO: 1608868 - DNA, 15 bp, Homo sapiens
cttaaaataattaat

SEQ ID NO: 1608869 - DNA, 15 bp, Homo sapiens
tcttaaaataattaa

SEQ ID NO: 1608870 - DNA, 15 bp, Homo sapiens
ctcttaaaataatta

SEQ ID NO: 1608871 - DNA, 15 bp, Homo sapiens
tctcttaaaataatt

SEQ ID NO: 1608872 - DNA, 15 bp, Homo sapiens
gtctcttaaaataat

SEQ ID NO: 1608873 - DNA, 15 bp, Homo sapiens
agtctcttaaaataa

SEQ ID NO: 1608874 - DNA, 15 bp, Homo sapiens
gagtctcttaaaata

SEQ ID NO: 1608875 - DNA, 15 bp, Homo sapiens
cgagtctcttaaaat

SEQ ID NO: 1608876 - DNA, 15 bp, Homo sapiens
acgagtctcttaaaa

SEQ ID NO: 1608877 - DNA, 15 bp, Homo sapiens
tacgagtctcttaaa

SEQ ID NO: 1608878 - DNA, 15 bp, Homo sapiens
ttacgagtctcttaa

SEQ ID NO: 1608879 - DNA, 15 bp, Homo sapiens
tttacgagtctctta

SEQ ID NO: 1608880 - DNA, 15 bp, Homo sapiens
gtttacgagtctctt

SEQ ID NO: 1608881 - DNA, 15 bp, Homo sapiens
agtttacgagtctct

SEQ ID NO: 1608882 - DNA, 15 bp, Homo sapiens
cagtttacgagtctc

SEQ ID NO: 1608883 - DNA, 15 bp, Homo sapiens
tcagtttacgagtct

SEQ ID NO: 1608884 - DNA, 15 bp, Homo sapiens
ctcagtttacgagtc

SEQ ID NO: 1608885 - DNA, 15 bp, Homo sapiens
tctcagtttacgagt

SEQ ID NO: 1608886 - DNA, 15 bp, Homo sapiens
atctcagtttacgag

SEQ ID NO: 1608887 - DNA, 15 bp, Homo sapiens
tatctcagtttacga

SEQ ID NO: 1608888 - DNA, 15 bp, Homo sapiens
ctatctcagtttacg

SEQ ID NO: 1608889 - DNA, 15 bp, Homo sapiens
tctatctcagtttac

SEQ ID NO: 1608890 - DNA, 15 bp, Homo sapiens
gtctatctcagttta

SEQ ID NO: 1608891 - DNA, 15 bp, Homo sapiens
ggtctatctcagttt

SEQ ID NO: 1608892 - DNA, 15 bp, Homo sapiens
aggtctatctcagtt

SEQ ID NO: 1608893 - DNA, 15 bp, Homo sapiens
aaggtctatctcagt

SEQ ID NO: 1608894 - DNA, 15 bp, Homo sapiens
taaggtctatctcag

SEQ ID NO: 1608895 - DNA, 15 bp, Homo sapiens
ttaaggtctatctca

SEQ ID NO: 1608896 - DNA, 15 bp, Homo sapiens
cttaaggtctatctc

SEQ ID NO: 1608897 - DNA, 15 bp, Homo sapiens
tcttaaggtctatct

SEQ ID NO: 1608898 - DNA, 15 bp, Homo sapiens
ttcttaaggtctatc

SEQ ID NO: 1608899 - DNA, 15 bp, Homo sapiens
tttcttaaggtctat

SEQ ID NO: 1608900 - DNA, 15 bp, Homo sapiens
atttcttaaggtcta

SEQ ID NO: 1608901 - DNA, 15 bp, Homo sapiens
aatttcttaaggtct

SEQ ID NO: 1608902 - DNA, 15 bp, Homo sapiens
taatttcttaaggtc

SEQ ID NO: 1608903 - DNA, 15 bp, Homo sapiens
ctaatttcttaaggt

SEQ ID NO: 1608904 - DNA, 15 bp, Homo sapiens
tctaatttcttaagg

SEQ ID NO: 1608905 - DNA, 15 bp, Homo sapiens
atctaatttcttaag

SEQ ID NO: 1608906 - DNA, 15 bp, Homo sapiens
tatctaatttcttaa

SEQ ID NO: 1608907 - DNA, 15 bp, Homo sapiens
ttatctaatttctta

SEQ ID NO: 1608908 - DNA, 15 bp, Homo sapiens
tttatctaatttctt

SEQ ID NO: 1608909 - DNA, 15 bp, Homo sapiens
ctttatctaatttct

SEQ ID NO: 1608910 - DNA, 15 bp, Homo sapiens
tctttatctaatttc

SEQ ID NO: 1608911 - DNA, 15 bp, Homo sapiens
ctctttatctaattt

SEQ ID NO: 1608912 - DNA, 15 bp, Homo sapiens
cctctttatctaatt

SEQ ID NO: 1608913 - DNA, 15 bp, Homo sapiens
tcctctttatctaat

SEQ ID NO: 1608914 - DNA, 15 bp, Homo sapiens
atcctctttatctaa

SEQ ID NO: 1608915 - DNA, 15 bp, Homo sapiens
tatcctctttatcta

SEQ ID NO: 1608916 - DNA, 15 bp, Homo sapiens
atatcctctttatct

SEQ ID NO: 1608917 - DNA, 15 bp, Homo sapiens
tatatcctctttatc

SEQ ID NO: 1608918 - DNA, 15 bp, Homo sapiens
ttatatcctctttat

SEQ ID NO: 1608919 - DNA, 15 bp, Homo sapiens
gttatatcctcttta

SEQ ID NO: 1608920 - DNA, 15 bp, Homo sapiens
agttatatcctcttt

SEQ ID NO: 1608921 - DNA, 15 bp, Homo sapiens
gagttatatcctctt

SEQ ID NO: 1608922 - DNA, 15 bp, Homo sapiens
ggagttatatcctct

SEQ ID NO: 1608923 - DNA, 15 bp, Homo sapiens
tggagttatatcctc

SEQ ID NO: 1608924 - DNA, 15 bp, Homo sapiens
atggagttatatcct

SEQ ID NO: 1608925 - DNA, 15 bp, Homo sapiens
gatggagttatatcc

SEQ ID NO: 1608926 - DNA, 15 bp, Homo sapiens
tgatggagttatatc

SEQ ID NO: 1608927 - DNA, 15 bp, Homo sapiens
ttgatggagttatat

SEQ ID NO: 1608928 - DNA, 15 bp, Homo sapiens
cttgatggagttata

SEQ ID NO: 1608929 - DNA, 15 bp, Homo sapiens
acttgatggagttat

SEQ ID NO: 1608930 - DNA, 15 bp, Homo sapiens
cacttgatggagtta

SEQ ID NO: 1608931 - DNA, 15 bp, Homo sapiens
tcacttgatggagtt

SEQ ID NO: 1608932 - DNA, 15 bp, Homo sapiens
ctcacttgatggagt

SEQ ID NO: 1608933 - DNA, 15 bp, Homo sapiens
gctcacttgatggag

SEQ ID NO: 1608934 - DNA, 15 bp, Homo sapiens
agctcacttgatgga

SEQ ID NO: 1608935 - DNA, 15 bp, Homo sapiens
cagctcacttgatgg

SEQ ID NO: 1608936 - DNA, 15 bp, Homo sapiens
ccagctcacttgatg

SEQ ID NO: 1608937 - DNA, 15 bp, Homo sapiens
gccagctcacttgat

SEQ ID NO: 1608938 - DNA, 15 bp, Homo sapiens
tgccagctcacttga

SEQ ID NO: 1608939 - DNA, 15 bp, Homo sapiens
ttgccagctcacttg

SEQ ID NO: 1608940 - DNA, 15 bp, Homo sapiens
attgccagctcactt

SEQ ID NO: 1608941 - DNA, 15 bp, Homo sapiens
cattgccagctcact

SEQ ID NO: 1608942 - DNA, 15 bp, Homo sapiens
gcattgccagctcac

SEQ ID NO: 1608943 - DNA, 15 bp, Homo sapiens
ggcattgccagctca

SEQ ID NO: 1608944 - DNA, 15 bp, Homo sapiens
tggcattgccagctc

SEQ ID NO: 1608945 - DNA, 15 bp, Homo sapiens
ttggcattgccagct

SEQ ID NO: 1608946 - DNA, 15 bp, Homo sapiens
tttggcattgccagc

SEQ ID NO: 1608947 - DNA, 15 bp, Homo sapiens
atttggcattgccag

SEQ ID NO: 1608948 - DNA, 15 bp, Homo sapiens
aatttggcattgcca

SEQ ID NO: 1608949 - DNA, 15 bp, Homo sapiens
taatttggcattgcc

SEQ ID NO: 1608950 - DNA, 15 bp, Homo sapiens
ctaatttggcattgc

SEQ ID NO: 1608951 - DNA, 15 bp, Homo sapiens
actaatttggcattg

SEQ ID NO: 1608952 - DNA, 15 bp, Homo sapiens
cactaatttggcatt

SEQ ID NO: 1608953 - DNA, 15 bp, Homo sapiens
tcactaatttggcat

SEQ ID NO: 1608954 - DNA, 15 bp, Homo sapiens
ttcactaatttggca

SEQ ID NO: 1608955 - DNA, 15 bp, Homo sapiens
attcactaatttggc

SEQ ID NO: 1608956 - DNA, 15 bp, Homo sapiens
gattcactaatttgg

SEQ ID NO: 1608957 - DNA, 15 bp, Homo sapiens
agattcactaatttg

SEQ ID NO: 1608958 - DNA, 15 bp, Homo sapiens
tagattcactaattt

SEQ ID NO: 1608959 - DNA, 15 bp, Homo sapiens
ttagattcactaatt

SEQ ID NO: 1608960 - DNA, 15 bp, Homo sapiens
attagattcactaat

SEQ ID NO: 1608961 - DNA, 15 bp, Homo sapiens
gattagattcactaa

SEQ ID NO: 1608962 - DNA, 15 bp, Homo sapiens
tgattagattcacta

SEQ ID NO: 1608963 - DNA, 15 bp, Homo sapiens
atgattagattcact

SEQ ID NO: 1608964 - DNA, 15 bp, Homo sapiens
tatgattagattcac

SEQ ID NO: 1608965 - DNA, 15 bp, Homo sapiens
ttatgattagattca

SEQ ID NO: 1608966 - DNA, 15 bp, Homo sapiens
cttatgattagattc

SEQ ID NO: 1608967 - DNA, 15 bp, Homo sapiens
gcttatgattagatt

SEQ ID NO: 1608968 - DNA, 15 bp, Homo sapiens
tgcttatgattagat

SEQ ID NO: 1608969 - DNA, 15 bp, Homo sapiens
atgcttatgattaga

SEQ ID NO: 1608970 - DNA, 15 bp, Homo sapiens
gatgcttatgattag

SEQ ID NO: 1608971 - DNA, 15 bp, Homo sapiens
tgatgcttatgatta

SEQ ID NO: 1608972 - DNA, 15 bp, Homo sapiens
gtgatgcttatgatt

SEQ ID NO: 1608973 - DNA, 15 bp, Homo sapiens
tgtgatgcttatgat

SEQ ID NO: 1608974 - DNA, 15 bp, Homo sapiens
ttgtgatgcttatga

SEQ ID NO: 1608975 - DNA, 15 bp, Homo sapiens
cttgtgatgcttatg

SEQ ID NO: 1608976 - DNA, 15 bp, Homo sapiens
gcttgtgatgcttat

SEQ ID NO: 1608977 - DNA, 15 bp, Homo sapiens
agcttgtgatgctta

SEQ ID NO: 1608978 - DNA, 15 bp, Homo sapiens
tagcttgtgatgctt

SEQ ID NO: 1608979 - DNA, 15 bp, Homo sapiens
ttagcttgtgatgct

SEQ ID NO: 1608980 - DNA, 15 bp, Homo sapiens
tttagcttgtgatgc

SEQ ID NO: 1608981 - DNA, 15 bp, Homo sapiens
gtttagcttgtgatg

SEQ ID NO: 1608982 - DNA, 15 bp, Homo sapiens
agtttagcttgtgat

SEQ ID NO: 1608983 - DNA, 15 bp, Homo sapiens
aagtttagcttgtga

SEQ ID NO: 1608984 - DNA, 15 bp, Homo sapiens
taagtttagcttgtg

SEQ ID NO: 1608985 - DNA, 15 bp, Homo sapiens
ttaagtttagcttgt

SEQ ID NO: 1608986 - DNA, 15 bp, Homo sapiens
attaagtttagcttg

SEQ ID NO: 1608987 - DNA, 15 bp, Homo sapiens
cattaagtttagctt

SEQ ID NO: 1608988 - DNA, 15 bp, Homo sapiens
ccattaagtttagct

SEQ ID NO: 1608989 - DNA, 15 bp, Homo sapiens
accattaagtttagc

SEQ ID NO: 1608990 - DNA, 15 bp, Homo sapiens
aaccattaagtttag

SEQ ID NO: 1608991 - DNA, 15 bp, Homo sapiens
caaccattaagttta

SEQ ID NO: 1608992 - DNA, 15 bp, Homo sapiens
ccaaccattaagttt

SEQ ID NO: 1608993 - DNA, 15 bp, Homo sapiens
gccaaccattaagtt

SEQ ID NO: 1608994 - DNA, 15 bp, Homo sapiens
ggccaaccattaagt

SEQ ID NO: 1608995 - DNA, 15 bp, Homo sapiens
aggccaaccattaag

SEQ ID NO: 1608996 - DNA, 15 bp, Homo sapiens
caggccaaccattaa

SEQ ID NO: 1608997 - DNA, 15 bp, Homo sapiens
ccaggccaaccatta

SEQ ID NO: 1608998 - DNA, 15 bp, Homo sapiens
tccaggccaaccatt

SEQ ID NO: 1608999 - DNA, 15 bp, Homo sapiens
ttccaggccaaccat

SEQ ID NO: 1609000 - DNA, 15 bp, Homo sapiens
tttccaggccaacca

SEQ ID NO: 1609001 - DNA, 15 bp, Homo sapiens
ctttccaggccaacc

SEQ ID NO: 1609002 - DNA, 15 bp, Homo sapiens
actttccaggccaac

SEQ ID NO: 1609003 - DNA, 15 bp, Homo sapiens
gactttccaggccaa

SEQ ID NO: 1609004 - DNA, 15 bp, Homo sapiens
agactttccaggcca

SEQ ID NO: 1609005 - DNA, 15 bp, Homo sapiens
gagactttccaggcc

SEQ ID NO: 1609006 - DNA, 15 bp, Homo sapiens
agagactttccaggc

SEQ ID NO: 1609007 - DNA, 15 bp, Homo sapiens
cagagactttccagg

SEQ ID NO: 1609008 - DNA, 15 bp, Homo sapiens
acagagactttccag

SEQ ID NO: 1609009 - DNA, 15 bp, Homo sapiens
aacagagactttcca

SEQ ID NO: 1609010 - DNA, 15 bp, Homo sapiens
gaacagagactttcc

SEQ ID NO: 1609011 - DNA, 15 bp, Homo sapiens
ggaacagagactttc

SEQ ID NO: 1609012 - DNA, 15 bp, Homo sapiens
tggaacagagacttt

SEQ ID NO: 1609013 - DNA, 15 bp, Homo sapiens
ctggaacagagactt

SEQ ID NO: 1609014 - DNA, 15 bp, Homo sapiens
tctggaacagagact

SEQ ID NO: 1609015 - DNA, 15 bp, Homo sapiens
ttctggaacagagac

SEQ ID NO: 1609016 - DNA, 15 bp, Homo sapiens
tttctggaacagaga

SEQ ID NO: 1609017 - DNA, 15 bp, Homo sapiens
gtttctggaacagag

SEQ ID NO: 1609018 - DNA, 15 bp, Homo sapiens
ggtttctggaacaga

SEQ ID NO: 1609019 - DNA, 15 bp, Homo sapiens
aggtttctggaacag

SEQ ID NO: 1609020 - DNA, 15 bp, Homo sapiens
gaggtttctggaaca

SEQ ID NO: 1609021 - DNA, 15 bp, Homo sapiens
ggaggtttctggaac

SEQ ID NO: 1609022 - DNA, 15 bp, Homo sapiens
tggaggtttctggaa

SEQ ID NO: 1609023 - DNA, 15 bp, Homo sapiens
ttggaggtttctgga

SEQ ID NO: 1609024 - DNA, 15 bp, Homo sapiens
cttggaggtttctgg

SEQ ID NO: 1609025 - DNA, 15 bp, Homo sapiens
ccttggaggtttctg

SEQ ID NO: 1609026 - DNA, 15 bp, Homo sapiens
accttggaggtttct

SEQ ID NO: 1609027 - DNA, 15 bp, Homo sapiens
gaccttggaggtttc

SEQ ID NO: 1609028 - DNA, 15 bp, Homo sapiens
tgaccttggaggttt

SEQ ID NO: 1609029 - DNA, 15 bp, Homo sapiens
gtgaccttggaggtt

SEQ ID NO: 1609030 - DNA, 15 bp, Homo sapiens
agtgaccttggaggt

SEQ ID NO: 1609031 - DNA, 15 bp, Homo sapiens
aagtgaccttggagg

SEQ ID NO: 1609032 - DNA, 15 bp, Homo sapiens
aaagtgaccttggag

SEQ ID NO: 1609033 - DNA, 15 bp, Homo sapiens
caaagtgaccttgga

SEQ ID NO: 1609034 - DNA, 15 bp, Homo sapiens
ccaaagtgaccttgg

SEQ ID NO: 1609035 - DNA, 15 bp, Homo sapiens
tccaaagtgaccttg

SEQ ID NO: 1609036 - DNA, 15 bp, Homo sapiens
gtccaaagtgacctt

SEQ ID NO: 1609037 - DNA, 15 bp, Homo sapiens
cgtccaaagtgacct

SEQ ID NO: 1609038 - DNA, 15 bp, Homo sapiens
acgtccaaagtgacc

SEQ ID NO: 1609039 - DNA, 15 bp, Homo sapiens
cacgtccaaagtgac

SEQ ID NO: 1609040 - DNA, 15 bp, Homo sapiens
tcacgtccaaagtga

SEQ ID NO: 1609041 - DNA, 15 bp, Homo sapiens
ttcacgtccaaagtg

SEQ ID NO: 1609042 - DNA, 15 bp, Homo sapiens
attcacgtccaaagt

SEQ ID NO: 1609043 - DNA, 15 bp, Homo sapiens
tattcacgtccaaag

SEQ ID NO: 1609044 - DNA, 15 bp, Homo sapiens
gtattcacgtccaaa

SEQ ID NO: 1609045 - DNA, 15 bp, Homo sapiens
ggtattcacgtccaa

SEQ ID NO: 1609046 - DNA, 15 bp, Homo sapiens
tggtattcacgtcca

SEQ ID NO: 1609047 - DNA, 15 bp, Homo sapiens
gtggtattcacgtcc

SEQ ID NO: 1609048 - DNA, 15 bp, Homo sapiens
tgtggtattcacgtc

SEQ ID NO: 1609049 - DNA, 15 bp, Homo sapiens
gtgtggtattcacgt

SEQ ID NO: 1609050 - DNA, 15 bp, Homo sapiens
agtgtggtattcacg

SEQ ID NO: 1609051 - DNA, 15 bp, Homo sapiens
gagtgtggtattcac

SEQ ID NO: 1609052 - DNA, 15 bp, Homo sapiens
ggagtgtggtattca

SEQ ID NO: 1609053 - DNA, 15 bp, Homo sapiens
aggagtgtggtattc

SEQ ID NO: 1609054 - DNA, 15 bp, Homo sapiens
taggagtgtggtatt

SEQ ID NO: 1609055 - DNA, 15 bp, Homo sapiens
gtaggagtgtggtat

SEQ ID NO: 1609056 - DNA, 15 bp, Homo sapiens
ggtaggagtgtggta

SEQ ID NO: 1609057 - DNA, 15 bp, Homo sapiens
tggtaggagtgtggt

SEQ ID NO: 1609058 - DNA, 15 bp, Homo sapiens
atggtaggagtgtgg

SEQ ID NO: 1609059 - DNA, 15 bp, Homo sapiens
aatggtaggagtgtg

SEQ ID NO: 1609060 - DNA, 15 bp, Homo sapiens
caatggtaggagtgt

SEQ ID NO: 1609061 - DNA, 15 bp, Homo sapiens
acaatggtaggagtg

SEQ ID NO: 1609062 - DNA, 15 bp, Homo sapiens
tacaatggtaggagt

SEQ ID NO: 1609063 - DNA, 15 bp, Homo sapiens
gtacaatggtaggag

SEQ ID NO: 1609064 - DNA, 15 bp, Homo sapiens
agtacaatggtagga

SEQ ID NO: 1609065 - DNA, 15 bp, Homo sapiens
gagtacaatggtagg

SEQ ID NO: 1609066 - DNA, 15 bp, Homo sapiens
tgagtacaatggtag

SEQ ID NO: 1609067 - DNA, 15 bp, Homo sapiens
ctgagtacaatggta

SEQ ID NO: 1609068 - DNA, 15 bp, Homo sapiens
actgagtacaatggt

SEQ ID NO: 1609069 - DNA, 15 bp, Homo sapiens
aactgagtacaatgg

SEQ ID NO: 1609070 - DNA, 15 bp, Homo sapiens
aaactgagtacaatg

SEQ ID NO: 1609071 - DNA, 15 bp, Homo sapiens
taaactgagtacaat

SEQ ID NO: 1609072 - DNA, 15 bp, Homo sapiens
gtaaactgagtacaa

SEQ ID NO: 1609073 - DNA, 15 bp, Homo sapiens
agtaaactgagtaca

SEQ ID NO: 1609074 - DNA, 15 bp, Homo sapiens
cagtaaactgagtac

SEQ ID NO: 1609075 - DNA, 15 bp, Homo sapiens
gcagtaaactgagta

SEQ ID NO: 1609076 - DNA, 15 bp, Homo sapiens
ggcagtaaactgagt

SEQ ID NO: 1609077 - DNA, 15 bp, Homo sapiens
aggcagtaaactgag

SEQ ID NO: 1609078 - DNA, 15 bp, Homo sapiens
aaggcagtaaactga

SEQ ID NO: 1609079 - DNA, 15 bp, Homo sapiens
caaggcagtaaactg

SEQ ID NO: 1609080 - DNA, 15 bp, Homo sapiens
tcaaggcagtaaact

SEQ ID NO: 1609081 - DNA, 15 bp, Homo sapiens
gtcaaggcagtaaac

SEQ ID NO: 1609082 - DNA, 15 bp, Homo sapiens
tgtcaaggcagtaaa

SEQ ID NO: 1609083 - DNA, 15 bp, Homo sapiens
atgtcaaggcagtaa

SEQ ID NO: 1609084 - DNA, 15 bp, Homo sapiens
aatgtcaaggcagta

SEQ ID NO: 1609085 - DNA, 15 bp, Homo sapiens
aaatgtcaaggcagt

SEQ ID NO: 1609086 - DNA, 15 bp, Homo sapiens
caaatgtcaaggcag

SEQ ID NO: 1609087 - DNA, 15 bp, Homo sapiens
tcaaatgtcaaggca

SEQ ID NO: 1609088 - DNA, 15 bp, Homo sapiens
atcaaatgtcaaggc

SEQ ID NO: 1609089 - DNA, 15 bp, Homo sapiens
aatcaaatgtcaagg

SEQ ID NO: 1609090 - DNA, 15 bp, Homo sapiens
gaatcaaatgtcaag

SEQ ID NO: 1609091 - DNA, 15 bp, Homo sapiens
agaatcaaatgtcaa

SEQ ID NO: 1609092 - DNA, 15 bp, Homo sapiens
aagaatcaaatgtca

SEQ ID NO: 1609093 - DNA, 15 bp, Homo sapiens
taagaatcaaatgtc

SEQ ID NO: 1609094 - DNA, 15 bp, Homo sapiens
ataagaatcaaatgt

SEQ ID NO: 1609095 - DNA, 15 bp, Homo sapiens
aataagaatcaaatg

SEQ ID NO: 1609096 - DNA, 15 bp, Homo sapiens
aaataagaatcaaat

SEQ ID NO: 1609097 - DNA, 15 bp, Homo sapiens
taaataagaatcaaa

SEQ ID NO: 1609098 - DNA, 15 bp, Homo sapiens
ttaaataagaatcaa

SEQ ID NO: 1609099 - DNA, 15 bp, Homo sapiens
attaaataagaatca

SEQ ID NO: 1609100 - DNA, 15 bp, Homo sapiens
aattaaataagaatc

SEQ ID NO: 1609101 - DNA, 15 bp, Homo sapiens
aaattaaataagaat

SEQ ID NO: 1609102 - DNA, 15 bp, Homo sapiens
aaaattaaataagaa

SEQ ID NO: 1609103 - DNA, 15 bp, Homo sapiens
aaaaattaaataaga

SEQ ID NO: 1609104 - DNA, 15 bp, Homo sapiens
aaaaaattaaataag

SEQ ID NO: 1609105 - DNA, 15 bp, Homo sapiens
tataaaaaaaaaaaa

SEQ ID NO: 1609106 - DNA, 15 bp, Homo sapiens
ctataaaaaaaaaaa

SEQ ID NO: 1609107 - DNA, 15 bp, Homo sapiens
tctataaaaaaaaaa

SEQ ID NO: 1609108 - DNA, 15 bp, Homo sapiens
atctataaaaaaaaa

SEQ ID NO: 1609109 - DNA, 15 bp, Homo sapiens
catctataaaaaaaa

SEQ ID NO: 1609110 - DNA, 15 bp, Homo sapiens
ccatctataaaaaaa

SEQ ID NO: 1609111 - DNA, 15 bp, Homo sapiens
tccatctataaaaaa

SEQ ID NO: 1609112 - DNA, 15 bp, Homo sapiens
ttccatctataaaaa

SEQ ID NO: 1609113 - DNA, 15 bp, Homo sapiens
attccatctataaaa

SEQ ID NO: 1609114 - DNA, 15 bp, Homo sapiens
gattccatctataaa

SEQ ID NO: 1609115 - DNA, 15 bp, Homo sapiens
agattccatctataa

SEQ ID NO: 1609116 - DNA, 15 bp, Homo sapiens
gagattccatctata

SEQ ID NO: 1609117 - DNA, 15 bp, Homo sapiens
tgagattccatctat

SEQ ID NO: 1609118 - DNA, 15 bp, Homo sapiens
gtgagattccatcta

SEQ ID NO: 1609119 - DNA, 15 bp, Homo sapiens
ggtgagattccatct

SEQ ID NO: 1609120 - DNA, 15 bp, Homo sapiens
tggtgagattccatc

SEQ ID NO: 1609121 - DNA, 15 bp, Homo sapiens
atggtgagattccat

SEQ ID NO: 1609122 - DNA, 15 bp, Homo sapiens
catggtgagattcca

SEQ ID NO: 1609123 - DNA, 15 bp, Homo sapiens
acatggtgagattcc

SEQ ID NO: 1609124 - DNA, 15 bp, Homo sapiens
aacatggtgagattc

SEQ ID NO: 1609125 - DNA, 15 bp, Homo sapiens
caacatggtgagatt

SEQ ID NO: 1609126 - DNA, 15 bp, Homo sapiens
gcaacatggtgagat

SEQ ID NO: 1609127 - DNA, 15 bp, Homo sapiens
tggcaacatggtgag

SEQ ID NO: 1609128 - DNA, 15 bp, Homo sapiens
ttggcaacatggtga

SEQ ID NO: 1609129 - DNA, 15 bp, Homo sapiens
cttggcaacatggtg

SEQ ID NO: 1609130 - DNA, 15 bp, Homo sapiens
ccttggcaacatggt

SEQ ID NO: 1609131 - DNA, 15 bp, Homo sapiens
gccttggcaacatgg

SEQ ID NO: 1609132 - DNA, 15 bp, Homo sapiens
agccttggcaacatg

SEQ ID NO: 1609133 - DNA, 15 bp, Homo sapiens
cagccttggcaacat

SEQ ID NO: 1609134 - DNA, 15 bp, Homo sapiens
ccagccttggcaaca

SEQ ID NO: 1609135 - DNA, 15 bp, Homo sapiens
accagccttggcaac

SEQ ID NO: 1609136 - DNA, 15 bp, Homo sapiens
gaccagccttggcaa

SEQ ID NO: 1609137 - DNA, 15 bp, Homo sapiens
agaccagccttggca

SEQ ID NO: 1609138 - DNA, 15 bp, Homo sapiens
aagaccagccttggc

SEQ ID NO: 1609139 - DNA, 15 bp, Homo sapiens
caagaccagccttgg

SEQ ID NO: 1609140 - DNA, 15 bp, Homo sapiens
tcaagaccagccttg

SEQ ID NO: 1609141 - DNA, 15 bp, Homo sapiens
ttcaagaccagcctt

SEQ ID NO: 1609142 - DNA, 15 bp, Homo sapiens
acaggagttcaagac

SEQ ID NO: 1609143 - DNA, 15 bp, Homo sapiens
aacaggagttcaaga

SEQ ID NO: 1609144 - DNA, 15 bp, Homo sapiens
caacaggagttcaag

SEQ ID NO: 1609145 - DNA, 15 bp, Homo sapiens
acaacaggagttcaa

SEQ ID NO: 1609146 - DNA, 15 bp, Homo sapiens
aacaacaggagttca

SEQ ID NO: 1609147 - DNA, 15 bp, Homo sapiens
aaacaacaggagttc

SEQ ID NO: 1609148 - DNA, 15 bp, Homo sapiens
aaaacaacaggagtt

SEQ ID NO: 1609149 - DNA, 15 bp, Homo sapiens
aaaaacaacaggagt

SEQ ID NO: 1609150 - DNA, 15 bp, Homo sapiens
gaaaaacaacaggag

SEQ ID NO: 1609151 - DNA, 15 bp, Homo sapiens
tgaaaaacaacagga

SEQ ID NO: 1609152 - DNA, 15 bp, Homo sapiens
ttgaaaaacaacagg

SEQ ID NO: 1609153 - DNA, 15 bp, Homo sapiens
gttgaaaaacaacag

SEQ ID NO: 1609154 - DNA, 15 bp, Homo sapiens
agttgaaaaacaaca

SEQ ID NO: 1609155 - DNA, 15 bp, Homo sapiens
aagttgaaaaacaac

SEQ ID NO: 1609156 - DNA, 15 bp, Homo sapiens
gaagttgaaaaacaa

SEQ ID NO: 1609157 - DNA, 15 bp, Homo sapiens
ggaagttgaaaaaca

SEQ ID NO: 1609158 - DNA, 15 bp, Homo sapiens
aggaagttgaaaaac

SEQ ID NO: 1609159 - DNA, 15 bp, Homo sapiens
aaggaagttgaaaaa

SEQ ID NO: 1609160 - DNA, 15 bp, Homo sapiens
aaaggaagttgaaaa

SEQ ID NO: 1609161 - DNA, 15 bp, Homo sapiens
taaaggaagttgaaa

SEQ ID NO: 1609162 - DNA, 15 bp, Homo sapiens
ctaaaggaagttgaa

SEQ ID NO: 1609163 - DNA, 15 bp, Homo sapiens
actaaaggaagttga

SEQ ID NO: 1609164 - DNA, 15 bp, Homo sapiens
aactaaaggaagttg

SEQ ID NO: 1609165 - DNA, 15 bp, Homo sapiens
caactaaaggaagtt

SEQ ID NO: 1609166 - DNA, 15 bp, Homo sapiens
tcaactaaaggaagt

SEQ ID NO: 1609167 - DNA, 15 bp, Homo sapiens
ttttcatgaatttca

SEQ ID NO: 1609168 - DNA, 15 bp, Homo sapiens
tttttcatgaatttc

SEQ ID NO: 1609169 - DNA, 15 bp, Homo sapiens
atttttcatgaattt

SEQ ID NO: 1609170 - DNA, 15 bp, Homo sapiens
catttttcatgaatt

SEQ ID NO: 1609171 - DNA, 15 bp, Homo sapiens
tcatttttcatgaat

SEQ ID NO: 1609172 - DNA, 15 bp, Homo sapiens
ttcatttttcatgaa

SEQ ID NO: 1609173 - DNA, 15 bp, Homo sapiens
attcatttttcatga

SEQ ID NO: 1609174 - DNA, 15 bp, Homo sapiens
aattcatttttcatg

SEQ ID NO: 1609175 - DNA, 15 bp, Homo sapiens
aaattcatttttcat

SEQ ID NO: 1609176 - DNA, 15 bp, Homo sapiens
gaaattcatttttca

SEQ ID NO: 1609177 - DNA, 15 bp, Homo sapiens
tgaaattcatttttc

SEQ ID NO: 1609178 - DNA, 15 bp, Homo sapiens
atgaaattcattttt

SEQ ID NO: 1609179 - DNA, 15 bp, Homo sapiens
catgaaattcatttt

SEQ ID NO: 1609180 - DNA, 15 bp, Homo sapiens
tcatgaaattcattt

SEQ ID NO: 1609181 - DNA, 15 bp, Homo sapiens
ttcatgaaattcatt

SEQ ID NO: 1609182 - DNA, 15 bp, Homo sapiens
attcatgaaattcat

SEQ ID NO: 1609183 - DNA, 15 bp, Homo sapiens
aattcatgaaattca

SEQ ID NO: 1609184 - DNA, 15 bp, Homo sapiens
gaattcatgaaattc

SEQ ID NO: 1609185 - DNA, 15 bp, Homo sapiens
tgaattcatgaaatt

SEQ ID NO: 1609186 - DNA, 15 bp, Homo sapiens
atgaattcatgaaat

SEQ ID NO: 1609187 - DNA, 15 bp, Homo sapiens
catgaattcatgaaa

SEQ ID NO: 1609188 - DNA, 15 bp, Homo sapiens
acatgaattcatgaa

SEQ ID NO: 1609189 - DNA, 15 bp, Homo sapiens
aacatgaattcatga

SEQ ID NO: 1609190 - DNA, 15 bp, Homo sapiens
aaacatgaattcatg

SEQ ID NO: 1609191 - DNA, 15 bp, Homo sapiens
aaaacatgaattcat

SEQ ID NO: 1609192 - DNA, 15 bp, Homo sapiens
taaaacatgaattca

SEQ ID NO: 1609193 - DNA, 15 bp, Homo sapiens
ttaaaacatgaattc

SEQ ID NO: 1609194 - DNA, 15 bp, Homo sapiens
attaaaacatgaatt

SEQ ID NO: 1609195 - DNA, 15 bp, Homo sapiens
aattaaaacatgaat

SEQ ID NO: 1609196 - DNA, 15 bp, Homo sapiens
gaattaaaacatgaa

SEQ ID NO: 1609197 - DNA, 15 bp, Homo sapiens
tgaattaaaacatga

SEQ ID NO: 1609198 - DNA, 15 bp, Homo sapiens
atgaattaaaacatg

SEQ ID NO: 1609199 - DNA, 15 bp, Homo sapiens
aatgaattaaaacat

SEQ ID NO: 1609200 - DNA, 15 bp, Homo sapiens
aaatgaattaaaaca

SEQ ID NO: 1609201 - DNA, 15 bp, Homo sapiens
gaaatgaattaaaac

SEQ ID NO: 1609202 - DNA, 15 bp, Homo sapiens
tgaaatgaattaaaa

SEQ ID NO: 1609203 - DNA, 15 bp, Homo sapiens
gtgaaatgaattaaa

SEQ ID NO: 1609204 - DNA, 15 bp, Homo sapiens
agtgaaatgaattaa

SEQ ID NO: 1609205 - DNA, 15 bp, Homo sapiens
gagtgaaatgaatta

SEQ ID NO: 1609206 - DNA, 15 bp, Homo sapiens
tgagtgaaatgaatt

SEQ ID NO: 1609207 - DNA, 15 bp, Homo sapiens
ttgagtgaaatgaat

SEQ ID NO: 1609208 - DNA, 15 bp, Homo sapiens
cttgagtgaaatgaa

SEQ ID NO: 1609209 - DNA, 15 bp, Homo sapiens
acttgagtgaaatga

SEQ ID NO: 1609210 - DNA, 15 bp, Homo sapiens
cacttgagtgaaatg

SEQ ID NO: 1609211 - DNA, 15 bp, Homo sapiens
tcacttgagtgaaat

SEQ ID NO: 1609212 - DNA, 15 bp, Homo sapiens
atcacttgagtgaaa

SEQ ID NO: 1609213 - DNA, 15 bp, Homo sapiens
gatcacttgagtgaa

SEQ ID NO: 1609214 - DNA, 15 bp, Homo sapiens
ggatcacttgagtga

SEQ ID NO: 1609215 - DNA, 15 bp, Homo sapiens
aggatcacttgagtg

SEQ ID NO: 1609216 - DNA, 15 bp, Homo sapiens
gaggatcacttgagt

SEQ ID NO: 1609217 - DNA, 15 bp, Homo sapiens
ttactcaggaagctg

SEQ ID NO: 1609218 - DNA, 15 bp, Homo sapiens
gttactcaggaagct

SEQ ID NO: 1609219 - DNA, 15 bp, Homo sapiens
agttactcaggaagc

SEQ ID NO: 1609220 - DNA, 15 bp, Homo sapiens
cagttactcaggaag

SEQ ID NO: 1609221 - DNA, 15 bp, Homo sapiens
tcagttactcaggaa

SEQ ID NO: 1609222 - DNA, 15 bp, Homo sapiens
ctcagttactcagga

SEQ ID NO: 1609223 - DNA, 15 bp, Homo sapiens
tctcagttactcagg

SEQ ID NO: 1609224 - DNA, 15 bp, Homo sapiens
gtctcagttactcag

SEQ ID NO: 1609225 - DNA, 15 bp, Homo sapiens
agtctcagttactca

SEQ ID NO: 1609226 - DNA, 15 bp, Homo sapiens
tagtctcagttactc

SEQ ID NO: 1609227 - DNA, 15 bp, Homo sapiens
gtagtctcagttact

SEQ ID NO: 1609228 - DNA, 15 bp, Homo sapiens
tgtagtctcagttac

SEQ ID NO: 1609229 - DNA, 15 bp, Homo sapiens
ctgtagtctcagtta

SEQ ID NO: 1609230 - DNA, 15 bp, Homo sapiens
cctgtagtctcagtt

SEQ ID NO: 1609231 - DNA, 15 bp, Homo sapiens
gcctgtagtctcagt

SEQ ID NO: 1609232 - DNA, 15 bp, Homo sapiens
atgcctgtagtctca

SEQ ID NO: 1609233 - DNA, 15 bp, Homo sapiens
catgcctgtagtctc

SEQ ID NO: 1609234 - DNA, 15 bp, Homo sapiens
acatgcctgtagtct

SEQ ID NO: 1609235 - DNA, 15 bp, Homo sapiens
cacatgcctgtagtc

SEQ ID NO: 1609236 - DNA, 15 bp, Homo sapiens
acacatgcctgtagt

SEQ ID NO: 1609237 - DNA, 15 bp, Homo sapiens
gacacatgcctgtag

SEQ ID NO: 1609238 - DNA, 15 bp, Homo sapiens
tgacacatgcctgta

SEQ ID NO: 1609239 - DNA, 15 bp, Homo sapiens
gtgacacatgcctgt

SEQ ID NO: 1609240 - DNA, 15 bp, Homo sapiens
ggtgacacatgcctg

SEQ ID NO: 1609241 - DNA, 15 bp, Homo sapiens
tggtgacacatgcct

SEQ ID NO: 1609242 - DNA, 15 bp, Homo sapiens
atggtgacacatgcc

SEQ ID NO: 1609243 - DNA, 15 bp, Homo sapiens
aatggtgacacatgc

SEQ ID NO: 1609244 - DNA, 15 bp, Homo sapiens
gaatggtgacacatg

SEQ ID NO: 1609245 - DNA, 15 bp, Homo sapiens
ggaatggtgacacat

SEQ ID NO: 1609246 - DNA, 15 bp, Homo sapiens
tggaatggtgacaca

SEQ ID NO: 1609247 - DNA, 15 bp, Homo sapiens
ctggaatggtgacac

SEQ ID NO: 1609248 - DNA, 15 bp, Homo sapiens
cctggaatggtgaca

SEQ ID NO: 1609249 - DNA, 15 bp, Homo sapiens
gcctggaatggtgac

SEQ ID NO: 1609250 - DNA, 15 bp, Homo sapiens
ggcctggaatggtga

SEQ ID NO: 1609251 - DNA, 15 bp, Homo sapiens
tggcctggaatggtg

SEQ ID NO: 1609252 - DNA, 15 bp, Homo sapiens
gtggcctggaatggt

SEQ ID NO: 1609253 - DNA, 15 bp, Homo sapiens
agtggcctggaatgg

SEQ ID NO: 1609254 - DNA, 15 bp, Homo sapiens
aagtggcctggaatg

SEQ ID NO: 1609255 - DNA, 15 bp, Homo sapiens
caagtggcctggaat

SEQ ID NO: 1609256 - DNA, 15 bp, Homo sapiens
ccaagtggcctggaa

SEQ ID NO: 1609257 - DNA, 15 bp, Homo sapiens
accaagtggcctgga

SEQ ID NO: 1609258 - DNA, 15 bp, Homo sapiens
aaccaagtggcctgg

SEQ ID NO: 1609259 - DNA, 15 bp, Homo sapiens
gaaccaagtggcctg

SEQ ID NO: 1609260 - DNA, 15 bp, Homo sapiens
ggaaccaagtggcct

SEQ ID NO: 1609261 - DNA, 15 bp, Homo sapiens
aggaaccaagtggcc

SEQ ID NO: 1609262 - DNA, 15 bp, Homo sapiens
aaggaaccaagtggc

SEQ ID NO: 1609263 - DNA, 15 bp, Homo sapiens
aaaggaaccaagtgg

SEQ ID NO: 1609264 - DNA, 15 bp, Homo sapiens
aaaaggaaccaagtg

SEQ ID NO: 1609265 - DNA, 15 bp, Homo sapiens
taaaaggaaccaagt

SEQ ID NO: 1609266 - DNA, 15 bp, Homo sapiens
ataaaaggaaccaag

SEQ ID NO: 1609267 - DNA, 15 bp, Homo sapiens
tataaaaggaaccaa

SEQ ID NO: 1609268 - DNA, 15 bp, Homo sapiens
ctataaaaggaacca

SEQ ID NO: 1609269 - DNA, 15 bp, Homo sapiens
actataaaaggaacc

SEQ ID NO: 1609270 - DNA, 15 bp, Homo sapiens
aactataaaaggaac

SEQ ID NO: 1609271 - DNA, 15 bp, Homo sapiens
aaactataaaaggaa

SEQ ID NO: 1609272 - DNA, 15 bp, Homo sapiens
gaaactataaaagga

SEQ ID NO: 1609273 - DNA, 15 bp, Homo sapiens
agaaactataaaagg

SEQ ID NO: 1609274 - DNA, 15 bp, Homo sapiens
tagaaactataaaag

SEQ ID NO: 1609275 - DNA, 15 bp, Homo sapiens
atagaaactataaaa

SEQ ID NO: 1609276 - DNA, 15 bp, Homo sapiens
aatagaaactataaa

SEQ ID NO: 1609277 - DNA, 15 bp, Homo sapiens
aaatagaaactataa

SEQ ID NO: 1609278 - DNA, 15 bp, Homo sapiens
gaaatagaaactata

SEQ ID NO: 1609279 - DNA, 15 bp, Homo sapiens
agaaatagaaactat

SEQ ID NO: 1609280 - DNA, 15 bp, Homo sapiens
aagaaatagaaacta

SEQ ID NO: 1609281 - DNA, 15 bp, Homo sapiens
gaagaaatagaaact

SEQ ID NO: 1609282 - DNA, 15 bp, Homo sapiens
tgaagaaatagaaac

SEQ ID NO: 1609283 - DNA, 15 bp, Homo sapiens
atgaagaaatagaaa

SEQ ID NO: 1609284 - DNA, 15 bp, Homo sapiens
aatgaagaaatagaa

SEQ ID NO: 1609285 - DNA, 15 bp, Homo sapiens
aaatgaagaaataga

SEQ ID NO: 1609286 - DNA, 15 bp, Homo sapiens
taaatgaagaaatag

SEQ ID NO: 1609287 - DNA, 15 bp, Homo sapiens
ataaatgaagaaata

SEQ ID NO: 1609288 - DNA, 15 bp, Homo sapiens
aataaatgaagaaat

SEQ ID NO: 1609289 - DNA, 15 bp, Homo sapiens
taataaatgaagaaa

SEQ ID NO: 1609290 - DNA, 15 bp, Homo sapiens
gtaataaatgaagaa

SEQ ID NO: 1609291 - DNA, 15 bp, Homo sapiens
tgtaataaatgaaga

SEQ ID NO: 1609292 - DNA, 15 bp, Homo sapiens
ttgtaataaatgaag

SEQ ID NO: 1609293 - DNA, 15 bp, Homo sapiens
cttgtaataaatgaa

SEQ ID NO: 1609294 - DNA, 15 bp, Homo sapiens
gcttgtaataaatga

SEQ ID NO: 1609295 - DNA, 15 bp, Homo sapiens
tgcttgtaataaatg

SEQ ID NO: 1609296 - DNA, 15 bp, Homo sapiens
atgcttgtaataaat

SEQ ID NO: 1609297 - DNA, 15 bp, Homo sapiens
tatgcttgtaataaa

SEQ ID NO: 1609298 - DNA, 15 bp, Homo sapiens
atatgcttgtaataa

SEQ ID NO: 1609299 - DNA, 15 bp, Homo sapiens
aatatgcttgtaata

SEQ ID NO: 1609300 - DNA, 15 bp, Homo sapiens
aaatatgcttgtaat

SEQ ID NO: 1609301 - DNA, 15 bp, Homo sapiens
aaaatatgcttgtaa

SEQ ID NO: 1609302 - DNA, 15 bp, Homo sapiens
gaaaatatgcttgta

SEQ ID NO: 1609303 - DNA, 15 bp, Homo sapiens
ggaaaatatgcttgt

SEQ ID NO: 1609304 - DNA, 15 bp, Homo sapiens
aggaaaatatgcttg

SEQ ID NO: 1609305 - DNA, 15 bp, Homo sapiens
aaggaaaatatgctt

SEQ ID NO: 1609306 - DNA, 15 bp, Homo sapiens
aaaggaaaatatgct

SEQ ID NO: 1609307 - DNA, 15 bp, Homo sapiens
taaaggaaaatatgc

SEQ ID NO: 1609308 - DNA, 15 bp, Homo sapiens
ataaaggaaaatatg

SEQ ID NO: 1609309 - DNA, 15 bp, Homo sapiens
cataaaggaaaatat

SEQ ID NO: 1609310 - DNA, 15 bp, Homo sapiens
acataaaggaaaata

SEQ ID NO: 1609311 - DNA, 15 bp, Homo sapiens
gacataaaggaaaat

SEQ ID NO: 1609312 - DNA, 15 bp, Homo sapiens
ggacataaaggaaaa

SEQ ID NO: 1609313 - DNA, 15 bp, Homo sapiens
aggacataaaggaaa

SEQ ID NO: 1609314 - DNA, 15 bp, Homo sapiens
aaggacataaaggaa

SEQ ID NO: 1609315 - DNA, 15 bp, Homo sapiens
aaaggacataaagga

SEQ ID NO: 1609316 - DNA, 15 bp, Homo sapiens
caaaggacataaagg

SEQ ID NO: 1609317 - DNA, 15 bp, Homo sapiens
tcaaaggacataaag

SEQ ID NO: 1609318 - DNA, 15 bp, Homo sapiens
ctcaaaggacataaa

SEQ ID NO: 1609319 - DNA, 15 bp, Homo sapiens
gctcaaaggacataa

SEQ ID NO: 1609320 - DNA, 15 bp, Homo sapiens
tgctcaaaggacata

SEQ ID NO: 1609321 - DNA, 15 bp, Homo sapiens
atgctcaaaggacat

SEQ ID NO: 1609322 - DNA, 15 bp, Homo sapiens
tatgctcaaaggaca

SEQ ID NO: 1609323 - DNA, 15 bp, Homo sapiens
ctatgctcaaaggac

SEQ ID NO: 1609324 - DNA, 15 bp, Homo sapiens
actatgctcaaagga

SEQ ID NO: 1609325 - DNA, 15 bp, Homo sapiens
aactatgctcaaagg

SEQ ID NO: 1609326 - DNA, 15 bp, Homo sapiens
taactatgctcaaag

SEQ ID NO: 1609327 - DNA, 15 bp, Homo sapiens
ataactatgctcaaa

SEQ ID NO: 1609328 - DNA, 15 bp, Homo sapiens
tataactatgctcaa

SEQ ID NO: 1609329 - DNA, 15 bp, Homo sapiens
ttataactatgctca

SEQ ID NO: 1609330 - DNA, 15 bp, Homo sapiens
attataactatgctc

SEQ ID NO: 1609331 - DNA, 15 bp, Homo sapiens
cattataactatgct

SEQ ID NO: 1609332 - DNA, 15 bp, Homo sapiens
gcattataactatgc

SEQ ID NO: 1609333 - DNA, 15 bp, Homo sapiens
tgcattataactatg

SEQ ID NO: 1609334 - DNA, 15 bp, Homo sapiens
ctgcattataactat

SEQ ID NO: 1609335 - DNA, 15 bp, Homo sapiens
gctgcattataacta

SEQ ID NO: 1609336 - DNA, 15 bp, Homo sapiens
agctgcattataact

SEQ ID NO: 1609337 - DNA, 15 bp, Homo sapiens
aagctgcattataac

SEQ ID NO: 1609338 - DNA, 15 bp, Homo sapiens
aaagctgcattataa

SEQ ID NO: 1609339 - DNA, 15 bp, Homo sapiens
taaagctgcattata

SEQ ID NO: 1609340 - DNA, 15 bp, Homo sapiens
ttaaagctgcattat

SEQ ID NO: 1609341 - DNA, 15 bp, Homo sapiens
tttaaagctgcatta

SEQ ID NO: 1609342 - DNA, 15 bp, Homo sapiens
ttttaaagctgcatt

SEQ ID NO: 1609343 - DNA, 15 bp, Homo sapiens
attttaaagctgcat

SEQ ID NO: 1609344 - DNA, 15 bp, Homo sapiens
aattttaaagctgca

SEQ ID NO: 1609345 - DNA, 15 bp, Homo sapiens
gaattttaaagctgc

SEQ ID NO: 1609346 - DNA, 15 bp, Homo sapiens
aagaattttaaagct

SEQ ID NO: 1609347 - DNA, 15 bp, Homo sapiens
caagaattttaaagc

SEQ ID NO: 1609348 - DNA, 15 bp, Homo sapiens
acaagaattttaaag

SEQ ID NO: 1609349 - DNA, 15 bp, Homo sapiens
aacaagaattttaaa

SEQ ID NO: 1609350 - DNA, 15 bp, Homo sapiens
aaacaagaattttaa

SEQ ID NO: 1609351 - DNA, 15 bp, Homo sapiens
caaacaagaatttta

SEQ ID NO: 1609352 - DNA, 15 bp, Homo sapiens
gcaaacaagaatttt

SEQ ID NO: 1609353 - DNA, 15 bp, Homo sapiens
agcaaacaagaattt

SEQ ID NO: 1609354 - DNA, 15 bp, Homo sapiens
tagcaaacaagaatt

SEQ ID NO: 1609355 - DNA, 15 bp, Homo sapiens
tttcactaataagga

SEQ ID NO: 1609356 - DNA, 15 bp, Homo sapiens
gtttcactaataagg

SEQ ID NO: 1609357 - DNA, 15 bp, Homo sapiens
agtttcactaataag

SEQ ID NO: 1609358 - DNA, 15 bp, Homo sapiens
tagtttcactaataa

SEQ ID NO: 1609359 - DNA, 15 bp, Homo sapiens
ttagtttcactaata

SEQ ID NO: 1609360 - DNA, 15 bp, Homo sapiens
attagtttcactaat

SEQ ID NO: 1609361 - DNA, 15 bp, Homo sapiens
tattagtttcactaa

SEQ ID NO: 1609362 - DNA, 15 bp, Homo sapiens
ttattagtttcacta

SEQ ID NO: 1609363 - DNA, 15 bp, Homo sapiens
attattagtttcact

SEQ ID NO: 1609364 - DNA, 15 bp, Homo sapiens
aattattagtttcac

SEQ ID NO: 1609365 - DNA, 15 bp, Homo sapiens
taattattagtttca

SEQ ID NO: 1609366 - DNA, 15 bp, Homo sapiens
gtaattattagtttc

SEQ ID NO: 1609367 - DNA, 15 bp, Homo sapiens
agtaattattagttt

SEQ ID NO: 1609368 - DNA, 15 bp, Homo sapiens
tagtaattattagtt

SEQ ID NO: 1609369 - DNA, 15 bp, Homo sapiens
atagtaattattagt

SEQ ID NO: 1609370 - DNA, 15 bp, Homo sapiens
aatagtaattattag

SEQ ID NO: 1609371 - DNA, 15 bp, Homo sapiens
taatagtaattatta

SEQ ID NO: 1609372 - DNA, 15 bp, Homo sapiens
ttaatagtaattatt

SEQ ID NO: 1609373 - DNA, 15 bp, Homo sapiens
attaatagtaattat

SEQ ID NO: 1609374 - DNA, 15 bp, Homo sapiens
tattaatagtaatta

SEQ ID NO: 1609375 - DNA, 15 bp, Homo sapiens
gtattaatagtaatt

SEQ ID NO: 1609376 - DNA, 15 bp, Homo sapiens
ggtattaatagtaat

SEQ ID NO: 1609377 - DNA, 15 bp, Homo sapiens
aggtattaatagtaa

SEQ ID NO: 1609378 - DNA, 15 bp, Homo sapiens
caggtattaatagta

SEQ ID NO: 1609379 - DNA, 15 bp, Homo sapiens
ccaggtattaatagt

SEQ ID NO: 1609380 - DNA, 15 bp, Homo sapiens
gccaggtattaatag

SEQ ID NO: 1609381 - DNA, 15 bp, Homo sapiens
ggccaggtattaata

SEQ ID NO: 1609382 - DNA, 15 bp, Homo sapiens
gggccaggtattaat

SEQ ID NO: 1609383 - DNA, 15 bp, Homo sapiens
ggggccaggtattaa

SEQ ID NO: 1609384 - DNA, 15 bp, Homo sapiens
aggggccaggtatta

SEQ ID NO: 1609385 - DNA, 15 bp, Homo sapiens
gaggggccaggtatt

SEQ ID NO: 1609386 - DNA, 15 bp, Homo sapiens
ggaggggccaggtat

SEQ ID NO: 1609387 - DNA, 15 bp, Homo sapiens
gggaggggccaggta

SEQ ID NO: 1609388 - DNA, 15 bp, Homo sapiens
agggaggggccaggt

SEQ ID NO: 1609389 - DNA, 15 bp, Homo sapiens
cagggaggggccagg

SEQ ID NO: 1609390 - DNA, 15 bp, Homo sapiens
ccagggaggggccag

SEQ ID NO: 1609391 - DNA, 15 bp, Homo sapiens
gccagggaggggcca

SEQ ID NO: 1609392 - DNA, 15 bp, Homo sapiens
ggccagggaggggcc

SEQ ID NO: 1609393 - DNA, 15 bp, Homo sapiens
gggccagggaggggc

SEQ ID NO: 1609394 - DNA, 15 bp, Homo sapiens
agggccagggagggg

SEQ ID NO: 1609395 - DNA, 15 bp, Homo sapiens
aagggccagggaggg

SEQ ID NO: 1609396 - DNA, 15 bp, Homo sapiens
aaagggccagggagg

SEQ ID NO: 1609397 - DNA, 15 bp, Homo sapiens
gaaagggccagggag

SEQ ID NO: 1609398 - DNA, 15 bp, Homo sapiens
tgaaagggccaggga

SEQ ID NO: 1609399 - DNA, 15 bp, Homo sapiens
atgaaagggccaggg

SEQ ID NO: 1609400 - DNA, 15 bp, Homo sapiens
gatgaaagggccagg

SEQ ID NO: 1609401 - DNA, 15 bp, Homo sapiens
ggatgaaagggccag

SEQ ID NO: 1609402 - DNA, 15 bp, Homo sapiens
tggatgaaagggcca

SEQ ID NO: 1609403 - DNA, 15 bp, Homo sapiens
ctggatgaaagggcc

SEQ ID NO: 1609404 - DNA, 15 bp, Homo sapiens
cctggatgaaagggc

SEQ ID NO: 1609405 - DNA, 15 bp, Homo sapiens
acctggatgaaaggg

SEQ ID NO: 1609406 - DNA, 15 bp, Homo sapiens
cacctggatgaaagg

SEQ ID NO: 1609407 - DNA, 15 bp, Homo sapiens
ccacctggatgaaag

SEQ ID NO: 1609408 - DNA, 15 bp, Homo sapiens
cccacctggatgaaa

SEQ ID NO: 1609409 - DNA, 15 bp, Homo sapiens
acccacctggatgaa

SEQ ID NO: 1609410 - DNA, 15 bp, Homo sapiens
cacccacctggatga

SEQ ID NO: 1609411 - DNA, 15 bp, Homo sapiens
ccacccacctggatg

SEQ ID NO: 1609412 - DNA, 15 bp, Homo sapiens
cccacccacctggat

SEQ ID NO: 1609413 - DNA, 15 bp, Homo sapiens
ccccacccacctgga

SEQ ID NO: 1609414 - DNA, 15 bp, Homo sapiens
tccccacccacctgg

SEQ ID NO: 1609415 - DNA, 15 bp, Homo sapiens
ctccccacccacctg

SEQ ID NO: 1609416 - DNA, 15 bp, Homo sapiens
cctccccacccacct

SEQ ID NO: 1609417 - DNA, 15 bp, Homo sapiens
acctccccacccacc

SEQ ID NO: 1609418 - DNA, 15 bp, Homo sapiens
aacctccccacccac

SEQ ID NO: 1609419 - DNA, 15 bp, Homo sapiens
aaacctccccaccca

SEQ ID NO: 1609420 - DNA, 15 bp, Homo sapiens
aaaacctccccaccc

SEQ ID NO: 1609421 - DNA, 15 bp, Homo sapiens
caaaacctccccacc

SEQ ID NO: 1609422 - DNA, 15 bp, Homo sapiens
tcaaaacctccccac

SEQ ID NO: 1609423 - DNA, 15 bp, Homo sapiens
ttcaaaacctcccca

SEQ ID NO: 1609424 - DNA, 15 bp, Homo sapiens
cttcaaaacctcccc

SEQ ID NO: 1609425 - DNA, 15 bp, Homo sapiens
tcttcaaaacctccc

SEQ ID NO: 1609426 - DNA, 15 bp, Homo sapiens
atcttcaaaacctcc

SEQ ID NO: 1609427 - DNA, 15 bp, Homo sapiens
catcttcaaaacctc

SEQ ID NO: 1609428 - DNA, 15 bp, Homo sapiens
tcatcttcaaaacct

SEQ ID NO: 1609429 - DNA, 15 bp, Homo sapiens
ttcatcttcaaaacc

SEQ ID NO: 1609430 - DNA, 15 bp, Homo sapiens
tttcatcttcaaaac

SEQ ID NO: 1609431 - DNA, 15 bp, Homo sapiens
ctttcatcttcaaaa

SEQ ID NO: 1609432 - DNA, 15 bp, Homo sapiens
actttcatcttcaaa

SEQ ID NO: 1609433 - DNA, 15 bp, Homo sapiens
gactttcatcttcaa

SEQ ID NO: 1609434 - DNA, 15 bp, Homo sapiens
agactttcatcttca

SEQ ID NO: 1609435 - DNA, 15 bp, Homo sapiens
cagactttcatcttc

SEQ ID NO: 1609436 - DNA, 15 bp, Homo sapiens
ccagactttcatctt

SEQ ID NO: 1609437 - DNA, 15 bp, Homo sapiens
cccagactttcatct

SEQ ID NO: 1609438 - DNA, 15 bp, Homo sapiens
ccccagactttcatc

SEQ ID NO: 1609439 - DNA, 15 bp, Homo sapiens
cccccagactttcat

SEQ ID NO: 1609440 - DNA, 15 bp, Homo sapiens
ccccccagactttca

SEQ ID NO: 1609441 - DNA, 15 bp, Homo sapiens
gccccccagactttc

SEQ ID NO: 1609442 - DNA, 15 bp, Homo sapiens
ggccccccagacttt

SEQ ID NO: 1609443 - DNA, 15 bp, Homo sapiens
aggccccccagactt

SEQ ID NO: 1609444 - DNA, 15 bp, Homo sapiens
gaggccccccagact

SEQ ID NO: 1609445 - DNA, 15 bp, Homo sapiens
agaggccccccagac

SEQ ID NO: 1609446 - DNA, 15 bp, Homo sapiens
gagaggccccccaga

SEQ ID NO: 1609447 - DNA, 15 bp, Homo sapiens
agagaggccccccag

SEQ ID NO: 1609448 - DNA, 15 bp, Homo sapiens
tagagaggcccccca

SEQ ID NO: 1609449 - DNA, 15 bp, Homo sapiens
ctagagaggcccccc

SEQ ID NO: 1609450 - DNA, 15 bp, Homo sapiens
tctagagaggccccc

SEQ ID NO: 1609451 - DNA, 15 bp, Homo sapiens
atctagagaggcccc

SEQ ID NO: 1609452 - DNA, 15 bp, Homo sapiens
catctagagaggccc

SEQ ID NO: 1609453 - DNA, 15 bp, Homo sapiens
gcatctagagaggcc

SEQ ID NO: 1609454 - DNA, 15 bp, Homo sapiens
tgcatctagagaggc

SEQ ID NO: 1609455 - DNA, 15 bp, Homo sapiens
ctgcatctagagagg

SEQ ID NO: 1609456 - DNA, 15 bp, Homo sapiens
cctgcatctagagag

SEQ ID NO: 1609457 - DNA, 15 bp, Homo sapiens
acctgcatctagaga

SEQ ID NO: 1609458 - DNA, 15 bp, Homo sapiens
aacctgcatctagag

SEQ ID NO: 1609459 - DNA, 15 bp, Homo sapiens
aaacctgcatctaga

SEQ ID NO: 1609460 - DNA, 15 bp, Homo sapiens
gaaacctgcatctag

SEQ ID NO: 1609461 - DNA, 15 bp, Homo sapiens
cgaaacctgcatcta

SEQ ID NO: 1609462 - DNA, 15 bp, Homo sapiens
ccgaaacctgcatct

SEQ ID NO: 1609463 - DNA, 15 bp, Homo sapiens
cccgaaacctgcatc

SEQ ID NO: 1609464 - DNA, 15 bp, Homo sapiens
ccccgaaacctgcat

SEQ ID NO: 1609465 - DNA, 15 bp, Homo sapiens
tccccgaaacctgca

SEQ ID NO: 1609466 - DNA, 15 bp, Homo sapiens
atccccgaaacctgc

SEQ ID NO: 1609467 - DNA, 15 bp, Homo sapiens
aatccccgaaacctg

SEQ ID NO: 1609468 - DNA, 15 bp, Homo sapiens
gaatccccgaaacct

SEQ ID NO: 1609469 - DNA, 15 bp, Homo sapiens
tgaatccccgaaacc

SEQ ID NO: 1609470 - DNA, 15 bp, Homo sapiens
gtgaatccccgaaac

SEQ ID NO: 1609471 - DNA, 15 bp, Homo sapiens
tgtgaatccccgaaa

SEQ ID NO: 1609472 - DNA, 15 bp, Homo sapiens
ttgtgaatccccgaa

SEQ ID NO: 1609473 - DNA, 15 bp, Homo sapiens
gttgtgaatccccga

SEQ ID NO: 1609474 - DNA, 15 bp, Homo sapiens
agttgtgaatccccg

SEQ ID NO: 1609475 - DNA, 15 bp, Homo sapiens
tagttgtgaatcccc

SEQ ID NO: 1609476 - DNA, 15 bp, Homo sapiens
gtagttgtgaatccc

SEQ ID NO: 1609477 - DNA, 15 bp, Homo sapiens
agtagttgtgaatcc

SEQ ID NO: 1609478 - DNA, 15 bp, Homo sapiens
tagtagttgtgaatc

SEQ ID NO: 1609479 - DNA, 15 bp, Homo sapiens
ttagtagttgtgaat

SEQ ID NO: 1609480 - DNA, 15 bp, Homo sapiens
attagtagttgtgaa

SEQ ID NO: 1609481 - DNA, 15 bp, Homo sapiens
aattagtagttgtga

SEQ ID NO: 1609482 - DNA, 15 bp, Homo sapiens
taattagtagttgtg

SEQ ID NO: 1609483 - DNA, 15 bp, Homo sapiens
ttaattagtagttgt

SEQ ID NO: 1609484 - DNA, 15 bp, Homo sapiens
cttaattagtagttg

SEQ ID NO: 1609485 - DNA, 15 bp, Homo sapiens
gcttaattagtagtt

SEQ ID NO: 1609486 - DNA, 15 bp, Homo sapiens
agcttaattagtagt

SEQ ID NO: 1609487 - DNA, 15 bp, Homo sapiens
aagcttaattagtag

SEQ ID NO: 1609488 - DNA, 15 bp, Homo sapiens
caagcttaattagta

SEQ ID NO: 1609489 - DNA, 15 bp, Homo sapiens
ccaagcttaattagt

SEQ ID NO: 1609490 - DNA, 15 bp, Homo sapiens
gccaagcttaattag

SEQ ID NO: 1609491 - DNA, 15 bp, Homo sapiens
tgccaagcttaatta

SEQ ID NO: 1609492 - DNA, 15 bp, Homo sapiens
ctgccaagcttaatt

SEQ ID NO: 1609493 - DNA, 15 bp, Homo sapiens
gctgccaagcttaat

SEQ ID NO: 1609494 - DNA, 15 bp, Homo sapiens
ggctgccaagcttaa

SEQ ID NO: 1609495 - DNA, 15 bp, Homo sapiens
gggctgccaagctta

SEQ ID NO: 1609496 - DNA, 15 bp, Homo sapiens
ggggctgccaagctt

SEQ ID NO: 1609497 - DNA, 15 bp, Homo sapiens
aggggctgccaagct

SEQ ID NO: 1609498 - DNA, 15 bp, Homo sapiens
gaggggctgccaagc

SEQ ID NO: 1609499 - DNA, 15 bp, Homo sapiens
agaggggctgccaag

SEQ ID NO: 1609500 - DNA, 15 bp, Homo sapiens
tagaggggctgccaa

SEQ ID NO: 1609501 - DNA, 15 bp, Homo sapiens
ctagaggggctgcca

SEQ ID NO: 1609502 - DNA, 15 bp, Homo sapiens
actagaggggctgcc

SEQ ID NO: 1609503 - DNA, 15 bp, Homo sapiens
aactagaggggctgc

SEQ ID NO: 1609504 - DNA, 15 bp, Homo sapiens
gaactagaggggctg

SEQ ID NO: 1609505 - DNA, 15 bp, Homo sapiens
ggaactagaggggct

SEQ ID NO: 1609506 - DNA, 15 bp, Homo sapiens
gggaactagaggggc

SEQ ID NO: 1609507 - DNA, 15 bp, Homo sapiens
agggaactagagggg

SEQ ID NO: 1609508 - DNA, 15 bp, Homo sapiens
gagggaactagaggg

SEQ ID NO: 1609509 - DNA, 15 bp, Homo sapiens
ggagggaactagagg

SEQ ID NO: 1609510 - DNA, 15 bp, Homo sapiens
gggagggaactagag

SEQ ID NO: 1609511 - DNA, 15 bp, Homo sapiens
ggggagggaactaga

SEQ ID NO: 1609512 - DNA, 15 bp, Homo sapiens
gggggagggaactag

SEQ ID NO: 1609513 - DNA, 15 bp, Homo sapiens
tgggggagggaacta

SEQ ID NO: 1609514 - DNA, 15 bp, Homo sapiens
gtgggggagggaact

SEQ ID NO: 1609515 - DNA, 15 bp, Homo sapiens
ggtgggggagggaac

SEQ ID NO: 1609516 - DNA, 15 bp, Homo sapiens
gggtgggggagggaa

SEQ ID NO: 1609517 - DNA, 15 bp, Homo sapiens
ggggtgggggaggga

SEQ ID NO: 1609518 - DNA, 15 bp, Homo sapiens
gggggtgggggaggg

SEQ ID NO: 1609519 - DNA, 15 bp, Homo sapiens
cgggggtgggggagg

SEQ ID NO: 1609520 - DNA, 15 bp, Homo sapiens
ccgggggtgggggag

SEQ ID NO: 1609521 - DNA, 15 bp, Homo sapiens
cccgggggtggggga

SEQ ID NO: 1609522 - DNA, 15 bp, Homo sapiens
ccccgggggtggggg

SEQ ID NO: 1609523 - DNA, 15 bp, Homo sapiens
tccccgggggtgggg

SEQ ID NO: 1609524 - DNA, 15 bp, Homo sapiens
atccccgggggtggg

SEQ ID NO: 1609525 - DNA, 15 bp, Homo sapiens
catccccgggggtgg

SEQ ID NO: 1609526 - DNA, 15 bp, Homo sapiens
gcatccccgggggtg

SEQ ID NO: 1609527 - DNA, 15 bp, Homo sapiens
agcatccccgggggt

SEQ ID NO: 1609528 - DNA, 15 bp, Homo sapiens
cagcatccccggggg

SEQ ID NO: 1609529 - DNA, 15 bp, Homo sapiens
gcagcatccccgggg

SEQ ID NO: 1609530 - DNA, 15 bp, Homo sapiens
tgcagcatccccggg

SEQ ID NO: 1609531 - DNA, 15 bp, Homo sapiens
gtgcagcatccccgg

SEQ ID NO: 1609532 - DNA, 15 bp, Homo sapiens
ggtgcagcatccccg

SEQ ID NO: 1609533 - DNA, 15 bp, Homo sapiens
tggtgcagcatcccc

SEQ ID NO: 1609534 - DNA, 15 bp, Homo sapiens
ctggtgcagcatccc

SEQ ID NO: 1609535 - DNA, 15 bp, Homo sapiens
gctggtgcagcatcc

SEQ ID NO: 1609536 - DNA, 15 bp, Homo sapiens
tgctggtgcagcatc

SEQ ID NO: 1609537 - DNA, 15 bp, Homo sapiens
ctgctggtgcagcat

SEQ ID NO: 1609538 - DNA, 15 bp, Homo sapiens
tctgctggtgcagca

SEQ ID NO: 1609539 - DNA, 15 bp, Homo sapiens
gtctgctggtgcagc

SEQ ID NO: 1609540 - DNA, 15 bp, Homo sapiens
agtctgctggtgcag

SEQ ID NO: 1609541 - DNA, 15 bp, Homo sapiens
gagtctgctggtgca

SEQ ID NO: 1609542 - DNA, 15 bp, Homo sapiens
tgagtctgctggtgc

SEQ ID NO: 1609543 - DNA, 15 bp, Homo sapiens
ttgagtctgctggtg

SEQ ID NO: 1609544 - DNA, 15 bp, Homo sapiens
attgagtctgctggt

SEQ ID NO: 1609545 - DNA, 15 bp, Homo sapiens
cattgagtctgctgg

SEQ ID NO: 1609546 - DNA, 15 bp, Homo sapiens
gcattgagtctgctg

SEQ ID NO: 1609547 - DNA, 15 bp, Homo sapiens
ggcattgagtctgct

SEQ ID NO: 1609548 - DNA, 15 bp, Homo sapiens
aggcattgagtctgc

SEQ ID NO: 1609549 - DNA, 15 bp, Homo sapiens
aaggcattgagtctg

SEQ ID NO: 1609550 - DNA, 15 bp, Homo sapiens
aaaggcattgagtct

SEQ ID NO: 1609551 - DNA, 15 bp, Homo sapiens
gaaaggcattgagtc

SEQ ID NO: 1609552 - DNA, 15 bp, Homo sapiens
ggaaaggcattgagt

SEQ ID NO: 1609553 - DNA, 15 bp, Homo sapiens
tggaaaggcattgag

SEQ ID NO: 1609554 - DNA, 15 bp, Homo sapiens
ctggaaaggcattga

SEQ ID NO: 1609555 - DNA, 15 bp, Homo sapiens
cctggaaaggcattg

SEQ ID NO: 1609556 - DNA, 15 bp, Homo sapiens
acctggaaaggcatt

SEQ ID NO: 1609557 - DNA, 15 bp, Homo sapiens
cacctggaaaggcat

SEQ ID NO: 1609558 - DNA, 15 bp, Homo sapiens
ccacctggaaaggca

SEQ ID NO: 1609559 - DNA, 15 bp, Homo sapiens
cccacctggaaaggc

SEQ ID NO: 1609560 - DNA, 15 bp, Homo sapiens
tgtcccacctggaaa

SEQ ID NO: 1609561 - DNA, 15 bp, Homo sapiens
gtgtcccacctggaa

SEQ ID NO: 1609562 - DNA, 15 bp, Homo sapiens
tgtgtcccacctgga

SEQ ID NO: 1609563 - DNA, 15 bp, Homo sapiens
ctgtgtcccacctgg

SEQ ID NO: 1609564 - DNA, 15 bp, Homo sapiens
gctgtgtcccacctg

SEQ ID NO: 1609565 - DNA, 15 bp, Homo sapiens
tgctgtgtcccacct

SEQ ID NO: 1609566 - DNA, 15 bp, Homo sapiens
ctgctgtgtcccacc

SEQ ID NO: 1609567 - DNA, 15 bp, Homo sapiens
cctgctgtgtcccac

SEQ ID NO: 1609568 - DNA, 15 bp, Homo sapiens
ccctgctgtgtccca

SEQ ID NO: 1609569 - DNA, 15 bp, Homo sapiens
tccctgctgtgtccc

SEQ ID NO: 1609570 - DNA, 15 bp, Homo sapiens
ctccctgctgtgtcc

SEQ ID NO: 1609571 - DNA, 15 bp, Homo sapiens
gctccctgctgtgtc

SEQ ID NO: 1609572 - DNA, 15 bp, Homo sapiens
agctccctgctgtgt

SEQ ID NO: 1609573 - DNA, 15 bp, Homo sapiens
cagctccctgctgtg

SEQ ID NO: 1609574 - DNA, 15 bp, Homo sapiens
gcagctccctgctgt

SEQ ID NO: 1609575 - DNA, 15 bp, Homo sapiens
agcagctccctgctg

SEQ ID NO: 1609576 - DNA, 15 bp, Homo sapiens
gagcagctccctgct

SEQ ID NO: 1609577 - DNA, 15 bp, Homo sapiens
ggagcagctccctgc

SEQ ID NO: 1609578 - DNA, 15 bp, Homo sapiens
gggagcagctccctg

SEQ ID NO: 1609579 - DNA, 15 bp, Homo sapiens
agggagcagctccct

SEQ ID NO: 1609580 - DNA, 15 bp, Homo sapiens
cagggagcagctccc

SEQ ID NO: 1609581 - DNA, 15 bp, Homo sapiens
ccagggagcagctcc

SEQ ID NO: 1609582 - DNA, 15 bp, Homo sapiens
cccagggagcagctc

SEQ ID NO: 1609583 - DNA, 15 bp, Homo sapiens
gcccagggagcagct

SEQ ID NO: 1609584 - DNA, 15 bp, Homo sapiens
agcccagggagcagc

SEQ ID NO: 1609585 - DNA, 15 bp, Homo sapiens
cagcccagggagcag

SEQ ID NO: 1609586 - DNA, 15 bp, Homo sapiens
ccagcccagggagca

SEQ ID NO: 1609587 - DNA, 15 bp, Homo sapiens
cccagcccagggagc

SEQ ID NO: 1609588 - DNA, 15 bp, Homo sapiens
gcccagcccagggag

SEQ ID NO: 1609589 - DNA, 15 bp, Homo sapiens
ggcccagcccaggga

SEQ ID NO: 1609590 - DNA, 15 bp, Homo sapiens
aggcccagcccaggg

SEQ ID NO: 1609591 - DNA, 15 bp, Homo sapiens
gaggcccagcccagg

SEQ ID NO: 1609592 - DNA, 15 bp, Homo sapiens
ggaggcccagcccag

SEQ ID NO: 1609593 - DNA, 15 bp, Homo sapiens
aggaggcccagccca

SEQ ID NO: 1609594 - DNA, 15 bp, Homo sapiens
gaggaggcccagccc

SEQ ID NO: 1609595 - DNA, 15 bp, Homo sapiens
ggaggaggcccagcc

SEQ ID NO: 1609596 - DNA, 15 bp, Homo sapiens
aggaggaggcccagc

SEQ ID NO: 1609597 - DNA, 15 bp, Homo sapiens
caggaggaggcccag

SEQ ID NO: 1609598 - DNA, 15 bp, Homo sapiens
tcaggaggaggccca

SEQ ID NO: 1609599 - DNA, 15 bp, Homo sapiens
tctcaggaggaggcc

SEQ ID NO: 1609600 - DNA, 15 bp, Homo sapiens
ctctcaggaggaggc

SEQ ID NO: 1609601 - DNA, 15 bp, Homo sapiens
cctctcaggaggagg

SEQ ID NO: 1609602 - DNA, 15 bp, Homo sapiens
acctctcaggaggag

SEQ ID NO: 1609603 - DNA, 15 bp, Homo sapiens
cacctctcaggagga

SEQ ID NO: 1609604 - DNA, 15 bp, Homo sapiens
acacctctcaggagg

SEQ ID NO: 1609605 - DNA, 15 bp, Homo sapiens
aacacctctcaggag

SEQ ID NO: 1609606 - DNA, 15 bp, Homo sapiens
caacacctctcagga

SEQ ID NO: 1609607 - DNA, 15 bp, Homo sapiens
tcaacacctctcagg

SEQ ID NO: 1609608 - DNA, 15 bp, Homo sapiens
ctcaacacctctcag

SEQ ID NO: 1609609 - DNA, 15 bp, Homo sapiens
actcaacacctctca

SEQ ID NO: 1609610 - DNA, 15 bp, Homo sapiens
tactcaacacctctc

SEQ ID NO: 1609611 - DNA, 15 bp, Homo sapiens
ctactcaacacctct

SEQ ID NO: 1609612 - DNA, 15 bp, Homo sapiens
gctactcaacacctc

SEQ ID NO: 1609613 - DNA, 15 bp, Homo sapiens
agctactcaacacct

SEQ ID NO: 1609614 - DNA, 15 bp, Homo sapiens
cagctactcaacacc

SEQ ID NO: 1609615 - DNA, 15 bp, Homo sapiens
gcagctactcaacac

SEQ ID NO: 1609616 - DNA, 15 bp, Homo sapiens
tgcagctactcaaca

SEQ ID NO: 1609617 - DNA, 15 bp, Homo sapiens
ctgcagctactcaac

SEQ ID NO: 1609618 - DNA, 15 bp, Homo sapiens
actgcagctactcaa

SEQ ID NO: 1609619 - DNA, 15 bp, Homo sapiens
aactgcagctactca

SEQ ID NO: 1609620 - DNA, 15 bp, Homo sapiens
caactgcagctactc

SEQ ID NO: 1609621 - DNA, 15 bp, Homo sapiens
acaactgcagctact

SEQ ID NO: 1609622 - DNA, 15 bp, Homo sapiens
cacaactgcagctac

SEQ ID NO: 1609623 - DNA, 15 bp, Homo sapiens
ccacaactgcagcta

SEQ ID NO: 1609624 - DNA, 15 bp, Homo sapiens
cccacaactgcagct

SEQ ID NO: 1609625 - DNA, 15 bp, Homo sapiens
ccccacaactgcagc

SEQ ID NO: 1609626 - DNA, 15 bp, Homo sapiens
cccccacaactgcag

SEQ ID NO: 1609627 - DNA, 15 bp, Homo sapiens
tcccccacaactgca

SEQ ID NO: 1609628 - DNA, 15 bp, Homo sapiens
atcccccacaactgc

SEQ ID NO: 1609629 - DNA, 15 bp, Homo sapiens
catcccccacaactg

SEQ ID NO: 1609630 - DNA, 15 bp, Homo sapiens
ccatcccccacaact

SEQ ID NO: 1609631 - DNA, 15 bp, Homo sapiens
cccatcccccacaac

SEQ ID NO: 1609632 - DNA, 15 bp, Homo sapiens
ccccatcccccacaa

SEQ ID NO: 1609633 - DNA, 15 bp, Homo sapiens
gccccatcccccaca

SEQ ID NO: 1609634 - DNA, 15 bp, Homo sapiens
agccccatcccccac

SEQ ID NO: 1609635 - DNA, 15 bp, Homo sapiens
cagccccatccccca

SEQ ID NO: 1609636 - DNA, 15 bp, Homo sapiens
acagccccatccccc

SEQ ID NO: 1609637 - DNA, 15 bp, Homo sapiens
gacagccccatcccc

SEQ ID NO: 1609638 - DNA, 15 bp, Homo sapiens
tgacagccccatccc

SEQ ID NO: 1609639 - DNA, 15 bp, Homo sapiens
ctgacagccccatcc

SEQ ID NO: 1609640 - DNA, 15 bp, Homo sapiens
cctgacagccccatc

SEQ ID NO: 1609641 - DNA, 15 bp, Homo sapiens
gcctgacagccccat

SEQ ID NO: 1609642 - DNA, 15 bp, Homo sapiens
tgcctgacagcccca

SEQ ID NO: 1609643 - DNA, 15 bp, Homo sapiens
ttgcctgacagcccc

SEQ ID NO: 1609644 - DNA, 15 bp, Homo sapiens
cttgcctgacagccc

SEQ ID NO: 1609645 - DNA, 15 bp, Homo sapiens
tcttgcctgacagcc

SEQ ID NO: 1609646 - DNA, 15 bp, Homo sapiens
gtcttgcctgacagc

SEQ ID NO: 1609647 - DNA, 15 bp, Homo sapiens
tgtcttgcctgacag

SEQ ID NO: 1609648 - DNA, 15 bp, Homo sapiens
ctgtcttgcctgaca

SEQ ID NO: 1609649 - DNA, 15 bp, Homo sapiens
actgtcttgcctgac

SEQ ID NO: 1609650 - DNA, 15 bp, Homo sapiens
gactgtcttgcctga

SEQ ID NO: 1609651 - DNA, 15 bp, Homo sapiens
tgactgtcttgcctg

SEQ ID NO: 1609652 - DNA, 15 bp, Homo sapiens
atgactgtcttgcct

SEQ ID NO: 1609653 - DNA, 15 bp, Homo sapiens
catgactgtcttgcc

SEQ ID NO: 1609654 - DNA, 15 bp, Homo sapiens
tcatgactgtcttgc

SEQ ID NO: 1609655 - DNA, 15 bp, Homo sapiens
ctcatgactgtcttg

SEQ ID NO: 1609656 - DNA, 15 bp, Homo sapiens
cctcatgactgtctt

SEQ ID NO: 1609657 - DNA, 15 bp, Homo sapiens
tcctcatgactgtct

SEQ ID NO: 1609658 - DNA, 15 bp, Homo sapiens
ctcctcatgactgtc

SEQ ID NO: 1609659 - DNA, 15 bp, Homo sapiens
cctcctcatgactgt

SEQ ID NO: 1609660 - DNA, 15 bp, Homo sapiens
acctcctcatgactg

SEQ ID NO: 1609661 - DNA, 15 bp, Homo sapiens
cacctcctcatgact

SEQ ID NO: 1609662 - DNA, 15 bp, Homo sapiens
gcacctcctcatgac

SEQ ID NO: 1609663 - DNA, 15 bp, Homo sapiens
ggcacctcctcatga

SEQ ID NO: 1609664 - DNA, 15 bp, Homo sapiens
cggcacctcctcatg

SEQ ID NO: 1609665 - DNA, 15 bp, Homo sapiens
ccggcacctcctcat

SEQ ID NO: 1609666 - DNA, 15 bp, Homo sapiens
tccggcacctcctca

SEQ ID NO: 1609667 - DNA, 15 bp, Homo sapiens
ttccggcacctcctc

SEQ ID NO: 1609668 - DNA, 15 bp, Homo sapiens
tttccggcacctcct

SEQ ID NO: 1609669 - DNA, 15 bp, Homo sapiens
ctttccggcacctcc

SEQ ID NO: 1609670 - DNA, 15 bp, Homo sapiens
tctttccggcacctc

SEQ ID NO: 1609671 - DNA, 15 bp, Homo sapiens
ctctttccggcacct

SEQ ID NO: 1609672 - DNA, 15 bp, Homo sapiens
cctctttccggcacc

SEQ ID NO: 1609673 - DNA, 15 bp, Homo sapiens
tcctctttccggcac

SEQ ID NO: 1609674 - DNA, 15 bp, Homo sapiens
ttcctctttccggca

SEQ ID NO: 1609675 - DNA, 15 bp, Homo sapiens
gttcctctttccggc

SEQ ID NO: 1609676 - DNA, 15 bp, Homo sapiens
ggttcctctttccgg

SEQ ID NO: 1609677 - DNA, 15 bp, Homo sapiens
aggttcctctttccg

SEQ ID NO: 1609678 - DNA, 15 bp, Homo sapiens
gaggttcctctttcc

SEQ ID NO: 1609679 - DNA, 15 bp, Homo sapiens
tgaggttcctctttc

SEQ ID NO: 1609680 - DNA, 15 bp, Homo sapiens
gtgaggttcctcttt

SEQ ID NO: 1609681 - DNA, 15 bp, Homo sapiens
tgtgaggttcctctt

SEQ ID NO: 1609682 - DNA, 15 bp, Homo sapiens
gtgtgaggttcctct

SEQ ID NO: 1609683 - DNA, 15 bp, Homo sapiens
ggtgtgaggttcctc

SEQ ID NO: 1609684 - DNA, 15 bp, Homo sapiens
tggtgtgaggttcct

SEQ ID NO: 1609685 - DNA, 15 bp, Homo sapiens
ctggtgtgaggttcc

SEQ ID NO: 1609686 - DNA, 15 bp, Homo sapiens
cctggtgtgaggttc

SEQ ID NO: 1609687 - DNA, 15 bp, Homo sapiens
acctggtgtgaggtt

SEQ ID NO: 1609688 - DNA, 15 bp, Homo sapiens
cacctggtgtgaggt

SEQ ID NO: 1609689 - DNA, 15 bp, Homo sapiens
ccacctggtgtgagg

SEQ ID NO: 1609690 - DNA, 15 bp, Homo sapiens
gccacctggtgtgag

SEQ ID NO: 1609691 - DNA, 15 bp, Homo sapiens
agccacctggtgtga

SEQ ID NO: 1609692 - DNA, 15 bp, Homo sapiens
cagccacctggtgtg

SEQ ID NO: 1609693 - DNA, 15 bp, Homo sapiens
tcagccacctggtgt

SEQ ID NO: 1609694 - DNA, 15 bp, Homo sapiens
ctcagccacctggtg

SEQ ID NO: 1609695 - DNA, 15 bp, Homo sapiens
tctcagccacctggt

SEQ ID NO: 1609696 - DNA, 15 bp, Homo sapiens
gtctcagccacctgg

SEQ ID NO: 1609697 - DNA, 15 bp, Homo sapiens
agtctcagccacctg

SEQ ID NO: 1609698 - DNA, 15 bp, Homo sapiens
gagtctcagccacct

SEQ ID NO: 1609699 - DNA, 15 bp, Homo sapiens
tgagtctcagccacc

SEQ ID NO: 1609700 - DNA, 15 bp, Homo sapiens
ctgagtctcagccac

SEQ ID NO: 1609701 - DNA, 15 bp, Homo sapiens
cctgagtctcagcca

SEQ ID NO: 1609702 - DNA, 15 bp, Homo sapiens
tcctgagtctcagcc

SEQ ID NO: 1609703 - DNA, 15 bp, Homo sapiens
ctcctgagtctcagc

SEQ ID NO: 1609704 - DNA, 15 bp, Homo sapiens
gctcctgagtctcag

SEQ ID NO: 1609705 - DNA, 15 bp, Homo sapiens
ggctcctgagtctca

SEQ ID NO: 1609706 - DNA, 15 bp, Homo sapiens
gggctcctgagtctc

SEQ ID NO: 1609707 - DNA, 15 bp, Homo sapiens
agggctcctgagtct

SEQ ID NO: 1609708 - DNA, 15 bp, Homo sapiens
cagggctcctgagtc

SEQ ID NO: 1609709 - DNA, 15 bp, Homo sapiens
gcagggctcctgagt

SEQ ID NO: 1609710 - DNA, 15 bp, Homo sapiens
ggcagggctcctgag

SEQ ID NO: 1609711 - DNA, 15 bp, Homo sapiens
gggcagggctcctga

SEQ ID NO: 1609712 - DNA, 15 bp, Homo sapiens
ggggcagggctcctg

SEQ ID NO: 1609713 - DNA, 15 bp, Homo sapiens
gggggcagggctcct

SEQ ID NO: 1609714 - DNA, 15 bp, Homo sapiens
tgggggcagggctcc

SEQ ID NO: 1609715 - DNA, 15 bp, Homo sapiens
ctgggggcagggctc

SEQ ID NO: 1609716 - DNA, 15 bp, Homo sapiens
gctgggggcagggct

SEQ ID NO: 1609717 - DNA, 15 bp, Homo sapiens
agctgggggcagggc

SEQ ID NO: 1609718 - DNA, 15 bp, Homo sapiens
cagctgggggcaggg

SEQ ID NO: 1609719 - DNA, 15 bp, Homo sapiens
tcagctgggggcagg

SEQ ID NO: 1609720 - DNA, 15 bp, Homo sapiens
ttcagctgggggcag

SEQ ID NO: 1609721 - DNA, 15 bp, Homo sapiens
tttcagctgggggca

SEQ ID NO: 1609722 - DNA, 15 bp, Homo sapiens
atttcagctgggggc

SEQ ID NO: 1609723 - DNA, 15 bp, Homo sapiens
aatttcagctggggg

SEQ ID NO: 1609724 - DNA, 15 bp, Homo sapiens
taatttcagctgggg

SEQ ID NO: 1609725 - DNA, 15 bp, Homo sapiens
gtaatttcagctggg

SEQ ID NO: 1609726 - DNA, 15 bp, Homo sapiens
tgtaatttcagctgg

SEQ ID NO: 1609727 - DNA, 15 bp, Homo sapiens
ctgtaatttcagctg

SEQ ID NO: 1609728 - DNA, 15 bp, Homo sapiens
gctgtaatttcagct

SEQ ID NO: 1609729 - DNA, 15 bp, Homo sapiens
ggctgtaatttcagc

SEQ ID NO: 1609730 - DNA, 15 bp, Homo sapiens
gggctgtaatttcag

SEQ ID NO: 1609731 - DNA, 15 bp, Homo sapiens
ggggctgtaatttca

SEQ ID NO: 1609732 - DNA, 15 bp, Homo sapiens
tggggctgtaatttc

SEQ ID NO: 1609733 - DNA, 15 bp, Homo sapiens
atggggctgtaattt

SEQ ID NO: 1609734 - DNA, 15 bp, Homo sapiens
gatggggctgtaatt

SEQ ID NO: 1609735 - DNA, 15 bp, Homo sapiens
ggatggggctgtaat

SEQ ID NO: 1609736 - DNA, 15 bp, Homo sapiens
gggatggggctgtaa

SEQ ID NO: 1609737 - DNA, 15 bp, Homo sapiens
agggatggggctgta

SEQ ID NO: 1609738 - DNA, 15 bp, Homo sapiens
cagggatggggctgt

SEQ ID NO: 1609739 - DNA, 15 bp, Homo sapiens
tcagggatggggctg

SEQ ID NO: 1609740 - DNA, 15 bp, Homo sapiens
ctcagggatggggct

SEQ ID NO: 1609741 - DNA, 15 bp, Homo sapiens
cctcagggatggggc

SEQ ID NO: 1609742 - DNA, 15 bp, Homo sapiens
gcctcagggatgggg

SEQ ID NO: 1609743 - DNA, 15 bp, Homo sapiens
agcctcagggatggg

SEQ ID NO: 1609744 - DNA, 15 bp, Homo sapiens
cagcctcagggatgg

SEQ ID NO: 1609745 - DNA, 15 bp, Homo sapiens
gcagcctcagggatg

SEQ ID NO: 1609746 - DNA, 15 bp, Homo sapiens
ggcagcctcagggat

SEQ ID NO: 1609747 - DNA, 15 bp, Homo sapiens
gggcagcctcaggga

SEQ ID NO: 1609748 - DNA, 15 bp, Homo sapiens
ggggcagcctcaggg

SEQ ID NO: 1609749 - DNA, 15 bp, Homo sapiens
aggggcagcctcagg

SEQ ID NO: 1609750 - DNA, 15 bp, Homo sapiens
gaggggcagcctcag

SEQ ID NO: 1609751 - DNA, 15 bp, Homo sapiens
tgaggggcagcctca

SEQ ID NO: 1609752 - DNA, 15 bp, Homo sapiens
atgaggggcagcctc

SEQ ID NO: 1609753 - DNA, 15 bp, Homo sapiens
gatgaggggcagcct

SEQ ID NO: 1609754 - DNA, 15 bp, Homo sapiens
ggatgaggggcagcc

SEQ ID NO: 1609755 - DNA, 15 bp, Homo sapiens
gggatgaggggcagc

SEQ ID NO: 1609756 - DNA, 15 bp, Homo sapiens
tgggatgaggggcag

SEQ ID NO: 1609757 - DNA, 15 bp, Homo sapiens
gtgggatgaggggca

SEQ ID NO: 1609758 - DNA, 15 bp, Homo sapiens
ggtgggatgaggggc

SEQ ID NO: 1609759 - DNA, 15 bp, Homo sapiens
gggtgggatgagggg

SEQ ID NO: 1609760 - DNA, 15 bp, Homo sapiens
ggggtgggatgaggg

SEQ ID NO: 1609761 - DNA, 15 bp, Homo sapiens
tggggtgggatgagg

SEQ ID NO: 1609762 - DNA, 15 bp, Homo sapiens
ctggggtgggatgag

SEQ ID NO: 1609763 - DNA, 15 bp, Homo sapiens
cctggggtgggatga

SEQ ID NO: 1609764 - DNA, 15 bp, Homo sapiens
ccctggggtgggatg

SEQ ID NO: 1609765 - DNA, 15 bp, Homo sapiens
accctggggtgggat

SEQ ID NO: 1609766 - DNA, 15 bp, Homo sapiens
gaccctggggtggga

SEQ ID NO: 1609767 - DNA, 15 bp, Homo sapiens
agaccctggggtggg

SEQ ID NO: 1609768 - DNA, 15 bp, Homo sapiens
cagaccctggggtgg

SEQ ID NO: 1609769 - DNA, 15 bp, Homo sapiens
acagaccctggggtg

SEQ ID NO: 1609770 - DNA, 15 bp, Homo sapiens
cacagaccctggggt

SEQ ID NO: 1609771 - DNA, 15 bp, Homo sapiens
acacagaccctgggg

SEQ ID NO: 1609772 - DNA, 15 bp, Homo sapiens
cacacagaccctggg

SEQ ID NO: 1609773 - DNA, 15 bp, Homo sapiens
acacacagaccctgg

SEQ ID NO: 1609774 - DNA, 15 bp, Homo sapiens
gacacacagaccctg

SEQ ID NO: 1609775 - DNA, 15 bp, Homo sapiens
agacacacagaccct

SEQ ID NO: 1609776 - DNA, 15 bp, Homo sapiens
gagacacacagaccc

SEQ ID NO: 1609777 - DNA, 15 bp, Homo sapiens
agagacacacagacc

SEQ ID NO: 1609778 - DNA, 15 bp, Homo sapiens
cagagacacacagac

SEQ ID NO: 1609779 - DNA, 15 bp, Homo sapiens
ccagagacacacaga

SEQ ID NO: 1609780 - DNA, 15 bp, Homo sapiens
tccagagacacacag

SEQ ID NO: 1609781 - DNA, 15 bp, Homo sapiens
gtccagagacacaca

SEQ ID NO: 1609782 - DNA, 15 bp, Homo sapiens
ggtccagagacacac

SEQ ID NO: 1609783 - DNA, 15 bp, Homo sapiens
gggtccagagacaca

SEQ ID NO: 1609784 - DNA, 15 bp, Homo sapiens
agggtccagagacac

SEQ ID NO: 1609785 - DNA, 15 bp, Homo sapiens
cagggtccagagaca

SEQ ID NO: 1609786 - DNA, 15 bp, Homo sapiens
gcagggtccagagac

SEQ ID NO: 1609787 - DNA, 15 bp, Homo sapiens
ggcagggtccagaga

SEQ ID NO: 1609788 - DNA, 15 bp, Homo sapiens
tggcagggtccagag

SEQ ID NO: 1609789 - DNA, 15 bp, Homo sapiens
ctggcagggtccaga

SEQ ID NO: 1609790 - DNA, 15 bp, Homo sapiens
tctggcagggtccag

SEQ ID NO: 1609791 - DNA, 15 bp, Homo sapiens
atctggcagggtcca

SEQ ID NO: 1609792 - DNA, 15 bp, Homo sapiens
catctggcagggtcc

SEQ ID NO: 1609793 - DNA, 15 bp, Homo sapiens
ccatctggcagggtc

SEQ ID NO: 1609794 - DNA, 15 bp, Homo sapiens
accatctggcagggt

SEQ ID NO: 1609795 - DNA, 15 bp, Homo sapiens
taccatctggcaggg

SEQ ID NO: 1609796 - DNA, 15 bp, Homo sapiens
ctaccatctggcagg

SEQ ID NO: 1609797 - DNA, 15 bp, Homo sapiens
actaccatctggcag

SEQ ID NO: 1609798 - DNA, 15 bp, Homo sapiens
cactaccatctggca

SEQ ID NO: 1609799 - DNA, 15 bp, Homo sapiens
ccactaccatctggc

SEQ ID NO: 1609800 - DNA, 15 bp, Homo sapiens
cccactaccatctgg

SEQ ID NO: 1609801 - DNA, 15 bp, Homo sapiens
ccccactaccatctg

SEQ ID NO: 1609802 - DNA, 15 bp, Homo sapiens
cccccactaccatct

SEQ ID NO: 1609803 - DNA, 15 bp, Homo sapiens
tcccccactaccatc

SEQ ID NO: 1609804 - DNA, 15 bp, Homo sapiens
ttcccccactaccat

SEQ ID NO: 1609805 - DNA, 15 bp, Homo sapiens
attcccccactacca

SEQ ID NO: 1609806 - DNA, 15 bp, Homo sapiens
cattcccccactacc

SEQ ID NO: 1609807 - DNA, 15 bp, Homo sapiens
ccattcccccactac

SEQ ID NO: 1609808 - DNA, 15 bp, Homo sapiens
accattcccccacta

SEQ ID NO: 1609809 - DNA, 15 bp, Homo sapiens
caccattcccccact

SEQ ID NO: 1609810 - DNA, 15 bp, Homo sapiens
gcaccattcccccac

SEQ ID NO: 1609811 - DNA, 15 bp, Homo sapiens
ggcaccattccccca

SEQ ID NO: 1609812 - DNA, 15 bp, Homo sapiens
tggcaccattccccc

SEQ ID NO: 1609813 - DNA, 15 bp, Homo sapiens
ttggcaccattcccc

SEQ ID NO: 1609814 - DNA, 15 bp, Homo sapiens
tttggcaccattccc

SEQ ID NO: 1609815 - DNA, 15 bp, Homo sapiens
ctttggcaccattcc

SEQ ID NO: 1609816 - DNA, 15 bp, Homo sapiens
cctttggcaccattc

SEQ ID NO: 1609817 - DNA, 15 bp, Homo sapiens
ccctttggcaccatt

SEQ ID NO: 1609818 - DNA, 15 bp, Homo sapiens
tccctttggcaccat

SEQ ID NO: 1609819 - DNA, 15 bp, Homo sapiens
ctccctttggcacca

SEQ ID NO: 1609820 - DNA, 15 bp, Homo sapiens
tctccctttggcacc

SEQ ID NO: 1609821 - DNA, 15 bp, Homo sapiens
ctctccctttggcac

SEQ ID NO: 1609822 - DNA, 15 bp, Homo sapiens
cctctccctttggca

SEQ ID NO: 1609823 - DNA, 15 bp, Homo sapiens
tcctctccctttggc

SEQ ID NO: 1609824 - DNA, 15 bp, Homo sapiens
ctcctctccctttgg

SEQ ID NO: 1609825 - DNA, 15 bp, Homo sapiens
cctcctctccctttg

SEQ ID NO: 1609826 - DNA, 15 bp, Homo sapiens
gcctcctctcccttt

SEQ ID NO: 1609827 - DNA, 15 bp, Homo sapiens
agcctcctctccctt

SEQ ID NO: 1609828 - DNA, 15 bp, Homo sapiens
gagcctcctctccct

SEQ ID NO: 1609829 - DNA, 15 bp, Homo sapiens
ggagcctcctctccc

SEQ ID NO: 1609830 - DNA, 15 bp, Homo sapiens
tggagcctcctctcc

SEQ ID NO: 1609831 - DNA, 15 bp, Homo sapiens
ttggagcctcctctc

SEQ ID NO: 1609832 - DNA, 15 bp, Homo sapiens
gttggagcctcctct

SEQ ID NO: 1609833 - DNA, 15 bp, Homo sapiens
ggttggagcctcctc

SEQ ID NO: 1609834 - DNA, 15 bp, Homo sapiens
tggttggagcctcct

SEQ ID NO: 1609835 - DNA, 15 bp, Homo sapiens
ctggttggagcctcc

SEQ ID NO: 1609836 - DNA, 15 bp, Homo sapiens
tctggttggagcctc

SEQ ID NO: 1609837 - DNA, 15 bp, Homo sapiens
gtctggttggagcct

SEQ ID NO: 1609838 - DNA, 15 bp, Homo sapiens
tgtctggttggagcc

SEQ ID NO: 1609839 - DNA, 15 bp, Homo sapiens
ttgtctggttggagc

SEQ ID NO: 1609840 - DNA, 15 bp, Homo sapiens
tttgtctggttggag

SEQ ID NO: 1609841 - DNA, 15 bp, Homo sapiens
ctttgtctggttgga

SEQ ID NO: 1609842 - DNA, 15 bp, Homo sapiens
tctttgtctggttgg

SEQ ID NO: 1609843 - DNA, 15 bp, Homo sapiens
ctctttgtctggttg

SEQ ID NO: 1609844 - DNA, 15 bp, Homo sapiens
tctctttgtctggtt

SEQ ID NO: 1609845 - DNA, 15 bp, Homo sapiens
gtctctttgtctggt

SEQ ID NO: 1609846 - DNA, 15 bp, Homo sapiens
tgtctctttgtctgg

SEQ ID NO: 1609847 - DNA, 15 bp, Homo sapiens
ctgtctctttgtctg

SEQ ID NO: 1609848 - DNA, 15 bp, Homo sapiens
ctctgtctctttgtc

SEQ ID NO: 1609849 - DNA, 15 bp, Homo sapiens
gctctgtctctttgt

SEQ ID NO: 1609850 - DNA, 15 bp, Homo sapiens
ggctctgtctctttg

SEQ ID NO: 1609851 - DNA, 15 bp, Homo sapiens
tggctctgtctcttt

SEQ ID NO: 1609852 - DNA, 15 bp, Homo sapiens
ctggctctgtctctt

SEQ ID NO: 1609853 - DNA, 15 bp, Homo sapiens
gctggctctgtctct

SEQ ID NO: 1609854 - DNA, 15 bp, Homo sapiens
tgctggctctgtctc

SEQ ID NO: 1609855 - DNA, 15 bp, Homo sapiens
atgctggctctgtct

SEQ ID NO: 1609856 - DNA, 15 bp, Homo sapiens
tatgctggctctgtc

SEQ ID NO: 1609857 - DNA, 15 bp, Homo sapiens
atatgctggctctgt

SEQ ID NO: 1609858 - DNA, 15 bp, Homo sapiens
gatatgctggctctg

SEQ ID NO: 1609859 - DNA, 15 bp, Homo sapiens
ggatatgctggctct

SEQ ID NO: 1609860 - DNA, 15 bp, Homo sapiens
tggatatgctggctc

SEQ ID NO: 1609861 - DNA, 15 bp, Homo sapiens
ctggatatgctggct

SEQ ID NO: 1609862 - DNA, 15 bp, Homo sapiens
gctggatatgctggc

SEQ ID NO: 1609863 - DNA, 15 bp, Homo sapiens
agctggatatgctgg

SEQ ID NO: 1609864 - DNA, 15 bp, Homo sapiens
gagctggatatgctg

SEQ ID NO: 1609865 - DNA, 15 bp, Homo sapiens
ggagctggatatgct

SEQ ID NO: 1609866 - DNA, 15 bp, Homo sapiens
aggagctggatatgc

SEQ ID NO: 1609867 - DNA, 15 bp, Homo sapiens
gaggagctggatatg

SEQ ID NO: 1609868 - DNA, 15 bp, Homo sapiens
ggaggagctggatat

SEQ ID NO: 1609869 - DNA, 15 bp, Homo sapiens
cggaggagctggata

SEQ ID NO: 1609870 - DNA, 15 bp, Homo sapiens
acggaggagctggat

SEQ ID NO: 1609871 - DNA, 15 bp, Homo sapiens
cacggaggagctgga

SEQ ID NO: 1609872 - DNA, 15 bp, Homo sapiens
acacggaggagctgg

SEQ ID NO: 1609873 - DNA, 15 bp, Homo sapiens
cacacggaggagctg

SEQ ID NO: 1609874 - DNA, 15 bp, Homo sapiens
ccacacggaggagct

SEQ ID NO: 1609875 - DNA, 15 bp, Homo sapiens
gccacacggaggagc

SEQ ID NO: 1609876 - DNA, 15 bp, Homo sapiens
ggccacacggaggag

SEQ ID NO: 1609877 - DNA, 15 bp, Homo sapiens
gggccacacggagga

SEQ ID NO: 1609878 - DNA, 15 bp, Homo sapiens
ggggccacacggagg

SEQ ID NO: 1609879 - DNA, 15 bp, Homo sapiens
tggggccacacggag

SEQ ID NO: 1609880 - DNA, 15 bp, Homo sapiens
ctggggccacacgga

SEQ ID NO: 1609881 - DNA, 15 bp, Homo sapiens
cctggggccacacgg

SEQ ID NO: 1609882 - DNA, 15 bp, Homo sapiens
ccctggggccacacg

SEQ ID NO: 1609883 - DNA, 15 bp, Homo sapiens
cccctggggccacac

SEQ ID NO: 1609884 - DNA, 15 bp, Homo sapiens
gcccctggggccaca

SEQ ID NO: 1609885 - DNA, 15 bp, Homo sapiens
tgcccctggggccac

SEQ ID NO: 1609886 - DNA, 15 bp, Homo sapiens
gtgcccctggggcca

SEQ ID NO: 1609887 - DNA, 15 bp, Homo sapiens
ggtgcccctggggcc

SEQ ID NO: 1609888 - DNA, 15 bp, Homo sapiens
cggtgcccctggggc

SEQ ID NO: 1609889 - DNA, 15 bp, Homo sapiens
tcggtgcccctgggg

SEQ ID NO: 1609890 - DNA, 15 bp, Homo sapiens
ctcggtgcccctggg

SEQ ID NO: 1609891 - DNA, 15 bp, Homo sapiens
actcggtgcccctgg

SEQ ID NO: 1609892 - DNA, 15 bp, Homo sapiens
gactcggtgcccctg

SEQ ID NO: 1609893 - DNA, 15 bp, Homo sapiens
ggactcggtgcccct

SEQ ID NO: 1609894 - DNA, 15 bp, Homo sapiens
aggactcggtgcccc

SEQ ID NO: 1609895 - DNA, 15 bp, Homo sapiens
caggactcggtgccc

SEQ ID NO: 1609896 - DNA, 15 bp, Homo sapiens
gcaggactcggtgcc

SEQ ID NO: 1609897 - DNA, 15 bp, Homo sapiens
agcaggactcggtgc

SEQ ID NO: 1609898 - DNA, 15 bp, Homo sapiens
tagcaggactcggtg

SEQ ID NO: 1609899 - DNA, 15 bp, Homo sapiens
atagcaggactcggt

SEQ ID NO: 1609900 - DNA, 15 bp, Homo sapiens
gatagcaggactcgg

SEQ ID NO: 1609901 - DNA, 15 bp, Homo sapiens
agatagcaggactcg

SEQ ID NO: 1609902 - DNA, 15 bp, Homo sapiens
cagatagcaggactc

SEQ ID NO: 1609903 - DNA, 15 bp, Homo sapiens
ccagatagcaggact

SEQ ID NO: 1609904 - DNA, 15 bp, Homo sapiens
gccagatagcaggac

SEQ ID NO: 1609905 - DNA, 15 bp, Homo sapiens
tgccagatagcagga

SEQ ID NO: 1609906 - DNA, 15 bp, Homo sapiens
atgccagatagcagg

SEQ ID NO: 1609907 - DNA, 15 bp, Homo sapiens
gatgccagatagcag

SEQ ID NO: 1609908 - DNA, 15 bp, Homo sapiens
ggatgccagatagca

SEQ ID NO: 1609909 - DNA, 15 bp, Homo sapiens
aggatgccagatagc

SEQ ID NO: 1609910 - DNA, 15 bp, Homo sapiens
gaggatgccagatag

SEQ ID NO: 1609911 - DNA, 15 bp, Homo sapiens
tgaggatgccagata

SEQ ID NO: 1609912 - DNA, 15 bp, Homo sapiens
ctgaggatgccagat

SEQ ID NO: 1609913 - DNA, 15 bp, Homo sapiens
cctgaggatgccaga

SEQ ID NO: 1609914 - DNA, 15 bp, Homo sapiens
ccctgaggatgccag

SEQ ID NO: 1609915 - DNA, 15 bp, Homo sapiens
accctgaggatgcca

SEQ ID NO: 1609916 - DNA, 15 bp, Homo sapiens
gaccctgaggatgcc

SEQ ID NO: 1609917 - DNA, 15 bp, Homo sapiens
agaccctgaggatgc

SEQ ID NO: 1609918 - DNA, 15 bp, Homo sapiens
tagaccctgaggatg

SEQ ID NO: 1609919 - DNA, 15 bp, Homo sapiens
atagaccctgaggat

SEQ ID NO: 1609920 - DNA, 15 bp, Homo sapiens
aatagaccctgagga

SEQ ID NO: 1609921 - DNA, 15 bp, Homo sapiens
aaatagaccctgagg

SEQ ID NO: 1609922 - DNA, 15 bp, Homo sapiens
aaaatagaccctgag

SEQ ID NO: 1609923 - DNA, 15 bp, Homo sapiens
caaaatagaccctga

SEQ ID NO: 1609924 - DNA, 15 bp, Homo sapiens
acaaaatagaccctg

SEQ ID NO: 1609925 - DNA, 15 bp, Homo sapiens
aacaaaatagaccct

SEQ ID NO: 1609926 - DNA, 15 bp, Homo sapiens
gaacaaaatagaccc

SEQ ID NO: 1609927 - DNA, 15 bp, Homo sapiens
ggaacaaaatagacc

SEQ ID NO: 1609928 - DNA, 15 bp, Homo sapiens
tggaacaaaatagac

SEQ ID NO: 1609929 - DNA, 15 bp, Homo sapiens
gtggaacaaaataga

SEQ ID NO: 1609930 - DNA, 15 bp, Homo sapiens
ggtggaacaaaatag

SEQ ID NO: 1609931 - DNA, 15 bp, Homo sapiens
aggtggaacaaaata

SEQ ID NO: 1609932 - DNA, 15 bp, Homo sapiens
gaggtggaacaaaat

SEQ ID NO: 1609933 - DNA, 15 bp, Homo sapiens
ggaggtggaacaaaa

SEQ ID NO: 1609934 - DNA, 15 bp, Homo sapiens
gggaggtggaacaaa

SEQ ID NO: 1609935 - DNA, 15 bp, Homo sapiens
ggggaggtggaacaa

SEQ ID NO: 1609936 - DNA, 15 bp, Homo sapiens
aggggaggtggaaca

SEQ ID NO: 1609937 - DNA, 15 bp, Homo sapiens
gaggggaggtggaac

SEQ ID NO: 1609938 - DNA, 15 bp, Homo sapiens
tgaggggaggtggaa

SEQ ID NO: 1609939 - DNA, 15 bp, Homo sapiens
ttgaggggaggtgga

SEQ ID NO: 1609940 - DNA, 15 bp, Homo sapiens
tttgaggggaggtgg

SEQ ID NO: 1609941 - DNA, 15 bp, Homo sapiens
ctttgaggggaggtg

SEQ ID NO: 1609942 - DNA, 15 bp, Homo sapiens
tctttgaggggaggt

SEQ ID NO: 1609943 - DNA, 15 bp, Homo sapiens
ctctttgaggggagg

SEQ ID NO: 1609944 - DNA, 15 bp, Homo sapiens
cctctttgaggggag

SEQ ID NO: 1609945 - DNA, 15 bp, Homo sapiens
gcctctttgagggga

SEQ ID NO: 1609946 - DNA, 15 bp, Homo sapiens
ggcctctttgagggg

SEQ ID NO: 1609947 - DNA, 15 bp, Homo sapiens
aggcctctttgaggg

SEQ ID NO: 1609948 - DNA, 15 bp, Homo sapiens
gaggcctctttgagg

SEQ ID NO: 1609949 - DNA, 15 bp, Homo sapiens
ggaggcctctttgag

SEQ ID NO: 1609950 - DNA, 15 bp, Homo sapiens
aggaggcctctttga

SEQ ID NO: 1609951 - DNA, 15 bp, Homo sapiens
gaggaggcctctttg

SEQ ID NO: 1609952 - DNA, 15 bp, Homo sapiens
agaggaggcctcttt

SEQ ID NO: 1609953 - DNA, 15 bp, Homo sapiens
gagaggaggcctctt

SEQ ID NO: 1609954 - DNA, 15 bp, Homo sapiens
agagaggaggcctct

SEQ ID NO: 1609955 - DNA, 15 bp, Homo sapiens
gagagaggaggcctc

SEQ ID NO: 1609956 - DNA, 15 bp, Homo sapiens
agagagaggaggcct

SEQ ID NO: 1609957 - DNA, 15 bp, Homo sapiens
tagagagaggaggcc

SEQ ID NO: 1609958 - DNA, 15 bp, Homo sapiens
ctagagagaggaggc

SEQ ID NO: 1609959 - DNA, 15 bp, Homo sapiens
actagagagaggagg

SEQ ID NO: 1609960 - DNA, 15 bp, Homo sapiens
cactagagagaggag

SEQ ID NO: 1609961 - DNA, 15 bp, Homo sapiens
ccactagagagagga

SEQ ID NO: 1609962 - DNA, 15 bp, Homo sapiens
gccactagagagagg

SEQ ID NO: 1609963 - DNA, 15 bp, Homo sapiens
tgccactagagagag

SEQ ID NO: 1609964 - DNA, 15 bp, Homo sapiens
atgccactagagaga

SEQ ID NO: 1609965 - DNA, 15 bp, Homo sapiens
gatgccactagagag

SEQ ID NO: 1609966 - DNA, 15 bp, Homo sapiens
tgatgccactagaga

SEQ ID NO: 1609967 - DNA, 15 bp, Homo sapiens
ctgatgccactagag

SEQ ID NO: 1609968 - DNA, 15 bp, Homo sapiens
gctgatgccactaga

SEQ ID NO: 1609969 - DNA, 15 bp, Homo sapiens
ggctgatgccactag

SEQ ID NO: 1609970 - DNA, 15 bp, Homo sapiens
tggctgatgccacta

SEQ ID NO: 1609971 - DNA, 15 bp, Homo sapiens
ctggctgatgccact

SEQ ID NO: 1609972 - DNA, 15 bp, Homo sapiens
gctggctgatgccac

SEQ ID NO: 1609973 - DNA, 15 bp, Homo sapiens
ggctggctgatgcca

SEQ ID NO: 1609974 - DNA, 15 bp, Homo sapiens
aggctggctgatgcc

SEQ ID NO: 1609975 - DNA, 15 bp, Homo sapiens
caggctggctgatgc

SEQ ID NO: 1609976 - DNA, 15 bp, Homo sapiens
acaggctggctgatg

SEQ ID NO: 1609977 - DNA, 15 bp, Homo sapiens
gacaggctggctgat

SEQ ID NO: 1609978 - DNA, 15 bp, Homo sapiens
ggacaggctggctga

SEQ ID NO: 1609979 - DNA, 15 bp, Homo sapiens
aggacaggctggctg

SEQ ID NO: 1609980 - DNA, 15 bp, Homo sapiens
caggacaggctggct

SEQ ID NO: 1609981 - DNA, 15 bp, Homo sapiens
gcaggacaggctggc

SEQ ID NO: 1609982 - DNA, 15 bp, Homo sapiens
tgcaggacaggctgg

SEQ ID NO: 1609983 - DNA, 15 bp, Homo sapiens
gtgcaggacaggctg

SEQ ID NO: 1609984 - DNA, 15 bp, Homo sapiens
tgtgcaggacaggct

SEQ ID NO: 1609985 - DNA, 15 bp, Homo sapiens
gtgtgcaggacaggc

SEQ ID NO: 1609986 - DNA, 15 bp, Homo sapiens
ggtgtgcaggacagg

SEQ ID NO: 1609987 - DNA, 15 bp, Homo sapiens
aggtgtgcaggacag

SEQ ID NO: 1609988 - DNA, 15 bp, Homo sapiens
gaggtgtgcaggaca

SEQ ID NO: 1609989 - DNA, 15 bp, Homo sapiens
ggaggtgtgcaggac

SEQ ID NO: 1609990 - DNA, 15 bp, Homo sapiens
cggaggtgtgcagga

SEQ ID NO: 1609991 - DNA, 15 bp, Homo sapiens
ccggaggtgtgcagg

SEQ ID NO: 1609992 - DNA, 15 bp, Homo sapiens
accggaggtgtgcag

SEQ ID NO: 1609993 - DNA, 15 bp, Homo sapiens
caccggaggtgtgca

SEQ ID NO: 1609994 - DNA, 15 bp, Homo sapiens
tcaccggaggtgtgc

SEQ ID NO: 1609995 - DNA, 15 bp, Homo sapiens
atcaccggaggtgtg

SEQ ID NO: 1609996 - DNA, 15 bp, Homo sapiens
catcaccggaggtgt

SEQ ID NO: 1609997 - DNA, 15 bp, Homo sapiens
tcatcaccggaggtg

SEQ ID NO: 1609998 - DNA, 15 bp, Homo sapiens
ctcatcaccggaggt

SEQ ID NO: 1609999 - DNA, 15 bp, Homo sapiens
cctcatcaccggagg

SEQ ID NO: 1610000 - DNA, 15 bp, Homo sapiens
gcctcatcaccggag

SEQ ID NO: 1610001 - DNA, 15 bp, Homo sapiens
ggcctcatcaccgga

SEQ ID NO: 1610002 - DNA, 15 bp, Homo sapiens
aggcctcatcaccgg

SEQ ID NO: 1610003 - DNA, 15 bp, Homo sapiens
aaggcctcatcaccg

SEQ ID NO: 1610004 - DNA, 15 bp, Homo sapiens
gaaggcctcatcacc

SEQ ID NO: 1610005 - DNA, 15 bp, Homo sapiens
tgaaggcctcatcac

SEQ ID NO: 1610006 - DNA, 15 bp, Homo sapiens
gtgaaggcctcatca

SEQ ID NO: 1610007 - DNA, 15 bp, Homo sapiens
agtgaaggcctcatc

SEQ ID NO: 1610008 - DNA, 15 bp, Homo sapiens
tagtgaaggcctcat

SEQ ID NO: 1610009 - DNA, 15 bp, Homo sapiens
gtagtgaaggcctca

SEQ ID NO: 1610010 - DNA, 15 bp, Homo sapiens
ggtagtgaaggcctc

SEQ ID NO: 1610011 - DNA, 15 bp, Homo sapiens
aggtagtgaaggcct

SEQ ID NO: 1610012 - DNA, 15 bp, Homo sapiens
caggtagtgaaggcc

SEQ ID NO: 1610013 - DNA, 15 bp, Homo sapiens
gcaggtagtgaaggc

SEQ ID NO: 1610014 - DNA, 15 bp, Homo sapiens
ggcaggtagtgaagg

SEQ ID NO: 1610015 - DNA, 15 bp, Homo sapiens
tggcaggtagtgaag

SEQ ID NO: 1610016 - DNA, 15 bp, Homo sapiens
ctggcaggtagtgaa

SEQ ID NO: 1610017 - DNA, 15 bp, Homo sapiens
tctggcaggtagtga

SEQ ID NO: 1610018 - DNA, 15 bp, Homo sapiens
gtctggcaggtagtg

SEQ ID NO: 1610019 - DNA, 15 bp, Homo sapiens
agtctggcaggtagt

SEQ ID NO: 1610020 - DNA, 15 bp, Homo sapiens
cagtctggcaggtag

SEQ ID NO: 1610021 - DNA, 15 bp, Homo sapiens
acagtctggcaggta

SEQ ID NO: 1610022 - DNA, 15 bp, Homo sapiens
cacagtctggcaggt

SEQ ID NO: 1610023 - DNA, 15 bp, Homo sapiens
ccacagtctggcagg

SEQ ID NO: 1610024 - DNA, 15 bp, Homo sapiens
cccacagtctggcag

SEQ ID NO: 1610025 - DNA, 15 bp, Homo sapiens
gcccacagtctggca

SEQ ID NO: 1610026 - DNA, 15 bp, Homo sapiens
agcccacagtctggc

SEQ ID NO: 1610027 - DNA, 15 bp, Homo sapiens
cagcccacagtctgg

SEQ ID NO: 1610028 - DNA, 15 bp, Homo sapiens
acagcccacagtctg

SEQ ID NO: 1610029 - DNA, 15 bp, Homo sapiens
cacagcccacagtct

SEQ ID NO: 1610030 - DNA, 15 bp, Homo sapiens
acacagcccacagtc

SEQ ID NO: 1610031 - DNA, 15 bp, Homo sapiens
cacacagcccacagt

SEQ ID NO: 1610032 - DNA, 15 bp, Homo sapiens
tcacacagcccacag

SEQ ID NO: 1610033 - DNA, 15 bp, Homo sapiens
ttcacacagcccaca

SEQ ID NO: 1610034 - DNA, 15 bp, Homo sapiens
cttcacacagcccac

SEQ ID NO: 1610035 - DNA, 15 bp, Homo sapiens
ccttcacacagccca

SEQ ID NO: 1610036 - DNA, 15 bp, Homo sapiens
cccttcacacagccc

SEQ ID NO: 1610037 - DNA, 15 bp, Homo sapiens
tcccttcacacagcc

SEQ ID NO: 1610038 - DNA, 15 bp, Homo sapiens
atcccttcacacagc

SEQ ID NO: 1610039 - DNA, 15 bp, Homo sapiens
gatcccttcacacag

SEQ ID NO: 1610040 - DNA, 15 bp, Homo sapiens
agatcccttcacaca

SEQ ID NO: 1610041 - DNA, 15 bp, Homo sapiens
gagatcccttcacac

SEQ ID NO: 1610042 - DNA, 15 bp, Homo sapiens
tgagatcccttcaca

SEQ ID NO: 1610043 - DNA, 15 bp, Homo sapiens
atgagatcccttcac

SEQ ID NO: 1610044 - DNA, 15 bp, Homo sapiens
gatgagatcccttca

SEQ ID NO: 1610045 - DNA, 15 bp, Homo sapiens
ggatgagatcccttc

SEQ ID NO: 1610046 - DNA, 15 bp, Homo sapiens
tggatgagatccctt

SEQ ID NO: 1610047 - DNA, 15 bp, Homo sapiens
ttggatgagatccct

SEQ ID NO: 1610048 - DNA, 15 bp, Homo sapiens
attggatgagatccc

SEQ ID NO: 1610049 - DNA, 15 bp, Homo sapiens
gattggatgagatcc

SEQ ID NO: 1610050 - DNA, 15 bp, Homo sapiens
ggattggatgagatc

SEQ ID NO: 1610051 - DNA, 15 bp, Homo sapiens
gggattggatgagat

SEQ ID NO: 1610052 - DNA, 15 bp, Homo sapiens
agggattggatgaga

SEQ ID NO: 1610053 - DNA, 15 bp, Homo sapiens
aagggattggatgag

SEQ ID NO: 1610054 - DNA, 15 bp, Homo sapiens
caagggattggatga

SEQ ID NO: 1610055 - DNA, 15 bp, Homo sapiens
tcaagggattggatg

SEQ ID NO: 1610056 - DNA, 15 bp, Homo sapiens
gtcaagggattggat

SEQ ID NO: 1610057 - DNA, 15 bp, Homo sapiens
tgtcaagggattgga

SEQ ID NO: 1610058 - DNA, 15 bp, Homo sapiens
atgtcaagggattgg

SEQ ID NO: 1610059 - DNA, 15 bp, Homo sapiens
tatgtcaagggattg

SEQ ID NO: 1610060 - DNA, 15 bp, Homo sapiens
ttatgtcaagggatt

SEQ ID NO: 1610061 - DNA, 15 bp, Homo sapiens
tttatgtcaagggat

SEQ ID NO: 1610062 - DNA, 15 bp, Homo sapiens
ttttatgtcaaggga

SEQ ID NO: 1610063 - DNA, 15 bp, Homo sapiens
attttatgtcaaggg

SEQ ID NO: 1610064 - DNA, 15 bp, Homo sapiens
tattttatgtcaagg

SEQ ID NO: 1610065 - DNA, 15 bp, Homo sapiens
gtattttatgtcaag

SEQ ID NO: 1610066 - DNA, 15 bp, Homo sapiens
tgtattttatgtcaa

SEQ ID NO: 1610067 - DNA, 15 bp, Homo sapiens
ttgtattttatgtca

SEQ ID NO: 1610068 - DNA, 15 bp, Homo sapiens
gttgtattttatgtc

SEQ ID NO: 1610069 - DNA, 15 bp, Homo sapiens
ggttgtattttatgt

SEQ ID NO: 1610070 - DNA, 15 bp, Homo sapiens
aggttgtattttatg

SEQ ID NO: 1610071 - DNA, 15 bp, Homo sapiens
taggttgtattttat

SEQ ID NO: 1610072 - DNA, 15 bp, Homo sapiens
ctaggttgtatttta

SEQ ID NO: 1610073 - DNA, 15 bp, Homo sapiens
tctaggttgtatttt

SEQ ID NO: 1610074 - DNA, 15 bp, Homo sapiens
ctctaggttgtattt

SEQ ID NO: 1610075 - DNA, 15 bp, Homo sapiens
cctctaggttgtatt

SEQ ID NO: 1610076 - DNA, 15 bp, Homo sapiens
gcctctaggttgtat

SEQ ID NO: 1610077 - DNA, 15 bp, Homo sapiens
agcctctaggttgta

SEQ ID NO: 1610078 - DNA, 15 bp, Homo sapiens
gagcctctaggttgt

SEQ ID NO: 1610079 - DNA, 15 bp, Homo sapiens
ggagcctctaggttg

SEQ ID NO: 1610080 - DNA, 15 bp, Homo sapiens
aggagcctctaggtt

SEQ ID NO: 1610081 - DNA, 15 bp, Homo sapiens
caggagcctctaggt

SEQ ID NO: 1610082 - DNA, 15 bp, Homo sapiens
tcaggagcctctagg

SEQ ID NO: 1610083 - DNA, 15 bp, Homo sapiens
ctcaggagcctctag

SEQ ID NO: 1610084 - DNA, 15 bp, Homo sapiens
cctcaggagcctcta

SEQ ID NO: 1610085 - DNA, 15 bp, Homo sapiens
acctcaggagcctct

SEQ ID NO: 1610086 - DNA, 15 bp, Homo sapiens
aacctcaggagcctc

SEQ ID NO: 1610087 - DNA, 15 bp, Homo sapiens
taacctcaggagcct

SEQ ID NO: 1610088 - DNA, 15 bp, Homo sapiens
gtaacctcaggagcc

SEQ ID NO: 1610089 - DNA, 15 bp, Homo sapiens
tgtaacctcaggagc

SEQ ID NO: 1610090 - DNA, 15 bp, Homo sapiens
atgtaacctcaggag

SEQ ID NO: 1610091 - DNA, 15 bp, Homo sapiens
gatgtaacctcagga

SEQ ID NO: 1610092 - DNA, 15 bp, Homo sapiens
tgatgtaacctcagg

SEQ ID NO: 1610093 - DNA, 15 bp, Homo sapiens
ctgatgtaacctcag

SEQ ID NO: 1610094 - DNA, 15 bp, Homo sapiens
gctgatgtaacctca

SEQ ID NO: 1610095 - DNA, 15 bp, Homo sapiens
tgctgatgtaacctc

SEQ ID NO: 1610096 - DNA, 15 bp, Homo sapiens
ctgctgatgtaacct

SEQ ID NO: 1610097 - DNA, 15 bp, Homo sapiens
actgctgatgtaacc

SEQ ID NO: 1610098 - DNA, 15 bp, Homo sapiens
gactgctgatgtaac

SEQ ID NO: 1610099 - DNA, 15 bp, Homo sapiens
ggactgctgatgtaa

SEQ ID NO: 1610100 - DNA, 15 bp, Homo sapiens
aggactgctgatgta

SEQ ID NO: 1610101 - DNA, 15 bp, Homo sapiens
caggactgctgatgt

SEQ ID NO: 1610102 - DNA, 15 bp, Homo sapiens
tcaggactgctgatg

SEQ ID NO: 1610103 - DNA, 15 bp, Homo sapiens
ttcaggactgctgat

SEQ ID NO: 1610104 - DNA, 15 bp, Homo sapiens
gttcaggactgctga

SEQ ID NO: 1610105 - DNA, 15 bp, Homo sapiens
agttcaggactgctg

SEQ ID NO: 1610106 - DNA, 15 bp, Homo sapiens
aagttcaggactgct

SEQ ID NO: 1610107 - DNA, 15 bp, Homo sapiens
aaagttcaggactgc

SEQ ID NO: 1610108 - DNA, 15 bp, Homo sapiens
gaaagttcaggactg

SEQ ID NO: 1610109 - DNA, 15 bp, Homo sapiens
ggaaagttcaggact

SEQ ID NO: 1610110 - DNA, 15 bp, Homo sapiens
tggaaagttcaggac

SEQ ID NO: 1610111 - DNA, 15 bp, Homo sapiens
ttggaaagttcagga

SEQ ID NO: 1610112 - DNA, 15 bp, Homo sapiens
attggaaagttcagg

SEQ ID NO: 1610113 - DNA, 15 bp, Homo sapiens
tattggaaagttcag

SEQ ID NO: 1610114 - DNA, 15 bp, Homo sapiens
ttattggaaagttca

SEQ ID NO: 1610115 - DNA, 15 bp, Homo sapiens
cttattggaaagttc

SEQ ID NO: 1610116 - DNA, 15 bp, Homo sapiens
gcttattggaaagtt

SEQ ID NO: 1610117 - DNA, 15 bp, Homo sapiens
agcttattggaaagt

SEQ ID NO: 1610118 - DNA, 15 bp, Homo sapiens
gagcttattggaaag

SEQ ID NO: 1610119 - DNA, 15 bp, Homo sapiens
ggagcttattggaaa

SEQ ID NO: 1610120 - DNA, 15 bp, Homo sapiens
tggagcttattggaa

SEQ ID NO: 1610121 - DNA, 15 bp, Homo sapiens
ttggagcttattgga

SEQ ID NO: 1610122 - DNA, 15 bp, Homo sapiens
gttggagcttattgg

SEQ ID NO: 1610123 - DNA, 15 bp, Homo sapiens
agttggagcttattg

SEQ ID NO: 1610124 - DNA, 15 bp, Homo sapiens
cagttggagcttatt

SEQ ID NO: 1610125 - DNA, 15 bp, Homo sapiens
gcagttggagcttat

SEQ ID NO: 1610126 - DNA, 15 bp, Homo sapiens
agcagttggagctta

SEQ ID NO: 1610127 - DNA, 15 bp, Homo sapiens
aagcagttggagctt

SEQ ID NO: 1610128 - DNA, 15 bp, Homo sapiens
caagcagttggagct

SEQ ID NO: 1610129 - DNA, 15 bp, Homo sapiens
gcaagcagttggagc

SEQ ID NO: 1610130 - DNA, 15 bp, Homo sapiens
ggcaagcagttggag

SEQ ID NO: 1610131 - DNA, 15 bp, Homo sapiens
gggcaagcagttgga

SEQ ID NO: 1610132 - DNA, 15 bp, Homo sapiens
ggggcaagcagttgg

SEQ ID NO: 1610133 - DNA, 15 bp, Homo sapiens
tggggcaagcagttg

SEQ ID NO: 1610134 - DNA, 15 bp, Homo sapiens
atggggcaagcagtt

SEQ ID NO: 1610135 - DNA, 15 bp, Homo sapiens
gatggggcaagcagt

SEQ ID NO: 1610136 - DNA, 15 bp, Homo sapiens
ggatggggcaagcag

SEQ ID NO: 1610137 - DNA, 15 bp, Homo sapiens
aggatggggcaagca

SEQ ID NO: 1610138 - DNA, 15 bp, Homo sapiens
aaggatggggcaagc

SEQ ID NO: 1610139 - DNA, 15 bp, Homo sapiens
gaaggatggggcaag

SEQ ID NO: 1610140 - DNA, 15 bp, Homo sapiens
agaaggatggggcaa

SEQ ID NO: 1610141 - DNA, 15 bp, Homo sapiens
tagaaggatggggca

SEQ ID NO: 1610142 - DNA, 15 bp, Homo sapiens
gtagaaggatggggc

SEQ ID NO: 1610143 - DNA, 15 bp, Homo sapiens
agtagaaggatgggg

SEQ ID NO: 1610144 - DNA, 15 bp, Homo sapiens
tagtagaaggatggg

SEQ ID NO: 1610145 - DNA, 15 bp, Homo sapiens
ctagtagaaggatgg

SEQ ID NO: 1610146 - DNA, 15 bp, Homo sapiens
cctagtagaaggatg

SEQ ID NO: 1610147 - DNA, 15 bp, Homo sapiens
tcctagtagaaggat

SEQ ID NO: 1610148 - DNA, 15 bp, Homo sapiens
atcctagtagaagga

SEQ ID NO: 1610149 - DNA, 15 bp, Homo sapiens
tatcctagtagaagg

SEQ ID NO: 1610150 - DNA, 15 bp, Homo sapiens
atatcctagtagaag

SEQ ID NO: 1610151 - DNA, 15 bp, Homo sapiens
gatatcctagtagaa

SEQ ID NO: 1610152 - DNA, 15 bp, Homo sapiens
tgatatcctagtaga

SEQ ID NO: 1610153 - DNA, 15 bp, Homo sapiens
gtgatatcctagtag

SEQ ID NO: 1610154 - DNA, 15 bp, Homo sapiens
tgtgatatcctagta

SEQ ID NO: 1610155 - DNA, 15 bp, Homo sapiens
gtgtgatatcctagt

SEQ ID NO: 1610156 - DNA, 15 bp, Homo sapiens
tgtgtgatatcctag

SEQ ID NO: 1610157 - DNA, 15 bp, Homo sapiens
ctgtgtgatatccta

SEQ ID NO: 1610158 - DNA, 15 bp, Homo sapiens
tctgtgtgatatcct

SEQ ID NO: 1610159 - DNA, 15 bp, Homo sapiens
ttctgtgtgatatcc

SEQ ID NO: 1610160 - DNA, 15 bp, Homo sapiens
cttctgtgtgatatc

SEQ ID NO: 1610161 - DNA, 15 bp, Homo sapiens
ccttctgtgtgatat

SEQ ID NO: 1610162 - DNA, 15 bp, Homo sapiens
gccttctgtgtgata

SEQ ID NO: 1610163 - DNA, 15 bp, Homo sapiens
agccttctgtgtgat

SEQ ID NO: 1610164 - DNA, 15 bp, Homo sapiens
gagccttctgtgtga

SEQ ID NO: 1610165 - DNA, 15 bp, Homo sapiens
ggagccttctgtgtg

SEQ ID NO: 1610166 - DNA, 15 bp, Homo sapiens
tggagccttctgtgt

SEQ ID NO: 1610167 - DNA, 15 bp, Homo sapiens
ttggagccttctgtg

SEQ ID NO: 1610168 - DNA, 15 bp, Homo sapiens
tttggagccttctgt

SEQ ID NO: 1610169 - DNA, 15 bp, Homo sapiens
ttttggagccttctg

SEQ ID NO: 1610170 - DNA, 15 bp, Homo sapiens
tttttggagccttct

SEQ ID NO: 1610171 - DNA, 15 bp, Homo sapiens
atttttggagccttc

SEQ ID NO: 1610172 - DNA, 15 bp, Homo sapiens
tatttttggagcctt

SEQ ID NO: 1610173 - DNA, 15 bp, Homo sapiens
ctatttttggagcct

SEQ ID NO: 1610174 - DNA, 15 bp, Homo sapiens
gctatttttggagcc

SEQ ID NO: 1610175 - DNA, 15 bp, Homo sapiens
tgctatttttggagc

SEQ ID NO: 1610176 - DNA, 15 bp, Homo sapiens
ctgctatttttggag

SEQ ID NO: 1610177 - DNA, 15 bp, Homo sapiens
cctgctatttttgga

SEQ ID NO: 1610178 - DNA, 15 bp, Homo sapiens
ccctgctatttttgg

SEQ ID NO: 1610179 - DNA, 15 bp, Homo sapiens
gccctgctatttttg

SEQ ID NO: 1610180 - DNA, 15 bp, Homo sapiens
ggccctgctattttt

SEQ ID NO: 1610181 - DNA, 15 bp, Homo sapiens
aggccctgctatttt

SEQ ID NO: 1610182 - DNA, 15 bp, Homo sapiens
caggccctgctattt

SEQ ID NO: 1610183 - DNA, 15 bp, Homo sapiens
tcaggccctgctatt

SEQ ID NO: 1610184 - DNA, 15 bp, Homo sapiens
ctcaggccctgctat

SEQ ID NO: 1610185 - DNA, 15 bp, Homo sapiens
gctcaggccctgcta

SEQ ID NO: 1610186 - DNA, 15 bp, Homo sapiens
ggctcaggccctgct

SEQ ID NO: 1610187 - DNA, 15 bp, Homo sapiens
aggctcaggccctgc

SEQ ID NO: 1610188 - DNA, 15 bp, Homo sapiens
caggctcaggccctg

SEQ ID NO: 1610189 - DNA, 15 bp, Homo sapiens
tcaggctcaggccct

SEQ ID NO: 1610190 - DNA, 15 bp, Homo sapiens
atcaggctcaggccc

SEQ ID NO: 1610191 - DNA, 15 bp, Homo sapiens
aatcaggctcaggcc

SEQ ID NO: 1610192 - DNA, 15 bp, Homo sapiens
gaatcaggctcaggc

SEQ ID NO: 1610193 - DNA, 15 bp, Homo sapiens
ggaatcaggctcagg

SEQ ID NO: 1610194 - DNA, 15 bp, Homo sapiens
tggaatcaggctcag

SEQ ID NO: 1610195 - DNA, 15 bp, Homo sapiens
ctggaatcaggctca

SEQ ID NO: 1610196 - DNA, 15 bp, Homo sapiens
gctggaatcaggctc

SEQ ID NO: 1610197 - DNA, 15 bp, Homo sapiens
ggctggaatcaggct

SEQ ID NO: 1610198 - DNA, 15 bp, Homo sapiens
aggctggaatcaggc

SEQ ID NO: 1610199 - DNA, 15 bp, Homo sapiens
gaggctggaatcagg

SEQ ID NO: 1610200 - DNA, 15 bp, Homo sapiens
ggaggctggaatcag

SEQ ID NO: 1610201 - DNA, 15 bp, Homo sapiens
tggaggctggaatca

SEQ ID NO: 1610202 - DNA, 15 bp, Homo sapiens
gtggaggctggaatc

SEQ ID NO: 1610203 - DNA, 15 bp, Homo sapiens
ggtggaggctggaat

SEQ ID NO: 1610204 - DNA, 15 bp, Homo sapiens
gggtggaggctggaa

SEQ ID NO: 1610205 - DNA, 15 bp, Homo sapiens
tgggtggaggctgga

SEQ ID NO: 1610206 - DNA, 15 bp, Homo sapiens
ttgggtggaggctgg

SEQ ID NO: 1610207 - DNA, 15 bp, Homo sapiens
cttgggtggaggctg

SEQ ID NO: 1610208 - DNA, 15 bp, Homo sapiens
acttgggtggaggct

SEQ ID NO: 1610209 - DNA, 15 bp, Homo sapiens
aacttgggtggaggc

SEQ ID NO: 1610210 - DNA, 15 bp, Homo sapiens
caacttgggtggagg

SEQ ID NO: 1610211 - DNA, 15 bp, Homo sapiens
acaacttgggtggag

SEQ ID NO: 1610212 - DNA, 15 bp, Homo sapiens
cacaacttgggtgga

SEQ ID NO: 1610213 - DNA, 15 bp, Homo sapiens
tcacaacttgggtgg

SEQ ID NO: 1610214 - DNA, 15 bp, Homo sapiens
gtcacaacttgggtg

SEQ ID NO: 1610215 - DNA, 15 bp, Homo sapiens
ggtcacaacttgggt

SEQ ID NO: 1610216 - DNA, 15 bp, Homo sapiens
aggtcacaacttggg

SEQ ID NO: 1610217 - DNA, 15 bp, Homo sapiens
gaggtcacaacttgg

SEQ ID NO: 1610218 - DNA, 15 bp, Homo sapiens
ggaggtcacaacttg

SEQ ID NO: 1610219 - DNA, 15 bp, Homo sapiens
gggaggtcacaactt

SEQ ID NO: 1610220 - DNA, 15 bp, Homo sapiens
ggggaggtcacaact

SEQ ID NO: 1610221 - DNA, 15 bp, Homo sapiens
gggggaggtcacaac

SEQ ID NO: 1610222 - DNA, 15 bp, Homo sapiens
agggggaggtcacaa

SEQ ID NO: 1610223 - DNA, 15 bp, Homo sapiens
cagggggaggtcaca

SEQ ID NO: 1610224 - DNA, 15 bp, Homo sapiens
ccagggggaggtcac

SEQ ID NO: 1610225 - DNA, 15 bp, Homo sapiens
gccagggggaggtca

SEQ ID NO: 1610226 - DNA, 15 bp, Homo sapiens
agccagggggaggtc

SEQ ID NO: 1610227 - DNA, 15 bp, Homo sapiens
gagccagggggaggt

SEQ ID NO: 1610228 - DNA, 15 bp, Homo sapiens
agagccagggggagg

SEQ ID NO: 1610229 - DNA, 15 bp, Homo sapiens
gagagccagggggag

SEQ ID NO: 1610230 - DNA, 15 bp, Homo sapiens
ggagagccaggggga

SEQ ID NO: 1610231 - DNA, 15 bp, Homo sapiens
gggagagccaggggg

SEQ ID NO: 1610232 - DNA, 15 bp, Homo sapiens
ggggagagccagggg

SEQ ID NO: 1610233 - DNA, 15 bp, Homo sapiens
tggggagagccaggg

SEQ ID NO: 1610234 - DNA, 15 bp, Homo sapiens
gtggggagagccagg

SEQ ID NO: 1610235 - DNA, 15 bp, Homo sapiens
ggtggggagagccag

SEQ ID NO: 1610236 - DNA, 15 bp, Homo sapiens
aggtggggagagcca

SEQ ID NO: 1610237 - DNA, 15 bp, Homo sapiens
aaggtggggagagcc

SEQ ID NO: 1610238 - DNA, 15 bp, Homo sapiens
caaggtggggagagc

SEQ ID NO: 1610239 - DNA, 15 bp, Homo sapiens
ccaaggtggggagag

SEQ ID NO: 1610240 - DNA, 15 bp, Homo sapiens
accaaggtggggaga

SEQ ID NO: 1610241 - DNA, 15 bp, Homo sapiens
aaccaaggtggggag

SEQ ID NO: 1610242 - DNA, 15 bp, Homo sapiens
taaccaaggtgggga

SEQ ID NO: 1610243 - DNA, 15 bp, Homo sapiens
ttaaccaaggtgggg

SEQ ID NO: 1610244 - DNA, 15 bp, Homo sapiens
attaaccaaggtggg

SEQ ID NO: 1610245 - DNA, 15 bp, Homo sapiens
tattaaccaaggtgg

SEQ ID NO: 1610246 - DNA, 15 bp, Homo sapiens
ctattaaccaaggtg

SEQ ID NO: 1610247 - DNA, 15 bp, Homo sapiens
gctattaaccaaggt

SEQ ID NO: 1610248 - DNA, 15 bp, Homo sapiens
ggctattaaccaagg

SEQ ID NO: 1610249 - DNA, 15 bp, Homo sapiens
gggctattaaccaag

SEQ ID NO: 1610250 - DNA, 15 bp, Homo sapiens
ggggctattaaccaa

SEQ ID NO: 1610251 - DNA, 15 bp, Homo sapiens
tggggctattaacca

SEQ ID NO: 1610252 - DNA, 15 bp, Homo sapiens
atggggctattaacc

SEQ ID NO: 1610253 - DNA, 15 bp, Homo sapiens
gatggggctattaac

SEQ ID NO: 1610254 - DNA, 15 bp, Homo sapiens
tgatggggctattaa

SEQ ID NO: 1610255 - DNA, 15 bp, Homo sapiens
atgatggggctatta

SEQ ID NO: 1610256 - DNA, 15 bp, Homo sapiens
gatgatggggctatt

SEQ ID NO: 1610257 - DNA, 15 bp, Homo sapiens
ggatgatggggctat

SEQ ID NO: 1610258 - DNA, 15 bp, Homo sapiens
tggatgatggggcta

SEQ ID NO: 1610259 - DNA, 15 bp, Homo sapiens
gtggatgatggggct

SEQ ID NO: 1610260 - DNA, 15 bp, Homo sapiens
ggtggatgatggggc

SEQ ID NO: 1610261 - DNA, 15 bp, Homo sapiens
gggtggatgatgggg

SEQ ID NO: 1610262 - DNA, 15 bp, Homo sapiens
cgggtggatgatggg

SEQ ID NO: 1610263 - DNA, 15 bp, Homo sapiens
acgggtggatgatgg

SEQ ID NO: 1610264 - DNA, 15 bp, Homo sapiens
aacgggtggatgatg

SEQ ID NO: 1610265 - DNA, 15 bp, Homo sapiens
caacgggtggatgat

SEQ ID NO: 1610266 - DNA, 15 bp, Homo sapiens
gcaacgggtggatga

SEQ ID NO: 1610267 - DNA, 15 bp, Homo sapiens
agcaacgggtggatg

SEQ ID NO: 1610268 - DNA, 15 bp, Homo sapiens
gagcaacgggtggat

SEQ ID NO: 1610269 - DNA, 15 bp, Homo sapiens
tgagcaacgggtgga

SEQ ID NO: 1610270 - DNA, 15 bp, Homo sapiens
ttgagcaacgggtgg

SEQ ID NO: 1610271 - DNA, 15 bp, Homo sapiens
cttgagcaacgggtg

SEQ ID NO: 1610272 - DNA, 15 bp, Homo sapiens
gcttgagcaacgggt

SEQ ID NO: 1610273 - DNA, 15 bp, Homo sapiens
ggcttgagcaacggg

SEQ ID NO: 1610274 - DNA, 15 bp, Homo sapiens
aggcttgagcaacgg

SEQ ID NO: 1610275 - DNA, 15 bp, Homo sapiens
taggcttgagcaacg

SEQ ID NO: 1610276 - DNA, 15 bp, Homo sapiens
ctaggcttgagcaac

SEQ ID NO: 1610277 - DNA, 15 bp, Homo sapiens
tctaggcttgagcaa

SEQ ID NO: 1610278 - DNA, 15 bp, Homo sapiens
ttctaggcttgagca

SEQ ID NO: 1610279 - DNA, 15 bp, Homo sapiens
gttctaggcttgagc

SEQ ID NO: 1610280 - DNA, 15 bp, Homo sapiens
ggttctaggcttgag

SEQ ID NO: 1610281 - DNA, 15 bp, Homo sapiens
aggttctaggcttga

SEQ ID NO: 1610282 - DNA, 15 bp, Homo sapiens
taggttctaggcttg

SEQ ID NO: 1610283 - DNA, 15 bp, Homo sapiens
gtaggttctaggctt

SEQ ID NO: 1610284 - DNA, 15 bp, Homo sapiens
tgtaggttctaggct

SEQ ID NO: 1610285 - DNA, 15 bp, Homo sapiens
ttgtaggttctaggc

SEQ ID NO: 1610286 - DNA, 15 bp, Homo sapiens
attgtaggttctagg

SEQ ID NO: 1610287 - DNA, 15 bp, Homo sapiens
gattgtaggttctag

SEQ ID NO: 1610288 - DNA, 15 bp, Homo sapiens
tgattgtaggttcta

SEQ ID NO: 1610289 - DNA, 15 bp, Homo sapiens
atgattgtaggttct

SEQ ID NO: 1610290 - DNA, 15 bp, Homo sapiens
gatgattgtaggttc

SEQ ID NO: 1610291 - DNA, 15 bp, Homo sapiens
ggatgattgtaggtt

SEQ ID NO: 1610292 - DNA, 15 bp, Homo sapiens
aggatgattgtaggt

SEQ ID NO: 1610293 - DNA, 15 bp, Homo sapiens
gaggatgattgtagg

SEQ ID NO: 1610294 - DNA, 15 bp, Homo sapiens
tgaggatgattgtag

SEQ ID NO: 1610295 - DNA, 15 bp, Homo sapiens
gtgaggatgattgta

SEQ ID NO: 1610296 - DNA, 15 bp, Homo sapiens
ggtgaggatgattgt

SEQ ID NO: 1610297 - DNA, 15 bp, Homo sapiens
gggtgaggatgattg

SEQ ID NO: 1610298 - DNA, 15 bp, Homo sapiens
ggggtgaggatgatt

SEQ ID NO: 1610299 - DNA, 15 bp, Homo sapiens
aggggtgaggatgat

SEQ ID NO: 1610300 - DNA, 15 bp, Homo sapiens
gaggggtgaggatga

SEQ ID NO: 1610301 - DNA, 15 bp, Homo sapiens
ggaggggtgaggatg

SEQ ID NO: 1610302 - DNA, 15 bp, Homo sapiens
tggaggggtgaggat

SEQ ID NO: 1610303 - DNA, 15 bp, Homo sapiens
atggaggggtgagga

SEQ ID NO: 1610304 - DNA, 15 bp, Homo sapiens
gatggaggggtgagg

SEQ ID NO: 1610305 - DNA, 15 bp, Homo sapiens
ggatggaggggtgag

SEQ ID NO: 1610306 - DNA, 15 bp, Homo sapiens
tggatggaggggtga

SEQ ID NO: 1610307 - DNA, 15 bp, Homo sapiens
ttggatggaggggtg

SEQ ID NO: 1610308 - DNA, 15 bp, Homo sapiens
attggatggaggggt

SEQ ID NO: 1610309 - DNA, 15 bp, Homo sapiens
aattggatggagggg

SEQ ID NO: 1610310 - DNA, 15 bp, Homo sapiens
gaattggatggaggg

SEQ ID NO: 1610311 - DNA, 15 bp, Homo sapiens
tgaattggatggagg

SEQ ID NO: 1610312 - DNA, 15 bp, Homo sapiens
atgaattggatggag

SEQ ID NO: 1610313 - DNA, 15 bp, Homo sapiens
gatgaattggatgga

SEQ ID NO: 1610314 - DNA, 15 bp, Homo sapiens
agatgaattggatgg

SEQ ID NO: 1610315 - DNA, 15 bp, Homo sapiens
cagatgaattggatg

SEQ ID NO: 1610316 - DNA, 15 bp, Homo sapiens
tcagatgaattggat

SEQ ID NO: 1610317 - DNA, 15 bp, Homo sapiens
ttcagatgaattgga

SEQ ID NO: 1610318 - DNA, 15 bp, Homo sapiens
tttcagatgaattgg

SEQ ID NO: 1610319 - DNA, 15 bp, Homo sapiens
ttttcagatgaattg

SEQ ID NO: 1610320 - DNA, 15 bp, Homo sapiens
attttcagatgaatt

SEQ ID NO: 1610321 - DNA, 15 bp, Homo sapiens
aattttcagatgaat

SEQ ID NO: 1610322 - DNA, 15 bp, Homo sapiens
gaattttcagatgaa

SEQ ID NO: 1610323 - DNA, 15 bp, Homo sapiens
agaattttcagatga

SEQ ID NO: 1610324 - DNA, 15 bp, Homo sapiens
tagaattttcagatg

SEQ ID NO: 1610325 - DNA, 15 bp, Homo sapiens
gtagaattttcagat

SEQ ID NO: 1610326 - DNA, 15 bp, Homo sapiens
tgtagaattttcaga

SEQ ID NO: 1610327 - DNA, 15 bp, Homo sapiens
ctgtagaattttcag

SEQ ID NO: 1610328 - DNA, 15 bp, Homo sapiens
tctgtagaattttca

SEQ ID NO: 1610329 - DNA, 15 bp, Homo sapiens
atctgtagaattttc

SEQ ID NO: 1610330 - DNA, 15 bp, Homo sapiens
aatctgtagaatttt

SEQ ID NO: 1610331 - DNA, 15 bp, Homo sapiens
gaatctgtagaattt

SEQ ID NO: 1610332 - DNA, 15 bp, Homo sapiens
agaatctgtagaatt

SEQ ID NO: 1610333 - DNA, 15 bp, Homo sapiens
cagaatctgtagaat

SEQ ID NO: 1610334 - DNA, 15 bp, Homo sapiens
gcagaatctgtagaa

SEQ ID NO: 1610335 - DNA, 15 bp, Homo sapiens
agcagaatctgtaga

SEQ ID NO: 1610336 - DNA, 15 bp, Homo sapiens
aagcagaatctgtag

SEQ ID NO: 1610337 - DNA, 15 bp, Homo sapiens
gaagcagaatctgta

SEQ ID NO: 1610338 - DNA, 15 bp, Homo sapiens
ggaagcagaatctgt

SEQ ID NO: 1610339 - DNA, 15 bp, Homo sapiens
tggaagcagaatctg

SEQ ID NO: 1610340 - DNA, 15 bp, Homo sapiens
ttggaagcagaatct

SEQ ID NO: 1610341 - DNA, 15 bp, Homo sapiens
tttggaagcagaatc

SEQ ID NO: 1610342 - DNA, 15 bp, Homo sapiens
ctttggaagcagaat

SEQ ID NO: 1610343 - DNA, 15 bp, Homo sapiens
actttggaagcagaa

SEQ ID NO: 1610344 - DNA, 15 bp, Homo sapiens
tactttggaagcaga

SEQ ID NO: 1610345 - DNA, 15 bp, Homo sapiens
atactttggaagcag

SEQ ID NO: 1610346 - DNA, 15 bp, Homo sapiens
gatactttggaagca

SEQ ID NO: 1610347 - DNA, 15 bp, Homo sapiens
agatactttggaagc

SEQ ID NO: 1610348 - DNA, 15 bp, Homo sapiens
gagatactttggaag

SEQ ID NO: 1610349 - DNA, 15 bp, Homo sapiens
agagatactttggaa

SEQ ID NO: 1610350 - DNA, 15 bp, Homo sapiens
gagagatactttgga

SEQ ID NO: 1610351 - DNA, 15 bp, Homo sapiens
tgagagatactttgg

SEQ ID NO: 1610352 - DNA, 15 bp, Homo sapiens
ctgagagatactttg

SEQ ID NO: 1610353 - DNA, 15 bp, Homo sapiens
tctgagagatacttt

SEQ ID NO: 1610354 - DNA, 15 bp, Homo sapiens
atctgagagatactt

SEQ ID NO: 1610355 - DNA, 15 bp, Homo sapiens
gatctgagagatact

SEQ ID NO: 1610356 - DNA, 15 bp, Homo sapiens
agatctgagagatac

SEQ ID NO: 1610357 - DNA, 15 bp, Homo sapiens
cagatctgagagata

SEQ ID NO: 1610358 - DNA, 15 bp, Homo sapiens
tcagatctgagagat

SEQ ID NO: 1610359 - DNA, 15 bp, Homo sapiens
gtcagatctgagaga

SEQ ID NO: 1610360 - DNA, 15 bp, Homo sapiens
ggtcagatctgagag

SEQ ID NO: 1610361 - DNA, 15 bp, Homo sapiens
tggtcagatctgaga

SEQ ID NO: 1610362 - DNA, 15 bp, Homo sapiens
atggtcagatctgag

SEQ ID NO: 1610363 - DNA, 15 bp, Homo sapiens
aatggtcagatctga

SEQ ID NO: 1610364 - DNA, 15 bp, Homo sapiens
caatggtcagatctg

SEQ ID NO: 1610365 - DNA, 15 bp, Homo sapiens
acaatggtcagatct

SEQ ID NO: 1610366 - DNA, 15 bp, Homo sapiens
aacaatggtcagatc

SEQ ID NO: 1610367 - DNA, 15 bp, Homo sapiens
gaacaatggtcagat

SEQ ID NO: 1610368 - DNA, 15 bp, Homo sapiens
agaacaatggtcaga

SEQ ID NO: 1610369 - DNA, 15 bp, Homo sapiens
gagaacaatggtcag

SEQ ID NO: 1610370 - DNA, 15 bp, Homo sapiens
ggagaacaatggtca

SEQ ID NO: 1610371 - DNA, 15 bp, Homo sapiens
tggagaacaatggtc

SEQ ID NO: 1610372 - DNA, 15 bp, Homo sapiens
atggagaacaatggt

SEQ ID NO: 1610373 - DNA, 15 bp, Homo sapiens
gatggagaacaatgg

SEQ ID NO: 1610374 - DNA, 15 bp, Homo sapiens
agatggagaacaatg

SEQ ID NO: 1610375 - DNA, 15 bp, Homo sapiens
aagatggagaacaat

SEQ ID NO: 1610376 - DNA, 15 bp, Homo sapiens
gaagatggagaacaa

SEQ ID NO: 1610377 - DNA, 15 bp, Homo sapiens
tgaagatggagaaca

SEQ ID NO: 1610378 - DNA, 15 bp, Homo sapiens
gtgaagatggagaac

SEQ ID NO: 1610379 - DNA, 15 bp, Homo sapiens
tgtgaagatggagaa

SEQ ID NO: 1610380 - DNA, 15 bp, Homo sapiens
ctgtgaagatggaga

SEQ ID NO: 1610381 - DNA, 15 bp, Homo sapiens
gctgtgaagatggag

SEQ ID NO: 1610382 - DNA, 15 bp, Homo sapiens
agctgtgaagatgga

SEQ ID NO: 1610383 - DNA, 15 bp, Homo sapiens
cagctgtgaagatgg

SEQ ID NO: 1610384 - DNA, 15 bp, Homo sapiens
gcagctgtgaagatg

SEQ ID NO: 1610385 - DNA, 15 bp, Homo sapiens
ggcagctgtgaagat

SEQ ID NO: 1610386 - DNA, 15 bp, Homo sapiens
tggcagctgtgaaga

SEQ ID NO: 1610387 - DNA, 15 bp, Homo sapiens
atggcagctgtgaag

SEQ ID NO: 1610388 - DNA, 15 bp, Homo sapiens
gatggcagctgtgaa

SEQ ID NO: 1610389 - DNA, 15 bp, Homo sapiens
cgatggcagctgtga

SEQ ID NO: 1610390 - DNA, 15 bp, Homo sapiens
gcgatggcagctgtg

SEQ ID NO: 1610391 - DNA, 15 bp, Homo sapiens
cgcgatggcagctgt

SEQ ID NO: 1610392 - DNA, 15 bp, Homo sapiens
ccgcgatggcagctg

SEQ ID NO: 1610393 - DNA, 15 bp, Homo sapiens
accgcgatggcagct

SEQ ID NO: 1610394 - DNA, 15 bp, Homo sapiens
gaccgcgatggcagc

SEQ ID NO: 1610395 - DNA, 15 bp, Homo sapiens
agaccgcgatggcag

SEQ ID NO: 1610396 - DNA, 15 bp, Homo sapiens
cagaccgcgatggca

SEQ ID NO: 1610397 - DNA, 15 bp, Homo sapiens
tcagaccgcgatggc

SEQ ID NO: 1610398 - DNA, 15 bp, Homo sapiens
ctcagaccgcgatgg

SEQ ID NO: 1610399 - DNA, 15 bp, Homo sapiens
gctcagaccgcgatg

SEQ ID NO: 1610400 - DNA, 15 bp, Homo sapiens
ggctcagaccgcgat

SEQ ID NO: 1610401 - DNA, 15 bp, Homo sapiens
gggctcagaccgcga

SEQ ID NO: 1610402 - DNA, 15 bp, Homo sapiens
ggggctcagaccgcg

SEQ ID NO: 1610403 - DNA, 15 bp, Homo sapiens
gggggctcagaccgc

SEQ ID NO: 1610404 - DNA, 15 bp, Homo sapiens
cgggggctcagaccg

SEQ ID NO: 1610405 - DNA, 15 bp, Homo sapiens
acgggggctcagacc

SEQ ID NO: 1610406 - DNA, 15 bp, Homo sapiens
gacgggggctcagac

SEQ ID NO: 1610407 - DNA, 15 bp, Homo sapiens
tgacgggggctcaga

SEQ ID NO: 1610408 - DNA, 15 bp, Homo sapiens
gtgacgggggctcag

SEQ ID NO: 1610409 - DNA, 15 bp, Homo sapiens
ggtgacgggggctca

SEQ ID NO: 1610410 - DNA, 15 bp, Homo sapiens
aggtgacgggggctc

SEQ ID NO: 1610411 - DNA, 15 bp, Homo sapiens
gaggtgacgggggct

SEQ ID NO: 1610412 - DNA, 15 bp, Homo sapiens
agaggtgacgggggc

SEQ ID NO: 1610413 - DNA, 15 bp, Homo sapiens
gagaggtgacggggg

SEQ ID NO: 1610414 - DNA, 15 bp, Homo sapiens
tgagaggtgacgggg

SEQ ID NO: 1610415 - DNA, 15 bp, Homo sapiens
gtgagaggtgacggg

SEQ ID NO: 1610416 - DNA, 15 bp, Homo sapiens
ggtgagaggtgacgg

SEQ ID NO: 1610417 - DNA, 15 bp, Homo sapiens
tggtgagaggtgacg

SEQ ID NO: 1610418 - DNA, 15 bp, Homo sapiens
ctggtgagaggtgac

SEQ ID NO: 1610419 - DNA, 15 bp, Homo sapiens
gctggtgagaggtga

SEQ ID NO: 1610420 - DNA, 15 bp, Homo sapiens
cgctggtgagaggtg

SEQ ID NO: 1610421 - DNA, 15 bp, Homo sapiens
acgctggtgagaggt

SEQ ID NO: 1610422 - DNA, 15 bp, Homo sapiens
cacgctggtgagagg

SEQ ID NO: 1610423 - DNA, 15 bp, Homo sapiens
tcacgctggtgagag

SEQ ID NO: 1610424 - DNA, 15 bp, Homo sapiens
gtcacgctggtgaga

SEQ ID NO: 1610425 - DNA, 15 bp, Homo sapiens
ggtcacgctggtgag

SEQ ID NO: 1610426 - DNA, 15 bp, Homo sapiens
cggtcacgctggtga

SEQ ID NO: 1610427 - DNA, 15 bp, Homo sapiens
acggtcacgctggtg

SEQ ID NO: 1610428 - DNA, 15 bp, Homo sapiens
gacggtcacgctggt

SEQ ID NO: 1610429 - DNA, 15 bp, Homo sapiens
agacggtcacgctgg

SEQ ID NO: 1610430 - DNA, 15 bp, Homo sapiens
gagacggtcacgctg

SEQ ID NO: 1610431 - DNA, 15 bp, Homo sapiens
ggagacggtcacgct

SEQ ID NO: 1610432 - DNA, 15 bp, Homo sapiens
tggagacggtcacgc

SEQ ID NO: 1610433 - DNA, 15 bp, Homo sapiens
gtggagacggtcacg

SEQ ID NO: 1610434 - DNA, 15 bp, Homo sapiens
ggtggagacggtcac

SEQ ID NO: 1610435 - DNA, 15 bp, Homo sapiens
aggtggagacggtca

SEQ ID NO: 1610436 - DNA, 15 bp, Homo sapiens
gaggtggagacggtc

SEQ ID NO: 1610437 - DNA, 15 bp, Homo sapiens
ggaggtggagacggt

SEQ ID NO: 1610438 - DNA, 15 bp, Homo sapiens
aggaggtggagacgg

SEQ ID NO: 1610439 - DNA, 15 bp, Homo sapiens
gaggaggtggagacg

SEQ ID NO: 1610440 - DNA, 15 bp, Homo sapiens
ggaggaggtggagac

SEQ ID NO: 1610441 - DNA, 15 bp, Homo sapiens
aggaggaggtggaga

SEQ ID NO: 1610442 - DNA, 15 bp, Homo sapiens
caggaggaggtggag

SEQ ID NO: 1610443 - DNA, 15 bp, Homo sapiens
gcaggaggaggtgga

SEQ ID NO: 1610444 - DNA, 15 bp, Homo sapiens
agcaggaggaggtgg

SEQ ID NO: 1610445 - DNA, 15 bp, Homo sapiens
gagcaggaggaggtg

SEQ ID NO: 1610446 - DNA, 15 bp, Homo sapiens
ggagcaggaggaggt

SEQ ID NO: 1610447 - DNA, 15 bp, Homo sapiens
gggagcaggaggagg

SEQ ID NO: 1610448 - DNA, 15 bp, Homo sapiens
agggagcaggaggag

SEQ ID NO: 1610449 - DNA, 15 bp, Homo sapiens
gagggagcaggagga

SEQ ID NO: 1610450 - DNA, 15 bp, Homo sapiens
agagggagcaggagg

SEQ ID NO: 1610451 - DNA, 15 bp, Homo sapiens
gagagggagcaggag

SEQ ID NO: 1610452 - DNA, 15 bp, Homo sapiens
agagagggagcagga

SEQ ID NO: 1610453 - DNA, 15 bp, Homo sapiens
aagagagggagcagg

SEQ ID NO: 1610454 - DNA, 15 bp, Homo sapiens
caagagagggagcag

SEQ ID NO: 1610455 - DNA, 15 bp, Homo sapiens
gcaagagagggagca

SEQ ID NO: 1610456 - DNA, 15 bp, Homo sapiens
agcaagagagggagc

SEQ ID NO: 1610457 - DNA, 15 bp, Homo sapiens
gagcaagagagggag

SEQ ID NO: 1610458 - DNA, 15 bp, Homo sapiens
tgagcaagagaggga

SEQ ID NO: 1610459 - DNA, 15 bp, Homo sapiens
gtgagcaagagaggg

SEQ ID NO: 1610460 - DNA, 15 bp, Homo sapiens
ggtgagcaagagagg

SEQ ID NO: 1610461 - DNA, 15 bp, Homo sapiens
aggtgagcaagagag

SEQ ID NO: 1610462 - DNA, 15 bp, Homo sapiens
aaggtgagcaagaga

SEQ ID NO: 1610463 - DNA, 15 bp, Homo sapiens
gaaggtgagcaagag

SEQ ID NO: 1610464 - DNA, 15 bp, Homo sapiens
tgaaggtgagcaaga

SEQ ID NO: 1610465 - DNA, 15 bp, Homo sapiens
ctgaaggtgagcaag

SEQ ID NO: 1610466 - DNA, 15 bp, Homo sapiens
gctgaaggtgagcaa

SEQ ID NO: 1610467 - DNA, 15 bp, Homo sapiens
ggctgaaggtgagca

SEQ ID NO: 1610468 - DNA, 15 bp, Homo sapiens
tggctgaaggtgagc

SEQ ID NO: 1610469 - DNA, 15 bp, Homo sapiens
ttggctgaaggtgag

SEQ ID NO: 1610470 - DNA, 15 bp, Homo sapiens
attggctgaaggtga

SEQ ID NO: 1610471 - DNA, 15 bp, Homo sapiens
aattggctgaaggtg

SEQ ID NO: 1610472 - DNA, 15 bp, Homo sapiens
gaattggctgaaggt

SEQ ID NO: 1610473 - DNA, 15 bp, Homo sapiens
agaattggctgaagg

SEQ ID NO: 1610474 - DNA, 15 bp, Homo sapiens
gagaattggctgaag

SEQ ID NO: 1610475 - DNA, 15 bp, Homo sapiens
ggagaattggctgaa

SEQ ID NO: 1610476 - DNA, 15 bp, Homo sapiens
tggagaattggctga

SEQ ID NO: 1610477 - DNA, 15 bp, Homo sapiens
ttggagaattggctg

SEQ ID NO: 1610478 - DNA, 15 bp, Homo sapiens
tttggagaattggct

SEQ ID NO: 1610479 - DNA, 15 bp, Homo sapiens
ctttggagaattggc

SEQ ID NO: 1610480 - DNA, 15 bp, Homo sapiens
gctttggagaattgg

SEQ ID NO: 1610481 - DNA, 15 bp, Homo sapiens
ggctttggagaattg

SEQ ID NO: 1610482 - DNA, 15 bp, Homo sapiens
tggctttggagaatt

SEQ ID NO: 1610483 - DNA, 15 bp, Homo sapiens
ctggctttggagaat

SEQ ID NO: 1610484 - DNA, 15 bp, Homo sapiens
tctggctttggagaa

SEQ ID NO: 1610485 - DNA, 15 bp, Homo sapiens
ctctggctttggaga

SEQ ID NO: 1610486 - DNA, 15 bp, Homo sapiens
actctggctttggag

SEQ ID NO: 1610487 - DNA, 15 bp, Homo sapiens
tactctggctttgga

SEQ ID NO: 1610488 - DNA, 15 bp, Homo sapiens
ctactctggctttgg

SEQ ID NO: 1610489 - DNA, 15 bp, Homo sapiens
tctactctggctttg

SEQ ID NO: 1610490 - DNA, 15 bp, Homo sapiens
gtctactctggcttt

SEQ ID NO: 1610491 - DNA, 15 bp, Homo sapiens
agtctactctggctt

SEQ ID NO: 1610492 - DNA, 15 bp, Homo sapiens
aagtctactctggct

SEQ ID NO: 1610493 - DNA, 15 bp, Homo sapiens
aaagtctactctggc

SEQ ID NO: 1610494 - DNA, 15 bp, Homo sapiens
gaaagtctactctgg

SEQ ID NO: 1610495 - DNA, 15 bp, Homo sapiens
cgaaagtctactctg

SEQ ID NO: 1610496 - DNA, 15 bp, Homo sapiens
acgaaagtctactct

SEQ ID NO: 1610497 - DNA, 15 bp, Homo sapiens
aacgaaagtctactc

SEQ ID NO: 1610498 - DNA, 15 bp, Homo sapiens
aaacgaaagtctact

SEQ ID NO: 1610499 - DNA, 15 bp, Homo sapiens
taaacgaaagtctac

SEQ ID NO: 1610500 - DNA, 15 bp, Homo sapiens
ataaacgaaagtcta

SEQ ID NO: 1610501 - DNA, 15 bp, Homo sapiens
aataaacgaaagtct

SEQ ID NO: 1610502 - DNA, 15 bp, Homo sapiens
aaataaacgaaagtc

SEQ ID NO: 1610503 - DNA, 15 bp, Homo sapiens
aaaataaacgaaagt

SEQ ID NO: 1610504 - DNA, 15 bp, Homo sapiens
aaaaataaacgaaag

SEQ ID NO: 1610505 - DNA, 15 bp, Homo sapiens
aaaaaataaacgaaa

SEQ ID NO: 1610506 - DNA, 15 bp, Homo sapiens
taaaaaataaacgaa

SEQ ID NO: 1610507 - DNA, 15 bp, Homo sapiens
ttaaaaaataaacga

SEQ ID NO: 1610508 - DNA, 15 bp, Homo sapiens
tttaaaaaataaacg

SEQ ID NO: 1610509 - DNA, 15 bp, Homo sapiens
atttaaaaaataaac

SEQ ID NO: 1610510 - DNA, 15 bp, Homo sapiens
aatttaaaaaataaa

SEQ ID NO: 1610511 - DNA, 15 bp, Homo sapiens
aaatttaaaaaataa

SEQ ID NO: 1610512 - DNA, 15 bp, Homo sapiens
taaatttaaaaaata

SEQ ID NO: 1610513 - DNA, 15 bp, Homo sapiens
ataaatttaaaaaat

SEQ ID NO: 1610514 - DNA, 15 bp, Homo sapiens
aataaatttaaaaaa

SEQ ID NO: 1610515 - DNA, 15 bp, Homo sapiens
aaataaatttaaaaa

SEQ ID NO: 1610516 - DNA, 15 bp, Homo sapiens
aaaataaatttaaaa

SEQ ID NO: 1610517 - DNA, 15 bp, Homo sapiens
taaaataaatttaaa

SEQ ID NO: 1610518 - DNA, 15 bp, Homo sapiens
ataaaataaatttaa

SEQ ID NO: 1610519 - DNA, 15 bp, Homo sapiens
aataaaataaattta

SEQ ID NO: 1610520 - DNA, 15 bp, Homo sapiens
aaataaaataaattt

SEQ ID NO: 1610521 - DNA, 15 bp, Homo sapiens
aaaataaaataaatt

SEQ ID NO: 1610522 - DNA, 15 bp, Homo sapiens
aaataaaaataaaat

SEQ ID NO: 1610523 - DNA, 15 bp, Homo sapiens
taaataaaataaaaa

SEQ ID NO: 1610524 - DNA, 15 bp, Homo sapiens
ataaataaaataaaa

SEQ ID NO: 1610525 - DNA, 15 bp, Homo sapiens
aaaataaataaaata

SEQ ID NO: 1610526 - DNA, 15 bp, Homo sapiens
taaaataaataaaat

SEQ ID NO: 1610527 - DNA, 15 bp, Homo sapiens
ataaaataaataaaa

SEQ ID NO: 1610528 - DNA, 15 bp, Homo sapiens
tacaaaaaataaaaa

SEQ ID NO: 1610529 - DNA, 15 bp, Homo sapiens
ttacaaaaaataaaa

SEQ ID NO: 1610530 - DNA, 15 bp, Homo sapiens
tttacaaaaaataaa

SEQ ID NO: 1610531 - DNA, 15 bp, Homo sapiens
ctttacaaaaaataa

SEQ ID NO: 1610532 - DNA, 15 bp, Homo sapiens
tctttacaaaaaata

SEQ ID NO: 1610533 - DNA, 15 bp, Homo sapiens
gtctttacaaaaaat

SEQ ID NO: 1610534 - DNA, 15 bp, Homo sapiens
tgtctttacaaaaaa

SEQ ID NO: 1610535 - DNA, 15 bp, Homo sapiens
ttgtctttacaaaaa

SEQ ID NO: 1610536 - DNA, 15 bp, Homo sapiens
cttgtctttacaaaa

SEQ ID NO: 1610537 - DNA, 15 bp, Homo sapiens
ccttgtctttacaaa

SEQ ID NO: 1610538 - DNA, 15 bp, Homo sapiens
accttgtctttacaa

SEQ ID NO: 1610539 - DNA, 15 bp, Homo sapiens
gaccttgtctttaca

SEQ ID NO: 1610540 - DNA, 15 bp, Homo sapiens
agaccttgtctttac

SEQ ID NO: 1610541 - DNA, 15 bp, Homo sapiens
aagaccttgtcttta

SEQ ID NO: 1610542 - DNA, 15 bp, Homo sapiens
caagaccttgtcttt

SEQ ID NO: 1610543 - DNA, 15 bp, Homo sapiens
gcaagaccttgtctt

SEQ ID NO: 1610544 - DNA, 15 bp, Homo sapiens
aagcaagaccttgtc

SEQ ID NO: 1610545 - DNA, 15 bp, Homo sapiens
caagcaagaccttgt

SEQ ID NO: 1610546 - DNA, 15 bp, Homo sapiens
gcaagcaagaccttg

SEQ ID NO: 1610547 - DNA, 15 bp, Homo sapiens
agcaagcaagacctt

SEQ ID NO: 1610548 - DNA, 15 bp, Homo sapiens
tagcaagcaagacct

SEQ ID NO: 1610549 - DNA, 15 bp, Homo sapiens
ttagcaagcaagacc

SEQ ID NO: 1610550 - DNA, 15 bp, Homo sapiens
cttagcaagcaagac

SEQ ID NO: 1610551 - DNA, 15 bp, Homo sapiens
acttagcaagcaaga

SEQ ID NO: 1610552 - DNA, 15 bp, Homo sapiens
aacttagcaagcaag

SEQ ID NO: 1610553 - DNA, 15 bp, Homo sapiens
caacttagcaagcaa

SEQ ID NO: 1610554 - DNA, 15 bp, Homo sapiens
gcaacttagcaagca

SEQ ID NO: 1610555 - DNA, 15 bp, Homo sapiens
ggcaacttagcaagc

SEQ ID NO: 1610556 - DNA, 15 bp, Homo sapiens
gggcaacttagcaag

SEQ ID NO: 1610557 - DNA, 15 bp, Homo sapiens
tgggcaacttagcaa

SEQ ID NO: 1610558 - DNA, 15 bp, Homo sapiens
ctgggcaacttagca

SEQ ID NO: 1610559 - DNA, 15 bp, Homo sapiens
actgggcaacttagc

SEQ ID NO: 1610560 - DNA, 15 bp, Homo sapiens
gactgggcaacttag

SEQ ID NO: 1610561 - DNA, 15 bp, Homo sapiens
agactgggcaactta

SEQ ID NO: 1610562 - DNA, 15 bp, Homo sapiens
cagactgggcaactt

SEQ ID NO: 1610563 - DNA, 15 bp, Homo sapiens
ccagactgggcaact

SEQ ID NO: 1610564 - DNA, 15 bp, Homo sapiens
tccagactgggcaac

SEQ ID NO: 1610565 - DNA, 15 bp, Homo sapiens
gtccagactgggcaa

SEQ ID NO: 1610566 - DNA, 15 bp, Homo sapiens
agtccagactgggca

SEQ ID NO: 1610567 - DNA, 15 bp, Homo sapiens
gagtccagactgggc

SEQ ID NO: 1610568 - DNA, 15 bp, Homo sapiens
tgagtccagactggg

SEQ ID NO: 1610569 - DNA, 15 bp, Homo sapiens
ttgagtccagactgg

SEQ ID NO: 1610570 - DNA, 15 bp, Homo sapiens
tttgagtccagactg

SEQ ID NO: 1610571 - DNA, 15 bp, Homo sapiens
gtttgagtccagact

SEQ ID NO: 1610572 - DNA, 15 bp, Homo sapiens
agtttgagtccagac

SEQ ID NO: 1610573 - DNA, 15 bp, Homo sapiens
gagtttgagtccaga

SEQ ID NO: 1610574 - DNA, 15 bp, Homo sapiens
agagtttgagtccag

SEQ ID NO: 1610575 - DNA, 15 bp, Homo sapiens
aagagtttgagtcca

SEQ ID NO: 1610576 - DNA, 15 bp, Homo sapiens
caagagtttgagtcc

SEQ ID NO: 1610577 - DNA, 15 bp, Homo sapiens
ccaagagtttgagtc

SEQ ID NO: 1610578 - DNA, 15 bp, Homo sapiens
cccaagagtttgagt

SEQ ID NO: 1610579 - DNA, 15 bp, Homo sapiens
gcccaagagtttgag

SEQ ID NO: 1610580 - DNA, 15 bp, Homo sapiens
agcccaagagtttga

SEQ ID NO: 1610581 - DNA, 15 bp, Homo sapiens
gagcccaagagtttg

SEQ ID NO: 1610582 - DNA, 15 bp, Homo sapiens
tgagcccaagagttt

SEQ ID NO: 1610583 - DNA, 15 bp, Homo sapiens
ttgagcccaagagtt

SEQ ID NO: 1610584 - DNA, 15 bp, Homo sapiens
cttgagcccaagagt

SEQ ID NO: 1610585 - DNA, 15 bp, Homo sapiens
gcttgagcccaagag

SEQ ID NO: 1610586 - DNA, 15 bp, Homo sapiens
cgcttgagcccaaga

SEQ ID NO: 1610587 - DNA, 15 bp, Homo sapiens
tcgcttgagcccaag

SEQ ID NO: 1610588 - DNA, 15 bp, Homo sapiens
atcgcttgagcccaa

SEQ ID NO: 1610589 - DNA, 15 bp, Homo sapiens
ttgcacctgtaatcc

SEQ ID NO: 1610590 - DNA, 15 bp, Homo sapiens
cttgcacctgtaatc

SEQ ID NO: 1610591 - DNA, 15 bp, Homo sapiens
gcttgcacctgtaat

SEQ ID NO: 1610592 - DNA, 15 bp, Homo sapiens
ggcttgcacctgtaa

SEQ ID NO: 1610593 - DNA, 15 bp, Homo sapiens
tggcttgcacctgta

SEQ ID NO: 1610594 - DNA, 15 bp, Homo sapiens
atggcttgcacctgt

SEQ ID NO: 1610595 - DNA, 15 bp, Homo sapiens
gatggcttgcacctg

SEQ ID NO: 1610596 - DNA, 15 bp, Homo sapiens
tgatggcttgcacct

SEQ ID NO: 1610597 - DNA, 15 bp, Homo sapiens
gtgatggcttgcacc

SEQ ID NO: 1610598 - DNA, 15 bp, Homo sapiens
agtgatggcttgcac

SEQ ID NO: 1610599 - DNA, 15 bp, Homo sapiens
gagtgatggcttgca

SEQ ID NO: 1610600 - DNA, 15 bp, Homo sapiens
ggagtgatggcttgc

SEQ ID NO: 1610601 - DNA, 15 bp, Homo sapiens
aggagtgatggcttg

SEQ ID NO: 1610602 - DNA, 15 bp, Homo sapiens
caggagtgatggctt

SEQ ID NO: 1610603 - DNA, 15 bp, Homo sapiens
ccaggagtgatggct

SEQ ID NO: 1610604 - DNA, 15 bp, Homo sapiens
gccaggagtgatggc

SEQ ID NO: 1610605 - DNA, 15 bp, Homo sapiens
ggccaggagtgatgg

SEQ ID NO: 1610606 - DNA, 15 bp, Homo sapiens
gggccaggagtgatg

SEQ ID NO: 1610607 - DNA, 15 bp, Homo sapiens
tgggccaggagtgat

SEQ ID NO: 1610608 - DNA, 15 bp, Homo sapiens
ctgggccaggagtga

SEQ ID NO: 1610609 - DNA, 15 bp, Homo sapiens
tctgggccaggagtg

SEQ ID NO: 1610610 - DNA, 15 bp, Homo sapiens
ctctgggccaggagt

SEQ ID NO: 1610611 - DNA, 15 bp, Homo sapiens
actctgggccaggag

SEQ ID NO: 1610612 - DNA, 15 bp, Homo sapiens
cactctgggccagga

SEQ ID NO: 1610613 - DNA, 15 bp, Homo sapiens
ccactctgggccagg

SEQ ID NO: 1610614 - DNA, 15 bp, Homo sapiens
tccactctgggccag

SEQ ID NO: 1610615 - DNA, 15 bp, Homo sapiens
gtccactctgggcca

SEQ ID NO: 1610616 - DNA, 15 bp, Homo sapiens
agtccactctgggcc

SEQ ID NO: 1610617 - DNA, 15 bp, Homo sapiens
aagtccactctgggc

SEQ ID NO: 1610618 - DNA, 15 bp, Homo sapiens
gaagtccactctggg

SEQ ID NO: 1610619 - DNA, 15 bp, Homo sapiens
agaagtccactctgg

SEQ ID NO: 1610620 - DNA, 15 bp, Homo sapiens
tagaagtccactctg

SEQ ID NO: 1610621 - DNA, 15 bp, Homo sapiens
ttagaagtccactct

SEQ ID NO: 1610622 - DNA, 15 bp, Homo sapiens
tttagaagtccactc

SEQ ID NO: 1610623 - DNA, 15 bp, Homo sapiens
ctttagaagtccact

SEQ ID NO: 1610624 - DNA, 15 bp, Homo sapiens
tctttagaagtccac

SEQ ID NO: 1610625 - DNA, 15 bp, Homo sapiens
gtctttagaagtcca

SEQ ID NO: 1610626 - DNA, 15 bp, Homo sapiens
tgtctttagaagtcc

SEQ ID NO: 1610627 - DNA, 15 bp, Homo sapiens
ttgtctttagaagtc

SEQ ID NO: 1610628 - DNA, 15 bp, Homo sapiens
tttgtctttagaagt

SEQ ID NO: 1610629 - DNA, 15 bp, Homo sapiens
atttgtctttagaag

SEQ ID NO: 1610630 - DNA, 15 bp, Homo sapiens
gatttgtctttagaa

SEQ ID NO: 1610631 - DNA, 15 bp, Homo sapiens
tgatttgtctttaga

SEQ ID NO: 1610632 - DNA, 15 bp, Homo sapiens
ctgatttgtctttag

SEQ ID NO: 1610633 - DNA, 15 bp, Homo sapiens
tctgatttgtcttta

SEQ ID NO: 1610634 - DNA, 15 bp, Homo sapiens
ttctgatttgtcttt

SEQ ID NO: 1610635 - DNA, 15 bp, Homo sapiens
gttctgatttgtctt

SEQ ID NO: 1610636 - DNA, 15 bp, Homo sapiens
tgttctgatttgtct

SEQ ID NO: 1610637 - DNA, 15 bp, Homo sapiens
atgttctgatttgtc

SEQ ID NO: 1610638 - DNA, 15 bp, Homo sapiens
catgttctgatttgt

SEQ ID NO: 1610639 - DNA, 15 bp, Homo sapiens
acatgttctgatttg

SEQ ID NO: 1610640 - DNA, 15 bp, Homo sapiens
cacatgttctgattt

SEQ ID NO: 1610641 - DNA, 15 bp, Homo sapiens
ccacatgttctgatt

SEQ ID NO: 1610642 - DNA, 15 bp, Homo sapiens
gccacatgttctgat

SEQ ID NO: 1610643 - DNA, 15 bp, Homo sapiens
agccacatgttctga

SEQ ID NO: 1610644 - DNA, 15 bp, Homo sapiens
gagccacatgttctg

SEQ ID NO: 1610645 - DNA, 15 bp, Homo sapiens
ggagccacatgttct

SEQ ID NO: 1610646 - DNA, 15 bp, Homo sapiens
gggagccacatgttc

SEQ ID NO: 1610647 - DNA, 15 bp, Homo sapiens
agggagccacatgtt

SEQ ID NO: 1610648 - DNA, 15 bp, Homo sapiens
cagggagccacatgt

SEQ ID NO: 1610649 - DNA, 15 bp, Homo sapiens
gcagggagccacatg

SEQ ID NO: 1610650 - DNA, 15 bp, Homo sapiens
agcagggagccacat

SEQ ID NO: 1610651 - DNA, 15 bp, Homo sapiens
aagcagggagccaca

SEQ ID NO: 1610652 - DNA, 15 bp, Homo sapiens
taagcagggagccac

SEQ ID NO: 1610653 - DNA, 15 bp, Homo sapiens
ttaagcagggagcca

SEQ ID NO: 1610654 - DNA, 15 bp, Homo sapiens
tttaagcagggagcc

SEQ ID NO: 1610655 - DNA, 15 bp, Homo sapiens
ctttaagcagggagc

SEQ ID NO: 1610656 - DNA, 15 bp, Homo sapiens
gctttaagcagggag

SEQ ID NO: 1610657 - DNA, 15 bp, Homo sapiens
agctttaagcaggga

SEQ ID NO: 1610658 - DNA, 15 bp, Homo sapiens
gagctttaagcaggg

SEQ ID NO: 1610659 - DNA, 15 bp, Homo sapiens
agagctttaagcagg

SEQ ID NO: 1610660 - DNA, 15 bp, Homo sapiens
aagagctttaagcag

SEQ ID NO: 1610661 - DNA, 15 bp, Homo sapiens
gaagagctttaagca

SEQ ID NO: 1610662 - DNA, 15 bp, Homo sapiens
tgaagagctttaagc

SEQ ID NO: 1610663 - DNA, 15 bp, Homo sapiens
gtgaagagctttaag

SEQ ID NO: 1610664 - DNA, 15 bp, Homo sapiens
agtgaagagctttaa

SEQ ID NO: 1610665 - DNA, 15 bp, Homo sapiens
cagtgaagagcttta

SEQ ID NO: 1610666 - DNA, 15 bp, Homo sapiens
gcagtgaagagcttt

SEQ ID NO: 1610667 - DNA, 15 bp, Homo sapiens
ggcagtgaagagctt

SEQ ID NO: 1610668 - DNA, 15 bp, Homo sapiens
aggcagtgaagagct

SEQ ID NO: 1610669 - DNA, 15 bp, Homo sapiens
aaggcagtgaagagc

SEQ ID NO: 1610670 - DNA, 15 bp, Homo sapiens
gaaggcagtgaagag

SEQ ID NO: 1610671 - DNA, 15 bp, Homo sapiens
ggaaggcagtgaaga

SEQ ID NO: 1610672 - DNA, 15 bp, Homo sapiens
gggaaggcagtgaag

SEQ ID NO: 1610673 - DNA, 15 bp, Homo sapiens
tgggaaggcagtgaa

SEQ ID NO: 1610674 - DNA, 15 bp, Homo sapiens
atgggaaggcagtga

SEQ ID NO: 1610675 - DNA, 15 bp, Homo sapiens
catgggaaggcagtg

SEQ ID NO: 1610676 - DNA, 15 bp, Homo sapiens
gcatgggaaggcagt

SEQ ID NO: 1610677 - DNA, 15 bp, Homo sapiens
tgcatgggaaggcag

SEQ ID NO: 1610678 - DNA, 15 bp, Homo sapiens
ttgcatgggaaggca

SEQ ID NO: 1610679 - DNA, 15 bp, Homo sapiens
attgcatgggaaggc

SEQ ID NO: 1610680 - DNA, 15 bp, Homo sapiens
gattgcatgggaagg

SEQ ID NO: 1610681 - DNA, 15 bp, Homo sapiens
tgattgcatgggaag

SEQ ID NO: 1610682 - DNA, 15 bp, Homo sapiens
ctgattgcatgggaa

SEQ ID NO: 1610683 - DNA, 15 bp, Homo sapiens
tctgattgcatggga

SEQ ID NO: 1610684 - DNA, 15 bp, Homo sapiens
ttctgattgcatggg

SEQ ID NO: 1610685 - DNA, 15 bp, Homo sapiens
attctgattgcatgg

SEQ ID NO: 1610686 - DNA, 15 bp, Homo sapiens
tattctgattgcatg

SEQ ID NO: 1610687 - DNA, 15 bp, Homo sapiens
atattctgattgcat

SEQ ID NO: 1610688 - DNA, 15 bp, Homo sapiens
tatattctgattgca

SEQ ID NO: 1610689 - DNA, 15 bp, Homo sapiens
ttatattctgattgc

SEQ ID NO: 1610690 - DNA, 15 bp, Homo sapiens
attatattctgattg

SEQ ID NO: 1610691 - DNA, 15 bp, Homo sapiens
gattatattctgatt

SEQ ID NO: 1610692 - DNA, 15 bp, Homo sapiens
agattatattctgat

SEQ ID NO: 1610693 - DNA, 15 bp, Homo sapiens
tagattatattctga

SEQ ID NO: 1610694 - DNA, 15 bp, Homo sapiens
gtagattatattctg

SEQ ID NO: 1610695 - DNA, 15 bp, Homo sapiens
tgtagattatattct

SEQ ID NO: 1610696 - DNA, 15 bp, Homo sapiens
ctgtagattatattc

SEQ ID NO: 1610697 - DNA, 15 bp, Homo sapiens
actgtagattatatt

SEQ ID NO: 1610698 - DNA, 15 bp, Homo sapiens
aactgtagattatat

SEQ ID NO: 1610699 - DNA, 15 bp, Homo sapiens
caactgtagattata

SEQ ID NO: 1610700 - DNA, 15 bp, Homo sapiens
ccaactgtagattat

SEQ ID NO: 1610701 - DNA, 15 bp, Homo sapiens
gccaactgtagatta

SEQ ID NO: 1610702 - DNA, 15 bp, Homo sapiens
ggccaactgtagatt

SEQ ID NO: 1610703 - DNA, 15 bp, Homo sapiens
cggccaactgtagat

SEQ ID NO: 1610704 - DNA, 15 bp, Homo sapiens
ccggccaactgtaga

SEQ ID NO: 1610705 - DNA, 15 bp, Homo sapiens
cccggccaactgtag

SEQ ID NO: 1610706 - DNA, 15 bp, Homo sapiens
gcccggccaactgta

SEQ ID NO: 1610707 - DNA, 15 bp, Homo sapiens
cgcccggccaactgt

SEQ ID NO: 1610708 - DNA, 15 bp, Homo sapiens
gcgcccggccaactg

SEQ ID NO: 1610709 - DNA, 15 bp, Homo sapiens
tgcgcccggccaact

SEQ ID NO: 1610710 - DNA, 15 bp, Homo sapiens
ctgcgcccggccaac

SEQ ID NO: 1610711 - DNA, 15 bp, Homo sapiens
actgcgcccggccaa

SEQ ID NO: 1610712 - DNA, 15 bp, Homo sapiens
gtgagccactgcgcc

SEQ ID NO: 1610713 - DNA, 15 bp, Homo sapiens
cgtgagccactgcgc

SEQ ID NO: 1610714 - DNA, 15 bp, Homo sapiens
gcgtgagccactgcg

SEQ ID NO: 1610715 - DNA, 15 bp, Homo sapiens
ggcgtgagccactgc

SEQ ID NO: 1610716 - DNA, 15 bp, Homo sapiens
aggcgtgagccactg

SEQ ID NO: 1610717 - DNA, 15 bp, Homo sapiens
aggattacaggcgtg

SEQ ID NO: 1610718 - DNA, 15 bp, Homo sapiens
taggattacaggcgt

SEQ ID NO: 1610719 - DNA, 15 bp, Homo sapiens
ttaggattacaggcg

SEQ ID NO: 1610720 - DNA, 15 bp, Homo sapiens
gttaggattacaggc

SEQ ID NO: 1610721 - DNA, 15 bp, Homo sapiens
tgttaggattacagg

SEQ ID NO: 1610722 - DNA, 15 bp, Homo sapiens
ctgttaggattacag

SEQ ID NO: 1610723 - DNA, 15 bp, Homo sapiens
actgttaggattaca

SEQ ID NO: 1610724 - DNA, 15 bp, Homo sapiens
aactgttaggattac

SEQ ID NO: 1610725 - DNA, 15 bp, Homo sapiens
aaactgttaggatta

SEQ ID NO: 1610726 - DNA, 15 bp, Homo sapiens
caaactgttaggatt

SEQ ID NO: 1610727 - DNA, 15 bp, Homo sapiens
ccaaactgttaggat

SEQ ID NO: 1610728 - DNA, 15 bp, Homo sapiens
cccaaactgttagga

SEQ ID NO: 1610729 - DNA, 15 bp, Homo sapiens
tcccaaactgttagg

SEQ ID NO: 1610730 - DNA, 15 bp, Homo sapiens
ctcccaaactgttag

SEQ ID NO: 1610731 - DNA, 15 bp, Homo sapiens
gctcccaaactgtta

SEQ ID NO: 1610732 - DNA, 15 bp, Homo sapiens
ggctcccaaactgtt

SEQ ID NO: 1610733 - DNA, 15 bp, Homo sapiens
gggctcccaaactgt

SEQ ID NO: 1610734 - DNA, 15 bp, Homo sapiens
cgggctcccaaactg

SEQ ID NO: 1610735 - DNA, 15 bp, Homo sapiens
ccgggctcccaaact

SEQ ID NO: 1610736 - DNA, 15 bp, Homo sapiens
tccgggctcccaaac

SEQ ID NO: 1610737 - DNA, 15 bp, Homo sapiens
ctccgggctcccaaa

SEQ ID NO: 1610738 - DNA, 15 bp, Homo sapiens
gctccgggctcccaa

SEQ ID NO: 1610739 - DNA, 15 bp, Homo sapiens
cgctccgggctccca

SEQ ID NO: 1610740 - DNA, 15 bp, Homo sapiens
ccgctccgggctccc

SEQ ID NO: 1610741 - DNA, 15 bp, Homo sapiens
cccgctccgggctcc

SEQ ID NO: 1610742 - DNA, 15 bp, Homo sapiens
acccgctccgggctc

SEQ ID NO: 1610743 - DNA, 15 bp, Homo sapiens
cacccgctccgggct

SEQ ID NO: 1610744 - DNA, 15 bp, Homo sapiens
ccacccgctccgggc

SEQ ID NO: 1610745 - DNA, 15 bp, Homo sapiens
tccacccgctccggg

SEQ ID NO: 1610746 - DNA, 15 bp, Homo sapiens
atccacccgctccgg

SEQ ID NO: 1610747 - DNA, 15 bp, Homo sapiens
gatccacccgctccg

SEQ ID NO: 1610748 - DNA, 15 bp, Homo sapiens
tgatccacccgctcc

SEQ ID NO: 1610749 - DNA, 15 bp, Homo sapiens
atgatccacccgctc

SEQ ID NO: 1610750 - DNA, 15 bp, Homo sapiens
aatgatccacccgct

SEQ ID NO: 1610751 - DNA, 15 bp, Homo sapiens
gtgccaccacgcccg

SEQ ID NO: 1610752 - DNA, 15 bp, Homo sapiens
cgtgccaccacgccc

SEQ ID NO: 1610753 - DNA, 15 bp, Homo sapiens
acgtgccaccacgcc

SEQ ID NO: 1610754 - DNA, 15 bp, Homo sapiens
cacgtgccaccacgc

SEQ ID NO: 1610755 - DNA, 15 bp, Homo sapiens
gcacgtgccaccacg

SEQ ID NO: 1610756 - DNA, 15 bp, Homo sapiens
ggcacgtgccaccac

SEQ ID NO: 1610757 - DNA, 15 bp, Homo sapiens
aggcacgtgccacca

SEQ ID NO: 1610758 - DNA, 15 bp, Homo sapiens
caggcacgtgccacc

SEQ ID NO: 1610759 - DNA, 15 bp, Homo sapiens
acaggcacgtgccac

SEQ ID NO: 1610760 - DNA, 15 bp, Homo sapiens
tacaggcacgtgcca

SEQ ID NO: 1610761 - DNA, 15 bp, Homo sapiens
ttacaggcacgtgcc

SEQ ID NO: 1610762 - DNA, 15 bp, Homo sapiens
attacaggcacgtgc

SEQ ID NO: 1610763 - DNA, 15 bp, Homo sapiens
gattacaggcacgtg

SEQ ID NO: 1610764 - DNA, 15 bp, Homo sapiens
ggattacaggcacgt

SEQ ID NO: 1610765 - DNA, 15 bp, Homo sapiens
gggattacaggcacg

SEQ ID NO: 1610766 - DNA, 15 bp, Homo sapiens
tgcctcccaggtagc

SEQ ID NO: 1610767 - DNA, 15 bp, Homo sapiens
ctgcctcccaggtag

SEQ ID NO: 1610768 - DNA, 15 bp, Homo sapiens
tctgcctcccaggta

SEQ ID NO: 1610769 - DNA, 15 bp, Homo sapiens
tctgcaacctctgcc

SEQ ID NO: 1610770 - DNA, 15 bp, Homo sapiens
ctctgcaacctctgc

SEQ ID NO: 1610771 - DNA, 15 bp, Homo sapiens
tctctgcaacctctg

SEQ ID NO: 1610772 - DNA, 15 bp, Homo sapiens
ctctctgcaacctct

SEQ ID NO: 1610773 - DNA, 15 bp, Homo sapiens
gctctctgcaacctc

SEQ ID NO: 1610774 - DNA, 15 bp, Homo sapiens
ggctctctgcaacct

SEQ ID NO: 1610775 - DNA, 15 bp, Homo sapiens
cggctctctgcaacc

SEQ ID NO: 1610776 - DNA, 15 bp, Homo sapiens
tcggctctctgcaac

SEQ ID NO: 1610777 - DNA, 15 bp, Homo sapiens
ctcggctctctgcaa

SEQ ID NO: 1610778 - DNA, 15 bp, Homo sapiens
tctcggctctctgca

SEQ ID NO: 1610779 - DNA, 15 bp, Homo sapiens
atctcggctctctgc

SEQ ID NO: 1610780 - DNA, 15 bp, Homo sapiens
gatctcggctctctg

SEQ ID NO: 1610781 - DNA, 15 bp, Homo sapiens
cgatctcggctctct

SEQ ID NO: 1610782 - DNA, 15 bp, Homo sapiens
gcgatctcggctctc

SEQ ID NO: 1610783 - DNA, 15 bp, Homo sapiens
cgcgatctcggctct

SEQ ID NO: 1610784 - DNA, 15 bp, Homo sapiens
ctgctcagtcgccca

SEQ ID NO: 1610785 - DNA, 15 bp, Homo sapiens
tctgctcagtcgccc

SEQ ID NO: 1610786 - DNA, 15 bp, Homo sapiens
ttctgctcagtcgcc

SEQ ID NO: 1610787 - DNA, 15 bp, Homo sapiens
gttctgctcagtcgc

SEQ ID NO: 1610788 - DNA, 15 bp, Homo sapiens
agttctgctcagtcg

SEQ ID NO: 1610789 - DNA, 15 bp, Homo sapiens
cagttctgctcagtc

SEQ ID NO: 1610790 - DNA, 15 bp, Homo sapiens
acagttctgctcagt

SEQ ID NO: 1610791 - DNA, 15 bp, Homo sapiens
aacagttctgctcag

SEQ ID NO: 1610792 - DNA, 15 bp, Homo sapiens
aaacagttctgctca

SEQ ID NO: 1610793 - DNA, 15 bp, Homo sapiens
gaaacagttctgctc

SEQ ID NO: 1610794 - DNA, 15 bp, Homo sapiens
tgaaacagttctgct

SEQ ID NO: 1610795 - DNA, 15 bp, Homo sapiens
ttgaaacagttctgc

SEQ ID NO: 1610796 - DNA, 15 bp, Homo sapiens
tttgaaacagttctg

SEQ ID NO: 1610797 - DNA, 15 bp, Homo sapiens
ttttgaaacagttct

SEQ ID NO: 1610798 - DNA, 15 bp, Homo sapiens
attttgaaacagttc

SEQ ID NO: 1610799 - DNA, 15 bp, Homo sapiens
tattttgaaacagtt

SEQ ID NO: 1610800 - DNA, 15 bp, Homo sapiens
ttattttgaaacagt

SEQ ID NO: 1610801 - DNA, 15 bp, Homo sapiens
attattttgaaacag

SEQ ID NO: 1610802 - DNA, 15 bp, Homo sapiens
tattattttgaaaca

SEQ ID NO: 1610803 - DNA, 15 bp, Homo sapiens
ttattattttgaaac

SEQ ID NO: 1610804 - DNA, 15 bp, Homo sapiens
attattattttgaaa

SEQ ID NO: 1610805 - DNA, 15 bp, Homo sapiens
tattattattttgaa

SEQ ID NO: 1610806 - DNA, 15 bp, Homo sapiens
ttattattattttga

SEQ ID NO: 1610807 - DNA, 15 bp, Homo sapiens
attattattattttg

SEQ ID NO: 1610808 - DNA, 15 bp, Homo sapiens
ttgttgttgttatta

SEQ ID NO: 1610809 - DNA, 15 bp, Homo sapiens
gttgttgttgttgtt

SEQ ID NO: 1610810 - DNA, 15 bp, Homo sapiens
tgttgttgttgttgt

SEQ ID NO: 1610811 - DNA, 15 bp, Homo sapiens
cgttgttgttgttgt

SEQ ID NO: 1610812 - DNA, 15 bp, Homo sapiens
tcgttgttgttgttg

SEQ ID NO: 1610813 - DNA, 15 bp, Homo sapiens
atcgttgttgttgtt

SEQ ID NO: 1610814 - DNA, 15 bp, Homo sapiens
tatcgttgttgttgt

SEQ ID NO: 1610815 - DNA, 15 bp, Homo sapiens
ttatcgttgttgttg

SEQ ID NO: 1610816 - DNA, 15 bp, Homo sapiens
attatcgttgttgtt

SEQ ID NO: 1610817 - DNA, 15 bp, Homo sapiens
tattatcgttgttgt

SEQ ID NO: 1610818 - DNA, 15 bp, Homo sapiens
ttattatcgttgttg

SEQ ID NO: 1610819 - DNA, 15 bp, Homo sapiens
attattatcgttgtt

SEQ ID NO: 1610820 - DNA, 15 bp, Homo sapiens
tattattatcgttgt

SEQ ID NO: 1610821 - DNA, 15 bp, Homo sapiens
ttattattatcgttg

SEQ ID NO: 1610822 - DNA, 15 bp, Homo sapiens
tttattattatcgtt

SEQ ID NO: 1610823 - DNA, 15 bp, Homo sapiens
atttattattatcgt

SEQ ID NO: 1610824 - DNA, 15 bp, Homo sapiens
gatttattattatcg

SEQ ID NO: 1610825 - DNA, 15 bp, Homo sapiens
agatttattattatc

SEQ ID NO: 1610826 - DNA, 15 bp, Homo sapiens
tagatttattattat

SEQ ID NO: 1610827 - DNA, 15 bp, Homo sapiens
gtagatttattatta

SEQ ID NO: 1610828 - DNA, 15 bp, Homo sapiens
tgtagatttattatt

SEQ ID NO: 1610829 - DNA, 15 bp, Homo sapiens
gtgtagatttattat

SEQ ID NO: 1610830 - DNA, 15 bp, Homo sapiens
agtgtagatttatta

SEQ ID NO: 1610831 - DNA, 15 bp, Homo sapiens
gagtgtagatttatt

SEQ ID NO: 1610832 - DNA, 15 bp, Homo sapiens
ggagtgtagatttat

SEQ ID NO: 1610833 - DNA, 15 bp, Homo sapiens
aggagtgtagattta

SEQ ID NO: 1610834 - DNA, 15 bp, Homo sapiens
aaggagtgtagattt

SEQ ID NO: 1610835 - DNA, 15 bp, Homo sapiens
caaggagtgtagatt

SEQ ID NO: 1610836 - DNA, 15 bp, Homo sapiens
tcaaggagtgtagat

SEQ ID NO: 1610837 - DNA, 15 bp, Homo sapiens
gtcaaggagtgtaga

SEQ ID NO: 1610838 - DNA, 15 bp, Homo sapiens
tgtcaaggagtgtag

SEQ ID NO: 1610839 - DNA, 15 bp, Homo sapiens
ttgtcaaggagtgta

SEQ ID NO: 1610840 - DNA, 15 bp, Homo sapiens
cttgtcaaggagtgt

SEQ ID NO: 1610841 - DNA, 15 bp, Homo sapiens
ccttgtcaaggagtg

SEQ ID NO: 1610842 - DNA, 15 bp, Homo sapiens
gccttgtcaaggagt

SEQ ID NO: 1610843 - DNA, 15 bp, Homo sapiens
tgccttgtcaaggag

SEQ ID NO: 1610844 - DNA, 15 bp, Homo sapiens
ctgccttgtcaagga

SEQ ID NO: 1610845 - DNA, 15 bp, Homo sapiens
cctgccttgtcaagg

SEQ ID NO: 1610846 - DNA, 15 bp, Homo sapiens
ccctgccttgtcaag

SEQ ID NO: 1610847 - DNA, 15 bp, Homo sapiens
gccctgccttgtcaa

SEQ ID NO: 1610848 - DNA, 15 bp, Homo sapiens
ggccctgccttgtca

SEQ ID NO: 1610849 - DNA, 15 bp, Homo sapiens
aggccctgccttgtc

SEQ ID NO: 1610850 - DNA, 15 bp, Homo sapiens
taggccctgccttgt

SEQ ID NO: 1610851 - DNA, 15 bp, Homo sapiens
ctaggccctgccttg

SEQ ID NO: 1610852 - DNA, 15 bp, Homo sapiens
gctaggccctgcctt

SEQ ID NO: 1610853 - DNA, 15 bp, Homo sapiens
tgctaggccctgcct

SEQ ID NO: 1610854 - DNA, 15 bp, Homo sapiens
ctgctaggccctgcc

SEQ ID NO: 1610855 - DNA, 15 bp, Homo sapiens
cctgctaggccctgc

SEQ ID NO: 1610856 - DNA, 15 bp, Homo sapiens
gcctgctaggccctg

SEQ ID NO: 1610857 - DNA, 15 bp, Homo sapiens
ggcctgctaggccct

SEQ ID NO: 1610858 - DNA, 15 bp, Homo sapiens
gggcctgctaggccc

SEQ ID NO: 1610859 - DNA, 15 bp, Homo sapiens
tgggcctgctaggcc

SEQ ID NO: 1610860 - DNA, 15 bp, Homo sapiens
ctgggcctgctaggc

SEQ ID NO: 1610861 - DNA, 15 bp, Homo sapiens
tctgggcctgctagg

SEQ ID NO: 1610862 - DNA, 15 bp, Homo sapiens
ctctgggcctgctag

SEQ ID NO: 1610863 - DNA, 15 bp, Homo sapiens
cctctgggcctgcta

SEQ ID NO: 1610864 - DNA, 15 bp, Homo sapiens
tcctctgggcctgct

SEQ ID NO: 1610865 - DNA, 15 bp, Homo sapiens
atcctctgggcctgc

SEQ ID NO: 1610866 - DNA, 15 bp, Homo sapiens
gatcctctgggcctg

SEQ ID NO: 1610867 - DNA, 15 bp, Homo sapiens
agatcctctgggcct

SEQ ID NO: 1610868 - DNA, 15 bp, Homo sapiens
cagatcctctgggcc

SEQ ID NO: 1610869 - DNA, 15 bp, Homo sapiens
ccagatcctctgggc

SEQ ID NO: 1610870 - DNA, 15 bp, Homo sapiens
gccagatcctctggg

SEQ ID NO: 1610871 - DNA, 15 bp, Homo sapiens
ggccagatcctctgg

SEQ ID NO: 1610872 - DNA, 15 bp, Homo sapiens
gggccagatcctctg

SEQ ID NO: 1610873 - DNA, 15 bp, Homo sapiens
ggggccagatcctct

SEQ ID NO: 1610874 - DNA, 15 bp, Homo sapiens
aggggccagatcctc

SEQ ID NO: 1610875 - DNA, 15 bp, Homo sapiens
caggggccagatcct

SEQ ID NO: 1610876 - DNA, 15 bp, Homo sapiens
gcaggggccagatcc

SEQ ID NO: 1610877 - DNA, 15 bp, Homo sapiens
ggcaggggccagatc

SEQ ID NO: 1610878 - DNA, 15 bp, Homo sapiens
gggcaggggccagat

SEQ ID NO: 1610879 - DNA, 15 bp, Homo sapiens
agggcaggggccaga

SEQ ID NO: 1610880 - DNA, 15 bp, Homo sapiens
gagggcaggggccag

SEQ ID NO: 1610881 - DNA, 15 bp, Homo sapiens
tgagggcaggggcca

SEQ ID NO: 1610882 - DNA, 15 bp, Homo sapiens
ctgagggcaggggcc

SEQ ID NO: 1610883 - DNA, 15 bp, Homo sapiens
cctgagggcaggggc

SEQ ID NO: 1610884 - DNA, 15 bp, Homo sapiens
ccctgagggcagggg

SEQ ID NO: 1610885 - DNA, 15 bp, Homo sapiens
tccctgagggcaggg

SEQ ID NO: 1610886 - DNA, 15 bp, Homo sapiens
gtccctgagggcagg

SEQ ID NO: 1610887 - DNA, 15 bp, Homo sapiens
tgtccctgagggcag

SEQ ID NO: 1610888 - DNA, 15 bp, Homo sapiens
ctgtccctgagggca

SEQ ID NO: 1610889 - DNA, 15 bp, Homo sapiens
gctgtccctgagggc

SEQ ID NO: 1610890 - DNA, 15 bp, Homo sapiens
ggctgtccctgaggg

SEQ ID NO: 1610891 - DNA, 15 bp, Homo sapiens
gggctgtccctgagg

SEQ ID NO: 1610892 - DNA, 15 bp, Homo sapiens
agggctgtccctgag

SEQ ID NO: 1610893 - DNA, 15 bp, Homo sapiens
tagggctgtccctga

SEQ ID NO: 1610894 - DNA, 15 bp, Homo sapiens
ttagggctgtccctg

SEQ ID NO: 1610895 - DNA, 15 bp, Homo sapiens
gttagggctgtccct

SEQ ID NO: 1610896 - DNA, 15 bp, Homo sapiens
tgttagggctgtccc

SEQ ID NO: 1610897 - DNA, 15 bp, Homo sapiens
gtgttagggctgtcc

SEQ ID NO: 1610898 - DNA, 15 bp, Homo sapiens
agtgttagggctgtc

SEQ ID NO: 1610899 - DNA, 15 bp, Homo sapiens
gagtgttagggctgt

SEQ ID NO: 1610900 - DNA, 15 bp, Homo sapiens
agagtgttagggctg

SEQ ID NO: 1610901 - DNA, 15 bp, Homo sapiens
aagagtgttagggct

SEQ ID NO: 1610902 - DNA, 15 bp, Homo sapiens
gaagagtgttagggc

SEQ ID NO: 1610903 - DNA, 15 bp, Homo sapiens
agaagagtgttaggg

SEQ ID NO: 1610904 - DNA, 15 bp, Homo sapiens
gagaagagtgttagg

SEQ ID NO: 1610905 - DNA, 15 bp, Homo sapiens
agagaagagtgttag

SEQ ID NO: 1610906 - DNA, 15 bp, Homo sapiens
gagagaagagtgtta

SEQ ID NO: 1610907 - DNA, 15 bp, Homo sapiens
agagagaagagtgtt

SEQ ID NO: 1610908 - DNA, 15 bp, Homo sapiens
gagagagaagagtgt

SEQ ID NO: 1610909 - DNA, 15 bp, Homo sapiens
ggagagagaagagtg

SEQ ID NO: 1610910 - DNA, 15 bp, Homo sapiens
aggagagagaagagt

SEQ ID NO: 1610911 - DNA, 15 bp, Homo sapiens
caggagagagaagag

SEQ ID NO: 1610912 - DNA, 15 bp, Homo sapiens
ccaggagagagaaga

SEQ ID NO: 1610913 - DNA, 15 bp, Homo sapiens
gccaggagagagaag

SEQ ID NO: 1610914 - DNA, 15 bp, Homo sapiens
ggccaggagagagaa

SEQ ID NO: 1610915 - DNA, 15 bp, Homo sapiens
gggccaggagagaga

SEQ ID NO: 1610916 - DNA, 15 bp, Homo sapiens
ggggccaggagagag

SEQ ID NO: 1610917 - DNA, 15 bp, Homo sapiens
tggggccaggagaga

SEQ ID NO: 1610918 - DNA, 15 bp, Homo sapiens
ctggggccaggagag

SEQ ID NO: 1610919 - DNA, 15 bp, Homo sapiens
gctggggccaggaga

SEQ ID NO: 1610920 - DNA, 15 bp, Homo sapiens
ggctggggccaggag

SEQ ID NO: 1610921 - DNA, 15 bp, Homo sapiens
gggctggggccagga

SEQ ID NO: 1610922 - DNA, 15 bp, Homo sapiens
ggggctggggccagg

SEQ ID NO: 1610923 - DNA, 15 bp, Homo sapiens
cggggctggggccag

SEQ ID NO: 1610924 - DNA, 15 bp, Homo sapiens
gcggggctggggcca

SEQ ID NO: 1610925 - DNA, 15 bp, Homo sapiens
ggcggggctggggcc

SEQ ID NO: 1610926 - DNA, 15 bp, Homo sapiens
aggcggggctggggc

SEQ ID NO: 1610927 - DNA, 15 bp, Homo sapiens
gaggcggggctgggg

SEQ ID NO: 1610928 - DNA, 15 bp, Homo sapiens
ggaggcggggctggg

SEQ ID NO: 1610929 - DNA, 15 bp, Homo sapiens
aggaggcggggctgg

SEQ ID NO: 1610930 - DNA, 15 bp, Homo sapiens
aaggaggcggggctg

SEQ ID NO: 1610931 - DNA, 15 bp, Homo sapiens
caaggaggcggggct

SEQ ID NO: 1610932 - DNA, 15 bp, Homo sapiens
gcaaggaggcggggc

SEQ ID NO: 1610933 - DNA, 15 bp, Homo sapiens
tgcaaggaggcgggg

SEQ ID NO: 1610934 - DNA, 15 bp, Homo sapiens
ctgcaaggaggcggg

SEQ ID NO: 1610935 - DNA, 15 bp, Homo sapiens
actgcaaggaggcgg

SEQ ID NO: 1610936 - DNA, 15 bp, Homo sapiens
aactgcaaggaggcg

SEQ ID NO: 1610937 - DNA, 15 bp, Homo sapiens
gaactgcaaggaggc

SEQ ID NO: 1610938 - DNA, 15 bp, Homo sapiens
ggaactgcaaggagg

SEQ ID NO: 1610939 - DNA, 15 bp, Homo sapiens
aggaactgcaaggag

SEQ ID NO: 1610940 - DNA, 15 bp, Homo sapiens
gaggaactgcaagga

SEQ ID NO: 1610941 - DNA, 15 bp, Homo sapiens
cgaggaactgcaagg

SEQ ID NO: 1610942 - DNA, 15 bp, Homo sapiens
ccgaggaactgcaag

SEQ ID NO: 1610943 - DNA, 15 bp, Homo sapiens
cccgaggaactgcaa

SEQ ID NO: 1610944 - DNA, 15 bp, Homo sapiens
gcccgaggaactgca

SEQ ID NO: 1610945 - DNA, 15 bp, Homo sapiens
agcccgaggaactgc

SEQ ID NO: 1610946 - DNA, 15 bp, Homo sapiens
gagcccgaggaactg

SEQ ID NO: 1610947 - DNA, 15 bp, Homo sapiens
ggagcccgaggaact

SEQ ID NO: 1610948 - DNA, 15 bp, Homo sapiens
aggagcccgaggaac

SEQ ID NO: 1610949 - DNA, 15 bp, Homo sapiens
gaggagcccgaggaa

SEQ ID NO: 1610950 - DNA, 15 bp, Homo sapiens
ggaggagcccgagga

SEQ ID NO: 1610951 - DNA, 15 bp, Homo sapiens
gggaggagcccgagg

SEQ ID NO: 1610952 - DNA, 15 bp, Homo sapiens
tgggaggagcccgag

SEQ ID NO: 1610953 - DNA, 15 bp, Homo sapiens
ttgggaggagcccga

SEQ ID NO: 1610954 - DNA, 15 bp, Homo sapiens
attgggaggagcccg

SEQ ID NO: 1610955 - DNA, 15 bp, Homo sapiens
aattgggaggagccc

SEQ ID NO: 1610956 - DNA, 15 bp, Homo sapiens
aaattgggaggagcc

SEQ ID NO: 1610957 - DNA, 15 bp, Homo sapiens
aaaattgggaggagc

SEQ ID NO: 1610958 - DNA, 15 bp, Homo sapiens
caaaattgggaggag

SEQ ID NO: 1610959 - DNA, 15 bp, Homo sapiens
ccaaaattgggagga

SEQ ID NO: 1610960 - DNA, 15 bp, Homo sapiens
gccaaaattgggagg

SEQ ID NO: 1610961 - DNA, 15 bp, Homo sapiens
tgccaaaattgggag

SEQ ID NO: 1610962 - DNA, 15 bp, Homo sapiens
ctgccaaaattggga

SEQ ID NO: 1610963 - DNA, 15 bp, Homo sapiens
gctgccaaaattggg

SEQ ID NO: 1610964 - DNA, 15 bp, Homo sapiens
ggctgccaaaattgg

SEQ ID NO: 1610965 - DNA, 15 bp, Homo sapiens
aggctgccaaaattg

SEQ ID NO: 1610966 - DNA, 15 bp, Homo sapiens
caggctgccaaaatt

SEQ ID NO: 1610967 - DNA, 15 bp, Homo sapiens
acaggctgccaaaat

SEQ ID NO: 1610968 - DNA, 15 bp, Homo sapiens
cacaggctgccaaaa

SEQ ID NO: 1610969 - DNA, 15 bp, Homo sapiens
gcacaggctgccaaa

SEQ ID NO: 1610970 - DNA, 15 bp, Homo sapiens
tgcacaggctgccaa

SEQ ID NO: 1610971 - DNA, 15 bp, Homo sapiens
gtgcacaggctgcca

SEQ ID NO: 1610972 - DNA, 15 bp, Homo sapiens
agtgcacaggctgcc

SEQ ID NO: 1610973 - DNA, 15 bp, Homo sapiens
cagtgcacaggctgc

SEQ ID NO: 1610974 - DNA, 15 bp, Homo sapiens
gcagtgcacaggctg

SEQ ID NO: 1610975 - DNA, 15 bp, Homo sapiens
agcagtgcacaggct

SEQ ID NO: 1610976 - DNA, 15 bp, Homo sapiens
cagcagtgcacaggc

SEQ ID NO: 1610977 - DNA, 15 bp, Homo sapiens
acagcagtgcacagg

SEQ ID NO: 1610978 - DNA, 15 bp, Homo sapiens
gacagcagtgcacag

SEQ ID NO: 1610979 - DNA, 15 bp, Homo sapiens
ggacagcagtgcaca

SEQ ID NO: 1610980 - DNA, 15 bp, Homo sapiens
ctctgggccacatcc

SEQ ID NO: 1610981 - DNA, 15 bp, Homo sapiens
cctctgggccacatc

SEQ ID NO: 1610982 - DNA, 15 bp, Homo sapiens
acctctgggccacat

SEQ ID NO: 1610983 - DNA, 15 bp, Homo sapiens
cacctctgggccaca

SEQ ID NO: 1610984 - DNA, 15 bp, Homo sapiens
gcacctctgggccac

SEQ ID NO: 1610985 - DNA, 15 bp, Homo sapiens
tgcacctctgggcca

SEQ ID NO: 1610986 - DNA, 15 bp, Homo sapiens
ttgcacctctgggcc

SEQ ID NO: 1610987 - DNA, 15 bp, Homo sapiens
cttgcacctctgggc

SEQ ID NO: 1610988 - DNA, 15 bp, Homo sapiens
ccttgcacctctggg

SEQ ID NO: 1610989 - DNA, 15 bp, Homo sapiens
tccttgcacctctgg

SEQ ID NO: 1610990 - DNA, 15 bp, Homo sapiens
ctccttgcacctctg

SEQ ID NO: 1610991 - DNA, 15 bp, Homo sapiens
gctccttgcacctct

SEQ ID NO: 1610992 - DNA, 15 bp, Homo sapiens
agctccttgcacctc

SEQ ID NO: 1610993 - DNA, 15 bp, Homo sapiens
cagctccttgcacct

SEQ ID NO: 1610994 - DNA, 15 bp, Homo sapiens
ccagctccttgcacc

SEQ ID NO: 1610995 - DNA, 15 bp, Homo sapiens
cccagctccttgcac

SEQ ID NO: 1610996 - DNA, 15 bp, Homo sapiens
acccagctccttgca

SEQ ID NO: 1610997 - DNA, 15 bp, Homo sapiens
tacccagctccttgc

SEQ ID NO: 1610998 - DNA, 15 bp, Homo sapiens
atacccagctccttg

SEQ ID NO: 1610999 - DNA, 15 bp, Homo sapiens
gatacccagctcctt

SEQ ID NO: 1611000 - DNA, 15 bp, Homo sapiens
tgatacccagctcct

SEQ ID NO: 1611001 - DNA, 15 bp, Homo sapiens
gtgatacccagctcc

SEQ ID NO: 1611002 - DNA, 15 bp, Homo sapiens
ggtgatacccagctc

SEQ ID NO: 1611003 - DNA, 15 bp, Homo sapiens
cggtgatacccagct

SEQ ID NO: 1611004 - DNA, 15 bp, Homo sapiens
gcggtgatacccagc

SEQ ID NO: 1611005 - DNA, 15 bp, Homo sapiens
ggcggtgatacccag

SEQ ID NO: 1611006 - DNA, 15 bp, Homo sapiens
gggcggtgataccca

SEQ ID NO: 1611007 - DNA, 15 bp, Homo sapiens
agggcggtgataccc

SEQ ID NO: 1611008 - DNA, 15 bp, Homo sapiens
tagggcggtgatacc

SEQ ID NO: 1611009 - DNA, 15 bp, Homo sapiens
gtagggcggtgatac

SEQ ID NO: 1611010 - DNA, 15 bp, Homo sapiens
tgtagggcggtgata

SEQ ID NO: 1611011 - DNA, 15 bp, Homo sapiens
gtgtagggcggtgat

SEQ ID NO: 1611012 - DNA, 15 bp, Homo sapiens
tgtgtagggcggtga

SEQ ID NO: 1611013 - DNA, 15 bp, Homo sapiens
atgtgtagggcggtg

SEQ ID NO: 1611014 - DNA, 15 bp, Homo sapiens
gatgtgtagggcggt

SEQ ID NO: 1611015 - DNA, 15 bp, Homo sapiens
tgatgtgtagggcgg

SEQ ID NO: 1611016 - DNA, 15 bp, Homo sapiens
ttgatgtgtagggcg

SEQ ID NO: 1611017 - DNA, 15 bp, Homo sapiens
tttgatgtgtagggc

SEQ ID NO: 1611018 - DNA, 15 bp, Homo sapiens
gtttgatgtgtaggg

SEQ ID NO: 1611019 - DNA, 15 bp, Homo sapiens
agtttgatgtgtagg

SEQ ID NO: 1611020 - DNA, 15 bp, Homo sapiens
gagtttgatgtgtag

SEQ ID NO: 1611021 - DNA, 15 bp, Homo sapiens
ggagtttgatgtgta

SEQ ID NO: 1611022 - DNA, 15 bp, Homo sapiens
cggagtttgatgtgt

SEQ ID NO: 1611023 - DNA, 15 bp, Homo sapiens
ccggagtttgatgtg

SEQ ID NO: 1611024 - DNA, 15 bp, Homo sapiens
cccggagtttgatgt

SEQ ID NO: 1611025 - DNA, 15 bp, Homo sapiens
gcccggagtttgatg

SEQ ID NO: 1611026 - DNA, 15 bp, Homo sapiens
ggcccggagtttgat

SEQ ID NO: 1611027 - DNA, 15 bp, Homo sapiens
tggcccggagtttga

SEQ ID NO: 1611028 - DNA, 15 bp, Homo sapiens
gtggcccggagtttg

SEQ ID NO: 1611029 - DNA, 15 bp, Homo sapiens
tgtggcccggagttt

SEQ ID NO: 1611030 - DNA, 15 bp, Homo sapiens
ctgtggcccggagtt

SEQ ID NO: 1611031 - DNA, 15 bp, Homo sapiens
cctgtggcccggagt

SEQ ID NO: 1611032 - DNA, 15 bp, Homo sapiens
tcctgtggcccggag

SEQ ID NO: 1611033 - DNA, 15 bp, Homo sapiens
ctcctgtggcccgga

SEQ ID NO: 1611034 - DNA, 15 bp, Homo sapiens
cctcctgtggcccgg

SEQ ID NO: 1611035 - DNA, 15 bp, Homo sapiens
tcctcctgtggcccg

SEQ ID NO: 1611036 - DNA, 15 bp, Homo sapiens
ttcctcctgtggccc

SEQ ID NO: 1611037 - DNA, 15 bp, Homo sapiens
tttcctcctgtggcc

SEQ ID NO: 1611038 - DNA, 15 bp, Homo sapiens
atttcctcctgtggc

SEQ ID NO: 1611039 - DNA, 15 bp, Homo sapiens
tatttcctcctgtgg

SEQ ID NO: 1611040 - DNA, 15 bp, Homo sapiens
ctatttcctcctgtg

SEQ ID NO: 1611041 - DNA, 15 bp, Homo sapiens
cctatttcctcctgt

SEQ ID NO: 1611042 - DNA, 15 bp, Homo sapiens
acctatttcctcctg

SEQ ID NO: 1611043 - DNA, 15 bp, Homo sapiens
tacctatttcctcct

SEQ ID NO: 1611044 - DNA, 15 bp, Homo sapiens
gtacctatttcctcc

SEQ ID NO: 1611045 - DNA, 15 bp, Homo sapiens
cgtacctatttcctc

SEQ ID NO: 1611046 - DNA, 15 bp, Homo sapiens
tcgtacctatttcct

SEQ ID NO: 1611047 - DNA, 15 bp, Homo sapiens
ctcgtacctatttcc

SEQ ID NO: 1611048 - DNA, 15 bp, Homo sapiens
actcgtacctatttc

SEQ ID NO: 1611049 - DNA, 15 bp, Homo sapiens
gactcgtacctattt

SEQ ID NO: 1611050 - DNA, 15 bp, Homo sapiens
cgactcgtacctatt

SEQ ID NO: 1611051 - DNA, 15 bp, Homo sapiens
gcgactcgtacctat

SEQ ID NO: 1611052 - DNA, 15 bp, Homo sapiens
tgcgactcgtaccta

SEQ ID NO: 1611053 - DNA, 15 bp, Homo sapiens
ctgcgactcgtacct

SEQ ID NO: 1611054 - DNA, 15 bp, Homo sapiens
tctgcgactcgtacc

SEQ ID NO: 1611055 - DNA, 15 bp, Homo sapiens
ctctgcgactcgtac

SEQ ID NO: 1611056 - DNA, 15 bp, Homo sapiens
cctctgcgactcgta

SEQ ID NO: 1611057 - DNA, 15 bp, Homo sapiens
ccctctgcgactcgt

SEQ ID NO: 1611058 - DNA, 15 bp, Homo sapiens
cccctctgcgactcg

SEQ ID NO: 1611059 - DNA, 15 bp, Homo sapiens
tcccctctgcgactc

SEQ ID NO: 1611060 - DNA, 15 bp, Homo sapiens
atcccctctgcgact

SEQ ID NO: 1611061 - DNA, 15 bp, Homo sapiens
catcccctctgcgac

SEQ ID NO: 1611062 - DNA, 15 bp, Homo sapiens
ccatcccctctgcga

SEQ ID NO: 1611063 - DNA, 15 bp, Homo sapiens
gccatcccctctgcg

SEQ ID NO: 1611064 - DNA, 15 bp, Homo sapiens
agccatcccctctgc

SEQ ID NO: 1611065 - DNA, 15 bp, Homo sapiens
cagccatcccctctg

SEQ ID NO: 1611066 - DNA, 15 bp, Homo sapiens
ccagccatcccctct

SEQ ID NO: 1611067 - DNA, 15 bp, Homo sapiens
cccagccatcccctc

SEQ ID NO: 1611068 - DNA, 15 bp, Homo sapiens
acccagccatcccct

SEQ ID NO: 1611069 - DNA, 15 bp, Homo sapiens
cacccagccatcccc

SEQ ID NO: 1611070 - DNA, 15 bp, Homo sapiens
ccacccagccatccc

SEQ ID NO: 1611071 - DNA, 15 bp, Homo sapiens
accacccagccatcc

SEQ ID NO: 1611072 - DNA, 15 bp, Homo sapiens
taccacccagccatc

SEQ ID NO: 1611073 - DNA, 15 bp, Homo sapiens
ctaccacccagccat

SEQ ID NO: 1611074 - DNA, 15 bp, Homo sapiens
tctaccacccagcca

SEQ ID NO: 1611075 - DNA, 15 bp, Homo sapiens
ttctaccacccagcc

SEQ ID NO: 1611076 - DNA, 15 bp, Homo sapiens
tttctaccacccagc

SEQ ID NO: 1611077 - DNA, 15 bp, Homo sapiens
ttttctaccacccag

SEQ ID NO: 1611078 - DNA, 15 bp, Homo sapiens
gttttctaccaccca

SEQ ID NO: 1611079 - DNA, 15 bp, Homo sapiens
ggttttctaccaccc

SEQ ID NO: 1611080 - DNA, 15 bp, Homo sapiens
aggttttctaccacc

SEQ ID NO: 1611081 - DNA, 15 bp, Homo sapiens
caggttttctaccac

SEQ ID NO: 1611082 - DNA, 15 bp, Homo sapiens
gcaggttttctacca

SEQ ID NO: 1611083 - DNA, 15 bp, Homo sapiens
agcaggttttctacc

SEQ ID NO: 1611084 - DNA, 15 bp, Homo sapiens
cagcaggttttctac

SEQ ID NO: 1611085 - DNA, 15 bp, Homo sapiens
ccagcaggttttcta

SEQ ID NO: 1611086 - DNA, 15 bp, Homo sapiens
cccagcaggttttct

SEQ ID NO: 1611087 - DNA, 15 bp, Homo sapiens
gcccagcaggttttc

SEQ ID NO: 1611088 - DNA, 15 bp, Homo sapiens
agcccagcaggtttt

SEQ ID NO: 1611089 - DNA, 15 bp, Homo sapiens
aagcccagcaggttt

SEQ ID NO: 1611090 - DNA, 15 bp, Homo sapiens
caagcccagcaggtt

SEQ ID NO: 1611091 - DNA, 15 bp, Homo sapiens
ccaagcccagcaggt

SEQ ID NO: 1611092 - DNA, 15 bp, Homo sapiens
cccaagcccagcagg

SEQ ID NO: 1611093 - DNA, 15 bp, Homo sapiens
acccaagcccagcag

SEQ ID NO: 1611094 - DNA, 15 bp, Homo sapiens
cacccaagcccagca

SEQ ID NO: 1611095 - DNA, 15 bp, Homo sapiens
gcacccaagcccagc

SEQ ID NO: 1611096 - DNA, 15 bp, Homo sapiens
agcacccaagcccag

SEQ ID NO: 1611097 - DNA, 15 bp, Homo sapiens
cagcacccaagccca

SEQ ID NO: 1611098 - DNA, 15 bp, Homo sapiens
ccagcacccaagccc

SEQ ID NO: 1611099 - DNA, 15 bp, Homo sapiens
tccagcacccaagcc

SEQ ID NO: 1611100 - DNA, 15 bp, Homo sapiens
ctccagcacccaagc

SEQ ID NO: 1611101 - DNA, 15 bp, Homo sapiens
gctccagcacccaag

SEQ ID NO: 1611102 - DNA, 15 bp, Homo sapiens
tgctccagcacccaa

SEQ ID NO: 1611103 - DNA, 15 bp, Homo sapiens
gtgctccagcaccca

SEQ ID NO: 1611104 - DNA, 15 bp, Homo sapiens
ggtgctccagcaccc

SEQ ID NO: 1611105 - DNA, 15 bp, Homo sapiens
aggtgctccagcacc

SEQ ID NO: 1611106 - DNA, 15 bp, Homo sapiens
caggtgctccagcac

SEQ ID NO: 1611107 - DNA, 15 bp, Homo sapiens
ccaggtgctccagca

SEQ ID NO: 1611108 - DNA, 15 bp, Homo sapiens
tccaggtgctccagc

SEQ ID NO: 1611109 - DNA, 15 bp, Homo sapiens
atccaggtgctccag

SEQ ID NO: 1611110 - DNA, 15 bp, Homo sapiens
aatccaggtgctcca

SEQ ID NO: 1611111 - DNA, 15 bp, Homo sapiens
aaatccaggtgctcc

SEQ ID NO: 1611112 - DNA, 15 bp, Homo sapiens
caaatccaggtgctc

SEQ ID NO: 1611113 - DNA, 15 bp, Homo sapiens
tcaaatccaggtgct

SEQ ID NO: 1611114 - DNA, 15 bp, Homo sapiens
ctcaaatccaggtgc

SEQ ID NO: 1611115 - DNA, 15 bp, Homo sapiens
cctcaaatccaggtg

SEQ ID NO: 1611116 - DNA, 15 bp, Homo sapiens
acctcaaatccaggt

SEQ ID NO: 1611117 - DNA, 15 bp, Homo sapiens
aacctcaaatccagg

SEQ ID NO: 1611118 - DNA, 15 bp, Homo sapiens
aaacctcaaatccag

SEQ ID NO: 1611119 - DNA, 15 bp, Homo sapiens
caaacctcaaatcca

SEQ ID NO: 1611120 - DNA, 15 bp, Homo sapiens
ccaaacctcaaatcc

SEQ ID NO: 1611121 - DNA, 15 bp, Homo sapiens
cccaaacctcaaatc

SEQ ID NO: 1611122 - DNA, 15 bp, Homo sapiens
acccaaacctcaaat

SEQ ID NO: 1611123 - DNA, 15 bp, Homo sapiens
aacccaaacctcaaa

SEQ ID NO: 1611124 - DNA, 15 bp, Homo sapiens
aaacccaaacctcaa

SEQ ID NO: 1611125 - DNA, 15 bp, Homo sapiens
aaaacccaaacctca

SEQ ID NO: 1611126 - DNA, 15 bp, Homo sapiens
aaaaacccaaacctc

SEQ ID NO: 1611127 - DNA, 15 bp, Homo sapiens
aaaaaacccaaacct

SEQ ID NO: 1611128 - DNA, 15 bp, Homo sapiens
caaaaaacccaaacc

SEQ ID NO: 1611129 - DNA, 15 bp, Homo sapiens
acaaaaaacccaaac

SEQ ID NO: 1611130 - DNA, 15 bp, Homo sapiens
aacaaaaaacccaaa

SEQ ID NO: 1611131 - DNA, 15 bp, Homo sapiens
caacaaaaaacccaa

SEQ ID NO: 1611132 - DNA, 15 bp, Homo sapiens
acaacaaaaaaccca

SEQ ID NO: 1611133 - DNA, 15 bp, Homo sapiens
cacaacaaaaaaccc

SEQ ID NO: 1611134 - DNA, 15 bp, Homo sapiens
tcacaacaaaaaacc

SEQ ID NO: 1611135 - DNA, 15 bp, Homo sapiens
gtcacaacaaaaaac

SEQ ID NO: 1611136 - DNA, 15 bp, Homo sapiens
ggtcacaacaaaaaa

SEQ ID NO: 1611137 - DNA, 15 bp, Homo sapiens
aggtcacaacaaaaa

SEQ ID NO: 1611138 - DNA, 15 bp, Homo sapiens
aaggtcacaacaaaa

SEQ ID NO: 1611139 - DNA, 15 bp, Homo sapiens
caaggtcacaacaaa

SEQ ID NO: 1611140 - DNA, 15 bp, Homo sapiens
tcaaggtcacaacaa

SEQ ID NO: 1611141 - DNA, 15 bp, Homo sapiens
ttcaaggtcacaaca

SEQ ID NO: 1611142 - DNA, 15 bp, Homo sapiens
gttcaaggtcacaac

SEQ ID NO: 1611143 - DNA, 15 bp, Homo sapiens
tgttcaaggtcacaa

SEQ ID NO: 1611144 - DNA, 15 bp, Homo sapiens
tcttgttcaaggtca

SEQ ID NO: 1611145 - DNA, 15 bp, Homo sapiens
atcttgttcaaggtc

SEQ ID NO: 1611146 - DNA, 15 bp, Homo sapiens
tatcttgttcaaggt

SEQ ID NO: 1611147 - DNA, 15 bp, Homo sapiens
atatcttgttcaagg

SEQ ID NO: 1611148 - DNA, 15 bp, Homo sapiens
aatatcttgttcaag

SEQ ID NO: 1611149 - DNA, 15 bp, Homo sapiens
aaatatcttgttcaa

SEQ ID NO: 1611150 - DNA, 15 bp, Homo sapiens
aaaatatcttgttca

SEQ ID NO: 1611151 - DNA, 15 bp, Homo sapiens
taaaatatcttgttc

SEQ ID NO: 1611152 - DNA, 15 bp, Homo sapiens
ctaaaatatcttgtt

SEQ ID NO: 1611153 - DNA, 15 bp, Homo sapiens
cctaaaatatcttgt

SEQ ID NO: 1611154 - DNA, 15 bp, Homo sapiens
gcctaaaatatcttg

SEQ ID NO: 1611155 - DNA, 15 bp, Homo sapiens
tgcctaaaatatctt

SEQ ID NO: 1611156 - DNA, 15 bp, Homo sapiens
atgcctaaaatatct

SEQ ID NO: 1611157 - DNA, 15 bp, Homo sapiens
tatgcctaaaatatc

SEQ ID NO: 1611158 - DNA, 15 bp, Homo sapiens
atatgcctaaaatat

SEQ ID NO: 1611159 - DNA, 15 bp, Homo sapiens
tatatgcctaaaata

SEQ ID NO: 1611160 - DNA, 15 bp, Homo sapiens
agtcaccaagcccag

SEQ ID NO: 1611161 - DNA, 15 bp, Homo sapiens
tagtcaccaagccca

SEQ ID NO: 1611162 - DNA, 15 bp, Homo sapiens
gtagtcaccaagccc

SEQ ID NO: 1611163 - DNA, 15 bp, Homo sapiens
agtagtcaccaagcc

SEQ ID NO: 1611164 - DNA, 15 bp, Homo sapiens
cagtagtcaccaagc

SEQ ID NO: 1611165 - DNA, 15 bp, Homo sapiens
ccagtagtcaccaag

SEQ ID NO: 1611166 - DNA, 15 bp, Homo sapiens
tccagtagtcaccaa

SEQ ID NO: 1611167 - DNA, 15 bp, Homo sapiens
gtccagtagtcacca

SEQ ID NO: 1611168 - DNA, 15 bp, Homo sapiens
agtccagtagtcacc

SEQ ID NO: 1611169 - DNA, 15 bp, Homo sapiens
aagtccagtagtcac

SEQ ID NO: 1611170 - DNA, 15 bp, Homo sapiens
aaagtccagtagtca

SEQ ID NO: 1611171 - DNA, 15 bp, Homo sapiens
aaaagtccagtagtc

SEQ ID NO: 1611172 - DNA, 15 bp, Homo sapiens
gaaaagtccagtagt

SEQ ID NO: 1611173 - DNA, 15 bp, Homo sapiens
ggaaaagtccagtag

SEQ ID NO: 1611174 - DNA, 15 bp, Homo sapiens
cggaaaagtccagta

SEQ ID NO: 1611175 - DNA, 15 bp, Homo sapiens
acggaaaagtccagt

SEQ ID NO: 1611176 - DNA, 15 bp, Homo sapiens
aacggaaaagtccag

SEQ ID NO: 1611177 - DNA, 15 bp, Homo sapiens
gaacggaaaagtcca

SEQ ID NO: 1611178 - DNA, 15 bp, Homo sapiens
tgaacggaaaagtcc

SEQ ID NO: 1611179 - DNA, 15 bp, Homo sapiens
ctgaacggaaaagtc

SEQ ID NO: 1611180 - DNA, 15 bp, Homo sapiens
cctgaacggaaaagt

SEQ ID NO: 1611181 - DNA, 15 bp, Homo sapiens
acctgaacggaaaag

SEQ ID NO: 1611182 - DNA, 15 bp, Homo sapiens
gacctgaacggaaaa

SEQ ID NO: 1611183 - DNA, 15 bp, Homo sapiens
tgacctgaacggaaa

SEQ ID NO: 1611184 - DNA, 15 bp, Homo sapiens
gtgacctgaacggaa

SEQ ID NO: 1611185 - DNA, 15 bp, Homo sapiens
agtgacctgaacgga

SEQ ID NO: 1611186 - DNA, 15 bp, Homo sapiens
cagtgacctgaacgg

SEQ ID NO: 1611187 - DNA, 15 bp, Homo sapiens
gcagtgacctgaacg

SEQ ID NO: 1611188 - DNA, 15 bp, Homo sapiens
agcagtgacctgaac

SEQ ID NO: 1611189 - DNA, 15 bp, Homo sapiens
cagcagtgacctgaa

SEQ ID NO: 1611190 - DNA, 15 bp, Homo sapiens
acagcagtgacctga

SEQ ID NO: 1611191 - DNA, 15 bp, Homo sapiens
gacagcagtgacctg

SEQ ID NO: 1611192 - DNA, 15 bp, Homo sapiens
ggacagcagtgacct

SEQ ID NO: 1611193 - DNA, 15 bp, Homo sapiens
gggacagcagtgacc

SEQ ID NO: 1611194 - DNA, 15 bp, Homo sapiens
tgggacagcagtgac

SEQ ID NO: 1611195 - DNA, 15 bp, Homo sapiens
ctgggacagcagtga

SEQ ID NO: 1611196 - DNA, 15 bp, Homo sapiens
gctgggacagcagtg

SEQ ID NO: 1611197 - DNA, 15 bp, Homo sapiens
tgctgggacagcagt

SEQ ID NO: 1611198 - DNA, 15 bp, Homo sapiens
gtgctgggacagcag

SEQ ID NO: 1611199 - DNA, 15 bp, Homo sapiens
ggtgctgggacagca

SEQ ID NO: 1611200 - DNA, 15 bp, Homo sapiens
aggtgctgggacagc

SEQ ID NO: 1611201 - DNA, 15 bp, Homo sapiens
caggtgctgggacag

SEQ ID NO: 1611202 - DNA, 15 bp, Homo sapiens
tcaggtgctgggaca

SEQ ID NO: 1611203 - DNA, 15 bp, Homo sapiens
ctcaggtgctgggac

SEQ ID NO: 1611204 - DNA, 15 bp, Homo sapiens
tctcaggtgctggga

SEQ ID NO: 1611205 - DNA, 15 bp, Homo sapiens
gtctcaggtgctggg

SEQ ID NO: 1611206 - DNA, 15 bp, Homo sapiens
tgtctcaggtgctgg

SEQ ID NO: 1611207 - DNA, 15 bp, Homo sapiens
ttgtctcaggtgctg

SEQ ID NO: 1611208 - DNA, 15 bp, Homo sapiens
attgtctcaggtgct

SEQ ID NO: 1611209 - DNA, 15 bp, Homo sapiens
cattgtctcaggtgc

SEQ ID NO: 1611210 - DNA, 15 bp, Homo sapiens
gcattgtctcaggtg

SEQ ID NO: 1611211 - DNA, 15 bp, Homo sapiens
cgcattgtctcaggt

SEQ ID NO: 1611212 - DNA, 15 bp, Homo sapiens
acgcattgtctcagg

SEQ ID NO: 1611213 - DNA, 15 bp, Homo sapiens
tacgcattgtctcag

SEQ ID NO: 1611214 - DNA, 15 bp, Homo sapiens
gtacgcattgtctca

SEQ ID NO: 1611215 - DNA, 15 bp, Homo sapiens
ggtacgcattgtctc

SEQ ID NO: 1611216 - DNA, 15 bp, Homo sapiens
aggtacgcattgtct

SEQ ID NO: 1611217 - DNA, 15 bp, Homo sapiens
caggtacgcattgtc

SEQ ID NO: 1611218 - DNA, 15 bp, Homo sapiens
ccaggtacgcattgt

SEQ ID NO: 1611219 - DNA, 15 bp, Homo sapiens
accaggtacgcattg

SEQ ID NO: 1611220 - DNA, 15 bp, Homo sapiens
taccaggtacgcatt

SEQ ID NO: 1611221 - DNA, 15 bp, Homo sapiens
ataccaggtacgcat

SEQ ID NO: 1611222 - DNA, 15 bp, Homo sapiens
gataccaggtacgca

SEQ ID NO: 1611223 - DNA, 15 bp, Homo sapiens
tgataccaggtacgc

SEQ ID NO: 1611224 - DNA, 15 bp, Homo sapiens
atgataccaggtacg

SEQ ID NO: 1611225 - DNA, 15 bp, Homo sapiens
tatgataccaggtac

SEQ ID NO: 1611226 - DNA, 15 bp, Homo sapiens
atatgataccaggta

SEQ ID NO: 1611227 - DNA, 15 bp, Homo sapiens
tatatgataccaggt

SEQ ID NO: 1611228 - DNA, 15 bp, Homo sapiens
ttatatgataccagg

SEQ ID NO: 1611229 - DNA, 15 bp, Homo sapiens
tttatatgataccag

SEQ ID NO: 1611230 - DNA, 15 bp, Homo sapiens
atttatatgatacca

SEQ ID NO: 1611231 - DNA, 15 bp, Homo sapiens
tatttatatgatacc

SEQ ID NO: 1611232 - DNA, 15 bp, Homo sapiens
atatttatatgatac

SEQ ID NO: 1611233 - DNA, 15 bp, Homo sapiens
aatatttatatgata

SEQ ID NO: 1611234 - DNA, 15 bp, Homo sapiens
aaatatttatatgat

SEQ ID NO: 1611235 - DNA, 15 bp, Homo sapiens
taaatatttatatga

SEQ ID NO: 1611236 - DNA, 15 bp, Homo sapiens
ataaatatttatatg

SEQ ID NO: 1611237 - DNA, 15 bp, Homo sapiens
tcataaatatttata

SEQ ID NO: 1611238 - DNA, 15 bp, Homo sapiens
gtcataaatatttat

SEQ ID NO: 1611239 - DNA, 15 bp, Homo sapiens
agtcataaatattta

SEQ ID NO: 1611240 - DNA, 15 bp, Homo sapiens
gagtcataaatattt

SEQ ID NO: 1611241 - DNA, 15 bp, Homo sapiens
tgagtcataaatatt

SEQ ID NO: 1611242 - DNA, 15 bp, Homo sapiens
atgagtcataaatat

SEQ ID NO: 1611243 - DNA, 15 bp, Homo sapiens
tatgagtcataaata

SEQ ID NO: 1611244 - DNA, 15 bp, Homo sapiens
atatgagtcataaat

SEQ ID NO: 1611245 - DNA, 15 bp, Homo sapiens
aatatgagtcataaa

SEQ ID NO: 1611246 - DNA, 15 bp, Homo sapiens
taatatgagtcataa

SEQ ID NO: 1611247 - DNA, 15 bp, Homo sapiens
gtaatatgagtcata

SEQ ID NO: 1611248 - DNA, 15 bp, Homo sapiens
tgtaatatgagtcat

SEQ ID NO: 1611249 - DNA, 15 bp, Homo sapiens
ttgtaatatgagtca

SEQ ID NO: 1611250 - DNA, 15 bp, Homo sapiens
cttgtaatatgagtc

SEQ ID NO: 1611251 - DNA, 15 bp, Homo sapiens
acttgtaatatgagt

SEQ ID NO: 1611252 - DNA, 15 bp, Homo sapiens
tacttgtaatatgag

SEQ ID NO: 1611253 - DNA, 15 bp, Homo sapiens
atacttgtaatatga

SEQ ID NO: 1611254 - DNA, 15 bp, Homo sapiens
aatacttgtaatatg

SEQ ID NO: 1611255 - DNA, 15 bp, Homo sapiens
taatacttgtaatat

SEQ ID NO: 1611256 - DNA, 15 bp, Homo sapiens
gtaatacttgtaata

SEQ ID NO: 1611257 - DNA, 15 bp, Homo sapiens
ggtaatacttgtaat

SEQ ID NO: 1611258 - DNA, 15 bp, Homo sapiens
aggtaatacttgtaa

SEQ ID NO: 1611259 - DNA, 15 bp, Homo sapiens
gaggtaatacttgta

SEQ ID NO: 1611260 - DNA, 15 bp, Homo sapiens
tgaggtaatacttgt

SEQ ID NO: 1611261 - DNA, 15 bp, Homo sapiens
atgaggtaatacttg

SEQ ID NO: 1611262 - DNA, 15 bp, Homo sapiens
aatgaggtaatactt

SEQ ID NO: 1611263 - DNA, 15 bp, Homo sapiens
gaatgaggtaatact

SEQ ID NO: 1611264 - DNA, 15 bp, Homo sapiens
tgaatgaggtaatac

SEQ ID NO: 1611265 - DNA, 15 bp, Homo sapiens
ctgaatgaggtaata

SEQ ID NO: 1611266 - DNA, 15 bp, Homo sapiens
actgaatgaggtaat

SEQ ID NO: 1611267 - DNA, 15 bp, Homo sapiens
gactgaatgaggtaa

SEQ ID NO: 1611268 - DNA, 15 bp, Homo sapiens
cgactgaatgaggta

SEQ ID NO: 1611269 - DNA, 15 bp, Homo sapiens
gcgactgaatgaggt

SEQ ID NO: 1611270 - DNA, 15 bp, Homo sapiens
agcgactgaatgagg

SEQ ID NO: 1611271 - DNA, 15 bp, Homo sapiens
aagcgactgaatgag

SEQ ID NO: 1611272 - DNA, 15 bp, Homo sapiens
aaagcgactgaatga

SEQ ID NO: 1611273 - DNA, 15 bp, Homo sapiens
caaagcgactgaatg

SEQ ID NO: 1611274 - DNA, 15 bp, Homo sapiens
tcaaagcgactgaat

SEQ ID NO: 1611275 - DNA, 15 bp, Homo sapiens
ctcaaagcgactgaa

SEQ ID NO: 1611276 - DNA, 15 bp, Homo sapiens
cctcaaagcgactga

SEQ ID NO: 1611277 - DNA, 15 bp, Homo sapiens
acctcaaagcgactg

SEQ ID NO: 1611278 - DNA, 15 bp, Homo sapiens
tacctcaaagcgact

SEQ ID NO: 1611279 - DNA, 15 bp, Homo sapiens
ttacctcaaagcgac

SEQ ID NO: 1611280 - DNA, 15 bp, Homo sapiens
cttacctcaaagcga

SEQ ID NO: 1611281 - DNA, 15 bp, Homo sapiens
acttacctcaaagcg

SEQ ID NO: 1611282 - DNA, 15 bp, Homo sapiens
tacttacctcaaagc

SEQ ID NO: 1611283 - DNA, 15 bp, Homo sapiens
gtacttacctcaaag

SEQ ID NO: 1611284 - DNA, 15 bp, Homo sapiens
agtacttacctcaaa

SEQ ID NO: 1611285 - DNA, 15 bp, Homo sapiens
cagtacttacctcaa

SEQ ID NO: 1611286 - DNA, 15 bp, Homo sapiens
acagtacttacctca

SEQ ID NO: 1611287 - DNA, 15 bp, Homo sapiens
aacagtacttacctc

SEQ ID NO: 1611288 - DNA, 15 bp, Homo sapiens
taacagtacttacct

SEQ ID NO: 1611289 - DNA, 15 bp, Homo sapiens
ataacagtacttacc

SEQ ID NO: 1611290 - DNA, 15 bp, Homo sapiens
aataacagtacttac

SEQ ID NO: 1611291 - DNA, 15 bp, Homo sapiens
taataacagtactta

SEQ ID NO: 1611292 - DNA, 15 bp, Homo sapiens
ataataacagtactt

SEQ ID NO: 1611293 - DNA, 15 bp, Homo sapiens
gataataacagtact

SEQ ID NO: 1611294 - DNA, 15 bp, Homo sapiens
tgataataacagtac

SEQ ID NO: 1611295 - DNA, 15 bp, Homo sapiens
ttgataataacagta

SEQ ID NO: 1611296 - DNA, 15 bp, Homo sapiens
tttgataataacagt

SEQ ID NO: 1611297 - DNA, 15 bp, Homo sapiens
ttttgataataacag

SEQ ID NO: 1611298 - DNA, 15 bp, Homo sapiens
attttgataataaca

SEQ ID NO: 1611299 - DNA, 15 bp, Homo sapiens
aattttgataataac

SEQ ID NO: 1611300 - DNA, 15 bp, Homo sapiens
taaattttgataata

SEQ ID NO: 1611301 - DNA, 15 bp, Homo sapiens
ttaaattttgataat

SEQ ID NO: 1611302 - DNA, 15 bp, Homo sapiens
gttaaattttgataa

SEQ ID NO: 1611303 - DNA, 15 bp, Homo sapiens
tgttaaattttgata

SEQ ID NO: 1611304 - DNA, 15 bp, Homo sapiens
atgttaaattttgat

SEQ ID NO: 1611305 - DNA, 15 bp, Homo sapiens
catgttaaattttga

SEQ ID NO: 1611306 - DNA, 15 bp, Homo sapiens
acatgttaaattttg

SEQ ID NO: 1611307 - DNA, 15 bp, Homo sapiens
cacatgttaaatttt

SEQ ID NO: 1611308 - DNA, 15 bp, Homo sapiens
tcacatgttaaattt

SEQ ID NO: 1611309 - DNA, 15 bp, Homo sapiens
ctcacatgttaaatt

SEQ ID NO: 1611310 - DNA, 15 bp, Homo sapiens
cctcacatgttaaat

SEQ ID NO: 1611311 - DNA, 15 bp, Homo sapiens
tcctcacatgttaaa

SEQ ID NO: 1611312 - DNA, 15 bp, Homo sapiens
ttcctcacatgttaa

SEQ ID NO: 1611313 - DNA, 15 bp, Homo sapiens
tttcctcacatgtta

SEQ ID NO: 1611314 - DNA, 15 bp, Homo sapiens
gtttcctcacatgtt

SEQ ID NO: 1611315 - DNA, 15 bp, Homo sapiens
ccctcagtttcctca

SEQ ID NO: 1611316 - DNA, 15 bp, Homo sapiens
accctcagtttcctc

SEQ ID NO: 1611317 - DNA, 15 bp, Homo sapiens
gaccctcagtttcct

SEQ ID NO: 1611318 - DNA, 15 bp, Homo sapiens
tgaccctcagtttcc

SEQ ID NO: 1611319 - DNA, 15 bp, Homo sapiens
ctgaccctcagtttc

SEQ ID NO: 1611320 - DNA, 15 bp, Homo sapiens
tctgaccctcagttt

SEQ ID NO: 1611321 - DNA, 15 bp, Homo sapiens
ctctgaccctcagtt

SEQ ID NO: 1611322 - DNA, 15 bp, Homo sapiens
tctctgaccctcagt

SEQ ID NO: 1611323 - DNA, 15 bp, Homo sapiens
ctctctgaccctcag

SEQ ID NO: 1611324 - DNA, 15 bp, Homo sapiens
cctctctgaccctca

SEQ ID NO: 1611325 - DNA, 15 bp, Homo sapiens
acctctctgaccctc

SEQ ID NO: 1611326 - DNA, 15 bp, Homo sapiens
taacctctctgaccc

SEQ ID NO: 1611327 - DNA, 15 bp, Homo sapiens
ttaacctctctgacc

SEQ ID NO: 1611328 - DNA, 15 bp, Homo sapiens
cttaacctctctgac

SEQ ID NO: 1611329 - DNA, 15 bp, Homo sapiens
acttaacctctctga

SEQ ID NO: 1611330 - DNA, 15 bp, Homo sapiens
cacttaacctctctg

SEQ ID NO: 1611331 - DNA, 15 bp, Homo sapiens
tcacttaacctctct

SEQ ID NO: 1611332 - DNA, 15 bp, Homo sapiens
gtcacttaacctctc

SEQ ID NO: 1611333 - DNA, 15 bp, Homo sapiens
agtcacttaacctct

SEQ ID NO: 1611334 - DNA, 15 bp, Homo sapiens
gagtcacttaacctc

SEQ ID NO: 1611335 - DNA, 15 bp, Homo sapiens
cgagtcacttaacct

SEQ ID NO: 1611336 - DNA, 15 bp, Homo sapiens
acgagtcacttaacc

SEQ ID NO: 1611337 - DNA, 15 bp, Homo sapiens
gacgagtcacttaac

SEQ ID NO: 1611338 - DNA, 15 bp, Homo sapiens
ggacgagtcacttaa

SEQ ID NO: 1611339 - DNA, 15 bp, Homo sapiens
tggacgagtcactta

SEQ ID NO: 1611340 - DNA, 15 bp, Homo sapiens
ctggacgagtcactt

SEQ ID NO: 1611341 - DNA, 15 bp, Homo sapiens
cctggacgagtcact

SEQ ID NO: 1611342 - DNA, 15 bp, Homo sapiens
ccctggacgagtcac

SEQ ID NO: 1611343 - DNA, 15 bp, Homo sapiens
cccctggacgagtca

SEQ ID NO: 1611344 - DNA, 15 bp, Homo sapiens
gcccctggacgagtc

SEQ ID NO: 1611345 - DNA, 15 bp, Homo sapiens
tgcccctggacgagt

SEQ ID NO: 1611346 - DNA, 15 bp, Homo sapiens
gtgcccctggacgag

SEQ ID NO: 1611347 - DNA, 15 bp, Homo sapiens
tgtgcccctggacga

SEQ ID NO: 1611348 - DNA, 15 bp, Homo sapiens
gtgtgcccctggacg

SEQ ID NO: 1611349 - DNA, 15 bp, Homo sapiens
tgtgtgcccctggac

SEQ ID NO: 1611350 - DNA, 15 bp, Homo sapiens
ctgtgtgcccctgga

SEQ ID NO: 1611351 - DNA, 15 bp, Homo sapiens
gctgtgtgcccctgg

SEQ ID NO: 1611352 - DNA, 15 bp, Homo sapiens
agctgtgtgcccctg

SEQ ID NO: 1611353 - DNA, 15 bp, Homo sapiens
cagctgtgtgcccct

SEQ ID NO: 1611354 - DNA, 15 bp, Homo sapiens
ccagctgtgtgcccc

SEQ ID NO: 1611355 - DNA, 15 bp, Homo sapiens
tccagctgtgtgccc

SEQ ID NO: 1611356 - DNA, 15 bp, Homo sapiens
ttccagctgtgtgcc

SEQ ID NO: 1611357 - DNA, 15 bp, Homo sapiens
tttccagctgtgtgc

SEQ ID NO: 1611358 - DNA, 15 bp, Homo sapiens
cctttccagctgtgt

SEQ ID NO: 1611359 - DNA, 15 bp, Homo sapiens
ccctttccagctgtg

SEQ ID NO: 1611360 - DNA, 15 bp, Homo sapiens
cccctttccagctgt

SEQ ID NO: 1611361 - DNA, 15 bp, Homo sapiens
gcccctttccagctg

SEQ ID NO: 1611362 - DNA, 15 bp, Homo sapiens
tgcccctttccagct

SEQ ID NO: 1611363 - DNA, 15 bp, Homo sapiens
ctgcccctttccagc

SEQ ID NO: 1611364 - DNA, 15 bp, Homo sapiens
cctgcccctttccag

SEQ ID NO: 1611365 - DNA, 15 bp, Homo sapiens
tcctgcccctttcca

SEQ ID NO: 1611366 - DNA, 15 bp, Homo sapiens
ctcctgcccctttcc

SEQ ID NO: 1611367 - DNA, 15 bp, Homo sapiens
gctcctgcccctttc

SEQ ID NO: 1611368 - DNA, 15 bp, Homo sapiens
tgctcctgccccttt

SEQ ID NO: 1611369 - DNA, 15 bp, Homo sapiens
ttgctcctgcccctt

SEQ ID NO: 1611370 - DNA, 15 bp, Homo sapiens
cttgctcctgcccct

SEQ ID NO: 1611371 - DNA, 15 bp, Homo sapiens
ccttgctcctgcccc

SEQ ID NO: 1611372 - DNA, 15 bp, Homo sapiens
tccttgctcctgccc

SEQ ID NO: 1611373 - DNA, 15 bp, Homo sapiens
atccttgctcctgcc

SEQ ID NO: 1611374 - DNA, 15 bp, Homo sapiens
aatccttgctcctgc

SEQ ID NO: 1611375 - DNA, 15 bp, Homo sapiens
gaatccttgctcctg

SEQ ID NO: 1611376 - DNA, 15 bp, Homo sapiens
tgaatccttgctcct

SEQ ID NO: 1611377 - DNA, 15 bp, Homo sapiens
ttgaatccttgctcc

SEQ ID NO: 1611378 - DNA, 15 bp, Homo sapiens
tttgaatccttgctc

SEQ ID NO: 1611379 - DNA, 15 bp, Homo sapiens
gtttgaatccttgct

SEQ ID NO: 1611380 - DNA, 15 bp, Homo sapiens
agtttgaatccttgc

SEQ ID NO: 1611381 - DNA, 15 bp, Homo sapiens
aagtttgaatccttg

SEQ ID NO: 1611382 - DNA, 15 bp, Homo sapiens
taagtttgaatcctt

SEQ ID NO: 1611383 - DNA, 15 bp, Homo sapiens
gtaagtttgaatcct

SEQ ID NO: 1611384 - DNA, 15 bp, Homo sapiens
tgtaagtttgaatcc

SEQ ID NO: 1611385 - DNA, 15 bp, Homo sapiens
atgtaagtttgaatc

SEQ ID NO: 1611386 - DNA, 15 bp, Homo sapiens
tatgtaagtttgaat

SEQ ID NO: 1611387 - DNA, 15 bp, Homo sapiens
gtatgtaagtttgaa

SEQ ID NO: 1611388 - DNA, 15 bp, Homo sapiens
cgtatgtaagtttga

SEQ ID NO: 1611389 - DNA, 15 bp, Homo sapiens
gcgtatgtaagtttg

SEQ ID NO: 1611390 - DNA, 15 bp, Homo sapiens
agcgtatgtaagttt

SEQ ID NO: 1611391 - DNA, 15 bp, Homo sapiens
aagcgtatgtaagtt

SEQ ID NO: 1611392 - DNA, 15 bp, Homo sapiens
caagcgtatgtaagt

SEQ ID NO: 1611393 - DNA, 15 bp, Homo sapiens
acaagcgtatgtaag

SEQ ID NO: 1611394 - DNA, 15 bp, Homo sapiens
gacaagcgtatgtaa

SEQ ID NO: 1611395 - DNA, 15 bp, Homo sapiens
agacaagcgtatgta

SEQ ID NO: 1611396 - DNA, 15 bp, Homo sapiens
tagacaagcgtatgt

SEQ ID NO: 1611397 - DNA, 15 bp, Homo sapiens
atagacaagcgtatg

SEQ ID NO: 1611398 - DNA, 15 bp, Homo sapiens
tatagacaagcgtat

SEQ ID NO: 1611399 - DNA, 15 bp, Homo sapiens
ttatagacaagcgta

SEQ ID NO: 1611400 - DNA, 15 bp, Homo sapiens
gttatagacaagcgt

SEQ ID NO: 1611401 - DNA, 15 bp, Homo sapiens
ggttatagacaagcg

SEQ ID NO: 1611402 - DNA, 15 bp, Homo sapiens
tggttatagacaagc

SEQ ID NO: 1611403 - DNA, 15 bp, Homo sapiens
gtggttatagacaag

SEQ ID NO: 1611404 - DNA, 15 bp, Homo sapiens
tgtggttatagacaa

SEQ ID NO: 1611405 - DNA, 15 bp, Homo sapiens
ctgtggttatagaca

SEQ ID NO: 1611406 - DNA, 15 bp, Homo sapiens
tctgtggttatagac

SEQ ID NO: 1611407 - DNA, 15 bp, Homo sapiens
gtctgtggttataga

SEQ ID NO: 1611408 - DNA, 15 bp, Homo sapiens
ggtctgtggttatag

SEQ ID NO: 1611409 - DNA, 15 bp, Homo sapiens
cggtctgtggttata

SEQ ID NO: 1611410 - DNA, 15 bp, Homo sapiens
acggtctgtggttat

SEQ ID NO: 1611411 - DNA, 15 bp, Homo sapiens
cacggtctgtggtta

SEQ ID NO: 1611412 - DNA, 15 bp, Homo sapiens
gcacggtctgtggtt

SEQ ID NO: 1611413 - DNA, 15 bp, Homo sapiens
ggcacggtctgtggt

SEQ ID NO: 1611414 - DNA, 15 bp, Homo sapiens
gggcacggtctgtgg

SEQ ID NO: 1611415 - DNA, 15 bp, Homo sapiens
agggcacggtctgtg

SEQ ID NO: 1611416 - DNA, 15 bp, Homo sapiens
aagggcacggtctgt

SEQ ID NO: 1611417 - DNA, 15 bp, Homo sapiens
taagggcacggtctg

SEQ ID NO: 1611418 - DNA, 15 bp, Homo sapiens
ttaagggcacggtct

SEQ ID NO: 1611419 - DNA, 15 bp, Homo sapiens
attaagggcacggtc

SEQ ID NO: 1611420 - DNA, 15 bp, Homo sapiens
gattaagggcacggt

SEQ ID NO: 1611421 - DNA, 15 bp, Homo sapiens
cgattaagggcacgg

SEQ ID NO: 1611422 - DNA, 15 bp, Homo sapiens
gcgattaagggcacg

SEQ ID NO: 1611423 - DNA, 15 bp, Homo sapiens
ggcgattaagggcac

SEQ ID NO: 1611424 - DNA, 15 bp, Homo sapiens
tggcgattaagggca

SEQ ID NO: 1611425 - DNA, 15 bp, Homo sapiens
gtggcgattaagggc

SEQ ID NO: 1611426 - DNA, 15 bp, Homo sapiens
tgtggcgattaaggg

SEQ ID NO: 1611427 - DNA, 15 bp, Homo sapiens
gtgtggcgattaagg

SEQ ID NO: 1611428 - DNA, 15 bp, Homo sapiens
agtgtggcgattaag

SEQ ID NO: 1611429 - DNA, 15 bp, Homo sapiens
gagtgtggcgattaa

SEQ ID NO: 1611430 - DNA, 15 bp, Homo sapiens
agagtgtggcgatta

SEQ ID NO: 1611431 - DNA, 15 bp, Homo sapiens
aagagtgtggcgatt

SEQ ID NO: 1611432 - DNA, 15 bp, Homo sapiens
aaagagtgtggcgat

SEQ ID NO: 1611433 - DNA, 15 bp, Homo sapiens
gaaagagtgtggcga

SEQ ID NO: 1611434 - DNA, 15 bp, Homo sapiens
tgaaagagtgtggcg

SEQ ID NO: 1611435 - DNA, 15 bp, Homo sapiens
gtgaaagagtgtggc

SEQ ID NO: 1611436 - DNA, 15 bp, Homo sapiens
agtgaaagagtgtgg

SEQ ID NO: 1611437 - DNA, 15 bp, Homo sapiens
aagtgaaagagtgtg

SEQ ID NO: 1611438 - DNA, 15 bp, Homo sapiens
gaagtgaaagagtgt

SEQ ID NO: 1611439 - DNA, 15 bp, Homo sapiens
agaagtgaaagagtg

SEQ ID NO: 1611440 - DNA, 15 bp, Homo sapiens
tagaagtgaaagagt

SEQ ID NO: 1611441 - DNA, 15 bp, Homo sapiens
ctagaagtgaaagag

SEQ ID NO: 1611442 - DNA, 15 bp, Homo sapiens
gctagaagtgaaaga

SEQ ID NO: 1611443 - DNA, 15 bp, Homo sapiens
tgctagaagtgaaag

SEQ ID NO: 1611444 - DNA, 15 bp, Homo sapiens
ctgctagaagtgaaa

SEQ ID NO: 1611445 - DNA, 15 bp, Homo sapiens
cctgctagaagtgaa

SEQ ID NO: 1611446 - DNA, 15 bp, Homo sapiens
gcctgctagaagtga

SEQ ID NO: 1611447 - DNA, 15 bp, Homo sapiens
agcctgctagaagtg

SEQ ID NO: 1611448 - DNA, 15 bp, Homo sapiens
cagcctgctagaagt

SEQ ID NO: 1611449 - DNA, 15 bp, Homo sapiens
ccagcctgctagaag

SEQ ID NO: 1611450 - DNA, 15 bp, Homo sapiens
cccagcctgctagaa

SEQ ID NO: 1611451 - DNA, 15 bp, Homo sapiens
ccccagcctgctaga

SEQ ID NO: 1611452 - DNA, 15 bp, Homo sapiens
gccccagcctgctag

SEQ ID NO: 1611453 - DNA, 15 bp, Homo sapiens
agccccagcctgcta

SEQ ID NO: 1611454 - DNA, 15 bp, Homo sapiens
gagccccagcctgct

SEQ ID NO: 1611455 - DNA, 15 bp, Homo sapiens
tgagccccagcctgc

SEQ ID NO: 1611456 - DNA, 15 bp, Homo sapiens
ctgagccccagcctg

SEQ ID NO: 1611457 - DNA, 15 bp, Homo sapiens
gcactgagccccagc

SEQ ID NO: 1611458 - DNA, 15 bp, Homo sapiens
tgcactgagccccag

SEQ ID NO: 1611459 - DNA, 15 bp, Homo sapiens
ttgcactgagcccca

SEQ ID NO: 1611460 - DNA, 15 bp, Homo sapiens
attgcactgagcccc

SEQ ID NO: 1611461 - DNA, 15 bp, Homo sapiens
gattgcactgagccc

SEQ ID NO: 1611462 - DNA, 15 bp, Homo sapiens
tgattgcactgagcc

SEQ ID NO: 1611463 - DNA, 15 bp, Homo sapiens
ctgattgcactgagc

SEQ ID NO: 1611464 - DNA, 15 bp, Homo sapiens
cctgattgcactgag

SEQ ID NO: 1611465 - DNA, 15 bp, Homo sapiens
gcctgattgcactga

SEQ ID NO: 1611466 - DNA, 15 bp, Homo sapiens
agcctgattgcactg

SEQ ID NO: 1611467 - DNA, 15 bp, Homo sapiens
tagcctgattgcact

SEQ ID NO: 1611468 - DNA, 15 bp, Homo sapiens
gtagcctgattgcac

SEQ ID NO: 1611469 - DNA, 15 bp, Homo sapiens
ggtagcctgattgca

SEQ ID NO: 1611470 - DNA, 15 bp, Homo sapiens
tggtagcctgattgc

SEQ ID NO: 1611471 - DNA, 15 bp, Homo sapiens
ttggtagcctgattg

SEQ ID NO: 1611472 - DNA, 15 bp, Homo sapiens
cttggtagcctgatt

SEQ ID NO: 1611473 - DNA, 15 bp, Homo sapiens
ccttggtagcctgat

SEQ ID NO: 1611474 - DNA, 15 bp, Homo sapiens
tccttggtagcctga

SEQ ID NO: 1611475 - DNA, 15 bp, Homo sapiens
ttccttggtagcctg

SEQ ID NO: 1611476 - DNA, 15 bp, Homo sapiens
cttccttggtagcct

SEQ ID NO: 1611477 - DNA, 15 bp, Homo sapiens
acttccttggtagcc

SEQ ID NO: 1611478 - DNA, 15 bp, Homo sapiens
gacttccttggtagc

SEQ ID NO: 1611479 - DNA, 15 bp, Homo sapiens
cgacttccttggtag

SEQ ID NO: 1611480 - DNA, 15 bp, Homo sapiens
tcgacttccttggta

SEQ ID NO: 1611481 - DNA, 15 bp, Homo sapiens
ctcgacttccttggt

SEQ ID NO: 1611482 - DNA, 15 bp, Homo sapiens
cctcgacttccttgg

SEQ ID NO: 1611483 - DNA, 15 bp, Homo sapiens
tcctcgacttccttg

SEQ ID NO: 1611484 - DNA, 15 bp, Homo sapiens
ctcctcgacttcctt

SEQ ID NO: 1611485 - DNA, 15 bp, Homo sapiens
cctcctcgacttcct

SEQ ID NO: 1611486 - DNA, 15 bp, Homo sapiens
tcctcctcgacttcc

SEQ ID NO: 1611487 - DNA, 15 bp, Homo sapiens
ctcctcctcgacttc

SEQ ID NO: 1611488 - DNA, 15 bp, Homo sapiens
cctcctcctcgactt

SEQ ID NO: 1611489 - DNA, 15 bp, Homo sapiens
tcctcctcctcgact

SEQ ID NO: 1611490 - DNA, 15 bp, Homo sapiens
ctcctcctcctcgac

SEQ ID NO: 1611491 - DNA, 15 bp, Homo sapiens
cctcctcctcctcga

SEQ ID NO: 1611492 - DNA, 15 bp, Homo sapiens
tcctcctcctcctcg

SEQ ID NO: 1611493 - DNA, 15 bp, Homo sapiens
gggtcctcctcctcc

SEQ ID NO: 1611494 - DNA, 15 bp, Homo sapiens
cgggtcctcctcctc

SEQ ID NO: 1611495 - DNA, 15 bp, Homo sapiens
gcgggtcctcctcct

SEQ ID NO: 1611496 - DNA, 15 bp, Homo sapiens
ggcgggtcctcctcc

SEQ ID NO: 1611497 - DNA, 15 bp, Homo sapiens
gggcgggtcctcctc

SEQ ID NO: 1611498 - DNA, 15 bp, Homo sapiens
agggcgggtcctcct

SEQ ID NO: 1611499 - DNA, 15 bp, Homo sapiens
cagggcgggtcctcc

SEQ ID NO: 1611500 - DNA, 15 bp, Homo sapiens
acagggcgggtcctc

SEQ ID NO: 1611501 - DNA, 15 bp, Homo sapiens
gacagggcgggtcct

SEQ ID NO: 1611502 - DNA, 15 bp, Homo sapiens
agacagggcgggtcc

SEQ ID NO: 1611503 - DNA, 15 bp, Homo sapiens
gagacagggcgggtc

SEQ ID NO: 1611504 - DNA, 15 bp, Homo sapiens
tgagacagggcgggt

SEQ ID NO: 1611505 - DNA, 15 bp, Homo sapiens
ctgagacagggcggg

SEQ ID NO: 1611506 - DNA, 15 bp, Homo sapiens
gctgagacagggcgg

SEQ ID NO: 1611507 - DNA, 15 bp, Homo sapiens
tgctgagacagggcg

SEQ ID NO: 1611508 - DNA, 15 bp, Homo sapiens
atgctgagacagggc

SEQ ID NO: 1611509 - DNA, 15 bp, Homo sapiens
gatgctgagacaggg

SEQ ID NO: 1611510 - DNA, 15 bp, Homo sapiens
agatgctgagacagg

SEQ ID NO: 1611511 - DNA, 15 bp, Homo sapiens
gagatgctgagacag

SEQ ID NO: 1611512 - DNA, 15 bp, Homo sapiens
agagatgctgagaca

SEQ ID NO: 1611513 - DNA, 15 bp, Homo sapiens
aagagatgctgagac

SEQ ID NO: 1611514 - DNA, 15 bp, Homo sapiens
gaagagatgctgaga

SEQ ID NO: 1611515 - DNA, 15 bp, Homo sapiens
tgaagagatgctgag

SEQ ID NO: 1611516 - DNA, 15 bp, Homo sapiens
ctgaagagatgctga

SEQ ID NO: 1611517 - DNA, 15 bp, Homo sapiens
tctgaagagatgctg

SEQ ID NO: 1611518 - DNA, 15 bp, Homo sapiens
ctctgaagagatgct

SEQ ID NO: 1611519 - DNA, 15 bp, Homo sapiens
cctctgaagagatgc

SEQ ID NO: 1611520 - DNA, 15 bp, Homo sapiens
ccctctgaagagatg

SEQ ID NO: 1611521 - DNA, 15 bp, Homo sapiens
gccctctgaagagat

SEQ ID NO: 1611522 - DNA, 15 bp, Homo sapiens
agccctctgaagaga

SEQ ID NO: 1611523 - DNA, 15 bp, Homo sapiens
cagccctctgaagag

SEQ ID NO: 1611524 - DNA, 15 bp, Homo sapiens
ccagccctctgaaga

SEQ ID NO: 1611525 - DNA, 15 bp, Homo sapiens
cccagccctctgaag

SEQ ID NO: 1611526 - DNA, 15 bp, Homo sapiens
tcccagccctctgaa

SEQ ID NO: 1611527 - DNA, 15 bp, Homo sapiens
ttcccagccctctga

SEQ ID NO: 1611528 - DNA, 15 bp, Homo sapiens
cttcccagccctctg

SEQ ID NO: 1611529 - DNA, 15 bp, Homo sapiens
acttcccagccctct

SEQ ID NO: 1611530 - DNA, 15 bp, Homo sapiens
tacttcccagccctc

SEQ ID NO: 1611531 - DNA, 15 bp, Homo sapiens
gtacttcccagccct

SEQ ID NO: 1611532 - DNA, 15 bp, Homo sapiens
tgtacttcccagccc

SEQ ID NO: 1611533 - DNA, 15 bp, Homo sapiens
gtgtacttcccagcc

SEQ ID NO: 1611534 - DNA, 15 bp, Homo sapiens
cgtgtacttcccagc

SEQ ID NO: 1611535 - DNA, 15 bp, Homo sapiens
ccgtgtacttcccag

SEQ ID NO: 1611536 - DNA, 15 bp, Homo sapiens
accgtgtacttccca

SEQ ID NO: 1611537 - DNA, 15 bp, Homo sapiens
taccgtgtacttccc

SEQ ID NO: 1611538 - DNA, 15 bp, Homo sapiens
ctaccgtgtacttcc

SEQ ID NO: 1611539 - DNA, 15 bp, Homo sapiens
gctaccgtgtacttc

SEQ ID NO: 1611540 - DNA, 15 bp, Homo sapiens
tgctaccgtgtactt

SEQ ID NO: 1611541 - DNA, 15 bp, Homo sapiens
ctgctaccgtgtact

SEQ ID NO: 1611542 - DNA, 15 bp, Homo sapiens
tctgctaccgtgtac

SEQ ID NO: 1611543 - DNA, 15 bp, Homo sapiens
ctctgctaccgtgta

SEQ ID NO: 1611544 - DNA, 15 bp, Homo sapiens
actctgctaccgtgt

SEQ ID NO: 1611545 - DNA, 15 bp, Homo sapiens
gactctgctaccgtg

SEQ ID NO: 1611546 - DNA, 15 bp, Homo sapiens
ggactctgctaccgt

SEQ ID NO: 1611547 - DNA, 15 bp, Homo sapiens
aggactctgctaccg

SEQ ID NO: 1611548 - DNA, 15 bp, Homo sapiens
caggactctgctacc

SEQ ID NO: 1611549 - DNA, 15 bp, Homo sapiens
gcaggactctgctac

SEQ ID NO: 1611550 - DNA, 15 bp, Homo sapiens
ggcaggactctgcta

SEQ ID NO: 1611551 - DNA, 15 bp, Homo sapiens
gggcaggactctgct

SEQ ID NO: 1611552 - DNA, 15 bp, Homo sapiens
ggggcaggactctgc

SEQ ID NO: 1611553 - DNA, 15 bp, Homo sapiens
aggggcaggactctg

SEQ ID NO: 1611554 - DNA, 15 bp, Homo sapiens
caggggcaggactct

SEQ ID NO: 1611555 - DNA, 15 bp, Homo sapiens
tcaggggcaggactc

SEQ ID NO: 1611556 - DNA, 15 bp, Homo sapiens
ttcaggggcaggact

SEQ ID NO: 1611557 - DNA, 15 bp, Homo sapiens
cttcaggggcaggac

SEQ ID NO: 1611558 - DNA, 15 bp, Homo sapiens
ccttcaggggcagga

SEQ ID NO: 1611559 - DNA, 15 bp, Homo sapiens
cccttcaggggcagg

SEQ ID NO: 1611560 - DNA, 15 bp, Homo sapiens
tcccttcaggggcag

SEQ ID NO: 1611561 - DNA, 15 bp, Homo sapiens
ctcccttcaggggca

SEQ ID NO: 1611562 - DNA, 15 bp, Homo sapiens
gctcccttcaggggc

SEQ ID NO: 1611563 - DNA, 15 bp, Homo sapiens
ggctcccttcagggg

SEQ ID NO: 1611564 - DNA, 15 bp, Homo sapiens
gggctcccttcaggg

SEQ ID NO: 1611565 - DNA, 15 bp, Homo sapiens
ggggctcccttcagg

SEQ ID NO: 1611566 - DNA, 15 bp, Homo sapiens
cggggctcccttcag

SEQ ID NO: 1611567 - DNA, 15 bp, Homo sapiens
acggggctcccttca

SEQ ID NO: 1611568 - DNA, 15 bp, Homo sapiens
aacggggctcccttc

SEQ ID NO: 1611569 - DNA, 15 bp, Homo sapiens
caacggggctccctt

SEQ ID NO: 1611570 - DNA, 15 bp, Homo sapiens
gcaacggggctccct

SEQ ID NO: 1611571 - DNA, 15 bp, Homo sapiens
ggcaacggggctccc

SEQ ID NO: 1611572 - DNA, 15 bp, Homo sapiens
cggcaacggggctcc

SEQ ID NO: 1611573 - DNA, 15 bp, Homo sapiens
acggcaacggggctc

SEQ ID NO: 1611574 - DNA, 15 bp, Homo sapiens
cacggcaacggggct

SEQ ID NO: 1611575 - DNA, 15 bp, Homo sapiens
ccacggcaacggggc

SEQ ID NO: 1611576 - DNA, 15 bp, Homo sapiens
cccacggcaacgggg

SEQ ID NO: 1611577 - DNA, 15 bp, Homo sapiens
tcccacggcaacggg

SEQ ID NO: 1611578 - DNA, 15 bp, Homo sapiens
ctcccacggcaacgg

SEQ ID NO: 1611579 - DNA, 15 bp, Homo sapiens
gctcccacggcaacg

SEQ ID NO: 1611580 - DNA, 15 bp, Homo sapiens
agctcccacggcaac

SEQ ID NO: 1611581 - DNA, 15 bp, Homo sapiens
aagctcccacggcaa

SEQ ID NO: 1611582 - DNA, 15 bp, Homo sapiens
taagctcccacggca

SEQ ID NO: 1611583 - DNA, 15 bp, Homo sapiens
gtaagctcccacggc

SEQ ID NO: 1611584 - DNA, 15 bp, Homo sapiens
tgtaagctcccacgg

SEQ ID NO: 1611585 - DNA, 15 bp, Homo sapiens
atgtaagctcccacg

SEQ ID NO: 1611586 - DNA, 15 bp, Homo sapiens
gatgtaagctcccac

SEQ ID NO: 1611587 - DNA, 15 bp, Homo sapiens
tgatgtaagctccca

SEQ ID NO: 1611588 - DNA, 15 bp, Homo sapiens
ctgatgtaagctccc

SEQ ID NO: 1611589 - DNA, 15 bp, Homo sapiens
actgatgtaagctcc

SEQ ID NO: 1611590 - DNA, 15 bp, Homo sapiens
gactgatgtaagctc

SEQ ID NO: 1611591 - DNA, 15 bp, Homo sapiens
tgactgatgtaagct

SEQ ID NO: 1611592 - DNA, 15 bp, Homo sapiens
atgactgatgtaagc

SEQ ID NO: 1611593 - DNA, 15 bp, Homo sapiens
tatgactgatgtaag

SEQ ID NO: 1611594 - DNA, 15 bp, Homo sapiens
atatgactgatgtaa

SEQ ID NO: 1611595 - DNA, 15 bp, Homo sapiens
tatatgactgatgta

SEQ ID NO: 1611596 - DNA, 15 bp, Homo sapiens
atatatgactgatgt

SEQ ID NO: 1611597 - DNA, 15 bp, Homo sapiens
tatatatgactgatg

SEQ ID NO: 1611598 - DNA, 15 bp, Homo sapiens
ctatatatgactgat

SEQ ID NO: 1611599 - DNA, 15 bp, Homo sapiens
cctatatatgactga

SEQ ID NO: 1611600 - DNA, 15 bp, Homo sapiens
acctatatatgactg

SEQ ID NO: 1611601 - DNA, 15 bp, Homo sapiens
cacctatatatgact

SEQ ID NO: 1611602 - DNA, 15 bp, Homo sapiens
ccacctatatatgac

SEQ ID NO: 1611603 - DNA, 15 bp, Homo sapiens
gccacctatatatga

SEQ ID NO: 1611604 - DNA, 15 bp, Homo sapiens
ggccacctatatatg

SEQ ID NO: 1611605 - DNA, 15 bp, Homo sapiens
tggccacctatatat

SEQ ID NO: 1611606 - DNA, 15 bp, Homo sapiens
gtggccacctatata

SEQ ID NO: 1611607 - DNA, 15 bp, Homo sapiens
ggtggccacctatat

SEQ ID NO: 1611608 - DNA, 15 bp, Homo sapiens
tggtggccacctata

SEQ ID NO: 1611609 - DNA, 15 bp, Homo sapiens
ctggtggccacctat

SEQ ID NO: 1611610 - DNA, 15 bp, Homo sapiens
cctggtggccaccta

SEQ ID NO: 1611611 - DNA, 15 bp, Homo sapiens
acctggtggccacct

SEQ ID NO: 1611612 - DNA, 15 bp, Homo sapiens
cacctggtggccacc

SEQ ID NO: 1611613 - DNA, 15 bp, Homo sapiens
ccacctggtggccac

SEQ ID NO: 1611614 - DNA, 15 bp, Homo sapiens
gccacctggtggcca

SEQ ID NO: 1611615 - DNA, 15 bp, Homo sapiens
tgccacctggtggcc

SEQ ID NO: 1611616 - DNA, 15 bp, Homo sapiens
ctgccacctggtggc

SEQ ID NO: 1611617 - DNA, 15 bp, Homo sapiens
gctgccacctggtgg

SEQ ID NO: 1611618 - DNA, 15 bp, Homo sapiens
tgctgccacctggtg

SEQ ID NO: 1611619 - DNA, 15 bp, Homo sapiens
atgctgccacctggt

SEQ ID NO: 1611620 - DNA, 15 bp, Homo sapiens
aatgctgccacctgg

SEQ ID NO: 1611621 - DNA, 15 bp, Homo sapiens
caatgctgccacctg

SEQ ID NO: 1611622 - DNA, 15 bp, Homo sapiens
acaatgctgccacct

SEQ ID NO: 1611623 - DNA, 15 bp, Homo sapiens
aacaatgctgccacc

SEQ ID NO: 1611624 - DNA, 15 bp, Homo sapiens
gaacaatgctgccac

SEQ ID NO: 1611625 - DNA, 15 bp, Homo sapiens
agaacaatgctgcca

SEQ ID NO: 1611626 - DNA, 15 bp, Homo sapiens
cagaacaatgctgcc

SEQ ID NO: 1611627 - DNA, 15 bp, Homo sapiens
tcagaacaatgctgc

SEQ ID NO: 1611628 - DNA, 15 bp, Homo sapiens
gtcagaacaatgctg

SEQ ID NO: 1611629 - DNA, 15 bp, Homo sapiens
tgtcagaacaatgct

SEQ ID NO: 1611630 - DNA, 15 bp, Homo sapiens
ctgtcagaacaatgc

SEQ ID NO: 1611631 - DNA, 15 bp, Homo sapiens
cctgtcagaacaatg

SEQ ID NO: 1611632 - DNA, 15 bp, Homo sapiens
tcctgtcagaacaat

SEQ ID NO: 1611633 - DNA, 15 bp, Homo sapiens
ttcctgtcagaacaa

SEQ ID NO: 1611634 - DNA, 15 bp, Homo sapiens
cttcctgtcagaaca

SEQ ID NO: 1611635 - DNA, 15 bp, Homo sapiens
gcttcctgtcagaac

SEQ ID NO: 1611636 - DNA, 15 bp, Homo sapiens
ggcttcctgtcagaa

SEQ ID NO: 1611637 - DNA, 15 bp, Homo sapiens
cggcttcctgtcaga

SEQ ID NO: 1611638 - DNA, 15 bp, Homo sapiens
gcggcttcctgtcag

SEQ ID NO: 1611639 - DNA, 15 bp, Homo sapiens
cgcggcttcctgtca

SEQ ID NO: 1611640 - DNA, 15 bp, Homo sapiens
acgcggcttcctgtc

SEQ ID NO: 1611641 - DNA, 15 bp, Homo sapiens
cacgcggcttcctgt

SEQ ID NO: 1611642 - DNA, 15 bp, Homo sapiens
gcacgcggcttcctg

SEQ ID NO: 1611643 - DNA, 15 bp, Homo sapiens
agcacgcggcttcct

SEQ ID NO: 1611644 - DNA, 15 bp, Homo sapiens
cagcacgcggcttcc

SEQ ID NO: 1611645 - DNA, 15 bp, Homo sapiens
gcagcacgcggcttc

SEQ ID NO: 1611646 - DNA, 15 bp, Homo sapiens
ggcagcacgcggctt

SEQ ID NO: 1611647 - DNA, 15 bp, Homo sapiens
aggcagcacgcggct

SEQ ID NO: 1611648 - DNA, 15 bp, Homo sapiens
aaggcagcacgcggc

SEQ ID NO: 1611649 - DNA, 15 bp, Homo sapiens
caaggcagcacgcgg

SEQ ID NO: 1611650 - DNA, 15 bp, Homo sapiens
gcaaggcagcacgcg

SEQ ID NO: 1611651 - DNA, 15 bp, Homo sapiens
agcaaggcagcacgc

SEQ ID NO: 1611652 - DNA, 15 bp, Homo sapiens
cagcaaggcagcacg

SEQ ID NO: 1611653 - DNA, 15 bp, Homo sapiens
acagcaaggcagcac

SEQ ID NO: 1611654 - DNA, 15 bp, Homo sapiens
gacagcaaggcagca

SEQ ID NO: 1611655 - DNA, 15 bp, Homo sapiens
agacagcaaggcagc

SEQ ID NO: 1611656 - DNA, 15 bp, Homo sapiens
aagacagcaaggcag

SEQ ID NO: 1611657 - DNA, 15 bp, Homo sapiens
taagacagcaaggca

SEQ ID NO: 1611658 - DNA, 15 bp, Homo sapiens
ctaagacagcaaggc

SEQ ID NO: 1611659 - DNA, 15 bp, Homo sapiens
actaagacagcaagg

SEQ ID NO: 1611660 - DNA, 15 bp, Homo sapiens
aactaagacagcaag

SEQ ID NO: 1611661 - DNA, 15 bp, Homo sapiens
gaactaagacagcaa

SEQ ID NO: 1611662 - DNA, 15 bp, Homo sapiens
agaactaagacagca

SEQ ID NO: 1611663 - DNA, 15 bp, Homo sapiens
cagaactaagacagc

SEQ ID NO: 1611664 - DNA, 15 bp, Homo sapiens
tcagaactaagacag

SEQ ID NO: 1611665 - DNA, 15 bp, Homo sapiens
atcagaactaagaca

SEQ ID NO: 1611666 - DNA, 15 bp, Homo sapiens
gatcagaactaagac

SEQ ID NO: 1611667 - DNA, 15 bp, Homo sapiens
agatcagaactaaga

SEQ ID NO: 1611668 - DNA, 15 bp, Homo sapiens
cagatcagaactaag

SEQ ID NO: 1611669 - DNA, 15 bp, Homo sapiens
ccagatcagaactaa

SEQ ID NO: 1611670 - DNA, 15 bp, Homo sapiens
cccagatcagaacta

SEQ ID NO: 1611671 - DNA, 15 bp, Homo sapiens
acccagatcagaact

SEQ ID NO: 1611672 - DNA, 15 bp, Homo sapiens
aacccagatcagaac

SEQ ID NO: 1611673 - DNA, 15 bp, Homo sapiens
gaacccagatcagaa

SEQ ID NO: 1611674 - DNA, 15 bp, Homo sapiens
agaacccagatcaga

SEQ ID NO: 1611675 - DNA, 15 bp, Homo sapiens
cagaacccagatcag

SEQ ID NO: 1611676 - DNA, 15 bp, Homo sapiens
gcagaacccagatca

SEQ ID NO: 1611677 - DNA, 15 bp, Homo sapiens
ggcagaacccagatc

SEQ ID NO: 1611678 - DNA, 15 bp, Homo sapiens
tggcagaacccagat

SEQ ID NO: 1611679 - DNA, 15 bp, Homo sapiens
gtggcagaacccaga

SEQ ID NO: 1611680 - DNA, 15 bp, Homo sapiens
ggtggcagaacccag

SEQ ID NO: 1611681 - DNA, 15 bp, Homo sapiens
gggtggcagaaccca

SEQ ID NO: 1611682 - DNA, 15 bp, Homo sapiens
ggggtggcagaaccc

SEQ ID NO: 1611683 - DNA, 15 bp, Homo sapiens
aggggtggcagaacc

SEQ ID NO: 1611684 - DNA, 15 bp, Homo sapiens
caggggtggcagaac

SEQ ID NO: 1611685 - DNA, 15 bp, Homo sapiens
ccaggggtggcagaa

SEQ ID NO: 1611686 - DNA, 15 bp, Homo sapiens
accaggggtggcaga

SEQ ID NO: 1611687 - DNA, 15 bp, Homo sapiens
aaccaggggtggcag

SEQ ID NO: 1611688 - DNA, 15 bp, Homo sapiens
gaaccaggggtggca

SEQ ID NO: 1611689 - DNA, 15 bp, Homo sapiens
tgaaccaggggtggc

SEQ ID NO: 1611690 - DNA, 15 bp, Homo sapiens
ctgaaccaggggtgg

SEQ ID NO: 1611691 - DNA, 15 bp, Homo sapiens
actgaaccaggggtg

SEQ ID NO: 1611692 - DNA, 15 bp, Homo sapiens
cactgaaccaggggt

SEQ ID NO: 1611693 - DNA, 15 bp, Homo sapiens
ccactgaaccagggg

SEQ ID NO: 1611694 - DNA, 15 bp, Homo sapiens
gccactgaaccaggg

SEQ ID NO: 1611695 - DNA, 15 bp, Homo sapiens
ggccactgaaccagg

SEQ ID NO: 1611696 - DNA, 15 bp, Homo sapiens
gggccactgaaccag

SEQ ID NO: 1611697 - DNA, 15 bp, Homo sapiens
agggccactgaacca

SEQ ID NO: 1611698 - DNA, 15 bp, Homo sapiens
gagggccactgaacc

SEQ ID NO: 1611699 - DNA, 15 bp, Homo sapiens
tgagggccactgaac

SEQ ID NO: 1611700 - DNA, 15 bp, Homo sapiens
ctgagggccactgaa

SEQ ID NO: 1611701 - DNA, 15 bp, Homo sapiens
gctgagggccactga

SEQ ID NO: 1611702 - DNA, 15 bp, Homo sapiens
ggctgagggccactg

SEQ ID NO: 1611703 - DNA, 15 bp, Homo sapiens
aggctgagggccact

SEQ ID NO: 1611704 - DNA, 15 bp, Homo sapiens
taggctgagggccac

SEQ ID NO: 1611705 - DNA, 15 bp, Homo sapiens
ataggctgagggcca

SEQ ID NO: 1611706 - DNA, 15 bp, Homo sapiens
gataggctgagggcc

SEQ ID NO: 1611707 - DNA, 15 bp, Homo sapiens
ggataggctgagggc

SEQ ID NO: 1611708 - DNA, 15 bp, Homo sapiens
tggataggctgaggg

SEQ ID NO: 1611709 - DNA, 15 bp, Homo sapiens
atggataggctgagg

SEQ ID NO: 1611710 - DNA, 15 bp, Homo sapiens
aatggataggctgag

SEQ ID NO: 1611711 - DNA, 15 bp, Homo sapiens
aaatggataggctga

SEQ ID NO: 1611712 - DNA, 15 bp, Homo sapiens
gaaatggataggctg

SEQ ID NO: 1611713 - DNA, 15 bp, Homo sapiens
agaaatggataggct

SEQ ID NO: 1611714 - DNA, 15 bp, Homo sapiens
aagaaatggataggc

SEQ ID NO: 1611715 - DNA, 15 bp, Homo sapiens
taagaaatggatagg

SEQ ID NO: 1611716 - DNA, 15 bp, Homo sapiens
ataagaaatggatag

SEQ ID NO: 1611717 - DNA, 15 bp, Homo sapiens
cataagaaatggata

SEQ ID NO: 1611718 - DNA, 15 bp, Homo sapiens
acataagaaatggat

SEQ ID NO: 1611719 - DNA, 15 bp, Homo sapiens
cacataagaaatgga

SEQ ID NO: 1611720 - DNA, 15 bp, Homo sapiens
gcacataagaaatgg

SEQ ID NO: 1611721 - DNA, 15 bp, Homo sapiens
ggcacataagaaatg

SEQ ID NO: 1611722 - DNA, 15 bp, Homo sapiens
aggcacataagaaat

SEQ ID NO: 1611723 - DNA, 15 bp, Homo sapiens
gaggcacataagaaa

SEQ ID NO: 1611724 - DNA, 15 bp, Homo sapiens
ggaggcacataagaa

SEQ ID NO: 1611725 - DNA, 15 bp, Homo sapiens
cggaggcacataaga

SEQ ID NO: 1611726 - DNA, 15 bp, Homo sapiens
acggaggcacataag

SEQ ID NO: 1611727 - DNA, 15 bp, Homo sapiens
aacggaggcacataa

SEQ ID NO: 1611728 - DNA, 15 bp, Homo sapiens
aaacggaggcacata

SEQ ID NO: 1611729 - DNA, 15 bp, Homo sapiens
gaaacggaggcacat

SEQ ID NO: 1611730 - DNA, 15 bp, Homo sapiens
ggaaacggaggcaca

SEQ ID NO: 1611731 - DNA, 15 bp, Homo sapiens
aggaaacggaggcac

SEQ ID NO: 1611732 - DNA, 15 bp, Homo sapiens
gaggaaacggaggca

SEQ ID NO: 1611733 - DNA, 15 bp, Homo sapiens
tgaggaaacggaggc

SEQ ID NO: 1611734 - DNA, 15 bp, Homo sapiens
atgaggaaacggagg

SEQ ID NO: 1611735 - DNA, 15 bp, Homo sapiens
gatgaggaaacggag

SEQ ID NO: 1611736 - DNA, 15 bp, Homo sapiens
agatgaggaaacgga

SEQ ID NO: 1611737 - DNA, 15 bp, Homo sapiens
aagatgaggaaacgg

SEQ ID NO: 1611738 - DNA, 15 bp, Homo sapiens
aaagatgaggaaacg

SEQ ID NO: 1611739 - DNA, 15 bp, Homo sapiens
taaagatgaggaaac

SEQ ID NO: 1611740 - DNA, 15 bp, Homo sapiens
gtaaagatgaggaaa

SEQ ID NO: 1611741 - DNA, 15 bp, Homo sapiens
tgtaaagatgaggaa

SEQ ID NO: 1611742 - DNA, 15 bp, Homo sapiens
ttgtaaagatgagga

SEQ ID NO: 1611743 - DNA, 15 bp, Homo sapiens
tttgtaaagatgagg

SEQ ID NO: 1611744 - DNA, 15 bp, Homo sapiens
ttttgtaaagatgag

SEQ ID NO: 1611745 - DNA, 15 bp, Homo sapiens
tttttgtaaagatga

SEQ ID NO: 1611746 - DNA, 15 bp, Homo sapiens
ctttttgtaaagatg

SEQ ID NO: 1611747 - DNA, 15 bp, Homo sapiens
cctttttgtaaagat

SEQ ID NO: 1611748 - DNA, 15 bp, Homo sapiens
tcctttttgtaaaga

SEQ ID NO: 1611749 - DNA, 15 bp, Homo sapiens
ctcctttttgtaaag

SEQ ID NO: 1611750 - DNA, 15 bp, Homo sapiens
tctcctttttgtaaa

SEQ ID NO: 1611751 - DNA, 15 bp, Homo sapiens
atctcctttttgtaa

SEQ ID NO: 1611752 - DNA, 15 bp, Homo sapiens
aatctcctttttgta

SEQ ID NO: 1611753 - DNA, 15 bp, Homo sapiens
caatctcctttttgt

SEQ ID NO: 1611754 - DNA, 15 bp, Homo sapiens
gcaatctcctttttg

SEQ ID NO: 1611755 - DNA, 15 bp, Homo sapiens
tgcaatctccttttt

SEQ ID NO: 1611756 - DNA, 15 bp, Homo sapiens
atgcaatctcctttt

SEQ ID NO: 1611757 - DNA, 15 bp, Homo sapiens
gatgcaatctccttt

SEQ ID NO: 1611758 - DNA, 15 bp, Homo sapiens
agatgcaatctcctt

SEQ ID NO: 1611759 - DNA, 15 bp, Homo sapiens
gagatgcaatctcct

SEQ ID NO: 1611760 - DNA, 15 bp, Homo sapiens
agagatgcaatctcc

SEQ ID NO: 1611761 - DNA, 15 bp, Homo sapiens
cagagatgcaatctc

SEQ ID NO: 1611762 - DNA, 15 bp, Homo sapiens
acagagatgcaatct

SEQ ID NO: 1611763 - DNA, 15 bp, Homo sapiens
cacagagatgcaatc

SEQ ID NO: 1611764 - DNA, 15 bp, Homo sapiens
tcacagagatgcaat

SEQ ID NO: 1611765 - DNA, 15 bp, Homo sapiens
atcacagagatgcaa

SEQ ID NO: 1611766 - DNA, 15 bp, Homo sapiens
gatcacagagatgca

SEQ ID NO: 1611767 - DNA, 15 bp, Homo sapiens
agatcacagagatgc

SEQ ID NO: 1611768 - DNA, 15 bp, Homo sapiens
gagatcacagagatg

SEQ ID NO: 1611769 - DNA, 15 bp, Homo sapiens
agagatcacagagat

SEQ ID NO: 1611770 - DNA, 15 bp, Homo sapiens
cagagatcacagaga

SEQ ID NO: 1611771 - DNA, 15 bp, Homo sapiens
tcagagatcacagag

SEQ ID NO: 1611772 - DNA, 15 bp, Homo sapiens
ttcagagatcacaga

SEQ ID NO: 1611773 - DNA, 15 bp, Homo sapiens
cttcagagatcacag

SEQ ID NO: 1611774 - DNA, 15 bp, Homo sapiens
tcttcagagatcaca

SEQ ID NO: 1611775 - DNA, 15 bp, Homo sapiens
ctcttcagagatcac

SEQ ID NO: 1611776 - DNA, 15 bp, Homo sapiens
gctcttcagagatca

SEQ ID NO: 1611777 - DNA, 15 bp, Homo sapiens
ggctcttcagagatc

SEQ ID NO: 1611778 - DNA, 15 bp, Homo sapiens
gggctcttcagagat

SEQ ID NO: 1611779 - DNA, 15 bp, Homo sapiens
agggctcttcagaga

SEQ ID NO: 1611780 - DNA, 15 bp, Homo sapiens
aagggctcttcagag

SEQ ID NO: 1611781 - DNA, 15 bp, Homo sapiens
caagggctcttcaga

SEQ ID NO: 1611782 - DNA, 15 bp, Homo sapiens
gcaagggctcttcag

SEQ ID NO: 1611783 - DNA, 15 bp, Homo sapiens
tgcaagggctcttca

SEQ ID NO: 1611784 - DNA, 15 bp, Homo sapiens
gtgcaagggctcttc

SEQ ID NO: 1611785 - DNA, 15 bp, Homo sapiens
ggtgcaagggctctt

SEQ ID NO: 1611786 - DNA, 15 bp, Homo sapiens
aggtgcaagggctct

SEQ ID NO: 1611787 - DNA, 15 bp, Homo sapiens
gaggtgcaagggctc

SEQ ID NO: 1611788 - DNA, 15 bp, Homo sapiens
tgaggtgcaagggct

SEQ ID NO: 1611789 - DNA, 15 bp, Homo sapiens
ctgaggtgcaagggc

SEQ ID NO: 1611790 - DNA, 15 bp, Homo sapiens
tctgaggtgcaaggg

SEQ ID NO: 1611791 - DNA, 15 bp, Homo sapiens
atctgaggtgcaagg

SEQ ID NO: 1611792 - DNA, 15 bp, Homo sapiens
catctgaggtgcaag

SEQ ID NO: 1611793 - DNA, 15 bp, Homo sapiens
gcatctgaggtgcaa

SEQ ID NO: 1611794 - DNA, 15 bp, Homo sapiens
ggcatctgaggtgca

SEQ ID NO: 1611795 - DNA, 15 bp, Homo sapiens
tggcatctgaggtgc

SEQ ID NO: 1611796 - DNA, 15 bp, Homo sapiens
atggcatctgaggtg

SEQ ID NO: 1611797 - DNA, 15 bp, Homo sapiens
catggcatctgaggt

SEQ ID NO: 1611798 - DNA, 15 bp, Homo sapiens
acatggcatctgagg

SEQ ID NO: 1611799 - DNA, 15 bp, Homo sapiens
tacatggcatctgag

SEQ ID NO: 1611800 - DNA, 15 bp, Homo sapiens
ttacatggcatctga

SEQ ID NO: 1611801 - DNA, 15 bp, Homo sapiens
tttacatggcatctg

SEQ ID NO: 1611802 - DNA, 15 bp, Homo sapiens
ttttacatggcatct

SEQ ID NO: 1611803 - DNA, 15 bp, Homo sapiens
cttttacatggcatc

SEQ ID NO: 1611804 - DNA, 15 bp, Homo sapiens
tcttttacatggcat

SEQ ID NO: 1611805 - DNA, 15 bp, Homo sapiens
ctcttttacatggca

SEQ ID NO: 1611806 - DNA, 15 bp, Homo sapiens
tctcttttacatggc

SEQ ID NO: 1611807 - DNA, 15 bp, Homo sapiens
ttctcttttacatgg

SEQ ID NO: 1611808 - DNA, 15 bp, Homo sapiens
tttctcttttacatg

SEQ ID NO: 1611809 - DNA, 15 bp, Homo sapiens
ctttctcttttacat

SEQ ID NO: 1611810 - DNA, 15 bp, Homo sapiens
cctttctcttttaca

SEQ ID NO: 1611811 - DNA, 15 bp, Homo sapiens
acctttctcttttac

SEQ ID NO: 1611812 - DNA, 15 bp, Homo sapiens
ctgcacctttctctt

SEQ ID NO: 1611813 - DNA, 15 bp, Homo sapiens
gctgcacctttctct

SEQ ID NO: 1611814 - DNA, 15 bp, Homo sapiens
ggctgcacctttctc

SEQ ID NO: 1611815 - DNA, 15 bp, Homo sapiens
ctggctgcacctttc

SEQ ID NO: 1611816 - DNA, 15 bp, Homo sapiens
actggctgcaccttt

SEQ ID NO: 1611817 - DNA, 15 bp, Homo sapiens
cactggctgcacctt

SEQ ID NO: 1611818 - DNA, 15 bp, Homo sapiens
ccactggctgcacct

SEQ ID NO: 1611819 - DNA, 15 bp, Homo sapiens
tccactggctgcacc

SEQ ID NO: 1611820 - DNA, 15 bp, Homo sapiens
ttccactggctgcac

SEQ ID NO: 1611821 - DNA, 15 bp, Homo sapiens
attccactggctgca

SEQ ID NO: 1611822 - DNA, 15 bp, Homo sapiens
aattccactggctgc

SEQ ID NO: 1611823 - DNA, 15 bp, Homo sapiens
gaattccactggctg

SEQ ID NO: 1611824 - DNA, 15 bp, Homo sapiens
tgaattccactggct

SEQ ID NO: 1611825 - DNA, 15 bp, Homo sapiens
ttgaattccactggc

SEQ ID NO: 1611826 - DNA, 15 bp, Homo sapiens
tttgaattccactgg

SEQ ID NO: 1611827 - DNA, 15 bp, Homo sapiens
atttgaattccactg

SEQ ID NO: 1611828 - DNA, 15 bp, Homo sapiens
catttgaattccact

SEQ ID NO: 1611829 - DNA, 15 bp, Homo sapiens
gcatttgaattccac

SEQ ID NO: 1611830 - DNA, 15 bp, Homo sapiens
agcatttgaattcca

SEQ ID NO: 1611831 - DNA, 15 bp, Homo sapiens
gagcatttgaattcc

SEQ ID NO: 1611832 - DNA, 15 bp, Homo sapiens
ggagcatttgaattc

SEQ ID NO: 1611833 - DNA, 15 bp, Homo sapiens
ggtttggtttgggag

SEQ ID NO: 1611834 - DNA, 15 bp, Homo sapiens
tggtttggtttggga

SEQ ID NO: 1611835 - DNA, 15 bp, Homo sapiens
ctggtttggtttggg

SEQ ID NO: 1611836 - DNA, 15 bp, Homo sapiens
tctggtttggtttgg

SEQ ID NO: 1611837 - DNA, 15 bp, Homo sapiens
atctggtttggtttg

SEQ ID NO: 1611838 - DNA, 15 bp, Homo sapiens
gatctggtttggttt

SEQ ID NO: 1611839 - DNA, 15 bp, Homo sapiens
agatctggtttggtt

SEQ ID NO: 1611840 - DNA, 15 bp, Homo sapiens
gagatctggtttggt

SEQ ID NO: 1611841 - DNA, 15 bp, Homo sapiens
ggagatctggtttgg

SEQ ID NO: 1611842 - DNA, 15 bp, Homo sapiens
aggagatctggtttg

SEQ ID NO: 1611843 - DNA, 15 bp, Homo sapiens
gaggagatctggttt

SEQ ID NO: 1611844 - DNA, 15 bp, Homo sapiens
ggaggagatctggtt

SEQ ID NO: 1611845 - DNA, 15 bp, Homo sapiens
gggaggagatctggt

SEQ ID NO: 1611846 - DNA, 15 bp, Homo sapiens
gggggaggagatctg

SEQ ID NO: 1611847 - DNA, 15 bp, Homo sapiens
ggggggaggagatct

SEQ ID NO: 1611848 - DNA, 15 bp, Homo sapiens
gggggggaggagatc

SEQ ID NO: 1611849 - DNA, 15 bp, Homo sapiens
tgggggggaggagat

SEQ ID NO: 1611850 - DNA, 15 bp, Homo sapiens
gtgggggggaggaga

SEQ ID NO: 1611851 - DNA, 15 bp, Homo sapiens
agtgggggggaggag

SEQ ID NO: 1611852 - DNA, 15 bp, Homo sapiens
cagtgggggggagga

SEQ ID NO: 1611853 - DNA, 15 bp, Homo sapiens
tcagtgggggggagg

SEQ ID NO: 1611854 - DNA, 15 bp, Homo sapiens
ttcagtgggggggag

SEQ ID NO: 1611855 - DNA, 15 bp, Homo sapiens
tttcagtggggggga

SEQ ID NO: 1611856 - DNA, 15 bp, Homo sapiens
ttttcagtggggggg

SEQ ID NO: 1611857 - DNA, 15 bp, Homo sapiens
gttttcagtgggggg

SEQ ID NO: 1611858 - DNA, 15 bp, Homo sapiens
tgttttcagtggggg

SEQ ID NO: 1611859 - DNA, 15 bp, Homo sapiens
ttgttttcagtgggg

SEQ ID NO: 1611860 - DNA, 15 bp, Homo sapiens
gttgttttcagtggg

SEQ ID NO: 1611861 - DNA, 15 bp, Homo sapiens
ttgttgttttcagtg

SEQ ID NO: 1611862 - DNA, 15 bp, Homo sapiens
atatttctttggtgc

SEQ ID NO: 1611863 - DNA, 15 bp, Homo sapiens
catatttctttggtg

SEQ ID NO: 1611864 - DNA, 15 bp, Homo sapiens
tcatatttctttggt

SEQ ID NO: 1611865 - DNA, 15 bp, Homo sapiens
atcatatttctttgg

SEQ ID NO: 1611866 - DNA, 15 bp, Homo sapiens
catcatatttctttg

SEQ ID NO: 1611867 - DNA, 15 bp, Homo sapiens
gcatcatatttcttt

SEQ ID NO: 1611868 - DNA, 15 bp, Homo sapiens
tgcatcatatttctt

SEQ ID NO: 1611869 - DNA, 15 bp, Homo sapiens
ttgcatcatatttct

SEQ ID NO: 1611870 - DNA, 15 bp, Homo sapiens
cttgcatcatatttc

SEQ ID NO: 1611871 - DNA, 15 bp, Homo sapiens
gcttgcatcatattt

SEQ ID NO: 1611872 - DNA, 15 bp, Homo sapiens
ggcttgcatcatatt

SEQ ID NO: 1611873 - DNA, 15 bp, Homo sapiens
tggcttgcatcatat

SEQ ID NO: 1611874 - DNA, 15 bp, Homo sapiens
gtggcttgcatcata

SEQ ID NO: 1611875 - DNA, 15 bp, Homo sapiens
tgtggcttgcatcat

SEQ ID NO: 1611876 - DNA, 15 bp, Homo sapiens
ctgtggcttgcatca

SEQ ID NO: 1611877 - DNA, 15 bp, Homo sapiens
tctgtggcttgcatc

SEQ ID NO: 1611878 - DNA, 15 bp, Homo sapiens
ttctgtggcttgcat

SEQ ID NO: 1611879 - DNA, 15 bp, Homo sapiens
cttctgtggcttgca

SEQ ID NO: 1611880 - DNA, 15 bp, Homo sapiens
acttctgtggcttgc

SEQ ID NO: 1611881 - DNA, 15 bp, Homo sapiens
cacttctgtggcttg

SEQ ID NO: 1611882 - DNA, 15 bp, Homo sapiens
tcacttctgtggctt

SEQ ID NO: 1611883 - DNA, 15 bp, Homo sapiens
ctcacttctgtggct

SEQ ID NO: 1611884 - DNA, 15 bp, Homo sapiens
gctcacttctgtggc

SEQ ID NO: 1611885 - DNA, 15 bp, Homo sapiens
ggctcacttctgtgg

SEQ ID NO: 1611886 - DNA, 15 bp, Homo sapiens
tggctcacttctgtg

SEQ ID NO: 1611887 - DNA, 15 bp, Homo sapiens
gtggctcacttctgt

SEQ ID NO: 1611888 - DNA, 15 bp, Homo sapiens
tgtggctcacttctg

SEQ ID NO: 1611889 - DNA, 15 bp, Homo sapiens
ctgtggctcacttct

SEQ ID NO: 1611890 - DNA, 15 bp, Homo sapiens
cctgtggctcacttc

SEQ ID NO: 1611891 - DNA, 15 bp, Homo sapiens
acctgtggctcactt

SEQ ID NO: 1611892 - DNA, 15 bp, Homo sapiens
cacctgtggctcact

SEQ ID NO: 1611893 - DNA, 15 bp, Homo sapiens
acacctgtggctcac

SEQ ID NO: 1611894 - DNA, 15 bp, Homo sapiens
tacacctgtggctca

SEQ ID NO: 1611895 - DNA, 15 bp, Homo sapiens
ttacacctgtggctc

SEQ ID NO: 1611896 - DNA, 15 bp, Homo sapiens
attacacctgtggct

SEQ ID NO: 1611897 - DNA, 15 bp, Homo sapiens
aattacacctgtggc

SEQ ID NO: 1611898 - DNA, 15 bp, Homo sapiens
aaattacacctgtgg

SEQ ID NO: 1611899 - DNA, 15 bp, Homo sapiens
gaaattacacctgtg

SEQ ID NO: 1611900 - DNA, 15 bp, Homo sapiens
tgaaattacacctgt

SEQ ID NO: 1611901 - DNA, 15 bp, Homo sapiens
ttgaaattacacctg

SEQ ID NO: 1611902 - DNA, 15 bp, Homo sapiens
tttgaaattacacct

SEQ ID NO: 1611903 - DNA, 15 bp, Homo sapiens
atttgaaattacacc

SEQ ID NO: 1611904 - DNA, 15 bp, Homo sapiens
ggaaaatttgaaatt

SEQ ID NO: 1611905 - DNA, 15 bp, Homo sapiens
tggaaaatttgaaat

SEQ ID NO: 1611906 - DNA, 15 bp, Homo sapiens
ctggaaaatttgaaa

SEQ ID NO: 1611907 - DNA, 15 bp, Homo sapiens
actggaaaatttgaa

SEQ ID NO: 1611908 - DNA, 15 bp, Homo sapiens
tactggaaaatttga

SEQ ID NO: 1611909 - DNA, 15 bp, Homo sapiens
ctactggaaaatttg

SEQ ID NO: 1611910 - DNA, 15 bp, Homo sapiens
gctactggaaaattt

SEQ ID NO: 1611911 - DNA, 15 bp, Homo sapiens
ggctactggaaaatt

SEQ ID NO: 1611912 - DNA, 15 bp, Homo sapiens
tggctactggaaaat

SEQ ID NO: 1611913 - DNA, 15 bp, Homo sapiens
gtggctactggaaaa

SEQ ID NO: 1611914 - DNA, 15 bp, Homo sapiens
tgtggctactggaaa

SEQ ID NO: 1611915 - DNA, 15 bp, Homo sapiens
gtgtggctactggaa

SEQ ID NO: 1611916 - DNA, 15 bp, Homo sapiens
agtgtggctactgga

SEQ ID NO: 1611917 - DNA, 15 bp, Homo sapiens
cagtgtggctactgg

SEQ ID NO: 1611918 - DNA, 15 bp, Homo sapiens
tcagtgtggctactg

SEQ ID NO: 1611919 - DNA, 15 bp, Homo sapiens
atcagtgtggctact

SEQ ID NO: 1611920 - DNA, 15 bp, Homo sapiens
tatcagtgtggctac

SEQ ID NO: 1611921 - DNA, 15 bp, Homo sapiens
ttatcagtgtggcta

SEQ ID NO: 1611922 - DNA, 15 bp, Homo sapiens
tttatcagtgtggct

SEQ ID NO: 1611923 - DNA, 15 bp, Homo sapiens
ctttatcagtgtggc

SEQ ID NO: 1611924 - DNA, 15 bp, Homo sapiens
actttatcagtgtgg

SEQ ID NO: 1611925 - DNA, 15 bp, Homo sapiens
tactttatcagtgtg

SEQ ID NO: 1611926 - DNA, 15 bp, Homo sapiens
atactttatcagtgt

SEQ ID NO: 1611927 - DNA, 15 bp, Homo sapiens
gatactttatcagtg

SEQ ID NO: 1611928 - DNA, 15 bp, Homo sapiens
tgatactttatcagt

SEQ ID NO: 1611929 - DNA, 15 bp, Homo sapiens
gtgatactttatcag

SEQ ID NO: 1611930 - DNA, 15 bp, Homo sapiens
tgtgatactttatca

SEQ ID NO: 1611931 - DNA, 15 bp, Homo sapiens
ttgtgatactttatc

SEQ ID NO: 1611932 - DNA, 15 bp, Homo sapiens
tttgtgatactttat

SEQ ID NO: 1611933 - DNA, 15 bp, Homo sapiens
ttttgtgatacttta

SEQ ID NO: 1611934 - DNA, 15 bp, Homo sapiens
attttgtgatacttt

SEQ ID NO: 1611935 - DNA, 15 bp, Homo sapiens
cattttgtgatactt

SEQ ID NO: 1611936 - DNA, 15 bp, Homo sapiens
tcattttgtgatact

SEQ ID NO: 1611937 - DNA, 15 bp, Homo sapiens
gtcattttgtgatac

SEQ ID NO: 1611938 - DNA, 15 bp, Homo sapiens
tgtcattttgtgata

SEQ ID NO: 1611939 - DNA, 15 bp, Homo sapiens
atgtcattttgtgat

SEQ ID NO: 1611940 - DNA, 15 bp, Homo sapiens
aatgtcattttgtga

SEQ ID NO: 1611941 - DNA, 15 bp, Homo sapiens
taatgtcattttgtg

SEQ ID NO: 1611942 - DNA, 15 bp, Homo sapiens
ttaatgtcattttgt

SEQ ID NO: 1611943 - DNA, 15 bp, Homo sapiens
attaatgtcattttg

SEQ ID NO: 1611944 - DNA, 15 bp, Homo sapiens
aattaatgtcatttt

SEQ ID NO: 1611945 - DNA, 15 bp, Homo sapiens
aaattaatgtcattt

SEQ ID NO: 1611946 - DNA, 15 bp, Homo sapiens
aaaattaatgtcatt

SEQ ID NO: 1611947 - DNA, 15 bp, Homo sapiens
taaaattaatgtcat

SEQ ID NO: 1611948 - DNA, 15 bp, Homo sapiens
catgaaatatattat

SEQ ID NO: 1611949 - DNA, 15 bp, Homo sapiens
acatgaaatatatta

SEQ ID NO: 1611950 - DNA, 15 bp, Homo sapiens
tacatgaaatatatt

SEQ ID NO: 1611951 - DNA, 15 bp, Homo sapiens
ttacatgaaatatat

SEQ ID NO: 1611952 - DNA, 15 bp, Homo sapiens
gttacatgaaatata

SEQ ID NO: 1611953 - DNA, 15 bp, Homo sapiens
ggttacatgaaatat

SEQ ID NO: 1611954 - DNA, 15 bp, Homo sapiens
gggttacatgaaata

SEQ ID NO: 1611955 - DNA, 15 bp, Homo sapiens
tgggttacatgaaat

SEQ ID NO: 1611956 - DNA, 15 bp, Homo sapiens
ttgggttacatgaaa

SEQ ID NO: 1611957 - DNA, 15 bp, Homo sapiens
attgggttacatgaa

SEQ ID NO: 1611958 - DNA, 15 bp, Homo sapiens
tattgggttacatga

SEQ ID NO: 1611959 - DNA, 15 bp, Homo sapiens
atattgggttacatg

SEQ ID NO: 1611960 - DNA, 15 bp, Homo sapiens
catattgggttacat

SEQ ID NO: 1611961 - DNA, 15 bp, Homo sapiens
acatattgggttaca

SEQ ID NO: 1611962 - DNA, 15 bp, Homo sapiens
aacatattgggttac

SEQ ID NO: 1611963 - DNA, 15 bp, Homo sapiens
gaacatattgggtta

SEQ ID NO: 1611964 - DNA, 15 bp, Homo sapiens
tgaacatattgggtt

SEQ ID NO: 1611965 - DNA, 15 bp, Homo sapiens
ttgaacatattgggt

SEQ ID NO: 1611966 - DNA, 15 bp, Homo sapiens
tttgaacatattggg

SEQ ID NO: 1611967 - DNA, 15 bp, Homo sapiens
ttttgaacatattgg

SEQ ID NO: 1611968 - DNA, 15 bp, Homo sapiens
attttgaacatattg

SEQ ID NO: 1611969 - DNA, 15 bp, Homo sapiens
tattttgaacatatt

SEQ ID NO: 1611970 - DNA, 15 bp, Homo sapiens
atattttgaacatat

SEQ ID NO: 1611971 - DNA, 15 bp, Homo sapiens
aatattttgaacata

SEQ ID NO: 1611972 - DNA, 15 bp, Homo sapiens
aaatattttgaacat

SEQ ID NO: 1611973 - DNA, 15 bp, Homo sapiens
aaaatattttgaaca

SEQ ID NO: 1611974 - DNA, 15 bp, Homo sapiens
gaaaatattttgaac

SEQ ID NO: 1611975 - DNA, 15 bp, Homo sapiens
tgaaaatattttgaa

SEQ ID NO: 1611976 - DNA, 15 bp, Homo sapiens
atgaaaatattttga

SEQ ID NO: 1611977 - DNA, 15 bp, Homo sapiens
aatgaaaatattttg

SEQ ID NO: 1611978 - DNA, 15 bp, Homo sapiens
gaatgaaaatatttt

SEQ ID NO: 1611979 - DNA, 15 bp, Homo sapiens
ggaatgaaaatattt

SEQ ID NO: 1611980 - DNA, 15 bp, Homo sapiens
tggaatgaaaatatt

SEQ ID NO: 1611981 - DNA, 15 bp, Homo sapiens
ttggaatgaaaatat

SEQ ID NO: 1611982 - DNA, 15 bp, Homo sapiens
gttggaatgaaaata

SEQ ID NO: 1611983 - DNA, 15 bp, Homo sapiens
tgttggaatgaaaat

SEQ ID NO: 1611984 - DNA, 15 bp, Homo sapiens
atgttggaatgaaaa

SEQ ID NO: 1611985 - DNA, 15 bp, Homo sapiens
tatgttggaatgaaa

SEQ ID NO: 1611986 - DNA, 15 bp, Homo sapiens
atatgttggaatgaa

SEQ ID NO: 1611987 - DNA, 15 bp, Homo sapiens
tatatgttggaatga

SEQ ID NO: 1611988 - DNA, 15 bp, Homo sapiens
ttatatgttggaatg

SEQ ID NO: 1611989 - DNA, 15 bp, Homo sapiens
attatatgttggaat

SEQ ID NO: 1611990 - DNA, 15 bp, Homo sapiens
gattatatgttggaa

SEQ ID NO: 1611991 - DNA, 15 bp, Homo sapiens
tgattatatgttgga

SEQ ID NO: 1611992 - DNA, 15 bp, Homo sapiens
ttgattatatgttgg

SEQ ID NO: 1611993 - DNA, 15 bp, Homo sapiens
attgattatatgttg

SEQ ID NO: 1611994 - DNA, 15 bp, Homo sapiens
tattgattatatgtt

SEQ ID NO: 1611995 - DNA, 15 bp, Homo sapiens
atattgattatatgt

SEQ ID NO: 1611996 - DNA, 15 bp, Homo sapiens
tatattgattatatg

SEQ ID NO: 1611997 - DNA, 15 bp, Homo sapiens
ttatattgattatat

SEQ ID NO: 1611998 - DNA, 15 bp, Homo sapiens
tttatattgattata

SEQ ID NO: 1611999 - DNA, 15 bp, Homo sapiens
ttttatattgattat

SEQ ID NO: 1612000 - DNA, 15 bp, Homo sapiens
tttttatattgatta

SEQ ID NO: 1612001 - DNA, 15 bp, Homo sapiens
atttttatattgatt

SEQ ID NO: 1612002 - DNA, 15 bp, Homo sapiens
aatttttatattgat

SEQ ID NO: 1612003 - DNA, 15 bp, Homo sapiens
taatttttatattga

SEQ ID NO: 1612004 - DNA, 15 bp, Homo sapiens
ataatttttatattg

SEQ ID NO: 1612005 - DNA, 15 bp, Homo sapiens
aataatttttatatt

SEQ ID NO: 1612006 - DNA, 15 bp, Homo sapiens
taataatttttatat

SEQ ID NO: 1612007 - DNA, 15 bp, Homo sapiens
ttaataatttttata

SEQ ID NO: 1612008 - DNA, 15 bp, Homo sapiens
cttaataatttttat

SEQ ID NO: 1612009 - DNA, 15 bp, Homo sapiens
tcttaataattttta

SEQ ID NO: 1612010 - DNA, 15 bp, Homo sapiens
atcttaataattttt

SEQ ID NO: 1612011 - DNA, 15 bp, Homo sapiens
catcttaataatttt

SEQ ID NO: 1612012 - DNA, 15 bp, Homo sapiens
acatcttaataattt

SEQ ID NO: 1612013 - DNA, 15 bp, Homo sapiens
aacatcttaataatt

SEQ ID NO: 1612014 - DNA, 15 bp, Homo sapiens
aaacatcttaataat

SEQ ID NO: 1612015 - DNA, 15 bp, Homo sapiens
aaaacatcttaataa

SEQ ID NO: 1612016 - DNA, 15 bp, Homo sapiens
taaaacatcttaata

SEQ ID NO: 1612017 - DNA, 15 bp, Homo sapiens
gtaaaacatcttaat

SEQ ID NO: 1612018 - DNA, 15 bp, Homo sapiens
agtaaaacatcttaa

SEQ ID NO: 1612019 - DNA, 15 bp, Homo sapiens
aagtaaaacatctta

SEQ ID NO: 1612020 - DNA, 15 bp, Homo sapiens
aaagtaaaacatctt

SEQ ID NO: 1612021 - DNA, 15 bp, Homo sapiens
aaaaagtaaaacatc

SEQ ID NO: 1612022 - DNA, 15 bp, Homo sapiens
aaaaaagtaaaacat

SEQ ID NO: 1612023 - DNA, 15 bp, Homo sapiens
aaaaaaagtaaaaca

SEQ ID NO: 1612024 - DNA, 15 bp, Homo sapiens
caaaaaaagtaaaac

SEQ ID NO: 1612025 - DNA, 15 bp, Homo sapiens
acaaaaaaagtaaaa

SEQ ID NO: 1612026 - DNA, 15 bp, Homo sapiens
cacaaaaaaagtaaa

SEQ ID NO: 1612027 - DNA, 15 bp, Homo sapiens
acacaaaaaaagtaa

SEQ ID NO: 1612028 - DNA, 15 bp, Homo sapiens
cacacaaaaaaagta

SEQ ID NO: 1612029 - DNA, 15 bp, Homo sapiens
tcacacaaaaaaagt

SEQ ID NO: 1612030 - DNA, 15 bp, Homo sapiens
ttcacacaaaaaaag

SEQ ID NO: 1612031 - DNA, 15 bp, Homo sapiens
cttcacacaaaaaaa

SEQ ID NO: 1612032 - DNA, 15 bp, Homo sapiens
acttcacacaaaaaa

SEQ ID NO: 1612033 - DNA, 15 bp, Homo sapiens
aacttcacacaaaaa

SEQ ID NO: 1612034 - DNA, 15 bp, Homo sapiens
aaacttcacacaaaa

SEQ ID NO: 1612035 - DNA, 15 bp, Homo sapiens
caaacttcacacaaa

SEQ ID NO: 1612036 - DNA, 15 bp, Homo sapiens
tcaaacttcacacaa

SEQ ID NO: 1612037 - DNA, 15 bp, Homo sapiens
ctcaaacttcacaca

SEQ ID NO: 1612038 - DNA, 15 bp, Homo sapiens
tctcaaacttcacac

SEQ ID NO: 1612039 - DNA, 15 bp, Homo sapiens
atctcaaacttcaca

SEQ ID NO: 1612040 - DNA, 15 bp, Homo sapiens
gatctcaaacttcac

SEQ ID NO: 1612041 - DNA, 15 bp, Homo sapiens
ggatctcaaacttca

SEQ ID NO: 1612042 - DNA, 15 bp, Homo sapiens
tggatctcaaacttc

SEQ ID NO: 1612043 - DNA, 15 bp, Homo sapiens
atggatctcaaactt

SEQ ID NO: 1612044 - DNA, 15 bp, Homo sapiens
aatggatctcaaact

SEQ ID NO: 1612045 - DNA, 15 bp, Homo sapiens
caatggatctcaaac

SEQ ID NO: 1612046 - DNA, 15 bp, Homo sapiens
acaatggatctcaaa

SEQ ID NO: 1612047 - DNA, 15 bp, Homo sapiens
tacaatggatctcaa

SEQ ID NO: 1612048 - DNA, 15 bp, Homo sapiens
gtacaatggatctca

SEQ ID NO: 1612049 - DNA, 15 bp, Homo sapiens
agtacaatggatctc

SEQ ID NO: 1612050 - DNA, 15 bp, Homo sapiens
aagtacaatggatct

SEQ ID NO: 1612051 - DNA, 15 bp, Homo sapiens
aaagtacaatggatc

SEQ ID NO: 1612052 - DNA, 15 bp, Homo sapiens
aaaagtacaatggat

SEQ ID NO: 1612053 - DNA, 15 bp, Homo sapiens
aaaaagtacaatgga

SEQ ID NO: 1612054 - DNA, 15 bp, Homo sapiens
aaaaaagtacaatgg

SEQ ID NO: 1612055 - DNA, 15 bp, Homo sapiens
aaaaaaagtacaatg

SEQ ID NO: 1612056 - DNA, 15 bp, Homo sapiens
aaaaaaaagtacaat

SEQ ID NO: 1612057 - DNA, 15 bp, Homo sapiens
aaaaaaaaagtacaa

SEQ ID NO: 1612058 - DNA, 15 bp, Homo sapiens
aaaaaaaaaagtaca

SEQ ID NO: 1612059 - DNA, 15 bp, Homo sapiens
aaaaaaaaaaagtac

SEQ ID NO: 1612060 - DNA, 15 bp, Homo sapiens
caaaaaaaaaaagta

SEQ ID NO: 1612061 - DNA, 15 bp, Homo sapiens
agagactccgtctca

SEQ ID NO: 1612062 - DNA, 15 bp, Homo sapiens
gagagactccgtctc

SEQ ID NO: 1612063 - DNA, 15 bp, Homo sapiens
agagagactccgtct

SEQ ID NO: 1612064 - DNA, 15 bp, Homo sapiens
cagagagactccgtc

SEQ ID NO: 1612065 - DNA, 15 bp, Homo sapiens
acagagagactccgt

SEQ ID NO: 1612066 - DNA, 15 bp, Homo sapiens
gacagagagactccg

SEQ ID NO: 1612067 - DNA, 15 bp, Homo sapiens
tgacagagagactcc

SEQ ID NO: 1612068 - DNA, 15 bp, Homo sapiens
gtgacagagagactc

SEQ ID NO: 1612069 - DNA, 15 bp, Homo sapiens
agtgacagagagact

SEQ ID NO: 1612070 - DNA, 15 bp, Homo sapiens
gagtgacagagagac

SEQ ID NO: 1612071 - DNA, 15 bp, Homo sapiens
tgagtgacagagaga

SEQ ID NO: 1612072 - DNA, 15 bp, Homo sapiens
ctgagtgacagagag

SEQ ID NO: 1612073 - DNA, 15 bp, Homo sapiens
cctgagtgacagaga

SEQ ID NO: 1612074 - DNA, 15 bp, Homo sapiens
acaagattgtgccac

SEQ ID NO: 1612075 - DNA, 15 bp, Homo sapiens
gacaagattgtgcca

SEQ ID NO: 1612076 - DNA, 15 bp, Homo sapiens
agacaagattgtgcc

SEQ ID NO: 1612077 - DNA, 15 bp, Homo sapiens
gagacaagattgtgc

SEQ ID NO: 1612078 - DNA, 15 bp, Homo sapiens
tgagacaagattgtg

SEQ ID NO: 1612079 - DNA, 15 bp, Homo sapiens
gtgagacaagattgt

SEQ ID NO: 1612080 - DNA, 15 bp, Homo sapiens
agtgagacaagattg

SEQ ID NO: 1612081 - DNA, 15 bp, Homo sapiens
cagtgagacaagatt

SEQ ID NO: 1612082 - DNA, 15 bp, Homo sapiens
gcagtgagacaagat

SEQ ID NO: 1612083 - DNA, 15 bp, Homo sapiens
tgcagtgagacaaga

SEQ ID NO: 1612084 - DNA, 15 bp, Homo sapiens
ttgcagtgagacaag

SEQ ID NO: 1612085 - DNA, 15 bp, Homo sapiens
gttgcagtgagacaa

SEQ ID NO: 1612086 - DNA, 15 bp, Homo sapiens
ggttgcagtgagaca

SEQ ID NO: 1612087 - DNA, 15 bp, Homo sapiens
aggttgcagtgagac

SEQ ID NO: 1612088 - DNA, 15 bp, Homo sapiens
gaggttgcagtgaga

SEQ ID NO: 1612089 - DNA, 15 bp, Homo sapiens
tagaggttgcagtga

SEQ ID NO: 1612090 - DNA, 15 bp, Homo sapiens
gtagaggttgcagtg

SEQ ID NO: 1612091 - DNA, 15 bp, Homo sapiens
ggtagaggttgcagt

SEQ ID NO: 1612092 - DNA, 15 bp, Homo sapiens
aggtagaggttgcag

SEQ ID NO: 1612093 - DNA, 15 bp, Homo sapiens
gaggtagaggttgca

SEQ ID NO: 1612094 - DNA, 15 bp, Homo sapiens
ggaggtagaggttgc

SEQ ID NO: 1612095 - DNA, 15 bp, Homo sapiens
gggaggtagaggttg

SEQ ID NO: 1612096 - DNA, 15 bp, Homo sapiens
cgggaggtagaggtt

SEQ ID NO: 1612097 - DNA, 15 bp, Homo sapiens
ccgggaggtagaggt

SEQ ID NO: 1612098 - DNA, 15 bp, Homo sapiens
cccgggaggtagagg

SEQ ID NO: 1612099 - DNA, 15 bp, Homo sapiens
acccgggaggtagag

SEQ ID NO: 1612100 - DNA, 15 bp, Homo sapiens
aacccgggaggtaga

SEQ ID NO: 1612101 - DNA, 15 bp, Homo sapiens
gaacccgggaggtag

SEQ ID NO: 1612102 - DNA, 15 bp, Homo sapiens
tgaacccgggaggta

SEQ ID NO: 1612103 - DNA, 15 bp, Homo sapiens
aggtgtggtggtggg

SEQ ID NO: 1612104 - DNA, 15 bp, Homo sapiens
caggtgtggtggtgg

SEQ ID NO: 1612105 - DNA, 15 bp, Homo sapiens
ttcaggagttcaaga

SEQ ID NO: 1612106 - DNA, 15 bp, Homo sapiens
gttcaggagttcaag

SEQ ID NO: 1612107 - DNA, 15 bp, Homo sapiens
agttcaggagttcaa

SEQ ID NO: 1612108 - DNA, 15 bp, Homo sapiens
gagttcaggagttca

SEQ ID NO: 1612109 - DNA, 15 bp, Homo sapiens
tgagttcaggagttc

SEQ ID NO: 1612110 - DNA, 15 bp, Homo sapiens
ctgagttcaggagtt

SEQ ID NO: 1612111 - DNA, 15 bp, Homo sapiens
cctgagttcaggagt

SEQ ID NO: 1612112 - DNA, 15 bp, Homo sapiens
acctgagttcaggag

SEQ ID NO: 1612113 - DNA, 15 bp, Homo sapiens
cacctgagttcagga

SEQ ID NO: 1612114 - DNA, 15 bp, Homo sapiens
tcacctgagttcagg

SEQ ID NO: 1612115 - DNA, 15 bp, Homo sapiens
atcacctgagttcag

SEQ ID NO: 1612116 - DNA, 15 bp, Homo sapiens
gatcacctgagttca

SEQ ID NO: 1612117 - DNA, 15 bp, Homo sapiens
ggatcacctgagttc

SEQ ID NO: 1612118 - DNA, 15 bp, Homo sapiens
tggatcacctgagtt

SEQ ID NO: 1612119 - DNA, 15 bp, Homo sapiens
gtggatcacctgagt

SEQ ID NO: 1612120 - DNA, 15 bp, Homo sapiens
agaggctgaggcggg

SEQ ID NO: 1612121 - DNA, 15 bp, Homo sapiens
gagaggctgaggcgg

SEQ ID NO: 1612122 - DNA, 15 bp, Homo sapiens
tgagaggctgaggcg

SEQ ID NO: 1612123 - DNA, 15 bp, Homo sapiens
ttgagaggctgaggc

SEQ ID NO: 1612124 - DNA, 15 bp, Homo sapiens
tttgagaggctgagg

SEQ ID NO: 1612125 - DNA, 15 bp, Homo sapiens
ctttgagaggctgag

SEQ ID NO: 1612126 - DNA, 15 bp, Homo sapiens
actttgagaggctga

SEQ ID NO: 1612127 - DNA, 15 bp, Homo sapiens
cactttgagaggctg

SEQ ID NO: 1612128 - DNA, 15 bp, Homo sapiens
gcactttgagaggct

SEQ ID NO: 1612129 - DNA, 15 bp, Homo sapiens
ggcctgtaatcccag

SEQ ID NO: 1612130 - DNA, 15 bp, Homo sapiens
aggcctgtaatccca

SEQ ID NO: 1612131 - DNA, 15 bp, Homo sapiens
agtggctcaggcctg

SEQ ID NO: 1612132 - DNA, 15 bp, Homo sapiens
cagtggctcaggcct

SEQ ID NO: 1612133 - DNA, 15 bp, Homo sapiens
tcagtggctcaggcc

SEQ ID NO: 1612134 - DNA, 15 bp, Homo sapiens
ctcagtggctcaggc

SEQ ID NO: 1612135 - DNA, 15 bp, Homo sapiens
gctcagtggctcagg

SEQ ID NO: 1612136 - DNA, 15 bp, Homo sapiens
ggctcagtggctcag

SEQ ID NO: 1612137 - DNA, 15 bp, Homo sapiens
cgggctcagtggctc

SEQ ID NO: 1612138 - DNA, 15 bp, Homo sapiens
ccgggctcagtggct

SEQ ID NO: 1612139 - DNA, 15 bp, Homo sapiens
gccgggctcagtggc

SEQ ID NO: 1612140 - DNA, 15 bp, Homo sapiens
agccgggctcagtgg

SEQ ID NO: 1612141 - DNA, 15 bp, Homo sapiens
cagccgggctcagtg

SEQ ID NO: 1612142 - DNA, 15 bp, Homo sapiens
ccagccgggctcagt

SEQ ID NO: 1612143 - DNA, 15 bp, Homo sapiens
accagccgggctcag

SEQ ID NO: 1612144 - DNA, 15 bp, Homo sapiens
gaccagccgggctca

SEQ ID NO: 1612145 - DNA, 15 bp, Homo sapiens
ggaccagccgggctc

SEQ ID NO: 1612146 - DNA, 15 bp, Homo sapiens
gggaccagccgggct

SEQ ID NO: 1612147 - DNA, 15 bp, Homo sapiens
agggaccagccgggc

SEQ ID NO: 1612148 - DNA, 15 bp, Homo sapiens
aagggaccagccggg

SEQ ID NO: 1612149 - DNA, 15 bp, Homo sapiens
taagggaccagccgg

SEQ ID NO: 1612150 - DNA, 15 bp, Homo sapiens
ataagggaccagccg

SEQ ID NO: 1612151 - DNA, 15 bp, Homo sapiens
tataagggaccagcc

SEQ ID NO: 1612152 - DNA, 15 bp, Homo sapiens
atataagggaccagc

SEQ ID NO: 1612153 - DNA, 15 bp, Homo sapiens
tatataagggaccag

SEQ ID NO: 1612154 - DNA, 15 bp, Homo sapiens
atatataagggacca

SEQ ID NO: 1612155 - DNA, 15 bp, Homo sapiens
aatatataagggacc

SEQ ID NO: 1612156 - DNA, 15 bp, Homo sapiens
aaatatataagggac

SEQ ID NO: 1612157 - DNA, 15 bp, Homo sapiens
gaaatatataaggga

SEQ ID NO: 1612158 - DNA, 15 bp, Homo sapiens
ggaaatatataaggg

SEQ ID NO: 1612159 - DNA, 15 bp, Homo sapiens
tggaaatatataagg

SEQ ID NO: 1612160 - DNA, 15 bp, Homo sapiens
gtggaaatatataag

SEQ ID NO: 1612161 - DNA, 15 bp, Homo sapiens
agtggaaatatataa

SEQ ID NO: 1612162 - DNA, 15 bp, Homo sapiens
aagtggaaatatata

SEQ ID NO: 1612163 - DNA, 15 bp, Homo sapiens
taagtggaaatatat

SEQ ID NO: 1612164 - DNA, 15 bp, Homo sapiens
ataagtggaaatata

SEQ ID NO: 1612165 - DNA, 15 bp, Homo sapiens
tataagtggaaatat

SEQ ID NO: 1612166 - DNA, 15 bp, Homo sapiens
ctataagtggaaata

SEQ ID NO: 1612167 - DNA, 15 bp, Homo sapiens
gctataagtggaaat

SEQ ID NO: 1612168 - DNA, 15 bp, Homo sapiens
tgctataagtggaaa

SEQ ID NO: 1612169 - DNA, 15 bp, Homo sapiens
gtgctataagtggaa

SEQ ID NO: 1612170 - DNA, 15 bp, Homo sapiens
tgtgctataagtgga

SEQ ID NO: 1612171 - DNA, 15 bp, Homo sapiens
gtgtgctataagtgg

SEQ ID NO: 1612172 - DNA, 15 bp, Homo sapiens
tagtccaaatggaag

SEQ ID NO: 1612173 - DNA, 15 bp, Homo sapiens
ctagtccaaatggaa

SEQ ID NO: 1612174 - DNA, 15 bp, Homo sapiens
gctagtccaaatgga

SEQ ID NO: 1612175 - DNA, 15 bp, Homo sapiens
ggctagtccaaatgg

SEQ ID NO: 1612176 - DNA, 15 bp, Homo sapiens
tggctagtccaaatg

SEQ ID NO: 1612177 - DNA, 15 bp, Homo sapiens
gtggctagtccaaat

SEQ ID NO: 1612178 - DNA, 15 bp, Homo sapiens
tgtggctagtccaaa

SEQ ID NO: 1612179 - DNA, 15 bp, Homo sapiens
atgtggctagtccaa

SEQ ID NO: 1612180 - DNA, 15 bp, Homo sapiens
aatgtggctagtcca

SEQ ID NO: 1612181 - DNA, 15 bp, Homo sapiens
aaatgtggctagtcc

SEQ ID NO: 1612182 - DNA, 15 bp, Homo sapiens
gaaatgtggctagtc

SEQ ID NO: 1612183 - DNA, 15 bp, Homo sapiens
tgaaatgtggctagt

SEQ ID NO: 1612184 - DNA, 15 bp, Homo sapiens
ttgaaatgtggctag

SEQ ID NO: 1612185 - DNA, 15 bp, Homo sapiens
cttgaaatgtggcta

SEQ ID NO: 1612186 - DNA, 15 bp, Homo sapiens
ccttgaaatgtggct

SEQ ID NO: 1612187 - DNA, 15 bp, Homo sapiens
cccttgaaatgtggc

SEQ ID NO: 1612188 - DNA, 15 bp, Homo sapiens
gcccttgaaatgtgg

SEQ ID NO: 1612189 - DNA, 15 bp, Homo sapiens
agcccttgaaatgtg

SEQ ID NO: 1612190 - DNA, 15 bp, Homo sapiens
gagcccttgaaatgt

SEQ ID NO: 1612191 - DNA, 15 bp, Homo sapiens
tgagcccttgaaatg

SEQ ID NO: 1612192 - DNA, 15 bp, Homo sapiens
ttgagcccttgaaat

SEQ ID NO: 1612193 - DNA, 15 bp, Homo sapiens
gttgagcccttgaaa

SEQ ID NO: 1612194 - DNA, 15 bp, Homo sapiens
ggttgagcccttgaa

SEQ ID NO: 1612195 - DNA, 15 bp, Homo sapiens
tggttgagcccttga

SEQ ID NO: 1612196 - DNA, 15 bp, Homo sapiens
gtggttgagcccttg

SEQ ID NO: 1612197 - DNA, 15 bp, Homo sapiens
ggtggttgagccctt

SEQ ID NO: 1612198 - DNA, 15 bp, Homo sapiens
tggtggttgagccct

SEQ ID NO: 1612199 - DNA, 15 bp, Homo sapiens
atggtggttgagccc

SEQ ID NO: 1612200 - DNA, 15 bp, Homo sapiens
catggtggttgagcc

SEQ ID NO: 1612201 - DNA, 15 bp, Homo sapiens
acatggtggttgagc

SEQ ID NO: 1612202 - DNA, 15 bp, Homo sapiens
acacatggtggttga

SEQ ID NO: 1612203 - DNA, 15 bp, Homo sapiens
tacacatggtggttg

SEQ ID NO: 1612204 - DNA, 15 bp, Homo sapiens
ctacacatggtggtt

SEQ ID NO: 1612205 - DNA, 15 bp, Homo sapiens
gctacacatggtggt

SEQ ID NO: 1612206 - DNA, 15 bp, Homo sapiens
agctacacatggtgg

SEQ ID NO: 1612207 - DNA, 15 bp, Homo sapiens
tagctacacatggtg

SEQ ID NO: 1612208 - DNA, 15 bp, Homo sapiens
ctagctacacatggt

SEQ ID NO: 1612209 - DNA, 15 bp, Homo sapiens
actagctacacatgg

SEQ ID NO: 1612210 - DNA, 15 bp, Homo sapiens
cactagctacacatg

SEQ ID NO: 1612211 - DNA, 15 bp, Homo sapiens
ccactagctacacat

SEQ ID NO: 1612212 - DNA, 15 bp, Homo sapiens
gccactagctacaca

SEQ ID NO: 1612213 - DNA, 15 bp, Homo sapiens
agccactagctacac

SEQ ID NO: 1612214 - DNA, 15 bp, Homo sapiens
cagccactagctaca

SEQ ID NO: 1612215 - DNA, 15 bp, Homo sapiens
gcagccactagctac

SEQ ID NO: 1612216 - DNA, 15 bp, Homo sapiens
ggcagccactagcta

SEQ ID NO: 1612217 - DNA, 15 bp, Homo sapiens
tggcagccactagct

SEQ ID NO: 1612218 - DNA, 15 bp, Homo sapiens
atggcagccactagc

SEQ ID NO: 1612219 - DNA, 15 bp, Homo sapiens
catggcagccactag

SEQ ID NO: 1612220 - DNA, 15 bp, Homo sapiens
acatggcagccacta

SEQ ID NO: 1612221 - DNA, 15 bp, Homo sapiens
aacatggcagccact

SEQ ID NO: 1612222 - DNA, 15 bp, Homo sapiens
taacatggcagccac

SEQ ID NO: 1612223 - DNA, 15 bp, Homo sapiens
ctaacatggcagcca

SEQ ID NO: 1612224 - DNA, 15 bp, Homo sapiens
tctaacatggcagcc

SEQ ID NO: 1612225 - DNA, 15 bp, Homo sapiens
gtctaacatggcagc

SEQ ID NO: 1612226 - DNA, 15 bp, Homo sapiens
tgtctaacatggcag

SEQ ID NO: 1612227 - DNA, 15 bp, Homo sapiens
ctgtctaacatggca

SEQ ID NO: 1612228 - DNA, 15 bp, Homo sapiens
gctgtctaacatggc

SEQ ID NO: 1612229 - DNA, 15 bp, Homo sapiens
tgctgtctaacatgg

SEQ ID NO: 1612230 - DNA, 15 bp, Homo sapiens
gtgctgtctaacatg

SEQ ID NO: 1612231 - DNA, 15 bp, Homo sapiens
tgtgctgtctaacat

SEQ ID NO: 1612232 - DNA, 15 bp, Homo sapiens
ctgtgctgtctaaca

SEQ ID NO: 1612233 - DNA, 15 bp, Homo sapiens
gctgtgctgtctaac

SEQ ID NO: 1612234 - DNA, 15 bp, Homo sapiens
ggctgtgctgtctaa

SEQ ID NO: 1612235 - DNA, 15 bp, Homo sapiens
aggctgtgctgtcta

SEQ ID NO: 1612236 - DNA, 15 bp, Homo sapiens
aaggctgtgctgtct

SEQ ID NO: 1612237 - DNA, 15 bp, Homo sapiens
taaggctgtgctgtc

SEQ ID NO: 1612238 - DNA, 15 bp, Homo sapiens
ctaaggctgtgctgt

SEQ ID NO: 1612239 - DNA, 15 bp, Homo sapiens
tctaaggctgtgctg

SEQ ID NO: 1612240 - DNA, 15 bp, Homo sapiens
atctaaggctgtgct

SEQ ID NO: 1612241 - DNA, 15 bp, Homo sapiens
tatctaaggctgtgc

SEQ ID NO: 1612242 - DNA, 15 bp, Homo sapiens
atatctaaggctgtg

SEQ ID NO: 1612243 - DNA, 15 bp, Homo sapiens
aatatctaaggctgt

SEQ ID NO: 1612244 - DNA, 15 bp, Homo sapiens
taatatctaaggctg

SEQ ID NO: 1612245 - DNA, 15 bp, Homo sapiens
ttaatatctaaggct

SEQ ID NO: 1612246 - DNA, 15 bp, Homo sapiens
attaatatctaaggc

SEQ ID NO: 1612247 - DNA, 15 bp, Homo sapiens
cattaatatctaagg

SEQ ID NO: 1612248 - DNA, 15 bp, Homo sapiens
gcattaatatctaag

SEQ ID NO: 1612249 - DNA, 15 bp, Homo sapiens
ggcattaatatctaa

SEQ ID NO: 1612250 - DNA, 15 bp, Homo sapiens
tggcattaatatcta

SEQ ID NO: 1612251 - DNA, 15 bp, Homo sapiens
ttggcattaatatct

SEQ ID NO: 1612252 - DNA, 15 bp, Homo sapiens
tttggcattaatatc

SEQ ID NO: 1612253 - DNA, 15 bp, Homo sapiens
gtttggcattaatat

SEQ ID NO: 1612254 - DNA, 15 bp, Homo sapiens
tgtttggcattaata

SEQ ID NO: 1612255 - DNA, 15 bp, Homo sapiens
atgtttggcattaat

SEQ ID NO: 1612256 - DNA, 15 bp, Homo sapiens
aatgtttggcattaa

SEQ ID NO: 1612257 - DNA, 15 bp, Homo sapiens
aaatgtttggcatta

SEQ ID NO: 1612258 - DNA, 15 bp, Homo sapiens
taaatgtttggcatt

SEQ ID NO: 1612259 - DNA, 15 bp, Homo sapiens
ataaatgtttggcat

SEQ ID NO: 1612260 - DNA, 15 bp, Homo sapiens
aataaatgtttggca

SEQ ID NO: 1612261 - DNA, 15 bp, Homo sapiens
caataaatgtttggc

SEQ ID NO: 1612262 - DNA, 15 bp, Homo sapiens
tcaataaatgtttgg

SEQ ID NO: 1612263 - DNA, 15 bp, Homo sapiens
cctcaataaatgttt

SEQ ID NO: 1612264 - DNA, 15 bp, Homo sapiens
acctcaataaatgtt

SEQ ID NO: 1612265 - DNA, 15 bp, Homo sapiens
tacctcaataaatgt

SEQ ID NO: 1612266 - DNA, 15 bp, Homo sapiens
ctacctcaataaatg

SEQ ID NO: 1612267 - DNA, 15 bp, Homo sapiens
cctacctcaataaat

SEQ ID NO: 1612268 - DNA, 15 bp, Homo sapiens
acctacctcaataaa

SEQ ID NO: 1612269 - DNA, 15 bp, Homo sapiens
tacctacctcaataa

SEQ ID NO: 1612270 - DNA, 15 bp, Homo sapiens
gtacctacctcaata

SEQ ID NO: 1612271 - DNA, 15 bp, Homo sapiens
agtacctacctcaat

SEQ ID NO: 1612272 - DNA, 15 bp, Homo sapiens
tagtacctacctcaa

SEQ ID NO: 1612273 - DNA, 15 bp, Homo sapiens
atagtacctacctca

SEQ ID NO: 1612274 - DNA, 15 bp, Homo sapiens
catagtacctacctc

SEQ ID NO: 1612275 - DNA, 15 bp, Homo sapiens
gcatagtacctacct

SEQ ID NO: 1612276 - DNA, 15 bp, Homo sapiens
ggcatagtacctacc

SEQ ID NO: 1612277 - DNA, 15 bp, Homo sapiens
cggcatagtacctac

SEQ ID NO: 1612278 - DNA, 15 bp, Homo sapiens
tcggcatagtaccta

SEQ ID NO: 1612279 - DNA, 15 bp, Homo sapiens
ctcggcatagtacct

SEQ ID NO: 1612280 - DNA, 15 bp, Homo sapiens
actcggcatagtacc

SEQ ID NO: 1612281 - DNA, 15 bp, Homo sapiens
cactcggcatagtac

SEQ ID NO: 1612282 - DNA, 15 bp, Homo sapiens
acactcggcatagta

SEQ ID NO: 1612283 - DNA, 15 bp, Homo sapiens
aacactcggcatagt

SEQ ID NO: 1612284 - DNA, 15 bp, Homo sapiens
aaacactcggcatag

SEQ ID NO: 1612285 - DNA, 15 bp, Homo sapiens
aaaacactcggcata

SEQ ID NO: 1612286 - DNA, 15 bp, Homo sapiens
taaaacactcggcat

SEQ ID NO: 1612287 - DNA, 15 bp, Homo sapiens
gtaaaacactcggca

SEQ ID NO: 1612288 - DNA, 15 bp, Homo sapiens
tgtaaaacactcggc

SEQ ID NO: 1612289 - DNA, 15 bp, Homo sapiens
atgtaaaacactcgg

SEQ ID NO: 1612290 - DNA, 15 bp, Homo sapiens
catgtaaaacactcg

SEQ ID NO: 1612291 - DNA, 15 bp, Homo sapiens
gcatgtaaaacactc

SEQ ID NO: 1612292 - DNA, 15 bp, Homo sapiens
tgcatgtaaaacact

SEQ ID NO: 1612293 - DNA, 15 bp, Homo sapiens
atgcatgtaaaacac

SEQ ID NO: 1612294 - DNA, 15 bp, Homo sapiens
aatgcatgtaaaaca

SEQ ID NO: 1612295 - DNA, 15 bp, Homo sapiens
gaatgcatgtaaaac

SEQ ID NO: 1612296 - DNA, 15 bp, Homo sapiens
agaatgcatgtaaaa

SEQ ID NO: 1612297 - DNA, 15 bp, Homo sapiens
gagaatgcatgtaaa

SEQ ID NO: 1612298 - DNA, 15 bp, Homo sapiens
agagaatgcatgtaa

SEQ ID NO: 1612299 - DNA, 15 bp, Homo sapiens
aagagaatgcatgta

SEQ ID NO: 1612300 - DNA, 15 bp, Homo sapiens
aaagagaatgcatgt

SEQ ID NO: 1612301 - DNA, 15 bp, Homo sapiens
aaaagagaatgcatg

SEQ ID NO: 1612302 - DNA, 15 bp, Homo sapiens
aaaaagagaatgcat

SEQ ID NO: 1612303 - DNA, 15 bp, Homo sapiens
aaaaaagagaatgca

SEQ ID NO: 1612304 - DNA, 15 bp, Homo sapiens
aaaaaaagagaatgc

SEQ ID NO: 1612305 - DNA, 15 bp, Homo sapiens
aaaaaaaagagaatg

SEQ ID NO: 1612306 - DNA, 15 bp, Homo sapiens
aaaaaaaaagagaat

SEQ ID NO: 1612307 - DNA, 15 bp, Homo sapiens
aaaaaaaaaagagaa

SEQ ID NO: 1612308 - DNA, 15 bp, Homo sapiens
cggaaaaaaaaaaaa

SEQ ID NO: 1612309 - DNA, 15 bp, Homo sapiens
tcggaaaaaaaaaaa

SEQ ID NO: 1612310 - DNA, 15 bp, Homo sapiens
ctcggaaaaaaaaaa

SEQ ID NO: 1612311 - DNA, 15 bp, Homo sapiens
tctcggaaaaaaaaa

SEQ ID NO: 1612312 - DNA, 15 bp, Homo sapiens
gtctcggaaaaaaaa

SEQ ID NO: 1612313 - DNA, 15 bp, Homo sapiens
tgtctcggaaaaaaa

SEQ ID NO: 1612314 - DNA, 15 bp, Homo sapiens
ctgtctcggaaaaaa

SEQ ID NO: 1612315 - DNA, 15 bp, Homo sapiens
tctgtctcggaaaaa

SEQ ID NO: 1612316 - DNA, 15 bp, Homo sapiens
ctctgtctcggaaaa

SEQ ID NO: 1612317 - DNA, 15 bp, Homo sapiens
actctgtctcggaaa

SEQ ID NO: 1612318 - DNA, 15 bp, Homo sapiens
aactctgtctcggaa

SEQ ID NO: 1612319 - DNA, 15 bp, Homo sapiens
aaactctgtctcgga

SEQ ID NO: 1612320 - DNA, 15 bp, Homo sapiens
gaaactctgtctcgg

SEQ ID NO: 1612321 - DNA, 15 bp, Homo sapiens
cgaaactctgtctcg

SEQ ID NO: 1612322 - DNA, 15 bp, Homo sapiens
cagagcgaaactctg

SEQ ID NO: 1612323 - DNA, 15 bp, Homo sapiens
acagagcgaaactct

SEQ ID NO: 1612324 - DNA, 15 bp, Homo sapiens
gccattgcactccag

SEQ ID NO: 1612325 - DNA, 15 bp, Homo sapiens
agtgccattgcactc

SEQ ID NO: 1612326 - DNA, 15 bp, Homo sapiens
tagtgccattgcact

SEQ ID NO: 1612327 - DNA, 15 bp, Homo sapiens
atagtgccattgcac

SEQ ID NO: 1612328 - DNA, 15 bp, Homo sapiens
gatagtgccattgca

SEQ ID NO: 1612329 - DNA, 15 bp, Homo sapiens
agatagtgccattgc

SEQ ID NO: 1612330 - DNA, 15 bp, Homo sapiens
aagatagtgccattg

SEQ ID NO: 1612331 - DNA, 15 bp, Homo sapiens
caagatagtgccatt

SEQ ID NO: 1612332 - DNA, 15 bp, Homo sapiens
ccaagatagtgccat

SEQ ID NO: 1612333 - DNA, 15 bp, Homo sapiens
accaagatagtgcca

SEQ ID NO: 1612334 - DNA, 15 bp, Homo sapiens
aaccaagatagtgcc

SEQ ID NO: 1612335 - DNA, 15 bp, Homo sapiens
gaaccaagatagtgc

SEQ ID NO: 1612336 - DNA, 15 bp, Homo sapiens
tgaaccaagatagtg

SEQ ID NO: 1612337 - DNA, 15 bp, Homo sapiens
gtgaaccaagatagt

SEQ ID NO: 1612338 - DNA, 15 bp, Homo sapiens
agtgaaccaagatag

SEQ ID NO: 1612339 - DNA, 15 bp, Homo sapiens
cagtgaaccaagata

SEQ ID NO: 1612340 - DNA, 15 bp, Homo sapiens
aaggttgcagtgaac

SEQ ID NO: 1612341 - DNA, 15 bp, Homo sapiens
gaaggttgcagtgaa

SEQ ID NO: 1612342 - DNA, 15 bp, Homo sapiens
cgaaggttgcagtga

SEQ ID NO: 1612343 - DNA, 15 bp, Homo sapiens
gcgaaggttgcagtg

SEQ ID NO: 1612344 - DNA, 15 bp, Homo sapiens
ggcgaaggttgcagt

SEQ ID NO: 1612345 - DNA, 15 bp, Homo sapiens
aggcgaaggttgcag

SEQ ID NO: 1612346 - DNA, 15 bp, Homo sapiens
gaggcgaaggttgca

SEQ ID NO: 1612347 - DNA, 15 bp, Homo sapiens
ggaggcgaaggttgc

SEQ ID NO: 1612348 - DNA, 15 bp, Homo sapiens
gggaggcgaaggttg

SEQ ID NO: 1612349 - DNA, 15 bp, Homo sapiens
cgggaggcgaaggtt

SEQ ID NO: 1612350 - DNA, 15 bp, Homo sapiens
ccgggaggcgaaggt

SEQ ID NO: 1612351 - DNA, 15 bp, Homo sapiens
cccgggaggcgaagg

SEQ ID NO: 1612352 - DNA, 15 bp, Homo sapiens
acccgggaggcgaag

SEQ ID NO: 1612353 - DNA, 15 bp, Homo sapiens
aacccgggaggcgaa

SEQ ID NO: 1612354 - DNA, 15 bp, Homo sapiens
gaacccgggaggcga

SEQ ID NO: 1612355 - DNA, 15 bp, Homo sapiens
ctcgcttgaacccgg

SEQ ID NO: 1612356 - DNA, 15 bp, Homo sapiens
tctcgcttgaacccg

SEQ ID NO: 1612357 - DNA, 15 bp, Homo sapiens
atctcgcttgaaccc

SEQ ID NO: 1612358 - DNA, 15 bp, Homo sapiens
aatctcgcttgaacc

SEQ ID NO: 1612359 - DNA, 15 bp, Homo sapiens
gaatctcgcttgaac

SEQ ID NO: 1612360 - DNA, 15 bp, Homo sapiens
agaatctcgcttgaa

SEQ ID NO: 1612361 - DNA, 15 bp, Homo sapiens
gagaatctcgcttga

SEQ ID NO: 1612362 - DNA, 15 bp, Homo sapiens
ggagaatctcgcttg

SEQ ID NO: 1612363 - DNA, 15 bp, Homo sapiens
gggagaatctcgctt

SEQ ID NO: 1612364 - DNA, 15 bp, Homo sapiens
ggggagaatctcgct

SEQ ID NO: 1612365 - DNA, 15 bp, Homo sapiens
aggggagaatctcgc

SEQ ID NO: 1612366 - DNA, 15 bp, Homo sapiens
aaggggagaatctcg

SEQ ID NO: 1612367 - DNA, 15 bp, Homo sapiens
gaaggggagaatctc

SEQ ID NO: 1612368 - DNA, 15 bp, Homo sapiens
tgaaggggagaatct

SEQ ID NO: 1612369 - DNA, 15 bp, Homo sapiens
ctgaaggggagaatc

SEQ ID NO: 1612370 - DNA, 15 bp, Homo sapiens
gctgaaggggagaat

SEQ ID NO: 1612371 - DNA, 15 bp, Homo sapiens
ggctgaaggggagaa

SEQ ID NO: 1612372 - DNA, 15 bp, Homo sapiens
aggctgaaggggaga

SEQ ID NO: 1612373 - DNA, 15 bp, Homo sapiens
gaggctgaaggggag

SEQ ID NO: 1612374 - DNA, 15 bp, Homo sapiens
ggaggctgaagggga

SEQ ID NO: 1612375 - DNA, 15 bp, Homo sapiens
gggaggctgaagggg

SEQ ID NO: 1612376 - DNA, 15 bp, Homo sapiens
cgggaggctgaaggg

SEQ ID NO: 1612377 - DNA, 15 bp, Homo sapiens
tcgggaggctgaagg

SEQ ID NO: 1612378 - DNA, 15 bp, Homo sapiens
ctcgggaggctgaag

SEQ ID NO: 1612379 - DNA, 15 bp, Homo sapiens
actcgggaggctgaa

SEQ ID NO: 1612380 - DNA, 15 bp, Homo sapiens
cgctactcgggaggc

SEQ ID NO: 1612381 - DNA, 15 bp, Homo sapiens
tcgctactcgggagg

SEQ ID NO: 1612382 - DNA, 15 bp, Homo sapiens
ctcgctactcgggag

SEQ ID NO: 1612383 - DNA, 15 bp, Homo sapiens
cctcgctactcggga

SEQ ID NO: 1612384 - DNA, 15 bp, Homo sapiens
tcctcgctactcggg

SEQ ID NO: 1612385 - DNA, 15 bp, Homo sapiens
ctcctcgctactcgg

SEQ ID NO: 1612386 - DNA, 15 bp, Homo sapiens
actcctcgctactcg

SEQ ID NO: 1612387 - DNA, 15 bp, Homo sapiens
tactcctcgctactc

SEQ ID NO: 1612388 - DNA, 15 bp, Homo sapiens
gtactcctcgctact

SEQ ID NO: 1612389 - DNA, 15 bp, Homo sapiens
tgtactcctcgctac

SEQ ID NO: 1612390 - DNA, 15 bp, Homo sapiens
ctgtactcctcgcta

SEQ ID NO: 1612391 - DNA, 15 bp, Homo sapiens
cctgtactcctcgct

SEQ ID NO: 1612392 - DNA, 15 bp, Homo sapiens
gcctgtactcctcgc

SEQ ID NO: 1612393 - DNA, 15 bp, Homo sapiens
tgcctgtactcctcg

SEQ ID NO: 1612394 - DNA, 15 bp, Homo sapiens
gtgcctgtactcctc

SEQ ID NO: 1612395 - DNA, 15 bp, Homo sapiens
ggtgcctgtactcct

SEQ ID NO: 1612396 - DNA, 15 bp, Homo sapiens
aggtgcctgtactcc

SEQ ID NO: 1612397 - DNA, 15 bp, Homo sapiens
caggtgcctgtactc

SEQ ID NO: 1612398 - DNA, 15 bp, Homo sapiens
gcaggtgcctgtact

SEQ ID NO: 1612399 - DNA, 15 bp, Homo sapiens
agcaggtgcctgtac

SEQ ID NO: 1612400 - DNA, 15 bp, Homo sapiens
tagcaggtgcctgta

SEQ ID NO: 1612401 - DNA, 15 bp, Homo sapiens
atagcaggtgcctgt

SEQ ID NO: 1612402 - DNA, 15 bp, Homo sapiens
gatagcaggtgcctg

SEQ ID NO: 1612403 - DNA, 15 bp, Homo sapiens
tgatagcaggtgcct

SEQ ID NO: 1612404 - DNA, 15 bp, Homo sapiens
atgatagcaggtgcc

SEQ ID NO: 1612405 - DNA, 15 bp, Homo sapiens
catgatagcaggtgc

SEQ ID NO: 1612406 - DNA, 15 bp, Homo sapiens
gcatgatagcaggtg

SEQ ID NO: 1612407 - DNA, 15 bp, Homo sapiens
agcatgatagcaggt

SEQ ID NO: 1612408 - DNA, 15 bp, Homo sapiens
cagcatgatagcagg

SEQ ID NO: 1612409 - DNA, 15 bp, Homo sapiens
ccagcatgatagcag

SEQ ID NO: 1612410 - DNA, 15 bp, Homo sapiens
gccagcatgatagca

SEQ ID NO: 1612411 - DNA, 15 bp, Homo sapiens
agccagcatgatagc

SEQ ID NO: 1612412 - DNA, 15 bp, Homo sapiens
tagccagcatgatag

SEQ ID NO: 1612413 - DNA, 15 bp, Homo sapiens
ctagccagcatgata

SEQ ID NO: 1612414 - DNA, 15 bp, Homo sapiens
actagccagcatgat

SEQ ID NO: 1612415 - DNA, 15 bp, Homo sapiens
aactagccagcatga

SEQ ID NO: 1612416 - DNA, 15 bp, Homo sapiens
aaactagccagcatg

SEQ ID NO: 1612417 - DNA, 15 bp, Homo sapiens
aaaactagccagcat

SEQ ID NO: 1612418 - DNA, 15 bp, Homo sapiens
aaaaactagccagca

SEQ ID NO: 1612419 - DNA, 15 bp, Homo sapiens
aaaaaactagccagc

SEQ ID NO: 1612420 - DNA, 15 bp, Homo sapiens
caaaaaactagccag

SEQ ID NO: 1612421 - DNA, 15 bp, Homo sapiens
gcaaaaaactagcca

SEQ ID NO: 1612422 - DNA, 15 bp, Homo sapiens
tgcaaaaaactagcc

SEQ ID NO: 1612423 - DNA, 15 bp, Homo sapiens
atgcaaaaaactagc

SEQ ID NO: 1612424 - DNA, 15 bp, Homo sapiens
aatgcaaaaaactag

SEQ ID NO: 1612425 - DNA, 15 bp, Homo sapiens
aaatgcaaaaaacta

SEQ ID NO: 1612426 - DNA, 15 bp, Homo sapiens
aaaatgcaaaaaact

SEQ ID NO: 1612427 - DNA, 15 bp, Homo sapiens
aaaaatgcaaaaaac

SEQ ID NO: 1612428 - DNA, 15 bp, Homo sapiens
taaaaatgcaaaaaa

SEQ ID NO: 1612429 - DNA, 15 bp, Homo sapiens
ctaaaaatgcaaaaa

SEQ ID NO: 1612430 - DNA, 15 bp, Homo sapiens
actaaaaatgcaaaa

SEQ ID NO: 1612431 - DNA, 15 bp, Homo sapiens
tactaaaaatgcaaa

SEQ ID NO: 1612432 - DNA, 15 bp, Homo sapiens
ctactaaaaatgcaa

SEQ ID NO: 1612433 - DNA, 15 bp, Homo sapiens
tctactaaaaatgca

SEQ ID NO: 1612434 - DNA, 15 bp, Homo sapiens
ctctactaaaaatgc

SEQ ID NO: 1612435 - DNA, 15 bp, Homo sapiens
tctctactaaaaatg

SEQ ID NO: 1612436 - DNA, 15 bp, Homo sapiens
tatggtgaaaccccg

SEQ ID NO: 1612437 - DNA, 15 bp, Homo sapiens
tggatcatgaggtca

SEQ ID NO: 1612438 - DNA, 15 bp, Homo sapiens
gtggatcatgaggtc

SEQ ID NO: 1612439 - DNA, 15 bp, Homo sapiens
ggtggatcatgaggt

SEQ ID NO: 1612440 - DNA, 15 bp, Homo sapiens
aggtggatcatgagg

SEQ ID NO: 1612441 - DNA, 15 bp, Homo sapiens
caggtggatcatgag

SEQ ID NO: 1612442 - DNA, 15 bp, Homo sapiens
gcaggtggatcatga

SEQ ID NO: 1612443 - DNA, 15 bp, Homo sapiens
ggcaggtggatcatg

SEQ ID NO: 1612444 - DNA, 15 bp, Homo sapiens
aggcaggtggatcat

SEQ ID NO: 1612445 - DNA, 15 bp, Homo sapiens
gaggccgaggcaggt

SEQ ID NO: 1612446 - DNA, 15 bp, Homo sapiens
aggcgcagtggctca

SEQ ID NO: 1612447 - DNA, 15 bp, Homo sapiens
caggcgcagtggctc

SEQ ID NO: 1612448 - DNA, 15 bp, Homo sapiens
ccaggcgcagtggct

SEQ ID NO: 1612449 - DNA, 15 bp, Homo sapiens
gccaggcgcagtggc

SEQ ID NO: 1612450 - DNA, 15 bp, Homo sapiens
agccaggcgcagtgg

SEQ ID NO: 1612451 - DNA, 15 bp, Homo sapiens
cagccaggcgcagtg

SEQ ID NO: 1612452 - DNA, 15 bp, Homo sapiens
gcagccaggcgcagt

SEQ ID NO: 1612453 - DNA, 15 bp, Homo sapiens
tgcagccaggcgcag

SEQ ID NO: 1612454 - DNA, 15 bp, Homo sapiens
atgcagccaggcgca

SEQ ID NO: 1612455 - DNA, 15 bp, Homo sapiens
aatgcagccaggcgc

SEQ ID NO: 1612456 - DNA, 15 bp, Homo sapiens
gaatgcagccaggcg

SEQ ID NO: 1612457 - DNA, 15 bp, Homo sapiens
agaatgcagccaggc

SEQ ID NO: 1612458 - DNA, 15 bp, Homo sapiens
gagaatgcagccagg

SEQ ID NO: 1612459 - DNA, 15 bp, Homo sapiens
agagaatgcagccag

SEQ ID NO: 1612460 - DNA, 15 bp, Homo sapiens
aagagaatgcagcca

SEQ ID NO: 1612461 - DNA, 15 bp, Homo sapiens
taagagaatgcagcc

SEQ ID NO: 1612462 - DNA, 15 bp, Homo sapiens
ttaagagaatgcagc

SEQ ID NO: 1612463 - DNA, 15 bp, Homo sapiens
attaagagaatgcag

SEQ ID NO: 1612464 - DNA, 15 bp, Homo sapiens
gattaagagaatgca

SEQ ID NO: 1612465 - DNA, 15 bp, Homo sapiens
tgattaagagaatgc

SEQ ID NO: 1612466 - DNA, 15 bp, Homo sapiens
ttgattaagagaatg

SEQ ID NO: 1612467 - DNA, 15 bp, Homo sapiens
attgattaagagaat

SEQ ID NO: 1612468 - DNA, 15 bp, Homo sapiens
gattgattaagagaa

SEQ ID NO: 1612469 - DNA, 15 bp, Homo sapiens
agattgattaagaga

SEQ ID NO: 1612470 - DNA, 15 bp, Homo sapiens
aagattgattaagag

SEQ ID NO: 1612471 - DNA, 15 bp, Homo sapiens
gaagattgattaaga

SEQ ID NO: 1612472 - DNA, 15 bp, Homo sapiens
tgaagattgattaag

SEQ ID NO: 1612473 - DNA, 15 bp, Homo sapiens
gtgaagattgattaa

SEQ ID NO: 1612474 - DNA, 15 bp, Homo sapiens
tgtgaagattgatta

SEQ ID NO: 1612475 - DNA, 15 bp, Homo sapiens
ttgtgaagattgatt

SEQ ID NO: 1612476 - DNA, 15 bp, Homo sapiens
gttgtgaagattgat

SEQ ID NO: 1612477 - DNA, 15 bp, Homo sapiens
tgttgtgaagattga

SEQ ID NO: 1612478 - DNA, 15 bp, Homo sapiens
atgttgtgaagattg

SEQ ID NO: 1612479 - DNA, 15 bp, Homo sapiens
catgttgtgaagatt

SEQ ID NO: 1612480 - DNA, 15 bp, Homo sapiens
gcatgttgtgaagat

SEQ ID NO: 1612481 - DNA, 15 bp, Homo sapiens
agcatgttgtgaaga

SEQ ID NO: 1612482 - DNA, 15 bp, Homo sapiens
tagcatgttgtgaag

SEQ ID NO: 1612483 - DNA, 15 bp, Homo sapiens
atagcatgttgtgaa

SEQ ID NO: 1612484 - DNA, 15 bp, Homo sapiens
catagcatgttgtga

SEQ ID NO: 1612485 - DNA, 15 bp, Homo sapiens
tcatagcatgttgtg

SEQ ID NO: 1612486 - DNA, 15 bp, Homo sapiens
ttcatagcatgttgt

SEQ ID NO: 1612487 - DNA, 15 bp, Homo sapiens
cttcatagcatgttg

SEQ ID NO: 1612488 - DNA, 15 bp, Homo sapiens
gcttcatagcatgtt

SEQ ID NO: 1612489 - DNA, 15 bp, Homo sapiens
tgcttcatagcatgt

SEQ ID NO: 1612490 - DNA, 15 bp, Homo sapiens
ctgcttcatagcatg

SEQ ID NO: 1612491 - DNA, 15 bp, Homo sapiens
cctgcttcatagcat

SEQ ID NO: 1612492 - DNA, 15 bp, Homo sapiens
gcctgcttcatagca

SEQ ID NO: 1612493 - DNA, 15 bp, Homo sapiens
tgcctgcttcatagc

SEQ ID NO: 1612494 - DNA, 15 bp, Homo sapiens
ttgcctgcttcatag

SEQ ID NO: 1612495 - DNA, 15 bp, Homo sapiens
cttgcctgcttcata

SEQ ID NO: 1612496 - DNA, 15 bp, Homo sapiens
atcttgcctgcttca

SEQ ID NO: 1612497 - DNA, 15 bp, Homo sapiens
aatcttgcctgcttc

SEQ ID NO: 1612498 - DNA, 15 bp, Homo sapiens
taatcttgcctgctt

SEQ ID NO: 1612499 - DNA, 15 bp, Homo sapiens
ataatcttgcctgct

SEQ ID NO: 1612500 - DNA, 15 bp, Homo sapiens
aataatcttgcctgc

SEQ ID NO: 1612501 - DNA, 15 bp, Homo sapiens
taataatcttgcctg

SEQ ID NO: 1612502 - DNA, 15 bp, Homo sapiens
ataataatcttgcct

SEQ ID NO: 1612503 - DNA, 15 bp, Homo sapiens
aataataatcttgcc

SEQ ID NO: 1612504 - DNA, 15 bp, Homo sapiens
taataataatcttgc

SEQ ID NO: 1612505 - DNA, 15 bp, Homo sapiens
ataataataatcttg

SEQ ID NO: 1612506 - DNA, 15 bp, Homo sapiens
aataataataatctt

SEQ ID NO: 1612507 - DNA, 15 bp, Homo sapiens
taataataataatct

SEQ ID NO: 1612508 - DNA, 15 bp, Homo sapiens
ataataataataatc

SEQ ID NO: 1612509 - DNA, 15 bp, Homo sapiens
ctaataataataata

SEQ ID NO: 1612510 - DNA, 15 bp, Homo sapiens
actaataataataat

SEQ ID NO: 1612511 - DNA, 15 bp, Homo sapiens
gactaataataataa

SEQ ID NO: 1612512 - DNA, 15 bp, Homo sapiens
ggactaataataata

SEQ ID NO: 1612513 - DNA, 15 bp, Homo sapiens
aggactaataataat

SEQ ID NO: 1612514 - DNA, 15 bp, Homo sapiens
caggactaataataa

SEQ ID NO: 1612515 - DNA, 15 bp, Homo sapiens
acaggactaataata

SEQ ID NO: 1612516 - DNA, 15 bp, Homo sapiens
aacaggactaataat

SEQ ID NO: 1612517 - DNA, 15 bp, Homo sapiens
aaacaggactaataa

SEQ ID NO: 1612518 - DNA, 15 bp, Homo sapiens
aaaacaggactaata

SEQ ID NO: 1612519 - DNA, 15 bp, Homo sapiens
caaaacaggactaat

SEQ ID NO: 1612520 - DNA, 15 bp, Homo sapiens
gcaaaacaggactaa

SEQ ID NO: 1612521 - DNA, 15 bp, Homo sapiens
tgcaaaacaggacta

SEQ ID NO: 1612522 - DNA, 15 bp, Homo sapiens
ctgcaaaacaggact

SEQ ID NO: 1612523 - DNA, 15 bp, Homo sapiens
tctgcaaaacaggac

SEQ ID NO: 1612524 - DNA, 15 bp, Homo sapiens
atctgcaaaacagga

SEQ ID NO: 1612525 - DNA, 15 bp, Homo sapiens
catctgcaaaacagg

SEQ ID NO: 1612526 - DNA, 15 bp, Homo sapiens
tcatctgcaaaacag

SEQ ID NO: 1612527 - DNA, 15 bp, Homo sapiens
ctcatctgcaaaaca

SEQ ID NO: 1612528 - DNA, 15 bp, Homo sapiens
tctcatctgcaaaac

SEQ ID NO: 1612529 - DNA, 15 bp, Homo sapiens
ttctcatctgcaaaa

SEQ ID NO: 1612530 - DNA, 15 bp, Homo sapiens
tttctcatctgcaaa

SEQ ID NO: 1612531 - DNA, 15 bp, Homo sapiens
ttttctcatctgcaa

SEQ ID NO: 1612532 - DNA, 15 bp, Homo sapiens
gttttctcatctgca

SEQ ID NO: 1612533 - DNA, 15 bp, Homo sapiens
agttttctcatctgc

SEQ ID NO: 1612534 - DNA, 15 bp, Homo sapiens
ctcagttttctcatc

SEQ ID NO: 1612535 - DNA, 15 bp, Homo sapiens
cctcagttttctcat

SEQ ID NO: 1612536 - DNA, 15 bp, Homo sapiens
gcctcagttttctca

SEQ ID NO: 1612537 - DNA, 15 bp, Homo sapiens
agcctcagttttctc

SEQ ID NO: 1612538 - DNA, 15 bp, Homo sapiens
aagcctcagttttct

SEQ ID NO: 1612539 - DNA, 15 bp, Homo sapiens
caagcctcagttttc

SEQ ID NO: 1612540 - DNA, 15 bp, Homo sapiens
gcaagcctcagtttt

SEQ ID NO: 1612541 - DNA, 15 bp, Homo sapiens
agcaagcctcagttt

SEQ ID NO: 1612542 - DNA, 15 bp, Homo sapiens
aagcaagcctcagtt

SEQ ID NO: 1612543 - DNA, 15 bp, Homo sapiens
taagcaagcctcagt

SEQ ID NO: 1612544 - DNA, 15 bp, Homo sapiens
ctaagcaagcctcag

SEQ ID NO: 1612545 - DNA, 15 bp, Homo sapiens
cctaagcaagcctca

SEQ ID NO: 1612546 - DNA, 15 bp, Homo sapiens
ccctaagcaagcctc

SEQ ID NO: 1612547 - DNA, 15 bp, Homo sapiens
tccctaagcaagcct

SEQ ID NO: 1612548 - DNA, 15 bp, Homo sapiens
ctccctaagcaagcc

SEQ ID NO: 1612549 - DNA, 15 bp, Homo sapiens
tctccctaagcaagc

SEQ ID NO: 1612550 - DNA, 15 bp, Homo sapiens
gtctccctaagcaag

SEQ ID NO: 1612551 - DNA, 15 bp, Homo sapiens
agtctccctaagcaa

SEQ ID NO: 1612552 - DNA, 15 bp, Homo sapiens
tagtctccctaagca

SEQ ID NO: 1612553 - DNA, 15 bp, Homo sapiens
ttagtctccctaagc

SEQ ID NO: 1612554 - DNA, 15 bp, Homo sapiens
cttagtctccctaag

SEQ ID NO: 1612555 - DNA, 15 bp, Homo sapiens
acttagtctccctaa

SEQ ID NO: 1612556 - DNA, 15 bp, Homo sapiens
cacttagtctcccta

SEQ ID NO: 1612557 - DNA, 15 bp, Homo sapiens
gcacttagtctccct

SEQ ID NO: 1612558 - DNA, 15 bp, Homo sapiens
ggcacttagtctccc

SEQ ID NO: 1612559 - DNA, 15 bp, Homo sapiens
aggcacttagtctcc

SEQ ID NO: 1612560 - DNA, 15 bp, Homo sapiens
gaggcacttagtctc

SEQ ID NO: 1612561 - DNA, 15 bp, Homo sapiens
tgaggcacttagtct

SEQ ID NO: 1612562 - DNA, 15 bp, Homo sapiens
ctgaggcacttagtc

SEQ ID NO: 1612563 - DNA, 15 bp, Homo sapiens
gctgaggcacttagt

SEQ ID NO: 1612564 - DNA, 15 bp, Homo sapiens
ggctgaggcacttag

SEQ ID NO: 1612565 - DNA, 15 bp, Homo sapiens
tggctgaggcactta

SEQ ID NO: 1612566 - DNA, 15 bp, Homo sapiens
ttggctgaggcactt

SEQ ID NO: 1612567 - DNA, 15 bp, Homo sapiens
cttggctgaggcact

SEQ ID NO: 1612568 - DNA, 15 bp, Homo sapiens
tcttggctgaggcac

SEQ ID NO: 1612569 - DNA, 15 bp, Homo sapiens
atcttggctgaggca

SEQ ID NO: 1612570 - DNA, 15 bp, Homo sapiens
gatcttggctgaggc

SEQ ID NO: 1612571 - DNA, 15 bp, Homo sapiens
tgatcttggctgagg

SEQ ID NO: 1612572 - DNA, 15 bp, Homo sapiens
gtgatcttggctgag

SEQ ID NO: 1612573 - DNA, 15 bp, Homo sapiens
tgtgatcttggctga

SEQ ID NO: 1612574 - DNA, 15 bp, Homo sapiens
gtgtgatcttggctg

SEQ ID NO: 1612575 - DNA, 15 bp, Homo sapiens
tgtgtgatcttggct

SEQ ID NO: 1612576 - DNA, 15 bp, Homo sapiens
ctgtgtgatcttggc

SEQ ID NO: 1612577 - DNA, 15 bp, Homo sapiens
gctgtgtgatcttgg

SEQ ID NO: 1612578 - DNA, 15 bp, Homo sapiens
tgctgtgtgatcttg

SEQ ID NO: 1612579 - DNA, 15 bp, Homo sapiens
ttgctgtgtgatctt

SEQ ID NO: 1612580 - DNA, 15 bp, Homo sapiens
cttgctgtgtgatct

SEQ ID NO: 1612581 - DNA, 15 bp, Homo sapiens
acttgctgtgtgatc

SEQ ID NO: 1612582 - DNA, 15 bp, Homo sapiens
tacttgctgtgtgat

SEQ ID NO: 1612583 - DNA, 15 bp, Homo sapiens
ttacttgctgtgtga

SEQ ID NO: 1612584 - DNA, 15 bp, Homo sapiens
cttacttgctgtgtg

SEQ ID NO: 1612585 - DNA, 15 bp, Homo sapiens
acttacttgctgtgt

SEQ ID NO: 1612586 - DNA, 15 bp, Homo sapiens
cacttacttgctgtg

SEQ ID NO: 1612587 - DNA, 15 bp, Homo sapiens
ccacttacttgctgt

SEQ ID NO: 1612588 - DNA, 15 bp, Homo sapiens
tccacttacttgctg

SEQ ID NO: 1612589 - DNA, 15 bp, Homo sapiens
ctccacttacttgct

SEQ ID NO: 1612590 - DNA, 15 bp, Homo sapiens
cctccacttacttgc

SEQ ID NO: 1612591 - DNA, 15 bp, Homo sapiens
tcctccacttacttg

SEQ ID NO: 1612592 - DNA, 15 bp, Homo sapiens
ctcctccacttactt

SEQ ID NO: 1612593 - DNA, 15 bp, Homo sapiens
actcctccacttact

SEQ ID NO: 1612594 - DNA, 15 bp, Homo sapiens
gactcctccacttac

SEQ ID NO: 1612595 - DNA, 15 bp, Homo sapiens
agactcctccactta

SEQ ID NO: 1612596 - DNA, 15 bp, Homo sapiens
cagactcctccactt

SEQ ID NO: 1612597 - DNA, 15 bp, Homo sapiens
ccagactcctccact

SEQ ID NO: 1612598 - DNA, 15 bp, Homo sapiens
tccagactcctccac

SEQ ID NO: 1612599 - DNA, 15 bp, Homo sapiens
atccagactcctcca

SEQ ID NO: 1612600 - DNA, 15 bp, Homo sapiens
aatccagactcctcc

SEQ ID NO: 1612601 - DNA, 15 bp, Homo sapiens
aaatccagactcctc

SEQ ID NO: 1612602 - DNA, 15 bp, Homo sapiens
caaatccagactcct

SEQ ID NO: 1612603 - DNA, 15 bp, Homo sapiens
tcaaatccagactcc

SEQ ID NO: 1612604 - DNA, 15 bp, Homo sapiens
ttcaaatccagactc

SEQ ID NO: 1612605 - DNA, 15 bp, Homo sapiens
gttcaaatccagact

SEQ ID NO: 1612606 - DNA, 15 bp, Homo sapiens
agttcaaatccagac

SEQ ID NO: 1612607 - DNA, 15 bp, Homo sapiens
aagttcaaatccaga

SEQ ID NO: 1612608 - DNA, 15 bp, Homo sapiens
taagttcaaatccag

SEQ ID NO: 1612609 - DNA, 15 bp, Homo sapiens
ctaagttcaaatcca

SEQ ID NO: 1612610 - DNA, 15 bp, Homo sapiens
gctaagttcaaatcc

SEQ ID NO: 1612611 - DNA, 15 bp, Homo sapiens
agctaagttcaaatc

SEQ ID NO: 1612612 - DNA, 15 bp, Homo sapiens
gagctaagttcaaat

SEQ ID NO: 1612613 - DNA, 15 bp, Homo sapiens
agagctaagttcaaa

SEQ ID NO: 1612614 - DNA, 15 bp, Homo sapiens
cagagctaagttcaa

SEQ ID NO: 1612615 - DNA, 15 bp, Homo sapiens
gcagagctaagttca

SEQ ID NO: 1612616 - DNA, 15 bp, Homo sapiens
ggcagagctaagttc

SEQ ID NO: 1612617 - DNA, 15 bp, Homo sapiens
aggcagagctaagtt

SEQ ID NO: 1612618 - DNA, 15 bp, Homo sapiens
caggcagagctaagt

SEQ ID NO: 1612619 - DNA, 15 bp, Homo sapiens
ccaggcagagctaag

SEQ ID NO: 1612620 - DNA, 15 bp, Homo sapiens
gccaggcagagctaa

SEQ ID NO: 1612621 - DNA, 15 bp, Homo sapiens
agccaggcagagcta

SEQ ID NO: 1612622 - DNA, 15 bp, Homo sapiens
gagccaggcagagct

SEQ ID NO: 1612623 - DNA, 15 bp, Homo sapiens
ggagccaggcagagc

SEQ ID NO: 1612624 - DNA, 15 bp, Homo sapiens
cggagccaggcagag

SEQ ID NO: 1612625 - DNA, 15 bp, Homo sapiens
ccggagccaggcaga

SEQ ID NO: 1612626 - DNA, 15 bp, Homo sapiens
tccggagccaggcag

SEQ ID NO: 1612627 - DNA, 15 bp, Homo sapiens
ctccggagccaggca

SEQ ID NO: 1612628 - DNA, 15 bp, Homo sapiens
actccggagccaggc

SEQ ID NO: 1612629 - DNA, 15 bp, Homo sapiens
gactccggagccagg

SEQ ID NO: 1612630 - DNA, 15 bp, Homo sapiens
ggactccggagccag

SEQ ID NO: 1612631 - DNA, 15 bp, Homo sapiens
cggactccggagcca

SEQ ID NO: 1612632 - DNA, 15 bp, Homo sapiens
ccggactccggagcc

SEQ ID NO: 1612633 - DNA, 15 bp, Homo sapiens
cccggactccggagc

SEQ ID NO: 1612634 - DNA, 15 bp, Homo sapiens
gcccggactccggag

SEQ ID NO: 1612635 - DNA, 15 bp, Homo sapiens
ggcccggactccgga

SEQ ID NO: 1612636 - DNA, 15 bp, Homo sapiens
gggcccggactccgg

SEQ ID NO: 1612637 - DNA, 15 bp, Homo sapiens
agggcccggactccg

SEQ ID NO: 1612638 - DNA, 15 bp, Homo sapiens
aagggcccggactcc

SEQ ID NO: 1612639 - DNA, 15 bp, Homo sapiens
gaagggcccggactc

SEQ ID NO: 1612640 - DNA, 15 bp, Homo sapiens
tgaagggcccggact

SEQ ID NO: 1612641 - DNA, 15 bp, Homo sapiens
atgaagggcccggac

SEQ ID NO: 1612642 - DNA, 15 bp, Homo sapiens
gatgaagggcccgga

SEQ ID NO: 1612643 - DNA, 15 bp, Homo sapiens
tgatgaagggcccgg

SEQ ID NO: 1612644 - DNA, 15 bp, Homo sapiens
atgatgaagggcccg

SEQ ID NO: 1612645 - DNA, 15 bp, Homo sapiens
catgatgaagggccc

SEQ ID NO: 1612646 - DNA, 15 bp, Homo sapiens
tcatgatgaagggcc

SEQ ID NO: 1612647 - DNA, 15 bp, Homo sapiens
gtcatgatgaagggc

SEQ ID NO: 1612648 - DNA, 15 bp, Homo sapiens
tgtcatgatgaaggg

SEQ ID NO: 1612649 - DNA, 15 bp, Homo sapiens
atgtcatgatgaagg

SEQ ID NO: 1612650 - DNA, 15 bp, Homo sapiens
gatgtcatgatgaag

SEQ ID NO: 1612651 - DNA, 15 bp, Homo sapiens
tgatgtcatgatgaa

SEQ ID NO: 1612652 - DNA, 15 bp, Homo sapiens
atgatgtcatgatga

SEQ ID NO: 1612653 - DNA, 15 bp, Homo sapiens
gatgatgtcatgatg

SEQ ID NO: 1612654 - DNA, 15 bp, Homo sapiens
ggatgatgtcatgat

SEQ ID NO: 1612655 - DNA, 15 bp, Homo sapiens
aggatgatgtcatga

SEQ ID NO: 1612656 - DNA, 15 bp, Homo sapiens
caggatgatgtcatg

SEQ ID NO: 1612657 - DNA, 15 bp, Homo sapiens
gcaggatgatgtcat

SEQ ID NO: 1612658 - DNA, 15 bp, Homo sapiens
ggcaggatgatgtca

SEQ ID NO: 1612659 - DNA, 15 bp, Homo sapiens
gggcaggatgatgtc

SEQ ID NO: 1612660 - DNA, 15 bp, Homo sapiens
agggcaggatgatgt

SEQ ID NO: 1612661 - DNA, 15 bp, Homo sapiens
cagggcaggatgatg

SEQ ID NO: 1612662 - DNA, 15 bp, Homo sapiens
tcagggcaggatgat

SEQ ID NO: 1612663 - DNA, 15 bp, Homo sapiens
atcagggcaggatga

SEQ ID NO: 1612664 - DNA, 15 bp, Homo sapiens
catcagggcaggatg

SEQ ID NO: 1612665 - DNA, 15 bp, Homo sapiens
ccatcagggcaggat

SEQ ID NO: 1612666 - DNA, 15 bp, Homo sapiens
gccatcagggcagga

SEQ ID NO: 1612667 - DNA, 15 bp, Homo sapiens
tgccatcagggcagg

SEQ ID NO: 1612668 - DNA, 15 bp, Homo sapiens
ctgccatcagggcag

SEQ ID NO: 1612669 - DNA, 15 bp, Homo sapiens
tctgccatcagggca

SEQ ID NO: 1612670 - DNA, 15 bp, Homo sapiens
atctgccatcagggc

SEQ ID NO: 1612671 - DNA, 15 bp, Homo sapiens
catctgccatcaggg

SEQ ID NO: 1612672 - DNA, 15 bp, Homo sapiens
gcatctgccatcagg

SEQ ID NO: 1612673 - DNA, 15 bp, Homo sapiens
agcatctgccatcag

SEQ ID NO: 1612674 - DNA, 15 bp, Homo sapiens
aagcatctgccatca

SEQ ID NO: 1612675 - DNA, 15 bp, Homo sapiens
taagcatctgccatc

SEQ ID NO: 1612676 - DNA, 15 bp, Homo sapiens
ctaagcatctgccat

SEQ ID NO: 1612677 - DNA, 15 bp, Homo sapiens
cctaagcatctgcca

SEQ ID NO: 1612678 - DNA, 15 bp, Homo sapiens
ccctaagcatctgcc

SEQ ID NO: 1612679 - DNA, 15 bp, Homo sapiens
accctaagcatctgc

SEQ ID NO: 1612680 - DNA, 15 bp, Homo sapiens
taccctaagcatctg

SEQ ID NO: 1612681 - DNA, 15 bp, Homo sapiens
ataccctaagcatct

SEQ ID NO: 1612682 - DNA, 15 bp, Homo sapiens
cataccctaagcatc

SEQ ID NO: 1612683 - DNA, 15 bp, Homo sapiens
gcataccctaagcat

SEQ ID NO: 1612684 - DNA, 15 bp, Homo sapiens
agcataccctaagca

SEQ ID NO: 1612685 - DNA, 15 bp, Homo sapiens
cagcataccctaagc

SEQ ID NO: 1612686 - DNA, 15 bp, Homo sapiens
acagcataccctaag

SEQ ID NO: 1612687 - DNA, 15 bp, Homo sapiens
gacagcataccctaa

SEQ ID NO: 1612688 - DNA, 15 bp, Homo sapiens
tgacagcatacccta

SEQ ID NO: 1612689 - DNA, 15 bp, Homo sapiens
ctgacagcataccct

SEQ ID NO: 1612690 - DNA, 15 bp, Homo sapiens
tctgacagcataccc

SEQ ID NO: 1612691 - DNA, 15 bp, Homo sapiens
ctctgacagcatacc

SEQ ID NO: 1612692 - DNA, 15 bp, Homo sapiens
tctctgacagcatac

SEQ ID NO: 1612693 - DNA, 15 bp, Homo sapiens
ctctctgacagcata

SEQ ID NO: 1612694 - DNA, 15 bp, Homo sapiens
cctctctgacagcat

SEQ ID NO: 1612695 - DNA, 15 bp, Homo sapiens
gcctctctgacagca

SEQ ID NO: 1612696 - DNA, 15 bp, Homo sapiens
ggcctctctgacagc

SEQ ID NO: 1612697 - DNA, 15 bp, Homo sapiens
aggcctctctgacag

SEQ ID NO: 1612698 - DNA, 15 bp, Homo sapiens
taggcctctctgaca

SEQ ID NO: 1612699 - DNA, 15 bp, Homo sapiens
gtaggcctctctgac

SEQ ID NO: 1612700 - DNA, 15 bp, Homo sapiens
ggtaggcctctctga

SEQ ID NO: 1612701 - DNA, 15 bp, Homo sapiens
cggtaggcctctctg

SEQ ID NO: 1612702 - DNA, 15 bp, Homo sapiens
tcggtaggcctctct

SEQ ID NO: 1612703 - DNA, 15 bp, Homo sapiens
gtcggtaggcctctc

SEQ ID NO: 1612704 - DNA, 15 bp, Homo sapiens
tgtcggtaggcctct

SEQ ID NO: 1612705 - DNA, 15 bp, Homo sapiens
ctgtcggtaggcctc

SEQ ID NO: 1612706 - DNA, 15 bp, Homo sapiens
cctgtcggtaggcct

SEQ ID NO: 1612707 - DNA, 15 bp, Homo sapiens
ccctgtcggtaggcc

SEQ ID NO: 1612708 - DNA, 15 bp, Homo sapiens
tccctgtcggtaggc

SEQ ID NO: 1612709 - DNA, 15 bp, Homo sapiens
atccctgtcggtagg

SEQ ID NO: 1612710 - DNA, 15 bp, Homo sapiens
aatccctgtcggtag

SEQ ID NO: 1612711 - DNA, 15 bp, Homo sapiens
gaatccctgtcggta

SEQ ID NO: 1612712 - DNA, 15 bp, Homo sapiens
ggaatccctgtcggt

SEQ ID NO: 1612713 - DNA, 15 bp, Homo sapiens
tggaatccctgtcgg

SEQ ID NO: 1612714 - DNA, 15 bp, Homo sapiens
ttggaatccctgtcg

SEQ ID NO: 1612715 - DNA, 15 bp, Homo sapiens
tttggaatccctgtc

SEQ ID NO: 1612716 - DNA, 15 bp, Homo sapiens
atttggaatccctgt

SEQ ID NO: 1612717 - DNA, 15 bp, Homo sapiens
gatttggaatccctg

SEQ ID NO: 1612718 - DNA, 15 bp, Homo sapiens
ggatttggaatccct

SEQ ID NO: 1612719 - DNA, 15 bp, Homo sapiens
tggatttggaatccc

SEQ ID NO: 1612720 - DNA, 15 bp, Homo sapiens
ttggatttggaatcc

SEQ ID NO: 1612721 - DNA, 15 bp, Homo sapiens
cttggatttggaatc

SEQ ID NO: 1612722 - DNA, 15 bp, Homo sapiens
acttggatttggaat

SEQ ID NO: 1612723 - DNA, 15 bp, Homo sapiens
tacttggatttggaa

SEQ ID NO: 1612724 - DNA, 15 bp, Homo sapiens
ttacttggatttgga

SEQ ID NO: 1612725 - DNA, 15 bp, Homo sapiens
attacttggatttgg

SEQ ID NO: 1612726 - DNA, 15 bp, Homo sapiens
cattacttggatttg

SEQ ID NO: 1612727 - DNA, 15 bp, Homo sapiens
gcattacttggattt

SEQ ID NO: 1612728 - DNA, 15 bp, Homo sapiens
tgcattacttggatt

SEQ ID NO: 1612729 - DNA, 15 bp, Homo sapiens
ttgcattacttggat

SEQ ID NO: 1612730 - DNA, 15 bp, Homo sapiens
tttgcattacttgga

SEQ ID NO: 1612731 - DNA, 15 bp, Homo sapiens
atttgcattacttgg

SEQ ID NO: 1612732 - DNA, 15 bp, Homo sapiens
aatttgcattacttg

SEQ ID NO: 1612733 - DNA, 15 bp, Homo sapiens
gaatttgcattactt

SEQ ID NO: 1612734 - DNA, 15 bp, Homo sapiens
ggaatttgcattact

SEQ ID NO: 1612735 - DNA, 15 bp, Homo sapiens
aggaatttgcattac

SEQ ID NO: 1612736 - DNA, 15 bp, Homo sapiens
caggaatttgcatta

SEQ ID NO: 1612737 - DNA, 15 bp, Homo sapiens
ccaggaatttgcatt

SEQ ID NO: 1612738 - DNA, 15 bp, Homo sapiens
cccaggaatttgcat

SEQ ID NO: 1612739 - DNA, 15 bp, Homo sapiens
tcccaggaatttgca

SEQ ID NO: 1612740 - DNA, 15 bp, Homo sapiens
ctcccaggaatttgc

SEQ ID NO: 1612741 - DNA, 15 bp, Homo sapiens
actcccaggaatttg

SEQ ID NO: 1612742 - DNA, 15 bp, Homo sapiens
tactcccaggaattt

SEQ ID NO: 1612743 - DNA, 15 bp, Homo sapiens
ttactcccaggaatt

SEQ ID NO: 1612744 - DNA, 15 bp, Homo sapiens
tttactcccaggaat

SEQ ID NO: 1612745 - DNA, 15 bp, Homo sapiens
gtttactcccaggaa

SEQ ID NO: 1612746 - DNA, 15 bp, Homo sapiens
tgtttactcccagga

SEQ ID NO: 1612747 - DNA, 15 bp, Homo sapiens
ttgtttactcccagg

SEQ ID NO: 1612748 - DNA, 15 bp, Homo sapiens
attgtttactcccag

SEQ ID NO: 1612749 - DNA, 15 bp, Homo sapiens
gattgtttactccca

SEQ ID NO: 1612750 - DNA, 15 bp, Homo sapiens
tgattgtttactccc

SEQ ID NO: 1612751 - DNA, 15 bp, Homo sapiens
ctgattgtttactcc

SEQ ID NO: 1612752 - DNA, 15 bp, Homo sapiens
cctgattgtttactc

SEQ ID NO: 1612753 - DNA, 15 bp, Homo sapiens
gcctgattgtttact

SEQ ID NO: 1612754 - DNA, 15 bp, Homo sapiens
ggcctgattgtttac

SEQ ID NO: 1612755 - DNA, 15 bp, Homo sapiens
aggcctgattgttta

SEQ ID NO: 1612756 - DNA, 15 bp, Homo sapiens
caggcctgattgttt

SEQ ID NO: 1612757 - DNA, 15 bp, Homo sapiens
acaggcctgattgtt

SEQ ID NO: 1612758 - DNA, 15 bp, Homo sapiens
gacaggcctgattgt

SEQ ID NO: 1612759 - DNA, 15 bp, Homo sapiens
tgacaggcctgattg

SEQ ID NO: 1612760 - DNA, 15 bp, Homo sapiens
ctgacaggcctgatt

SEQ ID NO: 1612761 - DNA, 15 bp, Homo sapiens
cctgacaggcctgat

SEQ ID NO: 1612762 - DNA, 15 bp, Homo sapiens
ccctgacaggcctga

SEQ ID NO: 1612763 - DNA, 15 bp, Homo sapiens
gccctgacaggcctg

SEQ ID NO: 1612764 - DNA, 15 bp, Homo sapiens
tgccctgacaggcct

SEQ ID NO: 1612765 - DNA, 15 bp, Homo sapiens
ctgccctgacaggcc

SEQ ID NO: 1612766 - DNA, 15 bp, Homo sapiens
cctgccctgacaggc

SEQ ID NO: 1612767 - DNA, 15 bp, Homo sapiens
tcctgccctgacagg

SEQ ID NO: 1612768 - DNA, 15 bp, Homo sapiens
ctcctgccctgacag

SEQ ID NO: 1612769 - DNA, 15 bp, Homo sapiens
cctcctgccctgaca

SEQ ID NO: 1612770 - DNA, 15 bp, Homo sapiens
ccctcctgccctgac

SEQ ID NO: 1612771 - DNA, 15 bp, Homo sapiens
cccctcctgccctga

SEQ ID NO: 1612772 - DNA, 15 bp, Homo sapiens
tcccctcctgccctg

SEQ ID NO: 1612773 - DNA, 15 bp, Homo sapiens
gcctcccctcctgcc

SEQ ID NO: 1612774 - DNA, 15 bp, Homo sapiens
ggcctcccctcctgc

SEQ ID NO: 1612775 - DNA, 15 bp, Homo sapiens
gggcctcccctcctg

SEQ ID NO: 1612776 - DNA, 15 bp, Homo sapiens
agggcctcccctcct

SEQ ID NO: 1612777 - DNA, 15 bp, Homo sapiens
cagggcctcccctcc

SEQ ID NO: 1612778 - DNA, 15 bp, Homo sapiens
tcagggcctcccctc

SEQ ID NO: 1612779 - DNA, 15 bp, Homo sapiens
ttcagggcctcccct

SEQ ID NO: 1612780 - DNA, 15 bp, Homo sapiens
cttcagggcctcccc

SEQ ID NO: 1612781 - DNA, 15 bp, Homo sapiens
gcttcagggcctccc

SEQ ID NO: 1612782 - DNA, 15 bp, Homo sapiens
agcttcagggcctcc

SEQ ID NO: 1612783 - DNA, 15 bp, Homo sapiens
tagcttcagggcctc

SEQ ID NO: 1612784 - DNA, 15 bp, Homo sapiens
gtagcttcagggcct

SEQ ID NO: 1612785 - DNA, 15 bp, Homo sapiens
tgtagcttcagggcc

SEQ ID NO: 1612786 - DNA, 15 bp, Homo sapiens
atgtagcttcagggc

SEQ ID NO: 1612787 - DNA, 15 bp, Homo sapiens
aatgtagcttcaggg

SEQ ID NO: 1612788 - DNA, 15 bp, Homo sapiens
gaatgtagcttcagg

SEQ ID NO: 1612789 - DNA, 15 bp, Homo sapiens
agaatgtagcttcag

SEQ ID NO: 1612790 - DNA, 15 bp, Homo sapiens
gagaatgtagcttca

SEQ ID NO: 1612791 - DNA, 15 bp, Homo sapiens
ggagaatgtagcttc

SEQ ID NO: 1612792 - DNA, 15 bp, Homo sapiens
gggagaatgtagctt

SEQ ID NO: 1612793 - DNA, 15 bp, Homo sapiens
tgggagaatgtagct

SEQ ID NO: 1612794 - DNA, 15 bp, Homo sapiens
gtgggagaatgtagc

SEQ ID NO: 1612795 - DNA, 15 bp, Homo sapiens
ggtgggagaatgtag

SEQ ID NO: 1612796 - DNA, 15 bp, Homo sapiens
gggtgggagaatgta

SEQ ID NO: 1612797 - DNA, 15 bp, Homo sapiens
cgggtgggagaatgt

SEQ ID NO: 1612798 - DNA, 15 bp, Homo sapiens
gcgggtgggagaatg

SEQ ID NO: 1612799 - DNA, 15 bp, Homo sapiens
ggcgggtgggagaat

SEQ ID NO: 1612800 - DNA, 15 bp, Homo sapiens
cggcgggtgggagaa

SEQ ID NO: 1612801 - DNA, 15 bp, Homo sapiens
gcggcgggtgggaga

SEQ ID NO: 1612802 - DNA, 15 bp, Homo sapiens
tgcggcgggtgggag

SEQ ID NO: 1612803 - DNA, 15 bp, Homo sapiens
ctgcggcgggtggga

SEQ ID NO: 1612804 - DNA, 15 bp, Homo sapiens
actgcggcgggtggg

SEQ ID NO: 1612805 - DNA, 15 bp, Homo sapiens
aactgcggcgggtgg

SEQ ID NO: 1612806 - DNA, 15 bp, Homo sapiens
caactgcggcgggtg

SEQ ID NO: 1612807 - DNA, 15 bp, Homo sapiens
acaactgcggcgggt

SEQ ID NO: 1612808 - DNA, 15 bp, Homo sapiens
cacaactgcggcggg

SEQ ID NO: 1612809 - DNA, 15 bp, Homo sapiens
acacaactgcggcgg

SEQ ID NO: 1612810 - DNA, 15 bp, Homo sapiens
cacacaactgcggcg

SEQ ID NO: 1612811 - DNA, 15 bp, Homo sapiens
acacacaactgcggc

SEQ ID NO: 1612812 - DNA, 15 bp, Homo sapiens
gacacacaactgcgg

SEQ ID NO: 1612813 - DNA, 15 bp, Homo sapiens
agacacacaactgcg

SEQ ID NO: 1612814 - DNA, 15 bp, Homo sapiens
cagacacacaactgc

SEQ ID NO: 1612815 - DNA, 15 bp, Homo sapiens
ccagacacacaactg

SEQ ID NO: 1612816 - DNA, 15 bp, Homo sapiens
gccagacacacaact

SEQ ID NO: 1612817 - DNA, 15 bp, Homo sapiens
tgccagacacacaac

SEQ ID NO: 1612818 - DNA, 15 bp, Homo sapiens
ttgccagacacacaa

SEQ ID NO: 1612819 - DNA, 15 bp, Homo sapiens
tttgccagacacaca

SEQ ID NO: 1612820 - DNA, 15 bp, Homo sapiens
ctttgccagacacac

SEQ ID NO: 1612821 - DNA, 15 bp, Homo sapiens
actttgccagacaca

SEQ ID NO: 1612822 - DNA, 15 bp, Homo sapiens
aactttgccagacac

SEQ ID NO: 1612823 - DNA, 15 bp, Homo sapiens
caactttgccagaca

SEQ ID NO: 1612824 - DNA, 15 bp, Homo sapiens
tcaactttgccagac

SEQ ID NO: 1612825 - DNA, 15 bp, Homo sapiens
ctcaactttgccaga

SEQ ID NO: 1612826 - DNA, 15 bp, Homo sapiens
gctcaactttgccag

SEQ ID NO: 1612827 - DNA, 15 bp, Homo sapiens
agctcaactttgcca

SEQ ID NO: 1612828 - DNA, 15 bp, Homo sapiens
aagctcaactttgcc

SEQ ID NO: 1612829 - DNA, 15 bp, Homo sapiens
caagctcaactttgc

SEQ ID NO: 1612830 - DNA, 15 bp, Homo sapiens
gcaagctcaactttg

SEQ ID NO: 1612831 - DNA, 15 bp, Homo sapiens
ggcaagctcaacttt

SEQ ID NO: 1612832 - DNA, 15 bp, Homo sapiens
aggcaagctcaactt

SEQ ID NO: 1612833 - DNA, 15 bp, Homo sapiens
caggcaagctcaact

SEQ ID NO: 1612834 - DNA, 15 bp, Homo sapiens
ccaggcaagctcaac

SEQ ID NO: 1612835 - DNA, 15 bp, Homo sapiens
gccaggcaagctcaa

SEQ ID NO: 1612836 - DNA, 15 bp, Homo sapiens
tgccaggcaagctca

SEQ ID NO: 1612837 - DNA, 15 bp, Homo sapiens
ttgccaggcaagctc

SEQ ID NO: 1612838 - DNA, 15 bp, Homo sapiens
tttgccaggcaagct

SEQ ID NO: 1612839 - DNA, 15 bp, Homo sapiens
gtttgccaggcaagc

SEQ ID NO: 1612840 - DNA, 15 bp, Homo sapiens
tgtttgccaggcaag

SEQ ID NO: 1612841 - DNA, 15 bp, Homo sapiens
ttgtttgccaggcaa

SEQ ID NO: 1612842 - DNA, 15 bp, Homo sapiens
gttgtttgccaggca

SEQ ID NO: 1612843 - DNA, 15 bp, Homo sapiens
ggttgtttgccaggc

SEQ ID NO: 1612844 - DNA, 15 bp, Homo sapiens
tggttgtttgccagg

SEQ ID NO: 1612845 - DNA, 15 bp, Homo sapiens
ttggttgtttgccag

SEQ ID NO: 1612846 - DNA, 15 bp, Homo sapiens
attggttgtttgcca

SEQ ID NO: 1612847 - DNA, 15 bp, Homo sapiens
cattggttgtttgcc

SEQ ID NO: 1612848 - DNA, 15 bp, Homo sapiens
tcattggttgtttgc

SEQ ID NO: 1612849 - DNA, 15 bp, Homo sapiens
gtcattggttgtttg

SEQ ID NO: 1612850 - DNA, 15 bp, Homo sapiens
agtcattggttgttt

SEQ ID NO: 1612851 - DNA, 15 bp, Homo sapiens
gagtcattggttgtt

SEQ ID NO: 1612852 - DNA, 15 bp, Homo sapiens
agagtcattggttgt

SEQ ID NO: 1612853 - DNA, 15 bp, Homo sapiens
cagagtcattggttg

SEQ ID NO: 1612854 - DNA, 15 bp, Homo sapiens
tcagagtcattggtt

SEQ ID NO: 1612855 - DNA, 15 bp, Homo sapiens
gtcagagtcattggt

SEQ ID NO: 1612856 - DNA, 15 bp, Homo sapiens
tgtcagagtcattgg

SEQ ID NO: 1612857 - DNA, 15 bp, Homo sapiens
ttgtcagagtcattg

SEQ ID NO: 1612858 - DNA, 15 bp, Homo sapiens
cttgtcagagtcatt

SEQ ID NO: 1612859 - DNA, 15 bp, Homo sapiens
tcttgtcagagtcat

SEQ ID NO: 1612860 - DNA, 15 bp, Homo sapiens
ttcttgtcagagtca

SEQ ID NO: 1612861 - DNA, 15 bp, Homo sapiens
cttcttgtcagagtc

SEQ ID NO: 1612862 - DNA, 15 bp, Homo sapiens
tcttcttgtcagagt

SEQ ID NO: 1612863 - DNA, 15 bp, Homo sapiens
ttcttcttgtcagag

SEQ ID NO: 1612864 - DNA, 15 bp, Homo sapiens
tttcttcttgtcaga

SEQ ID NO: 1612865 - DNA, 15 bp, Homo sapiens
gtttcttcttgtcag

SEQ ID NO: 1612866 - DNA, 15 bp, Homo sapiens
ggtttcttcttgtca

SEQ ID NO: 1612867 - DNA, 15 bp, Homo sapiens
tggtttcttcttgtc

SEQ ID NO: 1612868 - DNA, 15 bp, Homo sapiens
atggtttcttcttgt

SEQ ID NO: 1612869 - DNA, 15 bp, Homo sapiens
catggtttcttcttg

SEQ ID NO: 1612870 - DNA, 15 bp, Homo sapiens
tcatggtttcttctt

SEQ ID NO: 1612871 - DNA, 15 bp, Homo sapiens
atcatggtttcttct

SEQ ID NO: 1612872 - DNA, 15 bp, Homo sapiens
gatcatggtttcttc

SEQ ID NO: 1612873 - DNA, 15 bp, Homo sapiens
agatcatggtttctt

SEQ ID NO: 1612874 - DNA, 15 bp, Homo sapiens
aagatcatggtttct

SEQ ID NO: 1612875 - DNA, 15 bp, Homo sapiens
caagatcatggtttc

SEQ ID NO: 1612876 - DNA, 15 bp, Homo sapiens
ccaagatcatggttt

SEQ ID NO: 1612877 - DNA, 15 bp, Homo sapiens
cccaagatcatggtt

SEQ ID NO: 1612878 - DNA, 15 bp, Homo sapiens
ccccaagatcatggt

SEQ ID NO: 1612879 - DNA, 15 bp, Homo sapiens
tccccaagatcatgg

SEQ ID NO: 1612880 - DNA, 15 bp, Homo sapiens
ttccccaagatcatg

SEQ ID NO: 1612881 - DNA, 15 bp, Homo sapiens
tttccccaagatcat

SEQ ID NO: 1612882 - DNA, 15 bp, Homo sapiens
atttccccaagatca

SEQ ID NO: 1612883 - DNA, 15 bp, Homo sapiens
aatttccccaagatc

SEQ ID NO: 1612884 - DNA, 15 bp, Homo sapiens
taatttccccaagat

SEQ ID NO: 1612885 - DNA, 15 bp, Homo sapiens
ataatttccccaaga

SEQ ID NO: 1612886 - DNA, 15 bp, Homo sapiens
cataatttccccaag

SEQ ID NO: 1612887 - DNA, 15 bp, Homo sapiens
acataatttccccaa

SEQ ID NO: 1612888 - DNA, 15 bp, Homo sapiens
aacataatttcccca

SEQ ID NO: 1612889 - DNA, 15 bp, Homo sapiens
aaacataatttcccc

SEQ ID NO: 1612890 - DNA, 15 bp, Homo sapiens
caaacataatttccc

SEQ ID NO: 1612891 - DNA, 15 bp, Homo sapiens
gcaaacataatttcc

SEQ ID NO: 1612892 - DNA, 15 bp, Homo sapiens
tgcaaacataatttc

SEQ ID NO: 1612893 - DNA, 15 bp, Homo sapiens
atgcaaacataattt

SEQ ID NO: 1612894 - DNA, 15 bp, Homo sapiens
catgcaaacataatt

SEQ ID NO: 1612895 - DNA, 15 bp, Homo sapiens
tcatgcaaacataat

SEQ ID NO: 1612896 - DNA, 15 bp, Homo sapiens
atcatgcaaacataa

SEQ ID NO: 1612897 - DNA, 15 bp, Homo sapiens
catcatgcaaacata

SEQ ID NO: 1612898 - DNA, 15 bp, Homo sapiens
tcatcatgcaaacat

SEQ ID NO: 1612899 - DNA, 15 bp, Homo sapiens
ttcatcatgcaaaca

SEQ ID NO: 1612900 - DNA, 15 bp, Homo sapiens
tttcatcatgcaaac

SEQ ID NO: 1612901 - DNA, 15 bp, Homo sapiens
ttttcatcatgcaaa

SEQ ID NO: 1612902 - DNA, 15 bp, Homo sapiens
tttttcatcatgcaa

SEQ ID NO: 1612903 - DNA, 15 bp, Homo sapiens
atttttcatcatgca

SEQ ID NO: 1612904 - DNA, 15 bp, Homo sapiens
catttttcatcatgc

SEQ ID NO: 1612905 - DNA, 15 bp, Homo sapiens
ccatttttcatcatg

SEQ ID NO: 1612906 - DNA, 15 bp, Homo sapiens
tccatttttcatcat

SEQ ID NO: 1612907 - DNA, 15 bp, Homo sapiens
ttccatttttcatca

SEQ ID NO: 1612908 - DNA, 15 bp, Homo sapiens
gttccatttttcatc

SEQ ID NO: 1612909 - DNA, 15 bp, Homo sapiens
agttccatttttcat

SEQ ID NO: 1612910 - DNA, 15 bp, Homo sapiens
aagttccatttttca

SEQ ID NO: 1612911 - DNA, 15 bp, Homo sapiens
caagttccatttttc

SEQ ID NO: 1612912 - DNA, 15 bp, Homo sapiens
gcaagttccattttt

SEQ ID NO: 1612913 - DNA, 15 bp, Homo sapiens
tgcaagttccatttt

SEQ ID NO: 1612914 - DNA, 15 bp, Homo sapiens
ttgcaagttccattt

SEQ ID NO: 1612915 - DNA, 15 bp, Homo sapiens
tttgcaagttccatt

SEQ ID NO: 1612916 - DNA, 15 bp, Homo sapiens
ttttgcaagttccat

SEQ ID NO: 1612917 - DNA, 15 bp, Homo sapiens
tttttgcaagttcca

SEQ ID NO: 1612918 - DNA, 15 bp, Homo sapiens
ctttttgcaagttcc

SEQ ID NO: 1612919 - DNA, 15 bp, Homo sapiens
tctttttgcaagttc

SEQ ID NO: 1612920 - DNA, 15 bp, Homo sapiens
ttctttttgcaagtt

SEQ ID NO: 1612921 - DNA, 15 bp, Homo sapiens
tttctttttgcaagt

SEQ ID NO: 1612922 - DNA, 15 bp, Homo sapiens
ttttctttttgcaag

SEQ ID NO: 1612923 - DNA, 15 bp, Homo sapiens
attttctttttgcaa

SEQ ID NO: 1612924 - DNA, 15 bp, Homo sapiens
gattttctttttgca

SEQ ID NO: 1612925 - DNA, 15 bp, Homo sapiens
agattttctttttgc

SEQ ID NO: 1612926 - DNA, 15 bp, Homo sapiens
cagattttctttttg

SEQ ID NO: 1612927 - DNA, 15 bp, Homo sapiens
ccagattttcttttt

SEQ ID NO: 1612928 - DNA, 15 bp, Homo sapiens
gccagattttctttt

SEQ ID NO: 1612929 - DNA, 15 bp, Homo sapiens
tgccagattttcttt

SEQ ID NO: 1612930 - DNA, 15 bp, Homo sapiens
atgccagattttctt

SEQ ID NO: 1612931 - DNA, 15 bp, Homo sapiens
gatgccagattttct

SEQ ID NO: 1612932 - DNA, 15 bp, Homo sapiens
tgatgccagattttc

SEQ ID NO: 1612933 - DNA, 15 bp, Homo sapiens
ttgatgccagatttt

SEQ ID NO: 1612934 - DNA, 15 bp, Homo sapiens
cttgatgccagattt

SEQ ID NO: 1612935 - DNA, 15 bp, Homo sapiens
acttgatgccagatt

SEQ ID NO: 1612936 - DNA, 15 bp, Homo sapiens
cacttgatgccagat

SEQ ID NO: 1612937 - DNA, 15 bp, Homo sapiens
ccacttgatgccaga

SEQ ID NO: 1612938 - DNA, 15 bp, Homo sapiens
gccacttgatgccag

SEQ ID NO: 1612939 - DNA, 15 bp, Homo sapiens
ggccacttgatgcca

SEQ ID NO: 1612940 - DNA, 15 bp, Homo sapiens
cggccacttgatgcc

SEQ ID NO: 1612941 - DNA, 15 bp, Homo sapiens
ccggccacttgatgc

SEQ ID NO: 1612942 - DNA, 15 bp, Homo sapiens
cccggccacttgatg

SEQ ID NO: 1612943 - DNA, 15 bp, Homo sapiens
acccggccacttgat

SEQ ID NO: 1612944 - DNA, 15 bp, Homo sapiens
cacccggccacttga

SEQ ID NO: 1612945 - DNA, 15 bp, Homo sapiens
gcacccggccacttg

SEQ ID NO: 1612946 - DNA, 15 bp, Homo sapiens
tgcacccggccactt

SEQ ID NO: 1612947 - DNA, 15 bp, Homo sapiens
ctgcacccggccact

SEQ ID NO: 1612948 - DNA, 15 bp, Homo sapiens
actgcacccggccac

SEQ ID NO: 1612949 - DNA, 15 bp, Homo sapiens
cactgcacccggcca

SEQ ID NO: 1612950 - DNA, 15 bp, Homo sapiens
ttgagccactgcacc

SEQ ID NO: 1612951 - DNA, 15 bp, Homo sapiens
cttgagccactgcac

SEQ ID NO: 1612952 - DNA, 15 bp, Homo sapiens
gcttgagccactgca

SEQ ID NO: 1612953 - DNA, 15 bp, Homo sapiens
ggcttgagccactgc

SEQ ID NO: 1612954 - DNA, 15 bp, Homo sapiens
aggcttgagccactg

SEQ ID NO: 1612955 - DNA, 15 bp, Homo sapiens
caggcttgagccact

SEQ ID NO: 1612956 - DNA, 15 bp, Homo sapiens
ggattacaggcttga

SEQ ID NO: 1612957 - DNA, 15 bp, Homo sapiens
gggattacaggcttg

SEQ ID NO: 1612958 - DNA, 15 bp, Homo sapiens
tgggattacaggctt

SEQ ID NO: 1612959 - DNA, 15 bp, Homo sapiens
acccaaagtgctggg

SEQ ID NO: 1612960 - DNA, 15 bp, Homo sapiens
cacccaaagtgctgg

SEQ ID NO: 1612961 - DNA, 15 bp, Homo sapiens
ccacccaaagtgctg

SEQ ID NO: 1612962 - DNA, 15 bp, Homo sapiens
gccacccaaagtgct

SEQ ID NO: 1612963 - DNA, 15 bp, Homo sapiens
ggccacccaaagtgc

SEQ ID NO: 1612964 - DNA, 15 bp, Homo sapiens
tggccacccaaagtg

SEQ ID NO: 1612965 - DNA, 15 bp, Homo sapiens
ttggccacccaaagt

SEQ ID NO: 1612966 - DNA, 15 bp, Homo sapiens
cttggccacccaaag

SEQ ID NO: 1612967 - DNA, 15 bp, Homo sapiens
ccttggccacccaaa

SEQ ID NO: 1612968 - DNA, 15 bp, Homo sapiens
gccttggccacccaa

SEQ ID NO: 1612969 - DNA, 15 bp, Homo sapiens
tgccttggccaccca

SEQ ID NO: 1612970 - DNA, 15 bp, Homo sapiens
ctgccttggccaccc

SEQ ID NO: 1612971 - DNA, 15 bp, Homo sapiens
cctgccttggccacc

SEQ ID NO: 1612972 - DNA, 15 bp, Homo sapiens
gcctgccttggccac

SEQ ID NO: 1612973 - DNA, 15 bp, Homo sapiens
cgcctgccttggcca

SEQ ID NO: 1612974 - DNA, 15 bp, Homo sapiens
agtgatccgcctgcc

SEQ ID NO: 1612975 - DNA, 15 bp, Homo sapiens
aagtgatccgcctgc

SEQ ID NO: 1612976 - DNA, 15 bp, Homo sapiens
caagtgatccgcctg

SEQ ID NO: 1612977 - DNA, 15 bp, Homo sapiens
tcaagtgatccgcct

SEQ ID NO: 1612978 - DNA, 15 bp, Homo sapiens
ctcatgacctcaagt

SEQ ID NO: 1612979 - DNA, 15 bp, Homo sapiens
actcatgacctcaag

SEQ ID NO: 1612980 - DNA, 15 bp, Homo sapiens
aactcatgacctcaa

SEQ ID NO: 1612981 - DNA, 15 bp, Homo sapiens
gaactcatgacctca

SEQ ID NO: 1612982 - DNA, 15 bp, Homo sapiens
tgaactcatgacctc

SEQ ID NO: 1612983 - DNA, 15 bp, Homo sapiens
ttgaactcatgacct

SEQ ID NO: 1612984 - DNA, 15 bp, Homo sapiens
cttgaactcatgacc

SEQ ID NO: 1612985 - DNA, 15 bp, Homo sapiens
tcttgaactcatgac

SEQ ID NO: 1612986 - DNA, 15 bp, Homo sapiens
gtcttgaactcatga

SEQ ID NO: 1612987 - DNA, 15 bp, Homo sapiens
ggtcttgaactcatg

SEQ ID NO: 1612988 - DNA, 15 bp, Homo sapiens
tggtcttgaactcat

SEQ ID NO: 1612989 - DNA, 15 bp, Homo sapiens
ctggtcttgaactca

SEQ ID NO: 1612990 - DNA, 15 bp, Homo sapiens
cttcaccatgttggc

SEQ ID NO: 1612991 - DNA, 15 bp, Homo sapiens
gcttcaccatgttgg

SEQ ID NO: 1612992 - DNA, 15 bp, Homo sapiens
ggcttcaccatgttg

SEQ ID NO: 1612993 - DNA, 15 bp, Homo sapiens
gggcttcaccatgtt

SEQ ID NO: 1612994 - DNA, 15 bp, Homo sapiens
agggcttcaccatgt

SEQ ID NO: 1612995 - DNA, 15 bp, Homo sapiens
cagggcttcaccatg

SEQ ID NO: 1612996 - DNA, 15 bp, Homo sapiens
acagggcttcaccat

SEQ ID NO: 1612997 - DNA, 15 bp, Homo sapiens
gacagggcttcacca

SEQ ID NO: 1612998 - DNA, 15 bp, Homo sapiens
agacagggcttcacc

SEQ ID NO: 1612999 - DNA, 15 bp, Homo sapiens
gagacagggcttcac

SEQ ID NO: 1613000 - DNA, 15 bp, Homo sapiens
agagacagggcttca

SEQ ID NO: 1613001 - DNA, 15 bp, Homo sapiens
tagagacagggcttc

SEQ ID NO: 1613002 - DNA, 15 bp, Homo sapiens
gtagagacagggctt

SEQ ID NO: 1613003 - DNA, 15 bp, Homo sapiens
agtagagacagggct

SEQ ID NO: 1613004 - DNA, 15 bp, Homo sapiens
tagtagagacagggc

SEQ ID NO: 1613005 - DNA, 15 bp, Homo sapiens
ctaattttttttttt

SEQ ID NO: 1613006 - DNA, 15 bp, Homo sapiens
gctaatttttttttt

SEQ ID NO: 1613007 - DNA, 15 bp, Homo sapiens
ggctaattttttttt

SEQ ID NO: 1613008 - DNA, 15 bp, Homo sapiens
tggctaatttttttt

SEQ ID NO: 1613009 - DNA, 15 bp, Homo sapiens
ctggctaattttttt

SEQ ID NO: 1613010 - DNA, 15 bp, Homo sapiens
ctgccaccacacctg

SEQ ID NO: 1613011 - DNA, 15 bp, Homo sapiens
actgccaccacacct

SEQ ID NO: 1613012 - DNA, 15 bp, Homo sapiens
gactgccaccacacc

SEQ ID NO: 1613013 - DNA, 15 bp, Homo sapiens
tgactgccaccacac

SEQ ID NO: 1613014 - DNA, 15 bp, Homo sapiens
atgactgccaccaca

SEQ ID NO: 1613015 - DNA, 15 bp, Homo sapiens
gatgactgccaccac

SEQ ID NO: 1613016 - DNA, 15 bp, Homo sapiens
agatgactgccacca

SEQ ID NO: 1613017 - DNA, 15 bp, Homo sapiens
cagatgactgccacc

SEQ ID NO: 1613018 - DNA, 15 bp, Homo sapiens
acagatgactgccac

SEQ ID NO: 1613019 - DNA, 15 bp, Homo sapiens
tacagatgactgcca

SEQ ID NO: 1613020 - DNA, 15 bp, Homo sapiens
ttacagatgactgcc

SEQ ID NO: 1613021 - DNA, 15 bp, Homo sapiens
attacagatgactgc

SEQ ID NO: 1613022 - DNA, 15 bp, Homo sapiens
gattacagatgactg

SEQ ID NO: 1613023 - DNA, 15 bp, Homo sapiens
ggattacagatgact

SEQ ID NO: 1613024 - DNA, 15 bp, Homo sapiens
gggattacagatgac

SEQ ID NO: 1613025 - DNA, 15 bp, Homo sapiens
agctgggattacaga

SEQ ID NO: 1613026 - DNA, 15 bp, Homo sapiens
taagtagctgggatt

SEQ ID NO: 1613027 - DNA, 15 bp, Homo sapiens
ctaagtagctgggat

SEQ ID NO: 1613028 - DNA, 15 bp, Homo sapiens
acctcctaagtagct

SEQ ID NO: 1613029 - DNA, 15 bp, Homo sapiens
aacctcctaagtagc

SEQ ID NO: 1613030 - DNA, 15 bp, Homo sapiens
caacctcctaagtag

SEQ ID NO: 1613031 - DNA, 15 bp, Homo sapiens
tcaacctcctaagta

SEQ ID NO: 1613032 - DNA, 15 bp, Homo sapiens
ctcaacctcctaagt

SEQ ID NO: 1613033 - DNA, 15 bp, Homo sapiens
cctcaacctcctaag

SEQ ID NO: 1613034 - DNA, 15 bp, Homo sapiens
gcctcaacctcctaa

SEQ ID NO: 1613035 - DNA, 15 bp, Homo sapiens
tgcctcaacctccta

SEQ ID NO: 1613036 - DNA, 15 bp, Homo sapiens
ctgcctcaacctcct

SEQ ID NO: 1613037 - DNA, 15 bp, Homo sapiens
ctttaagcaattctc

SEQ ID NO: 1613038 - DNA, 15 bp, Homo sapiens
gctttaagcaattct

SEQ ID NO: 1613039 - DNA, 15 bp, Homo sapiens
ggctttaagcaattc

SEQ ID NO: 1613040 - DNA, 15 bp, Homo sapiens
tggctttaagcaatt

SEQ ID NO: 1613041 - DNA, 15 bp, Homo sapiens
ctggctttaagcaat

SEQ ID NO: 1613042 - DNA, 15 bp, Homo sapiens
cctggctttaagcaa

SEQ ID NO: 1613043 - DNA, 15 bp, Homo sapiens
tcctggctttaagca

SEQ ID NO: 1613044 - DNA, 15 bp, Homo sapiens
ctcctggctttaagc

SEQ ID NO: 1613045 - DNA, 15 bp, Homo sapiens
cctcctggctttaag

SEQ ID NO: 1613046 - DNA, 15 bp, Homo sapiens
acctcctggctttaa

SEQ ID NO: 1613047 - DNA, 15 bp, Homo sapiens
cacctcctggcttta

SEQ ID NO: 1613048 - DNA, 15 bp, Homo sapiens
ccacctcctggcttt

SEQ ID NO: 1613049 - DNA, 15 bp, Homo sapiens
tccacctcctggctt

SEQ ID NO: 1613050 - DNA, 15 bp, Homo sapiens
ctccacctcctggct

SEQ ID NO: 1613051 - DNA, 15 bp, Homo sapiens
tctccacctcctggc

SEQ ID NO: 1613052 - DNA, 15 bp, Homo sapiens
taatctccacctcct

SEQ ID NO: 1613053 - DNA, 15 bp, Homo sapiens
gtaatctccacctcc

SEQ ID NO: 1613054 - DNA, 15 bp, Homo sapiens
tgtaatctccacctc

SEQ ID NO: 1613055 - DNA, 15 bp, Homo sapiens
ctgtaatctccacct

SEQ ID NO: 1613056 - DNA, 15 bp, Homo sapiens
actgtaatctccacc

SEQ ID NO: 1613057 - DNA, 15 bp, Homo sapiens
cactgtaatctccac

SEQ ID NO: 1613058 - DNA, 15 bp, Homo sapiens
tcactgtaatctcca

SEQ ID NO: 1613059 - DNA, 15 bp, Homo sapiens
ctcactgtaatctcc

SEQ ID NO: 1613060 - DNA, 15 bp, Homo sapiens
gctcactgtaatctc

SEQ ID NO: 1613061 - DNA, 15 bp, Homo sapiens
ggctcactgtaatct

SEQ ID NO: 1613062 - DNA, 15 bp, Homo sapiens
cggctcactgtaatc

SEQ ID NO: 1613063 - DNA, 15 bp, Homo sapiens
tcggctcactgtaat

SEQ ID NO: 1613064 - DNA, 15 bp, Homo sapiens
tcatgatctcggctc

SEQ ID NO: 1613065 - DNA, 15 bp, Homo sapiens
gtcatgatctcggct

SEQ ID NO: 1613066 - DNA, 15 bp, Homo sapiens
tgtcatgatctcggc

SEQ ID NO: 1613067 - DNA, 15 bp, Homo sapiens
gtgtcatgatctcgg

SEQ ID NO: 1613068 - DNA, 15 bp, Homo sapiens
agtgtcatgatctcg

SEQ ID NO: 1613069 - DNA, 15 bp, Homo sapiens
cagtgtcatgatctc

SEQ ID NO: 1613070 - DNA, 15 bp, Homo sapiens
gcagtgtcatgatct

SEQ ID NO: 1613071 - DNA, 15 bp, Homo sapiens
tgcagtgtcatgatc

SEQ ID NO: 1613072 - DNA, 15 bp, Homo sapiens
gtgcagtgtcatgat

SEQ ID NO: 1613073 - DNA, 15 bp, Homo sapiens
agtgcagtgtcatga

SEQ ID NO: 1613074 - DNA, 15 bp, Homo sapiens
gagtgcagtgtcatg

SEQ ID NO: 1613075 - DNA, 15 bp, Homo sapiens
agagtgcagtgtcat

SEQ ID NO: 1613076 - DNA, 15 bp, Homo sapiens
tagagtgcagtgtca

SEQ ID NO: 1613077 - DNA, 15 bp, Homo sapiens
ctagagtgcagtgtc

SEQ ID NO: 1613078 - DNA, 15 bp, Homo sapiens
agtctccctctgtcg

SEQ ID NO: 1613079 - DNA, 15 bp, Homo sapiens
gagtctccctctgtc

SEQ ID NO: 1613080 - DNA, 15 bp, Homo sapiens
ggagtctccctctgt

SEQ ID NO: 1613081 - DNA, 15 bp, Homo sapiens
tggagtctccctctg

SEQ ID NO: 1613082 - DNA, 15 bp, Homo sapiens
atggagtctccctct

SEQ ID NO: 1613083 - DNA, 15 bp, Homo sapiens
gatggagtctccctc

SEQ ID NO: 1613084 - DNA, 15 bp, Homo sapiens
agatggagtctccct

SEQ ID NO: 1613085 - DNA, 15 bp, Homo sapiens
gagatggagtctccc

SEQ ID NO: 1613086 - DNA, 15 bp, Homo sapiens
tgagatggagtctcc

SEQ ID NO: 1613087 - DNA, 15 bp, Homo sapiens
gttttttttttttga

SEQ ID NO: 1613088 - DNA, 15 bp, Homo sapiens
tgttttttttttttg

SEQ ID NO: 1613089 - DNA, 15 bp, Homo sapiens
attttgttttttttt

SEQ ID NO: 1613090 - DNA, 15 bp, Homo sapiens
tattttgtttttttt

SEQ ID NO: 1613091 - DNA, 15 bp, Homo sapiens
ttattttgttttttt

SEQ ID NO: 1613092 - DNA, 15 bp, Homo sapiens
tttattttgtttttt

SEQ ID NO: 1613093 - DNA, 15 bp, Homo sapiens
ttttattttgttttt

SEQ ID NO: 1613094 - DNA, 15 bp, Homo sapiens
gttttattttgtttt

SEQ ID NO: 1613095 - DNA, 15 bp, Homo sapiens
ggttttattttgttt

SEQ ID NO: 1613096 - DNA, 15 bp, Homo sapiens
ttggttttattttgt

SEQ ID NO: 1613097 - DNA, 15 bp, Homo sapiens
ttttggttttatttt

SEQ ID NO: 1613098 - DNA, 15 bp, Homo sapiens
tttttggttttattt

SEQ ID NO: 1613099 - DNA, 15 bp, Homo sapiens
gtttttggttttatt

SEQ ID NO: 1613100 - DNA, 15 bp, Homo sapiens
agtttttggttttat

SEQ ID NO: 1613101 - DNA, 15 bp, Homo sapiens
gagtttttggtttta

SEQ ID NO: 1613102 - DNA, 15 bp, Homo sapiens
agagtttttggtttt

SEQ ID NO: 1613103 - DNA, 15 bp, Homo sapiens
cagagtttttggttt

SEQ ID NO: 1613104 - DNA, 15 bp, Homo sapiens
ccagagtttttggtt

SEQ ID NO: 1613105 - DNA, 15 bp, Homo sapiens
gccagagtttttggt

SEQ ID NO: 1613106 - DNA, 15 bp, Homo sapiens
tgccagagtttttgg

SEQ ID NO: 1613107 - DNA, 15 bp, Homo sapiens
atgccagagtttttg

SEQ ID NO: 1613108 - DNA, 15 bp, Homo sapiens
gatgccagagttttt

SEQ ID NO: 1613109 - DNA, 15 bp, Homo sapiens
tgatgccagagtttt

SEQ ID NO: 1613110 - DNA, 15 bp, Homo sapiens
ctgatgccagagttt

SEQ ID NO: 1613111 - DNA, 15 bp, Homo sapiens
cctgatgccagagtt

SEQ ID NO: 1613112 - DNA, 15 bp, Homo sapiens
tcctgatgccagagt

SEQ ID NO: 1613113 - DNA, 15 bp, Homo sapiens
ctcctgatgccagag

SEQ ID NO: 1613114 - DNA, 15 bp, Homo sapiens
tctcctgatgccaga

SEQ ID NO: 1613115 - DNA, 15 bp, Homo sapiens
ttctcctgatgccag

SEQ ID NO: 1613116 - DNA, 15 bp, Homo sapiens
tttctcctgatgcca

SEQ ID NO: 1613117 - DNA, 15 bp, Homo sapiens
ttttctcctgatgcc

SEQ ID NO: 1613118 - DNA, 15 bp, Homo sapiens
attttctcctgatgc

SEQ ID NO: 1613119 - DNA, 15 bp, Homo sapiens
aattttctcctgatg

SEQ ID NO: 1613120 - DNA, 15 bp, Homo sapiens
taattttctcctgat

SEQ ID NO: 1613121 - DNA, 15 bp, Homo sapiens
ttaattttctcctga

SEQ ID NO: 1613122 - DNA, 15 bp, Homo sapiens
tttaattttctcctg

SEQ ID NO: 1613123 - DNA, 15 bp, Homo sapiens
ttttaattttctcct

SEQ ID NO: 1613124 - DNA, 15 bp, Homo sapiens
attttaattttctcc

SEQ ID NO: 1613125 - DNA, 15 bp, Homo sapiens
aattttaattttctc

SEQ ID NO: 1613126 - DNA, 15 bp, Homo sapiens
tcaattttaattttc

SEQ ID NO: 1613127 - DNA, 15 bp, Homo sapiens
ctcaattttaatttt

SEQ ID NO: 1613128 - DNA, 15 bp, Homo sapiens
tctcaattttaattt

SEQ ID NO: 1613129 - DNA, 15 bp, Homo sapiens
ttctcaattttaatt

SEQ ID NO: 1613130 - DNA, 15 bp, Homo sapiens
tttctcaattttaat

SEQ ID NO: 1613131 - DNA, 15 bp, Homo sapiens
atttctcaattttaa

SEQ ID NO: 1613132 - DNA, 15 bp, Homo sapiens
catttctcaatttta

SEQ ID NO: 1613133 - DNA, 15 bp, Homo sapiens
ccatttctcaatttt

SEQ ID NO: 1613134 - DNA, 15 bp, Homo sapiens
tccatttctcaattt

SEQ ID NO: 1613135 - DNA, 15 bp, Homo sapiens
gtccatttctcaatt

SEQ ID NO: 1613136 - DNA, 15 bp, Homo sapiens
agtccatttctcaat

SEQ ID NO: 1613137 - DNA, 15 bp, Homo sapiens
tagtccatttctcaa

SEQ ID NO: 1613138 - DNA, 15 bp, Homo sapiens
ctagtccatttctca

SEQ ID NO: 1613139 - DNA, 15 bp, Homo sapiens
cctagtccatttctc

SEQ ID NO: 1613140 - DNA, 15 bp, Homo sapiens
ccctagtccatttct

SEQ ID NO: 1613141 - DNA, 15 bp, Homo sapiens
accctagtccatttc

SEQ ID NO: 1613142 - DNA, 15 bp, Homo sapiens
caccctagtccattt

SEQ ID NO: 1613143 - DNA, 15 bp, Homo sapiens
ccaccctagtccatt

SEQ ID NO: 1613144 - DNA, 15 bp, Homo sapiens
gccaccctagtccat

SEQ ID NO: 1613145 - DNA, 15 bp, Homo sapiens
agccaccctagtcca

SEQ ID NO: 1613146 - DNA, 15 bp, Homo sapiens
gagccaccctagtcc

SEQ ID NO: 1613147 - DNA, 15 bp, Homo sapiens
tgagccaccctagtc

SEQ ID NO: 1613148 - DNA, 15 bp, Homo sapiens
gtgagccaccctagt

SEQ ID NO: 1613149 - DNA, 15 bp, Homo sapiens
cgtgagccaccctag

SEQ ID NO: 1613150 - DNA, 15 bp, Homo sapiens
gcgtgagccacccta

SEQ ID NO: 1613151 - DNA, 15 bp, Homo sapiens
ggcgtgagccaccct

SEQ ID NO: 1613152 - DNA, 15 bp, Homo sapiens
aggcgtgagccaccc

SEQ ID NO: 1613153 - DNA, 15 bp, Homo sapiens
gttgggactacaggc

SEQ ID NO: 1613154 - DNA, 15 bp, Homo sapiens
tgttgggactacagg

SEQ ID NO: 1613155 - DNA, 15 bp, Homo sapiens
gtgttgggactacag

SEQ ID NO: 1613156 - DNA, 15 bp, Homo sapiens
agtgttgggactaca

SEQ ID NO: 1613157 - DNA, 15 bp, Homo sapiens
aagtgttgggactac

SEQ ID NO: 1613158 - DNA, 15 bp, Homo sapiens
aaagtgttgggacta

SEQ ID NO: 1613159 - DNA, 15 bp, Homo sapiens
caaagtgttgggact

SEQ ID NO: 1613160 - DNA, 15 bp, Homo sapiens
ccaaagtgttgggac

SEQ ID NO: 1613161 - DNA, 15 bp, Homo sapiens
tccaaagtgttggga

SEQ ID NO: 1613162 - DNA, 15 bp, Homo sapiens
ttccaaagtgttggg

SEQ ID NO: 1613163 - DNA, 15 bp, Homo sapiens
cttccaaagtgttgg

SEQ ID NO: 1613164 - DNA, 15 bp, Homo sapiens
ccttccaaagtgttg

SEQ ID NO: 1613165 - DNA, 15 bp, Homo sapiens
gccttccaaagtgtt

SEQ ID NO: 1613166 - DNA, 15 bp, Homo sapiens
ggccttccaaagtgt

SEQ ID NO: 1613167 - DNA, 15 bp, Homo sapiens
tggccttccaaagtg

SEQ ID NO: 1613168 - DNA, 15 bp, Homo sapiens
ttggccttccaaagt

SEQ ID NO: 1613169 - DNA, 15 bp, Homo sapiens
cttggccttccaaag

SEQ ID NO: 1613170 - DNA, 15 bp, Homo sapiens
ccttggccttccaaa

SEQ ID NO: 1613171 - DNA, 15 bp, Homo sapiens
accttggccttccaa

SEQ ID NO: 1613172 - DNA, 15 bp, Homo sapiens
caccttggccttcca

SEQ ID NO: 1613173 - DNA, 15 bp, Homo sapiens
ccaccttggccttcc

SEQ ID NO: 1613174 - DNA, 15 bp, Homo sapiens
cccaccttggccttc

SEQ ID NO: 1613175 - DNA, 15 bp, Homo sapiens
gcccaccttggcctt

SEQ ID NO: 1613176 - DNA, 15 bp, Homo sapiens
gctcaagtgatccgc

SEQ ID NO: 1613177 - DNA, 15 bp, Homo sapiens
ggctcaagtgatccg

SEQ ID NO: 1613178 - DNA, 15 bp, Homo sapiens
aggctcaagtgatcc

SEQ ID NO: 1613179 - DNA, 15 bp, Homo sapiens
taggctcaagtgatc

SEQ ID NO: 1613180 - DNA, 15 bp, Homo sapiens
ctaggctcaagtgat

SEQ ID NO: 1613181 - DNA, 15 bp, Homo sapiens
cctaggctcaagtga

SEQ ID NO: 1613182 - DNA, 15 bp, Homo sapiens
tcctaggctcaagtg

SEQ ID NO: 1613183 - DNA, 15 bp, Homo sapiens
ctcctaggctcaagt

SEQ ID NO: 1613184 - DNA, 15 bp, Homo sapiens
actcctaggctcaag

SEQ ID NO: 1613185 - DNA, 15 bp, Homo sapiens
aactcctaggctcaa

SEQ ID NO: 1613186 - DNA, 15 bp, Homo sapiens
gaactcctaggctca

SEQ ID NO: 1613187 - DNA, 15 bp, Homo sapiens
cgaactcctaggctc

SEQ ID NO: 1613188 - DNA, 15 bp, Homo sapiens
tcgaactcctaggct

SEQ ID NO: 1613189 - DNA, 15 bp, Homo sapiens
ctcgaactcctaggc

SEQ ID NO: 1613190 - DNA, 15 bp, Homo sapiens
cctcgaactcctagg

SEQ ID NO: 1613191 - DNA, 15 bp, Homo sapiens
gcctcgaactcctag

SEQ ID NO: 1613192 - DNA, 15 bp, Homo sapiens
ggcctcgaactccta

SEQ ID NO: 1613193 - DNA, 15 bp, Homo sapiens
tggcctcgaactcct

SEQ ID NO: 1613194 - DNA, 15 bp, Homo sapiens
ctggcctcgaactcc

SEQ ID NO: 1613195 - DNA, 15 bp, Homo sapiens
gctggcctcgaactc

SEQ ID NO: 1613196 - DNA, 15 bp, Homo sapiens
ggctggcctcgaact

SEQ ID NO: 1613197 - DNA, 15 bp, Homo sapiens
tggctggcctcgaac

SEQ ID NO: 1613198 - DNA, 15 bp, Homo sapiens
atggctggcctcgaa

SEQ ID NO: 1613199 - DNA, 15 bp, Homo sapiens
catggctggcctcga

SEQ ID NO: 1613200 - DNA, 15 bp, Homo sapiens
ccatggctggcctcg

SEQ ID NO: 1613201 - DNA, 15 bp, Homo sapiens
cccatggctggcctc

SEQ ID NO: 1613202 - DNA, 15 bp, Homo sapiens
ccccatggctggcct

SEQ ID NO: 1613203 - DNA, 15 bp, Homo sapiens
tccccatggctggcc

SEQ ID NO: 1613204 - DNA, 15 bp, Homo sapiens
ctccccatggctggc

SEQ ID NO: 1613205 - DNA, 15 bp, Homo sapiens
tctccccatggctgg

SEQ ID NO: 1613206 - DNA, 15 bp, Homo sapiens
gtctccccatggctg

SEQ ID NO: 1613207 - DNA, 15 bp, Homo sapiens
agtctccccatggct

SEQ ID NO: 1613208 - DNA, 15 bp, Homo sapiens
gagtctccccatggc

SEQ ID NO: 1613209 - DNA, 15 bp, Homo sapiens
agagtctccccatgg

SEQ ID NO: 1613210 - DNA, 15 bp, Homo sapiens
cagagtctccccatg

SEQ ID NO: 1613211 - DNA, 15 bp, Homo sapiens
acagagtctccccat

SEQ ID NO: 1613212 - DNA, 15 bp, Homo sapiens
gacagagtctcccca

SEQ ID NO: 1613213 - DNA, 15 bp, Homo sapiens
agacagagtctcccc

SEQ ID NO: 1613214 - DNA, 15 bp, Homo sapiens
gagacagagtctccc

SEQ ID NO: 1613215 - DNA, 15 bp, Homo sapiens
agagacagagtctcc

SEQ ID NO: 1613216 - DNA, 15 bp, Homo sapiens
atttttgtagagaca

SEQ ID NO: 1613217 - DNA, 15 bp, Homo sapiens
tatttttgtagagac

SEQ ID NO: 1613218 - DNA, 15 bp, Homo sapiens
ggtatttttgtagag

SEQ ID NO: 1613219 - DNA, 15 bp, Homo sapiens
tggtatttttgtaga

SEQ ID NO: 1613220 - DNA, 15 bp, Homo sapiens
ttggtatttttgtag

SEQ ID NO: 1613221 - DNA, 15 bp, Homo sapiens
tttggtatttttgta

SEQ ID NO: 1613222 - DNA, 15 bp, Homo sapiens
ttttggtatttttgt

SEQ ID NO: 1613223 - DNA, 15 bp, Homo sapiens
attttggtatttttg

SEQ ID NO: 1613224 - DNA, 15 bp, Homo sapiens
aattttggtattttt

SEQ ID NO: 1613225 - DNA, 15 bp, Homo sapiens
taattttggtatttt

SEQ ID NO: 1613226 - DNA, 15 bp, Homo sapiens
gtaattttggtattt

SEQ ID NO: 1613227 - DNA, 15 bp, Homo sapiens
ggtaattttggtatt

SEQ ID NO: 1613228 - DNA, 15 bp, Homo sapiens
gggtaattttggtat

SEQ ID NO: 1613229 - DNA, 15 bp, Homo sapiens
tgggtaattttggta

SEQ ID NO: 1613230 - DNA, 15 bp, Homo sapiens
ctgggtaattttggt

SEQ ID NO: 1613231 - DNA, 15 bp, Homo sapiens
cctgggtaattttgg

SEQ ID NO: 1613232 - DNA, 15 bp, Homo sapiens
gcctgggtaattttg

SEQ ID NO: 1613233 - DNA, 15 bp, Homo sapiens
tgcctgggtaatttt

SEQ ID NO: 1613234 - DNA, 15 bp, Homo sapiens
atgcctgggtaattt

SEQ ID NO: 1613235 - DNA, 15 bp, Homo sapiens
aatgcctgggtaatt

SEQ ID NO: 1613236 - DNA, 15 bp, Homo sapiens
caatgcctgggtaat

SEQ ID NO: 1613237 - DNA, 15 bp, Homo sapiens
acaatgcctgggtaa

SEQ ID NO: 1613238 - DNA, 15 bp, Homo sapiens
cacaatgcctgggta

SEQ ID NO: 1613239 - DNA, 15 bp, Homo sapiens
ccacaatgcctgggt

SEQ ID NO: 1613240 - DNA, 15 bp, Homo sapiens
accacaatgcctggg

SEQ ID NO: 1613241 - DNA, 15 bp, Homo sapiens
caccacaatgcctgg

SEQ ID NO: 1613242 - DNA, 15 bp, Homo sapiens
acaccacaatgcctg

SEQ ID NO: 1613243 - DNA, 15 bp, Homo sapiens
cacaccacaatgcct

SEQ ID NO: 1613244 - DNA, 15 bp, Homo sapiens
tcacaccacaatgcc

SEQ ID NO: 1613245 - DNA, 15 bp, Homo sapiens
ttcacaccacaatgc

SEQ ID NO: 1613246 - DNA, 15 bp, Homo sapiens
gttcacaccacaatg

SEQ ID NO: 1613247 - DNA, 15 bp, Homo sapiens
ggttcacaccacaat

SEQ ID NO: 1613248 - DNA, 15 bp, Homo sapiens
aggttcacaccacaa

SEQ ID NO: 1613249 - DNA, 15 bp, Homo sapiens
caggttcacaccaca

SEQ ID NO: 1613250 - DNA, 15 bp, Homo sapiens
acaggttcacaccac

SEQ ID NO: 1613251 - DNA, 15 bp, Homo sapiens
aacaggttcacacca

SEQ ID NO: 1613252 - DNA, 15 bp, Homo sapiens
caacaggttcacacc

SEQ ID NO: 1613253 - DNA, 15 bp, Homo sapiens
acaacaggttcacac

SEQ ID NO: 1613254 - DNA, 15 bp, Homo sapiens
aacaacaggttcaca

SEQ ID NO: 1613255 - DNA, 15 bp, Homo sapiens
gaacaacaggttcac

SEQ ID NO: 1613256 - DNA, 15 bp, Homo sapiens
ggaacaacaggttca

SEQ ID NO: 1613257 - DNA, 15 bp, Homo sapiens
tggaacaacaggttc

SEQ ID NO: 1613258 - DNA, 15 bp, Homo sapiens
ttggaacaacaggtt

SEQ ID NO: 1613259 - DNA, 15 bp, Homo sapiens
gttggaacaacaggt

SEQ ID NO: 1613260 - DNA, 15 bp, Homo sapiens
agttggaacaacagg

SEQ ID NO: 1613261 - DNA, 15 bp, Homo sapiens
tagttggaacaacag

SEQ ID NO: 1613262 - DNA, 15 bp, Homo sapiens
gtagttggaacaaca

SEQ ID NO: 1613263 - DNA, 15 bp, Homo sapiens
agtagttggaacaac

SEQ ID NO: 1613264 - DNA, 15 bp, Homo sapiens
gagtagttggaacaa

SEQ ID NO: 1613265 - DNA, 15 bp, Homo sapiens
tgagtagttggaaca

SEQ ID NO: 1613266 - DNA, 15 bp, Homo sapiens
ttgagtagttggaac

SEQ ID NO: 1613267 - DNA, 15 bp, Homo sapiens
cttgagtagttggaa

SEQ ID NO: 1613268 - DNA, 15 bp, Homo sapiens
tcttgagtagttgga

SEQ ID NO: 1613269 - DNA, 15 bp, Homo sapiens
ctcttgagtagttgg

SEQ ID NO: 1613270 - DNA, 15 bp, Homo sapiens
cctcttgagtagttg

SEQ ID NO: 1613271 - DNA, 15 bp, Homo sapiens
gcctcttgagtagtt

SEQ ID NO: 1613272 - DNA, 15 bp, Homo sapiens
agcctcttgagtagt

SEQ ID NO: 1613273 - DNA, 15 bp, Homo sapiens
cagcctcttgagtag

SEQ ID NO: 1613274 - DNA, 15 bp, Homo sapiens
tcagcctcttgagta

SEQ ID NO: 1613275 - DNA, 15 bp, Homo sapiens
ctcagcctcttgagt

SEQ ID NO: 1613276 - DNA, 15 bp, Homo sapiens
cctcagcctcttgag

SEQ ID NO: 1613277 - DNA, 15 bp, Homo sapiens
gccatcctcccacct

SEQ ID NO: 1613278 - DNA, 15 bp, Homo sapiens
agccatcctcccacc

SEQ ID NO: 1613279 - DNA, 15 bp, Homo sapiens
aagccatcctcccac

SEQ ID NO: 1613280 - DNA, 15 bp, Homo sapiens
caagccatcctccca

SEQ ID NO: 1613281 - DNA, 15 bp, Homo sapiens
tcaagccatcctccc

SEQ ID NO: 1613282 - DNA, 15 bp, Homo sapiens
ctcaagccatcctcc

SEQ ID NO: 1613283 - DNA, 15 bp, Homo sapiens
actcaagccatcctc

SEQ ID NO: 1613284 - DNA, 15 bp, Homo sapiens
gactcaagccatcct

SEQ ID NO: 1613285 - DNA, 15 bp, Homo sapiens
ggactcaagccatcc

SEQ ID NO: 1613286 - DNA, 15 bp, Homo sapiens
tggactcaagccatc

SEQ ID NO: 1613287 - DNA, 15 bp, Homo sapiens
ctggactcaagccat

SEQ ID NO: 1613288 - DNA, 15 bp, Homo sapiens
cctggactcaagcca

SEQ ID NO: 1613289 - DNA, 15 bp, Homo sapiens
cctcctggactcaag

SEQ ID NO: 1613290 - DNA, 15 bp, Homo sapiens
gcctcctggactcaa

SEQ ID NO: 1613291 - DNA, 15 bp, Homo sapiens
tgcctcctggactca

SEQ ID NO: 1613292 - DNA, 15 bp, Homo sapiens
ctgcctcctggactc

SEQ ID NO: 1613293 - DNA, 15 bp, Homo sapiens
tctgcctcctggact

SEQ ID NO: 1613294 - DNA, 15 bp, Homo sapiens
ctctgcctcctggac

SEQ ID NO: 1613295 - DNA, 15 bp, Homo sapiens
cctctgcctcctgga

SEQ ID NO: 1613296 - DNA, 15 bp, Homo sapiens
tactgcaacctctgc

SEQ ID NO: 1613297 - DNA, 15 bp, Homo sapiens
agcttactgcaacct

SEQ ID NO: 1613298 - DNA, 15 bp, Homo sapiens
cagcttactgcaacc

SEQ ID NO: 1613299 - DNA, 15 bp, Homo sapiens
tcagcttactgcaac

SEQ ID NO: 1613300 - DNA, 15 bp, Homo sapiens
ctcagcttactgcaa

SEQ ID NO: 1613301 - DNA, 15 bp, Homo sapiens
tctcagcttactgca

SEQ ID NO: 1613302 - DNA, 15 bp, Homo sapiens
atctcagcttactgc

SEQ ID NO: 1613303 - DNA, 15 bp, Homo sapiens
catctcagcttactg

SEQ ID NO: 1613304 - DNA, 15 bp, Homo sapiens
ccatctcagcttact

SEQ ID NO: 1613305 - DNA, 15 bp, Homo sapiens
tccatctcagcttac

SEQ ID NO: 1613306 - DNA, 15 bp, Homo sapiens
ttccatctcagctta

SEQ ID NO: 1613307 - DNA, 15 bp, Homo sapiens
attccatctcagctt

SEQ ID NO: 1613308 - DNA, 15 bp, Homo sapiens
gattccatctcagct

SEQ ID NO: 1613309 - DNA, 15 bp, Homo sapiens
tgattccatctcagc

SEQ ID NO: 1613310 - DNA, 15 bp, Homo sapiens
gtgattccatctcag

SEQ ID NO: 1613311 - DNA, 15 bp, Homo sapiens
agtgattccatctca

SEQ ID NO: 1613312 - DNA, 15 bp, Homo sapiens
tagtgattccatctc

SEQ ID NO: 1613313 - DNA, 15 bp, Homo sapiens
gtagtgattccatct

SEQ ID NO: 1613314 - DNA, 15 bp, Homo sapiens
tgtagtgattccatc

SEQ ID NO: 1613315 - DNA, 15 bp, Homo sapiens
gtgtagtgattccat

SEQ ID NO: 1613316 - DNA, 15 bp, Homo sapiens
agtgtagtgattcca

SEQ ID NO: 1613317 - DNA, 15 bp, Homo sapiens
gagtgtagtgattcc

SEQ ID NO: 1613318 - DNA, 15 bp, Homo sapiens
ggagtgtagtgattc

SEQ ID NO: 1613319 - DNA, 15 bp, Homo sapiens
tggagtgtagtgatt

SEQ ID NO: 1613320 - DNA, 15 bp, Homo sapiens
ctggagtgtagtgat

SEQ ID NO: 1613321 - DNA, 15 bp, Homo sapiens
gctggagtgtagtga

SEQ ID NO: 1613322 - DNA, 15 bp, Homo sapiens
ggctggagtgtagtg

SEQ ID NO: 1613323 - DNA, 15 bp, Homo sapiens
aggctggagtgtagt

SEQ ID NO: 1613324 - DNA, 15 bp, Homo sapiens
caggctggagtgtag

SEQ ID NO: 1613325 - DNA, 15 bp, Homo sapiens
ccaggctggagtgta

SEQ ID NO: 1613326 - DNA, 15 bp, Homo sapiens
cccaggctggagtgt

SEQ ID NO: 1613327 - DNA, 15 bp, Homo sapiens
atcacccaggctgga

SEQ ID NO: 1613328 - DNA, 15 bp, Homo sapiens
catcacccaggctgg

SEQ ID NO: 1613329 - DNA, 15 bp, Homo sapiens
gctccatcacccagg

SEQ ID NO: 1613330 - DNA, 15 bp, Homo sapiens
tgctccatcacccag

SEQ ID NO: 1613331 - DNA, 15 bp, Homo sapiens
ttgctccatcaccca

SEQ ID NO: 1613332 - DNA, 15 bp, Homo sapiens
cttgctccatcaccc

SEQ ID NO: 1613333 - DNA, 15 bp, Homo sapiens
tcttgctccatcacc

SEQ ID NO: 1613334 - DNA, 15 bp, Homo sapiens
gtcttgctccatcac

SEQ ID NO: 1613335 - DNA, 15 bp, Homo sapiens
agtcttgctccatca

SEQ ID NO: 1613336 - DNA, 15 bp, Homo sapiens
gagtcttgctccatc

SEQ ID NO: 1613337 - DNA, 15 bp, Homo sapiens
agagtcttgctccat

SEQ ID NO: 1613338 - DNA, 15 bp, Homo sapiens
tctttttcttttttg

SEQ ID NO: 1613339 - DNA, 15 bp, Homo sapiens
ttctttttctttttt

SEQ ID NO: 1613340 - DNA, 15 bp, Homo sapiens
atttttctttttctt

SEQ ID NO: 1613341 - DNA, 15 bp, Homo sapiens
aatttttctttttct

SEQ ID NO: 1613342 - DNA, 15 bp, Homo sapiens
caatttttctttttc

SEQ ID NO: 1613343 - DNA, 15 bp, Homo sapiens
tcaatttttcttttt

SEQ ID NO: 1613344 - DNA, 15 bp, Homo sapiens
ctcaatttttctttt

SEQ ID NO: 1613345 - DNA, 15 bp, Homo sapiens
tctcaatttttcttt

SEQ ID NO: 1613346 - DNA, 15 bp, Homo sapiens
ttctcaatttttctt

SEQ ID NO: 1613347 - DNA, 15 bp, Homo sapiens
tttctcaatttttct

SEQ ID NO: 1613348 - DNA, 15 bp, Homo sapiens
atttctcaatttttc

SEQ ID NO: 1613349 - DNA, 15 bp, Homo sapiens
catttctcaattttt

SEQ ID NO: 1613350 - DNA, 15 bp, Homo sapiens
gcatttctcaatttt

SEQ ID NO: 1613351 - DNA, 15 bp, Homo sapiens
tgcatttctcaattt

SEQ ID NO: 1613352 - DNA, 15 bp, Homo sapiens
ctgcatttctcaatt

SEQ ID NO: 1613353 - DNA, 15 bp, Homo sapiens
tctgcatttctcaat

SEQ ID NO: 1613354 - DNA, 15 bp, Homo sapiens
ttctgcatttctcaa

SEQ ID NO: 1613355 - DNA, 15 bp, Homo sapiens
gttctgcatttctca

SEQ ID NO: 1613356 - DNA, 15 bp, Homo sapiens
tgttctgcatttctc

SEQ ID NO: 1613357 - DNA, 15 bp, Homo sapiens
ttgttctgcatttct

SEQ ID NO: 1613358 - DNA, 15 bp, Homo sapiens
attgttctgcatttc

SEQ ID NO: 1613359 - DNA, 15 bp, Homo sapiens
tattgttctgcattt

SEQ ID NO: 1613360 - DNA, 15 bp, Homo sapiens
ctattgttctgcatt

SEQ ID NO: 1613361 - DNA, 15 bp, Homo sapiens
cctattgttctgcat

SEQ ID NO: 1613362 - DNA, 15 bp, Homo sapiens
tcctattgttctgca

SEQ ID NO: 1613363 - DNA, 15 bp, Homo sapiens
ttcctattgttctgc

SEQ ID NO: 1613364 - DNA, 15 bp, Homo sapiens
attcctattgttctg

SEQ ID NO: 1613365 - DNA, 15 bp, Homo sapiens
tattcctattgttct

SEQ ID NO: 1613366 - DNA, 15 bp, Homo sapiens
ttattcctattgttc

SEQ ID NO: 1613367 - DNA, 15 bp, Homo sapiens
gttattcctattgtt

SEQ ID NO: 1613368 - DNA, 15 bp, Homo sapiens
ggttattcctattgt

SEQ ID NO: 1613369 - DNA, 15 bp, Homo sapiens
aggttattcctattg

SEQ ID NO: 1613370 - DNA, 15 bp, Homo sapiens
caggttattcctatt

SEQ ID NO: 1613371 - DNA, 15 bp, Homo sapiens
gcaggttattcctat

SEQ ID NO: 1613372 - DNA, 15 bp, Homo sapiens
tgcaggttattccta

SEQ ID NO: 1613373 - DNA, 15 bp, Homo sapiens
ctgcaggttattcct

SEQ ID NO: 1613374 - DNA, 15 bp, Homo sapiens
cctgcaggttattcc

SEQ ID NO: 1613375 - DNA, 15 bp, Homo sapiens
acctgcaggttattc

SEQ ID NO: 1613376 - DNA, 15 bp, Homo sapiens
cacctgcaggttatt

SEQ ID NO: 1613377 - DNA, 15 bp, Homo sapiens
tcacctgcaggttat

SEQ ID NO: 1613378 - DNA, 15 bp, Homo sapiens
ctcacctgcaggtta

SEQ ID NO: 1613379 - DNA, 15 bp, Homo sapiens
actcacctgcaggtt

SEQ ID NO: 1613380 - DNA, 15 bp, Homo sapiens
cactcacctgcaggt

SEQ ID NO: 1613381 - DNA, 15 bp, Homo sapiens
gcactcacctgcagg

SEQ ID NO: 1613382 - DNA, 15 bp, Homo sapiens
cgcactcacctgcag

SEQ ID NO: 1613383 - DNA, 15 bp, Homo sapiens
tcgcactcacctgca

SEQ ID NO: 1613384 - DNA, 15 bp, Homo sapiens
ttcgcactcacctgc

SEQ ID NO: 1613385 - DNA, 15 bp, Homo sapiens
tttcgcactcacctg

SEQ ID NO: 1613386 - DNA, 15 bp, Homo sapiens
ctttcgcactcacct

SEQ ID NO: 1613387 - DNA, 15 bp, Homo sapiens
tctttcgcactcacc

SEQ ID NO: 1613388 - DNA, 15 bp, Homo sapiens
ctctttcgcactcac

SEQ ID NO: 1613389 - DNA, 15 bp, Homo sapiens
cctctttcgcactca

SEQ ID NO: 1613390 - DNA, 15 bp, Homo sapiens
ccctctttcgcactc

SEQ ID NO: 1613391 - DNA, 15 bp, Homo sapiens
accctctttcgcact

SEQ ID NO: 1613392 - DNA, 15 bp, Homo sapiens
taccctctttcgcac

SEQ ID NO: 1613393 - DNA, 15 bp, Homo sapiens
ctaccctctttcgca

SEQ ID NO: 1613394 - DNA, 15 bp, Homo sapiens
tctaccctctttcgc

SEQ ID NO: 1613395 - DNA, 15 bp, Homo sapiens
ttctaccctctttcg

SEQ ID NO: 1613396 - DNA, 15 bp, Homo sapiens
attctaccctctttc

SEQ ID NO: 1613397 - DNA, 15 bp, Homo sapiens
aattctaccctcttt

SEQ ID NO: 1613398 - DNA, 15 bp, Homo sapiens
gaattctaccctctt

SEQ ID NO: 1613399 - DNA, 15 bp, Homo sapiens
ggaattctaccctct

SEQ ID NO: 1613400 - DNA, 15 bp, Homo sapiens
tggaattctaccctc

SEQ ID NO: 1613401 - DNA, 15 bp, Homo sapiens
ttggaattctaccct

SEQ ID NO: 1613402 - DNA, 15 bp, Homo sapiens
cttggaattctaccc

SEQ ID NO: 1613403 - DNA, 15 bp, Homo sapiens
ccttggaattctacc

SEQ ID NO: 1613404 - DNA, 15 bp, Homo sapiens
cccttggaattctac

SEQ ID NO: 1613405 - DNA, 15 bp, Homo sapiens
tcccttggaattcta

SEQ ID NO: 1613406 - DNA, 15 bp, Homo sapiens
gtcccttggaattct

SEQ ID NO: 1613407 - DNA, 15 bp, Homo sapiens
tgtcccttggaattc

SEQ ID NO: 1613408 - DNA, 15 bp, Homo sapiens
ctgtcccttggaatt

SEQ ID NO: 1613409 - DNA, 15 bp, Homo sapiens
tctgtcccttggaat

SEQ ID NO: 1613410 - DNA, 15 bp, Homo sapiens
ctctgtcccttggaa

SEQ ID NO: 1613411 - DNA, 15 bp, Homo sapiens
gctctgtcccttgga

SEQ ID NO: 1613412 - DNA, 15 bp, Homo sapiens
agctctgtcccttgg

SEQ ID NO: 1613413 - DNA, 15 bp, Homo sapiens
tagctctgtcccttg

SEQ ID NO: 1613414 - DNA, 15 bp, Homo sapiens
ctagctctgtccctt

SEQ ID NO: 1613415 - DNA, 15 bp, Homo sapiens
tctagctctgtccct

SEQ ID NO: 1613416 - DNA, 15 bp, Homo sapiens
gtctagctctgtccc

SEQ ID NO: 1613417 - DNA, 15 bp, Homo sapiens
ggtctagctctgtcc

SEQ ID NO: 1613418 - DNA, 15 bp, Homo sapiens
aggtctagctctgtc

SEQ ID NO: 1613419 - DNA, 15 bp, Homo sapiens
taggtctagctctgt

SEQ ID NO: 1613420 - DNA, 15 bp, Homo sapiens
ttaggtctagctctg

SEQ ID NO: 1613421 - DNA, 15 bp, Homo sapiens
tttaggtctagctct

SEQ ID NO: 1613422 - DNA, 15 bp, Homo sapiens
ctttaggtctagctc

SEQ ID NO: 1613423 - DNA, 15 bp, Homo sapiens
actttaggtctagct

SEQ ID NO: 1613424 - DNA, 15 bp, Homo sapiens
tactttaggtctagc

SEQ ID NO: 1613425 - DNA, 15 bp, Homo sapiens
atactttaggtctag

SEQ ID NO: 1613426 - DNA, 15 bp, Homo sapiens
catactttaggtcta

SEQ ID NO: 1613427 - DNA, 15 bp, Homo sapiens
ccatactttaggtct

SEQ ID NO: 1613428 - DNA, 15 bp, Homo sapiens
tccatactttaggtc

SEQ ID NO: 1613429 - DNA, 15 bp, Homo sapiens
ttccatactttaggt

SEQ ID NO: 1613430 - DNA, 15 bp, Homo sapiens
cttccatactttagg

SEQ ID NO: 1613431 - DNA, 15 bp, Homo sapiens
acttccatactttag

SEQ ID NO: 1613432 - DNA, 15 bp, Homo sapiens
aacttccatacttta

SEQ ID NO: 1613433 - DNA, 15 bp, Homo sapiens
taacttccatacttt

SEQ ID NO: 1613434 - DNA, 15 bp, Homo sapiens
gtaacttccatactt

SEQ ID NO: 1613435 - DNA, 15 bp, Homo sapiens
tgtaacttccatact

SEQ ID NO: 1613436 - DNA, 15 bp, Homo sapiens
ctgtaacttccatac

SEQ ID NO: 1613437 - DNA, 15 bp, Homo sapiens
cctgtaacttccata

SEQ ID NO: 1613438 - DNA, 15 bp, Homo sapiens
ccctgtaacttccat

SEQ ID NO: 1613439 - DNA, 15 bp, Homo sapiens
tccctgtaacttcca

SEQ ID NO: 1613440 - DNA, 15 bp, Homo sapiens
ctccctgtaacttcc

SEQ ID NO: 1613441 - DNA, 15 bp, Homo sapiens
cctccctgtaacttc

SEQ ID NO: 1613442 - DNA, 15 bp, Homo sapiens
gcctccctgtaactt

SEQ ID NO: 1613443 - DNA, 15 bp, Homo sapiens
tgcctccctgtaact

SEQ ID NO: 1613444 - DNA, 15 bp, Homo sapiens
ttgcctccctgtaac

SEQ ID NO: 1613445 - DNA, 15 bp, Homo sapiens
cttgcctccctgtaa

SEQ ID NO: 1613446 - DNA, 15 bp, Homo sapiens
gcttgcctccctgta

SEQ ID NO: 1613447 - DNA, 15 bp, Homo sapiens
agcttgcctccctgt

SEQ ID NO: 1613448 - DNA, 15 bp, Homo sapiens
cagcttgcctccctg

SEQ ID NO: 1613449 - DNA, 15 bp, Homo sapiens
acagcttgcctccct

SEQ ID NO: 1613450 - DNA, 15 bp, Homo sapiens
cacagcttgcctccc

SEQ ID NO: 1613451 - DNA, 15 bp, Homo sapiens
ccacagcttgcctcc

SEQ ID NO: 1613452 - DNA, 15 bp, Homo sapiens
accacagcttgcctc

SEQ ID NO: 1613453 - DNA, 15 bp, Homo sapiens
caccacagcttgcct

SEQ ID NO: 1613454 - DNA, 15 bp, Homo sapiens
gcaccacagcttgcc

SEQ ID NO: 1613455 - DNA, 15 bp, Homo sapiens
cgcaccacagcttgc

SEQ ID NO: 1613456 - DNA, 15 bp, Homo sapiens
tcgcaccacagcttg

SEQ ID NO: 1613457 - DNA, 15 bp, Homo sapiens
gtcgcaccacagctt

SEQ ID NO: 1613458 - DNA, 15 bp, Homo sapiens
tgtcgcaccacagct

SEQ ID NO: 1613459 - DNA, 15 bp, Homo sapiens
atgtcgcaccacagc

SEQ ID NO: 1613460 - DNA, 15 bp, Homo sapiens
aatgtcgcaccacag

SEQ ID NO: 1613461 - DNA, 15 bp, Homo sapiens
taatgtcgcaccaca

SEQ ID NO: 1613462 - DNA, 15 bp, Homo sapiens
ctaatgtcgcaccac

SEQ ID NO: 1613463 - DNA, 15 bp, Homo sapiens
cctaatgtcgcacca

SEQ ID NO: 1613464 - DNA, 15 bp, Homo sapiens
ccctaatgtcgcacc

SEQ ID NO: 1613465 - DNA, 15 bp, Homo sapiens
tccctaatgtcgcac

SEQ ID NO: 1613466 - DNA, 15 bp, Homo sapiens
ttccctaatgtcgca

SEQ ID NO: 1613467 - DNA, 15 bp, Homo sapiens
tttccctaatgtcgc

SEQ ID NO: 1613468 - DNA, 15 bp, Homo sapiens
ttttccctaatgtcg

SEQ ID NO: 1613469 - DNA, 15 bp, Homo sapiens
attttccctaatgtc

SEQ ID NO: 1613470 - DNA, 15 bp, Homo sapiens
tattttccctaatgt

SEQ ID NO: 1613471 - DNA, 15 bp, Homo sapiens
ctattttccctaatg

SEQ ID NO: 1613472 - DNA, 15 bp, Homo sapiens
gctattttccctaat

SEQ ID NO: 1613473 - DNA, 15 bp, Homo sapiens
tgctattttccctaa

SEQ ID NO: 1613474 - DNA, 15 bp, Homo sapiens
gtgctattttcccta

SEQ ID NO: 1613475 - DNA, 15 bp, Homo sapiens
agtgctattttccct

SEQ ID NO: 1613476 - DNA, 15 bp, Homo sapiens
tagtgctattttccc

SEQ ID NO: 1613477 - DNA, 15 bp, Homo sapiens
ttagtgctattttcc

SEQ ID NO: 1613478 - DNA, 15 bp, Homo sapiens
gttagtgctattttc

SEQ ID NO: 1613479 - DNA, 15 bp, Homo sapiens
agttagtgctatttt

SEQ ID NO: 1613480 - DNA, 15 bp, Homo sapiens
tagttagtgctattt

SEQ ID NO: 1613481 - DNA, 15 bp, Homo sapiens
ctagttagtgctatt

SEQ ID NO: 1613482 - DNA, 15 bp, Homo sapiens
tctagttagtgctat

SEQ ID NO: 1613483 - DNA, 15 bp, Homo sapiens
gtctagttagtgcta

SEQ ID NO: 1613484 - DNA, 15 bp, Homo sapiens
agtctagttagtgct

SEQ ID NO: 1613485 - DNA, 15 bp, Homo sapiens
cagtctagttagtgc

SEQ ID NO: 1613486 - DNA, 15 bp, Homo sapiens
tcagtctagttagtg

SEQ ID NO: 1613487 - DNA, 15 bp, Homo sapiens
gtcagtctagttagt

SEQ ID NO: 1613488 - DNA, 15 bp, Homo sapiens
cgtcagtctagttag

SEQ ID NO: 1613489 - DNA, 15 bp, Homo sapiens
tcgtcagtctagtta

SEQ ID NO: 1613490 - DNA, 15 bp, Homo sapiens
atcgtcagtctagtt

SEQ ID NO: 1613491 - DNA, 15 bp, Homo sapiens
catcgtcagtctagt

SEQ ID NO: 1613492 - DNA, 15 bp, Homo sapiens
acatcgtcagtctag

SEQ ID NO: 1613493 - DNA, 15 bp, Homo sapiens
aacatcgtcagtcta

SEQ ID NO: 1613494 - DNA, 15 bp, Homo sapiens
taacatcgtcagtct

SEQ ID NO: 1613495 - DNA, 15 bp, Homo sapiens
ataacatcgtcagtc

SEQ ID NO: 1613496 - DNA, 15 bp, Homo sapiens
tataacatcgtcagt

SEQ ID NO: 1613497 - DNA, 15 bp, Homo sapiens
gtataacatcgtcag

SEQ ID NO: 1613498 - DNA, 15 bp, Homo sapiens
tgtataacatcgtca

SEQ ID NO: 1613499 - DNA, 15 bp, Homo sapiens
ctgtataacatcgtc

SEQ ID NO: 1613500 - DNA, 15 bp, Homo sapiens
gctgtataacatcgt

SEQ ID NO: 1613501 - DNA, 15 bp, Homo sapiens
agctgtataacatcg

SEQ ID NO: 1613502 - DNA, 15 bp, Homo sapiens
cagctgtataacatc

SEQ ID NO: 1613503 - DNA, 15 bp, Homo sapiens
tcagctgtataacat

SEQ ID NO: 1613504 - DNA, 15 bp, Homo sapiens
ttcagctgtataaca

SEQ ID NO: 1613505 - DNA, 15 bp, Homo sapiens
tttcagctgtataac

SEQ ID NO: 1613506 - DNA, 15 bp, Homo sapiens
atttcagctgtataa

SEQ ID NO: 1613507 - DNA, 15 bp, Homo sapiens
aatttcagctgtata

SEQ ID NO: 1613508 - DNA, 15 bp, Homo sapiens
aaatttcagctgtat

SEQ ID NO: 1613509 - DNA, 15 bp, Homo sapiens
taaatttcagctgta

SEQ ID NO: 1613510 - DNA, 15 bp, Homo sapiens
ataaatttcagctgt

SEQ ID NO: 1613511 - DNA, 15 bp, Homo sapiens
aataaatttcagctg

SEQ ID NO: 1613512 - DNA, 15 bp, Homo sapiens
taataaatttcagct

SEQ ID NO: 1613513 - DNA, 15 bp, Homo sapiens
ttaataaatttcagc

SEQ ID NO: 1613514 - DNA, 15 bp, Homo sapiens
cttaataaatttcag

SEQ ID NO: 1613515 - DNA, 15 bp, Homo sapiens
gcttaataaatttca

SEQ ID NO: 1613516 - DNA, 15 bp, Homo sapiens
tgcttaataaatttc

SEQ ID NO: 1613517 - DNA, 15 bp, Homo sapiens
gtgcttaataaattt

SEQ ID NO: 1613518 - DNA, 15 bp, Homo sapiens
agtgcttaataaatt

SEQ ID NO: 1613519 - DNA, 15 bp, Homo sapiens
aagtgcttaataaat

SEQ ID NO: 1613520 - DNA, 15 bp, Homo sapiens
taagtgcttaataaa

SEQ ID NO: 1613521 - DNA, 15 bp, Homo sapiens
ataagtgcttaataa

SEQ ID NO: 1613522 - DNA, 15 bp, Homo sapiens
gataagtgcttaata

SEQ ID NO: 1613523 - DNA, 15 bp, Homo sapiens
tgataagtgcttaat

SEQ ID NO: 1613524 - DNA, 15 bp, Homo sapiens
ttgataagtgcttaa

SEQ ID NO: 1613525 - DNA, 15 bp, Homo sapiens
cttgataagtgctta

SEQ ID NO: 1613526 - DNA, 15 bp, Homo sapiens
gcttgataagtgctt

SEQ ID NO: 1613527 - DNA, 15 bp, Homo sapiens
tgcttgataagtgct

SEQ ID NO: 1613528 - DNA, 15 bp, Homo sapiens
ttgcttgataagtgc

SEQ ID NO: 1613529 - DNA, 15 bp, Homo sapiens
gttgcttgataagtg

SEQ ID NO: 1613530 - DNA, 15 bp, Homo sapiens
agttgcttgataagt

SEQ ID NO: 1613531 - DNA, 15 bp, Homo sapiens
aagttgcttgataag

SEQ ID NO: 1613532 - DNA, 15 bp, Homo sapiens
taagttgcttgataa

SEQ ID NO: 1613533 - DNA, 15 bp, Homo sapiens
ttaagttgcttgata

SEQ ID NO: 1613534 - DNA, 15 bp, Homo sapiens
tttaagttgcttgat

SEQ ID NO: 1613535 - DNA, 15 bp, Homo sapiens
atttaagttgcttga

SEQ ID NO: 1613536 - DNA, 15 bp, Homo sapiens
catttaagttgcttg

SEQ ID NO: 1613537 - DNA, 15 bp, Homo sapiens
acatttaagttgctt

SEQ ID NO: 1613538 - DNA, 15 bp, Homo sapiens
tacatttaagttgct

SEQ ID NO: 1613539 - DNA, 15 bp, Homo sapiens
ctacatttaagttgc

SEQ ID NO: 1613540 - DNA, 15 bp, Homo sapiens
gctacatttaagttg

SEQ ID NO: 1613541 - DNA, 15 bp, Homo sapiens
tgctacatttaagtt

SEQ ID NO: 1613542 - DNA, 15 bp, Homo sapiens
ctgctacatttaagt

SEQ ID NO: 1613543 - DNA, 15 bp, Homo sapiens
gctgctacatttaag

SEQ ID NO: 1613544 - DNA, 15 bp, Homo sapiens
agctgctacatttaa

SEQ ID NO: 1613545 - DNA, 15 bp, Homo sapiens
aagctgctacattta

SEQ ID NO: 1613546 - DNA, 15 bp, Homo sapiens
taagctgctacattt

SEQ ID NO: 1613547 - DNA, 15 bp, Homo sapiens
ataagctgctacatt

SEQ ID NO: 1613548 - DNA, 15 bp, Homo sapiens
aataagctgctacat

SEQ ID NO: 1613549 - DNA, 15 bp, Homo sapiens
caataagctgctaca

SEQ ID NO: 1613550 - DNA, 15 bp, Homo sapiens
ccaataagctgctac

SEQ ID NO: 1613551 - DNA, 15 bp, Homo sapiens
gccaataagctgcta

SEQ ID NO: 1613552 - DNA, 15 bp, Homo sapiens
agccaataagctgct

SEQ ID NO: 1613553 - DNA, 15 bp, Homo sapiens
cagccaataagctgc

SEQ ID NO: 1613554 - DNA, 15 bp, Homo sapiens
ccagccaataagctg

SEQ ID NO: 1613555 - DNA, 15 bp, Homo sapiens
cccagccaataagct

SEQ ID NO: 1613556 - DNA, 15 bp, Homo sapiens
acccagccaataagc

SEQ ID NO: 1613557 - DNA, 15 bp, Homo sapiens
cacccagccaataag

SEQ ID NO: 1613558 - DNA, 15 bp, Homo sapiens
gcacccagccaataa

SEQ ID NO: 1613559 - DNA, 15 bp, Homo sapiens
cgcacccagccaata

SEQ ID NO: 1613560 - DNA, 15 bp, Homo sapiens
ccgcacccagccaat

SEQ ID NO: 1613561 - DNA, 15 bp, Homo sapiens
tcaccgcacccagcc

SEQ ID NO: 1613562 - DNA, 15 bp, Homo sapiens
gtcaccgcacccagc

SEQ ID NO: 1613563 - DNA, 15 bp, Homo sapiens
agtcaccgcacccag

SEQ ID NO: 1613564 - DNA, 15 bp, Homo sapiens
gagtcaccgcaccca

SEQ ID NO: 1613565 - DNA, 15 bp, Homo sapiens
tgagtcaccgcaccc

SEQ ID NO: 1613566 - DNA, 15 bp, Homo sapiens
gtgagtcaccgcacc

SEQ ID NO: 1613567 - DNA, 15 bp, Homo sapiens
cgtgagtcaccgcac

SEQ ID NO: 1613568 - DNA, 15 bp, Homo sapiens
gcgtgagtcaccgca

SEQ ID NO: 1613569 - DNA, 15 bp, Homo sapiens
ggcgtgagtcaccgc

SEQ ID NO: 1613570 - DNA, 15 bp, Homo sapiens
aggcgtgagtcaccg

SEQ ID NO: 1613571 - DNA, 15 bp, Homo sapiens
caggcgtgagtcacc

SEQ ID NO: 1613572 - DNA, 15 bp, Homo sapiens
acaggcgtgagtcac

SEQ ID NO: 1613573 - DNA, 15 bp, Homo sapiens
aacaggcgtgagtca

SEQ ID NO: 1613574 - DNA, 15 bp, Homo sapiens
taacaggcgtgagtc

SEQ ID NO: 1613575 - DNA, 15 bp, Homo sapiens
ataacaggcgtgagt

SEQ ID NO: 1613576 - DNA, 15 bp, Homo sapiens
gataacaggcgtgag

SEQ ID NO: 1613577 - DNA, 15 bp, Homo sapiens
ggataacaggcgtga

SEQ ID NO: 1613578 - DNA, 15 bp, Homo sapiens
gggataacaggcgtg

SEQ ID NO: 1613579 - DNA, 15 bp, Homo sapiens
tgggataacaggcgt

SEQ ID NO: 1613580 - DNA, 15 bp, Homo sapiens
ctgggataacaggcg

SEQ ID NO: 1613581 - DNA, 15 bp, Homo sapiens
gccgcctcagcctcc

SEQ ID NO: 1613582 - DNA, 15 bp, Homo sapiens
agccgcctcagcctc

SEQ ID NO: 1613583 - DNA, 15 bp, Homo sapiens
cagccgcctcagcct

SEQ ID NO: 1613584 - DNA, 15 bp, Homo sapiens
ccagccgcctcagcc

SEQ ID NO: 1613585 - DNA, 15 bp, Homo sapiens
tccagccgcctcagc

SEQ ID NO: 1613586 - DNA, 15 bp, Homo sapiens
atccagccgcctcag

SEQ ID NO: 1613587 - DNA, 15 bp, Homo sapiens
gatccagccgcctca

SEQ ID NO: 1613588 - DNA, 15 bp, Homo sapiens
tgatccagccgcctc

SEQ ID NO: 1613589 - DNA, 15 bp, Homo sapiens
gtgatccagccgcct

SEQ ID NO: 1613590 - DNA, 15 bp, Homo sapiens
ggtgatccagccgcc

SEQ ID NO: 1613591 - DNA, 15 bp, Homo sapiens
aggtgatccagccgc

SEQ ID NO: 1613592 - DNA, 15 bp, Homo sapiens
caggtgatccagccg

SEQ ID NO: 1613593 - DNA, 15 bp, Homo sapiens
attcaccatgttggc

SEQ ID NO: 1613594 - DNA, 15 bp, Homo sapiens
gattcaccatgttgg

SEQ ID NO: 1613595 - DNA, 15 bp, Homo sapiens
ggattcaccatgttg

SEQ ID NO: 1613596 - DNA, 15 bp, Homo sapiens
gggattcaccatgtt

SEQ ID NO: 1613597 - DNA, 15 bp, Homo sapiens
tgggattcaccatgt

SEQ ID NO: 1613598 - DNA, 15 bp, Homo sapiens
ctgggattcaccatg

SEQ ID NO: 1613599 - DNA, 15 bp, Homo sapiens
actgggattcaccat

SEQ ID NO: 1613600 - DNA, 15 bp, Homo sapiens
gactgggattcacca

SEQ ID NO: 1613601 - DNA, 15 bp, Homo sapiens
agactgggattcacc

SEQ ID NO: 1613602 - DNA, 15 bp, Homo sapiens
gagactgggattcac

SEQ ID NO: 1613603 - DNA, 15 bp, Homo sapiens
agagactgggattca

SEQ ID NO: 1613604 - DNA, 15 bp, Homo sapiens
tagagactgggattc

SEQ ID NO: 1613605 - DNA, 15 bp, Homo sapiens
gtagagactgggatt

SEQ ID NO: 1613606 - DNA, 15 bp, Homo sapiens
agtagagactgggat

SEQ ID NO: 1613607 - DNA, 15 bp, Homo sapiens
tagtagagactggga

SEQ ID NO: 1613608 - DNA, 15 bp, Homo sapiens
cactacaggtgtgca

SEQ ID NO: 1613609 - DNA, 15 bp, Homo sapiens
gcactacaggtgtgc

SEQ ID NO: 1613610 - DNA, 15 bp, Homo sapiens
agcactacaggtgtg

SEQ ID NO: 1613611 - DNA, 15 bp, Homo sapiens
tagcactacaggtgt

SEQ ID NO: 1613612 - DNA, 15 bp, Homo sapiens
ctagcactacaggtg

SEQ ID NO: 1613613 - DNA, 15 bp, Homo sapiens
gctagcactacaggt

SEQ ID NO: 1613614 - DNA, 15 bp, Homo sapiens
agctagcactacagg

SEQ ID NO: 1613615 - DNA, 15 bp, Homo sapiens
tagctagcactacag

SEQ ID NO: 1613616 - DNA, 15 bp, Homo sapiens
gtagctagcactaca

SEQ ID NO: 1613617 - DNA, 15 bp, Homo sapiens
agtagctagcactac

SEQ ID NO: 1613618 - DNA, 15 bp, Homo sapiens
gagtagctagcacta

SEQ ID NO: 1613619 - DNA, 15 bp, Homo sapiens
tgagtagctagcact

SEQ ID NO: 1613620 - DNA, 15 bp, Homo sapiens
ctgagtagctagcac

SEQ ID NO: 1613621 - DNA, 15 bp, Homo sapiens
cctgagtagctagca

SEQ ID NO: 1613622 - DNA, 15 bp, Homo sapiens
tcctgagtagctagc

SEQ ID NO: 1613623 - DNA, 15 bp, Homo sapiens
tgtgattctcctgcc

SEQ ID NO: 1613624 - DNA, 15 bp, Homo sapiens
ttgtgattctcctgc

SEQ ID NO: 1613625 - DNA, 15 bp, Homo sapiens
cttgtgattctcctg

SEQ ID NO: 1613626 - DNA, 15 bp, Homo sapiens
tcttgtgattctcct

SEQ ID NO: 1613627 - DNA, 15 bp, Homo sapiens
ttcttgtgattctcc

SEQ ID NO: 1613628 - DNA, 15 bp, Homo sapiens
gttcttgtgattctc

SEQ ID NO: 1613629 - DNA, 15 bp, Homo sapiens
ggttcttgtgattct

SEQ ID NO: 1613630 - DNA, 15 bp, Homo sapiens
gggttcttgtgattc

SEQ ID NO: 1613631 - DNA, 15 bp, Homo sapiens
tgggttcttgtgatt

SEQ ID NO: 1613632 - DNA, 15 bp, Homo sapiens
ctgggttcttgtgat

SEQ ID NO: 1613633 - DNA, 15 bp, Homo sapiens
cctgggttcttgtga

SEQ ID NO: 1613634 - DNA, 15 bp, Homo sapiens
tcctgggttcttgtg

SEQ ID NO: 1613635 - DNA, 15 bp, Homo sapiens
ctcctgggttcttgt

SEQ ID NO: 1613636 - DNA, 15 bp, Homo sapiens
cctcctgggttcttg

SEQ ID NO: 1613637 - DNA, 15 bp, Homo sapiens
gcctcctgggttctt

SEQ ID NO: 1613638 - DNA, 15 bp, Homo sapiens
cgcctcctgggttct

SEQ ID NO: 1613639 - DNA, 15 bp, Homo sapiens
cctccgcctcctggg

SEQ ID NO: 1613640 - DNA, 15 bp, Homo sapiens
gcatcttggctcact

SEQ ID NO: 1613641 - DNA, 15 bp, Homo sapiens
ggcatcttggctcac

SEQ ID NO: 1613642 - DNA, 15 bp, Homo sapiens
cggcatcttggctca

SEQ ID NO: 1613643 - DNA, 15 bp, Homo sapiens
acggcatcttggctc

SEQ ID NO: 1613644 - DNA, 15 bp, Homo sapiens
aacggcatcttggct

SEQ ID NO: 1613645 - DNA, 15 bp, Homo sapiens
caacggcatcttggc

SEQ ID NO: 1613646 - DNA, 15 bp, Homo sapiens
gcaacggcatcttgg

SEQ ID NO: 1613647 - DNA, 15 bp, Homo sapiens
tgcaacggcatcttg

SEQ ID NO: 1613648 - DNA, 15 bp, Homo sapiens
gtgcaacggcatctt

SEQ ID NO: 1613649 - DNA, 15 bp, Homo sapiens
agtgcaacggcatct

SEQ ID NO: 1613650 - DNA, 15 bp, Homo sapiens
gagtgcaacggcatc

SEQ ID NO: 1613651 - DNA, 15 bp, Homo sapiens
ggagtgcaacggcat

SEQ ID NO: 1613652 - DNA, 15 bp, Homo sapiens
tggagtgcaacggca

SEQ ID NO: 1613653 - DNA, 15 bp, Homo sapiens
ctggagtgcaacggc

SEQ ID NO: 1613654 - DNA, 15 bp, Homo sapiens
gctggagtgcaacgg

SEQ ID NO: 1613655 - DNA, 15 bp, Homo sapiens
ggctggagtgcaacg

SEQ ID NO: 1613656 - DNA, 15 bp, Homo sapiens
aggctggagtgcaac

SEQ ID NO: 1613657 - DNA, 15 bp, Homo sapiens
gacagtctcactctg

SEQ ID NO: 1613658 - DNA, 15 bp, Homo sapiens
agacagtctcactct

SEQ ID NO: 1613659 - DNA, 15 bp, Homo sapiens
gctactttttttttt

SEQ ID NO: 1613660 - DNA, 15 bp, Homo sapiens
tgctacttttttttt

SEQ ID NO: 1613661 - DNA, 15 bp, Homo sapiens
ctgctactttttttt

SEQ ID NO: 1613662 - DNA, 15 bp, Homo sapiens
gctgctacttttttt

SEQ ID NO: 1613663 - DNA, 15 bp, Homo sapiens
agctgctactttttt

SEQ ID NO: 1613664 - DNA, 15 bp, Homo sapiens
aagctgctacttttt

SEQ ID NO: 1613665 - DNA, 15 bp, Homo sapiens
taagctgctactttt

SEQ ID NO: 1613666 - DNA, 15 bp, Homo sapiens
ataagctgctacttt

SEQ ID NO: 1613667 - DNA, 15 bp, Homo sapiens
aataagctgctactt

SEQ ID NO: 1613668 - DNA, 15 bp, Homo sapiens
aaataagctgctact

SEQ ID NO: 1613669 - DNA, 15 bp, Homo sapiens
taaataagctgctac

SEQ ID NO: 1613670 - DNA, 15 bp, Homo sapiens
ttaaataagctgcta

SEQ ID NO: 1613671 - DNA, 15 bp, Homo sapiens
attaaataagctgct

SEQ ID NO: 1613672 - DNA, 15 bp, Homo sapiens
aattaaataagctgc

SEQ ID NO: 1613673 - DNA, 15 bp, Homo sapiens
gaattaaataagctg

SEQ ID NO: 1613674 - DNA, 15 bp, Homo sapiens
agaattaaataagct

SEQ ID NO: 1613675 - DNA, 15 bp, Homo sapiens
gagaattaaataagc

SEQ ID NO: 1613676 - DNA, 15 bp, Homo sapiens
tgagaattaaataag

SEQ ID NO: 1613677 - DNA, 15 bp, Homo sapiens
atgagaattaaataa

SEQ ID NO: 1613678 - DNA, 15 bp, Homo sapiens
tatgagaattaaata

SEQ ID NO: 1613679 - DNA, 15 bp, Homo sapiens
gtatgagaattaaat

SEQ ID NO: 1613680 - DNA, 15 bp, Homo sapiens
agtatgagaattaaa

SEQ ID NO: 1613681 - DNA, 15 bp, Homo sapiens
gagtatgagaattaa

SEQ ID NO: 1613682 - DNA, 15 bp, Homo sapiens
tgagtatgagaatta

SEQ ID NO: 1613683 - DNA, 15 bp, Homo sapiens
gtgagtatgagaatt

SEQ ID NO: 1613684 - DNA, 15 bp, Homo sapiens
tgtgagtatgagaat

SEQ ID NO: 1613685 - DNA, 15 bp, Homo sapiens
ctgtgagtatgagaa

SEQ ID NO: 1613686 - DNA, 15 bp, Homo sapiens
actgtgagtatgaga

SEQ ID NO: 1613687 - DNA, 15 bp, Homo sapiens
tactgtgagtatgag

SEQ ID NO: 1613688 - DNA, 15 bp, Homo sapiens
ctactgtgagtatga

SEQ ID NO: 1613689 - DNA, 15 bp, Homo sapiens
cctactgtgagtatg

SEQ ID NO: 1613690 - DNA, 15 bp, Homo sapiens
tcctactgtgagtat

SEQ ID NO: 1613691 - DNA, 15 bp, Homo sapiens
ttcctactgtgagta

SEQ ID NO: 1613692 - DNA, 15 bp, Homo sapiens
cttcctactgtgagt

SEQ ID NO: 1613693 - DNA, 15 bp, Homo sapiens
acttcctactgtgag

SEQ ID NO: 1613694 - DNA, 15 bp, Homo sapiens
tacttcctactgtga

SEQ ID NO: 1613695 - DNA, 15 bp, Homo sapiens
ctacttcctactgtg

SEQ ID NO: 1613696 - DNA, 15 bp, Homo sapiens
gctacttcctactgt

SEQ ID NO: 1613697 - DNA, 15 bp, Homo sapiens
tgctacttcctactg

SEQ ID NO: 1613698 - DNA, 15 bp, Homo sapiens
atgctacttcctact

SEQ ID NO: 1613699 - DNA, 15 bp, Homo sapiens
catgctacttcctac

SEQ ID NO: 1613700 - DNA, 15 bp, Homo sapiens
gcatgctacttccta

SEQ ID NO: 1613701 - DNA, 15 bp, Homo sapiens
tgcatgctacttcct

SEQ ID NO: 1613702 - DNA, 15 bp, Homo sapiens
ttgcatgctacttcc

SEQ ID NO: 1613703 - DNA, 15 bp, Homo sapiens
cttgcatgctacttc

SEQ ID NO: 1613704 - DNA, 15 bp, Homo sapiens
acttgcatgctactt

SEQ ID NO: 1613705 - DNA, 15 bp, Homo sapiens
tacttgcatgctact

SEQ ID NO: 1613706 - DNA, 15 bp, Homo sapiens
ctacttgcatgctac

SEQ ID NO: 1613707 - DNA, 15 bp, Homo sapiens
tctacttgcatgcta

SEQ ID NO: 1613708 - DNA, 15 bp, Homo sapiens
gtctacttgcatgct

SEQ ID NO: 1613709 - DNA, 15 bp, Homo sapiens
ggtctacttgcatgc

SEQ ID NO: 1613710 - DNA, 15 bp, Homo sapiens
tggtctacttgcatg

SEQ ID NO: 1613711 - DNA, 15 bp, Homo sapiens
atggtctacttgcat

SEQ ID NO: 1613712 - DNA, 15 bp, Homo sapiens
gatggtctacttgca

SEQ ID NO: 1613713 - DNA, 15 bp, Homo sapiens
tgatggtctacttgc

SEQ ID NO: 1613714 - DNA, 15 bp, Homo sapiens
ctgatggtctacttg

SEQ ID NO: 1613715 - DNA, 15 bp, Homo sapiens
tctgatggtctactt

SEQ ID NO: 1613716 - DNA, 15 bp, Homo sapiens
ctctgatggtctact

SEQ ID NO: 1613717 - DNA, 15 bp, Homo sapiens
cctctgatggtctac

SEQ ID NO: 1613718 - DNA, 15 bp, Homo sapiens
acctctgatggtcta

SEQ ID NO: 1613719 - DNA, 15 bp, Homo sapiens
cacctctgatggtct

SEQ ID NO: 1613720 - DNA, 15 bp, Homo sapiens
acacctctgatggtc

SEQ ID NO: 1613721 - DNA, 15 bp, Homo sapiens
tacacctctgatggt

SEQ ID NO: 1613722 - DNA, 15 bp, Homo sapiens
ttacacctctgatgg

SEQ ID NO: 1613723 - DNA, 15 bp, Homo sapiens
cttacacctctgatg

SEQ ID NO: 1613724 - DNA, 15 bp, Homo sapiens
ccttacacctctgat

SEQ ID NO: 1613725 - DNA, 15 bp, Homo sapiens
tccttacacctctga

SEQ ID NO: 1613726 - DNA, 15 bp, Homo sapiens
ttccttacacctctg

SEQ ID NO: 1613727 - DNA, 15 bp, Homo sapiens
cttccttacacctct

SEQ ID NO: 1613728 - DNA, 15 bp, Homo sapiens
acttccttacacctc

SEQ ID NO: 1613729 - DNA, 15 bp, Homo sapiens
tacttccttacacct

SEQ ID NO: 1613730 - DNA, 15 bp, Homo sapiens
ctacttccttacacc

SEQ ID NO: 1613731 - DNA, 15 bp, Homo sapiens
tctacttccttacac

SEQ ID NO: 1613732 - DNA, 15 bp, Homo sapiens
atctacttccttaca

SEQ ID NO: 1613733 - DNA, 15 bp, Homo sapiens
tatctacttccttac

SEQ ID NO: 1613734 - DNA, 15 bp, Homo sapiens
gtatctacttcctta

SEQ ID NO: 1613735 - DNA, 15 bp, Homo sapiens
agtatctacttcctt

SEQ ID NO: 1613736 - DNA, 15 bp, Homo sapiens
cagtatctacttcct

SEQ ID NO: 1613737 - DNA, 15 bp, Homo sapiens
gcagtatctacttcc

SEQ ID NO: 1613738 - DNA, 15 bp, Homo sapiens
agcagtatctacttc

SEQ ID NO: 1613739 - DNA, 15 bp, Homo sapiens
tagcagtatctactt

SEQ ID NO: 1613740 - DNA, 15 bp, Homo sapiens
atagcagtatctact

SEQ ID NO: 1613741 - DNA, 15 bp, Homo sapiens
aatagcagtatctac

SEQ ID NO: 1613742 - DNA, 15 bp, Homo sapiens
taatagcagtatcta

SEQ ID NO: 1613743 - DNA, 15 bp, Homo sapiens
ataatagcagtatct

SEQ ID NO: 1613744 - DNA, 15 bp, Homo sapiens
aataatagcagtatc

SEQ ID NO: 1613745 - DNA, 15 bp, Homo sapiens
taataatagcagtat

SEQ ID NO: 1613746 - DNA, 15 bp, Homo sapiens
gtaataatagcagta

SEQ ID NO: 1613747 - DNA, 15 bp, Homo sapiens
ggtaataatagcagt

SEQ ID NO: 1613748 - DNA, 15 bp, Homo sapiens
gggtaataatagcag

SEQ ID NO: 1613749 - DNA, 15 bp, Homo sapiens
agggtaataatagca

SEQ ID NO: 1613750 - DNA, 15 bp, Homo sapiens
aagggtaataatagc

SEQ ID NO: 1613751 - DNA, 15 bp, Homo sapiens
aaagggtaataatag

SEQ ID NO: 1613752 - DNA, 15 bp, Homo sapiens
aaaagggtaataata

SEQ ID NO: 1613753 - DNA, 15 bp, Homo sapiens
aaaaagggtaataat

SEQ ID NO: 1613754 - DNA, 15 bp, Homo sapiens
caaaaagggtaataa

SEQ ID NO: 1613755 - DNA, 15 bp, Homo sapiens
acaaaaagggtaata

SEQ ID NO: 1613756 - DNA, 15 bp, Homo sapiens
aacaaaaagggtaat

SEQ ID NO: 1613757 - DNA, 15 bp, Homo sapiens
aaacaaaaagggtaa

SEQ ID NO: 1613758 - DNA, 15 bp, Homo sapiens
aaaacaaaaagggta

SEQ ID NO: 1613759 - DNA, 15 bp, Homo sapiens
aaaaacaaaaagggt

SEQ ID NO: 1613760 - DNA, 15 bp, Homo sapiens
caaaaacaaaaaggg

SEQ ID NO: 1613761 - DNA, 15 bp, Homo sapiens
acaaaaacaaaaagg

SEQ ID NO: 1613762 - DNA, 15 bp, Homo sapiens
aacaaaaacaaaaag

SEQ ID NO: 1613763 - DNA, 15 bp, Homo sapiens
taaaaaaacaaaaac

SEQ ID NO: 1613764 - DNA, 15 bp, Homo sapiens
ctaaaaaaacaaaaa

SEQ ID NO: 1613765 - DNA, 15 bp, Homo sapiens
tctaaaaaaacaaaa

SEQ ID NO: 1613766 - DNA, 15 bp, Homo sapiens
ctctaaaaaaacaaa

SEQ ID NO: 1613767 - DNA, 15 bp, Homo sapiens
tctctaaaaaaacaa

SEQ ID NO: 1613768 - DNA, 15 bp, Homo sapiens
gtctctaaaaaaaca

SEQ ID NO: 1613769 - DNA, 15 bp, Homo sapiens
tgtctctaaaaaaac

SEQ ID NO: 1613770 - DNA, 15 bp, Homo sapiens
tgatcacaccattgc

SEQ ID NO: 1613771 - DNA, 15 bp, Homo sapiens
gtgatcacaccattg

SEQ ID NO: 1613772 - DNA, 15 bp, Homo sapiens
tgtgatcacaccatt

SEQ ID NO: 1613773 - DNA, 15 bp, Homo sapiens
ctgtgatcacaccat

SEQ ID NO: 1613774 - DNA, 15 bp, Homo sapiens
gtttgaggctgcagt

SEQ ID NO: 1613775 - DNA, 15 bp, Homo sapiens
agtttgaggctgcag

SEQ ID NO: 1613776 - DNA, 15 bp, Homo sapiens
gagtttgaggctgca

SEQ ID NO: 1613777 - DNA, 15 bp, Homo sapiens
ggagtttgaggctgc

SEQ ID NO: 1613778 - DNA, 15 bp, Homo sapiens
aggagtttgaggctg

SEQ ID NO: 1613779 - DNA, 15 bp, Homo sapiens
caggagtttgaggct

SEQ ID NO: 1613780 - DNA, 15 bp, Homo sapiens
tcaggagtttgaggc

SEQ ID NO: 1613781 - DNA, 15 bp, Homo sapiens
ctcaggagtttgagg

SEQ ID NO: 1613782 - DNA, 15 bp, Homo sapiens
tctcaggagtttgag

SEQ ID NO: 1613783 - DNA, 15 bp, Homo sapiens
gtctcaggagtttga

SEQ ID NO: 1613784 - DNA, 15 bp, Homo sapiens
agtctcaggagtttg

SEQ ID NO: 1613785 - DNA, 15 bp, Homo sapiens
tagtctcaggagttt

SEQ ID NO: 1613786 - DNA, 15 bp, Homo sapiens
atagtctcaggagtt

SEQ ID NO: 1613787 - DNA, 15 bp, Homo sapiens
gatagtctcaggagt

SEQ ID NO: 1613788 - DNA, 15 bp, Homo sapiens
tgatagtctcaggag

SEQ ID NO: 1613789 - DNA, 15 bp, Homo sapiens
ctgatagtctcagga

SEQ ID NO: 1613790 - DNA, 15 bp, Homo sapiens
tctgatagtctcagg

SEQ ID NO: 1613791 - DNA, 15 bp, Homo sapiens
ctctgatagtctcag

SEQ ID NO: 1613792 - DNA, 15 bp, Homo sapiens
tctctgatagtctca

SEQ ID NO: 1613793 - DNA, 15 bp, Homo sapiens
atctctgatagtctc

SEQ ID NO: 1613794 - DNA, 15 bp, Homo sapiens
catctctgatagtct

SEQ ID NO: 1613795 - DNA, 15 bp, Homo sapiens
acatctctgatagtc

SEQ ID NO: 1613796 - DNA, 15 bp, Homo sapiens
cacatctctgatagt

SEQ ID NO: 1613797 - DNA, 15 bp, Homo sapiens
tcacatctctgatag

SEQ ID NO: 1613798 - DNA, 15 bp, Homo sapiens
ctcacatctctgata

SEQ ID NO: 1613799 - DNA, 15 bp, Homo sapiens
cctcacatctctgat

SEQ ID NO: 1613800 - DNA, 15 bp, Homo sapiens
tcctcacatctctga

SEQ ID NO: 1613801 - DNA, 15 bp, Homo sapiens
ttcctcacatctctg

SEQ ID NO: 1613802 - DNA, 15 bp, Homo sapiens
attcctcacatctct

SEQ ID NO: 1613803 - DNA, 15 bp, Homo sapiens
aattcctcacatctc

SEQ ID NO: 1613804 - DNA, 15 bp, Homo sapiens
taattcctcacatct

SEQ ID NO: 1613805 - DNA, 15 bp, Homo sapiens
ctaattcctcacatc

SEQ ID NO: 1613806 - DNA, 15 bp, Homo sapiens
cctaattcctcacat

SEQ ID NO: 1613807 - DNA, 15 bp, Homo sapiens
acctaattcctcaca

SEQ ID NO: 1613808 - DNA, 15 bp, Homo sapiens
tacctaattcctcac

SEQ ID NO: 1613809 - DNA, 15 bp, Homo sapiens
atacctaattcctca

SEQ ID NO: 1613810 - DNA, 15 bp, Homo sapiens
aatacctaattcctc

SEQ ID NO: 1613811 - DNA, 15 bp, Homo sapiens
caatacctaattcct

SEQ ID NO: 1613812 - DNA, 15 bp, Homo sapiens
gcaatacctaattcc

SEQ ID NO: 1613813 - DNA, 15 bp, Homo sapiens
agcaatacctaattc

SEQ ID NO: 1613814 - DNA, 15 bp, Homo sapiens
tagcaatacctaatt

SEQ ID NO: 1613815 - DNA, 15 bp, Homo sapiens
atagcaatacctaat

SEQ ID NO: 1613816 - DNA, 15 bp, Homo sapiens
aatagcaatacctaa

SEQ ID NO: 1613817 - DNA, 15 bp, Homo sapiens
taatagcaataccta

SEQ ID NO: 1613818 - DNA, 15 bp, Homo sapiens
ataatagcaatacct

SEQ ID NO: 1613819 - DNA, 15 bp, Homo sapiens
aataatagcaatacc

SEQ ID NO: 1613820 - DNA, 15 bp, Homo sapiens
taataatagcaatac

SEQ ID NO: 1613821 - DNA, 15 bp, Homo sapiens
gtaataatagcaata

SEQ ID NO: 1613822 - DNA, 15 bp, Homo sapiens
ggtaataatagcaat

SEQ ID NO: 1613823 - DNA, 15 bp, Homo sapiens
aggtaataatagcaa

SEQ ID NO: 1613824 - DNA, 15 bp, Homo sapiens
aaggtaataatagca

SEQ ID NO: 1613825 - DNA, 15 bp, Homo sapiens
aaaggtaataatagc

SEQ ID NO: 1613826 - DNA, 15 bp, Homo sapiens
aaaaggtaataatag

SEQ ID NO: 1613827 - DNA, 15 bp, Homo sapiens
aaaaaggtaataata

SEQ ID NO: 1613828 - DNA, 15 bp, Homo sapiens
gaaaaaggtaataat

SEQ ID NO: 1613829 - DNA, 15 bp, Homo sapiens
agaaaaaggtaataa

SEQ ID NO: 1613830 - DNA, 15 bp, Homo sapiens
tagaaaaaggtaata

SEQ ID NO: 1613831 - DNA, 15 bp, Homo sapiens
atagaaaaaggtaat

SEQ ID NO: 1613832 - DNA, 15 bp, Homo sapiens
aatagaaaaaggtaa

SEQ ID NO: 1613833 - DNA, 15 bp, Homo sapiens
aaatagaaaaaggta

SEQ ID NO: 1613834 - DNA, 15 bp, Homo sapiens
aaaatagaaaaaggt

SEQ ID NO: 1613835 - DNA, 15 bp, Homo sapiens
aaaaatagaaaaagg

SEQ ID NO: 1613836 - DNA, 15 bp, Homo sapiens
aaaaaatagaaaaag

SEQ ID NO: 1613837 - DNA, 15 bp, Homo sapiens
aaaaaaatagaaaaa

SEQ ID NO: 1613838 - DNA, 15 bp, Homo sapiens
aaaaaaaatagaaaa

SEQ ID NO: 1613839 - DNA, 15 bp, Homo sapiens
aaaaaaaaatagaaa

SEQ ID NO: 1613840 - DNA, 15 bp, Homo sapiens
caaaaaaaaatagaa

SEQ ID NO: 1613841 - DNA, 15 bp, Homo sapiens
tcaaaaaaaaataga

SEQ ID NO: 1613842 - DNA, 15 bp, Homo sapiens
ctcaaaaaaaaatag

SEQ ID NO: 1613843 - DNA, 15 bp, Homo sapiens
tctcaaaaaaaaata

SEQ ID NO: 1613844 - DNA, 15 bp, Homo sapiens
atctcaaaaaaaaat

SEQ ID NO: 1613845 - DNA, 15 bp, Homo sapiens
acaagagcaaaactc

SEQ ID NO: 1613846 - DNA, 15 bp, Homo sapiens
aacaagagcaaaact

SEQ ID NO: 1613847 - DNA, 15 bp, Homo sapiens
caacaagagcaaaac

SEQ ID NO: 1613848 - DNA, 15 bp, Homo sapiens
gcaacaagagcaaaa

SEQ ID NO: 1613849 - DNA, 15 bp, Homo sapiens
ggcaacaagagcaaa

SEQ ID NO: 1613850 - DNA, 15 bp, Homo sapiens
atgcactccagcttg

SEQ ID NO: 1613851 - DNA, 15 bp, Homo sapiens
aatgcactccagctt

SEQ ID NO: 1613852 - DNA, 15 bp, Homo sapiens
caatgcactccagct

SEQ ID NO: 1613853 - DNA, 15 bp, Homo sapiens
ccaatgcactccagc

SEQ ID NO: 1613854 - DNA, 15 bp, Homo sapiens
gccaatgcactccag

SEQ ID NO: 1613855 - DNA, 15 bp, Homo sapiens
tgccaatgcactcca

SEQ ID NO: 1613856 - DNA, 15 bp, Homo sapiens
gtgccaatgcactcc

SEQ ID NO: 1613857 - DNA, 15 bp, Homo sapiens
ggtgccaatgcactc

SEQ ID NO: 1613858 - DNA, 15 bp, Homo sapiens
tggtgccaatgcact

SEQ ID NO: 1613859 - DNA, 15 bp, Homo sapiens
atggtgccaatgcac

SEQ ID NO: 1613860 - DNA, 15 bp, Homo sapiens
gatggtgccaatgca

SEQ ID NO: 1613861 - DNA, 15 bp, Homo sapiens
agatggtgccaatgc

SEQ ID NO: 1613862 - DNA, 15 bp, Homo sapiens
gagatggtgccaatg

SEQ ID NO: 1613863 - DNA, 15 bp, Homo sapiens
tgagatggtgccaat

SEQ ID NO: 1613864 - DNA, 15 bp, Homo sapiens
ctgagatggtgccaa

SEQ ID NO: 1613865 - DNA, 15 bp, Homo sapiens
aagctgagatggtgc

SEQ ID NO: 1613866 - DNA, 15 bp, Homo sapiens
taagctgagatggtg

SEQ ID NO: 1613867 - DNA, 15 bp, Homo sapiens
gtaagctgagatggt

SEQ ID NO: 1613868 - DNA, 15 bp, Homo sapiens
tgtaagctgagatgg

SEQ ID NO: 1613869 - DNA, 15 bp, Homo sapiens
ctgtaagctgagatg

SEQ ID NO: 1613870 - DNA, 15 bp, Homo sapiens
gctgtaagctgagat

SEQ ID NO: 1613871 - DNA, 15 bp, Homo sapiens
tgctgtaagctgaga

SEQ ID NO: 1613872 - DNA, 15 bp, Homo sapiens
ttgctgtaagctgag

SEQ ID NO: 1613873 - DNA, 15 bp, Homo sapiens
gttgctgtaagctga

SEQ ID NO: 1613874 - DNA, 15 bp, Homo sapiens
ggttgctgtaagctg

SEQ ID NO: 1613875 - DNA, 15 bp, Homo sapiens
aggttgctgtaagct

SEQ ID NO: 1613876 - DNA, 15 bp, Homo sapiens
gaggttgctgtaagc

SEQ ID NO: 1613877 - DNA, 15 bp, Homo sapiens
ggaggttgctgtaag

SEQ ID NO: 1613878 - DNA, 15 bp, Homo sapiens
tggaggttgctgtaa

SEQ ID NO: 1613879 - DNA, 15 bp, Homo sapiens
gtggaggttgctgta

SEQ ID NO: 1613880 - DNA, 15 bp, Homo sapiens
ggtggaggttgctgt

SEQ ID NO: 1613881 - DNA, 15 bp, Homo sapiens
aggtggaggttgctg

SEQ ID NO: 1613882 - DNA, 15 bp, Homo sapiens
gaggtggaggttgct

SEQ ID NO: 1613883 - DNA, 15 bp, Homo sapiens
aaataccagctactt

SEQ ID NO: 1613884 - DNA, 15 bp, Homo sapiens
taaataccagctact

SEQ ID NO: 1613885 - DNA, 15 bp, Homo sapiens
gtaaataccagctac

SEQ ID NO: 1613886 - DNA, 15 bp, Homo sapiens
tgtaaataccagcta

SEQ ID NO: 1613887 - DNA, 15 bp, Homo sapiens
ctgtaaataccagct

SEQ ID NO: 1613888 - DNA, 15 bp, Homo sapiens
cctgtaaataccagc

SEQ ID NO: 1613889 - DNA, 15 bp, Homo sapiens
gcctgtaaataccag

SEQ ID NO: 1613890 - DNA, 15 bp, Homo sapiens
cgcctgtaaatacca

SEQ ID NO: 1613891 - DNA, 15 bp, Homo sapiens
acgcctgtaaatacc

SEQ ID NO: 1613892 - DNA, 15 bp, Homo sapiens
gacgcctgtaaatac

SEQ ID NO: 1613893 - DNA, 15 bp, Homo sapiens
agacgcctgtaaata

SEQ ID NO: 1613894 - DNA, 15 bp, Homo sapiens
cagacgcctgtaaat

SEQ ID NO: 1613895 - DNA, 15 bp, Homo sapiens
gcagacgcctgtaaa

SEQ ID NO: 1613896 - DNA, 15 bp, Homo sapiens
ggcagacgcctgtaa

SEQ ID NO: 1613897 - DNA, 15 bp, Homo sapiens
tggcagacgcctgta

SEQ ID NO: 1613898 - DNA, 15 bp, Homo sapiens
gtggcagacgcctgt

SEQ ID NO: 1613899 - DNA, 15 bp, Homo sapiens
ggtggcagacgcctg

SEQ ID NO: 1613900 - DNA, 15 bp, Homo sapiens
aggtggcagacgcct

SEQ ID NO: 1613901 - DNA, 15 bp, Homo sapiens
aaggtggcagacgcc

SEQ ID NO: 1613902 - DNA, 15 bp, Homo sapiens
caaggtggcagacgc

SEQ ID NO: 1613903 - DNA, 15 bp, Homo sapiens
gcaaggtggcagacg

SEQ ID NO: 1613904 - DNA, 15 bp, Homo sapiens
ggcaaggtggcagac

SEQ ID NO: 1613905 - DNA, 15 bp, Homo sapiens
gggcaaggtggcaga

SEQ ID NO: 1613906 - DNA, 15 bp, Homo sapiens
tgggcaaggtggcag

SEQ ID NO: 1613907 - DNA, 15 bp, Homo sapiens
ctgggcaaggtggca

SEQ ID NO: 1613908 - DNA, 15 bp, Homo sapiens
gctgggcaaggtggc

SEQ ID NO: 1613909 - DNA, 15 bp, Homo sapiens
agctgggcaaggtgg

SEQ ID NO: 1613910 - DNA, 15 bp, Homo sapiens
tagctgggcaaggtg

SEQ ID NO: 1613911 - DNA, 15 bp, Homo sapiens
ttagctgggcaaggt

SEQ ID NO: 1613912 - DNA, 15 bp, Homo sapiens
attagctgggcaagg

SEQ ID NO: 1613913 - DNA, 15 bp, Homo sapiens
aattagctgggcaag

SEQ ID NO: 1613914 - DNA, 15 bp, Homo sapiens
aaattagctgggcaa

SEQ ID NO: 1613915 - DNA, 15 bp, Homo sapiens
ttaaaaatataaaaa

SEQ ID NO: 1613916 - DNA, 15 bp, Homo sapiens
attaaaaatataaaa

SEQ ID NO: 1613917 - DNA, 15 bp, Homo sapiens
tattaaaaatataaa

SEQ ID NO: 1613918 - DNA, 15 bp, Homo sapiens
ctattaaaaatataa

SEQ ID NO: 1613919 - DNA, 15 bp, Homo sapiens
tctattaaaaatata

SEQ ID NO: 1613920 - DNA, 15 bp, Homo sapiens
ctctattaaaaatat

SEQ ID NO: 1613921 - DNA, 15 bp, Homo sapiens
tctctattaaaaata

SEQ ID NO: 1613922 - DNA, 15 bp, Homo sapiens
gtctctattaaaaat

SEQ ID NO: 1613923 - DNA, 15 bp, Homo sapiens
tgtctctattaaaaa

SEQ ID NO: 1613924 - DNA, 15 bp, Homo sapiens
ctgtctctattaaaa

SEQ ID NO: 1613925 - DNA, 15 bp, Homo sapiens
cctgtctctattaaa

SEQ ID NO: 1613926 - DNA, 15 bp, Homo sapiens
ccctgtctctattaa

SEQ ID NO: 1613927 - DNA, 15 bp, Homo sapiens
accctgtctctatta

SEQ ID NO: 1613928 - DNA, 15 bp, Homo sapiens
aaccctgtctctatt

SEQ ID NO: 1613929 - DNA, 15 bp, Homo sapiens
aaaccctgtctctat

SEQ ID NO: 1613930 - DNA, 15 bp, Homo sapiens
gcttgaggtcaggag

SEQ ID NO: 1613931 - DNA, 15 bp, Homo sapiens
cgcttgaggtcagga

SEQ ID NO: 1613932 - DNA, 15 bp, Homo sapiens
tcgcttgaggtcagg

SEQ ID NO: 1613933 - DNA, 15 bp, Homo sapiens
atcgcttgaggtcag

SEQ ID NO: 1613934 - DNA, 15 bp, Homo sapiens
gatcgcttgaggtca

SEQ ID NO: 1613935 - DNA, 15 bp, Homo sapiens
ggatcgcttgaggtc

SEQ ID NO: 1613936 - DNA, 15 bp, Homo sapiens
cggatcgcttgaggt

SEQ ID NO: 1613937 - DNA, 15 bp, Homo sapiens
gcggatcgcttgagg

SEQ ID NO: 1613938 - DNA, 15 bp, Homo sapiens
agcggatcgcttgag

SEQ ID NO: 1613939 - DNA, 15 bp, Homo sapiens
gagcggatcgcttga

SEQ ID NO: 1613940 - DNA, 15 bp, Homo sapiens
tgagcggatcgcttg

SEQ ID NO: 1613941 - DNA, 15 bp, Homo sapiens
gtgagcggatcgctt

SEQ ID NO: 1613942 - DNA, 15 bp, Homo sapiens
ggtgagcggatcgct

SEQ ID NO: 1613943 - DNA, 15 bp, Homo sapiens
aggtgagcggatcgc

SEQ ID NO: 1613944 - DNA, 15 bp, Homo sapiens
gaggtgagcggatcg

SEQ ID NO: 1613945 - DNA, 15 bp, Homo sapiens
tgaggtgagcggatc

SEQ ID NO: 1613946 - DNA, 15 bp, Homo sapiens
ctgaggtgagcggat

SEQ ID NO: 1613947 - DNA, 15 bp, Homo sapiens
gctgaggtgagcgga

SEQ ID NO: 1613948 - DNA, 15 bp, Homo sapiens
ggctgaggtgagcgg

SEQ ID NO: 1613949 - DNA, 15 bp, Homo sapiens
aggctgaggtgagcg

SEQ ID NO: 1613950 - DNA, 15 bp, Homo sapiens
gaggctgaggtgagc

SEQ ID NO: 1613951 - DNA, 15 bp, Homo sapiens
caggccaggtgtggt

SEQ ID NO: 1613952 - DNA, 15 bp, Homo sapiens
gcaggccaggtgtgg

SEQ ID NO: 1613953 - DNA, 15 bp, Homo sapiens
ggcaggccaggtgtg

SEQ ID NO: 1613954 - DNA, 15 bp, Homo sapiens
aggcaggccaggtgt

SEQ ID NO: 1613955 - DNA, 15 bp, Homo sapiens
gaggcaggccaggtg

SEQ ID NO: 1613956 - DNA, 15 bp, Homo sapiens
agaggcaggccaggt

SEQ ID NO: 1613957 - DNA, 15 bp, Homo sapiens
aagaggcaggccagg

SEQ ID NO: 1613958 - DNA, 15 bp, Homo sapiens
aaagaggcaggccag

SEQ ID NO: 1613959 - DNA, 15 bp, Homo sapiens
aaaagaggcaggcca

SEQ ID NO: 1613960 - DNA, 15 bp, Homo sapiens
caaaagaggcaggcc

SEQ ID NO: 1613961 - DNA, 15 bp, Homo sapiens
ccaaaagaggcaggc

SEQ ID NO: 1613962 - DNA, 15 bp, Homo sapiens
accaaaagaggcagg

SEQ ID NO: 1613963 - DNA, 15 bp, Homo sapiens
aaccaaaagaggcag

SEQ ID NO: 1613964 - DNA, 15 bp, Homo sapiens
aaaccaaaagaggca

SEQ ID NO: 1613965 - DNA, 15 bp, Homo sapiens
aaaaccaaaagaggc

SEQ ID NO: 1613966 - DNA, 15 bp, Homo sapiens
caaaaccaaaagagg

SEQ ID NO: 1613967 - DNA, 15 bp, Homo sapiens
acaaaaccaaaagag

SEQ ID NO: 1613968 - DNA, 15 bp, Homo sapiens
aacaaaaccaaaaga

SEQ ID NO: 1613969 - DNA, 15 bp, Homo sapiens
aaacaaaaccaaaag

SEQ ID NO: 1613970 - DNA, 15 bp, Homo sapiens
aaaacaaaaccaaaa

SEQ ID NO: 1613971 - DNA, 15 bp, Homo sapiens
gaaaaaacaaaacca

SEQ ID NO: 1613972 - DNA, 15 bp, Homo sapiens
tgaaaaaacaaaacc

SEQ ID NO: 1613973 - DNA, 15 bp, Homo sapiens
ctgaaaaaacaaaac

SEQ ID NO: 1613974 - DNA, 15 bp, Homo sapiens
tctgaaaaaacaaaa

SEQ ID NO: 1613975 - DNA, 15 bp, Homo sapiens
ctctgaaaaaacaaa

SEQ ID NO: 1613976 - DNA, 15 bp, Homo sapiens
tctctgaaaaaacaa

SEQ ID NO: 1613977 - DNA, 15 bp, Homo sapiens
atctctgaaaaaaca

SEQ ID NO: 1613978 - DNA, 15 bp, Homo sapiens
tatctctgaaaaaac

SEQ ID NO: 1613979 - DNA, 15 bp, Homo sapiens
ctatctctgaaaaaa

SEQ ID NO: 1613980 - DNA, 15 bp, Homo sapiens
cctatctctgaaaaa

SEQ ID NO: 1613981 - DNA, 15 bp, Homo sapiens
ccctatctctgaaaa

SEQ ID NO: 1613982 - DNA, 15 bp, Homo sapiens
accctatctctgaaa

SEQ ID NO: 1613983 - DNA, 15 bp, Homo sapiens
gaccctatctctgaa

SEQ ID NO: 1613984 - DNA, 15 bp, Homo sapiens
agaccctatctctga

SEQ ID NO: 1613985 - DNA, 15 bp, Homo sapiens
aagaccctatctctg

SEQ ID NO: 1613986 - DNA, 15 bp, Homo sapiens
acaagaccctatctc

SEQ ID NO: 1613987 - DNA, 15 bp, Homo sapiens
aacaagaccctatct

SEQ ID NO: 1613988 - DNA, 15 bp, Homo sapiens
gaacaagaccctatc

SEQ ID NO: 1613989 - DNA, 15 bp, Homo sapiens
agaacaagaccctat

SEQ ID NO: 1613990 - DNA, 15 bp, Homo sapiens
cagaacaagacccta

SEQ ID NO: 1613991 - DNA, 15 bp, Homo sapiens
acagaacaagaccct

SEQ ID NO: 1613992 - DNA, 15 bp, Homo sapiens
aacagaacaagaccc

SEQ ID NO: 1613993 - DNA, 15 bp, Homo sapiens
caacagaacaagacc

SEQ ID NO: 1613994 - DNA, 15 bp, Homo sapiens
gcaacagaacaagac

SEQ ID NO: 1613995 - DNA, 15 bp, Homo sapiens
tgatcgcaccactgc

SEQ ID NO: 1613996 - DNA, 15 bp, Homo sapiens
atgatcgcaccactg

SEQ ID NO: 1613997 - DNA, 15 bp, Homo sapiens
catgatcgcaccact

SEQ ID NO: 1613998 - DNA, 15 bp, Homo sapiens
ccatgatcgcaccac

SEQ ID NO: 1613999 - DNA, 15 bp, Homo sapiens
gccatgatcgcacca

SEQ ID NO: 1614000 - DNA, 15 bp, Homo sapiens
agccatgatcgcacc

SEQ ID NO: 1614001 - DNA, 15 bp, Homo sapiens
gagccatgatcgcac

SEQ ID NO: 1614002 - DNA, 15 bp, Homo sapiens
tgagccatgatcgca

SEQ ID NO: 1614003 - DNA, 15 bp, Homo sapiens
gtgagccatgatcgc

SEQ ID NO: 1614004 - DNA, 15 bp, Homo sapiens
agtgagccatgatcg

SEQ ID NO: 1614005 - DNA, 15 bp, Homo sapiens
cagtgagccatgatc

SEQ ID NO: 1614006 - DNA, 15 bp, Homo sapiens
gcagtgagccatgat

SEQ ID NO: 1614007 - DNA, 15 bp, Homo sapiens
tgcagtgagccatga

SEQ ID NO: 1614008 - DNA, 15 bp, Homo sapiens
ctgcagtgagccatg

SEQ ID NO: 1614009 - DNA, 15 bp, Homo sapiens
gggagttcgaggctg

SEQ ID NO: 1614010 - DNA, 15 bp, Homo sapiens
tgggagttcgaggct

SEQ ID NO: 1614011 - DNA, 15 bp, Homo sapiens
ctgggagttcgaggc

SEQ ID NO: 1614012 - DNA, 15 bp, Homo sapiens
cctgggagttcgagg

SEQ ID NO: 1614013 - DNA, 15 bp, Homo sapiens
acctgggagttcgag

SEQ ID NO: 1614014 - DNA, 15 bp, Homo sapiens
aacctgggagttcga

SEQ ID NO: 1614015 - DNA, 15 bp, Homo sapiens
gaacctgggagttcg

SEQ ID NO: 1614016 - DNA, 15 bp, Homo sapiens
tgaacctgggagttc

SEQ ID NO: 1614017 - DNA, 15 bp, Homo sapiens
ttgaacctgggagtt

SEQ ID NO: 1614018 - DNA, 15 bp, Homo sapiens
cttgaacctgggagt

SEQ ID NO: 1614019 - DNA, 15 bp, Homo sapiens
aaggcaggaggatca

SEQ ID NO: 1614020 - DNA, 15 bp, Homo sapiens
taaggcaggaggatc

SEQ ID NO: 1614021 - DNA, 15 bp, Homo sapiens
ctaaggcaggaggat

SEQ ID NO: 1614022 - DNA, 15 bp, Homo sapiens
gctaaggcaggagga

SEQ ID NO: 1614023 - DNA, 15 bp, Homo sapiens
agctaaggcaggagg

SEQ ID NO: 1614024 - DNA, 15 bp, Homo sapiens
aagctaaggcaggag

SEQ ID NO: 1614025 - DNA, 15 bp, Homo sapiens
tgaaagctaaggcag

SEQ ID NO: 1614026 - DNA, 15 bp, Homo sapiens
ctgaaagctaaggca

SEQ ID NO: 1614027 - DNA, 15 bp, Homo sapiens
tctgaaagctaaggc

SEQ ID NO: 1614028 - DNA, 15 bp, Homo sapiens
ctctgaaagctaagg

SEQ ID NO: 1614029 - DNA, 15 bp, Homo sapiens
actctgaaagctaag

SEQ ID NO: 1614030 - DNA, 15 bp, Homo sapiens
tactctgaaagctaa

SEQ ID NO: 1614031 - DNA, 15 bp, Homo sapiens
ctactctgaaagcta

SEQ ID NO: 1614032 - DNA, 15 bp, Homo sapiens
gctactctgaaagct

SEQ ID NO: 1614033 - DNA, 15 bp, Homo sapiens
agctactctgaaagc

SEQ ID NO: 1614034 - DNA, 15 bp, Homo sapiens
tagctactctgaaag

SEQ ID NO: 1614035 - DNA, 15 bp, Homo sapiens
ctagctactctgaaa

SEQ ID NO: 1614036 - DNA, 15 bp, Homo sapiens
tctagctactctgaa

SEQ ID NO: 1614037 - DNA, 15 bp, Homo sapiens
ttctagctactctga

SEQ ID NO: 1614038 - DNA, 15 bp, Homo sapiens
gttctagctactctg

SEQ ID NO: 1614039 - DNA, 15 bp, Homo sapiens
agttctagctactct

SEQ ID NO: 1614040 - DNA, 15 bp, Homo sapiens
tagttctagctactc

SEQ ID NO: 1614041 - DNA, 15 bp, Homo sapiens
atagttctagctact

SEQ ID NO: 1614042 - DNA, 15 bp, Homo sapiens
tatagttctagctac

SEQ ID NO: 1614043 - DNA, 15 bp, Homo sapiens
ctatagttctagcta

SEQ ID NO: 1614044 - DNA, 15 bp, Homo sapiens
cctatagttctagct

SEQ ID NO: 1614045 - DNA, 15 bp, Homo sapiens
gcctatagttctagc

SEQ ID NO: 1614046 - DNA, 15 bp, Homo sapiens
tgcctatagttctag

SEQ ID NO: 1614047 - DNA, 15 bp, Homo sapiens
atgcctatagttcta

SEQ ID NO: 1614048 - DNA, 15 bp, Homo sapiens
tatgcctatagttct

SEQ ID NO: 1614049 - DNA, 15 bp, Homo sapiens
gtatgcctatagttc

SEQ ID NO: 1614050 - DNA, 15 bp, Homo sapiens
ccaggagcctgaggc

SEQ ID NO: 1614051 - DNA, 15 bp, Homo sapiens
cccaggagcctgagg

SEQ ID NO: 1614052 - DNA, 15 bp, Homo sapiens
tcccaggagcctgag

SEQ ID NO: 1614053 - DNA, 15 bp, Homo sapiens
atcccaggagcctga

SEQ ID NO: 1614054 - DNA, 15 bp, Homo sapiens
aatcccaggagcctg

SEQ ID NO: 1614055 - DNA, 15 bp, Homo sapiens
taatcccaggagcct

SEQ ID NO: 1614056 - DNA, 15 bp, Homo sapiens
gtaatcccaggagcc

SEQ ID NO: 1614057 - DNA, 15 bp, Homo sapiens
tgtaatcccaggagc

SEQ ID NO: 1614058 - DNA, 15 bp, Homo sapiens
ctgtaatcccaggag

SEQ ID NO: 1614059 - DNA, 15 bp, Homo sapiens
gcctgtaatcccagg

SEQ ID NO: 1614060 - DNA, 15 bp, Homo sapiens
gcgtggtggcgggcg

SEQ ID NO: 1614061 - DNA, 15 bp, Homo sapiens
ggcgtggtggcgggc

SEQ ID NO: 1614062 - DNA, 15 bp, Homo sapiens
gggcgtggtggcggg

SEQ ID NO: 1614063 - DNA, 15 bp, Homo sapiens
cgggcgtggtggcgg

SEQ ID NO: 1614064 - DNA, 15 bp, Homo sapiens
ccgggcgtggtggcg

SEQ ID NO: 1614065 - DNA, 15 bp, Homo sapiens
aaaaaaattagccgg

SEQ ID NO: 1614066 - DNA, 15 bp, Homo sapiens
ccacggtgaaacccc

SEQ ID NO: 1614067 - DNA, 15 bp, Homo sapiens
accacggtgaaaccc

SEQ ID NO: 1614068 - DNA, 15 bp, Homo sapiens
gaccacggtgaaacc

SEQ ID NO: 1614069 - DNA, 15 bp, Homo sapiens
agaccacggtgaaac

SEQ ID NO: 1614070 - DNA, 15 bp, Homo sapiens
gagaccacggtgaaa

SEQ ID NO: 1614071 - DNA, 15 bp, Homo sapiens
cgagaccacggtgaa

SEQ ID NO: 1614072 - DNA, 15 bp, Homo sapiens
tcgagaccacggtga

SEQ ID NO: 1614073 - DNA, 15 bp, Homo sapiens
atcgagaccacggtg

SEQ ID NO: 1614074 - DNA, 15 bp, Homo sapiens
gatcgagaccacggt

SEQ ID NO: 1614075 - DNA, 15 bp, Homo sapiens
agatcgagaccacgg

SEQ ID NO: 1614076 - DNA, 15 bp, Homo sapiens
gagatcgagaccacg

SEQ ID NO: 1614077 - DNA, 15 bp, Homo sapiens
ggagatcgagaccac

SEQ ID NO: 1614078 - DNA, 15 bp, Homo sapiens
caggtgcagtggctc

SEQ ID NO: 1614079 - DNA, 15 bp, Homo sapiens
aggccaggtgcagtg

SEQ ID NO: 1614080 - DNA, 15 bp, Homo sapiens
taggccaggtgcagt

SEQ ID NO: 1614081 - DNA, 15 bp, Homo sapiens
ttaggccaggtgcag

SEQ ID NO: 1614082 - DNA, 15 bp, Homo sapiens
aattaggccaggtgc

SEQ ID NO: 1614083 - DNA, 15 bp, Homo sapiens
aaattaggccaggtg

SEQ ID NO: 1614084 - DNA, 15 bp, Homo sapiens
aaaattaggccaggt

SEQ ID NO: 1614085 - DNA, 15 bp, Homo sapiens
aaaaattaggccagg

SEQ ID NO: 1614086 - DNA, 15 bp, Homo sapiens
aaaaaaattaggcca

SEQ ID NO: 1614087 - DNA, 15 bp, Homo sapiens
caaaaaaattaggcc

SEQ ID NO: 1614088 - DNA, 15 bp, Homo sapiens
aacaaaaaaattagg

SEQ ID NO: 1614089 - DNA, 15 bp, Homo sapiens
taaaaacaaaaaaat

SEQ ID NO: 1614090 - DNA, 15 bp, Homo sapiens
ttaaaaacaaaaaaa

SEQ ID NO: 1614091 - DNA, 15 bp, Homo sapiens
cttaaaaacaaaaaa

SEQ ID NO: 1614092 - DNA, 15 bp, Homo sapiens
tcttaaaaacaaaaa

SEQ ID NO: 1614093 - DNA, 15 bp, Homo sapiens
ctcttaaaaacaaaa

SEQ ID NO: 1614094 - DNA, 15 bp, Homo sapiens
tctcttaaaaacaaa

SEQ ID NO: 1614095 - DNA, 15 bp, Homo sapiens
atctcttaaaaacaa

SEQ ID NO: 1614096 - DNA, 15 bp, Homo sapiens
catctcttaaaaaca

SEQ ID NO: 1614097 - DNA, 15 bp, Homo sapiens
ccatctcttaaaaac

SEQ ID NO: 1614098 - DNA, 15 bp, Homo sapiens
cccatctcttaaaaa

SEQ ID NO: 1614099 - DNA, 15 bp, Homo sapiens
gcccatctcttaaaa

SEQ ID NO: 1614100 - DNA, 15 bp, Homo sapiens
cgcccatctcttaaa

SEQ ID NO: 1614101 - DNA, 15 bp, Homo sapiens
acgcccatctcttaa

SEQ ID NO: 1614102 - DNA, 15 bp, Homo sapiens
gacgcccatctctta

SEQ ID NO: 1614103 - DNA, 15 bp, Homo sapiens
tgacgcccatctctt

SEQ ID NO: 1614104 - DNA, 15 bp, Homo sapiens
gtgacgcccatctct

SEQ ID NO: 1614105 - DNA, 15 bp, Homo sapiens
ggtgacgcccatctc

SEQ ID NO: 1614106 - DNA, 15 bp, Homo sapiens
gggtgacgcccatct

SEQ ID NO: 1614107 - DNA, 15 bp, Homo sapiens
agggtgacgcccatc

SEQ ID NO: 1614108 - DNA, 15 bp, Homo sapiens
tagggtgacgcccat

SEQ ID NO: 1614109 - DNA, 15 bp, Homo sapiens
atagggtgacgccca

SEQ ID NO: 1614110 - DNA, 15 bp, Homo sapiens
catagggtgacgccc

SEQ ID NO: 1614111 - DNA, 15 bp, Homo sapiens
acatagggtgacgcc

SEQ ID NO: 1614112 - DNA, 15 bp, Homo sapiens
aacatagggtgacgc

SEQ ID NO: 1614113 - DNA, 15 bp, Homo sapiens
caacatagggtgacg

SEQ ID NO: 1614114 - DNA, 15 bp, Homo sapiens
acaacatagggtgac

SEQ ID NO: 1614115 - DNA, 15 bp, Homo sapiens
gacaacatagggtga

SEQ ID NO: 1614116 - DNA, 15 bp, Homo sapiens
ggacaacatagggtg

SEQ ID NO: 1614117 - DNA, 15 bp, Homo sapiens
tggacaacatagggt

SEQ ID NO: 1614118 - DNA, 15 bp, Homo sapiens
ctggacaacataggg

SEQ ID NO: 1614119 - DNA, 15 bp, Homo sapiens
cctggacaacatagg

SEQ ID NO: 1614120 - DNA, 15 bp, Homo sapiens
gcctggacaacatag

SEQ ID NO: 1614121 - DNA, 15 bp, Homo sapiens
agcctggacaacata

SEQ ID NO: 1614122 - DNA, 15 bp, Homo sapiens
tagcctggacaacat

SEQ ID NO: 1614123 - DNA, 15 bp, Homo sapiens
ctagcctggacaaca

SEQ ID NO: 1614124 - DNA, 15 bp, Homo sapiens
actagcctggacaac

SEQ ID NO: 1614125 - DNA, 15 bp, Homo sapiens
gactagcctggacaa

SEQ ID NO: 1614126 - DNA, 15 bp, Homo sapiens
agactagcctggaca

SEQ ID NO: 1614127 - DNA, 15 bp, Homo sapiens
aagactagcctggac

SEQ ID NO: 1614128 - DNA, 15 bp, Homo sapiens
caagactagcctgga

SEQ ID NO: 1614129 - DNA, 15 bp, Homo sapiens
cccaggagttcaaga

SEQ ID NO: 1614130 - DNA, 15 bp, Homo sapiens
gccttgagcccagga

SEQ ID NO: 1614131 - DNA, 15 bp, Homo sapiens
tgccttgagcccagg

SEQ ID NO: 1614132 - DNA, 15 bp, Homo sapiens
ttgccttgagcccag

SEQ ID NO: 1614133 - DNA, 15 bp, Homo sapiens
attgccttgagccca

SEQ ID NO: 1614134 - DNA, 15 bp, Homo sapiens
gattgccttgagccc

SEQ ID NO: 1614135 - DNA, 15 bp, Homo sapiens
ggattgccttgagcc

SEQ ID NO: 1614136 - DNA, 15 bp, Homo sapiens
aggattgccttgagc

SEQ ID NO: 1614137 - DNA, 15 bp, Homo sapiens
gaggattgccttgag

SEQ ID NO: 1614138 - DNA, 15 bp, Homo sapiens
ggaggattgccttga

SEQ ID NO: 1614139 - DNA, 15 bp, Homo sapiens
aggaggattgccttg

SEQ ID NO: 1614140 - DNA, 15 bp, Homo sapiens
aaggaggattgcctt

SEQ ID NO: 1614141 - DNA, 15 bp, Homo sapiens
gaaggaggattgcct

SEQ ID NO: 1614142 - DNA, 15 bp, Homo sapiens
ggaaggaggattgcc

SEQ ID NO: 1614143 - DNA, 15 bp, Homo sapiens
aggaaggaggattgc

SEQ ID NO: 1614144 - DNA, 15 bp, Homo sapiens
aaggaaggaggattg

SEQ ID NO: 1614145 - DNA, 15 bp, Homo sapiens
caaggaaggaggatt

SEQ ID NO: 1614146 - DNA, 15 bp, Homo sapiens
tcaaggaaggaggat

SEQ ID NO: 1614147 - DNA, 15 bp, Homo sapiens
gtcaaggaaggagga

SEQ ID NO: 1614148 - DNA, 15 bp, Homo sapiens
ggtcaaggaaggagg

SEQ ID NO: 1614149 - DNA, 15 bp, Homo sapiens
aggtcaaggaaggag

SEQ ID NO: 1614150 - DNA, 15 bp, Homo sapiens
gaggtcaaggaagga

SEQ ID NO: 1614151 - DNA, 15 bp, Homo sapiens
ggaggtcaaggaagg

SEQ ID NO: 1614152 - DNA, 15 bp, Homo sapiens
gggaggtcaaggaag

SEQ ID NO: 1614153 - DNA, 15 bp, Homo sapiens
tgggaggtcaaggaa

SEQ ID NO: 1614154 - DNA, 15 bp, Homo sapiens
ttgggaggtcaagga

SEQ ID NO: 1614155 - DNA, 15 bp, Homo sapiens
tttgggaggtcaagg

SEQ ID NO: 1614156 - DNA, 15 bp, Homo sapiens
atttgggaggtcaag

SEQ ID NO: 1614157 - DNA, 15 bp, Homo sapiens
aatttgggaggtcaa

SEQ ID NO: 1614158 - DNA, 15 bp, Homo sapiens
caatttgggaggtca

SEQ ID NO: 1614159 - DNA, 15 bp, Homo sapiens
acaatttgggaggtc

SEQ ID NO: 1614160 - DNA, 15 bp, Homo sapiens
aacaatttgggaggt

SEQ ID NO: 1614161 - DNA, 15 bp, Homo sapiens
caacaatttgggagg

SEQ ID NO: 1614162 - DNA, 15 bp, Homo sapiens
ccaacaatttgggag

SEQ ID NO: 1614163 - DNA, 15 bp, Homo sapiens
cccaacaatttggga

SEQ ID NO: 1614164 - DNA, 15 bp, Homo sapiens
tcccaacaatttggg

SEQ ID NO: 1614165 - DNA, 15 bp, Homo sapiens
atcccaacaatttgg

SEQ ID NO: 1614166 - DNA, 15 bp, Homo sapiens
aatcccaacaatttg

SEQ ID NO: 1614167 - DNA, 15 bp, Homo sapiens
taatcccaacaattt

SEQ ID NO: 1614168 - DNA, 15 bp, Homo sapiens
ctaatcccaacaatt

SEQ ID NO: 1614169 - DNA, 15 bp, Homo sapiens
tctaatcccaacaat

SEQ ID NO: 1614170 - DNA, 15 bp, Homo sapiens
ctctaatcccaacaa

SEQ ID NO: 1614171 - DNA, 15 bp, Homo sapiens
cctctaatcccaaca

SEQ ID NO: 1614172 - DNA, 15 bp, Homo sapiens
ccctctaatcccaac

SEQ ID NO: 1614173 - DNA, 15 bp, Homo sapiens
tccctctaatcccaa

SEQ ID NO: 1614174 - DNA, 15 bp, Homo sapiens
atccctctaatccca

SEQ ID NO: 1614175 - DNA, 15 bp, Homo sapiens
catccctctaatccc

SEQ ID NO: 1614176 - DNA, 15 bp, Homo sapiens
ccatccctctaatcc

SEQ ID NO: 1614177 - DNA, 15 bp, Homo sapiens
tccatccctctaatc

SEQ ID NO: 1614178 - DNA, 15 bp, Homo sapiens
gtccatccctctaat

SEQ ID NO: 1614179 - DNA, 15 bp, Homo sapiens
ggtccatccctctaa

SEQ ID NO: 1614180 - DNA, 15 bp, Homo sapiens
tggtccatccctcta

SEQ ID NO: 1614181 - DNA, 15 bp, Homo sapiens
gtggtccatccctct

SEQ ID NO: 1614182 - DNA, 15 bp, Homo sapiens
agtggtccatccctc

SEQ ID NO: 1614183 - DNA, 15 bp, Homo sapiens
cagtggtccatccct

SEQ ID NO: 1614184 - DNA, 15 bp, Homo sapiens
acagtggtccatccc

SEQ ID NO: 1614185 - DNA, 15 bp, Homo sapiens
cacagtggtccatcc

SEQ ID NO: 1614186 - DNA, 15 bp, Homo sapiens
gcacagtggtccatc

SEQ ID NO: 1614187 - DNA, 15 bp, Homo sapiens
ggcacagtggtccat

SEQ ID NO: 1614188 - DNA, 15 bp, Homo sapiens
tggcacagtggtcca

SEQ ID NO: 1614189 - DNA, 15 bp, Homo sapiens
ctggcacagtggtcc

SEQ ID NO: 1614190 - DNA, 15 bp, Homo sapiens
cctggcacagtggtc

SEQ ID NO: 1614191 - DNA, 15 bp, Homo sapiens
agcctggcacagtgg

SEQ ID NO: 1614192 - DNA, 15 bp, Homo sapiens
cagcctggcacagtg

SEQ ID NO: 1614193 - DNA, 15 bp, Homo sapiens
acagcctggcacagt

SEQ ID NO: 1614194 - DNA, 15 bp, Homo sapiens
aacagcctggcacag

SEQ ID NO: 1614195 - DNA, 15 bp, Homo sapiens
taacagcctggcaca

SEQ ID NO: 1614196 - DNA, 15 bp, Homo sapiens
ataacagcctggcac

SEQ ID NO: 1614197 - DNA, 15 bp, Homo sapiens
aataacagcctggca

SEQ ID NO: 1614198 - DNA, 15 bp, Homo sapiens
taataacagcctggc

SEQ ID NO: 1614199 - DNA, 15 bp, Homo sapiens
atacctgcctcctgt

SEQ ID NO: 1614200 - DNA, 15 bp, Homo sapiens
catacctgcctcctg

SEQ ID NO: 1614201 - DNA, 15 bp, Homo sapiens
ccatacctgcctcct

SEQ ID NO: 1614202 - DNA, 15 bp, Homo sapiens
cccatacctgcctcc

SEQ ID NO: 1614203 - DNA, 15 bp, Homo sapiens
tcccatacctgcctc

SEQ ID NO: 1614204 - DNA, 15 bp, Homo sapiens
ttcccatacctgcct

SEQ ID NO: 1614205 - DNA, 15 bp, Homo sapiens
tttcccatacctgcc

SEQ ID NO: 1614206 - DNA, 15 bp, Homo sapiens
ttttcccatacctgc

SEQ ID NO: 1614207 - DNA, 15 bp, Homo sapiens
tttttcccatacctg

SEQ ID NO: 1614208 - DNA, 15 bp, Homo sapiens
ctttttcccatacct

SEQ ID NO: 1614209 - DNA, 15 bp, Homo sapiens
tctttttcccatacc

SEQ ID NO: 1614210 - DNA, 15 bp, Homo sapiens
ctctttttcccatac

SEQ ID NO: 1614211 - DNA, 15 bp, Homo sapiens
cctctttttcccata

SEQ ID NO: 1614212 - DNA, 15 bp, Homo sapiens
gcctctttttcccat

SEQ ID NO: 1614213 - DNA, 15 bp, Homo sapiens
ggcctctttttccca

SEQ ID NO: 1614214 - DNA, 15 bp, Homo sapiens
gggcctctttttccc

SEQ ID NO: 1614215 - DNA, 15 bp, Homo sapiens
tgggcctctttttcc

SEQ ID NO: 1614216 - DNA, 15 bp, Homo sapiens
ctgggcctctttttc

SEQ ID NO: 1614217 - DNA, 15 bp, Homo sapiens
actgggcctcttttt

SEQ ID NO: 1614218 - DNA, 15 bp, Homo sapiens
gactgggcctctttt

SEQ ID NO: 1614219 - DNA, 15 bp, Homo sapiens
ggactgggcctcttt

SEQ ID NO: 1614220 - DNA, 15 bp, Homo sapiens
aggactgggcctctt

SEQ ID NO: 1614221 - DNA, 15 bp, Homo sapiens
caggactgggcctct

SEQ ID NO: 1614222 - DNA, 15 bp, Homo sapiens
gcaggactgggcctc

SEQ ID NO: 1614223 - DNA, 15 bp, Homo sapiens
agcaggactgggcct

SEQ ID NO: 1614224 - DNA, 15 bp, Homo sapiens
cagcaggactgggcc

SEQ ID NO: 1614225 - DNA, 15 bp, Homo sapiens
gcagcaggactgggc

SEQ ID NO: 1614226 - DNA, 15 bp, Homo sapiens
agcagcaggactggg

SEQ ID NO: 1614227 - DNA, 15 bp, Homo sapiens
cagcagcaggactgg

SEQ ID NO: 1614228 - DNA, 15 bp, Homo sapiens
tcagcagcaggactg

SEQ ID NO: 1614229 - DNA, 15 bp, Homo sapiens
ttcagcagcaggact

SEQ ID NO: 1614230 - DNA, 15 bp, Homo sapiens
attcagcagcaggac

SEQ ID NO: 1614231 - DNA, 15 bp, Homo sapiens
aattcagcagcagga

SEQ ID NO: 1614232 - DNA, 15 bp, Homo sapiens
caattcagcagcagg

SEQ ID NO: 1614233 - DNA, 15 bp, Homo sapiens
ccaattcagcagcag

SEQ ID NO: 1614234 - DNA, 15 bp, Homo sapiens
accaattcagcagca

SEQ ID NO: 1614235 - DNA, 15 bp, Homo sapiens
caccaattcagcagc

SEQ ID NO: 1614236 - DNA, 15 bp, Homo sapiens
acaccaattcagcag

SEQ ID NO: 1614237 - DNA, 15 bp, Homo sapiens
tacaccaattcagca

SEQ ID NO: 1614238 - DNA, 15 bp, Homo sapiens
gtacaccaattcagc

SEQ ID NO: 1614239 - DNA, 15 bp, Homo sapiens
cgtacaccaattcag

SEQ ID NO: 1614240 - DNA, 15 bp, Homo sapiens
tcgtacaccaattca

SEQ ID NO: 1614241 - DNA, 15 bp, Homo sapiens
gtcgtacaccaattc

SEQ ID NO: 1614242 - DNA, 15 bp, Homo sapiens
ggtcgtacaccaatt

SEQ ID NO: 1614243 - DNA, 15 bp, Homo sapiens
aggtcgtacaccaat

SEQ ID NO: 1614244 - DNA, 15 bp, Homo sapiens
aaggtcgtacaccaa

SEQ ID NO: 1614245 - DNA, 15 bp, Homo sapiens
caaggtcgtacacca

SEQ ID NO: 1614246 - DNA, 15 bp, Homo sapiens
tcaaggtcgtacacc

SEQ ID NO: 1614247 - DNA, 15 bp, Homo sapiens
ttcaaggtcgtacac

SEQ ID NO: 1614248 - DNA, 15 bp, Homo sapiens
gttcaaggtcgtaca

SEQ ID NO: 1614249 - DNA, 15 bp, Homo sapiens
agttcaaggtcgtac

SEQ ID NO: 1614250 - DNA, 15 bp, Homo sapiens
tagttcaaggtcgta

SEQ ID NO: 1614251 - DNA, 15 bp, Homo sapiens
ttagttcaaggtcgt

SEQ ID NO: 1614252 - DNA, 15 bp, Homo sapiens
cttagttcaaggtcg

SEQ ID NO: 1614253 - DNA, 15 bp, Homo sapiens
ccttagttcaaggtc

SEQ ID NO: 1614254 - DNA, 15 bp, Homo sapiens
cccttagttcaaggt

SEQ ID NO: 1614255 - DNA, 15 bp, Homo sapiens
acccttagttcaagg

SEQ ID NO: 1614256 - DNA, 15 bp, Homo sapiens
aacccttagttcaag

SEQ ID NO: 1614257 - DNA, 15 bp, Homo sapiens
aaacccttagttcaa

SEQ ID NO: 1614258 - DNA, 15 bp, Homo sapiens
gaaacccttagttca

SEQ ID NO: 1614259 - DNA, 15 bp, Homo sapiens
agaaacccttagttc

SEQ ID NO: 1614260 - DNA, 15 bp, Homo sapiens
tagaaacccttagtt

SEQ ID NO: 1614261 - DNA, 15 bp, Homo sapiens
gtagaaacccttagt

SEQ ID NO: 1614262 - DNA, 15 bp, Homo sapiens
agtagaaacccttag

SEQ ID NO: 1614263 - DNA, 15 bp, Homo sapiens
gagtagaaaccctta

SEQ ID NO: 1614264 - DNA, 15 bp, Homo sapiens
ggagtagaaaccctt

SEQ ID NO: 1614265 - DNA, 15 bp, Homo sapiens
gggagtagaaaccct

SEQ ID NO: 1614266 - DNA, 15 bp, Homo sapiens
agggagtagaaaccc

SEQ ID NO: 1614267 - DNA, 15 bp, Homo sapiens
gagggagtagaaacc

SEQ ID NO: 1614268 - DNA, 15 bp, Homo sapiens
cgagggagtagaaac

SEQ ID NO: 1614269 - DNA, 15 bp, Homo sapiens
ccgagggagtagaaa

SEQ ID NO: 1614270 - DNA, 15 bp, Homo sapiens
gccgagggagtagaa

SEQ ID NO: 1614271 - DNA, 15 bp, Homo sapiens
ggccgagggagtaga

SEQ ID NO: 1614272 - DNA, 15 bp, Homo sapiens
aggccgagggagtag

SEQ ID NO: 1614273 - DNA, 15 bp, Homo sapiens
gaggccgagggagta

SEQ ID NO: 1614274 - DNA, 15 bp, Homo sapiens
tgaggccgagggagt

SEQ ID NO: 1614275 - DNA, 15 bp, Homo sapiens
ctgaggccgagggag

SEQ ID NO: 1614276 - DNA, 15 bp, Homo sapiens
gctgaggccgaggga

SEQ ID NO: 1614277 - DNA, 15 bp, Homo sapiens
agctgaggccgaggg

SEQ ID NO: 1614278 - DNA, 15 bp, Homo sapiens
cagctgaggccgagg

SEQ ID NO: 1614279 - DNA, 15 bp, Homo sapiens
acagctgaggccgag

SEQ ID NO: 1614280 - DNA, 15 bp, Homo sapiens
gacagctgaggccga

SEQ ID NO: 1614281 - DNA, 15 bp, Homo sapiens
ggacagctgaggccg

SEQ ID NO: 1614282 - DNA, 15 bp, Homo sapiens
gggacagctgaggcc

SEQ ID NO: 1614283 - DNA, 15 bp, Homo sapiens
tgggacagctgaggc

SEQ ID NO: 1614284 - DNA, 15 bp, Homo sapiens
ctgggacagctgagg

SEQ ID NO: 1614285 - DNA, 15 bp, Homo sapiens
gctgggacagctgag

SEQ ID NO: 1614286 - DNA, 15 bp, Homo sapiens
cgctgggacagctga

SEQ ID NO: 1614287 - DNA, 15 bp, Homo sapiens
acgctgggacagctg

SEQ ID NO: 1614288 - DNA, 15 bp, Homo sapiens
aacgctgggacagct

SEQ ID NO: 1614289 - DNA, 15 bp, Homo sapiens
caacgctgggacagc

SEQ ID NO: 1614290 - DNA, 15 bp, Homo sapiens
tcaacgctgggacag

SEQ ID NO: 1614291 - DNA, 15 bp, Homo sapiens
ctcaacgctgggaca

SEQ ID NO: 1614292 - DNA, 15 bp, Homo sapiens
tctcaacgctgggac

SEQ ID NO: 1614293 - DNA, 15 bp, Homo sapiens
ctctcaacgctggga

SEQ ID NO: 1614294 - DNA, 15 bp, Homo sapiens
tctctcaacgctggg

SEQ ID NO: 1614295 - DNA, 15 bp, Homo sapiens
ttctctcaacgctgg

SEQ ID NO: 1614296 - DNA, 15 bp, Homo sapiens
attctctcaacgctg

SEQ ID NO: 1614297 - DNA, 15 bp, Homo sapiens
cattctctcaacgct

SEQ ID NO: 1614298 - DNA, 15 bp, Homo sapiens
gcattctctcaacgc

SEQ ID NO: 1614299 - DNA, 15 bp, Homo sapiens
tgcattctctcaacg

SEQ ID NO: 1614300 - DNA, 15 bp, Homo sapiens
ctgcattctctcaac

SEQ ID NO: 1614301 - DNA, 15 bp, Homo sapiens
gctgcattctctcaa

SEQ ID NO: 1614302 - DNA, 15 bp, Homo sapiens
cgctgcattctctca

SEQ ID NO: 1614303 - DNA, 15 bp, Homo sapiens
tcgctgcattctctc

SEQ ID NO: 1614304 - DNA, 15 bp, Homo sapiens
ctcgctgcattctct

SEQ ID NO: 1614305 - DNA, 15 bp, Homo sapiens
actcgctgcattctc

SEQ ID NO: 1614306 - DNA, 15 bp, Homo sapiens
aactcgctgcattct

SEQ ID NO: 1614307 - DNA, 15 bp, Homo sapiens
gaactcgctgcattc

SEQ ID NO: 1614308 - DNA, 15 bp, Homo sapiens
agaactcgctgcatt

SEQ ID NO: 1614309 - DNA, 15 bp, Homo sapiens
cagaactcgctgcat

SEQ ID NO: 1614310 - DNA, 15 bp, Homo sapiens
acagaactcgctgca

SEQ ID NO: 1614311 - DNA, 15 bp, Homo sapiens
cacagaactcgctgc

SEQ ID NO: 1614312 - DNA, 15 bp, Homo sapiens
ccacagaactcgctg

SEQ ID NO: 1614313 - DNA, 15 bp, Homo sapiens
cccacagaactcgct

SEQ ID NO: 1614314 - DNA, 15 bp, Homo sapiens
acccacagaactcgc

SEQ ID NO: 1614315 - DNA, 15 bp, Homo sapiens
gacccacagaactcg

SEQ ID NO: 1614316 - DNA, 15 bp, Homo sapiens
tgacccacagaactc

SEQ ID NO: 1614317 - DNA, 15 bp, Homo sapiens
ttgacccacagaact

SEQ ID NO: 1614318 - DNA, 15 bp, Homo sapiens
tttgacccacagaac

SEQ ID NO: 1614319 - DNA, 15 bp, Homo sapiens
ttttgacccacagaa

SEQ ID NO: 1614320 - DNA, 15 bp, Homo sapiens
tttttgacccacaga

SEQ ID NO: 1614321 - DNA, 15 bp, Homo sapiens
atttttgacccacag

SEQ ID NO: 1614322 - DNA, 15 bp, Homo sapiens
catttttgacccaca

SEQ ID NO: 1614323 - DNA, 15 bp, Homo sapiens
ccatttttgacccac

SEQ ID NO: 1614324 - DNA, 15 bp, Homo sapiens
cccatttttgaccca

SEQ ID NO: 1614325 - DNA, 15 bp, Homo sapiens
gcccatttttgaccc

SEQ ID NO: 1614326 - DNA, 15 bp, Homo sapiens
agcccatttttgacc

SEQ ID NO: 1614327 - DNA, 15 bp, Homo sapiens
tagcccatttttgac

SEQ ID NO: 1614328 - DNA, 15 bp, Homo sapiens
ctagcccatttttga

SEQ ID NO: 1614329 - DNA, 15 bp, Homo sapiens
tctagcccatttttg

SEQ ID NO: 1614330 - DNA, 15 bp, Homo sapiens
ctctagcccattttt

SEQ ID NO: 1614331 - DNA, 15 bp, Homo sapiens
cctctagcccatttt

SEQ ID NO: 1614332 - DNA, 15 bp, Homo sapiens
gcctctagcccattt

SEQ ID NO: 1614333 - DNA, 15 bp, Homo sapiens
ggcctctagcccatt

SEQ ID NO: 1614334 - DNA, 15 bp, Homo sapiens
cggcctctagcccat

SEQ ID NO: 1614335 - DNA, 15 bp, Homo sapiens
ccggcctctagccca

SEQ ID NO: 1614336 - DNA, 15 bp, Homo sapiens
cccggcctctagccc

SEQ ID NO: 1614337 - DNA, 15 bp, Homo sapiens
gcccggcctctagcc

SEQ ID NO: 1614338 - DNA, 15 bp, Homo sapiens
tgcccggcctctagc

SEQ ID NO: 1614339 - DNA, 15 bp, Homo sapiens
gtgcccggcctctag

SEQ ID NO: 1614340 - DNA, 15 bp, Homo sapiens
tgtgcccggcctcta

SEQ ID NO: 1614341 - DNA, 15 bp, Homo sapiens
ctgtgcccggcctct

SEQ ID NO: 1614342 - DNA, 15 bp, Homo sapiens
actgtgcccggcctc

SEQ ID NO: 1614343 - DNA, 15 bp, Homo sapiens
cactgtgcccggcct

SEQ ID NO: 1614344 - DNA, 15 bp, Homo sapiens
cgtgagccactgtgc

SEQ ID NO: 1614345 - DNA, 15 bp, Homo sapiens
gcgtgagccactgtg

SEQ ID NO: 1614346 - DNA, 15 bp, Homo sapiens
ggcgtgagccactgt

SEQ ID NO: 1614347 - DNA, 15 bp, Homo sapiens
aggcgtgagccactg

SEQ ID NO: 1614348 - DNA, 15 bp, Homo sapiens
cggattacaggcgtg

SEQ ID NO: 1614349 - DNA, 15 bp, Homo sapiens
tcggattacaggcgt

SEQ ID NO: 1614350 - DNA, 15 bp, Homo sapiens
ctcggattacaggcg

SEQ ID NO: 1614351 - DNA, 15 bp, Homo sapiens
gctcggattacaggc

SEQ ID NO: 1614352 - DNA, 15 bp, Homo sapiens
tgctcggattacagg

SEQ ID NO: 1614353 - DNA, 15 bp, Homo sapiens
gtgctcggattacag

SEQ ID NO: 1614354 - DNA, 15 bp, Homo sapiens
agtgctcggattaca

SEQ ID NO: 1614355 - DNA, 15 bp, Homo sapiens
aagtgctcggattac

SEQ ID NO: 1614356 - DNA, 15 bp, Homo sapiens
aaagtgctcggatta

SEQ ID NO: 1614357 - DNA, 15 bp, Homo sapiens
caaagtgctcggatt

SEQ ID NO: 1614358 - DNA, 15 bp, Homo sapiens
ccaaagtgctcggat

SEQ ID NO: 1614359 - DNA, 15 bp, Homo sapiens
cccaaagtgctcgga

SEQ ID NO: 1614360 - DNA, 15 bp, Homo sapiens
tcccaaagtgctcgg

SEQ ID NO: 1614361 - DNA, 15 bp, Homo sapiens
ctcccaaagtgctcg

SEQ ID NO: 1614362 - DNA, 15 bp, Homo sapiens
cctcccaaagtgctc

SEQ ID NO: 1614363 - DNA, 15 bp, Homo sapiens
gtctgcctgcctcag

SEQ ID NO: 1614364 - DNA, 15 bp, Homo sapiens
ggtctgcctgcctca

SEQ ID NO: 1614365 - DNA, 15 bp, Homo sapiens
tggtctgcctgcctc

SEQ ID NO: 1614366 - DNA, 15 bp, Homo sapiens
gtggtctgcctgcct

SEQ ID NO: 1614367 - DNA, 15 bp, Homo sapiens
cgtggtctgcctgcc

SEQ ID NO: 1614368 - DNA, 15 bp, Homo sapiens
tcgtggtctgcctgc

SEQ ID NO: 1614369 - DNA, 15 bp, Homo sapiens
ctcgtggtctgcctg

SEQ ID NO: 1614370 - DNA, 15 bp, Homo sapiens
cctcgtggtctgcct

SEQ ID NO: 1614371 - DNA, 15 bp, Homo sapiens
acctcgtggtctgcc

SEQ ID NO: 1614372 - DNA, 15 bp, Homo sapiens
gacctcgtggtctgc

SEQ ID NO: 1614373 - DNA, 15 bp, Homo sapiens
tgacctcgtggtctg

SEQ ID NO: 1614374 - DNA, 15 bp, Homo sapiens
ttgacctcgtggtct

SEQ ID NO: 1614375 - DNA, 15 bp, Homo sapiens
cttgacctcgtggtc

SEQ ID NO: 1614376 - DNA, 15 bp, Homo sapiens
tcttgacctcgtggt

SEQ ID NO: 1614377 - DNA, 15 bp, Homo sapiens
ctcttgacctcgtgg

SEQ ID NO: 1614378 - DNA, 15 bp, Homo sapiens
ggccaggatggtctc

SEQ ID NO: 1614379 - DNA, 15 bp, Homo sapiens
tggccaggatggtct

SEQ ID NO: 1614380 - DNA, 15 bp, Homo sapiens
ttggccaggatggtc

SEQ ID NO: 1614381 - DNA, 15 bp, Homo sapiens
gttggccaggatggt

SEQ ID NO: 1614382 - DNA, 15 bp, Homo sapiens
tgttggccaggatgg

SEQ ID NO: 1614383 - DNA, 15 bp, Homo sapiens
atgttggccaggatg

SEQ ID NO: 1614384 - DNA, 15 bp, Homo sapiens
catgttggccaggat

SEQ ID NO: 1614385 - DNA, 15 bp, Homo sapiens
ccatgttggccagga

SEQ ID NO: 1614386 - DNA, 15 bp, Homo sapiens
agcccagctaatttt

SEQ ID NO: 1614387 - DNA, 15 bp, Homo sapiens
aagcccagctaattt

SEQ ID NO: 1614388 - DNA, 15 bp, Homo sapiens
caagcccagctaatt

SEQ ID NO: 1614389 - DNA, 15 bp, Homo sapiens
ccaagcccagctaat

SEQ ID NO: 1614390 - DNA, 15 bp, Homo sapiens
accaagcccagctaa

SEQ ID NO: 1614391 - DNA, 15 bp, Homo sapiens
caccaagcccagcta

SEQ ID NO: 1614392 - DNA, 15 bp, Homo sapiens
ccaccaagcccagct

SEQ ID NO: 1614393 - DNA, 15 bp, Homo sapiens
gccaccaagcccagc

SEQ ID NO: 1614394 - DNA, 15 bp, Homo sapiens
cgccaccaagcccag

SEQ ID NO: 1614395 - DNA, 15 bp, Homo sapiens
gcgccaccaagccca

SEQ ID NO: 1614396 - DNA, 15 bp, Homo sapiens
tgcgccaccaagccc

SEQ ID NO: 1614397 - DNA, 15 bp, Homo sapiens
atgcgccaccaagcc

SEQ ID NO: 1614398 - DNA, 15 bp, Homo sapiens
catgcgccaccaagc

SEQ ID NO: 1614399 - DNA, 15 bp, Homo sapiens
gcatgcgccaccaag

SEQ ID NO: 1614400 - DNA, 15 bp, Homo sapiens
ggcatgcgccaccaa

SEQ ID NO: 1614401 - DNA, 15 bp, Homo sapiens
ctacaggcatgcgcc

SEQ ID NO: 1614402 - DNA, 15 bp, Homo sapiens
actacaggcatgcgc

SEQ ID NO: 1614403 - DNA, 15 bp, Homo sapiens
gactacaggcatgcg

SEQ ID NO: 1614404 - DNA, 15 bp, Homo sapiens
ttcccgagtagctgg

SEQ ID NO: 1614405 - DNA, 15 bp, Homo sapiens
cttcccgagtagctg

SEQ ID NO: 1614406 - DNA, 15 bp, Homo sapiens
gcttcccgagtagct

SEQ ID NO: 1614407 - DNA, 15 bp, Homo sapiens
agcttcccgagtagc

SEQ ID NO: 1614408 - DNA, 15 bp, Homo sapiens
cagcttcccgagtag

SEQ ID NO: 1614409 - DNA, 15 bp, Homo sapiens
tcagcttcccgagta

SEQ ID NO: 1614410 - DNA, 15 bp, Homo sapiens
ctcagcttcccgagt

SEQ ID NO: 1614411 - DNA, 15 bp, Homo sapiens
cctcagcttcccgag

SEQ ID NO: 1614412 - DNA, 15 bp, Homo sapiens
gcctcagcttcccga

SEQ ID NO: 1614413 - DNA, 15 bp, Homo sapiens
tgcctcagcttcccg

SEQ ID NO: 1614414 - DNA, 15 bp, Homo sapiens
ctgcctcagcttccc

SEQ ID NO: 1614415 - DNA, 15 bp, Homo sapiens
ctcctgcctcagctt

SEQ ID NO: 1614416 - DNA, 15 bp, Homo sapiens
cctccgcctcctggg

SEQ ID NO: 1614417 - DNA, 15 bp, Homo sapiens
tacaacctccgcctc

SEQ ID NO: 1614418 - DNA, 15 bp, Homo sapiens
ctacaacctccgcct

SEQ ID NO: 1614419 - DNA, 15 bp, Homo sapiens
actacaacctccgcc

SEQ ID NO: 1614420 - DNA, 15 bp, Homo sapiens
cactacaacctccgc

SEQ ID NO: 1614421 - DNA, 15 bp, Homo sapiens
tcactacaacctccg

SEQ ID NO: 1614422 - DNA, 15 bp, Homo sapiens
ctcactacaacctcc

SEQ ID NO: 1614423 - DNA, 15 bp, Homo sapiens
tggctcactacaacc

SEQ ID NO: 1614424 - DNA, 15 bp, Homo sapiens
ttggctcactacaac

SEQ ID NO: 1614425 - DNA, 15 bp, Homo sapiens
cttggctcactacaa

SEQ ID NO: 1614426 - DNA, 15 bp, Homo sapiens
tcttggctcactaca

SEQ ID NO: 1614427 - DNA, 15 bp, Homo sapiens
atcttggctcactac

SEQ ID NO: 1614428 - DNA, 15 bp, Homo sapiens
gatcttggctcacta

SEQ ID NO: 1614429 - DNA, 15 bp, Homo sapiens
cgtgatcttggctca

SEQ ID NO: 1614430 - DNA, 15 bp, Homo sapiens
gcgtgatcttggctc

SEQ ID NO: 1614431 - DNA, 15 bp, Homo sapiens
ggcgtgatcttggct

SEQ ID NO: 1614432 - DNA, 15 bp, Homo sapiens
tggcgtgatcttggc

SEQ ID NO: 1614433 - DNA, 15 bp, Homo sapiens
gtggcgtgatcttgg

SEQ ID NO: 1614434 - DNA, 15 bp, Homo sapiens
agtggcgtgatcttg

SEQ ID NO: 1614435 - DNA, 15 bp, Homo sapiens
cagtggcgtgatctt

SEQ ID NO: 1614436 - DNA, 15 bp, Homo sapiens
tgcagtggcgtgatc

SEQ ID NO: 1614437 - DNA, 15 bp, Homo sapiens
gtgcagtggcgtgat

SEQ ID NO: 1614438 - DNA, 15 bp, Homo sapiens
agtgcagtggcgtga

SEQ ID NO: 1614439 - DNA, 15 bp, Homo sapiens
gagtgcagtggcgtg

SEQ ID NO: 1614440 - DNA, 15 bp, Homo sapiens
ggagtgcagtggcgt

SEQ ID NO: 1614441 - DNA, 15 bp, Homo sapiens
gtgtcgcccaggctg

SEQ ID NO: 1614442 - DNA, 15 bp, Homo sapiens
tgtgtcgcccaggct

SEQ ID NO: 1614443 - DNA, 15 bp, Homo sapiens
ctgtgtcgcccaggc

SEQ ID NO: 1614444 - DNA, 15 bp, Homo sapiens
gctgtgtcgcccagg

SEQ ID NO: 1614445 - DNA, 15 bp, Homo sapiens
tgctgtgtcgcccag

SEQ ID NO: 1614446 - DNA, 15 bp, Homo sapiens
ttgctgtgtcgccca

SEQ ID NO: 1614447 - DNA, 15 bp, Homo sapiens
cttgctgtgtcgccc

SEQ ID NO: 1614448 - DNA, 15 bp, Homo sapiens
tcttgctgtgtcgcc

SEQ ID NO: 1614449 - DNA, 15 bp, Homo sapiens
gtcttgctgtgtcgc

SEQ ID NO: 1614450 - DNA, 15 bp, Homo sapiens
agtcttgctgtgtcg

SEQ ID NO: 1614451 - DNA, 15 bp, Homo sapiens
gagtcttgctgtgtc

SEQ ID NO: 1614452 - DNA, 15 bp, Homo sapiens
ggagtcttgctgtgt

SEQ ID NO: 1614453 - DNA, 15 bp, Homo sapiens
tggagtcttgctgtg

SEQ ID NO: 1614454 - DNA, 15 bp, Homo sapiens
atggagtcttgctgt

SEQ ID NO: 1614455 - DNA, 15 bp, Homo sapiens
gatggagtcttgctg

SEQ ID NO: 1614456 - DNA, 15 bp, Homo sapiens
attttttttttttga

SEQ ID NO: 1614457 - DNA, 15 bp, Homo sapiens
gctcatttttttttt

SEQ ID NO: 1614458 - DNA, 15 bp, Homo sapiens
agctcattttttttt

SEQ ID NO: 1614459 - DNA, 15 bp, Homo sapiens
tagctcatttttttt

SEQ ID NO: 1614460 - DNA, 15 bp, Homo sapiens
ctagctcattttttt

SEQ ID NO: 1614461 - DNA, 15 bp, Homo sapiens
tctagctcatttttt

SEQ ID NO: 1614462 - DNA, 15 bp, Homo sapiens
atctagctcattttt

SEQ ID NO: 1614463 - DNA, 15 bp, Homo sapiens
catctagctcatttt

SEQ ID NO: 1614464 - DNA, 15 bp, Homo sapiens
ccatctagctcattt

SEQ ID NO: 1614465 - DNA, 15 bp, Homo sapiens
cccatctagctcatt

SEQ ID NO: 1614466 - DNA, 15 bp, Homo sapiens
ccccatctagctcat

SEQ ID NO: 1614467 - DNA, 15 bp, Homo sapiens
cccccatctagctca

SEQ ID NO: 1614468 - DNA, 15 bp, Homo sapiens
tcccccatctagctc

SEQ ID NO: 1614469 - DNA, 15 bp, Homo sapiens
ctcccccatctagct

SEQ ID NO: 1614470 - DNA, 15 bp, Homo sapiens
tctcccccatctagc

SEQ ID NO: 1614471 - DNA, 15 bp, Homo sapiens
atctcccccatctag

SEQ ID NO: 1614472 - DNA, 15 bp, Homo sapiens
catctcccccatcta

SEQ ID NO: 1614473 - DNA, 15 bp, Homo sapiens
tcatctcccccatct

SEQ ID NO: 1614474 - DNA, 15 bp, Homo sapiens
ctcatctcccccatc

SEQ ID NO: 1614475 - DNA, 15 bp, Homo sapiens
tctcatctcccccat

SEQ ID NO: 1614476 - DNA, 15 bp, Homo sapiens
ttctcatctccccca

SEQ ID NO: 1614477 - DNA, 15 bp, Homo sapiens
gttctcatctccccc

SEQ ID NO: 1614478 - DNA, 15 bp, Homo sapiens
agttctcatctcccc

SEQ ID NO: 1614479 - DNA, 15 bp, Homo sapiens
cagttctcatctccc

SEQ ID NO: 1614480 - DNA, 15 bp, Homo sapiens
acagttctcatctcc

SEQ ID NO: 1614481 - DNA, 15 bp, Homo sapiens
gacagttctcatctc

SEQ ID NO: 1614482 - DNA, 15 bp, Homo sapiens
agacagttctcatct

SEQ ID NO: 1614483 - DNA, 15 bp, Homo sapiens
cagacagttctcatc

SEQ ID NO: 1614484 - DNA, 15 bp, Homo sapiens
ccagacagttctcat

SEQ ID NO: 1614485 - DNA, 15 bp, Homo sapiens
cccagacagttctca

SEQ ID NO: 1614486 - DNA, 15 bp, Homo sapiens
ccccagacagttctc

SEQ ID NO: 1614487 - DNA, 15 bp, Homo sapiens
accccagacagttct

SEQ ID NO: 1614488 - DNA, 15 bp, Homo sapiens
aaccccagacagttc

SEQ ID NO: 1614489 - DNA, 15 bp, Homo sapiens
caaccccagacagtt

SEQ ID NO: 1614490 - DNA, 15 bp, Homo sapiens
ccaaccccagacagt

SEQ ID NO: 1614491 - DNA, 15 bp, Homo sapiens
cccaaccccagacag

SEQ ID NO: 1614492 - DNA, 15 bp, Homo sapiens
ccccaaccccagaca

SEQ ID NO: 1614493 - DNA, 15 bp, Homo sapiens
accccaaccccagac

SEQ ID NO: 1614494 - DNA, 15 bp, Homo sapiens
taccccaaccccaga

SEQ ID NO: 1614495 - DNA, 15 bp, Homo sapiens
ctaccccaaccccag

SEQ ID NO: 1614496 - DNA, 15 bp, Homo sapiens
cctaccccaacccca

SEQ ID NO: 1614497 - DNA, 15 bp, Homo sapiens
tcctaccccaacccc

SEQ ID NO: 1614498 - DNA, 15 bp, Homo sapiens
atcctaccccaaccc

SEQ ID NO: 1614499 - DNA, 15 bp, Homo sapiens
tatcctaccccaacc

SEQ ID NO: 1614500 - DNA, 15 bp, Homo sapiens
ctatcctaccccaac

SEQ ID NO: 1614501 - DNA, 15 bp, Homo sapiens
cctatcctaccccaa

SEQ ID NO: 1614502 - DNA, 15 bp, Homo sapiens
ccctatcctacccca

SEQ ID NO: 1614503 - DNA, 15 bp, Homo sapiens
cccctatcctacccc

SEQ ID NO: 1614504 - DNA, 15 bp, Homo sapiens
acccctatcctaccc

SEQ ID NO: 1614505 - DNA, 15 bp, Homo sapiens
gacccctatcctacc

SEQ ID NO: 1614506 - DNA, 15 bp, Homo sapiens
tgacccctatcctac

SEQ ID NO: 1614507 - DNA, 15 bp, Homo sapiens
ctgacccctatccta

SEQ ID NO: 1614508 - DNA, 15 bp, Homo sapiens
cctgacccctatcct

SEQ ID NO: 1614509 - DNA, 15 bp, Homo sapiens
tcctgacccctatcc

SEQ ID NO: 1614510 - DNA, 15 bp, Homo sapiens
ctcctgacccctatc

SEQ ID NO: 1614511 - DNA, 15 bp, Homo sapiens
tctcctgacccctat

SEQ ID NO: 1614512 - DNA, 15 bp, Homo sapiens
ttctcctgaccccta

SEQ ID NO: 1614513 - DNA, 15 bp, Homo sapiens
tttctcctgacccct

SEQ ID NO: 1614514 - DNA, 15 bp, Homo sapiens
ctttctcctgacccc

SEQ ID NO: 1614515 - DNA, 15 bp, Homo sapiens
cctttctcctgaccc

SEQ ID NO: 1614516 - DNA, 15 bp, Homo sapiens
ccctttctcctgacc

SEQ ID NO: 1614517 - DNA, 15 bp, Homo sapiens
gccctttctcctgac

SEQ ID NO: 1614518 - DNA, 15 bp, Homo sapiens
agccctttctcctga

SEQ ID NO: 1614519 - DNA, 15 bp, Homo sapiens
gagccctttctcctg

SEQ ID NO: 1614520 - DNA, 15 bp, Homo sapiens
tgagccctttctcct

SEQ ID NO: 1614521 - DNA, 15 bp, Homo sapiens
atgagccctttctcc

SEQ ID NO: 1614522 - DNA, 15 bp, Homo sapiens
aatgagccctttctc

SEQ ID NO: 1614523 - DNA, 15 bp, Homo sapiens
taatgagccctttct

SEQ ID NO: 1614524 - DNA, 15 bp, Homo sapiens
ctaatgagccctttc

SEQ ID NO: 1614525 - DNA, 15 bp, Homo sapiens
tctaatgagcccttt

SEQ ID NO: 1614526 - DNA, 15 bp, Homo sapiens
ctctaatgagccctt

SEQ ID NO: 1614527 - DNA, 15 bp, Homo sapiens
gctctaatgagccct

SEQ ID NO: 1614528 - DNA, 15 bp, Homo sapiens
agctctaatgagccc

SEQ ID NO: 1614529 - DNA, 15 bp, Homo sapiens
gagctctaatgagcc

SEQ ID NO: 1614530 - DNA, 15 bp, Homo sapiens
agagctctaatgagc

SEQ ID NO: 1614531 - DNA, 15 bp, Homo sapiens
gagagctctaatgag

SEQ ID NO: 1614532 - DNA, 15 bp, Homo sapiens
ggagagctctaatga

SEQ ID NO: 1614533 - DNA, 15 bp, Homo sapiens
gggagagctctaatg

SEQ ID NO: 1614534 - DNA, 15 bp, Homo sapiens
agggagagctctaat

SEQ ID NO: 1614535 - DNA, 15 bp, Homo sapiens
cagggagagctctaa

SEQ ID NO: 1614536 - DNA, 15 bp, Homo sapiens
ccagggagagctcta

SEQ ID NO: 1614537 - DNA, 15 bp, Homo sapiens
accagggagagctct

SEQ ID NO: 1614538 - DNA, 15 bp, Homo sapiens
gaccagggagagctc

SEQ ID NO: 1614539 - DNA, 15 bp, Homo sapiens
ggaccagggagagct

SEQ ID NO: 1614540 - DNA, 15 bp, Homo sapiens
aggaccagggagagc

SEQ ID NO: 1614541 - DNA, 15 bp, Homo sapiens
aaggaccagggagag

SEQ ID NO: 1614542 - DNA, 15 bp, Homo sapiens
gaaggaccagggaga

SEQ ID NO: 1614543 - DNA, 15 bp, Homo sapiens
tgaaggaccagggag

SEQ ID NO: 1614544 - DNA, 15 bp, Homo sapiens
gtgaaggaccaggga

SEQ ID NO: 1614545 - DNA, 15 bp, Homo sapiens
tgtgaaggaccaggg

SEQ ID NO: 1614546 - DNA, 15 bp, Homo sapiens
ctgtgaaggaccagg

SEQ ID NO: 1614547 - DNA, 15 bp, Homo sapiens
gctgtgaaggaccag

SEQ ID NO: 1614548 - DNA, 15 bp, Homo sapiens
agctgtgaaggacca

SEQ ID NO: 1614549 - DNA, 15 bp, Homo sapiens
cagctgtgaaggacc

SEQ ID NO: 1614550 - DNA, 15 bp, Homo sapiens
ccagctgtgaaggac

SEQ ID NO: 1614551 - DNA, 15 bp, Homo sapiens
tccagctgtgaagga

SEQ ID NO: 1614552 - DNA, 15 bp, Homo sapiens
ttccagctgtgaagg

SEQ ID NO: 1614553 - DNA, 15 bp, Homo sapiens
tttccagctgtgaag

SEQ ID NO: 1614554 - DNA, 15 bp, Homo sapiens
ctttccagctgtgaa

SEQ ID NO: 1614555 - DNA, 15 bp, Homo sapiens
cctttccagctgtga

SEQ ID NO: 1614556 - DNA, 15 bp, Homo sapiens
tcctttccagctgtg

SEQ ID NO: 1614557 - DNA, 15 bp, Homo sapiens
ctcctttccagctgt

SEQ ID NO: 1614558 - DNA, 15 bp, Homo sapiens
tctcctttccagctg

SEQ ID NO: 1614559 - DNA, 15 bp, Homo sapiens
ttctcctttccagct

SEQ ID NO: 1614560 - DNA, 15 bp, Homo sapiens
gttctcctttccagc

SEQ ID NO: 1614561 - DNA, 15 bp, Homo sapiens
tgttctcctttccag

SEQ ID NO: 1614562 - DNA, 15 bp, Homo sapiens
atgttctcctttcca

SEQ ID NO: 1614563 - DNA, 15 bp, Homo sapiens
tatgttctcctttcc

SEQ ID NO: 1614564 - DNA, 15 bp, Homo sapiens
ctatgttctcctttc

SEQ ID NO: 1614565 - DNA, 15 bp, Homo sapiens
gctatgttctccttt

SEQ ID NO: 1614566 - DNA, 15 bp, Homo sapiens
tgctatgttctcctt

SEQ ID NO: 1614567 - DNA, 15 bp, Homo sapiens
gtgctatgttctcct

SEQ ID NO: 1614568 - DNA, 15 bp, Homo sapiens
ggtgctatgttctcc

SEQ ID NO: 1614569 - DNA, 15 bp, Homo sapiens
gggtgctatgttctc

SEQ ID NO: 1614570 - DNA, 15 bp, Homo sapiens
ggggtgctatgttct

SEQ ID NO: 1614571 - DNA, 15 bp, Homo sapiens
tggggtgctatgttc

SEQ ID NO: 1614572 - DNA, 15 bp, Homo sapiens
ctggggtgctatgtt

SEQ ID NO: 1614573 - DNA, 15 bp, Homo sapiens
gctggggtgctatgt

SEQ ID NO: 1614574 - DNA, 15 bp, Homo sapiens
ggctggggtgctatg

SEQ ID NO: 1614575 - DNA, 15 bp, Homo sapiens
aggctggggtgctat

SEQ ID NO: 1614576 - DNA, 15 bp, Homo sapiens
gaggctggggtgcta

SEQ ID NO: 1614577 - DNA, 15 bp, Homo sapiens
tgaggctggggtgct

SEQ ID NO: 1614578 - DNA, 15 bp, Homo sapiens
ctgaggctggggtgc

SEQ ID NO: 1614579 - DNA, 15 bp, Homo sapiens
tctgaggctggggtg

SEQ ID NO: 1614580 - DNA, 15 bp, Homo sapiens
gtctgaggctggggt

SEQ ID NO: 1614581 - DNA, 15 bp, Homo sapiens
ggtctgaggctgggg

SEQ ID NO: 1614582 - DNA, 15 bp, Homo sapiens
gggtctgaggctggg

SEQ ID NO: 1614583 - DNA, 15 bp, Homo sapiens
ggggtctgaggctgg

SEQ ID NO: 1614584 - DNA, 15 bp, Homo sapiens
gggggtctgaggctg

SEQ ID NO: 1614585 - DNA, 15 bp, Homo sapiens
ggggggtctgaggct

SEQ ID NO: 1614586 - DNA, 15 bp, Homo sapiens
tggggggtctgaggc

SEQ ID NO: 1614587 - DNA, 15 bp, Homo sapiens
atggggggtctgagg

SEQ ID NO: 1614588 - DNA, 15 bp, Homo sapiens
catggggggtctgag

SEQ ID NO: 1614589 - DNA, 15 bp, Homo sapiens
ccatggggggtctga

SEQ ID NO: 1614590 - DNA, 15 bp, Homo sapiens
cccatggggggtctg

SEQ ID NO: 1614591 - DNA, 15 bp, Homo sapiens
ccccatggggggtct

SEQ ID NO: 1614592 - DNA, 15 bp, Homo sapiens
gccccatggggggtc

SEQ ID NO: 1614593 - DNA, 15 bp, Homo sapiens
tgccccatggggggt

SEQ ID NO: 1614594 - DNA, 15 bp, Homo sapiens
ctgccccatgggggg

SEQ ID NO: 1614595 - DNA, 15 bp, Homo sapiens
actgccccatggggg

SEQ ID NO: 1614596 - DNA, 15 bp, Homo sapiens
gactgccccatgggg

SEQ ID NO: 1614597 - DNA, 15 bp, Homo sapiens
ggactgccccatggg

SEQ ID NO: 1614598 - DNA, 15 bp, Homo sapiens
aggactgccccatgg

SEQ ID NO: 1614599 - DNA, 15 bp, Homo sapiens
caggactgccccatg

SEQ ID NO: 1614600 - DNA, 15 bp, Homo sapiens
gcaggactgccccat

SEQ ID NO: 1614601 - DNA, 15 bp, Homo sapiens
agcaggactgcccca

SEQ ID NO: 1614602 - DNA, 15 bp, Homo sapiens
cagcaggactgcccc

SEQ ID NO: 1614603 - DNA, 15 bp, Homo sapiens
ccagcaggactgccc

SEQ ID NO: 1614604 - DNA, 15 bp, Homo sapiens
gccagcaggactgcc

SEQ ID NO: 1614605 - DNA, 15 bp, Homo sapiens
tgccagcaggactgc

SEQ ID NO: 1614606 - DNA, 15 bp, Homo sapiens
gtgccagcaggactg

SEQ ID NO: 1614607 - DNA, 15 bp, Homo sapiens
ggtgccagcaggact

SEQ ID NO: 1614608 - DNA, 15 bp, Homo sapiens
cggtgccagcaggac

SEQ ID NO: 1614609 - DNA, 15 bp, Homo sapiens
tcggtgccagcagga

SEQ ID NO: 1614610 - DNA, 15 bp, Homo sapiens
gtcggtgccagcagg

SEQ ID NO: 1614611 - DNA, 15 bp, Homo sapiens
tgtcggtgccagcag

SEQ ID NO: 1614612 - DNA, 15 bp, Homo sapiens
gtgtcggtgccagca

SEQ ID NO: 1614613 - DNA, 15 bp, Homo sapiens
ggtgtcggtgccagc

SEQ ID NO: 1614614 - DNA, 15 bp, Homo sapiens
gggtgtcggtgccag

SEQ ID NO: 1614615 - DNA, 15 bp, Homo sapiens
ggggtgtcggtgcca

SEQ ID NO: 1614616 - DNA, 15 bp, Homo sapiens
gggggtgtcggtgcc

SEQ ID NO: 1614617 - DNA, 15 bp, Homo sapiens
ggggggtgtcggtgc

SEQ ID NO: 1614618 - DNA, 15 bp, Homo sapiens
cggggggtgtcggtg

SEQ ID NO: 1614619 - DNA, 15 bp, Homo sapiens
ccggggggtgtcggt

SEQ ID NO: 1614620 - DNA, 15 bp, Homo sapiens
cccggggggtgtcgg

SEQ ID NO: 1614621 - DNA, 15 bp, Homo sapiens
tcccggggggtgtcg

SEQ ID NO: 1614622 - DNA, 15 bp, Homo sapiens
ttcccggggggtgtc

SEQ ID NO: 1614623 - DNA, 15 bp, Homo sapiens
cttcccggggggtgt

SEQ ID NO: 1614624 - DNA, 15 bp, Homo sapiens
ccttcccggggggtg

SEQ ID NO: 1614625 - DNA, 15 bp, Homo sapiens
accttcccggggggt

SEQ ID NO: 1614626 - DNA, 15 bp, Homo sapiens
taccttcccgggggg

SEQ ID NO: 1614627 - DNA, 15 bp, Homo sapiens
ttaccttcccggggg

SEQ ID NO: 1614628 - DNA, 15 bp, Homo sapiens
cttaccttcccgggg

SEQ ID NO: 1614629 - DNA, 15 bp, Homo sapiens
ccttaccttcccggg

SEQ ID NO: 1614630 - DNA, 15 bp, Homo sapiens
tccttaccttcccgg

SEQ ID NO: 1614631 - DNA, 15 bp, Homo sapiens
ctccttaccttcccg

SEQ ID NO: 1614632 - DNA, 15 bp, Homo sapiens
tctccttaccttccc

SEQ ID NO: 1614633 - DNA, 15 bp, Homo sapiens
ctctccttaccttcc

SEQ ID NO: 1614634 - DNA, 15 bp, Homo sapiens
cctctccttaccttc

SEQ ID NO: 1614635 - DNA, 15 bp, Homo sapiens
gcctctccttacctt

SEQ ID NO: 1614636 - DNA, 15 bp, Homo sapiens
agcctctccttacct

SEQ ID NO: 1614637 - DNA, 15 bp, Homo sapiens
cagcctctccttacc

SEQ ID NO: 1614638 - DNA, 15 bp, Homo sapiens
ccagcctctccttac

SEQ ID NO: 1614639 - DNA, 15 bp, Homo sapiens
cccagcctctcctta

SEQ ID NO: 1614640 - DNA, 15 bp, Homo sapiens
ccccagcctctcctt

SEQ ID NO: 1614641 - DNA, 15 bp, Homo sapiens
gccccagcctctcct

SEQ ID NO: 1614642 - DNA, 15 bp, Homo sapiens
ggccccagcctctcc

SEQ ID NO: 1614643 - DNA, 15 bp, Homo sapiens
aggccccagcctctc

SEQ ID NO: 1614644 - DNA, 15 bp, Homo sapiens
caggccccagcctct

SEQ ID NO: 1614645 - DNA, 15 bp, Homo sapiens
tcaggccccagcctc

SEQ ID NO: 1614646 - DNA, 15 bp, Homo sapiens
ctcaggccccagcct

SEQ ID NO: 1614647 - DNA, 15 bp, Homo sapiens
tctcaggccccagcc

SEQ ID NO: 1614648 - DNA, 15 bp, Homo sapiens
ttctcaggccccagc

SEQ ID NO: 1614649 - DNA, 15 bp, Homo sapiens
tttctcaggccccag

SEQ ID NO: 1614650 - DNA, 15 bp, Homo sapiens
ctttctcaggcccca

SEQ ID NO: 1614651 - DNA, 15 bp, Homo sapiens
actttctcaggcccc

SEQ ID NO: 1614652 - DNA, 15 bp, Homo sapiens
cactttctcaggccc

SEQ ID NO: 1614653 - DNA, 15 bp, Homo sapiens
acactttctcaggcc

SEQ ID NO: 1614654 - DNA, 15 bp, Homo sapiens
gacactttctcaggc

SEQ ID NO: 1614655 - DNA, 15 bp, Homo sapiens
ggacactttctcagg

SEQ ID NO: 1614656 - DNA, 15 bp, Homo sapiens
gggacactttctcag

SEQ ID NO: 1614657 - DNA, 15 bp, Homo sapiens
ggggacactttctca

SEQ ID NO: 1614658 - DNA, 15 bp, Homo sapiens
gggggacactttctc

SEQ ID NO: 1614659 - DNA, 15 bp, Homo sapiens
tgggggacactttct

SEQ ID NO: 1614660 - DNA, 15 bp, Homo sapiens
gtgggggacactttc

SEQ ID NO: 1614661 - DNA, 15 bp, Homo sapiens
ggtgggggacacttt

SEQ ID NO: 1614662 - DNA, 15 bp, Homo sapiens
gggtgggggacactt

SEQ ID NO: 1614663 - DNA, 15 bp, Homo sapiens
agggtgggggacact

SEQ ID NO: 1614664 - DNA, 15 bp, Homo sapiens
tagggtgggggacac

SEQ ID NO: 1614665 - DNA, 15 bp, Homo sapiens
ctagggtgggggaca

SEQ ID NO: 1614666 - DNA, 15 bp, Homo sapiens
actagggtgggggac

SEQ ID NO: 1614667 - DNA, 15 bp, Homo sapiens
aactagggtggggga

SEQ ID NO: 1614668 - DNA, 15 bp, Homo sapiens
gaactagggtggggg

SEQ ID NO: 1614669 - DNA, 15 bp, Homo sapiens
ggaactagggtgggg

SEQ ID NO: 1614670 - DNA, 15 bp, Homo sapiens
aggaactagggtggg

SEQ ID NO: 1614671 - DNA, 15 bp, Homo sapiens
taggaactagggtgg

SEQ ID NO: 1614672 - DNA, 15 bp, Homo sapiens
gtaggaactagggtg

SEQ ID NO: 1614673 - DNA, 15 bp, Homo sapiens
ggtaggaactagggt

SEQ ID NO: 1614674 - DNA, 15 bp, Homo sapiens
gggtaggaactaggg

SEQ ID NO: 1614675 - DNA, 15 bp, Homo sapiens
tgggtaggaactagg

SEQ ID NO: 1614676 - DNA, 15 bp, Homo sapiens
ctgggtaggaactag

SEQ ID NO: 1614677 - DNA, 15 bp, Homo sapiens
tctgggtaggaacta

SEQ ID NO: 1614678 - DNA, 15 bp, Homo sapiens
gtctgggtaggaact

SEQ ID NO: 1614679 - DNA, 15 bp, Homo sapiens
ggtctgggtaggaac

SEQ ID NO: 1614680 - DNA, 15 bp, Homo sapiens
gggtctgggtaggaa

SEQ ID NO: 1614681 - DNA, 15 bp, Homo sapiens
agggtctgggtagga

SEQ ID NO: 1614682 - DNA, 15 bp, Homo sapiens
aagggtctgggtagg

SEQ ID NO: 1614683 - DNA, 15 bp, Homo sapiens
aaagggtctgggtag

SEQ ID NO: 1614684 - DNA, 15 bp, Homo sapiens
gaaagggtctgggta

SEQ ID NO: 1614685 - DNA, 15 bp, Homo sapiens
agaaagggtctgggt

SEQ ID NO: 1614686 - DNA, 15 bp, Homo sapiens
aagaaagggtctggg

SEQ ID NO: 1614687 - DNA, 15 bp, Homo sapiens
gaagaaagggtctgg

SEQ ID NO: 1614688 - DNA, 15 bp, Homo sapiens
agaagaaagggtctg

SEQ ID NO: 1614689 - DNA, 15 bp, Homo sapiens
cagaagaaagggtct

SEQ ID NO: 1614690 - DNA, 15 bp, Homo sapiens
acagaagaaagggtc

SEQ ID NO: 1614691 - DNA, 15 bp, Homo sapiens
cacagaagaaagggt

SEQ ID NO: 1614692 - DNA, 15 bp, Homo sapiens
gcacagaagaaaggg

SEQ ID NO: 1614693 - DNA, 15 bp, Homo sapiens
ggcacagaagaaagg

SEQ ID NO: 1614694 - DNA, 15 bp, Homo sapiens
gggcacagaagaaag

SEQ ID NO: 1614695 - DNA, 15 bp, Homo sapiens
agggcacagaagaaa

SEQ ID NO: 1614696 - DNA, 15 bp, Homo sapiens
gagggcacagaagaa

SEQ ID NO: 1614697 - DNA, 15 bp, Homo sapiens
tgagggcacagaaga

SEQ ID NO: 1614698 - DNA, 15 bp, Homo sapiens
ttgagggcacagaag

SEQ ID NO: 1614699 - DNA, 15 bp, Homo sapiens
gttgagggcacagaa

SEQ ID NO: 1614700 - DNA, 15 bp, Homo sapiens
tgttgagggcacaga

SEQ ID NO: 1614701 - DNA, 15 bp, Homo sapiens
gtgttgagggcacag

SEQ ID NO: 1614702 - DNA, 15 bp, Homo sapiens
ggtgttgagggcaca

SEQ ID NO: 1614703 - DNA, 15 bp, Homo sapiens
aggtgttgagggcac

SEQ ID NO: 1614704 - DNA, 15 bp, Homo sapiens
caggtgttgagggca

SEQ ID NO: 1614705 - DNA, 15 bp, Homo sapiens
ccaggtgttgagggc

SEQ ID NO: 1614706 - DNA, 15 bp, Homo sapiens
cccaggtgttgaggg

SEQ ID NO: 1614707 - DNA, 15 bp, Homo sapiens
acccaggtgttgagg

SEQ ID NO: 1614708 - DNA, 15 bp, Homo sapiens
aacccaggtgttgag

SEQ ID NO: 1614709 - DNA, 15 bp, Homo sapiens
gaacccaggtgttga

SEQ ID NO: 1614710 - DNA, 15 bp, Homo sapiens
agaacccaggtgttg

SEQ ID NO: 1614711 - DNA, 15 bp, Homo sapiens
tagaacccaggtgtt

SEQ ID NO: 1614712 - DNA, 15 bp, Homo sapiens
ctagaacccaggtgt

SEQ ID NO: 1614713 - DNA, 15 bp, Homo sapiens
gctagaacccaggtg

SEQ ID NO: 1614714 - DNA, 15 bp, Homo sapiens
ggctagaacccaggt

SEQ ID NO: 1614715 - DNA, 15 bp, Homo sapiens
gggctagaacccagg

SEQ ID NO: 1614716 - DNA, 15 bp, Homo sapiens
ggggctagaacccag

SEQ ID NO: 1614717 - DNA, 15 bp, Homo sapiens
tggggctagaaccca

SEQ ID NO: 1614718 - DNA, 15 bp, Homo sapiens
ctggggctagaaccc

SEQ ID NO: 1614719 - DNA, 15 bp, Homo sapiens
gctggggctagaacc

SEQ ID NO: 1614720 - DNA, 15 bp, Homo sapiens
ggctggggctagaac

SEQ ID NO: 1614721 - DNA, 15 bp, Homo sapiens
gggctggggctagaa

SEQ ID NO: 1614722 - DNA, 15 bp, Homo sapiens
cagggctggggctag

SEQ ID NO: 1614723 - DNA, 15 bp, Homo sapiens
ccagggctggggcta

SEQ ID NO: 1614724 - DNA, 15 bp, Homo sapiens
accagggctggggct

SEQ ID NO: 1614725 - DNA, 15 bp, Homo sapiens
aaccagggctggggc

SEQ ID NO: 1614726 - DNA, 15 bp, Homo sapiens
aaaccagggctgggg

SEQ ID NO: 1614727 - DNA, 15 bp, Homo sapiens
caaaccagggctggg

SEQ ID NO: 1614728 - DNA, 15 bp, Homo sapiens
gcaaaccagggctgg

SEQ ID NO: 1614729 - DNA, 15 bp, Homo sapiens
agcaaaccagggctg

SEQ ID NO: 1614730 - DNA, 15 bp, Homo sapiens
tagcaaaccagggct

SEQ ID NO: 1614731 - DNA, 15 bp, Homo sapiens
atagcaaaccagggc

SEQ ID NO: 1614732 - DNA, 15 bp, Homo sapiens
catagcaaaccaggg

SEQ ID NO: 1614733 - DNA, 15 bp, Homo sapiens
acatagcaaaccagg

SEQ ID NO: 1614734 - DNA, 15 bp, Homo sapiens
tacatagcaaaccag

SEQ ID NO: 1614735 - DNA, 15 bp, Homo sapiens
ttacatagcaaacca

SEQ ID NO: 1614736 - DNA, 15 bp, Homo sapiens
attacatagcaaacc

SEQ ID NO: 1614737 - DNA, 15 bp, Homo sapiens
gattacatagcaaac

SEQ ID NO: 1614738 - DNA, 15 bp, Homo sapiens
agattacatagcaaa

SEQ ID NO: 1614739 - DNA, 15 bp, Homo sapiens
tagattacatagcaa

SEQ ID NO: 1614740 - DNA, 15 bp, Homo sapiens
ctagattacatagca

SEQ ID NO: 1614741 - DNA, 15 bp, Homo sapiens
actagattacatagc

SEQ ID NO: 1614742 - DNA, 15 bp, Homo sapiens
gactagattacatag

SEQ ID NO: 1614743 - DNA, 15 bp, Homo sapiens
tgactagattacata

SEQ ID NO: 1614744 - DNA, 15 bp, Homo sapiens
ttgactagattacat

SEQ ID NO: 1614745 - DNA, 15 bp, Homo sapiens
tttgactagattaca

SEQ ID NO: 1614746 - DNA, 15 bp, Homo sapiens
atttgactagattac

SEQ ID NO: 1614747 - DNA, 15 bp, Homo sapiens
gatttgactagatta

SEQ ID NO: 1614748 - DNA, 15 bp, Homo sapiens
tgatttgactagatt

SEQ ID NO: 1614749 - DNA, 15 bp, Homo sapiens
gtgatttgactagat

SEQ ID NO: 1614750 - DNA, 15 bp, Homo sapiens
agtgatttgactaga

SEQ ID NO: 1614751 - DNA, 15 bp, Homo sapiens
cagtgatttgactag

SEQ ID NO: 1614752 - DNA, 15 bp, Homo sapiens
gcagtgatttgacta

SEQ ID NO: 1614753 - DNA, 15 bp, Homo sapiens
agcagtgatttgact

SEQ ID NO: 1614754 - DNA, 15 bp, Homo sapiens
gagcagtgatttgac

SEQ ID NO: 1614755 - DNA, 15 bp, Homo sapiens
agagcagtgatttga

SEQ ID NO: 1614756 - DNA, 15 bp, Homo sapiens
aagagcagtgatttg

SEQ ID NO: 1614757 - DNA, 15 bp, Homo sapiens
gaagagcagtgattt

SEQ ID NO: 1614758 - DNA, 15 bp, Homo sapiens
agaagagcagtgatt

SEQ ID NO: 1614759 - DNA, 15 bp, Homo sapiens
gagaagagcagtgat

SEQ ID NO: 1614760 - DNA, 15 bp, Homo sapiens
agagaagagcagtga

SEQ ID NO: 1614761 - DNA, 15 bp, Homo sapiens
tagagaagagcagtg

SEQ ID NO: 1614762 - DNA, 15 bp, Homo sapiens
ctagagaagagcagt

SEQ ID NO: 1614763 - DNA, 15 bp, Homo sapiens
cctagagaagagcag

SEQ ID NO: 1614764 - DNA, 15 bp, Homo sapiens
gcctagagaagagca

SEQ ID NO: 1614765 - DNA, 15 bp, Homo sapiens
tgcctagagaagagc

SEQ ID NO: 1614766 - DNA, 15 bp, Homo sapiens
ttgcctagagaagag

SEQ ID NO: 1614767 - DNA, 15 bp, Homo sapiens
tttgcctagagaaga

SEQ ID NO: 1614768 - DNA, 15 bp, Homo sapiens
ttttgcctagagaag

SEQ ID NO: 1614769 - DNA, 15 bp, Homo sapiens
attttgcctagagaa

SEQ ID NO: 1614770 - DNA, 15 bp, Homo sapiens
cattttgcctagaga

SEQ ID NO: 1614771 - DNA, 15 bp, Homo sapiens
tcattttgcctagag

SEQ ID NO: 1614772 - DNA, 15 bp, Homo sapiens
ctcattttgcctaga

SEQ ID NO: 1614773 - DNA, 15 bp, Homo sapiens
cctcattttgcctag

SEQ ID NO: 1614774 - DNA, 15 bp, Homo sapiens
ccctcattttgccta

SEQ ID NO: 1614775 - DNA, 15 bp, Homo sapiens
cccctcattttgcct

SEQ ID NO: 1614776 - DNA, 15 bp, Homo sapiens
tcccctcattttgcc

SEQ ID NO: 1614777 - DNA, 15 bp, Homo sapiens
ttcccctcattttgc

SEQ ID NO: 1614778 - DNA, 15 bp, Homo sapiens
tttcccctcattttg

SEQ ID NO: 1614779 - DNA, 15 bp, Homo sapiens
ttttcccctcatttt

SEQ ID NO: 1614780 - DNA, 15 bp, Homo sapiens
gttttcccctcattt

SEQ ID NO: 1614781 - DNA, 15 bp, Homo sapiens
cgttttcccctcatt

SEQ ID NO: 1614782 - DNA, 15 bp, Homo sapiens
tcgttttcccctcat

SEQ ID NO: 1614783 - DNA, 15 bp, Homo sapiens
ctcgttttcccctca

SEQ ID NO: 1614784 - DNA, 15 bp, Homo sapiens
cctcgttttcccctc

SEQ ID NO: 1614785 - DNA, 15 bp, Homo sapiens
ccctcgttttcccct

SEQ ID NO: 1614786 - DNA, 15 bp, Homo sapiens
gccctcgttttcccc

SEQ ID NO: 1614787 - DNA, 15 bp, Homo sapiens
ggccctcgttttccc

SEQ ID NO: 1614788 - DNA, 15 bp, Homo sapiens
aggccctcgttttcc

SEQ ID NO: 1614789 - DNA, 15 bp, Homo sapiens
gaggccctcgttttc

SEQ ID NO: 1614790 - DNA, 15 bp, Homo sapiens
ggaggccctcgtttt

SEQ ID NO: 1614791 - DNA, 15 bp, Homo sapiens
gggaggccctcgttt

SEQ ID NO: 1614792 - DNA, 15 bp, Homo sapiens
tgggaggccctcgtt

SEQ ID NO: 1614793 - DNA, 15 bp, Homo sapiens
ctgggaggccctcgt

SEQ ID NO: 1614794 - DNA, 15 bp, Homo sapiens
gctgggaggccctcg

SEQ ID NO: 1614795 - DNA, 15 bp, Homo sapiens
ggctgggaggccctc

SEQ ID NO: 1614796 - DNA, 15 bp, Homo sapiens
gggctgggaggccct

SEQ ID NO: 1614797 - DNA, 15 bp, Homo sapiens
ggggctgggaggccc

SEQ ID NO: 1614798 - DNA, 15 bp, Homo sapiens
tggggctgggaggcc

SEQ ID NO: 1614799 - DNA, 15 bp, Homo sapiens
ttggggctgggaggc

SEQ ID NO: 1614800 - DNA, 15 bp, Homo sapiens
tttggggctgggagg

SEQ ID NO: 1614801 - DNA, 15 bp, Homo sapiens
ctttggggctgggag

SEQ ID NO: 1614802 - DNA, 15 bp, Homo sapiens
actttggggctggga

SEQ ID NO: 1614803 - DNA, 15 bp, Homo sapiens
aactttggggctggg

SEQ ID NO: 1614804 - DNA, 15 bp, Homo sapiens
aaactttggggctgg

SEQ ID NO: 1614805 - DNA, 15 bp, Homo sapiens
aaaactttggggctg

SEQ ID NO: 1614806 - DNA, 15 bp, Homo sapiens
caaaactttggggct

SEQ ID NO: 1614807 - DNA, 15 bp, Homo sapiens
ccaaaactttggggc

SEQ ID NO: 1614808 - DNA, 15 bp, Homo sapiens
cccaaaactttgggg

SEQ ID NO: 1614809 - DNA, 15 bp, Homo sapiens
ccccaaaactttggg

SEQ ID NO: 1614810 - DNA, 15 bp, Homo sapiens
accccaaaactttgg

SEQ ID NO: 1614811 - DNA, 15 bp, Homo sapiens
aaccccaaaactttg

SEQ ID NO: 1614812 - DNA, 15 bp, Homo sapiens
gaaccccaaaacttt

SEQ ID NO: 1614813 - DNA, 15 bp, Homo sapiens
agaaccccaaaactt

SEQ ID NO: 1614814 - DNA, 15 bp, Homo sapiens
cagaaccccaaaact

SEQ ID NO: 1614815 - DNA, 15 bp, Homo sapiens
gcagaaccccaaaac

SEQ ID NO: 1614816 - DNA, 15 bp, Homo sapiens
ggcagaaccccaaaa

SEQ ID NO: 1614817 - DNA, 15 bp, Homo sapiens
gggcagaaccccaaa

SEQ ID NO: 1614818 - DNA, 15 bp, Homo sapiens
cgggcagaaccccaa

SEQ ID NO: 1614819 - DNA, 15 bp, Homo sapiens
acgggcagaacccca

SEQ ID NO: 1614820 - DNA, 15 bp, Homo sapiens
tacgggcagaacccc

SEQ ID NO: 1614821 - DNA, 15 bp, Homo sapiens
atacgggcagaaccc

SEQ ID NO: 1614822 - DNA, 15 bp, Homo sapiens
gatacgggcagaacc

SEQ ID NO: 1614823 - DNA, 15 bp, Homo sapiens
ggatacgggcagaac

SEQ ID NO: 1614824 - DNA, 15 bp, Homo sapiens
gggatacgggcagaa

SEQ ID NO: 1614825 - DNA, 15 bp, Homo sapiens
tgggatacgggcaga

SEQ ID NO: 1614826 - DNA, 15 bp, Homo sapiens
ctgggatacgggcag

SEQ ID NO: 1614827 - DNA, 15 bp, Homo sapiens
tctgggatacgggca

SEQ ID NO: 1614828 - DNA, 15 bp, Homo sapiens
ttctgggatacgggc

SEQ ID NO: 1614829 - DNA, 15 bp, Homo sapiens
attctgggatacggg

SEQ ID NO: 1614830 - DNA, 15 bp, Homo sapiens
tattctgggatacgg

SEQ ID NO: 1614831 - DNA, 15 bp, Homo sapiens
gtattctgggatacg

SEQ ID NO: 1614832 - DNA, 15 bp, Homo sapiens
tgtattctgggatac

SEQ ID NO: 1614833 - DNA, 15 bp, Homo sapiens
gtgtattctgggata

SEQ ID NO: 1614834 - DNA, 15 bp, Homo sapiens
agtgtattctgggat

SEQ ID NO: 1614835 - DNA, 15 bp, Homo sapiens
gagtgtattctggga

SEQ ID NO: 1614836 - DNA, 15 bp, Homo sapiens
tgagtgtattctggg

SEQ ID NO: 1614837 - DNA, 15 bp, Homo sapiens
ttgagtgtattctgg

SEQ ID NO: 1614838 - DNA, 15 bp, Homo sapiens
attgagtgtattctg

SEQ ID NO: 1614839 - DNA, 15 bp, Homo sapiens
gattgagtgtattct

SEQ ID NO: 1614840 - DNA, 15 bp, Homo sapiens
ggattgagtgtattc

SEQ ID NO: 1614841 - DNA, 15 bp, Homo sapiens
aggattgagtgtatt

SEQ ID NO: 1614842 - DNA, 15 bp, Homo sapiens
aaggattgagtgtat

SEQ ID NO: 1614843 - DNA, 15 bp, Homo sapiens
aaaggattgagtgta

SEQ ID NO: 1614844 - DNA, 15 bp, Homo sapiens
aaaaggattgagtgt

SEQ ID NO: 1614845 - DNA, 15 bp, Homo sapiens
gaaaaggattgagtg

SEQ ID NO: 1614846 - DNA, 15 bp, Homo sapiens
ggaaaaggattgagt

SEQ ID NO: 1614847 - DNA, 15 bp, Homo sapiens
tggaaaaggattgag

SEQ ID NO: 1614848 - DNA, 15 bp, Homo sapiens
ctggaaaaggattga

SEQ ID NO: 1614849 - DNA, 15 bp, Homo sapiens
gctggaaaaggattg

SEQ ID NO: 1614850 - DNA, 15 bp, Homo sapiens
ggctggaaaaggatt

SEQ ID NO: 1614851 - DNA, 15 bp, Homo sapiens
aggctggaaaaggat

SEQ ID NO: 1614852 - DNA, 15 bp, Homo sapiens
aaggctggaaaagga

SEQ ID NO: 1614853 - DNA, 15 bp, Homo sapiens
caaggctggaaaagg

SEQ ID NO: 1614854 - DNA, 15 bp, Homo sapiens
acaaggctggaaaag

SEQ ID NO: 1614855 - DNA, 15 bp, Homo sapiens
tacaaggctggaaaa

SEQ ID NO: 1614856 - DNA, 15 bp, Homo sapiens
gtacaaggctggaaa

SEQ ID NO: 1614857 - DNA, 15 bp, Homo sapiens
ggtacaaggctggaa

SEQ ID NO: 1614858 - DNA, 15 bp, Homo sapiens
gggtacaaggctgga

SEQ ID NO: 1614859 - DNA, 15 bp, Homo sapiens
tgggtacaaggctgg

SEQ ID NO: 1614860 - DNA, 15 bp, Homo sapiens
ttgggtacaaggctg

SEQ ID NO: 1614861 - DNA, 15 bp, Homo sapiens
gttgggtacaaggct

SEQ ID NO: 1614862 - DNA, 15 bp, Homo sapiens
agttgggtacaaggc

SEQ ID NO: 1614863 - DNA, 15 bp, Homo sapiens
gagttgggtacaagg

SEQ ID NO: 1614864 - DNA, 15 bp, Homo sapiens
ggagttgggtacaag

SEQ ID NO: 1614865 - DNA, 15 bp, Homo sapiens
tggagttgggtacaa

SEQ ID NO: 1614866 - DNA, 15 bp, Homo sapiens
ctggagttgggtaca

SEQ ID NO: 1614867 - DNA, 15 bp, Homo sapiens
gctggagttgggtac

SEQ ID NO: 1614868 - DNA, 15 bp, Homo sapiens
ggctggagttgggta

SEQ ID NO: 1614869 - DNA, 15 bp, Homo sapiens
aggctggagttgggt

SEQ ID NO: 1614870 - DNA, 15 bp, Homo sapiens
caggctggagttggg

SEQ ID NO: 1614871 - DNA, 15 bp, Homo sapiens
acaggctggagttgg

SEQ ID NO: 1614872 - DNA, 15 bp, Homo sapiens
cacaggctggagttg

SEQ ID NO: 1614873 - DNA, 15 bp, Homo sapiens
gcacaggctggagtt

SEQ ID NO: 1614874 - DNA, 15 bp, Homo sapiens
ggcacaggctggagt

SEQ ID NO: 1614875 - DNA, 15 bp, Homo sapiens
gggcacaggctggag

SEQ ID NO: 1614876 - DNA, 15 bp, Homo sapiens
agggcacaggctgga

SEQ ID NO: 1614877 - DNA, 15 bp, Homo sapiens
gagggcacaggctgg

SEQ ID NO: 1614878 - DNA, 15 bp, Homo sapiens
agagggcacaggctg

SEQ ID NO: 1614879 - DNA, 15 bp, Homo sapiens
cagagggcacaggct

SEQ ID NO: 1614880 - DNA, 15 bp, Homo sapiens
gcagagggcacaggc

SEQ ID NO: 1614881 - DNA, 15 bp, Homo sapiens
ggcagagggcacagg

SEQ ID NO: 1614882 - DNA, 15 bp, Homo sapiens
gggcagagggcacag

SEQ ID NO: 1614883 - DNA, 15 bp, Homo sapiens
ggggcagagggcaca

SEQ ID NO: 1614884 - DNA, 15 bp, Homo sapiens
aggggcagagggcac

SEQ ID NO: 1614885 - DNA, 15 bp, Homo sapiens
caggggcagagggca

SEQ ID NO: 1614886 - DNA, 15 bp, Homo sapiens
gcaggggcagagggc

SEQ ID NO: 1614887 - DNA, 15 bp, Homo sapiens
tgcaggggcagaggg

SEQ ID NO: 1614888 - DNA, 15 bp, Homo sapiens
ctgcaggggcagagg

SEQ ID NO: 1614889 - DNA, 15 bp, Homo sapiens
tctgcaggggcagag

SEQ ID NO: 1614890 - DNA, 15 bp, Homo sapiens
ttctgcaggggcaga

SEQ ID NO: 1614891 - DNA, 15 bp, Homo sapiens
gttctgcaggggcag

SEQ ID NO: 1614892 - DNA, 15 bp, Homo sapiens
agttctgcaggggca

SEQ ID NO: 1614893 - DNA, 15 bp, Homo sapiens
gagttctgcaggggc

SEQ ID NO: 1614894 - DNA, 15 bp, Homo sapiens
ggagttctgcagggg

SEQ ID NO: 1614895 - DNA, 15 bp, Homo sapiens
aggagttctgcaggg

SEQ ID NO: 1614896 - DNA, 15 bp, Homo sapiens
caggagttctgcagg

SEQ ID NO: 1614897 - DNA, 15 bp, Homo sapiens
acaggagttctgcag

SEQ ID NO: 1614898 - DNA, 15 bp, Homo sapiens
cacaggagttctgca

SEQ ID NO: 1614899 - DNA, 15 bp, Homo sapiens
ccacaggagttctgc

SEQ ID NO: 1614900 - DNA, 15 bp, Homo sapiens
cccacaggagttctg

SEQ ID NO: 1614901 - DNA, 15 bp, Homo sapiens
gcccacaggagttct

SEQ ID NO: 1614902 - DNA, 15 bp, Homo sapiens
ggcccacaggagttc

SEQ ID NO: 1614903 - DNA, 15 bp, Homo sapiens
aggcccacaggagtt

SEQ ID NO: 1614904 - DNA, 15 bp, Homo sapiens
gaggcccacaggagt

SEQ ID NO: 1614905 - DNA, 15 bp, Homo sapiens
agaggcccacaggag

SEQ ID NO: 1614906 - DNA, 15 bp, Homo sapiens
cagaggcccacagga

SEQ ID NO: 1614907 - DNA, 15 bp, Homo sapiens
gcagaggcccacagg

SEQ ID NO: 1614908 - DNA, 15 bp, Homo sapiens
agcagaggcccacag

SEQ ID NO: 1614909 - DNA, 15 bp, Homo sapiens
cagcagaggcccaca

SEQ ID NO: 1614910 - DNA, 15 bp, Homo sapiens
gcagcagaggcccac

SEQ ID NO: 1614911 - DNA, 15 bp, Homo sapiens
agcagcagaggccca

SEQ ID NO: 1614912 - DNA, 15 bp, Homo sapiens
gagcagcagaggccc

SEQ ID NO: 1614913 - DNA, 15 bp, Homo sapiens
tgagcagcagaggcc

SEQ ID NO: 1614914 - DNA, 15 bp, Homo sapiens
gctgagcagcagagg

SEQ ID NO: 1614915 - DNA, 15 bp, Homo sapiens
ggctgagcagcagag

SEQ ID NO: 1614916 - DNA, 15 bp, Homo sapiens
tggctgagcagcaga

SEQ ID NO: 1614917 - DNA, 15 bp, Homo sapiens
atggctgagcagcag

SEQ ID NO: 1614918 - DNA, 15 bp, Homo sapiens
gatggctgagcagca

SEQ ID NO: 1614919 - DNA, 15 bp, Homo sapiens
ggatggctgagcagc

SEQ ID NO: 1614920 - DNA, 15 bp, Homo sapiens
gggatggctgagcag

SEQ ID NO: 1614921 - DNA, 15 bp, Homo sapiens
ggggatggctgagca

SEQ ID NO: 1614922 - DNA, 15 bp, Homo sapiens
gggggatggctgagc

SEQ ID NO: 1614923 - DNA, 15 bp, Homo sapiens
cgggggatggctgag

SEQ ID NO: 1614924 - DNA, 15 bp, Homo sapiens
ccgggggatggctga

SEQ ID NO: 1614925 - DNA, 15 bp, Homo sapiens
tccgggggatggctg

SEQ ID NO: 1614926 - DNA, 15 bp, Homo sapiens
ttccgggggatggct

SEQ ID NO: 1614927 - DNA, 15 bp, Homo sapiens
cttccgggggatggc

SEQ ID NO: 1614928 - DNA, 15 bp, Homo sapiens
gcttccgggggatgg

SEQ ID NO: 1614929 - DNA, 15 bp, Homo sapiens
ggcttccgggggatg

SEQ ID NO: 1614930 - DNA, 15 bp, Homo sapiens
aggcttccgggggat

SEQ ID NO: 1614931 - DNA, 15 bp, Homo sapiens
gaggcttccggggga

SEQ ID NO: 1614932 - DNA, 15 bp, Homo sapiens
cgaggcttccggggg

SEQ ID NO: 1614933 - DNA, 15 bp, Homo sapiens
gcgaggcttccgggg

SEQ ID NO: 1614934 - DNA, 15 bp, Homo sapiens
ggcgaggcttccggg

SEQ ID NO: 1614935 - DNA, 15 bp, Homo sapiens
gggcgaggcttccgg

SEQ ID NO: 1614936 - DNA, 15 bp, Homo sapiens
agggcgaggcttccg

SEQ ID NO: 1614937 - DNA, 15 bp, Homo sapiens
aagggcgaggcttcc

SEQ ID NO: 1614938 - DNA, 15 bp, Homo sapiens
caagggcgaggcttc

SEQ ID NO: 1614939 - DNA, 15 bp, Homo sapiens
acaagggcgaggctt

SEQ ID NO: 1614940 - DNA, 15 bp, Homo sapiens
gacaagggcgaggct

SEQ ID NO: 1614941 - DNA, 15 bp, Homo sapiens
ggacaagggcgaggc

SEQ ID NO: 1614942 - DNA, 15 bp, Homo sapiens
aggacaagggcgagg

SEQ ID NO: 1614943 - DNA, 15 bp, Homo sapiens
caggacaagggcgag

SEQ ID NO: 1614944 - DNA, 15 bp, Homo sapiens
ccaggacaagggcga

SEQ ID NO: 1614945 - DNA, 15 bp, Homo sapiens
tccaggacaagggcg

SEQ ID NO: 1614946 - DNA, 15 bp, Homo sapiens
gtccaggacaagggc

SEQ ID NO: 1614947 - DNA, 15 bp, Homo sapiens
agtccaggacaaggg

SEQ ID NO: 1614948 - DNA, 15 bp, Homo sapiens
gagtccaggacaagg

SEQ ID NO: 1614949 - DNA, 15 bp, Homo sapiens
ggagtccaggacaag

SEQ ID NO: 1614950 - DNA, 15 bp, Homo sapiens
cggagtccaggacaa

SEQ ID NO: 1614951 - DNA, 15 bp, Homo sapiens
ccggagtccaggaca

SEQ ID NO: 1614952 - DNA, 15 bp, Homo sapiens
accggagtccaggac

SEQ ID NO: 1614953 - DNA, 15 bp, Homo sapiens
caccggagtccagga

SEQ ID NO: 1614954 - DNA, 15 bp, Homo sapiens
gcaccggagtccagg

SEQ ID NO: 1614955 - DNA, 15 bp, Homo sapiens
ggcaccggagtccag

SEQ ID NO: 1614956 - DNA, 15 bp, Homo sapiens
aggcaccggagtcca

SEQ ID NO: 1614957 - DNA, 15 bp, Homo sapiens
gaggcaccggagtcc

SEQ ID NO: 1614958 - DNA, 15 bp, Homo sapiens
ggaggcaccggagtc

SEQ ID NO: 1614959 - DNA, 15 bp, Homo sapiens
aggaggcaccggagt

SEQ ID NO: 1614960 - DNA, 15 bp, Homo sapiens
caggaggcaccggag

SEQ ID NO: 1614961 - DNA, 15 bp, Homo sapiens
ccaggaggcaccgga

SEQ ID NO: 1614962 - DNA, 15 bp, Homo sapiens
gccaggaggcaccgg

SEQ ID NO: 1614963 - DNA, 15 bp, Homo sapiens
ggccaggaggcaccg

SEQ ID NO: 1614964 - DNA, 15 bp, Homo sapiens
gggccaggaggcacc

SEQ ID NO: 1614965 - DNA, 15 bp, Homo sapiens
agggccaggaggcac

SEQ ID NO: 1614966 - DNA, 15 bp, Homo sapiens
aagggccaggaggca

SEQ ID NO: 1614967 - DNA, 15 bp, Homo sapiens
caagggccaggaggc

SEQ ID NO: 1614968 - DNA, 15 bp, Homo sapiens
ccaagggccaggagg

SEQ ID NO: 1614969 - DNA, 15 bp, Homo sapiens
cccaagggccaggag

SEQ ID NO: 1614970 - DNA, 15 bp, Homo sapiens
acccaagggccagga

SEQ ID NO: 1614971 - DNA, 15 bp, Homo sapiens
gacccaagggccagg

SEQ ID NO: 1614972 - DNA, 15 bp, Homo sapiens
ggacccaagggccag

SEQ ID NO: 1614973 - DNA, 15 bp, Homo sapiens
gggacccaagggcca

SEQ ID NO: 1614974 - DNA, 15 bp, Homo sapiens
agggacccaagggcc

SEQ ID NO: 1614975 - DNA, 15 bp, Homo sapiens
cagggacccaagggc

SEQ ID NO: 1614976 - DNA, 15 bp, Homo sapiens
ccagggacccaaggg

SEQ ID NO: 1614977 - DNA, 15 bp, Homo sapiens
tccagggacccaagg

SEQ ID NO: 1614978 - DNA, 15 bp, Homo sapiens
gtccagggacccaag

SEQ ID NO: 1614979 - DNA, 15 bp, Homo sapiens
tgtccagggacccaa

SEQ ID NO: 1614980 - DNA, 15 bp, Homo sapiens
gtgtccagggaccca

SEQ ID NO: 1614981 - DNA, 15 bp, Homo sapiens
agtgtccagggaccc

SEQ ID NO: 1614982 - DNA, 15 bp, Homo sapiens
cagtgtccagggacc

SEQ ID NO: 1614983 - DNA, 15 bp, Homo sapiens
ccagtgtccagggac

SEQ ID NO: 1614984 - DNA, 15 bp, Homo sapiens
gccagtgtccaggga

SEQ ID NO: 1614985 - DNA, 15 bp, Homo sapiens
agccagtgtccaggg

SEQ ID NO: 1614986 - DNA, 15 bp, Homo sapiens
cagccagtgtccagg

SEQ ID NO: 1614987 - DNA, 15 bp, Homo sapiens
gcagccagtgtccag

SEQ ID NO: 1614988 - DNA, 15 bp, Homo sapiens
ggcagccagtgtcca

SEQ ID NO: 1614989 - DNA, 15 bp, Homo sapiens
aggcagccagtgtcc

SEQ ID NO: 1614990 - DNA, 15 bp, Homo sapiens
gaggcagccagtgtc

SEQ ID NO: 1614991 - DNA, 15 bp, Homo sapiens
ggaggcagccagtgt

SEQ ID NO: 1614992 - DNA, 15 bp, Homo sapiens
tggaggcagccagtg

SEQ ID NO: 1614993 - DNA, 15 bp, Homo sapiens
ctggaggcagccagt

SEQ ID NO: 1614994 - DNA, 15 bp, Homo sapiens
cctggaggcagccag

SEQ ID NO: 1614995 - DNA, 15 bp, Homo sapiens
gcctggaggcagcca

SEQ ID NO: 1614996 - DNA, 15 bp, Homo sapiens
agcctggaggcagcc

SEQ ID NO: 1614997 - DNA, 15 bp, Homo sapiens
aagcctggaggcagc

SEQ ID NO: 1614998 - DNA, 15 bp, Homo sapiens
gaagcctggaggcag

SEQ ID NO: 1614999 - DNA, 15 bp, Homo sapiens
agaagcctggaggca

SEQ ID NO: 1615000 - DNA, 15 bp, Homo sapiens
gagaagcctggaggc

SEQ ID NO: 1615001 - DNA, 15 bp, Homo sapiens
ggagaagcctggagg

SEQ ID NO: 1615002 - DNA, 15 bp, Homo sapiens
tggagaagcctggag

SEQ ID NO: 1615003 - DNA, 15 bp, Homo sapiens
atggagaagcctgga

SEQ ID NO: 1615004 - DNA, 15 bp, Homo sapiens
catggagaagcctgg

SEQ ID NO: 1615005 - DNA, 15 bp, Homo sapiens
gcatggagaagcctg

SEQ ID NO: 1615006 - DNA, 15 bp, Homo sapiens
ggcatggagaagcct

SEQ ID NO: 1615007 - DNA, 15 bp, Homo sapiens
tggcatggagaagcc

SEQ ID NO: 1615008 - DNA, 15 bp, Homo sapiens
gtggcatggagaagc

SEQ ID NO: 1615009 - DNA, 15 bp, Homo sapiens
ggtggcatggagaag

SEQ ID NO: 1615010 - DNA, 15 bp, Homo sapiens
tggtggcatggagaa

SEQ ID NO: 1615011 - DNA, 15 bp, Homo sapiens
gtggtggcatggaga

SEQ ID NO: 1615012 - DNA, 15 bp, Homo sapiens
ggtggtggcatggag

SEQ ID NO: 1615013 - DNA, 15 bp, Homo sapiens
tggtggtggcatgga

SEQ ID NO: 1615014 - DNA, 15 bp, Homo sapiens
ctggtggtggcatgg

SEQ ID NO: 1615015 - DNA, 15 bp, Homo sapiens
actggtggtggcatg

SEQ ID NO: 1615016 - DNA, 15 bp, Homo sapiens
cactggtggtggcat

SEQ ID NO: 1615017 - DNA, 15 bp, Homo sapiens
ccactggtggtggca

SEQ ID NO: 1615018 - DNA, 15 bp, Homo sapiens
accactggtggtggc

SEQ ID NO: 1615019 - DNA, 15 bp, Homo sapiens
caccactggtggtgg

SEQ ID NO: 1615020 - DNA, 15 bp, Homo sapiens
acaccactggtggtg

SEQ ID NO: 1615021 - DNA, 15 bp, Homo sapiens
cacaccactggtggt

SEQ ID NO: 1615022 - DNA, 15 bp, Homo sapiens
gcacaccactggtgg

SEQ ID NO: 1615023 - DNA, 15 bp, Homo sapiens
ggcacaccactggtg

SEQ ID NO: 1615024 - DNA, 15 bp, Homo sapiens
cggcacaccactggt

SEQ ID NO: 1615025 - DNA, 15 bp, Homo sapiens
gcggcacaccactgg

SEQ ID NO: 1615026 - DNA, 15 bp, Homo sapiens
ggcggcacaccactg

SEQ ID NO: 1615027 - DNA, 15 bp, Homo sapiens
aggcggcacaccact

SEQ ID NO: 1615028 - DNA, 15 bp, Homo sapiens
caggcggcacaccac

SEQ ID NO: 1615029 - DNA, 15 bp, Homo sapiens
gcaggcggcacacca

SEQ ID NO: 1615030 - DNA, 15 bp, Homo sapiens
agcaggcggcacacc

SEQ ID NO: 1615031 - DNA, 15 bp, Homo sapiens
cagcaggcggcacac

SEQ ID NO: 1615032 - DNA, 15 bp, Homo sapiens
acagcaggcggcaca

SEQ ID NO: 1615033 - DNA, 15 bp, Homo sapiens
tacagcaggcggcac

SEQ ID NO: 1615034 - DNA, 15 bp, Homo sapiens
gtacagcaggcggca

SEQ ID NO: 1615035 - DNA, 15 bp, Homo sapiens
ggtacagcaggcggc

SEQ ID NO: 1615036 - DNA, 15 bp, Homo sapiens
tggtacagcaggcgg

SEQ ID NO: 1615037 - DNA, 15 bp, Homo sapiens
ttggtacagcaggcg

SEQ ID NO: 1615038 - DNA, 15 bp, Homo sapiens
cttggtacagcaggc

SEQ ID NO: 1615039 - DNA, 15 bp, Homo sapiens
tcttggtacagcagg

SEQ ID NO: 1615040 - DNA, 15 bp, Homo sapiens
ttcttggtacagcag

SEQ ID NO: 1615041 - DNA, 15 bp, Homo sapiens
gttcttggtacagca

SEQ ID NO: 1615042 - DNA, 15 bp, Homo sapiens
ggttcttggtacagc

SEQ ID NO: 1615043 - DNA, 15 bp, Homo sapiens
aggttcttggtacag

SEQ ID NO: 1615044 - DNA, 15 bp, Homo sapiens
caggttcttggtaca

SEQ ID NO: 1615045 - DNA, 15 bp, Homo sapiens
gcaggttcttggtac

SEQ ID NO: 1615046 - DNA, 15 bp, Homo sapiens
agcaggttcttggta

SEQ ID NO: 1615047 - DNA, 15 bp, Homo sapiens
cagcaggttcttggt

SEQ ID NO: 1615048 - DNA, 15 bp, Homo sapiens
acagcaggttcttgg

SEQ ID NO: 1615049 - DNA, 15 bp, Homo sapiens
gacagcaggttcttg

SEQ ID NO: 1615050 - DNA, 15 bp, Homo sapiens
agacagcaggttctt

SEQ ID NO: 1615051 - DNA, 15 bp, Homo sapiens
gagacagcaggttct

SEQ ID NO: 1615052 - DNA, 15 bp, Homo sapiens
agagacagcaggttc

SEQ ID NO: 1615053 - DNA, 15 bp, Homo sapiens
gagagacagcaggtt

SEQ ID NO: 1615054 - DNA, 15 bp, Homo sapiens
agagagacagcaggt

SEQ ID NO: 1615055 - DNA, 15 bp, Homo sapiens
cagagagacagcagg

SEQ ID NO: 1615056 - DNA, 15 bp, Homo sapiens
gcagagagacagcag

SEQ ID NO: 1615057 - DNA, 15 bp, Homo sapiens
ggcagagagacagca

SEQ ID NO: 1615058 - DNA, 15 bp, Homo sapiens
aggcagagagacagc

SEQ ID NO: 1615059 - DNA, 15 bp, Homo sapiens
gaggcagagagacag

SEQ ID NO: 1615060 - DNA, 15 bp, Homo sapiens
ggaggcagagagaca

SEQ ID NO: 1615061 - DNA, 15 bp, Homo sapiens
gggaggcagagagac

SEQ ID NO: 1615062 - DNA, 15 bp, Homo sapiens
agggaggcagagaga

SEQ ID NO: 1615063 - DNA, 15 bp, Homo sapiens
aagggaggcagagag

SEQ ID NO: 1615064 - DNA, 15 bp, Homo sapiens
gaagggaggcagaga

SEQ ID NO: 1615065 - DNA, 15 bp, Homo sapiens
ggaagggaggcagag

SEQ ID NO: 1615066 - DNA, 15 bp, Homo sapiens
gggaagggaggcaga

SEQ ID NO: 1615067 - DNA, 15 bp, Homo sapiens
agggaagggaggcag

SEQ ID NO: 1615068 - DNA, 15 bp, Homo sapiens
cagggaagggaggca

SEQ ID NO: 1615069 - DNA, 15 bp, Homo sapiens
ccagggaagggaggc

SEQ ID NO: 1615070 - DNA, 15 bp, Homo sapiens
accagggaagggagg

SEQ ID NO: 1615071 - DNA, 15 bp, Homo sapiens
taccagggaagggag

SEQ ID NO: 1615072 - DNA, 15 bp, Homo sapiens
ttaccagggaaggga

SEQ ID NO: 1615073 - DNA, 15 bp, Homo sapiens
cttaccagggaaggg

SEQ ID NO: 1615074 - DNA, 15 bp, Homo sapiens
tcttaccagggaagg

SEQ ID NO: 1615075 - DNA, 15 bp, Homo sapiens
atcttaccagggaag

SEQ ID NO: 1615076 - DNA, 15 bp, Homo sapiens
catcttaccagggaa

SEQ ID NO: 1615077 - DNA, 15 bp, Homo sapiens
tcatcttaccaggga

SEQ ID NO: 1615078 - DNA, 15 bp, Homo sapiens
atcatcttaccaggg

SEQ ID NO: 1615079 - DNA, 15 bp, Homo sapiens
tatcatcttaccagg

SEQ ID NO: 1615080 - DNA, 15 bp, Homo sapiens
ttatcatcttaccag

SEQ ID NO: 1615081 - DNA, 15 bp, Homo sapiens
attatcatcttacca

SEQ ID NO: 1615082 - DNA, 15 bp, Homo sapiens
aattatcatcttacc

SEQ ID NO: 1615083 - DNA, 15 bp, Homo sapiens
gaattatcatcttac

SEQ ID NO: 1615084 - DNA, 15 bp, Homo sapiens
tgaattatcatctta

SEQ ID NO: 1615085 - DNA, 15 bp, Homo sapiens
ttgaattatcatctt

SEQ ID NO: 1615086 - DNA, 15 bp, Homo sapiens
gttgaattatcatct

SEQ ID NO: 1615087 - DNA, 15 bp, Homo sapiens
tgttgaattatcatc

SEQ ID NO: 1615088 - DNA, 15 bp, Homo sapiens
atgttgaattatcat

SEQ ID NO: 1615089 - DNA, 15 bp, Homo sapiens
aatgttgaattatca

SEQ ID NO: 1615090 - DNA, 15 bp, Homo sapiens
gaatgttgaattatc

SEQ ID NO: 1615091 - DNA, 15 bp, Homo sapiens
tgaatgttgaattat

SEQ ID NO: 1615092 - DNA, 15 bp, Homo sapiens
atgaatgttgaatta

SEQ ID NO: 1615093 - DNA, 15 bp, Homo sapiens
aatgaatgttgaatt

SEQ ID NO: 1615094 - DNA, 15 bp, Homo sapiens
gaatgaatgttgaat

SEQ ID NO: 1615095 - DNA, 15 bp, Homo sapiens
tgaatgaatgttgaa

SEQ ID NO: 1615096 - DNA, 15 bp, Homo sapiens
ttgaatgaatgttga

SEQ ID NO: 1615097 - DNA, 15 bp, Homo sapiens
gttgaatgaatgttg

SEQ ID NO: 1615098 - DNA, 15 bp, Homo sapiens
tgttgaatgaatgtt

SEQ ID NO: 1615099 - DNA, 15 bp, Homo sapiens
atgttgaatgaatgt

SEQ ID NO: 1615100 - DNA, 15 bp, Homo sapiens
tatgttgaatgaatg

SEQ ID NO: 1615101 - DNA, 15 bp, Homo sapiens
atatgttgaatgaat

SEQ ID NO: 1615102 - DNA, 15 bp, Homo sapiens
tatatgttgaatgaa

SEQ ID NO: 1615103 - DNA, 15 bp, Homo sapiens
atatatgttgaatga

SEQ ID NO: 1615104 - DNA, 15 bp, Homo sapiens
aatatatgttgaatg

SEQ ID NO: 1615105 - DNA, 15 bp, Homo sapiens
aaatatatgttgaat

SEQ ID NO: 1615106 - DNA, 15 bp, Homo sapiens
caaatatatgttgaa

SEQ ID NO: 1615107 - DNA, 15 bp, Homo sapiens
tcaaatatatgttga

SEQ ID NO: 1615108 - DNA, 15 bp, Homo sapiens
ctcaaatatatgttg

SEQ ID NO: 1615109 - DNA, 15 bp, Homo sapiens
actcaaatatatgtt

SEQ ID NO: 1615110 - DNA, 15 bp, Homo sapiens
cactcaaatatatgt

SEQ ID NO: 1615111 - DNA, 15 bp, Homo sapiens
gcactcaaatatatg

SEQ ID NO: 1615112 - DNA, 15 bp, Homo sapiens
ggcactcaaatatat

SEQ ID NO: 1615113 - DNA, 15 bp, Homo sapiens
tggcactcaaatata

SEQ ID NO: 1615114 - DNA, 15 bp, Homo sapiens
ttggcactcaaatat

SEQ ID NO: 1615115 - DNA, 15 bp, Homo sapiens
attggcactcaaata

SEQ ID NO: 1615116 - DNA, 15 bp, Homo sapiens
gattggcactcaaat

SEQ ID NO: 1615117 - DNA, 15 bp, Homo sapiens
agattggcactcaaa

SEQ ID NO: 1615118 - DNA, 15 bp, Homo sapiens
cagattggcactcaa

SEQ ID NO: 1615119 - DNA, 15 bp, Homo sapiens
gcagattggcactca

SEQ ID NO: 1615120 - DNA, 15 bp, Homo sapiens
ggcagattggcactc

SEQ ID NO: 1615121 - DNA, 15 bp, Homo sapiens
tggcagattggcact

SEQ ID NO: 1615122 - DNA, 15 bp, Homo sapiens
gtggcagattggcac

SEQ ID NO: 1615123 - DNA, 15 bp, Homo sapiens
tgtggcagattggca

SEQ ID NO: 1615124 - DNA, 15 bp, Homo sapiens
atgtggcagattggc

SEQ ID NO: 1615125 - DNA, 15 bp, Homo sapiens
tatgtggcagattgg

SEQ ID NO: 1615126 - DNA, 15 bp, Homo sapiens
atatgtggcagattg

SEQ ID NO: 1615127 - DNA, 15 bp, Homo sapiens
aatatgtggcagatt

SEQ ID NO: 1615128 - DNA, 15 bp, Homo sapiens
caatatgtggcagat

SEQ ID NO: 1615129 - DNA, 15 bp, Homo sapiens
ccaatatgtggcaga

SEQ ID NO: 1615130 - DNA, 15 bp, Homo sapiens
tccaatatgtggcag

SEQ ID NO: 1615131 - DNA, 15 bp, Homo sapiens
ctccaatatgtggca

SEQ ID NO: 1615132 - DNA, 15 bp, Homo sapiens
tctccaatatgtggc

SEQ ID NO: 1615133 - DNA, 15 bp, Homo sapiens
ctctccaatatgtgg

SEQ ID NO: 1615134 - DNA, 15 bp, Homo sapiens
cctctccaatatgtg

SEQ ID NO: 1615135 - DNA, 15 bp, Homo sapiens
ccctctccaatatgt

SEQ ID NO: 1615136 - DNA, 15 bp, Homo sapiens
tccctctccaatatg

SEQ ID NO: 1615137 - DNA, 15 bp, Homo sapiens
ttccctctccaatat

SEQ ID NO: 1615138 - DNA, 15 bp, Homo sapiens
cttccctctccaata

SEQ ID NO: 1615139 - DNA, 15 bp, Homo sapiens
tcttccctctccaat

SEQ ID NO: 1615140 - DNA, 15 bp, Homo sapiens
ctcttccctctccaa

SEQ ID NO: 1615141 - DNA, 15 bp, Homo sapiens
cctcttccctctcca

SEQ ID NO: 1615142 - DNA, 15 bp, Homo sapiens
tcctcttccctctcc

SEQ ID NO: 1615143 - DNA, 15 bp, Homo sapiens
ttcctcttccctctc

SEQ ID NO: 1615144 - DNA, 15 bp, Homo sapiens
cttcctcttccctct

SEQ ID NO: 1615145 - DNA, 15 bp, Homo sapiens
tcttcctcttccctc

SEQ ID NO: 1615146 - DNA, 15 bp, Homo sapiens
ctttcttcctcttcc

SEQ ID NO: 1615147 - DNA, 15 bp, Homo sapiens
gctttcttcctcttc

SEQ ID NO: 1615148 - DNA, 15 bp, Homo sapiens
tgctttcttcctctt

SEQ ID NO: 1615149 - DNA, 15 bp, Homo sapiens
atgctttcttcctct

SEQ ID NO: 1615150 - DNA, 15 bp, Homo sapiens
tatgctttcttcctc

SEQ ID NO: 1615151 - DNA, 15 bp, Homo sapiens
ctatgctttcttcct

SEQ ID NO: 1615152 - DNA, 15 bp, Homo sapiens
cctatgctttcttcc

SEQ ID NO: 1615153 - DNA, 15 bp, Homo sapiens
acctatgctttcttc

SEQ ID NO: 1615154 - DNA, 15 bp, Homo sapiens
cacctatgctttctt

SEQ ID NO: 1615155 - DNA, 15 bp, Homo sapiens
ccacctatgctttct

SEQ ID NO: 1615156 - DNA, 15 bp, Homo sapiens
cccacctatgctttc

SEQ ID NO: 1615157 - DNA, 15 bp, Homo sapiens
ccccacctatgcttt

SEQ ID NO: 1615158 - DNA, 15 bp, Homo sapiens
tccccacctatgctt

SEQ ID NO: 1615159 - DNA, 15 bp, Homo sapiens
ctccccacctatgct

SEQ ID NO: 1615160 - DNA, 15 bp, Homo sapiens
tctccccacctatgc

SEQ ID NO: 1615161 - DNA, 15 bp, Homo sapiens
ctctccccacctatg

SEQ ID NO: 1615162 - DNA, 15 bp, Homo sapiens
cctctccccacctat

SEQ ID NO: 1615163 - DNA, 15 bp, Homo sapiens
ccctctccccaccta

SEQ ID NO: 1615164 - DNA, 15 bp, Homo sapiens
tccctctccccacct

SEQ ID NO: 1615165 - DNA, 15 bp, Homo sapiens
ctccctctccccacc

SEQ ID NO: 1615166 - DNA, 15 bp, Homo sapiens
cctccctctccccac

SEQ ID NO: 1615167 - DNA, 15 bp, Homo sapiens
tcctccctctcccca

SEQ ID NO: 1615168 - DNA, 15 bp, Homo sapiens
ttcctccctctcccc

SEQ ID NO: 1615169 - DNA, 15 bp, Homo sapiens
tttcctccctctccc

SEQ ID NO: 1615170 - DNA, 15 bp, Homo sapiens
ctttcctccctctcc

SEQ ID NO: 1615171 - DNA, 15 bp, Homo sapiens
tctttcctccctctc

SEQ ID NO: 1615172 - DNA, 15 bp, Homo sapiens
ttctttcctccctct

SEQ ID NO: 1615173 - DNA, 15 bp, Homo sapiens
tttctttcctccctc

SEQ ID NO: 1615174 - DNA, 15 bp, Homo sapiens
gtttctttcctccct

SEQ ID NO: 1615175 - DNA, 15 bp, Homo sapiens
agtttctttcctccc

SEQ ID NO: 1615176 - DNA, 15 bp, Homo sapiens
tagtttctttcctcc

SEQ ID NO: 1615177 - DNA, 15 bp, Homo sapiens
atagtttctttcctc

SEQ ID NO: 1615178 - DNA, 15 bp, Homo sapiens
catagtttctttcct

SEQ ID NO: 1615179 - DNA, 15 bp, Homo sapiens
tcatagtttctttcc

SEQ ID NO: 1615180 - DNA, 15 bp, Homo sapiens
gtcatagtttctttc

SEQ ID NO: 1615181 - DNA, 15 bp, Homo sapiens
ggtcatagtttcttt

SEQ ID NO: 1615182 - DNA, 15 bp, Homo sapiens
aggtcatagtttctt

SEQ ID NO: 1615183 - DNA, 15 bp, Homo sapiens
aaggtcatagtttct

SEQ ID NO: 1615184 - DNA, 15 bp, Homo sapiens
caaggtcatagtttc

SEQ ID NO: 1615185 - DNA, 15 bp, Homo sapiens
ccaaggtcatagttt

SEQ ID NO: 1615186 - DNA, 15 bp, Homo sapiens
gccaaggtcatagtt

SEQ ID NO: 1615187 - DNA, 15 bp, Homo sapiens
ggccaaggtcatagt

SEQ ID NO: 1615188 - DNA, 15 bp, Homo sapiens
gggccaaggtcatag

SEQ ID NO: 1615189 - DNA, 15 bp, Homo sapiens
ggggccaaggtcata

SEQ ID NO: 1615190 - DNA, 15 bp, Homo sapiens
aggggccaaggtcat

SEQ ID NO: 1615191 - DNA, 15 bp, Homo sapiens
taggggccaaggtca

SEQ ID NO: 1615192 - DNA, 15 bp, Homo sapiens
ataggggccaaggtc

SEQ ID NO: 1615193 - DNA, 15 bp, Homo sapiens
tataggggccaaggt

SEQ ID NO: 1615194 - DNA, 15 bp, Homo sapiens
gtataggggccaagg

SEQ ID NO: 1615195 - DNA, 15 bp, Homo sapiens
tgtataggggccaag

SEQ ID NO: 1615196 - DNA, 15 bp, Homo sapiens
gtgtataggggccaa

SEQ ID NO: 1615197 - DNA, 15 bp, Homo sapiens
agtgtataggggcca

SEQ ID NO: 1615198 - DNA, 15 bp, Homo sapiens
gagtgtataggggcc

SEQ ID NO: 1615199 - DNA, 15 bp, Homo sapiens
agagtgtataggggc

SEQ ID NO: 1615200 - DNA, 15 bp, Homo sapiens
cagagtgtatagggg

SEQ ID NO: 1615201 - DNA, 15 bp, Homo sapiens
gcagagtgtataggg

SEQ ID NO: 1615202 - DNA, 15 bp, Homo sapiens
tgcagagtgtatagg

SEQ ID NO: 1615203 - DNA, 15 bp, Homo sapiens
atgcagagtgtatag

SEQ ID NO: 1615204 - DNA, 15 bp, Homo sapiens
aatgcagagtgtata

SEQ ID NO: 1615205 - DNA, 15 bp, Homo sapiens
gaatgcagagtgtat

SEQ ID NO: 1615206 - DNA, 15 bp, Homo sapiens
agaatgcagagtgta

SEQ ID NO: 1615207 - DNA, 15 bp, Homo sapiens
aagaatgcagagtgt

SEQ ID NO: 1615208 - DNA, 15 bp, Homo sapiens
aaagaatgcagagtg

SEQ ID NO: 1615209 - DNA, 15 bp, Homo sapiens
aaaagaatgcagagt

SEQ ID NO: 1615210 - DNA, 15 bp, Homo sapiens
taaaagaatgcagag

SEQ ID NO: 1615211 - DNA, 15 bp, Homo sapiens
aataaaagaatgcag

SEQ ID NO: 1615212 - DNA, 15 bp, Homo sapiens
gaataaaagaatgca

SEQ ID NO: 1615213 - DNA, 15 bp, Homo sapiens
agaataaaagaatgc

SEQ ID NO: 1615214 - DNA, 15 bp, Homo sapiens
aagaataaaagaatg

SEQ ID NO: 1615215 - DNA, 15 bp, Homo sapiens
taagaataaaagaat

SEQ ID NO: 1615216 - DNA, 15 bp, Homo sapiens
ataagaataaaagaa

SEQ ID NO: 1615217 - DNA, 15 bp, Homo sapiens
aataagaataaaaga

SEQ ID NO: 1615218 - DNA, 15 bp, Homo sapiens
taataagaataaaag

SEQ ID NO: 1615219 - DNA, 15 bp, Homo sapiens
ctaataagaataaaa

SEQ ID NO: 1615220 - DNA, 15 bp, Homo sapiens
cctaataagaataaa

SEQ ID NO: 1615221 - DNA, 15 bp, Homo sapiens
gcctaataagaataa

SEQ ID NO: 1615222 - DNA, 15 bp, Homo sapiens
agcctaataagaata

SEQ ID NO: 1615223 - DNA, 15 bp, Homo sapiens
aagcctaataagaat

SEQ ID NO: 1615224 - DNA, 15 bp, Homo sapiens
aaagcctaataagaa

SEQ ID NO: 1615225 - DNA, 15 bp, Homo sapiens
caaagcctaataaga

SEQ ID NO: 1615226 - DNA, 15 bp, Homo sapiens
tcaaagcctaataag

SEQ ID NO: 1615227 - DNA, 15 bp, Homo sapiens
gtcaaagcctaataa

SEQ ID NO: 1615228 - DNA, 15 bp, Homo sapiens
ggtcaaagcctaata

SEQ ID NO: 1615229 - DNA, 15 bp, Homo sapiens
gggtcaaagcctaat

SEQ ID NO: 1615230 - DNA, 15 bp, Homo sapiens
agggtcaaagcctaa

SEQ ID NO: 1615231 - DNA, 15 bp, Homo sapiens
cagggtcaaagccta

SEQ ID NO: 1615232 - DNA, 15 bp, Homo sapiens
ccagggtcaaagcct

SEQ ID NO: 1615233 - DNA, 15 bp, Homo sapiens
gccagggtcaaagcc

SEQ ID NO: 1615234 - DNA, 15 bp, Homo sapiens
tgccagggtcaaagc

SEQ ID NO: 1615235 - DNA, 15 bp, Homo sapiens
gtgccagggtcaaag

SEQ ID NO: 1615236 - DNA, 15 bp, Homo sapiens
ggtgccagggtcaaa

SEQ ID NO: 1615237 - DNA, 15 bp, Homo sapiens
aggtgccagggtcaa

SEQ ID NO: 1615238 - DNA, 15 bp, Homo sapiens
gaggtgccagggtca

SEQ ID NO: 1615239 - DNA, 15 bp, Homo sapiens
ggaggtgccagggtc

SEQ ID NO: 1615240 - DNA, 15 bp, Homo sapiens
gggaggtgccagggt

SEQ ID NO: 1615241 - DNA, 15 bp, Homo sapiens
agggaggtgccaggg

SEQ ID NO: 1615242 - DNA, 15 bp, Homo sapiens
gagggaggtgccagg

SEQ ID NO: 1615243 - DNA, 15 bp, Homo sapiens
ggagggaggtgccag

SEQ ID NO: 1615244 - DNA, 15 bp, Homo sapiens
tggagggaggtgcca

SEQ ID NO: 1615245 - DNA, 15 bp, Homo sapiens
ctggagggaggtgcc

SEQ ID NO: 1615246 - DNA, 15 bp, Homo sapiens
gctggagggaggtgc

SEQ ID NO: 1615247 - DNA, 15 bp, Homo sapiens
agctggagggaggtg

SEQ ID NO: 1615248 - DNA, 15 bp, Homo sapiens
cagctggagggaggt

SEQ ID NO: 1615249 - DNA, 15 bp, Homo sapiens
gcagctggagggagg

SEQ ID NO: 1615250 - DNA, 15 bp, Homo sapiens
ggcagctggagggag

SEQ ID NO: 1615251 - DNA, 15 bp, Homo sapiens
gggcagctggaggga

SEQ ID NO: 1615252 - DNA, 15 bp, Homo sapiens
tgggcagctggaggg

SEQ ID NO: 1615253 - DNA, 15 bp, Homo sapiens
gtgggcagctggagg

SEQ ID NO: 1615254 - DNA, 15 bp, Homo sapiens
agtgggcagctggag

SEQ ID NO: 1615255 - DNA, 15 bp, Homo sapiens
gagtgggcagctgga

SEQ ID NO: 1615256 - DNA, 15 bp, Homo sapiens
tgagtgggcagctgg

SEQ ID NO: 1615257 - DNA, 15 bp, Homo sapiens
atgagtgggcagctg

SEQ ID NO: 1615258 - DNA, 15 bp, Homo sapiens
catgagtgggcagct

SEQ ID NO: 1615259 - DNA, 15 bp, Homo sapiens
ccatgagtgggcagc

SEQ ID NO: 1615260 - DNA, 15 bp, Homo sapiens
cccatgagtgggcag

SEQ ID NO: 1615261 - DNA, 15 bp, Homo sapiens
gcccatgagtgggca

SEQ ID NO: 1615262 - DNA, 15 bp, Homo sapiens
ggcccatgagtgggc

SEQ ID NO: 1615263 - DNA, 15 bp, Homo sapiens
gggcccatgagtggg

SEQ ID NO: 1615264 - DNA, 15 bp, Homo sapiens
agggcccatgagtgg

SEQ ID NO: 1615265 - DNA, 15 bp, Homo sapiens
aagggcccatgagtg

SEQ ID NO: 1615266 - DNA, 15 bp, Homo sapiens
gaagggcccatgagt

SEQ ID NO: 1615267 - DNA, 15 bp, Homo sapiens
tgaagggcccatgag

SEQ ID NO: 1615268 - DNA, 15 bp, Homo sapiens
gtgaagggcccatga

SEQ ID NO: 1615269 - DNA, 15 bp, Homo sapiens
ggtgaagggcccatg

SEQ ID NO: 1615270 - DNA, 15 bp, Homo sapiens
tggtgaagggcccat

SEQ ID NO: 1615271 - DNA, 15 bp, Homo sapiens
gtggtgaagggccca

SEQ ID NO: 1615272 - DNA, 15 bp, Homo sapiens
ggtggtgaagggccc

SEQ ID NO: 1615273 - DNA, 15 bp, Homo sapiens
aggtggtgaagggcc

SEQ ID NO: 1615274 - DNA, 15 bp, Homo sapiens
caggtggtgaagggc

SEQ ID NO: 1615275 - DNA, 15 bp, Homo sapiens
gcaggtggtgaaggg

SEQ ID NO: 1615276 - DNA, 15 bp, Homo sapiens
ggcaggtggtgaagg

SEQ ID NO: 1615277 - DNA, 15 bp, Homo sapiens
gggcaggtggtgaag

SEQ ID NO: 1615278 - DNA, 15 bp, Homo sapiens
ctgggcaggtggtga

SEQ ID NO: 1615279 - DNA, 15 bp, Homo sapiens
cctgggcaggtggtg

SEQ ID NO: 1615280 - DNA, 15 bp, Homo sapiens
tcctgggcaggtggt

SEQ ID NO: 1615281 - DNA, 15 bp, Homo sapiens
atcctgggcaggtgg

SEQ ID NO: 1615282 - DNA, 15 bp, Homo sapiens
gatcctgggcaggtg

SEQ ID NO: 1615283 - DNA, 15 bp, Homo sapiens
agatcctgggcaggt

SEQ ID NO: 1615284 - DNA, 15 bp, Homo sapiens
gagatcctgggcagg

SEQ ID NO: 1615285 - DNA, 15 bp, Homo sapiens
tgagatcctgggcag

SEQ ID NO: 1615286 - DNA, 15 bp, Homo sapiens
gtgagatcctgggca

SEQ ID NO: 1615287 - DNA, 15 bp, Homo sapiens
ggtgagatcctgggc

SEQ ID NO: 1615288 - DNA, 15 bp, Homo sapiens
gggtgagatcctggg

SEQ ID NO: 1615289 - DNA, 15 bp, Homo sapiens
tgggtgagatcctgg

SEQ ID NO: 1615290 - DNA, 15 bp, Homo sapiens
ctgggtgagatcctg

SEQ ID NO: 1615291 - DNA, 15 bp, Homo sapiens
actgggtgagatcct

SEQ ID NO: 1615292 - DNA, 15 bp, Homo sapiens
tactgggtgagatcc

SEQ ID NO: 1615293 - DNA, 15 bp, Homo sapiens
gtactgggtgagatc

SEQ ID NO: 1615294 - DNA, 15 bp, Homo sapiens
agtactgggtgagat

SEQ ID NO: 1615295 - DNA, 15 bp, Homo sapiens
cagtactgggtgaga

SEQ ID NO: 1615296 - DNA, 15 bp, Homo sapiens
tcagtactgggtgag

SEQ ID NO: 1615297 - DNA, 15 bp, Homo sapiens
gtcagtactgggtga

SEQ ID NO: 1615298 - DNA, 15 bp, Homo sapiens
tgtcagtactgggtg

SEQ ID NO: 1615299 - DNA, 15 bp, Homo sapiens
ctgtcagtactgggt

SEQ ID NO: 1615300 - DNA, 15 bp, Homo sapiens
gctgtcagtactggg

SEQ ID NO: 1615301 - DNA, 15 bp, Homo sapiens
agctgtcagtactgg

SEQ ID NO: 1615302 - DNA, 15 bp, Homo sapiens
gagctgtcagtactg

SEQ ID NO: 1615303 - DNA, 15 bp, Homo sapiens
ggagctgtcagtact

SEQ ID NO: 1615304 - DNA, 15 bp, Homo sapiens
aggagctgtcagtac

SEQ ID NO: 1615305 - DNA, 15 bp, Homo sapiens
gaggagctgtcagta

SEQ ID NO: 1615306 - DNA, 15 bp, Homo sapiens
agaggagctgtcagt

SEQ ID NO: 1615307 - DNA, 15 bp, Homo sapiens
aagaggagctgtcag

SEQ ID NO: 1615308 - DNA, 15 bp, Homo sapiens
aaagaggagctgtca

SEQ ID NO: 1615309 - DNA, 15 bp, Homo sapiens
gaaagaggagctgtc

SEQ ID NO: 1615310 - DNA, 15 bp, Homo sapiens
agaaagaggagctgt

SEQ ID NO: 1615311 - DNA, 15 bp, Homo sapiens
cagaaagaggagctg

SEQ ID NO: 1615312 - DNA, 15 bp, Homo sapiens
ccagaaagaggagct

SEQ ID NO: 1615313 - DNA, 15 bp, Homo sapiens
tccagaaagaggagc

SEQ ID NO: 1615314 - DNA, 15 bp, Homo sapiens
ctccagaaagaggag

SEQ ID NO: 1615315 - DNA, 15 bp, Homo sapiens
tctccagaaagagga

SEQ ID NO: 1615316 - DNA, 15 bp, Homo sapiens
ctctccagaaagagg

SEQ ID NO: 1615317 - DNA, 15 bp, Homo sapiens
gctctccagaaagag

SEQ ID NO: 1615318 - DNA, 15 bp, Homo sapiens
ggctctccagaaaga

SEQ ID NO: 1615319 - DNA, 15 bp, Homo sapiens
gggctctccagaaag

SEQ ID NO: 1615320 - DNA, 15 bp, Homo sapiens
ggggctctccagaaa

SEQ ID NO: 1615321 - DNA, 15 bp, Homo sapiens
tggggctctccagaa

SEQ ID NO: 1615322 - DNA, 15 bp, Homo sapiens
ttggggctctccaga

SEQ ID NO: 1615323 - DNA, 15 bp, Homo sapiens
cttggggctctccag

SEQ ID NO: 1615324 - DNA, 15 bp, Homo sapiens
ccttggggctctcca

SEQ ID NO: 1615325 - DNA, 15 bp, Homo sapiens
cccttggggctctcc

SEQ ID NO: 1615326 - DNA, 15 bp, Homo sapiens
gcccttggggctctc

SEQ ID NO: 1615327 - DNA, 15 bp, Homo sapiens
ggcccttggggctct

SEQ ID NO: 1615328 - DNA, 15 bp, Homo sapiens
gggcccttggggctc

SEQ ID NO: 1615329 - DNA, 15 bp, Homo sapiens
ggggcccttggggct

SEQ ID NO: 1615330 - DNA, 15 bp, Homo sapiens
gggggcccttggggc

SEQ ID NO: 1615331 - DNA, 15 bp, Homo sapiens
agggggcccttgggg

SEQ ID NO: 1615332 - DNA, 15 bp, Homo sapiens
tagggggcccttggg

SEQ ID NO: 1615333 - DNA, 15 bp, Homo sapiens
ctagggggcccttgg

SEQ ID NO: 1615334 - DNA, 15 bp, Homo sapiens
gctagggggcccttg

SEQ ID NO: 1615335 - DNA, 15 bp, Homo sapiens
ggctagggggccctt

SEQ ID NO: 1615336 - DNA, 15 bp, Homo sapiens
tggctagggggccct

SEQ ID NO: 1615337 - DNA, 15 bp, Homo sapiens
ctggctagggggccc

SEQ ID NO: 1615338 - DNA, 15 bp, Homo sapiens
gctggctagggggcc

SEQ ID NO: 1615339 - DNA, 15 bp, Homo sapiens
ggctggctagggggc

SEQ ID NO: 1615340 - DNA, 15 bp, Homo sapiens
gggctggctaggggg

SEQ ID NO: 1615341 - DNA, 15 bp, Homo sapiens
ggggctggctagggg

SEQ ID NO: 1615342 - DNA, 15 bp, Homo sapiens
cggggctggctaggg

SEQ ID NO: 1615343 - DNA, 15 bp, Homo sapiens
gcggggctggctagg

SEQ ID NO: 1615344 - DNA, 15 bp, Homo sapiens
tgcggggctggctag

SEQ ID NO: 1615345 - DNA, 15 bp, Homo sapiens
gtgcggggctggcta

SEQ ID NO: 1615346 - DNA, 15 bp, Homo sapiens
cgtgcggggctggct

SEQ ID NO: 1615347 - DNA, 15 bp, Homo sapiens
acgtgcggggctggc

SEQ ID NO: 1615348 - DNA, 15 bp, Homo sapiens
cacgtgcggggctgg

SEQ ID NO: 1615349 - DNA, 15 bp, Homo sapiens
tcacgtgcggggctg

SEQ ID NO: 1615350 - DNA, 15 bp, Homo sapiens
ctcacgtgcggggct

SEQ ID NO: 1615351 - DNA, 15 bp, Homo sapiens
actcacgtgcggggc

SEQ ID NO: 1615352 - DNA, 15 bp, Homo sapiens
tactcacgtgcgggg

SEQ ID NO: 1615353 - DNA, 15 bp, Homo sapiens
ctactcacgtgcggg

SEQ ID NO: 1615354 - DNA, 15 bp, Homo sapiens
cctactcacgtgcgg

SEQ ID NO: 1615355 - DNA, 15 bp, Homo sapiens
ccctactcacgtgcg

SEQ ID NO: 1615356 - DNA, 15 bp, Homo sapiens
tccctactcacgtgc

SEQ ID NO: 1615357 - DNA, 15 bp, Homo sapiens
ctccctactcacgtg

SEQ ID NO: 1615358 - DNA, 15 bp, Homo sapiens
tctccctactcacgt

SEQ ID NO: 1615359 - DNA, 15 bp, Homo sapiens
ctctccctactcacg

SEQ ID NO: 1615360 - DNA, 15 bp, Homo sapiens
tctctccctactcac

SEQ ID NO: 1615361 - DNA, 15 bp, Homo sapiens
ttctctccctactca

SEQ ID NO: 1615362 - DNA, 15 bp, Homo sapiens
cttctctccctactc

SEQ ID NO: 1615363 - DNA, 15 bp, Homo sapiens
ccttctctccctact

SEQ ID NO: 1615364 - DNA, 15 bp, Homo sapiens
tccttctctccctac

SEQ ID NO: 1615365 - DNA, 15 bp, Homo sapiens
atccttctctcccta

SEQ ID NO: 1615366 - DNA, 15 bp, Homo sapiens
catccttctctccct

SEQ ID NO: 1615367 - DNA, 15 bp, Homo sapiens
acatccttctctccc

SEQ ID NO: 1615368 - DNA, 15 bp, Homo sapiens
cacatccttctctcc

SEQ ID NO: 1615369 - DNA, 15 bp, Homo sapiens
acacatccttctctc

SEQ ID NO: 1615370 - DNA, 15 bp, Homo sapiens
tacacatccttctct

SEQ ID NO: 1615371 - DNA, 15 bp, Homo sapiens
atacacatccttctc

SEQ ID NO: 1615372 - DNA, 15 bp, Homo sapiens
gatacacatccttct

SEQ ID NO: 1615373 - DNA, 15 bp, Homo sapiens
tgatacacatccttc

SEQ ID NO: 1615374 - DNA, 15 bp, Homo sapiens
atgatacacatcctt

SEQ ID NO: 1615375 - DNA, 15 bp, Homo sapiens
tatgatacacatcct

SEQ ID NO: 1615376 - DNA, 15 bp, Homo sapiens
ttatgatacacatcc

SEQ ID NO: 1615377 - DNA, 15 bp, Homo sapiens
cttatgatacacatc

SEQ ID NO: 1615378 - DNA, 15 bp, Homo sapiens
gcttatgatacacat

SEQ ID NO: 1615379 - DNA, 15 bp, Homo sapiens
ggcttatgatacaca

SEQ ID NO: 1615380 - DNA, 15 bp, Homo sapiens
aggcttatgatacac

SEQ ID NO: 1615381 - DNA, 15 bp, Homo sapiens
taggcttatgataca

SEQ ID NO: 1615382 - DNA, 15 bp, Homo sapiens
ttaggcttatgatac

SEQ ID NO: 1615383 - DNA, 15 bp, Homo sapiens
cttaggcttatgata

SEQ ID NO: 1615384 - DNA, 15 bp, Homo sapiens
gcttaggcttatgat

SEQ ID NO: 1615385 - DNA, 15 bp, Homo sapiens
ggcttaggcttatga

SEQ ID NO: 1615386 - DNA, 15 bp, Homo sapiens
aggcttaggcttatg

SEQ ID NO: 1615387 - DNA, 15 bp, Homo sapiens
caggcttaggcttat

SEQ ID NO: 1615388 - DNA, 15 bp, Homo sapiens
acaggcttaggctta

SEQ ID NO: 1615389 - DNA, 15 bp, Homo sapiens
cacaggcttaggctt

SEQ ID NO: 1615390 - DNA, 15 bp, Homo sapiens
gcacaggcttaggct

SEQ ID NO: 1615391 - DNA, 15 bp, Homo sapiens
agcacaggcttaggc

SEQ ID NO: 1615392 - DNA, 15 bp, Homo sapiens
cagcacaggcttagg

SEQ ID NO: 1615393 - DNA, 15 bp, Homo sapiens
acagcacaggcttag

SEQ ID NO: 1615394 - DNA, 15 bp, Homo sapiens
cacagcacaggctta

SEQ ID NO: 1615395 - DNA, 15 bp, Homo sapiens
acacagcacaggctt

SEQ ID NO: 1615396 - DNA, 15 bp, Homo sapiens
gacacagcacaggct

SEQ ID NO: 1615397 - DNA, 15 bp, Homo sapiens
ggacacagcacaggc

SEQ ID NO: 1615398 - DNA, 15 bp, Homo sapiens
tggacacagcacagg

SEQ ID NO: 1615399 - DNA, 15 bp, Homo sapiens
ttggacacagcacag

SEQ ID NO: 1615400 - DNA, 15 bp, Homo sapiens
gttggacacagcaca

SEQ ID NO: 1615401 - DNA, 15 bp, Homo sapiens
ggttggacacagcac

SEQ ID NO: 1615402 - DNA, 15 bp, Homo sapiens
tggttggacacagca

SEQ ID NO: 1615403 - DNA, 15 bp, Homo sapiens
gtggttggacacagc

SEQ ID NO: 1615404 - DNA, 15 bp, Homo sapiens
tgtggttggacacag

SEQ ID NO: 1615405 - DNA, 15 bp, Homo sapiens
ctgtggttggacaca

SEQ ID NO: 1615406 - DNA, 15 bp, Homo sapiens
actgtggttggacac

SEQ ID NO: 1615407 - DNA, 15 bp, Homo sapiens
cactgtggttggaca

SEQ ID NO: 1615408 - DNA, 15 bp, Homo sapiens
gcactgtggttggac

SEQ ID NO: 1615409 - DNA, 15 bp, Homo sapiens
agcactgtggttgga

SEQ ID NO: 1615410 - DNA, 15 bp, Homo sapiens
cagcactgtggttgg

SEQ ID NO: 1615411 - DNA, 15 bp, Homo sapiens
ccagcactgtggttg

SEQ ID NO: 1615412 - DNA, 15 bp, Homo sapiens
accagcactgtggtt

SEQ ID NO: 1615413 - DNA, 15 bp, Homo sapiens
caccagcactgtggt

SEQ ID NO: 1615414 - DNA, 15 bp, Homo sapiens
acaccagcactgtgg

SEQ ID NO: 1615415 - DNA, 15 bp, Homo sapiens
gacaccagcactgtg

SEQ ID NO: 1615416 - DNA, 15 bp, Homo sapiens
ggacaccagcactgt

SEQ ID NO: 1615417 - DNA, 15 bp, Homo sapiens
tggacaccagcactg

SEQ ID NO: 1615418 - DNA, 15 bp, Homo sapiens
ttggacaccagcact

SEQ ID NO: 1615419 - DNA, 15 bp, Homo sapiens
gttggacaccagcac

SEQ ID NO: 1615420 - DNA, 15 bp, Homo sapiens
ggttggacaccagca

SEQ ID NO: 1615421 - DNA, 15 bp, Homo sapiens
tggttggacaccagc

SEQ ID NO: 1615422 - DNA, 15 bp, Homo sapiens
gtggttggacaccag

SEQ ID NO: 1615423 - DNA, 15 bp, Homo sapiens
tgtggttggacacca

SEQ ID NO: 1615424 - DNA, 15 bp, Homo sapiens
ctgtggttggacacc

SEQ ID NO: 1615425 - DNA, 15 bp, Homo sapiens
ccactgtggttggac

SEQ ID NO: 1615426 - DNA, 15 bp, Homo sapiens
tccactgtggttgga

SEQ ID NO: 1615427 - DNA, 15 bp, Homo sapiens
atccactgtggttgg

SEQ ID NO: 1615428 - DNA, 15 bp, Homo sapiens
tatccactgtggttg

SEQ ID NO: 1615429 - DNA, 15 bp, Homo sapiens
ttatccactgtggtt

SEQ ID NO: 1615430 - DNA, 15 bp, Homo sapiens
attatccactgtggt

SEQ ID NO: 1615431 - DNA, 15 bp, Homo sapiens
cattatccactgtgg

SEQ ID NO: 1615432 - DNA, 15 bp, Homo sapiens
tcattatccactgtg

SEQ ID NO: 1615433 - DNA, 15 bp, Homo sapiens
ttcattatccactgt

SEQ ID NO: 1615434 - DNA, 15 bp, Homo sapiens
cttcattatccactg

SEQ ID NO: 1615435 - DNA, 15 bp, Homo sapiens
tcttcattatccact

SEQ ID NO: 1615436 - DNA, 15 bp, Homo sapiens
atcttcattatccac

SEQ ID NO: 1615437 - DNA, 15 bp, Homo sapiens
catcttcattatcca

SEQ ID NO: 1615438 - DNA, 15 bp, Homo sapiens
tcatcttcattatcc

SEQ ID NO: 1615439 - DNA, 15 bp, Homo sapiens
ttcatcttcattatc

SEQ ID NO: 1615440 - DNA, 15 bp, Homo sapiens
tttcatcttcattat

SEQ ID NO: 1615441 - DNA, 15 bp, Homo sapiens
ttttcatcttcatta

SEQ ID NO: 1615442 - DNA, 15 bp, Homo sapiens
cttttcatcttcatt

SEQ ID NO: 1615443 - DNA, 15 bp, Homo sapiens
ccttttcatcttcat

SEQ ID NO: 1615444 - DNA, 15 bp, Homo sapiens
accttttcatcttca

SEQ ID NO: 1615445 - DNA, 15 bp, Homo sapiens
gaccttttcatcttc

SEQ ID NO: 1615446 - DNA, 15 bp, Homo sapiens
agaccttttcatctt

SEQ ID NO: 1615447 - DNA, 15 bp, Homo sapiens
gagaccttttcatct

SEQ ID NO: 1615448 - DNA, 15 bp, Homo sapiens
agagaccttttcatc

SEQ ID NO: 1615449 - DNA, 15 bp, Homo sapiens
cagagaccttttcat

SEQ ID NO: 1615450 - DNA, 15 bp, Homo sapiens
tcagagaccttttca

SEQ ID NO: 1615451 - DNA, 15 bp, Homo sapiens
gtcagagaccttttc

SEQ ID NO: 1615452 - DNA, 15 bp, Homo sapiens
agtcagagacctttt

SEQ ID NO: 1615453 - DNA, 15 bp, Homo sapiens
tagtcagagaccttt

SEQ ID NO: 1615454 - DNA, 15 bp, Homo sapiens
ttagtcagagacctt

SEQ ID NO: 1615455 - DNA, 15 bp, Homo sapiens
attagtcagagacct

SEQ ID NO: 1615456 - DNA, 15 bp, Homo sapiens
tattagtcagagacc

SEQ ID NO: 1615457 - DNA, 15 bp, Homo sapiens
ctattagtcagagac

SEQ ID NO: 1615458 - DNA, 15 bp, Homo sapiens
cctattagtcagaga

SEQ ID NO: 1615459 - DNA, 15 bp, Homo sapiens
gcctattagtcagag

SEQ ID NO: 1615460 - DNA, 15 bp, Homo sapiens
tgcctattagtcaga

SEQ ID NO: 1615461 - DNA, 15 bp, Homo sapiens
ttgcctattagtcag

SEQ ID NO: 1615462 - DNA, 15 bp, Homo sapiens
cttgcctattagtca

SEQ ID NO: 1615463 - DNA, 15 bp, Homo sapiens
ccttgcctattagtc

SEQ ID NO: 1615464 - DNA, 15 bp, Homo sapiens
gccttgcctattagt

SEQ ID NO: 1615465 - DNA, 15 bp, Homo sapiens
tgccttgcctattag

SEQ ID NO: 1615466 - DNA, 15 bp, Homo sapiens
ctgccttgcctatta

SEQ ID NO: 1615467 - DNA, 15 bp, Homo sapiens
tctgccttgcctatt

SEQ ID NO: 1615468 - DNA, 15 bp, Homo sapiens
ctctgccttgcctat

SEQ ID NO: 1615469 - DNA, 15 bp, Homo sapiens
gctctgccttgccta

SEQ ID NO: 1615470 - DNA, 15 bp, Homo sapiens
agctctgccttgcct

SEQ ID NO: 1615471 - DNA, 15 bp, Homo sapiens
gagctctgccttgcc

SEQ ID NO: 1615472 - DNA, 15 bp, Homo sapiens
agagctctgccttgc

SEQ ID NO: 1615473 - DNA, 15 bp, Homo sapiens
gagagctctgccttg

SEQ ID NO: 1615474 - DNA, 15 bp, Homo sapiens
ggagagctctgcctt

SEQ ID NO: 1615475 - DNA, 15 bp, Homo sapiens
aggagagctctgcct

SEQ ID NO: 1615476 - DNA, 15 bp, Homo sapiens
taggagagctctgcc

SEQ ID NO: 1615477 - DNA, 15 bp, Homo sapiens
ctaggagagctctgc

SEQ ID NO: 1615478 - DNA, 15 bp, Homo sapiens
actaggagagctctg

SEQ ID NO: 1615479 - DNA, 15 bp, Homo sapiens
tactaggagagctct

SEQ ID NO: 1615480 - DNA, 15 bp, Homo sapiens
gtactaggagagctc

SEQ ID NO: 1615481 - DNA, 15 bp, Homo sapiens
agtactaggagagct

SEQ ID NO: 1615482 - DNA, 15 bp, Homo sapiens
cagtactaggagagc

SEQ ID NO: 1615483 - DNA, 15 bp, Homo sapiens
gcagtactaggagag

SEQ ID NO: 1615484 - DNA, 15 bp, Homo sapiens
ggcagtactaggaga

SEQ ID NO: 1615485 - DNA, 15 bp, Homo sapiens
tggcagtactaggag

SEQ ID NO: 1615486 - DNA, 15 bp, Homo sapiens
atggcagtactagga

SEQ ID NO: 1615487 - DNA, 15 bp, Homo sapiens
aatggcagtactagg

SEQ ID NO: 1615488 - DNA, 15 bp, Homo sapiens
aaatggcagtactag

SEQ ID NO: 1615489 - DNA, 15 bp, Homo sapiens
gaaatggcagtacta

SEQ ID NO: 1615490 - DNA, 15 bp, Homo sapiens
ggaaatggcagtact

SEQ ID NO: 1615491 - DNA, 15 bp, Homo sapiens
aggaaatggcagtac

SEQ ID NO: 1615492 - DNA, 15 bp, Homo sapiens
taggaaatggcagta

SEQ ID NO: 1615493 - DNA, 15 bp, Homo sapiens
ctaggaaatggcagt

SEQ ID NO: 1615494 - DNA, 15 bp, Homo sapiens
gctaggaaatggcag

SEQ ID NO: 1615495 - DNA, 15 bp, Homo sapiens
agctaggaaatggca

SEQ ID NO: 1615496 - DNA, 15 bp, Homo sapiens
cagctaggaaatggc

SEQ ID NO: 1615497 - DNA, 15 bp, Homo sapiens
acagctaggaaatgg

SEQ ID NO: 1615498 - DNA, 15 bp, Homo sapiens
cacagctaggaaatg

SEQ ID NO: 1615499 - DNA, 15 bp, Homo sapiens
tcacagctaggaaat

SEQ ID NO: 1615500 - DNA, 15 bp, Homo sapiens
atcacagctaggaaa

SEQ ID NO: 1615501 - DNA, 15 bp, Homo sapiens
catcacagctaggaa

SEQ ID NO: 1615502 - DNA, 15 bp, Homo sapiens
gcatcacagctagga

SEQ ID NO: 1615503 - DNA, 15 bp, Homo sapiens
agcatcacagctagg

SEQ ID NO: 1615504 - DNA, 15 bp, Homo sapiens
aagcatcacagctag

SEQ ID NO: 1615505 - DNA, 15 bp, Homo sapiens
aaagcatcacagcta

SEQ ID NO: 1615506 - DNA, 15 bp, Homo sapiens
caaagcatcacagct

SEQ ID NO: 1615507 - DNA, 15 bp, Homo sapiens
ccaaagcatcacagc

SEQ ID NO: 1615508 - DNA, 15 bp, Homo sapiens
tccaaagcatcacag

SEQ ID NO: 1615509 - DNA, 15 bp, Homo sapiens
gtccaaagcatcaca

SEQ ID NO: 1615510 - DNA, 15 bp, Homo sapiens
tgtccaaagcatcac

SEQ ID NO: 1615511 - DNA, 15 bp, Homo sapiens
ttgtccaaagcatca

SEQ ID NO: 1615512 - DNA, 15 bp, Homo sapiens
attgtccaaagcatc

SEQ ID NO: 1615513 - DNA, 15 bp, Homo sapiens
aattgtccaaagcat

SEQ ID NO: 1615514 - DNA, 15 bp, Homo sapiens
taattgtccaaagca

SEQ ID NO: 1615515 - DNA, 15 bp, Homo sapiens
ataattgtccaaagc

SEQ ID NO: 1615516 - DNA, 15 bp, Homo sapiens
gataattgtccaaag

SEQ ID NO: 1615517 - DNA, 15 bp, Homo sapiens
agataattgtccaaa

SEQ ID NO: 1615518 - DNA, 15 bp, Homo sapiens
aagataattgtccaa

SEQ ID NO: 1615519 - DNA, 15 bp, Homo sapiens
aaagataattgtcca

SEQ ID NO: 1615520 - DNA, 15 bp, Homo sapiens
taaagataattgtcc

SEQ ID NO: 1615521 - DNA, 15 bp, Homo sapiens
gtaaagataattgtc

SEQ ID NO: 1615522 - DNA, 15 bp, Homo sapiens
ggtaaagataattgt

SEQ ID NO: 1615523 - DNA, 15 bp, Homo sapiens
aggtaaagataattg

SEQ ID NO: 1615524 - DNA, 15 bp, Homo sapiens
gaggtaaagataatt

SEQ ID NO: 1615525 - DNA, 15 bp, Homo sapiens
agaggtaaagataat

SEQ ID NO: 1615526 - DNA, 15 bp, Homo sapiens
gagaggtaaagataa

SEQ ID NO: 1615527 - DNA, 15 bp, Homo sapiens
agagaggtaaagata

SEQ ID NO: 1615528 - DNA, 15 bp, Homo sapiens
cagagaggtaaagat

SEQ ID NO: 1615529 - DNA, 15 bp, Homo sapiens
tcagagaggtaaaga

SEQ ID NO: 1615530 - DNA, 15 bp, Homo sapiens
ctcagagaggtaaag

SEQ ID NO: 1615531 - DNA, 15 bp, Homo sapiens
gctcagagaggtaaa

SEQ ID NO: 1615532 - DNA, 15 bp, Homo sapiens
ggctcagagaggtaa

SEQ ID NO: 1615533 - DNA, 15 bp, Homo sapiens
aggctcagagaggta

SEQ ID NO: 1615534 - DNA, 15 bp, Homo sapiens
caggctcagagaggt

SEQ ID NO: 1615535 - DNA, 15 bp, Homo sapiens
acaggctcagagagg

SEQ ID NO: 1615536 - DNA, 15 bp, Homo sapiens
aacaggctcagagag

SEQ ID NO: 1615537 - DNA, 15 bp, Homo sapiens
aaacaggctcagaga

SEQ ID NO: 1615538 - DNA, 15 bp, Homo sapiens
aaaacaggctcagag

SEQ ID NO: 1615539 - DNA, 15 bp, Homo sapiens
aaaaacaggctcaga

SEQ ID NO: 1615540 - DNA, 15 bp, Homo sapiens
gaaaaacaggctcag

SEQ ID NO: 1615541 - DNA, 15 bp, Homo sapiens
agaaaaacaggctca

SEQ ID NO: 1615542 - DNA, 15 bp, Homo sapiens
tagaaaaacaggctc

SEQ ID NO: 1615543 - DNA, 15 bp, Homo sapiens
atagaaaaacaggct

SEQ ID NO: 1615544 - DNA, 15 bp, Homo sapiens
gatagaaaaacaggc

SEQ ID NO: 1615545 - DNA, 15 bp, Homo sapiens
tgatagaaaaacagg

SEQ ID NO: 1615546 - DNA, 15 bp, Homo sapiens
ctgatagaaaaacag

SEQ ID NO: 1615547 - DNA, 15 bp, Homo sapiens
actgatagaaaaaca

SEQ ID NO: 1615548 - DNA, 15 bp, Homo sapiens
tactgatagaaaaac

SEQ ID NO: 1615549 - DNA, 15 bp, Homo sapiens
ttactgatagaaaaa

SEQ ID NO: 1615550 - DNA, 15 bp, Homo sapiens
tttactgatagaaaa

SEQ ID NO: 1615551 - DNA, 15 bp, Homo sapiens
atttactgatagaaa

SEQ ID NO: 1615552 - DNA, 15 bp, Homo sapiens
aatttactgatagaa

SEQ ID NO: 1615553 - DNA, 15 bp, Homo sapiens
caatttactgataga

SEQ ID NO: 1615554 - DNA, 15 bp, Homo sapiens
ccaatttactgatag

SEQ ID NO: 1615555 - DNA, 15 bp, Homo sapiens
tccaatttactgata

SEQ ID NO: 1615556 - DNA, 15 bp, Homo sapiens
ctccaatttactgat

SEQ ID NO: 1615557 - DNA, 15 bp, Homo sapiens
tctccaatttactga

SEQ ID NO: 1615558 - DNA, 15 bp, Homo sapiens
gtctccaatttactg

SEQ ID NO: 1615559 - DNA, 15 bp, Homo sapiens
tgtctccaatttact

SEQ ID NO: 1615560 - DNA, 15 bp, Homo sapiens
gtgtctccaatttac

SEQ ID NO: 1615561 - DNA, 15 bp, Homo sapiens
agtgtctccaattta

SEQ ID NO: 1615562 - DNA, 15 bp, Homo sapiens
tagtgtctccaattt

SEQ ID NO: 1615563 - DNA, 15 bp, Homo sapiens
atagtgtctccaatt

SEQ ID NO: 1615564 - DNA, 15 bp, Homo sapiens
aatagtgtctccaat

SEQ ID NO: 1615565 - DNA, 15 bp, Homo sapiens
taatagtgtctccaa

SEQ ID NO: 1615566 - DNA, 15 bp, Homo sapiens
gtaatagtgtctcca

SEQ ID NO: 1615567 - DNA, 15 bp, Homo sapiens
agtaatagtgtctcc

SEQ ID NO: 1615568 - DNA, 15 bp, Homo sapiens
aagtaatagtgtctc

SEQ ID NO: 1615569 - DNA, 15 bp, Homo sapiens
taagtaatagtgtct

SEQ ID NO: 1615570 - DNA, 15 bp, Homo sapiens
gtaagtaatagtgtc

SEQ ID NO: 1615571 - DNA, 15 bp, Homo sapiens
ggtaagtaatagtgt

SEQ ID NO: 1615572 - DNA, 15 bp, Homo sapiens
aggtaagtaatagtg

SEQ ID NO: 1615573 - DNA, 15 bp, Homo sapiens
gaggtaagtaatagt

SEQ ID NO: 1615574 - DNA, 15 bp, Homo sapiens
agaggtaagtaatag

SEQ ID NO: 1615575 - DNA, 15 bp, Homo sapiens
gagaggtaagtaata

SEQ ID NO: 1615576 - DNA, 15 bp, Homo sapiens
agagaggtaagtaat

SEQ ID NO: 1615577 - DNA, 15 bp, Homo sapiens
cagagaggtaagtaa

SEQ ID NO: 1615578 - DNA, 15 bp, Homo sapiens
tcagagaggtaagta

SEQ ID NO: 1615579 - DNA, 15 bp, Homo sapiens
atcagagaggtaagt

SEQ ID NO: 1615580 - DNA, 15 bp, Homo sapiens
aatcagagaggtaag

SEQ ID NO: 1615581 - DNA, 15 bp, Homo sapiens
caatcagagaggtaa

SEQ ID NO: 1615582 - DNA, 15 bp, Homo sapiens
acaatcagagaggta

SEQ ID NO: 1615583 - DNA, 15 bp, Homo sapiens
aacaatcagagaggt

SEQ ID NO: 1615584 - DNA, 15 bp, Homo sapiens
caacaatcagagagg

SEQ ID NO: 1615585 - DNA, 15 bp, Homo sapiens
acaacaatcagagag

SEQ ID NO: 1615586 - DNA, 15 bp, Homo sapiens
tacaacaatcagaga

SEQ ID NO: 1615587 - DNA, 15 bp, Homo sapiens
ttacaacaatcagag

SEQ ID NO: 1615588 - DNA, 15 bp, Homo sapiens
cttacaacaatcaga

SEQ ID NO: 1615589 - DNA, 15 bp, Homo sapiens
tcttacaacaatcag

SEQ ID NO: 1615590 - DNA, 15 bp, Homo sapiens
ttcttacaacaatca

SEQ ID NO: 1615591 - DNA, 15 bp, Homo sapiens
attcttacaacaatc

SEQ ID NO: 1615592 - DNA, 15 bp, Homo sapiens
aattcttacaacaat

SEQ ID NO: 1615593 - DNA, 15 bp, Homo sapiens
taattcttacaacaa

SEQ ID NO: 1615594 - DNA, 15 bp, Homo sapiens
ctaattcttacaaca

SEQ ID NO: 1615595 - DNA, 15 bp, Homo sapiens
gctaattcttacaac

SEQ ID NO: 1615596 - DNA, 15 bp, Homo sapiens
tgctaattcttacaa

SEQ ID NO: 1615597 - DNA, 15 bp, Homo sapiens
ttgctaattcttaca

SEQ ID NO: 1615598 - DNA, 15 bp, Homo sapiens
attgctaattcttac

SEQ ID NO: 1615599 - DNA, 15 bp, Homo sapiens
tattgctaattctta

SEQ ID NO: 1615600 - DNA, 15 bp, Homo sapiens
ttattgctaattctt

SEQ ID NO: 1615601 - DNA, 15 bp, Homo sapiens
attattgctaattct

SEQ ID NO: 1615602 - DNA, 15 bp, Homo sapiens
cattattgctaattc

SEQ ID NO: 1615603 - DNA, 15 bp, Homo sapiens
acattattgctaatt

SEQ ID NO: 1615604 - DNA, 15 bp, Homo sapiens
atacattattgctaa

SEQ ID NO: 1615605 - DNA, 15 bp, Homo sapiens
catacattattgcta

SEQ ID NO: 1615606 - DNA, 15 bp, Homo sapiens
ccatacattattgct

SEQ ID NO: 1615607 - DNA, 15 bp, Homo sapiens
tccatacattattgc

SEQ ID NO: 1615608 - DNA, 15 bp, Homo sapiens
ttccatacattattg

SEQ ID NO: 1615609 - DNA, 15 bp, Homo sapiens
attccatacattatt

SEQ ID NO: 1615610 - DNA, 15 bp, Homo sapiens
tattccatacattat

SEQ ID NO: 1615611 - DNA, 15 bp, Homo sapiens
ctattccatacatta

SEQ ID NO: 1615612 - DNA, 15 bp, Homo sapiens
tctattccatacatt

SEQ ID NO: 1615613 - DNA, 15 bp, Homo sapiens
gtctattccatacat

SEQ ID NO: 1615614 - DNA, 15 bp, Homo sapiens
ggtctattccataca

SEQ ID NO: 1615615 - DNA, 15 bp, Homo sapiens
aggtctattccatac

SEQ ID NO: 1615616 - DNA, 15 bp, Homo sapiens
taggtctattccata

SEQ ID NO: 1615617 - DNA, 15 bp, Homo sapiens
ctaggtctattccat

SEQ ID NO: 1615618 - DNA, 15 bp, Homo sapiens
gctaggtctattcca

SEQ ID NO: 1615619 - DNA, 15 bp, Homo sapiens
tgctaggtctattcc

SEQ ID NO: 1615620 - DNA, 15 bp, Homo sapiens
gtgctaggtctattc

SEQ ID NO: 1615621 - DNA, 15 bp, Homo sapiens
tgtgctaggtctatt

SEQ ID NO: 1615622 - DNA, 15 bp, Homo sapiens
ctgtgctaggtctat

SEQ ID NO: 1615623 - DNA, 15 bp, Homo sapiens
tctgtgctaggtcta

SEQ ID NO: 1615624 - DNA, 15 bp, Homo sapiens
gtctgtgctaggtct

SEQ ID NO: 1615625 - DNA, 15 bp, Homo sapiens
agtctgtgctaggtc

SEQ ID NO: 1615626 - DNA, 15 bp, Homo sapiens
gagtctgtgctaggt

SEQ ID NO: 1615627 - DNA, 15 bp, Homo sapiens
agagtctgtgctagg

SEQ ID NO: 1615628 - DNA, 15 bp, Homo sapiens
aagagtctgtgctag

SEQ ID NO: 1615629 - DNA, 15 bp, Homo sapiens
aaagagtctgtgcta

SEQ ID NO: 1615630 - DNA, 15 bp, Homo sapiens
taaagagtctgtgct

SEQ ID NO: 1615631 - DNA, 15 bp, Homo sapiens
ttaaagagtctgtgc

SEQ ID NO: 1615632 - DNA, 15 bp, Homo sapiens
attaaagagtctgtg

SEQ ID NO: 1615633 - DNA, 15 bp, Homo sapiens
cattaaagagtctgt

SEQ ID NO: 1615634 - DNA, 15 bp, Homo sapiens
ccattaaagagtctg

SEQ ID NO: 1615635 - DNA, 15 bp, Homo sapiens
accattaaagagtct

SEQ ID NO: 1615636 - DNA, 15 bp, Homo sapiens
taccattaaagagtc

SEQ ID NO: 1615637 - DNA, 15 bp, Homo sapiens
ctaccattaaagagt

SEQ ID NO: 1615638 - DNA, 15 bp, Homo sapiens
gctaccattaaagag

SEQ ID NO: 1615639 - DNA, 15 bp, Homo sapiens
agctaccattaaaga

SEQ ID NO: 1615640 - DNA, 15 bp, Homo sapiens
cagctaccattaaag

SEQ ID NO: 1615641 - DNA, 15 bp, Homo sapiens
acagctaccattaaa

SEQ ID NO: 1615642 - DNA, 15 bp, Homo sapiens
aacagctaccattaa

SEQ ID NO: 1615643 - DNA, 15 bp, Homo sapiens
taacagctaccatta

SEQ ID NO: 1615644 - DNA, 15 bp, Homo sapiens
ataacagctaccatt

SEQ ID NO: 1615645 - DNA, 15 bp, Homo sapiens
tataacagctaccat

SEQ ID NO: 1615646 - DNA, 15 bp, Homo sapiens
atataacagctacca

SEQ ID NO: 1615647 - DNA, 15 bp, Homo sapiens
gatataacagctacc

SEQ ID NO: 1615648 - DNA, 15 bp, Homo sapiens
agatataacagctac

SEQ ID NO: 1615649 - DNA, 15 bp, Homo sapiens
cagatataacagcta

SEQ ID NO: 1615650 - DNA, 15 bp, Homo sapiens
gcagatataacagct

SEQ ID NO: 1615651 - DNA, 15 bp, Homo sapiens
agcagatataacagc

SEQ ID NO: 1615652 - DNA, 15 bp, Homo sapiens
aagcagatataacag

SEQ ID NO: 1615653 - DNA, 15 bp, Homo sapiens
taagcagatataaca

SEQ ID NO: 1615654 - DNA, 15 bp, Homo sapiens
ctaagcagatataac

SEQ ID NO: 1615655 - DNA, 15 bp, Homo sapiens
tctaagcagatataa

SEQ ID NO: 1615656 - DNA, 15 bp, Homo sapiens
gtctaagcagatata

SEQ ID NO: 1615657 - DNA, 15 bp, Homo sapiens
tgtctaagcagatat

SEQ ID NO: 1615658 - DNA, 15 bp, Homo sapiens
ctgtctaagcagata

SEQ ID NO: 1615659 - DNA, 15 bp, Homo sapiens
tctgtctaagcagat

SEQ ID NO: 1615660 - DNA, 15 bp, Homo sapiens
atctgtctaagcaga

SEQ ID NO: 1615661 - DNA, 15 bp, Homo sapiens
aatctgtctaagcag

SEQ ID NO: 1615662 - DNA, 15 bp, Homo sapiens
aaatctgtctaagca

SEQ ID NO: 1615663 - DNA, 15 bp, Homo sapiens
caaatctgtctaagc

SEQ ID NO: 1615664 - DNA, 15 bp, Homo sapiens
tcaaatctgtctaag

SEQ ID NO: 1615665 - DNA, 15 bp, Homo sapiens
atcaaatctgtctaa

SEQ ID NO: 1615666 - DNA, 15 bp, Homo sapiens
catcaaatctgtcta

SEQ ID NO: 1615667 - DNA, 15 bp, Homo sapiens
ccatcaaatctgtct

SEQ ID NO: 1615668 - DNA, 15 bp, Homo sapiens
cccatcaaatctgtc

SEQ ID NO: 1615669 - DNA, 15 bp, Homo sapiens
ccccatcaaatctgt

SEQ ID NO: 1615670 - DNA, 15 bp, Homo sapiens
accccatcaaatctg

SEQ ID NO: 1615671 - DNA, 15 bp, Homo sapiens
taccccatcaaatct

SEQ ID NO: 1615672 - DNA, 15 bp, Homo sapiens
ttaccccatcaaatc

SEQ ID NO: 1615673 - DNA, 15 bp, Homo sapiens
cttaccccatcaaat

SEQ ID NO: 1615674 - DNA, 15 bp, Homo sapiens
tcttaccccatcaaa

SEQ ID NO: 1615675 - DNA, 15 bp, Homo sapiens
atcttaccccatcaa

SEQ ID NO: 1615676 - DNA, 15 bp, Homo sapiens
aatcttaccccatca

SEQ ID NO: 1615677 - DNA, 15 bp, Homo sapiens
caatcttaccccatc

SEQ ID NO: 1615678 - DNA, 15 bp, Homo sapiens
gcaatcttaccccat

SEQ ID NO: 1615679 - DNA, 15 bp, Homo sapiens
ggcaatcttacccca

SEQ ID NO: 1615680 - DNA, 15 bp, Homo sapiens
aggcaatcttacccc

SEQ ID NO: 1615681 - DNA, 15 bp, Homo sapiens
caggcaatcttaccc

SEQ ID NO: 1615682 - DNA, 15 bp, Homo sapiens
gcaggcaatcttacc

SEQ ID NO: 1615683 - DNA, 15 bp, Homo sapiens
agcaggcaatcttac

SEQ ID NO: 1615684 - DNA, 15 bp, Homo sapiens
cagcaggcaatctta

SEQ ID NO: 1615685 - DNA, 15 bp, Homo sapiens
tcagcaggcaatctt

SEQ ID NO: 1615686 - DNA, 15 bp, Homo sapiens
atcagcaggcaatct

SEQ ID NO: 1615687 - DNA, 15 bp, Homo sapiens
tatcagcaggcaatc

SEQ ID NO: 1615688 - DNA, 15 bp, Homo sapiens
atatcagcaggcaat

SEQ ID NO: 1615689 - DNA, 15 bp, Homo sapiens
catatcagcaggcaa

SEQ ID NO: 1615690 - DNA, 15 bp, Homo sapiens
ccatatcagcaggca

SEQ ID NO: 1615691 - DNA, 15 bp, Homo sapiens
cccatatcagcaggc

SEQ ID NO: 1615692 - DNA, 15 bp, Homo sapiens
ccccatatcagcagg

SEQ ID NO: 1615693 - DNA, 15 bp, Homo sapiens
cccccatatcagcag

SEQ ID NO: 1615694 - DNA, 15 bp, Homo sapiens
ccccccatatcagca

SEQ ID NO: 1615695 - DNA, 15 bp, Homo sapiens
gccccccatatcagc

SEQ ID NO: 1615696 - DNA, 15 bp, Homo sapiens
tgccccccatatcag

SEQ ID NO: 1615697 - DNA, 15 bp, Homo sapiens
ctgccccccatatca

SEQ ID NO: 1615698 - DNA, 15 bp, Homo sapiens
tctgccccccatatc

SEQ ID NO: 1615699 - DNA, 15 bp, Homo sapiens
ctctgccccccatat

SEQ ID NO: 1615700 - DNA, 15 bp, Homo sapiens
tctctgccccccata

SEQ ID NO: 1615701 - DNA, 15 bp, Homo sapiens
atctctgccccccat

SEQ ID NO: 1615702 - DNA, 15 bp, Homo sapiens
catctctgcccccca

SEQ ID NO: 1615703 - DNA, 15 bp, Homo sapiens
tcatctctgcccccc

SEQ ID NO: 1615704 - DNA, 15 bp, Homo sapiens
atcatctctgccccc

SEQ ID NO: 1615705 - DNA, 15 bp, Homo sapiens
catcatctctgcccc

SEQ ID NO: 1615706 - DNA, 15 bp, Homo sapiens
tcatcatctctgccc

SEQ ID NO: 1615707 - DNA, 15 bp, Homo sapiens
ctcatcatctctgcc

SEQ ID NO: 1615708 - DNA, 15 bp, Homo sapiens
tctcatcatctctgc

SEQ ID NO: 1615709 - DNA, 15 bp, Homo sapiens
ctctcatcatctctg

SEQ ID NO: 1615710 - DNA, 15 bp, Homo sapiens
gctctcatcatctct

SEQ ID NO: 1615711 - DNA, 15 bp, Homo sapiens
ggctctcatcatctc

SEQ ID NO: 1615712 - DNA, 15 bp, Homo sapiens
aggctctcatcatct

SEQ ID NO: 1615713 - DNA, 15 bp, Homo sapiens
gaggctctcatcatc

SEQ ID NO: 1615714 - DNA, 15 bp, Homo sapiens
tgaggctctcatcat

SEQ ID NO: 1615715 - DNA, 15 bp, Homo sapiens
ctgaggctctcatca

SEQ ID NO: 1615716 - DNA, 15 bp, Homo sapiens
tctgaggctctcatc

SEQ ID NO: 1615717 - DNA, 15 bp, Homo sapiens
ctctgaggctctcat

SEQ ID NO: 1615718 - DNA, 15 bp, Homo sapiens
tctctgaggctctca

SEQ ID NO: 1615719 - DNA, 15 bp, Homo sapiens
gtctctgaggctctc

SEQ ID NO: 1615720 - DNA, 15 bp, Homo sapiens
ggtctctgaggctct

SEQ ID NO: 1615721 - DNA, 15 bp, Homo sapiens
gggtctctgaggctc

SEQ ID NO: 1615722 - DNA, 15 bp, Homo sapiens
tgggtctctgaggct

SEQ ID NO: 1615723 - DNA, 15 bp, Homo sapiens
ctgggtctctgaggc

SEQ ID NO: 1615724 - DNA, 15 bp, Homo sapiens
cctgggtctctgagg

SEQ ID NO: 1615725 - DNA, 15 bp, Homo sapiens
tcctgggtctctgag

SEQ ID NO: 1615726 - DNA, 15 bp, Homo sapiens
ctcctgggtctctga

SEQ ID NO: 1615727 - DNA, 15 bp, Homo sapiens
tctcctgggtctctg

SEQ ID NO: 1615728 - DNA, 15 bp, Homo sapiens
ctctcctgggtctct

SEQ ID NO: 1615729 - DNA, 15 bp, Homo sapiens
cctctcctgggtctc

SEQ ID NO: 1615730 - DNA, 15 bp, Homo sapiens
ccctctcctgggtct

SEQ ID NO: 1615731 - DNA, 15 bp, Homo sapiens
cccctctcctgggtc

SEQ ID NO: 1615732 - DNA, 15 bp, Homo sapiens
gcccctctcctgggt

SEQ ID NO: 1615733 - DNA, 15 bp, Homo sapiens
ggcccctctcctggg

SEQ ID NO: 1615734 - DNA, 15 bp, Homo sapiens
tggcccctctcctgg

SEQ ID NO: 1615735 - DNA, 15 bp, Homo sapiens
ctggcccctctcctg

SEQ ID NO: 1615736 - DNA, 15 bp, Homo sapiens
tctggcccctctcct

SEQ ID NO: 1615737 - DNA, 15 bp, Homo sapiens
ctctggcccctctcc

SEQ ID NO: 1615738 - DNA, 15 bp, Homo sapiens
cctctggcccctctc

SEQ ID NO: 1615739 - DNA, 15 bp, Homo sapiens
gcctctggcccctct

SEQ ID NO: 1615740 - DNA, 15 bp, Homo sapiens
ggcctctggcccctc

SEQ ID NO: 1615741 - DNA, 15 bp, Homo sapiens
tggcctctggcccct

SEQ ID NO: 1615742 - DNA, 15 bp, Homo sapiens
atggcctctggcccc

SEQ ID NO: 1615743 - DNA, 15 bp, Homo sapiens
aatggcctctggccc

SEQ ID NO: 1615744 - DNA, 15 bp, Homo sapiens
taatggcctctggcc

SEQ ID NO: 1615745 - DNA, 15 bp, Homo sapiens
ctaatggcctctggc

SEQ ID NO: 1615746 - DNA, 15 bp, Homo sapiens
cctaatggcctctgg

SEQ ID NO: 1615747 - DNA, 15 bp, Homo sapiens
tcctaatggcctctg

SEQ ID NO: 1615748 - DNA, 15 bp, Homo sapiens
ttcctaatggcctct

SEQ ID NO: 1615749 - DNA, 15 bp, Homo sapiens
tttcctaatggcctc

SEQ ID NO: 1615750 - DNA, 15 bp, Homo sapiens
ttttcctaatggcct

SEQ ID NO: 1615751 - DNA, 15 bp, Homo sapiens
cttttcctaatggcc

SEQ ID NO: 1615752 - DNA, 15 bp, Homo sapiens
gcttttcctaatggc

SEQ ID NO: 1615753 - DNA, 15 bp, Homo sapiens
agcttttcctaatgg

SEQ ID NO: 1615754 - DNA, 15 bp, Homo sapiens
aagcttttcctaatg

SEQ ID NO: 1615755 - DNA, 15 bp, Homo sapiens
gaagcttttcctaat

SEQ ID NO: 1615756 - DNA, 15 bp, Homo sapiens
ggaagcttttcctaa

SEQ ID NO: 1615757 - DNA, 15 bp, Homo sapiens
gggaagcttttccta

SEQ ID NO: 1615758 - DNA, 15 bp, Homo sapiens
tgggaagcttttcct

SEQ ID NO: 1615759 - DNA, 15 bp, Homo sapiens
ttgggaagcttttcc

SEQ ID NO: 1615760 - DNA, 15 bp, Homo sapiens
tttgggaagcttttc

SEQ ID NO: 1615761 - DNA, 15 bp, Homo sapiens
ctttgggaagctttt

SEQ ID NO: 1615762 - DNA, 15 bp, Homo sapiens
cctttgggaagcttt

SEQ ID NO: 1615763 - DNA, 15 bp, Homo sapiens
acctttgggaagctt

SEQ ID NO: 1615764 - DNA, 15 bp, Homo sapiens
cacctttgggaagct

SEQ ID NO: 1615765 - DNA, 15 bp, Homo sapiens
tcacctttgggaagc

SEQ ID NO: 1615766 - DNA, 15 bp, Homo sapiens
ctcacctttgggaag

SEQ ID NO: 1615767 - DNA, 15 bp, Homo sapiens
gctcacctttgggaa

SEQ ID NO: 1615768 - DNA, 15 bp, Homo sapiens
ggctcacctttggga

SEQ ID NO: 1615769 - DNA, 15 bp, Homo sapiens
tggctcacctttggg

SEQ ID NO: 1615770 - DNA, 15 bp, Homo sapiens
ttggctcacctttgg

SEQ ID NO: 1615771 - DNA, 15 bp, Homo sapiens
cttggctcacctttg

SEQ ID NO: 1615772 - DNA, 15 bp, Homo sapiens
gcttggctcaccttt

SEQ ID NO: 1615773 - DNA, 15 bp, Homo sapiens
agcttggctcacctt

SEQ ID NO: 1615774 - DNA, 15 bp, Homo sapiens
gagcttggctcacct

SEQ ID NO: 1615775 - DNA, 15 bp, Homo sapiens
agagcttggctcacc

SEQ ID NO: 1615776 - DNA, 15 bp, Homo sapiens
gagagcttggctcac

SEQ ID NO: 1615777 - DNA, 15 bp, Homo sapiens
ggagagcttggctca

SEQ ID NO: 1615778 - DNA, 15 bp, Homo sapiens
aggagagcttggctc

SEQ ID NO: 1615779 - DNA, 15 bp, Homo sapiens
aaggagagcttggct

SEQ ID NO: 1615780 - DNA, 15 bp, Homo sapiens
gaaggagagcttggc

SEQ ID NO: 1615781 - DNA, 15 bp, Homo sapiens
tgaaggagagcttgg

SEQ ID NO: 1615782 - DNA, 15 bp, Homo sapiens
ttgaaggagagcttg

SEQ ID NO: 1615783 - DNA, 15 bp, Homo sapiens
cttgaaggagagctt

SEQ ID NO: 1615784 - DNA, 15 bp, Homo sapiens
acttgaaggagagct

SEQ ID NO: 1615785 - DNA, 15 bp, Homo sapiens
aacttgaaggagagc

SEQ ID NO: 1615786 - DNA, 15 bp, Homo sapiens
gaacttgaaggagag

SEQ ID NO: 1615787 - DNA, 15 bp, Homo sapiens
agaacttgaaggaga

SEQ ID NO: 1615788 - DNA, 15 bp, Homo sapiens
tagaacttgaaggag

SEQ ID NO: 1615789 - DNA, 15 bp, Homo sapiens
atagaacttgaagga

SEQ ID NO: 1615790 - DNA, 15 bp, Homo sapiens
catagaacttgaagg

SEQ ID NO: 1615791 - DNA, 15 bp, Homo sapiens
ccatagaacttgaag

SEQ ID NO: 1615792 - DNA, 15 bp, Homo sapiens
accatagaacttgaa

SEQ ID NO: 1615793 - DNA, 15 bp, Homo sapiens
caccatagaacttga

SEQ ID NO: 1615794 - DNA, 15 bp, Homo sapiens
tcaccatagaacttg

SEQ ID NO: 1615795 - DNA, 15 bp, Homo sapiens
gtcaccatagaactt

SEQ ID NO: 1615796 - DNA, 15 bp, Homo sapiens
agtcaccatagaact

SEQ ID NO: 1615797 - DNA, 15 bp, Homo sapiens
cagtcaccatagaac

SEQ ID NO: 1615798 - DNA, 15 bp, Homo sapiens
ccagtcaccatagaa

SEQ ID NO: 1615799 - DNA, 15 bp, Homo sapiens
cccagtcaccataga

SEQ ID NO: 1615800 - DNA, 15 bp, Homo sapiens
ccccagtcaccatag

SEQ ID NO: 1615801 - DNA, 15 bp, Homo sapiens
tccccagtcaccata

SEQ ID NO: 1615802 - DNA, 15 bp, Homo sapiens
ttccccagtcaccat

SEQ ID NO: 1615803 - DNA, 15 bp, Homo sapiens
gttccccagtcacca

SEQ ID NO: 1615804 - DNA, 15 bp, Homo sapiens
agttccccagtcacc

SEQ ID NO: 1615805 - DNA, 15 bp, Homo sapiens
cagttccccagtcac

SEQ ID NO: 1615806 - DNA, 15 bp, Homo sapiens
ccagttccccagtca

SEQ ID NO: 1615807 - DNA, 15 bp, Homo sapiens
cccagttccccagtc

SEQ ID NO: 1615808 - DNA, 15 bp, Homo sapiens
ccccagttccccagt

SEQ ID NO: 1615809 - DNA, 15 bp, Homo sapiens
cccccagttccccag

SEQ ID NO: 1615810 - DNA, 15 bp, Homo sapiens
tcccccagttcccca

SEQ ID NO: 1615811 - DNA, 15 bp, Homo sapiens
ttcccccagttcccc

SEQ ID NO: 1615812 - DNA, 15 bp, Homo sapiens
attcccccagttccc

SEQ ID NO: 1615813 - DNA, 15 bp, Homo sapiens
cattcccccagttcc

SEQ ID NO: 1615814 - DNA, 15 bp, Homo sapiens
ccattcccccagttc

SEQ ID NO: 1615815 - DNA, 15 bp, Homo sapiens
cccattcccccagtt

SEQ ID NO: 1615816 - DNA, 15 bp, Homo sapiens
tcccattcccccagt

SEQ ID NO: 1615817 - DNA, 15 bp, Homo sapiens
gtcccattcccccag

SEQ ID NO: 1615818 - DNA, 15 bp, Homo sapiens
ggtcccattccccca

SEQ ID NO: 1615819 - DNA, 15 bp, Homo sapiens
gggtcccattccccc

SEQ ID NO: 1615820 - DNA, 15 bp, Homo sapiens
tgggtcccattcccc

SEQ ID NO: 1615821 - DNA, 15 bp, Homo sapiens
ctgggtcccattccc

SEQ ID NO: 1615822 - DNA, 15 bp, Homo sapiens
tctgggtcccattcc

SEQ ID NO: 1615823 - DNA, 15 bp, Homo sapiens
gtctgggtcccattc

SEQ ID NO: 1615824 - DNA, 15 bp, Homo sapiens
agtctgggtcccatt

SEQ ID NO: 1615825 - DNA, 15 bp, Homo sapiens
gagtctgggtcccat

SEQ ID NO: 1615826 - DNA, 15 bp, Homo sapiens
agagtctgggtccca

SEQ ID NO: 1615827 - DNA, 15 bp, Homo sapiens
cagagtctgggtccc

SEQ ID NO: 1615828 - DNA, 15 bp, Homo sapiens
tcagagtctgggtcc

SEQ ID NO: 1615829 - DNA, 15 bp, Homo sapiens
atcagagtctgggtc

SEQ ID NO: 1615830 - DNA, 15 bp, Homo sapiens
tatcagagtctgggt

SEQ ID NO: 1615831 - DNA, 15 bp, Homo sapiens
ctatcagagtctggg

SEQ ID NO: 1615832 - DNA, 15 bp, Homo sapiens
cctatcagagtctgg

SEQ ID NO: 1615833 - DNA, 15 bp, Homo sapiens
acctatcagagtctg

SEQ ID NO: 1615834 - DNA, 15 bp, Homo sapiens
gacctatcagagtct

SEQ ID NO: 1615835 - DNA, 15 bp, Homo sapiens
tgacctatcagagtc

SEQ ID NO: 1615836 - DNA, 15 bp, Homo sapiens
ctgacctatcagagt

SEQ ID NO: 1615837 - DNA, 15 bp, Homo sapiens
cctgacctatcagag

SEQ ID NO: 1615838 - DNA, 15 bp, Homo sapiens
ccctgacctatcaga

SEQ ID NO: 1615839 - DNA, 15 bp, Homo sapiens
tccctgacctatcag

SEQ ID NO: 1615840 - DNA, 15 bp, Homo sapiens
gtccctgacctatca

SEQ ID NO: 1615841 - DNA, 15 bp, Homo sapiens
tgtccctgacctatc

SEQ ID NO: 1615842 - DNA, 15 bp, Homo sapiens
ctgtccctgacctat

SEQ ID NO: 1615843 - DNA, 15 bp, Homo sapiens
actgtccctgaccta

SEQ ID NO: 1615844 - DNA, 15 bp, Homo sapiens
tactgtccctgacct

SEQ ID NO: 1615845 - DNA, 15 bp, Homo sapiens
ttactgtccctgacc

SEQ ID NO: 1615846 - DNA, 15 bp, Homo sapiens
attactgtccctgac

SEQ ID NO: 1615847 - DNA, 15 bp, Homo sapiens
gattactgtccctga

SEQ ID NO: 1615848 - DNA, 15 bp, Homo sapiens
agattactgtccctg

SEQ ID NO: 1615849 - DNA, 15 bp, Homo sapiens
gagattactgtccct

SEQ ID NO: 1615850 - DNA, 15 bp, Homo sapiens
tgagattactgtccc

SEQ ID NO: 1615851 - DNA, 15 bp, Homo sapiens
ctgagattactgtcc

SEQ ID NO: 1615852 - DNA, 15 bp, Homo sapiens
actgagattactgtc

SEQ ID NO: 1615853 - DNA, 15 bp, Homo sapiens
gactgagattactgt

SEQ ID NO: 1615854 - DNA, 15 bp, Homo sapiens
agactgagattactg

SEQ ID NO: 1615855 - DNA, 15 bp, Homo sapiens
aagactgagattact

SEQ ID NO: 1615856 - DNA, 15 bp, Homo sapiens
gaagactgagattac

SEQ ID NO: 1615857 - DNA, 15 bp, Homo sapiens
agaagactgagatta

SEQ ID NO: 1615858 - DNA, 15 bp, Homo sapiens
tagaagactgagatt

SEQ ID NO: 1615859 - DNA, 15 bp, Homo sapiens
ctagaagactgagat

SEQ ID NO: 1615860 - DNA, 15 bp, Homo sapiens
cctagaagactgaga

SEQ ID NO: 1615861 - DNA, 15 bp, Homo sapiens
acctagaagactgag

SEQ ID NO: 1615862 - DNA, 15 bp, Homo sapiens
cacctagaagactga

SEQ ID NO: 1615863 - DNA, 15 bp, Homo sapiens
acacctagaagactg

SEQ ID NO: 1615864 - DNA, 15 bp, Homo sapiens
aacacctagaagact

SEQ ID NO: 1615865 - DNA, 15 bp, Homo sapiens
aaacacctagaagac

SEQ ID NO: 1615866 - DNA, 15 bp, Homo sapiens
aaaacacctagaaga

SEQ ID NO: 1615867 - DNA, 15 bp, Homo sapiens
aaaaacacctagaag

SEQ ID NO: 1615868 - DNA, 15 bp, Homo sapiens
aaaaaacacctagaa

SEQ ID NO: 1615869 - DNA, 15 bp, Homo sapiens
aaaaaaacacctaga

SEQ ID NO: 1615870 - DNA, 15 bp, Homo sapiens
taaaaaaacacctag

SEQ ID NO: 1615871 - DNA, 15 bp, Homo sapiens
ttaaaaaaacaccta

SEQ ID NO: 1615872 - DNA, 15 bp, Homo sapiens
tttaaaaaaacacct

SEQ ID NO: 1615873 - DNA, 15 bp, Homo sapiens
gtttttaaaaaaaca

SEQ ID NO: 1615874 - DNA, 15 bp, Homo sapiens
ggtttttaaaaaaac

SEQ ID NO: 1615875 - DNA, 15 bp, Homo sapiens
cggtttttaaaaaaa

SEQ ID NO: 1615876 - DNA, 15 bp, Homo sapiens
ccggtttttaaaaaa

SEQ ID NO: 1615877 - DNA, 15 bp, Homo sapiens
gccggtttttaaaaa

SEQ ID NO: 1615878 - DNA, 15 bp, Homo sapiens
tgccggtttttaaaa

SEQ ID NO: 1615879 - DNA, 15 bp, Homo sapiens
atgccggtttttaaa

SEQ ID NO: 1615880 - DNA, 15 bp, Homo sapiens
gatgccggtttttaa

SEQ ID NO: 1615881 - DNA, 15 bp, Homo sapiens
tgatgccggttttta

SEQ ID NO: 1615882 - DNA, 15 bp, Homo sapiens
ctgatgccggttttt

SEQ ID NO: 1615883 - DNA, 15 bp, Homo sapiens
cctgatgccggtttt

SEQ ID NO: 1615884 - DNA, 15 bp, Homo sapiens
acctgatgccggttt

SEQ ID NO: 1615885 - DNA, 15 bp, Homo sapiens
cacctgatgccggtt

SEQ ID NO: 1615886 - DNA, 15 bp, Homo sapiens
ccacctgatgccggt

SEQ ID NO: 1615887 - DNA, 15 bp, Homo sapiens
cccacctgatgccgg

SEQ ID NO: 1615888 - DNA, 15 bp, Homo sapiens
ccccacctgatgccg

SEQ ID NO: 1615889 - DNA, 15 bp, Homo sapiens
gccccacctgatgcc

SEQ ID NO: 1615890 - DNA, 15 bp, Homo sapiens
ggccccacctgatgc

SEQ ID NO: 1615891 - DNA, 15 bp, Homo sapiens
aggccccacctgatg

SEQ ID NO: 1615892 - DNA, 15 bp, Homo sapiens
caggccccacctgat

SEQ ID NO: 1615893 - DNA, 15 bp, Homo sapiens
ccaggccccacctga

SEQ ID NO: 1615894 - DNA, 15 bp, Homo sapiens
accaggccccacctg

SEQ ID NO: 1615895 - DNA, 15 bp, Homo sapiens
caccaggccccacct

SEQ ID NO: 1615896 - DNA, 15 bp, Homo sapiens
ccaccaggccccacc

SEQ ID NO: 1615897 - DNA, 15 bp, Homo sapiens
gccaccaggccccac

SEQ ID NO: 1615898 - DNA, 15 bp, Homo sapiens
agccaccaggcccca

SEQ ID NO: 1615899 - DNA, 15 bp, Homo sapiens
gagccaccaggcccc

SEQ ID NO: 1615900 - DNA, 15 bp, Homo sapiens
tgagccaccaggccc

SEQ ID NO: 1615901 - DNA, 15 bp, Homo sapiens
gtgagccaccaggcc

SEQ ID NO: 1615902 - DNA, 15 bp, Homo sapiens
tgtgagccaccaggc

SEQ ID NO: 1615903 - DNA, 15 bp, Homo sapiens
gtgtgagccaccagg

SEQ ID NO: 1615904 - DNA, 15 bp, Homo sapiens
ggtgtgagccaccag

SEQ ID NO: 1615905 - DNA, 15 bp, Homo sapiens
tgttgggattacagg

SEQ ID NO: 1615906 - DNA, 15 bp, Homo sapiens
gtgttgggattacag

SEQ ID NO: 1615907 - DNA, 15 bp, Homo sapiens
agtgttgggattaca

SEQ ID NO: 1615908 - DNA, 15 bp, Homo sapiens
aagtgttgggattac

SEQ ID NO: 1615909 - DNA, 15 bp, Homo sapiens
ctcccaaagtgttgg

SEQ ID NO: 1615910 - DNA, 15 bp, Homo sapiens
cctcccaaagtgttg

SEQ ID NO: 1615911 - DNA, 15 bp, Homo sapiens
gcctcccaaagtgtt

SEQ ID NO: 1615912 - DNA, 15 bp, Homo sapiens
agcctcccaaagtgt

SEQ ID NO: 1615913 - DNA, 15 bp, Homo sapiens
taatcctcccacctc

SEQ ID NO: 1615914 - DNA, 15 bp, Homo sapiens
gtaatcctcccacct

SEQ ID NO: 1615915 - DNA, 15 bp, Homo sapiens
agtaatcctcccacc

SEQ ID NO: 1615916 - DNA, 15 bp, Homo sapiens
aagtaatcctcccac

SEQ ID NO: 1615917 - DNA, 15 bp, Homo sapiens
caagtaatcctccca

SEQ ID NO: 1615918 - DNA, 15 bp, Homo sapiens
tcaagtaatcctccc

SEQ ID NO: 1615919 - DNA, 15 bp, Homo sapiens
ctcaagtaatcctcc

SEQ ID NO: 1615920 - DNA, 15 bp, Homo sapiens
cctcaagtaatcctc

SEQ ID NO: 1615921 - DNA, 15 bp, Homo sapiens
gcctcaagtaatcct

SEQ ID NO: 1615922 - DNA, 15 bp, Homo sapiens
ggcctcaagtaatcc

SEQ ID NO: 1615923 - DNA, 15 bp, Homo sapiens
tggcctcaagtaatc

SEQ ID NO: 1615924 - DNA, 15 bp, Homo sapiens
ttggcctcaagtaat

SEQ ID NO: 1615925 - DNA, 15 bp, Homo sapiens
cttggcctcaagtaa

SEQ ID NO: 1615926 - DNA, 15 bp, Homo sapiens
tcttggcctcaagta

SEQ ID NO: 1615927 - DNA, 15 bp, Homo sapiens
ctcttggcctcaagt

SEQ ID NO: 1615928 - DNA, 15 bp, Homo sapiens
gtggtctcaaactct

SEQ ID NO: 1615929 - DNA, 15 bp, Homo sapiens
ggtggtctcaaactc

SEQ ID NO: 1615930 - DNA, 15 bp, Homo sapiens
aggtggtctcaaact

SEQ ID NO: 1615931 - DNA, 15 bp, Homo sapiens
caggtggtctcaaac

SEQ ID NO: 1615932 - DNA, 15 bp, Homo sapiens
tcaggtggtctcaaa

SEQ ID NO: 1615933 - DNA, 15 bp, Homo sapiens
ctcaggtggtctcaa

SEQ ID NO: 1615934 - DNA, 15 bp, Homo sapiens
actcaggtggtctca

SEQ ID NO: 1615935 - DNA, 15 bp, Homo sapiens
tactcaggtggtctc

SEQ ID NO: 1615936 - DNA, 15 bp, Homo sapiens
ttactcaggtggtct

SEQ ID NO: 1615937 - DNA, 15 bp, Homo sapiens
gttactcaggtggtc

SEQ ID NO: 1615938 - DNA, 15 bp, Homo sapiens
agttactcaggtggt

SEQ ID NO: 1615939 - DNA, 15 bp, Homo sapiens
cagttactcaggtgg

SEQ ID NO: 1615940 - DNA, 15 bp, Homo sapiens
tcagttactcaggtg

SEQ ID NO: 1615941 - DNA, 15 bp, Homo sapiens
ctcagttactcaggt

SEQ ID NO: 1615942 - DNA, 15 bp, Homo sapiens
gctcagttactcagg

SEQ ID NO: 1615943 - DNA, 15 bp, Homo sapiens
cgctcagttactcag

SEQ ID NO: 1615944 - DNA, 15 bp, Homo sapiens
tcgctcagttactca

SEQ ID NO: 1615945 - DNA, 15 bp, Homo sapiens
ctcgctcagttactc

SEQ ID NO: 1615946 - DNA, 15 bp, Homo sapiens
tctcgctcagttact

SEQ ID NO: 1615947 - DNA, 15 bp, Homo sapiens
gtctcgctcagttac

SEQ ID NO: 1615948 - DNA, 15 bp, Homo sapiens
agtctcgctcagtta

SEQ ID NO: 1615949 - DNA, 15 bp, Homo sapiens
aagtctcgctcagtt

SEQ ID NO: 1615950 - DNA, 15 bp, Homo sapiens
gaagtctcgctcagt

SEQ ID NO: 1615951 - DNA, 15 bp, Homo sapiens
cgaagtctcgctcag

SEQ ID NO: 1615952 - DNA, 15 bp, Homo sapiens
acgaagtctcgctca

SEQ ID NO: 1615953 - DNA, 15 bp, Homo sapiens
gacgaagtctcgctc

SEQ ID NO: 1615954 - DNA, 15 bp, Homo sapiens
agacgaagtctcgct

SEQ ID NO: 1615955 - DNA, 15 bp, Homo sapiens
gagacgaagtctcgc

SEQ ID NO: 1615956 - DNA, 15 bp, Homo sapiens
agagacgaagtctcg

SEQ ID NO: 1615957 - DNA, 15 bp, Homo sapiens
tagagacgaagtctc

SEQ ID NO: 1615958 - DNA, 15 bp, Homo sapiens
gtagagacgaagtct

SEQ ID NO: 1615959 - DNA, 15 bp, Homo sapiens
tgtagagacgaagtc

SEQ ID NO: 1615960 - DNA, 15 bp, Homo sapiens
ttgtagagacgaagt

SEQ ID NO: 1615961 - DNA, 15 bp, Homo sapiens
tttgtagagacgaag

SEQ ID NO: 1615962 - DNA, 15 bp, Homo sapiens
ttttgtagagacgaa

SEQ ID NO: 1615963 - DNA, 15 bp, Homo sapiens
tttttttgtagagac

SEQ ID NO: 1615964 - DNA, 15 bp, Homo sapiens
atttttttgtagaga

SEQ ID NO: 1615965 - DNA, 15 bp, Homo sapiens
aatttttttgtagag

SEQ ID NO: 1615966 - DNA, 15 bp, Homo sapiens
taatttttttgtaga

SEQ ID NO: 1615967 - DNA, 15 bp, Homo sapiens
ttaatttttttgtag

SEQ ID NO: 1615968 - DNA, 15 bp, Homo sapiens
tttaatttttttgta

SEQ ID NO: 1615969 - DNA, 15 bp, Homo sapiens
ttttaatttttttgt

SEQ ID NO: 1615970 - DNA, 15 bp, Homo sapiens
gttttaatttttttg

SEQ ID NO: 1615971 - DNA, 15 bp, Homo sapiens
tgttttaattttttt

SEQ ID NO: 1615972 - DNA, 15 bp, Homo sapiens
gctgttttaattttt

SEQ ID NO: 1615973 - DNA, 15 bp, Homo sapiens
ggctgttttaatttt

SEQ ID NO: 1615974 - DNA, 15 bp, Homo sapiens
tggctgttttaattt

SEQ ID NO: 1615975 - DNA, 15 bp, Homo sapiens
ctggctgttttaatt

SEQ ID NO: 1615976 - DNA, 15 bp, Homo sapiens
cctggctgttttaat

SEQ ID NO: 1615977 - DNA, 15 bp, Homo sapiens
tcctggctgttttaa

SEQ ID NO: 1615978 - DNA, 15 bp, Homo sapiens
ttcctggctgtttta

SEQ ID NO: 1615979 - DNA, 15 bp, Homo sapiens
attcctggctgtttt

SEQ ID NO: 1615980 - DNA, 15 bp, Homo sapiens
cattcctggctgttt

SEQ ID NO: 1615981 - DNA, 15 bp, Homo sapiens
ccattcctggctgtt

SEQ ID NO: 1615982 - DNA, 15 bp, Homo sapiens
accattcctggctgt

SEQ ID NO: 1615983 - DNA, 15 bp, Homo sapiens
caccattcctggctg

SEQ ID NO: 1615984 - DNA, 15 bp, Homo sapiens
ccaccattcctggct

SEQ ID NO: 1615985 - DNA, 15 bp, Homo sapiens
accaccattcctggc

SEQ ID NO: 1615986 - DNA, 15 bp, Homo sapiens
caccaccattcctgg

SEQ ID NO: 1615987 - DNA, 15 bp, Homo sapiens
gcaccaccattcctg

SEQ ID NO: 1615988 - DNA, 15 bp, Homo sapiens
tgcaccaccattcct

SEQ ID NO: 1615989 - DNA, 15 bp, Homo sapiens
gtgcaccaccattcc

SEQ ID NO: 1615990 - DNA, 15 bp, Homo sapiens
tgtgcaccaccattc

SEQ ID NO: 1615991 - DNA, 15 bp, Homo sapiens
gtgtgcaccaccatt

SEQ ID NO: 1615992 - DNA, 15 bp, Homo sapiens
aacaggtgtgcacca

SEQ ID NO: 1615993 - DNA, 15 bp, Homo sapiens
aaacaggtgtgcacc

SEQ ID NO: 1615994 - DNA, 15 bp, Homo sapiens
aaaacaggtgtgcac

SEQ ID NO: 1615995 - DNA, 15 bp, Homo sapiens
gaaaacaggtgtgca

SEQ ID NO: 1615996 - DNA, 15 bp, Homo sapiens
ggaaaacaggtgtgc

SEQ ID NO: 1615997 - DNA, 15 bp, Homo sapiens
aggaaaacaggtgtg

SEQ ID NO: 1615998 - DNA, 15 bp, Homo sapiens
caggaaaacaggtgt

SEQ ID NO: 1615999 - DNA, 15 bp, Homo sapiens
ccaggaaaacaggtg

SEQ ID NO: 1616000 - DNA, 15 bp, Homo sapiens
gccaggaaaacaggt

SEQ ID NO: 1616001 - DNA, 15 bp, Homo sapiens
agccaggaaaacagg

SEQ ID NO: 1616002 - DNA, 15 bp, Homo sapiens
tagccaggaaaacag

SEQ ID NO: 1616003 - DNA, 15 bp, Homo sapiens
gtagccaggaaaaca

SEQ ID NO: 1616004 - DNA, 15 bp, Homo sapiens
agtagccaggaaaac

SEQ ID NO: 1616005 - DNA, 15 bp, Homo sapiens
aagtagccaggaaaa

SEQ ID NO: 1616006 - DNA, 15 bp, Homo sapiens
taagtagccaggaaa

SEQ ID NO: 1616007 - DNA, 15 bp, Homo sapiens
ctaagtagccaggaa

SEQ ID NO: 1616008 - DNA, 15 bp, Homo sapiens
tcctaagtagccagg

SEQ ID NO: 1616009 - DNA, 15 bp, Homo sapiens
ctcctaagtagccag

SEQ ID NO: 1616010 - DNA, 15 bp, Homo sapiens
cctcctaagtagcca

SEQ ID NO: 1616011 - DNA, 15 bp, Homo sapiens
gcctcctaagtagcc

SEQ ID NO: 1616012 - DNA, 15 bp, Homo sapiens
tcttcccacctcagc

SEQ ID NO: 1616013 - DNA, 15 bp, Homo sapiens
atcttcccacctcag

SEQ ID NO: 1616014 - DNA, 15 bp, Homo sapiens
catcttcccacctca

SEQ ID NO: 1616015 - DNA, 15 bp, Homo sapiens
ccatcttcccacctc

SEQ ID NO: 1616016 - DNA, 15 bp, Homo sapiens
accatcttcccacct

SEQ ID NO: 1616017 - DNA, 15 bp, Homo sapiens
caccatcttcccacc

SEQ ID NO: 1616018 - DNA, 15 bp, Homo sapiens
acaccatcttcccac

SEQ ID NO: 1616019 - DNA, 15 bp, Homo sapiens
tacaccatcttccca

SEQ ID NO: 1616020 - DNA, 15 bp, Homo sapiens
ctacaccatcttccc

SEQ ID NO: 1616021 - DNA, 15 bp, Homo sapiens
cctacaccatcttcc

SEQ ID NO: 1616022 - DNA, 15 bp, Homo sapiens
gcctacaccatcttc

SEQ ID NO: 1616023 - DNA, 15 bp, Homo sapiens
ggcctacaccatctt

SEQ ID NO: 1616024 - DNA, 15 bp, Homo sapiens
gggcctacaccatct

SEQ ID NO: 1616025 - DNA, 15 bp, Homo sapiens
tgggcctacaccatc

SEQ ID NO: 1616026 - DNA, 15 bp, Homo sapiens
ctgggcctacaccat

SEQ ID NO: 1616027 - DNA, 15 bp, Homo sapiens
cctgggcctacacca

SEQ ID NO: 1616028 - DNA, 15 bp, Homo sapiens
tcctgggcctacacc

SEQ ID NO: 1616029 - DNA, 15 bp, Homo sapiens
ctcctgggcctacac

SEQ ID NO: 1616030 - DNA, 15 bp, Homo sapiens
actcctgggcctaca

SEQ ID NO: 1616031 - DNA, 15 bp, Homo sapiens
aactcctgggcctac

SEQ ID NO: 1616032 - DNA, 15 bp, Homo sapiens
gaactcctgggccta

SEQ ID NO: 1616033 - DNA, 15 bp, Homo sapiens
tgaactcctgggcct

SEQ ID NO: 1616034 - DNA, 15 bp, Homo sapiens
ttgaactcctgggcc

SEQ ID NO: 1616035 - DNA, 15 bp, Homo sapiens
gcttgaactcctggg

SEQ ID NO: 1616036 - DNA, 15 bp, Homo sapiens
agcttgaactcctgg

SEQ ID NO: 1616037 - DNA, 15 bp, Homo sapiens
aagcttgaactcctg

SEQ ID NO: 1616038 - DNA, 15 bp, Homo sapiens
taagcttgaactcct

SEQ ID NO: 1616039 - DNA, 15 bp, Homo sapiens
ataagcttgaactcc

SEQ ID NO: 1616040 - DNA, 15 bp, Homo sapiens
cataagcttgaactc

SEQ ID NO: 1616041 - DNA, 15 bp, Homo sapiens
ccataagcttgaact

SEQ ID NO: 1616042 - DNA, 15 bp, Homo sapiens
accataagcttgaac

SEQ ID NO: 1616043 - DNA, 15 bp, Homo sapiens
caccataagcttgaa

SEQ ID NO: 1616044 - DNA, 15 bp, Homo sapiens
tcaccataagcttga

SEQ ID NO: 1616045 - DNA, 15 bp, Homo sapiens
ctcaccataagcttg

SEQ ID NO: 1616046 - DNA, 15 bp, Homo sapiens
gctcaccataagctt

SEQ ID NO: 1616047 - DNA, 15 bp, Homo sapiens
ggctcaccataagct

SEQ ID NO: 1616048 - DNA, 15 bp, Homo sapiens
tggctcaccataagc

SEQ ID NO: 1616049 - DNA, 15 bp, Homo sapiens
atggctcaccataag

SEQ ID NO: 1616050 - DNA, 15 bp, Homo sapiens
catggctcaccataa

SEQ ID NO: 1616051 - DNA, 15 bp, Homo sapiens
tcatggctcaccata

SEQ ID NO: 1616052 - DNA, 15 bp, Homo sapiens
atcatggctcaccat

SEQ ID NO: 1616053 - DNA, 15 bp, Homo sapiens
gatcatggctcacca

SEQ ID NO: 1616054 - DNA, 15 bp, Homo sapiens
tgatcatggctcacc

SEQ ID NO: 1616055 - DNA, 15 bp, Homo sapiens
gtgatcatggctcac

SEQ ID NO: 1616056 - DNA, 15 bp, Homo sapiens
tgtgatcatggctca

SEQ ID NO: 1616057 - DNA, 15 bp, Homo sapiens
gtgtgatcatggctc

SEQ ID NO: 1616058 - DNA, 15 bp, Homo sapiens
ggtgtgatcatggct

SEQ ID NO: 1616059 - DNA, 15 bp, Homo sapiens
cggtgtgatcatggc

SEQ ID NO: 1616060 - DNA, 15 bp, Homo sapiens
gcggtgtgatcatgg

SEQ ID NO: 1616061 - DNA, 15 bp, Homo sapiens
ggcggtgtgatcatg

SEQ ID NO: 1616062 - DNA, 15 bp, Homo sapiens
tggcggtgtgatcat

SEQ ID NO: 1616063 - DNA, 15 bp, Homo sapiens
gtggcggtgtgatca

SEQ ID NO: 1616064 - DNA, 15 bp, Homo sapiens
agtggcggtgtgatc

SEQ ID NO: 1616065 - DNA, 15 bp, Homo sapiens
cagtggcggtgtgat

SEQ ID NO: 1616066 - DNA, 15 bp, Homo sapiens
gcagtggcggtgtga

SEQ ID NO: 1616067 - DNA, 15 bp, Homo sapiens
tgcagtggcggtgtg

SEQ ID NO: 1616068 - DNA, 15 bp, Homo sapiens
gtgcagtggcggtgt

SEQ ID NO: 1616069 - DNA, 15 bp, Homo sapiens
agtgcagtggcggtg

SEQ ID NO: 1616070 - DNA, 15 bp, Homo sapiens
gagtgcagtggcggt

SEQ ID NO: 1616071 - DNA, 15 bp, Homo sapiens
ggagtgcagtggcgg

SEQ ID NO: 1616072 - DNA, 15 bp, Homo sapiens
taggctggagtgcag

SEQ ID NO: 1616073 - DNA, 15 bp, Homo sapiens
ctaggctggagtgca

SEQ ID NO: 1616074 - DNA, 15 bp, Homo sapiens
cctaggctggagtgc

SEQ ID NO: 1616075 - DNA, 15 bp, Homo sapiens
acctaggctggagtg

SEQ ID NO: 1616076 - DNA, 15 bp, Homo sapiens
cacctaggctggagt

SEQ ID NO: 1616077 - DNA, 15 bp, Homo sapiens
tcacctaggctggag

SEQ ID NO: 1616078 - DNA, 15 bp, Homo sapiens
gtcacctaggctgga

SEQ ID NO: 1616079 - DNA, 15 bp, Homo sapiens
tgtcacctaggctgg

SEQ ID NO: 1616080 - DNA, 15 bp, Homo sapiens
tctgtcacctaggct

SEQ ID NO: 1616081 - DNA, 15 bp, Homo sapiens
ctctgtcacctaggc

SEQ ID NO: 1616082 - DNA, 15 bp, Homo sapiens
gctctgtcacctagg

SEQ ID NO: 1616083 - DNA, 15 bp, Homo sapiens
tgctctgtcacctag

SEQ ID NO: 1616084 - DNA, 15 bp, Homo sapiens
ttgctctgtcaccta

SEQ ID NO: 1616085 - DNA, 15 bp, Homo sapiens
cttgctctgtcacct

SEQ ID NO: 1616086 - DNA, 15 bp, Homo sapiens
ctcttgctctgtcac

SEQ ID NO: 1616087 - DNA, 15 bp, Homo sapiens
gctcttgctctgtca

SEQ ID NO: 1616088 - DNA, 15 bp, Homo sapiens
ggctcttgctctgtc

SEQ ID NO: 1616089 - DNA, 15 bp, Homo sapiens
aggctcttgctctgt

SEQ ID NO: 1616090 - DNA, 15 bp, Homo sapiens
caggctcttgctctg

SEQ ID NO: 1616091 - DNA, 15 bp, Homo sapiens
acaggctcttgctct

SEQ ID NO: 1616092 - DNA, 15 bp, Homo sapiens
gacaggctcttgctc

SEQ ID NO: 1616093 - DNA, 15 bp, Homo sapiens
agacaggctcttgct

SEQ ID NO: 1616094 - DNA, 15 bp, Homo sapiens
gagacaggctcttgc

SEQ ID NO: 1616095 - DNA, 15 bp, Homo sapiens
tgagacaggctcttg

SEQ ID NO: 1616096 - DNA, 15 bp, Homo sapiens
ttgagacaggctctt

SEQ ID NO: 1616097 - DNA, 15 bp, Homo sapiens
ttttttgagacaggc

SEQ ID NO: 1616098 - DNA, 15 bp, Homo sapiens
cttttttttttttga

SEQ ID NO: 1616099 - DNA, 15 bp, Homo sapiens
tgtcttttttttttt

SEQ ID NO: 1616100 - DNA, 15 bp, Homo sapiens
gtgtctttttttttt

SEQ ID NO: 1616101 - DNA, 15 bp, Homo sapiens
agtgtcttttttttt

SEQ ID NO: 1616102 - DNA, 15 bp, Homo sapiens
tagtgtctttttttt

SEQ ID NO: 1616103 - DNA, 15 bp, Homo sapiens
ctagtgtcttttttt

SEQ ID NO: 1616104 - DNA, 15 bp, Homo sapiens
actagtgtctttttt

SEQ ID NO: 1616105 - DNA, 15 bp, Homo sapiens
cactagtgtcttttt

SEQ ID NO: 1616106 - DNA, 15 bp, Homo sapiens
tcactagtgtctttt

SEQ ID NO: 1616107 - DNA, 15 bp, Homo sapiens
atcactagtgtcttt

SEQ ID NO: 1616108 - DNA, 15 bp, Homo sapiens
aatcactagtgtctt

SEQ ID NO: 1616109 - DNA, 15 bp, Homo sapiens
aaatcactagtgtct

SEQ ID NO: 1616110 - DNA, 15 bp, Homo sapiens
gaaatcactagtgtc

SEQ ID NO: 1616111 - DNA, 15 bp, Homo sapiens
ggaaatcactagtgt

SEQ ID NO: 1616112 - DNA, 15 bp, Homo sapiens
gggaaatcactagtg

SEQ ID NO: 1616113 - DNA, 15 bp, Homo sapiens
tgggaaatcactagt

SEQ ID NO: 1616114 - DNA, 15 bp, Homo sapiens
atgggaaatcactag

SEQ ID NO: 1616115 - DNA, 15 bp, Homo sapiens
tatgggaaatcacta

SEQ ID NO: 1616116 - DNA, 15 bp, Homo sapiens
ttatgggaaatcact

SEQ ID NO: 1616117 - DNA, 15 bp, Homo sapiens
attatgggaaatcac

SEQ ID NO: 1616118 - DNA, 15 bp, Homo sapiens
gattatgggaaatca

SEQ ID NO: 1616119 - DNA, 15 bp, Homo sapiens
ggattatgggaaatc

SEQ ID NO: 1616120 - DNA, 15 bp, Homo sapiens
aggattatgggaaat

SEQ ID NO: 1616121 - DNA, 15 bp, Homo sapiens
gaggattatgggaaa

SEQ ID NO: 1616122 - DNA, 15 bp, Homo sapiens
tgaggattatgggaa

SEQ ID NO: 1616123 - DNA, 15 bp, Homo sapiens
gtgaggattatggga

SEQ ID NO: 1616124 - DNA, 15 bp, Homo sapiens
tgtgaggattatggg

SEQ ID NO: 1616125 - DNA, 15 bp, Homo sapiens
ctgtgaggattatgg

SEQ ID NO: 1616126 - DNA, 15 bp, Homo sapiens
actgtgaggattatg

SEQ ID NO: 1616127 - DNA, 15 bp, Homo sapiens
tactgtgaggattat

SEQ ID NO: 1616128 - DNA, 15 bp, Homo sapiens
ctactgtgaggatta

SEQ ID NO: 1616129 - DNA, 15 bp, Homo sapiens
gctactgtgaggatt

SEQ ID NO: 1616130 - DNA, 15 bp, Homo sapiens
ggctactgtgaggat

SEQ ID NO: 1616131 - DNA, 15 bp, Homo sapiens
gggctactgtgagga

SEQ ID NO: 1616132 - DNA, 15 bp, Homo sapiens
agggctactgtgagg

SEQ ID NO: 1616133 - DNA, 15 bp, Homo sapiens
cagggctactgtgag

SEQ ID NO: 1616134 - DNA, 15 bp, Homo sapiens
ccagggctactgtga

SEQ ID NO: 1616135 - DNA, 15 bp, Homo sapiens
cccagggctactgtg

SEQ ID NO: 1616136 - DNA, 15 bp, Homo sapiens
tcccagggctactgt

SEQ ID NO: 1616137 - DNA, 15 bp, Homo sapiens
ctcccagggctactg

SEQ ID NO: 1616138 - DNA, 15 bp, Homo sapiens
cctcccagggctact

SEQ ID NO: 1616139 - DNA, 15 bp, Homo sapiens
tcctcccagggctac

SEQ ID NO: 1616140 - DNA, 15 bp, Homo sapiens
ttcctcccagggcta

SEQ ID NO: 1616141 - DNA, 15 bp, Homo sapiens
tttcctcccagggct

SEQ ID NO: 1616142 - DNA, 15 bp, Homo sapiens
ttttcctcccagggc

SEQ ID NO: 1616143 - DNA, 15 bp, Homo sapiens
tttttcctcccaggg

SEQ ID NO: 1616144 - DNA, 15 bp, Homo sapiens
gtttttcctcccagg

SEQ ID NO: 1616145 - DNA, 15 bp, Homo sapiens
agtttttcctcccag

SEQ ID NO: 1616146 - DNA, 15 bp, Homo sapiens
cagtttttcctccca

SEQ ID NO: 1616147 - DNA, 15 bp, Homo sapiens
ccagtttttcctccc

SEQ ID NO: 1616148 - DNA, 15 bp, Homo sapiens
gccagtttttcctcc

SEQ ID NO: 1616149 - DNA, 15 bp, Homo sapiens
tgccagtttttcctc

SEQ ID NO: 1616150 - DNA, 15 bp, Homo sapiens
ttgccagtttttcct

SEQ ID NO: 1616151 - DNA, 15 bp, Homo sapiens
cttgccagtttttcc

SEQ ID NO: 1616152 - DNA, 15 bp, Homo sapiens
ccttgccagtttttc

SEQ ID NO: 1616153 - DNA, 15 bp, Homo sapiens
tccttgccagttttt

SEQ ID NO: 1616154 - DNA, 15 bp, Homo sapiens
atccttgccagtttt

SEQ ID NO: 1616155 - DNA, 15 bp, Homo sapiens
aatccttgccagttt

SEQ ID NO: 1616156 - DNA, 15 bp, Homo sapiens
aaatccttgccagtt

SEQ ID NO: 1616157 - DNA, 15 bp, Homo sapiens
aaaatccttgccagt

SEQ ID NO: 1616158 - DNA, 15 bp, Homo sapiens
aaaaatccttgccag

SEQ ID NO: 1616159 - DNA, 15 bp, Homo sapiens
taaaaatccttgcca

SEQ ID NO: 1616160 - DNA, 15 bp, Homo sapiens
gtaaaaatccttgcc

SEQ ID NO: 1616161 - DNA, 15 bp, Homo sapiens
agtaaaaatccttgc

SEQ ID NO: 1616162 - DNA, 15 bp, Homo sapiens
aagtaaaaatccttg

SEQ ID NO: 1616163 - DNA, 15 bp, Homo sapiens
aaagtaaaaatcctt

SEQ ID NO: 1616164 - DNA, 15 bp, Homo sapiens
taaagtaaaaatcct

SEQ ID NO: 1616165 - DNA, 15 bp, Homo sapiens
gtaaagtaaaaatcc

SEQ ID NO: 1616166 - DNA, 15 bp, Homo sapiens
agtaaagtaaaaatc

SEQ ID NO: 1616167 - DNA, 15 bp, Homo sapiens
cagtaaagtaaaaat

SEQ ID NO: 1616168 - DNA, 15 bp, Homo sapiens
tcagtaaagtaaaaa

SEQ ID NO: 1616169 - DNA, 15 bp, Homo sapiens
ttcagtaaagtaaaa

SEQ ID NO: 1616170 - DNA, 15 bp, Homo sapiens
tttcagtaaagtaaa

SEQ ID NO: 1616171 - DNA, 15 bp, Homo sapiens
ttttcagtaaagtaa

SEQ ID NO: 1616172 - DNA, 15 bp, Homo sapiens
gttttcagtaaagta

SEQ ID NO: 1616173 - DNA, 15 bp, Homo sapiens
tgttttcagtaaagt

SEQ ID NO: 1616174 - DNA, 15 bp, Homo sapiens
ttgttttcagtaaag

SEQ ID NO: 1616175 - DNA, 15 bp, Homo sapiens
tttgttttcagtaaa

SEQ ID NO: 1616176 - DNA, 15 bp, Homo sapiens
ttttgttttcagtaa

SEQ ID NO: 1616177 - DNA, 15 bp, Homo sapiens
attttgttttcagta

SEQ ID NO: 1616178 - DNA, 15 bp, Homo sapiens
tattttgttttcagt

SEQ ID NO: 1616179 - DNA, 15 bp, Homo sapiens
ttattttgttttcag

SEQ ID NO: 1616180 - DNA, 15 bp, Homo sapiens
cttattttgttttca

SEQ ID NO: 1616181 - DNA, 15 bp, Homo sapiens
acttattttgttttc

SEQ ID NO: 1616182 - DNA, 15 bp, Homo sapiens
gacttattttgtttt

SEQ ID NO: 1616183 - DNA, 15 bp, Homo sapiens
tgacttattttgttt

SEQ ID NO: 1616184 - DNA, 15 bp, Homo sapiens
ttgacttattttgtt

SEQ ID NO: 1616185 - DNA, 15 bp, Homo sapiens
cttgacttattttgt

SEQ ID NO: 1616186 - DNA, 15 bp, Homo sapiens
tcttgacttattttg

SEQ ID NO: 1616187 - DNA, 15 bp, Homo sapiens
gtcttgacttatttt

SEQ ID NO: 1616188 - DNA, 15 bp, Homo sapiens
tgtcttgacttattt

SEQ ID NO: 1616189 - DNA, 15 bp, Homo sapiens
gtgtcttgacttatt

SEQ ID NO: 1616190 - DNA, 15 bp, Homo sapiens
tgtgtcttgacttat

SEQ ID NO: 1616191 - DNA, 15 bp, Homo sapiens
ctgtgtcttgactta

SEQ ID NO: 1616192 - DNA, 15 bp, Homo sapiens
gctgtgtcttgactt

SEQ ID NO: 1616193 - DNA, 15 bp, Homo sapiens
agctgtgtcttgact

SEQ ID NO: 1616194 - DNA, 15 bp, Homo sapiens
aagctgtgtcttgac

SEQ ID NO: 1616195 - DNA, 15 bp, Homo sapiens
taagctgtgtcttga

SEQ ID NO: 1616196 - DNA, 15 bp, Homo sapiens
ttaagctgtgtcttg

SEQ ID NO: 1616197 - DNA, 15 bp, Homo sapiens
attaagctgtgtctt

SEQ ID NO: 1616198 - DNA, 15 bp, Homo sapiens
cattaagctgtgtct

SEQ ID NO: 1616199 - DNA, 15 bp, Homo sapiens
ccattaagctgtgtc

SEQ ID NO: 1616200 - DNA, 15 bp, Homo sapiens
gccattaagctgtgt

SEQ ID NO: 1616201 - DNA, 15 bp, Homo sapiens
ggccattaagctgtg

SEQ ID NO: 1616202 - DNA, 15 bp, Homo sapiens
gggccattaagctgt

SEQ ID NO: 1616203 - DNA, 15 bp, Homo sapiens
tgggccattaagctg

SEQ ID NO: 1616204 - DNA, 15 bp, Homo sapiens
ctgggccattaagct

SEQ ID NO: 1616205 - DNA, 15 bp, Homo sapiens
gctgggccattaagc

SEQ ID NO: 1616206 - DNA, 15 bp, Homo sapiens
tgctgggccattaag

SEQ ID NO: 1616207 - DNA, 15 bp, Homo sapiens
ctgctgggccattaa

SEQ ID NO: 1616208 - DNA, 15 bp, Homo sapiens
cctgctgggccatta

SEQ ID NO: 1616209 - DNA, 15 bp, Homo sapiens
gcctgctgggccatt

SEQ ID NO: 1616210 - DNA, 15 bp, Homo sapiens
agcctgctgggccat

SEQ ID NO: 1616211 - DNA, 15 bp, Homo sapiens
gagcctgctgggcca

SEQ ID NO: 1616212 - DNA, 15 bp, Homo sapiens
agagcctgctgggcc

SEQ ID NO: 1616213 - DNA, 15 bp, Homo sapiens
gagagcctgctgggc

SEQ ID NO: 1616214 - DNA, 15 bp, Homo sapiens
tgagagcctgctggg

SEQ ID NO: 1616215 - DNA, 15 bp, Homo sapiens
ctgagagcctgctgg

SEQ ID NO: 1616216 - DNA, 15 bp, Homo sapiens
tctgagagcctgctg

SEQ ID NO: 1616217 - DNA, 15 bp, Homo sapiens
atctgagagcctgct

SEQ ID NO: 1616218 - DNA, 15 bp, Homo sapiens
aatctgagagcctgc

SEQ ID NO: 1616219 - DNA, 15 bp, Homo sapiens
gaatctgagagcctg

SEQ ID NO: 1616220 - DNA, 15 bp, Homo sapiens
ggaatctgagagcct

SEQ ID NO: 1616221 - DNA, 15 bp, Homo sapiens
gggaatctgagagcc

SEQ ID NO: 1616222 - DNA, 15 bp, Homo sapiens
tgggaatctgagagc

SEQ ID NO: 1616223 - DNA, 15 bp, Homo sapiens
ctgggaatctgagag

SEQ ID NO: 1616224 - DNA, 15 bp, Homo sapiens
tctgggaatctgaga

SEQ ID NO: 1616225 - DNA, 15 bp, Homo sapiens
atctgggaatctgag

SEQ ID NO: 1616226 - DNA, 15 bp, Homo sapiens
gatctgggaatctga

SEQ ID NO: 1616227 - DNA, 15 bp, Homo sapiens
tgatctgggaatctg

SEQ ID NO: 1616228 - DNA, 15 bp, Homo sapiens
ttgatctgggaatct

SEQ ID NO: 1616229 - DNA, 15 bp, Homo sapiens
tttgatctgggaatc

SEQ ID NO: 1616230 - DNA, 15 bp, Homo sapiens
ttttgatctgggaat

SEQ ID NO: 1616231 - DNA, 15 bp, Homo sapiens
gttttgatctgggaa

SEQ ID NO: 1616232 - DNA, 15 bp, Homo sapiens
tgttttgatctggga

SEQ ID NO: 1616233 - DNA, 15 bp, Homo sapiens
atgttttgatctggg

SEQ ID NO: 1616234 - DNA, 15 bp, Homo sapiens
catgttttgatctgg

SEQ ID NO: 1616235 - DNA, 15 bp, Homo sapiens
ccatgttttgatctg

SEQ ID NO: 1616236 - DNA, 15 bp, Homo sapiens
gccatgttttgatct

SEQ ID NO: 1616237 - DNA, 15 bp, Homo sapiens
tgccatgttttgatc

SEQ ID NO: 1616238 - DNA, 15 bp, Homo sapiens
ttgccatgttttgat

SEQ ID NO: 1616239 - DNA, 15 bp, Homo sapiens
tttgccatgttttga

SEQ ID NO: 1616240 - DNA, 15 bp, Homo sapiens
ttttgccatgttttg

SEQ ID NO: 1616241 - DNA, 15 bp, Homo sapiens
attttgccatgtttt

SEQ ID NO: 1616242 - DNA, 15 bp, Homo sapiens
gattttgccatgttt

SEQ ID NO: 1616243 - DNA, 15 bp, Homo sapiens
ggattttgccatgtt

SEQ ID NO: 1616244 - DNA, 15 bp, Homo sapiens
aggattttgccatgt

SEQ ID NO: 1616245 - DNA, 15 bp, Homo sapiens
caggattttgccatg

SEQ ID NO: 1616246 - DNA, 15 bp, Homo sapiens
gcaggattttgccat

SEQ ID NO: 1616247 - DNA, 15 bp, Homo sapiens
ggcaggattttgcca

SEQ ID NO: 1616248 - DNA, 15 bp, Homo sapiens
gaggggcaggatttt

SEQ ID NO: 1616249 - DNA, 15 bp, Homo sapiens
agaggggcaggattt

SEQ ID NO: 1616250 - DNA, 15 bp, Homo sapiens
aagaggggcaggatt

SEQ ID NO: 1616251 - DNA, 15 bp, Homo sapiens
aaagaggggcaggat

SEQ ID NO: 1616252 - DNA, 15 bp, Homo sapiens
gaaagaggggcagga

SEQ ID NO: 1616253 - DNA, 15 bp, Homo sapiens
tgaaagaggggcagg

SEQ ID NO: 1616254 - DNA, 15 bp, Homo sapiens
ttgaaagaggggcag

SEQ ID NO: 1616255 - DNA, 15 bp, Homo sapiens
attgaaagaggggca

SEQ ID NO: 1616256 - DNA, 15 bp, Homo sapiens
cattgaaagaggggc

SEQ ID NO: 1616257 - DNA, 15 bp, Homo sapiens
acattgaaagagggg

SEQ ID NO: 1616258 - DNA, 15 bp, Homo sapiens
cacattgaaagaggg

SEQ ID NO: 1616259 - DNA, 15 bp, Homo sapiens
acacattgaaagagg

SEQ ID NO: 1616260 - DNA, 15 bp, Homo sapiens
cacacattgaaagag

SEQ ID NO: 1616261 - DNA, 15 bp, Homo sapiens
gcacacattgaaaga

SEQ ID NO: 1616262 - DNA, 15 bp, Homo sapiens
tgcacacattgaaag

SEQ ID NO: 1616263 - DNA, 15 bp, Homo sapiens
atgcacacattgaaa

SEQ ID NO: 1616264 - DNA, 15 bp, Homo sapiens
catgcacacattgaa

SEQ ID NO: 1616265 - DNA, 15 bp, Homo sapiens
acatgcacacattga

SEQ ID NO: 1616266 - DNA, 15 bp, Homo sapiens
gacatgcacacattg

SEQ ID NO: 1616267 - DNA, 15 bp, Homo sapiens
agacatgcacacatt

SEQ ID NO: 1616268 - DNA, 15 bp, Homo sapiens
cagacatgcacacat

SEQ ID NO: 1616269 - DNA, 15 bp, Homo sapiens
acagacatgcacaca

SEQ ID NO: 1616270 - DNA, 15 bp, Homo sapiens
aacagacatgcacac

SEQ ID NO: 1616271 - DNA, 15 bp, Homo sapiens
gaacagacatgcaca

SEQ ID NO: 1616272 - DNA, 15 bp, Homo sapiens
tgaacagacatgcac

SEQ ID NO: 1616273 - DNA, 15 bp, Homo sapiens
atgaacagacatgca

SEQ ID NO: 1616274 - DNA, 15 bp, Homo sapiens
gatgaacagacatgc

SEQ ID NO: 1616275 - DNA, 15 bp, Homo sapiens
agatgaacagacatg

SEQ ID NO: 1616276 - DNA, 15 bp, Homo sapiens
cagatgaacagacat

SEQ ID NO: 1616277 - DNA, 15 bp, Homo sapiens
acagatgaacagaca

SEQ ID NO: 1616278 - DNA, 15 bp, Homo sapiens
aacagatgaacagac

SEQ ID NO: 1616279 - DNA, 15 bp, Homo sapiens
aaacagatgaacaga

SEQ ID NO: 1616280 - DNA, 15 bp, Homo sapiens
taaacagatgaacag

SEQ ID NO: 1616281 - DNA, 15 bp, Homo sapiens
ttaaacagatgaaca

SEQ ID NO: 1616282 - DNA, 15 bp, Homo sapiens
gttaaacagatgaac

SEQ ID NO: 1616283 - DNA, 15 bp, Homo sapiens
ggttaaacagatgaa

SEQ ID NO: 1616284 - DNA, 15 bp, Homo sapiens
tggttaaacagatga

SEQ ID NO: 1616285 - DNA, 15 bp, Homo sapiens
gtggttaaacagatg

SEQ ID NO: 1616286 - DNA, 15 bp, Homo sapiens
ggtggttaaacagat

SEQ ID NO: 1616287 - DNA, 15 bp, Homo sapiens
gggtggttaaacaga

SEQ ID NO: 1616288 - DNA, 15 bp, Homo sapiens
agggtggttaaacag

SEQ ID NO: 1616289 - DNA, 15 bp, Homo sapiens
cagggtggttaaaca

SEQ ID NO: 1616290 - DNA, 15 bp, Homo sapiens
ccagggtggttaaac

SEQ ID NO: 1616291 - DNA, 15 bp, Homo sapiens
gccagggtggttaaa

SEQ ID NO: 1616292 - DNA, 15 bp, Homo sapiens
tgccagggtggttaa

SEQ ID NO: 1616293 - DNA, 15 bp, Homo sapiens
atgccagggtggtta

SEQ ID NO: 1616294 - DNA, 15 bp, Homo sapiens
gatgccagggtggtt

SEQ ID NO: 1616295 - DNA, 15 bp, Homo sapiens
agatgccagggtggt

SEQ ID NO: 1616296 - DNA, 15 bp, Homo sapiens
aagatgccagggtgg

SEQ ID NO: 1616297 - DNA, 15 bp, Homo sapiens
gaagatgccagggtg

SEQ ID NO: 1616298 - DNA, 15 bp, Homo sapiens
agaagatgccagggt

SEQ ID NO: 1616299 - DNA, 15 bp, Homo sapiens
gagaagatgccaggg

SEQ ID NO: 1616300 - DNA, 15 bp, Homo sapiens
agagaagatgccagg

SEQ ID NO: 1616301 - DNA, 15 bp, Homo sapiens
gagagaagatgccag

SEQ ID NO: 1616302 - DNA, 15 bp, Homo sapiens
ggagagaagatgcca

SEQ ID NO: 1616303 - DNA, 15 bp, Homo sapiens
aggagagaagatgcc

SEQ ID NO: 1616304 - DNA, 15 bp, Homo sapiens
aaggagagaagatgc

SEQ ID NO: 1616305 - DNA, 15 bp, Homo sapiens
caaggagagaagatg

SEQ ID NO: 1616306 - DNA, 15 bp, Homo sapiens
acaaggagagaagat

SEQ ID NO: 1616307 - DNA, 15 bp, Homo sapiens
aacaaggagagaaga

SEQ ID NO: 1616308 - DNA, 15 bp, Homo sapiens
aaacaaggagagaag

SEQ ID NO: 1616309 - DNA, 15 bp, Homo sapiens
gaaacaaggagagaa

SEQ ID NO: 1616310 - DNA, 15 bp, Homo sapiens
agaaacaaggagaga

SEQ ID NO: 1616311 - DNA, 15 bp, Homo sapiens
tagaaacaaggagag

SEQ ID NO: 1616312 - DNA, 15 bp, Homo sapiens
ctagaaacaaggaga

SEQ ID NO: 1616313 - DNA, 15 bp, Homo sapiens
tctagaaacaaggag

SEQ ID NO: 1616314 - DNA, 15 bp, Homo sapiens
gtctagaaacaagga

SEQ ID NO: 1616315 - DNA, 15 bp, Homo sapiens
tgtctagaaacaagg

SEQ ID NO: 1616316 - DNA, 15 bp, Homo sapiens
gtgtctagaaacaag

SEQ ID NO: 1616317 - DNA, 15 bp, Homo sapiens
agtgtctagaaacaa

SEQ ID NO: 1616318 - DNA, 15 bp, Homo sapiens
gagtgtctagaaaca

SEQ ID NO: 1616319 - DNA, 15 bp, Homo sapiens
tgagtgtctagaaac

SEQ ID NO: 1616320 - DNA, 15 bp, Homo sapiens
ttgagtgtctagaaa

SEQ ID NO: 1616321 - DNA, 15 bp, Homo sapiens
gttgagtgtctagaa

SEQ ID NO: 1616322 - DNA, 15 bp, Homo sapiens
agttgagtgtctaga

SEQ ID NO: 1616323 - DNA, 15 bp, Homo sapiens
gagttgagtgtctag

SEQ ID NO: 1616324 - DNA, 15 bp, Homo sapiens
agagttgagtgtcta

SEQ ID NO: 1616325 - DNA, 15 bp, Homo sapiens
cagagttgagtgtct

SEQ ID NO: 1616326 - DNA, 15 bp, Homo sapiens
tcagagttgagtgtc

SEQ ID NO: 1616327 - DNA, 15 bp, Homo sapiens
atcagagttgagtgt

SEQ ID NO: 1616328 - DNA, 15 bp, Homo sapiens
tatcagagttgagtg

SEQ ID NO: 1616329 - DNA, 15 bp, Homo sapiens
gtatcagagttgagt

SEQ ID NO: 1616330 - DNA, 15 bp, Homo sapiens
agtatcagagttgag

SEQ ID NO: 1616331 - DNA, 15 bp, Homo sapiens
gagtatcagagttga

SEQ ID NO: 1616332 - DNA, 15 bp, Homo sapiens
ggagtatcagagttg

SEQ ID NO: 1616333 - DNA, 15 bp, Homo sapiens
tggagtatcagagtt

SEQ ID NO: 1616334 - DNA, 15 bp, Homo sapiens
ctggagtatcagagt

SEQ ID NO: 1616335 - DNA, 15 bp, Homo sapiens
gctggagtatcagag

SEQ ID NO: 1616336 - DNA, 15 bp, Homo sapiens
ggctggagtatcaga

SEQ ID NO: 1616337 - DNA, 15 bp, Homo sapiens
gggctggagtatcag

SEQ ID NO: 1616338 - DNA, 15 bp, Homo sapiens
agggctggagtatca

SEQ ID NO: 1616339 - DNA, 15 bp, Homo sapiens
cagggctggagtatc

SEQ ID NO: 1616340 - DNA, 15 bp, Homo sapiens
acagggctggagtat

SEQ ID NO: 1616341 - DNA, 15 bp, Homo sapiens
cacagggctggagta

SEQ ID NO: 1616342 - DNA, 15 bp, Homo sapiens
ccacagggctggagt

SEQ ID NO: 1616343 - DNA, 15 bp, Homo sapiens
gccacagggctggag

SEQ ID NO: 1616344 - DNA, 15 bp, Homo sapiens
tgccacagggctgga

SEQ ID NO: 1616345 - DNA, 15 bp, Homo sapiens
gtgccacagggctgg

SEQ ID NO: 1616346 - DNA, 15 bp, Homo sapiens
ggtgccacagggctg

SEQ ID NO: 1616347 - DNA, 15 bp, Homo sapiens
gggtgccacagggct

SEQ ID NO: 1616348 - DNA, 15 bp, Homo sapiens
ggggtgccacagggc

SEQ ID NO: 1616349 - DNA, 15 bp, Homo sapiens
tggggtgccacaggg

SEQ ID NO: 1616350 - DNA, 15 bp, Homo sapiens
ctggggtgccacagg

SEQ ID NO: 1616351 - DNA, 15 bp, Homo sapiens
tctggggtgccacag

SEQ ID NO: 1616352 - DNA, 15 bp, Homo sapiens
gtctggggtgccaca

SEQ ID NO: 1616353 - DNA, 15 bp, Homo sapiens
ggtctggggtgccac

SEQ ID NO: 1616354 - DNA, 15 bp, Homo sapiens
gggtctggggtgcca

SEQ ID NO: 1616355 - DNA, 15 bp, Homo sapiens
agggtctggggtgcc

SEQ ID NO: 1616356 - DNA, 15 bp, Homo sapiens
gagggtctggggtgc

SEQ ID NO: 1616357 - DNA, 15 bp, Homo sapiens
agagggtctggggtg

SEQ ID NO: 1616358 - DNA, 15 bp, Homo sapiens
aagagggtctggggt

SEQ ID NO: 1616359 - DNA, 15 bp, Homo sapiens
gaagagggtctgggg

SEQ ID NO: 1616360 - DNA, 15 bp, Homo sapiens
tgaagagggtctggg

SEQ ID NO: 1616361 - DNA, 15 bp, Homo sapiens
ctgaagagggtctgg

SEQ ID NO: 1616362 - DNA, 15 bp, Homo sapiens
gctgaagagggtctg

SEQ ID NO: 1616363 - DNA, 15 bp, Homo sapiens
agctgaagagggtct

SEQ ID NO: 1616364 - DNA, 15 bp, Homo sapiens
tagctgaagagggtc

SEQ ID NO: 1616365 - DNA, 15 bp, Homo sapiens
gtagctgaagagggt

SEQ ID NO: 1616366 - DNA, 15 bp, Homo sapiens
tgtagctgaagaggg

SEQ ID NO: 1616367 - DNA, 15 bp, Homo sapiens
ctgtagctgaagagg

SEQ ID NO: 1616368 - DNA, 15 bp, Homo sapiens
gctgtagctgaagag

SEQ ID NO: 1616369 - DNA, 15 bp, Homo sapiens
ggctgtagctgaaga

SEQ ID NO: 1616370 - DNA, 15 bp, Homo sapiens
tggctgtagctgaag

SEQ ID NO: 1616371 - DNA, 15 bp, Homo sapiens
gtggctgtagctgaa

SEQ ID NO: 1616372 - DNA, 15 bp, Homo sapiens
tgtggctgtagctga

SEQ ID NO: 1616373 - DNA, 15 bp, Homo sapiens
ctgtggctgtagctg

SEQ ID NO: 1616374 - DNA, 15 bp, Homo sapiens
cctgtggctgtagct

SEQ ID NO: 1616375 - DNA, 15 bp, Homo sapiens
acctgtggctgtagc

SEQ ID NO: 1616376 - DNA, 15 bp, Homo sapiens
gacctgtggctgtag

SEQ ID NO: 1616377 - DNA, 15 bp, Homo sapiens
ggacctgtggctgta

SEQ ID NO: 1616378 - DNA, 15 bp, Homo sapiens
aggacctgtggctgt

SEQ ID NO: 1616379 - DNA, 15 bp, Homo sapiens
caggacctgtggctg

SEQ ID NO: 1616380 - DNA, 15 bp, Homo sapiens
ccaggacctgtggct

SEQ ID NO: 1616381 - DNA, 15 bp, Homo sapiens
cccaggacctgtggc

SEQ ID NO: 1616382 - DNA, 15 bp, Homo sapiens
tcccaggacctgtgg

SEQ ID NO: 1616383 - DNA, 15 bp, Homo sapiens
ttcccaggacctgtg

SEQ ID NO: 1616384 - DNA, 15 bp, Homo sapiens
tttcccaggacctgt

SEQ ID NO: 1616385 - DNA, 15 bp, Homo sapiens
ctttcccaggacctg

SEQ ID NO: 1616386 - DNA, 15 bp, Homo sapiens
tctttcccaggacct

SEQ ID NO: 1616387 - DNA, 15 bp, Homo sapiens
ttctttcccaggacc

SEQ ID NO: 1616388 - DNA, 15 bp, Homo sapiens
cttctttcccaggac

SEQ ID NO: 1616389 - DNA, 15 bp, Homo sapiens
acttctttcccagga

SEQ ID NO: 1616390 - DNA, 15 bp, Homo sapiens
cacttctttcccagg

SEQ ID NO: 1616391 - DNA, 15 bp, Homo sapiens
ccacttctttcccag

SEQ ID NO: 1616392 - DNA, 15 bp, Homo sapiens
cccacttctttccca

SEQ ID NO: 1616393 - DNA, 15 bp, Homo sapiens
atcccacttctttcc

SEQ ID NO: 1616394 - DNA, 15 bp, Homo sapiens
gatcccacttctttc

SEQ ID NO: 1616395 - DNA, 15 bp, Homo sapiens
agatcccacttcttt

SEQ ID NO: 1616396 - DNA, 15 bp, Homo sapiens
tagatcccacttctt

SEQ ID NO: 1616397 - DNA, 15 bp, Homo sapiens
ctagatcccacttct

SEQ ID NO: 1616398 - DNA, 15 bp, Homo sapiens
cctagatcccacttc

SEQ ID NO: 1616399 - DNA, 15 bp, Homo sapiens
ccctagatcccactt

SEQ ID NO: 1616400 - DNA, 15 bp, Homo sapiens
gccctagatcccact

SEQ ID NO: 1616401 - DNA, 15 bp, Homo sapiens
ggccctagatcccac

SEQ ID NO: 1616402 - DNA, 15 bp, Homo sapiens
gggccctagatccca

SEQ ID NO: 1616403 - DNA, 15 bp, Homo sapiens
agggccctagatccc

SEQ ID NO: 1616404 - DNA, 15 bp, Homo sapiens
cagggccctagatcc

SEQ ID NO: 1616405 - DNA, 15 bp, Homo sapiens
ccagggccctagatc

SEQ ID NO: 1616406 - DNA, 15 bp, Homo sapiens
cccagggccctagat

SEQ ID NO: 1616407 - DNA, 15 bp, Homo sapiens
tcccagggccctaga

SEQ ID NO: 1616408 - DNA, 15 bp, Homo sapiens
ctcccagggccctag

SEQ ID NO: 1616409 - DNA, 15 bp, Homo sapiens
cctcccagggcccta

SEQ ID NO: 1616410 - DNA, 15 bp, Homo sapiens
tcctcccagggccct

SEQ ID NO: 1616411 - DNA, 15 bp, Homo sapiens
ctcctcccagggccc

SEQ ID NO: 1616412 - DNA, 15 bp, Homo sapiens
cctcctcccagggcc

SEQ ID NO: 1616413 - DNA, 15 bp, Homo sapiens
acctcctcccagggc

SEQ ID NO: 1616414 - DNA, 15 bp, Homo sapiens
aacctcctcccaggg

SEQ ID NO: 1616415 - DNA, 15 bp, Homo sapiens
caacctcctcccagg

SEQ ID NO: 1616416 - DNA, 15 bp, Homo sapiens
tcaacctcctcccag

SEQ ID NO: 1616417 - DNA, 15 bp, Homo sapiens
ctcaacctcctccca

SEQ ID NO: 1616418 - DNA, 15 bp, Homo sapiens
gctcaacctcctccc

SEQ ID NO: 1616419 - DNA, 15 bp, Homo sapiens
ggctcaacctcctcc

SEQ ID NO: 1616420 - DNA, 15 bp, Homo sapiens
aggctcaacctcctc

SEQ ID NO: 1616421 - DNA, 15 bp, Homo sapiens
caggctcaacctcct

SEQ ID NO: 1616422 - DNA, 15 bp, Homo sapiens
ccaggctcaacctcc

SEQ ID NO: 1616423 - DNA, 15 bp, Homo sapiens
cccaggctcaacctc

SEQ ID NO: 1616424 - DNA, 15 bp, Homo sapiens
ccccaggctcaacct

SEQ ID NO: 1616425 - DNA, 15 bp, Homo sapiens
tccccaggctcaacc

SEQ ID NO: 1616426 - DNA, 15 bp, Homo sapiens
ttccccaggctcaac

SEQ ID NO: 1616427 - DNA, 15 bp, Homo sapiens
cttccccaggctcaa

SEQ ID NO: 1616428 - DNA, 15 bp, Homo sapiens
ccttccccaggctca

SEQ ID NO: 1616429 - DNA, 15 bp, Homo sapiens
tccttccccaggctc

SEQ ID NO: 1616430 - DNA, 15 bp, Homo sapiens
ttccttccccaggct

SEQ ID NO: 1616431 - DNA, 15 bp, Homo sapiens
tttccttccccaggc

SEQ ID NO: 1616432 - DNA, 15 bp, Homo sapiens
ttttccttccccagg

SEQ ID NO: 1616433 - DNA, 15 bp, Homo sapiens
tttttccttccccag

SEQ ID NO: 1616434 - DNA, 15 bp, Homo sapiens
ctttttccttcccca

SEQ ID NO: 1616435 - DNA, 15 bp, Homo sapiens
gctttttccttcccc

SEQ ID NO: 1616436 - DNA, 15 bp, Homo sapiens
tgctttttccttccc

SEQ ID NO: 1616437 - DNA, 15 bp, Homo sapiens
ctgctttttccttcc

SEQ ID NO: 1616438 - DNA, 15 bp, Homo sapiens
cctgctttttccttc

SEQ ID NO: 1616439 - DNA, 15 bp, Homo sapiens
tcctgctttttcctt

SEQ ID NO: 1616440 - DNA, 15 bp, Homo sapiens
ttcctgctttttcct

SEQ ID NO: 1616441 - DNA, 15 bp, Homo sapiens
tttcctgctttttcc

SEQ ID NO: 1616442 - DNA, 15 bp, Homo sapiens
gtttcctgctttttc

SEQ ID NO: 1616443 - DNA, 15 bp, Homo sapiens
agtttcctgcttttt

SEQ ID NO: 1616444 - DNA, 15 bp, Homo sapiens
cagtttcctgctttt

SEQ ID NO: 1616445 - DNA, 15 bp, Homo sapiens
tcagtttcctgcttt

SEQ ID NO: 1616446 - DNA, 15 bp, Homo sapiens
ttcagtttcctgctt

SEQ ID NO: 1616447 - DNA, 15 bp, Homo sapiens
cttcagtttcctgct

SEQ ID NO: 1616448 - DNA, 15 bp, Homo sapiens
ccttcagtttcctgc

SEQ ID NO: 1616449 - DNA, 15 bp, Homo sapiens
tccttcagtttcctg

SEQ ID NO: 1616450 - DNA, 15 bp, Homo sapiens
ttccttcagtttcct

SEQ ID NO: 1616451 - DNA, 15 bp, Homo sapiens
cttccttcagtttcc

SEQ ID NO: 1616452 - DNA, 15 bp, Homo sapiens
gcttccttcagtttc

SEQ ID NO: 1616453 - DNA, 15 bp, Homo sapiens
tgcttccttcagttt

SEQ ID NO: 1616454 - DNA, 15 bp, Homo sapiens
ctgcttccttcagtt

SEQ ID NO: 1616455 - DNA, 15 bp, Homo sapiens
cctgcttccttcagt

SEQ ID NO: 1616456 - DNA, 15 bp, Homo sapiens
ccctgcttccttcag

SEQ ID NO: 1616457 - DNA, 15 bp, Homo sapiens
cccctgcttccttca

SEQ ID NO: 1616458 - DNA, 15 bp, Homo sapiens
gcccctgcttccttc

SEQ ID NO: 1616459 - DNA, 15 bp, Homo sapiens
agcccctgcttcctt

SEQ ID NO: 1616460 - DNA, 15 bp, Homo sapiens
cagcccctgcttcct

SEQ ID NO: 1616461 - DNA, 15 bp, Homo sapiens
tcagcccctgcttcc

SEQ ID NO: 1616462 - DNA, 15 bp, Homo sapiens
ctcagcccctgcttc

SEQ ID NO: 1616463 - DNA, 15 bp, Homo sapiens
cctcagcccctgctt

SEQ ID NO: 1616464 - DNA, 15 bp, Homo sapiens
tcctcagcccctgct

SEQ ID NO: 1616465 - DNA, 15 bp, Homo sapiens
ttcctcagcccctgc

SEQ ID NO: 1616466 - DNA, 15 bp, Homo sapiens
gttcctcagcccctg

SEQ ID NO: 1616467 - DNA, 15 bp, Homo sapiens
tgttcctcagcccct

SEQ ID NO: 1616468 - DNA, 15 bp, Homo sapiens
gtgttcctcagcccc

SEQ ID NO: 1616469 - DNA, 15 bp, Homo sapiens
agtgttcctcagccc

SEQ ID NO: 1616470 - DNA, 15 bp, Homo sapiens
aagtgttcctcagcc

SEQ ID NO: 1616471 - DNA, 15 bp, Homo sapiens
taagtgttcctcagc

SEQ ID NO: 1616472 - DNA, 15 bp, Homo sapiens
ctaagtgttcctcag

SEQ ID NO: 1616473 - DNA, 15 bp, Homo sapiens
tctaagtgttcctca

SEQ ID NO: 1616474 - DNA, 15 bp, Homo sapiens
ctctaagtgttcctc

SEQ ID NO: 1616475 - DNA, 15 bp, Homo sapiens
cctctaagtgttcct

SEQ ID NO: 1616476 - DNA, 15 bp, Homo sapiens
ccctctaagtgttcc

SEQ ID NO: 1616477 - DNA, 15 bp, Homo sapiens
accctctaagtgttc

SEQ ID NO: 1616478 - DNA, 15 bp, Homo sapiens
caccctctaagtgtt

SEQ ID NO: 1616479 - DNA, 15 bp, Homo sapiens
ccaccctctaagtgt

SEQ ID NO: 1616480 - DNA, 15 bp, Homo sapiens
cccaccctctaagtg

SEQ ID NO: 1616481 - DNA, 15 bp, Homo sapiens
gcccaccctctaagt

SEQ ID NO: 1616482 - DNA, 15 bp, Homo sapiens
tgcccaccctctaag

SEQ ID NO: 1616483 - DNA, 15 bp, Homo sapiens
ctgcccaccctctaa

SEQ ID NO: 1616484 - DNA, 15 bp, Homo sapiens
tctgcccaccctcta

SEQ ID NO: 1616485 - DNA, 15 bp, Homo sapiens
ttctgcccaccctct

SEQ ID NO: 1616486 - DNA, 15 bp, Homo sapiens
cttctgcccaccctc

SEQ ID NO: 1616487 - DNA, 15 bp, Homo sapiens
gcttctgcccaccct

SEQ ID NO: 1616488 - DNA, 15 bp, Homo sapiens
cgcttctgcccaccc

SEQ ID NO: 1616489 - DNA, 15 bp, Homo sapiens
ccgcttctgcccacc

SEQ ID NO: 1616490 - DNA, 15 bp, Homo sapiens
cccgcttctgcccac

SEQ ID NO: 1616491 - DNA, 15 bp, Homo sapiens
ccccgcttctgccca

SEQ ID NO: 1616492 - DNA, 15 bp, Homo sapiens
cccccgcttctgccc

SEQ ID NO: 1616493 - DNA, 15 bp, Homo sapiens
acccccgcttctgcc

SEQ ID NO: 1616494 - DNA, 15 bp, Homo sapiens
aacccccgcttctgc

SEQ ID NO: 1616495 - DNA, 15 bp, Homo sapiens
gaacccccgcttctg

SEQ ID NO: 1616496 - DNA, 15 bp, Homo sapiens
ggaacccccgcttct

SEQ ID NO: 1616497 - DNA, 15 bp, Homo sapiens
gggaacccccgcttc

SEQ ID NO: 1616498 - DNA, 15 bp, Homo sapiens
tgggaacccccgctt

SEQ ID NO: 1616499 - DNA, 15 bp, Homo sapiens
ctgggaacccccgct

SEQ ID NO: 1616500 - DNA, 15 bp, Homo sapiens
actgggaacccccgc

SEQ ID NO: 1616501 - DNA, 15 bp, Homo sapiens
gactgggaacccccg

SEQ ID NO: 1616502 - DNA, 15 bp, Homo sapiens
agactgggaaccccc

SEQ ID NO: 1616503 - DNA, 15 bp, Homo sapiens
cagactgggaacccc

SEQ ID NO: 1616504 - DNA, 15 bp, Homo sapiens
gcagactgggaaccc

SEQ ID NO: 1616505 - DNA, 15 bp, Homo sapiens
agcagactgggaacc

SEQ ID NO: 1616506 - DNA, 15 bp, Homo sapiens
aagcagactgggaac

SEQ ID NO: 1616507 - DNA, 15 bp, Homo sapiens
caagcagactgggaa

SEQ ID NO: 1616508 - DNA, 15 bp, Homo sapiens
acaagcagactggga

SEQ ID NO: 1616509 - DNA, 15 bp, Homo sapiens
gacaagcagactggg

SEQ ID NO: 1616510 - DNA, 15 bp, Homo sapiens
agacaagcagactgg

SEQ ID NO: 1616511 - DNA, 15 bp, Homo sapiens
gagacaagcagactg

SEQ ID NO: 1616512 - DNA, 15 bp, Homo sapiens
ggagacaagcagact

SEQ ID NO: 1616513 - DNA, 15 bp, Homo sapiens
gggagacaagcagac

SEQ ID NO: 1616514 - DNA, 15 bp, Homo sapiens
agggagacaagcaga

SEQ ID NO: 1616515 - DNA, 15 bp, Homo sapiens
aagggagacaagcag

SEQ ID NO: 1616516 - DNA, 15 bp, Homo sapiens
aaagggagacaagca

SEQ ID NO: 1616517 - DNA, 15 bp, Homo sapiens
gaaagggagacaagc

SEQ ID NO: 1616518 - DNA, 15 bp, Homo sapiens
ggaaagggagacaag

SEQ ID NO: 1616519 - DNA, 15 bp, Homo sapiens
gggaaagggagacaa

SEQ ID NO: 1616520 - DNA, 15 bp, Homo sapiens
agggaaagggagaca

SEQ ID NO: 1616521 - DNA, 15 bp, Homo sapiens
aagggaaagggagac

SEQ ID NO: 1616522 - DNA, 15 bp, Homo sapiens
caagggaaagggaga

SEQ ID NO: 1616523 - DNA, 15 bp, Homo sapiens
gcaagggaaagggag

SEQ ID NO: 1616524 - DNA, 15 bp, Homo sapiens
tgcaagggaaaggga

SEQ ID NO: 1616525 - DNA, 15 bp, Homo sapiens
ctgcaagggaaaggg

SEQ ID NO: 1616526 - DNA, 15 bp, Homo sapiens
cctgcaagggaaagg

SEQ ID NO: 1616527 - DNA, 15 bp, Homo sapiens
gcctgcaagggaaag

SEQ ID NO: 1616528 - DNA, 15 bp, Homo sapiens
ggcctgcaagggaaa

SEQ ID NO: 1616529 - DNA, 15 bp, Homo sapiens
aggcctgcaagggaa

SEQ ID NO: 1616530 - DNA, 15 bp, Homo sapiens
gaggcctgcaaggga

SEQ ID NO: 1616531 - DNA, 15 bp, Homo sapiens
agaggcctgcaaggg

SEQ ID NO: 1616532 - DNA, 15 bp, Homo sapiens
cagaggcctgcaagg

SEQ ID NO: 1616533 - DNA, 15 bp, Homo sapiens
ccagaggcctgcaag

SEQ ID NO: 1616534 - DNA, 15 bp, Homo sapiens
tccagaggcctgcaa

SEQ ID NO: 1616535 - DNA, 15 bp, Homo sapiens
ctccagaggcctgca

SEQ ID NO: 1616536 - DNA, 15 bp, Homo sapiens
gctccagaggcctgc

SEQ ID NO: 1616537 - DNA, 15 bp, Homo sapiens
ggctccagaggcctg

SEQ ID NO: 1616538 - DNA, 15 bp, Homo sapiens
aggctccagaggcct

SEQ ID NO: 1616539 - DNA, 15 bp, Homo sapiens
gaggctccagaggcc

SEQ ID NO: 1616540 - DNA, 15 bp, Homo sapiens
cgaggctccagaggc

SEQ ID NO: 1616541 - DNA, 15 bp, Homo sapiens
acgaggctccagagg

SEQ ID NO: 1616542 - DNA, 15 bp, Homo sapiens
cacgaggctccagag

SEQ ID NO: 1616543 - DNA, 15 bp, Homo sapiens
gcacgaggctccaga

SEQ ID NO: 1616544 - DNA, 15 bp, Homo sapiens
ggcacgaggctccag

SEQ ID NO: 1616545 - DNA, 15 bp, Homo sapiens
aggcacgaggctcca

SEQ ID NO: 1616546 - DNA, 15 bp, Homo sapiens
caggcacgaggctcc

SEQ ID NO: 1616547 - DNA, 15 bp, Homo sapiens
ccaggcacgaggctc

SEQ ID NO: 1616548 - DNA, 15 bp, Homo sapiens
gccaggcacgaggct

SEQ ID NO: 1616549 - DNA, 15 bp, Homo sapiens
ggccaggcacgaggc

SEQ ID NO: 1616550 - DNA, 15 bp, Homo sapiens
gggccaggcacgagg

SEQ ID NO: 1616551 - DNA, 15 bp, Homo sapiens
cgggccaggcacgag

SEQ ID NO: 1616552 - DNA, 15 bp, Homo sapiens
ccgggccaggcacga

SEQ ID NO: 1616553 - DNA, 15 bp, Homo sapiens
tccgggccaggcacg

SEQ ID NO: 1616554 - DNA, 15 bp, Homo sapiens
gtccgggccaggcac

SEQ ID NO: 1616555 - DNA, 15 bp, Homo sapiens
tgtccgggccaggca

SEQ ID NO: 1616556 - DNA, 15 bp, Homo sapiens
atgtccgggccaggc

SEQ ID NO: 1616557 - DNA, 15 bp, Homo sapiens
gatgtccgggccagg

SEQ ID NO: 1616558 - DNA, 15 bp, Homo sapiens
agatgtccgggccag

SEQ ID NO: 1616559 - DNA, 15 bp, Homo sapiens
cagatgtccgggcca

SEQ ID NO: 1616560 - DNA, 15 bp, Homo sapiens
ccagatgtccgggcc

SEQ ID NO: 1616561 - DNA, 15 bp, Homo sapiens
accagatgtccgggc

SEQ ID NO: 1616562 - DNA, 15 bp, Homo sapiens
gaccagatgtccggg

SEQ ID NO: 1616563 - DNA, 15 bp, Homo sapiens
ggaccagatgtccgg

SEQ ID NO: 1616564 - DNA, 15 bp, Homo sapiens
gggaccagatgtccg

SEQ ID NO: 1616565 - DNA, 15 bp, Homo sapiens
agggaccagatgtcc

SEQ ID NO: 1616566 - DNA, 15 bp, Homo sapiens
gagggaccagatgtc

SEQ ID NO: 1616567 - DNA, 15 bp, Homo sapiens
tgagggaccagatgt

SEQ ID NO: 1616568 - DNA, 15 bp, Homo sapiens
ctgagggaccagatg

SEQ ID NO: 1616569 - DNA, 15 bp, Homo sapiens
tctgagggaccagat

SEQ ID NO: 1616570 - DNA, 15 bp, Homo sapiens
ctctgagggaccaga

SEQ ID NO: 1616571 - DNA, 15 bp, Homo sapiens
actctgagggaccag

SEQ ID NO: 1616572 - DNA, 15 bp, Homo sapiens
cactctgagggacca

SEQ ID NO: 1616573 - DNA, 15 bp, Homo sapiens
ccactctgagggacc

SEQ ID NO: 1616574 - DNA, 15 bp, Homo sapiens
gccactctgagggac

SEQ ID NO: 1616575 - DNA, 15 bp, Homo sapiens
tgccactctgaggga

SEQ ID NO: 1616576 - DNA, 15 bp, Homo sapiens
ctgccactctgaggg

SEQ ID NO: 1616577 - DNA, 15 bp, Homo sapiens
gctgccactctgagg

SEQ ID NO: 1616578 - DNA, 15 bp, Homo sapiens
agctgccactctgag

SEQ ID NO: 1616579 - DNA, 15 bp, Homo sapiens
cagctgccactctga

SEQ ID NO: 1616580 - DNA, 15 bp, Homo sapiens
gcagctgccactctg

SEQ ID NO: 1616581 - DNA, 15 bp, Homo sapiens
tgcagctgccactct

SEQ ID NO: 1616582 - DNA, 15 bp, Homo sapiens
ctgcagctgccactc

SEQ ID NO: 1616583 - DNA, 15 bp, Homo sapiens
gctgcagctgccact

SEQ ID NO: 1616584 - DNA, 15 bp, Homo sapiens
tgctgcagctgccac

SEQ ID NO: 1616585 - DNA, 15 bp, Homo sapiens
ttgctgcagctgcca

SEQ ID NO: 1616586 - DNA, 15 bp, Homo sapiens
cttgctgcagctgcc

SEQ ID NO: 1616587 - DNA, 15 bp, Homo sapiens
tcttgctgcagctgc

SEQ ID NO: 1616588 - DNA, 15 bp, Homo sapiens
ctcttgctgcagctg

SEQ ID NO: 1616589 - DNA, 15 bp, Homo sapiens
cctcttgctgcagct

SEQ ID NO: 1616590 - DNA, 15 bp, Homo sapiens
gcctcttgctgcagc

SEQ ID NO: 1616591 - DNA, 15 bp, Homo sapiens
tgcctcttgctgcag

SEQ ID NO: 1616592 - DNA, 15 bp, Homo sapiens
ctgcctcttgctgca

SEQ ID NO: 1616593 - DNA, 15 bp, Homo sapiens
gctgcctcttgctgc

SEQ ID NO: 1616594 - DNA, 15 bp, Homo sapiens
agctgcctcttgctg

SEQ ID NO: 1616595 - DNA, 15 bp, Homo sapiens
cagctgcctcttgct

SEQ ID NO: 1616596 - DNA, 15 bp, Homo sapiens
tcagctgcctcttgc

SEQ ID NO: 1616597 - DNA, 15 bp, Homo sapiens
ttcagctgcctcttg

SEQ ID NO: 1616598 - DNA, 15 bp, Homo sapiens
cttcagctgcctctt

SEQ ID NO: 1616599 - DNA, 15 bp, Homo sapiens
gcttcagctgcctct

SEQ ID NO: 1616600 - DNA, 15 bp, Homo sapiens
ggcttcagctgcctc

SEQ ID NO: 1616601 - DNA, 15 bp, Homo sapiens
gggcttcagctgcct

SEQ ID NO: 1616602 - DNA, 15 bp, Homo sapiens
agggcttcagctgcc

SEQ ID NO: 1616603 - DNA, 15 bp, Homo sapiens
gagggcttcagctgc

SEQ ID NO: 1616604 - DNA, 15 bp, Homo sapiens
cgagggcttcagctg

SEQ ID NO: 1616605 - DNA, 15 bp, Homo sapiens
acgagggcttcagct

SEQ ID NO: 1616606 - DNA, 15 bp, Homo sapiens
cacgagggcttcagc

SEQ ID NO: 1616607 - DNA, 15 bp, Homo sapiens
ccacgagggcttcag

SEQ ID NO: 1616608 - DNA, 15 bp, Homo sapiens
cccacgagggcttca

SEQ ID NO: 1616609 - DNA, 15 bp, Homo sapiens
ccccacgagggcttc

SEQ ID NO: 1616610 - DNA, 15 bp, Homo sapiens
gccccacgagggctt

SEQ ID NO: 1616611 - DNA, 15 bp, Homo sapiens
agccccacgagggct

SEQ ID NO: 1616612 - DNA, 15 bp, Homo sapiens
cagccccacgagggc

SEQ ID NO: 1616613 - DNA, 15 bp, Homo sapiens
tcagccccacgaggg

SEQ ID NO: 1616614 - DNA, 15 bp, Homo sapiens
ttcagccccacgagg

SEQ ID NO: 1616615 - DNA, 15 bp, Homo sapiens
tttcagccccacgag

SEQ ID NO: 1616616 - DNA, 15 bp, Homo sapiens
ctttcagccccacga

SEQ ID NO: 1616617 - DNA, 15 bp, Homo sapiens
tctttcagccccacg

SEQ ID NO: 1616618 - DNA, 15 bp, Homo sapiens
atctttcagccccac

SEQ ID NO: 1616619 - DNA, 15 bp, Homo sapiens
aatctttcagcccca

SEQ ID NO: 1616620 - DNA, 15 bp, Homo sapiens
actgtggctgcaaaa

SEQ ID NO: 1616621 - DNA, 15 bp, Homo sapiens
tactgtggctgcaaa

SEQ ID NO: 1616622 - DNA, 15 bp, Homo sapiens
atactgtggctgcaa

SEQ ID NO: 1616623 - DNA, 15 bp, Homo sapiens
gatactgtggctgca

SEQ ID NO: 1616624 - DNA, 15 bp, Homo sapiens
tgatactgtggctgc

SEQ ID NO: 1616625 - DNA, 15 bp, Homo sapiens
ctgatactgtggctg

SEQ ID NO: 1616626 - DNA, 15 bp, Homo sapiens
actgatactgtggct

SEQ ID NO: 1616627 - DNA, 15 bp, Homo sapiens
cactgatactgtggc

SEQ ID NO: 1616628 - DNA, 15 bp, Homo sapiens
acactgatactgtgg

SEQ ID NO: 1616629 - DNA, 15 bp, Homo sapiens
cacactgatactgtg

SEQ ID NO: 1616630 - DNA, 15 bp, Homo sapiens
ccacactgatactgt

SEQ ID NO: 1616631 - DNA, 15 bp, Homo sapiens
cccacactgatactg

SEQ ID NO: 1616632 - DNA, 15 bp, Homo sapiens
ccccacactgatact

SEQ ID NO: 1616633 - DNA, 15 bp, Homo sapiens
accccacactgatac

SEQ ID NO: 1616634 - DNA, 15 bp, Homo sapiens
taccccacactgata

SEQ ID NO: 1616635 - DNA, 15 bp, Homo sapiens
ttaccccacactgat

SEQ ID NO: 1616636 - DNA, 15 bp, Homo sapiens
tttaccccacactga

SEQ ID NO: 1616637 - DNA, 15 bp, Homo sapiens
ttttaccccacactg

SEQ ID NO: 1616638 - DNA, 15 bp, Homo sapiens
attttaccccacact

SEQ ID NO: 1616639 - DNA, 15 bp, Homo sapiens
aattttaccccacac

SEQ ID NO: 1616640 - DNA, 15 bp, Homo sapiens
gaattttaccccaca

SEQ ID NO: 1616641 - DNA, 15 bp, Homo sapiens
agaattttaccccac

SEQ ID NO: 1616642 - DNA, 15 bp, Homo sapiens
tagaattttacccca

SEQ ID NO: 1616643 - DNA, 15 bp, Homo sapiens
ttagaattttacccc

SEQ ID NO: 1616644 - DNA, 15 bp, Homo sapiens
attagaattttaccc

SEQ ID NO: 1616645 - DNA, 15 bp, Homo sapiens
tattagaattttacc

SEQ ID NO: 1616646 - DNA, 15 bp, Homo sapiens
atattagaattttac

SEQ ID NO: 1616647 - DNA, 15 bp, Homo sapiens
aatattagaatttta

SEQ ID NO: 1616648 - DNA, 15 bp, Homo sapiens
aaatattagaatttt

SEQ ID NO: 1616649 - DNA, 15 bp, Homo sapiens
caaatattagaattt

SEQ ID NO: 1616650 - DNA, 15 bp, Homo sapiens
gcaaatattagaatt

SEQ ID NO: 1616651 - DNA, 15 bp, Homo sapiens
agcaaatattagaat

SEQ ID NO: 1616652 - DNA, 15 bp, Homo sapiens
gagcaaatattagaa

SEQ ID NO: 1616653 - DNA, 15 bp, Homo sapiens
agagcaaatattaga

SEQ ID NO: 1616654 - DNA, 15 bp, Homo sapiens
aagagcaaatattag

SEQ ID NO: 1616655 - DNA, 15 bp, Homo sapiens
taagagcaaatatta

SEQ ID NO: 1616656 - DNA, 15 bp, Homo sapiens
ataagagcaaatatt

SEQ ID NO: 1616657 - DNA, 15 bp, Homo sapiens
cataagagcaaatat

SEQ ID NO: 1616658 - DNA, 15 bp, Homo sapiens
acataagagcaaata

SEQ ID NO: 1616659 - DNA, 15 bp, Homo sapiens
aacataagagcaaat

SEQ ID NO: 1616660 - DNA, 15 bp, Homo sapiens
aaacataagagcaaa

SEQ ID NO: 1616661 - DNA, 15 bp, Homo sapiens
aaaacataagagcaa

SEQ ID NO: 1616662 - DNA, 15 bp, Homo sapiens
taaaacataagagca

SEQ ID NO: 1616663 - DNA, 15 bp, Homo sapiens
ttaaaacataagagc

SEQ ID NO: 1616664 - DNA, 15 bp, Homo sapiens
tttaaaacataagag

SEQ ID NO: 1616665 - DNA, 15 bp, Homo sapiens
atttaaaacataaga

SEQ ID NO: 1616666 - DNA, 15 bp, Homo sapiens
aatttaaaacataag

SEQ ID NO: 1616667 - DNA, 15 bp, Homo sapiens
gaatttaaaacataa

SEQ ID NO: 1616668 - DNA, 15 bp, Homo sapiens
agaatttaaaacata

SEQ ID NO: 1616669 - DNA, 15 bp, Homo sapiens
gagaatttaaaacat

SEQ ID NO: 1616670 - DNA, 15 bp, Homo sapiens
tgagaatttaaaaca

SEQ ID NO: 1616671 - DNA, 15 bp, Homo sapiens
ctgagaatttaaaac

SEQ ID NO: 1616672 - DNA, 15 bp, Homo sapiens
actgagaatttaaaa

SEQ ID NO: 1616673 - DNA, 15 bp, Homo sapiens
gactgagaatttaaa

SEQ ID NO: 1616674 - DNA, 15 bp, Homo sapiens
agactgagaatttaa

SEQ ID NO: 1616675 - DNA, 15 bp, Homo sapiens
aagactgagaattta

SEQ ID NO: 1616676 - DNA, 15 bp, Homo sapiens
aaagactgagaattt

SEQ ID NO: 1616677 - DNA, 15 bp, Homo sapiens
gaaagactgagaatt

SEQ ID NO: 1616678 - DNA, 15 bp, Homo sapiens
ggaaagactgagaat

SEQ ID NO: 1616679 - DNA, 15 bp, Homo sapiens
tggaaagactgagaa

SEQ ID NO: 1616680 - DNA, 15 bp, Homo sapiens
ttggaaagactgaga

SEQ ID NO: 1616681 - DNA, 15 bp, Homo sapiens
gttggaaagactgag

SEQ ID NO: 1616682 - DNA, 15 bp, Homo sapiens
tgttggaaagactga

SEQ ID NO: 1616683 - DNA, 15 bp, Homo sapiens
atgttggaaagactg

SEQ ID NO: 1616684 - DNA, 15 bp, Homo sapiens
tatgttggaaagact

SEQ ID NO: 1616685 - DNA, 15 bp, Homo sapiens
ttatgttggaaagac

SEQ ID NO: 1616686 - DNA, 15 bp, Homo sapiens
cttatgttggaaaga

SEQ ID NO: 1616687 - DNA, 15 bp, Homo sapiens
tcttatgttggaaag

SEQ ID NO: 1616688 - DNA, 15 bp, Homo sapiens
ttcttatgttggaaa

SEQ ID NO: 1616689 - DNA, 15 bp, Homo sapiens
tttcttatgttggaa

SEQ ID NO: 1616690 - DNA, 15 bp, Homo sapiens
ttttcttatgttgga

SEQ ID NO: 1616691 - DNA, 15 bp, Homo sapiens
attttcttatgttgg

SEQ ID NO: 1616692 - DNA, 15 bp, Homo sapiens
tattttcttatgttg

SEQ ID NO: 1616693 - DNA, 15 bp, Homo sapiens
ctattttcttatgtt

SEQ ID NO: 1616694 - DNA, 15 bp, Homo sapiens
gctattttcttatgt

SEQ ID NO: 1616695 - DNA, 15 bp, Homo sapiens
agctattttcttatg

SEQ ID NO: 1616696 - DNA, 15 bp, Homo sapiens
tagctattttcttat

SEQ ID NO: 1616697 - DNA, 15 bp, Homo sapiens
gtagctattttctta

SEQ ID NO: 1616698 - DNA, 15 bp, Homo sapiens
tgtagctattttctt

SEQ ID NO: 1616699 - DNA, 15 bp, Homo sapiens
gtgtagctattttct

SEQ ID NO: 1616700 - DNA, 15 bp, Homo sapiens
tgtgtagctattttc

SEQ ID NO: 1616701 - DNA, 15 bp, Homo sapiens
gtgtgtagctatttt

SEQ ID NO: 1616702 - DNA, 15 bp, Homo sapiens
tgtgtgtagctattt

SEQ ID NO: 1616703 - DNA, 15 bp, Homo sapiens
atgtgtgtagctatt

SEQ ID NO: 1616704 - DNA, 15 bp, Homo sapiens
aatgtgtgtagctat

SEQ ID NO: 1616705 - DNA, 15 bp, Homo sapiens
aaatgtgtgtagcta

SEQ ID NO: 1616706 - DNA, 15 bp, Homo sapiens
gaaatgtgtgtagct

SEQ ID NO: 1616707 - DNA, 15 bp, Homo sapiens
tgaaatgtgtgtagc

SEQ ID NO: 1616708 - DNA, 15 bp, Homo sapiens
ctgaaatgtgtgtag

SEQ ID NO: 1616709 - DNA, 15 bp, Homo sapiens
actgaaatgtgtgta

SEQ ID NO: 1616710 - DNA, 15 bp, Homo sapiens
cactgaaatgtgtgt

SEQ ID NO: 1616711 - DNA, 15 bp, Homo sapiens
acactgaaatgtgtg

SEQ ID NO: 1616712 - DNA, 15 bp, Homo sapiens
aacactgaaatgtgt

SEQ ID NO: 1616713 - DNA, 15 bp, Homo sapiens
aaacactgaaatgtg

SEQ ID NO: 1616714 - DNA, 15 bp, Homo sapiens
gaaacactgaaatgt

SEQ ID NO: 1616715 - DNA, 15 bp, Homo sapiens
ggaaacactgaaatg

SEQ ID NO: 1616716 - DNA, 15 bp, Homo sapiens
aggaaacactgaaat

SEQ ID NO: 1616717 - DNA, 15 bp, Homo sapiens
aaggaaacactgaaa

SEQ ID NO: 1616718 - DNA, 15 bp, Homo sapiens
aaaggaaacactgaa

SEQ ID NO: 1616719 - DNA, 15 bp, Homo sapiens
aaaaggaaacactga

SEQ ID NO: 1616720 - DNA, 15 bp, Homo sapiens
aaaaaggaaacactg

SEQ ID NO: 1616721 - DNA, 15 bp, Homo sapiens
caaaaaggaaacact

SEQ ID NO: 1616722 - DNA, 15 bp, Homo sapiens
gcaaaaaggaaacac

SEQ ID NO: 1616723 - DNA, 15 bp, Homo sapiens
tgcaaaaaggaaaca

SEQ ID NO: 1616724 - DNA, 15 bp, Homo sapiens
ttgcaaaaaggaaac

SEQ ID NO: 1616725 - DNA, 15 bp, Homo sapiens
gttgcaaaaaggaaa

SEQ ID NO: 1616726 - DNA, 15 bp, Homo sapiens
tgttgcaaaaaggaa

SEQ ID NO: 1616727 - DNA, 15 bp, Homo sapiens
ttgttgcaaaaagga

SEQ ID NO: 1616728 - DNA, 15 bp, Homo sapiens
cttgttgcaaaaagg

SEQ ID NO: 1616729 - DNA, 15 bp, Homo sapiens
acttgttgcaaaaag

SEQ ID NO: 1616730 - DNA, 15 bp, Homo sapiens
aacttgttgcaaaaa

SEQ ID NO: 1616731 - DNA, 15 bp, Homo sapiens
taacttgttgcaaaa

SEQ ID NO: 1616732 - DNA, 15 bp, Homo sapiens
ttaacttgttgcaaa

SEQ ID NO: 1616733 - DNA, 15 bp, Homo sapiens
gttaacttgttgcaa

SEQ ID NO: 1616734 - DNA, 15 bp, Homo sapiens
tgttaacttgttgca

SEQ ID NO: 1616735 - DNA, 15 bp, Homo sapiens
atgttaacttgttgc

SEQ ID NO: 1616736 - DNA, 15 bp, Homo sapiens
tatgttaacttgttg

SEQ ID NO: 1616737 - DNA, 15 bp, Homo sapiens
ttatgttaacttgtt

SEQ ID NO: 1616738 - DNA, 15 bp, Homo sapiens
attatgttaacttgt

SEQ ID NO: 1616739 - DNA, 15 bp, Homo sapiens
aattatgttaacttg

SEQ ID NO: 1616740 - DNA, 15 bp, Homo sapiens
aaattatgttaactt

SEQ ID NO: 1616741 - DNA, 15 bp, Homo sapiens
aaaattatgttaact

SEQ ID NO: 1616742 - DNA, 15 bp, Homo sapiens
taaaattatgttaac

SEQ ID NO: 1616743 - DNA, 15 bp, Homo sapiens
ataaaattatgttaa

SEQ ID NO: 1616744 - DNA, 15 bp, Homo sapiens
aataaaattatgtta

SEQ ID NO: 1616745 - DNA, 15 bp, Homo sapiens
caataaaattatgtt

SEQ ID NO: 1616746 - DNA, 15 bp, Homo sapiens
ccaataaaattatgt

SEQ ID NO: 1616747 - DNA, 15 bp, Homo sapiens
tccaataaaattatg

SEQ ID NO: 1616748 - DNA, 15 bp, Homo sapiens
gtccaataaaattat

SEQ ID NO: 1616749 - DNA, 15 bp, Homo sapiens
ggtccaataaaatta

SEQ ID NO: 1616750 - DNA, 15 bp, Homo sapiens
tggtccaataaaatt

SEQ ID NO: 1616751 - DNA, 15 bp, Homo sapiens
gtggtccaataaaat

SEQ ID NO: 1616752 - DNA, 15 bp, Homo sapiens
cgtggtccaataaaa

SEQ ID NO: 1616753 - DNA, 15 bp, Homo sapiens
acgtggtccaataaa

SEQ ID NO: 1616754 - DNA, 15 bp, Homo sapiens
aacgtggtccaataa

SEQ ID NO: 1616755 - DNA, 15 bp, Homo sapiens
taacgtggtccaata

SEQ ID NO: 1616756 - DNA, 15 bp, Homo sapiens
ataacgtggtccaat

SEQ ID NO: 1616757 - DNA, 15 bp, Homo sapiens
aataacgtggtccaa

SEQ ID NO: 1616758 - DNA, 15 bp, Homo sapiens
aaataacgtggtcca

SEQ ID NO: 1616759 - DNA, 15 bp, Homo sapiens
taaataacgtggtcc

SEQ ID NO: 1616760 - DNA, 15 bp, Homo sapiens
ctaaataacgtggtc

SEQ ID NO: 1616761 - DNA, 15 bp, Homo sapiens
actaaataacgtggt

SEQ ID NO: 1616762 - DNA, 15 bp, Homo sapiens
aactaaataacgtgg

SEQ ID NO: 1616763 - DNA, 15 bp, Homo sapiens
caactaaataacgtg

SEQ ID NO: 1616764 - DNA, 15 bp, Homo sapiens
acaactaaataacgt

SEQ ID NO: 1616765 - DNA, 15 bp, Homo sapiens
aacaactaaataacg

SEQ ID NO: 1616766 - DNA, 15 bp, Homo sapiens
caacaactaaataac

SEQ ID NO: 1616767 - DNA, 15 bp, Homo sapiens
ccaacaactaaataa

SEQ ID NO: 1616768 - DNA, 15 bp, Homo sapiens
cccaacaactaaata

SEQ ID NO: 1616769 - DNA, 15 bp, Homo sapiens
gcccaacaactaaat

SEQ ID NO: 1616770 - DNA, 15 bp, Homo sapiens
ggcccaacaactaaa

SEQ ID NO: 1616771 - DNA, 15 bp, Homo sapiens
aggcccaacaactaa

SEQ ID NO: 1616772 - DNA, 15 bp, Homo sapiens
caaggcccaacaact

SEQ ID NO: 1616773 - DNA, 15 bp, Homo sapiens
acaaggcccaacaac

SEQ ID NO: 1616774 - DNA, 15 bp, Homo sapiens
tacaaggcccaacaa

SEQ ID NO: 1616775 - DNA, 15 bp, Homo sapiens
ttacaaggcccaaca

SEQ ID NO: 1616776 - DNA, 15 bp, Homo sapiens
cttacaaggcccaac

SEQ ID NO: 1616777 - DNA, 15 bp, Homo sapiens
ccttacaaggcccaa

SEQ ID NO: 1616778 - DNA, 15 bp, Homo sapiens
tccttacaaggccca

SEQ ID NO: 1616779 - DNA, 15 bp, Homo sapiens
atccttacaaggccc

SEQ ID NO: 1616780 - DNA, 15 bp, Homo sapiens
aatccttacaaggcc

SEQ ID NO: 1616781 - DNA, 15 bp, Homo sapiens
taatccttacaaggc

SEQ ID NO: 1616782 - DNA, 15 bp, Homo sapiens
ttaatccttacaagg

SEQ ID NO: 1616783 - DNA, 15 bp, Homo sapiens
tttaatccttacaag

SEQ ID NO: 1616784 - DNA, 15 bp, Homo sapiens
atttaatccttacaa

SEQ ID NO: 1616785 - DNA, 15 bp, Homo sapiens
catttaatccttaca

SEQ ID NO: 1616786 - DNA, 15 bp, Homo sapiens
tcatttaatccttac

SEQ ID NO: 1616787 - DNA, 15 bp, Homo sapiens
ctcatttaatcctta

SEQ ID NO: 1616788 - DNA, 15 bp, Homo sapiens
tctcatttaatcctt

SEQ ID NO: 1616789 - DNA, 15 bp, Homo sapiens
atctcatttaatcct

SEQ ID NO: 1616790 - DNA, 15 bp, Homo sapiens
gatctcatttaatcc

SEQ ID NO: 1616791 - DNA, 15 bp, Homo sapiens
tgatctcatttaatc

SEQ ID NO: 1616792 - DNA, 15 bp, Homo sapiens
atgatctcatttaat

SEQ ID NO: 1616793 - DNA, 15 bp, Homo sapiens
catgatctcatttaa

SEQ ID NO: 1616794 - DNA, 15 bp, Homo sapiens
gcatgatctcattta

SEQ ID NO: 1616795 - DNA, 15 bp, Homo sapiens
tgcatgatctcattt

SEQ ID NO: 1616796 - DNA, 15 bp, Homo sapiens
atgcatgatctcatt

SEQ ID NO: 1616797 - DNA, 15 bp, Homo sapiens
catgcatgatctcat

SEQ ID NO: 1616798 - DNA, 15 bp, Homo sapiens
acatgcatgatctca

SEQ ID NO: 1616799 - DNA, 15 bp, Homo sapiens
tacatgcatgatctc

SEQ ID NO: 1616800 - DNA, 15 bp, Homo sapiens
ttacatgcatgatct

SEQ ID NO: 1616801 - DNA, 15 bp, Homo sapiens
gttacatgcatgatc

SEQ ID NO: 1616802 - DNA, 15 bp, Homo sapiens
tgttacatgcatgat

SEQ ID NO: 1616803 - DNA, 15 bp, Homo sapiens
gtgttacatgcatga

SEQ ID NO: 1616804 - DNA, 15 bp, Homo sapiens
agtgttacatgcatg

SEQ ID NO: 1616805 - DNA, 15 bp, Homo sapiens
tagtgttacatgcat

SEQ ID NO: 1616806 - DNA, 15 bp, Homo sapiens
gtagtgttacatgca

SEQ ID NO: 1616807 - DNA, 15 bp, Homo sapiens
tgtagtgttacatgc

SEQ ID NO: 1616808 - DNA, 15 bp, Homo sapiens
ctgtagtgttacatg

SEQ ID NO: 1616809 - DNA, 15 bp, Homo sapiens
actgtagtgttacat

SEQ ID NO: 1616810 - DNA, 15 bp, Homo sapiens
tactgtagtgttaca

SEQ ID NO: 1616811 - DNA, 15 bp, Homo sapiens
ttactgtagtgttac

SEQ ID NO: 1616812 - DNA, 15 bp, Homo sapiens
gttactgtagtgtta

SEQ ID NO: 1616813 - DNA, 15 bp, Homo sapiens
tgttactgtagtgtt

SEQ ID NO: 1616814 - DNA, 15 bp, Homo sapiens
ctgttactgtagtgt

SEQ ID NO: 1616815 - DNA, 15 bp, Homo sapiens
gctgttactgtagtg

SEQ ID NO: 1616816 - DNA, 15 bp, Homo sapiens
ggctgttactgtagt

SEQ ID NO: 1616817 - DNA, 15 bp, Homo sapiens
tggctgttactgtag

SEQ ID NO: 1616818 - DNA, 15 bp, Homo sapiens
gtggctgttactgta

SEQ ID NO: 1616819 - DNA, 15 bp, Homo sapiens
tgtggctgttactgt

SEQ ID NO: 1616820 - DNA, 15 bp, Homo sapiens
atgtggctgttactg

SEQ ID NO: 1616821 - DNA, 15 bp, Homo sapiens
catgtggctgttact

SEQ ID NO: 1616822 - DNA, 15 bp, Homo sapiens
tcatgtggctgttac

SEQ ID NO: 1616823 - DNA, 15 bp, Homo sapiens
atcatgtggctgtta

SEQ ID NO: 1616824 - DNA, 15 bp, Homo sapiens
tatcatgtggctgtt

SEQ ID NO: 1616825 - DNA, 15 bp, Homo sapiens
ttatcatgtggctgt

SEQ ID NO: 1616826 - DNA, 15 bp, Homo sapiens
tttatcatgtggctg

SEQ ID NO: 1616827 - DNA, 15 bp, Homo sapiens
atttatcatgtggct

SEQ ID NO: 1616828 - DNA, 15 bp, Homo sapiens
catttatcatgtggc

SEQ ID NO: 1616829 - DNA, 15 bp, Homo sapiens
acatttatcatgtgg

SEQ ID NO: 1616830 - DNA, 15 bp, Homo sapiens
gacatttatcatgtg

SEQ ID NO: 1616831 - DNA, 15 bp, Homo sapiens
ggacatttatcatgt

SEQ ID NO: 1616832 - DNA, 15 bp, Homo sapiens
tggacatttatcatg

SEQ ID NO: 1616833 - DNA, 15 bp, Homo sapiens
ttggacatttatcat

SEQ ID NO: 1616834 - DNA, 15 bp, Homo sapiens
tttggacatttatca

SEQ ID NO: 1616835 - DNA, 15 bp, Homo sapiens
atttggacatttatc

SEQ ID NO: 1616836 - DNA, 15 bp, Homo sapiens
tatttggacatttat

SEQ ID NO: 1616837 - DNA, 15 bp, Homo sapiens
ttatttggacattta

SEQ ID NO: 1616838 - DNA, 15 bp, Homo sapiens
attatttggacattt

SEQ ID NO: 1616839 - DNA, 15 bp, Homo sapiens
tattatttggacatt

SEQ ID NO: 1616840 - DNA, 15 bp, Homo sapiens
atattatttggacat

SEQ ID NO: 1616841 - DNA, 15 bp, Homo sapiens
aatattatttggaca

SEQ ID NO: 1616842 - DNA, 15 bp, Homo sapiens
aaatattatttggac

SEQ ID NO: 1616843 - DNA, 15 bp, Homo sapiens
taaatattatttgga

SEQ ID NO: 1616844 - DNA, 15 bp, Homo sapiens
gtaaatattatttgg

SEQ ID NO: 1616845 - DNA, 15 bp, Homo sapiens
ggtaaatattatttg

SEQ ID NO: 1616846 - DNA, 15 bp, Homo sapiens
aggtaaatattattt

SEQ ID NO: 1616847 - DNA, 15 bp, Homo sapiens
caggtaaatattatt

SEQ ID NO: 1616848 - DNA, 15 bp, Homo sapiens
acaggtaaatattat

SEQ ID NO: 1616849 - DNA, 15 bp, Homo sapiens
cacaggtaaatatta

SEQ ID NO: 1616850 - DNA, 15 bp, Homo sapiens
gcacaggtaaatatt

SEQ ID NO: 1616851 - DNA, 15 bp, Homo sapiens
ggcacaggtaaatat

SEQ ID NO: 1616852 - DNA, 15 bp, Homo sapiens
aggcacaggtaaata

SEQ ID NO: 1616853 - DNA, 15 bp, Homo sapiens
caggcacaggtaaat

SEQ ID NO: 1616854 - DNA, 15 bp, Homo sapiens
ccaggcacaggtaaa

SEQ ID NO: 1616855 - DNA, 15 bp, Homo sapiens
gccaggcacaggtaa

SEQ ID NO: 1616856 - DNA, 15 bp, Homo sapiens
tgccaggcacaggta

SEQ ID NO: 1616857 - DNA, 15 bp, Homo sapiens
gtgccaggcacaggt

SEQ ID NO: 1616858 - DNA, 15 bp, Homo sapiens
tgtgccaggcacagg

SEQ ID NO: 1616859 - DNA, 15 bp, Homo sapiens
ctgtgccaggcacag

SEQ ID NO: 1616860 - DNA, 15 bp, Homo sapiens
tctgtgccaggcaca

SEQ ID NO: 1616861 - DNA, 15 bp, Homo sapiens
gctctgtgccaggca

SEQ ID NO: 1616862 - DNA, 15 bp, Homo sapiens
tgctctgtgccaggc

SEQ ID NO: 1616863 - DNA, 15 bp, Homo sapiens
ctgctctgtgccagg

SEQ ID NO: 1616864 - DNA, 15 bp, Homo sapiens
cctgctctgtgccag

SEQ ID NO: 1616865 - DNA, 15 bp, Homo sapiens
gcctgctctgtgcca

SEQ ID NO: 1616866 - DNA, 15 bp, Homo sapiens
tgcctgctctgtgcc

SEQ ID NO: 1616867 - DNA, 15 bp, Homo sapiens
gtgcctgctctgtgc

SEQ ID NO: 1616868 - DNA, 15 bp, Homo sapiens
agtgcctgctctgtg

SEQ ID NO: 1616869 - DNA, 15 bp, Homo sapiens
gagtgcctgctctgt

SEQ ID NO: 1616870 - DNA, 15 bp, Homo sapiens
tgagtgcctgctctg

SEQ ID NO: 1616871 - DNA, 15 bp, Homo sapiens
ttgagtgcctgctct

SEQ ID NO: 1616872 - DNA, 15 bp, Homo sapiens
tttgagtgcctgctc

SEQ ID NO: 1616873 - DNA, 15 bp, Homo sapiens
ttttgagtgcctgct

SEQ ID NO: 1616874 - DNA, 15 bp, Homo sapiens
tttttgagtgcctgc

SEQ ID NO: 1616875 - DNA, 15 bp, Homo sapiens
ttttttgagtgcctg

SEQ ID NO: 1616876 - DNA, 15 bp, Homo sapiens
attttttgagtgcct

SEQ ID NO: 1616877 - DNA, 15 bp, Homo sapiens
tattttttgagtgcc

SEQ ID NO: 1616878 - DNA, 15 bp, Homo sapiens
atattttttgagtgc

SEQ ID NO: 1616879 - DNA, 15 bp, Homo sapiens
aatattttttgagtg

SEQ ID NO: 1616880 - DNA, 15 bp, Homo sapiens
aaatattttttgagt

SEQ ID NO: 1616881 - DNA, 15 bp, Homo sapiens
aaaatattttttgag

SEQ ID NO: 1616882 - DNA, 15 bp, Homo sapiens
aaaaatattttttga

SEQ ID NO: 1616883 - DNA, 15 bp, Homo sapiens
aaaaaatattttttg

SEQ ID NO: 1616884 - DNA, 15 bp, Homo sapiens
taaaaaatatttttt

SEQ ID NO: 1616885 - DNA, 15 bp, Homo sapiens
ctaaaaaatattttt

SEQ ID NO: 1616886 - DNA, 15 bp, Homo sapiens
tctaaaaaatatttt

SEQ ID NO: 1616887 - DNA, 15 bp, Homo sapiens
ctctaaaaaatattt

SEQ ID NO: 1616888 - DNA, 15 bp, Homo sapiens
gctctaaaaaatatt

SEQ ID NO: 1616889 - DNA, 15 bp, Homo sapiens
tgctctaaaaaatat

SEQ ID NO: 1616890 - DNA, 15 bp, Homo sapiens
atgctctaaaaaata

SEQ ID NO: 1616891 - DNA, 15 bp, Homo sapiens
catgctctaaaaaat

SEQ ID NO: 1616892 - DNA, 15 bp, Homo sapiens
acatgctctaaaaaa

SEQ ID NO: 1616893 - DNA, 15 bp, Homo sapiens
cacatgctctaaaaa

SEQ ID NO: 1616894 - DNA, 15 bp, Homo sapiens
tcacatgctctaaaa

SEQ ID NO: 1616895 - DNA, 15 bp, Homo sapiens
gtcacatgctctaaa

SEQ ID NO: 1616896 - DNA, 15 bp, Homo sapiens
cgtcacatgctctaa

SEQ ID NO: 1616897 - DNA, 15 bp, Homo sapiens
gcgtcacatgctcta

SEQ ID NO: 1616898 - DNA, 15 bp, Homo sapiens
cgcgtcacatgctct

SEQ ID NO: 1616899 - DNA, 15 bp, Homo sapiens
gcgcgtcacatgctc

SEQ ID NO: 1616900 - DNA, 15 bp, Homo sapiens
ggcgcgtcacatgct

SEQ ID NO: 1616901 - DNA, 15 bp, Homo sapiens
tggcgcgtcacatgc

SEQ ID NO: 1616902 - DNA, 15 bp, Homo sapiens
atggcgcgtcacatg

SEQ ID NO: 1616903 - DNA, 15 bp, Homo sapiens
catggcgcgtcacat

SEQ ID NO: 1616904 - DNA, 15 bp, Homo sapiens
tcatggcgcgtcaca

SEQ ID NO: 1616905 - DNA, 15 bp, Homo sapiens
ttcatggcgcgtcac

SEQ ID NO: 1616906 - DNA, 15 bp, Homo sapiens
gttcatggcgcgtca

SEQ ID NO: 1616907 - DNA, 15 bp, Homo sapiens
ggttcatggcgcgtc

SEQ ID NO: 1616908 - DNA, 15 bp, Homo sapiens
tggttcatggcgcgt

SEQ ID NO: 1616909 - DNA, 15 bp, Homo sapiens
ctggttcatggcgcg

SEQ ID NO: 1616910 - DNA, 15 bp, Homo sapiens
tctggttcatggcgc

SEQ ID NO: 1616911 - DNA, 15 bp, Homo sapiens
ctctggttcatggcg

SEQ ID NO: 1616912 - DNA, 15 bp, Homo sapiens
cctctggttcatggc

SEQ ID NO: 1616913 - DNA, 15 bp, Homo sapiens
tcctctggttcatgg

SEQ ID NO: 1616914 - DNA, 15 bp, Homo sapiens
ctcctctggttcatg

SEQ ID NO: 1616915 - DNA, 15 bp, Homo sapiens
gctcctctggttcat

SEQ ID NO: 1616916 - DNA, 15 bp, Homo sapiens
ggctcctctggttca

SEQ ID NO: 1616917 - DNA, 15 bp, Homo sapiens
tggctcctctggttc

SEQ ID NO: 1616918 - DNA, 15 bp, Homo sapiens
gtggctcctctggtt

SEQ ID NO: 1616919 - DNA, 15 bp, Homo sapiens
agtggctcctctggt

SEQ ID NO: 1616920 - DNA, 15 bp, Homo sapiens
aagtggctcctctgg

SEQ ID NO: 1616921 - DNA, 15 bp, Homo sapiens
aaagtggctcctctg

SEQ ID NO: 1616922 - DNA, 15 bp, Homo sapiens
taaagtggctcctct

SEQ ID NO: 1616923 - DNA, 15 bp, Homo sapiens
ttaaagtggctcctc

SEQ ID NO: 1616924 - DNA, 15 bp, Homo sapiens
tttaaagtggctcct

SEQ ID NO: 1616925 - DNA, 15 bp, Homo sapiens
atttaaagtggctcc

SEQ ID NO: 1616926 - DNA, 15 bp, Homo sapiens
catttaaagtggctc

SEQ ID NO: 1616927 - DNA, 15 bp, Homo sapiens
ccatttaaagtggct

SEQ ID NO: 1616928 - DNA, 15 bp, Homo sapiens
tccatttaaagtggc

SEQ ID NO: 1616929 - DNA, 15 bp, Homo sapiens
gtccatttaaagtgg

SEQ ID NO: 1616930 - DNA, 15 bp, Homo sapiens
tgtccatttaaagtg

SEQ ID NO: 1616931 - DNA, 15 bp, Homo sapiens
ttgtccatttaaagt

SEQ ID NO: 1616932 - DNA, 15 bp, Homo sapiens
tttgtccatttaaag

SEQ ID NO: 1616933 - DNA, 15 bp, Homo sapiens
gtttgtccatttaaa

SEQ ID NO: 1616934 - DNA, 15 bp, Homo sapiens
cgtttgtccatttaa

SEQ ID NO: 1616935 - DNA, 15 bp, Homo sapiens
ccgtttgtccattta

SEQ ID NO: 1616936 - DNA, 15 bp, Homo sapiens
cccgtttgtccattt

SEQ ID NO: 1616937 - DNA, 15 bp, Homo sapiens
ccccgtttgtccatt

SEQ ID NO: 1616938 - DNA, 15 bp, Homo sapiens
tccccgtttgtccat

SEQ ID NO: 1616939 - DNA, 15 bp, Homo sapiens
atccccgtttgtcca

SEQ ID NO: 1616940 - DNA, 15 bp, Homo sapiens
gatccccgtttgtcc

SEQ ID NO: 1616941 - DNA, 15 bp, Homo sapiens
agatccccgtttgtc

SEQ ID NO: 1616942 - DNA, 15 bp, Homo sapiens
gagatccccgtttgt

SEQ ID NO: 1616943 - DNA, 15 bp, Homo sapiens
tgagatccccgtttg

SEQ ID NO: 1616944 - DNA, 15 bp, Homo sapiens
atgagatccccgttt

SEQ ID NO: 1616945 - DNA, 15 bp, Homo sapiens
aatgagatccccgtt

SEQ ID NO: 1616946 - DNA, 15 bp, Homo sapiens
aaatgagatccccgt

SEQ ID NO: 1616947 - DNA, 15 bp, Homo sapiens
aaaatgagatccccg

SEQ ID NO: 1616948 - DNA, 15 bp, Homo sapiens
aaaaatgagatcccc

SEQ ID NO: 1616949 - DNA, 15 bp, Homo sapiens
aaaaaatgagatccc

SEQ ID NO: 1616950 - DNA, 15 bp, Homo sapiens
aaaaaaatgagatcc

SEQ ID NO: 1616951 - DNA, 15 bp, Homo sapiens
aaaaaaaatgagatc

SEQ ID NO: 1616952 - DNA, 15 bp, Homo sapiens
aaaaaaaaatgagat

SEQ ID NO: 1616953 - DNA, 15 bp, Homo sapiens
aaaaaaaaaatgaga

SEQ ID NO: 1616954 - DNA, 15 bp, Homo sapiens
aaaaaaaaaaatgag

SEQ ID NO: 1616955 - DNA, 15 bp, Homo sapiens
aaaaaaaaaaaatga

SEQ ID NO: 1616956 - DNA, 15 bp, Homo sapiens
aaaaaaaaaaaaatg

SEQ ID NO: 1616957 - DNA, 15 bp, Homo sapiens
ccattaaaaaaaaaa

SEQ ID NO: 1616958 - DNA, 15 bp, Homo sapiens
accattaaaaaaaaa

SEQ ID NO: 1616959 - DNA, 15 bp, Homo sapiens
caccattaaaaaaaa

SEQ ID NO: 1616960 - DNA, 15 bp, Homo sapiens
tcaccattaaaaaaa

SEQ ID NO: 1616961 - DNA, 15 bp, Homo sapiens
ctcaccattaaaaaa

SEQ ID NO: 1616962 - DNA, 15 bp, Homo sapiens
tctcaccattaaaaa

SEQ ID NO: 1616963 - DNA, 15 bp, Homo sapiens
gtctcaccattaaaa

SEQ ID NO: 1616964 - DNA, 15 bp, Homo sapiens
tgtctcaccattaaa

SEQ ID NO: 1616965 - DNA, 15 bp, Homo sapiens
ttgtctcaccattaa

SEQ ID NO: 1616966 - DNA, 15 bp, Homo sapiens
cttgtctcaccatta

SEQ ID NO: 1616967 - DNA, 15 bp, Homo sapiens
gcttgtctcaccatt

SEQ ID NO: 1616968 - DNA, 15 bp, Homo sapiens
ggcttgtctcaccat

SEQ ID NO: 1616969 - DNA, 15 bp, Homo sapiens
gggcttgtctcacca

SEQ ID NO: 1616970 - DNA, 15 bp, Homo sapiens
agggcttgtctcacc

SEQ ID NO: 1616971 - DNA, 15 bp, Homo sapiens
cagggcttgtctcac

SEQ ID NO: 1616972 - DNA, 15 bp, Homo sapiens
tcagggcttgtctca

SEQ ID NO: 1616973 - DNA, 15 bp, Homo sapiens
ctcagggcttgtctc

SEQ ID NO: 1616974 - DNA, 15 bp, Homo sapiens
tctcagggcttgtct

SEQ ID NO: 1616975 - DNA, 15 bp, Homo sapiens
ttctcagggcttgtc

SEQ ID NO: 1616976 - DNA, 15 bp, Homo sapiens
cttctcagggcttgt

SEQ ID NO: 1616977 - DNA, 15 bp, Homo sapiens
ccttctcagggcttg

SEQ ID NO: 1616978 - DNA, 15 bp, Homo sapiens
gccttctcagggctt

SEQ ID NO: 1616979 - DNA, 15 bp, Homo sapiens
tgccttctcagggct

SEQ ID NO: 1616980 - DNA, 15 bp, Homo sapiens
ttgccttctcagggc

SEQ ID NO: 1616981 - DNA, 15 bp, Homo sapiens
tttgccttctcaggg

SEQ ID NO: 1616982 - DNA, 15 bp, Homo sapiens
atttgccttctcagg

SEQ ID NO: 1616983 - DNA, 15 bp, Homo sapiens
catttgccttctcag

SEQ ID NO: 1616984 - DNA, 15 bp, Homo sapiens
ccatttgccttctca

SEQ ID NO: 1616985 - DNA, 15 bp, Homo sapiens
tccatttgccttctc

SEQ ID NO: 1616986 - DNA, 15 bp, Homo sapiens
gtccatttgccttct

SEQ ID NO: 1616987 - DNA, 15 bp, Homo sapiens
agtccatttgccttc

SEQ ID NO: 1616988 - DNA, 15 bp, Homo sapiens
cagtccatttgcctt

SEQ ID NO: 1616989 - DNA, 15 bp, Homo sapiens
gcagtccatttgcct

SEQ ID NO: 1616990 - DNA, 15 bp, Homo sapiens
ggcagtccatttgcc

SEQ ID NO: 1616991 - DNA, 15 bp, Homo sapiens
aggcagtccatttgc

SEQ ID NO: 1616992 - DNA, 15 bp, Homo sapiens
taggcagtccatttg

SEQ ID NO: 1616993 - DNA, 15 bp, Homo sapiens
ttaggcagtccattt

SEQ ID NO: 1616994 - DNA, 15 bp, Homo sapiens
tttaggcagtccatt

SEQ ID NO: 1616995 - DNA, 15 bp, Homo sapiens
ctttaggcagtccat

SEQ ID NO: 1616996 - DNA, 15 bp, Homo sapiens
gctttaggcagtcca

SEQ ID NO: 1616997 - DNA, 15 bp, Homo sapiens
agctttaggcagtcc

SEQ ID NO: 1616998 - DNA, 15 bp, Homo sapiens
tagctttaggcagtc

SEQ ID NO: 1616999 - DNA, 15 bp, Homo sapiens
gtagctttaggcagt

SEQ ID NO: 1617000 - DNA, 15 bp, Homo sapiens
tgtagctttaggcag

SEQ ID NO: 1617001 - DNA, 15 bp, Homo sapiens
gtgtagctttaggca

SEQ ID NO: 1617002 - DNA, 15 bp, Homo sapiens
tgtgtagctttaggc

SEQ ID NO: 1617003 - DNA, 15 bp, Homo sapiens
ctgtgtagctttagg

SEQ ID NO: 1617004 - DNA, 15 bp, Homo sapiens
cctgtgtagctttag

SEQ ID NO: 1617005 - DNA, 15 bp, Homo sapiens
acctgtgtagcttta

SEQ ID NO: 1617006 - DNA, 15 bp, Homo sapiens
gacctgtgtagcttt

SEQ ID NO: 1617007 - DNA, 15 bp, Homo sapiens
tgacctgtgtagctt

SEQ ID NO: 1617008 - DNA, 15 bp, Homo sapiens
ctgacctgtgtagct

SEQ ID NO: 1617009 - DNA, 15 bp, Homo sapiens
gctgacctgtgtagc

SEQ ID NO: 1617010 - DNA, 15 bp, Homo sapiens
cgctgacctgtgtag

SEQ ID NO: 1617011 - DNA, 15 bp, Homo sapiens
ccgctgacctgtgta

SEQ ID NO: 1617012 - DNA, 15 bp, Homo sapiens
cccgctgacctgtgt

SEQ ID NO: 1617013 - DNA, 15 bp, Homo sapiens
ccccgctgacctgtg

SEQ ID NO: 1617014 - DNA, 15 bp, Homo sapiens
gccccgctgacctgt

SEQ ID NO: 1617015 - DNA, 15 bp, Homo sapiens
tgccccgctgacctg

SEQ ID NO: 1617016 - DNA, 15 bp, Homo sapiens
ctgccccgctgacct

SEQ ID NO: 1617017 - DNA, 15 bp, Homo sapiens
cctgccccgctgacc

SEQ ID NO: 1617018 - DNA, 15 bp, Homo sapiens
acctgccccgctgac

SEQ ID NO: 1617019 - DNA, 15 bp, Homo sapiens
tacctgccccgctga

SEQ ID NO: 1617020 - DNA, 15 bp, Homo sapiens
ttacctgccccgctg

SEQ ID NO: 1617021 - DNA, 15 bp, Homo sapiens
tttacctgccccgct

SEQ ID NO: 1617022 - DNA, 15 bp, Homo sapiens
atttacctgccccgc

SEQ ID NO: 1617023 - DNA, 15 bp, Homo sapiens
gatttacctgccccg

SEQ ID NO: 1617024 - DNA, 15 bp, Homo sapiens
agatttacctgcccc

SEQ ID NO: 1617025 - DNA, 15 bp, Homo sapiens
tagatttacctgccc

SEQ ID NO: 1617026 - DNA, 15 bp, Homo sapiens
ttagatttacctgcc

SEQ ID NO: 1617027 - DNA, 15 bp, Homo sapiens
tttagatttacctgc

SEQ ID NO: 1617028 - DNA, 15 bp, Homo sapiens
atttagatttacctg

SEQ ID NO: 1617029 - DNA, 15 bp, Homo sapiens
aatttagatttacct

SEQ ID NO: 1617030 - DNA, 15 bp, Homo sapiens
caatttagatttacc

SEQ ID NO: 1617031 - DNA, 15 bp, Homo sapiens
ccaatttagatttac

SEQ ID NO: 1617032 - DNA, 15 bp, Homo sapiens
gccaatttagattta

SEQ ID NO: 1617033 - DNA, 15 bp, Homo sapiens
tgccaatttagattt

SEQ ID NO: 1617034 - DNA, 15 bp, Homo sapiens
ttgccaatttagatt

SEQ ID NO: 1617035 - DNA, 15 bp, Homo sapiens
tttgccaatttagat

SEQ ID NO: 1617036 - DNA, 15 bp, Homo sapiens
ctttgccaatttaga

SEQ ID NO: 1617037 - DNA, 15 bp, Homo sapiens
actttgccaatttag

SEQ ID NO: 1617038 - DNA, 15 bp, Homo sapiens
tactttgccaattta

SEQ ID NO: 1617039 - DNA, 15 bp, Homo sapiens
ttactttgccaattt

SEQ ID NO: 1617040 - DNA, 15 bp, Homo sapiens
cttactttgccaatt

SEQ ID NO: 1617041 - DNA, 15 bp, Homo sapiens
ccttactttgccaat

SEQ ID NO: 1617042 - DNA, 15 bp, Homo sapiens
cccttactttgccaa

SEQ ID NO: 1617043 - DNA, 15 bp, Homo sapiens
gcccttactttgcca

SEQ ID NO: 1617044 - DNA, 15 bp, Homo sapiens
agcccttactttgcc

SEQ ID NO: 1617045 - DNA, 15 bp, Homo sapiens
cagcccttactttgc

SEQ ID NO: 1617046 - DNA, 15 bp, Homo sapiens
tcagcccttactttg

SEQ ID NO: 1617047 - DNA, 15 bp, Homo sapiens
ctcagcccttacttt

SEQ ID NO: 1617048 - DNA, 15 bp, Homo sapiens
gctcagcccttactt

SEQ ID NO: 1617049 - DNA, 15 bp, Homo sapiens
cgctcagcccttact

SEQ ID NO: 1617050 - DNA, 15 bp, Homo sapiens
tcgctcagcccttac

SEQ ID NO: 1617051 - DNA, 15 bp, Homo sapiens
ttcgctcagccctta

SEQ ID NO: 1617052 - DNA, 15 bp, Homo sapiens
gttcgctcagccctt

SEQ ID NO: 1617053 - DNA, 15 bp, Homo sapiens
tgttcgctcagccct

SEQ ID NO: 1617054 - DNA, 15 bp, Homo sapiens
ctgttcgctcagccc

SEQ ID NO: 1617055 - DNA, 15 bp, Homo sapiens
tctgttcgctcagcc

SEQ ID NO: 1617056 - DNA, 15 bp, Homo sapiens
gtctgttcgctcagc

SEQ ID NO: 1617057 - DNA, 15 bp, Homo sapiens
agtctgttcgctcag

SEQ ID NO: 1617058 - DNA, 15 bp, Homo sapiens
gagtctgttcgctca

SEQ ID NO: 1617059 - DNA, 15 bp, Homo sapiens
ggagtctgttcgctc

SEQ ID NO: 1617060 - DNA, 15 bp, Homo sapiens
cggagtctgttcgct

SEQ ID NO: 1617061 - DNA, 15 bp, Homo sapiens
tcggagtctgttcgc

SEQ ID NO: 1617062 - DNA, 15 bp, Homo sapiens
gtcggagtctgttcg

SEQ ID NO: 1617063 - DNA, 15 bp, Homo sapiens
tgtcggagtctgttc

SEQ ID NO: 1617064 - DNA, 15 bp, Homo sapiens
gtgtcggagtctgtt

SEQ ID NO: 1617065 - DNA, 15 bp, Homo sapiens
agtgtcggagtctgt

SEQ ID NO: 1617066 - DNA, 15 bp, Homo sapiens
tagtgtcggagtctg

SEQ ID NO: 1617067 - DNA, 15 bp, Homo sapiens
ctagtgtcggagtct

SEQ ID NO: 1617068 - DNA, 15 bp, Homo sapiens
tctagtgtcggagtc

SEQ ID NO: 1617069 - DNA, 15 bp, Homo sapiens
ttctagtgtcggagt

SEQ ID NO: 1617070 - DNA, 15 bp, Homo sapiens
cttctagtgtcggag

SEQ ID NO: 1617071 - DNA, 15 bp, Homo sapiens
ccttctagtgtcgga

SEQ ID NO: 1617072 - DNA, 15 bp, Homo sapiens
gccttctagtgtcgg

SEQ ID NO: 1617073 - DNA, 15 bp, Homo sapiens
tgccttctagtgtcg

SEQ ID NO: 1617074 - DNA, 15 bp, Homo sapiens
ctgccttctagtgtc

SEQ ID NO: 1617075 - DNA, 15 bp, Homo sapiens
tctgccttctagtgt

SEQ ID NO: 1617076 - DNA, 15 bp, Homo sapiens
ctctgccttctagtg

SEQ ID NO: 1617077 - DNA, 15 bp, Homo sapiens
gctctgccttctagt

SEQ ID NO: 1617078 - DNA, 15 bp, Homo sapiens
agctctgccttctag

SEQ ID NO: 1617079 - DNA, 15 bp, Homo sapiens
cagctctgccttcta

SEQ ID NO: 1617080 - DNA, 15 bp, Homo sapiens
tcagctctgccttct

SEQ ID NO: 1617081 - DNA, 15 bp, Homo sapiens
ttcagctctgccttc

SEQ ID NO: 1617082 - DNA, 15 bp, Homo sapiens
gttcagctctgcctt

SEQ ID NO: 1617083 - DNA, 15 bp, Homo sapiens
agttcagctctgcct

SEQ ID NO: 1617084 - DNA, 15 bp, Homo sapiens
tagttcagctctgcc

SEQ ID NO: 1617085 - DNA, 15 bp, Homo sapiens
ttagttcagctctgc

SEQ ID NO: 1617086 - DNA, 15 bp, Homo sapiens
gttagttcagctctg

SEQ ID NO: 1617087 - DNA, 15 bp, Homo sapiens
agttagttcagctct

SEQ ID NO: 1617088 - DNA, 15 bp, Homo sapiens
aagttagttcagctc

SEQ ID NO: 1617089 - DNA, 15 bp, Homo sapiens
gaagttagttcagct

SEQ ID NO: 1617090 - DNA, 15 bp, Homo sapiens
agaagttagttcagc

SEQ ID NO: 1617091 - DNA, 15 bp, Homo sapiens
cagaagttagttcag

SEQ ID NO: 1617092 - DNA, 15 bp, Homo sapiens
gcagaagttagttca

SEQ ID NO: 1617093 - DNA, 15 bp, Homo sapiens
agcagaagttagttc

SEQ ID NO: 1617094 - DNA, 15 bp, Homo sapiens
tagcagaagttagtt

SEQ ID NO: 1617095 - DNA, 15 bp, Homo sapiens
ttagcagaagttagt

SEQ ID NO: 1617096 - DNA, 15 bp, Homo sapiens
cttagcagaagttag

SEQ ID NO: 1617097 - DNA, 15 bp, Homo sapiens
ccttagcagaagtta

SEQ ID NO: 1617098 - DNA, 15 bp, Homo sapiens
accttagcagaagtt

SEQ ID NO: 1617099 - DNA, 15 bp, Homo sapiens
gaccttagcagaagt

SEQ ID NO: 1617100 - DNA, 15 bp, Homo sapiens
ggaccttagcagaag

SEQ ID NO: 1617101 - DNA, 15 bp, Homo sapiens
gggaccttagcagaa

SEQ ID NO: 1617102 - DNA, 15 bp, Homo sapiens
cgggaccttagcaga

SEQ ID NO: 1617103 - DNA, 15 bp, Homo sapiens
gcgggaccttagcag

SEQ ID NO: 1617104 - DNA, 15 bp, Homo sapiens
ggcgggaccttagca

SEQ ID NO: 1617105 - DNA, 15 bp, Homo sapiens
aggcgggaccttagc

SEQ ID NO: 1617106 - DNA, 15 bp, Homo sapiens
gaggcgggaccttag

SEQ ID NO: 1617107 - DNA, 15 bp, Homo sapiens
agaggcgggacctta

SEQ ID NO: 1617108 - DNA, 15 bp, Homo sapiens
cagaggcgggacctt

SEQ ID NO: 1617109 - DNA, 15 bp, Homo sapiens
gcagaggcgggacct

SEQ ID NO: 1617110 - DNA, 15 bp, Homo sapiens
ggcagaggcgggacc

SEQ ID NO: 1617111 - DNA, 15 bp, Homo sapiens
cggcagaggcgggac

SEQ ID NO: 1617112 - DNA, 15 bp, Homo sapiens
gcggcagaggcggga

SEQ ID NO: 1617113 - DNA, 15 bp, Homo sapiens
agcggcagaggcggg

SEQ ID NO: 1617114 - DNA, 15 bp, Homo sapiens
aagcggcagaggcgg

SEQ ID NO: 1617115 - DNA, 15 bp, Homo sapiens
aaagcggcagaggcg

SEQ ID NO: 1617116 - DNA, 15 bp, Homo sapiens
caaagcggcagaggc

SEQ ID NO: 1617117 - DNA, 15 bp, Homo sapiens
acaaagcggcagagg

SEQ ID NO: 1617118 - DNA, 15 bp, Homo sapiens
gacaaagcggcagag

SEQ ID NO: 1617119 - DNA, 15 bp, Homo sapiens
ggacaaagcggcaga

SEQ ID NO: 1617120 - DNA, 15 bp, Homo sapiens
gggacaaagcggcag

SEQ ID NO: 1617121 - DNA, 15 bp, Homo sapiens
cgggacaaagcggca

SEQ ID NO: 1617122 - DNA, 15 bp, Homo sapiens
gcgggacaaagcggc

SEQ ID NO: 1617123 - DNA, 15 bp, Homo sapiens
ggcgggacaaagcgg

SEQ ID NO: 1617124 - DNA, 15 bp, Homo sapiens
gggcgggacaaagcg

SEQ ID NO: 1617125 - DNA, 15 bp, Homo sapiens
agggcgggacaaagc

SEQ ID NO: 1617126 - DNA, 15 bp, Homo sapiens
aagggcgggacaaag

SEQ ID NO: 1617127 - DNA, 15 bp, Homo sapiens
taagggcgggacaaa

SEQ ID NO: 1617128 - DNA, 15 bp, Homo sapiens
ataagggcgggacaa

SEQ ID NO: 1617129 - DNA, 15 bp, Homo sapiens
gataagggcgggaca

SEQ ID NO: 1617130 - DNA, 15 bp, Homo sapiens
agataagggcgggac

SEQ ID NO: 1617131 - DNA, 15 bp, Homo sapiens
aagataagggcggga

SEQ ID NO: 1617132 - DNA, 15 bp, Homo sapiens
gaagataagggcggg

SEQ ID NO: 1617133 - DNA, 15 bp, Homo sapiens
agaagataagggcgg

SEQ ID NO: 1617134 - DNA, 15 bp, Homo sapiens
gagaagataagggcg

SEQ ID NO: 1617135 - DNA, 15 bp, Homo sapiens
ggagaagataagggc

SEQ ID NO: 1617136 - DNA, 15 bp, Homo sapiens
gggagaagataaggg

SEQ ID NO: 1617137 - DNA, 15 bp, Homo sapiens
ggggagaagataagg

SEQ ID NO: 1617138 - DNA, 15 bp, Homo sapiens
aggggagaagataag

SEQ ID NO: 1617139 - DNA, 15 bp, Homo sapiens
gaggggagaagataa

SEQ ID NO: 1617140 - DNA, 15 bp, Homo sapiens
ggaggggagaagata

SEQ ID NO: 1617141 - DNA, 15 bp, Homo sapiens
aggaggggagaagat

SEQ ID NO: 1617142 - DNA, 15 bp, Homo sapiens
gaggaggggagaaga

SEQ ID NO: 1617143 - DNA, 15 bp, Homo sapiens
ggaggaggggagaag

SEQ ID NO: 1617144 - DNA, 15 bp, Homo sapiens
ctggaggaggggaga

SEQ ID NO: 1617145 - DNA, 15 bp, Homo sapiens
gctggaggaggggag

SEQ ID NO: 1617146 - DNA, 15 bp, Homo sapiens
cgctggaggagggga

SEQ ID NO: 1617147 - DNA, 15 bp, Homo sapiens
gcgctggaggagggg

SEQ ID NO: 1617148 - DNA, 15 bp, Homo sapiens
ggcgctggaggaggg

SEQ ID NO: 1617149 - DNA, 15 bp, Homo sapiens
aggcgctggaggagg

SEQ ID NO: 1617150 - DNA, 15 bp, Homo sapiens
gaggcgctggaggag

SEQ ID NO: 1617151 - DNA, 15 bp, Homo sapiens
tgaggcgctggagga

SEQ ID NO: 1617152 - DNA, 15 bp, Homo sapiens
atgaggcgctggagg

SEQ ID NO: 1617153 - DNA, 15 bp, Homo sapiens
aatgaggcgctggag

SEQ ID NO: 1617154 - DNA, 15 bp, Homo sapiens
gaatgaggcgctgga

SEQ ID NO: 1617155 - DNA, 15 bp, Homo sapiens
ggaatgaggcgctgg

SEQ ID NO: 1617156 - DNA, 15 bp, Homo sapiens
gggaatgaggcgctg

SEQ ID NO: 1617157 - DNA, 15 bp, Homo sapiens
agggaatgaggcgct

SEQ ID NO: 1617158 - DNA, 15 bp, Homo sapiens
aagggaatgaggcgc

SEQ ID NO: 1617159 - DNA, 15 bp, Homo sapiens
aaagggaatgaggcg

SEQ ID NO: 1617160 - DNA, 15 bp, Homo sapiens
aaaagggaatgaggc

SEQ ID NO: 1617161 - DNA, 15 bp, Homo sapiens
gaaaagggaatgagg

SEQ ID NO: 1617162 - DNA, 15 bp, Homo sapiens
cgaaaagggaatgag

SEQ ID NO: 1617163 - DNA, 15 bp, Homo sapiens
gcgaaaagggaatga

SEQ ID NO: 1617164 - DNA, 15 bp, Homo sapiens
agcgaaaagggaatg

SEQ ID NO: 1617165 - DNA, 15 bp, Homo sapiens
gagcgaaaagggaat

SEQ ID NO: 1617166 - DNA, 15 bp, Homo sapiens
cgagcgaaaagggaa

SEQ ID NO: 1617167 - DNA, 15 bp, Homo sapiens
gcgagcgaaaaggga

SEQ ID NO: 1617168 - DNA, 15 bp, Homo sapiens
ggcgagcgaaaaggg

SEQ ID NO: 1617169 - DNA, 15 bp, Homo sapiens
gggcgagcgaaaagg

SEQ ID NO: 1617170 - DNA, 15 bp, Homo sapiens
ggggcgagcgaaaag

SEQ ID NO: 1617171 - DNA, 15 bp, Homo sapiens
cggggcgagcgaaaa

SEQ ID NO: 1617172 - DNA, 15 bp, Homo sapiens
ccggggcgagcgaaa

SEQ ID NO: 1617173 - DNA, 15 bp, Homo sapiens
gccggggcgagcgaa

SEQ ID NO: 1617174 - DNA, 15 bp, Homo sapiens
ggccggggcgagcga

SEQ ID NO: 1617175 - DNA, 15 bp, Homo sapiens
cggccggggcgagcg

SEQ ID NO: 1617176 - DNA, 15 bp, Homo sapiens
acggccggggcgagc

SEQ ID NO: 1617177 - DNA, 15 bp, Homo sapiens
cacggccggggcgag

SEQ ID NO: 1617178 - DNA, 15 bp, Homo sapiens
gcacggccggggcga

SEQ ID NO: 1617179 - DNA, 15 bp, Homo sapiens
agcacggccggggcg

SEQ ID NO: 1617180 - DNA, 15 bp, Homo sapiens
cagcacggccggggc

SEQ ID NO: 1617181 - DNA, 15 bp, Homo sapiens
tcagcacggccgggg

SEQ ID NO: 1617182 - DNA, 15 bp, Homo sapiens
ttcagcacggccggg

SEQ ID NO: 1617183 - DNA, 15 bp, Homo sapiens
cttcagcacggccgg

SEQ ID NO: 1617184 - DNA, 15 bp, Homo sapiens
gcttcagcacggccg

SEQ ID NO: 1617185 - DNA, 15 bp, Homo sapiens
tgcttcagcacggcc

SEQ ID NO: 1617186 - DNA, 15 bp, Homo sapiens
ttgcttcagcacggc

SEQ ID NO: 1617187 - DNA, 15 bp, Homo sapiens
gttgcttcagcacgg

SEQ ID NO: 1617188 - DNA, 15 bp, Homo sapiens
agttgcttcagcacg

SEQ ID NO: 1617189 - DNA, 15 bp, Homo sapiens
aagttgcttcagcac

SEQ ID NO: 1617190 - DNA, 15 bp, Homo sapiens
gaagttgcttcagca

SEQ ID NO: 1617191 - DNA, 15 bp, Homo sapiens
ggaagttgcttcagc

SEQ ID NO: 1617192 - DNA, 15 bp, Homo sapiens
cggaagttgcttcag

SEQ ID NO: 1617193 - DNA, 15 bp, Homo sapiens
gcggaagttgcttca

SEQ ID NO: 1617194 - DNA, 15 bp, Homo sapiens
ggcggaagttgcttc

SEQ ID NO: 1617195 - DNA, 15 bp, Homo sapiens
gggcggaagttgctt

SEQ ID NO: 1617196 - DNA, 15 bp, Homo sapiens
agggcggaagttgct

SEQ ID NO: 1617197 - DNA, 15 bp, Homo sapiens
cagggcggaagttgc

SEQ ID NO: 1617198 - DNA, 15 bp, Homo sapiens
tcagggcggaagttg

SEQ ID NO: 1617199 - DNA, 15 bp, Homo sapiens
ctcagggcggaagtt

SEQ ID NO: 1617200 - DNA, 15 bp, Homo sapiens
tctcagggcggaagt

SEQ ID NO: 1617201 - DNA, 15 bp, Homo sapiens
ttctcagggcggaag

SEQ ID NO: 1617202 - DNA, 15 bp, Homo sapiens
cttctcagggcggaa

SEQ ID NO: 1617203 - DNA, 15 bp, Homo sapiens
ccttctcagggcgga

SEQ ID NO: 1617204 - DNA, 15 bp, Homo sapiens
cccttctcagggcgg

SEQ ID NO: 1617205 - DNA, 15 bp, Homo sapiens
acccttctcagggcg

SEQ ID NO: 1617206 - DNA, 15 bp, Homo sapiens
cacccttctcagggc

SEQ ID NO: 1617207 - DNA, 15 bp, Homo sapiens
ccacccttctcaggg

SEQ ID NO: 1617208 - DNA, 15 bp, Homo sapiens
cccacccttctcagg

SEQ ID NO: 1617209 - DNA, 15 bp, Homo sapiens
ccccacccttctcag

SEQ ID NO: 1617210 - DNA, 15 bp, Homo sapiens
gccccacccttctca

SEQ ID NO: 1617211 - DNA, 15 bp, Homo sapiens
agccccacccttctc

SEQ ID NO: 1617212 - DNA, 15 bp, Homo sapiens
aagccccacccttct

SEQ ID NO: 1617213 - DNA, 15 bp, Homo sapiens
gaagccccacccttc

SEQ ID NO: 1617214 - DNA, 15 bp, Homo sapiens
ggaagccccaccctt

SEQ ID NO: 1617215 - DNA, 15 bp, Homo sapiens
cggaagccccaccct

SEQ ID NO: 1617216 - DNA, 15 bp, Homo sapiens
acggaagccccaccc

SEQ ID NO: 1617217 - DNA, 15 bp, Homo sapiens
gacggaagccccacc

SEQ ID NO: 1617218 - DNA, 15 bp, Homo sapiens
agacggaagccccac

SEQ ID NO: 1617219 - DNA, 15 bp, Homo sapiens
gagacggaagcccca

SEQ ID NO: 1617220 - DNA, 15 bp, Homo sapiens
ggagacggaagcccc

SEQ ID NO: 1617221 - DNA, 15 bp, Homo sapiens
gggagacggaagccc

SEQ ID NO: 1617222 - DNA, 15 bp, Homo sapiens
cgggagacggaagcc

SEQ ID NO: 1617223 - DNA, 15 bp, Homo sapiens
gcgggagacggaagc

SEQ ID NO: 1617224 - DNA, 15 bp, Homo sapiens
agcgggagacggaag

SEQ ID NO: 1617225 - DNA, 15 bp, Homo sapiens
gagcgggagacggaa

SEQ ID NO: 1617226 - DNA, 15 bp, Homo sapiens
agagcgggagacgga

SEQ ID NO: 1617227 - DNA, 15 bp, Homo sapiens
gagagcgggagacgg

SEQ ID NO: 1617228 - DNA, 15 bp, Homo sapiens
cgagagcgggagacg

SEQ ID NO: 1617229 - DNA, 15 bp, Homo sapiens
gcgagagcgggagac

SEQ ID NO: 1617230 - DNA, 15 bp, Homo sapiens
cgcgagagcgggaga

SEQ ID NO: 1617231 - DNA, 15 bp, Homo sapiens
tcgcgagagcgggag

SEQ ID NO: 1617232 - DNA, 15 bp, Homo sapiens
gtcgcgagagcggga

SEQ ID NO: 1617233 - DNA, 15 bp, Homo sapiens
agtcgcgagagcggg

SEQ ID NO: 1617234 - DNA, 15 bp, Homo sapiens
gagtcgcgagagcgg

SEQ ID NO: 1617235 - DNA, 15 bp, Homo sapiens
ggagtcgcgagagcg

SEQ ID NO: 1617236 - DNA, 15 bp, Homo sapiens
aggagtcgcgagagc

SEQ ID NO: 1617237 - DNA, 15 bp, Homo sapiens
caggagtcgcgagag

SEQ ID NO: 1617238 - DNA, 15 bp, Homo sapiens
ccaggagtcgcgaga

SEQ ID NO: 1617239 - DNA, 15 bp, Homo sapiens
gccaggagtcgcgag

SEQ ID NO: 1617240 - DNA, 15 bp, Homo sapiens
cgccaggagtcgcga

SEQ ID NO: 1617241 - DNA, 15 bp, Homo sapiens
ccgccaggagtcgcg

SEQ ID NO: 1617242 - DNA, 15 bp, Homo sapiens
accgccaggagtcgc

SEQ ID NO: 1617243 - DNA, 15 bp, Homo sapiens
caccgccaggagtcg

SEQ ID NO: 1617244 - DNA, 15 bp, Homo sapiens
tcaccgccaggagtc

SEQ ID NO: 1617245 - DNA, 15 bp, Homo sapiens
ttcaccgccaggagt

SEQ ID NO: 1617246 - DNA, 15 bp, Homo sapiens
cttcaccgccaggag

SEQ ID NO: 1617247 - DNA, 15 bp, Homo sapiens
ccttcaccgccagga

SEQ ID NO: 1617248 - DNA, 15 bp, Homo sapiens
tccttcaccgccagg

SEQ ID NO: 1617249 - DNA, 15 bp, Homo sapiens
gtccttcaccgccag

SEQ ID NO: 1617250 - DNA, 15 bp, Homo sapiens
cgtccttcaccgcca

SEQ ID NO: 1617251 - DNA, 15 bp, Homo sapiens
ccgtccttcaccgcc

SEQ ID NO: 1617252 - DNA, 15 bp, Homo sapiens
tccgtccttcaccgc

SEQ ID NO: 1617253 - DNA, 15 bp, Homo sapiens
ttccgtccttcaccg

SEQ ID NO: 1617254 - DNA, 15 bp, Homo sapiens
cttccgtccttcacc

SEQ ID NO: 1617255 - DNA, 15 bp, Homo sapiens
tcttccgtccttcac

SEQ ID NO: 1617256 - DNA, 15 bp, Homo sapiens
atcttccgtccttca

SEQ ID NO: 1617257 - DNA, 15 bp, Homo sapiens
catcttccgtccttc

SEQ ID NO: 1617258 - DNA, 15 bp, Homo sapiens
tcatcttccgtcctt

SEQ ID NO: 1617259 - DNA, 15 bp, Homo sapiens
atcatcttccgtcct

SEQ ID NO: 1617260 - DNA, 15 bp, Homo sapiens
tatcatcttccgtcc

SEQ ID NO: 1617261 - DNA, 15 bp, Homo sapiens
ctatcatcttccgtc

SEQ ID NO: 1617262 - DNA, 15 bp, Homo sapiens
gctatcatcttccgt

SEQ ID NO: 1617263 - DNA, 15 bp, Homo sapiens
ggctatcatcttccg

SEQ ID NO: 1617264 - DNA, 15 bp, Homo sapiens
tggctatcatcttcc

SEQ ID NO: 1617265 - DNA, 15 bp, Homo sapiens
gtggctatcatcttc

SEQ ID NO: 1617266 - DNA, 15 bp, Homo sapiens
tgtggctatcatctt

SEQ ID NO: 1617267 - DNA, 15 bp, Homo sapiens
atgtggctatcatct

SEQ ID NO: 1617268 - DNA, 15 bp, Homo sapiens
aatgtggctatcatc

SEQ ID NO: 1617269 - DNA, 15 bp, Homo sapiens
aaatgtggctatcat

SEQ ID NO: 1617270 - DNA, 15 bp, Homo sapiens
gaaatgtggctatca

SEQ ID NO: 1617271 - DNA, 15 bp, Homo sapiens
agaaatgtggctatc

SEQ ID NO: 1617272 - DNA, 15 bp, Homo sapiens
aagaaatgtggctat

SEQ ID NO: 1617273 - DNA, 15 bp, Homo sapiens
gaagaaatgtggcta

SEQ ID NO: 1617274 - DNA, 15 bp, Homo sapiens
ggaagaaatgtggct

SEQ ID NO: 1617275 - DNA, 15 bp, Homo sapiens
aggaagaaatgtggc

SEQ ID NO: 1617276 - DNA, 15 bp, Homo sapiens
gaggaagaaatgtgg

SEQ ID NO: 1617277 - DNA, 15 bp, Homo sapiens
cgaggaagaaatgtg

SEQ ID NO: 1617278 - DNA, 15 bp, Homo sapiens
gcgaggaagaaatgt

SEQ ID NO: 1617279 - DNA, 15 bp, Homo sapiens
ggcgaggaagaaatg

SEQ ID NO: 1617280 - DNA, 15 bp, Homo sapiens
gggcgaggaagaaat

SEQ ID NO: 1617281 - DNA, 15 bp, Homo sapiens
agggcgaggaagaaa

SEQ ID NO: 1617282 - DNA, 15 bp, Homo sapiens
aagggcgaggaagaa

SEQ ID NO: 1617283 - DNA, 15 bp, Homo sapiens
gaagggcgaggaaga

SEQ ID NO: 1617284 - DNA, 15 bp, Homo sapiens
ggaagggcgaggaag

SEQ ID NO: 1617285 - DNA, 15 bp, Homo sapiens
gggaagggcgaggaa

SEQ ID NO: 1617286 - DNA, 15 bp, Homo sapiens
ggggaagggcgagga

SEQ ID NO: 1617287 - DNA, 15 bp, Homo sapiens
aggggaagggcgagg

SEQ ID NO: 1617288 - DNA, 15 bp, Homo sapiens
taggggaagggcgag

SEQ ID NO: 1617289 - DNA, 15 bp, Homo sapiens
ctaggggaagggcga

SEQ ID NO: 1617290 - DNA, 15 bp, Homo sapiens
cctaggggaagggcg

SEQ ID NO: 1617291 - DNA, 15 bp, Homo sapiens
acctaggggaagggc

SEQ ID NO: 1617292 - DNA, 15 bp, Homo sapiens
aacctaggggaaggg

SEQ ID NO: 1617293 - DNA, 15 bp, Homo sapiens
gaacctaggggaagg

SEQ ID NO: 1617294 - DNA, 15 bp, Homo sapiens
ggaacctaggggaag

SEQ ID NO: 1617295 - DNA, 15 bp, Homo sapiens
gggaacctaggggaa

SEQ ID NO: 1617296 - DNA, 15 bp, Homo sapiens
agggaacctagggga

SEQ ID NO: 1617297 - DNA, 15 bp, Homo sapiens
cagggaacctagggg

SEQ ID NO: 1617298 - DNA, 15 bp, Homo sapiens
acagggaacctaggg

SEQ ID NO: 1617299 - DNA, 15 bp, Homo sapiens
gacagggaacctagg

SEQ ID NO: 1617300 - DNA, 15 bp, Homo sapiens
tgacagggaacctag

SEQ ID NO: 1617301 - DNA, 15 bp, Homo sapiens
gtgacagggaaccta

SEQ ID NO: 1617302 - DNA, 15 bp, Homo sapiens
tgtgacagggaacct

SEQ ID NO: 1617303 - DNA, 15 bp, Homo sapiens
ctgtgacagggaacc

SEQ ID NO: 1617304 - DNA, 15 bp, Homo sapiens
actgtgacagggaac

SEQ ID NO: 1617305 - DNA, 15 bp, Homo sapiens
aactgtgacagggaa

SEQ ID NO: 1617306 - DNA, 15 bp, Homo sapiens
gaactgtgacaggga

SEQ ID NO: 1617307 - DNA, 15 bp, Homo sapiens
ggaactgtgacaggg

SEQ ID NO: 1617308 - DNA, 15 bp, Homo sapiens
cggaactgtgacagg

SEQ ID NO: 1617309 - DNA, 15 bp, Homo sapiens
gcggaactgtgacag

SEQ ID NO: 1617310 - DNA, 15 bp, Homo sapiens
ggcggaactgtgaca

SEQ ID NO: 1617311 - DNA, 15 bp, Homo sapiens
gggcggaactgtgac

SEQ ID NO: 1617312 - DNA, 15 bp, Homo sapiens
agggcggaactgtga

SEQ ID NO: 1617313 - DNA, 15 bp, Homo sapiens
aagggcggaactgtg

SEQ ID NO: 1617314 - DNA, 15 bp, Homo sapiens
taagggcggaactgt

SEQ ID NO: 1617315 - DNA, 15 bp, Homo sapiens
gtaagggcggaactg

SEQ ID NO: 1617316 - DNA, 15 bp, Homo sapiens
agtaagggcggaact

SEQ ID NO: 1617317 - DNA, 15 bp, Homo sapiens
tagtaagggcggaac

SEQ ID NO: 1617318 - DNA, 15 bp, Homo sapiens
gtagtaagggcggaa

SEQ ID NO: 1617319 - DNA, 15 bp, Homo sapiens
agtagtaagggcgga

SEQ ID NO: 1617320 - DNA, 15 bp, Homo sapiens
gagtagtaagggcgg

SEQ ID NO: 1617321 - DNA, 15 bp, Homo sapiens
ggagtagtaagggcg

SEQ ID NO: 1617322 - DNA, 15 bp, Homo sapiens
gggagtagtaagggc

SEQ ID NO: 1617323 - DNA, 15 bp, Homo sapiens
tgggagtagtaaggg

SEQ ID NO: 1617324 - DNA, 15 bp, Homo sapiens
gtgggagtagtaagg

SEQ ID NO: 1617325 - DNA, 15 bp, Homo sapiens
agtgggagtagtaag

SEQ ID NO: 1617326 - DNA, 15 bp, Homo sapiens
aagtgggagtagtaa

SEQ ID NO: 1617327 - DNA, 15 bp, Homo sapiens
gaagtgggagtagta

SEQ ID NO: 1617328 - DNA, 15 bp, Homo sapiens
ggaagtgggagtagt

SEQ ID NO: 1617329 - DNA, 15 bp, Homo sapiens
cggaagtgggagtag

SEQ ID NO: 1617330 - DNA, 15 bp, Homo sapiens
ccggaagtgggagta

SEQ ID NO: 1617331 - DNA, 15 bp, Homo sapiens
gccggaagtgggagt

SEQ ID NO: 1617332 - DNA, 15 bp, Homo sapiens
ggccggaagtgggag

SEQ ID NO: 1617333 - DNA, 15 bp, Homo sapiens
tggccggaagtggga

SEQ ID NO: 1617334 - DNA, 15 bp, Homo sapiens
ctggccggaagtggg

SEQ ID NO: 1617335 - DNA, 15 bp, Homo sapiens
cctggccggaagtgg

SEQ ID NO: 1617336 - DNA, 15 bp, Homo sapiens
ccctggccggaagtg

SEQ ID NO: 1617337 - DNA, 15 bp, Homo sapiens
tccctggccggaagt

SEQ ID NO: 1617338 - DNA, 15 bp, Homo sapiens
ttccctggccggaag

SEQ ID NO: 1617339 - DNA, 15 bp, Homo sapiens
gttccctggccggaa

SEQ ID NO: 1617340 - DNA, 15 bp, Homo sapiens
tgttccctggccgga

SEQ ID NO: 1617341 - DNA, 15 bp, Homo sapiens
ctgttccctggccgg

SEQ ID NO: 1617342 - DNA, 15 bp, Homo sapiens
gctgttccctggccg

SEQ ID NO: 1617343 - DNA, 15 bp, Homo sapiens
ggctgttccctggcc

SEQ ID NO: 1617344 - DNA, 15 bp, Homo sapiens
tggctgttccctggc

SEQ ID NO: 1617345 - DNA, 15 bp, Homo sapiens
gtggctgttccctgg

SEQ ID NO: 1617346 - DNA, 15 bp, Homo sapiens
agtggctgttccctg

SEQ ID NO: 1617347 - DNA, 15 bp, Homo sapiens
aagtggctgttccct

SEQ ID NO: 1617348 - DNA, 15 bp, Homo sapiens
gaagtggctgttccc

SEQ ID NO: 1617349 - DNA, 15 bp, Homo sapiens
ggaagtggctgttcc

SEQ ID NO: 1617350 - DNA, 15 bp, Homo sapiens
tggaagtggctgttc

SEQ ID NO: 1617351 - DNA, 15 bp, Homo sapiens
gtggaagtggctgtt

SEQ ID NO: 1617352 - DNA, 15 bp, Homo sapiens
ggtggaagtggctgt

SEQ ID NO: 1617353 - DNA, 15 bp, Homo sapiens
gggtggaagtggctg

SEQ ID NO: 1617354 - DNA, 15 bp, Homo sapiens
cgggtggaagtggct

SEQ ID NO: 1617355 - DNA, 15 bp, Homo sapiens
ccgggtggaagtggc

SEQ ID NO: 1617356 - DNA, 15 bp, Homo sapiens
tccgggtggaagtgg

SEQ ID NO: 1617357 - DNA, 15 bp, Homo sapiens
ttccgggtggaagtg

SEQ ID NO: 1617358 - DNA, 15 bp, Homo sapiens
tttccgggtggaagt

SEQ ID NO: 1617359 - DNA, 15 bp, Homo sapiens
ttttccgggtggaag

SEQ ID NO: 1617360 - DNA, 15 bp, Homo sapiens
cttttccgggtggaa

SEQ ID NO: 1617361 - DNA, 15 bp, Homo sapiens
ccttttccgggtgga

SEQ ID NO: 1617362 - DNA, 15 bp, Homo sapiens
cccttttccgggtgg

SEQ ID NO: 1617363 - DNA, 15 bp, Homo sapiens
ccccttttccgggtg

SEQ ID NO: 1617364 - DNA, 15 bp, Homo sapiens
accccttttccgggt

SEQ ID NO: 1617365 - DNA, 15 bp, Homo sapiens
aaccccttttccggg

SEQ ID NO: 1617366 - DNA, 15 bp, Homo sapiens
caaccccttttccgg

SEQ ID NO: 1617367 - DNA, 15 bp, Homo sapiens
acaaccccttttccg

SEQ ID NO: 1617368 - DNA, 15 bp, Homo sapiens
aacaaccccttttcc

SEQ ID NO: 1617369 - DNA, 15 bp, Homo sapiens
gaacaaccccttttc

SEQ ID NO: 1617370 - DNA, 15 bp, Homo sapiens
ggaacaacccctttt

SEQ ID NO: 1617371 - DNA, 15 bp, Homo sapiens
cggaacaaccccttt

SEQ ID NO: 1617372 - DNA, 15 bp, Homo sapiens
gcggaacaacccctt

SEQ ID NO: 1617373 - DNA, 15 bp, Homo sapiens
ggcggaacaacccct

SEQ ID NO: 1617374 - DNA, 15 bp, Homo sapiens
cggcggaacaacccc

SEQ ID NO: 1617375 - DNA, 15 bp, Homo sapiens
acggcggaacaaccc

SEQ ID NO: 1617376 - DNA, 15 bp, Homo sapiens
cacggcggaacaacc

SEQ ID NO: 1617377 - DNA, 15 bp, Homo sapiens
ccacggcggaacaac

SEQ ID NO: 1617378 - DNA, 15 bp, Homo sapiens
cccacggcggaacaa

SEQ ID NO: 1617379 - DNA, 15 bp, Homo sapiens
ccccacggcggaaca

SEQ ID NO: 1617380 - DNA, 15 bp, Homo sapiens
gccccacggcggaac

SEQ ID NO: 1617381 - DNA, 15 bp, Homo sapiens
cgccccacggcggaa

SEQ ID NO: 1617382 - DNA, 15 bp, Homo sapiens
gcgccccacggcgga

SEQ ID NO: 1617383 - DNA, 15 bp, Homo sapiens
ggcgccccacggcgg

SEQ ID NO: 1617384 - DNA, 15 bp, Homo sapiens
tggcgccccacggcg

SEQ ID NO: 1617385 - DNA, 15 bp, Homo sapiens
ctggcgccccacggc

SEQ ID NO: 1617386 - DNA, 15 bp, Homo sapiens
gctggcgccccacgg

SEQ ID NO: 1617387 - DNA, 15 bp, Homo sapiens
agctggcgccccacg

SEQ ID NO: 1617388 - DNA, 15 bp, Homo sapiens
cagctggcgccccac

SEQ ID NO: 1617389 - DNA, 15 bp, Homo sapiens
acagctggcgcccca

SEQ ID NO: 1617390 - DNA, 15 bp, Homo sapiens
cacagctggcgcccc

SEQ ID NO: 1617391 - DNA, 15 bp, Homo sapiens
ccacagctggcgccc

SEQ ID NO: 1617392 - DNA, 15 bp, Homo sapiens
gccacagctggcgcc

SEQ ID NO: 1617393 - DNA, 15 bp, Homo sapiens
ggccacagctggcgc

SEQ ID NO: 1617394 - DNA, 15 bp, Homo sapiens
gggccacagctggcg

SEQ ID NO: 1617395 - DNA, 15 bp, Homo sapiens
tgggccacagctggc

SEQ ID NO: 1617396 - DNA, 15 bp, Homo sapiens
gtgggccacagctgg

SEQ ID NO: 1617397 - DNA, 15 bp, Homo sapiens
ggtgggccacagctg

SEQ ID NO: 1617398 - DNA, 15 bp, Homo sapiens
gggtgggccacagct

SEQ ID NO: 1617399 - DNA, 15 bp, Homo sapiens
tgggtgggccacagc

SEQ ID NO: 1617400 - DNA, 15 bp, Homo sapiens
atgggtgggccacag

SEQ ID NO: 1617401 - DNA, 15 bp, Homo sapiens
gatgggtgggccaca

SEQ ID NO: 1617402 - DNA, 15 bp, Homo sapiens
ggatgggtgggccac

SEQ ID NO: 1617403 - DNA, 15 bp, Homo sapiens
aggatgggtgggcca

SEQ ID NO: 1617404 - DNA, 15 bp, Homo sapiens
caggatgggtgggcc

SEQ ID NO: 1617405 - DNA, 15 bp, Homo sapiens
gcaggatgggtgggc

SEQ ID NO: 1617406 - DNA, 15 bp, Homo sapiens
ggcaggatgggtggg

SEQ ID NO: 1617407 - DNA, 15 bp, Homo sapiens
gggcaggatgggtgg

SEQ ID NO: 1617408 - DNA, 15 bp, Homo sapiens
ggggcaggatgggtg

SEQ ID NO: 1617409 - DNA, 15 bp, Homo sapiens
cggggcaggatgggt

SEQ ID NO: 1617410 - DNA, 15 bp, Homo sapiens
acggggcaggatggg

SEQ ID NO: 1617411 - DNA, 15 bp, Homo sapiens
tacggggcaggatgg

SEQ ID NO: 1617412 - DNA, 15 bp, Homo sapiens
gtacggggcaggatg

SEQ ID NO: 1617413 - DNA, 15 bp, Homo sapiens
agtacggggcaggat

SEQ ID NO: 1617414 - DNA, 15 bp, Homo sapiens
aagtacggggcagga

SEQ ID NO: 1617415 - DNA, 15 bp, Homo sapiens
aaagtacggggcagg

SEQ ID NO: 1617416 - DNA, 15 bp, Homo sapiens
gaaagtacggggcag

SEQ ID NO: 1617417 - DNA, 15 bp, Homo sapiens
cgaaagtacggggca

SEQ ID NO: 1617418 - DNA, 15 bp, Homo sapiens
gcgaaagtacggggc

SEQ ID NO: 1617419 - DNA, 15 bp, Homo sapiens
ggcgaaagtacgggg

SEQ ID NO: 1617420 - DNA, 15 bp, Homo sapiens
tggcgaaagtacggg

SEQ ID NO: 1617421 - DNA, 15 bp, Homo sapiens
atggcgaaagtacgg

SEQ ID NO: 1617422 - DNA, 15 bp, Homo sapiens
gatggcgaaagtacg

SEQ ID NO: 1617423 - DNA, 15 bp, Homo sapiens
tgatggcgaaagtac

SEQ ID NO: 1617424 - DNA, 15 bp, Homo sapiens
atgatggcgaaagta

SEQ ID NO: 1617425 - DNA, 15 bp, Homo sapiens
tatgatggcgaaagt

SEQ ID NO: 1617426 - DNA, 15 bp, Homo sapiens
ctatgatggcgaaag

SEQ ID NO: 1617427 - DNA, 15 bp, Homo sapiens
actatgatggcgaaa

SEQ ID NO: 1617428 - DNA, 15 bp, Homo sapiens
tactatgatggcgaa

SEQ ID NO: 1617429 - DNA, 15 bp, Homo sapiens
atactatgatggcga

SEQ ID NO: 1617430 - DNA, 15 bp, Homo sapiens
aatactatgatggcg

SEQ ID NO: 1617431 - DNA, 15 bp, Homo sapiens
gaatactatgatggc

SEQ ID NO: 1617432 - DNA, 15 bp, Homo sapiens
agaatactatgatgg

SEQ ID NO: 1617433 - DNA, 15 bp, Homo sapiens
gagaatactatgatg

SEQ ID NO: 1617434 - DNA, 15 bp, Homo sapiens
ggagaatactatgat

SEQ ID NO: 1617435 - DNA, 15 bp, Homo sapiens
tggagaatactatga

SEQ ID NO: 1617436 - DNA, 15 bp, Homo sapiens
gtggagaatactatg

SEQ ID NO: 1617437 - DNA, 15 bp, Homo sapiens
ggtggagaatactat

SEQ ID NO: 1617438 - DNA, 15 bp, Homo sapiens
tggtggagaatacta

SEQ ID NO: 1617439 - DNA, 15 bp, Homo sapiens
gtggtggagaatact

SEQ ID NO: 1617440 - DNA, 15 bp, Homo sapiens
agtggtggagaatac

SEQ ID NO: 1617441 - DNA, 15 bp, Homo sapiens
cagtggtggagaata

SEQ ID NO: 1617442 - DNA, 15 bp, Homo sapiens
acagtggtggagaat

SEQ ID NO: 1617443 - DNA, 15 bp, Homo sapiens
aacagtggtggagaa

SEQ ID NO: 1617444 - DNA, 15 bp, Homo sapiens
gaacagtggtggaga

SEQ ID NO: 1617445 - DNA, 15 bp, Homo sapiens
ggaacagtggtggag

SEQ ID NO: 1617446 - DNA, 15 bp, Homo sapiens
aggaacagtggtgga

SEQ ID NO: 1617447 - DNA, 15 bp, Homo sapiens
aaggaacagtggtgg

SEQ ID NO: 1617448 - DNA, 15 bp, Homo sapiens
gaaggaacagtggtg

SEQ ID NO: 1617449 - DNA, 15 bp, Homo sapiens
ggaaggaacagtggt

SEQ ID NO: 1617450 - DNA, 15 bp, Homo sapiens
tggaaggaacagtgg

SEQ ID NO: 1617451 - DNA, 15 bp, Homo sapiens
ctggaaggaacagtg

SEQ ID NO: 1617452 - DNA, 15 bp, Homo sapiens
gctggaaggaacagt

SEQ ID NO: 1617453 - DNA, 15 bp, Homo sapiens
ggctggaaggaacag

SEQ ID NO: 1617454 - DNA, 15 bp, Homo sapiens
tggctggaaggaaca

SEQ ID NO: 1617455 - DNA, 15 bp, Homo sapiens
gtggctggaaggaac

SEQ ID NO: 1617456 - DNA, 15 bp, Homo sapiens
cgtggctggaaggaa

SEQ ID NO: 1617457 - DNA, 15 bp, Homo sapiens
tcgtggctggaagga

SEQ ID NO: 1617458 - DNA, 15 bp, Homo sapiens
ttcgtggctggaagg

SEQ ID NO: 1617459 - DNA, 15 bp, Homo sapiens
gttcgtggctggaag

SEQ ID NO: 1617460 - DNA, 15 bp, Homo sapiens
cgttcgtggctggaa

SEQ ID NO: 1617461 - DNA, 15 bp, Homo sapiens
tcgttcgtggctgga

SEQ ID NO: 1617462 - DNA, 15 bp, Homo sapiens
gtcgttcgtggctgg

SEQ ID NO: 1617463 - DNA, 15 bp, Homo sapiens
cgtcgttcgtggctg

SEQ ID NO: 1617464 - DNA, 15 bp, Homo sapiens
gcgtcgttcgtggct

SEQ ID NO: 1617465 - DNA, 15 bp, Homo sapiens
tgcgtcgttcgtggc

SEQ ID NO: 1617466 - DNA, 15 bp, Homo sapiens
ttgcgtcgttcgtgg

SEQ ID NO: 1617467 - DNA, 15 bp, Homo sapiens
tttgcgtcgttcgtg

SEQ ID NO: 1617468 - DNA, 15 bp, Homo sapiens
gtttgcgtcgttcgt

SEQ ID NO: 1617469 - DNA, 15 bp, Homo sapiens
cgtttgcgtcgttcg

SEQ ID NO: 1617470 - DNA, 15 bp, Homo sapiens
tcgtttgcgtcgttc

SEQ ID NO: 1617471 - DNA, 15 bp, Homo sapiens
ttcgtttgcgtcgtt

SEQ ID NO: 1617472 - DNA, 15 bp, Homo sapiens
cttcgtttgcgtcgt

SEQ ID NO: 1617473 - DNA, 15 bp, Homo sapiens
gcttcgtttgcgtcg

SEQ ID NO: 1617474 - DNA, 15 bp, Homo sapiens
ggcttcgtttgcgtc

SEQ ID NO: 1617475 - DNA, 15 bp, Homo sapiens
tggcttcgtttgcgt

SEQ ID NO: 1617476 - DNA, 15 bp, Homo sapiens
ttggcttcgtttgcg

SEQ ID NO: 1617477 - DNA, 15 bp, Homo sapiens
cttggcttcgtttgc

SEQ ID NO: 1617478 - DNA, 15 bp, Homo sapiens
acttggcttcgtttg

SEQ ID NO: 1617479 - DNA, 15 bp, Homo sapiens
aacttggcttcgttt

SEQ ID NO: 1617480 - DNA, 15 bp, Homo sapiens
gaacttggcttcgtt

SEQ ID NO: 1617481 - DNA, 15 bp, Homo sapiens
ggaacttggcttcgt

SEQ ID NO: 1617482 - DNA, 15 bp, Homo sapiens
gggaacttggcttcg

SEQ ID NO: 1617483 - DNA, 15 bp, Homo sapiens
ggggaacttggcttc

SEQ ID NO: 1617484 - DNA, 15 bp, Homo sapiens
gggggaacttggctt

SEQ ID NO: 1617485 - DNA, 15 bp, Homo sapiens
tgggggaacttggct

SEQ ID NO: 1617486 - DNA, 15 bp, Homo sapiens
ctgggggaacttggc

SEQ ID NO: 1617487 - DNA, 15 bp, Homo sapiens
gctgggggaacttgg

SEQ ID NO: 1617488 - DNA, 15 bp, Homo sapiens
agctgggggaacttg

SEQ ID NO: 1617489 - DNA, 15 bp, Homo sapiens
gagctgggggaactt

SEQ ID NO: 1617490 - DNA, 15 bp, Homo sapiens
ggagctgggggaact

SEQ ID NO: 1617491 - DNA, 15 bp, Homo sapiens
cggagctgggggaac

SEQ ID NO: 1617492 - DNA, 15 bp, Homo sapiens
tcggagctgggggaa

SEQ ID NO: 1617493 - DNA, 15 bp, Homo sapiens
ttcggagctggggga

SEQ ID NO: 1617494 - DNA, 15 bp, Homo sapiens
gttcggagctggggg

SEQ ID NO: 1617495 - DNA, 15 bp, Homo sapiens
tgttcggagctgggg

SEQ ID NO: 1617496 - DNA, 15 bp, Homo sapiens
ctgttcggagctggg

SEQ ID NO: 1617497 - DNA, 15 bp, Homo sapiens
cctgttcggagctgg

SEQ ID NO: 1617498 - DNA, 15 bp, Homo sapiens
tcctgttcggagctg

SEQ ID NO: 1617499 - DNA, 15 bp, Homo sapiens
ctcctgttcggagct

SEQ ID NO: 1617500 - DNA, 15 bp, Homo sapiens
gctcctgttcggagc

SEQ ID NO: 1617501 - DNA, 15 bp, Homo sapiens
agctcctgttcggag

SEQ ID NO: 1617502 - DNA, 15 bp, Homo sapiens
gagctcctgttcgga

SEQ ID NO: 1617503 - DNA, 15 bp, Homo sapiens
agagctcctgttcgg

SEQ ID NO: 1617504 - DNA, 15 bp, Homo sapiens
gagagctcctgttcg

SEQ ID NO: 1617505 - DNA, 15 bp, Homo sapiens
agagagctcctgttc

SEQ ID NO: 1617506 - DNA, 15 bp, Homo sapiens
tagagagctcctgtt

SEQ ID NO: 1617507 - DNA, 15 bp, Homo sapiens
atagagagctcctgt

SEQ ID NO: 1617508 - DNA, 15 bp, Homo sapiens
gatagagagctcctg

SEQ ID NO: 1617509 - DNA, 15 bp, Homo sapiens
gaggatagagagctc

SEQ ID NO: 1617510 - DNA, 15 bp, Homo sapiens
agaggatagagagct

SEQ ID NO: 1617511 - DNA, 15 bp, Homo sapiens
gagaggatagagagc

SEQ ID NO: 1617512 - DNA, 15 bp, Homo sapiens
agagaggatagagag

SEQ ID NO: 1617513 - DNA, 15 bp, Homo sapiens
gagagaggatagaga

SEQ ID NO: 1617514 - DNA, 15 bp, Homo sapiens
agagagaggatagag

SEQ ID NO: 1617515 - DNA, 15 bp, Homo sapiens
tagagagaggataga

SEQ ID NO: 1617516 - DNA, 15 bp, Homo sapiens
atagagagaggatag

SEQ ID NO: 1617517 - DNA, 15 bp, Homo sapiens
aatagagagaggata

SEQ ID NO: 1617518 - DNA, 15 bp, Homo sapiens
taatagagagaggat

SEQ ID NO: 1617519 - DNA, 15 bp, Homo sapiens
gtaatagagagagga

SEQ ID NO: 1617520 - DNA, 15 bp, Homo sapiens
tgtaatagagagagg

SEQ ID NO: 1617521 - DNA, 15 bp, Homo sapiens
gtgtaatagagagag

SEQ ID NO: 1617522 - DNA, 15 bp, Homo sapiens
agtgtaatagagaga

SEQ ID NO: 1617523 - DNA, 15 bp, Homo sapiens
gagtgtaatagagag

SEQ ID NO: 1617524 - DNA, 15 bp, Homo sapiens
ggagtgtaatagaga

SEQ ID NO: 1617525 - DNA, 15 bp, Homo sapiens
cggagtgtaatagag

SEQ ID NO: 1617526 - DNA, 15 bp, Homo sapiens
ccggagtgtaataga

SEQ ID NO: 1617527 - DNA, 15 bp, Homo sapiens
cccggagtgtaatag

SEQ ID NO: 1617528 - DNA, 15 bp, Homo sapiens
tcccggagtgtaata

SEQ ID NO: 1617529 - DNA, 15 bp, Homo sapiens
ctcccggagtgtaat

SEQ ID NO: 1617530 - DNA, 15 bp, Homo sapiens
tctcccggagtgtaa

SEQ ID NO: 1617531 - DNA, 15 bp, Homo sapiens
ttctcccggagtgta

SEQ ID NO: 1617532 - DNA, 15 bp, Homo sapiens
cttctcccggagtgt

SEQ ID NO: 1617533 - DNA, 15 bp, Homo sapiens
ccttctcccggagtg

SEQ ID NO: 1617534 - DNA, 15 bp, Homo sapiens
tccttctcccggagt

SEQ ID NO: 1617535 - DNA, 15 bp, Homo sapiens
ttccttctcccggag

SEQ ID NO: 1617536 - DNA, 15 bp, Homo sapiens
tttccttctcccgga

SEQ ID NO: 1617537 - DNA, 15 bp, Homo sapiens
gtttccttctcccgg

SEQ ID NO: 1617538 - DNA, 15 bp, Homo sapiens
cgtttccttctcccg

SEQ ID NO: 1617539 - DNA, 15 bp, Homo sapiens
gcgtttccttctccc

SEQ ID NO: 1617540 - DNA, 15 bp, Homo sapiens
cgcgtttccttctcc

SEQ ID NO: 1617541 - DNA, 15 bp, Homo sapiens
ccgcgtttccttctc

SEQ ID NO: 1617542 - DNA, 15 bp, Homo sapiens
cccgcgtttccttct

SEQ ID NO: 1617543 - DNA, 15 bp, Homo sapiens
tcccgcgtttccttc

SEQ ID NO: 1617544 - DNA, 15 bp, Homo sapiens
ctcccgcgtttcctt

SEQ ID NO: 1617545 - DNA, 15 bp, Homo sapiens
cctcccgcgtttcct

SEQ ID NO: 1617546 - DNA, 15 bp, Homo sapiens
tcctcccgcgtttcc

SEQ ID NO: 1617547 - DNA, 15 bp, Homo sapiens
ttcctcccgcgtttc

SEQ ID NO: 1617548 - DNA, 15 bp, Homo sapiens
tttcctcccgcgttt

SEQ ID NO: 1617549 - DNA, 15 bp, Homo sapiens
gtttcctcccgcgtt

SEQ ID NO: 1617550 - DNA, 15 bp, Homo sapiens
ggtttcctcccgcgt

SEQ ID NO: 1617551 - DNA, 15 bp, Homo sapiens
gggtttcctcccgcg

SEQ ID NO: 1617552 - DNA, 15 bp, Homo sapiens
tgggtttcctcccgc

SEQ ID NO: 1617553 - DNA, 15 bp, Homo sapiens
ctgggtttcctcccg

SEQ ID NO: 1617554 - DNA, 15 bp, Homo sapiens
cctgggtttcctccc

SEQ ID NO: 1617555 - DNA, 15 bp, Homo sapiens
gcctgggtttcctcc

SEQ ID NO: 1617556 - DNA, 15 bp, Homo sapiens
ggcctgggtttcctc

SEQ ID NO: 1617557 - DNA, 15 bp, Homo sapiens
aggcctgggtttcct

SEQ ID NO: 1617558 - DNA, 15 bp, Homo sapiens
gaggcctgggtttcc

SEQ ID NO: 1617559 - DNA, 15 bp, Homo sapiens
ggaggcctgggtttc

SEQ ID NO: 1617560 - DNA, 15 bp, Homo sapiens
tggaggcctgggttt

SEQ ID NO: 1617561 - DNA, 15 bp, Homo sapiens
cgtggaggcctgggt

SEQ ID NO: 1617562 - DNA, 15 bp, Homo sapiens
gcgtggaggcctggg

SEQ ID NO: 1617563 - DNA, 15 bp, Homo sapiens
cgcgtggaggcctgg

SEQ ID NO: 1617564 - DNA, 15 bp, Homo sapiens
gcgcgtggaggcctg

SEQ ID NO: 1617565 - DNA, 15 bp, Homo sapiens
cgcgcgtggaggcct

SEQ ID NO: 1617566 - DNA, 15 bp, Homo sapiens
tcgcgcgtggaggcc

SEQ ID NO: 1617567 - DNA, 15 bp, Homo sapiens
gtcgcgcgtggaggc

SEQ ID NO: 1617568 - DNA, 15 bp, Homo sapiens
ggtcgcgcgtggagg

SEQ ID NO: 1617569 - DNA, 15 bp, Homo sapiens
gggtcgcgcgtggag

SEQ ID NO: 1617570 - DNA, 15 bp, Homo sapiens
ggggtcgcgcgtgga

SEQ ID NO: 1617571 - DNA, 15 bp, Homo sapiens
aggggtcgcgcgtgg

SEQ ID NO: 1617572 - DNA, 15 bp, Homo sapiens
aaggggtcgcgcgtg

SEQ ID NO: 1617573 - DNA, 15 bp, Homo sapiens
caaggggtcgcgcgt

SEQ ID NO: 1617574 - DNA, 15 bp, Homo sapiens
ccaaggggtcgcgcg

SEQ ID NO: 1617575 - DNA, 15 bp, Homo sapiens
gccaaggggtcgcgc

SEQ ID NO: 1617576 - DNA, 15 bp, Homo sapiens
ggccaaggggtcgcg

SEQ ID NO: 1617577 - DNA, 15 bp, Homo sapiens
gggccaaggggtcgc

SEQ ID NO: 1617578 - DNA, 15 bp, Homo sapiens
agggccaaggggtcg

SEQ ID NO: 1617579 - DNA, 15 bp, Homo sapiens
gagggccaaggggtc

SEQ ID NO: 1617580 - DNA, 15 bp, Homo sapiens
ggagggccaaggggt

SEQ ID NO: 1617581 - DNA, 15 bp, Homo sapiens
gggagggccaagggg

SEQ ID NO: 1617582 - DNA, 15 bp, Homo sapiens
ggggagggccaaggg

SEQ ID NO: 1617583 - DNA, 15 bp, Homo sapiens
aggggagggccaagg

SEQ ID NO: 1617584 - DNA, 15 bp, Homo sapiens
aaggggagggccaag

SEQ ID NO: 1617585 - DNA, 15 bp, Homo sapiens
aaaggggagggccaa

SEQ ID NO: 1617586 - DNA, 15 bp, Homo sapiens
taaaggggagggcca

SEQ ID NO: 1617587 - DNA, 15 bp, Homo sapiens
gtaaaggggagggcc

SEQ ID NO: 1617588 - DNA, 15 bp, Homo sapiens
ggtaaaggggagggc

SEQ ID NO: 1617589 - DNA, 15 bp, Homo sapiens
aggtaaaggggaggg

SEQ ID NO: 1617590 - DNA, 15 bp, Homo sapiens
gaggtaaaggggagg

SEQ ID NO: 1617591 - DNA, 15 bp, Homo sapiens
agaggtaaaggggag

SEQ ID NO: 1617592 - DNA, 15 bp, Homo sapiens
gagaggtaaagggga

SEQ ID NO: 1617593 - DNA, 15 bp, Homo sapiens
ggagaggtaaagggg

SEQ ID NO: 1617594 - DNA, 15 bp, Homo sapiens
tggagaggtaaaggg

SEQ ID NO: 1617595 - DNA, 15 bp, Homo sapiens
gtggagaggtaaagg

SEQ ID NO: 1617596 - DNA, 15 bp, Homo sapiens
ggtggagaggtaaag

SEQ ID NO: 1617597 - DNA, 15 bp, Homo sapiens
gggtggagaggtaaa

SEQ ID NO: 1617598 - DNA, 15 bp, Homo sapiens
ggggtggagaggtaa

SEQ ID NO: 1617599 - DNA, 15 bp, Homo sapiens
aggggtggagaggta

SEQ ID NO: 1617600 - DNA, 15 bp, Homo sapiens
gaggggtggagaggt

SEQ ID NO: 1617601 - DNA, 15 bp, Homo sapiens
tgaggggtggagagg

SEQ ID NO: 1617602 - DNA, 15 bp, Homo sapiens
gtgaggggtggagag

SEQ ID NO: 1617603 - DNA, 15 bp, Homo sapiens
agtgaggggtggaga

SEQ ID NO: 1617604 - DNA, 15 bp, Homo sapiens
tagtgaggggtggag

SEQ ID NO: 1617605 - DNA, 15 bp, Homo sapiens
ctagtgaggggtgga

SEQ ID NO: 1617606 - DNA, 15 bp, Homo sapiens
tctagtgaggggtgg

SEQ ID NO: 1617607 - DNA, 15 bp, Homo sapiens
gtctagtgaggggtg

SEQ ID NO: 1617608 - DNA, 15 bp, Homo sapiens
tgtctagtgaggggt

SEQ ID NO: 1617609 - DNA, 15 bp, Homo sapiens
gtgtctagtgagggg

SEQ ID NO: 1617610 - DNA, 15 bp, Homo sapiens
ggtgtctagtgaggg

SEQ ID NO: 1617611 - DNA, 15 bp, Homo sapiens
gggtgtctagtgagg

SEQ ID NO: 1617612 - DNA, 15 bp, Homo sapiens
agggtgtctagtgag

SEQ ID NO: 1617613 - DNA, 15 bp, Homo sapiens
ggagggtgtctagtg

SEQ ID NO: 1617614 - DNA, 15 bp, Homo sapiens
gggagggtgtctagt

SEQ ID NO: 1617615 - DNA, 15 bp, Homo sapiens
ggggagggtgtctag

SEQ ID NO: 1617616 - DNA, 15 bp, Homo sapiens
aggggagggtgtcta

SEQ ID NO: 1617617 - DNA, 15 bp, Homo sapiens
gaggggagggtgtct

SEQ ID NO: 1617618 - DNA, 15 bp, Homo sapiens
agaggggagggtgtc

SEQ ID NO: 1617619 - DNA, 15 bp, Homo sapiens
tagaggggagggtgt

SEQ ID NO: 1617620 - DNA, 15 bp, Homo sapiens
ctagaggggagggtg

SEQ ID NO: 1617621 - DNA, 15 bp, Homo sapiens
cctagaggggagggt

SEQ ID NO: 1617622 - DNA, 15 bp, Homo sapiens
gcctagaggggaggg

SEQ ID NO: 1617623 - DNA, 15 bp, Homo sapiens
cgcctagaggggagg

SEQ ID NO: 1617624 - DNA, 15 bp, Homo sapiens
ccgcctagaggggag

SEQ ID NO: 1617625 - DNA, 15 bp, Homo sapiens
cccgcctagagggga

SEQ ID NO: 1617626 - DNA, 15 bp, Homo sapiens
ccccgcctagagggg

SEQ ID NO: 1617627 - DNA, 15 bp, Homo sapiens
tccccgcctagaggg

SEQ ID NO: 1617628 - DNA, 15 bp, Homo sapiens
gtccccgcctagagg

SEQ ID NO: 1617629 - DNA, 15 bp, Homo sapiens
cgtccccgcctagag

SEQ ID NO: 1617630 - DNA, 15 bp, Homo sapiens
tcgtccccgcctaga

SEQ ID NO: 1617631 - DNA, 15 bp, Homo sapiens
ttcgtccccgcctag

SEQ ID NO: 1617632 - DNA, 15 bp, Homo sapiens
gttcgtccccgccta

SEQ ID NO: 1617633 - DNA, 15 bp, Homo sapiens
agttcgtccccgcct

SEQ ID NO: 1617634 - DNA, 15 bp, Homo sapiens
aagttcgtccccgcc

SEQ ID NO: 1617635 - DNA, 15 bp, Homo sapiens
aaagttcgtccccgc

SEQ ID NO: 1617636 - DNA, 15 bp, Homo sapiens
gaaagttcgtccccg

SEQ ID NO: 1617637 - DNA, 15 bp, Homo sapiens
cgaaagttcgtcccc

SEQ ID NO: 1617638 - DNA, 15 bp, Homo sapiens
gcgaaagttcgtccc

SEQ ID NO: 1617639 - DNA, 15 bp, Homo sapiens
ggcgaaagttcgtcc

SEQ ID NO: 1617640 - DNA, 15 bp, Homo sapiens
gggcgaaagttcgtc

SEQ ID NO: 1617641 - DNA, 15 bp, Homo sapiens
agggcgaaagttcgt

SEQ ID NO: 1617642 - DNA, 15 bp, Homo sapiens
cagggcgaaagttcg

SEQ ID NO: 1617643 - DNA, 15 bp, Homo sapiens
tcagggcgaaagttc

SEQ ID NO: 1617644 - DNA, 15 bp, Homo sapiens
ctcagggcgaaagtt

SEQ ID NO: 1617645 - DNA, 15 bp, Homo sapiens
tctcagggcgaaagt

SEQ ID NO: 1617646 - DNA, 15 bp, Homo sapiens
ctctcagggcgaaag

SEQ ID NO: 1617647 - DNA, 15 bp, Homo sapiens
tctctcagggcgaaa

SEQ ID NO: 1617648 - DNA, 15 bp, Homo sapiens
ctctctcagggcgaa

SEQ ID NO: 1617649 - DNA, 15 bp, Homo sapiens
cctctctcagggcga

SEQ ID NO: 1617650 - DNA, 15 bp, Homo sapiens
gcctctctcagggcg

SEQ ID NO: 1617651 - DNA, 15 bp, Homo sapiens
cgcctctctcagggc

SEQ ID NO: 1617652 - DNA, 15 bp, Homo sapiens
ccgcctctctcaggg

SEQ ID NO: 1617653 - DNA, 15 bp, Homo sapiens
tccgcctctctcagg

SEQ ID NO: 1617654 - DNA, 15 bp, Homo sapiens
ctccgcctctctcag

SEQ ID NO: 1617655 - DNA, 15 bp, Homo sapiens
gctccgcctctctca

SEQ ID NO: 1617656 - DNA, 15 bp, Homo sapiens
ggctccgcctctctc

SEQ ID NO: 1617657 - DNA, 15 bp, Homo sapiens
aggctccgcctctct

SEQ ID NO: 1617658 - DNA, 15 bp, Homo sapiens
gaggctccgcctctc

SEQ ID NO: 1617659 - DNA, 15 bp, Homo sapiens
tgaggctccgcctct

SEQ ID NO: 1617660 - DNA, 15 bp, Homo sapiens
ctgaggctccgcctc

SEQ ID NO: 1617661 - DNA, 15 bp, Homo sapiens
gctgaggctccgcct

SEQ ID NO: 1617662 - DNA, 15 bp, Homo sapiens
cgctgaggctccgcc

SEQ ID NO: 1617663 - DNA, 15 bp, Homo sapiens
acgctgaggctccgc

SEQ ID NO: 1617664 - DNA, 15 bp, Homo sapiens
gacgctgaggctccg

SEQ ID NO: 1617665 - DNA, 15 bp, Homo sapiens
agacgctgaggctcc

SEQ ID NO: 1617666 - DNA, 15 bp, Homo sapiens
tagacgctgaggctc

SEQ ID NO: 1617667 - DNA, 15 bp, Homo sapiens
gtagacgctgaggct

SEQ ID NO: 1617668 - DNA, 15 bp, Homo sapiens
ggtagacgctgaggc

SEQ ID NO: 1617669 - DNA, 15 bp, Homo sapiens
gggtagacgctgagg

SEQ ID NO: 1617670 - DNA, 15 bp, Homo sapiens
agggtagacgctgag

SEQ ID NO: 1617671 - DNA, 15 bp, Homo sapiens
gagggtagacgctga

SEQ ID NO: 1617672 - DNA, 15 bp, Homo sapiens
cgagggtagacgctg

SEQ ID NO: 1617673 - DNA, 15 bp, Homo sapiens
gcgagggtagacgct

SEQ ID NO: 1617674 - DNA, 15 bp, Homo sapiens
agcgagggtagacgc

SEQ ID NO: 1617675 - DNA, 15 bp, Homo sapiens
gagcgagggtagacg

SEQ ID NO: 1617676 - DNA, 15 bp, Homo sapiens
agagcgagggtagac

SEQ ID NO: 1617677 - DNA, 15 bp, Homo sapiens
gagagcgagggtaga

SEQ ID NO: 1617678 - DNA, 15 bp, Homo sapiens
cgagagcgagggtag

SEQ ID NO: 1617679 - DNA, 15 bp, Homo sapiens
gcgagagcgagggta

SEQ ID NO: 1617680 - DNA, 15 bp, Homo sapiens
cgcgagagcgagggt

SEQ ID NO: 1617681 - DNA, 15 bp, Homo sapiens
tcgcgagagcgaggg

SEQ ID NO: 1617682 - DNA, 15 bp, Homo sapiens
ctcgcgagagcgagg

SEQ ID NO: 1617683 - DNA, 15 bp, Homo sapiens
gctcgcgagagcgag

SEQ ID NO: 1617684 - DNA, 15 bp, Homo sapiens
agctcgcgagagcga

SEQ ID NO: 1617685 - DNA, 15 bp, Homo sapiens
aagctcgcgagagcg

SEQ ID NO: 1617686 - DNA, 15 bp, Homo sapiens
aaagctcgcgagagc

SEQ ID NO: 1617687 - DNA, 15 bp, Homo sapiens
gaaagctcgcgagag

SEQ ID NO: 1617688 - DNA, 15 bp, Homo sapiens
cgaaagctcgcgaga

SEQ ID NO: 1617689 - DNA, 15 bp, Homo sapiens
ccgaaagctcgcgag

SEQ ID NO: 1617690 - DNA, 15 bp, Homo sapiens
tccgaaagctcgcga

SEQ ID NO: 1617691 - DNA, 15 bp, Homo sapiens
ttccgaaagctcgcg

SEQ ID NO: 1617692 - DNA, 15 bp, Homo sapiens
gttccgaaagctcgc

SEQ ID NO: 1617693 - DNA, 15 bp, Homo sapiens
agttccgaaagctcg

SEQ ID NO: 1617694 - DNA, 15 bp, Homo sapiens
gagttccgaaagctc

SEQ ID NO: 1617695 - DNA, 15 bp, Homo sapiens
agagttccgaaagct

SEQ ID NO: 1617696 - DNA, 15 bp, Homo sapiens
gagagttccgaaagc

SEQ ID NO: 1617697 - DNA, 15 bp, Homo sapiens
cgagagttccgaaag

SEQ ID NO: 1617698 - DNA, 15 bp, Homo sapiens
gcgagagttccgaaa

SEQ ID NO: 1617699 - DNA, 15 bp, Homo sapiens
cgcgagagttccgaa

SEQ ID NO: 1617700 - DNA, 15 bp, Homo sapiens
tcgcgagagttccga

SEQ ID NO: 1617701 - DNA, 15 bp, Homo sapiens
ctcgcgagagttccg

SEQ ID NO: 1617702 - DNA, 15 bp, Homo sapiens
tctcgcgagagttcc

SEQ ID NO: 1617703 - DNA, 15 bp, Homo sapiens
gtctcgcgagagttc

SEQ ID NO: 1617704 - DNA, 15 bp, Homo sapiens
ggtctcgcgagagtt

SEQ ID NO: 1617705 - DNA, 15 bp, Homo sapiens
gggtctcgcgagagt

SEQ ID NO: 1617706 - DNA, 15 bp, Homo sapiens
agggtctcgcgagag

SEQ ID NO: 1617707 - DNA, 15 bp, Homo sapiens
tagggtctcgcgaga

SEQ ID NO: 1617708 - DNA, 15 bp, Homo sapiens
gtagggtctcgcgag

SEQ ID NO: 1617709 - DNA, 15 bp, Homo sapiens
cgtagggtctcgcga

SEQ ID NO: 1617710 - DNA, 15 bp, Homo sapiens
gcgtagggtctcgcg

SEQ ID NO: 1617711 - DNA, 15 bp, Homo sapiens
ggcgtagggtctcgc

SEQ ID NO: 1617712 - DNA, 15 bp, Homo sapiens
gggcgtagggtctcg

SEQ ID NO: 1617713 - DNA, 15 bp, Homo sapiens
cgggcgtagggtctc

SEQ ID NO: 1617714 - DNA, 15 bp, Homo sapiens
tcgggcgtagggtct

SEQ ID NO: 1617715 - DNA, 15 bp, Homo sapiens
gtcgggcgtagggtc

SEQ ID NO: 1617716 - DNA, 15 bp, Homo sapiens
agtcgggcgtagggt

SEQ ID NO: 1617717 - DNA, 15 bp, Homo sapiens
aagtcgggcgtaggg

SEQ ID NO: 1617718 - DNA, 15 bp, Homo sapiens
caagtcgggcgtagg

SEQ ID NO: 1617719 - DNA, 15 bp, Homo sapiens
acaagtcgggcgtag

SEQ ID NO: 1617720 - DNA, 15 bp, Homo sapiens
cacaagtcgggcgta

SEQ ID NO: 1617721 - DNA, 15 bp, Homo sapiens
gcacaagtcgggcgt

SEQ ID NO: 1617722 - DNA, 15 bp, Homo sapiens
cgcacaagtcgggcg

SEQ ID NO: 1617723 - DNA, 15 bp, Homo sapiens
gcgcacaagtcgggc

SEQ ID NO: 1617724 - DNA, 15 bp, Homo sapiens
ggcgcacaagtcggg

SEQ ID NO: 1617725 - DNA, 15 bp, Homo sapiens
gggcgcacaagtcgg

SEQ ID NO: 1617726 - DNA, 15 bp, Homo sapiens
cgggcgcacaagtcg

SEQ ID NO: 1617727 - DNA, 15 bp, Homo sapiens
ccgggcgcacaagtc

SEQ ID NO: 1617728 - DNA, 15 bp, Homo sapiens
cccgggcgcacaagt

SEQ ID NO: 1617729 - DNA, 15 bp, Homo sapiens
tcccgggcgcacaag

SEQ ID NO: 1617730 - DNA, 15 bp, Homo sapiens
ttcccgggcgcacaa

SEQ ID NO: 1617731 - DNA, 15 bp, Homo sapiens
tttcccgggcgcaca

SEQ ID NO: 1617732 - DNA, 15 bp, Homo sapiens
gtttcccgggcgcac

SEQ ID NO: 1617733 - DNA, 15 bp, Homo sapiens
ggtttcccgggcgca

SEQ ID NO: 1617734 - DNA, 15 bp, Homo sapiens
gggtttcccgggcgc

SEQ ID NO: 1617735 - DNA, 15 bp, Homo sapiens
ggggtttcccgggcg

SEQ ID NO: 1617736 - DNA, 15 bp, Homo sapiens
cggggtttcccgggc

SEQ ID NO: 1617737 - DNA, 15 bp, Homo sapiens
acggggtttcccggg

SEQ ID NO: 1617738 - DNA, 15 bp, Homo sapiens
gacggggtttcccgg

SEQ ID NO: 1617739 - DNA, 15 bp, Homo sapiens
cgacggggtttcccg

SEQ ID NO: 1617740 - DNA, 15 bp, Homo sapiens
acgacggggtttccc

SEQ ID NO: 1617741 - DNA, 15 bp, Homo sapiens
aacgacggggtttcc

SEQ ID NO: 1617742 - DNA, 15 bp, Homo sapiens
gaacgacggggtttc

SEQ ID NO: 1617743 - DNA, 15 bp, Homo sapiens
ggaacgacggggttt

SEQ ID NO: 1617744 - DNA, 15 bp, Homo sapiens
gggaacgacggggtt

SEQ ID NO: 1617745 - DNA, 15 bp, Homo sapiens
agggaacgacggggt

SEQ ID NO: 1617746 - DNA, 15 bp, Homo sapiens
aagggaacgacgggg

SEQ ID NO: 1617747 - DNA, 15 bp, Homo sapiens
aaagggaacgacggg

SEQ ID NO: 1617748 - DNA, 15 bp, Homo sapiens
gaaagggaacgacgg

SEQ ID NO: 1617749 - DNA, 15 bp, Homo sapiens
ggaaagggaacgacg

SEQ ID NO: 1617750 - DNA, 15 bp, Homo sapiens
gggaaagggaacgac

SEQ ID NO: 1617751 - DNA, 15 bp, Homo sapiens
ggggaaagggaacga

SEQ ID NO: 1617752 - DNA, 15 bp, Homo sapiens
caggggaaagggaac

SEQ ID NO: 1617753 - DNA, 15 bp, Homo sapiens
ccaggggaaagggaa

SEQ ID NO: 1617754 - DNA, 15 bp, Homo sapiens
gccaggggaaaggga

SEQ ID NO: 1617755 - DNA, 15 bp, Homo sapiens
agccaggggaaaggg

SEQ ID NO: 1617756 - DNA, 15 bp, Homo sapiens
cagccaggggaaagg

SEQ ID NO: 1617757 - DNA, 15 bp, Homo sapiens
ccagccaggggaaag

SEQ ID NO: 1617758 - DNA, 15 bp, Homo sapiens
gccagccaggggaaa

SEQ ID NO: 1617759 - DNA, 15 bp, Homo sapiens
tgccagccaggggaa

SEQ ID NO: 1617760 - DNA, 15 bp, Homo sapiens
ctgccagccagggga

SEQ ID NO: 1617761 - DNA, 15 bp, Homo sapiens
gctgccagccagggg

SEQ ID NO: 1617762 - DNA, 15 bp, Homo sapiens
cgctgccagccaggg

SEQ ID NO: 1617763 - DNA, 15 bp, Homo sapiens
gcgctgccagccagg

SEQ ID NO: 1617764 - DNA, 15 bp, Homo sapiens
cgcgctgccagccag

SEQ ID NO: 1617765 - DNA, 15 bp, Homo sapiens
ccgcgctgccagcca

SEQ ID NO: 1617766 - DNA, 15 bp, Homo sapiens
tccgcgctgccagcc

SEQ ID NO: 1617767 - DNA, 15 bp, Homo sapiens
ctccgcgctgccagc

SEQ ID NO: 1617768 - DNA, 15 bp, Homo sapiens
cctccgcgctgccag

SEQ ID NO: 1617769 - DNA, 15 bp, Homo sapiens
gcctccgcgctgcca

SEQ ID NO: 1617770 - DNA, 15 bp, Homo sapiens
ggcctccgcgctgcc

SEQ ID NO: 1617771 - DNA, 15 bp, Homo sapiens
cggcctccgcgctgc

SEQ ID NO: 1617772 - DNA, 15 bp, Homo sapiens
gcggcctccgcgctg

SEQ ID NO: 1617773 - DNA, 15 bp, Homo sapiens
tgcggcctccgcgct

SEQ ID NO: 1617774 - DNA, 15 bp, Homo sapiens
gtgcggcctccgcgc

SEQ ID NO: 1617775 - DNA, 15 bp, Homo sapiens
cgtgcggcctccgcg

SEQ ID NO: 1617776 - DNA, 15 bp, Homo sapiens
ccgtgcggcctccgc

SEQ ID NO: 1617777 - DNA, 15 bp, Homo sapiens
accgtgcggcctccg

SEQ ID NO: 1617778 - DNA, 15 bp, Homo sapiens
taccgtgcggcctcc

SEQ ID NO: 1617779 - DNA, 15 bp, Homo sapiens
ttaccgtgcggcctc

SEQ ID NO: 1617780 - DNA, 15 bp, Homo sapiens
cttaccgtgcggcct

SEQ ID NO: 1617781 - DNA, 15 bp, Homo sapiens
gcttaccgtgcggcc

SEQ ID NO: 1617782 - DNA, 15 bp, Homo sapiens
cgcttaccgtgcggc

SEQ ID NO: 1617783 - DNA, 15 bp, Homo sapiens
ccgcttaccgtgcgg

SEQ ID NO: 1617784 - DNA, 15 bp, Homo sapiens
cccgcttaccgtgcg

SEQ ID NO: 1617785 - DNA, 15 bp, Homo sapiens
ccccgcttaccgtgc

SEQ ID NO: 1617786 - DNA, 15 bp, Homo sapiens
cccccgcttaccgtg

SEQ ID NO: 1617787 - DNA, 15 bp, Homo sapiens
gcccccgcttaccgt

SEQ ID NO: 1617788 - DNA, 15 bp, Homo sapiens
agcccccgcttaccg

SEQ ID NO: 1617789 - DNA, 15 bp, Homo sapiens
gagcccccgcttacc

SEQ ID NO: 1617790 - DNA, 15 bp, Homo sapiens
ggagcccccgcttac

SEQ ID NO: 1617791 - DNA, 15 bp, Homo sapiens
cggagcccccgctta

SEQ ID NO: 1617792 - DNA, 15 bp, Homo sapiens
tcggagcccccgctt

SEQ ID NO: 1617793 - DNA, 15 bp, Homo sapiens
ctcggagcccccgct

SEQ ID NO: 1617794 - DNA, 15 bp, Homo sapiens
gctcggagcccccgc

SEQ ID NO: 1617795 - DNA, 15 bp, Homo sapiens
agctcggagcccccg

SEQ ID NO: 1617796 - DNA, 15 bp, Homo sapiens
cagctcggagccccc

SEQ ID NO: 1617797 - DNA, 15 bp, Homo sapiens
ccagctcggagcccc

SEQ ID NO: 1617798 - DNA, 15 bp, Homo sapiens
tccagctcggagccc

SEQ ID NO: 1617799 - DNA, 15 bp, Homo sapiens
gtccagctcggagcc

SEQ ID NO: 1617800 - DNA, 15 bp, Homo sapiens
ggtccagctcggagc

SEQ ID NO: 1617801 - DNA, 15 bp, Homo sapiens
cggtccagctcggag

SEQ ID NO: 1617802 - DNA, 15 bp, Homo sapiens
ccggtccagctcgga

SEQ ID NO: 1617803 - DNA, 15 bp, Homo sapiens
cccggtccagctcgg

SEQ ID NO: 1617804 - DNA, 15 bp, Homo sapiens
gcccggtccagctcg

SEQ ID NO: 1617805 - DNA, 15 bp, Homo sapiens
cgcccggtccagctc

SEQ ID NO: 1617806 - DNA, 15 bp, Homo sapiens
gcgcccggtccagct

SEQ ID NO: 1617807 - DNA, 15 bp, Homo sapiens
cgcgcccggtccagc

SEQ ID NO: 1617808 - DNA, 15 bp, Homo sapiens
tcgcgcccggtccag

SEQ ID NO: 1617809 - DNA, 15 bp, Homo sapiens
ctcgcgcccggtcca

SEQ ID NO: 1617810 - DNA, 15 bp, Homo sapiens
cctcgcgcccggtcc

SEQ ID NO: 1617811 - DNA, 15 bp, Homo sapiens
acctcgcgcccggtc

SEQ ID NO: 1617812 - DNA, 15 bp, Homo sapiens
cacctcgcgcccggt

SEQ ID NO: 1617813 - DNA, 15 bp, Homo sapiens
ccacctcgcgcccgg

SEQ ID NO: 1617814 - DNA, 15 bp, Homo sapiens
gccacctcgcgcccg

SEQ ID NO: 1617815 - DNA, 15 bp, Homo sapiens
tgccacctcgcgccc

SEQ ID NO: 1617816 - DNA, 15 bp, Homo sapiens
ctgccacctcgcgcc

SEQ ID NO: 1617817 - DNA, 15 bp, Homo sapiens
cctgccacctcgcgc

SEQ ID NO: 1617818 - DNA, 15 bp, Homo sapiens
ccctgccacctcgcg

SEQ ID NO: 1617819 - DNA, 15 bp, Homo sapiens
gccctgccacctcgc

SEQ ID NO: 1617820 - DNA, 15 bp, Homo sapiens
ggccctgccacctcg

SEQ ID NO: 1617821 - DNA, 15 bp, Homo sapiens
cggccctgccacctc

SEQ ID NO: 1617822 - DNA, 15 bp, Homo sapiens
ccggccctgccacct

SEQ ID NO: 1617823 - DNA, 15 bp, Homo sapiens
tccggccctgccacc

SEQ ID NO: 1617824 - DNA, 15 bp, Homo sapiens
gtccggccctgccac

SEQ ID NO: 1617825 - DNA, 15 bp, Homo sapiens
cgtccggccctgcca

SEQ ID NO: 1617826 - DNA, 15 bp, Homo sapiens
gcgtccggccctgcc

SEQ ID NO: 1617827 - DNA, 15 bp, Homo sapiens
ggcgtccggccctgc

SEQ ID NO: 1617828 - DNA, 15 bp, Homo sapiens
cggcgtccggccctg

SEQ ID NO: 1617829 - DNA, 15 bp, Homo sapiens
tcggcgtccggccct

SEQ ID NO: 1617830 - DNA, 15 bp, Homo sapiens
ttcggcgtccggccc

SEQ ID NO: 1617831 - DNA, 15 bp, Homo sapiens
cttcggcgtccggcc

SEQ ID NO: 1617832 - DNA, 15 bp, Homo sapiens
gcttcggcgtccggc

SEQ ID NO: 1617833 - DNA, 15 bp, Homo sapiens
ggcttcggcgtccgg

SEQ ID NO: 1617834 - DNA, 15 bp, Homo sapiens
aggcttcggcgtccg

SEQ ID NO: 1617835 - DNA, 15 bp, Homo sapiens
gaggcttcggcgtcc

SEQ ID NO: 1617836 - DNA, 15 bp, Homo sapiens
tgaggcttcggcgtc

SEQ ID NO: 1617837 - DNA, 15 bp, Homo sapiens
ctgaggcttcggcgt

SEQ ID NO: 1617838 - DNA, 15 bp, Homo sapiens
tctgaggcttcggcg

SEQ ID NO: 1617839 - DNA, 15 bp, Homo sapiens
ctctgaggcttcggc

SEQ ID NO: 1617840 - DNA, 15 bp, Homo sapiens
gctctgaggcttcgg

SEQ ID NO: 1617841 - DNA, 15 bp, Homo sapiens
cgctctgaggcttcg

SEQ ID NO: 1617842 - DNA, 15 bp, Homo sapiens
gcgctctgaggcttc

SEQ ID NO: 1617843 - DNA, 15 bp, Homo sapiens
cgcgctctgaggctt

SEQ ID NO: 1617844 - DNA, 15 bp, Homo sapiens
acgcgctctgaggct

SEQ ID NO: 1617845 - DNA, 15 bp, Homo sapiens
cacgcgctctgaggc

SEQ ID NO: 1617846 - DNA, 15 bp, Homo sapiens
gcacgcgctctgagg

SEQ ID NO: 1617847 - DNA, 15 bp, Homo sapiens
ggcacgcgctctgag

SEQ ID NO: 1617848 - DNA, 15 bp, Homo sapiens
aggcacgcgctctga

SEQ ID NO: 1617849 - DNA, 15 bp, Homo sapiens
caggcacgcgctctg

SEQ ID NO: 1617850 - DNA, 15 bp, Homo sapiens
tcaggcacgcgctct

SEQ ID NO: 1617851 - DNA, 15 bp, Homo sapiens
ctcaggcacgcgctc

SEQ ID NO: 1617852 - DNA, 15 bp, Homo sapiens
cctcaggcacgcgct

SEQ ID NO: 1617853 - DNA, 15 bp, Homo sapiens
ccctcaggcacgcgc

SEQ ID NO: 1617854 - DNA, 15 bp, Homo sapiens
gccctcaggcacgcg

SEQ ID NO: 1617855 - DNA, 15 bp, Homo sapiens
ggccctcaggcacgc

SEQ ID NO: 1617856 - DNA, 15 bp, Homo sapiens
gggccctcaggcacg

SEQ ID NO: 1617857 - DNA, 15 bp, Homo sapiens
ggggccctcaggcac

SEQ ID NO: 1617858 - DNA, 15 bp, Homo sapiens
cggggccctcaggca

SEQ ID NO: 1617859 - DNA, 15 bp, Homo sapiens
tcggggccctcaggc

SEQ ID NO: 1617860 - DNA, 15 bp, Homo sapiens
ctcggggccctcagg

SEQ ID NO: 1617861 - DNA, 15 bp, Homo sapiens
cctcggggccctcag

SEQ ID NO: 1617862 - DNA, 15 bp, Homo sapiens
gcctcggggccctca

SEQ ID NO: 1617863 - DNA, 15 bp, Homo sapiens
cgcctcggggccctc

SEQ ID NO: 1617864 - DNA, 15 bp, Homo sapiens
gcgcctcggggccct

SEQ ID NO: 1617865 - DNA, 15 bp, Homo sapiens
ggcgcctcggggccc

SEQ ID NO: 1617866 - DNA, 15 bp, Homo sapiens
gggcgcctcggggcc

SEQ ID NO: 1617867 - DNA, 15 bp, Homo sapiens
cgggcgcctcggggc

SEQ ID NO: 1617868 - DNA, 15 bp, Homo sapiens
ccgggcgcctcgggg

SEQ ID NO: 1617869 - DNA, 15 bp, Homo sapiens
gccgggcgcctcggg

SEQ ID NO: 1617870 - DNA, 15 bp, Homo sapiens
cgccgggcgcctcgg

SEQ ID NO: 1617871 - DNA, 15 bp, Homo sapiens
gcgccgggcgcctcg

SEQ ID NO: 1617872 - DNA, 15 bp, Homo sapiens
cgcgccgggcgcctc

SEQ ID NO: 1617873 - DNA, 15 bp, Homo sapiens
ccgcgccgggcgcct

SEQ ID NO: 1617874 - DNA, 15 bp, Homo sapiens
cccgcgccgggcgcc

SEQ ID NO: 1617875 - DNA, 15 bp, Homo sapiens
gcccgcgccgggcgc

SEQ ID NO: 1617876 - DNA, 15 bp, Homo sapiens
ggcccgcgccgggcg

SEQ ID NO: 1617877 - DNA, 15 bp, Homo sapiens
gggcccgcgccgggc

SEQ ID NO: 1617878 - DNA, 15 bp, Homo sapiens
cgggcccgcgccggg

SEQ ID NO: 1617879 - DNA, 15 bp, Homo sapiens
acgggcccgcgccgg

SEQ ID NO: 1617880 - DNA, 15 bp, Homo sapiens
gacgggcccgcgccg

SEQ ID NO: 1617881 - DNA, 15 bp, Homo sapiens
ggacgggcccgcgcc

SEQ ID NO: 1617882 - DNA, 15 bp, Homo sapiens
gggacgggcccgcgc

SEQ ID NO: 1617883 - DNA, 15 bp, Homo sapiens
cgggacgggcccgcg

SEQ ID NO: 1617884 - DNA, 15 bp, Homo sapiens
gcgggacgggcccgc

SEQ ID NO: 1617885 - DNA, 15 bp, Homo sapiens
ggcgggacgggcccg

SEQ ID NO: 1617886 - DNA, 15 bp, Homo sapiens
gggcgggacgggccc

SEQ ID NO: 1617887 - DNA, 15 bp, Homo sapiens
ggggcgggacgggcc

SEQ ID NO: 1617888 - DNA, 15 bp, Homo sapiens
gggggcgggacgggc

SEQ ID NO: 1617889 - DNA, 15 bp, Homo sapiens
agggggcgggacggg

SEQ ID NO: 1617890 - DNA, 15 bp, Homo sapiens
tagggggcgggacgg

SEQ ID NO: 1617891 - DNA, 15 bp, Homo sapiens
ctagggggcgggacg

SEQ ID NO: 1617892 - DNA, 15 bp, Homo sapiens
tctagggggcgggac

SEQ ID NO: 1617893 - DNA, 15 bp, Homo sapiens
ctctagggggcggga

SEQ ID NO: 1617894 - DNA, 15 bp, Homo sapiens
gctctagggggcggg

SEQ ID NO: 1617895 - DNA, 15 bp, Homo sapiens
ggctctagggggcgg

SEQ ID NO: 1617896 - DNA, 15 bp, Homo sapiens
cggctctagggggcg

SEQ ID NO: 1617897 - DNA, 15 bp, Homo sapiens
gcggctctagggggc

SEQ ID NO: 1617898 - DNA, 15 bp, Homo sapiens
cgcggctctaggggg

SEQ ID NO: 1617899 - DNA, 15 bp, Homo sapiens
ccgcggctctagggg

SEQ ID NO: 1617900 - DNA, 15 bp, Homo sapiens
gccgcggctctaggg

SEQ ID NO: 1617901 - DNA, 15 bp, Homo sapiens
ggccgcggctctagg

SEQ ID NO: 1617902 - DNA, 15 bp, Homo sapiens
tggccgcggctctag

SEQ ID NO: 1617903 - DNA, 15 bp, Homo sapiens
gtggccgcggctcta

SEQ ID NO: 1617904 - DNA, 15 bp, Homo sapiens
cgtggccgcggctct

SEQ ID NO: 1617905 - DNA, 15 bp, Homo sapiens
acgtggccgcggctc

SEQ ID NO: 1617906 - DNA, 15 bp, Homo sapiens
cacgtggccgcggct

SEQ ID NO: 1617907 - DNA, 15 bp, Homo sapiens
gcacgtggccgcggc

SEQ ID NO: 1617908 - DNA, 15 bp, Homo sapiens
cgcacgtggccgcgg

SEQ ID NO: 1617909 - DNA, 15 bp, Homo sapiens
tcgcacgtggccgcg

SEQ ID NO: 1617910 - DNA, 15 bp, Homo sapiens
ctcgcacgtggccgc

SEQ ID NO: 1617911 - DNA, 15 bp, Homo sapiens
gctcgcacgtggccg

SEQ ID NO: 1617912 - DNA, 15 bp, Homo sapiens
cgctcgcacgtggcc

SEQ ID NO: 1617913 - DNA, 15 bp, Homo sapiens
ccgctcgcacgtggc

SEQ ID NO: 1617914 - DNA, 15 bp, Homo sapiens
gccgctcgcacgtgg

SEQ ID NO: 1617915 - DNA, 15 bp, Homo sapiens
tgccgctcgcacgtg

SEQ ID NO: 1617916 - DNA, 15 bp, Homo sapiens
ctgccgctcgcacgt

SEQ ID NO: 1617917 - DNA, 15 bp, Homo sapiens
cctgccgctcgcacg

SEQ ID NO: 1617918 - DNA, 15 bp, Homo sapiens
gcctgccgctcgcac

SEQ ID NO: 1617919 - DNA, 15 bp, Homo sapiens
ggcctgccgctcgca

SEQ ID NO: 1617920 - DNA, 15 bp, Homo sapiens
gggcctgccgctcgc

SEQ ID NO: 1617921 - DNA, 15 bp, Homo sapiens
cgggcctgccgctcg

SEQ ID NO: 1617922 - DNA, 15 bp, Homo sapiens
ccgggcctgccgctc

SEQ ID NO: 1617923 - DNA, 15 bp, Homo sapiens
tccgggcctgccgct

SEQ ID NO: 1617924 - DNA, 15 bp, Homo sapiens
gtccgggcctgccgc

SEQ ID NO: 1617925 - DNA, 15 bp, Homo sapiens
tgtccgggcctgccg

SEQ ID NO: 1617926 - DNA, 15 bp, Homo sapiens
atgtccgggcctgcc

SEQ ID NO: 1617927 - DNA, 15 bp, Homo sapiens
catgtccgggcctgc

SEQ ID NO: 1617928 - DNA, 15 bp, Homo sapiens
gcatgtccgggcctg

SEQ ID NO: 1617929 - DNA, 15 bp, Homo sapiens
ggcatgtccgggcct

SEQ ID NO: 1617930 - DNA, 15 bp, Homo sapiens
gggcatgtccgggcc

SEQ ID NO: 1617931 - DNA, 15 bp, Homo sapiens
cgggcatgtccgggc

SEQ ID NO: 1617932 - DNA, 15 bp, Homo sapiens
ccgggcatgtccggg

SEQ ID NO: 1617933 - DNA, 15 bp, Homo sapiens
accgggcatgtccgg

SEQ ID NO: 1617934 - DNA, 15 bp, Homo sapiens
gaccgggcatgtccg

SEQ ID NO: 1617935 - DNA, 15 bp, Homo sapiens
tgaccgggcatgtcc

SEQ ID NO: 1617936 - DNA, 15 bp, Homo sapiens
ctgaccgggcatgtc

SEQ ID NO: 1617937 - DNA, 15 bp, Homo sapiens
gctgaccgggcatgt

SEQ ID NO: 1617938 - DNA, 15 bp, Homo sapiens
cgctgaccgggcatg

SEQ ID NO: 1617939 - DNA, 15 bp, Homo sapiens
gcgctgaccgggcat

SEQ ID NO: 1617940 - DNA, 15 bp, Homo sapiens
ggcgctgaccgggca

SEQ ID NO: 1617941 - DNA, 15 bp, Homo sapiens
cggcgctgaccgggc

SEQ ID NO: 1617942 - DNA, 15 bp, Homo sapiens
acggcgctgaccggg

SEQ ID NO: 1617943 - DNA, 15 bp, Homo sapiens
gacggcgctgaccgg

SEQ ID NO: 1617944 - DNA, 15 bp, Homo sapiens
ggacggcgctgaccg

SEQ ID NO: 1617945 - DNA, 15 bp, Homo sapiens
cggacggcgctgacc

SEQ ID NO: 1617946 - DNA, 15 bp, Homo sapiens
ccggacggcgctgac

SEQ ID NO: 1617947 - DNA, 15 bp, Homo sapiens
cccggacggcgctga

SEQ ID NO: 1617948 - DNA, 15 bp, Homo sapiens
tcccggacggcgctg

SEQ ID NO: 1617949 - DNA, 15 bp, Homo sapiens
ttcccggacggcgct

SEQ ID NO: 1617950 - DNA, 15 bp, Homo sapiens
gttcccggacggcgc

SEQ ID NO: 1617951 - DNA, 15 bp, Homo sapiens
ggttcccggacggcg

SEQ ID NO: 1617952 - DNA, 15 bp, Homo sapiens
cggttcccggacggc

SEQ ID NO: 1617953 - DNA, 15 bp, Homo sapiens
tcggttcccggacgg

SEQ ID NO: 1617954 - DNA, 15 bp, Homo sapiens
ctcggttcccggacg

SEQ ID NO: 1617955 - DNA, 15 bp, Homo sapiens
gctcggttcccggac

SEQ ID NO: 1617956 - DNA, 15 bp, Homo sapiens
cgctcggttcccgga

SEQ ID NO: 1617957 - DNA, 15 bp, Homo sapiens
acgctcggttcccgg

SEQ ID NO: 1617958 - DNA, 15 bp, Homo sapiens
cacgctcggttcccg

SEQ ID NO: 1617959 - DNA, 15 bp, Homo sapiens
ccacgctcggttccc

SEQ ID NO: 1617960 - DNA, 15 bp, Homo sapiens
cccacgctcggttcc

SEQ ID NO: 1617961 - DNA, 15 bp, Homo sapiens
gcccacgctcggttc

SEQ ID NO: 1617962 - DNA, 15 bp, Homo sapiens
ggcccacgctcggtt

SEQ ID NO: 1617963 - DNA, 15 bp, Homo sapiens
gggcccacgctcggt

SEQ ID NO: 1617964 - DNA, 15 bp, Homo sapiens
ggggcccacgctcgg

SEQ ID NO: 1617965 - DNA, 15 bp, Homo sapiens
cggggcccacgctcg

SEQ ID NO: 1617966 - DNA, 15 bp, Homo sapiens
ccggggcccacgctc

SEQ ID NO: 1617967 - DNA, 15 bp, Homo sapiens
cccggggcccacgct

SEQ ID NO: 1617968 - DNA, 15 bp, Homo sapiens
ccccggggcccacgc

SEQ ID NO: 1617969 - DNA, 15 bp, Homo sapiens
cccccggggcccacg

SEQ ID NO: 1617970 - DNA, 15 bp, Homo sapiens
ccccccggggcccac

SEQ ID NO: 1617971 - DNA, 15 bp, Homo sapiens
gccccccggggccca

SEQ ID NO: 1617972 - DNA, 15 bp, Homo sapiens
tgccccccggggccc

SEQ ID NO: 1617973 - DNA, 15 bp, Homo sapiens
ctgccccccggggcc

SEQ ID NO: 1617974 - DNA, 15 bp, Homo sapiens
gctgccccccggggc

SEQ ID NO: 1617975 - DNA, 15 bp, Homo sapiens
cgctgccccccgggg

SEQ ID NO: 1617976 - DNA, 15 bp, Homo sapiens
ccgctgccccccggg

SEQ ID NO: 1617977 - DNA, 15 bp, Homo sapiens
gccgctgccccccgg

SEQ ID NO: 1617978 - DNA, 15 bp, Homo sapiens
cgccgctgccccccg

SEQ ID NO: 1617979 - DNA, 15 bp, Homo sapiens
ccgccgctgcccccc

SEQ ID NO: 1617980 - DNA, 15 bp, Homo sapiens
cccgccgctgccccc

SEQ ID NO: 1617981 - DNA, 15 bp, Homo sapiens
ccccgccgctgcccc

SEQ ID NO: 1617982 - DNA, 15 bp, Homo sapiens
accccgccgctgccc

SEQ ID NO: 1617983 - DNA, 15 bp, Homo sapiens
caccccgccgctgcc

SEQ ID NO: 1617984 - DNA, 15 bp, Homo sapiens
gcaccccgccgctgc

SEQ ID NO: 1617985 - DNA, 15 bp, Homo sapiens
cgcaccccgccgctg

SEQ ID NO: 1617986 - DNA, 15 bp, Homo sapiens
acgcaccccgccgct

SEQ ID NO: 1617987 - DNA, 15 bp, Homo sapiens
cacgcaccccgccgc

SEQ ID NO: 1617988 - DNA, 15 bp, Homo sapiens
ccacgcaccccgccg

SEQ ID NO: 1617989 - DNA, 15 bp, Homo sapiens
cccacgcaccccgcc

SEQ ID NO: 1617990 - DNA, 15 bp, Homo sapiens
ccccacgcaccccgc

SEQ ID NO: 1617991 - DNA, 15 bp, Homo sapiens
gccccacgcaccccg

SEQ ID NO: 1617992 - DNA, 15 bp, Homo sapiens
cgccccacgcacccc

SEQ ID NO: 1617993 - DNA, 15 bp, Homo sapiens
acgccccacgcaccc

SEQ ID NO: 1617994 - DNA, 15 bp, Homo sapiens
gacgccccacgcacc

SEQ ID NO: 1617995 - DNA, 15 bp, Homo sapiens
ggacgccccacgcac

SEQ ID NO: 1617996 - DNA, 15 bp, Homo sapiens
cggacgccccacgca

SEQ ID NO: 1617997 - DNA, 15 bp, Homo sapiens
ccggacgccccacgc

SEQ ID NO: 1617998 - DNA, 15 bp, Homo sapiens
tccggacgccccacg

SEQ ID NO: 1617999 - DNA, 15 bp, Homo sapiens
ctccggacgccccac

SEQ ID NO: 1618000 - DNA, 15 bp, Homo sapiens
actccggacgcccca

SEQ ID NO: 1618001 - DNA, 15 bp, Homo sapiens
gactccggacgcccc

SEQ ID NO: 1618002 - DNA, 15 bp, Homo sapiens
ggactccggacgccc

SEQ ID NO: 1618003 - DNA, 15 bp, Homo sapiens
gggactccggacgcc

SEQ ID NO: 1618004 - DNA, 15 bp, Homo sapiens
cgggactccggacgc

SEQ ID NO: 1618005 - DNA, 15 bp, Homo sapiens
ccgggactccggacg

SEQ ID NO: 1618006 - DNA, 15 bp, Homo sapiens
cccgggactccggac

SEQ ID NO: 1618007 - DNA, 15 bp, Homo sapiens
ccccgggactccgga

SEQ ID NO: 1618008 - DNA, 15 bp, Homo sapiens
gccccgggactccgg

SEQ ID NO: 1618009 - DNA, 15 bp, Homo sapiens
agccccgggactccg

SEQ ID NO: 1618010 - DNA, 15 bp, Homo sapiens
cagccccgggactcc

SEQ ID NO: 1618011 - DNA, 15 bp, Homo sapiens
ccagccccgggactc

SEQ ID NO: 1618012 - DNA, 15 bp, Homo sapiens
cccagccccgggact

SEQ ID NO: 1618013 - DNA, 15 bp, Homo sapiens
ccccagccccgggac

SEQ ID NO: 1618014 - DNA, 15 bp, Homo sapiens
tccccagccccggga

SEQ ID NO: 1618015 - DNA, 15 bp, Homo sapiens
ctccccagccccggg

SEQ ID NO: 1618016 - DNA, 15 bp, Homo sapiens
actccccagccccgg

SEQ ID NO: 1618017 - DNA, 15 bp, Homo sapiens
cactccccagccccg

SEQ ID NO: 1618018 - DNA, 15 bp, Homo sapiens
ccactccccagcccc

SEQ ID NO: 1618019 - DNA, 15 bp, Homo sapiens
cccactccccagccc

SEQ ID NO: 1618020 - DNA, 15 bp, Homo sapiens
ccccactccccagcc

SEQ ID NO: 1618021 - DNA, 15 bp, Homo sapiens
accccactccccagc

SEQ ID NO: 1618022 - DNA, 15 bp, Homo sapiens
gaccccactccccag

SEQ ID NO: 1618023 - DNA, 15 bp, Homo sapiens
cgaccccactcccca

SEQ ID NO: 1618024 - DNA, 15 bp, Homo sapiens
gcgaccccactcccc

SEQ ID NO: 1618025 - DNA, 15 bp, Homo sapiens
cgcgaccccactccc

SEQ ID NO: 1618026 - DNA, 15 bp, Homo sapiens
gcgcgaccccactcc

SEQ ID NO: 1618027 - DNA, 15 bp, Homo sapiens
tgcgcgaccccactc

SEQ ID NO: 1618028 - DNA, 15 bp, Homo sapiens
ctgcgcgaccccact

SEQ ID NO: 1618029 - DNA, 15 bp, Homo sapiens
cctgcgcgaccccac

SEQ ID NO: 1618030 - DNA, 15 bp, Homo sapiens
tcctgcgcgacccca

SEQ ID NO: 1618031 - DNA, 15 bp, Homo sapiens
atcctgcgcgacccc

SEQ ID NO: 1618032 - DNA, 15 bp, Homo sapiens
gatcctgcgcgaccc

SEQ ID NO: 1618033 - DNA, 15 bp, Homo sapiens
ggatcctgcgcgacc

SEQ ID NO: 1618034 - DNA, 15 bp, Homo sapiens
aggatcctgcgcgac

SEQ ID NO: 1618035 - DNA, 15 bp, Homo sapiens
gaggatcctgcgcga

SEQ ID NO: 1618036 - DNA, 15 bp, Homo sapiens
tgaggatcctgcgcg

SEQ ID NO: 1618037 - DNA, 15 bp, Homo sapiens
gtgaggatcctgcgc

SEQ ID NO: 1618038 - DNA, 15 bp, Homo sapiens
tgtgaggatcctgcg

SEQ ID NO: 1618039 - DNA, 15 bp, Homo sapiens
gtgtgaggatcctgc

SEQ ID NO: 1618040 - DNA, 15 bp, Homo sapiens
cgtgtgaggatcctg

SEQ ID NO: 1618041 - DNA, 15 bp, Homo sapiens
gcgtgtgaggatcct

SEQ ID NO: 1618042 - DNA, 15 bp, Homo sapiens
tgcgtgtgaggatcc

SEQ ID NO: 1618043 - DNA, 15 bp, Homo sapiens
ctgcgtgtgaggatc

SEQ ID NO: 1618044 - DNA, 15 bp, Homo sapiens
cctgcgtgtgaggat

SEQ ID NO: 1618045 - DNA, 15 bp, Homo sapiens
ccctgcgtgtgagga

SEQ ID NO: 1618046 - DNA, 15 bp, Homo sapiens
cccctgcgtgtgagg

SEQ ID NO: 1618047 - DNA, 15 bp, Homo sapiens
gcccctgcgtgtgag

SEQ ID NO: 1618048 - DNA, 15 bp, Homo sapiens
ggcccctgcgtgtga

SEQ ID NO: 1618049 - DNA, 15 bp, Homo sapiens
cggcccctgcgtgtg

SEQ ID NO: 1618050 - DNA, 15 bp, Homo sapiens
ccggcccctgcgtgt

SEQ ID NO: 1618051 - DNA, 15 bp, Homo sapiens
cccggcccctgcgtg

SEQ ID NO: 1618052 - DNA, 15 bp, Homo sapiens
gcccggcccctgcgt

SEQ ID NO: 1618053 - DNA, 15 bp, Homo sapiens
agcccggcccctgcg

SEQ ID NO: 1618054 - DNA, 15 bp, Homo sapiens
gagcccggcccctgc

SEQ ID NO: 1618055 - DNA, 15 bp, Homo sapiens
agagcccggcccctg

SEQ ID NO: 1618056 - DNA, 15 bp, Homo sapiens
cagagcccggcccct

SEQ ID NO: 1618057 - DNA, 15 bp, Homo sapiens
acagagcccggcccc

SEQ ID NO: 1618058 - DNA, 15 bp, Homo sapiens
aacagagcccggccc

SEQ ID NO: 1618059 - DNA, 15 bp, Homo sapiens
taacagagcccggcc

SEQ ID NO: 1618060 - DNA, 15 bp, Homo sapiens
ctaacagagcccggc

SEQ ID NO: 1618061 - DNA, 15 bp, Homo sapiens
actaacagagcccgg

SEQ ID NO: 1618062 - DNA, 15 bp, Homo sapiens
cactaacagagcccg

SEQ ID NO: 1618063 - DNA, 15 bp, Homo sapiens
gcactaacagagccc

SEQ ID NO: 1618064 - DNA, 15 bp, Homo sapiens
cgcactaacagagcc

SEQ ID NO: 1618065 - DNA, 15 bp, Homo sapiens
tcgcactaacagagc

SEQ ID NO: 1618066 - DNA, 15 bp, Homo sapiens
atcgcactaacagag

SEQ ID NO: 1618067 - DNA, 15 bp, Homo sapiens
gatcgcactaacaga

SEQ ID NO: 1618068 - DNA, 15 bp, Homo sapiens
ggatcgcactaacag

SEQ ID NO: 1618069 - DNA, 15 bp, Homo sapiens
tggatcgcactaaca

SEQ ID NO: 1618070 - DNA, 15 bp, Homo sapiens
ctggatcgcactaac

SEQ ID NO: 1618071 - DNA, 15 bp, Homo sapiens
tctggatcgcactaa

SEQ ID NO: 1618072 - DNA, 15 bp, Homo sapiens
ctctggatcgcacta

SEQ ID NO: 1618073 - DNA, 15 bp, Homo sapiens
tctctggatcgcact

SEQ ID NO: 1618074 - DNA, 15 bp, Homo sapiens
ctctctggatcgcac

SEQ ID NO: 1618075 - DNA, 15 bp, Homo sapiens
cctctctggatcgca

SEQ ID NO: 1618076 - DNA, 15 bp, Homo sapiens
gcctctctggatcgc

SEQ ID NO: 1618077 - DNA, 15 bp, Homo sapiens
ggcctctctggatcg

SEQ ID NO: 1618078 - DNA, 15 bp, Homo sapiens
cggcctctctggatc

SEQ ID NO: 1618079 - DNA, 15 bp, Homo sapiens
acggcctctctggat

SEQ ID NO: 1618080 - DNA, 15 bp, Homo sapiens
cacggcctctctgga

SEQ ID NO: 1618081 - DNA, 15 bp, Homo sapiens
ccacggcctctctgg

SEQ ID NO: 1618082 - DNA, 15 bp, Homo sapiens
cccacggcctctctg

SEQ ID NO: 1618083 - DNA, 15 bp, Homo sapiens
gcccacggcctctct

SEQ ID NO: 1618084 - DNA, 15 bp, Homo sapiens
cgcccacggcctctc

SEQ ID NO: 1618085 - DNA, 15 bp, Homo sapiens
acgcccacggcctct

SEQ ID NO: 1618086 - DNA, 15 bp, Homo sapiens
gacgcccacggcctc

SEQ ID NO: 1618087 - DNA, 15 bp, Homo sapiens
cgacgcccacggcct

SEQ ID NO: 1618088 - DNA, 15 bp, Homo sapiens
ccgacgcccacggcc

SEQ ID NO: 1618089 - DNA, 15 bp, Homo sapiens
accgacgcccacggc

SEQ ID NO: 1618090 - DNA, 15 bp, Homo sapiens
caccgacgcccacgg

SEQ ID NO: 1618091 - DNA, 15 bp, Homo sapiens
tcaccgacgcccacg

SEQ ID NO: 1618092 - DNA, 15 bp, Homo sapiens
ctcaccgacgcccac

SEQ ID NO: 1618093 - DNA, 15 bp, Homo sapiens
gctcaccgacgccca

SEQ ID NO: 1618094 - DNA, 15 bp, Homo sapiens
agctcaccgacgccc

SEQ ID NO: 1618095 - DNA, 15 bp, Homo sapiens
gagctcaccgacgcc

SEQ ID NO: 1618096 - DNA, 15 bp, Homo sapiens
ggagctcaccgacgc

SEQ ID NO: 1618097 - DNA, 15 bp, Homo sapiens
aggagctcaccgacg

SEQ ID NO: 1618098 - DNA, 15 bp, Homo sapiens
aaggagctcaccgac

SEQ ID NO: 1618099 - DNA, 15 bp, Homo sapiens
gaaggagctcaccga

SEQ ID NO: 1618100 - DNA, 15 bp, Homo sapiens
tgaaggagctcaccg

SEQ ID NO: 1618101 - DNA, 15 bp, Homo sapiens
ctgaaggagctcacc

SEQ ID NO: 1618102 - DNA, 15 bp, Homo sapiens
tctgaaggagctcac

SEQ ID NO: 1618103 - DNA, 15 bp, Homo sapiens
gtctgaaggagctca

SEQ ID NO: 1618104 - DNA, 15 bp, Homo sapiens
ggtctgaaggagctc

SEQ ID NO: 1618105 - DNA, 15 bp, Homo sapiens
gggtctgaaggagct

SEQ ID NO: 1618106 - DNA, 15 bp, Homo sapiens
cgggtctgaaggagc

SEQ ID NO: 1618107 - DNA, 15 bp, Homo sapiens
gcgggtctgaaggag

SEQ ID NO: 1618108 - DNA, 15 bp, Homo sapiens
tgcgggtctgaagga

SEQ ID NO: 1618109 - DNA, 15 bp, Homo sapiens
ctgcgggtctgaagg

SEQ ID NO: 1618110 - DNA, 15 bp, Homo sapiens
cctgcgggtctgaag

SEQ ID NO: 1618111 - DNA, 15 bp, Homo sapiens
tcctgcgggtctgaa

SEQ ID NO: 1618112 - DNA, 15 bp, Homo sapiens
cttggggcgggaaag

SEQ ID NO: 1618113 - DNA, 15 bp, Homo sapiens
tcttggggcgggaaa

SEQ ID NO: 1618114 - DNA, 15 bp, Homo sapiens
ctcttggggcgggaa

SEQ ID NO: 1618115 - DNA, 15 bp, Homo sapiens
cctcttggggcggga

SEQ ID NO: 1618116 - DNA, 15 bp, Homo sapiens
ccctcttggggcggg

SEQ ID NO: 1618117 - DNA, 15 bp, Homo sapiens
tccctcttggggcgg

SEQ ID NO: 1618118 - DNA, 15 bp, Homo sapiens
ctccctcttggggcg

SEQ ID NO: 1618119 - DNA, 15 bp, Homo sapiens
tctccctcttggggc

SEQ ID NO: 1618120 - DNA, 15 bp, Homo sapiens
ctctccctcttgggg

SEQ ID NO: 1618121 - DNA, 15 bp, Homo sapiens
tctctccctcttggg

SEQ ID NO: 1618122 - DNA, 15 bp, Homo sapiens
ttctctccctcttgg

SEQ ID NO: 1618123 - DNA, 15 bp, Homo sapiens
tttctctccctcttg

SEQ ID NO: 1618124 - DNA, 15 bp, Homo sapiens
gtttctctccctctt

SEQ ID NO: 1618125 - DNA, 15 bp, Homo sapiens
ggtttctctccctct

SEQ ID NO: 1618126 - DNA, 15 bp, Homo sapiens
gggtttctctccctc

SEQ ID NO: 1618127 - DNA, 15 bp, Homo sapiens
agggtttctctccct

SEQ ID NO: 1618128 - DNA, 15 bp, Homo sapiens
aagggtttctctccc

SEQ ID NO: 1618129 - DNA, 15 bp, Homo sapiens
caagggtttctctcc

SEQ ID NO: 1618130 - DNA, 15 bp, Homo sapiens
ccaagggtttctctc

SEQ ID NO: 1618131 - DNA, 15 bp, Homo sapiens
accaagggtttctct

SEQ ID NO: 1618132 - DNA, 15 bp, Homo sapiens
aaccaagggtttctc

SEQ ID NO: 1618133 - DNA, 15 bp, Homo sapiens
caaccaagggtttct

SEQ ID NO: 1618134 - DNA, 15 bp, Homo sapiens
acaaccaagggtttc

SEQ ID NO: 1618135 - DNA, 15 bp, Homo sapiens
cacaaccaagggttt

SEQ ID NO: 1618136 - DNA, 15 bp, Homo sapiens
acacaaccaagggtt

SEQ ID NO: 1618137 - DNA, 15 bp, Homo sapiens
gacacaaccaagggt

SEQ ID NO: 1618138 - DNA, 15 bp, Homo sapiens
tgacacaaccaaggg

SEQ ID NO: 1618139 - DNA, 15 bp, Homo sapiens
gtgacacaaccaagg

SEQ ID NO: 1618140 - DNA, 15 bp, Homo sapiens
ggtgacacaaccaag

SEQ ID NO: 1618141 - DNA, 15 bp, Homo sapiens
tggtgacacaaccaa

SEQ ID NO: 1618142 - DNA, 15 bp, Homo sapiens
gtggtgacacaacca

SEQ ID NO: 1618143 - DNA, 15 bp, Homo sapiens
agtggtgacacaacc

SEQ ID NO: 1618144 - DNA, 15 bp, Homo sapiens
aagtggtgacacaac

SEQ ID NO: 1618145 - DNA, 15 bp, Homo sapiens
caagtggtgacacaa

SEQ ID NO: 1618146 - DNA, 15 bp, Homo sapiens
gcaagtggtgacaca

SEQ ID NO: 1618147 - DNA, 15 bp, Homo sapiens
agcaagtggtgacac

SEQ ID NO: 1618148 - DNA, 15 bp, Homo sapiens
aagcaagtggtgaca

SEQ ID NO: 1618149 - DNA, 15 bp, Homo sapiens
aaagcaagtggtgac

SEQ ID NO: 1618150 - DNA, 15 bp, Homo sapiens
caaagcaagtggtga

SEQ ID NO: 1618151 - DNA, 15 bp, Homo sapiens
acaaagcaagtggtg

SEQ ID NO: 1618152 - DNA, 15 bp, Homo sapiens
cacaaagcaagtggt

SEQ ID NO: 1618153 - DNA, 15 bp, Homo sapiens
cacacaaagcaagtg

SEQ ID NO: 1618154 - DNA, 15 bp, Homo sapiens
tcacacaaagcaagt

SEQ ID NO: 1618155 - DNA, 15 bp, Homo sapiens
atcacacaaagcaag

SEQ ID NO: 1618156 - DNA, 15 bp, Homo sapiens
catcacacaaagcaa

SEQ ID NO: 1618157 - DNA, 15 bp, Homo sapiens
acatcacacaaagca

SEQ ID NO: 1618158 - DNA, 15 bp, Homo sapiens
cacatcacacaaagc

SEQ ID NO: 1618159 - DNA, 15 bp, Homo sapiens
tcacatcacacaaag

SEQ ID NO: 1618160 - DNA, 15 bp, Homo sapiens
gtcacatcacacaaa

SEQ ID NO: 1618161 - DNA, 15 bp, Homo sapiens
tgtcacatcacacaa

SEQ ID NO: 1618162 - DNA, 15 bp, Homo sapiens
atgtcacatcacaca

SEQ ID NO: 1618163 - DNA, 15 bp, Homo sapiens
aatgtcacatcacac

SEQ ID NO: 1618164 - DNA, 15 bp, Homo sapiens
gaatgtcacatcaca

SEQ ID NO: 1618165 - DNA, 15 bp, Homo sapiens
cgaatgtcacatcac

SEQ ID NO: 1618166 - DNA, 15 bp, Homo sapiens
tcgaatgtcacatca

SEQ ID NO: 1618167 - DNA, 15 bp, Homo sapiens
atcgaatgtcacatc

SEQ ID NO: 1618168 - DNA, 15 bp, Homo sapiens
tatcgaatgtcacat

SEQ ID NO: 1618169 - DNA, 15 bp, Homo sapiens
ttatcgaatgtcaca

SEQ ID NO: 1618170 - DNA, 15 bp, Homo sapiens
gttatcgaatgtcac

SEQ ID NO: 1618171 - DNA, 15 bp, Homo sapiens
agttatcgaatgtca

SEQ ID NO: 1618172 - DNA, 15 bp, Homo sapiens
aagttatcgaatgtc

SEQ ID NO: 1618173 - DNA, 15 bp, Homo sapiens
caagttatcgaatgt

SEQ ID NO: 1618174 - DNA, 15 bp, Homo sapiens
ccaagttatcgaatg

SEQ ID NO: 1618175 - DNA, 15 bp, Homo sapiens
accaagttatcgaat

SEQ ID NO: 1618176 - DNA, 15 bp, Homo sapiens
taccaagttatcgaa

SEQ ID NO: 1618177 - DNA, 15 bp, Homo sapiens
gtaccaagttatcga

SEQ ID NO: 1618178 - DNA, 15 bp, Homo sapiens
agtaccaagttatcg

SEQ ID NO: 1618179 - DNA, 15 bp, Homo sapiens
gagtaccaagttatc

SEQ ID NO: 1618180 - DNA, 15 bp, Homo sapiens
ggagtaccaagttat

SEQ ID NO: 1618181 - DNA, 15 bp, Homo sapiens
tggagtaccaagtta

SEQ ID NO: 1618182 - DNA, 15 bp, Homo sapiens
ttggagtaccaagtt

SEQ ID NO: 1618183 - DNA, 15 bp, Homo sapiens
cttggagtaccaagt

SEQ ID NO: 1618184 - DNA, 15 bp, Homo sapiens
acttggagtaccaag

SEQ ID NO: 1618185 - DNA, 15 bp, Homo sapiens
aacttggagtaccaa

SEQ ID NO: 1618186 - DNA, 15 bp, Homo sapiens
aaacttggagtacca

SEQ ID NO: 1618187 - DNA, 15 bp, Homo sapiens
aaaacttggagtacc

SEQ ID NO: 1618188 - DNA, 15 bp, Homo sapiens
aaaaacttggagtac

SEQ ID NO: 1618189 - DNA, 15 bp, Homo sapiens
taaaaacttggagta

SEQ ID NO: 1618190 - DNA, 15 bp, Homo sapiens
ataaaaacttggagt

SEQ ID NO: 1618191 - DNA, 15 bp, Homo sapiens
cataaaaacttggag

SEQ ID NO: 1618192 - DNA, 15 bp, Homo sapiens
tcataaaaacttgga

SEQ ID NO: 1618193 - DNA, 15 bp, Homo sapiens
gtcataaaaacttgg

SEQ ID NO: 1618194 - DNA, 15 bp, Homo sapiens
tgtcataaaaacttg

SEQ ID NO: 1618195 - DNA, 15 bp, Homo sapiens
atgtcataaaaactt

SEQ ID NO: 1618196 - DNA, 15 bp, Homo sapiens
aatgtcataaaaact

SEQ ID NO: 1618197 - DNA, 15 bp, Homo sapiens
gaatgtcataaaaac

SEQ ID NO: 1618198 - DNA, 15 bp, Homo sapiens
agaatgtcataaaaa

SEQ ID NO: 1618199 - DNA, 15 bp, Homo sapiens
tagaatgtcataaaa

SEQ ID NO: 1618200 - DNA, 15 bp, Homo sapiens
ttagaatgtcataaa

SEQ ID NO: 1618201 - DNA, 15 bp, Homo sapiens
cttagaatgtcataa

SEQ ID NO: 1618202 - DNA, 15 bp, Homo sapiens
tcttagaatgtcata

SEQ ID NO: 1618203 - DNA, 15 bp, Homo sapiens
ctcttagaatgtcat

SEQ ID NO: 1618204 - DNA, 15 bp, Homo sapiens
gctcttagaatgtca

SEQ ID NO: 1618205 - DNA, 15 bp, Homo sapiens
agctcttagaatgtc

SEQ ID NO: 1618206 - DNA, 15 bp, Homo sapiens
aagctcttagaatgt

SEQ ID NO: 1618207 - DNA, 15 bp, Homo sapiens
aaagctcttagaatg

SEQ ID NO: 1618208 - DNA, 15 bp, Homo sapiens
caaagctcttagaat

SEQ ID NO: 1618209 - DNA, 15 bp, Homo sapiens
acaaagctcttagaa

SEQ ID NO: 1618210 - DNA, 15 bp, Homo sapiens
cacaaagctcttaga

SEQ ID NO: 1618211 - DNA, 15 bp, Homo sapiens
tcacaaagctcttag

SEQ ID NO: 1618212 - DNA, 15 bp, Homo sapiens
ctcacaaagctctta

SEQ ID NO: 1618213 - DNA, 15 bp, Homo sapiens
tctcacaaagctctt

SEQ ID NO: 1618214 - DNA, 15 bp, Homo sapiens
ctctcacaaagctct

SEQ ID NO: 1618215 - DNA, 15 bp, Homo sapiens
cctctcacaaagctc

SEQ ID NO: 1618216 - DNA, 15 bp, Homo sapiens
tcctctcacaaagct

SEQ ID NO: 1618217 - DNA, 15 bp, Homo sapiens
ctcctctcacaaagc

SEQ ID NO: 1618218 - DNA, 15 bp, Homo sapiens
cctcctctcacaaag

SEQ ID NO: 1618219 - DNA, 15 bp, Homo sapiens
tcctcctctcacaaa

SEQ ID NO: 1618220 - DNA, 15 bp, Homo sapiens
gtcctcctctcacaa

SEQ ID NO: 1618221 - DNA, 15 bp, Homo sapiens
ggtcctcctctcaca

SEQ ID NO: 1618222 - DNA, 15 bp, Homo sapiens
aggtcctcctctcac

SEQ ID NO: 1618223 - DNA, 15 bp, Homo sapiens
caggtcctcctctca

SEQ ID NO: 1618224 - DNA, 15 bp, Homo sapiens
acaggtcctcctctc

SEQ ID NO: 1618225 - DNA, 15 bp, Homo sapiens
cacaggtcctcctct

SEQ ID NO: 1618226 - DNA, 15 bp, Homo sapiens
ccacaggtcctcctc

SEQ ID NO: 1618227 - DNA, 15 bp, Homo sapiens
gccacaggtcctcct

SEQ ID NO: 1618228 - DNA, 15 bp, Homo sapiens
agccacaggtcctcc

SEQ ID NO: 1618229 - DNA, 15 bp, Homo sapiens
aagccacaggtcctc

SEQ ID NO: 1618230 - DNA, 15 bp, Homo sapiens
aaagccacaggtcct

SEQ ID NO: 1618231 - DNA, 15 bp, Homo sapiens
caaagccacaggtcc

SEQ ID NO: 1618232 - DNA, 15 bp, Homo sapiens
tcaaagccacaggtc

SEQ ID NO: 1618233 - DNA, 15 bp, Homo sapiens
ctcaaagccacaggt

SEQ ID NO: 1618234 - DNA, 15 bp, Homo sapiens
gctcaaagccacagg

SEQ ID NO: 1618235 - DNA, 15 bp, Homo sapiens
ggctcaaagccacag

SEQ ID NO: 1618236 - DNA, 15 bp, Homo sapiens
aggctcaaagccaca

SEQ ID NO: 1618237 - DNA, 15 bp, Homo sapiens
gaggctcaaagccac

SEQ ID NO: 1618238 - DNA, 15 bp, Homo sapiens
tgaggctcaaagcca

SEQ ID NO: 1618239 - DNA, 15 bp, Homo sapiens
ctgaggctcaaagcc

SEQ ID NO: 1618240 - DNA, 15 bp, Homo sapiens
cctgaggctcaaagc

SEQ ID NO: 1618241 - DNA, 15 bp, Homo sapiens
ccctgaggctcaaag

SEQ ID NO: 1618242 - DNA, 15 bp, Homo sapiens
cccctgaggctcaaa

SEQ ID NO: 1618243 - DNA, 15 bp, Homo sapiens
tcccctgaggctcaa

SEQ ID NO: 1618244 - DNA, 15 bp, Homo sapiens
ttcccctgaggctca

SEQ ID NO: 1618245 - DNA, 15 bp, Homo sapiens
tttcccctgaggctc

SEQ ID NO: 1618246 - DNA, 15 bp, Homo sapiens
gtttcccctgaggct

SEQ ID NO: 1618247 - DNA, 15 bp, Homo sapiens
ggtttcccctgaggc

SEQ ID NO: 1618248 - DNA, 15 bp, Homo sapiens
tggtttcccctgagg

SEQ ID NO: 1618249 - DNA, 15 bp, Homo sapiens
ctggtttcccctgag

SEQ ID NO: 1618250 - DNA, 15 bp, Homo sapiens
tctggtttcccctga

SEQ ID NO: 1618251 - DNA, 15 bp, Homo sapiens
ctctggtttcccctg

SEQ ID NO: 1618252 - DNA, 15 bp, Homo sapiens
tctctggtttcccct

SEQ ID NO: 1618253 - DNA, 15 bp, Homo sapiens
gtctctggtttcccc

SEQ ID NO: 1618254 - DNA, 15 bp, Homo sapiens
tgtctctggtttccc

SEQ ID NO: 1618255 - DNA, 15 bp, Homo sapiens
ctgtctctggtttcc

SEQ ID NO: 1618256 - DNA, 15 bp, Homo sapiens
tctgtctctggtttc

SEQ ID NO: 1618257 - DNA, 15 bp, Homo sapiens
atctgtctctggttt

SEQ ID NO: 1618258 - DNA, 15 bp, Homo sapiens
catctgtctctggtt

SEQ ID NO: 1618259 - DNA, 15 bp, Homo sapiens
tcatctgtctctggt

SEQ ID NO: 1618260 - DNA, 15 bp, Homo sapiens
ttcatctgtctctgg

SEQ ID NO: 1618261 - DNA, 15 bp, Homo sapiens
attcatctgtctctg

SEQ ID NO: 1618262 - DNA, 15 bp, Homo sapiens
cattcatctgtctct

SEQ ID NO: 1618263 - DNA, 15 bp, Homo sapiens
acattcatctgtctc

SEQ ID NO: 1618264 - DNA, 15 bp, Homo sapiens
aacattcatctgtct

SEQ ID NO: 1618265 - DNA, 15 bp, Homo sapiens
gaacattcatctgtc

SEQ ID NO: 1618266 - DNA, 15 bp, Homo sapiens
tgaacattcatctgt

SEQ ID NO: 1618267 - DNA, 15 bp, Homo sapiens
atgaacattcatctg

SEQ ID NO: 1618268 - DNA, 15 bp, Homo sapiens
tatgaacattcatct

SEQ ID NO: 1618269 - DNA, 15 bp, Homo sapiens
atatgaacattcatc

SEQ ID NO: 1618270 - DNA, 15 bp, Homo sapiens
aatatgaacattcat

SEQ ID NO: 1618271 - DNA, 15 bp, Homo sapiens
aaatatgaacattca

SEQ ID NO: 1618272 - DNA, 15 bp, Homo sapiens
aaaatatgaacattc

SEQ ID NO: 1618273 - DNA, 15 bp, Homo sapiens
caaaatatgaacatt

SEQ ID NO: 1618274 - DNA, 15 bp, Homo sapiens
gcaaaatatgaacat

SEQ ID NO: 1618275 - DNA, 15 bp, Homo sapiens
agcaaaatatgaaca

SEQ ID NO: 1618276 - DNA, 15 bp, Homo sapiens
aagcaaaatatgaac

SEQ ID NO: 1618277 - DNA, 15 bp, Homo sapiens
taagcaaaatatgaa

SEQ ID NO: 1618278 - DNA, 15 bp, Homo sapiens
gtaagcaaaatatga

SEQ ID NO: 1618279 - DNA, 15 bp, Homo sapiens
tgtaagcaaaatatg

SEQ ID NO: 1618280 - DNA, 15 bp, Homo sapiens
ctgtaagcaaaatat

SEQ ID NO: 1618281 - DNA, 15 bp, Homo sapiens
cctgtaagcaaaata

SEQ ID NO: 1618282 - DNA, 15 bp, Homo sapiens
acctgtaagcaaaat

SEQ ID NO: 1618283 - DNA, 15 bp, Homo sapiens
cacctgtaagcaaaa

SEQ ID NO: 1618284 - DNA, 15 bp, Homo sapiens
ccacctgtaagcaaa

SEQ ID NO: 1618285 - DNA, 15 bp, Homo sapiens
accacctgtaagcaa

SEQ ID NO: 1618286 - DNA, 15 bp, Homo sapiens
aaccacctgtaagca

SEQ ID NO: 1618287 - DNA, 15 bp, Homo sapiens
aaaccacctgtaagc

SEQ ID NO: 1618288 - DNA, 15 bp, Homo sapiens
taaaccacctgtaag

SEQ ID NO: 1618289 - DNA, 15 bp, Homo sapiens
ttaaaccacctgtaa

SEQ ID NO: 1618290 - DNA, 15 bp, Homo sapiens
attaaaccacctgta

SEQ ID NO: 1618291 - DNA, 15 bp, Homo sapiens
gattaaaccacctgt

SEQ ID NO: 1618292 - DNA, 15 bp, Homo sapiens
ggattaaaccacctg

SEQ ID NO: 1618293 - DNA, 15 bp, Homo sapiens
aggattaaaccacct

SEQ ID NO: 1618294 - DNA, 15 bp, Homo sapiens
aaggattaaaccacc

SEQ ID NO: 1618295 - DNA, 15 bp, Homo sapiens
aaaggattaaaccac

SEQ ID NO: 1618296 - DNA, 15 bp, Homo sapiens
gaaaggattaaacca

SEQ ID NO: 1618297 - DNA, 15 bp, Homo sapiens
agaaaggattaaacc

SEQ ID NO: 1618298 - DNA, 15 bp, Homo sapiens
tagaaaggattaaac

SEQ ID NO: 1618299 - DNA, 15 bp, Homo sapiens
atagaaaggattaaa

SEQ ID NO: 1618300 - DNA, 15 bp, Homo sapiens
tatagaaaggattaa

SEQ ID NO: 1618301 - DNA, 15 bp, Homo sapiens
atatagaaaggatta

SEQ ID NO: 1618302 - DNA, 15 bp, Homo sapiens
tatatagaaaggatt

SEQ ID NO: 1618303 - DNA, 15 bp, Homo sapiens
gtatatagaaaggat

SEQ ID NO: 1618304 - DNA, 15 bp, Homo sapiens
tgtatatagaaagga

SEQ ID NO: 1618305 - DNA, 15 bp, Homo sapiens
gtgtatatagaaagg

SEQ ID NO: 1618306 - DNA, 15 bp, Homo sapiens
cgtgtatatagaaag

SEQ ID NO: 1618307 - DNA, 15 bp, Homo sapiens
ccgtgtatatagaaa

SEQ ID NO: 1618308 - DNA, 15 bp, Homo sapiens
tccgtgtatatagaa

SEQ ID NO: 1618309 - DNA, 15 bp, Homo sapiens
ctccgtgtatataga

SEQ ID NO: 1618310 - DNA, 15 bp, Homo sapiens
cctccgtgtatatag

SEQ ID NO: 1618311 - DNA, 15 bp, Homo sapiens
gcctccgtgtatata

SEQ ID NO: 1618312 - DNA, 15 bp, Homo sapiens
tgcctccgtgtatat

SEQ ID NO: 1618313 - DNA, 15 bp, Homo sapiens
ctgcctccgtgtata

SEQ ID NO: 1618314 - DNA, 15 bp, Homo sapiens
tctgcctccgtgtat

SEQ ID NO: 1618315 - DNA, 15 bp, Homo sapiens
gtctgcctccgtgta

SEQ ID NO: 1618316 - DNA, 15 bp, Homo sapiens
agtctgcctccgtgt

SEQ ID NO: 1618317 - DNA, 15 bp, Homo sapiens
gagtctgcctccgtg

SEQ ID NO: 1618318 - DNA, 15 bp, Homo sapiens
ggagtctgcctccgt

SEQ ID NO: 1618319 - DNA, 15 bp, Homo sapiens
gggagtctgcctccg

SEQ ID NO: 1618320 - DNA, 15 bp, Homo sapiens
agggagtctgcctcc

SEQ ID NO: 1618321 - DNA, 15 bp, Homo sapiens
cagggagtctgcctc

SEQ ID NO: 1618322 - DNA, 15 bp, Homo sapiens
ccagggagtctgcct

SEQ ID NO: 1618323 - DNA, 15 bp, Homo sapiens
cccagggagtctgcc

SEQ ID NO: 1618324 - DNA, 15 bp, Homo sapiens
acccagggagtctgc

SEQ ID NO: 1618325 - DNA, 15 bp, Homo sapiens
aacccagggagtctg

SEQ ID NO: 1618326 - DNA, 15 bp, Homo sapiens
aaacccagggagtct

SEQ ID NO: 1618327 - DNA, 15 bp, Homo sapiens
caaacccagggagtc

SEQ ID NO: 1618328 - DNA, 15 bp, Homo sapiens
ccaaacccagggagt

SEQ ID NO: 1618329 - DNA, 15 bp, Homo sapiens
tccaaacccagggag

SEQ ID NO: 1618330 - DNA, 15 bp, Homo sapiens
atccaaacccaggga

SEQ ID NO: 1618331 - DNA, 15 bp, Homo sapiens
gatccaaacccaggg

SEQ ID NO: 1618332 - DNA, 15 bp, Homo sapiens
ggatccaaacccagg

SEQ ID NO: 1618333 - DNA, 15 bp, Homo sapiens
tggatccaaacccag

SEQ ID NO: 1618334 - DNA, 15 bp, Homo sapiens
atggatccaaaccca

SEQ ID NO: 1618335 - DNA, 15 bp, Homo sapiens
gatggatccaaaccc

SEQ ID NO: 1618336 - DNA, 15 bp, Homo sapiens
agatggatccaaacc

SEQ ID NO: 1618337 - DNA, 15 bp, Homo sapiens
aagatggatccaaac

SEQ ID NO: 1618338 - DNA, 15 bp, Homo sapiens
aaagatggatccaaa

SEQ ID NO: 1618339 - DNA, 15 bp, Homo sapiens
aaaagatggatccaa

SEQ ID NO: 1618340 - DNA, 15 bp, Homo sapiens
taaaagatggatcca

SEQ ID NO: 1618341 - DNA, 15 bp, Homo sapiens
gtaaaagatggatcc

SEQ ID NO: 1618342 - DNA, 15 bp, Homo sapiens
tgtaaaagatggatc

SEQ ID NO: 1618343 - DNA, 15 bp, Homo sapiens
atgtaaaagatggat

SEQ ID NO: 1618344 - DNA, 15 bp, Homo sapiens
gatgtaaaagatgga

SEQ ID NO: 1618345 - DNA, 15 bp, Homo sapiens
agatgtaaaagatgg

SEQ ID NO: 1618346 - DNA, 15 bp, Homo sapiens
cagatgtaaaagatg

SEQ ID NO: 1618347 - DNA, 15 bp, Homo sapiens
ccagatgtaaaagat

SEQ ID NO: 1618348 - DNA, 15 bp, Homo sapiens
gccagatgtaaaaga

SEQ ID NO: 1618349 - DNA, 15 bp, Homo sapiens
agccagatgtaaaag

SEQ ID NO: 1618350 - DNA, 15 bp, Homo sapiens
cagccagatgtaaaa

SEQ ID NO: 1618351 - DNA, 15 bp, Homo sapiens
acagccagatgtaaa

SEQ ID NO: 1618352 - DNA, 15 bp, Homo sapiens
cacagccagatgtaa

SEQ ID NO: 1618353 - DNA, 15 bp, Homo sapiens
acacagccagatgta

SEQ ID NO: 1618354 - DNA, 15 bp, Homo sapiens
cacacagccagatgt

SEQ ID NO: 1618355 - DNA, 15 bp, Homo sapiens
acacacagccagatg

SEQ ID NO: 1618356 - DNA, 15 bp, Homo sapiens
gacacacagccagat

SEQ ID NO: 1618357 - DNA, 15 bp, Homo sapiens
ggacacacagccaga

SEQ ID NO: 1618358 - DNA, 15 bp, Homo sapiens
aggacacacagccag

SEQ ID NO: 1618359 - DNA, 15 bp, Homo sapiens
gaggacacacagcca

SEQ ID NO: 1618360 - DNA, 15 bp, Homo sapiens
agaggacacacagcc

SEQ ID NO: 1618361 - DNA, 15 bp, Homo sapiens
cagaggacacacagc

SEQ ID NO: 1618362 - DNA, 15 bp, Homo sapiens
ccagaggacacacag

SEQ ID NO: 1618363 - DNA, 15 bp, Homo sapiens
gccagaggacacaca

SEQ ID NO: 1618364 - DNA, 15 bp, Homo sapiens
tgccagaggacacac

SEQ ID NO: 1618365 - DNA, 15 bp, Homo sapiens
ttgccagaggacaca

SEQ ID NO: 1618366 - DNA, 15 bp, Homo sapiens
cttgccagaggacac

SEQ ID NO: 1618367 - DNA, 15 bp, Homo sapiens
acttgccagaggaca

SEQ ID NO: 1618368 - DNA, 15 bp, Homo sapiens
aacttgccagaggac

SEQ ID NO: 1618369 - DNA, 15 bp, Homo sapiens
caacttgccagagga

SEQ ID NO: 1618370 - DNA, 15 bp, Homo sapiens
ccaacttgccagagg

SEQ ID NO: 1618371 - DNA, 15 bp, Homo sapiens
accaacttgccagag

SEQ ID NO: 1618372 - DNA, 15 bp, Homo sapiens
aaccaacttgccaga

SEQ ID NO: 1618373 - DNA, 15 bp, Homo sapiens
taaccaacttgccag

SEQ ID NO: 1618374 - DNA, 15 bp, Homo sapiens
ttaaccaacttgcca

SEQ ID NO: 1618375 - DNA, 15 bp, Homo sapiens
gttaaccaacttgcc

SEQ ID NO: 1618376 - DNA, 15 bp, Homo sapiens
ggttaaccaacttgc

SEQ ID NO: 1618377 - DNA, 15 bp, Homo sapiens
aggttaaccaacttg

SEQ ID NO: 1618378 - DNA, 15 bp, Homo sapiens
caggttaaccaactt

SEQ ID NO: 1618379 - DNA, 15 bp, Homo sapiens
gcaggttaaccaact

SEQ ID NO: 1618380 - DNA, 15 bp, Homo sapiens
ggcaggttaaccaac

SEQ ID NO: 1618381 - DNA, 15 bp, Homo sapiens
aggcaggttaaccaa

SEQ ID NO: 1618382 - DNA, 15 bp, Homo sapiens
caggcaggttaacca

SEQ ID NO: 1618383 - DNA, 15 bp, Homo sapiens
acaggcaggttaacc

SEQ ID NO: 1618384 - DNA, 15 bp, Homo sapiens
cacaggcaggttaac

SEQ ID NO: 1618385 - DNA, 15 bp, Homo sapiens
gcacaggcaggttaa

SEQ ID NO: 1618386 - DNA, 15 bp, Homo sapiens
tgcacaggcaggtta

SEQ ID NO: 1618387 - DNA, 15 bp, Homo sapiens
gtgcacaggcaggtt

SEQ ID NO: 1618388 - DNA, 15 bp, Homo sapiens
agtgcacaggcaggt

SEQ ID NO: 1618389 - DNA, 15 bp, Homo sapiens
gagtgcacaggcagg

SEQ ID NO: 1618390 - DNA, 15 bp, Homo sapiens
agagtgcacaggcag

SEQ ID NO: 1618391 - DNA, 15 bp, Homo sapiens
gagagtgcacaggca

SEQ ID NO: 1618392 - DNA, 15 bp, Homo sapiens
agagagtgcacaggc

SEQ ID NO: 1618393 - DNA, 15 bp, Homo sapiens
gagagagtgcacagg

SEQ ID NO: 1618394 - DNA, 15 bp, Homo sapiens
tgagagagtgcacag

SEQ ID NO: 1618395 - DNA, 15 bp, Homo sapiens
atgagagagtgcaca

SEQ ID NO: 1618396 - DNA, 15 bp, Homo sapiens
gatgagagagtgcac

SEQ ID NO: 1618397 - DNA, 15 bp, Homo sapiens
ggatgagagagtgca

SEQ ID NO: 1618398 - DNA, 15 bp, Homo sapiens
gggatgagagagtgc

SEQ ID NO: 1618399 - DNA, 15 bp, Homo sapiens
ggggatgagagagtg

SEQ ID NO: 1618400 - DNA, 15 bp, Homo sapiens
tggggatgagagagt

SEQ ID NO: 1618401 - DNA, 15 bp, Homo sapiens
ttggggatgagagag

SEQ ID NO: 1618402 - DNA, 15 bp, Homo sapiens
tttggggatgagaga

SEQ ID NO: 1618403 - DNA, 15 bp, Homo sapiens
ttttggggatgagag

SEQ ID NO: 1618404 - DNA, 15 bp, Homo sapiens
attttggggatgaga

SEQ ID NO: 1618405 - DNA, 15 bp, Homo sapiens
cattttggggatgag

SEQ ID NO: 1618406 - DNA, 15 bp, Homo sapiens
ccattttggggatga

SEQ ID NO: 1618407 - DNA, 15 bp, Homo sapiens
cccattttggggatg

SEQ ID NO: 1618408 - DNA, 15 bp, Homo sapiens
tcccattttggggat

SEQ ID NO: 1618409 - DNA, 15 bp, Homo sapiens
gtcccattttgggga

SEQ ID NO: 1618410 - DNA, 15 bp, Homo sapiens
agtcccattttgggg

SEQ ID NO: 1618411 - DNA, 15 bp, Homo sapiens
tagtcccattttggg

SEQ ID NO: 1618412 - DNA, 15 bp, Homo sapiens
ttagtcccattttgg

SEQ ID NO: 1618413 - DNA, 15 bp, Homo sapiens
attagtcccattttg

SEQ ID NO: 1618414 - DNA, 15 bp, Homo sapiens
aattagtcccatttt

SEQ ID NO: 1618415 - DNA, 15 bp, Homo sapiens
taattagtcccattt

SEQ ID NO: 1618416 - DNA, 15 bp, Homo sapiens
ataattagtcccatt

SEQ ID NO: 1618417 - DNA, 15 bp, Homo sapiens
aataattagtcccat

SEQ ID NO: 1618418 - DNA, 15 bp, Homo sapiens
caataattagtccca

SEQ ID NO: 1618419 - DNA, 15 bp, Homo sapiens
acaataattagtccc

SEQ ID NO: 1618420 - DNA, 15 bp, Homo sapiens
tacaataattagtcc

SEQ ID NO: 1618421 - DNA, 15 bp, Homo sapiens
gtacaataattagtc

SEQ ID NO: 1618422 - DNA, 15 bp, Homo sapiens
ggtacaataattagt

SEQ ID NO: 1618423 - DNA, 15 bp, Homo sapiens
tggtacaataattag

SEQ ID NO: 1618424 - DNA, 15 bp, Homo sapiens
ctggtacaataatta

SEQ ID NO: 1618425 - DNA, 15 bp, Homo sapiens
actggtacaataatt

SEQ ID NO: 1618426 - DNA, 15 bp, Homo sapiens
tactggtacaataat

SEQ ID NO: 1618427 - DNA, 15 bp, Homo sapiens
gtactggtacaataa

SEQ ID NO: 1618428 - DNA, 15 bp, Homo sapiens
agtactggtacaata

SEQ ID NO: 1618429 - DNA, 15 bp, Homo sapiens
tagtactggtacaat

SEQ ID NO: 1618430 - DNA, 15 bp, Homo sapiens
ctagtactggtacaa

SEQ ID NO: 1618431 - DNA, 15 bp, Homo sapiens
tctagtactggtaca

SEQ ID NO: 1618432 - DNA, 15 bp, Homo sapiens
ctctagtactggtac

SEQ ID NO: 1618433 - DNA, 15 bp, Homo sapiens
actctagtactggta

SEQ ID NO: 1618434 - DNA, 15 bp, Homo sapiens
tactctagtactggt

SEQ ID NO: 1618435 - DNA, 15 bp, Homo sapiens
atactctagtactgg

SEQ ID NO: 1618436 - DNA, 15 bp, Homo sapiens
aatactctagtactg

SEQ ID NO: 1618437 - DNA, 15 bp, Homo sapiens
caatactctagtact

SEQ ID NO: 1618438 - DNA, 15 bp, Homo sapiens
gcaatactctagtac

SEQ ID NO: 1618439 - DNA, 15 bp, Homo sapiens
tgcaatactctagta

SEQ ID NO: 1618440 - DNA, 15 bp, Homo sapiens
ttgcaatactctagt

SEQ ID NO: 1618441 - DNA, 15 bp, Homo sapiens
cttgcaatactctag

SEQ ID NO: 1618442 - DNA, 15 bp, Homo sapiens
ccttgcaatactcta

SEQ ID NO: 1618443 - DNA, 15 bp, Homo sapiens
tccttgcaatactct

SEQ ID NO: 1618444 - DNA, 15 bp, Homo sapiens
atccttgcaatactc

SEQ ID NO: 1618445 - DNA, 15 bp, Homo sapiens
aatccttgcaatact

SEQ ID NO: 1618446 - DNA, 15 bp, Homo sapiens
caatccttgcaatac

SEQ ID NO: 1618447 - DNA, 15 bp, Homo sapiens
tcaatccttgcaata

SEQ ID NO: 1618448 - DNA, 15 bp, Homo sapiens
ttcaatccttgcaat

SEQ ID NO: 1618449 - DNA, 15 bp, Homo sapiens
attcaatccttgcaa

SEQ ID NO: 1618450 - DNA, 15 bp, Homo sapiens
cattcaatccttgca

SEQ ID NO: 1618451 - DNA, 15 bp, Homo sapiens
tcattcaatccttgc

SEQ ID NO: 1618452 - DNA, 15 bp, Homo sapiens
ttcattcaatccttg

SEQ ID NO: 1618453 - DNA, 15 bp, Homo sapiens
attcattcaatcctt

SEQ ID NO: 1618454 - DNA, 15 bp, Homo sapiens
aattcattcaatcct

SEQ ID NO: 1618455 - DNA, 15 bp, Homo sapiens
aaattcattcaatcc

SEQ ID NO: 1618456 - DNA, 15 bp, Homo sapiens
taaattcattcaatc

SEQ ID NO: 1618457 - DNA, 15 bp, Homo sapiens
ttaaattcattcaat

SEQ ID NO: 1618458 - DNA, 15 bp, Homo sapiens
tttaaattcattcaa

SEQ ID NO: 1618459 - DNA, 15 bp, Homo sapiens
ctttaaattcattca

SEQ ID NO: 1618460 - DNA, 15 bp, Homo sapiens
gctttaaattcattc

SEQ ID NO: 1618461 - DNA, 15 bp, Homo sapiens
tgctttaaattcatt

SEQ ID NO: 1618462 - DNA, 15 bp, Homo sapiens
ctgctttaaattcat

SEQ ID NO: 1618463 - DNA, 15 bp, Homo sapiens
tctgctttaaattca

SEQ ID NO: 1618464 - DNA, 15 bp, Homo sapiens
ctctgctttaaattc

SEQ ID NO: 1618465 - DNA, 15 bp, Homo sapiens
actctgctttaaatt

SEQ ID NO: 1618466 - DNA, 15 bp, Homo sapiens
cactctgctttaaat

SEQ ID NO: 1618467 - DNA, 15 bp, Homo sapiens
acactctgctttaaa

SEQ ID NO: 1618468 - DNA, 15 bp, Homo sapiens
aacactctgctttaa

SEQ ID NO: 1618469 - DNA, 15 bp, Homo sapiens
aaacactctgcttta

SEQ ID NO: 1618470 - DNA, 15 bp, Homo sapiens
taaacactctgcttt

SEQ ID NO: 1618471 - DNA, 15 bp, Homo sapiens
ctaaacactctgctt

SEQ ID NO: 1618472 - DNA, 15 bp, Homo sapiens
tctaaacactctgct

SEQ ID NO: 1618473 - DNA, 15 bp, Homo sapiens
ttctaaacactctgc

SEQ ID NO: 1618474 - DNA, 15 bp, Homo sapiens
gttctaaacactctg

SEQ ID NO: 1618475 - DNA, 15 bp, Homo sapiens
cgttctaaacactct

SEQ ID NO: 1618476 - DNA, 15 bp, Homo sapiens
acgttctaaacactc

SEQ ID NO: 1618477 - DNA, 15 bp, Homo sapiens
cacgttctaaacact

SEQ ID NO: 1618478 - DNA, 15 bp, Homo sapiens
acacgttctaaacac

SEQ ID NO: 1618479 - DNA, 15 bp, Homo sapiens
gacacgttctaaaca

SEQ ID NO: 1618480 - DNA, 15 bp, Homo sapiens
agacacgttctaaac

SEQ ID NO: 1618481 - DNA, 15 bp, Homo sapiens
cagacacgttctaaa

SEQ ID NO: 1618482 - DNA, 15 bp, Homo sapiens
acagacacgttctaa

SEQ ID NO: 1618483 - DNA, 15 bp, Homo sapiens
aacagacacgttcta

SEQ ID NO: 1618484 - DNA, 15 bp, Homo sapiens
caacagacacgttct

SEQ ID NO: 1618485 - DNA, 15 bp, Homo sapiens
gcaacagacacgttc

SEQ ID NO: 1618486 - DNA, 15 bp, Homo sapiens
tgcaacagacacgtt

SEQ ID NO: 1618487 - DNA, 15 bp, Homo sapiens
gtgcaacagacacgt

SEQ ID NO: 1618488 - DNA, 15 bp, Homo sapiens
tgtgcaacagacacg

SEQ ID NO: 1618489 - DNA, 15 bp, Homo sapiens
ctgtgcaacagacac

SEQ ID NO: 1618490 - DNA, 15 bp, Homo sapiens
actgtgcaacagaca

SEQ ID NO: 1618491 - DNA, 15 bp, Homo sapiens
tactgtgcaacagac

SEQ ID NO: 1618492 - DNA, 15 bp, Homo sapiens
ctactgtgcaacaga

SEQ ID NO: 1618493 - DNA, 15 bp, Homo sapiens
actactgtgcaacag

SEQ ID NO: 1618494 - DNA, 15 bp, Homo sapiens
aactactgtgcaaca

SEQ ID NO: 1618495 - DNA, 15 bp, Homo sapiens
taactactgtgcaac

SEQ ID NO: 1618496 - DNA, 15 bp, Homo sapiens
ataactactgtgcaa

SEQ ID NO: 1618497 - DNA, 15 bp, Homo sapiens
aataactactgtgca

SEQ ID NO: 1618498 - DNA, 15 bp, Homo sapiens
gaataactactgtgc

SEQ ID NO: 1618499 - DNA, 15 bp, Homo sapiens
tgaataactactgtg

SEQ ID NO: 1618500 - DNA, 15 bp, Homo sapiens
ctgaataactactgt

SEQ ID NO: 1618501 - DNA, 15 bp, Homo sapiens
cctgaataactactg

SEQ ID NO: 1618502 - DNA, 15 bp, Homo sapiens
tcctgaataactact

SEQ ID NO: 1618503 - DNA, 15 bp, Homo sapiens
ttcctgaataactac

SEQ ID NO: 1618504 - DNA, 15 bp, Homo sapiens
tttcctgaataacta

SEQ ID NO: 1618505 - DNA, 15 bp, Homo sapiens
ttttcctgaataact

SEQ ID NO: 1618506 - DNA, 15 bp, Homo sapiens
tttttcctgaataac

SEQ ID NO: 1618507 - DNA, 15 bp, Homo sapiens
ctttttcctgaataa

SEQ ID NO: 1618508 - DNA, 15 bp, Homo sapiens
gctttttcctgaata

SEQ ID NO: 1618509 - DNA, 15 bp, Homo sapiens
ggctttttcctgaat

SEQ ID NO: 1618510 - DNA, 15 bp, Homo sapiens
tggctttttcctgaa

SEQ ID NO: 1618511 - DNA, 15 bp, Homo sapiens
ctggctttttcctga

SEQ ID NO: 1618512 - DNA, 15 bp, Homo sapiens
actggctttttcctg

SEQ ID NO: 1618513 - DNA, 15 bp, Homo sapiens
aactggctttttcct

SEQ ID NO: 1618514 - DNA, 15 bp, Homo sapiens
caactggctttttcc

SEQ ID NO: 1618515 - DNA, 15 bp, Homo sapiens
acaactggctttttc

SEQ ID NO: 1618516 - DNA, 15 bp, Homo sapiens
gacaactggcttttt

SEQ ID NO: 1618517 - DNA, 15 bp, Homo sapiens
agacaactggctttt

SEQ ID NO: 1618518 - DNA, 15 bp, Homo sapiens
aagacaactggcttt

SEQ ID NO: 1618519 - DNA, 15 bp, Homo sapiens
aaagacaactggctt

SEQ ID NO: 1618520 - DNA, 15 bp, Homo sapiens
taaagacaactggct

SEQ ID NO: 1618521 - DNA, 15 bp, Homo sapiens
gtaaagacaactggc

SEQ ID NO: 1618522 - DNA, 15 bp, Homo sapiens
agtaaagacaactgg

SEQ ID NO: 1618523 - DNA, 15 bp, Homo sapiens
tagtaaagacaactg

SEQ ID NO: 1618524 - DNA, 15 bp, Homo sapiens
atagtaaagacaact

SEQ ID NO: 1618525 - DNA, 15 bp, Homo sapiens
aatagtaaagacaac

SEQ ID NO: 1618526 - DNA, 15 bp, Homo sapiens
caatagtaaagacaa

SEQ ID NO: 1618527 - DNA, 15 bp, Homo sapiens
gcaatagtaaagaca

SEQ ID NO: 1618528 - DNA, 15 bp, Homo sapiens
agcaatagtaaagac

SEQ ID NO: 1618529 - DNA, 15 bp, Homo sapiens
gagcaatagtaaaga

SEQ ID NO: 1618530 - DNA, 15 bp, Homo sapiens
tgagcaatagtaaag

SEQ ID NO: 1618531 - DNA, 15 bp, Homo sapiens
ctgagcaatagtaaa

SEQ ID NO: 1618532 - DNA, 15 bp, Homo sapiens
tctgagcaatagtaa

SEQ ID NO: 1618533 - DNA, 15 bp, Homo sapiens
atctgagcaatagta

SEQ ID NO: 1618534 - DNA, 15 bp, Homo sapiens
gatctgagcaatagt

SEQ ID NO: 1618535 - DNA, 15 bp, Homo sapiens
tgatctgagcaatag

SEQ ID NO: 1618536 - DNA, 15 bp, Homo sapiens
atgatctgagcaata

SEQ ID NO: 1618537 - DNA, 15 bp, Homo sapiens
gatgatctgagcaat

SEQ ID NO: 1618538 - DNA, 15 bp, Homo sapiens
tgatgatctgagcaa

SEQ ID NO: 1618539 - DNA, 15 bp, Homo sapiens
ttgatgatctgagca

SEQ ID NO: 1618540 - DNA, 15 bp, Homo sapiens
cttgatgatctgagc

SEQ ID NO: 1618541 - DNA, 15 bp, Homo sapiens
acttgatgatctgag

SEQ ID NO: 1618542 - DNA, 15 bp, Homo sapiens
aacttgatgatctga

SEQ ID NO: 1618543 - DNA, 15 bp, Homo sapiens
taacttgatgatctg

SEQ ID NO: 1618544 - DNA, 15 bp, Homo sapiens
ctaacttgatgatct

SEQ ID NO: 1618545 - DNA, 15 bp, Homo sapiens
gctaacttgatgatc

SEQ ID NO: 1618546 - DNA, 15 bp, Homo sapiens
ggctaacttgatgat

SEQ ID NO: 1618547 - DNA, 15 bp, Homo sapiens
aggctaacttgatga

SEQ ID NO: 1618548 - DNA, 15 bp, Homo sapiens
aaggctaacttgatg

SEQ ID NO: 1618549 - DNA, 15 bp, Homo sapiens
gaaggctaacttgat

SEQ ID NO: 1618550 - DNA, 15 bp, Homo sapiens
agaaggctaacttga

SEQ ID NO: 1618551 - DNA, 15 bp, Homo sapiens
gagaaggctaacttg

SEQ ID NO: 1618552 - DNA, 15 bp, Homo sapiens
ggagaaggctaactt

SEQ ID NO: 1618553 - DNA, 15 bp, Homo sapiens
tggagaaggctaact

SEQ ID NO: 1618554 - DNA, 15 bp, Homo sapiens
atggagaaggctaac

SEQ ID NO: 1618555 - DNA, 15 bp, Homo sapiens
tatggagaaggctaa

SEQ ID NO: 1618556 - DNA, 15 bp, Homo sapiens
atatggagaaggcta

SEQ ID NO: 1618557 - DNA, 15 bp, Homo sapiens
gatatggagaaggct

SEQ ID NO: 1618558 - DNA, 15 bp, Homo sapiens
agatatggagaaggc

SEQ ID NO: 1618559 - DNA, 15 bp, Homo sapiens
gagatatggagaagg

SEQ ID NO: 1618560 - DNA, 15 bp, Homo sapiens
agagatatggagaag

SEQ ID NO: 1618561 - DNA, 15 bp, Homo sapiens
tagagatatggagaa

SEQ ID NO: 1618562 - DNA, 15 bp, Homo sapiens
ttagagatatggaga

SEQ ID NO: 1618563 - DNA, 15 bp, Homo sapiens
gttagagatatggag

SEQ ID NO: 1618564 - DNA, 15 bp, Homo sapiens
tgttagagatatgga

SEQ ID NO: 1618565 - DNA, 15 bp, Homo sapiens
ctgttagagatatgg

SEQ ID NO: 1618566 - DNA, 15 bp, Homo sapiens
cctgttagagatatg

SEQ ID NO: 1618567 - DNA, 15 bp, Homo sapiens
gcctgttagagatat

SEQ ID NO: 1618568 - DNA, 15 bp, Homo sapiens
agcctgttagagata

SEQ ID NO: 1618569 - DNA, 15 bp, Homo sapiens
cagcctgttagagat

SEQ ID NO: 1618570 - DNA, 15 bp, Homo sapiens
acagcctgttagaga

SEQ ID NO: 1618571 - DNA, 15 bp, Homo sapiens
aacagcctgttagag

SEQ ID NO: 1618572 - DNA, 15 bp, Homo sapiens
aaacagcctgttaga

SEQ ID NO: 1618573 - DNA, 15 bp, Homo sapiens
gaaacagcctgttag

SEQ ID NO: 1618574 - DNA, 15 bp, Homo sapiens
agaaacagcctgtta

SEQ ID NO: 1618575 - DNA, 15 bp, Homo sapiens
tagaaacagcctgtt

SEQ ID NO: 1618576 - DNA, 15 bp, Homo sapiens
ttagaaacagcctgt

SEQ ID NO: 1618577 - DNA, 15 bp, Homo sapiens
gttagaaacagcctg

SEQ ID NO: 1618578 - DNA, 15 bp, Homo sapiens
agttagaaacagcct

SEQ ID NO: 1618579 - DNA, 15 bp, Homo sapiens
tagttagaaacagcc

SEQ ID NO: 1618580 - DNA, 15 bp, Homo sapiens
ttagttagaaacagc

SEQ ID NO: 1618581 - DNA, 15 bp, Homo sapiens
tttagttagaaacag

SEQ ID NO: 1618582 - DNA, 15 bp, Homo sapiens
atttagttagaaaca

SEQ ID NO: 1618583 - DNA, 15 bp, Homo sapiens
catttagttagaaac

SEQ ID NO: 1618584 - DNA, 15 bp, Homo sapiens
ccatttagttagaaa

SEQ ID NO: 1618585 - DNA, 15 bp, Homo sapiens
accatttagttagaa

SEQ ID NO: 1618586 - DNA, 15 bp, Homo sapiens
aaccatttagttaga

SEQ ID NO: 1618587 - DNA, 15 bp, Homo sapiens
caaccatttagttag

SEQ ID NO: 1618588 - DNA, 15 bp, Homo sapiens
ccaaccatttagtta

SEQ ID NO: 1618589 - DNA, 15 bp, Homo sapiens
tccaaccatttagtt

SEQ ID NO: 1618590 - DNA, 15 bp, Homo sapiens
ctccaaccatttagt

SEQ ID NO: 1618591 - DNA, 15 bp, Homo sapiens
tctccaaccatttag

SEQ ID NO: 1618592 - DNA, 15 bp, Homo sapiens
atctccaaccattta

SEQ ID NO: 1618593 - DNA, 15 bp, Homo sapiens
gatctccaaccattt

SEQ ID NO: 1618594 - DNA, 15 bp, Homo sapiens
agatctccaaccatt

SEQ ID NO: 1618595 - DNA, 15 bp, Homo sapiens
cagatctccaaccat

SEQ ID NO: 1618596 - DNA, 15 bp, Homo sapiens
ccagatctccaacca

SEQ ID NO: 1618597 - DNA, 15 bp, Homo sapiens
gccagatctccaacc

SEQ ID NO: 1618598 - DNA, 15 bp, Homo sapiens
ggccagatctccaac

SEQ ID NO: 1618599 - DNA, 15 bp, Homo sapiens
tggccagatctccaa

SEQ ID NO: 1618600 - DNA, 15 bp, Homo sapiens
ctggccagatctcca

SEQ ID NO: 1618601 - DNA, 15 bp, Homo sapiens
cctggccagatctcc

SEQ ID NO: 1618602 - DNA, 15 bp, Homo sapiens
acctggccagatctc

SEQ ID NO: 1618603 - DNA, 15 bp, Homo sapiens
gacctggccagatct

SEQ ID NO: 1618604 - DNA, 15 bp, Homo sapiens
tgacctggccagatc

SEQ ID NO: 1618605 - DNA, 15 bp, Homo sapiens
ctgacctggccagat

SEQ ID NO: 1618606 - DNA, 15 bp, Homo sapiens
actgacctggccaga

SEQ ID NO: 1618607 - DNA, 15 bp, Homo sapiens
gactgacctggccag

SEQ ID NO: 1618608 - DNA, 15 bp, Homo sapiens
ggactgacctggcca

SEQ ID NO: 1618609 - DNA, 15 bp, Homo sapiens
gggactgacctggcc

SEQ ID NO: 1618610 - DNA, 15 bp, Homo sapiens
agggactgacctggc

SEQ ID NO: 1618611 - DNA, 15 bp, Homo sapiens
cagggactgacctgg

SEQ ID NO: 1618612 - DNA, 15 bp, Homo sapiens
gcagggactgacctg

SEQ ID NO: 1618613 - DNA, 15 bp, Homo sapiens
agcagggactgacct

SEQ ID NO: 1618614 - DNA, 15 bp, Homo sapiens
aagcagggactgacc

SEQ ID NO: 1618615 - DNA, 15 bp, Homo sapiens
aaagcagggactgac

SEQ ID NO: 1618616 - DNA, 15 bp, Homo sapiens
taaagcagggactga

SEQ ID NO: 1618617 - DNA, 15 bp, Homo sapiens
ttaaagcagggactg

SEQ ID NO: 1618618 - DNA, 15 bp, Homo sapiens
tttaaagcagggact

SEQ ID NO: 1618619 - DNA, 15 bp, Homo sapiens
atttaaagcagggac

SEQ ID NO: 1618620 - DNA, 15 bp, Homo sapiens
gatttaaagcaggga

SEQ ID NO: 1618621 - DNA, 15 bp, Homo sapiens
agatttaaagcaggg

SEQ ID NO: 1618622 - DNA, 15 bp, Homo sapiens
aagatttaaagcagg

SEQ ID NO: 1618623 - DNA, 15 bp, Homo sapiens
caagatttaaagcag

SEQ ID NO: 1618624 - DNA, 15 bp, Homo sapiens
tcaagatttaaagca

SEQ ID NO: 1618625 - DNA, 15 bp, Homo sapiens
gtcaagatttaaagc

SEQ ID NO: 1618626 - DNA, 15 bp, Homo sapiens
agtcaagatttaaag

SEQ ID NO: 1618627 - DNA, 15 bp, Homo sapiens
aagtcaagatttaaa

SEQ ID NO: 1618628 - DNA, 15 bp, Homo sapiens
gaagtcaagatttaa

SEQ ID NO: 1618629 - DNA, 15 bp, Homo sapiens
agaagtcaagattta

SEQ ID NO: 1618630 - DNA, 15 bp, Homo sapiens
cagaagtcaagattt

SEQ ID NO: 1618631 - DNA, 15 bp, Homo sapiens
tcagaagtcaagatt

SEQ ID NO: 1618632 - DNA, 15 bp, Homo sapiens
atcagaagtcaagat

SEQ ID NO: 1618633 - DNA, 15 bp, Homo sapiens
gatcagaagtcaaga

SEQ ID NO: 1618634 - DNA, 15 bp, Homo sapiens
agatcagaagtcaag

SEQ ID NO: 1618635 - DNA, 15 bp, Homo sapiens
aagatcagaagtcaa

SEQ ID NO: 1618636 - DNA, 15 bp, Homo sapiens
taagatcagaagtca

SEQ ID NO: 1618637 - DNA, 15 bp, Homo sapiens
ataagatcagaagtc

SEQ ID NO: 1618638 - DNA, 15 bp, Homo sapiens
cataagatcagaagt

SEQ ID NO: 1618639 - DNA, 15 bp, Homo sapiens
ccataagatcagaag

SEQ ID NO: 1618640 - DNA, 15 bp, Homo sapiens
tccataagatcagaa

SEQ ID NO: 1618641 - DNA, 15 bp, Homo sapiens
gtccataagatcaga

SEQ ID NO: 1618642 - DNA, 15 bp, Homo sapiens
tgtccataagatcag

SEQ ID NO: 1618643 - DNA, 15 bp, Homo sapiens
gtgtccataagatca

SEQ ID NO: 1618644 - DNA, 15 bp, Homo sapiens
ggtgtccataagatc

SEQ ID NO: 1618645 - DNA, 15 bp, Homo sapiens
gggtgtccataagat

SEQ ID NO: 1618646 - DNA, 15 bp, Homo sapiens
agggtgtccataaga

SEQ ID NO: 1618647 - DNA, 15 bp, Homo sapiens
cagggtgtccataag

SEQ ID NO: 1618648 - DNA, 15 bp, Homo sapiens
gcagggtgtccataa

SEQ ID NO: 1618649 - DNA, 15 bp, Homo sapiens
tgcagggtgtccata

SEQ ID NO: 1618650 - DNA, 15 bp, Homo sapiens
ttgcagggtgtccat

SEQ ID NO: 1618651 - DNA, 15 bp, Homo sapiens
gttgcagggtgtcca

SEQ ID NO: 1618652 - DNA, 15 bp, Homo sapiens
ggttgcagggtgtcc

SEQ ID NO: 1618653 - DNA, 15 bp, Homo sapiens
aggttgcagggtgtc

SEQ ID NO: 1618654 - DNA, 15 bp, Homo sapiens
gaggttgcagggtgt

SEQ ID NO: 1618655 - DNA, 15 bp, Homo sapiens
cgaggttgcagggtg

SEQ ID NO: 1618656 - DNA, 15 bp, Homo sapiens
acgaggttgcagggt

SEQ ID NO: 1618657 - DNA, 15 bp, Homo sapiens
cacgaggttgcaggg

SEQ ID NO: 1618658 - DNA, 15 bp, Homo sapiens
gcacgaggttgcagg

SEQ ID NO: 1618659 - DNA, 15 bp, Homo sapiens
ggcacgaggttgcag

SEQ ID NO: 1618660 - DNA, 15 bp, Homo sapiens
tggcacgaggttgca

SEQ ID NO: 1618661 - DNA, 15 bp, Homo sapiens
ctggcacgaggttgc

SEQ ID NO: 1618662 - DNA, 15 bp, Homo sapiens
gctggcacgaggttg

SEQ ID NO: 1618663 - DNA, 15 bp, Homo sapiens
ggctggcacgaggtt

SEQ ID NO: 1618664 - DNA, 15 bp, Homo sapiens
gggctggcacgaggt

SEQ ID NO: 1618665 - DNA, 15 bp, Homo sapiens
ggggctggcacgagg

SEQ ID NO: 1618666 - DNA, 15 bp, Homo sapiens
cggggctggcacgag

SEQ ID NO: 1618667 - DNA, 15 bp, Homo sapiens
acggggctggcacga

SEQ ID NO: 1618668 - DNA, 15 bp, Homo sapiens
gacggggctggcacg

SEQ ID NO: 1618669 - DNA, 15 bp, Homo sapiens
agacggggctggcac

SEQ ID NO: 1618670 - DNA, 15 bp, Homo sapiens
gagacggggctggca

SEQ ID NO: 1618671 - DNA, 15 bp, Homo sapiens
agagacggggctggc

SEQ ID NO: 1618672 - DNA, 15 bp, Homo sapiens
aagagacggggctgg

SEQ ID NO: 1618673 - DNA, 15 bp, Homo sapiens
aaagagacggggctg

SEQ ID NO: 1618674 - DNA, 15 bp, Homo sapiens
aaaagagacggggct

SEQ ID NO: 1618675 - DNA, 15 bp, Homo sapiens
gaaaagagacggggc

SEQ ID NO: 1618676 - DNA, 15 bp, Homo sapiens
cgaaaagagacgggg

SEQ ID NO: 1618677 - DNA, 15 bp, Homo sapiens
tcgaaaagagacggg

SEQ ID NO: 1618678 - DNA, 15 bp, Homo sapiens
atcgaaaagagacgg

SEQ ID NO: 1618679 - DNA, 15 bp, Homo sapiens
gatcgaaaagagacg

SEQ ID NO: 1618680 - DNA, 15 bp, Homo sapiens
agatcgaaaagagac

SEQ ID NO: 1618681 - DNA, 15 bp, Homo sapiens
aagatcgaaaagaga

SEQ ID NO: 1618682 - DNA, 15 bp, Homo sapiens
gaagatcgaaaagag

SEQ ID NO: 1618683 - DNA, 15 bp, Homo sapiens
ggaagatcgaaaaga

SEQ ID NO: 1618684 - DNA, 15 bp, Homo sapiens
tggaagatcgaaaag

SEQ ID NO: 1618685 - DNA, 15 bp, Homo sapiens
ttggaagatcgaaaa

SEQ ID NO: 1618686 - DNA, 15 bp, Homo sapiens
attggaagatcgaaa

SEQ ID NO: 1618687 - DNA, 15 bp, Homo sapiens
tattggaagatcgaa

SEQ ID NO: 1618688 - DNA, 15 bp, Homo sapiens
ttattggaagatcga

SEQ ID NO: 1618689 - DNA, 15 bp, Homo sapiens
attattggaagatcg

SEQ ID NO: 1618690 - DNA, 15 bp, Homo sapiens
tattattggaagatc

SEQ ID NO: 1618691 - DNA, 15 bp, Homo sapiens
ttattattggaagat

SEQ ID NO: 1618692 - DNA, 15 bp, Homo sapiens
attattattggaaga

SEQ ID NO: 1618693 - DNA, 15 bp, Homo sapiens
aattattattggaag

SEQ ID NO: 1618694 - DNA, 15 bp, Homo sapiens
aaattattattggaa

SEQ ID NO: 1618695 - DNA, 15 bp, Homo sapiens
taaattattattgga

SEQ ID NO: 1618696 - DNA, 15 bp, Homo sapiens
gtaaattattattgg

SEQ ID NO: 1618697 - DNA, 15 bp, Homo sapiens
cgtaaattattattg

SEQ ID NO: 1618698 - DNA, 15 bp, Homo sapiens
acgtaaattattatt

SEQ ID NO: 1618699 - DNA, 15 bp, Homo sapiens
tacgtaaattattat

SEQ ID NO: 1618700 - DNA, 15 bp, Homo sapiens
gtacgtaaattatta

SEQ ID NO: 1618701 - DNA, 15 bp, Homo sapiens
tgtacgtaaattatt

SEQ ID NO: 1618702 - DNA, 15 bp, Homo sapiens
ctgtacgtaaattat

SEQ ID NO: 1618703 - DNA, 15 bp, Homo sapiens
actgtacgtaaatta

SEQ ID NO: 1618704 - DNA, 15 bp, Homo sapiens
gactgtacgtaaatt

SEQ ID NO: 1618705 - DNA, 15 bp, Homo sapiens
ggactgtacgtaaat

SEQ ID NO: 1618706 - DNA, 15 bp, Homo sapiens
gggactgtacgtaaa

SEQ ID NO: 1618707 - DNA, 15 bp, Homo sapiens
agggactgtacgtaa

SEQ ID NO: 1618708 - DNA, 15 bp, Homo sapiens
cagggactgtacgta

SEQ ID NO: 1618709 - DNA, 15 bp, Homo sapiens
tcagggactgtacgt

SEQ ID NO: 1618710 - DNA, 15 bp, Homo sapiens
gtcagggactgtacg

SEQ ID NO: 1618711 - DNA, 15 bp, Homo sapiens
agtcagggactgtac

SEQ ID NO: 1618712 - DNA, 15 bp, Homo sapiens
tagtcagggactgta

SEQ ID NO: 1618713 - DNA, 15 bp, Homo sapiens
ctagtcagggactgt

SEQ ID NO: 1618714 - DNA, 15 bp, Homo sapiens
actagtcagggactg

SEQ ID NO: 1618715 - DNA, 15 bp, Homo sapiens
cactagtcagggact

SEQ ID NO: 1618716 - DNA, 15 bp, Homo sapiens
acactagtcagggac

SEQ ID NO: 1618717 - DNA, 15 bp, Homo sapiens
aacactagtcaggga

SEQ ID NO: 1618718 - DNA, 15 bp, Homo sapiens
taacactagtcaggg

SEQ ID NO: 1618719 - DNA, 15 bp, Homo sapiens
ctaacactagtcagg

SEQ ID NO: 1618720 - DNA, 15 bp, Homo sapiens
actaacactagtcag

SEQ ID NO: 1618721 - DNA, 15 bp, Homo sapiens
aactaacactagtca

SEQ ID NO: 1618722 - DNA, 15 bp, Homo sapiens
gaactaacactagtc

SEQ ID NO: 1618723 - DNA, 15 bp, Homo sapiens
agaactaacactagt

SEQ ID NO: 1618724 - DNA, 15 bp, Homo sapiens
gagaactaacactag

SEQ ID NO: 1618725 - DNA, 15 bp, Homo sapiens
tgagaactaacacta

SEQ ID NO: 1618726 - DNA, 15 bp, Homo sapiens
gtgagaactaacact

SEQ ID NO: 1618727 - DNA, 15 bp, Homo sapiens
cgtgagaactaacac

SEQ ID NO: 1618728 - DNA, 15 bp, Homo sapiens
acgtgagaactaaca

SEQ ID NO: 1618729 - DNA, 15 bp, Homo sapiens
cacgtgagaactaac

SEQ ID NO: 1618730 - DNA, 15 bp, Homo sapiens
acacgtgagaactaa

SEQ ID NO: 1618731 - DNA, 15 bp, Homo sapiens
gacacgtgagaacta

SEQ ID NO: 1618732 - DNA, 15 bp, Homo sapiens
agacacgtgagaact

SEQ ID NO: 1618733 - DNA, 15 bp, Homo sapiens
aagacacgtgagaac

SEQ ID NO: 1618734 - DNA, 15 bp, Homo sapiens
taagacacgtgagaa

SEQ ID NO: 1618735 - DNA, 15 bp, Homo sapiens
ttaagacacgtgaga

SEQ ID NO: 1618736 - DNA, 15 bp, Homo sapiens
attaagacacgtgag

SEQ ID NO: 1618737 - DNA, 15 bp, Homo sapiens
tattaagacacgtga

SEQ ID NO: 1618738 - DNA, 15 bp, Homo sapiens
atattaagacacgtg

SEQ ID NO: 1618739 - DNA, 15 bp, Homo sapiens
aatattaagacacgt

SEQ ID NO: 1618740 - DNA, 15 bp, Homo sapiens
aaatattaagacacg

SEQ ID NO: 1618741 - DNA, 15 bp, Homo sapiens
gaaatattaagacac

SEQ ID NO: 1618742 - DNA, 15 bp, Homo sapiens
tgaaatattaagaca

SEQ ID NO: 1618743 - DNA, 15 bp, Homo sapiens
ctgaaatattaagac

SEQ ID NO: 1618744 - DNA, 15 bp, Homo sapiens
actgaaatattaaga

SEQ ID NO: 1618745 - DNA, 15 bp, Homo sapiens
tactgaaatattaag

SEQ ID NO: 1618746 - DNA, 15 bp, Homo sapiens
gtactgaaatattaa

SEQ ID NO: 1618747 - DNA, 15 bp, Homo sapiens
agtactgaaatatta

SEQ ID NO: 1618748 - DNA, 15 bp, Homo sapiens
gagtactgaaatatt

SEQ ID NO: 1618749 - DNA, 15 bp, Homo sapiens
tgagtactgaaatat

SEQ ID NO: 1618750 - DNA, 15 bp, Homo sapiens
gtgagtactgaaata

SEQ ID NO: 1618751 - DNA, 15 bp, Homo sapiens
agtgagtactgaaat

SEQ ID NO: 1618752 - DNA, 15 bp, Homo sapiens
tagtgagtactgaaa

SEQ ID NO: 1618753 - DNA, 15 bp, Homo sapiens
ttagtgagtactgaa

SEQ ID NO: 1618754 - DNA, 15 bp, Homo sapiens
tttagtgagtactga

SEQ ID NO: 1618755 - DNA, 15 bp, Homo sapiens
atttagtgagtactg

SEQ ID NO: 1618756 - DNA, 15 bp, Homo sapiens
gatttagtgagtact

SEQ ID NO: 1618757 - DNA, 15 bp, Homo sapiens
agatttagtgagtac

SEQ ID NO: 1618758 - DNA, 15 bp, Homo sapiens
aagatttagtgagta

SEQ ID NO: 1618759 - DNA, 15 bp, Homo sapiens
gaagatttagtgagt

SEQ ID NO: 1618760 - DNA, 15 bp, Homo sapiens
tgaagatttagtgag

SEQ ID NO: 1618761 - DNA, 15 bp, Homo sapiens
gtgaagatttagtga

SEQ ID NO: 1618762 - DNA, 15 bp, Homo sapiens
agtgaagatttagtg

SEQ ID NO: 1618763 - DNA, 15 bp, Homo sapiens
aagtgaagatttagt

SEQ ID NO: 1618764 - DNA, 15 bp, Homo sapiens
aaagtgaagatttag

SEQ ID NO: 1618765 - DNA, 15 bp, Homo sapiens
gaaagtgaagattta

SEQ ID NO: 1618766 - DNA, 15 bp, Homo sapiens
tgaaagtgaagattt

SEQ ID NO: 1618767 - DNA, 15 bp, Homo sapiens
ctgaaagtgaagatt

SEQ ID NO: 1618768 - DNA, 15 bp, Homo sapiens
cctgaaagtgaagat

SEQ ID NO: 1618769 - DNA, 15 bp, Homo sapiens
tcctgaaagtgaaga

SEQ ID NO: 1618770 - DNA, 15 bp, Homo sapiens
ttcctgaaagtgaag

SEQ ID NO: 1618771 - DNA, 15 bp, Homo sapiens
cttcctgaaagtgaa

SEQ ID NO: 1618772 - DNA, 15 bp, Homo sapiens
tcttcctgaaagtga

SEQ ID NO: 1618773 - DNA, 15 bp, Homo sapiens
atcttcctgaaagtg

SEQ ID NO: 1618774 - DNA, 15 bp, Homo sapiens
catcttcctgaaagt

SEQ ID NO: 1618775 - DNA, 15 bp, Homo sapiens
acatcttcctgaaag

SEQ ID NO: 1618776 - DNA, 15 bp, Homo sapiens
tacatcttcctgaaa

SEQ ID NO: 1618777 - DNA, 15 bp, Homo sapiens
ttacatcttcctgaa

SEQ ID NO: 1618778 - DNA, 15 bp, Homo sapiens
gttacatcttcctga

SEQ ID NO: 1618779 - DNA, 15 bp, Homo sapiens
tgttacatcttcctg

SEQ ID NO: 1618780 - DNA, 15 bp, Homo sapiens
ctgttacatcttcct

SEQ ID NO: 1618781 - DNA, 15 bp, Homo sapiens
cctgttacatcttcc

SEQ ID NO: 1618782 - DNA, 15 bp, Homo sapiens
ccctgttacatcttc

SEQ ID NO: 1618783 - DNA, 15 bp, Homo sapiens
accctgttacatctt

SEQ ID NO: 1618784 - DNA, 15 bp, Homo sapiens
caccctgttacatct

SEQ ID NO: 1618785 - DNA, 15 bp, Homo sapiens
ccaccctgttacatc

SEQ ID NO: 1618786 - DNA, 15 bp, Homo sapiens
cccaccctgttacat

SEQ ID NO: 1618787 - DNA, 15 bp, Homo sapiens
gcccaccctgttaca

SEQ ID NO: 1618788 - DNA, 15 bp, Homo sapiens
cgcccaccctgttac

SEQ ID NO: 1618789 - DNA, 15 bp, Homo sapiens
ccgcccaccctgtta

SEQ ID NO: 1618790 - DNA, 15 bp, Homo sapiens
accgcccaccctgtt

SEQ ID NO: 1618791 - DNA, 15 bp, Homo sapiens
caccgcccaccctgt

SEQ ID NO: 1618792 - DNA, 15 bp, Homo sapiens
ccaccgcccaccctg

SEQ ID NO: 1618793 - DNA, 15 bp, Homo sapiens
gccaccgcccaccct

SEQ ID NO: 1618794 - DNA, 15 bp, Homo sapiens
tgccaccgcccaccc

SEQ ID NO: 1618795 - DNA, 15 bp, Homo sapiens
ctgccaccgcccacc

SEQ ID NO: 1618796 - DNA, 15 bp, Homo sapiens
actgccaccgcccac

SEQ ID NO: 1618797 - DNA, 15 bp, Homo sapiens
cactgccaccgccca

SEQ ID NO: 1618798 - DNA, 15 bp, Homo sapiens
gcactgccaccgccc

SEQ ID NO: 1618799 - DNA, 15 bp, Homo sapiens
ggcactgccaccgcc

SEQ ID NO: 1618800 - DNA, 15 bp, Homo sapiens
cggcactgccaccgc

SEQ ID NO: 1618801 - DNA, 15 bp, Homo sapiens
acggcactgccaccg

SEQ ID NO: 1618802 - DNA, 15 bp, Homo sapiens
cacggcactgccacc

SEQ ID NO: 1618803 - DNA, 15 bp, Homo sapiens
acacggcactgccac

SEQ ID NO: 1618804 - DNA, 15 bp, Homo sapiens
aacacggcactgcca

SEQ ID NO: 1618805 - DNA, 15 bp, Homo sapiens
taacacggcactgcc

SEQ ID NO: 1618806 - DNA, 15 bp, Homo sapiens
ataacacggcactgc

SEQ ID NO: 1618807 - DNA, 15 bp, Homo sapiens
cataacacggcactg

SEQ ID NO: 1618808 - DNA, 15 bp, Homo sapiens
acataacacggcact

SEQ ID NO: 1618809 - DNA, 15 bp, Homo sapiens
gacataacacggcac

SEQ ID NO: 1618810 - DNA, 15 bp, Homo sapiens
tgacataacacggca

SEQ ID NO: 1618811 - DNA, 15 bp, Homo sapiens
ttgacataacacggc

SEQ ID NO: 1618812 - DNA, 15 bp, Homo sapiens
cttgacataacacgg

SEQ ID NO: 1618813 - DNA, 15 bp, Homo sapiens
ccttgacataacacg

SEQ ID NO: 1618814 - DNA, 15 bp, Homo sapiens
accttgacataacac

SEQ ID NO: 1618815 - DNA, 15 bp, Homo sapiens
caccttgacataaca

SEQ ID NO: 1618816 - DNA, 15 bp, Homo sapiens
tcaccttgacataac

SEQ ID NO: 1618817 - DNA, 15 bp, Homo sapiens
gtcaccttgacataa

SEQ ID NO: 1618818 - DNA, 15 bp, Homo sapiens
tgtcaccttgacata

SEQ ID NO: 1618819 - DNA, 15 bp, Homo sapiens
ctgtcaccttgacat

SEQ ID NO: 1618820 - DNA, 15 bp, Homo sapiens
gctgtcaccttgaca

SEQ ID NO: 1618821 - DNA, 15 bp, Homo sapiens
ggctgtcaccttgac

SEQ ID NO: 1618822 - DNA, 15 bp, Homo sapiens
aggctgtcaccttga

SEQ ID NO: 1618823 - DNA, 15 bp, Homo sapiens
aaggctgtcaccttg

SEQ ID NO: 1618824 - DNA, 15 bp, Homo sapiens
taaggctgtcacctt

SEQ ID NO: 1618825 - DNA, 15 bp, Homo sapiens
ctaaggctgtcacct

SEQ ID NO: 1618826 - DNA, 15 bp, Homo sapiens
gctaaggctgtcacc

SEQ ID NO: 1618827 - DNA, 15 bp, Homo sapiens
tgctaaggctgtcac

SEQ ID NO: 1618828 - DNA, 15 bp, Homo sapiens
gtgctaaggctgtca

SEQ ID NO: 1618829 - DNA, 15 bp, Homo sapiens
ggtgctaaggctgtc

SEQ ID NO: 1618830 - DNA, 15 bp, Homo sapiens
cggtgctaaggctgt

SEQ ID NO: 1618831 - DNA, 15 bp, Homo sapiens
tcggtgctaaggctg

SEQ ID NO: 1618832 - DNA, 15 bp, Homo sapiens
gtcggtgctaaggct

SEQ ID NO: 1618833 - DNA, 15 bp, Homo sapiens
ggtcggtgctaaggc

SEQ ID NO: 1618834 - DNA, 15 bp, Homo sapiens
aggtcggtgctaagg

SEQ ID NO: 1618835 - DNA, 15 bp, Homo sapiens
aaggtcggtgctaag

SEQ ID NO: 1618836 - DNA, 15 bp, Homo sapiens
gaaggtcggtgctaa

SEQ ID NO: 1618837 - DNA, 15 bp, Homo sapiens
tgaaggtcggtgcta

SEQ ID NO: 1618838 - DNA, 15 bp, Homo sapiens
gtgaaggtcggtgct

SEQ ID NO: 1618839 - DNA, 15 bp, Homo sapiens
agtgaaggtcggtgc

SEQ ID NO: 1618840 - DNA, 15 bp, Homo sapiens
tagtgaaggtcggtg

SEQ ID NO: 1618841 - DNA, 15 bp, Homo sapiens
ttagtgaaggtcggt

SEQ ID NO: 1618842 - DNA, 15 bp, Homo sapiens
gttagtgaaggtcgg

SEQ ID NO: 1618843 - DNA, 15 bp, Homo sapiens
agttagtgaaggtcg

SEQ ID NO: 1618844 - DNA, 15 bp, Homo sapiens
tagttagtgaaggtc

SEQ ID NO: 1618845 - DNA, 15 bp, Homo sapiens
ttagttagtgaaggt

SEQ ID NO: 1618846 - DNA, 15 bp, Homo sapiens
cttagttagtgaagg

SEQ ID NO: 1618847 - DNA, 15 bp, Homo sapiens
ccttagttagtgaag

SEQ ID NO: 1618848 - DNA, 15 bp, Homo sapiens
cccttagttagtgaa

SEQ ID NO: 1618849 - DNA, 15 bp, Homo sapiens
ccccttagttagtga

SEQ ID NO: 1618850 - DNA, 15 bp, Homo sapiens
gccccttagttagtg

SEQ ID NO: 1618851 - DNA, 15 bp, Homo sapiens
ggccccttagttagt

SEQ ID NO: 1618852 - DNA, 15 bp, Homo sapiens
aggccccttagttag

SEQ ID NO: 1618853 - DNA, 15 bp, Homo sapiens
gaggccccttagtta

SEQ ID NO: 1618854 - DNA, 15 bp, Homo sapiens
cgaggccccttagtt

SEQ ID NO: 1618855 - DNA, 15 bp, Homo sapiens
ccgaggccccttagt

SEQ ID NO: 1618856 - DNA, 15 bp, Homo sapiens
gccgaggccccttag

SEQ ID NO: 1618857 - DNA, 15 bp, Homo sapiens
ggccgaggcccctta

SEQ ID NO: 1618858 - DNA, 15 bp, Homo sapiens
aggccgaggcccctt

SEQ ID NO: 1618859 - DNA, 15 bp, Homo sapiens
gaggccgaggcccct

SEQ ID NO: 1618860 - DNA, 15 bp, Homo sapiens
agaggccgaggcccc

SEQ ID NO: 1618861 - DNA, 15 bp, Homo sapiens
gagaggccgaggccc

SEQ ID NO: 1618862 - DNA, 15 bp, Homo sapiens
ggagaggccgaggcc

SEQ ID NO: 1618863 - DNA, 15 bp, Homo sapiens
tggagaggccgaggc

SEQ ID NO: 1618864 - DNA, 15 bp, Homo sapiens
ttggagaggccgagg

SEQ ID NO: 1618865 - DNA, 15 bp, Homo sapiens
attggagaggccgag

SEQ ID NO: 1618866 - DNA, 15 bp, Homo sapiens
gattggagaggccga

SEQ ID NO: 1618867 - DNA, 15 bp, Homo sapiens
agattggagaggccg

SEQ ID NO: 1618868 - DNA, 15 bp, Homo sapiens
aagattggagaggcc

SEQ ID NO: 1618869 - DNA, 15 bp, Homo sapiens
taagattggagaggc

SEQ ID NO: 1618870 - DNA, 15 bp, Homo sapiens
ttaagattggagagg

SEQ ID NO: 1618871 - DNA, 15 bp, Homo sapiens
tttaagattggagag

SEQ ID NO: 1618872 - DNA, 15 bp, Homo sapiens
gtttaagattggaga

SEQ ID NO: 1618873 - DNA, 15 bp, Homo sapiens
ggtttaagattggag

SEQ ID NO: 1618874 - DNA, 15 bp, Homo sapiens
aggtttaagattgga

SEQ ID NO: 1618875 - DNA, 15 bp, Homo sapiens
aaggtttaagattgg

SEQ ID NO: 1618876 - DNA, 15 bp, Homo sapiens
gaaggtttaagattg

SEQ ID NO: 1618877 - DNA, 15 bp, Homo sapiens
agaaggtttaagatt

SEQ ID NO: 1618878 - DNA, 15 bp, Homo sapiens
gagaaggtttaagat

SEQ ID NO: 1618879 - DNA, 15 bp, Homo sapiens
agagaaggtttaaga

SEQ ID NO: 1618880 - DNA, 15 bp, Homo sapiens
gagagaaggtttaag

SEQ ID NO: 1618881 - DNA, 15 bp, Homo sapiens
agagagaaggtttaa

SEQ ID NO: 1618882 - DNA, 15 bp, Homo sapiens
gagagagaaggttta

SEQ ID NO: 1618883 - DNA, 15 bp, Homo sapiens
agagagagaaggttt

SEQ ID NO: 1618884 - DNA, 15 bp, Homo sapiens
cagagagagaaggtt

SEQ ID NO: 1618885 - DNA, 15 bp, Homo sapiens
acagagagagaaggt

SEQ ID NO: 1618886 - DNA, 15 bp, Homo sapiens
cacagagagagaagg

SEQ ID NO: 1618887 - DNA, 15 bp, Homo sapiens
tcacagagagagaag

SEQ ID NO: 1618888 - DNA, 15 bp, Homo sapiens
ttcacagagagagaa

SEQ ID NO: 1618889 - DNA, 15 bp, Homo sapiens
cttcacagagagaga

SEQ ID NO: 1618890 - DNA, 15 bp, Homo sapiens
acttcacagagagag

SEQ ID NO: 1618891 - DNA, 15 bp, Homo sapiens
cacttcacagagaga

SEQ ID NO: 1618892 - DNA, 15 bp, Homo sapiens
ccacttcacagagag

SEQ ID NO: 1618893 - DNA, 15 bp, Homo sapiens
cccacttcacagaga

SEQ ID NO: 1618894 - DNA, 15 bp, Homo sapiens
ccccacttcacagag

SEQ ID NO: 1618895 - DNA, 15 bp, Homo sapiens
tccccacttcacaga

SEQ ID NO: 1618896 - DNA, 15 bp, Homo sapiens
gtccccacttcacag

SEQ ID NO: 1618897 - DNA, 15 bp, Homo sapiens
agtccccacttcaca

SEQ ID NO: 1618898 - DNA, 15 bp, Homo sapiens
gagtccccacttcac

SEQ ID NO: 1618899 - DNA, 15 bp, Homo sapiens
ggagtccccacttca

SEQ ID NO: 1618900 - DNA, 15 bp, Homo sapiens
tggagtccccacttc

SEQ ID NO: 1618901 - DNA, 15 bp, Homo sapiens
atggagtccccactt

SEQ ID NO: 1618902 - DNA, 15 bp, Homo sapiens
gatggagtccccact

SEQ ID NO: 1618903 - DNA, 15 bp, Homo sapiens
ggatggagtccccac

SEQ ID NO: 1618904 - DNA, 15 bp, Homo sapiens
aggatggagtcccca

SEQ ID NO: 1618905 - DNA, 15 bp, Homo sapiens
caggatggagtcccc

SEQ ID NO: 1618906 - DNA, 15 bp, Homo sapiens
tcaggatggagtccc

SEQ ID NO: 1618907 - DNA, 15 bp, Homo sapiens
gtcaggatggagtcc

SEQ ID NO: 1618908 - DNA, 15 bp, Homo sapiens
ggtcaggatggagtc

SEQ ID NO: 1618909 - DNA, 15 bp, Homo sapiens
tggtcaggatggagt

SEQ ID NO: 1618910 - DNA, 15 bp, Homo sapiens
gtggtcaggatggag

SEQ ID NO: 1618911 - DNA, 15 bp, Homo sapiens
tgtggtcaggatgga

SEQ ID NO: 1618912 - DNA, 15 bp, Homo sapiens
ttgtggtcaggatgg

SEQ ID NO: 1618913 - DNA, 15 bp, Homo sapiens
gttgtggtcaggatg

SEQ ID NO: 1618914 - DNA, 15 bp, Homo sapiens
agttgtggtcaggat

SEQ ID NO: 1618915 - DNA, 15 bp, Homo sapiens
aagttgtggtcagga

SEQ ID NO: 1618916 - DNA, 15 bp, Homo sapiens
caagttgtggtcagg

SEQ ID NO: 1618917 - DNA, 15 bp, Homo sapiens
acaagttgtggtcag

SEQ ID NO: 1618918 - DNA, 15 bp, Homo sapiens
gacaagttgtggtca

SEQ ID NO: 1618919 - DNA, 15 bp, Homo sapiens
agacaagttgtggtc

SEQ ID NO: 1618920 - DNA, 15 bp, Homo sapiens
gagacaagttgtggt

SEQ ID NO: 1618921 - DNA, 15 bp, Homo sapiens
ggagacaagttgtgg

SEQ ID NO: 1618922 - DNA, 15 bp, Homo sapiens
tggagacaagttgtg

SEQ ID NO: 1618923 - DNA, 15 bp, Homo sapiens
ctggagacaagttgt

SEQ ID NO: 1618924 - DNA, 15 bp, Homo sapiens
tctggagacaagttg

SEQ ID NO: 1618925 - DNA, 15 bp, Homo sapiens
atctggagacaagtt

SEQ ID NO: 1618926 - DNA, 15 bp, Homo sapiens
tatctggagacaagt

SEQ ID NO: 1618927 - DNA, 15 bp, Homo sapiens
ttatctggagacaag

SEQ ID NO: 1618928 - DNA, 15 bp, Homo sapiens
cttatctggagacaa

SEQ ID NO: 1618929 - DNA, 15 bp, Homo sapiens
tcttatctggagaca

SEQ ID NO: 1618930 - DNA, 15 bp, Homo sapiens
ttcttatctggagac

SEQ ID NO: 1618931 - DNA, 15 bp, Homo sapiens
cttcttatctggaga

SEQ ID NO: 1618932 - DNA, 15 bp, Homo sapiens
acttcttatctggag

SEQ ID NO: 1618933 - DNA, 15 bp, Homo sapiens
tacttcttatctgga

SEQ ID NO: 1618934 - DNA, 15 bp, Homo sapiens
ctacttcttatctgg

SEQ ID NO: 1618935 - DNA, 15 bp, Homo sapiens
cctacttcttatctg

SEQ ID NO: 1618936 - DNA, 15 bp, Homo sapiens
acctacttcttatct

SEQ ID NO: 1618937 - DNA, 15 bp, Homo sapiens
cacctacttcttatc

SEQ ID NO: 1618938 - DNA, 15 bp, Homo sapiens
ccacctacttcttat

SEQ ID NO: 1618939 - DNA, 15 bp, Homo sapiens
cccacctacttctta

SEQ ID NO: 1618940 - DNA, 15 bp, Homo sapiens
tcccacctacttctt

SEQ ID NO: 1618941 - DNA, 15 bp, Homo sapiens
ttcccacctacttct

SEQ ID NO: 1618942 - DNA, 15 bp, Homo sapiens
cttcccacctacttc

SEQ ID NO: 1618943 - DNA, 15 bp, Homo sapiens
gcttcccacctactt

SEQ ID NO: 1618944 - DNA, 15 bp, Homo sapiens
tgcttcccacctact

SEQ ID NO: 1618945 - DNA, 15 bp, Homo sapiens
ctgcttcccacctac

SEQ ID NO: 1618946 - DNA, 15 bp, Homo sapiens
cctgcttcccaccta

SEQ ID NO: 1618947 - DNA, 15 bp, Homo sapiens
ccctgcttcccacct

SEQ ID NO: 1618948 - DNA, 15 bp, Homo sapiens
accctgcttcccacc

SEQ ID NO: 1618949 - DNA, 15 bp, Homo sapiens
caaaccctgcttccc

SEQ ID NO: 1618950 - DNA, 15 bp, Homo sapiens
ccaaaccctgcttcc

SEQ ID NO: 1618951 - DNA, 15 bp, Homo sapiens
tccaaaccctgcttc

SEQ ID NO: 1618952 - DNA, 15 bp, Homo sapiens
ttccaaaccctgctt

SEQ ID NO: 1618953 - DNA, 15 bp, Homo sapiens
tttccaaaccctgct

SEQ ID NO: 1618954 - DNA, 15 bp, Homo sapiens
atttccaaaccctgc

SEQ ID NO: 1618955 - DNA, 15 bp, Homo sapiens
gatttccaaaccctg

SEQ ID NO: 1618956 - DNA, 15 bp, Homo sapiens
cgatttccaaaccct

SEQ ID NO: 1618957 - DNA, 15 bp, Homo sapiens
ccgatttccaaaccc

SEQ ID NO: 1618958 - DNA, 15 bp, Homo sapiens
gccgatttccaaacc

SEQ ID NO: 1618959 - DNA, 15 bp, Homo sapiens
tgccgatttccaaac

SEQ ID NO: 1618960 - DNA, 15 bp, Homo sapiens
ttgccgatttccaaa

SEQ ID NO: 1618961 - DNA, 15 bp, Homo sapiens
tttgccgatttccaa

SEQ ID NO: 1618962 - DNA, 15 bp, Homo sapiens
ctttgccgatttcca

SEQ ID NO: 1618963 - DNA, 15 bp, Homo sapiens
gctttgccgatttcc

SEQ ID NO: 1618964 - DNA, 15 bp, Homo sapiens
agctttgccgatttc

SEQ ID NO: 1618965 - DNA, 15 bp, Homo sapiens
gagctttgccgattt

SEQ ID NO: 1618966 - DNA, 15 bp, Homo sapiens
ggagctttgccgatt

SEQ ID NO: 1618967 - DNA, 15 bp, Homo sapiens
aggagctttgccgat

SEQ ID NO: 1618968 - DNA, 15 bp, Homo sapiens
gaggagctttgccga

SEQ ID NO: 1618969 - DNA, 15 bp, Homo sapiens
ggaggagctttgccg

SEQ ID NO: 1618970 - DNA, 15 bp, Homo sapiens
tggaggagctttgcc

SEQ ID NO: 1618971 - DNA, 15 bp, Homo sapiens
atggaggagctttgc

SEQ ID NO: 1618972 - DNA, 15 bp, Homo sapiens
catggaggagctttg

SEQ ID NO: 1618973 - DNA, 15 bp, Homo sapiens
tcatggaggagcttt

SEQ ID NO: 1618974 - DNA, 15 bp, Homo sapiens
gtcatggaggagctt

SEQ ID NO: 1618975 - DNA, 15 bp, Homo sapiens
ggtcatggaggagct

SEQ ID NO: 1618976 - DNA, 15 bp, Homo sapiens
gggtcatggaggagc

SEQ ID NO: 1618977 - DNA, 15 bp, Homo sapiens
agggtcatggaggag

SEQ ID NO: 1618978 - DNA, 15 bp, Homo sapiens
cagggtcatggagga

SEQ ID NO: 1618979 - DNA, 15 bp, Homo sapiens
tcagggtcatggagg

SEQ ID NO: 1618980 - DNA, 15 bp, Homo sapiens
ttcagggtcatggag

SEQ ID NO: 1618981 - DNA, 15 bp, Homo sapiens
tttcagggtcatgga

SEQ ID NO: 1618982 - DNA, 15 bp, Homo sapiens
ttttcagggtcatgg

SEQ ID NO: 1618983 - DNA, 15 bp, Homo sapiens
cttttcagggtcatg

SEQ ID NO: 1618984 - DNA, 15 bp, Homo sapiens
tcttttcagggtcat

SEQ ID NO: 1618985 - DNA, 15 bp, Homo sapiens
ctcttttcagggtca

SEQ ID NO: 1618986 - DNA, 15 bp, Homo sapiens
actcttttcagggtc

SEQ ID NO: 1618987 - DNA, 15 bp, Homo sapiens
aactcttttcagggt

SEQ ID NO: 1618988 - DNA, 15 bp, Homo sapiens
caactcttttcaggg

SEQ ID NO: 1618989 - DNA, 15 bp, Homo sapiens
ccaactcttttcagg

SEQ ID NO: 1618990 - DNA, 15 bp, Homo sapiens
gccaactcttttcag

SEQ ID NO: 1618991 - DNA, 15 bp, Homo sapiens
ggccaactcttttca

SEQ ID NO: 1618992 - DNA, 15 bp, Homo sapiens
aggccaactcttttc

SEQ ID NO: 1618993 - DNA, 15 bp, Homo sapiens
aaggccaactctttt

SEQ ID NO: 1618994 - DNA, 15 bp, Homo sapiens
caaggccaactcttt

SEQ ID NO: 1618995 - DNA, 15 bp, Homo sapiens
ccaaggccaactctt

SEQ ID NO: 1618996 - DNA, 15 bp, Homo sapiens
accaaggccaactct

SEQ ID NO: 1618997 - DNA, 15 bp, Homo sapiens
taccaaggccaactc

SEQ ID NO: 1618998 - DNA, 15 bp, Homo sapiens
gtaccaaggccaact

SEQ ID NO: 1618999 - DNA, 15 bp, Homo sapiens
tgtaccaaggccaac

SEQ ID NO: 1619000 - DNA, 15 bp, Homo sapiens
ctgtaccaaggccaa

SEQ ID NO: 1619001 - DNA, 15 bp, Homo sapiens
cctgtaccaaggcca

SEQ ID NO: 1619002 - DNA, 15 bp, Homo sapiens
acctgtaccaaggcc

SEQ ID NO: 1619003 - DNA, 15 bp, Homo sapiens
aacctgtaccaaggc

SEQ ID NO: 1619004 - DNA, 15 bp, Homo sapiens
caacctgtaccaagg

SEQ ID NO: 1619005 - DNA, 15 bp, Homo sapiens
gcaacctgtaccaag

SEQ ID NO: 1619006 - DNA, 15 bp, Homo sapiens
agcaacctgtaccaa

SEQ ID NO: 1619007 - DNA, 15 bp, Homo sapiens
aagcaacctgtacca

SEQ ID NO: 1619008 - DNA, 15 bp, Homo sapiens
caagcaacctgtacc

SEQ ID NO: 1619009 - DNA, 15 bp, Homo sapiens
ccaagcaacctgtac

SEQ ID NO: 1619010 - DNA, 15 bp, Homo sapiens
gccaagcaacctgta

SEQ ID NO: 1619011 - DNA, 15 bp, Homo sapiens
ggccaagcaacctgt

SEQ ID NO: 1619012 - DNA, 15 bp, Homo sapiens
gggccaagcaacctg

SEQ ID NO: 1619013 - DNA, 15 bp, Homo sapiens
agggccaagcaacct

SEQ ID NO: 1619014 - DNA, 15 bp, Homo sapiens
aagggccaagcaacc

SEQ ID NO: 1619015 - DNA, 15 bp, Homo sapiens
gaagggccaagcaac

SEQ ID NO: 1619016 - DNA, 15 bp, Homo sapiens
tgaagggccaagcaa

SEQ ID NO: 1619017 - DNA, 15 bp, Homo sapiens
ctgaagggccaagca

SEQ ID NO: 1619018 - DNA, 15 bp, Homo sapiens
tctgaagggccaagc

SEQ ID NO: 1619019 - DNA, 15 bp, Homo sapiens
ttctgaagggccaag

SEQ ID NO: 1619020 - DNA, 15 bp, Homo sapiens
attctgaagggccaa

SEQ ID NO: 1619021 - DNA, 15 bp, Homo sapiens
tattctgaagggcca

SEQ ID NO: 1619022 - DNA, 15 bp, Homo sapiens
atattctgaagggcc

SEQ ID NO: 1619023 - DNA, 15 bp, Homo sapiens
catattctgaagggc

SEQ ID NO: 1619024 - DNA, 15 bp, Homo sapiens
tcatattctgaaggg

SEQ ID NO: 1619025 - DNA, 15 bp, Homo sapiens
ttcatattctgaagg

SEQ ID NO: 1619026 - DNA, 15 bp, Homo sapiens
cttcatattctgaag

SEQ ID NO: 1619027 - DNA, 15 bp, Homo sapiens
gcttcatattctgaa

SEQ ID NO: 1619028 - DNA, 15 bp, Homo sapiens
tgcttcatattctga

SEQ ID NO: 1619029 - DNA, 15 bp, Homo sapiens
atgcttcatattctg

SEQ ID NO: 1619030 - DNA, 15 bp, Homo sapiens
aatgcttcatattct

SEQ ID NO: 1619031 - DNA, 15 bp, Homo sapiens
aaatgcttcatattc

SEQ ID NO: 1619032 - DNA, 15 bp, Homo sapiens
aaaatgcttcatatt

SEQ ID NO: 1619033 - DNA, 15 bp, Homo sapiens
caaaatgcttcatat

SEQ ID NO: 1619034 - DNA, 15 bp, Homo sapiens
acaaaatgcttcata

SEQ ID NO: 1619035 - DNA, 15 bp, Homo sapiens
tacaaaatgcttcat

SEQ ID NO: 1619036 - DNA, 15 bp, Homo sapiens
ctacaaaatgcttca

SEQ ID NO: 1619037 - DNA, 15 bp, Homo sapiens
tctacaaaatgcttc

SEQ ID NO: 1619038 - DNA, 15 bp, Homo sapiens
atctacaaaatgctt

SEQ ID NO: 1619039 - DNA, 15 bp, Homo sapiens
aatctacaaaatgct

SEQ ID NO: 1619040 - DNA, 15 bp, Homo sapiens
aaatctacaaaatgc

SEQ ID NO: 1619041 - DNA, 15 bp, Homo sapiens
caaatctacaaaatg

SEQ ID NO: 1619042 - DNA, 15 bp, Homo sapiens
acaaatctacaaaat

SEQ ID NO: 1619043 - DNA, 15 bp, Homo sapiens
cacaaatctacaaaa

SEQ ID NO: 1619044 - DNA, 15 bp, Homo sapiens
ccacaaatctacaaa

SEQ ID NO: 1619045 - DNA, 15 bp, Homo sapiens
accacaaatctacaa

SEQ ID NO: 1619046 - DNA, 15 bp, Homo sapiens
taccacaaatctaca

SEQ ID NO: 1619047 - DNA, 15 bp, Homo sapiens
gtaccacaaatctac

SEQ ID NO: 1619048 - DNA, 15 bp, Homo sapiens
tgtaccacaaatcta

SEQ ID NO: 1619049 - DNA, 15 bp, Homo sapiens
gtgtaccacaaatct

SEQ ID NO: 1619050 - DNA, 15 bp, Homo sapiens
agtgtaccacaaatc

SEQ ID NO: 1619051 - DNA, 15 bp, Homo sapiens
aagtgtaccacaaat

SEQ ID NO: 1619052 - DNA, 15 bp, Homo sapiens
caagtgtaccacaaa

SEQ ID NO: 1619053 - DNA, 15 bp, Homo sapiens
acaagtgtaccacaa

SEQ ID NO: 1619054 - DNA, 15 bp, Homo sapiens
cacaagtgtaccaca

SEQ ID NO: 1619055 - DNA, 15 bp, Homo sapiens
gcacaagtgtaccac

SEQ ID NO: 1619056 - DNA, 15 bp, Homo sapiens
ggcacaagtgtacca

SEQ ID NO: 1619057 - DNA, 15 bp, Homo sapiens
aggcacaagtgtacc

SEQ ID NO: 1619058 - DNA, 15 bp, Homo sapiens
gaggcacaagtgtac

SEQ ID NO: 1619059 - DNA, 15 bp, Homo sapiens
tgaggcacaagtgta

SEQ ID NO: 1619060 - DNA, 15 bp, Homo sapiens
ttgaggcacaagtgt

SEQ ID NO: 1619061 - DNA, 15 bp, Homo sapiens
tttgaggcacaagtg

SEQ ID NO: 1619062 - DNA, 15 bp, Homo sapiens
atttgaggcacaagt

SEQ ID NO: 1619063 - DNA, 15 bp, Homo sapiens
catttgaggcacaag

SEQ ID NO: 1619064 - DNA, 15 bp, Homo sapiens
acatttgaggcacaa

SEQ ID NO: 1619065 - DNA, 15 bp, Homo sapiens
gacatttgaggcaca

SEQ ID NO: 1619066 - DNA, 15 bp, Homo sapiens
agacatttgaggcac

SEQ ID NO: 1619067 - DNA, 15 bp, Homo sapiens
tagacatttgaggca

SEQ ID NO: 1619068 - DNA, 15 bp, Homo sapiens
atagacatttgaggc

SEQ ID NO: 1619069 - DNA, 15 bp, Homo sapiens
aatagacatttgagg

SEQ ID NO: 1619070 - DNA, 15 bp, Homo sapiens
caatagacatttgag

SEQ ID NO: 1619071 - DNA, 15 bp, Homo sapiens
ccaatagacatttga

SEQ ID NO: 1619072 - DNA, 15 bp, Homo sapiens
cccaatagacatttg

SEQ ID NO: 1619073 - DNA, 15 bp, Homo sapiens
ccccaatagacattt

SEQ ID NO: 1619074 - DNA, 15 bp, Homo sapiens
gccccaatagacatt

SEQ ID NO: 1619075 - DNA, 15 bp, Homo sapiens
ggccccaatagacat

SEQ ID NO: 1619076 - DNA, 15 bp, Homo sapiens
gggccccaatagaca

SEQ ID NO: 1619077 - DNA, 15 bp, Homo sapiens
tgggccccaatagac

SEQ ID NO: 1619078 - DNA, 15 bp, Homo sapiens
gtgggccccaataga

SEQ ID NO: 1619079 - DNA, 15 bp, Homo sapiens
agtgggccccaatag

SEQ ID NO: 1619080 - DNA, 15 bp, Homo sapiens
gagtgggccccaata

SEQ ID NO: 1619081 - DNA, 15 bp, Homo sapiens
agagtgggccccaat

SEQ ID NO: 1619082 - DNA, 15 bp, Homo sapiens
aagagtgggccccaa

SEQ ID NO: 1619083 - DNA, 15 bp, Homo sapiens
aaagagtgggcccca

SEQ ID NO: 1619084 - DNA, 15 bp, Homo sapiens
gaaagagtgggcccc

SEQ ID NO: 1619085 - DNA, 15 bp, Homo sapiens
tgaaagagtgggccc

SEQ ID NO: 1619086 - DNA, 15 bp, Homo sapiens
gcctgaaagagtggg

SEQ ID NO: 1619087 - DNA, 15 bp, Homo sapiens
ggcctgaaagagtgg

SEQ ID NO: 1619088 - DNA, 15 bp, Homo sapiens
tggcctgaaagagtg

SEQ ID NO: 1619089 - DNA, 15 bp, Homo sapiens
atggcctgaaagagt

SEQ ID NO: 1619090 - DNA, 15 bp, Homo sapiens
catggcctgaaagag

SEQ ID NO: 1619091 - DNA, 15 bp, Homo sapiens
ccatggcctgaaaga

SEQ ID NO: 1619092 - DNA, 15 bp, Homo sapiens
tccatggcctgaaag

SEQ ID NO: 1619093 - DNA, 15 bp, Homo sapiens
ctccatggcctgaaa

SEQ ID NO: 1619094 - DNA, 15 bp, Homo sapiens
actccatggcctgaa

SEQ ID NO: 1619095 - DNA, 15 bp, Homo sapiens
cactccatggcctga

SEQ ID NO: 1619096 - DNA, 15 bp, Homo sapiens
tcactccatggcctg

SEQ ID NO: 1619097 - DNA, 15 bp, Homo sapiens
ctcactccatggcct

SEQ ID NO: 1619098 - DNA, 15 bp, Homo sapiens
gctcactccatggcc

SEQ ID NO: 1619099 - DNA, 15 bp, Homo sapiens
tgctcactccatggc

SEQ ID NO: 1619100 - DNA, 15 bp, Homo sapiens
gtgctcactccatgg

SEQ ID NO: 1619101 - DNA, 15 bp, Homo sapiens
tgtgctcactccatg

SEQ ID NO: 1619102 - DNA, 15 bp, Homo sapiens
ctgtgctcactccat

SEQ ID NO: 1619103 - DNA, 15 bp, Homo sapiens
tctgtgctcactcca

SEQ ID NO: 1619104 - DNA, 15 bp, Homo sapiens
ctctgtgctcactcc

SEQ ID NO: 1619105 - DNA, 15 bp, Homo sapiens
cctctgtgctcactc

SEQ ID NO: 1619106 - DNA, 15 bp, Homo sapiens
tcctctgtgctcact

SEQ ID NO: 1619107 - DNA, 15 bp, Homo sapiens
gtcctctgtgctcac

SEQ ID NO: 1619108 - DNA, 15 bp, Homo sapiens
ggtcctctgtgctca

SEQ ID NO: 1619109 - DNA, 15 bp, Homo sapiens
tggtcctctgtgctc

SEQ ID NO: 1619110 - DNA, 15 bp, Homo sapiens
ctggtcctctgtgct

SEQ ID NO: 1619111 - DNA, 15 bp, Homo sapiens
gctggtcctctgtgc

SEQ ID NO: 1619112 - DNA, 15 bp, Homo sapiens
tgctggtcctctgtg

SEQ ID NO: 1619113 - DNA, 15 bp, Homo sapiens
atgctggtcctctgt

SEQ ID NO: 1619114 - DNA, 15 bp, Homo sapiens
tatgctggtcctctg

SEQ ID NO: 1619115 - DNA, 15 bp, Homo sapiens
ttatgctggtcctct

SEQ ID NO: 1619116 - DNA, 15 bp, Homo sapiens
gttatgctggtcctc

SEQ ID NO: 1619117 - DNA, 15 bp, Homo sapiens
agttatgctggtcct

SEQ ID NO: 1619118 - DNA, 15 bp, Homo sapiens
gagttatgctggtcc

SEQ ID NO: 1619119 - DNA, 15 bp, Homo sapiens
tgagttatgctggtc

SEQ ID NO: 1619120 - DNA, 15 bp, Homo sapiens
ctgagttatgctggt

SEQ ID NO: 1619121 - DNA, 15 bp, Homo sapiens
gctgagttatgctgg

SEQ ID NO: 1619122 - DNA, 15 bp, Homo sapiens
ggctgagttatgctg

SEQ ID NO: 1619123 - DNA, 15 bp, Homo sapiens
cggctgagttatgct

SEQ ID NO: 1619124 - DNA, 15 bp, Homo sapiens
gcggctgagttatgc

SEQ ID NO: 1619125 - DNA, 15 bp, Homo sapiens
cgcggctgagttatg

SEQ ID NO: 1619126 - DNA, 15 bp, Homo sapiens
ccgcggctgagttat

SEQ ID NO: 1619127 - DNA, 15 bp, Homo sapiens
gccgcggctgagtta

SEQ ID NO: 1619128 - DNA, 15 bp, Homo sapiens
ggccgcggctgagtt

SEQ ID NO: 1619129 - DNA, 15 bp, Homo sapiens
aggccgcggctgagt

SEQ ID NO: 1619130 - DNA, 15 bp, Homo sapiens
gaggccgcggctgag

SEQ ID NO: 1619131 - DNA, 15 bp, Homo sapiens
agaggccgcggctga

SEQ ID NO: 1619132 - DNA, 15 bp, Homo sapiens
cagaggccgcggctg

SEQ ID NO: 1619133 - DNA, 15 bp, Homo sapiens
tcagaggccgcggct

SEQ ID NO: 1619134 - DNA, 15 bp, Homo sapiens
ctcagaggccgcggc

SEQ ID NO: 1619135 - DNA, 15 bp, Homo sapiens
cctcagaggccgcgg

SEQ ID NO: 1619136 - DNA, 15 bp, Homo sapiens
tcctcagaggccgcg

SEQ ID NO: 1619137 - DNA, 15 bp, Homo sapiens
gtcctcagaggccgc

SEQ ID NO: 1619138 - DNA, 15 bp, Homo sapiens
agtcctcagaggccg

SEQ ID NO: 1619139 - DNA, 15 bp, Homo sapiens
cagtcctcagaggcc

SEQ ID NO: 1619140 - DNA, 15 bp, Homo sapiens
tcagtcctcagaggc

SEQ ID NO: 1619141 - DNA, 15 bp, Homo sapiens
ttcagtcctcagagg

SEQ ID NO: 1619142 - DNA, 15 bp, Homo sapiens
tttcagtcctcagag

SEQ ID NO: 1619143 - DNA, 15 bp, Homo sapiens
ctttcagtcctcaga

SEQ ID NO: 1619144 - DNA, 15 bp, Homo sapiens
tctttcagtcctcag

SEQ ID NO: 1619145 - DNA, 15 bp, Homo sapiens
atctttcagtcctca

SEQ ID NO: 1619146 - DNA, 15 bp, Homo sapiens
catctttcagtcctc

SEQ ID NO: 1619147 - DNA, 15 bp, Homo sapiens
tcatctttcagtcct

SEQ ID NO: 1619148 - DNA, 15 bp, Homo sapiens
ttcatctttcagtcc

SEQ ID NO: 1619149 - DNA, 15 bp, Homo sapiens
gttcatctttcagtc

SEQ ID NO: 1619150 - DNA, 15 bp, Homo sapiens
agttcatctttcagt

SEQ ID NO: 1619151 - DNA, 15 bp, Homo sapiens
aagttcatctttcag

SEQ ID NO: 1619152 - DNA, 15 bp, Homo sapiens
caagttcatctttca

SEQ ID NO: 1619153 - DNA, 15 bp, Homo sapiens
gcaagttcatctttc

SEQ ID NO: 1619154 - DNA, 15 bp, Homo sapiens
agcaagttcatcttt

SEQ ID NO: 1619155 - DNA, 15 bp, Homo sapiens
cagcaagttcatctt

SEQ ID NO: 1619156 - DNA, 15 bp, Homo sapiens
tcagcaagttcatct

SEQ ID NO: 1619157 - DNA, 15 bp, Homo sapiens
ctcagcaagttcatc

SEQ ID NO: 1619158 - DNA, 15 bp, Homo sapiens
cctcagcaagttcat

SEQ ID NO: 1619159 - DNA, 15 bp, Homo sapiens
acctcagcaagttca

SEQ ID NO: 1619160 - DNA, 15 bp, Homo sapiens
cacctcagcaagttc

SEQ ID NO: 1619161 - DNA, 15 bp, Homo sapiens
ccacctcagcaagtt

SEQ ID NO: 1619162 - DNA, 15 bp, Homo sapiens
cccacctcagcaagt

SEQ ID NO: 1619163 - DNA, 15 bp, Homo sapiens
acccacctcagcaag

SEQ ID NO: 1619164 - DNA, 15 bp, Homo sapiens
gacccacctcagcaa

SEQ ID NO: 1619165 - DNA, 15 bp, Homo sapiens
cgacccacctcagca

SEQ ID NO: 1619166 - DNA, 15 bp, Homo sapiens
ccgacccacctcagc

SEQ ID NO: 1619167 - DNA, 15 bp, Homo sapiens
cccgacccacctcag

SEQ ID NO: 1619168 - DNA, 15 bp, Homo sapiens
acccgacccacctca

SEQ ID NO: 1619169 - DNA, 15 bp, Homo sapiens
aacccgacccacctc

SEQ ID NO: 1619170 - DNA, 15 bp, Homo sapiens
caacccgacccacct

SEQ ID NO: 1619171 - DNA, 15 bp, Homo sapiens
gcaacccgacccacc

SEQ ID NO: 1619172 - DNA, 15 bp, Homo sapiens
agcaacccgacccac

SEQ ID NO: 1619173 - DNA, 15 bp, Homo sapiens
cagcaacccgaccca

SEQ ID NO: 1619174 - DNA, 15 bp, Homo sapiens
ccagcaacccgaccc

SEQ ID NO: 1619175 - DNA, 15 bp, Homo sapiens
gccagcaacccgacc

SEQ ID NO: 1619176 - DNA, 15 bp, Homo sapiens
tgccagcaacccgac

SEQ ID NO: 1619177 - DNA, 15 bp, Homo sapiens
atgccagcaacccga

SEQ ID NO: 1619178 - DNA, 15 bp, Homo sapiens
tatgccagcaacccg

SEQ ID NO: 1619179 - DNA, 15 bp, Homo sapiens
gtatgccagcaaccc

SEQ ID NO: 1619180 - DNA, 15 bp, Homo sapiens
ggtatgccagcaacc

SEQ ID NO: 1619181 - DNA, 15 bp, Homo sapiens
tggtatgccagcaac

SEQ ID NO: 1619182 - DNA, 15 bp, Homo sapiens
gtggtatgccagcaa

SEQ ID NO: 1619183 - DNA, 15 bp, Homo sapiens
ggtggtatgccagca

SEQ ID NO: 1619184 - DNA, 15 bp, Homo sapiens
aggtggtatgccagc

SEQ ID NO: 1619185 - DNA, 15 bp, Homo sapiens
taggtggtatgccag

SEQ ID NO: 1619186 - DNA, 15 bp, Homo sapiens
gtaggtggtatgcca

SEQ ID NO: 1619187 - DNA, 15 bp, Homo sapiens
ggtaggtggtatgcc

SEQ ID NO: 1619188 - DNA, 15 bp, Homo sapiens
gggtaggtggtatgc

SEQ ID NO: 1619189 - DNA, 15 bp, Homo sapiens
tgggtaggtggtatg

SEQ ID NO: 1619190 - DNA, 15 bp, Homo sapiens
gtgggtaggtggtat

SEQ ID NO: 1619191 - DNA, 15 bp, Homo sapiens
ggtgggtaggtggta

SEQ ID NO: 1619192 - DNA, 15 bp, Homo sapiens
cggtgggtaggtggt

SEQ ID NO: 1619193 - DNA, 15 bp, Homo sapiens
acggtgggtaggtgg

SEQ ID NO: 1619194 - DNA, 15 bp, Homo sapiens
aacggtgggtaggtg

SEQ ID NO: 1619195 - DNA, 15 bp, Homo sapiens
aaacggtgggtaggt

SEQ ID NO: 1619196 - DNA, 15 bp, Homo sapiens
caaacggtgggtagg

SEQ ID NO: 1619197 - DNA, 15 bp, Homo sapiens
acaaacggtgggtag

SEQ ID NO: 1619198 - DNA, 15 bp, Homo sapiens
aacaaacggtgggta

SEQ ID NO: 1619199 - DNA, 15 bp, Homo sapiens
aaacaaacggtgggt

SEQ ID NO: 1619200 - DNA, 15 bp, Homo sapiens
aaaacaaacggtggg

SEQ ID NO: 1619201 - DNA, 15 bp, Homo sapiens
taaaacaaacggtgg

SEQ ID NO: 1619202 - DNA, 15 bp, Homo sapiens
ctaaaacaaacggtg

SEQ ID NO: 1619203 - DNA, 15 bp, Homo sapiens
tctaaaacaaacggt

SEQ ID NO: 1619204 - DNA, 15 bp, Homo sapiens
gtctaaaacaaacgg

SEQ ID NO: 1619205 - DNA, 15 bp, Homo sapiens
tgtctaaaacaaacg

SEQ ID NO: 1619206 - DNA, 15 bp, Homo sapiens
ctgtctaaaacaaac

SEQ ID NO: 1619207 - DNA, 15 bp, Homo sapiens
tctgtctaaaacaaa

SEQ ID NO: 1619208 - DNA, 15 bp, Homo sapiens
ttctgtctaaaacaa

SEQ ID NO: 1619209 - DNA, 15 bp, Homo sapiens
tttctgtctaaaaca

SEQ ID NO: 1619210 - DNA, 15 bp, Homo sapiens
ttttctgtctaaaac

SEQ ID NO: 1619211 - DNA, 15 bp, Homo sapiens
attttctgtctaaaa

SEQ ID NO: 1619212 - DNA, 15 bp, Homo sapiens
cattttctgtctaaa

SEQ ID NO: 1619213 - DNA, 15 bp, Homo sapiens
ccattttctgtctaa

SEQ ID NO: 1619214 - DNA, 15 bp, Homo sapiens
cccattttctgtcta

SEQ ID NO: 1619215 - DNA, 15 bp, Homo sapiens
ccccattttctgtct

SEQ ID NO: 1619216 - DNA, 15 bp, Homo sapiens
gccccattttctgtc

SEQ ID NO: 1619217 - DNA, 15 bp, Homo sapiens
cgccccattttctgt

SEQ ID NO: 1619218 - DNA, 15 bp, Homo sapiens
ccgccccattttctg

SEQ ID NO: 1619219 - DNA, 15 bp, Homo sapiens
tccgccccattttct

SEQ ID NO: 1619220 - DNA, 15 bp, Homo sapiens
atccgccccattttc

SEQ ID NO: 1619221 - DNA, 15 bp, Homo sapiens
catccgccccatttt

SEQ ID NO: 1619222 - DNA, 15 bp, Homo sapiens
tcatccgccccattt

SEQ ID NO: 1619223 - DNA, 15 bp, Homo sapiens
ttcatccgccccatt

SEQ ID NO: 1619224 - DNA, 15 bp, Homo sapiens
cttcatccgccccat

SEQ ID NO: 1619225 - DNA, 15 bp, Homo sapiens
tcttcatccgcccca

SEQ ID NO: 1619226 - DNA, 15 bp, Homo sapiens
ctcttcatccgcccc

SEQ ID NO: 1619227 - DNA, 15 bp, Homo sapiens
tctcttcatccgccc

SEQ ID NO: 1619228 - DNA, 15 bp, Homo sapiens
ttctcttcatccgcc

SEQ ID NO: 1619229 - DNA, 15 bp, Homo sapiens
cttctcttcatccgc

SEQ ID NO: 1619230 - DNA, 15 bp, Homo sapiens
gcttctcttcatccg

SEQ ID NO: 1619231 - DNA, 15 bp, Homo sapiens
agcttctcttcatcc

SEQ ID NO: 1619232 - DNA, 15 bp, Homo sapiens
cagcttctcttcatc

SEQ ID NO: 1619233 - DNA, 15 bp, Homo sapiens
tcagcttctcttcat

SEQ ID NO: 1619234 - DNA, 15 bp, Homo sapiens
gtcagcttctcttca

SEQ ID NO: 1619235 - DNA, 15 bp, Homo sapiens
agtcagcttctcttc

SEQ ID NO: 1619236 - DNA, 15 bp, Homo sapiens
aagtcagcttctctt

SEQ ID NO: 1619237 - DNA, 15 bp, Homo sapiens
gaagtcagcttctct

SEQ ID NO: 1619238 - DNA, 15 bp, Homo sapiens
ggaagtcagcttctc

SEQ ID NO: 1619239 - DNA, 15 bp, Homo sapiens
gggaagtcagcttct

SEQ ID NO: 1619240 - DNA, 15 bp, Homo sapiens
agggaagtcagcttc

SEQ ID NO: 1619241 - DNA, 15 bp, Homo sapiens
cagggaagtcagctt

SEQ ID NO: 1619242 - DNA, 15 bp, Homo sapiens
ccagggaagtcagct

SEQ ID NO: 1619243 - DNA, 15 bp, Homo sapiens
cccagggaagtcagc

SEQ ID NO: 1619244 - DNA, 15 bp, Homo sapiens
gcccagggaagtcag

SEQ ID NO: 1619245 - DNA, 15 bp, Homo sapiens
cgcccagggaagtca

SEQ ID NO: 1619246 - DNA, 15 bp, Homo sapiens
gcgcccagggaagtc

SEQ ID NO: 1619247 - DNA, 15 bp, Homo sapiens
tgcgcccagggaagt

SEQ ID NO: 1619248 - DNA, 15 bp, Homo sapiens
gtgcgcccagggaag

SEQ ID NO: 1619249 - DNA, 15 bp, Homo sapiens
tgtgcgcccagggaa

SEQ ID NO: 1619250 - DNA, 15 bp, Homo sapiens
ctgtgcgcccaggga

SEQ ID NO: 1619251 - DNA, 15 bp, Homo sapiens
gctgtgcgcccaggg

SEQ ID NO: 1619252 - DNA, 15 bp, Homo sapiens
tgctgtgcgcccagg

SEQ ID NO: 1619253 - DNA, 15 bp, Homo sapiens
ctgctgtgcgcccag

SEQ ID NO: 1619254 - DNA, 15 bp, Homo sapiens
actgctgtgcgccca

SEQ ID NO: 1619255 - DNA, 15 bp, Homo sapiens
cactgctgtgcgccc

SEQ ID NO: 1619256 - DNA, 15 bp, Homo sapiens
tcactgctgtgcgcc

SEQ ID NO: 1619257 - DNA, 15 bp, Homo sapiens
gtcactgctgtgcgc

SEQ ID NO: 1619258 - DNA, 15 bp, Homo sapiens
tgtcactgctgtgcg

SEQ ID NO: 1619259 - DNA, 15 bp, Homo sapiens
ttgtcactgctgtgc

SEQ ID NO: 1619260 - DNA, 15 bp, Homo sapiens
cttgtcactgctgtg

SEQ ID NO: 1619261 - DNA, 15 bp, Homo sapiens
gcttgtcactgctgt

SEQ ID NO: 1619262 - DNA, 15 bp, Homo sapiens
ggcttgtcactgctg

SEQ ID NO: 1619263 - DNA, 15 bp, Homo sapiens
gggcttgtcactgct

SEQ ID NO: 1619264 - DNA, 15 bp, Homo sapiens
agggcttgtcactgc

SEQ ID NO: 1619265 - DNA, 15 bp, Homo sapiens
cagggcttgtcactg

SEQ ID NO: 1619266 - DNA, 15 bp, Homo sapiens
ccagggcttgtcact

SEQ ID NO: 1619267 - DNA, 15 bp, Homo sapiens
tccagggcttgtcac

SEQ ID NO: 1619268 - DNA, 15 bp, Homo sapiens
ttccagggcttgtca

SEQ ID NO: 1619269 - DNA, 15 bp, Homo sapiens
cttccagggcttgtc

SEQ ID NO: 1619270 - DNA, 15 bp, Homo sapiens
acttccagggcttgt

SEQ ID NO: 1619271 - DNA, 15 bp, Homo sapiens
aacttccagggcttg

SEQ ID NO: 1619272 - DNA, 15 bp, Homo sapiens
taacttccagggctt

SEQ ID NO: 1619273 - DNA, 15 bp, Homo sapiens
gtaacttccagggct

SEQ ID NO: 1619274 - DNA, 15 bp, Homo sapiens
tgtaacttccagggc

SEQ ID NO: 1619275 - DNA, 15 bp, Homo sapiens
atgtaacttccaggg

SEQ ID NO: 1619276 - DNA, 15 bp, Homo sapiens
tatgtaacttccagg

SEQ ID NO: 1619277 - DNA, 15 bp, Homo sapiens
atatgtaacttccag

SEQ ID NO: 1619278 - DNA, 15 bp, Homo sapiens
gatatgtaacttcca

SEQ ID NO: 1619279 - DNA, 15 bp, Homo sapiens
agatatgtaacttcc

SEQ ID NO: 1619280 - DNA, 15 bp, Homo sapiens
gagatatgtaacttc

SEQ ID NO: 1619281 - DNA, 15 bp, Homo sapiens
ggagatatgtaactt

SEQ ID NO: 1619282 - DNA, 15 bp, Homo sapiens
aggagatatgtaact

SEQ ID NO: 1619283 - DNA, 15 bp, Homo sapiens
gaggagatatgtaac

SEQ ID NO: 1619284 - DNA, 15 bp, Homo sapiens
ggaggagatatgtaa

SEQ ID NO: 1619285 - DNA, 15 bp, Homo sapiens
tggaggagatatgta

SEQ ID NO: 1619286 - DNA, 15 bp, Homo sapiens
gtggaggagatatgt

SEQ ID NO: 1619287 - DNA, 15 bp, Homo sapiens
ggtggaggagatatg

SEQ ID NO: 1619288 - DNA, 15 bp, Homo sapiens
aggtggaggagatat

SEQ ID NO: 1619289 - DNA, 15 bp, Homo sapiens
caggtggaggagata

SEQ ID NO: 1619290 - DNA, 15 bp, Homo sapiens
acaggtggaggagat

SEQ ID NO: 1619291 - DNA, 15 bp, Homo sapiens
gacaggtggaggaga

SEQ ID NO: 1619292 - DNA, 15 bp, Homo sapiens
ggacaggtggaggag

SEQ ID NO: 1619293 - DNA, 15 bp, Homo sapiens
gggacaggtggagga

SEQ ID NO: 1619294 - DNA, 15 bp, Homo sapiens
ggggacaggtggagg

SEQ ID NO: 1619295 - DNA, 15 bp, Homo sapiens
gggggacaggtggag

SEQ ID NO: 1619296 - DNA, 15 bp, Homo sapiens
ggggggacaggtgga

SEQ ID NO: 1619297 - DNA, 15 bp, Homo sapiens
tggggggacaggtgg

SEQ ID NO: 1619298 - DNA, 15 bp, Homo sapiens
atggggggacaggtg

SEQ ID NO: 1619299 - DNA, 15 bp, Homo sapiens
gatggggggacaggt

SEQ ID NO: 1619300 - DNA, 15 bp, Homo sapiens
agatggggggacagg

SEQ ID NO: 1619301 - DNA, 15 bp, Homo sapiens
aagatggggggacag

SEQ ID NO: 1619302 - DNA, 15 bp, Homo sapiens
caagatggggggaca

SEQ ID NO: 1619303 - DNA, 15 bp, Homo sapiens
gcaagatggggggac

SEQ ID NO: 1619304 - DNA, 15 bp, Homo sapiens
agcaagatgggggga

SEQ ID NO: 1619305 - DNA, 15 bp, Homo sapiens
aagcaagatgggggg

SEQ ID NO: 1619306 - DNA, 15 bp, Homo sapiens
aaagcaagatggggg

SEQ ID NO: 1619307 - DNA, 15 bp, Homo sapiens
caaagcaagatgggg

SEQ ID NO: 1619308 - DNA, 15 bp, Homo sapiens
ccaaagcaagatggg

SEQ ID NO: 1619309 - DNA, 15 bp, Homo sapiens
gccaaagcaagatgg

SEQ ID NO: 1619310 - DNA, 15 bp, Homo sapiens
tgccaaagcaagatg

SEQ ID NO: 1619311 - DNA, 15 bp, Homo sapiens
ctgccaaagcaagat

SEQ ID NO: 1619312 - DNA, 15 bp, Homo sapiens
actgccaaagcaaga

SEQ ID NO: 1619313 - DNA, 15 bp, Homo sapiens
cactgccaaagcaag

SEQ ID NO: 1619314 - DNA, 15 bp, Homo sapiens
gcactgccaaagcaa

SEQ ID NO: 1619315 - DNA, 15 bp, Homo sapiens
ggcactgccaaagca

SEQ ID NO: 1619316 - DNA, 15 bp, Homo sapiens
aggcactgccaaagc

SEQ ID NO: 1619317 - DNA, 15 bp, Homo sapiens
gaggcactgccaaag

SEQ ID NO: 1619318 - DNA, 15 bp, Homo sapiens
tgaggcactgccaaa

SEQ ID NO: 1619319 - DNA, 15 bp, Homo sapiens
ttgaggcactgccaa

SEQ ID NO: 1619320 - DNA, 15 bp, Homo sapiens
cttgaggcactgcca

SEQ ID NO: 1619321 - DNA, 15 bp, Homo sapiens
ccttgaggcactgcc

SEQ ID NO: 1619322 - DNA, 15 bp, Homo sapiens
cccttgaggcactgc

SEQ ID NO: 1619323 - DNA, 15 bp, Homo sapiens
acccttgaggcactg

SEQ ID NO: 1619324 - DNA, 15 bp, Homo sapiens
gacccttgaggcact

SEQ ID NO: 1619325 - DNA, 15 bp, Homo sapiens
tgacccttgaggcac

SEQ ID NO: 1619326 - DNA, 15 bp, Homo sapiens
ctgacccttgaggca

SEQ ID NO: 1619327 - DNA, 15 bp, Homo sapiens
actgacccttgaggc

SEQ ID NO: 1619328 - DNA, 15 bp, Homo sapiens
aactgacccttgagg

SEQ ID NO: 1619329 - DNA, 15 bp, Homo sapiens
caactgacccttgag

SEQ ID NO: 1619330 - DNA, 15 bp, Homo sapiens
ccaactgacccttga

SEQ ID NO: 1619331 - DNA, 15 bp, Homo sapiens
accaactgacccttg

SEQ ID NO: 1619332 - DNA, 15 bp, Homo sapiens
gaccaactgaccctt

SEQ ID NO: 1619333 - DNA, 15 bp, Homo sapiens
tgaccaactgaccct

SEQ ID NO: 1619334 - DNA, 15 bp, Homo sapiens
ctgaccaactgaccc

SEQ ID NO: 1619335 - DNA, 15 bp, Homo sapiens
tctgaccaactgacc

SEQ ID NO: 1619336 - DNA, 15 bp, Homo sapiens
ctctgaccaactgac

SEQ ID NO: 1619337 - DNA, 15 bp, Homo sapiens
gctctgaccaactga

SEQ ID NO: 1619338 - DNA, 15 bp, Homo sapiens
tgctctgaccaactg

SEQ ID NO: 1619339 - DNA, 15 bp, Homo sapiens
ctgctctgaccaact

SEQ ID NO: 1619340 - DNA, 15 bp, Homo sapiens
gctgctctgaccaac

SEQ ID NO: 1619341 - DNA, 15 bp, Homo sapiens
agctgctctgaccaa

SEQ ID NO: 1619342 - DNA, 15 bp, Homo sapiens
aagctgctctgacca

SEQ ID NO: 1619343 - DNA, 15 bp, Homo sapiens
aaagctgctctgacc

SEQ ID NO: 1619344 - DNA, 15 bp, Homo sapiens
caaagctgctctgac

SEQ ID NO: 1619345 - DNA, 15 bp, Homo sapiens
ccaaagctgctctga

SEQ ID NO: 1619346 - DNA, 15 bp, Homo sapiens
tccaaagctgctctg

SEQ ID NO: 1619347 - DNA, 15 bp, Homo sapiens
atccaaagctgctct

SEQ ID NO: 1619348 - DNA, 15 bp, Homo sapiens
gatccaaagctgctc

SEQ ID NO: 1619349 - DNA, 15 bp, Homo sapiens
agatccaaagctgct

SEQ ID NO: 1619350 - DNA, 15 bp, Homo sapiens
cagatccaaagctgc

SEQ ID NO: 1619351 - DNA, 15 bp, Homo sapiens
ccagatccaaagctg

SEQ ID NO: 1619352 - DNA, 15 bp, Homo sapiens
cccagatccaaagct

SEQ ID NO: 1619353 - DNA, 15 bp, Homo sapiens
tcccagatccaaagc

SEQ ID NO: 1619354 - DNA, 15 bp, Homo sapiens
atcccagatccaaag

SEQ ID NO: 1619355 - DNA, 15 bp, Homo sapiens
aatcccagatccaaa

SEQ ID NO: 1619356 - DNA, 15 bp, Homo sapiens
taatcccagatccaa

SEQ ID NO: 1619357 - DNA, 15 bp, Homo sapiens
ctaatcccagatcca

SEQ ID NO: 1619358 - DNA, 15 bp, Homo sapiens
gctaatcccagatcc

SEQ ID NO: 1619359 - DNA, 15 bp, Homo sapiens
ggctaatcccagatc

SEQ ID NO: 1619360 - DNA, 15 bp, Homo sapiens
aggctaatcccagat

SEQ ID NO: 1619361 - DNA, 15 bp, Homo sapiens
aaggctaatcccaga

SEQ ID NO: 1619362 - DNA, 15 bp, Homo sapiens
aaaggctaatcccag

SEQ ID NO: 1619363 - DNA, 15 bp, Homo sapiens
gaaaggctaatccca

SEQ ID NO: 1619364 - DNA, 15 bp, Homo sapiens
agaaaggctaatccc

SEQ ID NO: 1619365 - DNA, 15 bp, Homo sapiens
gagaaaggctaatcc

SEQ ID NO: 1619366 - DNA, 15 bp, Homo sapiens
tgagaaaggctaatc

SEQ ID NO: 1619367 - DNA, 15 bp, Homo sapiens
atgagaaaggctaat

SEQ ID NO: 1619368 - DNA, 15 bp, Homo sapiens
aatgagaaaggctaa

SEQ ID NO: 1619369 - DNA, 15 bp, Homo sapiens
aaatgagaaaggcta

SEQ ID NO: 1619370 - DNA, 15 bp, Homo sapiens
caaatgagaaaggct

SEQ ID NO: 1619371 - DNA, 15 bp, Homo sapiens
gcaaatgagaaaggc

SEQ ID NO: 1619372 - DNA, 15 bp, Homo sapiens
agcaaatgagaaagg

SEQ ID NO: 1619373 - DNA, 15 bp, Homo sapiens
cagcaaatgagaaag

SEQ ID NO: 1619374 - DNA, 15 bp, Homo sapiens
ccagcaaatgagaaa

SEQ ID NO: 1619375 - DNA, 15 bp, Homo sapiens
cccagcaaatgagaa

SEQ ID NO: 1619376 - DNA, 15 bp, Homo sapiens
ccccagcaaatgaga

SEQ ID NO: 1619377 - DNA, 15 bp, Homo sapiens
accccagcaaatgag

SEQ ID NO: 1619378 - DNA, 15 bp, Homo sapiens
caccccagcaaatga

SEQ ID NO: 1619379 - DNA, 15 bp, Homo sapiens
tcaccccagcaaatg

SEQ ID NO: 1619380 - DNA, 15 bp, Homo sapiens
ttcaccccagcaaat

SEQ ID NO: 1619381 - DNA, 15 bp, Homo sapiens
cttcaccccagcaaa

SEQ ID NO: 1619382 - DNA, 15 bp, Homo sapiens
tcttcaccccagcaa

SEQ ID NO: 1619383 - DNA, 15 bp, Homo sapiens
gtcttcaccccagca

SEQ ID NO: 1619384 - DNA, 15 bp, Homo sapiens
tgtcttcaccccagc

SEQ ID NO: 1619385 - DNA, 15 bp, Homo sapiens
gtgtcttcaccccag

SEQ ID NO: 1619386 - DNA, 15 bp, Homo sapiens
cgtgtcttcacccca

SEQ ID NO: 1619387 - DNA, 15 bp, Homo sapiens
acgtgtcttcacccc

SEQ ID NO: 1619388 - DNA, 15 bp, Homo sapiens
aacgtgtcttcaccc

SEQ ID NO: 1619389 - DNA, 15 bp, Homo sapiens
gaacgtgtcttcacc

SEQ ID NO: 1619390 - DNA, 15 bp, Homo sapiens
agaacgtgtcttcac

SEQ ID NO: 1619391 - DNA, 15 bp, Homo sapiens
cagaacgtgtcttca

SEQ ID NO: 1619392 - DNA, 15 bp, Homo sapiens
gcagaacgtgtcttc

SEQ ID NO: 1619393 - DNA, 15 bp, Homo sapiens
tgcagaacgtgtctt

SEQ ID NO: 1619394 - DNA, 15 bp, Homo sapiens
gtgcagaacgtgtct

SEQ ID NO: 1619395 - DNA, 15 bp, Homo sapiens
tgtgcagaacgtgtc

SEQ ID NO: 1619396 - DNA, 15 bp, Homo sapiens
atgtgcagaacgtgt

SEQ ID NO: 1619397 - DNA, 15 bp, Homo sapiens
tatgtgcagaacgtg

SEQ ID NO: 1619398 - DNA, 15 bp, Homo sapiens
gtatgtgcagaacgt

SEQ ID NO: 1619399 - DNA, 15 bp, Homo sapiens
ggtatgtgcagaacg

SEQ ID NO: 1619400 - DNA, 15 bp, Homo sapiens
tggtatgtgcagaac

SEQ ID NO: 1619401 - DNA, 15 bp, Homo sapiens
ttggtatgtgcagaa

SEQ ID NO: 1619402 - DNA, 15 bp, Homo sapiens
tttggtatgtgcaga

SEQ ID NO: 1619403 - DNA, 15 bp, Homo sapiens
atttggtatgtgcag

SEQ ID NO: 1619404 - DNA, 15 bp, Homo sapiens
tatttggtatgtgca

SEQ ID NO: 1619405 - DNA, 15 bp, Homo sapiens
gtatttggtatgtgc

SEQ ID NO: 1619406 - DNA, 15 bp, Homo sapiens
ggtatttggtatgtg

SEQ ID NO: 1619407 - DNA, 15 bp, Homo sapiens
aggtatttggtatgt

SEQ ID NO: 1619408 - DNA, 15 bp, Homo sapiens
gaggtatttggtatg

SEQ ID NO: 1619409 - DNA, 15 bp, Homo sapiens
ggaggtatttggtat

SEQ ID NO: 1619410 - DNA, 15 bp, Homo sapiens
tggaggtatttggta

SEQ ID NO: 1619411 - DNA, 15 bp, Homo sapiens
ttggaggtatttggt

SEQ ID NO: 1619412 - DNA, 15 bp, Homo sapiens
tttggaggtatttgg

SEQ ID NO: 1619413 - DNA, 15 bp, Homo sapiens
ctttggaggtatttg

SEQ ID NO: 1619414 - DNA, 15 bp, Homo sapiens
actttggaggtattt

SEQ ID NO: 1619415 - DNA, 15 bp, Homo sapiens
tactttggaggtatt

SEQ ID NO: 1619416 - DNA, 15 bp, Homo sapiens
ctactttggaggtat

SEQ ID NO: 1619417 - DNA, 15 bp, Homo sapiens
cctactttggaggta

SEQ ID NO: 1619418 - DNA, 15 bp, Homo sapiens
tcctactttggaggt

SEQ ID NO: 1619419 - DNA, 15 bp, Homo sapiens
gtcctactttggagg

SEQ ID NO: 1619420 - DNA, 15 bp, Homo sapiens
agtcctactttggag

SEQ ID NO: 1619421 - DNA, 15 bp, Homo sapiens
cagtcctactttgga

SEQ ID NO: 1619422 - DNA, 15 bp, Homo sapiens
acagtcctactttgg

SEQ ID NO: 1619423 - DNA, 15 bp, Homo sapiens
tacagtcctactttg

SEQ ID NO: 1619424 - DNA, 15 bp, Homo sapiens
atacagtcctacttt

SEQ ID NO: 1619425 - DNA, 15 bp, Homo sapiens
catacagtcctactt

SEQ ID NO: 1619426 - DNA, 15 bp, Homo sapiens
acatacagtcctact

SEQ ID NO: 1619427 - DNA, 15 bp, Homo sapiens
cacatacagtcctac

SEQ ID NO: 1619428 - DNA, 15 bp, Homo sapiens
acacatacagtccta

SEQ ID NO: 1619429 - DNA, 15 bp, Homo sapiens
gacacatacagtcct

SEQ ID NO: 1619430 - DNA, 15 bp, Homo sapiens
agacacatacagtcc

SEQ ID NO: 1619431 - DNA, 15 bp, Homo sapiens
aagacacatacagtc

SEQ ID NO: 1619432 - DNA, 15 bp, Homo sapiens
caagacacatacagt

SEQ ID NO: 1619433 - DNA, 15 bp, Homo sapiens
acaagacacatacag

SEQ ID NO: 1619434 - DNA, 15 bp, Homo sapiens
tacaagacacataca

SEQ ID NO: 1619435 - DNA, 15 bp, Homo sapiens
gtacaagacacatac

SEQ ID NO: 1619436 - DNA, 15 bp, Homo sapiens
tgtacaagacacata

SEQ ID NO: 1619437 - DNA, 15 bp, Homo sapiens
atgtacaagacacat

SEQ ID NO: 1619438 - DNA, 15 bp, Homo sapiens
aatgtacaagacaca

SEQ ID NO: 1619439 - DNA, 15 bp, Homo sapiens
aaatgtacaagacac

SEQ ID NO: 1619440 - DNA, 15 bp, Homo sapiens
aaaatgtacaagaca

SEQ ID NO: 1619441 - DNA, 15 bp, Homo sapiens
aaaaatgtacaagac

SEQ ID NO: 1619442 - DNA, 15 bp, Homo sapiens
aaaaaatgtacaaga

SEQ ID NO: 1619443 - DNA, 15 bp, Homo sapiens
aaaaaaatgtacaag

SEQ ID NO: 1619444 - DNA, 15 bp, Homo sapiens
aaaaaaaatgtacaa

SEQ ID NO: 1619445 - DNA, 15 bp, Homo sapiens
aaaaaaaaatgtaca

SEQ ID NO: 1619446 - DNA, 15 bp, Homo sapiens
aaaaaaaaaatgtac

SEQ ID NO: 1619447 - DNA, 15 bp, Homo sapiens
aaaaaaaaaaaatgt

SEQ ID NO: 1619448 - DNA, 15 bp, Homo sapiens
gttaaaaaaaaaaaa

SEQ ID NO: 1619449 - DNA, 15 bp, Homo sapiens
tgttaaaaaaaaaaa

SEQ ID NO: 1619450 - DNA, 15 bp, Homo sapiens
atgttaaaaaaaaaa

SEQ ID NO: 1619451 - DNA, 15 bp, Homo sapiens
catgttaaaaaaaaa

SEQ ID NO: 1619452 - DNA, 15 bp, Homo sapiens
ccatgttaaaaaaaa

SEQ ID NO: 1619453 - DNA, 15 bp, Homo sapiens
cccatgttaaaaaaa

SEQ ID NO: 1619454 - DNA, 15 bp, Homo sapiens
ccccatgttaaaaaa

SEQ ID NO: 1619455 - DNA, 15 bp, Homo sapiens
tccccatgttaaaaa

SEQ ID NO: 1619456 - DNA, 15 bp, Homo sapiens
ctccccatgttaaaa

SEQ ID NO: 1619457 - DNA, 15 bp, Homo sapiens
cctccccatgttaaa

SEQ ID NO: 1619458 - DNA, 15 bp, Homo sapiens
ccctccccatgttaa

SEQ ID NO: 1619459 - DNA, 15 bp, Homo sapiens
tccctccccatgtta

SEQ ID NO: 1619460 - DNA, 15 bp, Homo sapiens
atccctccccatgtt

SEQ ID NO: 1619461 - DNA, 15 bp, Homo sapiens
aatccctccccatgt

SEQ ID NO: 1619462 - DNA, 15 bp, Homo sapiens
taatccctccccatg

SEQ ID NO: 1619463 - DNA, 15 bp, Homo sapiens
ttaatccctccccat

SEQ ID NO: 1619464 - DNA, 15 bp, Homo sapiens
gttaatccctcccca

SEQ ID NO: 1619465 - DNA, 15 bp, Homo sapiens
tgttaatccctcccc

SEQ ID NO: 1619466 - DNA, 15 bp, Homo sapiens
ttgttaatccctccc

SEQ ID NO: 1619467 - DNA, 15 bp, Homo sapiens
cttgttaatccctcc

SEQ ID NO: 1619468 - DNA, 15 bp, Homo sapiens
tcttgttaatccctc

SEQ ID NO: 1619469 - DNA, 15 bp, Homo sapiens
ctcttgttaatccct

SEQ ID NO: 1619470 - DNA, 15 bp, Homo sapiens
tctcttgttaatccc

SEQ ID NO: 1619471 - DNA, 15 bp, Homo sapiens
atctcttgttaatcc

SEQ ID NO: 1619472 - DNA, 15 bp, Homo sapiens
catctcttgttaatc

SEQ ID NO: 1619473 - DNA, 15 bp, Homo sapiens
ccatctcttgttaat

SEQ ID NO: 1619474 - DNA, 15 bp, Homo sapiens
gccatctcttgttaa

SEQ ID NO: 1619475 - DNA, 15 bp, Homo sapiens
tgccatctcttgtta

SEQ ID NO: 1619476 - DNA, 15 bp, Homo sapiens
atgccatctcttgtt

SEQ ID NO: 1619477 - DNA, 15 bp, Homo sapiens
aatgccatctcttgt

SEQ ID NO: 1619478 - DNA, 15 bp, Homo sapiens
taatgccatctcttg

SEQ ID NO: 1619479 - DNA, 15 bp, Homo sapiens
ttaatgccatctctt

SEQ ID NO: 1619480 - DNA, 15 bp, Homo sapiens
cttaatgccatctct

SEQ ID NO: 1619481 - DNA, 15 bp, Homo sapiens
tcttaatgccatctc

SEQ ID NO: 1619482 - DNA, 15 bp, Homo sapiens
gtcttaatgccatct

SEQ ID NO: 1619483 - DNA, 15 bp, Homo sapiens
ggtcttaatgccatc

SEQ ID NO: 1619484 - DNA, 15 bp, Homo sapiens
aggtcttaatgccat

SEQ ID NO: 1619485 - DNA, 15 bp, Homo sapiens
aaggtcttaatgcca

SEQ ID NO: 1619486 - DNA, 15 bp, Homo sapiens
caaggtcttaatgcc

SEQ ID NO: 1619487 - DNA, 15 bp, Homo sapiens
ccaaggtcttaatgc

SEQ ID NO: 1619488 - DNA, 15 bp, Homo sapiens
tccaaggtcttaatg

SEQ ID NO: 1619489 - DNA, 15 bp, Homo sapiens
atccaaggtcttaat

SEQ ID NO: 1619490 - DNA, 15 bp, Homo sapiens
tatccaaggtcttaa

SEQ ID NO: 1619491 - DNA, 15 bp, Homo sapiens
ttatccaaggtctta

SEQ ID NO: 1619492 - DNA, 15 bp, Homo sapiens
attatccaaggtctt

SEQ ID NO: 1619493 - DNA, 15 bp, Homo sapiens
tattatccaaggtct

SEQ ID NO: 1619494 - DNA, 15 bp, Homo sapiens
ttattatccaaggtc

SEQ ID NO: 1619495 - DNA, 15 bp, Homo sapiens
tttattatccaaggt

SEQ ID NO: 1619496 - DNA, 15 bp, Homo sapiens
gtttattatccaagg

SEQ ID NO: 1619497 - DNA, 15 bp, Homo sapiens
ggtttattatccaag

SEQ ID NO: 1619498 - DNA, 15 bp, Homo sapiens
aggtttattatccaa

SEQ ID NO: 1619499 - DNA, 15 bp, Homo sapiens
taggtttattatcca

SEQ ID NO: 1619500 - DNA, 15 bp, Homo sapiens
ctaggtttattatcc

SEQ ID NO: 1619501 - DNA, 15 bp, Homo sapiens
actaggtttattatc

SEQ ID NO: 1619502 - DNA, 15 bp, Homo sapiens
aactaggtttattat

SEQ ID NO: 1619503 - DNA, 15 bp, Homo sapiens
caactaggtttatta

SEQ ID NO: 1619504 - DNA, 15 bp, Homo sapiens
gcaactaggtttatt

SEQ ID NO: 1619505 - DNA, 15 bp, Homo sapiens
tgcaactaggtttat

SEQ ID NO: 1619506 - DNA, 15 bp, Homo sapiens
atgcaactaggttta

SEQ ID NO: 1619507 - DNA, 15 bp, Homo sapiens
gatgcaactaggttt

SEQ ID NO: 1619508 - DNA, 15 bp, Homo sapiens
agatgcaactaggtt

SEQ ID NO: 1619509 - DNA, 15 bp, Homo sapiens
cagatgcaactaggt

SEQ ID NO: 1619510 - DNA, 15 bp, Homo sapiens
gcagatgcaactagg

SEQ ID NO: 1619511 - DNA, 15 bp, Homo sapiens
agcagatgcaactag

SEQ ID NO: 1619512 - DNA, 15 bp, Homo sapiens
cagcagatgcaacta

SEQ ID NO: 1619513 - DNA, 15 bp, Homo sapiens
ccagcagatgcaact

SEQ ID NO: 1619514 - DNA, 15 bp, Homo sapiens
accagcagatgcaac

SEQ ID NO: 1619515 - DNA, 15 bp, Homo sapiens
gaccagcagatgcaa

SEQ ID NO: 1619516 - DNA, 15 bp, Homo sapiens
tgaccagcagatgca

SEQ ID NO: 1619517 - DNA, 15 bp, Homo sapiens
atgaccagcagatgc

SEQ ID NO: 1619518 - DNA, 15 bp, Homo sapiens
catgaccagcagatg

SEQ ID NO: 1619519 - DNA, 15 bp, Homo sapiens
ccatgaccagcagat

SEQ ID NO: 1619520 - DNA, 15 bp, Homo sapiens
accatgaccagcaga

SEQ ID NO: 1619521 - DNA, 15 bp, Homo sapiens
taccatgaccagcag

SEQ ID NO: 1619522 - DNA, 15 bp, Homo sapiens
ctaccatgaccagca

SEQ ID NO: 1619523 - DNA, 15 bp, Homo sapiens
tctaccatgaccagc

SEQ ID NO: 1619524 - DNA, 15 bp, Homo sapiens
ctctaccatgaccag

SEQ ID NO: 1619525 - DNA, 15 bp, Homo sapiens
gctctaccatgacca

SEQ ID NO: 1619526 - DNA, 15 bp, Homo sapiens
agctctaccatgacc

SEQ ID NO: 1619527 - DNA, 15 bp, Homo sapiens
cagctctaccatgac

SEQ ID NO: 1619528 - DNA, 15 bp, Homo sapiens
gcagctctaccatga

SEQ ID NO: 1619529 - DNA, 15 bp, Homo sapiens
agcagctctaccatg

SEQ ID NO: 1619530 - DNA, 15 bp, Homo sapiens
cagcagctctaccat

SEQ ID NO: 1619531 - DNA, 15 bp, Homo sapiens
acagcagctctacca

SEQ ID NO: 1619532 - DNA, 15 bp, Homo sapiens
cacagcagctctacc

SEQ ID NO: 1619533 - DNA, 15 bp, Homo sapiens
ccacagcagctctac

SEQ ID NO: 1619534 - DNA, 15 bp, Homo sapiens
accacagcagctcta

SEQ ID NO: 1619535 - DNA, 15 bp, Homo sapiens
gaccacagcagctct

SEQ ID NO: 1619536 - DNA, 15 bp, Homo sapiens
ggaccacagcagctc

SEQ ID NO: 1619537 - DNA, 15 bp, Homo sapiens
gggaccacagcagct

SEQ ID NO: 1619538 - DNA, 15 bp, Homo sapiens
agggaccacagcagc

SEQ ID NO: 1619539 - DNA, 15 bp, Homo sapiens
aagggaccacagcag

SEQ ID NO: 1619540 - DNA, 15 bp, Homo sapiens
caagggaccacagca

SEQ ID NO: 1619541 - DNA, 15 bp, Homo sapiens
gcaagggaccacagc

SEQ ID NO: 1619542 - DNA, 15 bp, Homo sapiens
tgcaagggaccacag

SEQ ID NO: 1619543 - DNA, 15 bp, Homo sapiens
ctgcaagggaccaca

SEQ ID NO: 1619544 - DNA, 15 bp, Homo sapiens
gctgcaagggaccac

SEQ ID NO: 1619545 - DNA, 15 bp, Homo sapiens
ggctgcaagggacca

SEQ ID NO: 1619546 - DNA, 15 bp, Homo sapiens
gggctgcaagggacc

SEQ ID NO: 1619547 - DNA, 15 bp, Homo sapiens
tgggctgcaagggac

SEQ ID NO: 1619548 - DNA, 15 bp, Homo sapiens
gtgggctgcaaggga

SEQ ID NO: 1619549 - DNA, 15 bp, Homo sapiens
tgtgggctgcaaggg

SEQ ID NO: 1619550 - DNA, 15 bp, Homo sapiens
ctgtgggctgcaagg

SEQ ID NO: 1619551 - DNA, 15 bp, Homo sapiens
actgtgggctgcaag

SEQ ID NO: 1619552 - DNA, 15 bp, Homo sapiens
cactgtgggctgcaa

SEQ ID NO: 1619553 - DNA, 15 bp, Homo sapiens
ccactgtgggctgca

SEQ ID NO: 1619554 - DNA, 15 bp, Homo sapiens
gccactgtgggctgc

SEQ ID NO: 1619555 - DNA, 15 bp, Homo sapiens
ggccactgtgggctg

SEQ ID NO: 1619556 - DNA, 15 bp, Homo sapiens
gggccactgtgggct

SEQ ID NO: 1619557 - DNA, 15 bp, Homo sapiens
agggccactgtgggc

SEQ ID NO: 1619558 - DNA, 15 bp, Homo sapiens
cagggccactgtggg

SEQ ID NO: 1619559 - DNA, 15 bp, Homo sapiens
gcagggccactgtgg

SEQ ID NO: 1619560 - DNA, 15 bp, Homo sapiens
ggcagggccactgtg

SEQ ID NO: 1619561 - DNA, 15 bp, Homo sapiens
aggcagggccactgt

SEQ ID NO: 1619562 - DNA, 15 bp, Homo sapiens
caggcagggccactg

SEQ ID NO: 1619563 - DNA, 15 bp, Homo sapiens
ccaggcagggccact

SEQ ID NO: 1619564 - DNA, 15 bp, Homo sapiens
tccaggcagggccac

SEQ ID NO: 1619565 - DNA, 15 bp, Homo sapiens
ttccaggcagggcca

SEQ ID NO: 1619566 - DNA, 15 bp, Homo sapiens
tttccaggcagggcc

SEQ ID NO: 1619567 - DNA, 15 bp, Homo sapiens
gtttccaggcagggc

SEQ ID NO: 1619568 - DNA, 15 bp, Homo sapiens
ggtttccaggcaggg

SEQ ID NO: 1619569 - DNA, 15 bp, Homo sapiens
aggtttccaggcagg

SEQ ID NO: 1619570 - DNA, 15 bp, Homo sapiens
gaggtttccaggcag

SEQ ID NO: 1619571 - DNA, 15 bp, Homo sapiens
tgaggtttccaggca

SEQ ID NO: 1619572 - DNA, 15 bp, Homo sapiens
ttgaggtttccaggc

SEQ ID NO: 1619573 - DNA, 15 bp, Homo sapiens
cttgaggtttccagg

SEQ ID NO: 1619574 - DNA, 15 bp, Homo sapiens
gcttgaggtttccag

SEQ ID NO: 1619575 - DNA, 15 bp, Homo sapiens
tgcttgaggtttcca

SEQ ID NO: 1619576 - DNA, 15 bp, Homo sapiens
ctgcttgaggtttcc

SEQ ID NO: 1619577 - DNA, 15 bp, Homo sapiens
cctgcttgaggtttc

SEQ ID NO: 1619578 - DNA, 15 bp, Homo sapiens
tcctgcttgaggttt

SEQ ID NO: 1619579 - DNA, 15 bp, Homo sapiens
atcctgcttgaggtt

SEQ ID NO: 1619580 - DNA, 15 bp, Homo sapiens
catcctgcttgaggt

SEQ ID NO: 1619581 - DNA, 15 bp, Homo sapiens
acatcctgcttgagg

SEQ ID NO: 1619582 - DNA, 15 bp, Homo sapiens
cacatcctgcttgag

SEQ ID NO: 1619583 - DNA, 15 bp, Homo sapiens
gcacatcctgcttga

SEQ ID NO: 1619584 - DNA, 15 bp, Homo sapiens
tgcacatcctgcttg

SEQ ID NO: 1619585 - DNA, 15 bp, Homo sapiens
atgcacatcctgctt

SEQ ID NO: 1619586 - DNA, 15 bp, Homo sapiens
gatgcacatcctgct

SEQ ID NO: 1619587 - DNA, 15 bp, Homo sapiens
agatgcacatcctgc

SEQ ID NO: 1619588 - DNA, 15 bp, Homo sapiens
aagatgcacatcctg

SEQ ID NO: 1619589 - DNA, 15 bp, Homo sapiens
gaagatgcacatcct

SEQ ID NO: 1619590 - DNA, 15 bp, Homo sapiens
agaagatgcacatcc

SEQ ID NO: 1619591 - DNA, 15 bp, Homo sapiens
cagaagatgcacatc

SEQ ID NO: 1619592 - DNA, 15 bp, Homo sapiens
gcagaagatgcacat

SEQ ID NO: 1619593 - DNA, 15 bp, Homo sapiens
ggcagaagatgcaca

SEQ ID NO: 1619594 - DNA, 15 bp, Homo sapiens
aggcagaagatgcac

SEQ ID NO: 1619595 - DNA, 15 bp, Homo sapiens
caggcagaagatgca

SEQ ID NO: 1619596 - DNA, 15 bp, Homo sapiens
gcaggcagaagatgc

SEQ ID NO: 1619597 - DNA, 15 bp, Homo sapiens
ggcaggcagaagatg

SEQ ID NO: 1619598 - DNA, 15 bp, Homo sapiens
aggcaggcagaagat

SEQ ID NO: 1619599 - DNA, 15 bp, Homo sapiens
taggcaggcagaaga

SEQ ID NO: 1619600 - DNA, 15 bp, Homo sapiens
gtaggcaggcagaag

SEQ ID NO: 1619601 - DNA, 15 bp, Homo sapiens
agtaggcaggcagaa

SEQ ID NO: 1619602 - DNA, 15 bp, Homo sapiens
cagtaggcaggcaga

SEQ ID NO: 1619603 - DNA, 15 bp, Homo sapiens
tcagtaggcaggcag

SEQ ID NO: 1619604 - DNA, 15 bp, Homo sapiens
atcagtaggcaggca

SEQ ID NO: 1619605 - DNA, 15 bp, Homo sapiens
gatcagtaggcaggc

SEQ ID NO: 1619606 - DNA, 15 bp, Homo sapiens
agatcagtaggcagg

SEQ ID NO: 1619607 - DNA, 15 bp, Homo sapiens
gagatcagtaggcag

SEQ ID NO: 1619608 - DNA, 15 bp, Homo sapiens
ggagatcagtaggca

SEQ ID NO: 1619609 - DNA, 15 bp, Homo sapiens
tggagatcagtaggc

SEQ ID NO: 1619610 - DNA, 15 bp, Homo sapiens
atggagatcagtagg

SEQ ID NO: 1619611 - DNA, 15 bp, Homo sapiens
gatggagatcagtag

SEQ ID NO: 1619612 - DNA, 15 bp, Homo sapiens
tgatggagatcagta

SEQ ID NO: 1619613 - DNA, 15 bp, Homo sapiens
gtgatggagatcagt

SEQ ID NO: 1619614 - DNA, 15 bp, Homo sapiens
agtgatggagatcag

SEQ ID NO: 1619615 - DNA, 15 bp, Homo sapiens
aagtgatggagatca

SEQ ID NO: 1619616 - DNA, 15 bp, Homo sapiens
caagtgatggagatc

SEQ ID NO: 1619617 - DNA, 15 bp, Homo sapiens
ccaagtgatggagat

SEQ ID NO: 1619618 - DNA, 15 bp, Homo sapiens
tccaagtgatggaga

SEQ ID NO: 1619619 - DNA, 15 bp, Homo sapiens
ctccaagtgatggag

SEQ ID NO: 1619620 - DNA, 15 bp, Homo sapiens
actccaagtgatgga

SEQ ID NO: 1619621 - DNA, 15 bp, Homo sapiens
tactccaagtgatgg

SEQ ID NO: 1619622 - DNA, 15 bp, Homo sapiens
gtactccaagtgatg

SEQ ID NO: 1619623 - DNA, 15 bp, Homo sapiens
ggtactccaagtgat

SEQ ID NO: 1619624 - DNA, 15 bp, Homo sapiens
gggtactccaagtga

SEQ ID NO: 1619625 - DNA, 15 bp, Homo sapiens
ggggtactccaagtg

SEQ ID NO: 1619626 - DNA, 15 bp, Homo sapiens
tggggtactccaagt

SEQ ID NO: 1619627 - DNA, 15 bp, Homo sapiens
ttggggtactccaag

SEQ ID NO: 1619628 - DNA, 15 bp, Homo sapiens
tttggggtactccaa

SEQ ID NO: 1619629 - DNA, 15 bp, Homo sapiens
ctttggggtactcca

SEQ ID NO: 1619630 - DNA, 15 bp, Homo sapiens
cctttggggtactcc

SEQ ID NO: 1619631 - DNA, 15 bp, Homo sapiens
gcctttggggtactc

SEQ ID NO: 1619632 - DNA, 15 bp, Homo sapiens
ggcctttggggtact

SEQ ID NO: 1619633 - DNA, 15 bp, Homo sapiens
aggcctttggggtac

SEQ ID NO: 1619634 - DNA, 15 bp, Homo sapiens
gaggcctttggggta

SEQ ID NO: 1619635 - DNA, 15 bp, Homo sapiens
agaggcctttggggt

SEQ ID NO: 1619636 - DNA, 15 bp, Homo sapiens
aagaggcctttgggg

SEQ ID NO: 1619637 - DNA, 15 bp, Homo sapiens
aaagaggcctttggg

SEQ ID NO: 1619638 - DNA, 15 bp, Homo sapiens
aaaagaggcctttgg

SEQ ID NO: 1619639 - DNA, 15 bp, Homo sapiens
aaaaagaggcctttg

SEQ ID NO: 1619640 - DNA, 15 bp, Homo sapiens
gaaaaagaggccttt

SEQ ID NO: 1619641 - DNA, 15 bp, Homo sapiens
tgaaaaagaggcctt

SEQ ID NO: 1619642 - DNA, 15 bp, Homo sapiens
gtgaaaaagaggcct

SEQ ID NO: 1619643 - DNA, 15 bp, Homo sapiens
ggtgaaaaagaggcc

SEQ ID NO: 1619644 - DNA, 15 bp, Homo sapiens
aggtgaaaaagaggc

SEQ ID NO: 1619645 - DNA, 15 bp, Homo sapiens
gaggtgaaaaagagg

SEQ ID NO: 1619646 - DNA, 15 bp, Homo sapiens
tgaggtgaaaaagag

SEQ ID NO: 1619647 - DNA, 15 bp, Homo sapiens
gtgaggtgaaaaaga

SEQ ID NO: 1619648 - DNA, 15 bp, Homo sapiens
agtgaggtgaaaaag

SEQ ID NO: 1619649 - DNA, 15 bp, Homo sapiens
aagtgaggtgaaaaa

SEQ ID NO: 1619650 - DNA, 15 bp, Homo sapiens
caagtgaggtgaaaa

SEQ ID NO: 1619651 - DNA, 15 bp, Homo sapiens
gcaagtgaggtgaaa

SEQ ID NO: 1619652 - DNA, 15 bp, Homo sapiens
ggcaagtgaggtgaa

SEQ ID NO: 1619653 - DNA, 15 bp, Homo sapiens
gggcaagtgaggtga

SEQ ID NO: 1619654 - DNA, 15 bp, Homo sapiens
tgggcaagtgaggtg

SEQ ID NO: 1619655 - DNA, 15 bp, Homo sapiens
ctgggcaagtgaggt

SEQ ID NO: 1619656 - DNA, 15 bp, Homo sapiens
gctgggcaagtgagg

SEQ ID NO: 1619657 - DNA, 15 bp, Homo sapiens
agctgggcaagtgag

SEQ ID NO: 1619658 - DNA, 15 bp, Homo sapiens
cagctgggcaagtga

SEQ ID NO: 1619659 - DNA, 15 bp, Homo sapiens
acagctgggcaagtg

SEQ ID NO: 1619660 - DNA, 15 bp, Homo sapiens
gacagctgggcaagt

SEQ ID NO: 1619661 - DNA, 15 bp, Homo sapiens
ggacagctgggcaag

SEQ ID NO: 1619662 - DNA, 15 bp, Homo sapiens
aggacagctgggcaa

SEQ ID NO: 1619663 - DNA, 15 bp, Homo sapiens
taggacagctgggca

SEQ ID NO: 1619664 - DNA, 15 bp, Homo sapiens
ctaggacagctgggc

SEQ ID NO: 1619665 - DNA, 15 bp, Homo sapiens
gctaggacagctggg

SEQ ID NO: 1619666 - DNA, 15 bp, Homo sapiens
cgctaggacagctgg

SEQ ID NO: 1619667 - DNA, 15 bp, Homo sapiens
ccgctaggacagctg

SEQ ID NO: 1619668 - DNA, 15 bp, Homo sapiens
gccgctaggacagct

SEQ ID NO: 1619669 - DNA, 15 bp, Homo sapiens
tgccgctaggacagc

SEQ ID NO: 1619670 - DNA, 15 bp, Homo sapiens
atgccgctaggacag

SEQ ID NO: 1619671 - DNA, 15 bp, Homo sapiens
tatgccgctaggaca

SEQ ID NO: 1619672 - DNA, 15 bp, Homo sapiens
ctatgccgctaggac

SEQ ID NO: 1619673 - DNA, 15 bp, Homo sapiens
cctatgccgctagga

SEQ ID NO: 1619674 - DNA, 15 bp, Homo sapiens
tcctatgccgctagg

SEQ ID NO: 1619675 - DNA, 15 bp, Homo sapiens
atcctatgccgctag

SEQ ID NO: 1619676 - DNA, 15 bp, Homo sapiens
catcctatgccgcta

SEQ ID NO: 1619677 - DNA, 15 bp, Homo sapiens
ccatcctatgccgct

SEQ ID NO: 1619678 - DNA, 15 bp, Homo sapiens
accatcctatgccgc

SEQ ID NO: 1619679 - DNA, 15 bp, Homo sapiens
aaccatcctatgccg

SEQ ID NO: 1619680 - DNA, 15 bp, Homo sapiens
caaccatcctatgcc

SEQ ID NO: 1619681 - DNA, 15 bp, Homo sapiens
acaaccatcctatgc

SEQ ID NO: 1619682 - DNA, 15 bp, Homo sapiens
cacaaccatcctatg

SEQ ID NO: 1619683 - DNA, 15 bp, Homo sapiens
acacaaccatcctat

SEQ ID NO: 1619684 - DNA, 15 bp, Homo sapiens
cacacaaccatccta

SEQ ID NO: 1619685 - DNA, 15 bp, Homo sapiens
ccacacaaccatcct

SEQ ID NO: 1619686 - DNA, 15 bp, Homo sapiens
accacacaaccatcc

SEQ ID NO: 1619687 - DNA, 15 bp, Homo sapiens
taccacacaaccatc

SEQ ID NO: 1619688 - DNA, 15 bp, Homo sapiens
ctaccacacaaccat

SEQ ID NO: 1619689 - DNA, 15 bp, Homo sapiens
tctaccacacaacca

SEQ ID NO: 1619690 - DNA, 15 bp, Homo sapiens
gtctaccacacaacc

SEQ ID NO: 1619691 - DNA, 15 bp, Homo sapiens
ggtctaccacacaac

SEQ ID NO: 1619692 - DNA, 15 bp, Homo sapiens
tggtctaccacacaa

SEQ ID NO: 1619693 - DNA, 15 bp, Homo sapiens
ctggtctaccacaca

SEQ ID NO: 1619694 - DNA, 15 bp, Homo sapiens
tctggtctaccacac

SEQ ID NO: 1619695 - DNA, 15 bp, Homo sapiens
ctctggtctaccaca

SEQ ID NO: 1619696 - DNA, 15 bp, Homo sapiens
cctctggtctaccac

SEQ ID NO: 1619697 - DNA, 15 bp, Homo sapiens
gcctctggtctacca

SEQ ID NO: 1619698 - DNA, 15 bp, Homo sapiens
ggcctctggtctacc

SEQ ID NO: 1619699 - DNA, 15 bp, Homo sapiens
aggcctctggtctac

SEQ ID NO: 1619700 - DNA, 15 bp, Homo sapiens
caggcctctggtcta

SEQ ID NO: 1619701 - DNA, 15 bp, Homo sapiens
acaggcctctggtct

SEQ ID NO: 1619702 - DNA, 15 bp, Homo sapiens
aacaggcctctggtc

SEQ ID NO: 1619703 - DNA, 15 bp, Homo sapiens
caacaggcctctggt

SEQ ID NO: 1619704 - DNA, 15 bp, Homo sapiens
acaacaggcctctgg

SEQ ID NO: 1619705 - DNA, 15 bp, Homo sapiens
cacaacaggcctctg

SEQ ID NO: 1619706 - DNA, 15 bp, Homo sapiens
acacaacaggcctct

SEQ ID NO: 1619707 - DNA, 15 bp, Homo sapiens
tacacaacaggcctc

SEQ ID NO: 1619708 - DNA, 15 bp, Homo sapiens
atacacaacaggcct

SEQ ID NO: 1619709 - DNA, 15 bp, Homo sapiens
tatacacaacaggcc

SEQ ID NO: 1619710 - DNA, 15 bp, Homo sapiens
atatacacaacaggc

SEQ ID NO: 1619711 - DNA, 15 bp, Homo sapiens
aatatacacaacagg

SEQ ID NO: 1619712 - DNA, 15 bp, Homo sapiens
aaatatacacaacag

SEQ ID NO: 1619713 - DNA, 15 bp, Homo sapiens
aaaatatacacaaca

SEQ ID NO: 1619714 - DNA, 15 bp, Homo sapiens
aaaaatatacacaac

SEQ ID NO: 1619715 - DNA, 15 bp, Homo sapiens
caaaaatatacacaa

SEQ ID NO: 1619716 - DNA, 15 bp, Homo sapiens
acaaaaatatacaca

SEQ ID NO: 1619717 - DNA, 15 bp, Homo sapiens
aacaaaaatatacac

SEQ ID NO: 1619718 - DNA, 15 bp, Homo sapiens
caacaaaaatataca

SEQ ID NO: 1619719 - DNA, 15 bp, Homo sapiens
ccaacaaaaatatac

SEQ ID NO: 1619720 - DNA, 15 bp, Homo sapiens
cccaacaaaaatata

SEQ ID NO: 1619721 - DNA, 15 bp, Homo sapiens
acccaacaaaaatat

SEQ ID NO: 1619722 - DNA, 15 bp, Homo sapiens
aacccaacaaaaata

SEQ ID NO: 1619723 - DNA, 15 bp, Homo sapiens
taacccaacaaaaat

SEQ ID NO: 1619724 - DNA, 15 bp, Homo sapiens
ataacccaacaaaaa

SEQ ID NO: 1619725 - DNA, 15 bp, Homo sapiens
tataacccaacaaaa

SEQ ID NO: 1619726 - DNA, 15 bp, Homo sapiens
ctataacccaacaaa

SEQ ID NO: 1619727 - DNA, 15 bp, Homo sapiens
gctataacccaacaa

SEQ ID NO: 1619728 - DNA, 15 bp, Homo sapiens
ggctataacccaaca

SEQ ID NO: 1619729 - DNA, 15 bp, Homo sapiens
tggctataacccaac

SEQ ID NO: 1619730 - DNA, 15 bp, Homo sapiens
gtggctataacccaa

SEQ ID NO: 1619731 - DNA, 15 bp, Homo sapiens
ggtggctataaccca

SEQ ID NO: 1619732 - DNA, 15 bp, Homo sapiens
gggtggctataaccc

SEQ ID NO: 1619733 - DNA, 15 bp, Homo sapiens
ggggtggctataacc

SEQ ID NO: 1619734 - DNA, 15 bp, Homo sapiens
aggggtggctataac

SEQ ID NO: 1619735 - DNA, 15 bp, Homo sapiens
caggggtggctataa

SEQ ID NO: 1619736 - DNA, 15 bp, Homo sapiens
acaggggtggctata

SEQ ID NO: 1619737 - DNA, 15 bp, Homo sapiens
cacaggggtggctat

SEQ ID NO: 1619738 - DNA, 15 bp, Homo sapiens
acacaggggtggcta

SEQ ID NO: 1619739 - DNA, 15 bp, Homo sapiens
tacacaggggtggct

SEQ ID NO: 1619740 - DNA, 15 bp, Homo sapiens
atacacaggggtggc

SEQ ID NO: 1619741 - DNA, 15 bp, Homo sapiens
gatacacaggggtgg

SEQ ID NO: 1619742 - DNA, 15 bp, Homo sapiens
agatacacaggggtg

SEQ ID NO: 1619743 - DNA, 15 bp, Homo sapiens
tagatacacaggggt

SEQ ID NO: 1619744 - DNA, 15 bp, Homo sapiens
gtagatacacagggg

SEQ ID NO: 1619745 - DNA, 15 bp, Homo sapiens
tgtagatacacaggg

SEQ ID NO: 1619746 - DNA, 15 bp, Homo sapiens
atgtagatacacagg

SEQ ID NO: 1619747 - DNA, 15 bp, Homo sapiens
catgtagatacacag

SEQ ID NO: 1619748 - DNA, 15 bp, Homo sapiens
gcatgtagatacaca

SEQ ID NO: 1619749 - DNA, 15 bp, Homo sapiens
tgcatgtagatacac

SEQ ID NO: 1619750 - DNA, 15 bp, Homo sapiens
gtgcatgtagataca

SEQ ID NO: 1619751 - DNA, 15 bp, Homo sapiens
tgtgcatgtagatac

SEQ ID NO: 1619752 - DNA, 15 bp, Homo sapiens
ttgtgcatgtagata

SEQ ID NO: 1619753 - DNA, 15 bp, Homo sapiens
cttgtgcatgtagat

SEQ ID NO: 1619754 - DNA, 15 bp, Homo sapiens
ccttgtgcatgtaga

SEQ ID NO: 1619755 - DNA, 15 bp, Homo sapiens
cccttgtgcatgtag

SEQ ID NO: 1619756 - DNA, 15 bp, Homo sapiens
gcccttgtgcatgta

SEQ ID NO: 1619757 - DNA, 15 bp, Homo sapiens
tgcccttgtgcatgt

SEQ ID NO: 1619758 - DNA, 15 bp, Homo sapiens
ctgcccttgtgcatg

SEQ ID NO: 1619759 - DNA, 15 bp, Homo sapiens
tctgcccttgtgcat

SEQ ID NO: 1619760 - DNA, 15 bp, Homo sapiens
ctctgcccttgtgca

SEQ ID NO: 1619761 - DNA, 15 bp, Homo sapiens
actctgcccttgtgc

SEQ ID NO: 1619762 - DNA, 15 bp, Homo sapiens
aactctgcccttgtg

SEQ ID NO: 1619763 - DNA, 15 bp, Homo sapiens
caactctgcccttgt

SEQ ID NO: 1619764 - DNA, 15 bp, Homo sapiens
acaactctgcccttg

SEQ ID NO: 1619765 - DNA, 15 bp, Homo sapiens
tacaactctgccctt

SEQ ID NO: 1619766 - DNA, 15 bp, Homo sapiens
ctacaactctgccct

SEQ ID NO: 1619767 - DNA, 15 bp, Homo sapiens
actacaactctgccc

SEQ ID NO: 1619768 - DNA, 15 bp, Homo sapiens
aactacaactctgcc

SEQ ID NO: 1619769 - DNA, 15 bp, Homo sapiens
caactacaactctgc

SEQ ID NO: 1619770 - DNA, 15 bp, Homo sapiens
acaactacaactctg

SEQ ID NO: 1619771 - DNA, 15 bp, Homo sapiens
cacaactacaactct

SEQ ID NO: 1619772 - DNA, 15 bp, Homo sapiens
ccacaactacaactc

SEQ ID NO: 1619773 - DNA, 15 bp, Homo sapiens
gccacaactacaact

SEQ ID NO: 1619774 - DNA, 15 bp, Homo sapiens
tgccacaactacaac

SEQ ID NO: 1619775 - DNA, 15 bp, Homo sapiens
ctgccacaactacaa

SEQ ID NO: 1619776 - DNA, 15 bp, Homo sapiens
tctgccacaactaca

SEQ ID NO: 1619777 - DNA, 15 bp, Homo sapiens
ttctgccacaactac

SEQ ID NO: 1619778 - DNA, 15 bp, Homo sapiens
cttctgccacaacta

SEQ ID NO: 1619779 - DNA, 15 bp, Homo sapiens
gcttctgccacaact

SEQ ID NO: 1619780 - DNA, 15 bp, Homo sapiens
agcttctgccacaac

SEQ ID NO: 1619781 - DNA, 15 bp, Homo sapiens
cagcttctgccacaa

SEQ ID NO: 1619782 - DNA, 15 bp, Homo sapiens
acagcttctgccaca

SEQ ID NO: 1619783 - DNA, 15 bp, Homo sapiens
tacagcttctgccac

SEQ ID NO: 1619784 - DNA, 15 bp, Homo sapiens
ctacagcttctgcca

SEQ ID NO: 1619785 - DNA, 15 bp, Homo sapiens
gctacagcttctgcc

SEQ ID NO: 1619786 - DNA, 15 bp, Homo sapiens
ggctacagcttctgc

SEQ ID NO: 1619787 - DNA, 15 bp, Homo sapiens
aggctacagcttctg

SEQ ID NO: 1619788 - DNA, 15 bp, Homo sapiens
taggctacagcttct

SEQ ID NO: 1619789 - DNA, 15 bp, Homo sapiens
gtaggctacagcttc

SEQ ID NO: 1619790 - DNA, 15 bp, Homo sapiens
tgtaggctacagctt

SEQ ID NO: 1619791 - DNA, 15 bp, Homo sapiens
ttgtaggctacagct

SEQ ID NO: 1619792 - DNA, 15 bp, Homo sapiens
tttgtaggctacagc

SEQ ID NO: 1619793 - DNA, 15 bp, Homo sapiens
ctttgtaggctacag

SEQ ID NO: 1619794 - DNA, 15 bp, Homo sapiens
gctttgtaggctaca

SEQ ID NO: 1619795 - DNA, 15 bp, Homo sapiens
ggctttgtaggctac

SEQ ID NO: 1619796 - DNA, 15 bp, Homo sapiens
aggctttgtaggcta

SEQ ID NO: 1619797 - DNA, 15 bp, Homo sapiens
caggctttgtaggct

SEQ ID NO: 1619798 - DNA, 15 bp, Homo sapiens
tcaggctttgtaggc

SEQ ID NO: 1619799 - DNA, 15 bp, Homo sapiens
ttcaggctttgtagg

SEQ ID NO: 1619800 - DNA, 15 bp, Homo sapiens
tttcaggctttgtag

SEQ ID NO: 1619801 - DNA, 15 bp, Homo sapiens
atttcaggctttgta

SEQ ID NO: 1619802 - DNA, 15 bp, Homo sapiens
tatttcaggctttgt

SEQ ID NO: 1619803 - DNA, 15 bp, Homo sapiens
atatttcaggctttg

SEQ ID NO: 1619804 - DNA, 15 bp, Homo sapiens
aatatttcaggcttt

SEQ ID NO: 1619805 - DNA, 15 bp, Homo sapiens
gaaatatttcaggct

SEQ ID NO: 1619806 - DNA, 15 bp, Homo sapiens
ggaaatatttcaggc

SEQ ID NO: 1619807 - DNA, 15 bp, Homo sapiens
aggaaatatttcagg

SEQ ID NO: 1619808 - DNA, 15 bp, Homo sapiens
taggaaatatttcag

SEQ ID NO: 1619809 - DNA, 15 bp, Homo sapiens
gtaggaaatatttca

SEQ ID NO: 1619810 - DNA, 15 bp, Homo sapiens
ggtaggaaatatttc

SEQ ID NO: 1619811 - DNA, 15 bp, Homo sapiens
aggtaggaaatattt

SEQ ID NO: 1619812 - DNA, 15 bp, Homo sapiens
caggtaggaaatatt

SEQ ID NO: 1619813 - DNA, 15 bp, Homo sapiens
tcaggtaggaaatat

SEQ ID NO: 1619814 - DNA, 15 bp, Homo sapiens
gtcaggtaggaaata

SEQ ID NO: 1619815 - DNA, 15 bp, Homo sapiens
ggtcaggtaggaaat

SEQ ID NO: 1619816 - DNA, 15 bp, Homo sapiens
gggtcaggtaggaaa

SEQ ID NO: 1619817 - DNA, 15 bp, Homo sapiens
agggtcaggtaggaa

SEQ ID NO: 1619818 - DNA, 15 bp, Homo sapiens
aagggtcaggtagga

SEQ ID NO: 1619819 - DNA, 15 bp, Homo sapiens
aaagggtcaggtagg

SEQ ID NO: 1619820 - DNA, 15 bp, Homo sapiens
taaagggtcaggtag

SEQ ID NO: 1619821 - DNA, 15 bp, Homo sapiens
ataaagggtcaggta

SEQ ID NO: 1619822 - DNA, 15 bp, Homo sapiens
aataaagggtcaggt

SEQ ID NO: 1619823 - DNA, 15 bp, Homo sapiens
taataaagggtcagg

SEQ ID NO: 1619824 - DNA, 15 bp, Homo sapiens
ataataaagggtcag

SEQ ID NO: 1619825 - DNA, 15 bp, Homo sapiens
aataataaagggtca

SEQ ID NO: 1619826 - DNA, 15 bp, Homo sapiens
aaataataaagggtc

SEQ ID NO: 1619827 - DNA, 15 bp, Homo sapiens
taaataataaagggt

SEQ ID NO: 1619828 - DNA, 15 bp, Homo sapiens
ataaataataaaggg

SEQ ID NO: 1619829 - DNA, 15 bp, Homo sapiens
aataaataataaagg

SEQ ID NO: 1619830 - DNA, 15 bp, Homo sapiens
aaataaataataaag

SEQ ID NO: 1619831 - DNA, 15 bp, Homo sapiens
aaaataaataataaa

SEQ ID NO: 1619832 - DNA, 15 bp, Homo sapiens
gaaaataaataataa

SEQ ID NO: 1619833 - DNA, 15 bp, Homo sapiens
tgaaaataaataata

SEQ ID NO: 1619834 - DNA, 15 bp, Homo sapiens
ctgaaaataaataat

SEQ ID NO: 1619835 - DNA, 15 bp, Homo sapiens
cctgaaaataaataa

SEQ ID NO: 1619836 - DNA, 15 bp, Homo sapiens
ccctgaaaataaata

SEQ ID NO: 1619837 - DNA, 15 bp, Homo sapiens
tccctgaaaataaat

SEQ ID NO: 1619838 - DNA, 15 bp, Homo sapiens
gtccctgaaaataaa

SEQ ID NO: 1619839 - DNA, 15 bp, Homo sapiens
tgtccctgaaaataa

SEQ ID NO: 1619840 - DNA, 15 bp, Homo sapiens
ctgtccctgaaaata

SEQ ID NO: 1619841 - DNA, 15 bp, Homo sapiens
cctgtccctgaaaat

SEQ ID NO: 1619842 - DNA, 15 bp, Homo sapiens
ccctgtccctgaaaa

SEQ ID NO: 1619843 - DNA, 15 bp, Homo sapiens
accctgtccctgaaa

SEQ ID NO: 1619844 - DNA, 15 bp, Homo sapiens
gaccctgtccctgaa

SEQ ID NO: 1619845 - DNA, 15 bp, Homo sapiens
agaccctgtccctga

SEQ ID NO: 1619846 - DNA, 15 bp, Homo sapiens
tagaccctgtccctg

SEQ ID NO: 1619847 - DNA, 15 bp, Homo sapiens
ctagaccctgtccct

SEQ ID NO: 1619848 - DNA, 15 bp, Homo sapiens
cctagaccctgtccc

SEQ ID NO: 1619849 - DNA, 15 bp, Homo sapiens
gcctagaccctgtcc

SEQ ID NO: 1619850 - DNA, 15 bp, Homo sapiens
ggcctagaccctgtc

SEQ ID NO: 1619851 - DNA, 15 bp, Homo sapiens
aggcctagaccctgt

SEQ ID NO: 1619852 - DNA, 15 bp, Homo sapiens
caggcctagaccctg

SEQ ID NO: 1619853 - DNA, 15 bp, Homo sapiens
acaggcctagaccct

SEQ ID NO: 1619854 - DNA, 15 bp, Homo sapiens
gacaggcctagaccc

SEQ ID NO: 1619855 - DNA, 15 bp, Homo sapiens
tgacaggcctagacc

SEQ ID NO: 1619856 - DNA, 15 bp, Homo sapiens
gtgacaggcctagac

SEQ ID NO: 1619857 - DNA, 15 bp, Homo sapiens
ggtgacaggcctaga

SEQ ID NO: 1619858 - DNA, 15 bp, Homo sapiens
gggtgacaggcctag

SEQ ID NO: 1619859 - DNA, 15 bp, Homo sapiens
tgggtgacaggccta

SEQ ID NO: 1619860 - DNA, 15 bp, Homo sapiens
ctgggtgacaggcct

SEQ ID NO: 1619861 - DNA, 15 bp, Homo sapiens
cctgggtgacaggcc

SEQ ID NO: 1619862 - DNA, 15 bp, Homo sapiens
acctgggtgacaggc

SEQ ID NO: 1619863 - DNA, 15 bp, Homo sapiens
aacctgggtgacagg

SEQ ID NO: 1619864 - DNA, 15 bp, Homo sapiens
caacctgggtgacag

SEQ ID NO: 1619865 - DNA, 15 bp, Homo sapiens
ccaacctgggtgaca

SEQ ID NO: 1619866 - DNA, 15 bp, Homo sapiens
tccaacctgggtgac

SEQ ID NO: 1619867 - DNA, 15 bp, Homo sapiens
ctccaacctgggtga

SEQ ID NO: 1619868 - DNA, 15 bp, Homo sapiens
actccaacctgggtg

SEQ ID NO: 1619869 - DNA, 15 bp, Homo sapiens
cactccaacctgggt

SEQ ID NO: 1619870 - DNA, 15 bp, Homo sapiens
gcactccaacctggg

SEQ ID NO: 1619871 - DNA, 15 bp, Homo sapiens
tgcactccaacctgg

SEQ ID NO: 1619872 - DNA, 15 bp, Homo sapiens
aattgtgccactgca

SEQ ID NO: 1619873 - DNA, 15 bp, Homo sapiens
taattgtgccactgc

SEQ ID NO: 1619874 - DNA, 15 bp, Homo sapiens
ataattgtgccactg

SEQ ID NO: 1619875 - DNA, 15 bp, Homo sapiens
tataattgtgccact

SEQ ID NO: 1619876 - DNA, 15 bp, Homo sapiens
ctataattgtgccac

SEQ ID NO: 1619877 - DNA, 15 bp, Homo sapiens
gctataattgtgcca

SEQ ID NO: 1619878 - DNA, 15 bp, Homo sapiens
agctataattgtgcc

SEQ ID NO: 1619879 - DNA, 15 bp, Homo sapiens
gagctataattgtgc

SEQ ID NO: 1619880 - DNA, 15 bp, Homo sapiens
tgagctataattgtg

SEQ ID NO: 1619881 - DNA, 15 bp, Homo sapiens
gtgagctataattgt

SEQ ID NO: 1619882 - DNA, 15 bp, Homo sapiens
agtgagctataattg

SEQ ID NO: 1619883 - DNA, 15 bp, Homo sapiens
cagtgagctataatt

SEQ ID NO: 1619884 - DNA, 15 bp, Homo sapiens
agctgcagtgagcta

SEQ ID NO: 1619885 - DNA, 15 bp, Homo sapiens
aagctgcagtgagct

SEQ ID NO: 1619886 - DNA, 15 bp, Homo sapiens
gaagctgcagtgagc

SEQ ID NO: 1619887 - DNA, 15 bp, Homo sapiens
agaagctgcagtgag

SEQ ID NO: 1619888 - DNA, 15 bp, Homo sapiens
aagaagctgcagtga

SEQ ID NO: 1619889 - DNA, 15 bp, Homo sapiens
caagaagctgcagtg

SEQ ID NO: 1619890 - DNA, 15 bp, Homo sapiens
ccaagaagctgcagt

SEQ ID NO: 1619891 - DNA, 15 bp, Homo sapiens
cccaagaagctgcag

SEQ ID NO: 1619892 - DNA, 15 bp, Homo sapiens
gcccaagaagctgca

SEQ ID NO: 1619893 - DNA, 15 bp, Homo sapiens
agcccaagaagctgc

SEQ ID NO: 1619894 - DNA, 15 bp, Homo sapiens
gagcccaagaagctg

SEQ ID NO: 1619895 - DNA, 15 bp, Homo sapiens
tgagcccaagaagct

SEQ ID NO: 1619896 - DNA, 15 bp, Homo sapiens
ttgagcccaagaagc

SEQ ID NO: 1619897 - DNA, 15 bp, Homo sapiens
cttgagcccaagaag

SEQ ID NO: 1619898 - DNA, 15 bp, Homo sapiens
acttgagcccaagaa

SEQ ID NO: 1619899 - DNA, 15 bp, Homo sapiens
gggcaggaggatcac

SEQ ID NO: 1619900 - DNA, 15 bp, Homo sapiens
ggggcaggaggatca

SEQ ID NO: 1619901 - DNA, 15 bp, Homo sapiens
tggggcaggaggatc

SEQ ID NO: 1619902 - DNA, 15 bp, Homo sapiens
gtggggcaggaggat

SEQ ID NO: 1619903 - DNA, 15 bp, Homo sapiens
gggtggggcaggagg

SEQ ID NO: 1619904 - DNA, 15 bp, Homo sapiens
agggtggggcaggag

SEQ ID NO: 1619905 - DNA, 15 bp, Homo sapiens
gagggtggggcagga

SEQ ID NO: 1619906 - DNA, 15 bp, Homo sapiens
ggagggtggggcagg

SEQ ID NO: 1619907 - DNA, 15 bp, Homo sapiens
aggagggtggggcag

SEQ ID NO: 1619908 - DNA, 15 bp, Homo sapiens
taggagggtggggca

SEQ ID NO: 1619909 - DNA, 15 bp, Homo sapiens
ttaggagggtggggc

SEQ ID NO: 1619910 - DNA, 15 bp, Homo sapiens
cttaggagggtgggg

SEQ ID NO: 1619911 - DNA, 15 bp, Homo sapiens
acttaggagggtggg

SEQ ID NO: 1619912 - DNA, 15 bp, Homo sapiens
tacttaggagggtgg

SEQ ID NO: 1619913 - DNA, 15 bp, Homo sapiens
ctacttaggagggtg

SEQ ID NO: 1619914 - DNA, 15 bp, Homo sapiens
gctacttaggagggt

SEQ ID NO: 1619915 - DNA, 15 bp, Homo sapiens
agctacttaggaggg

SEQ ID NO: 1619916 - DNA, 15 bp, Homo sapiens
taggcacctgtagtc

SEQ ID NO: 1619917 - DNA, 15 bp, Homo sapiens
ataggcacctgtagt

SEQ ID NO: 1619918 - DNA, 15 bp, Homo sapiens
gataggcacctgtag

SEQ ID NO: 1619919 - DNA, 15 bp, Homo sapiens
tgataggcacctgta

SEQ ID NO: 1619920 - DNA, 15 bp, Homo sapiens
ctgataggcacctgt

SEQ ID NO: 1619921 - DNA, 15 bp, Homo sapiens
actgataggcacctg

SEQ ID NO: 1619922 - DNA, 15 bp, Homo sapiens
gtcacgggcttaaga

SEQ ID NO: 1619923 - DNA, 15 bp, Homo sapiens
cgtcacgggcttaag

SEQ ID NO: 1619924 - DNA, 15 bp, Homo sapiens
tcgtcacgggcttaa

SEQ ID NO: 1619925 - DNA, 15 bp, Homo sapiens
atcgtcacgggctta

SEQ ID NO: 1619926 - DNA, 15 bp, Homo sapiens
catcgtcacgggctt

SEQ ID NO: 1619927 - DNA, 15 bp, Homo sapiens
tcatcgtcacgggct

SEQ ID NO: 1619928 - DNA, 15 bp, Homo sapiens
ctcatcgtcacgggc

SEQ ID NO: 1619929 - DNA, 15 bp, Homo sapiens
cctcatcgtcacggg

SEQ ID NO: 1619930 - DNA, 15 bp, Homo sapiens
ccctcatcgtcacgg

SEQ ID NO: 1619931 - DNA, 15 bp, Homo sapiens
accctcatcgtcacg

SEQ ID NO: 1619932 - DNA, 15 bp, Homo sapiens
caccctcatcgtcac

SEQ ID NO: 1619933 - DNA, 15 bp, Homo sapiens
gcaccctcatcgtca

SEQ ID NO: 1619934 - DNA, 15 bp, Homo sapiens
agcaccctcatcgtc

SEQ ID NO: 1619935 - DNA, 15 bp, Homo sapiens
gagcaccctcatcgt

SEQ ID NO: 1619936 - DNA, 15 bp, Homo sapiens
cgagcaccctcatcg

SEQ ID NO: 1619937 - DNA, 15 bp, Homo sapiens
ccgagcaccctcatc

SEQ ID NO: 1619938 - DNA, 15 bp, Homo sapiens
gccgagcaccctcat

SEQ ID NO: 1619939 - DNA, 15 bp, Homo sapiens
ggccgagcaccctca

SEQ ID NO: 1619940 - DNA, 15 bp, Homo sapiens
gggccgagcaccctc

SEQ ID NO: 1619941 - DNA, 15 bp, Homo sapiens
ggggccgagcaccct

SEQ ID NO: 1619942 - DNA, 15 bp, Homo sapiens
aggggccgagcaccc

SEQ ID NO: 1619943 - DNA, 15 bp, Homo sapiens
gaggggccgagcacc

SEQ ID NO: 1619944 - DNA, 15 bp, Homo sapiens
agaggggccgagcac

SEQ ID NO: 1619945 - DNA, 15 bp, Homo sapiens
gagaggggccgagca

SEQ ID NO: 1619946 - DNA, 15 bp, Homo sapiens
ggagaggggccgagc

SEQ ID NO: 1619947 - DNA, 15 bp, Homo sapiens
gggagaggggccgag

SEQ ID NO: 1619948 - DNA, 15 bp, Homo sapiens
ggggagaggggccga

SEQ ID NO: 1619949 - DNA, 15 bp, Homo sapiens
tggggagaggggccg

SEQ ID NO: 1619950 - DNA, 15 bp, Homo sapiens
atggggagaggggcc

SEQ ID NO: 1619951 - DNA, 15 bp, Homo sapiens
gatggggagaggggc

SEQ ID NO: 1619952 - DNA, 15 bp, Homo sapiens
agatggggagagggg

SEQ ID NO: 1619953 - DNA, 15 bp, Homo sapiens
agagatggggagagg

SEQ ID NO: 1619954 - DNA, 15 bp, Homo sapiens
aagagatggggagag

SEQ ID NO: 1619955 - DNA, 15 bp, Homo sapiens
gaagagatggggaga

SEQ ID NO: 1619956 - DNA, 15 bp, Homo sapiens
ggaagagatggggag

SEQ ID NO: 1619957 - DNA, 15 bp, Homo sapiens
aggaagagatgggga

SEQ ID NO: 1619958 - DNA, 15 bp, Homo sapiens
gaggaagagatgggg

SEQ ID NO: 1619959 - DNA, 15 bp, Homo sapiens
ggaggaagagatggg

SEQ ID NO: 1619960 - DNA, 15 bp, Homo sapiens
aggaggaagagatgg

SEQ ID NO: 1619961 - DNA, 15 bp, Homo sapiens
aaggaggaagagatg

SEQ ID NO: 1619962 - DNA, 15 bp, Homo sapiens
gaaggaggaagagat

SEQ ID NO: 1619963 - DNA, 15 bp, Homo sapiens
agaaggaggaagaga

SEQ ID NO: 1619964 - DNA, 15 bp, Homo sapiens
gagaaggaggaagag

SEQ ID NO: 1619965 - DNA, 15 bp, Homo sapiens
agagaaggaggaaga

SEQ ID NO: 1619966 - DNA, 15 bp, Homo sapiens
gagagaaggaggaag

SEQ ID NO: 1619967 - DNA, 15 bp, Homo sapiens
agagagaaggaggaa

SEQ ID NO: 1619968 - DNA, 15 bp, Homo sapiens
aagagagaaggagga

SEQ ID NO: 1619969 - DNA, 15 bp, Homo sapiens
gaagagagaaggagg

SEQ ID NO: 1619970 - DNA, 15 bp, Homo sapiens
ggaagagagaaggag

SEQ ID NO: 1619971 - DNA, 15 bp, Homo sapiens
aggaagagagaagga

SEQ ID NO: 1619972 - DNA, 15 bp, Homo sapiens
gaggaagagagaagg

SEQ ID NO: 1619973 - DNA, 15 bp, Homo sapiens
tgaggaagagagaag

SEQ ID NO: 1619974 - DNA, 15 bp, Homo sapiens
gtgaggaagagagaa

SEQ ID NO: 1619975 - DNA, 15 bp, Homo sapiens
ggtgaggaagagaga

SEQ ID NO: 1619976 - DNA, 15 bp, Homo sapiens
aggtgaggaagagag

SEQ ID NO: 1619977 - DNA, 15 bp, Homo sapiens
gaggtgaggaagaga

SEQ ID NO: 1619978 - DNA, 15 bp, Homo sapiens
ggaggtgaggaagag

SEQ ID NO: 1619979 - DNA, 15 bp, Homo sapiens
gggaggtgaggaaga

SEQ ID NO: 1619980 - DNA, 15 bp, Homo sapiens
agggaggtgaggaag

SEQ ID NO: 1619981 - DNA, 15 bp, Homo sapiens
gagggaggtgaggaa

SEQ ID NO: 1619982 - DNA, 15 bp, Homo sapiens
ggagggaggtgagga

SEQ ID NO: 1619983 - DNA, 15 bp, Homo sapiens
aggagggaggtgagg

SEQ ID NO: 1619984 - DNA, 15 bp, Homo sapiens
gaggagggaggtgag

SEQ ID NO: 1619985 - DNA, 15 bp, Homo sapiens
ggaggagggaggtga

SEQ ID NO: 1619986 - DNA, 15 bp, Homo sapiens
tggaggagggaggtg

SEQ ID NO: 1619987 - DNA, 15 bp, Homo sapiens
gtggaggagggaggt

SEQ ID NO: 1619988 - DNA, 15 bp, Homo sapiens
ggtggaggagggagg

SEQ ID NO: 1619989 - DNA, 15 bp, Homo sapiens
aggtggaggagggag

SEQ ID NO: 1619990 - DNA, 15 bp, Homo sapiens
taggtggaggaggga

SEQ ID NO: 1619991 - DNA, 15 bp, Homo sapiens
gtaggtggaggaggg

SEQ ID NO: 1619992 - DNA, 15 bp, Homo sapiens
ggtaggtggaggagg

SEQ ID NO: 1619993 - DNA, 15 bp, Homo sapiens
aggtaggtggaggag

SEQ ID NO: 1619994 - DNA, 15 bp, Homo sapiens
gaggtaggtggagga

SEQ ID NO: 1619995 - DNA, 15 bp, Homo sapiens
ggaggtaggtggagg

SEQ ID NO: 1619996 - DNA, 15 bp, Homo sapiens
tggaggtaggtggag

SEQ ID NO: 1619997 - DNA, 15 bp, Homo sapiens
ctggaggtaggtgga

SEQ ID NO: 1619998 - DNA, 15 bp, Homo sapiens
tctggaggtaggtgg

SEQ ID NO: 1619999 - DNA, 15 bp, Homo sapiens
ttctggaggtaggtg

SEQ ID NO: 1620000 - DNA, 15 bp, Homo sapiens
cttctggaggtaggt

SEQ ID NO: 1620001 - DNA, 15 bp, Homo sapiens
tcttctggaggtagg

SEQ ID NO: 1620002 - DNA, 15 bp, Homo sapiens
ctcttctggaggtag

SEQ ID NO: 1620003 - DNA, 15 bp, Homo sapiens
cctcttctggaggta

SEQ ID NO: 1620004 - DNA, 15 bp, Homo sapiens
ccctcttctggaggt

SEQ ID NO: 1620005 - DNA, 15 bp, Homo sapiens
cccctcttctggagg

SEQ ID NO: 1620006 - DNA, 15 bp, Homo sapiens
tcccctcttctggag

SEQ ID NO: 1620007 - DNA, 15 bp, Homo sapiens
gtcccctcttctgga

SEQ ID NO: 1620008 - DNA, 15 bp, Homo sapiens
agtcccctcttctgg

SEQ ID NO: 1620009 - DNA, 15 bp, Homo sapiens
gccagtcccctcttc

SEQ ID NO: 1620010 - DNA, 15 bp, Homo sapiens
ggccagtcccctctt

SEQ ID NO: 1620011 - DNA, 15 bp, Homo sapiens
tggccagtcccctct

SEQ ID NO: 1620012 - DNA, 15 bp, Homo sapiens
atggccagtcccctc

SEQ ID NO: 1620013 - DNA, 15 bp, Homo sapiens
catggccagtcccct

SEQ ID NO: 1620014 - DNA, 15 bp, Homo sapiens
acatggccagtcccc

SEQ ID NO: 1620015 - DNA, 15 bp, Homo sapiens
cacatggccagtccc

SEQ ID NO: 1620016 - DNA, 15 bp, Homo sapiens
ccacatggccagtcc

SEQ ID NO: 1620017 - DNA, 15 bp, Homo sapiens
cccacatggccagtc

SEQ ID NO: 1620018 - DNA, 15 bp, Homo sapiens
tcccacatggccagt

SEQ ID NO: 1620019 - DNA, 15 bp, Homo sapiens
ctcccacatggccag

SEQ ID NO: 1620020 - DNA, 15 bp, Homo sapiens
cctcccacatggcca

SEQ ID NO: 1620021 - DNA, 15 bp, Homo sapiens
gcctcccacatggcc

SEQ ID NO: 1620022 - DNA, 15 bp, Homo sapiens
ggcctcccacatggc

SEQ ID NO: 1620023 - DNA, 15 bp, Homo sapiens
aggcctcccacatgg

SEQ ID NO: 1620024 - DNA, 15 bp, Homo sapiens
caggcctcccacatg

SEQ ID NO: 1620025 - DNA, 15 bp, Homo sapiens
ccaggcctcccacat

SEQ ID NO: 1620026 - DNA, 15 bp, Homo sapiens
gccaggcctcccaca

SEQ ID NO: 1620027 - DNA, 15 bp, Homo sapiens
agccaggcctcccac

SEQ ID NO: 1620028 - DNA, 15 bp, Homo sapiens
cagccaggcctccca

SEQ ID NO: 1620029 - DNA, 15 bp, Homo sapiens
tcagccaggcctccc

SEQ ID NO: 1620030 - DNA, 15 bp, Homo sapiens
ctcagccaggcctcc

SEQ ID NO: 1620031 - DNA, 15 bp, Homo sapiens
tctcagccaggcctc

SEQ ID NO: 1620032 - DNA, 15 bp, Homo sapiens
ctctcagccaggcct

SEQ ID NO: 1620033 - DNA, 15 bp, Homo sapiens
gaacagcagcagcgt

SEQ ID NO: 1620034 - DNA, 15 bp, Homo sapiens
tgaacagcagcagcg

SEQ ID NO: 1620035 - DNA, 15 bp, Homo sapiens
ctgaacagcagcagc

SEQ ID NO: 1620036 - DNA, 15 bp, Homo sapiens
cctgaacagcagcag

SEQ ID NO: 1620037 - DNA, 15 bp, Homo sapiens
ccctgaacagcagca

SEQ ID NO: 1620038 - DNA, 15 bp, Homo sapiens
accctgaacagcagc

SEQ ID NO: 1620039 - DNA, 15 bp, Homo sapiens
caccctgaacagcag

SEQ ID NO: 1620040 - DNA, 15 bp, Homo sapiens
tcaccctgaacagca

SEQ ID NO: 1620041 - DNA, 15 bp, Homo sapiens
ctcaccctgaacagc

SEQ ID NO: 1620042 - DNA, 15 bp, Homo sapiens
gctcaccctgaacag

SEQ ID NO: 1620043 - DNA, 15 bp, Homo sapiens
ggctcaccctgaaca

SEQ ID NO: 1620044 - DNA, 15 bp, Homo sapiens
gggctcaccctgaac

SEQ ID NO: 1620045 - DNA, 15 bp, Homo sapiens
ggggctcaccctgaa

SEQ ID NO: 1620046 - DNA, 15 bp, Homo sapiens
gggggctcaccctga

SEQ ID NO: 1620047 - DNA, 15 bp, Homo sapiens
agggggctcaccctg

SEQ ID NO: 1620048 - DNA, 15 bp, Homo sapiens
gagggggctcaccct

SEQ ID NO: 1620049 - DNA, 15 bp, Homo sapiens
cgagggggctcaccc

SEQ ID NO: 1620050 - DNA, 15 bp, Homo sapiens
ccgagggggctcacc

SEQ ID NO: 1620051 - DNA, 15 bp, Homo sapiens
tccgagggggctcac

SEQ ID NO: 1620052 - DNA, 15 bp, Homo sapiens
gtccgagggggctca

SEQ ID NO: 1620053 - DNA, 15 bp, Homo sapiens
ggtccgagggggctc

SEQ ID NO: 1620054 - DNA, 15 bp, Homo sapiens
aggtccgagggggct

SEQ ID NO: 1620055 - DNA, 15 bp, Homo sapiens
gaggtccgagggggc

SEQ ID NO: 1620056 - DNA, 15 bp, Homo sapiens
agaggtccgaggggg

SEQ ID NO: 1620057 - DNA, 15 bp, Homo sapiens
cagaggtccgagggg

SEQ ID NO: 1620058 - DNA, 15 bp, Homo sapiens
tcagaggtccgaggg

SEQ ID NO: 1620059 - DNA, 15 bp, Homo sapiens
ctcagaggtccgagg

SEQ ID NO: 1620060 - DNA, 15 bp, Homo sapiens
actcagaggtccgag

SEQ ID NO: 1620061 - DNA, 15 bp, Homo sapiens
gactcagaggtccga

SEQ ID NO: 1620062 - DNA, 15 bp, Homo sapiens
tgactcagaggtccg

SEQ ID NO: 1620063 - DNA, 15 bp, Homo sapiens
ctgactcagaggtcc

SEQ ID NO: 1620064 - DNA, 15 bp, Homo sapiens
gctgactcagaggtc

SEQ ID NO: 1620065 - DNA, 15 bp, Homo sapiens
ggctgactcagaggt

SEQ ID NO: 1620066 - DNA, 15 bp, Homo sapiens
cggctgactcagagg

SEQ ID NO: 1620067 - DNA, 15 bp, Homo sapiens
ccggctgactcagag

SEQ ID NO: 1620068 - DNA, 15 bp, Homo sapiens
cccggctgactcaga

SEQ ID NO: 1620069 - DNA, 15 bp, Homo sapiens
gcccggctgactcag

SEQ ID NO: 1620070 - DNA, 15 bp, Homo sapiens
cgcccggctgactca

SEQ ID NO: 1620071 - DNA, 15 bp, Homo sapiens
tcgcccggctgactc

SEQ ID NO: 1620072 - DNA, 15 bp, Homo sapiens
ctcgcccggctgact

SEQ ID NO: 1620073 - DNA, 15 bp, Homo sapiens
cctcgcccggctgac

SEQ ID NO: 1620074 - DNA, 15 bp, Homo sapiens
ccctcgcccggctga

SEQ ID NO: 1620075 - DNA, 15 bp, Homo sapiens
gccctcgcccggctg

SEQ ID NO: 1620076 - DNA, 15 bp, Homo sapiens
ggccctcgcccggct

SEQ ID NO: 1620077 - DNA, 15 bp, Homo sapiens
aggccctcgcccggc

SEQ ID NO: 1620078 - DNA, 15 bp, Homo sapiens
caggccctcgcccgg

SEQ ID NO: 1620079 - DNA, 15 bp, Homo sapiens
ccaggccctcgcccg

SEQ ID NO: 1620080 - DNA, 15 bp, Homo sapiens
cccaggccctcgccc

SEQ ID NO: 1620081 - DNA, 15 bp, Homo sapiens
gcccaggccctcgcc

SEQ ID NO: 1620082 - DNA, 15 bp, Homo sapiens
ggcccaggccctcgc

SEQ ID NO: 1620083 - DNA, 15 bp, Homo sapiens
cggcccaggccctcg

SEQ ID NO: 1620084 - DNA, 15 bp, Homo sapiens
tcggcccaggccctc

SEQ ID NO: 1620085 - DNA, 15 bp, Homo sapiens
ctcggcccaggccct

SEQ ID NO: 1620086 - DNA, 15 bp, Homo sapiens
cctcggcccaggccc

SEQ ID NO: 1620087 - DNA, 15 bp, Homo sapiens
ccctcggcccaggcc

SEQ ID NO: 1620088 - DNA, 15 bp, Homo sapiens
tccctcggcccaggc

SEQ ID NO: 1620089 - DNA, 15 bp, Homo sapiens
gtccctcggcccagg

SEQ ID NO: 1620090 - DNA, 15 bp, Homo sapiens
ggtccctcggcccag

SEQ ID NO: 1620091 - DNA, 15 bp, Homo sapiens
gggtccctcggccca

SEQ ID NO: 1620092 - DNA, 15 bp, Homo sapiens
ggggtccctcggccc

SEQ ID NO: 1620093 - DNA, 15 bp, Homo sapiens
gggggtccctcggcc

SEQ ID NO: 1620094 - DNA, 15 bp, Homo sapiens
tgggggtccctcggc

SEQ ID NO: 1620095 - DNA, 15 bp, Homo sapiens
ttgggggtccctcgg

SEQ ID NO: 1620096 - DNA, 15 bp, Homo sapiens
attgggggtccctcg

SEQ ID NO: 1620097 - DNA, 15 bp, Homo sapiens
tattgggggtccctc

SEQ ID NO: 1620098 - DNA, 15 bp, Homo sapiens
gtattgggggtccct

SEQ ID NO: 1620099 - DNA, 15 bp, Homo sapiens
ggtattgggggtccc

SEQ ID NO: 1620100 - DNA, 15 bp, Homo sapiens
gggtattgggggtcc

SEQ ID NO: 1620101 - DNA, 15 bp, Homo sapiens
tgggtattgggggtc

SEQ ID NO: 1620102 - DNA, 15 bp, Homo sapiens
ctgggtattgggggt

SEQ ID NO: 1620103 - DNA, 15 bp, Homo sapiens
cctgggtattggggg

SEQ ID NO: 1620104 - DNA, 15 bp, Homo sapiens
acctgggtattgggg

SEQ ID NO: 1620105 - DNA, 15 bp, Homo sapiens
tacctgggtattggg

SEQ ID NO: 1620106 - DNA, 15 bp, Homo sapiens
ctacctgggtattgg

SEQ ID NO: 1620107 - DNA, 15 bp, Homo sapiens
gctacctgggtattg

SEQ ID NO: 1620108 - DNA, 15 bp, Homo sapiens
ggctacctgggtatt

SEQ ID NO: 1620109 - DNA, 15 bp, Homo sapiens
gggctacctgggtat

SEQ ID NO: 1620110 - DNA, 15 bp, Homo sapiens
agggctacctgggta

SEQ ID NO: 1620111 - DNA, 15 bp, Homo sapiens
gagggctacctgggt

SEQ ID NO: 1620112 - DNA, 15 bp, Homo sapiens
agagggctacctggg

SEQ ID NO: 1620113 - DNA, 15 bp, Homo sapiens
tagagggctacctgg

SEQ ID NO: 1620114 - DNA, 15 bp, Homo sapiens
ctagagggctacctg

SEQ ID NO: 1620115 - DNA, 15 bp, Homo sapiens
tctagagggctacct

SEQ ID NO: 1620116 - DNA, 15 bp, Homo sapiens
ctctagagggctacc

SEQ ID NO: 1620117 - DNA, 15 bp, Homo sapiens
gctctagagggctac

SEQ ID NO: 1620118 - DNA, 15 bp, Homo sapiens
ggctctagagggcta

SEQ ID NO: 1620119 - DNA, 15 bp, Homo sapiens
aggctctagagggct

SEQ ID NO: 1620120 - DNA, 15 bp, Homo sapiens
caggctctagagggc

SEQ ID NO: 1620121 - DNA, 15 bp, Homo sapiens
tcaggctctagaggg

SEQ ID NO: 1620122 - DNA, 15 bp, Homo sapiens
ctcaggctctagagg

SEQ ID NO: 1620123 - DNA, 15 bp, Homo sapiens
cctcaggctctagag

SEQ ID NO: 1620124 - DNA, 15 bp, Homo sapiens
acctcaggctctaga

SEQ ID NO: 1620125 - DNA, 15 bp, Homo sapiens
aacctcaggctctag

SEQ ID NO: 1620126 - DNA, 15 bp, Homo sapiens
gaacctcaggctcta

SEQ ID NO: 1620127 - DNA, 15 bp, Homo sapiens
ggaacctcaggctct

SEQ ID NO: 1620128 - DNA, 15 bp, Homo sapiens
gggaacctcaggctc

SEQ ID NO: 1620129 - DNA, 15 bp, Homo sapiens
ggggaacctcaggct

SEQ ID NO: 1620130 - DNA, 15 bp, Homo sapiens
tggggaacctcaggc

SEQ ID NO: 1620131 - DNA, 15 bp, Homo sapiens
atggggaacctcagg

SEQ ID NO: 1620132 - DNA, 15 bp, Homo sapiens
gatggggaacctcag

SEQ ID NO: 1620133 - DNA, 15 bp, Homo sapiens
ggatggggaacctca

SEQ ID NO: 1620134 - DNA, 15 bp, Homo sapiens
tggatggggaacctc

SEQ ID NO: 1620135 - DNA, 15 bp, Homo sapiens
ttggatggggaacct

SEQ ID NO: 1620136 - DNA, 15 bp, Homo sapiens
tttggatggggaacc

SEQ ID NO: 1620137 - DNA, 15 bp, Homo sapiens
ttttggatggggaac

SEQ ID NO: 1620138 - DNA, 15 bp, Homo sapiens
gttttggatggggaa

SEQ ID NO: 1620139 - DNA, 15 bp, Homo sapiens
agttttggatgggga

SEQ ID NO: 1620140 - DNA, 15 bp, Homo sapiens
aagttttggatgggg

SEQ ID NO: 1620141 - DNA, 15 bp, Homo sapiens
caagttttggatggg

SEQ ID NO: 1620142 - DNA, 15 bp, Homo sapiens
ccaagttttggatgg

SEQ ID NO: 1620143 - DNA, 15 bp, Homo sapiens
cccaagttttggatg

SEQ ID NO: 1620144 - DNA, 15 bp, Homo sapiens
tcccaagttttggat

SEQ ID NO: 1620145 - DNA, 15 bp, Homo sapiens
ctcccaagttttgga

SEQ ID NO: 1620146 - DNA, 15 bp, Homo sapiens
tctcccaagttttgg

SEQ ID NO: 1620147 - DNA, 15 bp, Homo sapiens
ttctcccaagttttg

SEQ ID NO: 1620148 - DNA, 15 bp, Homo sapiens
attctcccaagtttt

SEQ ID NO: 1620149 - DNA, 15 bp, Homo sapiens
cattctcccaagttt

SEQ ID NO: 1620150 - DNA, 15 bp, Homo sapiens
tcattctcccaagtt

SEQ ID NO: 1620151 - DNA, 15 bp, Homo sapiens
ttcattctcccaagt

SEQ ID NO: 1620152 - DNA, 15 bp, Homo sapiens
tttcattctcccaag

SEQ ID NO: 1620153 - DNA, 15 bp, Homo sapiens
ctttcattctcccaa

SEQ ID NO: 1620154 - DNA, 15 bp, Homo sapiens
gctttcattctccca

SEQ ID NO: 1620155 - DNA, 15 bp, Homo sapiens
tgctttcattctccc

SEQ ID NO: 1620156 - DNA, 15 bp, Homo sapiens
gtgctttcattctcc

SEQ ID NO: 1620157 - DNA, 15 bp, Homo sapiens
ggtgctttcattctc

SEQ ID NO: 1620158 - DNA, 15 bp, Homo sapiens
gggtgctttcattct

SEQ ID NO: 1620159 - DNA, 15 bp, Homo sapiens
tgggtgctttcattc

SEQ ID NO: 1620160 - DNA, 15 bp, Homo sapiens
gtgggtgctttcatt

SEQ ID NO: 1620161 - DNA, 15 bp, Homo sapiens
ggtgggtgctttcat

SEQ ID NO: 1620162 - DNA, 15 bp, Homo sapiens
tggtgggtgctttca

SEQ ID NO: 1620163 - DNA, 15 bp, Homo sapiens
atggtgggtgctttc

SEQ ID NO: 1620164 - DNA, 15 bp, Homo sapiens
tatggtgggtgcttt

SEQ ID NO: 1620165 - DNA, 15 bp, Homo sapiens
atatggtgggtgctt

SEQ ID NO: 1620166 - DNA, 15 bp, Homo sapiens
tatatggtgggtgct

SEQ ID NO: 1620167 - DNA, 15 bp, Homo sapiens
ctatatggtgggtgc

SEQ ID NO: 1620168 - DNA, 15 bp, Homo sapiens
cctatatggtgggtg

SEQ ID NO: 1620169 - DNA, 15 bp, Homo sapiens
ccctatatggtgggt

SEQ ID NO: 1620170 - DNA, 15 bp, Homo sapiens
cccctatatggtggg

SEQ ID NO: 1620171 - DNA, 15 bp, Homo sapiens
gcccctatatggtgg

SEQ ID NO: 1620172 - DNA, 15 bp, Homo sapiens
agcccctatatggtg

SEQ ID NO: 1620173 - DNA, 15 bp, Homo sapiens
cagcccctatatggt

SEQ ID NO: 1620174 - DNA, 15 bp, Homo sapiens
acagcccctatatgg

SEQ ID NO: 1620175 - DNA, 15 bp, Homo sapiens
cacagcccctatatg

SEQ ID NO: 1620176 - DNA, 15 bp, Homo sapiens
ccacagcccctatat

SEQ ID NO: 1620177 - DNA, 15 bp, Homo sapiens
cccacagcccctata

SEQ ID NO: 1620178 - DNA, 15 bp, Homo sapiens
tcccacagcccctat

SEQ ID NO: 1620179 - DNA, 15 bp, Homo sapiens
ctcccacagccccta

SEQ ID NO: 1620180 - DNA, 15 bp, Homo sapiens
actcccacagcccct

SEQ ID NO: 1620181 - DNA, 15 bp, Homo sapiens
aactcccacagcccc

SEQ ID NO: 1620182 - DNA, 15 bp, Homo sapiens
taactcccacagccc

SEQ ID NO: 1620183 - DNA, 15 bp, Homo sapiens
ttaactcccacagcc

SEQ ID NO: 1620184 - DNA, 15 bp, Homo sapiens
tttaactcccacagc

SEQ ID NO: 1620185 - DNA, 15 bp, Homo sapiens
atttaactcccacag

SEQ ID NO: 1620186 - DNA, 15 bp, Homo sapiens
catttaactcccaca

SEQ ID NO: 1620187 - DNA, 15 bp, Homo sapiens
tcatttaactcccac

SEQ ID NO: 1620188 - DNA, 15 bp, Homo sapiens
ttcatttaactccca

SEQ ID NO: 1620189 - DNA, 15 bp, Homo sapiens
attcatttaactccc

SEQ ID NO: 1620190 - DNA, 15 bp, Homo sapiens
cattcatttaactcc

SEQ ID NO: 1620191 - DNA, 15 bp, Homo sapiens
tcattcatttaactc

SEQ ID NO: 1620192 - DNA, 15 bp, Homo sapiens
ttcattcatttaact

SEQ ID NO: 1620193 - DNA, 15 bp, Homo sapiens
attcattcatttaac

SEQ ID NO: 1620194 - DNA, 15 bp, Homo sapiens
tattcattcatttaa

SEQ ID NO: 1620195 - DNA, 15 bp, Homo sapiens
atattcattcattta

SEQ ID NO: 1620196 - DNA, 15 bp, Homo sapiens
tatattcattcattt

SEQ ID NO: 1620197 - DNA, 15 bp, Homo sapiens
ttatattcattcatt

SEQ ID NO: 1620198 - DNA, 15 bp, Homo sapiens
tttatattcattcat

SEQ ID NO: 1620199 - DNA, 15 bp, Homo sapiens
ctttatattcattca

SEQ ID NO: 1620200 - DNA, 15 bp, Homo sapiens
tctttatattcattc

SEQ ID NO: 1620201 - DNA, 15 bp, Homo sapiens
ttctttatattcatt

SEQ ID NO: 1620202 - DNA, 15 bp, Homo sapiens
cttctttatattcat

SEQ ID NO: 1620203 - DNA, 15 bp, Homo sapiens
ccttctttatattca

SEQ ID NO: 1620204 - DNA, 15 bp, Homo sapiens
cccttctttatattc

SEQ ID NO: 1620205 - DNA, 15 bp, Homo sapiens
tcccttctttatatt

SEQ ID NO: 1620206 - DNA, 15 bp, Homo sapiens
gtcccttctttatat

SEQ ID NO: 1620207 - DNA, 15 bp, Homo sapiens
agtcccttctttata

SEQ ID NO: 1620208 - DNA, 15 bp, Homo sapiens
aagtcccttctttat

SEQ ID NO: 1620209 - DNA, 15 bp, Homo sapiens
caagtcccttcttta

SEQ ID NO: 1620210 - DNA, 15 bp, Homo sapiens
tcaagtcccttcttt

SEQ ID NO: 1620211 - DNA, 15 bp, Homo sapiens
ttcaagtcccttctt

SEQ ID NO: 1620212 - DNA, 15 bp, Homo sapiens
gttcaagtcccttct

SEQ ID NO: 1620213 - DNA, 15 bp, Homo sapiens
agttcaagtcccttc

SEQ ID NO: 1620214 - DNA, 15 bp, Homo sapiens
cagttcaagtccctt

SEQ ID NO: 1620215 - DNA, 15 bp, Homo sapiens
ccagttcaagtccct

SEQ ID NO: 1620216 - DNA, 15 bp, Homo sapiens
gccagttcaagtccc

SEQ ID NO: 1620217 - DNA, 15 bp, Homo sapiens
cgccagttcaagtcc

SEQ ID NO: 1620218 - DNA, 15 bp, Homo sapiens
gcgccagttcaagtc

SEQ ID NO: 1620219 - DNA, 15 bp, Homo sapiens
agcgccagttcaagt

SEQ ID NO: 1620220 - DNA, 15 bp, Homo sapiens
cagcgccagttcaag

SEQ ID NO: 1620221 - DNA, 15 bp, Homo sapiens
tcagcgccagttcaa

SEQ ID NO: 1620222 - DNA, 15 bp, Homo sapiens
ctcagcgccagttca

SEQ ID NO: 1620223 - DNA, 15 bp, Homo sapiens
gctcagcgccagttc

SEQ ID NO: 1620224 - DNA, 15 bp, Homo sapiens
ggctcagcgccagtt

SEQ ID NO: 1620225 - DNA, 15 bp, Homo sapiens
gggctcagcgccagt

SEQ ID NO: 1620226 - DNA, 15 bp, Homo sapiens
tgggctcagcgccag

SEQ ID NO: 1620227 - DNA, 15 bp, Homo sapiens
ctgggctcagcgcca

SEQ ID NO: 1620228 - DNA, 15 bp, Homo sapiens
cctgggctcagcgcc

SEQ ID NO: 1620229 - DNA, 15 bp, Homo sapiens
ccctgggctcagcgc

SEQ ID NO: 1620230 - DNA, 15 bp, Homo sapiens
cccctgggctcagcg

SEQ ID NO: 1620231 - DNA, 15 bp, Homo sapiens
ccccctgggctcagc

SEQ ID NO: 1620232 - DNA, 15 bp, Homo sapiens
accccctgggctcag

SEQ ID NO: 1620233 - DNA, 15 bp, Homo sapiens
caccccctgggctca

SEQ ID NO: 1620234 - DNA, 15 bp, Homo sapiens
acaccccctgggctc

SEQ ID NO: 1620235 - DNA, 15 bp, Homo sapiens
gacaccccctgggct

SEQ ID NO: 1620236 - DNA, 15 bp, Homo sapiens
agacaccccctgggc

SEQ ID NO: 1620237 - DNA, 15 bp, Homo sapiens
aagacaccccctggg

SEQ ID NO: 1620238 - DNA, 15 bp, Homo sapiens
gaagacaccccctgg

SEQ ID NO: 1620239 - DNA, 15 bp, Homo sapiens
tgaagacaccccctg

SEQ ID NO: 1620240 - DNA, 15 bp, Homo sapiens
ttgaagacaccccct

SEQ ID NO: 1620241 - DNA, 15 bp, Homo sapiens
attgaagacaccccc

SEQ ID NO: 1620242 - DNA, 15 bp, Homo sapiens
aattgaagacacccc

SEQ ID NO: 1620243 - DNA, 15 bp, Homo sapiens
aaattgaagacaccc

SEQ ID NO: 1620244 - DNA, 15 bp, Homo sapiens
taaattgaagacacc

SEQ ID NO: 1620245 - DNA, 15 bp, Homo sapiens
ctaaattgaagacac

SEQ ID NO: 1620246 - DNA, 15 bp, Homo sapiens
actaaattgaagaca

SEQ ID NO: 1620247 - DNA, 15 bp, Homo sapiens
aactaaattgaagac

SEQ ID NO: 1620248 - DNA, 15 bp, Homo sapiens
aaactaaattgaaga

SEQ ID NO: 1620249 - DNA, 15 bp, Homo sapiens
gaaactaaattgaag

SEQ ID NO: 1620250 - DNA, 15 bp, Homo sapiens
ggaaactaaattgaa

SEQ ID NO: 1620251 - DNA, 15 bp, Homo sapiens
gggaaactaaattga

SEQ ID NO: 1620252 - DNA, 15 bp, Homo sapiens
ggggaaactaaattg

SEQ ID NO: 1620253 - DNA, 15 bp, Homo sapiens
aggggaaactaaatt

SEQ ID NO: 1620254 - DNA, 15 bp, Homo sapiens
aaggggaaactaaat

SEQ ID NO: 1620255 - DNA, 15 bp, Homo sapiens
gaaggggaaactaaa

SEQ ID NO: 1620256 - DNA, 15 bp, Homo sapiens
agaaggggaaactaa

SEQ ID NO: 1620257 - DNA, 15 bp, Homo sapiens
cagaaggggaaacta

SEQ ID NO: 1620258 - DNA, 15 bp, Homo sapiens
ccagaaggggaaact

SEQ ID NO: 1620259 - DNA, 15 bp, Homo sapiens
cccagaaggggaaac

SEQ ID NO: 1620260 - DNA, 15 bp, Homo sapiens
gcccagaaggggaaa

SEQ ID NO: 1620261 - DNA, 15 bp, Homo sapiens
agcccagaaggggaa

SEQ ID NO: 1620262 - DNA, 15 bp, Homo sapiens
cagcccagaagggga

SEQ ID NO: 1620263 - DNA, 15 bp, Homo sapiens
acagcccagaagggg

SEQ ID NO: 1620264 - DNA, 15 bp, Homo sapiens
gacagcccagaaggg

SEQ ID NO: 1620265 - DNA, 15 bp, Homo sapiens
ggacagcccagaagg

SEQ ID NO: 1620266 - DNA, 15 bp, Homo sapiens
aggacagcccagaag

SEQ ID NO: 1620267 - DNA, 15 bp, Homo sapiens
gaggacagcccagaa

SEQ ID NO: 1620268 - DNA, 15 bp, Homo sapiens
tgaggacagcccaga

SEQ ID NO: 1620269 - DNA, 15 bp, Homo sapiens
gtgaggacagcccag

SEQ ID NO: 1620270 - DNA, 15 bp, Homo sapiens
cgtgaggacagccca

SEQ ID NO: 1620271 - DNA, 15 bp, Homo sapiens
acgtgaggacagccc

SEQ ID NO: 1620272 - DNA, 15 bp, Homo sapiens
gacgtgaggacagcc

SEQ ID NO: 1620273 - DNA, 15 bp, Homo sapiens
ggacgtgaggacagc

SEQ ID NO: 1620274 - DNA, 15 bp, Homo sapiens
tggacgtgaggacag

SEQ ID NO: 1620275 - DNA, 15 bp, Homo sapiens
gtggacgtgaggaca

SEQ ID NO: 1620276 - DNA, 15 bp, Homo sapiens
ggtggacgtgaggac

SEQ ID NO: 1620277 - DNA, 15 bp, Homo sapiens
aggtggacgtgagga

SEQ ID NO: 1620278 - DNA, 15 bp, Homo sapiens
gaggtggacgtgagg

SEQ ID NO: 1620279 - DNA, 15 bp, Homo sapiens
ggaggtggacgtgag

SEQ ID NO: 1620280 - DNA, 15 bp, Homo sapiens
gggaggtggacgtga

SEQ ID NO: 1620281 - DNA, 15 bp, Homo sapiens
ggggaggtggacgtg

SEQ ID NO: 1620282 - DNA, 15 bp, Homo sapiens
gggggaggtggacgt

SEQ ID NO: 1620283 - DNA, 15 bp, Homo sapiens
ggggggaggtggacg

SEQ ID NO: 1620284 - DNA, 15 bp, Homo sapiens
tggggggaggtggac

SEQ ID NO: 1620285 - DNA, 15 bp, Homo sapiens
ttggggggaggtgga

SEQ ID NO: 1620286 - DNA, 15 bp, Homo sapiens
cttggggggaggtgg

SEQ ID NO: 1620287 - DNA, 15 bp, Homo sapiens
tcttggggggaggtg

SEQ ID NO: 1620288 - DNA, 15 bp, Homo sapiens
ttcttggggggaggt

SEQ ID NO: 1620289 - DNA, 15 bp, Homo sapiens
cttcttggggggagg

SEQ ID NO: 1620290 - DNA, 15 bp, Homo sapiens
tcttcttggggggag

SEQ ID NO: 1620291 - DNA, 15 bp, Homo sapiens
ctcttcttgggggga

SEQ ID NO: 1620292 - DNA, 15 bp, Homo sapiens
actcttcttgggggg

SEQ ID NO: 1620293 - DNA, 15 bp, Homo sapiens
gactcttcttggggg

SEQ ID NO: 1620294 - DNA, 15 bp, Homo sapiens
agactcttcttgggg

SEQ ID NO: 1620295 - DNA, 15 bp, Homo sapiens
gagactcttcttggg

SEQ ID NO: 1620296 - DNA, 15 bp, Homo sapiens
tgagactcttcttgg

SEQ ID NO: 1620297 - DNA, 15 bp, Homo sapiens
atgagactcttcttg

SEQ ID NO: 1620298 - DNA, 15 bp, Homo sapiens
aatgagactcttctt

SEQ ID NO: 1620299 - DNA, 15 bp, Homo sapiens
gaatgagactcttct

SEQ ID NO: 1620300 - DNA, 15 bp, Homo sapiens
agaatgagactcttc

SEQ ID NO: 1620301 - DNA, 15 bp, Homo sapiens
aagaatgagactctt

SEQ ID NO: 1620302 - DNA, 15 bp, Homo sapiens
gaagaatgagactct

SEQ ID NO: 1620303 - DNA, 15 bp, Homo sapiens
agaagaatgagactc

SEQ ID NO: 1620304 - DNA, 15 bp, Homo sapiens
gagaagaatgagact

SEQ ID NO: 1620305 - DNA, 15 bp, Homo sapiens
ggagaagaatgagac

SEQ ID NO: 1620306 - DNA, 15 bp, Homo sapiens
gggagaagaatgaga

SEQ ID NO: 1620307 - DNA, 15 bp, Homo sapiens
agggagaagaatgag

SEQ ID NO: 1620308 - DNA, 15 bp, Homo sapiens
tagggagaagaatga

SEQ ID NO: 1620309 - DNA, 15 bp, Homo sapiens
ttagggagaagaatg

SEQ ID NO: 1620310 - DNA, 15 bp, Homo sapiens
cttagggagaagaat

SEQ ID NO: 1620311 - DNA, 15 bp, Homo sapiens
tcttagggagaagaa

SEQ ID NO: 1620312 - DNA, 15 bp, Homo sapiens
ctcttagggagaaga

SEQ ID NO: 1620313 - DNA, 15 bp, Homo sapiens
actcttagggagaag

SEQ ID NO: 1620314 - DNA, 15 bp, Homo sapiens
cactcttagggagaa

SEQ ID NO: 1620315 - DNA, 15 bp, Homo sapiens
acactcttagggaga

SEQ ID NO: 1620316 - DNA, 15 bp, Homo sapiens
gacactcttagggag

SEQ ID NO: 1620317 - DNA, 15 bp, Homo sapiens
ggacactcttaggga

SEQ ID NO: 1620318 - DNA, 15 bp, Homo sapiens
aggacactcttaggg

SEQ ID NO: 1620319 - DNA, 15 bp, Homo sapiens
gaggacactcttagg

SEQ ID NO: 1620320 - DNA, 15 bp, Homo sapiens
tgaggacactcttag

SEQ ID NO: 1620321 - DNA, 15 bp, Homo sapiens
gtgaggacactctta

SEQ ID NO: 1620322 - DNA, 15 bp, Homo sapiens
agtgaggacactctt

SEQ ID NO: 1620323 - DNA, 15 bp, Homo sapiens
gagtgaggacactct

SEQ ID NO: 1620324 - DNA, 15 bp, Homo sapiens
ggagtgaggacactc

SEQ ID NO: 1620325 - DNA, 15 bp, Homo sapiens
gggagtgaggacact

SEQ ID NO: 1620326 - DNA, 15 bp, Homo sapiens
ggggagtgaggacac

SEQ ID NO: 1620327 - DNA, 15 bp, Homo sapiens
aggggagtgaggaca

SEQ ID NO: 1620328 - DNA, 15 bp, Homo sapiens
gaggggagtgaggac

SEQ ID NO: 1620329 - DNA, 15 bp, Homo sapiens
ggaggggagtgagga

SEQ ID NO: 1620330 - DNA, 15 bp, Homo sapiens
aggaggggagtgagg

SEQ ID NO: 1620331 - DNA, 15 bp, Homo sapiens
caggaggggagtgag

SEQ ID NO: 1620332 - DNA, 15 bp, Homo sapiens
gcaggaggggagtga

SEQ ID NO: 1620333 - DNA, 15 bp, Homo sapiens
ggcaggaggggagtg

SEQ ID NO: 1620334 - DNA, 15 bp, Homo sapiens
gggcaggaggggagt

SEQ ID NO: 1620335 - DNA, 15 bp, Homo sapiens
agggcaggaggggag

SEQ ID NO: 1620336 - DNA, 15 bp, Homo sapiens
gagggcaggagggga

SEQ ID NO: 1620337 - DNA, 15 bp, Homo sapiens
tgagggcaggagggg

SEQ ID NO: 1620338 - DNA, 15 bp, Homo sapiens
gtgagggcaggaggg

SEQ ID NO: 1620339 - DNA, 15 bp, Homo sapiens
ggtgagggcaggagg

SEQ ID NO: 1620340 - DNA, 15 bp, Homo sapiens
gggtgagggcaggag

SEQ ID NO: 1620341 - DNA, 15 bp, Homo sapiens
tgggtgagggcagga

SEQ ID NO: 1620342 - DNA, 15 bp, Homo sapiens
ctgggtgagggcagg

SEQ ID NO: 1620343 - DNA, 15 bp, Homo sapiens
cctgggtgagggcag

SEQ ID NO: 1620344 - DNA, 15 bp, Homo sapiens
tcctgggtgagggca

SEQ ID NO: 1620345 - DNA, 15 bp, Homo sapiens
ctcctgggtgagggc

SEQ ID NO: 1620346 - DNA, 15 bp, Homo sapiens
actcctgggtgaggg

SEQ ID NO: 1620347 - DNA, 15 bp, Homo sapiens
cactcctgggtgagg

SEQ ID NO: 1620348 - DNA, 15 bp, Homo sapiens
acactcctgggtgag

SEQ ID NO: 1620349 - DNA, 15 bp, Homo sapiens
cacactcctgggtga

SEQ ID NO: 1620350 - DNA, 15 bp, Homo sapiens
ccacactcctgggtg

SEQ ID NO: 1620351 - DNA, 15 bp, Homo sapiens
accacactcctgggt

SEQ ID NO: 1620352 - DNA, 15 bp, Homo sapiens
aaccacactcctggg

SEQ ID NO: 1620353 - DNA, 15 bp, Homo sapiens
taaccacactcctgg

SEQ ID NO: 1620354 - DNA, 15 bp, Homo sapiens
gtaaccacactcctg

SEQ ID NO: 1620355 - DNA, 15 bp, Homo sapiens
ggtaaccacactcct

SEQ ID NO: 1620356 - DNA, 15 bp, Homo sapiens
gggtaaccacactcc

SEQ ID NO: 1620357 - DNA, 15 bp, Homo sapiens
agggtaaccacactc

SEQ ID NO: 1620358 - DNA, 15 bp, Homo sapiens
gagggtaaccacact

SEQ ID NO: 1620359 - DNA, 15 bp, Homo sapiens
ggagggtaaccacac

SEQ ID NO: 1620360 - DNA, 15 bp, Homo sapiens
tggagggtaaccaca

SEQ ID NO: 1620361 - DNA, 15 bp, Homo sapiens
ctggagggtaaccac

SEQ ID NO: 1620362 - DNA, 15 bp, Homo sapiens
cctggagggtaacca

SEQ ID NO: 1620363 - DNA, 15 bp, Homo sapiens
acctggagggtaacc

SEQ ID NO: 1620364 - DNA, 15 bp, Homo sapiens
cacctggagggtaac

SEQ ID NO: 1620365 - DNA, 15 bp, Homo sapiens
acacctggagggtaa

SEQ ID NO: 1620366 - DNA, 15 bp, Homo sapiens
tacacctggagggta

SEQ ID NO: 1620367 - DNA, 15 bp, Homo sapiens
ctacacctggagggt

SEQ ID NO: 1620368 - DNA, 15 bp, Homo sapiens
gctacacctggaggg

SEQ ID NO: 1620369 - DNA, 15 bp, Homo sapiens
ggctacacctggagg

SEQ ID NO: 1620370 - DNA, 15 bp, Homo sapiens
tggctacacctggag

SEQ ID NO: 1620371 - DNA, 15 bp, Homo sapiens
ttggctacacctgga

SEQ ID NO: 1620372 - DNA, 15 bp, Homo sapiens
cttggctacacctgg

SEQ ID NO: 1620373 - DNA, 15 bp, Homo sapiens
tcttggctacacctg

SEQ ID NO: 1620374 - DNA, 15 bp, Homo sapiens
gtcttggctacacct

SEQ ID NO: 1620375 - DNA, 15 bp, Homo sapiens
ggtcttggctacacc

SEQ ID NO: 1620376 - DNA, 15 bp, Homo sapiens
tggtcttggctacac

SEQ ID NO: 1620377 - DNA, 15 bp, Homo sapiens
ctggtcttggctaca

SEQ ID NO: 1620378 - DNA, 15 bp, Homo sapiens
cctggtcttggctac

SEQ ID NO: 1620379 - DNA, 15 bp, Homo sapiens
ccctggtcttggcta

SEQ ID NO: 1620380 - DNA, 15 bp, Homo sapiens
tccctggtcttggct

SEQ ID NO: 1620381 - DNA, 15 bp, Homo sapiens
ttccctggtcttggc

SEQ ID NO: 1620382 - DNA, 15 bp, Homo sapiens
cttccctggtcttgg

SEQ ID NO: 1620383 - DNA, 15 bp, Homo sapiens
ccttccctggtcttg

SEQ ID NO: 1620384 - DNA, 15 bp, Homo sapiens
accttccctggtctt

SEQ ID NO: 1620385 - DNA, 15 bp, Homo sapiens
caccttccctggtct

SEQ ID NO: 1620386 - DNA, 15 bp, Homo sapiens
ccaccttccctggtc

SEQ ID NO: 1620387 - DNA, 15 bp, Homo sapiens
cccaccttccctggt

SEQ ID NO: 1620388 - DNA, 15 bp, Homo sapiens
ccccaccttccctgg

SEQ ID NO: 1620389 - DNA, 15 bp, Homo sapiens
gccccaccttccctg

SEQ ID NO: 1620390 - DNA, 15 bp, Homo sapiens
ggccccaccttccct

SEQ ID NO: 1620391 - DNA, 15 bp, Homo sapiens
aggccccaccttccc

SEQ ID NO: 1620392 - DNA, 15 bp, Homo sapiens
caggccccaccttcc

SEQ ID NO: 1620393 - DNA, 15 bp, Homo sapiens
ccaggccccaccttc

SEQ ID NO: 1620394 - DNA, 15 bp, Homo sapiens
accaggccccacctt

SEQ ID NO: 1620395 - DNA, 15 bp, Homo sapiens
gaccaggccccacct

SEQ ID NO: 1620396 - DNA, 15 bp, Homo sapiens
ggaccaggccccacc

SEQ ID NO: 1620397 - DNA, 15 bp, Homo sapiens
aggaccaggccccac

SEQ ID NO: 1620398 - DNA, 15 bp, Homo sapiens
gaggaccaggcccca

SEQ ID NO: 1620399 - DNA, 15 bp, Homo sapiens
ggaggaccaggcccc

SEQ ID NO: 1620400 - DNA, 15 bp, Homo sapiens
gggaggaccaggccc

SEQ ID NO: 1620401 - DNA, 15 bp, Homo sapiens
tgggaggaccaggcc

SEQ ID NO: 1620402 - DNA, 15 bp, Homo sapiens
ctgggaggaccaggc

SEQ ID NO: 1620403 - DNA, 15 bp, Homo sapiens
tctgggaggaccagg

SEQ ID NO: 1620404 - DNA, 15 bp, Homo sapiens
ttctgggaggaccag

SEQ ID NO: 1620405 - DNA, 15 bp, Homo sapiens
attctgggaggacca

SEQ ID NO: 1620406 - DNA, 15 bp, Homo sapiens
gattctgggaggacc

SEQ ID NO: 1620407 - DNA, 15 bp, Homo sapiens
agattctgggaggac

SEQ ID NO: 1620408 - DNA, 15 bp, Homo sapiens
gagattctgggagga

SEQ ID NO: 1620409 - DNA, 15 bp, Homo sapiens
agagattctgggagg

SEQ ID NO: 1620410 - DNA, 15 bp, Homo sapiens
cagagattctgggag

SEQ ID NO: 1620411 - DNA, 15 bp, Homo sapiens
tcagagattctggga

SEQ ID NO: 1620412 - DNA, 15 bp, Homo sapiens
atcagagattctggg

SEQ ID NO: 1620413 - DNA, 15 bp, Homo sapiens
gatcagagattctgg

SEQ ID NO: 1620414 - DNA, 15 bp, Homo sapiens
agatcagagattctg

SEQ ID NO: 1620415 - DNA, 15 bp, Homo sapiens
cagatcagagattct

SEQ ID NO: 1620416 - DNA, 15 bp, Homo sapiens
acagatcagagattc

SEQ ID NO: 1620417 - DNA, 15 bp, Homo sapiens
tacagatcagagatt

SEQ ID NO: 1620418 - DNA, 15 bp, Homo sapiens
gtacagatcagagat

SEQ ID NO: 1620419 - DNA, 15 bp, Homo sapiens
ggtacagatcagaga

SEQ ID NO: 1620420 - DNA, 15 bp, Homo sapiens
tggtacagatcagag

SEQ ID NO: 1620421 - DNA, 15 bp, Homo sapiens
ctggtacagatcaga

SEQ ID NO: 1620422 - DNA, 15 bp, Homo sapiens
gctggtacagatcag

SEQ ID NO: 1620423 - DNA, 15 bp, Homo sapiens
ggctggtacagatca

SEQ ID NO: 1620424 - DNA, 15 bp, Homo sapiens
aggctggtacagatc

SEQ ID NO: 1620425 - DNA, 15 bp, Homo sapiens
gaggctggtacagat

SEQ ID NO: 1620426 - DNA, 15 bp, Homo sapiens
agaggctggtacaga

SEQ ID NO: 1620427 - DNA, 15 bp, Homo sapiens
gagaggctggtacag

SEQ ID NO: 1620428 - DNA, 15 bp, Homo sapiens
ggagaggctggtaca

SEQ ID NO: 1620429 - DNA, 15 bp, Homo sapiens
aggagaggctggtac

SEQ ID NO: 1620430 - DNA, 15 bp, Homo sapiens
aaggagaggctggta

SEQ ID NO: 1620431 - DNA, 15 bp, Homo sapiens
taaggagaggctggt

SEQ ID NO: 1620432 - DNA, 15 bp, Homo sapiens
ctaaggagaggctgg

SEQ ID NO: 1620433 - DNA, 15 bp, Homo sapiens
cctaaggagaggctg

SEQ ID NO: 1620434 - DNA, 15 bp, Homo sapiens
gcctaaggagaggct

SEQ ID NO: 1620435 - DNA, 15 bp, Homo sapiens
tgcctaaggagaggc

SEQ ID NO: 1620436 - DNA, 15 bp, Homo sapiens
gtgcctaaggagagg

SEQ ID NO: 1620437 - DNA, 15 bp, Homo sapiens
agtgcctaaggagag

SEQ ID NO: 1620438 - DNA, 15 bp, Homo sapiens
tagtgcctaaggaga

SEQ ID NO: 1620439 - DNA, 15 bp, Homo sapiens
gtagtgcctaaggag

SEQ ID NO: 1620440 - DNA, 15 bp, Homo sapiens
tgtagtgcctaagga

SEQ ID NO: 1620441 - DNA, 15 bp, Homo sapiens
ctgtagtgcctaagg

SEQ ID NO: 1620442 - DNA, 15 bp, Homo sapiens
tctgtagtgcctaag

SEQ ID NO: 1620443 - DNA, 15 bp, Homo sapiens
ttctgtagtgcctaa

SEQ ID NO: 1620444 - DNA, 15 bp, Homo sapiens
tttctgtagtgccta

SEQ ID NO: 1620445 - DNA, 15 bp, Homo sapiens
ctttctgtagtgcct

SEQ ID NO: 1620446 - DNA, 15 bp, Homo sapiens
actttctgtagtgcc

SEQ ID NO: 1620447 - DNA, 15 bp, Homo sapiens
cactttctgtagtgc

SEQ ID NO: 1620448 - DNA, 15 bp, Homo sapiens
acactttctgtagtg

SEQ ID NO: 1620449 - DNA, 15 bp, Homo sapiens
cacactttctgtagt

SEQ ID NO: 1620450 - DNA, 15 bp, Homo sapiens
tcacactttctgtag

SEQ ID NO: 1620451 - DNA, 15 bp, Homo sapiens
gtcacactttctgta

SEQ ID NO: 1620452 - DNA, 15 bp, Homo sapiens
agtcacactttctgt

SEQ ID NO: 1620453 - DNA, 15 bp, Homo sapiens
cagtcacactttctg

SEQ ID NO: 1620454 - DNA, 15 bp, Homo sapiens
acagtcacactttct

SEQ ID NO: 1620455 - DNA, 15 bp, Homo sapiens
aacagtcacactttc

SEQ ID NO: 1620456 - DNA, 15 bp, Homo sapiens
taacagtcacacttt

SEQ ID NO: 1620457 - DNA, 15 bp, Homo sapiens
ataacagtcacactt

SEQ ID NO: 1620458 - DNA, 15 bp, Homo sapiens
aataacagtcacact

SEQ ID NO: 1620459 - DNA, 15 bp, Homo sapiens
caataacagtcacac

SEQ ID NO: 1620460 - DNA, 15 bp, Homo sapiens
acaataacagtcaca

SEQ ID NO: 1620461 - DNA, 15 bp, Homo sapiens
aacaataacagtcac

SEQ ID NO: 1620462 - DNA, 15 bp, Homo sapiens
taacaataacagtca

SEQ ID NO: 1620463 - DNA, 15 bp, Homo sapiens
ataacaataacagtc

SEQ ID NO: 1620464 - DNA, 15 bp, Homo sapiens
aataacaataacagt

SEQ ID NO: 1620465 - DNA, 15 bp, Homo sapiens
taataacaataacag

SEQ ID NO: 1620466 - DNA, 15 bp, Homo sapiens
ataataacaataaca

SEQ ID NO: 1620467 - DNA, 15 bp, Homo sapiens
aataataacaataac

SEQ ID NO: 1620468 - DNA, 15 bp, Homo sapiens
gaataataacaataa

SEQ ID NO: 1620469 - DNA, 15 bp, Homo sapiens
tgaataataacaata

SEQ ID NO: 1620470 - DNA, 15 bp, Homo sapiens
atgaataataacaat

SEQ ID NO: 1620471 - DNA, 15 bp, Homo sapiens
catgaataataacaa

SEQ ID NO: 1620472 - DNA, 15 bp, Homo sapiens
ccatgaataataaca

SEQ ID NO: 1620473 - DNA, 15 bp, Homo sapiens
tccatgaataataac

SEQ ID NO: 1620474 - DNA, 15 bp, Homo sapiens
ctccatgaataataa

SEQ ID NO: 1620475 - DNA, 15 bp, Homo sapiens
tctccatgaataata

SEQ ID NO: 1620476 - DNA, 15 bp, Homo sapiens
ttctccatgaataat

SEQ ID NO: 1620477 - DNA, 15 bp, Homo sapiens
attctccatgaataa

SEQ ID NO: 1620478 - DNA, 15 bp, Homo sapiens
tattctccatgaata

SEQ ID NO: 1620479 - DNA, 15 bp, Homo sapiens
ctattctccatgaat

SEQ ID NO: 1620480 - DNA, 15 bp, Homo sapiens
actattctccatgaa

SEQ ID NO: 1620481 - DNA, 15 bp, Homo sapiens
tactattctccatga

SEQ ID NO: 1620482 - DNA, 15 bp, Homo sapiens
ttactattctccatg

SEQ ID NO: 1620483 - DNA, 15 bp, Homo sapiens
cttactattctccat

SEQ ID NO: 1620484 - DNA, 15 bp, Homo sapiens
ccttactattctcca

SEQ ID NO: 1620485 - DNA, 15 bp, Homo sapiens
cccttactattctcc

SEQ ID NO: 1620486 - DNA, 15 bp, Homo sapiens
tcccttactattctc

SEQ ID NO: 1620487 - DNA, 15 bp, Homo sapiens
ctcccttactattct

SEQ ID NO: 1620488 - DNA, 15 bp, Homo sapiens
actcccttactattc

SEQ ID NO: 1620489 - DNA, 15 bp, Homo sapiens
cactcccttactatt

SEQ ID NO: 1620490 - DNA, 15 bp, Homo sapiens
ccactcccttactat

SEQ ID NO: 1620491 - DNA, 15 bp, Homo sapiens
tccactcccttacta

SEQ ID NO: 1620492 - DNA, 15 bp, Homo sapiens
ctccactcccttact

SEQ ID NO: 1620493 - DNA, 15 bp, Homo sapiens
tctccactcccttac

SEQ ID NO: 1620494 - DNA, 15 bp, Homo sapiens
gtctccactccctta

SEQ ID NO: 1620495 - DNA, 15 bp, Homo sapiens
agtctccactccctt

SEQ ID NO: 1620496 - DNA, 15 bp, Homo sapiens
gagtctccactccct

SEQ ID NO: 1620497 - DNA, 15 bp, Homo sapiens
tgagtctccactccc

SEQ ID NO: 1620498 - DNA, 15 bp, Homo sapiens
ttgagtctccactcc

SEQ ID NO: 1620499 - DNA, 15 bp, Homo sapiens
cttgagtctccactc

SEQ ID NO: 1620500 - DNA, 15 bp, Homo sapiens
tcttgagtctccact

SEQ ID NO: 1620501 - DNA, 15 bp, Homo sapiens
ttcttgagtctccac

SEQ ID NO: 1620502 - DNA, 15 bp, Homo sapiens
cttcttgagtctcca

SEQ ID NO: 1620503 - DNA, 15 bp, Homo sapiens
tcttcttgagtctcc

SEQ ID NO: 1620504 - DNA, 15 bp, Homo sapiens
gtcttcttgagtctc

SEQ ID NO: 1620505 - DNA, 15 bp, Homo sapiens
cgtcttcttgagtct

SEQ ID NO: 1620506 - DNA, 15 bp, Homo sapiens
gcgtcttcttgagtc

SEQ ID NO: 1620507 - DNA, 15 bp, Homo sapiens
agcgtcttcttgagt

SEQ ID NO: 1620508 - DNA, 15 bp, Homo sapiens
tagcgtcttcttgag

SEQ ID NO: 1620509 - DNA, 15 bp, Homo sapiens
ccacaagatagtccc

SEQ ID NO: 1620510 - DNA, 15 bp, Homo sapiens
tccacaagatagtcc

SEQ ID NO: 1620511 - DNA, 15 bp, Homo sapiens
atccacaagatagtc

SEQ ID NO: 1620512 - DNA, 15 bp, Homo sapiens
aatccacaagatagt

SEQ ID NO: 1620513 - DNA, 15 bp, Homo sapiens
caatccacaagatag

SEQ ID NO: 1620514 - DNA, 15 bp, Homo sapiens
ccaatccacaagata

SEQ ID NO: 1620515 - DNA, 15 bp, Homo sapiens
cccaatccacaagat

SEQ ID NO: 1620516 - DNA, 15 bp, Homo sapiens
ccccaatccacaaga

SEQ ID NO: 1620517 - DNA, 15 bp, Homo sapiens
gccccaatccacaag

SEQ ID NO: 1620518 - DNA, 15 bp, Homo sapiens
agccccaatccacaa

SEQ ID NO: 1620519 - DNA, 15 bp, Homo sapiens
tagccccaatccaca

SEQ ID NO: 1620520 - DNA, 15 bp, Homo sapiens
ctagccccaatccac

SEQ ID NO: 1620521 - DNA, 15 bp, Homo sapiens
actagccccaatcca

SEQ ID NO: 1620522 - DNA, 15 bp, Homo sapiens
tactagccccaatcc

SEQ ID NO: 1620523 - DNA, 15 bp, Homo sapiens
gtactagccccaatc

SEQ ID NO: 1620524 - DNA, 15 bp, Homo sapiens
tgtactagccccaat

SEQ ID NO: 1620525 - DNA, 15 bp, Homo sapiens
ctgtactagccccaa

SEQ ID NO: 1620526 - DNA, 15 bp, Homo sapiens
tctgtactagcccca

SEQ ID NO: 1620527 - DNA, 15 bp, Homo sapiens
ttctgtactagcccc

SEQ ID NO: 1620528 - DNA, 15 bp, Homo sapiens
attctgtactagccc

SEQ ID NO: 1620529 - DNA, 15 bp, Homo sapiens
aattctgtactagcc

SEQ ID NO: 1620530 - DNA, 15 bp, Homo sapiens
gaattctgtactagc

SEQ ID NO: 1620531 - DNA, 15 bp, Homo sapiens
tgaattctgtactag

SEQ ID NO: 1620532 - DNA, 15 bp, Homo sapiens
ctgaattctgtacta

SEQ ID NO: 1620533 - DNA, 15 bp, Homo sapiens
tctgaattctgtact

SEQ ID NO: 1620534 - DNA, 15 bp, Homo sapiens
gtctgaattctgtac

SEQ ID NO: 1620535 - DNA, 15 bp, Homo sapiens
agtctgaattctgta

SEQ ID NO: 1620536 - DNA, 15 bp, Homo sapiens
cagtctgaattctgt

SEQ ID NO: 1620537 - DNA, 15 bp, Homo sapiens
gcagtctgaattctg

SEQ ID NO: 1620538 - DNA, 15 bp, Homo sapiens
tgcagtctgaattct

SEQ ID NO: 1620539 - DNA, 15 bp, Homo sapiens
ctgcagtctgaattc

SEQ ID NO: 1620540 - DNA, 15 bp, Homo sapiens
gctgcagtctgaatt

SEQ ID NO: 1620541 - DNA, 15 bp, Homo sapiens
ggctgcagtctgaat

SEQ ID NO: 1620542 - DNA, 15 bp, Homo sapiens
aggctgcagtctgaa

SEQ ID NO: 1620543 - DNA, 15 bp, Homo sapiens
aaggctgcagtctga

SEQ ID NO: 1620544 - DNA, 15 bp, Homo sapiens
aaaggctgcagtctg

SEQ ID NO: 1620545 - DNA, 15 bp, Homo sapiens
aaaaggctgcagtct

SEQ ID NO: 1620546 - DNA, 15 bp, Homo sapiens
gaaaaggctgcagtc

SEQ ID NO: 1620547 - DNA, 15 bp, Homo sapiens
ggaaaaggctgcagt

SEQ ID NO: 1620548 - DNA, 15 bp, Homo sapiens
gggaaaaggctgcag

SEQ ID NO: 1620549 - DNA, 15 bp, Homo sapiens
cgggaaaaggctgca

SEQ ID NO: 1620550 - DNA, 15 bp, Homo sapiens
tcgggaaaaggctgc

SEQ ID NO: 1620551 - DNA, 15 bp, Homo sapiens
atcgggaaaaggctg

SEQ ID NO: 1620552 - DNA, 15 bp, Homo sapiens
catcgggaaaaggct

SEQ ID NO: 1620553 - DNA, 15 bp, Homo sapiens
gcatcgggaaaaggc

SEQ ID NO: 1620554 - DNA, 15 bp, Homo sapiens
cgcatcgggaaaagg

SEQ ID NO: 1620555 - DNA, 15 bp, Homo sapiens
acgcatcgggaaaag

SEQ ID NO: 1620556 - DNA, 15 bp, Homo sapiens
aacgcatcgggaaaa

SEQ ID NO: 1620557 - DNA, 15 bp, Homo sapiens
caacgcatcgggaaa

SEQ ID NO: 1620558 - DNA, 15 bp, Homo sapiens
tcaacgcatcgggaa

SEQ ID NO: 1620559 - DNA, 15 bp, Homo sapiens
gtcaacgcatcggga

SEQ ID NO: 1620560 - DNA, 15 bp, Homo sapiens
agtcaacgcatcggg

SEQ ID NO: 1620561 - DNA, 15 bp, Homo sapiens
aagtcaacgcatcgg

SEQ ID NO: 1620562 - DNA, 15 bp, Homo sapiens
taagtcaacgcatcg

SEQ ID NO: 1620563 - DNA, 15 bp, Homo sapiens
gtaagtcaacgcatc

SEQ ID NO: 1620564 - DNA, 15 bp, Homo sapiens
tgtaagtcaacgcat

SEQ ID NO: 1620565 - DNA, 15 bp, Homo sapiens
ctgtaagtcaacgca

SEQ ID NO: 1620566 - DNA, 15 bp, Homo sapiens
tctgtaagtcaacgc

SEQ ID NO: 1620567 - DNA, 15 bp, Homo sapiens
ttctgtaagtcaacg

SEQ ID NO: 1620568 - DNA, 15 bp, Homo sapiens
cttctgtaagtcaac

SEQ ID NO: 1620569 - DNA, 15 bp, Homo sapiens
ccttctgtaagtcaa

SEQ ID NO: 1620570 - DNA, 15 bp, Homo sapiens
cccttctgtaagtca

SEQ ID NO: 1620571 - DNA, 15 bp, Homo sapiens
ccccttctgtaagtc

SEQ ID NO: 1620572 - DNA, 15 bp, Homo sapiens
gccccttctgtaagt

SEQ ID NO: 1620573 - DNA, 15 bp, Homo sapiens
tgccccttctgtaag

SEQ ID NO: 1620574 - DNA, 15 bp, Homo sapiens
atgccccttctgtaa

SEQ ID NO: 1620575 - DNA, 15 bp, Homo sapiens
aatgccccttctgta

SEQ ID NO: 1620576 - DNA, 15 bp, Homo sapiens
aaatgccccttctgt

SEQ ID NO: 1620577 - DNA, 15 bp, Homo sapiens
aaaatgccccttctg

SEQ ID NO: 1620578 - DNA, 15 bp, Homo sapiens
caaaatgccccttct

SEQ ID NO: 1620579 - DNA, 15 bp, Homo sapiens
ccaaaatgccccttc

SEQ ID NO: 1620580 - DNA, 15 bp, Homo sapiens
tccaaaatgcccctt

SEQ ID NO: 1620581 - DNA, 15 bp, Homo sapiens
ctccaaaatgcccct

SEQ ID NO: 1620582 - DNA, 15 bp, Homo sapiens
cctccaaaatgcccc

SEQ ID NO: 1620583 - DNA, 15 bp, Homo sapiens
ccctccaaaatgccc

SEQ ID NO: 1620584 - DNA, 15 bp, Homo sapiens
accctccaaaatgcc

SEQ ID NO: 1620585 - DNA, 15 bp, Homo sapiens
gaccctccaaaatgc

SEQ ID NO: 1620586 - DNA, 15 bp, Homo sapiens
agaccctccaaaatg

SEQ ID NO: 1620587 - DNA, 15 bp, Homo sapiens
cagaccctccaaaat

SEQ ID NO: 1620588 - DNA, 15 bp, Homo sapiens
acagaccctccaaaa

SEQ ID NO: 1620589 - DNA, 15 bp, Homo sapiens
cacagaccctccaaa

SEQ ID NO: 1620590 - DNA, 15 bp, Homo sapiens
ccacagaccctccaa

SEQ ID NO: 1620591 - DNA, 15 bp, Homo sapiens
accacagaccctcca

SEQ ID NO: 1620592 - DNA, 15 bp, Homo sapiens
gaccacagaccctcc

SEQ ID NO: 1620593 - DNA, 15 bp, Homo sapiens
ggaccacagaccctc

SEQ ID NO: 1620594 - DNA, 15 bp, Homo sapiens
aggaccacagaccct

SEQ ID NO: 1620595 - DNA, 15 bp, Homo sapiens
taggaccacagaccc

SEQ ID NO: 1620596 - DNA, 15 bp, Homo sapiens
ttaggaccacagacc

SEQ ID NO: 1620597 - DNA, 15 bp, Homo sapiens
gttaggaccacagac

SEQ ID NO: 1620598 - DNA, 15 bp, Homo sapiens
ggttaggaccacaga

SEQ ID NO: 1620599 - DNA, 15 bp, Homo sapiens
aggttaggaccacag

SEQ ID NO: 1620600 - DNA, 15 bp, Homo sapiens
caggttaggaccaca

SEQ ID NO: 1620601 - DNA, 15 bp, Homo sapiens
ccaggttaggaccac

SEQ ID NO: 1620602 - DNA, 15 bp, Homo sapiens
cccaggttaggacca

SEQ ID NO: 1620603 - DNA, 15 bp, Homo sapiens
ccccaggttaggacc

SEQ ID NO: 1620604 - DNA, 15 bp, Homo sapiens
tccccaggttaggac

SEQ ID NO: 1620605 - DNA, 15 bp, Homo sapiens
atccccaggttagga

SEQ ID NO: 1620606 - DNA, 15 bp, Homo sapiens
tatccccaggttagg

SEQ ID NO: 1620607 - DNA, 15 bp, Homo sapiens
ctatccccaggttag

SEQ ID NO: 1620608 - DNA, 15 bp, Homo sapiens
gctatccccaggtta

SEQ ID NO: 1620609 - DNA, 15 bp, Homo sapiens
tgctatccccaggtt

SEQ ID NO: 1620610 - DNA, 15 bp, Homo sapiens
ctgctatccccaggt

SEQ ID NO: 1620611 - DNA, 15 bp, Homo sapiens
cctgctatccccagg

SEQ ID NO: 1620612 - DNA, 15 bp, Homo sapiens
ccctgctatccccag

SEQ ID NO: 1620613 - DNA, 15 bp, Homo sapiens
tccctgctatcccca

SEQ ID NO: 1620614 - DNA, 15 bp, Homo sapiens
ctccctgctatcccc

SEQ ID NO: 1620615 - DNA, 15 bp, Homo sapiens
tctccctgctatccc

SEQ ID NO: 1620616 - DNA, 15 bp, Homo sapiens
atctccctgctatcc

SEQ ID NO: 1620617 - DNA, 15 bp, Homo sapiens
gatctccctgctatc

SEQ ID NO: 1620618 - DNA, 15 bp, Homo sapiens
ggatctccctgctat

SEQ ID NO: 1620619 - DNA, 15 bp, Homo sapiens
gggatctccctgcta

SEQ ID NO: 1620620 - DNA, 15 bp, Homo sapiens
cgggatctccctgct

SEQ ID NO: 1620621 - DNA, 15 bp, Homo sapiens
ccgggatctccctgc

SEQ ID NO: 1620622 - DNA, 15 bp, Homo sapiens
cccgggatctccctg

SEQ ID NO: 1620623 - DNA, 15 bp, Homo sapiens
ccccgggatctccct

SEQ ID NO: 1620624 - DNA, 15 bp, Homo sapiens
gccccgggatctccc

SEQ ID NO: 1620625 - DNA, 15 bp, Homo sapiens
tgccccgggatctcc

SEQ ID NO: 1620626 - DNA, 15 bp, Homo sapiens
ttgccccgggatctc

SEQ ID NO: 1620627 - DNA, 15 bp, Homo sapiens
attgccccgggatct

SEQ ID NO: 1620628 - DNA, 15 bp, Homo sapiens
cattgccccgggatc

SEQ ID NO: 1620629 - DNA, 15 bp, Homo sapiens
tcattgccccgggat

SEQ ID NO: 1620630 - DNA, 15 bp, Homo sapiens
gtcattgccccggga

SEQ ID NO: 1620631 - DNA, 15 bp, Homo sapiens
tgtcattgccccggg

SEQ ID NO: 1620632 - DNA, 15 bp, Homo sapiens
ctgtcattgccccgg

SEQ ID NO: 1620633 - DNA, 15 bp, Homo sapiens
tctgtcattgccccg

SEQ ID NO: 1620634 - DNA, 15 bp, Homo sapiens
ctctgtcattgcccc

SEQ ID NO: 1620635 - DNA, 15 bp, Homo sapiens
tctctgtcattgccc

SEQ ID NO: 1620636 - DNA, 15 bp, Homo sapiens
ctctctgtcattgcc

SEQ ID NO: 1620637 - DNA, 15 bp, Homo sapiens
cctctctgtcattgc

SEQ ID NO: 1620638 - DNA, 15 bp, Homo sapiens
gcctctctgtcattg

SEQ ID NO: 1620639 - DNA, 15 bp, Homo sapiens
tgcctctctgtcatt

SEQ ID NO: 1620640 - DNA, 15 bp, Homo sapiens
gtgcctctctgtcat

SEQ ID NO: 1620641 - DNA, 15 bp, Homo sapiens
tgtgcctctctgtca

SEQ ID NO: 1620642 - DNA, 15 bp, Homo sapiens
ctgtgcctctctgtc

SEQ ID NO: 1620643 - DNA, 15 bp, Homo sapiens
tctgtgcctctctgt

SEQ ID NO: 1620644 - DNA, 15 bp, Homo sapiens
ctctgtgcctctctg

SEQ ID NO: 1620645 - DNA, 15 bp, Homo sapiens
tctctgtgcctctct

SEQ ID NO: 1620646 - DNA, 15 bp, Homo sapiens
gtctctgtgcctctc

SEQ ID NO: 1620647 - DNA, 15 bp, Homo sapiens
tgtctctgtgcctct

SEQ ID NO: 1620648 - DNA, 15 bp, Homo sapiens
gtgtctctgtgcctc

SEQ ID NO: 1620649 - DNA, 15 bp, Homo sapiens
cgtgtctctgtgcct

SEQ ID NO: 1620650 - DNA, 15 bp, Homo sapiens
ccgtgtctctgtgcc

SEQ ID NO: 1620651 - DNA, 15 bp, Homo sapiens
tccgtgtctctgtgc

SEQ ID NO: 1620652 - DNA, 15 bp, Homo sapiens
atccgtgtctctgtg

SEQ ID NO: 1620653 - DNA, 15 bp, Homo sapiens
aatccgtgtctctgt

SEQ ID NO: 1620654 - DNA, 15 bp, Homo sapiens
aaatccgtgtctctg

SEQ ID NO: 1620655 - DNA, 15 bp, Homo sapiens
gaaatccgtgtctct

SEQ ID NO: 1620656 - DNA, 15 bp, Homo sapiens
ggaaatccgtgtctc

SEQ ID NO: 1620657 - DNA, 15 bp, Homo sapiens
aggaaatccgtgtct

SEQ ID NO: 1620658 - DNA, 15 bp, Homo sapiens
caggaaatccgtgtc

SEQ ID NO: 1620659 - DNA, 15 bp, Homo sapiens
tcaggaaatccgtgt

SEQ ID NO: 1620660 - DNA, 15 bp, Homo sapiens
ctcaggaaatccgtg

SEQ ID NO: 1620661 - DNA, 15 bp, Homo sapiens
tctcaggaaatccgt

SEQ ID NO: 1620662 - DNA, 15 bp, Homo sapiens
ttctcaggaaatccg

SEQ ID NO: 1620663 - DNA, 15 bp, Homo sapiens
tttctcaggaaatcc

SEQ ID NO: 1620664 - DNA, 15 bp, Homo sapiens
ctttctcaggaaatc

SEQ ID NO: 1620665 - DNA, 15 bp, Homo sapiens
cctttctcaggaaat

SEQ ID NO: 1620666 - DNA, 15 bp, Homo sapiens
ccctttctcaggaaa

SEQ ID NO: 1620667 - DNA, 15 bp, Homo sapiens
tccctttctcaggaa

SEQ ID NO: 1620668 - DNA, 15 bp, Homo sapiens
ctccctttctcagga

SEQ ID NO: 1620669 - DNA, 15 bp, Homo sapiens
tctccctttctcagg

SEQ ID NO: 1620670 - DNA, 15 bp, Homo sapiens
ctctccctttctcag

SEQ ID NO: 1620671 - DNA, 15 bp, Homo sapiens
cctctccctttctca

SEQ ID NO: 1620672 - DNA, 15 bp, Homo sapiens
tcctctccctttctc

SEQ ID NO: 1620673 - DNA, 15 bp, Homo sapiens
ctcctctccctttct

SEQ ID NO: 1620674 - DNA, 15 bp, Homo sapiens
tctcctctccctttc

SEQ ID NO: 1620675 - DNA, 15 bp, Homo sapiens
ctctcctctcccttt

SEQ ID NO: 1620676 - DNA, 15 bp, Homo sapiens
tctctcctctccctt

SEQ ID NO: 1620677 - DNA, 15 bp, Homo sapiens
ctctctcctctccct

SEQ ID NO: 1620678 - DNA, 15 bp, Homo sapiens
cctctctcctctccc

SEQ ID NO: 1620679 - DNA, 15 bp, Homo sapiens
gcctctctcctctcc

SEQ ID NO: 1620680 - DNA, 15 bp, Homo sapiens
agcctctctcctctc

SEQ ID NO: 1620681 - DNA, 15 bp, Homo sapiens
cagcctctctcctct

SEQ ID NO: 1620682 - DNA, 15 bp, Homo sapiens
tcagcctctctcctc

SEQ ID NO: 1620683 - DNA, 15 bp, Homo sapiens
ctcagcctctctcct

SEQ ID NO: 1620684 - DNA, 15 bp, Homo sapiens
tctcagcctctctcc

SEQ ID NO: 1620685 - DNA, 15 bp, Homo sapiens
gtctcagcctctctc

SEQ ID NO: 1620686 - DNA, 15 bp, Homo sapiens
ggtctcagcctctct

SEQ ID NO: 1620687 - DNA, 15 bp, Homo sapiens
gggtctcagcctctc

SEQ ID NO: 1620688 - DNA, 15 bp, Homo sapiens
tgggtctcagcctct

SEQ ID NO: 1620689 - DNA, 15 bp, Homo sapiens
ctgggtctcagcctc

SEQ ID NO: 1620690 - DNA, 15 bp, Homo sapiens
cctgggtctcagcct

SEQ ID NO: 1620691 - DNA, 15 bp, Homo sapiens
ccctgggtctcagcc

SEQ ID NO: 1620692 - DNA, 15 bp, Homo sapiens
tccctgggtctcagc

SEQ ID NO: 1620693 - DNA, 15 bp, Homo sapiens
atccctgggtctcag

SEQ ID NO: 1620694 - DNA, 15 bp, Homo sapiens
gatccctgggtctca

SEQ ID NO: 1620695 - DNA, 15 bp, Homo sapiens
tgatccctgggtctc

SEQ ID NO: 1620696 - DNA, 15 bp, Homo sapiens
atgatccctgggtct

SEQ ID NO: 1620697 - DNA, 15 bp, Homo sapiens
catgatccctgggtc

SEQ ID NO: 1620698 - DNA, 15 bp, Homo sapiens
tcatgatccctgggt

SEQ ID NO: 1620699 - DNA, 15 bp, Homo sapiens
ttcatgatccctggg

SEQ ID NO: 1620700 - DNA, 15 bp, Homo sapiens
cttcatgatccctgg

SEQ ID NO: 1620701 - DNA, 15 bp, Homo sapiens
ccttcatgatccctg

SEQ ID NO: 1620702 - DNA, 15 bp, Homo sapiens
cccttcatgatccct

SEQ ID NO: 1620703 - DNA, 15 bp, Homo sapiens
ccccttcatgatccc

SEQ ID NO: 1620704 - DNA, 15 bp, Homo sapiens
tccccttcatgatcc

SEQ ID NO: 1620705 - DNA, 15 bp, Homo sapiens
gtccccttcatgatc

SEQ ID NO: 1620706 - DNA, 15 bp, Homo sapiens
cgtccccttcatgat

SEQ ID NO: 1620707 - DNA, 15 bp, Homo sapiens
tcgtccccttcatga

SEQ ID NO: 1620708 - DNA, 15 bp, Homo sapiens
ctcgtccccttcatg

SEQ ID NO: 1620709 - DNA, 15 bp, Homo sapiens
gctcgtccccttcat

SEQ ID NO: 1620710 - DNA, 15 bp, Homo sapiens
tgctcgtccccttca

SEQ ID NO: 1620711 - DNA, 15 bp, Homo sapiens
ttgctcgtccccttc

SEQ ID NO: 1620712 - DNA, 15 bp, Homo sapiens
cttgctcgtcccctt

SEQ ID NO: 1620713 - DNA, 15 bp, Homo sapiens
ccttgctcgtcccct

SEQ ID NO: 1620714 - DNA, 15 bp, Homo sapiens
cccttgctcgtcccc

SEQ ID NO: 1620715 - DNA, 15 bp, Homo sapiens
tcccttgctcgtccc

SEQ ID NO: 1620716 - DNA, 15 bp, Homo sapiens
ttcccttgctcgtcc

SEQ ID NO: 1620717 - DNA, 15 bp, Homo sapiens
cttcccttgctcgtc

SEQ ID NO: 1620718 - DNA, 15 bp, Homo sapiens
ccttcccttgctcgt

SEQ ID NO: 1620719 - DNA, 15 bp, Homo sapiens
tccttcccttgctcg

SEQ ID NO: 1620720 - DNA, 15 bp, Homo sapiens
ttccttcccttgctc

SEQ ID NO: 1620721 - DNA, 15 bp, Homo sapiens
cttccttcccttgct

SEQ ID NO: 1620722 - DNA, 15 bp, Homo sapiens
tcttccttcccttgc

SEQ ID NO: 1620723 - DNA, 15 bp, Homo sapiens
ctcttccttcccttg

SEQ ID NO: 1620724 - DNA, 15 bp, Homo sapiens
tctcttccttccctt

SEQ ID NO: 1620725 - DNA, 15 bp, Homo sapiens
atctcttccttccct

SEQ ID NO: 1620726 - DNA, 15 bp, Homo sapiens
catctcttccttccc

SEQ ID NO: 1620727 - DNA, 15 bp, Homo sapiens
tcatctcttccttcc

SEQ ID NO: 1620728 - DNA, 15 bp, Homo sapiens
atcatctcttccttc

SEQ ID NO: 1620729 - DNA, 15 bp, Homo sapiens
catcatctcttcctt

SEQ ID NO: 1620730 - DNA, 15 bp, Homo sapiens
tcatcatctcttcct

SEQ ID NO: 1620731 - DNA, 15 bp, Homo sapiens
ctcatcatctcttcc

SEQ ID NO: 1620732 - DNA, 15 bp, Homo sapiens
tctcatcatctcttc

SEQ ID NO: 1620733 - DNA, 15 bp, Homo sapiens
gtctcatcatctctt

SEQ ID NO: 1620734 - DNA, 15 bp, Homo sapiens
ggtctcatcatctct

SEQ ID NO: 1620735 - DNA, 15 bp, Homo sapiens
gggtctcatcatctc

SEQ ID NO: 1620736 - DNA, 15 bp, Homo sapiens
agggtctcatcatct

SEQ ID NO: 1620737 - DNA, 15 bp, Homo sapiens
cagggtctcatcatc

SEQ ID NO: 1620738 - DNA, 15 bp, Homo sapiens
ccagggtctcatcat

SEQ ID NO: 1620739 - DNA, 15 bp, Homo sapiens
cccagggtctcatca

SEQ ID NO: 1620740 - DNA, 15 bp, Homo sapiens
tcccagggtctcatc

SEQ ID NO: 1620741 - DNA, 15 bp, Homo sapiens
ttcccagggtctcat

SEQ ID NO: 1620742 - DNA, 15 bp, Homo sapiens
attcccagggtctca

SEQ ID NO: 1620743 - DNA, 15 bp, Homo sapiens
gattcccagggtctc

SEQ ID NO: 1620744 - DNA, 15 bp, Homo sapiens
ggattcccagggtct

SEQ ID NO: 1620745 - DNA, 15 bp, Homo sapiens
cggattcccagggtc

SEQ ID NO: 1620746 - DNA, 15 bp, Homo sapiens
ccggattcccagggt

SEQ ID NO: 1620747 - DNA, 15 bp, Homo sapiens
cccggattcccaggg

SEQ ID NO: 1620748 - DNA, 15 bp, Homo sapiens
tcccggattcccagg

SEQ ID NO: 1620749 - DNA, 15 bp, Homo sapiens
ctcccggattcccag

SEQ ID NO: 1620750 - DNA, 15 bp, Homo sapiens
tctcccggattccca

SEQ ID NO: 1620751 - DNA, 15 bp, Homo sapiens
ctctcccggattccc

SEQ ID NO: 1620752 - DNA, 15 bp, Homo sapiens
tctctcccggattcc

SEQ ID NO: 1620753 - DNA, 15 bp, Homo sapiens
ctctctcccggattc

SEQ ID NO: 1620754 - DNA, 15 bp, Homo sapiens
tctctctcccggatt

SEQ ID NO: 1620755 - DNA, 15 bp, Homo sapiens
gtctctctcccggat

SEQ ID NO: 1620756 - DNA, 15 bp, Homo sapiens
tgtctctctcccgga

SEQ ID NO: 1620757 - DNA, 15 bp, Homo sapiens
ctgtctctctcccgg

SEQ ID NO: 1620758 - DNA, 15 bp, Homo sapiens
cctgtctctctcccg

SEQ ID NO: 1620759 - DNA, 15 bp, Homo sapiens
ccctgtctctctccc

SEQ ID NO: 1620760 - DNA, 15 bp, Homo sapiens
tccctgtctctctcc

SEQ ID NO: 1620761 - DNA, 15 bp, Homo sapiens
gtccctgtctctctc

SEQ ID NO: 1620762 - DNA, 15 bp, Homo sapiens
cgtccctgtctctct

SEQ ID NO: 1620763 - DNA, 15 bp, Homo sapiens
acgtccctgtctctc

SEQ ID NO: 1620764 - DNA, 15 bp, Homo sapiens
cacgtccctgtctct

SEQ ID NO: 1620765 - DNA, 15 bp, Homo sapiens
ccacgtccctgtctc

SEQ ID NO: 1620766 - DNA, 15 bp, Homo sapiens
tccacgtccctgtct

SEQ ID NO: 1620767 - DNA, 15 bp, Homo sapiens
ctccacgtccctgtc

SEQ ID NO: 1620768 - DNA, 15 bp, Homo sapiens
tctccacgtccctgt

SEQ ID NO: 1620769 - DNA, 15 bp, Homo sapiens
ctctccacgtccctg

SEQ ID NO: 1620770 - DNA, 15 bp, Homo sapiens
tctctccacgtccct

SEQ ID NO: 1620771 - DNA, 15 bp, Homo sapiens
ttctctccacgtccc

SEQ ID NO: 1620772 - DNA, 15 bp, Homo sapiens
tttctctccacgtcc

SEQ ID NO: 1620773 - DNA, 15 bp, Homo sapiens
ctttctctccacgtc

SEQ ID NO: 1620774 - DNA, 15 bp, Homo sapiens
cctttctctccacgt

SEQ ID NO: 1620775 - DNA, 15 bp, Homo sapiens
ccctttctctccacg

SEQ ID NO: 1620776 - DNA, 15 bp, Homo sapiens
tccctttctctccac

SEQ ID NO: 1620777 - DNA, 15 bp, Homo sapiens
gtccctttctctcca

SEQ ID NO: 1620778 - DNA, 15 bp, Homo sapiens
tgtccctttctctcc

SEQ ID NO: 1620779 - DNA, 15 bp, Homo sapiens
ctgtccctttctctc

SEQ ID NO: 1620780 - DNA, 15 bp, Homo sapiens
tctgtccctttctct

SEQ ID NO: 1620781 - DNA, 15 bp, Homo sapiens
ctctgtccctttctc

SEQ ID NO: 1620782 - DNA, 15 bp, Homo sapiens
tctctgtccctttct

SEQ ID NO: 1620783 - DNA, 15 bp, Homo sapiens
ctctctgtccctttc

SEQ ID NO: 1620784 - DNA, 15 bp, Homo sapiens
tctctctgtcccttt

SEQ ID NO: 1620785 - DNA, 15 bp, Homo sapiens
ctctctctgtccctt

SEQ ID NO: 1620786 - DNA, 15 bp, Homo sapiens
tctctctctgtccct

SEQ ID NO: 1620787 - DNA, 15 bp, Homo sapiens
ctctctctctgtccc

SEQ ID NO: 1620788 - DNA, 15 bp, Homo sapiens
gctctctctctgtcc

SEQ ID NO: 1620789 - DNA, 15 bp, Homo sapiens
cgctctctctctgtc

SEQ ID NO: 1620790 - DNA, 15 bp, Homo sapiens
tcgctctctctctgt

SEQ ID NO: 1620791 - DNA, 15 bp, Homo sapiens
ctcgctctctctctg

SEQ ID NO: 1620792 - DNA, 15 bp, Homo sapiens
tctcgctctctctct

SEQ ID NO: 1620793 - DNA, 15 bp, Homo sapiens
ttctcgctctctctc

SEQ ID NO: 1620794 - DNA, 15 bp, Homo sapiens
cttctcgctctctct

SEQ ID NO: 1620795 - DNA, 15 bp, Homo sapiens
ccttctcgctctctc

SEQ ID NO: 1620796 - DNA, 15 bp, Homo sapiens
tccttctcgctctct

SEQ ID NO: 1620797 - DNA, 15 bp, Homo sapiens
ttccttctcgctctc

SEQ ID NO: 1620798 - DNA, 15 bp, Homo sapiens
tttccttctcgctct

SEQ ID NO: 1620799 - DNA, 15 bp, Homo sapiens
ctttccttctcgctc

SEQ ID NO: 1620800 - DNA, 15 bp, Homo sapiens
cctttccttctcgct

SEQ ID NO: 1620801 - DNA, 15 bp, Homo sapiens
tcctttccttctcgc

SEQ ID NO: 1620802 - DNA, 15 bp, Homo sapiens
ttcctttccttctcg

SEQ ID NO: 1620803 - DNA, 15 bp, Homo sapiens
cttcctttccttctc

SEQ ID NO: 1620804 - DNA, 15 bp, Homo sapiens
tcttcctttccttct

SEQ ID NO: 1620805 - DNA, 15 bp, Homo sapiens
ctcttcctttccttc

SEQ ID NO: 1620806 - DNA, 15 bp, Homo sapiens
tctcttcctttcctt

SEQ ID NO: 1620807 - DNA, 15 bp, Homo sapiens
gtctcttcctttcct

SEQ ID NO: 1620808 - DNA, 15 bp, Homo sapiens
tgtctcttcctttcc

SEQ ID NO: 1620809 - DNA, 15 bp, Homo sapiens
ctgtctcttcctttc

SEQ ID NO: 1620810 - DNA, 15 bp, Homo sapiens
tctgtctcttccttt

SEQ ID NO: 1620811 - DNA, 15 bp, Homo sapiens
ttctgtctcttcctt

SEQ ID NO: 1620812 - DNA, 15 bp, Homo sapiens
cttctgtctcttcct

SEQ ID NO: 1620813 - DNA, 15 bp, Homo sapiens
ccttctgtctcttcc

SEQ ID NO: 1620814 - DNA, 15 bp, Homo sapiens
cccttctgtctcttc

SEQ ID NO: 1620815 - DNA, 15 bp, Homo sapiens
tcccttctgtctctt

SEQ ID NO: 1620816 - DNA, 15 bp, Homo sapiens
ctcccttctgtctct

SEQ ID NO: 1620817 - DNA, 15 bp, Homo sapiens
tctcccttctgtctc

SEQ ID NO: 1620818 - DNA, 15 bp, Homo sapiens
ttctcccttctgtct

SEQ ID NO: 1620819 - DNA, 15 bp, Homo sapiens
cttctcccttctgtc

SEQ ID NO: 1620820 - DNA, 15 bp, Homo sapiens
ccttctcccttctgt

SEQ ID NO: 1620821 - DNA, 15 bp, Homo sapiens
cccttctcccttctg

SEQ ID NO: 1620822 - DNA, 15 bp, Homo sapiens
ccccttctcccttct

SEQ ID NO: 1620823 - DNA, 15 bp, Homo sapiens
gccccttctcccttc

SEQ ID NO: 1620824 - DNA, 15 bp, Homo sapiens
tgccccttctccctt

SEQ ID NO: 1620825 - DNA, 15 bp, Homo sapiens
ttgccccttctccct

SEQ ID NO: 1620826 - DNA, 15 bp, Homo sapiens
gttgccccttctccc

SEQ ID NO: 1620827 - DNA, 15 bp, Homo sapiens
ggttgccccttctcc

SEQ ID NO: 1620828 - DNA, 15 bp, Homo sapiens
cggttgccccttctc

SEQ ID NO: 1620829 - DNA, 15 bp, Homo sapiens
tcggttgccccttct

SEQ ID NO: 1620830 - DNA, 15 bp, Homo sapiens
ttcggttgccccttc

SEQ ID NO: 1620831 - DNA, 15 bp, Homo sapiens
tttcggttgcccctt

SEQ ID NO: 1620832 - DNA, 15 bp, Homo sapiens
ttttcggttgcccct

SEQ ID NO: 1620833 - DNA, 15 bp, Homo sapiens
attttcggttgcccc

SEQ ID NO: 1620834 - DNA, 15 bp, Homo sapiens
cattttcggttgccc

SEQ ID NO: 1620835 - DNA, 15 bp, Homo sapiens
ccattttcggttgcc

SEQ ID NO: 1620836 - DNA, 15 bp, Homo sapiens
cccattttcggttgc

SEQ ID NO: 1620837 - DNA, 15 bp, Homo sapiens
gcccattttcggttg

SEQ ID NO: 1620838 - DNA, 15 bp, Homo sapiens
tgcccattttcggtt

SEQ ID NO: 1620839 - DNA, 15 bp, Homo sapiens
gtgcccattttcggt

SEQ ID NO: 1620840 - DNA, 15 bp, Homo sapiens
cgtgcccattttcgg

SEQ ID NO: 1620841 - DNA, 15 bp, Homo sapiens
tcgtgcccattttcg

SEQ ID NO: 1620842 - DNA, 15 bp, Homo sapiens
ttcgtgcccattttc

SEQ ID NO: 1620843 - DNA, 15 bp, Homo sapiens
cttcgtgcccatttt

SEQ ID NO: 1620844 - DNA, 15 bp, Homo sapiens
tcttcgtgcccattt

SEQ ID NO: 1620845 - DNA, 15 bp, Homo sapiens
ctcttcgtgcccatt

SEQ ID NO: 1620846 - DNA, 15 bp, Homo sapiens
cctcttcgtgcccat

SEQ ID NO: 1620847 - DNA, 15 bp, Homo sapiens
gcctcttcgtgccca

SEQ ID NO: 1620848 - DNA, 15 bp, Homo sapiens
ggcctcttcgtgccc

SEQ ID NO: 1620849 - DNA, 15 bp, Homo sapiens
gggcctcttcgtgcc

SEQ ID NO: 1620850 - DNA, 15 bp, Homo sapiens
tgggcctcttcgtgc

SEQ ID NO: 1620851 - DNA, 15 bp, Homo sapiens
ctgggcctcttcgtg

SEQ ID NO: 1620852 - DNA, 15 bp, Homo sapiens
cctgggcctcttcgt

SEQ ID NO: 1620853 - DNA, 15 bp, Homo sapiens
gcctgggcctcttcg

SEQ ID NO: 1620854 - DNA, 15 bp, Homo sapiens
tgcctgggcctcttc

SEQ ID NO: 1620855 - DNA, 15 bp, Homo sapiens
gtgcctgggcctctt

SEQ ID NO: 1620856 - DNA, 15 bp, Homo sapiens
tgtgcctgggcctct

SEQ ID NO: 1620857 - DNA, 15 bp, Homo sapiens
ctgtgcctgggcctc

SEQ ID NO: 1620858 - DNA, 15 bp, Homo sapiens
gctgtgcctgggcct

SEQ ID NO: 1620859 - DNA, 15 bp, Homo sapiens
tgctgtgcctgggcc

SEQ ID NO: 1620860 - DNA, 15 bp, Homo sapiens
ttgctgtgcctgggc

SEQ ID NO: 1620861 - DNA, 15 bp, Homo sapiens
gttgctgtgcctggg

SEQ ID NO: 1620862 - DNA, 15 bp, Homo sapiens
tgttgctgtgcctgg

SEQ ID NO: 1620863 - DNA, 15 bp, Homo sapiens
ctgttgctgtgcctg

SEQ ID NO: 1620864 - DNA, 15 bp, Homo sapiens
gctgttgctgtgcct

SEQ ID NO: 1620865 - DNA, 15 bp, Homo sapiens
agctgttgctgtgcc

SEQ ID NO: 1620866 - DNA, 15 bp, Homo sapiens
cagctgttgctgtgc

SEQ ID NO: 1620867 - DNA, 15 bp, Homo sapiens
ccagctgttgctgtg

SEQ ID NO: 1620868 - DNA, 15 bp, Homo sapiens
cccagctgttgctgt

SEQ ID NO: 1620869 - DNA, 15 bp, Homo sapiens
ccccagctgttgctg

SEQ ID NO: 1620870 - DNA, 15 bp, Homo sapiens
tccccagctgttgct

SEQ ID NO: 1620871 - DNA, 15 bp, Homo sapiens
ttccccagctgttgc

SEQ ID NO: 1620872 - DNA, 15 bp, Homo sapiens
tttccccagctgttg

SEQ ID NO: 1620873 - DNA, 15 bp, Homo sapiens
atttccccagctgtt

SEQ ID NO: 1620874 - DNA, 15 bp, Homo sapiens
catttccccagctgt

SEQ ID NO: 1620875 - DNA, 15 bp, Homo sapiens
tcatttccccagctg

SEQ ID NO: 1620876 - DNA, 15 bp, Homo sapiens
gtcatttccccagct

SEQ ID NO: 1620877 - DNA, 15 bp, Homo sapiens
tgtcatttccccagc

SEQ ID NO: 1620878 - DNA, 15 bp, Homo sapiens
ctgtcatttccccag

SEQ ID NO: 1620879 - DNA, 15 bp, Homo sapiens
tctgtcatttcccca

SEQ ID NO: 1620880 - DNA, 15 bp, Homo sapiens
ctctgtcatttcccc

SEQ ID NO: 1620881 - DNA, 15 bp, Homo sapiens
tctctgtcatttccc

SEQ ID NO: 1620882 - DNA, 15 bp, Homo sapiens
gtctctgtcatttcc

SEQ ID NO: 1620883 - DNA, 15 bp, Homo sapiens
agtctctgtcatttc

SEQ ID NO: 1620884 - DNA, 15 bp, Homo sapiens
cagtctctgtcattt

SEQ ID NO: 1620885 - DNA, 15 bp, Homo sapiens
tcagtctctgtcatt

SEQ ID NO: 1620886 - DNA, 15 bp, Homo sapiens
ctcagtctctgtcat

SEQ ID NO: 1620887 - DNA, 15 bp, Homo sapiens
tctcagtctctgtca

SEQ ID NO: 1620888 - DNA, 15 bp, Homo sapiens
cgtctcagtctctgt

SEQ ID NO: 1620889 - DNA, 15 bp, Homo sapiens
ccgtctcagtctctg

SEQ ID NO: 1620890 - DNA, 15 bp, Homo sapiens
tccgtctcagtctct

SEQ ID NO: 1620891 - DNA, 15 bp, Homo sapiens
ctccgtctcagtctc

SEQ ID NO: 1620892 - DNA, 15 bp, Homo sapiens
tctccgtctcagtct

SEQ ID NO: 1620893 - DNA, 15 bp, Homo sapiens
atctccgtctcagtc

SEQ ID NO: 1620894 - DNA, 15 bp, Homo sapiens
catctccgtctcagt

SEQ ID NO: 1620895 - DNA, 15 bp, Homo sapiens
gcatctccgtctcag

SEQ ID NO: 1620896 - DNA, 15 bp, Homo sapiens
tgcatctccgtctca

SEQ ID NO: 1620897 - DNA, 15 bp, Homo sapiens
ctgcatctccgtctc

SEQ ID NO: 1620898 - DNA, 15 bp, Homo sapiens
tctgcatctccgtct

SEQ ID NO: 1620899 - DNA, 15 bp, Homo sapiens
ttctgcatctccgtc

SEQ ID NO: 1620900 - DNA, 15 bp, Homo sapiens
tttctgcatctccgt

SEQ ID NO: 1620901 - DNA, 15 bp, Homo sapiens
ctttctgcatctccg

SEQ ID NO: 1620902 - DNA, 15 bp, Homo sapiens
tctttctgcatctcc

SEQ ID NO: 1620903 - DNA, 15 bp, Homo sapiens
atctttctgcatctc

SEQ ID NO: 1620904 - DNA, 15 bp, Homo sapiens
tatctttctgcatct

SEQ ID NO: 1620905 - DNA, 15 bp, Homo sapiens
gtatctttctgcatc

SEQ ID NO: 1620906 - DNA, 15 bp, Homo sapiens
tgtatctttctgcat

SEQ ID NO: 1620907 - DNA, 15 bp, Homo sapiens
ctgtatctttctgca

SEQ ID NO: 1620908 - DNA, 15 bp, Homo sapiens
tctgtatctttctgc

SEQ ID NO: 1620909 - DNA, 15 bp, Homo sapiens
ctctgtatctttctg

SEQ ID NO: 1620910 - DNA, 15 bp, Homo sapiens
tctctgtatctttct

SEQ ID NO: 1620911 - DNA, 15 bp, Homo sapiens
ctctctgtatctttc

SEQ ID NO: 1620912 - DNA, 15 bp, Homo sapiens
tctctctgtatcttt

SEQ ID NO: 1620913 - DNA, 15 bp, Homo sapiens
ctctctctgtatctt

SEQ ID NO: 1620914 - DNA, 15 bp, Homo sapiens
gctctctctgtatct

SEQ ID NO: 1620915 - DNA, 15 bp, Homo sapiens
agctctctctgtatc

SEQ ID NO: 1620916 - DNA, 15 bp, Homo sapiens
cagctctctctgtat

SEQ ID NO: 1620917 - DNA, 15 bp, Homo sapiens
tccagctctctctgt

SEQ ID NO: 1620918 - DNA, 15 bp, Homo sapiens
ctccagctctctctg

SEQ ID NO: 1620919 - DNA, 15 bp, Homo sapiens
tctccagctctctct

SEQ ID NO: 1620920 - DNA, 15 bp, Homo sapiens
ctctccagctctctc

SEQ ID NO: 1620921 - DNA, 15 bp, Homo sapiens
cctctccagctctct

SEQ ID NO: 1620922 - DNA, 15 bp, Homo sapiens
ccctctccagctctc

SEQ ID NO: 1620923 - DNA, 15 bp, Homo sapiens
accctctccagctct

SEQ ID NO: 1620924 - DNA, 15 bp, Homo sapiens
taccctctccagctc

SEQ ID NO: 1620925 - DNA, 15 bp, Homo sapiens
ctaccctctccagct

SEQ ID NO: 1620926 - DNA, 15 bp, Homo sapiens
tctaccctctccagc

SEQ ID NO: 1620927 - DNA, 15 bp, Homo sapiens
ctctaccctctccag

SEQ ID NO: 1620928 - DNA, 15 bp, Homo sapiens
tctctaccctctcca

SEQ ID NO: 1620929 - DNA, 15 bp, Homo sapiens
ttctctaccctctcc

SEQ ID NO: 1620930 - DNA, 15 bp, Homo sapiens
cttctctaccctctc

SEQ ID NO: 1620931 - DNA, 15 bp, Homo sapiens
ccttctctaccctct

SEQ ID NO: 1620932 - DNA, 15 bp, Homo sapiens
cccttctctaccctc

SEQ ID NO: 1620933 - DNA, 15 bp, Homo sapiens
gcccttctctaccct

SEQ ID NO: 1620934 - DNA, 15 bp, Homo sapiens
agcccttctctaccc

SEQ ID NO: 1620935 - DNA, 15 bp, Homo sapiens
aagcccttctctacc

SEQ ID NO: 1620936 - DNA, 15 bp, Homo sapiens
aaagcccttctctac

SEQ ID NO: 1620937 - DNA, 15 bp, Homo sapiens
gaaagcccttctcta

SEQ ID NO: 1620938 - DNA, 15 bp, Homo sapiens
cgaaagcccttctct

SEQ ID NO: 1620939 - DNA, 15 bp, Homo sapiens
ccgaaagcccttctc

SEQ ID NO: 1620940 - DNA, 15 bp, Homo sapiens
cccgaaagcccttct

SEQ ID NO: 1620941 - DNA, 15 bp, Homo sapiens
ccccgaaagcccttc

SEQ ID NO: 1620942 - DNA, 15 bp, Homo sapiens
tccccgaaagccctt

SEQ ID NO: 1620943 - DNA, 15 bp, Homo sapiens
ctccccgaaagccct

SEQ ID NO: 1620944 - DNA, 15 bp, Homo sapiens
tctccccgaaagccc

SEQ ID NO: 1620945 - DNA, 15 bp, Homo sapiens
ttctccccgaaagcc

SEQ ID NO: 1620946 - DNA, 15 bp, Homo sapiens
tttctccccgaaagc

SEQ ID NO: 1620947 - DNA, 15 bp, Homo sapiens
ctttctccccgaaag

SEQ ID NO: 1620948 - DNA, 15 bp, Homo sapiens
actttctccccgaaa

SEQ ID NO: 1620949 - DNA, 15 bp, Homo sapiens
cactttctccccgaa

SEQ ID NO: 1620950 - DNA, 15 bp, Homo sapiens
tcactttctccccga

SEQ ID NO: 1620951 - DNA, 15 bp, Homo sapiens
atcactttctccccg

SEQ ID NO: 1620952 - DNA, 15 bp, Homo sapiens
catcactttctcccc

SEQ ID NO: 1620953 - DNA, 15 bp, Homo sapiens
ccatcactttctccc

SEQ ID NO: 1620954 - DNA, 15 bp, Homo sapiens
tccatcactttctcc

SEQ ID NO: 1620955 - DNA, 15 bp, Homo sapiens
ctccatcactttctc

SEQ ID NO: 1620956 - DNA, 15 bp, Homo sapiens
cctccatcactttct

SEQ ID NO: 1620957 - DNA, 15 bp, Homo sapiens
ccctccatcactttc

SEQ ID NO: 1620958 - DNA, 15 bp, Homo sapiens
tccctccatcacttt

SEQ ID NO: 1620959 - DNA, 15 bp, Homo sapiens
gtccctccatcactt

SEQ ID NO: 1620960 - DNA, 15 bp, Homo sapiens
tgtccctccatcact

SEQ ID NO: 1620961 - DNA, 15 bp, Homo sapiens
ctgtccctccatcac

SEQ ID NO: 1620962 - DNA, 15 bp, Homo sapiens
tctgtccctccatca

SEQ ID NO: 1620963 - DNA, 15 bp, Homo sapiens
ctctgtccctccatc

SEQ ID NO: 1620964 - DNA, 15 bp, Homo sapiens
tctctgtccctccat

SEQ ID NO: 1620965 - DNA, 15 bp, Homo sapiens
ctctctgtccctcca

SEQ ID NO: 1620966 - DNA, 15 bp, Homo sapiens
cctctctgtccctcc

SEQ ID NO: 1620967 - DNA, 15 bp, Homo sapiens
tcctctctgtccctc

SEQ ID NO: 1620968 - DNA, 15 bp, Homo sapiens
ctcctctctgtccct

SEQ ID NO: 1620969 - DNA, 15 bp, Homo sapiens
tctcctctctgtccc

SEQ ID NO: 1620970 - DNA, 15 bp, Homo sapiens
ctctcctctctgtcc

SEQ ID NO: 1620971 - DNA, 15 bp, Homo sapiens
cctctcctctctgtc

SEQ ID NO: 1620972 - DNA, 15 bp, Homo sapiens
acctctcctctctgt

SEQ ID NO: 1620973 - DNA, 15 bp, Homo sapiens
cacctctcctctctg

SEQ ID NO: 1620974 - DNA, 15 bp, Homo sapiens
ccacctctcctctct

SEQ ID NO: 1620975 - DNA, 15 bp, Homo sapiens
tccacctctcctctc

SEQ ID NO: 1620976 - DNA, 15 bp, Homo sapiens
ctccacctctcctct

SEQ ID NO: 1620977 - DNA, 15 bp, Homo sapiens
cctccacctctcctc

SEQ ID NO: 1620978 - DNA, 15 bp, Homo sapiens
gcctccacctctcct

SEQ ID NO: 1620979 - DNA, 15 bp, Homo sapiens
ggcctccacctctcc

SEQ ID NO: 1620980 - DNA, 15 bp, Homo sapiens
tggcctccacctctc

SEQ ID NO: 1620981 - DNA, 15 bp, Homo sapiens
ttggcctccacctct

SEQ ID NO: 1620982 - DNA, 15 bp, Homo sapiens
cttggcctccacctc

SEQ ID NO: 1620983 - DNA, 15 bp, Homo sapiens
ccttggcctccacct

SEQ ID NO: 1620984 - DNA, 15 bp, Homo sapiens
tccttggcctccacc

SEQ ID NO: 1620985 - DNA, 15 bp, Homo sapiens
ctccttggcctccac

SEQ ID NO: 1620986 - DNA, 15 bp, Homo sapiens
cctccttggcctcca

SEQ ID NO: 1620987 - DNA, 15 bp, Homo sapiens
ccctccttggcctcc

SEQ ID NO: 1620988 - DNA, 15 bp, Homo sapiens
tccctccttggcctc

SEQ ID NO: 1620989 - DNA, 15 bp, Homo sapiens
ttccctccttggcct

SEQ ID NO: 1620990 - DNA, 15 bp, Homo sapiens
tttccctccttggcc

SEQ ID NO: 1620991 - DNA, 15 bp, Homo sapiens
ctttccctccttggc

SEQ ID NO: 1620992 - DNA, 15 bp, Homo sapiens
tctttccctccttgg

SEQ ID NO: 1620993 - DNA, 15 bp, Homo sapiens
gtctttccctccttg

SEQ ID NO: 1620994 - DNA, 15 bp, Homo sapiens
ggtctttccctcctt

SEQ ID NO: 1620995 - DNA, 15 bp, Homo sapiens
gggtctttccctcct

SEQ ID NO: 1620996 - DNA, 15 bp, Homo sapiens
ggggtctttccctcc

SEQ ID NO: 1620997 - DNA, 15 bp, Homo sapiens
tggggtctttccctc

SEQ ID NO: 1620998 - DNA, 15 bp, Homo sapiens
ctggggtctttccct

SEQ ID NO: 1620999 - DNA, 15 bp, Homo sapiens
actggggtctttccc

SEQ ID NO: 1621000 - DNA, 15 bp, Homo sapiens
tactggggtctttcc

SEQ ID NO: 1621001 - DNA, 15 bp, Homo sapiens
ctactggggtctttc

SEQ ID NO: 1621002 - DNA, 15 bp, Homo sapiens
tctactggggtcttt

SEQ ID NO: 1621003 - DNA, 15 bp, Homo sapiens
ctctactggggtctt

SEQ ID NO: 1621004 - DNA, 15 bp, Homo sapiens
tctctactggggtct

SEQ ID NO: 1621005 - DNA, 15 bp, Homo sapiens
ttctctactggggtc

SEQ ID NO: 1621006 - DNA, 15 bp, Homo sapiens
tttctctactggggt

SEQ ID NO: 1621007 - DNA, 15 bp, Homo sapiens
ctttctctactgggg

SEQ ID NO: 1621008 - DNA, 15 bp, Homo sapiens
tctttctctactggg

SEQ ID NO: 1621009 - DNA, 15 bp, Homo sapiens
gtctttctctactgg

SEQ ID NO: 1621010 - DNA, 15 bp, Homo sapiens
tgtctttctctactg

SEQ ID NO: 1621011 - DNA, 15 bp, Homo sapiens
ctgtctttctctact

SEQ ID NO: 1621012 - DNA, 15 bp, Homo sapiens
tctgtctttctctac

SEQ ID NO: 1621013 - DNA, 15 bp, Homo sapiens
ctctgtctttctcta

SEQ ID NO: 1621014 - DNA, 15 bp, Homo sapiens
cctctgtctttctct

SEQ ID NO: 1621015 - DNA, 15 bp, Homo sapiens
ccctctgtctttctc

SEQ ID NO: 1621016 - DNA, 15 bp, Homo sapiens
tccctctgtctttct

SEQ ID NO: 1621017 - DNA, 15 bp, Homo sapiens
gtccctctgtctttc

SEQ ID NO: 1621018 - DNA, 15 bp, Homo sapiens
tgtccctctgtcttt

SEQ ID NO: 1621019 - DNA, 15 bp, Homo sapiens
ctgtccctctgtctt

SEQ ID NO: 1621020 - DNA, 15 bp, Homo sapiens
tctgtccctctgtct

SEQ ID NO: 1621021 - DNA, 15 bp, Homo sapiens
ctctgtccctctgtc

SEQ ID NO: 1621022 - DNA, 15 bp, Homo sapiens
ttctctgtccctctg

SEQ ID NO: 1621023 - DNA, 15 bp, Homo sapiens
cttctctgtccctct

SEQ ID NO: 1621024 - DNA, 15 bp, Homo sapiens
ccttctctgtccctc

SEQ ID NO: 1621025 - DNA, 15 bp, Homo sapiens
cccttctctgtccct

SEQ ID NO: 1621026 - DNA, 15 bp, Homo sapiens
ccccttctctgtccc

SEQ ID NO: 1621027 - DNA, 15 bp, Homo sapiens
tccccttctctgtcc

SEQ ID NO: 1621028 - DNA, 15 bp, Homo sapiens
atccccttctctgtc

SEQ ID NO: 1621029 - DNA, 15 bp, Homo sapiens
catccccttctctgt

SEQ ID NO: 1621030 - DNA, 15 bp, Homo sapiens
gcatccccttctctg

SEQ ID NO: 1621031 - DNA, 15 bp, Homo sapiens
tgcatccccttctct

SEQ ID NO: 1621032 - DNA, 15 bp, Homo sapiens
ctgcatccccttctc

SEQ ID NO: 1621033 - DNA, 15 bp, Homo sapiens
tctgcatccccttct

SEQ ID NO: 1621034 - DNA, 15 bp, Homo sapiens
gtctgcatccccttc

SEQ ID NO: 1621035 - DNA, 15 bp, Homo sapiens
cgtctgcatcccctt

SEQ ID NO: 1621036 - DNA, 15 bp, Homo sapiens
gcgtctgcatcccct

SEQ ID NO: 1621037 - DNA, 15 bp, Homo sapiens
tgcgtctgcatcccc

SEQ ID NO: 1621038 - DNA, 15 bp, Homo sapiens
ctgcgtctgcatccc

SEQ ID NO: 1621039 - DNA, 15 bp, Homo sapiens
cctgcgtctgcatcc

SEQ ID NO: 1621040 - DNA, 15 bp, Homo sapiens
gcctgcgtctgcatc

SEQ ID NO: 1621041 - DNA, 15 bp, Homo sapiens
cgcctgcgtctgcat

SEQ ID NO: 1621042 - DNA, 15 bp, Homo sapiens
ccgcctgcgtctgca

SEQ ID NO: 1621043 - DNA, 15 bp, Homo sapiens
cccgcctgcgtctgc

SEQ ID NO: 1621044 - DNA, 15 bp, Homo sapiens
tcccgcctgcgtctg

SEQ ID NO: 1621045 - DNA, 15 bp, Homo sapiens
ctcccgcctgcgtct

SEQ ID NO: 1621046 - DNA, 15 bp, Homo sapiens
gctcccgcctgcgtc

SEQ ID NO: 1621047 - DNA, 15 bp, Homo sapiens
tgctcccgcctgcgt

SEQ ID NO: 1621048 - DNA, 15 bp, Homo sapiens
gtgctcccgcctgcg

SEQ ID NO: 1621049 - DNA, 15 bp, Homo sapiens
tgtgctcccgcctgc

SEQ ID NO: 1621050 - DNA, 15 bp, Homo sapiens
gtgtgctcccgcctg

SEQ ID NO: 1621051 - DNA, 15 bp, Homo sapiens
ggtgtgctcccgcct

SEQ ID NO: 1621052 - DNA, 15 bp, Homo sapiens
gggtgtgctcccgcc

SEQ ID NO: 1621053 - DNA, 15 bp, Homo sapiens
tgggtgtgctcccgc

SEQ ID NO: 1621054 - DNA, 15 bp, Homo sapiens
gtgggtgtgctcccg

SEQ ID NO: 1621055 - DNA, 15 bp, Homo sapiens
tgtgggtgtgctccc

SEQ ID NO: 1621056 - DNA, 15 bp, Homo sapiens
ctgtgggtgtgctcc

SEQ ID NO: 1621057 - DNA, 15 bp, Homo sapiens
tctgtgggtgtgctc

SEQ ID NO: 1621058 - DNA, 15 bp, Homo sapiens
ctctgtgggtgtgct

SEQ ID NO: 1621059 - DNA, 15 bp, Homo sapiens
cctctgtgggtgtgc

SEQ ID NO: 1621060 - DNA, 15 bp, Homo sapiens
gcctctgtgggtgtg

SEQ ID NO: 1621061 - DNA, 15 bp, Homo sapiens
cgcctctgtgggtgt

SEQ ID NO: 1621062 - DNA, 15 bp, Homo sapiens
tcgcctctgtgggtg

SEQ ID NO: 1621063 - DNA, 15 bp, Homo sapiens
ttcgcctctgtgggt

SEQ ID NO: 1621064 - DNA, 15 bp, Homo sapiens
cttcgcctctgtggg

SEQ ID NO: 1621065 - DNA, 15 bp, Homo sapiens
ccttcgcctctgtgg

SEQ ID NO: 1621066 - DNA, 15 bp, Homo sapiens
tccttcgcctctgtg

SEQ ID NO: 1621067 - DNA, 15 bp, Homo sapiens
ttccttcgcctctgt

SEQ ID NO: 1621068 - DNA, 15 bp, Homo sapiens
cttccttcgcctctg

SEQ ID NO: 1621069 - DNA, 15 bp, Homo sapiens
ccttccttcgcctct

SEQ ID NO: 1621070 - DNA, 15 bp, Homo sapiens
cccttccttcgcctc

SEQ ID NO: 1621071 - DNA, 15 bp, Homo sapiens
gcccttccttcgcct

SEQ ID NO: 1621072 - DNA, 15 bp, Homo sapiens
cgcccttccttcgcc

SEQ ID NO: 1621073 - DNA, 15 bp, Homo sapiens
gcgcccttccttcgc

SEQ ID NO: 1621074 - DNA, 15 bp, Homo sapiens
tgcgcccttccttcg

SEQ ID NO: 1621075 - DNA, 15 bp, Homo sapiens
ttgcgcccttccttc

SEQ ID NO: 1621076 - DNA, 15 bp, Homo sapiens
cttgcgcccttcctt

SEQ ID NO: 1621077 - DNA, 15 bp, Homo sapiens
tcttgcgcccttcct

SEQ ID NO: 1621078 - DNA, 15 bp, Homo sapiens
gtcttgcgcccttcc

SEQ ID NO: 1621079 - DNA, 15 bp, Homo sapiens
ggtcttgcgcccttc

SEQ ID NO: 1621080 - DNA, 15 bp, Homo sapiens
tggtcttgcgccctt

SEQ ID NO: 1621081 - DNA, 15 bp, Homo sapiens
atggtcttgcgccct

SEQ ID NO: 1621082 - DNA, 15 bp, Homo sapiens
catggtcttgcgccc

SEQ ID NO: 1621083 - DNA, 15 bp, Homo sapiens
tcatggtcttgcgcc

SEQ ID NO: 1621084 - DNA, 15 bp, Homo sapiens
ctcatggtcttgcgc

SEQ ID NO: 1621085 - DNA, 15 bp, Homo sapiens
tctcatggtcttgcg

SEQ ID NO: 1621086 - DNA, 15 bp, Homo sapiens
ttctcatggtcttgc

SEQ ID NO: 1621087 - DNA, 15 bp, Homo sapiens
gttctcatggtcttg

SEQ ID NO: 1621088 - DNA, 15 bp, Homo sapiens
ggttctcatggtctt

SEQ ID NO: 1621089 - DNA, 15 bp, Homo sapiens
tggttctcatggtct

SEQ ID NO: 1621090 - DNA, 15 bp, Homo sapiens
gtggttctcatggtc

SEQ ID NO: 1621091 - DNA, 15 bp, Homo sapiens
tgtggttctcatggt

SEQ ID NO: 1621092 - DNA, 15 bp, Homo sapiens
ctgtggttctcatgg

SEQ ID NO: 1621093 - DNA, 15 bp, Homo sapiens
tctgtggttctcatg

SEQ ID NO: 1621094 - DNA, 15 bp, Homo sapiens
gtctgtggttctcat

SEQ ID NO: 1621095 - DNA, 15 bp, Homo sapiens
cgtctgtggttctca

SEQ ID NO: 1621096 - DNA, 15 bp, Homo sapiens
gcgtctgtggttctc

SEQ ID NO: 1621097 - DNA, 15 bp, Homo sapiens
cgcgtctgtggttct

SEQ ID NO: 1621098 - DNA, 15 bp, Homo sapiens
ccgcgtctgtggttc

SEQ ID NO: 1621099 - DNA, 15 bp, Homo sapiens
tccgcgtctgtggtt

SEQ ID NO: 1621100 - DNA, 15 bp, Homo sapiens
ttccgcgtctgtggt

SEQ ID NO: 1621101 - DNA, 15 bp, Homo sapiens
tttccgcgtctgtgg

SEQ ID NO: 1621102 - DNA, 15 bp, Homo sapiens
ctttccgcgtctgtg

SEQ ID NO: 1621103 - DNA, 15 bp, Homo sapiens
gctttccgcgtctgt

SEQ ID NO: 1621104 - DNA, 15 bp, Homo sapiens
ggctttccgcgtctg

SEQ ID NO: 1621105 - DNA, 15 bp, Homo sapiens
cggctttccgcgtct

SEQ ID NO: 1621106 - DNA, 15 bp, Homo sapiens
ccggctttccgcgtc

SEQ ID NO: 1621107 - DNA, 15 bp, Homo sapiens
cccggctttccgcgt

SEQ ID NO: 1621108 - DNA, 15 bp, Homo sapiens
ccccggctttccgcg

SEQ ID NO: 1621109 - DNA, 15 bp, Homo sapiens
tccccggctttccgc

SEQ ID NO: 1621110 - DNA, 15 bp, Homo sapiens
ctccccggctttccg

SEQ ID NO: 1621111 - DNA, 15 bp, Homo sapiens
cctccccggctttcc

SEQ ID NO: 1621112 - DNA, 15 bp, Homo sapiens
acctccccggctttc

SEQ ID NO: 1621113 - DNA, 15 bp, Homo sapiens
gacctccccggcttt

SEQ ID NO: 1621114 - DNA, 15 bp, Homo sapiens
cgacctccccggctt

SEQ ID NO: 1621115 - DNA, 15 bp, Homo sapiens
acgacctccccggct

SEQ ID NO: 1621116 - DNA, 15 bp, Homo sapiens
cacgacctccccggc

SEQ ID NO: 1621117 - DNA, 15 bp, Homo sapiens
ccacgacctccccgg

SEQ ID NO: 1621118 - DNA, 15 bp, Homo sapiens
gccacgacctccccg

SEQ ID NO: 1621119 - DNA, 15 bp, Homo sapiens
agccacgacctcccc

SEQ ID NO: 1621120 - DNA, 15 bp, Homo sapiens
gagccacgacctccc

SEQ ID NO: 1621121 - DNA, 15 bp, Homo sapiens
cgagccacgacctcc

SEQ ID NO: 1621122 - DNA, 15 bp, Homo sapiens
ccgagccacgacctc

SEQ ID NO: 1621123 - DNA, 15 bp, Homo sapiens
accgagccacgacct

SEQ ID NO: 1621124 - DNA, 15 bp, Homo sapiens
gaccgagccacgacc

SEQ ID NO: 1621125 - DNA, 15 bp, Homo sapiens
agaccgagccacgac

SEQ ID NO: 1621126 - DNA, 15 bp, Homo sapiens
tagaccgagccacga

SEQ ID NO: 1621127 - DNA, 15 bp, Homo sapiens
ctagaccgagccacg

SEQ ID NO: 1621128 - DNA, 15 bp, Homo sapiens
cctagaccgagccac

SEQ ID NO: 1621129 - DNA, 15 bp, Homo sapiens
ccctagaccgagcca

SEQ ID NO: 1621130 - DNA, 15 bp, Homo sapiens
gccctagaccgagcc

SEQ ID NO: 1621131 - DNA, 15 bp, Homo sapiens
cgccctagaccgagc

SEQ ID NO: 1621132 - DNA, 15 bp, Homo sapiens
gcgccctagaccgag

SEQ ID NO: 1621133 - DNA, 15 bp, Homo sapiens
tgcgccctagaccga

SEQ ID NO: 1621134 - DNA, 15 bp, Homo sapiens
gtgcgccctagaccg

SEQ ID NO: 1621135 - DNA, 15 bp, Homo sapiens
cgtgcgccctagacc

SEQ ID NO: 1621136 - DNA, 15 bp, Homo sapiens
ccgtgcgccctagac

SEQ ID NO: 1621137 - DNA, 15 bp, Homo sapiens
cccgtgcgccctaga

SEQ ID NO: 1621138 - DNA, 15 bp, Homo sapiens
ccccgtgcgccctag

SEQ ID NO: 1621139 - DNA, 15 bp, Homo sapiens
tccccgtgcgcccta

SEQ ID NO: 1621140 - DNA, 15 bp, Homo sapiens
ctccccgtgcgccct

SEQ ID NO: 1621141 - DNA, 15 bp, Homo sapiens
gctccccgtgcgccc

SEQ ID NO: 1621142 - DNA, 15 bp, Homo sapiens
tgctccccgtgcgcc

SEQ ID NO: 1621143 - DNA, 15 bp, Homo sapiens
ctgctccccgtgcgc

SEQ ID NO: 1621144 - DNA, 15 bp, Homo sapiens
cctgctccccgtgcg

SEQ ID NO: 1621145 - DNA, 15 bp, Homo sapiens
ccctgctccccgtgc

SEQ ID NO: 1621146 - DNA, 15 bp, Homo sapiens
gccctgctccccgtg

SEQ ID NO: 1621147 - DNA, 15 bp, Homo sapiens
agccctgctccccgt

SEQ ID NO: 1621148 - DNA, 15 bp, Homo sapiens
aagccctgctccccg

SEQ ID NO: 1621149 - DNA, 15 bp, Homo sapiens
caagccctgctcccc

SEQ ID NO: 1621150 - DNA, 15 bp, Homo sapiens
gcaagccctgctccc

SEQ ID NO: 1621151 - DNA, 15 bp, Homo sapiens
ggcaagccctgctcc

SEQ ID NO: 1621152 - DNA, 15 bp, Homo sapiens
gggcaagccctgctc

SEQ ID NO: 1621153 - DNA, 15 bp, Homo sapiens
ggggcaagccctgct

SEQ ID NO: 1621154 - DNA, 15 bp, Homo sapiens
gggggcaagccctgc

SEQ ID NO: 1621155 - DNA, 15 bp, Homo sapiens
ggggggcaagccctg

SEQ ID NO: 1621156 - DNA, 15 bp, Homo sapiens
tggggggcaagccct

SEQ ID NO: 1621157 - DNA, 15 bp, Homo sapiens
ctggggggcaagccc

SEQ ID NO: 1621158 - DNA, 15 bp, Homo sapiens
gctggggggcaagcc

SEQ ID NO: 1621159 - DNA, 15 bp, Homo sapiens
tgctggggggcaagc

SEQ ID NO: 1621160 - DNA, 15 bp, Homo sapiens
gtgctggggggcaag

SEQ ID NO: 1621161 - DNA, 15 bp, Homo sapiens
ggtgctggggggcaa

SEQ ID NO: 1621162 - DNA, 15 bp, Homo sapiens
aggtgctggggggca

SEQ ID NO: 1621163 - DNA, 15 bp, Homo sapiens
gaggtgctggggggc

SEQ ID NO: 1621164 - DNA, 15 bp, Homo sapiens
ggaggtgctgggggg

SEQ ID NO: 1621165 - DNA, 15 bp, Homo sapiens
cggaggtgctggggg

SEQ ID NO: 1621166 - DNA, 15 bp, Homo sapiens
ccggaggtgctgggg

SEQ ID NO: 1621167 - DNA, 15 bp, Homo sapiens
cccggaggtgctggg

SEQ ID NO: 1621168 - DNA, 15 bp, Homo sapiens
ccccggaggtgctgg

SEQ ID NO: 1621169 - DNA, 15 bp, Homo sapiens
tccccggaggtgctg

SEQ ID NO: 1621170 - DNA, 15 bp, Homo sapiens
ctccccggaggtgct

SEQ ID NO: 1621171 - DNA, 15 bp, Homo sapiens
cctccccggaggtgc

SEQ ID NO: 1621172 - DNA, 15 bp, Homo sapiens
acctccccggaggtg

SEQ ID NO: 1621173 - DNA, 15 bp, Homo sapiens
cacctccccggaggt

SEQ ID NO: 1621174 - DNA, 15 bp, Homo sapiens
tcacctccccggagg

SEQ ID NO: 1621175 - DNA, 15 bp, Homo sapiens
gtcacctccccggag

SEQ ID NO: 1621176 - DNA, 15 bp, Homo sapiens
ggtcacctccccgga

SEQ ID NO: 1621177 - DNA, 15 bp, Homo sapiens
gggtcacctccccgg

SEQ ID NO: 1621178 - DNA, 15 bp, Homo sapiens
ggggtcacctccccg

SEQ ID NO: 1621179 - DNA, 15 bp, Homo sapiens
tggggtcacctcccc

SEQ ID NO: 1621180 - DNA, 15 bp, Homo sapiens
ctggggtcacctccc

SEQ ID NO: 1621181 - DNA, 15 bp, Homo sapiens
gctggggtcacctcc

SEQ ID NO: 1621182 - DNA, 15 bp, Homo sapiens
ggctggggtcacctc

SEQ ID NO: 1621183 - DNA, 15 bp, Homo sapiens
cggctggggtcacct

SEQ ID NO: 1621184 - DNA, 15 bp, Homo sapiens
ccggctggggtcacc

SEQ ID NO: 1621185 - DNA, 15 bp, Homo sapiens
cccggctggggtcac

SEQ ID NO: 1621186 - DNA, 15 bp, Homo sapiens
tcccggctggggtca

SEQ ID NO: 1621187 - DNA, 15 bp, Homo sapiens
ctcccggctggggtc

SEQ ID NO: 1621188 - DNA, 15 bp, Homo sapiens
tctcccggctggggt

SEQ ID NO: 1621189 - DNA, 15 bp, Homo sapiens
atctcccggctgggg

SEQ ID NO: 1621190 - DNA, 15 bp, Homo sapiens
catctcccggctggg

SEQ ID NO: 1621191 - DNA, 15 bp, Homo sapiens
gcatctcccggctgg

SEQ ID NO: 1621192 - DNA, 15 bp, Homo sapiens
cgcatctcccggctg

SEQ ID NO: 1621193 - DNA, 15 bp, Homo sapiens
tcgcatctcccggct

SEQ ID NO: 1621194 - DNA, 15 bp, Homo sapiens
ctcgcatctcccggc

SEQ ID NO: 1621195 - DNA, 15 bp, Homo sapiens
actcgcatctcccgg

SEQ ID NO: 1621196 - DNA, 15 bp, Homo sapiens
gactcgcatctcccg

SEQ ID NO: 1621197 - DNA, 15 bp, Homo sapiens
ggactcgcatctccc

SEQ ID NO: 1621198 - DNA, 15 bp, Homo sapiens
gggactcgcatctcc

SEQ ID NO: 1621199 - DNA, 15 bp, Homo sapiens
cgggactcgcatctc

SEQ ID NO: 1621200 - DNA, 15 bp, Homo sapiens
gcgggactcgcatct

SEQ ID NO: 1621201 - DNA, 15 bp, Homo sapiens
cgcgggactcgcatc

SEQ ID NO: 1621202 - DNA, 15 bp, Homo sapiens
ccgcgggactcgcat

SEQ ID NO: 1621203 - DNA, 15 bp, Homo sapiens
tccgcgggactcgca

SEQ ID NO: 1621204 - DNA, 15 bp, Homo sapiens
ctccgcgggactcgc

SEQ ID NO: 1621205 - DNA, 15 bp, Homo sapiens
gctccgcgggactcg

SEQ ID NO: 1621206 - DNA, 15 bp, Homo sapiens
ggctccgcgggactc

SEQ ID NO: 1621207 - DNA, 15 bp, Homo sapiens
gggctccgcgggact

SEQ ID NO: 1621208 - DNA, 15 bp, Homo sapiens
cgggctccgcgggac

SEQ ID NO: 1621209 - DNA, 15 bp, Homo sapiens
gcgggctccgcggga

SEQ ID NO: 1621210 - DNA, 15 bp, Homo sapiens
cgcgggctccgcggg

SEQ ID NO: 1621211 - DNA, 15 bp, Homo sapiens
gcgcgggctccgcgg

SEQ ID NO: 1621212 - DNA, 15 bp, Homo sapiens
ggcgcgggctccgcg

SEQ ID NO: 1621213 - DNA, 15 bp, Homo sapiens
gggcgcgggctccgc

SEQ ID NO: 1621214 - DNA, 15 bp, Homo sapiens
cgggcgcgggctccg

SEQ ID NO: 1621215 - DNA, 15 bp, Homo sapiens
ccgggcgcgggctcc

SEQ ID NO: 1621216 - DNA, 15 bp, Homo sapiens
gccgggcgcgggctc

SEQ ID NO: 1621217 - DNA, 15 bp, Homo sapiens
cgccgggcgcgggct

SEQ ID NO: 1621218 - DNA, 15 bp, Homo sapiens
ccgccgggcgcgggc

SEQ ID NO: 1621219 - DNA, 15 bp, Homo sapiens
tccgccgggcgcggg

SEQ ID NO: 1621220 - DNA, 15 bp, Homo sapiens
gtccgccgggcgcgg

SEQ ID NO: 1621221 - DNA, 15 bp, Homo sapiens
cgtccgccgggcgcg

SEQ ID NO: 1621222 - DNA, 15 bp, Homo sapiens
ccgtccgccgggcgc

SEQ ID NO: 1621223 - DNA, 15 bp, Homo sapiens
tccgtccgccgggcg

SEQ ID NO: 1621224 - DNA, 15 bp, Homo sapiens
gtccgtccgccgggc

SEQ ID NO: 1621225 - DNA, 15 bp, Homo sapiens
ggtccgtccgccggg

SEQ ID NO: 1621226 - DNA, 15 bp, Homo sapiens
cggtccgtccgccgg

SEQ ID NO: 1621227 - DNA, 15 bp, Homo sapiens
tcggtccgtccgccg

SEQ ID NO: 1621228 - DNA, 15 bp, Homo sapiens
atcggtccgtccgcc

SEQ ID NO: 1621229 - DNA, 15 bp, Homo sapiens
catcggtccgtccgc

SEQ ID NO: 1621230 - DNA, 15 bp, Homo sapiens
ccatcggtccgtccg

SEQ ID NO: 1621231 - DNA, 15 bp, Homo sapiens
tccatcggtccgtcc

SEQ ID NO: 1621232 - DNA, 15 bp, Homo sapiens
gtccatcggtccgtc

SEQ ID NO: 1621233 - DNA, 15 bp, Homo sapiens
tgtccatcggtccgt

SEQ ID NO: 1621234 - DNA, 15 bp, Homo sapiens
ttgtccatcggtccg

SEQ ID NO: 1621235 - DNA, 15 bp, Homo sapiens
tttgtccatcggtcc

SEQ ID NO: 1621236 - DNA, 15 bp, Homo sapiens
ctttgtccatcggtc

SEQ ID NO: 1621237 - DNA, 15 bp, Homo sapiens
gctttgtccatcggt

SEQ ID NO: 1621238 - DNA, 15 bp, Homo sapiens
ggctttgtccatcgg

SEQ ID NO: 1621239 - DNA, 15 bp, Homo sapiens
cggctttgtccatcg

SEQ ID NO: 1621240 - DNA, 15 bp, Homo sapiens
ccggctttgtccatc

SEQ ID NO: 1621241 - DNA, 15 bp, Homo sapiens
cccggctttgtccat

SEQ ID NO: 1621242 - DNA, 15 bp, Homo sapiens
ccccggctttgtcca

SEQ ID NO: 1621243 - DNA, 15 bp, Homo sapiens
tccccggctttgtcc

SEQ ID NO: 1621244 - DNA, 15 bp, Homo sapiens
ctccccggctttgtc

SEQ ID NO: 1621245 - DNA, 15 bp, Homo sapiens
tctccccggctttgt

SEQ ID NO: 1621246 - DNA, 15 bp, Homo sapiens
ctctccccggctttg

SEQ ID NO: 1621247 - DNA, 15 bp, Homo sapiens
gctctccccggcttt

SEQ ID NO: 1621248 - DNA, 15 bp, Homo sapiens
agctctccccggctt

SEQ ID NO: 1621249 - DNA, 15 bp, Homo sapiens
gagctctccccggct

SEQ ID NO: 1621250 - DNA, 15 bp, Homo sapiens
cgagctctccccggc

SEQ ID NO: 1621251 - DNA, 15 bp, Homo sapiens
ccgagctctccccgg

SEQ ID NO: 1621252 - DNA, 15 bp, Homo sapiens
cccgagctctccccg

SEQ ID NO: 1621253 - DNA, 15 bp, Homo sapiens
gcccgagctctcccc

SEQ ID NO: 1621254 - DNA, 15 bp, Homo sapiens
cgcccgagctctccc

SEQ ID NO: 1621255 - DNA, 15 bp, Homo sapiens
gcgcccgagctctcc

SEQ ID NO: 1621256 - DNA, 15 bp, Homo sapiens
cgcgcccgagctctc

SEQ ID NO: 1621257 - DNA, 15 bp, Homo sapiens
ccgcgcccgagctct

SEQ ID NO: 1621258 - DNA, 15 bp, Homo sapiens
gccgcgcccgagctc

SEQ ID NO: 1621259 - DNA, 15 bp, Homo sapiens
ggccgcgcccgagct

SEQ ID NO: 1621260 - DNA, 15 bp, Homo sapiens
cggccgcgcccgagc

SEQ ID NO: 1621261 - DNA, 15 bp, Homo sapiens
ccggccgcgcccgag

SEQ ID NO: 1621262 - DNA, 15 bp, Homo sapiens
cccggccgcgcccga

SEQ ID NO: 1621263 - DNA, 15 bp, Homo sapiens
ccccggccgcgcccg

SEQ ID NO: 1621264 - DNA, 15 bp, Homo sapiens
gccccggccgcgccc

SEQ ID NO: 1621265 - DNA, 15 bp, Homo sapiens
cgccccggccgcgcc

SEQ ID NO: 1621266 - DNA, 15 bp, Homo sapiens
ccgccccggccgcgc

SEQ ID NO: 1621267 - DNA, 15 bp, Homo sapiens
cccgccccggccgcg

SEQ ID NO: 1621268 - DNA, 15 bp, Homo sapiens
ccccgccccggccgc

SEQ ID NO: 1621269 - DNA, 15 bp, Homo sapiens
cccccgccccggccg

SEQ ID NO: 1621270 - DNA, 15 bp, Homo sapiens
gcccccgccccggcc

SEQ ID NO: 1621271 - DNA, 15 bp, Homo sapiens
ggcccccgccccggc

SEQ ID NO: 1621272 - DNA, 15 bp, Homo sapiens
cggcccccgccccgg

SEQ ID NO: 1621273 - DNA, 15 bp, Homo sapiens
ccggcccccgccccg

SEQ ID NO: 1621274 - DNA, 15 bp, Homo sapiens
accggcccccgcccc

SEQ ID NO: 1621275 - DNA, 15 bp, Homo sapiens
caccggcccccgccc

SEQ ID NO: 1621276 - DNA, 15 bp, Homo sapiens
gcaccggcccccgcc

SEQ ID NO: 1621277 - DNA, 15 bp, Homo sapiens
ggcaccggcccccgc

SEQ ID NO: 1621278 - DNA, 15 bp, Homo sapiens
gggcaccggcccccg

SEQ ID NO: 1621279 - DNA, 15 bp, Homo sapiens
cgggcaccggccccc

SEQ ID NO: 1621280 - DNA, 15 bp, Homo sapiens
gcgggcaccggcccc

SEQ ID NO: 1621281 - DNA, 15 bp, Homo sapiens
tgcgggcaccggccc

SEQ ID NO: 1621282 - DNA, 15 bp, Homo sapiens
ctgcgggcaccggcc

SEQ ID NO: 1621283 - DNA, 15 bp, Homo sapiens
cctgcgggcaccggc

SEQ ID NO: 1621284 - DNA, 15 bp, Homo sapiens
ccctgcgggcaccgg

SEQ ID NO: 1621285 - DNA, 15 bp, Homo sapiens
tccctgcgggcaccg

SEQ ID NO: 1621286 - DNA, 15 bp, Homo sapiens
gtccctgcgggcacc

SEQ ID NO: 1621287 - DNA, 15 bp, Homo sapiens
ggtccctgcgggcac

SEQ ID NO: 1621288 - DNA, 15 bp, Homo sapiens
gggtccctgcgggca

SEQ ID NO: 1621289 - DNA, 15 bp, Homo sapiens
cgggtccctgcgggc

SEQ ID NO: 1621290 - DNA, 15 bp, Homo sapiens
ccgggtccctgcggg

SEQ ID NO: 1621291 - DNA, 15 bp, Homo sapiens
cccgggtccctgcgg

SEQ ID NO: 1621292 - DNA, 15 bp, Homo sapiens
gcccgggtccctgcg

SEQ ID NO: 1621293 - DNA, 15 bp, Homo sapiens
cgcccgggtccctgc

SEQ ID NO: 1621294 - DNA, 15 bp, Homo sapiens
gcgcccgggtccctg

SEQ ID NO: 1621295 - DNA, 15 bp, Homo sapiens
tgcgcccgggtccct

SEQ ID NO: 1621296 - DNA, 15 bp, Homo sapiens
ctgcgcccgggtccc

SEQ ID NO: 1621297 - DNA, 15 bp, Homo sapiens
gctgcgcccgggtcc

SEQ ID NO: 1621298 - DNA, 15 bp, Homo sapiens
cgctgcgcccgggtc

SEQ ID NO: 1621299 - DNA, 15 bp, Homo sapiens
ccgctgcgcccgggt

SEQ ID NO: 1621300 - DNA, 15 bp, Homo sapiens
cccgctgcgcccggg

SEQ ID NO: 1621301 - DNA, 15 bp, Homo sapiens
ccccgctgcgcccgg

SEQ ID NO: 1621302 - DNA, 15 bp, Homo sapiens
tccccgctgcgcccg

SEQ ID NO: 1621303 - DNA, 15 bp, Homo sapiens
ttccccgctgcgccc

SEQ ID NO: 1621304 - DNA, 15 bp, Homo sapiens
tttccccgctgcgcc

SEQ ID NO: 1621305 - DNA, 15 bp, Homo sapiens
ctttccccgctgcgc

SEQ ID NO: 1621306 - DNA, 15 bp, Homo sapiens
cctttccccgctgcg

SEQ ID NO: 1621307 - DNA, 15 bp, Homo sapiens
tcctttccccgctgc

SEQ ID NO: 1621308 - DNA, 15 bp, Homo sapiens
ctcctttccccgctg

SEQ ID NO: 1621309 - DNA, 15 bp, Homo sapiens
cctcctttccccgct

SEQ ID NO: 1621310 - DNA, 15 bp, Homo sapiens
ccctcctttccccgc

SEQ ID NO: 1621311 - DNA, 15 bp, Homo sapiens
cccctcctttccccg

SEQ ID NO: 1621312 - DNA, 15 bp, Homo sapiens
gcccctcctttcccc

SEQ ID NO: 1621313 - DNA, 15 bp, Homo sapiens
cgcccctcctttccc

SEQ ID NO: 1621314 - DNA, 15 bp, Homo sapiens
ccgcccctcctttcc

SEQ ID NO: 1621315 - DNA, 15 bp, Homo sapiens
cccgcccctcctttc

SEQ ID NO: 1621316 - DNA, 15 bp, Homo sapiens
gcccgcccctccttt

SEQ ID NO: 1621317 - DNA, 15 bp, Homo sapiens
tgcccgcccctcctt

SEQ ID NO: 1621318 - DNA, 15 bp, Homo sapiens
ttgcccgcccctcct

SEQ ID NO: 1621319 - DNA, 15 bp, Homo sapiens
cttgcccgcccctcc

SEQ ID NO: 1621320 - DNA, 15 bp, Homo sapiens
gcttgcccgcccctc

SEQ ID NO: 1621321 - DNA, 15 bp, Homo sapiens
cgcttgcccgcccct

SEQ ID NO: 1621322 - DNA, 15 bp, Homo sapiens
ccgcttgcccgcccc

SEQ ID NO: 1621323 - DNA, 15 bp, Homo sapiens
gccgcttgcccgccc

SEQ ID NO: 1621324 - DNA, 15 bp, Homo sapiens
cgccgcttgcccgcc

SEQ ID NO: 1621325 - DNA, 15 bp, Homo sapiens
tcgccgcttgcccgc

SEQ ID NO: 1621326 - DNA, 15 bp, Homo sapiens
ctcgccgcttgcccg

SEQ ID NO: 1621327 - DNA, 15 bp, Homo sapiens
tctcgccgcttgccc

SEQ ID NO: 1621328 - DNA, 15 bp, Homo sapiens
ttctcgccgcttgcc

SEQ ID NO: 1621329 - DNA, 15 bp, Homo sapiens
cttctcgccgcttgc

SEQ ID NO: 1621330 - DNA, 15 bp, Homo sapiens
ccttctcgccgcttg

SEQ ID NO: 1621331 - DNA, 15 bp, Homo sapiens
cccttctcgccgctt

SEQ ID NO: 1621332 - DNA, 15 bp, Homo sapiens
ccccttctcgccgct

SEQ ID NO: 1621333 - DNA, 15 bp, Homo sapiens
tccccttctcgccgc

SEQ ID NO: 1621334 - DNA, 15 bp, Homo sapiens
ttccccttctcgccg

SEQ ID NO: 1621335 - DNA, 15 bp, Homo sapiens
cttccccttctcgcc

SEQ ID NO: 1621336 - DNA, 15 bp, Homo sapiens
ccttccccttctcgc

SEQ ID NO: 1621337 - DNA, 15 bp, Homo sapiens
tccttccccttctcg

SEQ ID NO: 1621338 - DNA, 15 bp, Homo sapiens
ttccttccccttctc

SEQ ID NO: 1621339 - DNA, 15 bp, Homo sapiens
cttccttccccttct

SEQ ID NO: 1621340 - DNA, 15 bp, Homo sapiens
gcttccttccccttc

SEQ ID NO: 1621341 - DNA, 15 bp, Homo sapiens
cgcttccttcccctt

SEQ ID NO: 1621342 - DNA, 15 bp, Homo sapiens
ccgcttccttcccct

SEQ ID NO: 1621343 - DNA, 15 bp, Homo sapiens
tccgcttccttcccc

SEQ ID NO: 1621344 - DNA, 15 bp, Homo sapiens
ctccgcttccttccc

SEQ ID NO: 1621345 - DNA, 15 bp, Homo sapiens
cctccgcttccttcc

SEQ ID NO: 1621346 - DNA, 15 bp, Homo sapiens
acctccgcttccttc

SEQ ID NO: 1621347 - DNA, 15 bp, Homo sapiens
cacctccgcttcctt

SEQ ID NO: 1621348 - DNA, 15 bp, Homo sapiens
gcacctccgcttcct

SEQ ID NO: 1621349 - DNA, 15 bp, Homo sapiens
ggcacctccgcttcc

SEQ ID NO: 1621350 - DNA, 15 bp, Homo sapiens
cggcacctccgcttc

SEQ ID NO: 1621351 - DNA, 15 bp, Homo sapiens
ccggcacctccgctt

SEQ ID NO: 1621352 - DNA, 15 bp, Homo sapiens
cccggcacctccgct

SEQ ID NO: 1621353 - DNA, 15 bp, Homo sapiens
gcccggcacctccgc

SEQ ID NO: 1621354 - DNA, 15 bp, Homo sapiens
cgcccggcacctccg

SEQ ID NO: 1621355 - DNA, 15 bp, Homo sapiens
ccgcccggcacctcc

SEQ ID NO: 1621356 - DNA, 15 bp, Homo sapiens
cccgcccggcacctc

SEQ ID NO: 1621357 - DNA, 15 bp, Homo sapiens
gcccgcccggcacct

SEQ ID NO: 1621358 - DNA, 15 bp, Homo sapiens
cgcccgcccggcacc

SEQ ID NO: 1621359 - DNA, 15 bp, Homo sapiens
gcgcccgcccggcac

SEQ ID NO: 1621360 - DNA, 15 bp, Homo sapiens
cgcgcccgcccggca

SEQ ID NO: 1621361 - DNA, 15 bp, Homo sapiens
ccgcgcccgcccggc

SEQ ID NO: 1621362 - DNA, 15 bp, Homo sapiens
cccgcgcccgcccgg

SEQ ID NO: 1621363 - DNA, 15 bp, Homo sapiens
ccccgcgcccgcccg

SEQ ID NO: 1621364 - DNA, 15 bp, Homo sapiens
gccccgcgcccgccc

SEQ ID NO: 1621365 - DNA, 15 bp, Homo sapiens
cgccccgcgcccgcc

SEQ ID NO: 1621366 - DNA, 15 bp, Homo sapiens
gcgccccgcgcccgc

SEQ ID NO: 1621367 - DNA, 15 bp, Homo sapiens
cgcgccccgcgcccg

SEQ ID NO: 1621368 - DNA, 15 bp, Homo sapiens
ccgcgccccgcgccc

SEQ ID NO: 1621369 - DNA, 15 bp, Homo sapiens
cccgcgccccgcgcc

SEQ ID NO: 1621370 - DNA, 15 bp, Homo sapiens
gcccgcgccccgcgc

SEQ ID NO: 1621371 - DNA, 15 bp, Homo sapiens
tgcccgcgccccgcg

SEQ ID NO: 1621372 - DNA, 15 bp, Homo sapiens
ctgcccgcgccccgc

SEQ ID NO: 1621373 - DNA, 15 bp, Homo sapiens
cctgcccgcgccccg

SEQ ID NO: 1621374 - DNA, 15 bp, Homo sapiens
tcctgcccgcgcccc

SEQ ID NO: 1621375 - DNA, 15 bp, Homo sapiens
ttcctgcccgcgccc

SEQ ID NO: 1621376 - DNA, 15 bp, Homo sapiens
cttcctgcccgcgcc

SEQ ID NO: 1621377 - DNA, 15 bp, Homo sapiens
gcttcctgcccgcgc

SEQ ID NO: 1621378 - DNA, 15 bp, Homo sapiens
cgcttcctgcccgcg

SEQ ID NO: 1621379 - DNA, 15 bp, Homo sapiens
ccgcttcctgcccgc

SEQ ID NO: 1621380 - DNA, 15 bp, Homo sapiens
cccgcttcctgcccg

SEQ ID NO: 1621381 - DNA, 15 bp, Homo sapiens
ccccgcttcctgccc

SEQ ID NO: 1621382 - DNA, 15 bp, Homo sapiens
tccccgcttcctgcc

SEQ ID NO: 1621383 - DNA, 15 bp, Homo sapiens
ctccccgcttcctgc

SEQ ID NO: 1621384 - DNA, 15 bp, Homo sapiens
cctccccgcttcctg

SEQ ID NO: 1621385 - DNA, 15 bp, Homo sapiens
ccctccccgcttcct

SEQ ID NO: 1621386 - DNA, 15 bp, Homo sapiens
cccctccccgcttcc

SEQ ID NO: 1621387 - DNA, 15 bp, Homo sapiens
gcccctccccgcttc

SEQ ID NO: 1621388 - DNA, 15 bp, Homo sapiens
cgcccctccccgctt

SEQ ID NO: 1621389 - DNA, 15 bp, Homo sapiens
ccgcccctccccgct

SEQ ID NO: 1621390 - DNA, 15 bp, Homo sapiens
gccgcccctccccgc

SEQ ID NO: 1621391 - DNA, 15 bp, Homo sapiens
cgccgcccctccccg

SEQ ID NO: 1621392 - DNA, 15 bp, Homo sapiens
ccgccgcccctcccc

SEQ ID NO: 1621393 - DNA, 15 bp, Homo sapiens
cccgccgcccctccc

SEQ ID NO: 1621394 - DNA, 15 bp, Homo sapiens
ccccgccgcccctcc

SEQ ID NO: 1621395 - DNA, 15 bp, Homo sapiens
gccccgccgcccctc

SEQ ID NO: 1621396 - DNA, 15 bp, Homo sapiens
cgccccgccgcccct

SEQ ID NO: 1621397 - DNA, 15 bp, Homo sapiens
ccgccccgccgcccc

SEQ ID NO: 1621398 - DNA, 15 bp, Homo sapiens
cccgccccgccgccc

SEQ ID NO: 1621399 - DNA, 15 bp, Homo sapiens
ccccgccccgccgcc

SEQ ID NO: 1621400 - DNA, 15 bp, Homo sapiens
cccccgccccgccgc

SEQ ID NO: 1621401 - DNA, 15 bp, Homo sapiens
gcccccgccccgccg

SEQ ID NO: 1621402 - DNA, 15 bp, Homo sapiens
ggcccccgccccgcc

SEQ ID NO: 1621403 - DNA, 15 bp, Homo sapiens
aggcccccgccccgc

SEQ ID NO: 1621404 - DNA, 15 bp, Homo sapiens
gaggcccccgccccg

SEQ ID NO: 1621405 - DNA, 15 bp, Homo sapiens
ggaggcccccgcccc

SEQ ID NO: 1621406 - DNA, 15 bp, Homo sapiens
cggaggcccccgccc

SEQ ID NO: 1621407 - DNA, 15 bp, Homo sapiens
ccggaggcccccgcc

SEQ ID NO: 1621408 - DNA, 15 bp, Homo sapiens
tccggaggcccccgc

SEQ ID NO: 1621409 - DNA, 15 bp, Homo sapiens
ttccggaggcccccg

SEQ ID NO: 1621410 - DNA, 15 bp, Homo sapiens
tttccggaggccccc

SEQ ID NO: 1621411 - DNA, 15 bp, Homo sapiens
ttttccggaggcccc

SEQ ID NO: 1621412 - DNA, 15 bp, Homo sapiens
tttttccggaggccc

SEQ ID NO: 1621413 - DNA, 15 bp, Homo sapiens
gtttttccggaggcc

SEQ ID NO: 1621414 - DNA, 15 bp, Homo sapiens
cgtttttccggaggc

SEQ ID NO: 1621415 - DNA, 15 bp, Homo sapiens
gcgtttttccggagg

SEQ ID NO: 1621416 - DNA, 15 bp, Homo sapiens
ggcgtttttccggag

SEQ ID NO: 1621417 - DNA, 15 bp, Homo sapiens
gggcgtttttccgga

SEQ ID NO: 1621418 - DNA, 15 bp, Homo sapiens
ggggcgtttttccgg

SEQ ID NO: 1621419 - DNA, 15 bp, Homo sapiens
cggggcgtttttccg

SEQ ID NO: 1621420 - DNA, 15 bp, Homo sapiens
tcggggcgtttttcc

SEQ ID NO: 1621421 - DNA, 15 bp, Homo sapiens
gtcggggcgtttttc

SEQ ID NO: 1621422 - DNA, 15 bp, Homo sapiens
agtcggggcgttttt

SEQ ID NO: 1621423 - DNA, 15 bp, Homo sapiens
aagtcggggcgtttt

SEQ ID NO: 1621424 - DNA, 15 bp, Homo sapiens
gaagtcggggcgttt

SEQ ID NO: 1621425 - DNA, 15 bp, Homo sapiens
ggaagtcggggcgtt

SEQ ID NO: 1621426 - DNA, 15 bp, Homo sapiens
aggaagtcggggcgt

SEQ ID NO: 1621427 - DNA, 15 bp, Homo sapiens
caggaagtcggggcg

SEQ ID NO: 1621428 - DNA, 15 bp, Homo sapiens
gcaggaagtcggggc

SEQ ID NO: 1621429 - DNA, 15 bp, Homo sapiens
ggcaggaagtcgggg

SEQ ID NO: 1621430 - DNA, 15 bp, Homo sapiens
gggcaggaagtcggg

SEQ ID NO: 1621431 - DNA, 15 bp, Homo sapiens
ggggcaggaagtcgg

SEQ ID NO: 1621432 - DNA, 15 bp, Homo sapiens
cggggcaggaagtcg

SEQ ID NO: 1621433 - DNA, 15 bp, Homo sapiens
gcggggcaggaagtc

SEQ ID NO: 1621434 - DNA, 15 bp, Homo sapiens
ggcggggcaggaagt

SEQ ID NO: 1621435 - DNA, 15 bp, Homo sapiens
tggcggggcaggaag

SEQ ID NO: 1621436 - DNA, 15 bp, Homo sapiens
ctggcggggcaggaa

SEQ ID NO: 1621437 - DNA, 15 bp, Homo sapiens
tctggcggggcagga

SEQ ID NO: 1621438 - DNA, 15 bp, Homo sapiens
ctctggcggggcagg

SEQ ID NO: 1621439 - DNA, 15 bp, Homo sapiens
gctctggcggggcag

SEQ ID NO: 1621440 - DNA, 15 bp, Homo sapiens
ggctctggcggggca

SEQ ID NO: 1621441 - DNA, 15 bp, Homo sapiens
tggctctggcggggc

SEQ ID NO: 1621442 - DNA, 15 bp, Homo sapiens
ctggctctggcgggg

SEQ ID NO: 1621443 - DNA, 15 bp, Homo sapiens
cctggctctggcggg

SEQ ID NO: 1621444 - DNA, 15 bp, Homo sapiens
tcctggctctggcgg

SEQ ID NO: 1621445 - DNA, 15 bp, Homo sapiens
ttcctggctctggcg

SEQ ID NO: 1621446 - DNA, 15 bp, Homo sapiens
cttcctggctctggc

SEQ ID NO: 1621447 - DNA, 15 bp, Homo sapiens
gcttcctggctctgg

SEQ ID NO: 1621448 - DNA, 15 bp, Homo sapiens
cgcttcctggctctg

SEQ ID NO: 1621449 - DNA, 15 bp, Homo sapiens
ccgcttcctggctct

SEQ ID NO: 1621450 - DNA, 15 bp, Homo sapiens
cccgcttcctggctc

SEQ ID NO: 1621451 - DNA, 15 bp, Homo sapiens
tcccgcttcctggct

SEQ ID NO: 1621452 - DNA, 15 bp, Homo sapiens
ctcccgcttcctggc

SEQ ID NO: 1621453 - DNA, 15 bp, Homo sapiens
gctcccgcttcctgg

SEQ ID NO: 1621454 - DNA, 15 bp, Homo sapiens
ggctcccgcttcctg

SEQ ID NO: 1621455 - DNA, 15 bp, Homo sapiens
cggctcccgcttcct

SEQ ID NO: 1621456 - DNA, 15 bp, Homo sapiens
ccggctcccgcttcc

SEQ ID NO: 1621457 - DNA, 15 bp, Homo sapiens
cccggctcccgcttc

SEQ ID NO: 1621458 - DNA, 15 bp, Homo sapiens
tcccggctcccgctt

SEQ ID NO: 1621459 - DNA, 15 bp, Homo sapiens
gtcccggctcccgct

SEQ ID NO: 1621460 - DNA, 15 bp, Homo sapiens
ggtcccggctcccgc

SEQ ID NO: 1621461 - DNA, 15 bp, Homo sapiens
gggtcccggctcccg

SEQ ID NO: 1621462 - DNA, 15 bp, Homo sapiens
tgggtcccggctccc

SEQ ID NO: 1621463 - DNA, 15 bp, Homo sapiens
ctgggtcccggctcc

SEQ ID NO: 1621464 - DNA, 15 bp, Homo sapiens
cctgggtcccggctc

SEQ ID NO: 1621465 - DNA, 15 bp, Homo sapiens
ccctgggtcccggct

SEQ ID NO: 1621466 - DNA, 15 bp, Homo sapiens
gccctgggtcccggc

SEQ ID NO: 1621467 - DNA, 15 bp, Homo sapiens
ggccctgggtcccgg

SEQ ID NO: 1621468 - DNA, 15 bp, Homo sapiens
gggccctgggtcccg

SEQ ID NO: 1621469 - DNA, 15 bp, Homo sapiens
cgggccctgggtccc

SEQ ID NO: 1621470 - DNA, 15 bp, Homo sapiens
ccgggccctgggtcc

SEQ ID NO: 1621471 - DNA, 15 bp, Homo sapiens
cccgggccctgggtc

SEQ ID NO: 1621472 - DNA, 15 bp, Homo sapiens
tcccgggccctgggt

SEQ ID NO: 1621473 - DNA, 15 bp, Homo sapiens
atcccgggccctggg

SEQ ID NO: 1621474 - DNA, 15 bp, Homo sapiens
gatcccgggccctgg

SEQ ID NO: 1621475 - DNA, 15 bp, Homo sapiens
cgatcccgggccctg

SEQ ID NO: 1621476 - DNA, 15 bp, Homo sapiens
gcgatcccgggccct

SEQ ID NO: 1621477 - DNA, 15 bp, Homo sapiens
ggcgatcccgggccc

SEQ ID NO: 1621478 - DNA, 15 bp, Homo sapiens
cggcgatcccgggcc

SEQ ID NO: 1621479 - DNA, 15 bp, Homo sapiens
tcggcgatcccgggc

SEQ ID NO: 1621480 - DNA, 15 bp, Homo sapiens
ctcggcgatcccggg

SEQ ID NO: 1621481 - DNA, 15 bp, Homo sapiens
gctcggcgatcccgg

SEQ ID NO: 1621482 - DNA, 15 bp, Homo sapiens
ggctcggcgatcccg

SEQ ID NO: 1621483 - DNA, 15 bp, Homo sapiens
gggctcggcgatccc

SEQ ID NO: 1621484 - DNA, 15 bp, Homo sapiens
cgggctcggcgatcc

SEQ ID NO: 1621485 - DNA, 15 bp, Homo sapiens
tcgggctcggcgatc

SEQ ID NO: 1621486 - DNA, 15 bp, Homo sapiens
gtcgggctcggcgat

SEQ ID NO: 1621487 - DNA, 15 bp, Homo sapiens
ggtcgggctcggcga

SEQ ID NO: 1621488 - DNA, 15 bp, Homo sapiens
aggtcgggctcggcg

SEQ ID NO: 1621489 - DNA, 15 bp, Homo sapiens
gaggtcgggctcggc

SEQ ID NO: 1621490 - DNA, 15 bp, Homo sapiens
cgaggtcgggctcgg

SEQ ID NO: 1621491 - DNA, 15 bp, Homo sapiens
ccgaggtcgggctcg

SEQ ID NO: 1621492 - DNA, 15 bp, Homo sapiens
cccgaggtcgggctc

SEQ ID NO: 1621493 - DNA, 15 bp, Homo sapiens
gcccgaggtcgggct

SEQ ID NO: 1621494 - DNA, 15 bp, Homo sapiens
cgcccgaggtcgggc

SEQ ID NO: 1621495 - DNA, 15 bp, Homo sapiens
gcgcccgaggtcggg

SEQ ID NO: 1621496 - DNA, 15 bp, Homo sapiens
ggcgcccgaggtcgg

SEQ ID NO: 1621497 - DNA, 15 bp, Homo sapiens
gggcgcccgaggtcg

SEQ ID NO: 1621498 - DNA, 15 bp, Homo sapiens
ggggcgcccgaggtc

SEQ ID NO: 1621499 - DNA, 15 bp, Homo sapiens
cggggcgcccgaggt

SEQ ID NO: 1621500 - DNA, 15 bp, Homo sapiens
gcggggcgcccgagg

SEQ ID NO: 1621501 - DNA, 15 bp, Homo sapiens
ggcggggcgcccgag

SEQ ID NO: 1621502 - DNA, 15 bp, Homo sapiens
cggcggggcgcccga

SEQ ID NO: 1621503 - DNA, 15 bp, Homo sapiens
ccggcggggcgcccg

SEQ ID NO: 1621504 - DNA, 15 bp, Homo sapiens
accggcggggcgccc

SEQ ID NO: 1621505 - DNA, 15 bp, Homo sapiens
gaccggcggggcgcc

SEQ ID NO: 1621506 - DNA, 15 bp, Homo sapiens
tgaccggcggggcgc

SEQ ID NO: 1621507 - DNA, 15 bp, Homo sapiens
gtgaccggcggggcg

SEQ ID NO: 1621508 - DNA, 15 bp, Homo sapiens
ggtgaccggcggggc

SEQ ID NO: 1621509 - DNA, 15 bp, Homo sapiens
aggtgaccggcgggg

SEQ ID NO: 1621510 - DNA, 15 bp, Homo sapiens
gaggtgaccggcggg

SEQ ID NO: 1621511 - DNA, 15 bp, Homo sapiens
ggaggtgaccggcgg

SEQ ID NO: 1621512 - DNA, 15 bp, Homo sapiens
cggaggtgaccggcg

SEQ ID NO: 1621513 - DNA, 15 bp, Homo sapiens
gcggaggtgaccggc

SEQ ID NO: 1621514 - DNA, 15 bp, Homo sapiens
cgcggaggtgaccgg

SEQ ID NO: 1621515 - DNA, 15 bp, Homo sapiens
gcgcggaggtgaccg

SEQ ID NO: 1621516 - DNA, 15 bp, Homo sapiens
cgcgcggaggtgacc

SEQ ID NO: 1621517 - DNA, 15 bp, Homo sapiens
ccgcgcggaggtgac

SEQ ID NO: 1621518 - DNA, 15 bp, Homo sapiens
tccgcgcggaggtga

SEQ ID NO: 1621519 - DNA, 15 bp, Homo sapiens
gtccgcgcggaggtg

SEQ ID NO: 1621520 - DNA, 15 bp, Homo sapiens
tgtccgcgcggaggt

SEQ ID NO: 1621521 - DNA, 15 bp, Homo sapiens
gtgtccgcgcggagg

SEQ ID NO: 1621522 - DNA, 15 bp, Homo sapiens
ggtgtccgcgcggag

SEQ ID NO: 1621523 - DNA, 15 bp, Homo sapiens
tggtgtccgcgcgga

SEQ ID NO: 1621524 - DNA, 15 bp, Homo sapiens
ctggtgtccgcgcgg

SEQ ID NO: 1621525 - DNA, 15 bp, Homo sapiens
cctggtgtccgcgcg

SEQ ID NO: 1621526 - DNA, 15 bp, Homo sapiens
acctggtgtccgcgc

SEQ ID NO: 1621527 - DNA, 15 bp, Homo sapiens
tacctggtgtccgcg

SEQ ID NO: 1621528 - DNA, 15 bp, Homo sapiens
gtacctggtgtccgc

SEQ ID NO: 1621529 - DNA, 15 bp, Homo sapiens
agtacctggtgtccg

SEQ ID NO: 1621530 - DNA, 15 bp, Homo sapiens
gagtacctggtgtcc

SEQ ID NO: 1621531 - DNA, 15 bp, Homo sapiens
cgagtacctggtgtc

SEQ ID NO: 1621532 - DNA, 15 bp, Homo sapiens
ccgagtacctggtgt

SEQ ID NO: 1621533 - DNA, 15 bp, Homo sapiens
accgagtacctggtg

SEQ ID NO: 1621534 - DNA, 15 bp, Homo sapiens
gaccgagtacctggt

SEQ ID NO: 1621535 - DNA, 15 bp, Homo sapiens
ggaccgagtacctgg

SEQ ID NO: 1621536 - DNA, 15 bp, Homo sapiens
gggaccgagtacctg

SEQ ID NO: 1621537 - DNA, 15 bp, Homo sapiens
ggggaccgagtacct

SEQ ID NO: 1621538 - DNA, 15 bp, Homo sapiens
cggggaccgagtacc

SEQ ID NO: 1621539 - DNA, 15 bp, Homo sapiens
ccggggaccgagtac

SEQ ID NO: 1621540 - DNA, 15 bp, Homo sapiens
gccggggaccgagta

SEQ ID NO: 1621541 - DNA, 15 bp, Homo sapiens
ggccggggaccgagt

SEQ ID NO: 1621542 - DNA, 15 bp, Homo sapiens
gggccggggaccgag

SEQ ID NO: 1621543 - DNA, 15 bp, Homo sapiens
ggggccggggaccga

SEQ ID NO: 1621544 - DNA, 15 bp, Homo sapiens
cggggccggggaccg

SEQ ID NO: 1621545 - DNA, 15 bp, Homo sapiens
gcggggccggggacc

SEQ ID NO: 1621546 - DNA, 15 bp, Homo sapiens
ggcggggccggggac

SEQ ID NO: 1621547 - DNA, 15 bp, Homo sapiens
gggcggggccgggga

SEQ ID NO: 1621548 - DNA, 15 bp, Homo sapiens
cgggcggggccgggg

SEQ ID NO: 1621549 - DNA, 15 bp, Homo sapiens
ccgggcggggccggg

SEQ ID NO: 1621550 - DNA, 15 bp, Homo sapiens
gccgggcggggccgg

SEQ ID NO: 1621551 - DNA, 15 bp, Homo sapiens
ggccgggcggggccg

SEQ ID NO: 1621552 - DNA, 15 bp, Homo sapiens
aggccgggcggggcc

SEQ ID NO: 1621553 - DNA, 15 bp, Homo sapiens
gaggccgggcggggc

SEQ ID NO: 1621554 - DNA, 15 bp, Homo sapiens
ggaggccgggcgggg

SEQ ID NO: 1621555 - DNA, 15 bp, Homo sapiens
aggaggccgggcggg

SEQ ID NO: 1621556 - DNA, 15 bp, Homo sapiens
gaggaggccgggcgg

SEQ ID NO: 1621557 - DNA, 15 bp, Homo sapiens
ggaggaggccgggcg

SEQ ID NO: 1621558 - DNA, 15 bp, Homo sapiens
gggaggaggccgggc

SEQ ID NO: 1621559 - DNA, 15 bp, Homo sapiens
ggggaggaggccggg

SEQ ID NO: 1621560 - DNA, 15 bp, Homo sapiens
aggggaggaggccgg

SEQ ID NO: 1621561 - DNA, 15 bp, Homo sapiens
gaggggaggaggccg

SEQ ID NO: 1621562 - DNA, 15 bp, Homo sapiens
cgaggggaggaggcc

SEQ ID NO: 1621563 - DNA, 15 bp, Homo sapiens
ccgaggggaggaggc

SEQ ID NO: 1621564 - DNA, 15 bp, Homo sapiens
gccgaggggaggagg

SEQ ID NO: 1621565 - DNA, 15 bp, Homo sapiens
agccgaggggaggag

SEQ ID NO: 1621566 - DNA, 15 bp, Homo sapiens
cagccgaggggagga

SEQ ID NO: 1621567 - DNA, 15 bp, Homo sapiens
acagccgaggggagg

SEQ ID NO: 1621568 - DNA, 15 bp, Homo sapiens
aacagccgaggggag

SEQ ID NO: 1621569 - DNA, 15 bp, Homo sapiens
caacagccgagggga

SEQ ID NO: 1621570 - DNA, 15 bp, Homo sapiens
ccaacagccgagggg

SEQ ID NO: 1621571 - DNA, 15 bp, Homo sapiens
cccaacagccgaggg

SEQ ID NO: 1621572 - DNA, 15 bp, Homo sapiens
ccccaacagccgagg

SEQ ID NO: 1621573 - DNA, 15 bp, Homo sapiens
cccccaacagccgag

SEQ ID NO: 1621574 - DNA, 15 bp, Homo sapiens
tcccccaacagccga

SEQ ID NO: 1621575 - DNA, 15 bp, Homo sapiens
ttcccccaacagccg

SEQ ID NO: 1621576 - DNA, 15 bp, Homo sapiens
cttcccccaacagcc

SEQ ID NO: 1621577 - DNA, 15 bp, Homo sapiens
acttcccccaacagc

SEQ ID NO: 1621578 - DNA, 15 bp, Homo sapiens
cacttcccccaacag

SEQ ID NO: 1621579 - DNA, 15 bp, Homo sapiens
ccacttcccccaaca

SEQ ID NO: 1621580 - DNA, 15 bp, Homo sapiens
cccacttcccccaac

SEQ ID NO: 1621581 - DNA, 15 bp, Homo sapiens
ccccacttcccccaa

SEQ ID NO: 1621582 - DNA, 15 bp, Homo sapiens
tccccacttccccca

SEQ ID NO: 1621583 - DNA, 15 bp, Homo sapiens
ctccccacttccccc

SEQ ID NO: 1621584 - DNA, 15 bp, Homo sapiens
cctccccacttcccc

SEQ ID NO: 1621585 - DNA, 15 bp, Homo sapiens
tcctccccacttccc

SEQ ID NO: 1621586 - DNA, 15 bp, Homo sapiens
ctcctccccacttcc

SEQ ID NO: 1621587 - DNA, 15 bp, Homo sapiens
cctcctccccacttc

SEQ ID NO: 1621588 - DNA, 15 bp, Homo sapiens
tcctcctccccactt

SEQ ID NO: 1621589 - DNA, 15 bp, Homo sapiens
ctcctcctccccact

SEQ ID NO: 1621590 - DNA, 15 bp, Homo sapiens
cctcctcctccccac

SEQ ID NO: 1621591 - DNA, 15 bp, Homo sapiens
ccctcctcctcccca

SEQ ID NO: 1621592 - DNA, 15 bp, Homo sapiens
tccctcctcctcccc

SEQ ID NO: 1621593 - DNA, 15 bp, Homo sapiens
ctccctcctcctccc

SEQ ID NO: 1621594 - DNA, 15 bp, Homo sapiens
cctccctcctcctcc

SEQ ID NO: 1621595 - DNA, 15 bp, Homo sapiens
ccctccctcctcctc

SEQ ID NO: 1621596 - DNA, 15 bp, Homo sapiens
cccctccctcctcct

SEQ ID NO: 1621597 - DNA, 15 bp, Homo sapiens
gcccctccctcctcc

SEQ ID NO: 1621598 - DNA, 15 bp, Homo sapiens
agcccctccctcctc

SEQ ID NO: 1621599 - DNA, 15 bp, Homo sapiens
cagcccctccctcct

SEQ ID NO: 1621600 - DNA, 15 bp, Homo sapiens
ccagcccctccctcc

SEQ ID NO: 1621601 - DNA, 15 bp, Homo sapiens
cccagcccctccctc

SEQ ID NO: 1621602 - DNA, 15 bp, Homo sapiens
ccccagcccctccct

SEQ ID NO: 1621603 - DNA, 15 bp, Homo sapiens
gccccagcccctccc

SEQ ID NO: 1621604 - DNA, 15 bp, Homo sapiens
cgccccagcccctcc

SEQ ID NO: 1621605 - DNA, 15 bp, Homo sapiens
gcgccccagcccctc

SEQ ID NO: 1621606 - DNA, 15 bp, Homo sapiens
agcgccccagcccct

SEQ ID NO: 1621607 - DNA, 15 bp, Homo sapiens
cagcgccccagcccc

SEQ ID NO: 1621608 - DNA, 15 bp, Homo sapiens
gcagcgccccagccc

SEQ ID NO: 1621609 - DNA, 15 bp, Homo sapiens
ggcagcgccccagcc

SEQ ID NO: 1621610 - DNA, 15 bp, Homo sapiens
cggcagcgccccagc

SEQ ID NO: 1621611 - DNA, 15 bp, Homo sapiens
ccggcagcgccccag

SEQ ID NO: 1621612 - DNA, 15 bp, Homo sapiens
gccggcagcgcccca

SEQ ID NO: 1621613 - DNA, 15 bp, Homo sapiens
tgccggcagcgcccc

SEQ ID NO: 1621614 - DNA, 15 bp, Homo sapiens
ctgccggcagcgccc

SEQ ID NO: 1621615 - DNA, 15 bp, Homo sapiens
gctgccggcagcgcc

SEQ ID NO: 1621616 - DNA, 15 bp, Homo sapiens
cgctgccggcagcgc

SEQ ID NO: 1621617 - DNA, 15 bp, Homo sapiens
ccgctgccggcagcg

SEQ ID NO: 1621618 - DNA, 15 bp, Homo sapiens
tccgctgccggcagc

SEQ ID NO: 1621619 - DNA, 15 bp, Homo sapiens
ctccgctgccggcag

SEQ ID NO: 1621620 - DNA, 15 bp, Homo sapiens
cctccgctgccggca

SEQ ID NO: 1621621 - DNA, 15 bp, Homo sapiens
ccctccgctgccggc

SEQ ID NO: 1621622 - DNA, 15 bp, Homo sapiens
cccctccgctgccgg

SEQ ID NO: 1621623 - DNA, 15 bp, Homo sapiens
gcccctccgctgccg

SEQ ID NO: 1621624 - DNA, 15 bp, Homo sapiens
ggcccctccgctgcc

SEQ ID NO: 1621625 - DNA, 15 bp, Homo sapiens
gggcccctccgctgc

SEQ ID NO: 1621626 - DNA, 15 bp, Homo sapiens
ggggcccctccgctg

SEQ ID NO: 1621627 - DNA, 15 bp, Homo sapiens
gggggcccctccgct

SEQ ID NO: 1621628 - DNA, 15 bp, Homo sapiens
agggggcccctccgc

SEQ ID NO: 1621629 - DNA, 15 bp, Homo sapiens
aagggggcccctccg

SEQ ID NO: 1621630 - DNA, 15 bp, Homo sapiens
gaagggggcccctcc

SEQ ID NO: 1621631 - DNA, 15 bp, Homo sapiens
cgaagggggcccctc

SEQ ID NO: 1621632 - DNA, 15 bp, Homo sapiens
ccgaagggggcccct

SEQ ID NO: 1621633 - DNA, 15 bp, Homo sapiens
tccgaagggggcccc

SEQ ID NO: 1621634 - DNA, 15 bp, Homo sapiens
gtccgaagggggccc

SEQ ID NO: 1621635 - DNA, 15 bp, Homo sapiens
ggtccgaagggggcc

SEQ ID NO: 1621636 - DNA, 15 bp, Homo sapiens
gggtccgaagggggc

SEQ ID NO: 1621637 - DNA, 15 bp, Homo sapiens
ggggtccgaaggggg

SEQ ID NO: 1621638 - DNA, 15 bp, Homo sapiens
tggggtccgaagggg

SEQ ID NO: 1621639 - DNA, 15 bp, Homo sapiens
gtggggtccgaaggg

SEQ ID NO: 1621640 - DNA, 15 bp, Homo sapiens
cgtggggtccgaagg

SEQ ID NO: 1621641 - DNA, 15 bp, Homo sapiens
ccgtggggtccgaag

SEQ ID NO: 1621642 - DNA, 15 bp, Homo sapiens
tccgtggggtccgaa

SEQ ID NO: 1621643 - DNA, 15 bp, Homo sapiens
ttccgtggggtccga

SEQ ID NO: 1621644 - DNA, 15 bp, Homo sapiens
gttccgtggggtccg

SEQ ID NO: 1621645 - DNA, 15 bp, Homo sapiens
ggttccgtggggtcc

SEQ ID NO: 1621646 - DNA, 15 bp, Homo sapiens
tggttccgtggggtc

SEQ ID NO: 1621647 - DNA, 15 bp, Homo sapiens
ctggttccgtggggt

SEQ ID NO: 1621648 - DNA, 15 bp, Homo sapiens
gctggttccgtgggg

SEQ ID NO: 1621649 - DNA, 15 bp, Homo sapiens
cgctggttccgtggg

SEQ ID NO: 1621650 - DNA, 15 bp, Homo sapiens
ccgctggttccgtgg

SEQ ID NO: 1621651 - DNA, 15 bp, Homo sapiens
gccgctggttccgtg

SEQ ID NO: 1621652 - DNA, 15 bp, Homo sapiens
ggccgctggttccgt

SEQ ID NO: 1621653 - DNA, 15 bp, Homo sapiens
ccacccgcggctcgc

SEQ ID NO: 1621654 - DNA, 15 bp, Homo sapiens
cccacccgcggctcg

SEQ ID NO: 1621655 - DNA, 15 bp, Homo sapiens
gcccacccgcggctc

SEQ ID NO: 1621656 - DNA, 15 bp, Homo sapiens
ggcccacccgcggct

SEQ ID NO: 1621657 - DNA, 15 bp, Homo sapiens
gggcccacccgcggc

SEQ ID NO: 1621658 - DNA, 15 bp, Homo sapiens
ggggcccacccgcgg

SEQ ID NO: 1621659 - DNA, 15 bp, Homo sapiens
tggggcccacccgcg

SEQ ID NO: 1621660 - DNA, 15 bp, Homo sapiens
ctggggcccacccgc

SEQ ID NO: 1621661 - DNA, 15 bp, Homo sapiens
cctggggcccacccg

SEQ ID NO: 1621662 - DNA, 15 bp, Homo sapiens
gcctggggcccaccc

SEQ ID NO: 1621663 - DNA, 15 bp, Homo sapiens
cgcctggggcccacc

SEQ ID NO: 1621664 - DNA, 15 bp, Homo sapiens
gcgcctggggcccac

SEQ ID NO: 1621665 - DNA, 15 bp, Homo sapiens
cgcgcctggggccca

SEQ ID NO: 1621666 - DNA, 15 bp, Homo sapiens
gcgcgcctggggccc

SEQ ID NO: 1621667 - DNA, 15 bp, Homo sapiens
tgcgcgcctggggcc

SEQ ID NO: 1621668 - DNA, 15 bp, Homo sapiens
ctgcgcgcctggggc

SEQ ID NO: 1621669 - DNA, 15 bp, Homo sapiens
tctgcgcgcctgggg

SEQ ID NO: 1621670 - DNA, 15 bp, Homo sapiens
gtctgcgcgcctggg

SEQ ID NO: 1621671 - DNA, 15 bp, Homo sapiens
tgtctgcgcgcctgg

SEQ ID NO: 1621672 - DNA, 15 bp, Homo sapiens
atgtctgcgcgcctg

SEQ ID NO: 1621673 - DNA, 15 bp, Homo sapiens
catgtctgcgcgcct

SEQ ID NO: 1621674 - DNA, 15 bp, Homo sapiens
ccatgtctgcgcgcc

SEQ ID NO: 1621675 - DNA, 15 bp, Homo sapiens
cccatgtctgcgcgc

SEQ ID NO: 1621676 - DNA, 15 bp, Homo sapiens
gcccatgtctgcgcg

SEQ ID NO: 1621677 - DNA, 15 bp, Homo sapiens
agcccatgtctgcgc

SEQ ID NO: 1621678 - DNA, 15 bp, Homo sapiens
cagcccatgtctgcg

SEQ ID NO: 1621679 - DNA, 15 bp, Homo sapiens
gcagcccatgtctgc

SEQ ID NO: 1621680 - DNA, 15 bp, Homo sapiens
agcagcccatgtctg

SEQ ID NO: 1621681 - DNA, 15 bp, Homo sapiens
gagcagcccatgtct

SEQ ID NO: 1621682 - DNA, 15 bp, Homo sapiens
ggagcagcccatgtc

SEQ ID NO: 1621683 - DNA, 15 bp, Homo sapiens
cggagcagcccatgt

SEQ ID NO: 1621684 - DNA, 15 bp, Homo sapiens
gcggagcagcccatg

SEQ ID NO: 1621685 - DNA, 15 bp, Homo sapiens
ggcggagcagcccat

SEQ ID NO: 1621686 - DNA, 15 bp, Homo sapiens
tggcggagcagccca

SEQ ID NO: 1621687 - DNA, 15 bp, Homo sapiens
ttggcggagcagccc

SEQ ID NO: 1621688 - DNA, 15 bp, Homo sapiens
tttggcggagcagcc

SEQ ID NO: 1621689 - DNA, 15 bp, Homo sapiens
ctttggcggagcagc

SEQ ID NO: 1621690 - DNA, 15 bp, Homo sapiens
gctttggcggagcag

SEQ ID NO: 1621691 - DNA, 15 bp, Homo sapiens
cgctttggcggagca

SEQ ID NO: 1621692 - DNA, 15 bp, Homo sapiens
gcgctttggcggagc

SEQ ID NO: 1621693 - DNA, 15 bp, Homo sapiens
cgcgctttggcggag

SEQ ID NO: 1621694 - DNA, 15 bp, Homo sapiens
gcgcgctttggcgga

SEQ ID NO: 1621695 - DNA, 15 bp, Homo sapiens
agcgcgctttggcgg

SEQ ID NO: 1621696 - DNA, 15 bp, Homo sapiens
cagcgcgctttggcg

SEQ ID NO: 1621697 - DNA, 15 bp, Homo sapiens
ccagcgcgctttggc

SEQ ID NO: 1621698 - DNA, 15 bp, Homo sapiens
cccagcgcgctttgg

SEQ ID NO: 1621699 - DNA, 15 bp, Homo sapiens
gcccagcgcgctttg

SEQ ID NO: 1621700 - DNA, 15 bp, Homo sapiens
agcccagcgcgcttt

SEQ ID NO: 1621701 - DNA, 15 bp, Homo sapiens
cagcccagcgcgctt

SEQ ID NO: 1621702 - DNA, 15 bp, Homo sapiens
gcagcccagcgcgct

SEQ ID NO: 1621703 - DNA, 15 bp, Homo sapiens
ggcagcccagcgcgc

SEQ ID NO: 1621704 - DNA, 15 bp, Homo sapiens
cggcagcccagcgcg

SEQ ID NO: 1621705 - DNA, 15 bp, Homo sapiens
ccggcagcccagcgc

SEQ ID NO: 1621706 - DNA, 15 bp, Homo sapiens
cccggcagcccagcg

SEQ ID NO: 1621707 - DNA, 15 bp, Homo sapiens
ccccggcagcccagc

SEQ ID NO: 1621708 - DNA, 15 bp, Homo sapiens
gccccggcagcccag

SEQ ID NO: 1621709 - DNA, 15 bp, Homo sapiens
cgccccggcagccca

SEQ ID NO: 1621710 - DNA, 15 bp, Homo sapiens
gcgccccggcagccc

SEQ ID NO: 1621711 - DNA, 15 bp, Homo sapiens
agcgccccggcagcc

SEQ ID NO: 1621712 - DNA, 15 bp, Homo sapiens
cagcgccccggcagc

SEQ ID NO: 1621713 - DNA, 15 bp, Homo sapiens
ccagcgccccggcag

SEQ ID NO: 1621714 - DNA, 15 bp, Homo sapiens
cccagcgccccggca

SEQ ID NO: 1621715 - DNA, 15 bp, Homo sapiens
gcccagcgccccggc

SEQ ID NO: 1621716 - DNA, 15 bp, Homo sapiens
cgcccagcgccccgg

SEQ ID NO: 1621717 - DNA, 15 bp, Homo sapiens
acgcccagcgccccg

SEQ ID NO: 1621718 - DNA, 15 bp, Homo sapiens
gacgcccagcgcccc

SEQ ID NO: 1621719 - DNA, 15 bp, Homo sapiens
cgacgcccagcgccc

SEQ ID NO: 1621720 - DNA, 15 bp, Homo sapiens
gcgacgcccagcgcc

SEQ ID NO: 1621721 - DNA, 15 bp, Homo sapiens
cgcgacgcccagcgc

SEQ ID NO: 1621722 - DNA, 15 bp, Homo sapiens
ccgcgacgcccagcg

SEQ ID NO: 1621723 - DNA, 15 bp, Homo sapiens
cccgcgacgcccagc

SEQ ID NO: 1621724 - DNA, 15 bp, Homo sapiens
ccccgcgacgcccag

SEQ ID NO: 1621725 - DNA, 15 bp, Homo sapiens
gccccgcgacgccca

SEQ ID NO: 1621726 - DNA, 15 bp, Homo sapiens
agccccgcgacgccc

SEQ ID NO: 1621727 - DNA, 15 bp, Homo sapiens
tagccccgcgacgcc

SEQ ID NO: 1621728 - DNA, 15 bp, Homo sapiens
gtagccccgcgacgc

SEQ ID NO: 1621729 - DNA, 15 bp, Homo sapiens
agtagccccgcgacg

SEQ ID NO: 1621730 - DNA, 15 bp, Homo sapiens
cagtagccccgcgac

SEQ ID NO: 1621731 - DNA, 15 bp, Homo sapiens
acagtagccccgcga

SEQ ID NO: 1621732 - DNA, 15 bp, Homo sapiens
cacagtagccccgcg

SEQ ID NO: 1621733 - DNA, 15 bp, Homo sapiens
gcacagtagccccgc

SEQ ID NO: 1621734 - DNA, 15 bp, Homo sapiens
cgcacagtagccccg

SEQ ID NO: 1621735 - DNA, 15 bp, Homo sapiens
gcgcacagtagcccc

SEQ ID NO: 1621736 - DNA, 15 bp, Homo sapiens
agcgcacagtagccc

SEQ ID NO: 1621737 - DNA, 15 bp, Homo sapiens
cagcgcacagtagcc

SEQ ID NO: 1621738 - DNA, 15 bp, Homo sapiens
acagcgcacagtagc

SEQ ID NO: 1621739 - DNA, 15 bp, Homo sapiens
cacagcgcacagtag

SEQ ID NO: 1621740 - DNA, 15 bp, Homo sapiens
gcacagcgcacagta

SEQ ID NO: 1621741 - DNA, 15 bp, Homo sapiens
agcacagcgcacagt

SEQ ID NO: 1621742 - DNA, 15 bp, Homo sapiens
cagcacagcgcacag

SEQ ID NO: 1621743 - DNA, 15 bp, Homo sapiens
ccagcacagcgcaca

SEQ ID NO: 1621744 - DNA, 15 bp, Homo sapiens
cccagcacagcgcac

SEQ ID NO: 1621745 - DNA, 15 bp, Homo sapiens
gcccagcacagcgca

SEQ ID NO: 1621746 - DNA, 15 bp, Homo sapiens
cgcccagcacagcgc

SEQ ID NO: 1621747 - DNA, 15 bp, Homo sapiens
gcgcccagcacagcg

SEQ ID NO: 1621748 - DNA, 15 bp, Homo sapiens
agcgcccagcacagc

SEQ ID NO: 1621749 - DNA, 15 bp, Homo sapiens
cagcgcccagcacag

SEQ ID NO: 1621750 - DNA, 15 bp, Homo sapiens
acagcgcccagcaca

SEQ ID NO: 1621751 - DNA, 15 bp, Homo sapiens
gacagcgcccagcac

SEQ ID NO: 1621752 - DNA, 15 bp, Homo sapiens
tgacagcgcccagca

SEQ ID NO: 1621753 - DNA, 15 bp, Homo sapiens
atgacagcgcccagc

SEQ ID NO: 1621754 - DNA, 15 bp, Homo sapiens
catgacagcgcccag

SEQ ID NO: 1621755 - DNA, 15 bp, Homo sapiens
tcatgacagcgccca

SEQ ID NO: 1621756 - DNA, 15 bp, Homo sapiens
atcatgacagcgccc

SEQ ID NO: 1621757 - DNA, 15 bp, Homo sapiens
gatcatgacagcgcc

SEQ ID NO: 1621758 - DNA, 15 bp, Homo sapiens
cgatcatgacagcgc

SEQ ID NO: 1621759 - DNA, 15 bp, Homo sapiens
acgatcatgacagcg

SEQ ID NO: 1621760 - DNA, 15 bp, Homo sapiens
cacgatcatgacagc

SEQ ID NO: 1621761 - DNA, 15 bp, Homo sapiens
tcacgatcatgacag

SEQ ID NO: 1621762 - DNA, 15 bp, Homo sapiens
atcacgatcatgaca

SEQ ID NO: 1621763 - DNA, 15 bp, Homo sapiens
catcacgatcatgac

SEQ ID NO: 1621764 - DNA, 15 bp, Homo sapiens
ccatcacgatcatga

SEQ ID NO: 1621765 - DNA, 15 bp, Homo sapiens
accatcacgatcatg

SEQ ID NO: 1621766 - DNA, 15 bp, Homo sapiens
caccatcacgatcat

SEQ ID NO: 1621767 - DNA, 15 bp, Homo sapiens
gcaccatcacgatca

SEQ ID NO: 1621768 - DNA, 15 bp, Homo sapiens
ggcaccatcacgatc

SEQ ID NO: 1621769 - DNA, 15 bp, Homo sapiens
cggcaccatcacgat

SEQ ID NO: 1621770 - DNA, 15 bp, Homo sapiens
acggcaccatcacga

SEQ ID NO: 1621771 - DNA, 15 bp, Homo sapiens
gacggcaccatcacg

SEQ ID NO: 1621772 - DNA, 15 bp, Homo sapiens
cgacggcaccatcac

SEQ ID NO: 1621773 - DNA, 15 bp, Homo sapiens
gcgacggcaccatca

SEQ ID NO: 1621774 - DNA, 15 bp, Homo sapiens
agcgacggcaccatc

SEQ ID NO: 1621775 - DNA, 15 bp, Homo sapiens
gagcgacggcaccat

SEQ ID NO: 1621776 - DNA, 15 bp, Homo sapiens
tgagcgacggcacca

SEQ ID NO: 1621777 - DNA, 15 bp, Homo sapiens
atgagcgacggcacc

SEQ ID NO: 1621778 - DNA, 15 bp, Homo sapiens
gatgagcgacggcac

SEQ ID NO: 1621779 - DNA, 15 bp, Homo sapiens
tgatgagcgacggca

SEQ ID NO: 1621780 - DNA, 15 bp, Homo sapiens
ttgatgagcgacggc

SEQ ID NO: 1621781 - DNA, 15 bp, Homo sapiens
cttgatgagcgacgg

SEQ ID NO: 1621782 - DNA, 15 bp, Homo sapiens
gcttgatgagcgacg

SEQ ID NO: 1621783 - DNA, 15 bp, Homo sapiens
tgcttgatgagcgac

SEQ ID NO: 1621784 - DNA, 15 bp, Homo sapiens
ctgcttgatgagcga

SEQ ID NO: 1621785 - DNA, 15 bp, Homo sapiens
gctgcttgatgagcg

SEQ ID NO: 1621786 - DNA, 15 bp, Homo sapiens
tgctgcttgatgagc

SEQ ID NO: 1621787 - DNA, 15 bp, Homo sapiens
ctgctgcttgatgag

SEQ ID NO: 1621788 - DNA, 15 bp, Homo sapiens
cctgctgcttgatga

SEQ ID NO: 1621789 - DNA, 15 bp, Homo sapiens
acctgctgcttgatg

SEQ ID NO: 1621790 - DNA, 15 bp, Homo sapiens
gacctgctgcttgat

SEQ ID NO: 1621791 - DNA, 15 bp, Homo sapiens
ggacctgctgcttga

SEQ ID NO: 1621792 - DNA, 15 bp, Homo sapiens
aggacctgctgcttg

SEQ ID NO: 1621793 - DNA, 15 bp, Homo sapiens
aaggacctgctgctt

SEQ ID NO: 1621794 - DNA, 15 bp, Homo sapiens
taaggacctgctgct

SEQ ID NO: 1621795 - DNA, 15 bp, Homo sapiens
ttaaggacctgctgc

SEQ ID NO: 1621796 - DNA, 15 bp, Homo sapiens
cttaaggacctgctg

SEQ ID NO: 1621797 - DNA, 15 bp, Homo sapiens
ccttaaggacctgct

SEQ ID NO: 1621798 - DNA, 15 bp, Homo sapiens
accttaaggacctgc

SEQ ID NO: 1621799 - DNA, 15 bp, Homo sapiens
caccttaaggacctg

SEQ ID NO: 1621800 - DNA, 15 bp, Homo sapiens
ccaccttaaggacct

SEQ ID NO: 1621801 - DNA, 15 bp, Homo sapiens
cccaccttaaggacc

SEQ ID NO: 1621802 - DNA, 15 bp, Homo sapiens
acccaccttaaggac

SEQ ID NO: 1621803 - DNA, 15 bp, Homo sapiens
cacccaccttaagga

SEQ ID NO: 1621804 - DNA, 15 bp, Homo sapiens
tcacccaccttaagg

SEQ ID NO: 1621805 - DNA, 15 bp, Homo sapiens
ctcacccaccttaag

SEQ ID NO: 1621806 - DNA, 15 bp, Homo sapiens
cctcacccaccttaa

SEQ ID NO: 1621807 - DNA, 15 bp, Homo sapiens
ccctcacccacctta

SEQ ID NO: 1621808 - DNA, 15 bp, Homo sapiens
tccctcacccacctt

SEQ ID NO: 1621809 - DNA, 15 bp, Homo sapiens
ctccctcacccacct

SEQ ID NO: 1621810 - DNA, 15 bp, Homo sapiens
tctccctcacccacc

SEQ ID NO: 1621811 - DNA, 15 bp, Homo sapiens
gtctccctcacccac

SEQ ID NO: 1621812 - DNA, 15 bp, Homo sapiens
ggtctccctcaccca

SEQ ID NO: 1621813 - DNA, 15 bp, Homo sapiens
gggtctccctcaccc

SEQ ID NO: 1621814 - DNA, 15 bp, Homo sapiens
ggggtctccctcacc

SEQ ID NO: 1621815 - DNA, 15 bp, Homo sapiens
tggggtctccctcac

SEQ ID NO: 1621816 - DNA, 15 bp, Homo sapiens
ctggggtctccctca

SEQ ID NO: 1621817 - DNA, 15 bp, Homo sapiens
cctggggtctccctc

SEQ ID NO: 1621818 - DNA, 15 bp, Homo sapiens
ccctggggtctccct

SEQ ID NO: 1621819 - DNA, 15 bp, Homo sapiens
cccctggggtctccc

SEQ ID NO: 1621820 - DNA, 15 bp, Homo sapiens
ccccctggggtctcc

SEQ ID NO: 1621821 - DNA, 15 bp, Homo sapiens
accccctggggtctc

SEQ ID NO: 1621822 - DNA, 15 bp, Homo sapiens
gaccccctggggtct

SEQ ID NO: 1621823 - DNA, 15 bp, Homo sapiens
ggaccccctggggtc

SEQ ID NO: 1621824 - DNA, 15 bp, Homo sapiens
cggaccccctggggt

SEQ ID NO: 1621825 - DNA, 15 bp, Homo sapiens
gcggaccccctgggg

SEQ ID NO: 1621826 - DNA, 15 bp, Homo sapiens
cgcggaccccctggg

SEQ ID NO: 1621827 - DNA, 15 bp, Homo sapiens
gcgcggaccccctgg

SEQ ID NO: 1621828 - DNA, 15 bp, Homo sapiens
tgcgcggaccccctg

SEQ ID NO: 1621829 - DNA, 15 bp, Homo sapiens
gtgcgcggaccccct

SEQ ID NO: 1621830 - DNA, 15 bp, Homo sapiens
cgtgcgcggaccccc

SEQ ID NO: 1621831 - DNA, 15 bp, Homo sapiens
ccgtgcgcggacccc

SEQ ID NO: 1621832 - DNA, 15 bp, Homo sapiens
tccgtgcgcggaccc

SEQ ID NO: 1621833 - DNA, 15 bp, Homo sapiens
gtccgtgcgcggacc

SEQ ID NO: 1621834 - DNA, 15 bp, Homo sapiens
ggtccgtgcgcggac

SEQ ID NO: 1621835 - DNA, 15 bp, Homo sapiens
gggtccgtgcgcgga

SEQ ID NO: 1621836 - DNA, 15 bp, Homo sapiens
cgggtccgtgcgcgg

SEQ ID NO: 1621837 - DNA, 15 bp, Homo sapiens
ccgggtccgtgcgcg

SEQ ID NO: 1621838 - DNA, 15 bp, Homo sapiens
cccgggtccgtgcgc

SEQ ID NO: 1621839 - DNA, 15 bp, Homo sapiens
gcccgggtccgtgcg

SEQ ID NO: 1621840 - DNA, 15 bp, Homo sapiens
agcccgggtccgtgc

SEQ ID NO: 1621841 - DNA, 15 bp, Homo sapiens
cagcccgggtccgtg

SEQ ID NO: 1621842 - DNA, 15 bp, Homo sapiens
acagcccgggtccgt

SEQ ID NO: 1621843 - DNA, 15 bp, Homo sapiens
aacagcccgggtccg

SEQ ID NO: 1621844 - DNA, 15 bp, Homo sapiens
caacagcccgggtcc

SEQ ID NO: 1621845 - DNA, 15 bp, Homo sapiens
ccaacagcccgggtc

SEQ ID NO: 1621846 - DNA, 15 bp, Homo sapiens
cccaacagcccgggt

SEQ ID NO: 1621847 - DNA, 15 bp, Homo sapiens
gcccaacagcccggg

SEQ ID NO: 1621848 - DNA, 15 bp, Homo sapiens
cgcccaacagcccgg

SEQ ID NO: 1621849 - DNA, 15 bp, Homo sapiens
gcgcccaacagcccg

SEQ ID NO: 1621850 - DNA, 15 bp, Homo sapiens
agcgcccaacagccc

SEQ ID NO: 1621851 - DNA, 15 bp, Homo sapiens
cagcgcccaacagcc

SEQ ID NO: 1621852 - DNA, 15 bp, Homo sapiens
ccagcgcccaacagc

SEQ ID NO: 1621853 - DNA, 15 bp, Homo sapiens
cccagcgcccaacag

SEQ ID NO: 1621854 - DNA, 15 bp, Homo sapiens
gcccagcgcccaaca

SEQ ID NO: 1621855 - DNA, 15 bp, Homo sapiens
cgcccagcgcccaac

SEQ ID NO: 1621856 - DNA, 15 bp, Homo sapiens
gcgcccagcgcccaa

SEQ ID NO: 1621857 - DNA, 15 bp, Homo sapiens
ggcgcccagcgccca

SEQ ID NO: 1621858 - DNA, 15 bp, Homo sapiens
cggcgcccagcgccc

SEQ ID NO: 1621859 - DNA, 15 bp, Homo sapiens
ccggcgcccagcgcc

SEQ ID NO: 1621860 - DNA, 15 bp, Homo sapiens
cccggcgcccagcgc

SEQ ID NO: 1621861 - DNA, 15 bp, Homo sapiens
tcccggcgcccagcg

SEQ ID NO: 1621862 - DNA, 15 bp, Homo sapiens
ctcccggcgcccagc

SEQ ID NO: 1621863 - DNA, 15 bp, Homo sapiens
cctcccggcgcccag

SEQ ID NO: 1621864 - DNA, 15 bp, Homo sapiens
tcctcccggcgccca

SEQ ID NO: 1621865 - DNA, 15 bp, Homo sapiens
gtcctcccggcgccc

SEQ ID NO: 1621866 - DNA, 15 bp, Homo sapiens
ggtcctcccggcgcc

SEQ ID NO: 1621867 - DNA, 15 bp, Homo sapiens
gggtcctcccggcgc

SEQ ID NO: 1621868 - DNA, 15 bp, Homo sapiens
cgggtcctcccggcg

SEQ ID NO: 1621869 - DNA, 15 bp, Homo sapiens
gcgggtcctcccggc

SEQ ID NO: 1621870 - DNA, 15 bp, Homo sapiens
cgcgggtcctcccgg

SEQ ID NO: 1621871 - DNA, 15 bp, Homo sapiens
gcgcgggtcctcccg

SEQ ID NO: 1621872 - DNA, 15 bp, Homo sapiens
cgcgcgggtcctccc

SEQ ID NO: 1621873 - DNA, 15 bp, Homo sapiens
acgcgcgggtcctcc

SEQ ID NO: 1621874 - DNA, 15 bp, Homo sapiens
aacgcgcgggtcctc

SEQ ID NO: 1621875 - DNA, 15 bp, Homo sapiens
caacgcgcgggtcct

SEQ ID NO: 1621876 - DNA, 15 bp, Homo sapiens
gcaacgcgcgggtcc

SEQ ID NO: 1621877 - DNA, 15 bp, Homo sapiens
cgcaacgcgcgggtc

SEQ ID NO: 1621878 - DNA, 15 bp, Homo sapiens
ccgcaacgcgcgggt

SEQ ID NO: 1621879 - DNA, 15 bp, Homo sapiens
accgcaacgcgcggg

SEQ ID NO: 1621880 - DNA, 15 bp, Homo sapiens
caccgcaacgcgcgg

SEQ ID NO: 1621881 - DNA, 15 bp, Homo sapiens
ccaccgcaacgcgcg

SEQ ID NO: 1621882 - DNA, 15 bp, Homo sapiens
cccaccgcaacgcgc

SEQ ID NO: 1621883 - DNA, 15 bp, Homo sapiens
acccaccgcaacgcg

SEQ ID NO: 1621884 - DNA, 15 bp, Homo sapiens
cacccaccgcaacgc

SEQ ID NO: 1621885 - DNA, 15 bp, Homo sapiens
ccacccaccgcaacg

SEQ ID NO: 1621886 - DNA, 15 bp, Homo sapiens
cccacccaccgcaac

SEQ ID NO: 1621887 - DNA, 15 bp, Homo sapiens
gcccacccaccgcaa

SEQ ID NO: 1621888 - DNA, 15 bp, Homo sapiens
cgcccacccaccgca

SEQ ID NO: 1621889 - DNA, 15 bp, Homo sapiens
tcgcccacccaccgc

SEQ ID NO: 1621890 - DNA, 15 bp, Homo sapiens
gtcgcccacccaccg

SEQ ID NO: 1621891 - DNA, 15 bp, Homo sapiens
ggtcgcccacccacc

SEQ ID NO: 1621892 - DNA, 15 bp, Homo sapiens
cggtcgcccacccac

SEQ ID NO: 1621893 - DNA, 15 bp, Homo sapiens
gcggtcgcccaccca

SEQ ID NO: 1621894 - DNA, 15 bp, Homo sapiens
tgcggtcgcccaccc

SEQ ID NO: 1621895 - DNA, 15 bp, Homo sapiens
ctgcggtcgcccacc

SEQ ID NO: 1621896 - DNA, 15 bp, Homo sapiens
gctgcggtcgcccac

SEQ ID NO: 1621897 - DNA, 15 bp, Homo sapiens
cgctgcggtcgccca

SEQ ID NO: 1621898 - DNA, 15 bp, Homo sapiens
ccgctgcggtcgccc

SEQ ID NO: 1621899 - DNA, 15 bp, Homo sapiens
tccgctgcggtcgcc

SEQ ID NO: 1621900 - DNA, 15 bp, Homo sapiens
ttccgctgcggtcgc

SEQ ID NO: 1621901 - DNA, 15 bp, Homo sapiens
attccgctgcggtcg

SEQ ID NO: 1621902 - DNA, 15 bp, Homo sapiens
gattccgctgcggtc

SEQ ID NO: 1621903 - DNA, 15 bp, Homo sapiens
cgattccgctgcggt

SEQ ID NO: 1621904 - DNA, 15 bp, Homo sapiens
ccgattccgctgcgg

SEQ ID NO: 1621905 - DNA, 15 bp, Homo sapiens
gccgattccgctgcg

SEQ ID NO: 1621906 - DNA, 15 bp, Homo sapiens
cgccgattccgctgc

SEQ ID NO: 1621907 - DNA, 15 bp, Homo sapiens
gcgccgattccgctg

SEQ ID NO: 1621908 - DNA, 15 bp, Homo sapiens
ggcgccgattccgct

SEQ ID NO: 1621909 - DNA, 15 bp, Homo sapiens
gggcgccgattccgc

SEQ ID NO: 1621910 - DNA, 15 bp, Homo sapiens
cgggcgccgattccg

SEQ ID NO: 1621911 - DNA, 15 bp, Homo sapiens
ccgggcgccgattcc

SEQ ID NO: 1621912 - DNA, 15 bp, Homo sapiens
cccgggcgccgattc

SEQ ID NO: 1621913 - DNA, 15 bp, Homo sapiens
gcccgggcgccgatt

SEQ ID NO: 1621914 - DNA, 15 bp, Homo sapiens
ggcccgggcgccgat

SEQ ID NO: 1621915 - DNA, 15 bp, Homo sapiens
aggcccgggcgccga

SEQ ID NO: 1621916 - DNA, 15 bp, Homo sapiens
caggcccgggcgccg

SEQ ID NO: 1621917 - DNA, 15 bp, Homo sapiens
ccaggcccgggcgcc

SEQ ID NO: 1621918 - DNA, 15 bp, Homo sapiens
gccaggcccgggcgc

SEQ ID NO: 1621919 - DNA, 15 bp, Homo sapiens
cgccaggcccgggcg

SEQ ID NO: 1621920 - DNA, 15 bp, Homo sapiens
gcgccaggcccgggc

SEQ ID NO: 1621921 - DNA, 15 bp, Homo sapiens
ggcgccaggcccggg

SEQ ID NO: 1621922 - DNA, 15 bp, Homo sapiens
cggcgccaggcccgg

SEQ ID NO: 1621923 - DNA, 15 bp, Homo sapiens
gcggcgccaggcccg

SEQ ID NO: 1621924 - DNA, 15 bp, Homo sapiens
tgcggcgccaggccc

SEQ ID NO: 1621925 - DNA, 15 bp, Homo sapiens
ctgcggcgccaggcc

SEQ ID NO: 1621926 - DNA, 15 bp, Homo sapiens
tctgcggcgccaggc

SEQ ID NO: 1621927 - DNA, 15 bp, Homo sapiens
ctctgcggcgccagg

SEQ ID NO: 1621928 - DNA, 15 bp, Homo sapiens
gctctgcggcgccag

SEQ ID NO: 1621929 - DNA, 15 bp, Homo sapiens
tgctctgcggcgcca

SEQ ID NO: 1621930 - DNA, 15 bp, Homo sapiens
gtgctctgcggcgcc

SEQ ID NO: 1621931 - DNA, 15 bp, Homo sapiens
cgtgctctgcggcgc

SEQ ID NO: 1621932 - DNA, 15 bp, Homo sapiens
tcgtgctctgcggcg

SEQ ID NO: 1621933 - DNA, 15 bp, Homo sapiens
ctcgtgctctgcggc

SEQ ID NO: 1621934 - DNA, 15 bp, Homo sapiens
cctcgtgctctgcgg

SEQ ID NO: 1621935 - DNA, 15 bp, Homo sapiens
ccctcgtgctctgcg

SEQ ID NO: 1621936 - DNA, 15 bp, Homo sapiens
tccctcgtgctctgc

SEQ ID NO: 1621937 - DNA, 15 bp, Homo sapiens
ctccctcgtgctctg

SEQ ID NO: 1621938 - DNA, 15 bp, Homo sapiens
cctccctcgtgctct

SEQ ID NO: 1621939 - DNA, 15 bp, Homo sapiens
gcctccctcgtgctc

SEQ ID NO: 1621940 - DNA, 15 bp, Homo sapiens
ggcctccctcgtgct

SEQ ID NO: 1621941 - DNA, 15 bp, Homo sapiens
tggcctccctcgtgc

SEQ ID NO: 1621942 - DNA, 15 bp, Homo sapiens
ctggcctccctcgtg

SEQ ID NO: 1621943 - DNA, 15 bp, Homo sapiens
cctggcctccctcgt

SEQ ID NO: 1621944 - DNA, 15 bp, Homo sapiens
gcctggcctccctcg

SEQ ID NO: 1621945 - DNA, 15 bp, Homo sapiens
cgcctggcctccctc

SEQ ID NO: 1621946 - DNA, 15 bp, Homo sapiens
gcgcctggcctccct

SEQ ID NO: 1621947 - DNA, 15 bp, Homo sapiens
agcgcctggcctccc

SEQ ID NO: 1621948 - DNA, 15 bp, Homo sapiens
aagcgcctggcctcc

SEQ ID NO: 1621949 - DNA, 15 bp, Homo sapiens
gaagcgcctggcctc

SEQ ID NO: 1621950 - DNA, 15 bp, Homo sapiens
cgaagcgcctggcct

SEQ ID NO: 1621951 - DNA, 15 bp, Homo sapiens
ccgaagcgcctggcc

SEQ ID NO: 1621952 - DNA, 15 bp, Homo sapiens
cccgaagcgcctggc

SEQ ID NO: 1621953 - DNA, 15 bp, Homo sapiens
tcccgaagcgcctgg

SEQ ID NO: 1621954 - DNA, 15 bp, Homo sapiens
ctcccgaagcgcctg

SEQ ID NO: 1621955 - DNA, 15 bp, Homo sapiens
cctcccgaagcgcct

SEQ ID NO: 1621956 - DNA, 15 bp, Homo sapiens
ccctcccgaagcgcc

SEQ ID NO: 1621957 - DNA, 15 bp, Homo sapiens
cccctcccgaagcgc

SEQ ID NO: 1621958 - DNA, 15 bp, Homo sapiens
gcccctcccgaagcg

SEQ ID NO: 1621959 - DNA, 15 bp, Homo sapiens
agcccctcccgaagc

SEQ ID NO: 1621960 - DNA, 15 bp, Homo sapiens
cagcccctcccgaag

SEQ ID NO: 1621961 - DNA, 15 bp, Homo sapiens
gcagcccctcccgaa

SEQ ID NO: 1621962 - DNA, 15 bp, Homo sapiens
agcagcccctcccga

SEQ ID NO: 1621963 - DNA, 15 bp, Homo sapiens
cagcagcccctcccg

SEQ ID NO: 1621964 - DNA, 15 bp, Homo sapiens
gcagcagcccctccc

SEQ ID NO: 1621965 - DNA, 15 bp, Homo sapiens
ggcagcagcccctcc

SEQ ID NO: 1621966 - DNA, 15 bp, Homo sapiens
gggcagcagcccctc

SEQ ID NO: 1621967 - DNA, 15 bp, Homo sapiens
cgggcagcagcccct

SEQ ID NO: 1621968 - DNA, 15 bp, Homo sapiens
gcgggcagcagcccc

SEQ ID NO: 1621969 - DNA, 15 bp, Homo sapiens
ggcgggcagcagccc

SEQ ID NO: 1621970 - DNA, 15 bp, Homo sapiens
aggcgggcagcagcc

SEQ ID NO: 1621971 - DNA, 15 bp, Homo sapiens
gaggcgggcagcagc

SEQ ID NO: 1621972 - DNA, 15 bp, Homo sapiens
ggaggcgggcagcag

SEQ ID NO: 1621973 - DNA, 15 bp, Homo sapiens
gggaggcgggcagca

SEQ ID NO: 1621974 - DNA, 15 bp, Homo sapiens
ggggaggcgggcagc

SEQ ID NO: 1621975 - DNA, 15 bp, Homo sapiens
tggggaggcgggcag

SEQ ID NO: 1621976 - DNA, 15 bp, Homo sapiens
gtggggaggcgggca

SEQ ID NO: 1621977 - DNA, 15 bp, Homo sapiens
ggtggggaggcgggc

SEQ ID NO: 1621978 - DNA, 15 bp, Homo sapiens
tggtggggaggcggg

SEQ ID NO: 1621979 - DNA, 15 bp, Homo sapiens
gtggtggggaggcgg

SEQ ID NO: 1621980 - DNA, 15 bp, Homo sapiens
ggtggtggggaggcg

SEQ ID NO: 1621981 - DNA, 15 bp, Homo sapiens
gggtggtggggaggc

SEQ ID NO: 1621982 - DNA, 15 bp, Homo sapiens
agggtggtggggagg

SEQ ID NO: 1621983 - DNA, 15 bp, Homo sapiens
gagggtggtggggag

SEQ ID NO: 1621984 - DNA, 15 bp, Homo sapiens
tgagggtggtgggga

SEQ ID NO: 1621985 - DNA, 15 bp, Homo sapiens
gtgagggtggtgggg

SEQ ID NO: 1621986 - DNA, 15 bp, Homo sapiens
ggtgagggtggtggg

SEQ ID NO: 1621987 - DNA, 15 bp, Homo sapiens
cggtgagggtggtgg

SEQ ID NO: 1621988 - DNA, 15 bp, Homo sapiens
gcggtgagggtggtg

SEQ ID NO: 1621989 - DNA, 15 bp, Homo sapiens
ggcggtgagggtggt

SEQ ID NO: 1621990 - DNA, 15 bp, Homo sapiens
gggcggtgagggtgg

SEQ ID NO: 1621991 - DNA, 15 bp, Homo sapiens
ggggcggtgagggtg

SEQ ID NO: 1621992 - DNA, 15 bp, Homo sapiens
tggggcggtgagggt

SEQ ID NO: 1621993 - DNA, 15 bp, Homo sapiens
ctggggcggtgaggg

SEQ ID NO: 1621994 - DNA, 15 bp, Homo sapiens
tctggggcggtgagg

SEQ ID NO: 1621995 - DNA, 15 bp, Homo sapiens
gtctggggcggtgag

SEQ ID NO: 1621996 - DNA, 15 bp, Homo sapiens
agtctggggcggtga

SEQ ID NO: 1621997 - DNA, 15 bp, Homo sapiens
cagtctggggcggtg

SEQ ID NO: 1621998 - DNA, 15 bp, Homo sapiens
tcagtctggggcggt

SEQ ID NO: 1621999 - DNA, 15 bp, Homo sapiens
ctcagtctggggcgg

SEQ ID NO: 1622000 - DNA, 15 bp, Homo sapiens
cctcagtctggggcg

SEQ ID NO: 1622001 - DNA, 15 bp, Homo sapiens
gcctcagtctggggc

SEQ ID NO: 1622002 - DNA, 15 bp, Homo sapiens
agcctcagtctgggg

SEQ ID NO: 1622003 - DNA, 15 bp, Homo sapiens
tagcctcagtctggg

SEQ ID NO: 1622004 - DNA, 15 bp, Homo sapiens
ctagcctcagtctgg

SEQ ID NO: 1622005 - DNA, 15 bp, Homo sapiens
cctagcctcagtctg

SEQ ID NO: 1622006 - DNA, 15 bp, Homo sapiens
ccctagcctcagtct

SEQ ID NO: 1622007 - DNA, 15 bp, Homo sapiens
cccctagcctcagtc

SEQ ID NO: 1622008 - DNA, 15 bp, Homo sapiens
ccccctagcctcagt

SEQ ID NO: 1622009 - DNA, 15 bp, Homo sapiens
cccccctagcctcag

SEQ ID NO: 1622010 - DNA, 15 bp, Homo sapiens
tcccccctagcctca

SEQ ID NO: 1622011 - DNA, 15 bp, Homo sapiens
ttcccccctagcctc

SEQ ID NO: 1622012 - DNA, 15 bp, Homo sapiens
gttcccccctagcct

SEQ ID NO: 1622013 - DNA, 15 bp, Homo sapiens
ggttcccccctagcc

SEQ ID NO: 1622014 - DNA, 15 bp, Homo sapiens
gggttcccccctagc

SEQ ID NO: 1622015 - DNA, 15 bp, Homo sapiens
tgggttcccccctag

SEQ ID NO: 1622016 - DNA, 15 bp, Homo sapiens
ctgggttccccccta

SEQ ID NO: 1622017 - DNA, 15 bp, Homo sapiens
cctgggttcccccct

SEQ ID NO: 1622018 - DNA, 15 bp, Homo sapiens
ccctgggttcccccc

SEQ ID NO: 1622019 - DNA, 15 bp, Homo sapiens
cccctgggttccccc

SEQ ID NO: 1622020 - DNA, 15 bp, Homo sapiens
gcccctgggttcccc

SEQ ID NO: 1622021 - DNA, 15 bp, Homo sapiens
agcccctgggttccc

SEQ ID NO: 1622022 - DNA, 15 bp, Homo sapiens
aagcccctgggttcc

SEQ ID NO: 1622023 - DNA, 15 bp, Homo sapiens
aaagcccctgggttc

SEQ ID NO: 1622024 - DNA, 15 bp, Homo sapiens
caaagcccctgggtt

SEQ ID NO: 1622025 - DNA, 15 bp, Homo sapiens
gcaaagcccctgggt

SEQ ID NO: 1622026 - DNA, 15 bp, Homo sapiens
agcaaagcccctggg

SEQ ID NO: 1622027 - DNA, 15 bp, Homo sapiens
cagcaaagcccctgg

SEQ ID NO: 1622028 - DNA, 15 bp, Homo sapiens
ccagcaaagcccctg

SEQ ID NO: 1622029 - DNA, 15 bp, Homo sapiens
tccagcaaagcccct

SEQ ID NO: 1622030 - DNA, 15 bp, Homo sapiens
ctccagcaaagcccc

SEQ ID NO: 1622031 - DNA, 15 bp, Homo sapiens
cctccagcaaagccc

SEQ ID NO: 1622032 - DNA, 15 bp, Homo sapiens
gcctccagcaaagcc

SEQ ID NO: 1622033 - DNA, 15 bp, Homo sapiens
cgcctccagcaaagc

SEQ ID NO: 1622034 - DNA, 15 bp, Homo sapiens
gcgcctccagcaaag

SEQ ID NO: 1622035 - DNA, 15 bp, Homo sapiens
tgcgcctccagcaaa

SEQ ID NO: 1622036 - DNA, 15 bp, Homo sapiens
ctgcgcctccagcaa

SEQ ID NO: 1622037 - DNA, 15 bp, Homo sapiens
cctgcgcctccagca

SEQ ID NO: 1622038 - DNA, 15 bp, Homo sapiens
gcctgcgcctccagc

SEQ ID NO: 1622039 - DNA, 15 bp, Homo sapiens
ggcctgcgcctccag

SEQ ID NO: 1622040 - DNA, 15 bp, Homo sapiens
tggcctgcgcctcca

SEQ ID NO: 1622041 - DNA, 15 bp, Homo sapiens
ctggcctgcgcctcc

SEQ ID NO: 1622042 - DNA, 15 bp, Homo sapiens
cctggcctgcgcctc

SEQ ID NO: 1622043 - DNA, 15 bp, Homo sapiens
ccctggcctgcgcct

SEQ ID NO: 1622044 - DNA, 15 bp, Homo sapiens
accctggcctgcgcc

SEQ ID NO: 1622045 - DNA, 15 bp, Homo sapiens
aaccctggcctgcgc

SEQ ID NO: 1622046 - DNA, 15 bp, Homo sapiens
caaccctggcctgcg

SEQ ID NO: 1622047 - DNA, 15 bp, Homo sapiens
ccaaccctggcctgc

SEQ ID NO: 1622048 - DNA, 15 bp, Homo sapiens
cccaaccctggcctg

SEQ ID NO: 1622049 - DNA, 15 bp, Homo sapiens
ccccaaccctggcct

SEQ ID NO: 1622050 - DNA, 15 bp, Homo sapiens
tccccaaccctggcc

SEQ ID NO: 1622051 - DNA, 15 bp, Homo sapiens
ctccccaaccctggc

SEQ ID NO: 1622052 - DNA, 15 bp, Homo sapiens
cctccccaaccctgg

SEQ ID NO: 1622053 - DNA, 15 bp, Homo sapiens
gcctccccaaccctg

SEQ ID NO: 1622054 - DNA, 15 bp, Homo sapiens
ggcctccccaaccct

SEQ ID NO: 1622055 - DNA, 15 bp, Homo sapiens
aggcctccccaaccc

SEQ ID NO: 1622056 - DNA, 15 bp, Homo sapiens
caggcctccccaacc

SEQ ID NO: 1622057 - DNA, 15 bp, Homo sapiens
ccaggcctccccaac

SEQ ID NO: 1622058 - DNA, 15 bp, Homo sapiens
tccaggcctccccaa

SEQ ID NO: 1622059 - DNA, 15 bp, Homo sapiens
gtccaggcctcccca

SEQ ID NO: 1622060 - DNA, 15 bp, Homo sapiens
cgtccaggcctcccc

SEQ ID NO: 1622061 - DNA, 15 bp, Homo sapiens
ccgtccaggcctccc

SEQ ID NO: 1622062 - DNA, 15 bp, Homo sapiens
cccgtccaggcctcc

SEQ ID NO: 1622063 - DNA, 15 bp, Homo sapiens
tcccgtccaggcctc

SEQ ID NO: 1622064 - DNA, 15 bp, Homo sapiens
ctcccgtccaggcct

SEQ ID NO: 1622065 - DNA, 15 bp, Homo sapiens
tctcccgtccaggcc

SEQ ID NO: 1622066 - DNA, 15 bp, Homo sapiens
gtctcccgtccaggc

SEQ ID NO: 1622067 - DNA, 15 bp, Homo sapiens
ggtctcccgtccagg

SEQ ID NO: 1622068 - DNA, 15 bp, Homo sapiens
tggtctcccgtccag

SEQ ID NO: 1622069 - DNA, 15 bp, Homo sapiens
gtggtctcccgtcca

SEQ ID NO: 1622070 - DNA, 15 bp, Homo sapiens
ggtggtctcccgtcc

SEQ ID NO: 1622071 - DNA, 15 bp, Homo sapiens
gggtggtctcccgtc

SEQ ID NO: 1622072 - DNA, 15 bp, Homo sapiens
cgggtggtctcccgt

SEQ ID NO: 1622073 - DNA, 15 bp, Homo sapiens
ccgggtggtctcccg

SEQ ID NO: 1622074 - DNA, 15 bp, Homo sapiens
cccgggtggtctccc

SEQ ID NO: 1622075 - DNA, 15 bp, Homo sapiens
gcccgggtggtctcc

SEQ ID NO: 1622076 - DNA, 15 bp, Homo sapiens
cgcccgggtggtctc

SEQ ID NO: 1622077 - DNA, 15 bp, Homo sapiens
gcgcccgggtggtct

SEQ ID NO: 1622078 - DNA, 15 bp, Homo sapiens
ggcgcccgggtggtc

SEQ ID NO: 1622079 - DNA, 15 bp, Homo sapiens
aggcgcccgggtggt

SEQ ID NO: 1622080 - DNA, 15 bp, Homo sapiens
caggcgcccgggtgg

SEQ ID NO: 1622081 - DNA, 15 bp, Homo sapiens
tcaggcgcccgggtg

SEQ ID NO: 1622082 - DNA, 15 bp, Homo sapiens
gtcaggcgcccgggt

SEQ ID NO: 1622083 - DNA, 15 bp, Homo sapiens
ggtcaggcgcccggg

SEQ ID NO: 1622084 - DNA, 15 bp, Homo sapiens
gggtcaggcgcccgg

SEQ ID NO: 1622085 - DNA, 15 bp, Homo sapiens
cgggtcaggcgcccg

SEQ ID NO: 1622086 - DNA, 15 bp, Homo sapiens
gcgggtcaggcgccc

SEQ ID NO: 1622087 - DNA, 15 bp, Homo sapiens
ggcgggtcaggcgcc

SEQ ID NO: 1622088 - DNA, 15 bp, Homo sapiens
gggcgggtcaggcgc

SEQ ID NO: 1622089 - DNA, 15 bp, Homo sapiens
agggcgggtcaggcg

SEQ ID NO: 1622090 - DNA, 15 bp, Homo sapiens
tagggcgggtcaggc

SEQ ID NO: 1622091 - DNA, 15 bp, Homo sapiens
ttagggcgggtcagg

SEQ ID NO: 1622092 - DNA, 15 bp, Homo sapiens
tttagggcgggtcag

SEQ ID NO: 1622093 - DNA, 15 bp, Homo sapiens
ctttagggcgggtca

SEQ ID NO: 1622094 - DNA, 15 bp, Homo sapiens
cctttagggcgggtc

SEQ ID NO: 1622095 - DNA, 15 bp, Homo sapiens
ccctttagggcgggt

SEQ ID NO: 1622096 - DNA, 15 bp, Homo sapiens
accctttagggcggg

SEQ ID NO: 1622097 - DNA, 15 bp, Homo sapiens
gaccctttagggcgg

SEQ ID NO: 1622098 - DNA, 15 bp, Homo sapiens
agaccctttagggcg

SEQ ID NO: 1622099 - DNA, 15 bp, Homo sapiens
cagaccctttagggc

SEQ ID NO: 1622100 - DNA, 15 bp, Homo sapiens
ccagaccctttaggg

SEQ ID NO: 1622101 - DNA, 15 bp, Homo sapiens
cccagaccctttagg

SEQ ID NO: 1622102 - DNA, 15 bp, Homo sapiens
gcccagaccctttag

SEQ ID NO: 1622103 - DNA, 15 bp, Homo sapiens
cgcccagacccttta

SEQ ID NO: 1622104 - DNA, 15 bp, Homo sapiens
gcgcccagacccttt

SEQ ID NO: 1622105 - DNA, 15 bp, Homo sapiens
ggcgcccagaccctt

SEQ ID NO: 1622106 - DNA, 15 bp, Homo sapiens
gggcgcccagaccct

SEQ ID NO: 1622107 - DNA, 15 bp, Homo sapiens
tgggcgcccagaccc

SEQ ID NO: 1622108 - DNA, 15 bp, Homo sapiens
gtgggcgcccagacc

SEQ ID NO: 1622109 - DNA, 15 bp, Homo sapiens
cgtgggcgcccagac

SEQ ID NO: 1622110 - DNA, 15 bp, Homo sapiens
tcgtgggcgcccaga

SEQ ID NO: 1622111 - DNA, 15 bp, Homo sapiens
gtcgtgggcgcccag

SEQ ID NO: 1622112 - DNA, 15 bp, Homo sapiens
cgtcgtgggcgccca

SEQ ID NO: 1622113 - DNA, 15 bp, Homo sapiens
ccgtcgtgggcgccc

SEQ ID NO: 1622114 - DNA, 15 bp, Homo sapiens
tccgtcgtgggcgcc

SEQ ID NO: 1622115 - DNA, 15 bp, Homo sapiens
atccgtcgtgggcgc

SEQ ID NO: 1622116 - DNA, 15 bp, Homo sapiens
gatccgtcgtgggcg

SEQ ID NO: 1622117 - DNA, 15 bp, Homo sapiens
tgatccgtcgtgggc

SEQ ID NO: 1622118 - DNA, 15 bp, Homo sapiens
ctgatccgtcgtggg

SEQ ID NO: 1622119 - DNA, 15 bp, Homo sapiens
cctgatccgtcgtgg

SEQ ID NO: 1622120 - DNA, 15 bp, Homo sapiens
tcctgatccgtcgtg

SEQ ID NO: 1622121 - DNA, 15 bp, Homo sapiens
ctcctgatccgtcgt

SEQ ID NO: 1622122 - DNA, 15 bp, Homo sapiens
actcctgatccgtcg

SEQ ID NO: 1622123 - DNA, 15 bp, Homo sapiens
cactcctgatccgtc

SEQ ID NO: 1622124 - DNA, 15 bp, Homo sapiens
acactcctgatccgt

SEQ ID NO: 1622125 - DNA, 15 bp, Homo sapiens
cacactcctgatccg

SEQ ID NO: 1622126 - DNA, 15 bp, Homo sapiens
ccacactcctgatcc

SEQ ID NO: 1622127 - DNA, 15 bp, Homo sapiens
tccacactcctgatc

SEQ ID NO: 1622128 - DNA, 15 bp, Homo sapiens
gtccacactcctgat

SEQ ID NO: 1622129 - DNA, 15 bp, Homo sapiens
tgtccacactcctga

SEQ ID NO: 1622130 - DNA, 15 bp, Homo sapiens
ctgtccacactcctg

SEQ ID NO: 1622131 - DNA, 15 bp, Homo sapiens
cctgtccacactcct

SEQ ID NO: 1622132 - DNA, 15 bp, Homo sapiens
acctgtccacactcc

SEQ ID NO: 1622133 - DNA, 15 bp, Homo sapiens
aacctgtccacactc

SEQ ID NO: 1622134 - DNA, 15 bp, Homo sapiens
caacctgtccacact

SEQ ID NO: 1622135 - DNA, 15 bp, Homo sapiens
gcaacctgtccacac

SEQ ID NO: 1622136 - DNA, 15 bp, Homo sapiens
agcaacctgtccaca

SEQ ID NO: 1622137 - DNA, 15 bp, Homo sapiens
aagcaacctgtccac

SEQ ID NO: 1622138 - DNA, 15 bp, Homo sapiens
gaagcaacctgtcca

SEQ ID NO: 1622139 - DNA, 15 bp, Homo sapiens
ggaagcaacctgtcc

SEQ ID NO: 1622140 - DNA, 15 bp, Homo sapiens
cggaagcaacctgtc

SEQ ID NO: 1622141 - DNA, 15 bp, Homo sapiens
acggaagcaacctgt

SEQ ID NO: 1622142 - DNA, 15 bp, Homo sapiens
cacggaagcaacctg

SEQ ID NO: 1622143 - DNA, 15 bp, Homo sapiens
ccacggaagcaacct

SEQ ID NO: 1622144 - DNA, 15 bp, Homo sapiens
accacggaagcaacc

SEQ ID NO: 1622145 - DNA, 15 bp, Homo sapiens
caccacggaagcaac

SEQ ID NO: 1622146 - DNA, 15 bp, Homo sapiens
gcaccacggaagcaa

SEQ ID NO: 1622147 - DNA, 15 bp, Homo sapiens
ggcaccacggaagca

SEQ ID NO: 1622148 - DNA, 15 bp, Homo sapiens
cggcaccacggaagc

SEQ ID NO: 1622149 - DNA, 15 bp, Homo sapiens
gcggcaccacggaag

SEQ ID NO: 1622150 - DNA, 15 bp, Homo sapiens
ggcggcaccacggaa

SEQ ID NO: 1622151 - DNA, 15 bp, Homo sapiens
gggcggcaccacgga

SEQ ID NO: 1622152 - DNA, 15 bp, Homo sapiens
cgggcggcaccacgg

SEQ ID NO: 1622153 - DNA, 15 bp, Homo sapiens
tcgggcggcaccacg

SEQ ID NO: 1622154 - DNA, 15 bp, Homo sapiens
ttcgggcggcaccac

SEQ ID NO: 1622155 - DNA, 15 bp, Homo sapiens
cttcgggcggcacca

SEQ ID NO: 1622156 - DNA, 15 bp, Homo sapiens
ccttcgggcggcacc

SEQ ID NO: 1622157 - DNA, 15 bp, Homo sapiens
tccttcgggcggcac

SEQ ID NO: 1622158 - DNA, 15 bp, Homo sapiens
ctccttcgggcggca

SEQ ID NO: 1622159 - DNA, 15 bp, Homo sapiens
gctccttcgggcggc

SEQ ID NO: 1622160 - DNA, 15 bp, Homo sapiens
ggctccttcgggcgg

SEQ ID NO: 1622161 - DNA, 15 bp, Homo sapiens
gggctccttcgggcg

SEQ ID NO: 1622162 - DNA, 15 bp, Homo sapiens
tgggctccttcgggc

SEQ ID NO: 1622163 - DNA, 15 bp, Homo sapiens
ttgggctccttcggg

SEQ ID NO: 1622164 - DNA, 15 bp, Homo sapiens
cttgggctccttcgg

SEQ ID NO: 1622165 - DNA, 15 bp, Homo sapiens
tcttgggctccttcg

SEQ ID NO: 1622166 - DNA, 15 bp, Homo sapiens
ctcttgggctccttc

SEQ ID NO: 1622167 - DNA, 15 bp, Homo sapiens
actcttgggctcctt

SEQ ID NO: 1622168 - DNA, 15 bp, Homo sapiens
cactcttgggctcct

SEQ ID NO: 1622169 - DNA, 15 bp, Homo sapiens
acactcttgggctcc

SEQ ID NO: 1622170 - DNA, 15 bp, Homo sapiens
cacactcttgggctc

SEQ ID NO: 1622171 - DNA, 15 bp, Homo sapiens
acacactcttgggct

SEQ ID NO: 1622172 - DNA, 15 bp, Homo sapiens
cacacactcttgggc

SEQ ID NO: 1622173 - DNA, 15 bp, Homo sapiens
tcacacactcttggg

SEQ ID NO: 1622174 - DNA, 15 bp, Homo sapiens
ttcacacactcttgg

SEQ ID NO: 1622175 - DNA, 15 bp, Homo sapiens
gttcacacactcttg

SEQ ID NO: 1622176 - DNA, 15 bp, Homo sapiens
cgttcacacactctt

SEQ ID NO: 1622177 - DNA, 15 bp, Homo sapiens
acgttcacacactct

SEQ ID NO: 1622178 - DNA, 15 bp, Homo sapiens
gacgttcacacactc

SEQ ID NO: 1622179 - DNA, 15 bp, Homo sapiens
agacgttcacacact

SEQ ID NO: 1622180 - DNA, 15 bp, Homo sapiens
cagacgttcacacac

SEQ ID NO: 1622181 - DNA, 15 bp, Homo sapiens
gcagacgttcacaca

SEQ ID NO: 1622182 - DNA, 15 bp, Homo sapiens
agcagacgttcacac

SEQ ID NO: 1622183 - DNA, 15 bp, Homo sapiens
aagcagacgttcaca

SEQ ID NO: 1622184 - DNA, 15 bp, Homo sapiens
aaagcagacgttcac

SEQ ID NO: 1622185 - DNA, 15 bp, Homo sapiens
gaaagcagacgttca

SEQ ID NO: 1622186 - DNA, 15 bp, Homo sapiens
tgaaagcagacgttc

SEQ ID NO: 1622187 - DNA, 15 bp, Homo sapiens
gtgaaagcagacgtt

SEQ ID NO: 1622188 - DNA, 15 bp, Homo sapiens
tgtgaaagcagacgt

SEQ ID NO: 1622189 - DNA, 15 bp, Homo sapiens
ctgtgaaagcagacg

SEQ ID NO: 1622190 - DNA, 15 bp, Homo sapiens
gctgtgaaagcagac

SEQ ID NO: 1622191 - DNA, 15 bp, Homo sapiens
tgctgtgaaagcaga

SEQ ID NO: 1622192 - DNA, 15 bp, Homo sapiens
ctgctgtgaaagcag

SEQ ID NO: 1622193 - DNA, 15 bp, Homo sapiens
gctgctgtgaaagca

SEQ ID NO: 1622194 - DNA, 15 bp, Homo sapiens
ggctgctgtgaaagc

SEQ ID NO: 1622195 - DNA, 15 bp, Homo sapiens
cggctgctgtgaaag

SEQ ID NO: 1622196 - DNA, 15 bp, Homo sapiens
ccggctgctgtgaaa

SEQ ID NO: 1622197 - DNA, 15 bp, Homo sapiens
accggctgctgtgaa

SEQ ID NO: 1622198 - DNA, 15 bp, Homo sapiens
taccggctgctgtga

SEQ ID NO: 1622199 - DNA, 15 bp, Homo sapiens
ctaccggctgctgtg

SEQ ID NO: 1622200 - DNA, 15 bp, Homo sapiens
gctaccggctgctgt

SEQ ID NO: 1622201 - DNA, 15 bp, Homo sapiens
tgctaccggctgctg

SEQ ID NO: 1622202 - DNA, 15 bp, Homo sapiens
ctgctaccggctgct

SEQ ID NO: 1622203 - DNA, 15 bp, Homo sapiens
cctgctaccggctgc

SEQ ID NO: 1622204 - DNA, 15 bp, Homo sapiens
ccctgctaccggctg

SEQ ID NO: 1622205 - DNA, 15 bp, Homo sapiens
accctgctaccggct

SEQ ID NO: 1622206 - DNA, 15 bp, Homo sapiens
gaccctgctaccggc

SEQ ID NO: 1622207 - DNA, 15 bp, Homo sapiens
ggaccctgctaccgg

SEQ ID NO: 1622208 - DNA, 15 bp, Homo sapiens
cggaccctgctaccg

SEQ ID NO: 1622209 - DNA, 15 bp, Homo sapiens
ccggaccctgctacc

SEQ ID NO: 1622210 - DNA, 15 bp, Homo sapiens
accggaccctgctac

SEQ ID NO: 1622211 - DNA, 15 bp, Homo sapiens
taccggaccctgcta

SEQ ID NO: 1622212 - DNA, 15 bp, Homo sapiens
ttaccggaccctgct

SEQ ID NO: 1622213 - DNA, 15 bp, Homo sapiens
tttaccggaccctgc

SEQ ID NO: 1622214 - DNA, 15 bp, Homo sapiens
ttttaccggaccctg

SEQ ID NO: 1622215 - DNA, 15 bp, Homo sapiens
attttaccggaccct

SEQ ID NO: 1622216 - DNA, 15 bp, Homo sapiens
aattttaccggaccc

SEQ ID NO: 1622217 - DNA, 15 bp, Homo sapiens
taattttaccggacc

SEQ ID NO: 1622218 - DNA, 15 bp, Homo sapiens
ctaattttaccggac

SEQ ID NO: 1622219 - DNA, 15 bp, Homo sapiens
tctaattttaccgga

SEQ ID NO: 1622220 - DNA, 15 bp, Homo sapiens
ctctaattttaccgg

SEQ ID NO: 1622221 - DNA, 15 bp, Homo sapiens
gctctaattttaccg

SEQ ID NO: 1622222 - DNA, 15 bp, Homo sapiens
agctctaattttacc

SEQ ID NO: 1622223 - DNA, 15 bp, Homo sapiens
cagctctaattttac

SEQ ID NO: 1622224 - DNA, 15 bp, Homo sapiens
gcagctctaatttta

SEQ ID NO: 1622225 - DNA, 15 bp, Homo sapiens
tgcagctctaatttt

SEQ ID NO: 1622226 - DNA, 15 bp, Homo sapiens
gtgcagctctaattt

SEQ ID NO: 1622227 - DNA, 15 bp, Homo sapiens
agtgcagctctaatt

SEQ ID NO: 1622228 - DNA, 15 bp, Homo sapiens
aagtgcagctctaat

SEQ ID NO: 1622229 - DNA, 15 bp, Homo sapiens
aaagtgcagctctaa

SEQ ID NO: 1622230 - DNA, 15 bp, Homo sapiens
caaagtgcagctcta

SEQ ID NO: 1622231 - DNA, 15 bp, Homo sapiens
gcaaagtgcagctct

SEQ ID NO: 1622232 - DNA, 15 bp, Homo sapiens
agcaaagtgcagctc

SEQ ID NO: 1622233 - DNA, 15 bp, Homo sapiens
aagcaaagtgcagct

SEQ ID NO: 1622234 - DNA, 15 bp, Homo sapiens
caagcaaagtgcagc

SEQ ID NO: 1622235 - DNA, 15 bp, Homo sapiens
acaagcaaagtgcag

SEQ ID NO: 1622236 - DNA, 15 bp, Homo sapiens
tacaagcaaagtgca

SEQ ID NO: 1622237 - DNA, 15 bp, Homo sapiens
atacaagcaaagtgc

SEQ ID NO: 1622238 - DNA, 15 bp, Homo sapiens
gatacaagcaaagtg

SEQ ID NO: 1622239 - DNA, 15 bp, Homo sapiens
ggatacaagcaaagt

SEQ ID NO: 1622240 - DNA, 15 bp, Homo sapiens
aggatacaagcaaag

SEQ ID NO: 1622241 - DNA, 15 bp, Homo sapiens
caggatacaagcaaa

SEQ ID NO: 1622242 - DNA, 15 bp, Homo sapiens
acaggatacaagcaa

SEQ ID NO: 1622243 - DNA, 15 bp, Homo sapiens
cacaggatacaagca

SEQ ID NO: 1622244 - DNA, 15 bp, Homo sapiens
tcacaggatacaagc

SEQ ID NO: 1622245 - DNA, 15 bp, Homo sapiens
ctcacaggatacaag

SEQ ID NO: 1622246 - DNA, 15 bp, Homo sapiens
gctcacaggatacaa

SEQ ID NO: 1622247 - DNA, 15 bp, Homo sapiens
ggctcacaggataca

SEQ ID NO: 1622248 - DNA, 15 bp, Homo sapiens
gggctcacaggatac

SEQ ID NO: 1622249 - DNA, 15 bp, Homo sapiens
tgggctcacaggata

SEQ ID NO: 1622250 - DNA, 15 bp, Homo sapiens
ctgggctcacaggat

SEQ ID NO: 1622251 - DNA, 15 bp, Homo sapiens
cctgggctcacagga

SEQ ID NO: 1622252 - DNA, 15 bp, Homo sapiens
tcctgggctcacagg

SEQ ID NO: 1622253 - DNA, 15 bp, Homo sapiens
ctcctgggctcacag

SEQ ID NO: 1622254 - DNA, 15 bp, Homo sapiens
cctcctgggctcaca

SEQ ID NO: 1622255 - DNA, 15 bp, Homo sapiens
tcctcctgggctcac

SEQ ID NO: 1622256 - DNA, 15 bp, Homo sapiens
gtcctcctgggctca

SEQ ID NO: 1622257 - DNA, 15 bp, Homo sapiens
tgtcctcctgggctc

SEQ ID NO: 1622258 - DNA, 15 bp, Homo sapiens
ctgtcctcctgggct

SEQ ID NO: 1622259 - DNA, 15 bp, Homo sapiens
cctgtcctcctgggc

SEQ ID NO: 1622260 - DNA, 15 bp, Homo sapiens
tcctgtcctcctggg

SEQ ID NO: 1622261 - DNA, 15 bp, Homo sapiens
ttcctgtcctcctgg

SEQ ID NO: 1622262 - DNA, 15 bp, Homo sapiens
gttcctgtcctcctg

SEQ ID NO: 1622263 - DNA, 15 bp, Homo sapiens
ggttcctgtcctcct

SEQ ID NO: 1622264 - DNA, 15 bp, Homo sapiens
aggttcctgtcctcc

SEQ ID NO: 1622265 - DNA, 15 bp, Homo sapiens
aaggttcctgtcctc

SEQ ID NO: 1622266 - DNA, 15 bp, Homo sapiens
gaaggttcctgtcct

SEQ ID NO: 1622267 - DNA, 15 bp, Homo sapiens
agaaggttcctgtcc

SEQ ID NO: 1622268 - DNA, 15 bp, Homo sapiens
cagaaggttcctgtc

SEQ ID NO: 1622269 - DNA, 15 bp, Homo sapiens
acagaaggttcctgt

SEQ ID NO: 1622270 - DNA, 15 bp, Homo sapiens
cacagaaggttcctg

SEQ ID NO: 1622271 - DNA, 15 bp, Homo sapiens
tcacagaaggttcct

SEQ ID NO: 1622272 - DNA, 15 bp, Homo sapiens
ctcacagaaggttcc

SEQ ID NO: 1622273 - DNA, 15 bp, Homo sapiens
tctcacagaaggttc

SEQ ID NO: 1622274 - DNA, 15 bp, Homo sapiens
gtctcacagaaggtt

SEQ ID NO: 1622275 - DNA, 15 bp, Homo sapiens
ggtctcacagaaggt

SEQ ID NO: 1622276 - DNA, 15 bp, Homo sapiens
gggtctcacagaagg

SEQ ID NO: 1622277 - DNA, 15 bp, Homo sapiens
tgggtctcacagaag

SEQ ID NO: 1622278 - DNA, 15 bp, Homo sapiens
gtgggtctcacagaa

SEQ ID NO: 1622279 - DNA, 15 bp, Homo sapiens
cgtgggtctcacaga

SEQ ID NO: 1622280 - DNA, 15 bp, Homo sapiens
acgtgggtctcacag

SEQ ID NO: 1622281 - DNA, 15 bp, Homo sapiens
cacgtgggtctcaca

SEQ ID NO: 1622282 - DNA, 15 bp, Homo sapiens
ccacgtgggtctcac

SEQ ID NO: 1622283 - DNA, 15 bp, Homo sapiens
cccacgtgggtctca

SEQ ID NO: 1622284 - DNA, 15 bp, Homo sapiens
acccacgtgggtctc

SEQ ID NO: 1622285 - DNA, 15 bp, Homo sapiens
cacccacgtgggtct

SEQ ID NO: 1622286 - DNA, 15 bp, Homo sapiens
gcacccacgtgggtc

SEQ ID NO: 1622287 - DNA, 15 bp, Homo sapiens
ggcacccacgtgggt

SEQ ID NO: 1622288 - DNA, 15 bp, Homo sapiens
gggcacccacgtggg

SEQ ID NO: 1622289 - DNA, 15 bp, Homo sapiens
tgggcacccacgtgg

SEQ ID NO: 1622290 - DNA, 15 bp, Homo sapiens
ctgggcacccacgtg

SEQ ID NO: 1622291 - DNA, 15 bp, Homo sapiens
gctgggcacccacgt

SEQ ID NO: 1622292 - DNA, 15 bp, Homo sapiens
agctgggcacccacg

SEQ ID NO: 1622293 - DNA, 15 bp, Homo sapiens
gagctgggcacccac

SEQ ID NO: 1622294 - DNA, 15 bp, Homo sapiens
tgagctgggcaccca

SEQ ID NO: 1622295 - DNA, 15 bp, Homo sapiens
gtgagctgggcaccc

SEQ ID NO: 1622296 - DNA, 15 bp, Homo sapiens
tgtgagctgggcacc

SEQ ID NO: 1622297 - DNA, 15 bp, Homo sapiens
atgtgagctgggcac

SEQ ID NO: 1622298 - DNA, 15 bp, Homo sapiens
catgtgagctgggca

SEQ ID NO: 1622299 - DNA, 15 bp, Homo sapiens
ccatgtgagctgggc

SEQ ID NO: 1622300 - DNA, 15 bp, Homo sapiens
accatgtgagctggg

SEQ ID NO: 1622301 - DNA, 15 bp, Homo sapiens
taccatgtgagctgg

SEQ ID NO: 1622302 - DNA, 15 bp, Homo sapiens
ctaccatgtgagctg

SEQ ID NO: 1622303 - DNA, 15 bp, Homo sapiens
cctaccatgtgagct

SEQ ID NO: 1622304 - DNA, 15 bp, Homo sapiens
acctaccatgtgagc

SEQ ID NO: 1622305 - DNA, 15 bp, Homo sapiens
cacctaccatgtgag

SEQ ID NO: 1622306 - DNA, 15 bp, Homo sapiens
gcacctaccatgtga

SEQ ID NO: 1622307 - DNA, 15 bp, Homo sapiens
agcacctaccatgtg

SEQ ID NO: 1622308 - DNA, 15 bp, Homo sapiens
gagcacctaccatgt

SEQ ID NO: 1622309 - DNA, 15 bp, Homo sapiens
tgagcacctaccatg

SEQ ID NO: 1622310 - DNA, 15 bp, Homo sapiens
ctgagcacctaccat

SEQ ID NO: 1622311 - DNA, 15 bp, Homo sapiens
gctgagcacctacca

SEQ ID NO: 1622312 - DNA, 15 bp, Homo sapiens
agctgagcacctacc

SEQ ID NO: 1622313 - DNA, 15 bp, Homo sapiens
cagctgagcacctac

SEQ ID NO: 1622314 - DNA, 15 bp, Homo sapiens
tcagctgagcaccta

SEQ ID NO: 1622315 - DNA, 15 bp, Homo sapiens
ctcagctgagcacct

SEQ ID NO: 1622316 - DNA, 15 bp, Homo sapiens
gctcagctgagcacc

SEQ ID NO: 1622317 - DNA, 15 bp, Homo sapiens
tgctcagctgagcac

SEQ ID NO: 1622318 - DNA, 15 bp, Homo sapiens
atgctcagctgagca

SEQ ID NO: 1622319 - DNA, 15 bp, Homo sapiens
gatgctcagctgagc

SEQ ID NO: 1622320 - DNA, 15 bp, Homo sapiens
ggatgctcagctgag

SEQ ID NO: 1622321 - DNA, 15 bp, Homo sapiens
aggatgctcagctga

SEQ ID NO: 1622322 - DNA, 15 bp, Homo sapiens
gaggatgctcagctg

SEQ ID NO: 1622323 - DNA, 15 bp, Homo sapiens
ggaggatgctcagct

SEQ ID NO: 1622324 - DNA, 15 bp, Homo sapiens
tggaggatgctcagc

SEQ ID NO: 1622325 - DNA, 15 bp, Homo sapiens
gtggaggatgctcag

SEQ ID NO: 1622326 - DNA, 15 bp, Homo sapiens
agtggaggatgctca

SEQ ID NO: 1622327 - DNA, 15 bp, Homo sapiens
cagtggaggatgctc

SEQ ID NO: 1622328 - DNA, 15 bp, Homo sapiens
gcagtggaggatgct

SEQ ID NO: 1622329 - DNA, 15 bp, Homo sapiens
ggcagtggaggatgc

SEQ ID NO: 1622330 - DNA, 15 bp, Homo sapiens
gggcagtggaggatg

SEQ ID NO: 1622331 - DNA, 15 bp, Homo sapiens
tgggcagtggaggat

SEQ ID NO: 1622332 - DNA, 15 bp, Homo sapiens
ctgggcagtggagga

SEQ ID NO: 1622333 - DNA, 15 bp, Homo sapiens
tctgggcagtggagg

SEQ ID NO: 1622334 - DNA, 15 bp, Homo sapiens
ttctgggcagtggag

SEQ ID NO: 1622335 - DNA, 15 bp, Homo sapiens
attctgggcagtgga

SEQ ID NO: 1622336 - DNA, 15 bp, Homo sapiens
gattctgggcagtgg

SEQ ID NO: 1622337 - DNA, 15 bp, Homo sapiens
agattctgggcagtg

SEQ ID NO: 1622338 - DNA, 15 bp, Homo sapiens
gagattctgggcagt

SEQ ID NO: 1622339 - DNA, 15 bp, Homo sapiens
ggagattctgggcag

SEQ ID NO: 1622340 - DNA, 15 bp, Homo sapiens
gggagattctgggca

SEQ ID NO: 1622341 - DNA, 15 bp, Homo sapiens
ggggagattctgggc

SEQ ID NO: 1622342 - DNA, 15 bp, Homo sapiens
tggggagattctggg

SEQ ID NO: 1622343 - DNA, 15 bp, Homo sapiens
atggggagattctgg

SEQ ID NO: 1622344 - DNA, 15 bp, Homo sapiens
tatggggagattctg

SEQ ID NO: 1622345 - DNA, 15 bp, Homo sapiens
ctatggggagattct

SEQ ID NO: 1622346 - DNA, 15 bp, Homo sapiens
cctatggggagattc

SEQ ID NO: 1622347 - DNA, 15 bp, Homo sapiens
tcctatggggagatt

SEQ ID NO: 1622348 - DNA, 15 bp, Homo sapiens
ttcctatggggagat

SEQ ID NO: 1622349 - DNA, 15 bp, Homo sapiens
gttcctatggggaga

SEQ ID NO: 1622350 - DNA, 15 bp, Homo sapiens
ggttcctatggggag

SEQ ID NO: 1622351 - DNA, 15 bp, Homo sapiens
gggttcctatgggga

SEQ ID NO: 1622352 - DNA, 15 bp, Homo sapiens
agggttcctatgggg

SEQ ID NO: 1622353 - DNA, 15 bp, Homo sapiens
gagggttcctatggg

SEQ ID NO: 1622354 - DNA, 15 bp, Homo sapiens
agagggttcctatgg

SEQ ID NO: 1622355 - DNA, 15 bp, Homo sapiens
gagagggttcctatg

SEQ ID NO: 1622356 - DNA, 15 bp, Homo sapiens
ggagagggttcctat

SEQ ID NO: 1622357 - DNA, 15 bp, Homo sapiens
gggagagggttccta

SEQ ID NO: 1622358 - DNA, 15 bp, Homo sapiens
tgggagagggttcct

SEQ ID NO: 1622359 - DNA, 15 bp, Homo sapiens
ctgggagagggttcc

SEQ ID NO: 1622360 - DNA, 15 bp, Homo sapiens
tctgggagagggttc

SEQ ID NO: 1622361 - DNA, 15 bp, Homo sapiens
ctctgggagagggtt

SEQ ID NO: 1622362 - DNA, 15 bp, Homo sapiens
cctctgggagagggt

SEQ ID NO: 1622363 - DNA, 15 bp, Homo sapiens
gcctctgggagaggg

SEQ ID NO: 1622364 - DNA, 15 bp, Homo sapiens
tgcctctgggagagg

SEQ ID NO: 1622365 - DNA, 15 bp, Homo sapiens
ctgcctctgggagag

SEQ ID NO: 1622366 - DNA, 15 bp, Homo sapiens
tctgcctctgggaga

SEQ ID NO: 1622367 - DNA, 15 bp, Homo sapiens
ttctgcctctgggag

SEQ ID NO: 1622368 - DNA, 15 bp, Homo sapiens
attctgcctctggga

SEQ ID NO: 1622369 - DNA, 15 bp, Homo sapiens
cattctgcctctggg

SEQ ID NO: 1622370 - DNA, 15 bp, Homo sapiens
gcattctgcctctgg

SEQ ID NO: 1622371 - DNA, 15 bp, Homo sapiens
cgcattctgcctctg

SEQ ID NO: 1622372 - DNA, 15 bp, Homo sapiens
gcgcattctgcctct

SEQ ID NO: 1622373 - DNA, 15 bp, Homo sapiens
cgcgcattctgcctc

SEQ ID NO: 1622374 - DNA, 15 bp, Homo sapiens
tcgcgcattctgcct

SEQ ID NO: 1622375 - DNA, 15 bp, Homo sapiens
gtcgcgcattctgcc

SEQ ID NO: 1622376 - DNA, 15 bp, Homo sapiens
agtcgcgcattctgc

SEQ ID NO: 1622377 - DNA, 15 bp, Homo sapiens
gagtcgcgcattctg

SEQ ID NO: 1622378 - DNA, 15 bp, Homo sapiens
agagtcgcgcattct

SEQ ID NO: 1622379 - DNA, 15 bp, Homo sapiens
cagagtcgcgcattc

SEQ ID NO: 1622380 - DNA, 15 bp, Homo sapiens
acagagtcgcgcatt

SEQ ID NO: 1622381 - DNA, 15 bp, Homo sapiens
aacagagtcgcgcat

SEQ ID NO: 1622382 - DNA, 15 bp, Homo sapiens
gaacagagtcgcgca

SEQ ID NO: 1622383 - DNA, 15 bp, Homo sapiens
agaacagagtcgcgc

SEQ ID NO: 1622384 - DNA, 15 bp, Homo sapiens
gagaacagagtcgcg

SEQ ID NO: 1622385 - DNA, 15 bp, Homo sapiens
ggagaacagagtcgc

SEQ ID NO: 1622386 - DNA, 15 bp, Homo sapiens
gggagaacagagtcg

SEQ ID NO: 1622387 - DNA, 15 bp, Homo sapiens
agggagaacagagtc

SEQ ID NO: 1622388 - DNA, 15 bp, Homo sapiens
cagggagaacagagt

SEQ ID NO: 1622389 - DNA, 15 bp, Homo sapiens
gcagggagaacagag

SEQ ID NO: 1622390 - DNA, 15 bp, Homo sapiens
agcagggagaacaga

SEQ ID NO: 1622391 - DNA, 15 bp, Homo sapiens
gagcagggagaacag

SEQ ID NO: 1622392 - DNA, 15 bp, Homo sapiens
tgagcagggagaaca

SEQ ID NO: 1622393 - DNA, 15 bp, Homo sapiens
gtgagcagggagaac

SEQ ID NO: 1622394 - DNA, 15 bp, Homo sapiens
agtgagcagggagaa

SEQ ID NO: 1622395 - DNA, 15 bp, Homo sapiens
cagtgagcagggaga

SEQ ID NO: 1622396 - DNA, 15 bp, Homo sapiens
gcagtgagcagggag

SEQ ID NO: 1622397 - DNA, 15 bp, Homo sapiens
ggcagtgagcaggga

SEQ ID NO: 1622398 - DNA, 15 bp, Homo sapiens
aggcagtgagcaggg

SEQ ID NO: 1622399 - DNA, 15 bp, Homo sapiens
gaggcagtgagcagg

SEQ ID NO: 1622400 - DNA, 15 bp, Homo sapiens
ggaggcagtgagcag

SEQ ID NO: 1622401 - DNA, 15 bp, Homo sapiens
tggaggcagtgagca

SEQ ID NO: 1622402 - DNA, 15 bp, Homo sapiens
atggaggcagtgagc

SEQ ID NO: 1622403 - DNA, 15 bp, Homo sapiens
catggaggcagtgag

SEQ ID NO: 1622404 - DNA, 15 bp, Homo sapiens
tcatggaggcagtga

SEQ ID NO: 1622405 - DNA, 15 bp, Homo sapiens
atcatggaggcagtg

SEQ ID NO: 1622406 - DNA, 15 bp, Homo sapiens
aatcatggaggcagt

SEQ ID NO: 1622407 - DNA, 15 bp, Homo sapiens
gaatcatggaggcag

SEQ ID NO: 1622408 - DNA, 15 bp, Homo sapiens
tgaatcatggaggca

SEQ ID NO: 1622409 - DNA, 15 bp, Homo sapiens
ctgaatcatggaggc

SEQ ID NO: 1622410 - DNA, 15 bp, Homo sapiens
actgaatcatggagg

SEQ ID NO: 1622411 - DNA, 15 bp, Homo sapiens
gactgaatcatggag

SEQ ID NO: 1622412 - DNA, 15 bp, Homo sapiens
agactgaatcatgga

SEQ ID NO: 1622413 - DNA, 15 bp, Homo sapiens
cagactgaatcatgg

SEQ ID NO: 1622414 - DNA, 15 bp, Homo sapiens
ccagactgaatcatg

SEQ ID NO: 1622415 - DNA, 15 bp, Homo sapiens
tccagactgaatcat

SEQ ID NO: 1622416 - DNA, 15 bp, Homo sapiens
ttccagactgaatca

SEQ ID NO: 1622417 - DNA, 15 bp, Homo sapiens
tttccagactgaatc

SEQ ID NO: 1622418 - DNA, 15 bp, Homo sapiens
gtttccagactgaat

SEQ ID NO: 1622419 - DNA, 15 bp, Homo sapiens
agtttccagactgaa

SEQ ID NO: 1622420 - DNA, 15 bp, Homo sapiens
tagtttccagactga

SEQ ID NO: 1622421 - DNA, 15 bp, Homo sapiens
atagtttccagactg

SEQ ID NO: 1622422 - DNA, 15 bp, Homo sapiens
tatagtttccagact

SEQ ID NO: 1622423 - DNA, 15 bp, Homo sapiens
ttatagtttccagac

SEQ ID NO: 1622424 - DNA, 15 bp, Homo sapiens
cttatagtttccaga

SEQ ID NO: 1622425 - DNA, 15 bp, Homo sapiens
gcttatagtttccag

SEQ ID NO: 1622426 - DNA, 15 bp, Homo sapiens
ggcttatagtttcca

SEQ ID NO: 1622427 - DNA, 15 bp, Homo sapiens
cggcttatagtttcc

SEQ ID NO: 1622428 - DNA, 15 bp, Homo sapiens
gcggcttatagtttc

SEQ ID NO: 1622429 - DNA, 15 bp, Homo sapiens
agcggcttatagttt

SEQ ID NO: 1622430 - DNA, 15 bp, Homo sapiens
aagcggcttatagtt

SEQ ID NO: 1622431 - DNA, 15 bp, Homo sapiens
aaagcggcttatagt

SEQ ID NO: 1622432 - DNA, 15 bp, Homo sapiens
aaaagcggcttatag

SEQ ID NO: 1622433 - DNA, 15 bp, Homo sapiens
gaaaagcggcttata

SEQ ID NO: 1622434 - DNA, 15 bp, Homo sapiens
agaaaagcggcttat

SEQ ID NO: 1622435 - DNA, 15 bp, Homo sapiens
gagaaaagcggctta

SEQ ID NO: 1622436 - DNA, 15 bp, Homo sapiens
ggagaaaagcggctt

SEQ ID NO: 1622437 - DNA, 15 bp, Homo sapiens
gggagaaaagcggct

SEQ ID NO: 1622438 - DNA, 15 bp, Homo sapiens
ggggagaaaagcggc

SEQ ID NO: 1622439 - DNA, 15 bp, Homo sapiens
tggggagaaaagcgg

SEQ ID NO: 1622440 - DNA, 15 bp, Homo sapiens
ctggggagaaaagcg

SEQ ID NO: 1622441 - DNA, 15 bp, Homo sapiens
tctggggagaaaagc

SEQ ID NO: 1622442 - DNA, 15 bp, Homo sapiens
atctggggagaaaag

SEQ ID NO: 1622443 - DNA, 15 bp, Homo sapiens
aatctggggagaaaa

SEQ ID NO: 1622444 - DNA, 15 bp, Homo sapiens
gaatctggggagaaa

SEQ ID NO: 1622445 - DNA, 15 bp, Homo sapiens
tgaatctggggagaa

SEQ ID NO: 1622446 - DNA, 15 bp, Homo sapiens
atgaatctggggaga

SEQ ID NO: 1622447 - DNA, 15 bp, Homo sapiens
catgaatctggggag

SEQ ID NO: 1622448 - DNA, 15 bp, Homo sapiens
gcatgaatctgggga

SEQ ID NO: 1622449 - DNA, 15 bp, Homo sapiens
tgcatgaatctgggg

SEQ ID NO: 1622450 - DNA, 15 bp, Homo sapiens
ctgcatgaatctggg

SEQ ID NO: 1622451 - DNA, 15 bp, Homo sapiens
tctgcatgaatctgg

SEQ ID NO: 1622452 - DNA, 15 bp, Homo sapiens
ctctgcatgaatctg

SEQ ID NO: 1622453 - DNA, 15 bp, Homo sapiens
cctctgcatgaatct

SEQ ID NO: 1622454 - DNA, 15 bp, Homo sapiens
gcctctgcatgaatc

SEQ ID NO: 1622455 - DNA, 15 bp, Homo sapiens
tgcctctgcatgaat

SEQ ID NO: 1622456 - DNA, 15 bp, Homo sapiens
ctgcctctgcatgaa

SEQ ID NO: 1622457 - DNA, 15 bp, Homo sapiens
cctgcctctgcatga

SEQ ID NO: 1622458 - DNA, 15 bp, Homo sapiens
gcctgcctctgcatg

SEQ ID NO: 1622459 - DNA, 15 bp, Homo sapiens
tgcctgcctctgcat

SEQ ID NO: 1622460 - DNA, 15 bp, Homo sapiens
ctgcctgcctctgca

SEQ ID NO: 1622461 - DNA, 15 bp, Homo sapiens
gctgcctgcctctgc

SEQ ID NO: 1622462 - DNA, 15 bp, Homo sapiens
tgctgcctgcctctg

SEQ ID NO: 1622463 - DNA, 15 bp, Homo sapiens
ctgctgcctgcctct

SEQ ID NO: 1622464 - DNA, 15 bp, Homo sapiens
gctgctgcctgcctc

SEQ ID NO: 1622465 - DNA, 15 bp, Homo sapiens
ggctgctgcctgcct

SEQ ID NO: 1622466 - DNA, 15 bp, Homo sapiens
gggctgctgcctgcc

SEQ ID NO: 1622467 - DNA, 15 bp, Homo sapiens
tgggctgctgcctgc

SEQ ID NO: 1622468 - DNA, 15 bp, Homo sapiens
ttgggctgctgcctg

SEQ ID NO: 1622469 - DNA, 15 bp, Homo sapiens
cttgggctgctgcct

SEQ ID NO: 1622470 - DNA, 15 bp, Homo sapiens
ccttgggctgctgcc

SEQ ID NO: 1622471 - DNA, 15 bp, Homo sapiens
accttgggctgctgc

SEQ ID NO: 1622472 - DNA, 15 bp, Homo sapiens
gaccttgggctgctg

SEQ ID NO: 1622473 - DNA, 15 bp, Homo sapiens
ggaccttgggctgct

SEQ ID NO: 1622474 - DNA, 15 bp, Homo sapiens
aggaccttgggctgc

SEQ ID NO: 1622475 - DNA, 15 bp, Homo sapiens
gaggaccttgggctg

SEQ ID NO: 1622476 - DNA, 15 bp, Homo sapiens
agaggaccttgggct

SEQ ID NO: 1622477 - DNA, 15 bp, Homo sapiens
cagaggaccttgggc

SEQ ID NO: 1622478 - DNA, 15 bp, Homo sapiens
tcagaggaccttggg

SEQ ID NO: 1622479 - DNA, 15 bp, Homo sapiens
ctcagaggaccttgg

SEQ ID NO: 1622480 - DNA, 15 bp, Homo sapiens
actcagaggaccttg

SEQ ID NO: 1622481 - DNA, 15 bp, Homo sapiens
cactcagaggacctt

SEQ ID NO: 1622482 - DNA, 15 bp, Homo sapiens
gcactcagaggacct

SEQ ID NO: 1622483 - DNA, 15 bp, Homo sapiens
tgcactcagaggacc

SEQ ID NO: 1622484 - DNA, 15 bp, Homo sapiens
gtgcactcagaggac

SEQ ID NO: 1622485 - DNA, 15 bp, Homo sapiens
cgtgcactcagagga

SEQ ID NO: 1622486 - DNA, 15 bp, Homo sapiens
gcgtgcactcagagg

SEQ ID NO: 1622487 - DNA, 15 bp, Homo sapiens
tgcgtgcactcagag

SEQ ID NO: 1622488 - DNA, 15 bp, Homo sapiens
ctgcgtgcactcaga

SEQ ID NO: 1622489 - DNA, 15 bp, Homo sapiens
gctgcgtgcactcag

SEQ ID NO: 1622490 - DNA, 15 bp, Homo sapiens
ggctgcgtgcactca

SEQ ID NO: 1622491 - DNA, 15 bp, Homo sapiens
aggctgcgtgcactc

SEQ ID NO: 1622492 - DNA, 15 bp, Homo sapiens
aaggctgcgtgcact

SEQ ID NO: 1622493 - DNA, 15 bp, Homo sapiens
taaggctgcgtgcac

SEQ ID NO: 1622494 - DNA, 15 bp, Homo sapiens
ctaaggctgcgtgca

SEQ ID NO: 1622495 - DNA, 15 bp, Homo sapiens
cctaaggctgcgtgc

SEQ ID NO: 1622496 - DNA, 15 bp, Homo sapiens
acctaaggctgcgtg

SEQ ID NO: 1622497 - DNA, 15 bp, Homo sapiens
gacctaaggctgcgt

SEQ ID NO: 1622498 - DNA, 15 bp, Homo sapiens
agacctaaggctgcg

SEQ ID NO: 1622499 - DNA, 15 bp, Homo sapiens
aagacctaaggctgc

SEQ ID NO: 1622500 - DNA, 15 bp, Homo sapiens
aaagacctaaggctg

SEQ ID NO: 1622501 - DNA, 15 bp, Homo sapiens
gaaagacctaaggct

SEQ ID NO: 1622502 - DNA, 15 bp, Homo sapiens
ggaaagacctaaggc

SEQ ID NO: 1622503 - DNA, 15 bp, Homo sapiens
aggaaagacctaagg

SEQ ID NO: 1622504 - DNA, 15 bp, Homo sapiens
gaggaaagacctaag

SEQ ID NO: 1622505 - DNA, 15 bp, Homo sapiens
agaggaaagacctaa

SEQ ID NO: 1622506 - DNA, 15 bp, Homo sapiens
cagaggaaagaccta

SEQ ID NO: 1622507 - DNA, 15 bp, Homo sapiens
tcagaggaaagacct

SEQ ID NO: 1622508 - DNA, 15 bp, Homo sapiens
atcagaggaaagacc

SEQ ID NO: 1622509 - DNA, 15 bp, Homo sapiens
gatcagaggaaagac

SEQ ID NO: 1622510 - DNA, 15 bp, Homo sapiens
ggatcagaggaaaga

SEQ ID NO: 1622511 - DNA, 15 bp, Homo sapiens
aggatcagaggaaag

SEQ ID NO: 1622512 - DNA, 15 bp, Homo sapiens
taggatcagaggaaa

SEQ ID NO: 1622513 - DNA, 15 bp, Homo sapiens
ttaggatcagaggaa

SEQ ID NO: 1622514 - DNA, 15 bp, Homo sapiens
gttaggatcagagga

SEQ ID NO: 1622515 - DNA, 15 bp, Homo sapiens
agttaggatcagagg

SEQ ID NO: 1622516 - DNA, 15 bp, Homo sapiens
aagttaggatcagag

SEQ ID NO: 1622517 - DNA, 15 bp, Homo sapiens
aaagttaggatcaga

SEQ ID NO: 1622518 - DNA, 15 bp, Homo sapiens
caaagttaggatcag

SEQ ID NO: 1622519 - DNA, 15 bp, Homo sapiens
gcaaagttaggatca

SEQ ID NO: 1622520 - DNA, 15 bp, Homo sapiens
tgcaaagttaggatc

SEQ ID NO: 1622521 - DNA, 15 bp, Homo sapiens
atgcaaagttaggat

SEQ ID NO: 1622522 - DNA, 15 bp, Homo sapiens
tatgcaaagttagga

SEQ ID NO: 1622523 - DNA, 15 bp, Homo sapiens
gtatgcaaagttagg

SEQ ID NO: 1622524 - DNA, 15 bp, Homo sapiens
ggtatgcaaagttag

SEQ ID NO: 1622525 - DNA, 15 bp, Homo sapiens
tggtatgcaaagtta

SEQ ID NO: 1622526 - DNA, 15 bp, Homo sapiens
atggtatgcaaagtt

SEQ ID NO: 1622527 - DNA, 15 bp, Homo sapiens
aatggtatgcaaagt

SEQ ID NO: 1622528 - DNA, 15 bp, Homo sapiens
caatggtatgcaaag

SEQ ID NO: 1622529 - DNA, 15 bp, Homo sapiens
gcaatggtatgcaaa

SEQ ID NO: 1622530 - DNA, 15 bp, Homo sapiens
ggcaatggtatgcaa

SEQ ID NO: 1622531 - DNA, 15 bp, Homo sapiens
gggcaatggtatgca

SEQ ID NO: 1622532 - DNA, 15 bp, Homo sapiens
agggcaatggtatgc

SEQ ID NO: 1622533 - DNA, 15 bp, Homo sapiens
aagggcaatggtatg

SEQ ID NO: 1622534 - DNA, 15 bp, Homo sapiens
aaagggcaatggtat

SEQ ID NO: 1622535 - DNA, 15 bp, Homo sapiens
gaaagggcaatggta

SEQ ID NO: 1622536 - DNA, 15 bp, Homo sapiens
tgaaagggcaatggt

SEQ ID NO: 1622537 - DNA, 15 bp, Homo sapiens
ttgaaagggcaatgg

SEQ ID NO: 1622538 - DNA, 15 bp, Homo sapiens
gttgaaagggcaatg

SEQ ID NO: 1622539 - DNA, 15 bp, Homo sapiens
ggttgaaagggcaat

SEQ ID NO: 1622540 - DNA, 15 bp, Homo sapiens
tggttgaaagggcaa

SEQ ID NO: 1622541 - DNA, 15 bp, Homo sapiens
ctggttgaaagggca

SEQ ID NO: 1622542 - DNA, 15 bp, Homo sapiens
cctggttgaaagggc

SEQ ID NO: 1622543 - DNA, 15 bp, Homo sapiens
ccctggttgaaaggg

SEQ ID NO: 1622544 - DNA, 15 bp, Homo sapiens
tccctggttgaaagg

SEQ ID NO: 1622545 - DNA, 15 bp, Homo sapiens
ctccctggttgaaag

SEQ ID NO: 1622546 - DNA, 15 bp, Homo sapiens
tctccctggttgaaa

SEQ ID NO: 1622547 - DNA, 15 bp, Homo sapiens
gtctccctggttgaa

SEQ ID NO: 1622548 - DNA, 15 bp, Homo sapiens
tgtctccctggttga

SEQ ID NO: 1622549 - DNA, 15 bp, Homo sapiens
ctgtctccctggttg

SEQ ID NO: 1622550 - DNA, 15 bp, Homo sapiens
tctgtctccctggtt

SEQ ID NO: 1622551 - DNA, 15 bp, Homo sapiens
atctgtctccctggt

SEQ ID NO: 1622552 - DNA, 15 bp, Homo sapiens
aatctgtctccctgg

SEQ ID NO: 1622553 - DNA, 15 bp, Homo sapiens
taatctgtctccctg

SEQ ID NO: 1622554 - DNA, 15 bp, Homo sapiens
ctaatctgtctccct

SEQ ID NO: 1622555 - DNA, 15 bp, Homo sapiens
cctaatctgtctccc

SEQ ID NO: 1622556 - DNA, 15 bp, Homo sapiens
gcctaatctgtctcc

SEQ ID NO: 1622557 - DNA, 15 bp, Homo sapiens
cgcctaatctgtctc

SEQ ID NO: 1622558 - DNA, 15 bp, Homo sapiens
ccgcctaatctgtct

SEQ ID NO: 1622559 - DNA, 15 bp, Homo sapiens
accgcctaatctgtc

SEQ ID NO: 1622560 - DNA, 15 bp, Homo sapiens
gaccgcctaatctgt

SEQ ID NO: 1622561 - DNA, 15 bp, Homo sapiens
tgaccgcctaatctg

SEQ ID NO: 1622562 - DNA, 15 bp, Homo sapiens
ctgaccgcctaatct

SEQ ID NO: 1622563 - DNA, 15 bp, Homo sapiens
gctgaccgcctaatc

SEQ ID NO: 1622564 - DNA, 15 bp, Homo sapiens
agctgaccgcctaat

SEQ ID NO: 1622565 - DNA, 15 bp, Homo sapiens
cagctgaccgcctaa

SEQ ID NO: 1622566 - DNA, 15 bp, Homo sapiens
ccagctgaccgccta

SEQ ID NO: 1622567 - DNA, 15 bp, Homo sapiens
accagctgaccgcct

SEQ ID NO: 1622568 - DNA, 15 bp, Homo sapiens
gaccagctgaccgcc

SEQ ID NO: 1622569 - DNA, 15 bp, Homo sapiens
agaccagctgaccgc

SEQ ID NO: 1622570 - DNA, 15 bp, Homo sapiens
cagaccagctgaccg

SEQ ID NO: 1622571 - DNA, 15 bp, Homo sapiens
gcagaccagctgacc

SEQ ID NO: 1622572 - DNA, 15 bp, Homo sapiens
tgcagaccagctgac

SEQ ID NO: 1622573 - DNA, 15 bp, Homo sapiens
ctgcagaccagctga

SEQ ID NO: 1622574 - DNA, 15 bp, Homo sapiens
tctgcagaccagctg

SEQ ID NO: 1622575 - DNA, 15 bp, Homo sapiens
gtctgcagaccagct

SEQ ID NO: 1622576 - DNA, 15 bp, Homo sapiens
cgtctgcagaccagc

SEQ ID NO: 1622577 - DNA, 15 bp, Homo sapiens
ccgtctgcagaccag

SEQ ID NO: 1622578 - DNA, 15 bp, Homo sapiens
tccgtctgcagacca

SEQ ID NO: 1622579 - DNA, 15 bp, Homo sapiens
gtccgtctgcagacc

SEQ ID NO: 1622580 - DNA, 15 bp, Homo sapiens
tgtccgtctgcagac

SEQ ID NO: 1622581 - DNA, 15 bp, Homo sapiens
ctgtccgtctgcaga

SEQ ID NO: 1622582 - DNA, 15 bp, Homo sapiens
tctgtccgtctgcag

SEQ ID NO: 1622583 - DNA, 15 bp, Homo sapiens
gtctgtccgtctgca

SEQ ID NO: 1622584 - DNA, 15 bp, Homo sapiens
agtctgtccgtctgc

SEQ ID NO: 1622585 - DNA, 15 bp, Homo sapiens
gagtctgtccgtctg

SEQ ID NO: 1622586 - DNA, 15 bp, Homo sapiens
agagtctgtccgtct

SEQ ID NO: 1622587 - DNA, 15 bp, Homo sapiens
cagagtctgtccgtc

SEQ ID NO: 1622588 - DNA, 15 bp, Homo sapiens
gcagagtctgtccgt

SEQ ID NO: 1622589 - DNA, 15 bp, Homo sapiens
ggcagagtctgtccg

SEQ ID NO: 1622590 - DNA, 15 bp, Homo sapiens
gggcagagtctgtcc

SEQ ID NO: 1622591 - DNA, 15 bp, Homo sapiens
agggcagagtctgtc

SEQ ID NO: 1622592 - DNA, 15 bp, Homo sapiens
cagggcagagtctgt

SEQ ID NO: 1622593 - DNA, 15 bp, Homo sapiens
ccagggcagagtctg

SEQ ID NO: 1622594 - DNA, 15 bp, Homo sapiens
cccagggcagagtct

SEQ ID NO: 1622595 - DNA, 15 bp, Homo sapiens
acccagggcagagtc

SEQ ID NO: 1622596 - DNA, 15 bp, Homo sapiens
cacccagggcagagt

SEQ ID NO: 1622597 - DNA, 15 bp, Homo sapiens
gcacccagggcagag

SEQ ID NO: 1622598 - DNA, 15 bp, Homo sapiens
ggcacccagggcaga

SEQ ID NO: 1622599 - DNA, 15 bp, Homo sapiens
aggcacccagggcag

SEQ ID NO: 1622600 - DNA, 15 bp, Homo sapiens
caggcacccagggca

SEQ ID NO: 1622601 - DNA, 15 bp, Homo sapiens
ccaggcacccagggc

SEQ ID NO: 1622602 - DNA, 15 bp, Homo sapiens
cccaggcacccaggg

SEQ ID NO: 1622603 - DNA, 15 bp, Homo sapiens
acccaggcacccagg

SEQ ID NO: 1622604 - DNA, 15 bp, Homo sapiens
cacccaggcacccag

SEQ ID NO: 1622605 - DNA, 15 bp, Homo sapiens
ccacccaggcaccca

SEQ ID NO: 1622606 - DNA, 15 bp, Homo sapiens
gccacccaggcaccc

SEQ ID NO: 1622607 - DNA, 15 bp, Homo sapiens
ggccacccaggcacc

SEQ ID NO: 1622608 - DNA, 15 bp, Homo sapiens
aggccacccaggcac

SEQ ID NO: 1622609 - DNA, 15 bp, Homo sapiens
caggccacccaggca

SEQ ID NO: 1622610 - DNA, 15 bp, Homo sapiens
acaggccacccaggc

SEQ ID NO: 1622611 - DNA, 15 bp, Homo sapiens
aacaggccacccagg

SEQ ID NO: 1622612 - DNA, 15 bp, Homo sapiens
aaacaggccacccag

SEQ ID NO: 1622613 - DNA, 15 bp, Homo sapiens
caaacaggccaccca

SEQ ID NO: 1622614 - DNA, 15 bp, Homo sapiens
tcaaacaggccaccc

SEQ ID NO: 1622615 - DNA, 15 bp, Homo sapiens
ttcaaacaggccacc

SEQ ID NO: 1622616 - DNA, 15 bp, Homo sapiens
attcaaacaggccac

SEQ ID NO: 1622617 - DNA, 15 bp, Homo sapiens
cattcaaacaggcca

SEQ ID NO: 1622618 - DNA, 15 bp, Homo sapiens
tcattcaaacaggcc

SEQ ID NO: 1622619 - DNA, 15 bp, Homo sapiens
ctcattcaaacaggc

SEQ ID NO: 1622620 - DNA, 15 bp, Homo sapiens
gctcattcaaacagg

SEQ ID NO: 1622621 - DNA, 15 bp, Homo sapiens
ggctcattcaaacag

SEQ ID NO: 1622622 - DNA, 15 bp, Homo sapiens
aggctcattcaaaca

SEQ ID NO: 1622623 - DNA, 15 bp, Homo sapiens
caggctcattcaaac

SEQ ID NO: 1622624 - DNA, 15 bp, Homo sapiens
ccaggctcattcaaa

SEQ ID NO: 1622625 - DNA, 15 bp, Homo sapiens
tccaggctcattcaa

SEQ ID NO: 1622626 - DNA, 15 bp, Homo sapiens
ctccaggctcattca

SEQ ID NO: 1622627 - DNA, 15 bp, Homo sapiens
actccaggctcattc

SEQ ID NO: 1622628 - DNA, 15 bp, Homo sapiens
aactccaggctcatt

SEQ ID NO: 1622629 - DNA, 15 bp, Homo sapiens
taactccaggctcat

SEQ ID NO: 1622630 - DNA, 15 bp, Homo sapiens
ctaactccaggctca

SEQ ID NO: 1622631 - DNA, 15 bp, Homo sapiens
cctaactccaggctc

SEQ ID NO: 1622632 - DNA, 15 bp, Homo sapiens
ccctaactccaggct

SEQ ID NO: 1622633 - DNA, 15 bp, Homo sapiens
tccctaactccaggc

SEQ ID NO: 1622634 - DNA, 15 bp, Homo sapiens
ttccctaactccagg

SEQ ID NO: 1622635 - DNA, 15 bp, Homo sapiens
cttccctaactccag

SEQ ID NO: 1622636 - DNA, 15 bp, Homo sapiens
ccttccctaactcca

SEQ ID NO: 1622637 - DNA, 15 bp, Homo sapiens
cccttccctaactcc

SEQ ID NO: 1622638 - DNA, 15 bp, Homo sapiens
gcccttccctaactc

SEQ ID NO: 1622639 - DNA, 15 bp, Homo sapiens
agcccttccctaact

SEQ ID NO: 1622640 - DNA, 15 bp, Homo sapiens
cagcccttccctaac

SEQ ID NO: 1622641 - DNA, 15 bp, Homo sapiens
ccagcccttccctaa

SEQ ID NO: 1622642 - DNA, 15 bp, Homo sapiens
cccagcccttcccta

SEQ ID NO: 1622643 - DNA, 15 bp, Homo sapiens
tcccagcccttccct

SEQ ID NO: 1622644 - DNA, 15 bp, Homo sapiens
ctcccagcccttccc

SEQ ID NO: 1622645 - DNA, 15 bp, Homo sapiens
tctcccagcccttcc

SEQ ID NO: 1622646 - DNA, 15 bp, Homo sapiens
atctcccagcccttc

SEQ ID NO: 1622647 - DNA, 15 bp, Homo sapiens
aatctcccagccctt

SEQ ID NO: 1622648 - DNA, 15 bp, Homo sapiens
caatctcccagccct

SEQ ID NO: 1622649 - DNA, 15 bp, Homo sapiens
gcaatctcccagccc

SEQ ID NO: 1622650 - DNA, 15 bp, Homo sapiens
tgcaatctcccagcc

SEQ ID NO: 1622651 - DNA, 15 bp, Homo sapiens
ctgcaatctcccagc

SEQ ID NO: 1622652 - DNA, 15 bp, Homo sapiens
tctgcaatctcccag

SEQ ID NO: 1622653 - DNA, 15 bp, Homo sapiens
ctctgcaatctccca

SEQ ID NO: 1622654 - DNA, 15 bp, Homo sapiens
actctgcaatctccc

SEQ ID NO: 1622655 - DNA, 15 bp, Homo sapiens
tactctgcaatctcc

SEQ ID NO: 1622656 - DNA, 15 bp, Homo sapiens
atactctgcaatctc

SEQ ID NO: 1622657 - DNA, 15 bp, Homo sapiens
gatactctgcaatct

SEQ ID NO: 1622658 - DNA, 15 bp, Homo sapiens
tgatactctgcaatc

SEQ ID NO: 1622659 - DNA, 15 bp, Homo sapiens
gtgatactctgcaat

SEQ ID NO: 1622660 - DNA, 15 bp, Homo sapiens
tgtgatactctgcaa

SEQ ID NO: 1622661 - DNA, 15 bp, Homo sapiens
atgtgatactctgca

SEQ ID NO: 1622662 - DNA, 15 bp, Homo sapiens
aatgtgatactctgc

SEQ ID NO: 1622663 - DNA, 15 bp, Homo sapiens
aaatgtgatactctg

SEQ ID NO: 1622664 - DNA, 15 bp, Homo sapiens
caaatgtgatactct

SEQ ID NO: 1622665 - DNA, 15 bp, Homo sapiens
tcaaatgtgatactc

SEQ ID NO: 1622666 - DNA, 15 bp, Homo sapiens
ttcaaatgtgatact

SEQ ID NO: 1622667 - DNA, 15 bp, Homo sapiens
gttcaaatgtgatac

SEQ ID NO: 1622668 - DNA, 15 bp, Homo sapiens
agttcaaatgtgata

SEQ ID NO: 1622669 - DNA, 15 bp, Homo sapiens
tagttcaaatgtgat

SEQ ID NO: 1622670 - DNA, 15 bp, Homo sapiens
ttagttcaaatgtga

SEQ ID NO: 1622671 - DNA, 15 bp, Homo sapiens
tttagttcaaatgtg

SEQ ID NO: 1622672 - DNA, 15 bp, Homo sapiens
ttttagttcaaatgt

SEQ ID NO: 1622673 - DNA, 15 bp, Homo sapiens
cttttagttcaaatg

SEQ ID NO: 1622674 - DNA, 15 bp, Homo sapiens
gcttttagttcaaat

SEQ ID NO: 1622675 - DNA, 15 bp, Homo sapiens
ggcttttagttcaaa

SEQ ID NO: 1622676 - DNA, 15 bp, Homo sapiens
tggcttttagttcaa

SEQ ID NO: 1622677 - DNA, 15 bp, Homo sapiens
atggcttttagttca

SEQ ID NO: 1622678 - DNA, 15 bp, Homo sapiens
aatggcttttagttc

SEQ ID NO: 1622679 - DNA, 15 bp, Homo sapiens
aaatggcttttagtt

SEQ ID NO: 1622680 - DNA, 15 bp, Homo sapiens
taaatggcttttagt

SEQ ID NO: 1622681 - DNA, 15 bp, Homo sapiens
ctaaatggcttttag

SEQ ID NO: 1622682 - DNA, 15 bp, Homo sapiens
tctaaatggctttta

SEQ ID NO: 1622683 - DNA, 15 bp, Homo sapiens
ctctaaatggctttt

SEQ ID NO: 1622684 - DNA, 15 bp, Homo sapiens
actctaaatggcttt

SEQ ID NO: 1622685 - DNA, 15 bp, Homo sapiens
aactctaaatggctt

SEQ ID NO: 1622686 - DNA, 15 bp, Homo sapiens
aaactctaaatggct

SEQ ID NO: 1622687 - DNA, 15 bp, Homo sapiens
aaaactctaaatggc

SEQ ID NO: 1622688 - DNA, 15 bp, Homo sapiens
caaaactctaaatgg

SEQ ID NO: 1622689 - DNA, 15 bp, Homo sapiens
tcaaaactctaaatg

SEQ ID NO: 1622690 - DNA, 15 bp, Homo sapiens
ttcaaaactctaaat

SEQ ID NO: 1622691 - DNA, 15 bp, Homo sapiens
cttcaaaactctaaa

SEQ ID NO: 1622692 - DNA, 15 bp, Homo sapiens
gcttcaaaactctaa

SEQ ID NO: 1622693 - DNA, 15 bp, Homo sapiens
ggcttcaaaactcta

SEQ ID NO: 1622694 - DNA, 15 bp, Homo sapiens
gggcttcaaaactct

SEQ ID NO: 1622695 - DNA, 15 bp, Homo sapiens
agggcttcaaaactc

SEQ ID NO: 1622696 - DNA, 15 bp, Homo sapiens
cagggcttcaaaact

SEQ ID NO: 1622697 - DNA, 15 bp, Homo sapiens
ccagggcttcaaaac

SEQ ID NO: 1622698 - DNA, 15 bp, Homo sapiens
cccagggcttcaaaa

SEQ ID NO: 1622699 - DNA, 15 bp, Homo sapiens
tcccagggcttcaaa

SEQ ID NO: 1622700 - DNA, 15 bp, Homo sapiens
ttcccagggcttcaa

SEQ ID NO: 1622701 - DNA, 15 bp, Homo sapiens
gttcccagggcttca

SEQ ID NO: 1622702 - DNA, 15 bp, Homo sapiens
ggttcccagggcttc

SEQ ID NO: 1622703 - DNA, 15 bp, Homo sapiens
gggttcccagggctt

SEQ ID NO: 1622704 - DNA, 15 bp, Homo sapiens
tgggttcccagggct

SEQ ID NO: 1622705 - DNA, 15 bp, Homo sapiens
gtgggttcccagggc

SEQ ID NO: 1622706 - DNA, 15 bp, Homo sapiens
tgtgggttcccaggg

SEQ ID NO: 1622707 - DNA, 15 bp, Homo sapiens
gtgtgggttcccagg

SEQ ID NO: 1622708 - DNA, 15 bp, Homo sapiens
tgtgtgggttcccag

SEQ ID NO: 1622709 - DNA, 15 bp, Homo sapiens
atgtgtgggttccca

SEQ ID NO: 1622710 - DNA, 15 bp, Homo sapiens
catgtgtgggttccc

SEQ ID NO: 1622711 - DNA, 15 bp, Homo sapiens
gcatgtgtgggttcc

SEQ ID NO: 1622712 - DNA, 15 bp, Homo sapiens
tgcatgtgtgggttc

SEQ ID NO: 1622713 - DNA, 15 bp, Homo sapiens
ctgcatgtgtgggtt

SEQ ID NO: 1622714 - DNA, 15 bp, Homo sapiens
actgcatgtgtgggt

SEQ ID NO: 1622715 - DNA, 15 bp, Homo sapiens
cactgcatgtgtggg

SEQ ID NO: 1622716 - DNA, 15 bp, Homo sapiens
ccactgcatgtgtgg

SEQ ID NO: 1622717 - DNA, 15 bp, Homo sapiens
gccactgcatgtgtg

SEQ ID NO: 1622718 - DNA, 15 bp, Homo sapiens
cgccactgcatgtgt

SEQ ID NO: 1622719 - DNA, 15 bp, Homo sapiens
ccgccactgcatgtg

SEQ ID NO: 1622720 - DNA, 15 bp, Homo sapiens
cccgccactgcatgt

SEQ ID NO: 1622721 - DNA, 15 bp, Homo sapiens
ccccgccactgcatg

SEQ ID NO: 1622722 - DNA, 15 bp, Homo sapiens
tccccgccactgcat

SEQ ID NO: 1622723 - DNA, 15 bp, Homo sapiens
ctccccgccactgca

SEQ ID NO: 1622724 - DNA, 15 bp, Homo sapiens
cctccccgccactgc

SEQ ID NO: 1622725 - DNA, 15 bp, Homo sapiens
ccctccccgccactg

SEQ ID NO: 1622726 - DNA, 15 bp, Homo sapiens
cccctccccgccact

SEQ ID NO: 1622727 - DNA, 15 bp, Homo sapiens
tcccctccccgccac

SEQ ID NO: 1622728 - DNA, 15 bp, Homo sapiens
ttcccctccccgcca

SEQ ID NO: 1622729 - DNA, 15 bp, Homo sapiens
tttcccctccccgcc

SEQ ID NO: 1622730 - DNA, 15 bp, Homo sapiens
gtttcccctccccgc

SEQ ID NO: 1622731 - DNA, 15 bp, Homo sapiens
agtttcccctccccg

SEQ ID NO: 1622732 - DNA, 15 bp, Homo sapiens
cagtttcccctcccc

SEQ ID NO: 1622733 - DNA, 15 bp, Homo sapiens
ccagtttcccctccc

SEQ ID NO: 1622734 - DNA, 15 bp, Homo sapiens
cccagtttcccctcc

SEQ ID NO: 1622735 - DNA, 15 bp, Homo sapiens
ccccagtttcccctc

SEQ ID NO: 1622736 - DNA, 15 bp, Homo sapiens
gccccagtttcccct

SEQ ID NO: 1622737 - DNA, 15 bp, Homo sapiens
agccccagtttcccc

SEQ ID NO: 1622738 - DNA, 15 bp, Homo sapiens
gagccccagtttccc

SEQ ID NO: 1622739 - DNA, 15 bp, Homo sapiens
tgagccccagtttcc

SEQ ID NO: 1622740 - DNA, 15 bp, Homo sapiens
gtgagccccagtttc

SEQ ID NO: 1622741 - DNA, 15 bp, Homo sapiens
agtgagccccagttt

SEQ ID NO: 1622742 - DNA, 15 bp, Homo sapiens
gagtgagccccagtt

SEQ ID NO: 1622743 - DNA, 15 bp, Homo sapiens
agagtgagccccagt

SEQ ID NO: 1622744 - DNA, 15 bp, Homo sapiens
aagagtgagccccag

SEQ ID NO: 1622745 - DNA, 15 bp, Homo sapiens
taagagtgagcccca

SEQ ID NO: 1622746 - DNA, 15 bp, Homo sapiens
ataagagtgagcccc

SEQ ID NO: 1622747 - DNA, 15 bp, Homo sapiens
gataagagtgagccc

SEQ ID NO: 1622748 - DNA, 15 bp, Homo sapiens
tgataagagtgagcc

SEQ ID NO: 1622749 - DNA, 15 bp, Homo sapiens
ttgataagagtgagc

SEQ ID NO: 1622750 - DNA, 15 bp, Homo sapiens
tttgataagagtgag

SEQ ID NO: 1622751 - DNA, 15 bp, Homo sapiens
ctttgataagagtga

SEQ ID NO: 1622752 - DNA, 15 bp, Homo sapiens
actttgataagagtg

SEQ ID NO: 1622753 - DNA, 15 bp, Homo sapiens
aactttgataagagt

SEQ ID NO: 1622754 - DNA, 15 bp, Homo sapiens
gaactttgataagag

SEQ ID NO: 1622755 - DNA, 15 bp, Homo sapiens
agaactttgataaga

SEQ ID NO: 1622756 - DNA, 15 bp, Homo sapiens
tagaactttgataag

SEQ ID NO: 1622757 - DNA, 15 bp, Homo sapiens
ctagaactttgataa

SEQ ID NO: 1622758 - DNA, 15 bp, Homo sapiens
gctagaactttgata

SEQ ID NO: 1622759 - DNA, 15 bp, Homo sapiens
ggctagaactttgat

SEQ ID NO: 1622760 - DNA, 15 bp, Homo sapiens
tggctagaactttga

SEQ ID NO: 1622761 - DNA, 15 bp, Homo sapiens
ctggctagaactttg

SEQ ID NO: 1622762 - DNA, 15 bp, Homo sapiens
tctggctagaacttt

SEQ ID NO: 1622763 - DNA, 15 bp, Homo sapiens
atctggctagaactt

SEQ ID NO: 1622764 - DNA, 15 bp, Homo sapiens
catctggctagaact

SEQ ID NO: 1622765 - DNA, 15 bp, Homo sapiens
gcatctggctagaac

SEQ ID NO: 1622766 - DNA, 15 bp, Homo sapiens
tgcatctggctagaa

SEQ ID NO: 1622767 - DNA, 15 bp, Homo sapiens
ctgcatctggctaga

SEQ ID NO: 1622768 - DNA, 15 bp, Homo sapiens
tctgcatctggctag

SEQ ID NO: 1622769 - DNA, 15 bp, Homo sapiens
ctctgcatctggcta

SEQ ID NO: 1622770 - DNA, 15 bp, Homo sapiens
gctctgcatctggct

SEQ ID NO: 1622771 - DNA, 15 bp, Homo sapiens
agctctgcatctggc

SEQ ID NO: 1622772 - DNA, 15 bp, Homo sapiens
cagctctgcatctgg

SEQ ID NO: 1622773 - DNA, 15 bp, Homo sapiens
ccagctctgcatctg

SEQ ID NO: 1622774 - DNA, 15 bp, Homo sapiens
cccagctctgcatct

SEQ ID NO: 1622775 - DNA, 15 bp, Homo sapiens
ccccagctctgcatc

SEQ ID NO: 1622776 - DNA, 15 bp, Homo sapiens
accccagctctgcat

SEQ ID NO: 1622777 - DNA, 15 bp, Homo sapiens
caccccagctctgca

SEQ ID NO: 1622778 - DNA, 15 bp, Homo sapiens
tcaccccagctctgc

SEQ ID NO: 1622779 - DNA, 15 bp, Homo sapiens
ttcaccccagctctg

SEQ ID NO: 1622780 - DNA, 15 bp, Homo sapiens
cttcaccccagctct

SEQ ID NO: 1622781 - DNA, 15 bp, Homo sapiens
tcttcaccccagctc

SEQ ID NO: 1622782 - DNA, 15 bp, Homo sapiens
atcttcaccccagct

SEQ ID NO: 1622783 - DNA, 15 bp, Homo sapiens
catcttcaccccagc

SEQ ID NO: 1622784 - DNA, 15 bp, Homo sapiens
acatcttcaccccag

SEQ ID NO: 1622785 - DNA, 15 bp, Homo sapiens
cacatcttcacccca

SEQ ID NO: 1622786 - DNA, 15 bp, Homo sapiens
ccacatcttcacccc

SEQ ID NO: 1622787 - DNA, 15 bp, Homo sapiens
tccacatcttcaccc

SEQ ID NO: 1622788 - DNA, 15 bp, Homo sapiens
gtccacatcttcacc

SEQ ID NO: 1622789 - DNA, 15 bp, Homo sapiens
tgtccacatcttcac

SEQ ID NO: 1622790 - DNA, 15 bp, Homo sapiens
atgtccacatcttca

SEQ ID NO: 1622791 - DNA, 15 bp, Homo sapiens
aatgtccacatcttc

SEQ ID NO: 1622792 - DNA, 15 bp, Homo sapiens
caatgtccacatctt

SEQ ID NO: 1622793 - DNA, 15 bp, Homo sapiens
acaatgtccacatct

SEQ ID NO: 1622794 - DNA, 15 bp, Homo sapiens
gacaatgtccacatc

SEQ ID NO: 1622795 - DNA, 15 bp, Homo sapiens
tgacaatgtccacat

SEQ ID NO: 1622796 - DNA, 15 bp, Homo sapiens
gtgacaatgtccaca

SEQ ID NO: 1622797 - DNA, 15 bp, Homo sapiens
agtgacaatgtccac

SEQ ID NO: 1622798 - DNA, 15 bp, Homo sapiens
gagtgacaatgtcca

SEQ ID NO: 1622799 - DNA, 15 bp, Homo sapiens
agagtgacaatgtcc

SEQ ID NO: 1622800 - DNA, 15 bp, Homo sapiens
tagagtgacaatgtc

SEQ ID NO: 1622801 - DNA, 15 bp, Homo sapiens
ttagagtgacaatgt

SEQ ID NO: 1622802 - DNA, 15 bp, Homo sapiens
attagagtgacaatg

SEQ ID NO: 1622803 - DNA, 15 bp, Homo sapiens
cattagagtgacaat

SEQ ID NO: 1622804 - DNA, 15 bp, Homo sapiens
ccattagagtgacaa

SEQ ID NO: 1622805 - DNA, 15 bp, Homo sapiens
tccattagagtgaca

SEQ ID NO: 1622806 - DNA, 15 bp, Homo sapiens
gtccattagagtgac

SEQ ID NO: 1622807 - DNA, 15 bp, Homo sapiens
cgtccattagagtga

SEQ ID NO: 1622808 - DNA, 15 bp, Homo sapiens
acgtccattagagtg

SEQ ID NO: 1622809 - DNA, 15 bp, Homo sapiens
gacgtccattagagt

SEQ ID NO: 1622810 - DNA, 15 bp, Homo sapiens
agacgtccattagag

SEQ ID NO: 1622811 - DNA, 15 bp, Homo sapiens
aagacgtccattaga

SEQ ID NO: 1622812 - DNA, 15 bp, Homo sapiens
aaagacgtccattag

SEQ ID NO: 1622813 - DNA, 15 bp, Homo sapiens
aaaagacgtccatta

SEQ ID NO: 1622814 - DNA, 15 bp, Homo sapiens
gaaaagacgtccatt

SEQ ID NO: 1622815 - DNA, 15 bp, Homo sapiens
ggaaaagacgtccat

SEQ ID NO: 1622816 - DNA, 15 bp, Homo sapiens
gggaaaagacgtcca

SEQ ID NO: 1622817 - DNA, 15 bp, Homo sapiens
ggggaaaagacgtcc

SEQ ID NO: 1622818 - DNA, 15 bp, Homo sapiens
aggggaaaagacgtc

SEQ ID NO: 1622819 - DNA, 15 bp, Homo sapiens
aaggggaaaagacgt

SEQ ID NO: 1622820 - DNA, 15 bp, Homo sapiens
caaggggaaaagacg

SEQ ID NO: 1622821 - DNA, 15 bp, Homo sapiens
ccaaggggaaaagac

SEQ ID NO: 1622822 - DNA, 15 bp, Homo sapiens
gccaaggggaaaaga

SEQ ID NO: 1622823 - DNA, 15 bp, Homo sapiens
ggccaaggggaaaag

SEQ ID NO: 1622824 - DNA, 15 bp, Homo sapiens
aggccaaggggaaaa

SEQ ID NO: 1622825 - DNA, 15 bp, Homo sapiens
caggccaaggggaaa

SEQ ID NO: 1622826 - DNA, 15 bp, Homo sapiens
gcaggccaaggggaa

SEQ ID NO: 1622827 - DNA, 15 bp, Homo sapiens
ggcaggccaagggga

SEQ ID NO: 1622828 - DNA, 15 bp, Homo sapiens
aggcaggccaagggg

SEQ ID NO: 1622829 - DNA, 15 bp, Homo sapiens
gaggcaggccaaggg

SEQ ID NO: 1622830 - DNA, 15 bp, Homo sapiens
agaggcaggccaagg

SEQ ID NO: 1622831 - DNA, 15 bp, Homo sapiens
aagaggcaggccaag

SEQ ID NO: 1622832 - DNA, 15 bp, Homo sapiens
aaagaggcaggccaa

SEQ ID NO: 1622833 - DNA, 15 bp, Homo sapiens
caaagaggcaggcca

SEQ ID NO: 1622834 - DNA, 15 bp, Homo sapiens
ccaaagaggcaggcc

SEQ ID NO: 1622835 - DNA, 15 bp, Homo sapiens
tccaaagaggcaggc

SEQ ID NO: 1622836 - DNA, 15 bp, Homo sapiens
gtccaaagaggcagg

SEQ ID NO: 1622837 - DNA, 15 bp, Homo sapiens
agtccaaagaggcag

SEQ ID NO: 1622838 - DNA, 15 bp, Homo sapiens
cagtccaaagaggca

SEQ ID NO: 1622839 - DNA, 15 bp, Homo sapiens
ccagtccaaagaggc

SEQ ID NO: 1622840 - DNA, 15 bp, Homo sapiens
cccagtccaaagagg

SEQ ID NO: 1622841 - DNA, 15 bp, Homo sapiens
acccagtccaaagag

SEQ ID NO: 1622842 - DNA, 15 bp, Homo sapiens
aacccagtccaaaga

SEQ ID NO: 1622843 - DNA, 15 bp, Homo sapiens
aaacccagtccaaag

SEQ ID NO: 1622844 - DNA, 15 bp, Homo sapiens
gaaacccagtccaaa

SEQ ID NO: 1622845 - DNA, 15 bp, Homo sapiens
agaaacccagtccaa

SEQ ID NO: 1622846 - DNA, 15 bp, Homo sapiens
aagaaacccagtcca

SEQ ID NO: 1622847 - DNA, 15 bp, Homo sapiens
taagaaacccagtcc

SEQ ID NO: 1622848 - DNA, 15 bp, Homo sapiens
ttaagaaacccagtc

SEQ ID NO: 1622849 - DNA, 15 bp, Homo sapiens
cttaagaaacccagt

SEQ ID NO: 1622850 - DNA, 15 bp, Homo sapiens
tcttaagaaacccag

SEQ ID NO: 1622851 - DNA, 15 bp, Homo sapiens
ttcttaagaaaccca

SEQ ID NO: 1622852 - DNA, 15 bp, Homo sapiens
attcttaagaaaccc

SEQ ID NO: 1622853 - DNA, 15 bp, Homo sapiens
cattcttaagaaacc

SEQ ID NO: 1622854 - DNA, 15 bp, Homo sapiens
ccattcttaagaaac

SEQ ID NO: 1622855 - DNA, 15 bp, Homo sapiens
accattcttaagaaa

SEQ ID NO: 1622856 - DNA, 15 bp, Homo sapiens
aaccattcttaagaa

SEQ ID NO: 1622857 - DNA, 15 bp, Homo sapiens
gaaccattcttaaga

SEQ ID NO: 1622858 - DNA, 15 bp, Homo sapiens
ggaaccattcttaag

SEQ ID NO: 1622859 - DNA, 15 bp, Homo sapiens
aggaaccattcttaa

SEQ ID NO: 1622860 - DNA, 15 bp, Homo sapiens
aaggaaccattctta

SEQ ID NO: 1622861 - DNA, 15 bp, Homo sapiens
caaggaaccattctt

SEQ ID NO: 1622862 - DNA, 15 bp, Homo sapiens
acaaggaaccattct

SEQ ID NO: 1622863 - DNA, 15 bp, Homo sapiens
gacaaggaaccattc

SEQ ID NO: 1622864 - DNA, 15 bp, Homo sapiens
ggacaaggaaccatt

SEQ ID NO: 1622865 - DNA, 15 bp, Homo sapiens
tggacaaggaaccat

SEQ ID NO: 1622866 - DNA, 15 bp, Homo sapiens
gtggacaaggaacca

SEQ ID NO: 1622867 - DNA, 15 bp, Homo sapiens
tgtggacaaggaacc

SEQ ID NO: 1622868 - DNA, 15 bp, Homo sapiens
atgtggacaaggaac

SEQ ID NO: 1622869 - DNA, 15 bp, Homo sapiens
aatgtggacaaggaa

SEQ ID NO: 1622870 - DNA, 15 bp, Homo sapiens
aaatgtggacaagga

SEQ ID NO: 1622871 - DNA, 15 bp, Homo sapiens
gaaatgtggacaagg

SEQ ID NO: 1622872 - DNA, 15 bp, Homo sapiens
tgaaatgtggacaag

SEQ ID NO: 1622873 - DNA, 15 bp, Homo sapiens
atgaaatgtggacaa

SEQ ID NO: 1622874 - DNA, 15 bp, Homo sapiens
catgaaatgtggaca

SEQ ID NO: 1622875 - DNA, 15 bp, Homo sapiens
acatgaaatgtggac

SEQ ID NO: 1622876 - DNA, 15 bp, Homo sapiens
gacatgaaatgtgga

SEQ ID NO: 1622877 - DNA, 15 bp, Homo sapiens
agacatgaaatgtgg

SEQ ID NO: 1622878 - DNA, 15 bp, Homo sapiens
cagacatgaaatgtg

SEQ ID NO: 1622879 - DNA, 15 bp, Homo sapiens
acagacatgaaatgt

SEQ ID NO: 1622880 - DNA, 15 bp, Homo sapiens
aacagacatgaaatg

SEQ ID NO: 1622881 - DNA, 15 bp, Homo sapiens
gaacagacatgaaat

SEQ ID NO: 1622882 - DNA, 15 bp, Homo sapiens
ggaacagacatgaaa

SEQ ID NO: 1622883 - DNA, 15 bp, Homo sapiens
gggaacagacatgaa

SEQ ID NO: 1622884 - DNA, 15 bp, Homo sapiens
agggaacagacatga

SEQ ID NO: 1622885 - DNA, 15 bp, Homo sapiens
gagggaacagacatg

SEQ ID NO: 1622886 - DNA, 15 bp, Homo sapiens
tgagggaacagacat

SEQ ID NO: 1622887 - DNA, 15 bp, Homo sapiens
atgagggaacagaca

SEQ ID NO: 1622888 - DNA, 15 bp, Homo sapiens
aatgagggaacagac

SEQ ID NO: 1622889 - DNA, 15 bp, Homo sapiens
gaatgagggaacaga

SEQ ID NO: 1622890 - DNA, 15 bp, Homo sapiens
tgaatgagggaacag

SEQ ID NO: 1622891 - DNA, 15 bp, Homo sapiens
gtgaatgagggaaca

SEQ ID NO: 1622892 - DNA, 15 bp, Homo sapiens
tgtgaatgagggaac

SEQ ID NO: 1622893 - DNA, 15 bp, Homo sapiens
ctgtgaatgagggaa

SEQ ID NO: 1622894 - DNA, 15 bp, Homo sapiens
tctgtgaatgaggga

SEQ ID NO: 1622895 - DNA, 15 bp, Homo sapiens
ctctgtgaatgaggg

SEQ ID NO: 1622896 - DNA, 15 bp, Homo sapiens
gctctgtgaatgagg

SEQ ID NO: 1622897 - DNA, 15 bp, Homo sapiens
cgctctgtgaatgag

SEQ ID NO: 1622898 - DNA, 15 bp, Homo sapiens
tcgctctgtgaatga

SEQ ID NO: 1622899 - DNA, 15 bp, Homo sapiens
ttcgctctgtgaatg

SEQ ID NO: 1622900 - DNA, 15 bp, Homo sapiens
attcgctctgtgaat

SEQ ID NO: 1622901 - DNA, 15 bp, Homo sapiens
cattcgctctgtgaa

SEQ ID NO: 1622902 - DNA, 15 bp, Homo sapiens
tcattcgctctgtga

SEQ ID NO: 1622903 - DNA, 15 bp, Homo sapiens
ttcattcgctctgtg

SEQ ID NO: 1622904 - DNA, 15 bp, Homo sapiens
attcattcgctctgt

SEQ ID NO: 1622905 - DNA, 15 bp, Homo sapiens
cattcattcgctctg

SEQ ID NO: 1622906 - DNA, 15 bp, Homo sapiens
tcattcattcgctct

SEQ ID NO: 1622907 - DNA, 15 bp, Homo sapiens
ctcattcattcgctc

SEQ ID NO: 1622908 - DNA, 15 bp, Homo sapiens
actcattcattcgct

SEQ ID NO: 1622909 - DNA, 15 bp, Homo sapiens
cactcattcattcgc

SEQ ID NO: 1622910 - DNA, 15 bp, Homo sapiens
tcactcattcattcg

SEQ ID NO: 1622911 - DNA, 15 bp, Homo sapiens
ttcactcattcattc

SEQ ID NO: 1622912 - DNA, 15 bp, Homo sapiens
attcactcattcatt

SEQ ID NO: 1622913 - DNA, 15 bp, Homo sapiens
cattcactcattcat

SEQ ID NO: 1622914 - DNA, 15 bp, Homo sapiens
tcattcactcattca

SEQ ID NO: 1622915 - DNA, 15 bp, Homo sapiens
ttcattcactcattc

SEQ ID NO: 1622916 - DNA, 15 bp, Homo sapiens
attcattcactcatt

SEQ ID NO: 1622917 - DNA, 15 bp, Homo sapiens
cattcattcactcat

SEQ ID NO: 1622918 - DNA, 15 bp, Homo sapiens
tcattcattcactca

SEQ ID NO: 1622919 - DNA, 15 bp, Homo sapiens
ttcattcattcactc

SEQ ID NO: 1622920 - DNA, 15 bp, Homo sapiens
cttcattcattcact

SEQ ID NO: 1622921 - DNA, 15 bp, Homo sapiens
ccttcattcattcac

SEQ ID NO: 1622922 - DNA, 15 bp, Homo sapiens
tccttcattcattca

SEQ ID NO: 1622923 - DNA, 15 bp, Homo sapiens
atccttcattcattc

SEQ ID NO: 1622924 - DNA, 15 bp, Homo sapiens
gatccttcattcatt

SEQ ID NO: 1622925 - DNA, 15 bp, Homo sapiens
agatccttcattcat

SEQ ID NO: 1622926 - DNA, 15 bp, Homo sapiens
cagatccttcattca

SEQ ID NO: 1622927 - DNA, 15 bp, Homo sapiens
gcagatccttcattc

SEQ ID NO: 1622928 - DNA, 15 bp, Homo sapiens
agcagatccttcatt

SEQ ID NO: 1622929 - DNA, 15 bp, Homo sapiens
aagcagatccttcat

SEQ ID NO: 1622930 - DNA, 15 bp, Homo sapiens
taagcagatccttca

SEQ ID NO: 1622931 - DNA, 15 bp, Homo sapiens
ctaagcagatccttc

SEQ ID NO: 1622932 - DNA, 15 bp, Homo sapiens
tctaagcagatcctt

SEQ ID NO: 1622933 - DNA, 15 bp, Homo sapiens
atctaagcagatcct

SEQ ID NO: 1622934 - DNA, 15 bp, Homo sapiens
gatctaagcagatcc

SEQ ID NO: 1622935 - DNA, 15 bp, Homo sapiens
agatctaagcagatc

SEQ ID NO: 1622936 - DNA, 15 bp, Homo sapiens
cagatctaagcagat

SEQ ID NO: 1622937 - DNA, 15 bp, Homo sapiens
ccagatctaagcaga

SEQ ID NO: 1622938 - DNA, 15 bp, Homo sapiens
gccagatctaagcag

SEQ ID NO: 1622939 - DNA, 15 bp, Homo sapiens
agccagatctaagca

SEQ ID NO: 1622940 - DNA, 15 bp, Homo sapiens
cagccagatctaagc

SEQ ID NO: 1622941 - DNA, 15 bp, Homo sapiens
gcagccagatctaag

SEQ ID NO: 1622942 - DNA, 15 bp, Homo sapiens
ggcagccagatctaa

SEQ ID NO: 1622943 - DNA, 15 bp, Homo sapiens
tggcagccagatcta

SEQ ID NO: 1622944 - DNA, 15 bp, Homo sapiens
gtggcagccagatct

SEQ ID NO: 1622945 - DNA, 15 bp, Homo sapiens
tgtggcagccagatc

SEQ ID NO: 1622946 - DNA, 15 bp, Homo sapiens
gtgtggcagccagat

SEQ ID NO: 1622947 - DNA, 15 bp, Homo sapiens
agtgtggcagccaga

SEQ ID NO: 1622948 - DNA, 15 bp, Homo sapiens
aagtgtggcagccag

SEQ ID NO: 1622949 - DNA, 15 bp, Homo sapiens
gaagtgtggcagcca

SEQ ID NO: 1622950 - DNA, 15 bp, Homo sapiens
agaagtgtggcagcc

SEQ ID NO: 1622951 - DNA, 15 bp, Homo sapiens
aagaagtgtggcagc

SEQ ID NO: 1622952 - DNA, 15 bp, Homo sapiens
caagaagtgtggcag

SEQ ID NO: 1622953 - DNA, 15 bp, Homo sapiens
ccaagaagtgtggca

SEQ ID NO: 1622954 - DNA, 15 bp, Homo sapiens
cccaagaagtgtggc

SEQ ID NO: 1622955 - DNA, 15 bp, Homo sapiens
tcccaagaagtgtgg

SEQ ID NO: 1622956 - DNA, 15 bp, Homo sapiens
gtcccaagaagtgtg

SEQ ID NO: 1622957 - DNA, 15 bp, Homo sapiens
ggtcccaagaagtgt

SEQ ID NO: 1622958 - DNA, 15 bp, Homo sapiens
gggtcccaagaagtg

SEQ ID NO: 1622959 - DNA, 15 bp, Homo sapiens
tgggtcccaagaagt

SEQ ID NO: 1622960 - DNA, 15 bp, Homo sapiens
ctgggtcccaagaag

SEQ ID NO: 1622961 - DNA, 15 bp, Homo sapiens
gctgggtcccaagaa

SEQ ID NO: 1622962 - DNA, 15 bp, Homo sapiens
agctgggtcccaaga

SEQ ID NO: 1622963 - DNA, 15 bp, Homo sapiens
tagctgggtcccaag

SEQ ID NO: 1622964 - DNA, 15 bp, Homo sapiens
ctagctgggtcccaa

SEQ ID NO: 1622965 - DNA, 15 bp, Homo sapiens
gctagctgggtccca

SEQ ID NO: 1622966 - DNA, 15 bp, Homo sapiens
agctagctgggtccc

SEQ ID NO: 1622967 - DNA, 15 bp, Homo sapiens
cagctagctgggtcc

SEQ ID NO: 1622968 - DNA, 15 bp, Homo sapiens
ccagctagctgggtc

SEQ ID NO: 1622969 - DNA, 15 bp, Homo sapiens
gccagctagctgggt

SEQ ID NO: 1622970 - DNA, 15 bp, Homo sapiens
ggccagctagctggg

SEQ ID NO: 1622971 - DNA, 15 bp, Homo sapiens
aggccagctagctgg

SEQ ID NO: 1622972 - DNA, 15 bp, Homo sapiens
aaggccagctagctg

SEQ ID NO: 1622973 - DNA, 15 bp, Homo sapiens
taaggccagctagct

SEQ ID NO: 1622974 - DNA, 15 bp, Homo sapiens
ttaaggccagctagc

SEQ ID NO: 1622975 - DNA, 15 bp, Homo sapiens
tttaaggccagctag

SEQ ID NO: 1622976 - DNA, 15 bp, Homo sapiens
ctttaaggccagcta

SEQ ID NO: 1622977 - DNA, 15 bp, Homo sapiens
tctttaaggccagct

SEQ ID NO: 1622978 - DNA, 15 bp, Homo sapiens
atctttaaggccagc

SEQ ID NO: 1622979 - DNA, 15 bp, Homo sapiens
catctttaaggccag

SEQ ID NO: 1622980 - DNA, 15 bp, Homo sapiens
ccatctttaaggcca

SEQ ID NO: 1622981 - DNA, 15 bp, Homo sapiens
tccatctttaaggcc

SEQ ID NO: 1622982 - DNA, 15 bp, Homo sapiens
ctccatctttaaggc

SEQ ID NO: 1622983 - DNA, 15 bp, Homo sapiens
gctccatctttaagg

SEQ ID NO: 1622984 - DNA, 15 bp, Homo sapiens
tgctccatctttaag

SEQ ID NO: 1622985 - DNA, 15 bp, Homo sapiens
ttgctccatctttaa

SEQ ID NO: 1622986 - DNA, 15 bp, Homo sapiens
gttgctccatcttta

SEQ ID NO: 1622987 - DNA, 15 bp, Homo sapiens
tgttgctccatcttt

SEQ ID NO: 1622988 - DNA, 15 bp, Homo sapiens
atgttgctccatctt

SEQ ID NO: 1622989 - DNA, 15 bp, Homo sapiens
tatgttgctccatct

SEQ ID NO: 1622990 - DNA, 15 bp, Homo sapiens
atatgttgctccatc

SEQ ID NO: 1622991 - DNA, 15 bp, Homo sapiens
catatgttgctccat

SEQ ID NO: 1622992 - DNA, 15 bp, Homo sapiens
ccatatgttgctcca

SEQ ID NO: 1622993 - DNA, 15 bp, Homo sapiens
accatatgttgctcc

SEQ ID NO: 1622994 - DNA, 15 bp, Homo sapiens
gaccatatgttgctc

SEQ ID NO: 1622995 - DNA, 15 bp, Homo sapiens
agaccatatgttgct

SEQ ID NO: 1622996 - DNA, 15 bp, Homo sapiens
gagaccatatgttgc

SEQ ID NO: 1622997 - DNA, 15 bp, Homo sapiens
agagaccatatgttg

SEQ ID NO: 1622998 - DNA, 15 bp, Homo sapiens
gagagaccatatgtt

SEQ ID NO: 1622999 - DNA, 15 bp, Homo sapiens
agagagaccatatgt

SEQ ID NO: 1623000 - DNA, 15 bp, Homo sapiens
gagagagaccatatg

SEQ ID NO: 1623001 - DNA, 15 bp, Homo sapiens
tgagagagaccatat

SEQ ID NO: 1623002 - DNA, 15 bp, Homo sapiens
ttgagagagaccata

SEQ ID NO: 1623003 - DNA, 15 bp, Homo sapiens
cttgagagagaccat

SEQ ID NO: 1623004 - DNA, 15 bp, Homo sapiens
ccttgagagagacca

SEQ ID NO: 1623005 - DNA, 15 bp, Homo sapiens
accttgagagagacc

SEQ ID NO: 1623006 - DNA, 15 bp, Homo sapiens
gaccttgagagagac

SEQ ID NO: 1623007 - DNA, 15 bp, Homo sapiens
agaccttgagagaga

SEQ ID NO: 1623008 - DNA, 15 bp, Homo sapiens
gagaccttgagagag

SEQ ID NO: 1623009 - DNA, 15 bp, Homo sapiens
agagaccttgagaga

SEQ ID NO: 1623010 - DNA, 15 bp, Homo sapiens
cagagaccttgagag

SEQ ID NO: 1623011 - DNA, 15 bp, Homo sapiens
ccagagaccttgaga

SEQ ID NO: 1623012 - DNA, 15 bp, Homo sapiens
cccagagaccttgag

SEQ ID NO: 1623013 - DNA, 15 bp, Homo sapiens
acccagagaccttga

SEQ ID NO: 1623014 - DNA, 15 bp, Homo sapiens
cacccagagaccttg

SEQ ID NO: 1623015 - DNA, 15 bp, Homo sapiens
tcacccagagacctt

SEQ ID NO: 1623016 - DNA, 15 bp, Homo sapiens
ctcacccagagacct

SEQ ID NO: 1623017 - DNA, 15 bp, Homo sapiens
gctcacccagagacc

SEQ ID NO: 1623018 - DNA, 15 bp, Homo sapiens
tgctcacccagagac

SEQ ID NO: 1623019 - DNA, 15 bp, Homo sapiens
ctgctcacccagaga

SEQ ID NO: 1623020 - DNA, 15 bp, Homo sapiens
actgctcacccagag

SEQ ID NO: 1623021 - DNA, 15 bp, Homo sapiens
aactgctcacccaga

SEQ ID NO: 1623022 - DNA, 15 bp, Homo sapiens
caactgctcacccag

SEQ ID NO: 1623023 - DNA, 15 bp, Homo sapiens
acaactgctcaccca

SEQ ID NO: 1623024 - DNA, 15 bp, Homo sapiens
gacaactgctcaccc

SEQ ID NO: 1623025 - DNA, 15 bp, Homo sapiens
agacaactgctcacc

SEQ ID NO: 1623026 - DNA, 15 bp, Homo sapiens
tagacaactgctcac

SEQ ID NO: 1623027 - DNA, 15 bp, Homo sapiens
ctagacaactgctca

SEQ ID NO: 1623028 - DNA, 15 bp, Homo sapiens
cctagacaactgctc

SEQ ID NO: 1623029 - DNA, 15 bp, Homo sapiens
ccctagacaactgct

SEQ ID NO: 1623030 - DNA, 15 bp, Homo sapiens
gccctagacaactgc

SEQ ID NO: 1623031 - DNA, 15 bp, Homo sapiens
tgccctagacaactg

SEQ ID NO: 1623032 - DNA, 15 bp, Homo sapiens
atgccctagacaact

SEQ ID NO: 1623033 - DNA, 15 bp, Homo sapiens
gatgccctagacaac

SEQ ID NO: 1623034 - DNA, 15 bp, Homo sapiens
agatgccctagacaa

SEQ ID NO: 1623035 - DNA, 15 bp, Homo sapiens
aagatgccctagaca

SEQ ID NO: 1623036 - DNA, 15 bp, Homo sapiens
taagatgccctagac

SEQ ID NO: 1623037 - DNA, 15 bp, Homo sapiens
ctaagatgccctaga

SEQ ID NO: 1623038 - DNA, 15 bp, Homo sapiens
gctaagatgccctag

SEQ ID NO: 1623039 - DNA, 15 bp, Homo sapiens
ggctaagatgcccta

SEQ ID NO: 1623040 - DNA, 15 bp, Homo sapiens
tggctaagatgccct

SEQ ID NO: 1623041 - DNA, 15 bp, Homo sapiens
gtggctaagatgccc

SEQ ID NO: 1623042 - DNA, 15 bp, Homo sapiens
cgtggctaagatgcc

SEQ ID NO: 1623043 - DNA, 15 bp, Homo sapiens
acgtggctaagatgc

SEQ ID NO: 1623044 - DNA, 15 bp, Homo sapiens
aacgtggctaagatg

SEQ ID NO: 1623045 - DNA, 15 bp, Homo sapiens
caacgtggctaagat

SEQ ID NO: 1623046 - DNA, 15 bp, Homo sapiens
acaacgtggctaaga

SEQ ID NO: 1623047 - DNA, 15 bp, Homo sapiens
cacaacgtggctaag

SEQ ID NO: 1623048 - DNA, 15 bp, Homo sapiens
acacaacgtggctaa

SEQ ID NO: 1623049 - DNA, 15 bp, Homo sapiens
gacacaacgtggcta

SEQ ID NO: 1623050 - DNA, 15 bp, Homo sapiens
agacacaacgtggct

SEQ ID NO: 1623051 - DNA, 15 bp, Homo sapiens
tagacacaacgtggc

SEQ ID NO: 1623052 - DNA, 15 bp, Homo sapiens
atagacacaacgtgg

SEQ ID NO: 1623053 - DNA, 15 bp, Homo sapiens
aatagacacaacgtg

SEQ ID NO: 1623054 - DNA, 15 bp, Homo sapiens
aaatagacacaacgt

SEQ ID NO: 1623055 - DNA, 15 bp, Homo sapiens
aaaatagacacaacg

SEQ ID NO: 1623056 - DNA, 15 bp, Homo sapiens
aaaaatagacacaac

SEQ ID NO: 1623057 - DNA, 15 bp, Homo sapiens
caaaaatagacacaa

SEQ ID NO: 1623058 - DNA, 15 bp, Homo sapiens
tcaaaaatagacaca

SEQ ID NO: 1623059 - DNA, 15 bp, Homo sapiens
atcaaaaatagacac

SEQ ID NO: 1623060 - DNA, 15 bp, Homo sapiens
aatcaaaaatagaca

SEQ ID NO: 1623061 - DNA, 15 bp, Homo sapiens
aaatcaaaaatagac

SEQ ID NO: 1623062 - DNA, 15 bp, Homo sapiens
tgaaaaatcaaaaat

SEQ ID NO: 1623063 - DNA, 15 bp, Homo sapiens
ttgaaaaatcaaaaa

SEQ ID NO: 1623064 - DNA, 15 bp, Homo sapiens
tttgaaaaatcaaaa

SEQ ID NO: 1623065 - DNA, 15 bp, Homo sapiens
atttgaaaaatcaaa

SEQ ID NO: 1623066 - DNA, 15 bp, Homo sapiens
gatttgaaaaatcaa

SEQ ID NO: 1623067 - DNA, 15 bp, Homo sapiens
agatttgaaaaatca

SEQ ID NO: 1623068 - DNA, 15 bp, Homo sapiens
aagatttgaaaaatc

SEQ ID NO: 1623069 - DNA, 15 bp, Homo sapiens
caagatttgaaaaat

SEQ ID NO: 1623070 - DNA, 15 bp, Homo sapiens
acaagatttgaaaaa

SEQ ID NO: 1623071 - DNA, 15 bp, Homo sapiens
gacaagatttgaaaa

SEQ ID NO: 1623072 - DNA, 15 bp, Homo sapiens
ggacaagatttgaaa

SEQ ID NO: 1623073 - DNA, 15 bp, Homo sapiens
gggacaagatttgaa

SEQ ID NO: 1623074 - DNA, 15 bp, Homo sapiens
cgggacaagatttga

SEQ ID NO: 1623075 - DNA, 15 bp, Homo sapiens
gcgggacaagatttg

SEQ ID NO: 1623076 - DNA, 15 bp, Homo sapiens
ggcgggacaagattt

SEQ ID NO: 1623077 - DNA, 15 bp, Homo sapiens
tggcgggacaagatt

SEQ ID NO: 1623078 - DNA, 15 bp, Homo sapiens
ttggcgggacaagat

SEQ ID NO: 1623079 - DNA, 15 bp, Homo sapiens
tttggcgggacaaga

SEQ ID NO: 1623080 - DNA, 15 bp, Homo sapiens
ctttggcgggacaag

SEQ ID NO: 1623081 - DNA, 15 bp, Homo sapiens
gctttggcgggacaa

SEQ ID NO: 1623082 - DNA, 15 bp, Homo sapiens
ggctttggcgggaca

SEQ ID NO: 1623083 - DNA, 15 bp, Homo sapiens
aggctttggcgggac

SEQ ID NO: 1623084 - DNA, 15 bp, Homo sapiens
acaggctttggcggg

SEQ ID NO: 1623085 - DNA, 15 bp, Homo sapiens
tacaggctttggcgg

SEQ ID NO: 1623086 - DNA, 15 bp, Homo sapiens
ttacaggctttggcg

SEQ ID NO: 1623087 - DNA, 15 bp, Homo sapiens
attacaggctttggc

SEQ ID NO: 1623088 - DNA, 15 bp, Homo sapiens
gattacaggctttgg

SEQ ID NO: 1623089 - DNA, 15 bp, Homo sapiens
agattacaggctttg

SEQ ID NO: 1623090 - DNA, 15 bp, Homo sapiens
cagattacaggcttt

SEQ ID NO: 1623091 - DNA, 15 bp, Homo sapiens
tcagattacaggctt

SEQ ID NO: 1623092 - DNA, 15 bp, Homo sapiens
gtcagattacaggct

SEQ ID NO: 1623093 - DNA, 15 bp, Homo sapiens
agtcagattacaggc

SEQ ID NO: 1623094 - DNA, 15 bp, Homo sapiens
cagtcagattacagg

SEQ ID NO: 1623095 - DNA, 15 bp, Homo sapiens
gcagtcagattacag

SEQ ID NO: 1623096 - DNA, 15 bp, Homo sapiens
tgcagtcagattaca

SEQ ID NO: 1623097 - DNA, 15 bp, Homo sapiens
ttgcagtcagattac

SEQ ID NO: 1623098 - DNA, 15 bp, Homo sapiens
tttgcagtcagatta

SEQ ID NO: 1623099 - DNA, 15 bp, Homo sapiens
ctttgcagtcagatt

SEQ ID NO: 1623100 - DNA, 15 bp, Homo sapiens
tctttgcagtcagat

SEQ ID NO: 1623101 - DNA, 15 bp, Homo sapiens
ctctttgcagtcaga

SEQ ID NO: 1623102 - DNA, 15 bp, Homo sapiens
cctctttgcagtcag

SEQ ID NO: 1623103 - DNA, 15 bp, Homo sapiens
acctctttgcagtca

SEQ ID NO: 1623104 - DNA, 15 bp, Homo sapiens
gacctctttgcagtc

SEQ ID NO: 1623105 - DNA, 15 bp, Homo sapiens
ggacctctttgcagt

SEQ ID NO: 1623106 - DNA, 15 bp, Homo sapiens
ggcccccagacttga

SEQ ID NO: 1623107 - DNA, 15 bp, Homo sapiens
cggcccccagacttg

SEQ ID NO: 1623108 - DNA, 15 bp, Homo sapiens
tcggcccccagactt

SEQ ID NO: 1623109 - DNA, 15 bp, Homo sapiens
gtcggcccccagact

SEQ ID NO: 1623110 - DNA, 15 bp, Homo sapiens
agtcggcccccagac

SEQ ID NO: 1623111 - DNA, 15 bp, Homo sapiens
gagtcggcccccaga

SEQ ID NO: 1623112 - DNA, 15 bp, Homo sapiens
ggagtcggcccccag

SEQ ID NO: 1623113 - DNA, 15 bp, Homo sapiens
tggagtcggccccca

SEQ ID NO: 1623114 - DNA, 15 bp, Homo sapiens
gtggagtcggccccc

SEQ ID NO: 1623115 - DNA, 15 bp, Homo sapiens
tgtggagtcggcccc

SEQ ID NO: 1623116 - DNA, 15 bp, Homo sapiens
ctgtggagtcggccc

SEQ ID NO: 1623117 - DNA, 15 bp, Homo sapiens
gctgtggagtcggcc

SEQ ID NO: 1623118 - DNA, 15 bp, Homo sapiens
agctgtggagtcggc

SEQ ID NO: 1623119 - DNA, 15 bp, Homo sapiens
cagctgtggagtcgg

SEQ ID NO: 1623120 - DNA, 15 bp, Homo sapiens
ccagctgtggagtcg

SEQ ID NO: 1623121 - DNA, 15 bp, Homo sapiens
accagctgtggagtc

SEQ ID NO: 1623122 - DNA, 15 bp, Homo sapiens
gaccagctgtggagt

SEQ ID NO: 1623123 - DNA, 15 bp, Homo sapiens
ggaccagctgtggag

SEQ ID NO: 1623124 - DNA, 15 bp, Homo sapiens
gggaccagctgtgga

SEQ ID NO: 1623125 - DNA, 15 bp, Homo sapiens
cgggaccagctgtgg

SEQ ID NO: 1623126 - DNA, 15 bp, Homo sapiens
ccgggaccagctgtg

SEQ ID NO: 1623127 - DNA, 15 bp, Homo sapiens
accgggaccagctgt

SEQ ID NO: 1623128 - DNA, 15 bp, Homo sapiens
caccgggaccagctg

SEQ ID NO: 1623129 - DNA, 15 bp, Homo sapiens
ccaccgggaccagct

SEQ ID NO: 1623130 - DNA, 15 bp, Homo sapiens
gccaccgggaccagc

SEQ ID NO: 1623131 - DNA, 15 bp, Homo sapiens
ggccaccgggaccag

SEQ ID NO: 1623132 - DNA, 15 bp, Homo sapiens
aggccaccgggacca

SEQ ID NO: 1623133 - DNA, 15 bp, Homo sapiens
gaggccaccgggacc

SEQ ID NO: 1623134 - DNA, 15 bp, Homo sapiens
agaggccaccgggac

SEQ ID NO: 1623135 - DNA, 15 bp, Homo sapiens
cagaggccaccggga

SEQ ID NO: 1623136 - DNA, 15 bp, Homo sapiens
gcagaggccaccggg

SEQ ID NO: 1623137 - DNA, 15 bp, Homo sapiens
cgcagaggccaccgg

SEQ ID NO: 1623138 - DNA, 15 bp, Homo sapiens
gcgcagaggccaccg

SEQ ID NO: 1623139 - DNA, 15 bp, Homo sapiens
tgcgcagaggccacc

SEQ ID NO: 1623140 - DNA, 15 bp, Homo sapiens
gtgcgcagaggccac

SEQ ID NO: 1623141 - DNA, 15 bp, Homo sapiens
agtgcgcagaggcca

SEQ ID NO: 1623142 - DNA, 15 bp, Homo sapiens
cagtgcgcagaggcc

SEQ ID NO: 1623143 - DNA, 15 bp, Homo sapiens
gcagtgcgcagaggc

SEQ ID NO: 1623144 - DNA, 15 bp, Homo sapiens
cgcagtgcgcagagg

SEQ ID NO: 1623145 - DNA, 15 bp, Homo sapiens
acgcagtgcgcagag

SEQ ID NO: 1623146 - DNA, 15 bp, Homo sapiens
gacgcagtgcgcaga

SEQ ID NO: 1623147 - DNA, 15 bp, Homo sapiens
ggacgcagtgcgcag

SEQ ID NO: 1623148 - DNA, 15 bp, Homo sapiens
aggacgcagtgcgca

SEQ ID NO: 1623149 - DNA, 15 bp, Homo sapiens
gaggacgcagtgcgc

SEQ ID NO: 1623150 - DNA, 15 bp, Homo sapiens
ggaggacgcagtgcg

SEQ ID NO: 1623151 - DNA, 15 bp, Homo sapiens
gggaggacgcagtgc

SEQ ID NO: 1623152 - DNA, 15 bp, Homo sapiens
cgggaggacgcagtg

SEQ ID NO: 1623153 - DNA, 15 bp, Homo sapiens
ccgggaggacgcagt

SEQ ID NO: 1623154 - DNA, 15 bp, Homo sapiens
accgggaggacgcag

SEQ ID NO: 1623155 - DNA, 15 bp, Homo sapiens
aaccgggaggacgca

SEQ ID NO: 1623156 - DNA, 15 bp, Homo sapiens
gaaccgggaggacgc

SEQ ID NO: 1623157 - DNA, 15 bp, Homo sapiens
agaaccgggaggacg

SEQ ID NO: 1623158 - DNA, 15 bp, Homo sapiens
gagaaccgggaggac

SEQ ID NO: 1623159 - DNA, 15 bp, Homo sapiens
ggagaaccgggagga

SEQ ID NO: 1623160 - DNA, 15 bp, Homo sapiens
cggagaaccgggagg

SEQ ID NO: 1623161 - DNA, 15 bp, Homo sapiens
acggagaaccgggag

SEQ ID NO: 1623162 - DNA, 15 bp, Homo sapiens
cacggagaaccggga

SEQ ID NO: 1623163 - DNA, 15 bp, Homo sapiens
acacggagaaccggg

SEQ ID NO: 1623164 - DNA, 15 bp, Homo sapiens
cacacggagaaccgg

SEQ ID NO: 1623165 - DNA, 15 bp, Homo sapiens
acacacggagaaccg

SEQ ID NO: 1623166 - DNA, 15 bp, Homo sapiens
gacacacggagaacc

SEQ ID NO: 1623167 - DNA, 15 bp, Homo sapiens
agacacacggagaac

SEQ ID NO: 1623168 - DNA, 15 bp, Homo sapiens
cagacacacggagaa

SEQ ID NO: 1623169 - DNA, 15 bp, Homo sapiens
tcagacacacggaga

SEQ ID NO: 1623170 - DNA, 15 bp, Homo sapiens
ctcagacacacggag

SEQ ID NO: 1623171 - DNA, 15 bp, Homo sapiens
gctcagacacacgga

SEQ ID NO: 1623172 - DNA, 15 bp, Homo sapiens
tgctcagacacacgg

SEQ ID NO: 1623173 - DNA, 15 bp, Homo sapiens
ctgctcagacacacg

SEQ ID NO: 1623174 - DNA, 15 bp, Homo sapiens
cctgctcagacacac

SEQ ID NO: 1623175 - DNA, 15 bp, Homo sapiens
acctgctcagacaca

SEQ ID NO: 1623176 - DNA, 15 bp, Homo sapiens
gacctgctcagacac

SEQ ID NO: 1623177 - DNA, 15 bp, Homo sapiens
cgacctgctcagaca

SEQ ID NO: 1623178 - DNA, 15 bp, Homo sapiens
tcgacctgctcagac

SEQ ID NO: 1623179 - DNA, 15 bp, Homo sapiens
gtcgacctgctcaga

SEQ ID NO: 1623180 - DNA, 15 bp, Homo sapiens
agtcgacctgctcag

SEQ ID NO: 1623181 - DNA, 15 bp, Homo sapiens
cagtcgacctgctca

SEQ ID NO: 1623182 - DNA, 15 bp, Homo sapiens
gcagtcgacctgctc

SEQ ID NO: 1623183 - DNA, 15 bp, Homo sapiens
tgcagtcgacctgct

SEQ ID NO: 1623184 - DNA, 15 bp, Homo sapiens
atgcagtcgacctgc

SEQ ID NO: 1623185 - DNA, 15 bp, Homo sapiens
catgcagtcgacctg

SEQ ID NO: 1623186 - DNA, 15 bp, Homo sapiens
gcatgcagtcgacct

SEQ ID NO: 1623187 - DNA, 15 bp, Homo sapiens
agcatgcagtcgacc

SEQ ID NO: 1623188 - DNA, 15 bp, Homo sapiens
aagcatgcagtcgac

SEQ ID NO: 1623189 - DNA, 15 bp, Homo sapiens
taagcatgcagtcga

SEQ ID NO: 1623190 - DNA, 15 bp, Homo sapiens
ttaagcatgcagtcg

SEQ ID NO: 1623191 - DNA, 15 bp, Homo sapiens
cttaagcatgcagtc

SEQ ID NO: 1623192 - DNA, 15 bp, Homo sapiens
ccttaagcatgcagt

SEQ ID NO: 1623193 - DNA, 15 bp, Homo sapiens
gccttaagcatgcag

SEQ ID NO: 1623194 - DNA, 15 bp, Homo sapiens
cgccttaagcatgca

SEQ ID NO: 1623195 - DNA, 15 bp, Homo sapiens
ccgccttaagcatgc

SEQ ID NO: 1623196 - DNA, 15 bp, Homo sapiens
cccgccttaagcatg

SEQ ID NO: 1623197 - DNA, 15 bp, Homo sapiens
gcccgccttaagcat

SEQ ID NO: 1623198 - DNA, 15 bp, Homo sapiens
cgcccgccttaagca

SEQ ID NO: 1623199 - DNA, 15 bp, Homo sapiens
ccgcccgccttaagc

SEQ ID NO: 1623200 - DNA, 15 bp, Homo sapiens
gccgcccgccttaag

SEQ ID NO: 1623201 - DNA, 15 bp, Homo sapiens
cgccgcccgccttaa

SEQ ID NO: 1623202 - DNA, 15 bp, Homo sapiens
ccgccgcccgcctta

SEQ ID NO: 1623203 - DNA, 15 bp, Homo sapiens
cccgccgcccgcctt

SEQ ID NO: 1623204 - DNA, 15 bp, Homo sapiens
ccccgccgcccgcct

SEQ ID NO: 1623205 - DNA, 15 bp, Homo sapiens
cccccgccgcccgcc

SEQ ID NO: 1623206 - DNA, 15 bp, Homo sapiens
ccccccgccgcccgc

SEQ ID NO: 1623207 - DNA, 15 bp, Homo sapiens
accccccgccgcccg

SEQ ID NO: 1623208 - DNA, 15 bp, Homo sapiens
caccccccgccgccc

SEQ ID NO: 1623209 - DNA, 15 bp, Homo sapiens
gcaccccccgccgcc

SEQ ID NO: 1623210 - DNA, 15 bp, Homo sapiens
ggcaccccccgccgc

SEQ ID NO: 1623211 - DNA, 15 bp, Homo sapiens
gggcaccccccgccg

SEQ ID NO: 1623212 - DNA, 15 bp, Homo sapiens
agggcaccccccgcc

SEQ ID NO: 1623213 - DNA, 15 bp, Homo sapiens
aagggcaccccccgc

SEQ ID NO: 1623214 - DNA, 15 bp, Homo sapiens
gaagggcaccccccg

SEQ ID NO: 1623215 - DNA, 15 bp, Homo sapiens
agaagggcacccccc

SEQ ID NO: 1623216 - DNA, 15 bp, Homo sapiens
aagaagggcaccccc

SEQ ID NO: 1623217 - DNA, 15 bp, Homo sapiens
taagaagggcacccc

SEQ ID NO: 1623218 - DNA, 15 bp, Homo sapiens
ataagaagggcaccc

SEQ ID NO: 1623219 - DNA, 15 bp, Homo sapiens
tataagaagggcacc

SEQ ID NO: 1623220 - DNA, 15 bp, Homo sapiens
atataagaagggcac

SEQ ID NO: 1623221 - DNA, 15 bp, Homo sapiens
aatataagaagggca

SEQ ID NO: 1623222 - DNA, 15 bp, Homo sapiens
gaatataagaagggc

SEQ ID NO: 1623223 - DNA, 15 bp, Homo sapiens
agaatataagaaggg

SEQ ID NO: 1623224 - DNA, 15 bp, Homo sapiens
gagaatataagaagg

SEQ ID NO: 1623225 - DNA, 15 bp, Homo sapiens
agagaatataagaag

SEQ ID NO: 1623226 - DNA, 15 bp, Homo sapiens
aagagaatataagaa

SEQ ID NO: 1623227 - DNA, 15 bp, Homo sapiens
gaagagaatataaga

SEQ ID NO: 1623228 - DNA, 15 bp, Homo sapiens
ggaagagaatataag

SEQ ID NO: 1623229 - DNA, 15 bp, Homo sapiens
aggaagagaatataa

SEQ ID NO: 1623230 - DNA, 15 bp, Homo sapiens
caggaagagaatata

SEQ ID NO: 1623231 - DNA, 15 bp, Homo sapiens
ccaggaagagaatat

SEQ ID NO: 1623232 - DNA, 15 bp, Homo sapiens
cccaggaagagaata

SEQ ID NO: 1623233 - DNA, 15 bp, Homo sapiens
gcccaggaagagaat

SEQ ID NO: 1623234 - DNA, 15 bp, Homo sapiens
agcccaggaagagaa

SEQ ID NO: 1623235 - DNA, 15 bp, Homo sapiens
cagcccaggaagaga

SEQ ID NO: 1623236 - DNA, 15 bp, Homo sapiens
gcagcccaggaagag

SEQ ID NO: 1623237 - DNA, 15 bp, Homo sapiens
ggcagcccaggaaga

SEQ ID NO: 1623238 - DNA, 15 bp, Homo sapiens
gggcagcccaggaag

SEQ ID NO: 1623239 - DNA, 15 bp, Homo sapiens
ggggcagcccaggaa

SEQ ID NO: 1623240 - DNA, 15 bp, Homo sapiens
aggggcagcccagga

SEQ ID NO: 1623241 - DNA, 15 bp, Homo sapiens
aaggggcagcccagg

SEQ ID NO: 1623242 - DNA, 15 bp, Homo sapiens
gaaggggcagcccag

SEQ ID NO: 1623243 - DNA, 15 bp, Homo sapiens
ggaaggggcagccca

SEQ ID NO: 1623244 - DNA, 15 bp, Homo sapiens
aggaaggggcagccc

SEQ ID NO: 1623245 - DNA, 15 bp, Homo sapiens
aaggaaggggcagcc

SEQ ID NO: 1623246 - DNA, 15 bp, Homo sapiens
aaaggaaggggcagc

SEQ ID NO: 1623247 - DNA, 15 bp, Homo sapiens
aaaaggaaggggcag

SEQ ID NO: 1623248 - DNA, 15 bp, Homo sapiens
gaaaaggaaggggca

SEQ ID NO: 1623249 - DNA, 15 bp, Homo sapiens
agaaaaggaaggggc

SEQ ID NO: 1623250 - DNA, 15 bp, Homo sapiens
cagaaaaggaagggg

SEQ ID NO: 1623251 - DNA, 15 bp, Homo sapiens
acagaaaaggaaggg

SEQ ID NO: 1623252 - DNA, 15 bp, Homo sapiens
cacagaaaaggaagg

SEQ ID NO: 1623253 - DNA, 15 bp, Homo sapiens
gcacagaaaaggaag

SEQ ID NO: 1623254 - DNA, 15 bp, Homo sapiens
tgcacagaaaaggaa

SEQ ID NO: 1623255 - DNA, 15 bp, Homo sapiens
atgcacagaaaagga

SEQ ID NO: 1623256 - DNA, 15 bp, Homo sapiens
gatgcacagaaaagg

SEQ ID NO: 1623257 - DNA, 15 bp, Homo sapiens
tgatgcacagaaaag

SEQ ID NO: 1623258 - DNA, 15 bp, Homo sapiens
gtgatgcacagaaaa

SEQ ID NO: 1623259 - DNA, 15 bp, Homo sapiens
ggtgatgcacagaaa

SEQ ID NO: 1623260 - DNA, 15 bp, Homo sapiens
tggtgatgcacagaa

SEQ ID NO: 1623261 - DNA, 15 bp, Homo sapiens
ctggtgatgcacaga

SEQ ID NO: 1623262 - DNA, 15 bp, Homo sapiens
cctggtgatgcacag

SEQ ID NO: 1623263 - DNA, 15 bp, Homo sapiens
ccctggtgatgcaca

SEQ ID NO: 1623264 - DNA, 15 bp, Homo sapiens
tccctggtgatgcac

SEQ ID NO: 1623265 - DNA, 15 bp, Homo sapiens
ttccctggtgatgca

SEQ ID NO: 1623266 - DNA, 15 bp, Homo sapiens
gttccctggtgatgc

SEQ ID NO: 1623267 - DNA, 15 bp, Homo sapiens
tgttccctggtgatg

SEQ ID NO: 1623268 - DNA, 15 bp, Homo sapiens
ctgttccctggtgat

SEQ ID NO: 1623269 - DNA, 15 bp, Homo sapiens
gctgttccctggtga

SEQ ID NO: 1623270 - DNA, 15 bp, Homo sapiens
tgctgttccctggtg

SEQ ID NO: 1623271 - DNA, 15 bp, Homo sapiens
ctgctgttccctggt

SEQ ID NO: 1623272 - DNA, 15 bp, Homo sapiens
cctgctgttccctgg

SEQ ID NO: 1623273 - DNA, 15 bp, Homo sapiens
ccctgctgttccctg

SEQ ID NO: 1623274 - DNA, 15 bp, Homo sapiens
accctgctgttccct

SEQ ID NO: 1623275 - DNA, 15 bp, Homo sapiens
gaccctgctgttccc

SEQ ID NO: 1623276 - DNA, 15 bp, Homo sapiens
ggaccctgctgttcc

SEQ ID NO: 1623277 - DNA, 15 bp, Homo sapiens
gggaccctgctgttc

SEQ ID NO: 1623278 - DNA, 15 bp, Homo sapiens
agggaccctgctgtt

SEQ ID NO: 1623279 - DNA, 15 bp, Homo sapiens
aagggaccctgctgt

SEQ ID NO: 1623280 - DNA, 15 bp, Homo sapiens
gaagggaccctgctg

SEQ ID NO: 1623281 - DNA, 15 bp, Homo sapiens
cgaagggaccctgct

SEQ ID NO: 1623282 - DNA, 15 bp, Homo sapiens
tcgaagggaccctgc

SEQ ID NO: 1623283 - DNA, 15 bp, Homo sapiens
ctcgaagggaccctg

SEQ ID NO: 1623284 - DNA, 15 bp, Homo sapiens
cctcgaagggaccct

SEQ ID NO: 1623285 - DNA, 15 bp, Homo sapiens
gcctcgaagggaccc

SEQ ID NO: 1623286 - DNA, 15 bp, Homo sapiens
agcctcgaagggacc

SEQ ID NO: 1623287 - DNA, 15 bp, Homo sapiens
aagcctcgaagggac

SEQ ID NO: 1623288 - DNA, 15 bp, Homo sapiens
aaagcctcgaaggga

SEQ ID NO: 1623289 - DNA, 15 bp, Homo sapiens
caaagcctcgaaggg

SEQ ID NO: 1623290 - DNA, 15 bp, Homo sapiens
acaaagcctcgaagg

SEQ ID NO: 1623291 - DNA, 15 bp, Homo sapiens
gacaaagcctcgaag

SEQ ID NO: 1623292 - DNA, 15 bp, Homo sapiens
ggacaaagcctcgaa

SEQ ID NO: 1623293 - DNA, 15 bp, Homo sapiens
aggacaaagcctcga

SEQ ID NO: 1623294 - DNA, 15 bp, Homo sapiens
taggacaaagcctcg

SEQ ID NO: 1623295 - DNA, 15 bp, Homo sapiens
ttaggacaaagcctc

SEQ ID NO: 1623296 - DNA, 15 bp, Homo sapiens
attaggacaaagcct

SEQ ID NO: 1623297 - DNA, 15 bp, Homo sapiens
gattaggacaaagcc

SEQ ID NO: 1623298 - DNA, 15 bp, Homo sapiens
tgattaggacaaagc

SEQ ID NO: 1623299 - DNA, 15 bp, Homo sapiens
atgattaggacaaag

SEQ ID NO: 1623300 - DNA, 15 bp, Homo sapiens
gatgattaggacaaa

SEQ ID NO: 1623301 - DNA, 15 bp, Homo sapiens
tgatgattaggacaa

SEQ ID NO: 1623302 - DNA, 15 bp, Homo sapiens
gtgatgattaggaca

SEQ ID NO: 1623303 - DNA, 15 bp, Homo sapiens
ggtgatgattaggac

SEQ ID NO: 1623304 - DNA, 15 bp, Homo sapiens
gggtgatgattagga

SEQ ID NO: 1623305 - DNA, 15 bp, Homo sapiens
ggggtgatgattagg

SEQ ID NO: 1623306 - DNA, 15 bp, Homo sapiens
cggggtgatgattag

SEQ ID NO: 1623307 - DNA, 15 bp, Homo sapiens
gcggggtgatgatta

SEQ ID NO: 1623308 - DNA, 15 bp, Homo sapiens
ggcggggtgatgatt

SEQ ID NO: 1623309 - DNA, 15 bp, Homo sapiens
tggcggggtgatgat

SEQ ID NO: 1623310 - DNA, 15 bp, Homo sapiens
ttggcggggtgatga

SEQ ID NO: 1623311 - DNA, 15 bp, Homo sapiens
tttggcggggtgatg

SEQ ID NO: 1623312 - DNA, 15 bp, Homo sapiens
gtttggcggggtgat

SEQ ID NO: 1623313 - DNA, 15 bp, Homo sapiens
agtttggcggggtga

SEQ ID NO: 1623314 - DNA, 15 bp, Homo sapiens
aagtttggcggggtg

SEQ ID NO: 1623315 - DNA, 15 bp, Homo sapiens
aaagtttggcggggt

SEQ ID NO: 1623316 - DNA, 15 bp, Homo sapiens
caaagtttggcgggg

SEQ ID NO: 1623317 - DNA, 15 bp, Homo sapiens
gcaaagtttggcggg

SEQ ID NO: 1623318 - DNA, 15 bp, Homo sapiens
agcaaagtttggcgg

SEQ ID NO: 1623319 - DNA, 15 bp, Homo sapiens
cagcaaagtttggcg

SEQ ID NO: 1623320 - DNA, 15 bp, Homo sapiens
ccagcaaagtttggc

SEQ ID NO: 1623321 - DNA, 15 bp, Homo sapiens
accagcaaagtttgg

SEQ ID NO: 1623322 - DNA, 15 bp, Homo sapiens
caccagcaaagtttg

SEQ ID NO: 1623323 - DNA, 15 bp, Homo sapiens
gcaccagcaaagttt

SEQ ID NO: 1623324 - DNA, 15 bp, Homo sapiens
tgcaccagcaaagtt

SEQ ID NO: 1623325 - DNA, 15 bp, Homo sapiens
ctgcaccagcaaagt

SEQ ID NO: 1623326 - DNA, 15 bp, Homo sapiens
tctgcaccagcaaag

SEQ ID NO: 1623327 - DNA, 15 bp, Homo sapiens
ctctgcaccagcaaa

SEQ ID NO: 1623328 - DNA, 15 bp, Homo sapiens
actctgcaccagcaa

SEQ ID NO: 1623329 - DNA, 15 bp, Homo sapiens
cactctgcaccagca

SEQ ID NO: 1623330 - DNA, 15 bp, Homo sapiens
gcactctgcaccagc

SEQ ID NO: 1623331 - DNA, 15 bp, Homo sapiens
tgcactctgcaccag

SEQ ID NO: 1623332 - DNA, 15 bp, Homo sapiens
gtgcactctgcacca

SEQ ID NO: 1623333 - DNA, 15 bp, Homo sapiens
ggtgcactctgcacc

SEQ ID NO: 1623334 - DNA, 15 bp, Homo sapiens
gggtgcactctgcac

SEQ ID NO: 1623335 - DNA, 15 bp, Homo sapiens
agggtgcactctgca

SEQ ID NO: 1623336 - DNA, 15 bp, Homo sapiens
cagggtgcactctgc

SEQ ID NO: 1623337 - DNA, 15 bp, Homo sapiens
ccagggtgcactctg

SEQ ID NO: 1623338 - DNA, 15 bp, Homo sapiens
gccagggtgcactct

SEQ ID NO: 1623339 - DNA, 15 bp, Homo sapiens
ggccagggtgcactc

SEQ ID NO: 1623340 - DNA, 15 bp, Homo sapiens
aggccagggtgcact

SEQ ID NO: 1623341 - DNA, 15 bp, Homo sapiens
gaggccagggtgcac

SEQ ID NO: 1623342 - DNA, 15 bp, Homo sapiens
agaggccagggtgca

SEQ ID NO: 1623343 - DNA, 15 bp, Homo sapiens
gagaggccagggtgc

SEQ ID NO: 1623344 - DNA, 15 bp, Homo sapiens
ggagaggccagggtg

SEQ ID NO: 1623345 - DNA, 15 bp, Homo sapiens
gggagaggccagggt

SEQ ID NO: 1623346 - DNA, 15 bp, Homo sapiens
agggagaggccaggg

SEQ ID NO: 1623347 - DNA, 15 bp, Homo sapiens
aagggagaggccagg

SEQ ID NO: 1623348 - DNA, 15 bp, Homo sapiens
gaagggagaggccag

SEQ ID NO: 1623349 - DNA, 15 bp, Homo sapiens
ggaagggagaggcca

SEQ ID NO: 1623350 - DNA, 15 bp, Homo sapiens
cggaagggagaggcc

SEQ ID NO: 1623351 - DNA, 15 bp, Homo sapiens
ccggaagggagaggc

SEQ ID NO: 1623352 - DNA, 15 bp, Homo sapiens
cccggaagggagagg

SEQ ID NO: 1623353 - DNA, 15 bp, Homo sapiens
ccccggaagggagag

SEQ ID NO: 1623354 - DNA, 15 bp, Homo sapiens
cccccggaagggaga

SEQ ID NO: 1623355 - DNA, 15 bp, Homo sapiens
acccccggaagggag

SEQ ID NO: 1623356 - DNA, 15 bp, Homo sapiens
tacccccggaaggga

SEQ ID NO: 1623357 - DNA, 15 bp, Homo sapiens
ctacccccggaaggg

SEQ ID NO: 1623358 - DNA, 15 bp, Homo sapiens
actacccccggaagg

SEQ ID NO: 1623359 - DNA, 15 bp, Homo sapiens
gactacccccggaag

SEQ ID NO: 1623360 - DNA, 15 bp, Homo sapiens
agactacccccggaa

SEQ ID NO: 1623361 - DNA, 15 bp, Homo sapiens
cagactacccccgga

SEQ ID NO: 1623362 - DNA, 15 bp, Homo sapiens
tcagactacccccgg

SEQ ID NO: 1623363 - DNA, 15 bp, Homo sapiens
ctcagactacccccg

SEQ ID NO: 1623364 - DNA, 15 bp, Homo sapiens
tctcagactaccccc

SEQ ID NO: 1623365 - DNA, 15 bp, Homo sapiens
gtctcagactacccc

SEQ ID NO: 1623366 - DNA, 15 bp, Homo sapiens
ggtctcagactaccc

SEQ ID NO: 1623367 - DNA, 15 bp, Homo sapiens
tggtctcagactacc

SEQ ID NO: 1623368 - DNA, 15 bp, Homo sapiens
ctggtctcagactac

SEQ ID NO: 1623369 - DNA, 15 bp, Homo sapiens
cctggtctcagacta

SEQ ID NO: 1623370 - DNA, 15 bp, Homo sapiens
ccctggtctcagact

SEQ ID NO: 1623371 - DNA, 15 bp, Homo sapiens
tccctggtctcagac

SEQ ID NO: 1623372 - DNA, 15 bp, Homo sapiens
gtccctggtctcaga

SEQ ID NO: 1623373 - DNA, 15 bp, Homo sapiens
tgtccctggtctcag

SEQ ID NO: 1623374 - DNA, 15 bp, Homo sapiens
atgtccctggtctca

SEQ ID NO: 1623375 - DNA, 15 bp, Homo sapiens
catgtccctggtctc

SEQ ID NO: 1623376 - DNA, 15 bp, Homo sapiens
acatgtccctggtct

SEQ ID NO: 1623377 - DNA, 15 bp, Homo sapiens
aacatgtccctggtc

SEQ ID NO: 1623378 - DNA, 15 bp, Homo sapiens
gaacatgtccctggt

SEQ ID NO: 1623379 - DNA, 15 bp, Homo sapiens
agaacatgtccctgg

SEQ ID NO: 1623380 - DNA, 15 bp, Homo sapiens
gagaacatgtccctg

SEQ ID NO: 1623381 - DNA, 15 bp, Homo sapiens
ggagaacatgtccct

SEQ ID NO: 1623382 - DNA, 15 bp, Homo sapiens
tggagaacatgtccc

SEQ ID NO: 1623383 - DNA, 15 bp, Homo sapiens
ttggagaacatgtcc

SEQ ID NO: 1623384 - DNA, 15 bp, Homo sapiens
attggagaacatgtc

SEQ ID NO: 1623385 - DNA, 15 bp, Homo sapiens
gattggagaacatgt

SEQ ID NO: 1623386 - DNA, 15 bp, Homo sapiens
tgattggagaacatg

SEQ ID NO: 1623387 - DNA, 15 bp, Homo sapiens
ttgattggagaacat

SEQ ID NO: 1623388 - DNA, 15 bp, Homo sapiens
tttgattggagaaca

SEQ ID NO: 1623389 - DNA, 15 bp, Homo sapiens
ctttgattggagaac

SEQ ID NO: 1623390 - DNA, 15 bp, Homo sapiens
cctttgattggagaa

SEQ ID NO: 1623391 - DNA, 15 bp, Homo sapiens
gcctttgattggaga

SEQ ID NO: 1623392 - DNA, 15 bp, Homo sapiens
tgcctttgattggag

SEQ ID NO: 1623393 - DNA, 15 bp, Homo sapiens
gtgcctttgattgga

SEQ ID NO: 1623394 - DNA, 15 bp, Homo sapiens
ggtgcctttgattgg

SEQ ID NO: 1623395 - DNA, 15 bp, Homo sapiens
tggtgcctttgattg

SEQ ID NO: 1623396 - DNA, 15 bp, Homo sapiens
ttggtgcctttgatt

SEQ ID NO: 1623397 - DNA, 15 bp, Homo sapiens
cttggtgcctttgat

SEQ ID NO: 1623398 - DNA, 15 bp, Homo sapiens
acttggtgcctttga

SEQ ID NO: 1623399 - DNA, 15 bp, Homo sapiens
cacttggtgcctttg

SEQ ID NO: 1623400 - DNA, 15 bp, Homo sapiens
tcacttggtgccttt

SEQ ID NO: 1623401 - DNA, 15 bp, Homo sapiens
ctcacttggtgcctt

SEQ ID NO: 1623402 - DNA, 15 bp, Homo sapiens
cctcacttggtgcct

SEQ ID NO: 1623403 - DNA, 15 bp, Homo sapiens
gcctcacttggtgcc

SEQ ID NO: 1623404 - DNA, 15 bp, Homo sapiens
agcctcacttggtgc

SEQ ID NO: 1623405 - DNA, 15 bp, Homo sapiens
gagcctcacttggtg

SEQ ID NO: 1623406 - DNA, 15 bp, Homo sapiens
ggagcctcacttggt

SEQ ID NO: 1623407 - DNA, 15 bp, Homo sapiens
gggagcctcacttgg

SEQ ID NO: 1623408 - DNA, 15 bp, Homo sapiens
cgggagcctcacttg

SEQ ID NO: 1623409 - DNA, 15 bp, Homo sapiens
ccgggagcctcactt

SEQ ID NO: 1623410 - DNA, 15 bp, Homo sapiens
cccgggagcctcact

SEQ ID NO: 1623411 - DNA, 15 bp, Homo sapiens
ccccgggagcctcac

SEQ ID NO: 1623412 - DNA, 15 bp, Homo sapiens
tccccgggagcctca

SEQ ID NO: 1623413 - DNA, 15 bp, Homo sapiens
ctccccgggagcctc

SEQ ID NO: 1623414 - DNA, 15 bp, Homo sapiens
cctccccgggagcct

SEQ ID NO: 1623415 - DNA, 15 bp, Homo sapiens
gcctccccgggagcc

SEQ ID NO: 1623416 - DNA, 15 bp, Homo sapiens
ggcctccccgggagc

SEQ ID NO: 1623417 - DNA, 15 bp, Homo sapiens
tggcctccccgggag

SEQ ID NO: 1623418 - DNA, 15 bp, Homo sapiens
gtggcctccccggga

SEQ ID NO: 1623419 - DNA, 15 bp, Homo sapiens
ggtggcctccccggg

SEQ ID NO: 1623420 - DNA, 15 bp, Homo sapiens
aggtggcctccccgg

SEQ ID NO: 1623421 - DNA, 15 bp, Homo sapiens
caggtggcctccccg

SEQ ID NO: 1623422 - DNA, 15 bp, Homo sapiens
acaggtggcctcccc

SEQ ID NO: 1623423 - DNA, 15 bp, Homo sapiens
aacaggtggcctccc

SEQ ID NO: 1623424 - DNA, 15 bp, Homo sapiens
gaacaggtggcctcc

SEQ ID NO: 1623425 - DNA, 15 bp, Homo sapiens
ggaacaggtggcctc

SEQ ID NO: 1623426 - DNA, 15 bp, Homo sapiens
aggaacaggtggcct

SEQ ID NO: 1623427 - DNA, 15 bp, Homo sapiens
taggaacaggtggcc

SEQ ID NO: 1623428 - DNA, 15 bp, Homo sapiens
ctaggaacaggtggc

SEQ ID NO: 1623429 - DNA, 15 bp, Homo sapiens
gctaggaacaggtgg

SEQ ID NO: 1623430 - DNA, 15 bp, Homo sapiens
ggctaggaacaggtg

SEQ ID NO: 1623431 - DNA, 15 bp, Homo sapiens
gggctaggaacaggt

SEQ ID NO: 1623432 - DNA, 15 bp, Homo sapiens
tgggctaggaacagg

SEQ ID NO: 1623433 - DNA, 15 bp, Homo sapiens
ctgggctaggaacag

SEQ ID NO: 1623434 - DNA, 15 bp, Homo sapiens
cctgggctaggaaca

SEQ ID NO: 1623435 - DNA, 15 bp, Homo sapiens
ccctgggctaggaac

SEQ ID NO: 1623436 - DNA, 15 bp, Homo sapiens
gccctgggctaggaa

SEQ ID NO: 1623437 - DNA, 15 bp, Homo sapiens
agccctgggctagga

SEQ ID NO: 1623438 - DNA, 15 bp, Homo sapiens
gagccctgggctagg

SEQ ID NO: 1623439 - DNA, 15 bp, Homo sapiens
ggagccctgggctag

SEQ ID NO: 1623440 - DNA, 15 bp, Homo sapiens
gggagccctgggcta

SEQ ID NO: 1623441 - DNA, 15 bp, Homo sapiens
tgggagccctgggct

SEQ ID NO: 1623442 - DNA, 15 bp, Homo sapiens
ctgggagccctgggc

SEQ ID NO: 1623443 - DNA, 15 bp, Homo sapiens
actgggagccctggg

SEQ ID NO: 1623444 - DNA, 15 bp, Homo sapiens
cactgggagccctgg

SEQ ID NO: 1623445 - DNA, 15 bp, Homo sapiens
tcactgggagccctg

SEQ ID NO: 1623446 - DNA, 15 bp, Homo sapiens
gtcactgggagccct

SEQ ID NO: 1623447 - DNA, 15 bp, Homo sapiens
ggtcactgggagccc

SEQ ID NO: 1623448 - DNA, 15 bp, Homo sapiens
gggtcactgggagcc

SEQ ID NO: 1623449 - DNA, 15 bp, Homo sapiens
ggggtcactgggagc

SEQ ID NO: 1623450 - DNA, 15 bp, Homo sapiens
cggggtcactgggag

SEQ ID NO: 1623451 - DNA, 15 bp, Homo sapiens
ccggggtcactggga

SEQ ID NO: 1623452 - DNA, 15 bp, Homo sapiens
cccggggtcactggg

SEQ ID NO: 1623453 - DNA, 15 bp, Homo sapiens
ccccggggtcactgg

SEQ ID NO: 1623454 - DNA, 15 bp, Homo sapiens
cccccggggtcactg

SEQ ID NO: 1623455 - DNA, 15 bp, Homo sapiens
gcccccggggtcact

SEQ ID NO: 1623456 - DNA, 15 bp, Homo sapiens
agcccccggggtcac

SEQ ID NO: 1623457 - DNA, 15 bp, Homo sapiens
cagcccccggggtca

SEQ ID NO: 1623458 - DNA, 15 bp, Homo sapiens
ccagcccccggggtc

SEQ ID NO: 1623459 - DNA, 15 bp, Homo sapiens
tccagcccccggggt

SEQ ID NO: 1623460 - DNA, 15 bp, Homo sapiens
gtccagcccccgggg

SEQ ID NO: 1623461 - DNA, 15 bp, Homo sapiens
agtccagcccccggg

SEQ ID NO: 1623462 - DNA, 15 bp, Homo sapiens
gagtccagcccccgg

SEQ ID NO: 1623463 - DNA, 15 bp, Homo sapiens
ggagtccagcccccg

SEQ ID NO: 1623464 - DNA, 15 bp, Homo sapiens
gggagtccagccccc

SEQ ID NO: 1623465 - DNA, 15 bp, Homo sapiens
tgggagtccagcccc

SEQ ID NO: 1623466 - DNA, 15 bp, Homo sapiens
gtgggagtccagccc

SEQ ID NO: 1623467 - DNA, 15 bp, Homo sapiens
ggtgggagtccagcc

SEQ ID NO: 1623468 - DNA, 15 bp, Homo sapiens
gggtgggagtccagc

SEQ ID NO: 1623469 - DNA, 15 bp, Homo sapiens
tgggtgggagtccag

SEQ ID NO: 1623470 - DNA, 15 bp, Homo sapiens
atgggtgggagtcca

SEQ ID NO: 1623471 - DNA, 15 bp, Homo sapiens
gatgggtgggagtcc

SEQ ID NO: 1623472 - DNA, 15 bp, Homo sapiens
ggatgggtgggagtc

SEQ ID NO: 1623473 - DNA, 15 bp, Homo sapiens
aggatgggtgggagt

SEQ ID NO: 1623474 - DNA, 15 bp, Homo sapiens
caggatgggtgggag

SEQ ID NO: 1623475 - DNA, 15 bp, Homo sapiens
gcaggatgggtggga

SEQ ID NO: 1623476 - DNA, 15 bp, Homo sapiens
tgcaggatgggtggg

SEQ ID NO: 1623477 - DNA, 15 bp, Homo sapiens
ctgcaggatgggtgg

SEQ ID NO: 1623478 - DNA, 15 bp, Homo sapiens
cctgcaggatgggtg

SEQ ID NO: 1623479 - DNA, 15 bp, Homo sapiens
ccctgcaggatgggt

SEQ ID NO: 1623480 - DNA, 15 bp, Homo sapiens
cccctgcaggatggg

SEQ ID NO: 1623481 - DNA, 15 bp, Homo sapiens
gcccctgcaggatgg

SEQ ID NO: 1623482 - DNA, 15 bp, Homo sapiens
ggcccctgcaggatg

SEQ ID NO: 1623483 - DNA, 15 bp, Homo sapiens
cggcccctgcaggat

SEQ ID NO: 1623484 - DNA, 15 bp, Homo sapiens
gcggcccctgcagga

SEQ ID NO: 1623485 - DNA, 15 bp, Homo sapiens
ggcggcccctgcagg

SEQ ID NO: 1623486 - DNA, 15 bp, Homo sapiens
gggcggcccctgcag

SEQ ID NO: 1623487 - DNA, 15 bp, Homo sapiens
cgggcggcccctgca

SEQ ID NO: 1623488 - DNA, 15 bp, Homo sapiens
gcgggcggcccctgc

SEQ ID NO: 1623489 - DNA, 15 bp, Homo sapiens
agcgggcggcccctg

SEQ ID NO: 1623490 - DNA, 15 bp, Homo sapiens
gagcgggcggcccct

SEQ ID NO: 1623491 - DNA, 15 bp, Homo sapiens
agagcgggcggcccc

SEQ ID NO: 1623492 - DNA, 15 bp, Homo sapiens
cagagcgggcggccc

SEQ ID NO: 1623493 - DNA, 15 bp, Homo sapiens
gcagagcgggcggcc

SEQ ID NO: 1623494 - DNA, 15 bp, Homo sapiens
cgcagagcgggcggc

SEQ ID NO: 1623495 - DNA, 15 bp, Homo sapiens
gcgcagagcgggcgg

SEQ ID NO: 1623496 - DNA, 15 bp, Homo sapiens
ggcgcagagcgggcg

SEQ ID NO: 1623497 - DNA, 15 bp, Homo sapiens
aggcgcagagcgggc

SEQ ID NO: 1623498 - DNA, 15 bp, Homo sapiens
aaggcgcagagcggg

SEQ ID NO: 1623499 - DNA, 15 bp, Homo sapiens
aaaggcgcagagcgg

SEQ ID NO: 1623500 - DNA, 15 bp, Homo sapiens
taaaggcgcagagcg

SEQ ID NO: 1623501 - DNA, 15 bp, Homo sapiens
ataaaggcgcagagc

SEQ ID NO: 1623502 - DNA, 15 bp, Homo sapiens
gataaaggcgcagag

SEQ ID NO: 1623503 - DNA, 15 bp, Homo sapiens
tgataaaggcgcaga

SEQ ID NO: 1623504 - DNA, 15 bp, Homo sapiens
ctgataaaggcgcag

SEQ ID NO: 1623505 - DNA, 15 bp, Homo sapiens
gctgataaaggcgca

SEQ ID NO: 1623506 - DNA, 15 bp, Homo sapiens
ggctgataaaggcgc

SEQ ID NO: 1623507 - DNA, 15 bp, Homo sapiens
gggctgataaaggcg

SEQ ID NO: 1623508 - DNA, 15 bp, Homo sapiens
ggggctgataaaggc

SEQ ID NO: 1623509 - DNA, 15 bp, Homo sapiens
gggggctgataaagg

SEQ ID NO: 1623510 - DNA, 15 bp, Homo sapiens
ggggggctgataaag

SEQ ID NO: 1623511 - DNA, 15 bp, Homo sapiens
aggggggctgataaa

SEQ ID NO: 1623512 - DNA, 15 bp, Homo sapiens
caggggggctgataa

SEQ ID NO: 1623513 - DNA, 15 bp, Homo sapiens
gcaggggggctgata

SEQ ID NO: 1623514 - DNA, 15 bp, Homo sapiens
cgcaggggggctgat

SEQ ID NO: 1623515 - DNA, 15 bp, Homo sapiens
ccgcaggggggctga

SEQ ID NO: 1623516 - DNA, 15 bp, Homo sapiens
tccgcaggggggctg

SEQ ID NO: 1623517 - DNA, 15 bp, Homo sapiens
ttccgcaggggggct

SEQ ID NO: 1623518 - DNA, 15 bp, Homo sapiens
gttccgcaggggggc

SEQ ID NO: 1623519 - DNA, 15 bp, Homo sapiens
ggttccgcagggggg

SEQ ID NO: 1623520 - DNA, 15 bp, Homo sapiens
aggttccgcaggggg

SEQ ID NO: 1623521 - DNA, 15 bp, Homo sapiens
caggttccgcagggg

SEQ ID NO: 1623522 - DNA, 15 bp, Homo sapiens
ccaggttccgcaggg

SEQ ID NO: 1623523 - DNA, 15 bp, Homo sapiens
cccaggttccgcagg

SEQ ID NO: 1623524 - DNA, 15 bp, Homo sapiens
ccccaggttccgcag

SEQ ID NO: 1623525 - DNA, 15 bp, Homo sapiens
cccccaggttccgca

SEQ ID NO: 1623526 - DNA, 15 bp, Homo sapiens
ccccccaggttccgc

SEQ ID NO: 1623527 - DNA, 15 bp, Homo sapiens
cccccccaggttccg

SEQ ID NO: 1623528 - DNA, 15 bp, Homo sapiens
tcccccccaggttcc

SEQ ID NO: 1623529 - DNA, 15 bp, Homo sapiens
ctcccccccaggttc

SEQ ID NO: 1623530 - DNA, 15 bp, Homo sapiens
cctcccccccaggtt

SEQ ID NO: 1623531 - DNA, 15 bp, Homo sapiens
gcctcccccccaggt

SEQ ID NO: 1623532 - DNA, 15 bp, Homo sapiens
ggcctcccccccagg

SEQ ID NO: 1623533 - DNA, 15 bp, Homo sapiens
gggcctcccccccag

SEQ ID NO: 1623534 - DNA, 15 bp, Homo sapiens
tgggcctccccccca

SEQ ID NO: 1623535 - DNA, 15 bp, Homo sapiens
ctgggcctccccccc

SEQ ID NO: 1623536 - DNA, 15 bp, Homo sapiens
actgggcctcccccc

SEQ ID NO: 1623537 - DNA, 15 bp, Homo sapiens
cactgggcctccccc

SEQ ID NO: 1623538 - DNA, 15 bp, Homo sapiens
acactgggcctcccc

SEQ ID NO: 1623539 - DNA, 15 bp, Homo sapiens
gacactgggcctccc

SEQ ID NO: 1623540 - DNA, 15 bp, Homo sapiens
agacactgggcctcc

SEQ ID NO: 1623541 - DNA, 15 bp, Homo sapiens
gagacactgggcctc

SEQ ID NO: 1623542 - DNA, 15 bp, Homo sapiens
ggagacactgggcct

SEQ ID NO: 1623543 - DNA, 15 bp, Homo sapiens
tggagacactgggcc

SEQ ID NO: 1623544 - DNA, 15 bp, Homo sapiens
gtggagacactgggc

SEQ ID NO: 1623545 - DNA, 15 bp, Homo sapiens
ggtggagacactggg

SEQ ID NO: 1623546 - DNA, 15 bp, Homo sapiens
aggtggagacactgg

SEQ ID NO: 1623547 - DNA, 15 bp, Homo sapiens
taggtggagacactg

SEQ ID NO: 1623548 - DNA, 15 bp, Homo sapiens
gtaggtggagacact

SEQ ID NO: 1623549 - DNA, 15 bp, Homo sapiens
ggtaggtggagacac

SEQ ID NO: 1623550 - DNA, 15 bp, Homo sapiens
cggtaggtggagaca

SEQ ID NO: 1623551 - DNA, 15 bp, Homo sapiens
ccggtaggtggagac

SEQ ID NO: 1623552 - DNA, 15 bp, Homo sapiens
cccggtaggtggaga

SEQ ID NO: 1623553 - DNA, 15 bp, Homo sapiens
gcccggtaggtggag

SEQ ID NO: 1623554 - DNA, 15 bp, Homo sapiens
cgcccggtaggtgga

SEQ ID NO: 1623555 - DNA, 15 bp, Homo sapiens
acgcccggtaggtgg

SEQ ID NO: 1623556 - DNA, 15 bp, Homo sapiens
aacgcccggtaggtg

SEQ ID NO: 1623557 - DNA, 15 bp, Homo sapiens
aaacgcccggtaggt

SEQ ID NO: 1623558 - DNA, 15 bp, Homo sapiens
gaaacgcccggtagg

SEQ ID NO: 1623559 - DNA, 15 bp, Homo sapiens
ggaaacgcccggtag

SEQ ID NO: 1623560 - DNA, 15 bp, Homo sapiens
aggaaacgcccggta

SEQ ID NO: 1623561 - DNA, 15 bp, Homo sapiens
caggaaacgcccggt

SEQ ID NO: 1623562 - DNA, 15 bp, Homo sapiens
acaggaaacgcccgg

SEQ ID NO: 1623563 - DNA, 15 bp, Homo sapiens
tacaggaaacgcccg

SEQ ID NO: 1623564 - DNA, 15 bp, Homo sapiens
ctacaggaaacgccc

SEQ ID NO: 1623565 - DNA, 15 bp, Homo sapiens
cctacaggaaacgcc

SEQ ID NO: 1623566 - DNA, 15 bp, Homo sapiens
tcctacaggaaacgc

SEQ ID NO: 1623567 - DNA, 15 bp, Homo sapiens
gtcctacaggaaacg

SEQ ID NO: 1623568 - DNA, 15 bp, Homo sapiens
ggtcctacaggaaac

SEQ ID NO: 1623569 - DNA, 15 bp, Homo sapiens
gggtcctacaggaaa

SEQ ID NO: 1623570 - DNA, 15 bp, Homo sapiens
ggggtcctacaggaa

SEQ ID NO: 1623571 - DNA, 15 bp, Homo sapiens
gggggtcctacagga

SEQ ID NO: 1623572 - DNA, 15 bp, Homo sapiens
agggggtcctacagg

SEQ ID NO: 1623573 - DNA, 15 bp, Homo sapiens
aagggggtcctacag

SEQ ID NO: 1623574 - DNA, 15 bp, Homo sapiens
caagggggtcctaca

SEQ ID NO: 1623575 - DNA, 15 bp, Homo sapiens
acaagggggtcctac

SEQ ID NO: 1623576 - DNA, 15 bp, Homo sapiens
aacaagggggtccta

SEQ ID NO: 1623577 - DNA, 15 bp, Homo sapiens
aaacaagggggtcct

SEQ ID NO: 1623578 - DNA, 15 bp, Homo sapiens
caaacaagggggtcc

SEQ ID NO: 1623579 - DNA, 15 bp, Homo sapiens
ccaaacaagggggtc

SEQ ID NO: 1623580 - DNA, 15 bp, Homo sapiens
tccaaacaagggggt

SEQ ID NO: 1623581 - DNA, 15 bp, Homo sapiens
gtccaaacaaggggg

SEQ ID NO: 1623582 - DNA, 15 bp, Homo sapiens
tgtccaaacaagggg

SEQ ID NO: 1623583 - DNA, 15 bp, Homo sapiens
atgtccaaacaaggg

SEQ ID NO: 1623584 - DNA, 15 bp, Homo sapiens
catgtccaaacaagg

SEQ ID NO: 1623585 - DNA, 15 bp, Homo sapiens
acatgtccaaacaag

SEQ ID NO: 1623586 - DNA, 15 bp, Homo sapiens
cacatgtccaaacaa

SEQ ID NO: 1623587 - DNA, 15 bp, Homo sapiens
ccacatgtccaaaca

SEQ ID NO: 1623588 - DNA, 15 bp, Homo sapiens
cccacatgtccaaac

SEQ ID NO: 1623589 - DNA, 15 bp, Homo sapiens
ccccacatgtccaaa

SEQ ID NO: 1623590 - DNA, 15 bp, Homo sapiens
gccccacatgtccaa

SEQ ID NO: 1623591 - DNA, 15 bp, Homo sapiens
tgccccacatgtcca

SEQ ID NO: 1623592 - DNA, 15 bp, Homo sapiens
ttgccccacatgtcc

SEQ ID NO: 1623593 - DNA, 15 bp, Homo sapiens
tttgccccacatgtc

SEQ ID NO: 1623594 - DNA, 15 bp, Homo sapiens
ctttgccccacatgt

SEQ ID NO: 1623595 - DNA, 15 bp, Homo sapiens
gctttgccccacatg

SEQ ID NO: 1623596 - DNA, 15 bp, Homo sapiens
ggctttgccccacat

SEQ ID NO: 1623597 - DNA, 15 bp, Homo sapiens
gggctttgccccaca

SEQ ID NO: 1623598 - DNA, 15 bp, Homo sapiens
agggctttgccccac

SEQ ID NO: 1623599 - DNA, 15 bp, Homo sapiens
tagggctttgcccca

SEQ ID NO: 1623600 - DNA, 15 bp, Homo sapiens
ctagggctttgcccc

SEQ ID NO: 1623601 - DNA, 15 bp, Homo sapiens
tctagggctttgccc

SEQ ID NO: 1623602 - DNA, 15 bp, Homo sapiens
ttctagggctttgcc

SEQ ID NO: 1623603 - DNA, 15 bp, Homo sapiens
gttctagggctttgc

SEQ ID NO: 1623604 - DNA, 15 bp, Homo sapiens
agttctagggctttg

SEQ ID NO: 1623605 - DNA, 15 bp, Homo sapiens
cagttctagggcttt

SEQ ID NO: 1623606 - DNA, 15 bp, Homo sapiens
tcagttctagggctt

SEQ ID NO: 1623607 - DNA, 15 bp, Homo sapiens
atcagttctagggct

SEQ ID NO: 1623608 - DNA, 15 bp, Homo sapiens
gatcagttctagggc

SEQ ID NO: 1623609 - DNA, 15 bp, Homo sapiens
tgatcagttctaggg

SEQ ID NO: 1623610 - DNA, 15 bp, Homo sapiens
gtgatcagttctagg

SEQ ID NO: 1623611 - DNA, 15 bp, Homo sapiens
agtgatcagttctag

SEQ ID NO: 1623612 - DNA, 15 bp, Homo sapiens
cagtgatcagttcta

SEQ ID NO: 1623613 - DNA, 15 bp, Homo sapiens
ccagtgatcagttct

SEQ ID NO: 1623614 - DNA, 15 bp, Homo sapiens
cccagtgatcagttc

SEQ ID NO: 1623615 - DNA, 15 bp, Homo sapiens
gcccagtgatcagtt

SEQ ID NO: 1623616 - DNA, 15 bp, Homo sapiens
tgcccagtgatcagt

SEQ ID NO: 1623617 - DNA, 15 bp, Homo sapiens
gtgcccagtgatcag

SEQ ID NO: 1623618 - DNA, 15 bp, Homo sapiens
tgtgcccagtgatca

SEQ ID NO: 1623619 - DNA, 15 bp, Homo sapiens
ctgtgcccagtgatc

SEQ ID NO: 1623620 - DNA, 15 bp, Homo sapiens
cctgtgcccagtgat

SEQ ID NO: 1623621 - DNA, 15 bp, Homo sapiens
acctgtgcccagtga

SEQ ID NO: 1623622 - DNA, 15 bp, Homo sapiens
cacctgtgcccagtg

SEQ ID NO: 1623623 - DNA, 15 bp, Homo sapiens
ccacctgtgcccagt

SEQ ID NO: 1623624 - DNA, 15 bp, Homo sapiens
cccacctgtgcccag

SEQ ID NO: 1623625 - DNA, 15 bp, Homo sapiens
ccccacctgtgccca

SEQ ID NO: 1623626 - DNA, 15 bp, Homo sapiens
tccccacctgtgccc

SEQ ID NO: 1623627 - DNA, 15 bp, Homo sapiens
ctccccacctgtgcc

SEQ ID NO: 1623628 - DNA, 15 bp, Homo sapiens
cctccccacctgtgc

SEQ ID NO: 1623629 - DNA, 15 bp, Homo sapiens
ccctccccacctgtg

SEQ ID NO: 1623630 - DNA, 15 bp, Homo sapiens
cccctccccacctgt

SEQ ID NO: 1623631 - DNA, 15 bp, Homo sapiens
ccccctccccacctg

SEQ ID NO: 1623632 - DNA, 15 bp, Homo sapiens
gccccctccccacct

SEQ ID NO: 1623633 - DNA, 15 bp, Homo sapiens
agccccctccccacc

SEQ ID NO: 1623634 - DNA, 15 bp, Homo sapiens
gagccccctccccac

SEQ ID NO: 1623635 - DNA, 15 bp, Homo sapiens
ggagccccctcccca

SEQ ID NO: 1623636 - DNA, 15 bp, Homo sapiens
aggagccccctcccc

SEQ ID NO: 1623637 - DNA, 15 bp, Homo sapiens
gaggagccccctccc

SEQ ID NO: 1623638 - DNA, 15 bp, Homo sapiens
cgaggagccccctcc

SEQ ID NO: 1623639 - DNA, 15 bp, Homo sapiens
tcgaggagccccctc

SEQ ID NO: 1623640 - DNA, 15 bp, Homo sapiens
ctcgaggagccccct

SEQ ID NO: 1623641 - DNA, 15 bp, Homo sapiens
cctcgaggagccccc

SEQ ID NO: 1623642 - DNA, 15 bp, Homo sapiens
tcctcgaggagcccc

SEQ ID NO: 1623643 - DNA, 15 bp, Homo sapiens
gtcctcgaggagccc

SEQ ID NO: 1623644 - DNA, 15 bp, Homo sapiens
tgtcctcgaggagcc

SEQ ID NO: 1623645 - DNA, 15 bp, Homo sapiens
ctgtcctcgaggagc

SEQ ID NO: 1623646 - DNA, 15 bp, Homo sapiens
gctgtcctcgaggag

SEQ ID NO: 1623647 - DNA, 15 bp, Homo sapiens
agctgtcctcgagga

SEQ ID NO: 1623648 - DNA, 15 bp, Homo sapiens
aagctgtcctcgagg

SEQ ID NO: 1623649 - DNA, 15 bp, Homo sapiens
caagctgtcctcgag

SEQ ID NO: 1623650 - DNA, 15 bp, Homo sapiens
ccaagctgtcctcga

SEQ ID NO: 1623651 - DNA, 15 bp, Homo sapiens
tccaagctgtcctcg

SEQ ID NO: 1623652 - DNA, 15 bp, Homo sapiens
atccaagctgtcctc

SEQ ID NO: 1623653 - DNA, 15 bp, Homo sapiens
gatccaagctgtcct

SEQ ID NO: 1623654 - DNA, 15 bp, Homo sapiens
tgatccaagctgtcc

SEQ ID NO: 1623655 - DNA, 15 bp, Homo sapiens
gtgatccaagctgtc

SEQ ID NO: 1623656 - DNA, 15 bp, Homo sapiens
tgtgatccaagctgt

SEQ ID NO: 1623657 - DNA, 15 bp, Homo sapiens
ctgtgatccaagctg

SEQ ID NO: 1623658 - DNA, 15 bp, Homo sapiens
cctgtgatccaagct

SEQ ID NO: 1623659 - DNA, 15 bp, Homo sapiens
acctgtgatccaagc

SEQ ID NO: 1623660 - DNA, 15 bp, Homo sapiens
cacctgtgatccaag

SEQ ID NO: 1623661 - DNA, 15 bp, Homo sapiens
acacctgtgatccaa

SEQ ID NO: 1623662 - DNA, 15 bp, Homo sapiens
cacacctgtgatcca

SEQ ID NO: 1623663 - DNA, 15 bp, Homo sapiens
acacacctgtgatcc

SEQ ID NO: 1623664 - DNA, 15 bp, Homo sapiens
cacacacctgtgatc

SEQ ID NO: 1623665 - DNA, 15 bp, Homo sapiens
gcacacacctgtgat

SEQ ID NO: 1623666 - DNA, 15 bp, Homo sapiens
ggcacacacctgtga

SEQ ID NO: 1623667 - DNA, 15 bp, Homo sapiens
tggcacacacctgtg

SEQ ID NO: 1623668 - DNA, 15 bp, Homo sapiens
ttggcacacacctgt

SEQ ID NO: 1623669 - DNA, 15 bp, Homo sapiens
attggcacacacctg

SEQ ID NO: 1623670 - DNA, 15 bp, Homo sapiens
aattggcacacacct

SEQ ID NO: 1623671 - DNA, 15 bp, Homo sapiens
gaattggcacacacc

SEQ ID NO: 1623672 - DNA, 15 bp, Homo sapiens
agaattggcacacac

SEQ ID NO: 1623673 - DNA, 15 bp, Homo sapiens
cagaattggcacaca

SEQ ID NO: 1623674 - DNA, 15 bp, Homo sapiens
acagaattggcacac

SEQ ID NO: 1623675 - DNA, 15 bp, Homo sapiens
aacagaattggcaca

SEQ ID NO: 1623676 - DNA, 15 bp, Homo sapiens
aaacagaattggcac

SEQ ID NO: 1623677 - DNA, 15 bp, Homo sapiens
aaaacagaattggca

SEQ ID NO: 1623678 - DNA, 15 bp, Homo sapiens
caaaacagaattggc

SEQ ID NO: 1623679 - DNA, 15 bp, Homo sapiens
acaaaacagaattgg

SEQ ID NO: 1623680 - DNA, 15 bp, Homo sapiens
aacaaaacagaattg

SEQ ID NO: 1623681 - DNA, 15 bp, Homo sapiens
aaacaaaacagaatt

SEQ ID NO: 1623682 - DNA, 15 bp, Homo sapiens
aaaacaaaacagaat

SEQ ID NO: 1623683 - DNA, 15 bp, Homo sapiens
aaaaacaaaacagaa

SEQ ID NO: 1623684 - DNA, 15 bp, Homo sapiens
gaaaaacaaaacaga

SEQ ID NO: 1623685 - DNA, 15 bp, Homo sapiens
agaaaaacaaaacag

SEQ ID NO: 1623686 - DNA, 15 bp, Homo sapiens
gaagaaaaacaaaac

SEQ ID NO: 1623687 - DNA, 15 bp, Homo sapiens
ggaagaaaaacaaaa

SEQ ID NO: 1623688 - DNA, 15 bp, Homo sapiens
aggaagaaaaacaaa

SEQ ID NO: 1623689 - DNA, 15 bp, Homo sapiens
gaggaagaaaaacaa

SEQ ID NO: 1623690 - DNA, 15 bp, Homo sapiens
agaggaagaaaaaca

SEQ ID NO: 1623691 - DNA, 15 bp, Homo sapiens
aagaggaagaaaaac

SEQ ID NO: 1623692 - DNA, 15 bp, Homo sapiens
aaagaggaagaaaaa

SEQ ID NO: 1623693 - DNA, 15 bp, Homo sapiens
gaaagaggaagaaaa

SEQ ID NO: 1623694 - DNA, 15 bp, Homo sapiens
ggaaagaggaagaaa

SEQ ID NO: 1623695 - DNA, 15 bp, Homo sapiens
aggaaagaggaagaa

SEQ ID NO: 1623696 - DNA, 15 bp, Homo sapiens
caggaaagaggaaga

SEQ ID NO: 1623697 - DNA, 15 bp, Homo sapiens
gcaggaaagaggaag

SEQ ID NO: 1623698 - DNA, 15 bp, Homo sapiens
ggcaggaaagaggaa

SEQ ID NO: 1623699 - DNA, 15 bp, Homo sapiens
tggcaggaaagagga

SEQ ID NO: 1623700 - DNA, 15 bp, Homo sapiens
atggcaggaaagagg

SEQ ID NO: 1623701 - DNA, 15 bp, Homo sapiens
aatggcaggaaagag

SEQ ID NO: 1623702 - DNA, 15 bp, Homo sapiens
caatggcaggaaaga

SEQ ID NO: 1623703 - DNA, 15 bp, Homo sapiens
tcaatggcaggaaag

SEQ ID NO: 1623704 - DNA, 15 bp, Homo sapiens
ttcaatggcaggaaa

SEQ ID NO: 1623705 - DNA, 15 bp, Homo sapiens
gttcaatggcaggaa

SEQ ID NO: 1623706 - DNA, 15 bp, Homo sapiens
agttcaatggcagga

SEQ ID NO: 1623707 - DNA, 15 bp, Homo sapiens
aagttcaatggcagg

SEQ ID NO: 1623708 - DNA, 15 bp, Homo sapiens
gaagttcaatggcag

SEQ ID NO: 1623709 - DNA, 15 bp, Homo sapiens
ggaagttcaatggca

SEQ ID NO: 1623710 - DNA, 15 bp, Homo sapiens
aggaagttcaatggc

SEQ ID NO: 1623711 - DNA, 15 bp, Homo sapiens
taggaagttcaatgg

SEQ ID NO: 1623712 - DNA, 15 bp, Homo sapiens
gtaggaagttcaatg

SEQ ID NO: 1623713 - DNA, 15 bp, Homo sapiens
agtaggaagttcaat

SEQ ID NO: 1623714 - DNA, 15 bp, Homo sapiens
gagtaggaagttcaa

SEQ ID NO: 1623715 - DNA, 15 bp, Homo sapiens
ggagtaggaagttca

SEQ ID NO: 1623716 - DNA, 15 bp, Homo sapiens
aggagtaggaagttc

SEQ ID NO: 1623717 - DNA, 15 bp, Homo sapiens
aaggagtaggaagtt

SEQ ID NO: 1623718 - DNA, 15 bp, Homo sapiens
gaaggagtaggaagt

SEQ ID NO: 1623719 - DNA, 15 bp, Homo sapiens
agaaggagtaggaag

SEQ ID NO: 1623720 - DNA, 15 bp, Homo sapiens
tagaaggagtaggaa

SEQ ID NO: 1623721 - DNA, 15 bp, Homo sapiens
ctagaaggagtagga

SEQ ID NO: 1623722 - DNA, 15 bp, Homo sapiens
gctagaaggagtagg

SEQ ID NO: 1623723 - DNA, 15 bp, Homo sapiens
tgctagaaggagtag

SEQ ID NO: 1623724 - DNA, 15 bp, Homo sapiens
atgctagaaggagta

SEQ ID NO: 1623725 - DNA, 15 bp, Homo sapiens
catgctagaaggagt

SEQ ID NO: 1623726 - DNA, 15 bp, Homo sapiens
acatgctagaaggag

SEQ ID NO: 1623727 - DNA, 15 bp, Homo sapiens
cacatgctagaagga

SEQ ID NO: 1623728 - DNA, 15 bp, Homo sapiens
tcacatgctagaagg

SEQ ID NO: 1623729 - DNA, 15 bp, Homo sapiens
ctcacatgctagaag

SEQ ID NO: 1623730 - DNA, 15 bp, Homo sapiens
tctcacatgctagaa

SEQ ID NO: 1623731 - DNA, 15 bp, Homo sapiens
ctctcacatgctaga

SEQ ID NO: 1623732 - DNA, 15 bp, Homo sapiens
tctctcacatgctag

SEQ ID NO: 1623733 - DNA, 15 bp, Homo sapiens
gtctctcacatgcta

SEQ ID NO: 1623734 - DNA, 15 bp, Homo sapiens
tgtctctcacatgct

SEQ ID NO: 1623735 - DNA, 15 bp, Homo sapiens
ctgtctctcacatgc

SEQ ID NO: 1623736 - DNA, 15 bp, Homo sapiens
gctgtctctcacatg

SEQ ID NO: 1623737 - DNA, 15 bp, Homo sapiens
agctgtctctcacat

SEQ ID NO: 1623738 - DNA, 15 bp, Homo sapiens
aagctgtctctcaca

SEQ ID NO: 1623739 - DNA, 15 bp, Homo sapiens
gaagctgtctctcac

SEQ ID NO: 1623740 - DNA, 15 bp, Homo sapiens
tgaagctgtctctca

SEQ ID NO: 1623741 - DNA, 15 bp, Homo sapiens
ttgaagctgtctctc

SEQ ID NO: 1623742 - DNA, 15 bp, Homo sapiens
gttgaagctgtctct

SEQ ID NO: 1623743 - DNA, 15 bp, Homo sapiens
agttgaagctgtctc

SEQ ID NO: 1623744 - DNA, 15 bp, Homo sapiens
aagttgaagctgtct

SEQ ID NO: 1623745 - DNA, 15 bp, Homo sapiens
taagttgaagctgtc

SEQ ID NO: 1623746 - DNA, 15 bp, Homo sapiens
gtaagttgaagctgt

SEQ ID NO: 1623747 - DNA, 15 bp, Homo sapiens
agtaagttgaagctg

SEQ ID NO: 1623748 - DNA, 15 bp, Homo sapiens
gagtaagttgaagct

SEQ ID NO: 1623749 - DNA, 15 bp, Homo sapiens
ggagtaagttgaagc

SEQ ID NO: 1623750 - DNA, 15 bp, Homo sapiens
gggagtaagttgaag

SEQ ID NO: 1623751 - DNA, 15 bp, Homo sapiens
agggagtaagttgaa

SEQ ID NO: 1623752 - DNA, 15 bp, Homo sapiens
cagggagtaagttga

SEQ ID NO: 1623753 - DNA, 15 bp, Homo sapiens
ccagggagtaagttg

SEQ ID NO: 1623754 - DNA, 15 bp, Homo sapiens
gccagggagtaagtt

SEQ ID NO: 1623755 - DNA, 15 bp, Homo sapiens
cgccagggagtaagt

SEQ ID NO: 1623756 - DNA, 15 bp, Homo sapiens
tcgccagggagtaag

SEQ ID NO: 1623757 - DNA, 15 bp, Homo sapiens
gtcgccagggagtaa

SEQ ID NO: 1623758 - DNA, 15 bp, Homo sapiens
cgtcgccagggagta

SEQ ID NO: 1623759 - DNA, 15 bp, Homo sapiens
ccgtcgccagggagt

SEQ ID NO: 1623760 - DNA, 15 bp, Homo sapiens
gccgtcgccagggag

SEQ ID NO: 1623761 - DNA, 15 bp, Homo sapiens
agccgtcgccaggga

SEQ ID NO: 1623762 - DNA, 15 bp, Homo sapiens
cagccgtcgccaggg

SEQ ID NO: 1623763 - DNA, 15 bp, Homo sapiens
tcagccgtcgccagg

SEQ ID NO: 1623764 - DNA, 15 bp, Homo sapiens
ttcagccgtcgccag

SEQ ID NO: 1623765 - DNA, 15 bp, Homo sapiens
tttcagccgtcgcca

SEQ ID NO: 1623766 - DNA, 15 bp, Homo sapiens
ttttcagccgtcgcc

SEQ ID NO: 1623767 - DNA, 15 bp, Homo sapiens
tttttcagccgtcgc

SEQ ID NO: 1623768 - DNA, 15 bp, Homo sapiens
gtttttcagccgtcg

SEQ ID NO: 1623769 - DNA, 15 bp, Homo sapiens
tgtttttcagccgtc

SEQ ID NO: 1623770 - DNA, 15 bp, Homo sapiens
atgtttttcagccgt

SEQ ID NO: 1623771 - DNA, 15 bp, Homo sapiens
catgtttttcagccg

SEQ ID NO: 1623772 - DNA, 15 bp, Homo sapiens
ccatgtttttcagcc

SEQ ID NO: 1623773 - DNA, 15 bp, Homo sapiens
cccatgtttttcagc

SEQ ID NO: 1623774 - DNA, 15 bp, Homo sapiens
gcccatgtttttcag

SEQ ID NO: 1623775 - DNA, 15 bp, Homo sapiens
agcccatgtttttca

SEQ ID NO: 1623776 - DNA, 15 bp, Homo sapiens
tagcccatgtttttc

SEQ ID NO: 1623777 - DNA, 15 bp, Homo sapiens
atagcccatgttttt

SEQ ID NO: 1623778 - DNA, 15 bp, Homo sapiens
aatagcccatgtttt

SEQ ID NO: 1623779 - DNA, 15 bp, Homo sapiens
aaatagcccatgttt

SEQ ID NO: 1623780 - DNA, 15 bp, Homo sapiens
aaaatagcccatgtt

SEQ ID NO: 1623781 - DNA, 15 bp, Homo sapiens
aaaaatagcccatgt

SEQ ID NO: 1623782 - DNA, 15 bp, Homo sapiens
taaaaatagcccatg

SEQ ID NO: 1623783 - DNA, 15 bp, Homo sapiens
ctaaaaatagcccat

SEQ ID NO: 1623784 - DNA, 15 bp, Homo sapiens
actaaaaatagccca

SEQ ID NO: 1623785 - DNA, 15 bp, Homo sapiens
aactaaaaatagccc

SEQ ID NO: 1623786 - DNA, 15 bp, Homo sapiens
aaactaaaaatagcc

SEQ ID NO: 1623787 - DNA, 15 bp, Homo sapiens
caaactaaaaatagc

SEQ ID NO: 1623788 - DNA, 15 bp, Homo sapiens
acaaactaaaaatag

SEQ ID NO: 1623789 - DNA, 15 bp, Homo sapiens
cacaaactaaaaata

SEQ ID NO: 1623790 - DNA, 15 bp, Homo sapiens
acacaaactaaaaat

SEQ ID NO: 1623791 - DNA, 15 bp, Homo sapiens
cacacaaactaaaaa

SEQ ID NO: 1623792 - DNA, 15 bp, Homo sapiens
tcacacaaactaaaa

SEQ ID NO: 1623793 - DNA, 15 bp, Homo sapiens
ctcacacaaactaaa

SEQ ID NO: 1623794 - DNA, 15 bp, Homo sapiens
actcacacaaactaa

SEQ ID NO: 1623795 - DNA, 15 bp, Homo sapiens
gactcacacaaacta

SEQ ID NO: 1623796 - DNA, 15 bp, Homo sapiens
agactcacacaaact

SEQ ID NO: 1623797 - DNA, 15 bp, Homo sapiens
tagactcacacaaac

SEQ ID NO: 1623798 - DNA, 15 bp, Homo sapiens
ctagactcacacaaa

SEQ ID NO: 1623799 - DNA, 15 bp, Homo sapiens
actagactcacacaa

SEQ ID NO: 1623800 - DNA, 15 bp, Homo sapiens
aactagactcacaca

SEQ ID NO: 1623801 - DNA, 15 bp, Homo sapiens
aaactagactcacac

SEQ ID NO: 1623802 - DNA, 15 bp, Homo sapiens
taaactagactcaca

SEQ ID NO: 1623803 - DNA, 15 bp, Homo sapiens
ataaactagactcac

SEQ ID NO: 1623804 - DNA, 15 bp, Homo sapiens
aataaactagactca

SEQ ID NO: 1623805 - DNA, 15 bp, Homo sapiens
aaataaactagactc

SEQ ID NO: 1623806 - DNA, 15 bp, Homo sapiens
caaataaactagact

SEQ ID NO: 1623807 - DNA, 15 bp, Homo sapiens
gcaaataaactagac

SEQ ID NO: 1623808 - DNA, 15 bp, Homo sapiens
agcaaataaactaga

SEQ ID NO: 1623809 - DNA, 15 bp, Homo sapiens
gagcaaataaactag

SEQ ID NO: 1623810 - DNA, 15 bp, Homo sapiens
ggagcaaataaacta

SEQ ID NO: 1623811 - DNA, 15 bp, Homo sapiens
aggagcaaataaact

SEQ ID NO: 1623812 - DNA, 15 bp, Homo sapiens
caggagcaaataaac

SEQ ID NO: 1623813 - DNA, 15 bp, Homo sapiens
ccaggagcaaataaa

SEQ ID NO: 1623814 - DNA, 15 bp, Homo sapiens
accaggagcaaataa

SEQ ID NO: 1623815 - DNA, 15 bp, Homo sapiens
taccaggagcaaata

SEQ ID NO: 1623816 - DNA, 15 bp, Homo sapiens
ctaccaggagcaaat

SEQ ID NO: 1623817 - DNA, 15 bp, Homo sapiens
tctaccaggagcaaa

SEQ ID NO: 1623818 - DNA, 15 bp, Homo sapiens
atctaccaggagcaa

SEQ ID NO: 1623819 - DNA, 15 bp, Homo sapiens
aatctaccaggagca

SEQ ID NO: 1623820 - DNA, 15 bp, Homo sapiens
aaatctaccaggagc

SEQ ID NO: 1623821 - DNA, 15 bp, Homo sapiens
caaatctaccaggag

SEQ ID NO: 1623822 - DNA, 15 bp, Homo sapiens
gcaaatctaccagga

SEQ ID NO: 1623823 - DNA, 15 bp, Homo sapiens
ggcaaatctaccagg

SEQ ID NO: 1623824 - DNA, 15 bp, Homo sapiens
aggcaaatctaccag

SEQ ID NO: 1623825 - DNA, 15 bp, Homo sapiens
gaggcaaatctacca

SEQ ID NO: 1623826 - DNA, 15 bp, Homo sapiens
agaggcaaatctacc

SEQ ID NO: 1623827 - DNA, 15 bp, Homo sapiens
gagaggcaaatctac

SEQ ID NO: 1623828 - DNA, 15 bp, Homo sapiens
ggagaggcaaatcta

SEQ ID NO: 1623829 - DNA, 15 bp, Homo sapiens
gggagaggcaaatct

SEQ ID NO: 1623830 - DNA, 15 bp, Homo sapiens
agggagaggcaaatc

SEQ ID NO: 1623831 - DNA, 15 bp, Homo sapiens
cagggagaggcaaat

SEQ ID NO: 1623832 - DNA, 15 bp, Homo sapiens
acagggagaggcaaa

SEQ ID NO: 1623833 - DNA, 15 bp, Homo sapiens
gacagggagaggcaa

SEQ ID NO: 1623834 - DNA, 15 bp, Homo sapiens
agacagggagaggca

SEQ ID NO: 1623835 - DNA, 15 bp, Homo sapiens
aagacagggagaggc

SEQ ID NO: 1623836 - DNA, 15 bp, Homo sapiens
gaagacagggagagg

SEQ ID NO: 1623837 - DNA, 15 bp, Homo sapiens
cgaagacagggagag

SEQ ID NO: 1623838 - DNA, 15 bp, Homo sapiens
acgaagacagggaga

SEQ ID NO: 1623839 - DNA, 15 bp, Homo sapiens
cacgaagacagggag

SEQ ID NO: 1623840 - DNA, 15 bp, Homo sapiens
tcacgaagacaggga

SEQ ID NO: 1623841 - DNA, 15 bp, Homo sapiens
ctcacgaagacaggg

SEQ ID NO: 1623842 - DNA, 15 bp, Homo sapiens
actcacgaagacagg

SEQ ID NO: 1623843 - DNA, 15 bp, Homo sapiens
cactcacgaagacag

SEQ ID NO: 1623844 - DNA, 15 bp, Homo sapiens
acactcacgaagaca

SEQ ID NO: 1623845 - DNA, 15 bp, Homo sapiens
cacactcacgaagac

SEQ ID NO: 1623846 - DNA, 15 bp, Homo sapiens
acacactcacgaaga

SEQ ID NO: 1623847 - DNA, 15 bp, Homo sapiens
cacacactcacgaag

SEQ ID NO: 1623848 - DNA, 15 bp, Homo sapiens
acacacactcacgaa

SEQ ID NO: 1623849 - DNA, 15 bp, Homo sapiens
cacacacactcacga

SEQ ID NO: 1623850 - DNA, 15 bp, Homo sapiens
acacacacactcacg

SEQ ID NO: 1623851 - DNA, 15 bp, Homo sapiens
cacacacacactcac

SEQ ID NO: 1623852 - DNA, 15 bp, Homo sapiens
acacacacacactca

SEQ ID NO: 1623853 - DNA, 15 bp, Homo sapiens
aacacacacacactc

SEQ ID NO: 1623854 - DNA, 15 bp, Homo sapiens
aaacacacacacact

SEQ ID NO: 1623855 - DNA, 15 bp, Homo sapiens
gcaaacacacacaca

SEQ ID NO: 1623856 - DNA, 15 bp, Homo sapiens
tgcaaacacacacac

SEQ ID NO: 1623857 - DNA, 15 bp, Homo sapiens
gtgcaaacacacaca

SEQ ID NO: 1623858 - DNA, 15 bp, Homo sapiens
tgtgcaaacacacac

SEQ ID NO: 1623859 - DNA, 15 bp, Homo sapiens
gtgtgcaaacacaca

SEQ ID NO: 1623860 - DNA, 15 bp, Homo sapiens
tgtgtgcaaacacac

SEQ ID NO: 1623861 - DNA, 15 bp, Homo sapiens
gtgtgtgcaaacaca

SEQ ID NO: 1623862 - DNA, 15 bp, Homo sapiens
cgtgtgtgcaaacac

SEQ ID NO: 1623863 - DNA, 15 bp, Homo sapiens
acgtgtgtgcaaaca

SEQ ID NO: 1623864 - DNA, 15 bp, Homo sapiens
cacgtgtgtgcaaac

SEQ ID NO: 1623865 - DNA, 15 bp, Homo sapiens
acacgtgtgtgcaaa

SEQ ID NO: 1623866 - DNA, 15 bp, Homo sapiens
cacacgtgtgtgcaa

SEQ ID NO: 1623867 - DNA, 15 bp, Homo sapiens
acacacgtgtgtgca

SEQ ID NO: 1623868 - DNA, 15 bp, Homo sapiens
aacacacgtgtgtgc

SEQ ID NO: 1623869 - DNA, 15 bp, Homo sapiens
caacacacgtgtgtg

SEQ ID NO: 1623870 - DNA, 15 bp, Homo sapiens
ccaacacacgtgtgt

SEQ ID NO: 1623871 - DNA, 15 bp, Homo sapiens
accaacacacgtgtg

SEQ ID NO: 1623872 - DNA, 15 bp, Homo sapiens
caccaacacacgtgt

SEQ ID NO: 1623873 - DNA, 15 bp, Homo sapiens
acaccaacacacgtg

SEQ ID NO: 1623874 - DNA, 15 bp, Homo sapiens
cacaccaacacacgt

SEQ ID NO: 1623875 - DNA, 15 bp, Homo sapiens
acacaccaacacacg

SEQ ID NO: 1623876 - DNA, 15 bp, Homo sapiens
cacacaccaacacac

SEQ ID NO: 1623877 - DNA, 15 bp, Homo sapiens
acacacaccaacaca

SEQ ID NO: 1623878 - DNA, 15 bp, Homo sapiens
tacacacaccaacac

SEQ ID NO: 1623879 - DNA, 15 bp, Homo sapiens
gtacacacaccaaca

SEQ ID NO: 1623880 - DNA, 15 bp, Homo sapiens
tgtacacacaccaac

SEQ ID NO: 1623881 - DNA, 15 bp, Homo sapiens
gtgtacacacaccaa

SEQ ID NO: 1623882 - DNA, 15 bp, Homo sapiens
tgtgtacacacacca

SEQ ID NO: 1623883 - DNA, 15 bp, Homo sapiens
ttgtgtacacacacc

SEQ ID NO: 1623884 - DNA, 15 bp, Homo sapiens
cttgtgtacacacac

SEQ ID NO: 1623885 - DNA, 15 bp, Homo sapiens
acttgtgtacacaca

SEQ ID NO: 1623886 - DNA, 15 bp, Homo sapiens
cacttgtgtacacac

SEQ ID NO: 1623887 - DNA, 15 bp, Homo sapiens
gcacttgtgtacaca

SEQ ID NO: 1623888 - DNA, 15 bp, Homo sapiens
agcacttgtgtacac

SEQ ID NO: 1623889 - DNA, 15 bp, Homo sapiens
cagcacttgtgtaca

SEQ ID NO: 1623890 - DNA, 15 bp, Homo sapiens
tcagcacttgtgtac

SEQ ID NO: 1623891 - DNA, 15 bp, Homo sapiens
atcagcacttgtgta

SEQ ID NO: 1623892 - DNA, 15 bp, Homo sapiens
catcagcacttgtgt

SEQ ID NO: 1623893 - DNA, 15 bp, Homo sapiens
ccatcagcacttgtg

SEQ ID NO: 1623894 - DNA, 15 bp, Homo sapiens
accatcagcacttgt

SEQ ID NO: 1623895 - DNA, 15 bp, Homo sapiens
caccatcagcacttg

SEQ ID NO: 1623896 - DNA, 15 bp, Homo sapiens
tcaccatcagcactt

SEQ ID NO: 1623897 - DNA, 15 bp, Homo sapiens
ttcaccatcagcact

SEQ ID NO: 1623898 - DNA, 15 bp, Homo sapiens
tttcaccatcagcac

SEQ ID NO: 1623899 - DNA, 15 bp, Homo sapiens
ttttcaccatcagca

SEQ ID NO: 1623900 - DNA, 15 bp, Homo sapiens
gttttcaccatcagc

SEQ ID NO: 1623901 - DNA, 15 bp, Homo sapiens
tgttttcaccatcag

SEQ ID NO: 1623902 - DNA, 15 bp, Homo sapiens
ctgttttcaccatca

SEQ ID NO: 1623903 - DNA, 15 bp, Homo sapiens
actgttttcaccatc

SEQ ID NO: 1623904 - DNA, 15 bp, Homo sapiens
cactgttttcaccat

SEQ ID NO: 1623905 - DNA, 15 bp, Homo sapiens
tcactgttttcacca

SEQ ID NO: 1623906 - DNA, 15 bp, Homo sapiens
gtcactgttttcacc

SEQ ID NO: 1623907 - DNA, 15 bp, Homo sapiens
tgtcactgttttcac

SEQ ID NO: 1623908 - DNA, 15 bp, Homo sapiens
gtgtcactgttttca

SEQ ID NO: 1623909 - DNA, 15 bp, Homo sapiens
tgtgtcactgttttc

SEQ ID NO: 1623910 - DNA, 15 bp, Homo sapiens
gtgtgtcactgtttt

SEQ ID NO: 1623911 - DNA, 15 bp, Homo sapiens
tgtgtgtcactgttt

SEQ ID NO: 1623912 - DNA, 15 bp, Homo sapiens
gtgtgtgtcactgtt

SEQ ID NO: 1623913 - DNA, 15 bp, Homo sapiens
tgtgtgtgtcactgt

SEQ ID NO: 1623914 - DNA, 15 bp, Homo sapiens
gtgtgtgtgtcactg

SEQ ID NO: 1623915 - DNA, 15 bp, Homo sapiens
ggtgtgtgtgtcact

SEQ ID NO: 1623916 - DNA, 15 bp, Homo sapiens
aggtgtgtgtgtcac

SEQ ID NO: 1623917 - DNA, 15 bp, Homo sapiens
caggtgtgtgtgtca

SEQ ID NO: 1623918 - DNA, 15 bp, Homo sapiens
acaggtgtgtgtgtc

SEQ ID NO: 1623919 - DNA, 15 bp, Homo sapiens
cacaggtgtgtgtgt

SEQ ID NO: 1623920 - DNA, 15 bp, Homo sapiens
acacaggtgtgtgtg

SEQ ID NO: 1623921 - DNA, 15 bp, Homo sapiens
tacacaggtgtgtgt

SEQ ID NO: 1623922 - DNA, 15 bp, Homo sapiens
ctacacaggtgtgtg

SEQ ID NO: 1623923 - DNA, 15 bp, Homo sapiens
cctacacaggtgtgt

SEQ ID NO: 1623924 - DNA, 15 bp, Homo sapiens
gcctacacaggtgtg

SEQ ID NO: 1623925 - DNA, 15 bp, Homo sapiens
tgcctacacaggtgt

SEQ ID NO: 1623926 - DNA, 15 bp, Homo sapiens
atgcctacacaggtg

SEQ ID NO: 1623927 - DNA, 15 bp, Homo sapiens
catgcctacacaggt

SEQ ID NO: 1623928 - DNA, 15 bp, Homo sapiens
gcatgcctacacagg

SEQ ID NO: 1623929 - DNA, 15 bp, Homo sapiens
tgcatgcctacacag

SEQ ID NO: 1623930 - DNA, 15 bp, Homo sapiens
gtgcatgcctacaca

SEQ ID NO: 1623931 - DNA, 15 bp, Homo sapiens
tgtgcatgcctacac

SEQ ID NO: 1623932 - DNA, 15 bp, Homo sapiens
gtgtgcatgcctaca

SEQ ID NO: 1623933 - DNA, 15 bp, Homo sapiens
tgtgtgcatgcctac

SEQ ID NO: 1623934 - DNA, 15 bp, Homo sapiens
gtgtgtgcatgccta

SEQ ID NO: 1623935 - DNA, 15 bp, Homo sapiens
ggtgtgtgcatgcct

SEQ ID NO: 1623936 - DNA, 15 bp, Homo sapiens
aggtgtgtgcatgcc

SEQ ID NO: 1623937 - DNA, 15 bp, Homo sapiens
caggtgtgtgcatgc

SEQ ID NO: 1623938 - DNA, 15 bp, Homo sapiens
gcaggtgtgtgcatg

SEQ ID NO: 1623939 - DNA, 15 bp, Homo sapiens
ggcaggtgtgtgcat

SEQ ID NO: 1623940 - DNA, 15 bp, Homo sapiens
aggcaggtgtgtgca

SEQ ID NO: 1623941 - DNA, 15 bp, Homo sapiens
aaggcaggtgtgtgc

SEQ ID NO: 1623942 - DNA, 15 bp, Homo sapiens
caaggcaggtgtgtg

SEQ ID NO: 1623943 - DNA, 15 bp, Homo sapiens
tcaaggcaggtgtgt

SEQ ID NO: 1623944 - DNA, 15 bp, Homo sapiens
atcaaggcaggtgtg

SEQ ID NO: 1623945 - DNA, 15 bp, Homo sapiens
catcaaggcaggtgt

SEQ ID NO: 1623946 - DNA, 15 bp, Homo sapiens
acatcaaggcaggtg

SEQ ID NO: 1623947 - DNA, 15 bp, Homo sapiens
cacatcaaggcaggt

SEQ ID NO: 1623948 - DNA, 15 bp, Homo sapiens
acacatcaaggcagg

SEQ ID NO: 1623949 - DNA, 15 bp, Homo sapiens
cacacatcaaggcag

SEQ ID NO: 1623950 - DNA, 15 bp, Homo sapiens
tcacacatcaaggca

SEQ ID NO: 1623951 - DNA, 15 bp, Homo sapiens
gtcacacatcaaggc

SEQ ID NO: 1623952 - DNA, 15 bp, Homo sapiens
cgtcacacatcaagg

SEQ ID NO: 1623953 - DNA, 15 bp, Homo sapiens
tcgtcacacatcaag

SEQ ID NO: 1623954 - DNA, 15 bp, Homo sapiens
gtcgtcacacatcaa

SEQ ID NO: 1623955 - DNA, 15 bp, Homo sapiens
cgtcgtcacacatca

SEQ ID NO: 1623956 - DNA, 15 bp, Homo sapiens
acgtcgtcacacatc

SEQ ID NO: 1623957 - DNA, 15 bp, Homo sapiens
cacgtcgtcacacat

SEQ ID NO: 1623958 - DNA, 15 bp, Homo sapiens
tcacgtcgtcacaca

SEQ ID NO: 1623959 - DNA, 15 bp, Homo sapiens
atcacgtcgtcacac

SEQ ID NO: 1623960 - DNA, 15 bp, Homo sapiens
catcacgtcgtcaca

SEQ ID NO: 1623961 - DNA, 15 bp, Homo sapiens
tcatcacgtcgtcac

SEQ ID NO: 1623962 - DNA, 15 bp, Homo sapiens
atcatcacgtcgtca

SEQ ID NO: 1623963 - DNA, 15 bp, Homo sapiens
catcatcacgtcgtc

SEQ ID NO: 1623964 - DNA, 15 bp, Homo sapiens
acatcatcacgtcgt

SEQ ID NO: 1623965 - DNA, 15 bp, Homo sapiens
cacatcatcacgtcg

SEQ ID NO: 1623966 - DNA, 15 bp, Homo sapiens
acacatcatcacgtc

SEQ ID NO: 1623967 - DNA, 15 bp, Homo sapiens
tacacatcatcacgt

SEQ ID NO: 1623968 - DNA, 15 bp, Homo sapiens
atacacatcatcacg

SEQ ID NO: 1623969 - DNA, 15 bp, Homo sapiens
catacacatcatcac

SEQ ID NO: 1623970 - DNA, 15 bp, Homo sapiens
gcatacacatcatca

SEQ ID NO: 1623971 - DNA, 15 bp, Homo sapiens
tgcatacacatcatc

SEQ ID NO: 1623972 - DNA, 15 bp, Homo sapiens
ctgcatacacatcat

SEQ ID NO: 1623973 - DNA, 15 bp, Homo sapiens
tctgcatacacatca

SEQ ID NO: 1623974 - DNA, 15 bp, Homo sapiens
gtctgcatacacatc

SEQ ID NO: 1623975 - DNA, 15 bp, Homo sapiens
tgtctgcatacacat

SEQ ID NO: 1623976 - DNA, 15 bp, Homo sapiens
gtgtctgcatacaca

SEQ ID NO: 1623977 - DNA, 15 bp, Homo sapiens
ggtgtctgcatacac

SEQ ID NO: 1623978 - DNA, 15 bp, Homo sapiens
aggtgtctgcataca

SEQ ID NO: 1623979 - DNA, 15 bp, Homo sapiens
caggtgtctgcatac

SEQ ID NO: 1623980 - DNA, 15 bp, Homo sapiens
acaggtgtctgcata

SEQ ID NO: 1623981 - DNA, 15 bp, Homo sapiens
cacaggtgtctgcat

SEQ ID NO: 1623982 - DNA, 15 bp, Homo sapiens
acacaggtgtctgca

SEQ ID NO: 1623983 - DNA, 15 bp, Homo sapiens
aacacaggtgtctgc

SEQ ID NO: 1623984 - DNA, 15 bp, Homo sapiens
caacacaggtgtctg

SEQ ID NO: 1623985 - DNA, 15 bp, Homo sapiens
tcaacacaggtgtct

SEQ ID NO: 1623986 - DNA, 15 bp, Homo sapiens
atcaacacaggtgtc

SEQ ID NO: 1623987 - DNA, 15 bp, Homo sapiens
catcaacacaggtgt

SEQ ID NO: 1623988 - DNA, 15 bp, Homo sapiens
acatcaacacaggtg

SEQ ID NO: 1623989 - DNA, 15 bp, Homo sapiens
cacatcaacacaggt

SEQ ID NO: 1623990 - DNA, 15 bp, Homo sapiens
acacatcaacacagg

SEQ ID NO: 1623991 - DNA, 15 bp, Homo sapiens
cacacatcaacacag

SEQ ID NO: 1623992 - DNA, 15 bp, Homo sapiens
gcacacatcaacaca

SEQ ID NO: 1623993 - DNA, 15 bp, Homo sapiens
ggcacacatcaacac

SEQ ID NO: 1623994 - DNA, 15 bp, Homo sapiens
aggcacacatcaaca

SEQ ID NO: 1623995 - DNA, 15 bp, Homo sapiens
taggcacacatcaac

SEQ ID NO: 1623996 - DNA, 15 bp, Homo sapiens
gtaggcacacatcaa

SEQ ID NO: 1623997 - DNA, 15 bp, Homo sapiens
tgtaggcacacatca

SEQ ID NO: 1623998 - DNA, 15 bp, Homo sapiens
atgtaggcacacatc

SEQ ID NO: 1623999 - DNA, 15 bp, Homo sapiens
tatgtaggcacacat

SEQ ID NO: 1624000 - DNA, 15 bp, Homo sapiens
atatgtaggcacaca

SEQ ID NO: 1624001 - DNA, 15 bp, Homo sapiens
catatgtaggcacac

SEQ ID NO: 1624002 - DNA, 15 bp, Homo sapiens
acatatgtaggcaca

SEQ ID NO: 1624003 - DNA, 15 bp, Homo sapiens
aacatatgtaggcac

SEQ ID NO: 1624004 - DNA, 15 bp, Homo sapiens
caacatatgtaggca

SEQ ID NO: 1624005 - DNA, 15 bp, Homo sapiens
tcaacatatgtaggc

SEQ ID NO: 1624006 - DNA, 15 bp, Homo sapiens
gtcaacatatgtagg

SEQ ID NO: 1624007 - DNA, 15 bp, Homo sapiens
tgtcaacatatgtag

SEQ ID NO: 1624008 - DNA, 15 bp, Homo sapiens
gtgtcaacatatgta

SEQ ID NO: 1624009 - DNA, 15 bp, Homo sapiens
tgtgtcaacatatgt

SEQ ID NO: 1624010 - DNA, 15 bp, Homo sapiens
ctgtgtcaacatatg

SEQ ID NO: 1624011 - DNA, 15 bp, Homo sapiens
cctgtgtcaacatat

SEQ ID NO: 1624012 - DNA, 15 bp, Homo sapiens
gcctgtgtcaacata

SEQ ID NO: 1624013 - DNA, 15 bp, Homo sapiens
tgcctgtgtcaacat

SEQ ID NO: 1624014 - DNA, 15 bp, Homo sapiens
gtgcctgtgtcaaca

SEQ ID NO: 1624015 - DNA, 15 bp, Homo sapiens
tgtgcctgtgtcaac

SEQ ID NO: 1624016 - DNA, 15 bp, Homo sapiens
gtgtgcctgtgtcaa

SEQ ID NO: 1624017 - DNA, 15 bp, Homo sapiens
tgtgtgcctgtgtca

SEQ ID NO: 1624018 - DNA, 15 bp, Homo sapiens
atgtgtgcctgtgtc

SEQ ID NO: 1624019 - DNA, 15 bp, Homo sapiens
catgtgtgcctgtgt

SEQ ID NO: 1624020 - DNA, 15 bp, Homo sapiens
ccatgtgtgcctgtg

SEQ ID NO: 1624021 - DNA, 15 bp, Homo sapiens
accatgtgtgcctgt

SEQ ID NO: 1624022 - DNA, 15 bp, Homo sapiens
caccatgtgtgcctg

SEQ ID NO: 1624023 - DNA, 15 bp, Homo sapiens
acaccatgtgtgcct

SEQ ID NO: 1624024 - DNA, 15 bp, Homo sapiens
cacaccatgtgtgcc

SEQ ID NO: 1624025 - DNA, 15 bp, Homo sapiens
acacaccatgtgtgc

SEQ ID NO: 1624026 - DNA, 15 bp, Homo sapiens
gacacaccatgtgtg

SEQ ID NO: 1624027 - DNA, 15 bp, Homo sapiens
agacacaccatgtgt

SEQ ID NO: 1624028 - DNA, 15 bp, Homo sapiens
cagacacaccatgtg

SEQ ID NO: 1624029 - DNA, 15 bp, Homo sapiens
acagacacaccatgt

SEQ ID NO: 1624030 - DNA, 15 bp, Homo sapiens
tacagacacaccatg

SEQ ID NO: 1624031 - DNA, 15 bp, Homo sapiens
gtacagacacaccat

SEQ ID NO: 1624032 - DNA, 15 bp, Homo sapiens
tgtacagacacacca

SEQ ID NO: 1624033 - DNA, 15 bp, Homo sapiens
atgtacagacacacc

SEQ ID NO: 1624034 - DNA, 15 bp, Homo sapiens
catgtacagacacac

SEQ ID NO: 1624035 - DNA, 15 bp, Homo sapiens
gcatgtacagacaca

SEQ ID NO: 1624036 - DNA, 15 bp, Homo sapiens
tgcatgtacagacac

SEQ ID NO: 1624037 - DNA, 15 bp, Homo sapiens
ttgcatgtacagaca

SEQ ID NO: 1624038 - DNA, 15 bp, Homo sapiens
tttgcatgtacagac

SEQ ID NO: 1624039 - DNA, 15 bp, Homo sapiens
atttgcatgtacaga

SEQ ID NO: 1624040 - DNA, 15 bp, Homo sapiens
catttgcatgtacag

SEQ ID NO: 1624041 - DNA, 15 bp, Homo sapiens
ccatttgcatgtaca

SEQ ID NO: 1624042 - DNA, 15 bp, Homo sapiens
tccatttgcatgtac

SEQ ID NO: 1624043 - DNA, 15 bp, Homo sapiens
gtccatttgcatgta

SEQ ID NO: 1624044 - DNA, 15 bp, Homo sapiens
tgtccatttgcatgt

SEQ ID NO: 1624045 - DNA, 15 bp, Homo sapiens
gtgtccatttgcatg

SEQ ID NO: 1624046 - DNA, 15 bp, Homo sapiens
tgtgtccatttgcat

SEQ ID NO: 1624047 - DNA, 15 bp, Homo sapiens
gtgtgtccatttgca

SEQ ID NO: 1624048 - DNA, 15 bp, Homo sapiens
tgtgtgtccatttgc

SEQ ID NO: 1624049 - DNA, 15 bp, Homo sapiens
atgtgtgtccatttg

SEQ ID NO: 1624050 - DNA, 15 bp, Homo sapiens
catgtgtgtccattt

SEQ ID NO: 1624051 - DNA, 15 bp, Homo sapiens
tcatgtgtgtccatt

SEQ ID NO: 1624052 - DNA, 15 bp, Homo sapiens
ttcatgtgtgtccat

SEQ ID NO: 1624053 - DNA, 15 bp, Homo sapiens
gttcatgtgtgtcca

SEQ ID NO: 1624054 - DNA, 15 bp, Homo sapiens
tgttcatgtgtgtcc

SEQ ID NO: 1624055 - DNA, 15 bp, Homo sapiens
gtgttcatgtgtgtc

SEQ ID NO: 1624056 - DNA, 15 bp, Homo sapiens
tgtgttcatgtgtgt

SEQ ID NO: 1624057 - DNA, 15 bp, Homo sapiens
gtgtgttcatgtgtg

SEQ ID NO: 1624058 - DNA, 15 bp, Homo sapiens
cgtgtgttcatgtgt

SEQ ID NO: 1624059 - DNA, 15 bp, Homo sapiens
acgtgtgttcatgtg

SEQ ID NO: 1624060 - DNA, 15 bp, Homo sapiens
cacgtgtgttcatgt

SEQ ID NO: 1624061 - DNA, 15 bp, Homo sapiens
acacgtgtgttcatg

SEQ ID NO: 1624062 - DNA, 15 bp, Homo sapiens
aacacgtgtgttcat

SEQ ID NO: 1624063 - DNA, 15 bp, Homo sapiens
aaacacgtgtgttca

SEQ ID NO: 1624064 - DNA, 15 bp, Homo sapiens
taaacacgtgtgttc

SEQ ID NO: 1624065 - DNA, 15 bp, Homo sapiens
ataaacacgtgtgtt

SEQ ID NO: 1624066 - DNA, 15 bp, Homo sapiens
cataaacacgtgtgt

SEQ ID NO: 1624067 - DNA, 15 bp, Homo sapiens
gcataaacacgtgtg

SEQ ID NO: 1624068 - DNA, 15 bp, Homo sapiens
tgcataaacacgtgt

SEQ ID NO: 1624069 - DNA, 15 bp, Homo sapiens
atgcataaacacgtg

SEQ ID NO: 1624070 - DNA, 15 bp, Homo sapiens
catgcataaacacgt

SEQ ID NO: 1624071 - DNA, 15 bp, Homo sapiens
acatgcataaacacg

SEQ ID NO: 1624072 - DNA, 15 bp, Homo sapiens
gacatgcataaacac

SEQ ID NO: 1624073 - DNA, 15 bp, Homo sapiens
ggacatgcataaaca

SEQ ID NO: 1624074 - DNA, 15 bp, Homo sapiens
aggacatgcataaac

SEQ ID NO: 1624075 - DNA, 15 bp, Homo sapiens
aaggacatgcataaa

SEQ ID NO: 1624076 - DNA, 15 bp, Homo sapiens
caaggacatgcataa

SEQ ID NO: 1624077 - DNA, 15 bp, Homo sapiens
acaaggacatgcata

SEQ ID NO: 1624078 - DNA, 15 bp, Homo sapiens
cacaaggacatgcat

SEQ ID NO: 1624079 - DNA, 15 bp, Homo sapiens
acacaaggacatgca

SEQ ID NO: 1624080 - DNA, 15 bp, Homo sapiens
cacacaaggacatgc

SEQ ID NO: 1624081 - DNA, 15 bp, Homo sapiens
acacacaaggacatg

SEQ ID NO: 1624082 - DNA, 15 bp, Homo sapiens
aacacacaaggacat

SEQ ID NO: 1624083 - DNA, 15 bp, Homo sapiens
caacacacaaggaca

SEQ ID NO: 1624084 - DNA, 15 bp, Homo sapiens
tcaacacacaaggac

SEQ ID NO: 1624085 - DNA, 15 bp, Homo sapiens
catcaacacacaagg

SEQ ID NO: 1624086 - DNA, 15 bp, Homo sapiens
acatcaacacacaag

SEQ ID NO: 1624087 - DNA, 15 bp, Homo sapiens
cacatcaacacacaa

SEQ ID NO: 1624088 - DNA, 15 bp, Homo sapiens
acacatcaacacaca

SEQ ID NO: 1624089 - DNA, 15 bp, Homo sapiens
gacacatcaacacac

SEQ ID NO: 1624090 - DNA, 15 bp, Homo sapiens
agacacatcaacaca

SEQ ID NO: 1624091 - DNA, 15 bp, Homo sapiens
cagacacatcaacac

SEQ ID NO: 1624092 - DNA, 15 bp, Homo sapiens
gcagacacatcaaca

SEQ ID NO: 1624093 - DNA, 15 bp, Homo sapiens
tgcagacacatcaac

SEQ ID NO: 1624094 - DNA, 15 bp, Homo sapiens
gtgcagacacatcaa

SEQ ID NO: 1624095 - DNA, 15 bp, Homo sapiens
tgtgcagacacatca

SEQ ID NO: 1624096 - DNA, 15 bp, Homo sapiens
atgtgcagacacatc

SEQ ID NO: 1624097 - DNA, 15 bp, Homo sapiens
tatgtgcagacacat

SEQ ID NO: 1624098 - DNA, 15 bp, Homo sapiens
gtatgtgcagacaca

SEQ ID NO: 1624099 - DNA, 15 bp, Homo sapiens
tgtatgtgcagacac

SEQ ID NO: 1624100 - DNA, 15 bp, Homo sapiens
atgtatgtgcagaca

SEQ ID NO: 1624101 - DNA, 15 bp, Homo sapiens
catgtatgtgcagac

SEQ ID NO: 1624102 - DNA, 15 bp, Homo sapiens
acatgtatgtgcaga

SEQ ID NO: 1624103 - DNA, 15 bp, Homo sapiens
aacatgtatgtgcag

SEQ ID NO: 1624104 - DNA, 15 bp, Homo sapiens
caacatgtatgtgca

SEQ ID NO: 1624105 - DNA, 15 bp, Homo sapiens
tcaacatgtatgtgc

SEQ ID NO: 1624106 - DNA, 15 bp, Homo sapiens
atcaacatgtatgtg

SEQ ID NO: 1624107 - DNA, 15 bp, Homo sapiens
catcaacatgtatgt

SEQ ID NO: 1624108 - DNA, 15 bp, Homo sapiens
acatcaacatgtatg

SEQ ID NO: 1624109 - DNA, 15 bp, Homo sapiens
cacatcaacatgtat

SEQ ID NO: 1624110 - DNA, 15 bp, Homo sapiens
acacatcaacatgta

SEQ ID NO: 1624111 - DNA, 15 bp, Homo sapiens
gacacatcaacatgt

SEQ ID NO: 1624112 - DNA, 15 bp, Homo sapiens
ggacacatcaacatg

SEQ ID NO: 1624113 - DNA, 15 bp, Homo sapiens
gggacacatcaacat

SEQ ID NO: 1624114 - DNA, 15 bp, Homo sapiens
cgggacacatcaaca

SEQ ID NO: 1624115 - DNA, 15 bp, Homo sapiens
gcgggacacatcaac

SEQ ID NO: 1624116 - DNA, 15 bp, Homo sapiens
agcgggacacatcaa

SEQ ID NO: 1624117 - DNA, 15 bp, Homo sapiens
cagcgggacacatca

SEQ ID NO: 1624118 - DNA, 15 bp, Homo sapiens
acagcgggacacatc

SEQ ID NO: 1624119 - DNA, 15 bp, Homo sapiens
cacagcgggacacat

SEQ ID NO: 1624120 - DNA, 15 bp, Homo sapiens
ccacagcgggacaca

SEQ ID NO: 1624121 - DNA, 15 bp, Homo sapiens
accacagcgggacac

SEQ ID NO: 1624122 - DNA, 15 bp, Homo sapiens
aaccacagcgggaca

SEQ ID NO: 1624123 - DNA, 15 bp, Homo sapiens
caaccacagcgggac

SEQ ID NO: 1624124 - DNA, 15 bp, Homo sapiens
ccaaccacagcggga

SEQ ID NO: 1624125 - DNA, 15 bp, Homo sapiens
gccaaccacagcggg

SEQ ID NO: 1624126 - DNA, 15 bp, Homo sapiens
ggccaaccacagcgg

SEQ ID NO: 1624127 - DNA, 15 bp, Homo sapiens
aggccaaccacagcg

SEQ ID NO: 1624128 - DNA, 15 bp, Homo sapiens
aaggccaaccacagc

SEQ ID NO: 1624129 - DNA, 15 bp, Homo sapiens
aaaggccaaccacag

SEQ ID NO: 1624130 - DNA, 15 bp, Homo sapiens
gaaaggccaaccaca

SEQ ID NO: 1624131 - DNA, 15 bp, Homo sapiens
agaaaggccaaccac

SEQ ID NO: 1624132 - DNA, 15 bp, Homo sapiens
cagaaaggccaacca

SEQ ID NO: 1624133 - DNA, 15 bp, Homo sapiens
ccagaaaggccaacc

SEQ ID NO: 1624134 - DNA, 15 bp, Homo sapiens
cccagaaaggccaac

SEQ ID NO: 1624135 - DNA, 15 bp, Homo sapiens
ccccagaaaggccaa

SEQ ID NO: 1624136 - DNA, 15 bp, Homo sapiens
gccccagaaaggcca

SEQ ID NO: 1624137 - DNA, 15 bp, Homo sapiens
ggccccagaaaggcc

SEQ ID NO: 1624138 - DNA, 15 bp, Homo sapiens
tggccccagaaaggc

SEQ ID NO: 1624139 - DNA, 15 bp, Homo sapiens
ctggccccagaaagg

SEQ ID NO: 1624140 - DNA, 15 bp, Homo sapiens
cctggccccagaaag

SEQ ID NO: 1624141 - DNA, 15 bp, Homo sapiens
gcctggccccagaaa

SEQ ID NO: 1624142 - DNA, 15 bp, Homo sapiens
ggcctggccccagaa

SEQ ID NO: 1624143 - DNA, 15 bp, Homo sapiens
gggcctggccccaga

SEQ ID NO: 1624144 - DNA, 15 bp, Homo sapiens
tgggcctggccccag

SEQ ID NO: 1624145 - DNA, 15 bp, Homo sapiens
ctgggcctggcccca

SEQ ID NO: 1624146 - DNA, 15 bp, Homo sapiens
gctgggcctggcccc

SEQ ID NO: 1624147 - DNA, 15 bp, Homo sapiens
tgctgggcctggccc

SEQ ID NO: 1624148 - DNA, 15 bp, Homo sapiens
gtgctgggcctggcc

SEQ ID NO: 1624149 - DNA, 15 bp, Homo sapiens
ggtgctgggcctggc

SEQ ID NO: 1624150 - DNA, 15 bp, Homo sapiens
aggtgctgggcctgg

SEQ ID NO: 1624151 - DNA, 15 bp, Homo sapiens
caggtgctgggcctg

SEQ ID NO: 1624152 - DNA, 15 bp, Homo sapiens
ccaggtgctgggcct

SEQ ID NO: 1624153 - DNA, 15 bp, Homo sapiens
cccaggtgctgggcc

SEQ ID NO: 1624154 - DNA, 15 bp, Homo sapiens
ccccaggtgctgggc

SEQ ID NO: 1624155 - DNA, 15 bp, Homo sapiens
accccaggtgctggg

SEQ ID NO: 1624156 - DNA, 15 bp, Homo sapiens
aaccccaggtgctgg

SEQ ID NO: 1624157 - DNA, 15 bp, Homo sapiens
aaaccccaggtgctg

SEQ ID NO: 1624158 - DNA, 15 bp, Homo sapiens
gaaaccccaggtgct

SEQ ID NO: 1624159 - DNA, 15 bp, Homo sapiens
ggaaaccccaggtgc

SEQ ID NO: 1624160 - DNA, 15 bp, Homo sapiens
tggaaaccccaggtg

SEQ ID NO: 1624161 - DNA, 15 bp, Homo sapiens
ctggaaaccccaggt

SEQ ID NO: 1624162 - DNA, 15 bp, Homo sapiens
cctggaaaccccagg

SEQ ID NO: 1624163 - DNA, 15 bp, Homo sapiens
tcctggaaaccccag

SEQ ID NO: 1624164 - DNA, 15 bp, Homo sapiens
ttcctggaaacccca

SEQ ID NO: 1624165 - DNA, 15 bp, Homo sapiens
tttcctggaaacccc

SEQ ID NO: 1624166 - DNA, 15 bp, Homo sapiens
gtttcctggaaaccc

SEQ ID NO: 1624167 - DNA, 15 bp, Homo sapiens
tgtttcctggaaacc

SEQ ID NO: 1624168 - DNA, 15 bp, Homo sapiens
atgtttcctggaaac

SEQ ID NO: 1624169 - DNA, 15 bp, Homo sapiens
aatgtttcctggaaa

SEQ ID NO: 1624170 - DNA, 15 bp, Homo sapiens
gaatgtttcctggaa

SEQ ID NO: 1624171 - DNA, 15 bp, Homo sapiens
ggaatgtttcctgga

SEQ ID NO: 1624172 - DNA, 15 bp, Homo sapiens
gggaatgtttcctgg

SEQ ID NO: 1624173 - DNA, 15 bp, Homo sapiens
agggaatgtttcctg

SEQ ID NO: 1624174 - DNA, 15 bp, Homo sapiens
cagggaatgtttcct

SEQ ID NO: 1624175 - DNA, 15 bp, Homo sapiens
acagggaatgtttcc

SEQ ID NO: 1624176 - DNA, 15 bp, Homo sapiens
gacagggaatgtttc

SEQ ID NO: 1624177 - DNA, 15 bp, Homo sapiens
ggacagggaatgttt

SEQ ID NO: 1624178 - DNA, 15 bp, Homo sapiens
gggacagggaatgtt

SEQ ID NO: 1624179 - DNA, 15 bp, Homo sapiens
agggacagggaatgt

SEQ ID NO: 1624180 - DNA, 15 bp, Homo sapiens
aagggacagggaatg

SEQ ID NO: 1624181 - DNA, 15 bp, Homo sapiens
gaagggacagggaat

SEQ ID NO: 1624182 - DNA, 15 bp, Homo sapiens
ggaagggacagggaa

SEQ ID NO: 1624183 - DNA, 15 bp, Homo sapiens
gggaagggacaggga

SEQ ID NO: 1624184 - DNA, 15 bp, Homo sapiens
cgggaagggacaggg

SEQ ID NO: 1624185 - DNA, 15 bp, Homo sapiens
ccgggaagggacagg

SEQ ID NO: 1624186 - DNA, 15 bp, Homo sapiens
tccgggaagggacag

SEQ ID NO: 1624187 - DNA, 15 bp, Homo sapiens
ttccgggaagggaca

SEQ ID NO: 1624188 - DNA, 15 bp, Homo sapiens
attccgggaagggac

SEQ ID NO: 1624189 - DNA, 15 bp, Homo sapiens
cattccgggaaggga

SEQ ID NO: 1624190 - DNA, 15 bp, Homo sapiens
ccattccgggaaggg

SEQ ID NO: 1624191 - DNA, 15 bp, Homo sapiens
gccattccgggaagg

SEQ ID NO: 1624192 - DNA, 15 bp, Homo sapiens
ggccattccgggaag

SEQ ID NO: 1624193 - DNA, 15 bp, Homo sapiens
cggccattccgggaa

SEQ ID NO: 1624194 - DNA, 15 bp, Homo sapiens
ccggccattccggga

SEQ ID NO: 1624195 - DNA, 15 bp, Homo sapiens
accggccattccggg

SEQ ID NO: 1624196 - DNA, 15 bp, Homo sapiens
taccggccattccgg

SEQ ID NO: 1624197 - DNA, 15 bp, Homo sapiens
gtaccggccattccg

SEQ ID NO: 1624198 - DNA, 15 bp, Homo sapiens
agtaccggccattcc

SEQ ID NO: 1624199 - DNA, 15 bp, Homo sapiens
aagtaccggccattc

SEQ ID NO: 1624200 - DNA, 15 bp, Homo sapiens
caagtaccggccatt

SEQ ID NO: 1624201 - DNA, 15 bp, Homo sapiens
gcaagtaccggccat

SEQ ID NO: 1624202 - DNA, 15 bp, Homo sapiens
agcaagtaccggcca

SEQ ID NO: 1624203 - DNA, 15 bp, Homo sapiens
cagcaagtaccggcc

SEQ ID NO: 1624204 - DNA, 15 bp, Homo sapiens
acagcaagtaccggc

SEQ ID NO: 1624205 - DNA, 15 bp, Homo sapiens
cacagcaagtaccgg

SEQ ID NO: 1624206 - DNA, 15 bp, Homo sapiens
gcacagcaagtaccg

SEQ ID NO: 1624207 - DNA, 15 bp, Homo sapiens
ggcacagcaagtacc

SEQ ID NO: 1624208 - DNA, 15 bp, Homo sapiens
aggcacagcaagtac

SEQ ID NO: 1624209 - DNA, 15 bp, Homo sapiens
gaggcacagcaagta

SEQ ID NO: 1624210 - DNA, 15 bp, Homo sapiens
ggaggcacagcaagt

SEQ ID NO: 1624211 - DNA, 15 bp, Homo sapiens
cggaggcacagcaag

SEQ ID NO: 1624212 - DNA, 15 bp, Homo sapiens
gcggaggcacagcaa

SEQ ID NO: 1624213 - DNA, 15 bp, Homo sapiens
ggcggaggcacagca

SEQ ID NO: 1624214 - DNA, 15 bp, Homo sapiens
cggcggaggcacagc

SEQ ID NO: 1624215 - DNA, 15 bp, Homo sapiens
ccggcggaggcacag

SEQ ID NO: 1624216 - DNA, 15 bp, Homo sapiens
cccggcggaggcaca

SEQ ID NO: 1624217 - DNA, 15 bp, Homo sapiens
tcccggcggaggcac

SEQ ID NO: 1624218 - DNA, 15 bp, Homo sapiens
ctcccggcggaggca

SEQ ID NO: 1624219 - DNA, 15 bp, Homo sapiens
tctcccggcggaggc

SEQ ID NO: 1624220 - DNA, 15 bp, Homo sapiens
atctcccggcggagg

SEQ ID NO: 1624221 - DNA, 15 bp, Homo sapiens
catctcccggcggag

SEQ ID NO: 1624222 - DNA, 15 bp, Homo sapiens
gcatctcccggcgga

SEQ ID NO: 1624223 - DNA, 15 bp, Homo sapiens
tgcatctcccggcgg

SEQ ID NO: 1624224 - DNA, 15 bp, Homo sapiens
gtgcatctcccggcg

SEQ ID NO: 1624225 - DNA, 15 bp, Homo sapiens
ggtgcatctcccggc

SEQ ID NO: 1624226 - DNA, 15 bp, Homo sapiens
gggtgcatctcccgg

SEQ ID NO: 1624227 - DNA, 15 bp, Homo sapiens
agggtgcatctcccg

SEQ ID NO: 1624228 - DNA, 15 bp, Homo sapiens
cagggtgcatctccc

SEQ ID NO: 1624229 - DNA, 15 bp, Homo sapiens
tcagggtgcatctcc

SEQ ID NO: 1624230 - DNA, 15 bp, Homo sapiens
atcagggtgcatctc

SEQ ID NO: 1624231 - DNA, 15 bp, Homo sapiens
aatcagggtgcatct

SEQ ID NO: 1624232 - DNA, 15 bp, Homo sapiens
taatcagggtgcatc

SEQ ID NO: 1624233 - DNA, 15 bp, Homo sapiens
ttaatcagggtgcat

SEQ ID NO: 1624234 - DNA, 15 bp, Homo sapiens
gttaatcagggtgca

SEQ ID NO: 1624235 - DNA, 15 bp, Homo sapiens
agttaatcagggtgc

SEQ ID NO: 1624236 - DNA, 15 bp, Homo sapiens
tagttaatcagggtg

SEQ ID NO: 1624237 - DNA, 15 bp, Homo sapiens
ctagttaatcagggt

SEQ ID NO: 1624238 - DNA, 15 bp, Homo sapiens
tctagttaatcaggg

SEQ ID NO: 1624239 - DNA, 15 bp, Homo sapiens
ttctagttaatcagg

SEQ ID NO: 1624240 - DNA, 15 bp, Homo sapiens
gttctagttaatcag

SEQ ID NO: 1624241 - DNA, 15 bp, Homo sapiens
cgttctagttaatca

SEQ ID NO: 1624242 - DNA, 15 bp, Homo sapiens
acgttctagttaatc

SEQ ID NO: 1624243 - DNA, 15 bp, Homo sapiens
cacgttctagttaat

SEQ ID NO: 1624244 - DNA, 15 bp, Homo sapiens
ccacgttctagttaa

SEQ ID NO: 1624245 - DNA, 15 bp, Homo sapiens
gccacgttctagtta

SEQ ID NO: 1624246 - DNA, 15 bp, Homo sapiens
cgccacgttctagtt

SEQ ID NO: 1624247 - DNA, 15 bp, Homo sapiens
tcgccacgttctagt

SEQ ID NO: 1624248 - DNA, 15 bp, Homo sapiens
ttcgccacgttctag

SEQ ID NO: 1624249 - DNA, 15 bp, Homo sapiens
cttcgccacgttcta

SEQ ID NO: 1624250 - DNA, 15 bp, Homo sapiens
gcttcgccacgttct

SEQ ID NO: 1624251 - DNA, 15 bp, Homo sapiens
agcttcgccacgttc

SEQ ID NO: 1624252 - DNA, 15 bp, Homo sapiens
gagcttcgccacgtt

SEQ ID NO: 1624253 - DNA, 15 bp, Homo sapiens
tgagcttcgccacgt

SEQ ID NO: 1624254 - DNA, 15 bp, Homo sapiens
ctgagcttcgccacg

SEQ ID NO: 1624255 - DNA, 15 bp, Homo sapiens
gctgagcttcgccac

SEQ ID NO: 1624256 - DNA, 15 bp, Homo sapiens
ggctgagcttcgcca

SEQ ID NO: 1624257 - DNA, 15 bp, Homo sapiens
tggctgagcttcgcc

SEQ ID NO: 1624258 - DNA, 15 bp, Homo sapiens
gtggctgagcttcgc

SEQ ID NO: 1624259 - DNA, 15 bp, Homo sapiens
ggtggctgagcttcg

SEQ ID NO: 1624260 - DNA, 15 bp, Homo sapiens
aggtggctgagcttc

SEQ ID NO: 1624261 - DNA, 15 bp, Homo sapiens
caggtggctgagctt

SEQ ID NO: 1624262 - DNA, 15 bp, Homo sapiens
ccaggtggctgagct

SEQ ID NO: 1624263 - DNA, 15 bp, Homo sapiens
tccaggtggctgagc

SEQ ID NO: 1624264 - DNA, 15 bp, Homo sapiens
ttccaggtggctgag

SEQ ID NO: 1624265 - DNA, 15 bp, Homo sapiens
attccaggtggctga

SEQ ID NO: 1624266 - DNA, 15 bp, Homo sapiens
gattccaggtggctg

SEQ ID NO: 1624267 - DNA, 15 bp, Homo sapiens
cgattccaggtggct

SEQ ID NO: 1624268 - DNA, 15 bp, Homo sapiens
gcgattccaggtggc

SEQ ID NO: 1624269 - DNA, 15 bp, Homo sapiens
ggcgattccaggtgg

SEQ ID NO: 1624270 - DNA, 15 bp, Homo sapiens
aggcgattccaggtg

SEQ ID NO: 1624271 - DNA, 15 bp, Homo sapiens
aaggcgattccaggt

SEQ ID NO: 1624272 - DNA, 15 bp, Homo sapiens
taaggcgattccagg

SEQ ID NO: 1624273 - DNA, 15 bp, Homo sapiens
gtaaggcgattccag

SEQ ID NO: 1624274 - DNA, 15 bp, Homo sapiens
ggtaaggcgattcca

SEQ ID NO: 1624275 - DNA, 15 bp, Homo sapiens
gggtaaggcgattcc

SEQ ID NO: 1624276 - DNA, 15 bp, Homo sapiens
agggtaaggcgattc

SEQ ID NO: 1624277 - DNA, 15 bp, Homo sapiens
cagggtaaggcgatt

SEQ ID NO: 1624278 - DNA, 15 bp, Homo sapiens
ccagggtaaggcgat

SEQ ID NO: 1624279 - DNA, 15 bp, Homo sapiens
gccagggtaaggcga

SEQ ID NO: 1624280 - DNA, 15 bp, Homo sapiens
ggccagggtaaggcg

SEQ ID NO: 1624281 - DNA, 15 bp, Homo sapiens
aggccagggtaaggc

SEQ ID NO: 1624282 - DNA, 15 bp, Homo sapiens
aaggccagggtaagg

SEQ ID NO: 1624283 - DNA, 15 bp, Homo sapiens
aaaggccagggtaag

SEQ ID NO: 1624284 - DNA, 15 bp, Homo sapiens
caaaggccagggtaa

SEQ ID NO: 1624285 - DNA, 15 bp, Homo sapiens
ccaaaggccagggta

SEQ ID NO: 1624286 - DNA, 15 bp, Homo sapiens
accaaaggccagggt

SEQ ID NO: 1624287 - DNA, 15 bp, Homo sapiens
aaccaaaggccaggg

SEQ ID NO: 1624288 - DNA, 15 bp, Homo sapiens
aaaccaaaggccagg

SEQ ID NO: 1624289 - DNA, 15 bp, Homo sapiens
gaaaccaaaggccag

SEQ ID NO: 1624290 - DNA, 15 bp, Homo sapiens
agaaaccaaaggcca

SEQ ID NO: 1624291 - DNA, 15 bp, Homo sapiens
tagaaaccaaaggcc

SEQ ID NO: 1624292 - DNA, 15 bp, Homo sapiens
ctagaaaccaaaggc

SEQ ID NO: 1624293 - DNA, 15 bp, Homo sapiens
gctagaaaccaaagg

SEQ ID NO: 1624294 - DNA, 15 bp, Homo sapiens
tgctagaaaccaaag

SEQ ID NO: 1624295 - DNA, 15 bp, Homo sapiens
ttgctagaaaccaaa

SEQ ID NO: 1624296 - DNA, 15 bp, Homo sapiens
tttgctagaaaccaa

SEQ ID NO: 1624297 - DNA, 15 bp, Homo sapiens
atttgctagaaacca

SEQ ID NO: 1624298 - DNA, 15 bp, Homo sapiens
catttgctagaaacc

SEQ ID NO: 1624299 - DNA, 15 bp, Homo sapiens
ccatttgctagaaac

SEQ ID NO: 1624300 - DNA, 15 bp, Homo sapiens
cccatttgctagaaa

SEQ ID NO: 1624301 - DNA, 15 bp, Homo sapiens
tcccatttgctagaa

SEQ ID NO: 1624302 - DNA, 15 bp, Homo sapiens
atcccatttgctaga

SEQ ID NO: 1624303 - DNA, 15 bp, Homo sapiens
catcccatttgctag

SEQ ID NO: 1624304 - DNA, 15 bp, Homo sapiens
ccatcccatttgcta

SEQ ID NO: 1624305 - DNA, 15 bp, Homo sapiens
tccatcccatttgct

SEQ ID NO: 1624306 - DNA, 15 bp, Homo sapiens
ttccatcccatttgc

SEQ ID NO: 1624307 - DNA, 15 bp, Homo sapiens
cttccatcccatttg

SEQ ID NO: 1624308 - DNA, 15 bp, Homo sapiens
acttccatcccattt

SEQ ID NO: 1624309 - DNA, 15 bp, Homo sapiens
cacttccatcccatt

SEQ ID NO: 1624310 - DNA, 15 bp, Homo sapiens
tcacttccatcccat

SEQ ID NO: 1624311 - DNA, 15 bp, Homo sapiens
ctcacttccatccca

SEQ ID NO: 1624312 - DNA, 15 bp, Homo sapiens
actcacttccatccc

SEQ ID NO: 1624313 - DNA, 15 bp, Homo sapiens
gactcacttccatcc

SEQ ID NO: 1624314 - DNA, 15 bp, Homo sapiens
ggactcacttccatc

SEQ ID NO: 1624315 - DNA, 15 bp, Homo sapiens
gggactcacttccat

SEQ ID NO: 1624316 - DNA, 15 bp, Homo sapiens
ggggactcacttcca

SEQ ID NO: 1624317 - DNA, 15 bp, Homo sapiens
tggggactcacttcc

SEQ ID NO: 1624318 - DNA, 15 bp, Homo sapiens
atggggactcacttc

SEQ ID NO: 1624319 - DNA, 15 bp, Homo sapiens
catggggactcactt

SEQ ID NO: 1624320 - DNA, 15 bp, Homo sapiens
ccatggggactcact

SEQ ID NO: 1624321 - DNA, 15 bp, Homo sapiens
tccatggggactcac

SEQ ID NO: 1624322 - DNA, 15 bp, Homo sapiens
ctccatggggactca

SEQ ID NO: 1624323 - DNA, 15 bp, Homo sapiens
cctccatggggactc

SEQ ID NO: 1624324 - DNA, 15 bp, Homo sapiens
ccctccatggggact

SEQ ID NO: 1624325 - DNA, 15 bp, Homo sapiens
gccctccatggggac

SEQ ID NO: 1624326 - DNA, 15 bp, Homo sapiens
agccctccatgggga

SEQ ID NO: 1624327 - DNA, 15 bp, Homo sapiens
aagccctccatgggg

SEQ ID NO: 1624328 - DNA, 15 bp, Homo sapiens
caagccctccatggg

SEQ ID NO: 1624329 - DNA, 15 bp, Homo sapiens
gcaagccctccatgg

SEQ ID NO: 1624330 - DNA, 15 bp, Homo sapiens
agcaagccctccatg

SEQ ID NO: 1624331 - DNA, 15 bp, Homo sapiens
gagcaagccctccat

SEQ ID NO: 1624332 - DNA, 15 bp, Homo sapiens
ggagcaagccctcca

SEQ ID NO: 1624333 - DNA, 15 bp, Homo sapiens
tggagcaagccctcc

SEQ ID NO: 1624334 - DNA, 15 bp, Homo sapiens
atggagcaagccctc

SEQ ID NO: 1624335 - DNA, 15 bp, Homo sapiens
catggagcaagccct

SEQ ID NO: 1624336 - DNA, 15 bp, Homo sapiens
tcatggagcaagccc

SEQ ID NO: 1624337 - DNA, 15 bp, Homo sapiens
ttcatggagcaagcc

SEQ ID NO: 1624338 - DNA, 15 bp, Homo sapiens
cttcatggagcaagc

SEQ ID NO: 1624339 - DNA, 15 bp, Homo sapiens
ccttcatggagcaag

SEQ ID NO: 1624340 - DNA, 15 bp, Homo sapiens
accttcatggagcaa

SEQ ID NO: 1624341 - DNA, 15 bp, Homo sapiens
caccttcatggagca

SEQ ID NO: 1624342 - DNA, 15 bp, Homo sapiens
acaccttcatggagc

SEQ ID NO: 1624343 - DNA, 15 bp, Homo sapiens
aacaccttcatggag

SEQ ID NO: 1624344 - DNA, 15 bp, Homo sapiens
aaacaccttcatgga

SEQ ID NO: 1624345 - DNA, 15 bp, Homo sapiens
aaaacaccttcatgg

SEQ ID NO: 1624346 - DNA, 15 bp, Homo sapiens
aaaaacaccttcatg

SEQ ID NO: 1624347 - DNA, 15 bp, Homo sapiens
gaaaaacaccttcat

SEQ ID NO: 1624348 - DNA, 15 bp, Homo sapiens
ggaaaaacaccttca

SEQ ID NO: 1624349 - DNA, 15 bp, Homo sapiens
aggaaaaacaccttc

SEQ ID NO: 1624350 - DNA, 15 bp, Homo sapiens
caggaaaaacacctt

SEQ ID NO: 1624351 - DNA, 15 bp, Homo sapiens
ccaggaaaaacacct

SEQ ID NO: 1624352 - DNA, 15 bp, Homo sapiens
tccaggaaaaacacc

SEQ ID NO: 1624353 - DNA, 15 bp, Homo sapiens
atccaggaaaaacac

SEQ ID NO: 1624354 - DNA, 15 bp, Homo sapiens
catccaggaaaaaca

SEQ ID NO: 1624355 - DNA, 15 bp, Homo sapiens
tcatccaggaaaaac

SEQ ID NO: 1624356 - DNA, 15 bp, Homo sapiens
ctcatccaggaaaaa

SEQ ID NO: 1624357 - DNA, 15 bp, Homo sapiens
actcatccaggaaaa

SEQ ID NO: 1624358 - DNA, 15 bp, Homo sapiens
gactcatccaggaaa

SEQ ID NO: 1624359 - DNA, 15 bp, Homo sapiens
agactcatccaggaa

SEQ ID NO: 1624360 - DNA, 15 bp, Homo sapiens
aagactcatccagga

SEQ ID NO: 1624361 - DNA, 15 bp, Homo sapiens
caagactcatccagg

SEQ ID NO: 1624362 - DNA, 15 bp, Homo sapiens
ccaagactcatccag

SEQ ID NO: 1624363 - DNA, 15 bp, Homo sapiens
gccaagactcatcca

SEQ ID NO: 1624364 - DNA, 15 bp, Homo sapiens
ggccaagactcatcc

SEQ ID NO: 1624365 - DNA, 15 bp, Homo sapiens
gggccaagactcatc

SEQ ID NO: 1624366 - DNA, 15 bp, Homo sapiens
ggggccaagactcat

SEQ ID NO: 1624367 - DNA, 15 bp, Homo sapiens
tggggccaagactca

SEQ ID NO: 1624368 - DNA, 15 bp, Homo sapiens
ctggggccaagactc

SEQ ID NO: 1624369 - DNA, 15 bp, Homo sapiens
actggggccaagact

SEQ ID NO: 1624370 - DNA, 15 bp, Homo sapiens
cactggggccaagac

SEQ ID NO: 1624371 - DNA, 15 bp, Homo sapiens
ccactggggccaaga

SEQ ID NO: 1624372 - DNA, 15 bp, Homo sapiens
gccactggggccaag

SEQ ID NO: 1624373 - DNA, 15 bp, Homo sapiens
cgccactggggccaa

SEQ ID NO: 1624374 - DNA, 15 bp, Homo sapiens
tcgccactggggcca

SEQ ID NO: 1624375 - DNA, 15 bp, Homo sapiens
atcgccactggggcc

SEQ ID NO: 1624376 - DNA, 15 bp, Homo sapiens
aatcgccactggggc

SEQ ID NO: 1624377 - DNA, 15 bp, Homo sapiens
aaatcgccactgggg

SEQ ID NO: 1624378 - DNA, 15 bp, Homo sapiens
caaatcgccactggg

SEQ ID NO: 1624379 - DNA, 15 bp, Homo sapiens
gcaaatcgccactgg

SEQ ID NO: 1624380 - DNA, 15 bp, Homo sapiens
agcaaatcgccactg

SEQ ID NO: 1624381 - DNA, 15 bp, Homo sapiens
cagcaaatcgccact

SEQ ID NO: 1624382 - DNA, 15 bp, Homo sapiens
gcagcaaatcgccac

SEQ ID NO: 1624383 - DNA, 15 bp, Homo sapiens
tgcagcaaatcgcca

SEQ ID NO: 1624384 - DNA, 15 bp, Homo sapiens
ctgcagcaaatcgcc

SEQ ID NO: 1624385 - DNA, 15 bp, Homo sapiens
cctgcagcaaatcgc

SEQ ID NO: 1624386 - DNA, 15 bp, Homo sapiens
gcctgcagcaaatcg

SEQ ID NO: 1624387 - DNA, 15 bp, Homo sapiens
agcctgcagcaaatc

SEQ ID NO: 1624388 - DNA, 15 bp, Homo sapiens
aagcctgcagcaaat

SEQ ID NO: 1624389 - DNA, 15 bp, Homo sapiens
caagcctgcagcaaa

SEQ ID NO: 1624390 - DNA, 15 bp, Homo sapiens
acaagcctgcagcaa

SEQ ID NO: 1624391 - DNA, 15 bp, Homo sapiens
aacaagcctgcagca

SEQ ID NO: 1624392 - DNA, 15 bp, Homo sapiens
caacaagcctgcagc

SEQ ID NO: 1624393 - DNA, 15 bp, Homo sapiens
ccaacaagcctgcag

SEQ ID NO: 1624394 - DNA, 15 bp, Homo sapiens
gccaacaagcctgca

SEQ ID NO: 1624395 - DNA, 15 bp, Homo sapiens
tgccaacaagcctgc

SEQ ID NO: 1624396 - DNA, 15 bp, Homo sapiens
gtgccaacaagcctg

SEQ ID NO: 1624397 - DNA, 15 bp, Homo sapiens
agtgccaacaagcct

SEQ ID NO: 1624398 - DNA, 15 bp, Homo sapiens
cagtgccaacaagcc

SEQ ID NO: 1624399 - DNA, 15 bp, Homo sapiens
acagtgccaacaagc

SEQ ID NO: 1624400 - DNA, 15 bp, Homo sapiens
gacagtgccaacaag

SEQ ID NO: 1624401 - DNA, 15 bp, Homo sapiens
tgacagtgccaacaa

SEQ ID NO: 1624402 - DNA, 15 bp, Homo sapiens
atgacagtgccaaca

SEQ ID NO: 1624403 - DNA, 15 bp, Homo sapiens
aatgacagtgccaac

SEQ ID NO: 1624404 - DNA, 15 bp, Homo sapiens
gaatgacagtgccaa

SEQ ID NO: 1624405 - DNA, 15 bp, Homo sapiens
cgaatgacagtgcca

SEQ ID NO: 1624406 - DNA, 15 bp, Homo sapiens
acgaatgacagtgcc

SEQ ID NO: 1624407 - DNA, 15 bp, Homo sapiens
cacgaatgacagtgc

SEQ ID NO: 1624408 - DNA, 15 bp, Homo sapiens
ccacgaatgacagtg

SEQ ID NO: 1624409 - DNA, 15 bp, Homo sapiens
cccacgaatgacagt

SEQ ID NO: 1624410 - DNA, 15 bp, Homo sapiens
acccacgaatgacag

SEQ ID NO: 1624411 - DNA, 15 bp, Homo sapiens
gacccacgaatgaca

SEQ ID NO: 1624412 - DNA, 15 bp, Homo sapiens
ggacccacgaatgac

SEQ ID NO: 1624413 - DNA, 15 bp, Homo sapiens
aggacccacgaatga

SEQ ID NO: 1624414 - DNA, 15 bp, Homo sapiens
caggacccacgaatg

SEQ ID NO: 1624415 - DNA, 15 bp, Homo sapiens
gcaggacccacgaat

SEQ ID NO: 1624416 - DNA, 15 bp, Homo sapiens
tgcaggacccacgaa

SEQ ID NO: 1624417 - DNA, 15 bp, Homo sapiens
atgcaggacccacga

SEQ ID NO: 1624418 - DNA, 15 bp, Homo sapiens
catgcaggacccacg

SEQ ID NO: 1624419 - DNA, 15 bp, Homo sapiens
ccatgcaggacccac

SEQ ID NO: 1624420 - DNA, 15 bp, Homo sapiens
tccatgcaggaccca

SEQ ID NO: 1624421 - DNA, 15 bp, Homo sapiens
ctccatgcaggaccc

SEQ ID NO: 1624422 - DNA, 15 bp, Homo sapiens
cctccatgcaggacc

SEQ ID NO: 1624423 - DNA, 15 bp, Homo sapiens
acctccatgcaggac

SEQ ID NO: 1624424 - DNA, 15 bp, Homo sapiens
aacctccatgcagga

SEQ ID NO: 1624425 - DNA, 15 bp, Homo sapiens
gaacctccatgcagg

SEQ ID NO: 1624426 - DNA, 15 bp, Homo sapiens
ggaacctccatgcag

SEQ ID NO: 1624427 - DNA, 15 bp, Homo sapiens
aggaacctccatgca

SEQ ID NO: 1624428 - DNA, 15 bp, Homo sapiens
aaggaacctccatgc

SEQ ID NO: 1624429 - DNA, 15 bp, Homo sapiens
taaggaacctccatg

SEQ ID NO: 1624430 - DNA, 15 bp, Homo sapiens
ctaaggaacctccat

SEQ ID NO: 1624431 - DNA, 15 bp, Homo sapiens
actaaggaacctcca

SEQ ID NO: 1624432 - DNA, 15 bp, Homo sapiens
cactaaggaacctcc

SEQ ID NO: 1624433 - DNA, 15 bp, Homo sapiens
acactaaggaacctc

SEQ ID NO: 1624434 - DNA, 15 bp, Homo sapiens
gacactaaggaacct

SEQ ID NO: 1624435 - DNA, 15 bp, Homo sapiens
ggacactaaggaacc

SEQ ID NO: 1624436 - DNA, 15 bp, Homo sapiens
tggacactaaggaac

SEQ ID NO: 1624437 - DNA, 15 bp, Homo sapiens
ctggacactaaggaa

SEQ ID NO: 1624438 - DNA, 15 bp, Homo sapiens
tctggacactaagga

SEQ ID NO: 1624439 - DNA, 15 bp, Homo sapiens
ctctggacactaagg

SEQ ID NO: 1624440 - DNA, 15 bp, Homo sapiens
cctctggacactaag

SEQ ID NO: 1624441 - DNA, 15 bp, Homo sapiens
ccctctggacactaa

SEQ ID NO: 1624442 - DNA, 15 bp, Homo sapiens
accctctggacacta

SEQ ID NO: 1624443 - DNA, 15 bp, Homo sapiens
caccctctggacact

SEQ ID NO: 1624444 - DNA, 15 bp, Homo sapiens
tcaccctctggacac

SEQ ID NO: 1624445 - DNA, 15 bp, Homo sapiens
atcaccctctggaca

SEQ ID NO: 1624446 - DNA, 15 bp, Homo sapiens
aatcaccctctggac

SEQ ID NO: 1624447 - DNA, 15 bp, Homo sapiens
gaatcaccctctgga

SEQ ID NO: 1624448 - DNA, 15 bp, Homo sapiens
ggaatcaccctctgg

SEQ ID NO: 1624449 - DNA, 15 bp, Homo sapiens
tggaatcaccctctg

SEQ ID NO: 1624450 - DNA, 15 bp, Homo sapiens
atggaatcaccctct

SEQ ID NO: 1624451 - DNA, 15 bp, Homo sapiens
catggaatcaccctc

SEQ ID NO: 1624452 - DNA, 15 bp, Homo sapiens
acatggaatcaccct

SEQ ID NO: 1624453 - DNA, 15 bp, Homo sapiens
gacatggaatcaccc

SEQ ID NO: 1624454 - DNA, 15 bp, Homo sapiens
agacatggaatcacc

SEQ ID NO: 1624455 - DNA, 15 bp, Homo sapiens
cagacatggaatcac

SEQ ID NO: 1624456 - DNA, 15 bp, Homo sapiens
acagacatggaatca

SEQ ID NO: 1624457 - DNA, 15 bp, Homo sapiens
cacagacatggaatc

SEQ ID NO: 1624458 - DNA, 15 bp, Homo sapiens
ccacagacatggaat

SEQ ID NO: 1624459 - DNA, 15 bp, Homo sapiens
accacagacatggaa

SEQ ID NO: 1624460 - DNA, 15 bp, Homo sapiens
gaccacagacatgga

SEQ ID NO: 1624461 - DNA, 15 bp, Homo sapiens
tgaccacagacatgg

SEQ ID NO: 1624462 - DNA, 15 bp, Homo sapiens
ctgaccacagacatg

SEQ ID NO: 1624463 - DNA, 15 bp, Homo sapiens
gctgaccacagacat

SEQ ID NO: 1624464 - DNA, 15 bp, Homo sapiens
tgctgaccacagaca

SEQ ID NO: 1624465 - DNA, 15 bp, Homo sapiens
ttgctgaccacagac

SEQ ID NO: 1624466 - DNA, 15 bp, Homo sapiens
tttgctgaccacaga

SEQ ID NO: 1624467 - DNA, 15 bp, Homo sapiens
ttttgctgaccacag

SEQ ID NO: 1624468 - DNA, 15 bp, Homo sapiens
cttttgctgaccaca

SEQ ID NO: 1624469 - DNA, 15 bp, Homo sapiens
tcttttgctgaccac

SEQ ID NO: 1624470 - DNA, 15 bp, Homo sapiens
ctcttttgctgacca

SEQ ID NO: 1624471 - DNA, 15 bp, Homo sapiens
tctcttttgctgacc

SEQ ID NO: 1624472 - DNA, 15 bp, Homo sapiens
ctctcttttgctgac

SEQ ID NO: 1624473 - DNA, 15 bp, Homo sapiens
cctctcttttgctga

SEQ ID NO: 1624474 - DNA, 15 bp, Homo sapiens
gcctctcttttgctg

SEQ ID NO: 1624475 - DNA, 15 bp, Homo sapiens
ggcctctcttttgct

SEQ ID NO: 1624476 - DNA, 15 bp, Homo sapiens
gggcctctcttttgc

SEQ ID NO: 1624477 - DNA, 15 bp, Homo sapiens
ggggcctctcttttg

SEQ ID NO: 1624478 - DNA, 15 bp, Homo sapiens
aggggcctctctttt

SEQ ID NO: 1624479 - DNA, 15 bp, Homo sapiens
caggggcctctcttt

SEQ ID NO: 1624480 - DNA, 15 bp, Homo sapiens
ccaggggcctctctt

SEQ ID NO: 1624481 - DNA, 15 bp, Homo sapiens
cccaggggcctctct

SEQ ID NO: 1624482 - DNA, 15 bp, Homo sapiens
ccccaggggcctctc

SEQ ID NO: 1624483 - DNA, 15 bp, Homo sapiens
gccccaggggcctct

SEQ ID NO: 1624484 - DNA, 15 bp, Homo sapiens
ggccccaggggcctc

SEQ ID NO: 1624485 - DNA, 15 bp, Homo sapiens
tggccccaggggcct

SEQ ID NO: 1624486 - DNA, 15 bp, Homo sapiens
atggccccaggggcc

SEQ ID NO: 1624487 - DNA, 15 bp, Homo sapiens
tatggccccaggggc

SEQ ID NO: 1624488 - DNA, 15 bp, Homo sapiens
ttatggccccagggg

SEQ ID NO: 1624489 - DNA, 15 bp, Homo sapiens
cttatggccccaggg

SEQ ID NO: 1624490 - DNA, 15 bp, Homo sapiens
gcttatggccccagg

SEQ ID NO: 1624491 - DNA, 15 bp, Homo sapiens
ggcttatggccccag

SEQ ID NO: 1624492 - DNA, 15 bp, Homo sapiens
tggcttatggcccca

SEQ ID NO: 1624493 - DNA, 15 bp, Homo sapiens
gtggcttatggcccc

SEQ ID NO: 1624494 - DNA, 15 bp, Homo sapiens
tgtggcttatggccc

SEQ ID NO: 1624495 - DNA, 15 bp, Homo sapiens
gtgtggcttatggcc

SEQ ID NO: 1624496 - DNA, 15 bp, Homo sapiens
ggtgtggcttatggc

SEQ ID NO: 1624497 - DNA, 15 bp, Homo sapiens
gggtgtggcttatgg

SEQ ID NO: 1624498 - DNA, 15 bp, Homo sapiens
ggggtgtggcttatg

SEQ ID NO: 1624499 - DNA, 15 bp, Homo sapiens
gggggtgtggcttat

SEQ ID NO: 1624500 - DNA, 15 bp, Homo sapiens
ggggggtgtggctta

SEQ ID NO: 1624501 - DNA, 15 bp, Homo sapiens
tggggggtgtggctt

SEQ ID NO: 1624502 - DNA, 15 bp, Homo sapiens
ttggggggtgtggct

SEQ ID NO: 1624503 - DNA, 15 bp, Homo sapiens
cttggggggtgtggc

SEQ ID NO: 1624504 - DNA, 15 bp, Homo sapiens
ccttggggggtgtgg

SEQ ID NO: 1624505 - DNA, 15 bp, Homo sapiens
gccttggggggtgtg

SEQ ID NO: 1624506 - DNA, 15 bp, Homo sapiens
agccttggggggtgt

SEQ ID NO: 1624507 - DNA, 15 bp, Homo sapiens
cagccttggggggtg

SEQ ID NO: 1624508 - DNA, 15 bp, Homo sapiens
tcagccttggggggt

SEQ ID NO: 1624509 - DNA, 15 bp, Homo sapiens
ttcagccttgggggg

SEQ ID NO: 1624510 - DNA, 15 bp, Homo sapiens
gttcagccttggggg

SEQ ID NO: 1624511 - DNA, 15 bp, Homo sapiens
ggttcagccttgggg

SEQ ID NO: 1624512 - DNA, 15 bp, Homo sapiens
gggttcagccttggg

SEQ ID NO: 1624513 - DNA, 15 bp, Homo sapiens
tgggttcagccttgg

SEQ ID NO: 1624514 - DNA, 15 bp, Homo sapiens
ctgggttcagccttg

SEQ ID NO: 1624515 - DNA, 15 bp, Homo sapiens
tctgggttcagcctt

SEQ ID NO: 1624516 - DNA, 15 bp, Homo sapiens
ctctgggttcagcct

SEQ ID NO: 1624517 - DNA, 15 bp, Homo sapiens
tctctgggttcagcc

SEQ ID NO: 1624518 - DNA, 15 bp, Homo sapiens
ctctctgggttcagc

SEQ ID NO: 1624519 - DNA, 15 bp, Homo sapiens
actctctgggttcag

SEQ ID NO: 1624520 - DNA, 15 bp, Homo sapiens
aactctctgggttca

SEQ ID NO: 1624521 - DNA, 15 bp, Homo sapiens
aaactctctgggttc

SEQ ID NO: 1624522 - DNA, 15 bp, Homo sapiens
caaactctctgggtt

SEQ ID NO: 1624523 - DNA, 15 bp, Homo sapiens
acaaactctctgggt

SEQ ID NO: 1624524 - DNA, 15 bp, Homo sapiens
cacaaactctctggg

SEQ ID NO: 1624525 - DNA, 15 bp, Homo sapiens
ccacaaactctctgg

SEQ ID NO: 1624526 - DNA, 15 bp, Homo sapiens
accacaaactctctg

SEQ ID NO: 1624527 - DNA, 15 bp, Homo sapiens
aaccacaaactctct

SEQ ID NO: 1624528 - DNA, 15 bp, Homo sapiens
aaaccacaaactctc

SEQ ID NO: 1624529 - DNA, 15 bp, Homo sapiens
taaaccacaaactct

SEQ ID NO: 1624530 - DNA, 15 bp, Homo sapiens
ttaaaccacaaactc

SEQ ID NO: 1624531 - DNA, 15 bp, Homo sapiens
tttaaaccacaaact

SEQ ID NO: 1624532 - DNA, 15 bp, Homo sapiens
atttaaaccacaaac

SEQ ID NO: 1624533 - DNA, 15 bp, Homo sapiens
gatttaaaccacaaa

SEQ ID NO: 1624534 - DNA, 15 bp, Homo sapiens
agatttaaaccacaa

SEQ ID NO: 1624535 - DNA, 15 bp, Homo sapiens
aagatttaaaccaca

SEQ ID NO: 1624536 - DNA, 15 bp, Homo sapiens
caagatttaaaccac

SEQ ID NO: 1624537 - DNA, 15 bp, Homo sapiens
ccaagatttaaacca

SEQ ID NO: 1624538 - DNA, 15 bp, Homo sapiens
cccaagatttaaacc

SEQ ID NO: 1624539 - DNA, 15 bp, Homo sapiens
gcccaagatttaaac

SEQ ID NO: 1624540 - DNA, 15 bp, Homo sapiens
ggcccaagatttaaa

SEQ ID NO: 1624541 - DNA, 15 bp, Homo sapiens
aggcccaagatttaa

SEQ ID NO: 1624542 - DNA, 15 bp, Homo sapiens
caggcccaagattta

SEQ ID NO: 1624543 - DNA, 15 bp, Homo sapiens
ccaggcccaagattt

SEQ ID NO: 1624544 - DNA, 15 bp, Homo sapiens
tccaggcccaagatt

SEQ ID NO: 1624545 - DNA, 15 bp, Homo sapiens
ctccaggcccaagat

SEQ ID NO: 1624546 - DNA, 15 bp, Homo sapiens
cctccaggcccaaga

SEQ ID NO: 1624547 - DNA, 15 bp, Homo sapiens
tcctccaggcccaag

SEQ ID NO: 1624548 - DNA, 15 bp, Homo sapiens
atcctccaggcccaa

SEQ ID NO: 1624549 - DNA, 15 bp, Homo sapiens
aatcctccaggccca

SEQ ID NO: 1624550 - DNA, 15 bp, Homo sapiens
gaatcctccaggccc

SEQ ID NO: 1624551 - DNA, 15 bp, Homo sapiens
agaatcctccaggcc

SEQ ID NO: 1624552 - DNA, 15 bp, Homo sapiens
cagaatcctccaggc

SEQ ID NO: 1624553 - DNA, 15 bp, Homo sapiens
acagaatcctccagg

SEQ ID NO: 1624554 - DNA, 15 bp, Homo sapiens
cacagaatcctccag

SEQ ID NO: 1624555 - DNA, 15 bp, Homo sapiens
ccacagaatcctcca

SEQ ID NO: 1624556 - DNA, 15 bp, Homo sapiens
tccacagaatcctcc

SEQ ID NO: 1624557 - DNA, 15 bp, Homo sapiens
ctccacagaatcctc

SEQ ID NO: 1624558 - DNA, 15 bp, Homo sapiens
cctccacagaatcct

SEQ ID NO: 1624559 - DNA, 15 bp, Homo sapiens
tcctccacagaatcc

SEQ ID NO: 1624560 - DNA, 15 bp, Homo sapiens
ctcctccacagaatc

SEQ ID NO: 1624561 - DNA, 15 bp, Homo sapiens
tctcctccacagaat

SEQ ID NO: 1624562 - DNA, 15 bp, Homo sapiens
ctctcctccacagaa

SEQ ID NO: 1624563 - DNA, 15 bp, Homo sapiens
actctcctccacaga

SEQ ID NO: 1624564 - DNA, 15 bp, Homo sapiens
aactctcctccacag

SEQ ID NO: 1624565 - DNA, 15 bp, Homo sapiens
gaactctcctccaca

SEQ ID NO: 1624566 - DNA, 15 bp, Homo sapiens
cgaactctcctccac

SEQ ID NO: 1624567 - DNA, 15 bp, Homo sapiens
ccgaactctcctcca

SEQ ID NO: 1624568 - DNA, 15 bp, Homo sapiens
accgaactctcctcc

SEQ ID NO: 1624569 - DNA, 15 bp, Homo sapiens
gaccgaactctcctc

SEQ ID NO: 1624570 - DNA, 15 bp, Homo sapiens
ggaccgaactctcct

SEQ ID NO: 1624571 - DNA, 15 bp, Homo sapiens
tggaccgaactctcc

SEQ ID NO: 1624572 - DNA, 15 bp, Homo sapiens
ctggaccgaactctc

SEQ ID NO: 1624573 - DNA, 15 bp, Homo sapiens
cctggaccgaactct

SEQ ID NO: 1624574 - DNA, 15 bp, Homo sapiens
gcctggaccgaactc

SEQ ID NO: 1624575 - DNA, 15 bp, Homo sapiens
ggcctggaccgaact

SEQ ID NO: 1624576 - DNA, 15 bp, Homo sapiens
aggcctggaccgaac

SEQ ID NO: 1624577 - DNA, 15 bp, Homo sapiens
aaggcctggaccgaa

SEQ ID NO: 1624578 - DNA, 15 bp, Homo sapiens
gaaggcctggaccga

SEQ ID NO: 1624579 - DNA, 15 bp, Homo sapiens
agaaggcctggaccg

SEQ ID NO: 1624580 - DNA, 15 bp, Homo sapiens
cagaaggcctggacc

SEQ ID NO: 1624581 - DNA, 15 bp, Homo sapiens
gcagaaggcctggac

SEQ ID NO: 1624582 - DNA, 15 bp, Homo sapiens
agcagaaggcctgga

SEQ ID NO: 1624583 - DNA, 15 bp, Homo sapiens
gagcagaaggcctgg

SEQ ID NO: 1624584 - DNA, 15 bp, Homo sapiens
ggagcagaaggcctg

SEQ ID NO: 1624585 - DNA, 15 bp, Homo sapiens
tggagcagaaggcct

SEQ ID NO: 1624586 - DNA, 15 bp, Homo sapiens
ctggagcagaaggcc

SEQ ID NO: 1624587 - DNA, 15 bp, Homo sapiens
cctggagcagaaggc

SEQ ID NO: 1624588 - DNA, 15 bp, Homo sapiens
tcctggagcagaagg

SEQ ID NO: 1624589 - DNA, 15 bp, Homo sapiens
ctcctggagcagaag

SEQ ID NO: 1624590 - DNA, 15 bp, Homo sapiens
cctcctggagcagaa

SEQ ID NO: 1624591 - DNA, 15 bp, Homo sapiens
gcctcctggagcaga

SEQ ID NO: 1624592 - DNA, 15 bp, Homo sapiens
cgcctcctggagcag

SEQ ID NO: 1624593 - DNA, 15 bp, Homo sapiens
gcgcctcctggagca

SEQ ID NO: 1624594 - DNA, 15 bp, Homo sapiens
agcgcctcctggagc

SEQ ID NO: 1624595 - DNA, 15 bp, Homo sapiens
cagcgcctcctggag

SEQ ID NO: 1624596 - DNA, 15 bp, Homo sapiens
ccagcgcctcctgga

SEQ ID NO: 1624597 - DNA, 15 bp, Homo sapiens
gccagcgcctcctgg

SEQ ID NO: 1624598 - DNA, 15 bp, Homo sapiens
tgccagcgcctcctg

SEQ ID NO: 1624599 - DNA, 15 bp, Homo sapiens
ctgccagcgcctcct

SEQ ID NO: 1624600 - DNA, 15 bp, Homo sapiens
gctgccagcgcctcc

SEQ ID NO: 1624601 - DNA, 15 bp, Homo sapiens
agctgccagcgcctc

SEQ ID NO: 1624602 - DNA, 15 bp, Homo sapiens
gagctgccagcgcct

SEQ ID NO: 1624603 - DNA, 15 bp, Homo sapiens
ggagctgccagcgcc

SEQ ID NO: 1624604 - DNA, 15 bp, Homo sapiens
cggagctgccagcgc

SEQ ID NO: 1624605 - DNA, 15 bp, Homo sapiens
tcggagctgccagcg

SEQ ID NO: 1624606 - DNA, 15 bp, Homo sapiens
gtcggagctgccagc

SEQ ID NO: 1624607 - DNA, 15 bp, Homo sapiens
tgtcggagctgccag

SEQ ID NO: 1624608 - DNA, 15 bp, Homo sapiens
gtgtcggagctgcca

SEQ ID NO: 1624609 - DNA, 15 bp, Homo sapiens
ggtgtcggagctgcc

SEQ ID NO: 1624610 - DNA, 15 bp, Homo sapiens
tggtgtcggagctgc

SEQ ID NO: 1624611 - DNA, 15 bp, Homo sapiens
gtggtgtcggagctg

SEQ ID NO: 1624612 - DNA, 15 bp, Homo sapiens
tgtggtgtcggagct

SEQ ID NO: 1624613 - DNA, 15 bp, Homo sapiens
ctgtggtgtcggagc

SEQ ID NO: 1624614 - DNA, 15 bp, Homo sapiens
tctgtggtgtcggag

SEQ ID NO: 1624615 - DNA, 15 bp, Homo sapiens
gtctgtggtgtcgga

SEQ ID NO: 1624616 - DNA, 15 bp, Homo sapiens
tgtctgtggtgtcgg

SEQ ID NO: 1624617 - DNA, 15 bp, Homo sapiens
gtgtctgtggtgtcg

SEQ ID NO: 1624618 - DNA, 15 bp, Homo sapiens
tgtgtctgtggtgtc

SEQ ID NO: 1624619 - DNA, 15 bp, Homo sapiens
atgtgtctgtggtgt

SEQ ID NO: 1624620 - DNA, 15 bp, Homo sapiens
aatgtgtctgtggtg

SEQ ID NO: 1624621 - DNA, 15 bp, Homo sapiens
taatgtgtctgtggt

SEQ ID NO: 1624622 - DNA, 15 bp, Homo sapiens
ttaatgtgtctgtgg

SEQ ID NO: 1624623 - DNA, 15 bp, Homo sapiens
attaatgtgtctgtg

SEQ ID NO: 1624624 - DNA, 15 bp, Homo sapiens
aattaatgtgtctgt

SEQ ID NO: 1624625 - DNA, 15 bp, Homo sapiens
caattaatgtgtctg

SEQ ID NO: 1624626 - DNA, 15 bp, Homo sapiens
acaattaatgtgtct

SEQ ID NO: 1624627 - DNA, 15 bp, Homo sapiens
cacaattaatgtgtc

SEQ ID NO: 1624628 - DNA, 15 bp, Homo sapiens
gcacaattaatgtgt

SEQ ID NO: 1624629 - DNA, 15 bp, Homo sapiens
cgcacaattaatgtg

SEQ ID NO: 1624630 - DNA, 15 bp, Homo sapiens
ccgcacaattaatgt

SEQ ID NO: 1624631 - DNA, 15 bp, Homo sapiens
tccgcacaattaatg

SEQ ID NO: 1624632 - DNA, 15 bp, Homo sapiens
ctccgcacaattaat

SEQ ID NO: 1624633 - DNA, 15 bp, Homo sapiens
tctccgcacaattaa

SEQ ID NO: 1624634 - DNA, 15 bp, Homo sapiens
ttctccgcacaatta

SEQ ID NO: 1624635 - DNA, 15 bp, Homo sapiens
attctccgcacaatt

SEQ ID NO: 1624636 - DNA, 15 bp, Homo sapiens
aattctccgcacaat

SEQ ID NO: 1624637 - DNA, 15 bp, Homo sapiens
gaattctccgcacaa

SEQ ID NO: 1624638 - DNA, 15 bp, Homo sapiens
tgaattctccgcaca

SEQ ID NO: 1624639 - DNA, 15 bp, Homo sapiens
ttgaattctccgcac

SEQ ID NO: 1624640 - DNA, 15 bp, Homo sapiens
gttgaattctccgca

SEQ ID NO: 1624641 - DNA, 15 bp, Homo sapiens
cgttgaattctccgc

SEQ ID NO: 1624642 - DNA, 15 bp, Homo sapiens
gcgttgaattctccg

SEQ ID NO: 1624643 - DNA, 15 bp, Homo sapiens
agcgttgaattctcc

SEQ ID NO: 1624644 - DNA, 15 bp, Homo sapiens
tagcgttgaattctc

SEQ ID NO: 1624645 - DNA, 15 bp, Homo sapiens
ctagcgttgaattct

SEQ ID NO: 1624646 - DNA, 15 bp, Homo sapiens
cctagcgttgaattc

SEQ ID NO: 1624647 - DNA, 15 bp, Homo sapiens
ccctagcgttgaatt

SEQ ID NO: 1624648 - DNA, 15 bp, Homo sapiens
gccctagcgttgaat

SEQ ID NO: 1624649 - DNA, 15 bp, Homo sapiens
agccctagcgttgaa

SEQ ID NO: 1624650 - DNA, 15 bp, Homo sapiens
gagccctagcgttga

SEQ ID NO: 1624651 - DNA, 15 bp, Homo sapiens
tgagccctagcgttg

SEQ ID NO: 1624652 - DNA, 15 bp, Homo sapiens
ctgagccctagcgtt

SEQ ID NO: 1624653 - DNA, 15 bp, Homo sapiens
actgagccctagcgt

SEQ ID NO: 1624654 - DNA, 15 bp, Homo sapiens
gactgagccctagcg

SEQ ID NO: 1624655 - DNA, 15 bp, Homo sapiens
tttgactgagcccta

SEQ ID NO: 1624656 - DNA, 15 bp, Homo sapiens
ttttgactgagccct

SEQ ID NO: 1624657 - DNA, 15 bp, Homo sapiens
tttttgactgagccc

SEQ ID NO: 1624658 - DNA, 15 bp, Homo sapiens
atttttgactgagcc

SEQ ID NO: 1624659 - DNA, 15 bp, Homo sapiens
gatttttgactgagc

SEQ ID NO: 1624660 - DNA, 15 bp, Homo sapiens
tgatttttgactgag

SEQ ID NO: 1624661 - DNA, 15 bp, Homo sapiens
ttgatttttgactga

SEQ ID NO: 1624662 - DNA, 15 bp, Homo sapiens
tttgatttttgactg

SEQ ID NO: 1624663 - DNA, 15 bp, Homo sapiens
ttttgatttttgact

SEQ ID NO: 1624664 - DNA, 15 bp, Homo sapiens
tttttgatttttgac

SEQ ID NO: 1624665 - DNA, 15 bp, Homo sapiens
gtttttgatttttga

SEQ ID NO: 1624666 - DNA, 15 bp, Homo sapiens
cgtttttgatttttg

SEQ ID NO: 1624667 - DNA, 15 bp, Homo sapiens
gcgtttttgattttt

SEQ ID NO: 1624668 - DNA, 15 bp, Homo sapiens
tgcgtttttgatttt

SEQ ID NO: 1624669 - DNA, 15 bp, Homo sapiens
ttgcgtttttgattt

SEQ ID NO: 1624670 - DNA, 15 bp, Homo sapiens
tttgcgtttttgatt

SEQ ID NO: 1624671 - DNA, 15 bp, Homo sapiens
ttttgcgtttttgat

SEQ ID NO: 1624672 - DNA, 15 bp, Homo sapiens
gttttgcgtttttga

SEQ ID NO: 1624673 - DNA, 15 bp, Homo sapiens
tgttttgcgtttttg

SEQ ID NO: 1624674 - DNA, 15 bp, Homo sapiens
ttgttttgcgttttt

SEQ ID NO: 1624675 - DNA, 15 bp, Homo sapiens
tttgttttgcgtttt

SEQ ID NO: 1624676 - DNA, 15 bp, Homo sapiens
ttttgttttgcgttt

SEQ ID NO: 1624677 - DNA, 15 bp, Homo sapiens
tttttgttttgcgtt

SEQ ID NO: 1624678 - DNA, 15 bp, Homo sapiens
ctttttgttttgcgt

SEQ ID NO: 1624679 - DNA, 15 bp, Homo sapiens
tctttttgttttgcg

SEQ ID NO: 1624680 - DNA, 15 bp, Homo sapiens
ctctttttgttttgc

SEQ ID NO: 1624681 - DNA, 15 bp, Homo sapiens
tctctttttgttttg

SEQ ID NO: 1624682 - DNA, 15 bp, Homo sapiens
ttctctttttgtttt

SEQ ID NO: 1624683 - DNA, 15 bp, Homo sapiens
attctctttttgttt

SEQ ID NO: 1624684 - DNA, 15 bp, Homo sapiens
gattctctttttgtt

SEQ ID NO: 1624685 - DNA, 15 bp, Homo sapiens
ggattctctttttgt

SEQ ID NO: 1624686 - DNA, 15 bp, Homo sapiens
gggattctctttttg

SEQ ID NO: 1624687 - DNA, 15 bp, Homo sapiens
agggattctcttttt

SEQ ID NO: 1624688 - DNA, 15 bp, Homo sapiens
aagggattctctttt

SEQ ID NO: 1624689 - DNA, 15 bp, Homo sapiens
aaagggattctcttt

SEQ ID NO: 1624690 - DNA, 15 bp, Homo sapiens
aaaagggattctctt

SEQ ID NO: 1624691 - DNA, 15 bp, Homo sapiens
taaaagggattctct

SEQ ID NO: 1624692 - DNA, 15 bp, Homo sapiens
ataaaagggattctc

SEQ ID NO: 1624693 - DNA, 15 bp, Homo sapiens
aataaaagggattct

SEQ ID NO: 1624694 - DNA, 15 bp, Homo sapiens
aaataaaagggattc

SEQ ID NO: 1624695 - DNA, 15 bp, Homo sapiens
taaataaaagggatt

SEQ ID NO: 1624696 - DNA, 15 bp, Homo sapiens
gtaaataaaagggat

SEQ ID NO: 1624697 - DNA, 15 bp, Homo sapiens
ggtaaataaaaggga

SEQ ID NO: 1624698 - DNA, 15 bp, Homo sapiens
aggtaaataaaaggg

SEQ ID NO: 1624699 - DNA, 15 bp, Homo sapiens
gaggtaaataaaagg

SEQ ID NO: 1624700 - DNA, 15 bp, Homo sapiens
cgaggtaaataaaag

SEQ ID NO: 1624701 - DNA, 15 bp, Homo sapiens
acgaggtaaataaaa

SEQ ID NO: 1624702 - DNA, 15 bp, Homo sapiens
gacgaggtaaataaa

SEQ ID NO: 1624703 - DNA, 15 bp, Homo sapiens
agacgaggtaaataa

SEQ ID NO: 1624704 - DNA, 15 bp, Homo sapiens
gagacgaggtaaata

SEQ ID NO: 1624705 - DNA, 15 bp, Homo sapiens
ggagacgaggtaaat

SEQ ID NO: 1624706 - DNA, 15 bp, Homo sapiens
gggagacgaggtaaa

SEQ ID NO: 1624707 - DNA, 15 bp, Homo sapiens
agggagacgaggtaa

SEQ ID NO: 1624708 - DNA, 15 bp, Homo sapiens
gagggagacgaggta

SEQ ID NO: 1624709 - DNA, 15 bp, Homo sapiens
ggagggagacgaggt

SEQ ID NO: 1624710 - DNA, 15 bp, Homo sapiens
ggggagggagacgag

SEQ ID NO: 1624711 - DNA, 15 bp, Homo sapiens
gggggagggagacga

SEQ ID NO: 1624712 - DNA, 15 bp, Homo sapiens
agggggagggagacg

SEQ ID NO: 1624713 - DNA, 15 bp, Homo sapiens
cagggggagggagac

SEQ ID NO: 1624714 - DNA, 15 bp, Homo sapiens
acagggggagggaga

SEQ ID NO: 1624715 - DNA, 15 bp, Homo sapiens
aacagggggagggag

SEQ ID NO: 1624716 - DNA, 15 bp, Homo sapiens
aaacagggggaggga

SEQ ID NO: 1624717 - DNA, 15 bp, Homo sapiens
caaacagggggaggg

SEQ ID NO: 1624718 - DNA, 15 bp, Homo sapiens
ccaaacagggggagg

SEQ ID NO: 1624719 - DNA, 15 bp, Homo sapiens
tccaaacagggggag

SEQ ID NO: 1624720 - DNA, 15 bp, Homo sapiens
gtccaaacaggggga

SEQ ID NO: 1624721 - DNA, 15 bp, Homo sapiens
tgtccaaacaggggg

SEQ ID NO: 1624722 - DNA, 15 bp, Homo sapiens
atgtccaaacagggg

SEQ ID NO: 1624723 - DNA, 15 bp, Homo sapiens
catgtccaaacaggg

SEQ ID NO: 1624724 - DNA, 15 bp, Homo sapiens
tcatgtccaaacagg

SEQ ID NO: 1624725 - DNA, 15 bp, Homo sapiens
gtcatgtccaaacag

SEQ ID NO: 1624726 - DNA, 15 bp, Homo sapiens
ggtcatgtccaaaca

SEQ ID NO: 1624727 - DNA, 15 bp, Homo sapiens
aggtcatgtccaaac

SEQ ID NO: 1624728 - DNA, 15 bp, Homo sapiens
aaggtcatgtccaaa

SEQ ID NO: 1624729 - DNA, 15 bp, Homo sapiens
caaggtcatgtccaa

SEQ ID NO: 1624730 - DNA, 15 bp, Homo sapiens
tcaaggtcatgtcca

SEQ ID NO: 1624731 - DNA, 15 bp, Homo sapiens
ctcaaggtcatgtcc

SEQ ID NO: 1624732 - DNA, 15 bp, Homo sapiens
gctcaaggtcatgtc

SEQ ID NO: 1624733 - DNA, 15 bp, Homo sapiens
agctcaaggtcatgt

SEQ ID NO: 1624734 - DNA, 15 bp, Homo sapiens
gagctcaaggtcatg

SEQ ID NO: 1624735 - DNA, 15 bp, Homo sapiens
agagctcaaggtcat

SEQ ID NO: 1624736 - DNA, 15 bp, Homo sapiens
cagagctcaaggtca

SEQ ID NO: 1624737 - DNA, 15 bp, Homo sapiens
gcagagctcaaggtc

SEQ ID NO: 1624738 - DNA, 15 bp, Homo sapiens
agcagagctcaaggt

SEQ ID NO: 1624739 - DNA, 15 bp, Homo sapiens
cagcagagctcaagg

SEQ ID NO: 1624740 - DNA, 15 bp, Homo sapiens
ccagcagagctcaag

SEQ ID NO: 1624741 - DNA, 15 bp, Homo sapiens
gccagcagagctcaa

SEQ ID NO: 1624742 - DNA, 15 bp, Homo sapiens
ggccagcagagctca

SEQ ID NO: 1624743 - DNA, 15 bp, Homo sapiens
gggccagcagagctc

SEQ ID NO: 1624744 - DNA, 15 bp, Homo sapiens
tgggccagcagagct

SEQ ID NO: 1624745 - DNA, 15 bp, Homo sapiens
gtgggccagcagagc

SEQ ID NO: 1624746 - DNA, 15 bp, Homo sapiens
tgtgggccagcagag

SEQ ID NO: 1624747 - DNA, 15 bp, Homo sapiens
ttgtgggccagcaga

SEQ ID NO: 1624748 - DNA, 15 bp, Homo sapiens
cttgtgggccagcag

SEQ ID NO: 1624749 - DNA, 15 bp, Homo sapiens
acttgtgggccagca

SEQ ID NO: 1624750 - DNA, 15 bp, Homo sapiens
cacttgtgggccagc

SEQ ID NO: 1624751 - DNA, 15 bp, Homo sapiens
ccacttgtgggccag

SEQ ID NO: 1624752 - DNA, 15 bp, Homo sapiens
gccacttgtgggcca

SEQ ID NO: 1624753 - DNA, 15 bp, Homo sapiens
ggccacttgtgggcc

SEQ ID NO: 1624754 - DNA, 15 bp, Homo sapiens
tggccacttgtgggc

SEQ ID NO: 1624755 - DNA, 15 bp, Homo sapiens
ctggccacttgtggg

SEQ ID NO: 1624756 - DNA, 15 bp, Homo sapiens
cctggccacttgtgg

SEQ ID NO: 1624757 - DNA, 15 bp, Homo sapiens
gcctggccacttgtg

SEQ ID NO: 1624758 - DNA, 15 bp, Homo sapiens
agcctggccacttgt

SEQ ID NO: 1624759 - DNA, 15 bp, Homo sapiens
cagcctggccacttg

SEQ ID NO: 1624760 - DNA, 15 bp, Homo sapiens
ccagcctggccactt

SEQ ID NO: 1624761 - DNA, 15 bp, Homo sapiens
tccagcctggccact

SEQ ID NO: 1624762 - DNA, 15 bp, Homo sapiens
ctccagcctggccac

SEQ ID NO: 1624763 - DNA, 15 bp, Homo sapiens
gctccagcctggcca

SEQ ID NO: 1624764 - DNA, 15 bp, Homo sapiens
agctccagcctggcc

SEQ ID NO: 1624765 - DNA, 15 bp, Homo sapiens
cagctccagcctggc

SEQ ID NO: 1624766 - DNA, 15 bp, Homo sapiens
acagctccagcctgg

SEQ ID NO: 1624767 - DNA, 15 bp, Homo sapiens
gacagctccagcctg

SEQ ID NO: 1624768 - DNA, 15 bp, Homo sapiens
agacagctccagcct

SEQ ID NO: 1624769 - DNA, 15 bp, Homo sapiens
aagacagctccagcc

SEQ ID NO: 1624770 - DNA, 15 bp, Homo sapiens
caagacagctccagc

SEQ ID NO: 1624771 - DNA, 15 bp, Homo sapiens
gcaagacagctccag

SEQ ID NO: 1624772 - DNA, 15 bp, Homo sapiens
tgcaagacagctcca

SEQ ID NO: 1624773 - DNA, 15 bp, Homo sapiens
ttgcaagacagctcc

SEQ ID NO: 1624774 - DNA, 15 bp, Homo sapiens
tttgcaagacagctc

SEQ ID NO: 1624775 - DNA, 15 bp, Homo sapiens
ctttgcaagacagct

SEQ ID NO: 1624776 - DNA, 15 bp, Homo sapiens
tctttgcaagacagc

SEQ ID NO: 1624777 - DNA, 15 bp, Homo sapiens
ctctttgcaagacag

SEQ ID NO: 1624778 - DNA, 15 bp, Homo sapiens
tctctttgcaagaca

SEQ ID NO: 1624779 - DNA, 15 bp, Homo sapiens
ttctctttgcaagac

SEQ ID NO: 1624780 - DNA, 15 bp, Homo sapiens
tttctctttgcaaga

SEQ ID NO: 1624781 - DNA, 15 bp, Homo sapiens
gtttctctttgcaag

SEQ ID NO: 1624782 - DNA, 15 bp, Homo sapiens
tgtttctctttgcaa

SEQ ID NO: 1624783 - DNA, 15 bp, Homo sapiens
ttgtttctctttgca

SEQ ID NO: 1624784 - DNA, 15 bp, Homo sapiens
tttgtttctctttgc

SEQ ID NO: 1624785 - DNA, 15 bp, Homo sapiens
ttttgtttctctttg

SEQ ID NO: 1624786 - DNA, 15 bp, Homo sapiens
tttttgtttctcttt

SEQ ID NO: 1624787 - DNA, 15 bp, Homo sapiens
gtttttgtttctctt

SEQ ID NO: 1624788 - DNA, 15 bp, Homo sapiens
ggggcaaaggggctc

SEQ ID NO: 1624789 - DNA, 15 bp, Homo sapiens
gggggcaaaggggct

SEQ ID NO: 1624790 - DNA, 15 bp, Homo sapiens
tgggggcaaaggggc

SEQ ID NO: 1624791 - DNA, 15 bp, Homo sapiens
ctgggggcaaagggg

SEQ ID NO: 1624792 - DNA, 15 bp, Homo sapiens
cctgggggcaaaggg

SEQ ID NO: 1624793 - DNA, 15 bp, Homo sapiens
acctgggggcaaagg

SEQ ID NO: 1624794 - DNA, 15 bp, Homo sapiens
tacctgggggcaaag

SEQ ID NO: 1624795 - DNA, 15 bp, Homo sapiens
ctacctgggggcaaa

SEQ ID NO: 1624796 - DNA, 15 bp, Homo sapiens
gctacctgggggcaa

SEQ ID NO: 1624797 - DNA, 15 bp, Homo sapiens
agctacctgggggca

SEQ ID NO: 1624798 - DNA, 15 bp, Homo sapiens
aagctacctgggggc

SEQ ID NO: 1624799 - DNA, 15 bp, Homo sapiens
gaagctacctggggg

SEQ ID NO: 1624800 - DNA, 15 bp, Homo sapiens
ggaagctacctgggg

SEQ ID NO: 1624801 - DNA, 15 bp, Homo sapiens
gggaagctacctggg

SEQ ID NO: 1624802 - DNA, 15 bp, Homo sapiens
tgggaagctacctgg

SEQ ID NO: 1624803 - DNA, 15 bp, Homo sapiens
gtgggaagctacctg

SEQ ID NO: 1624804 - DNA, 15 bp, Homo sapiens
agtgggaagctacct

SEQ ID NO: 1624805 - DNA, 15 bp, Homo sapiens
aagtgggaagctacc

SEQ ID NO: 1624806 - DNA, 15 bp, Homo sapiens
gaagtgggaagctac

SEQ ID NO: 1624807 - DNA, 15 bp, Homo sapiens
tgaagtgggaagcta

SEQ ID NO: 1624808 - DNA, 15 bp, Homo sapiens
atgaagtgggaagct

SEQ ID NO: 1624809 - DNA, 15 bp, Homo sapiens
gatgaagtgggaagc

SEQ ID NO: 1624810 - DNA, 15 bp, Homo sapiens
ggatgaagtgggaag

SEQ ID NO: 1624811 - DNA, 15 bp, Homo sapiens
gggatgaagtgggaa

SEQ ID NO: 1624812 - DNA, 15 bp, Homo sapiens
ggggatgaagtggga

SEQ ID NO: 1624813 - DNA, 15 bp, Homo sapiens
tggggatgaagtggg

SEQ ID NO: 1624814 - DNA, 15 bp, Homo sapiens
gtggggatgaagtgg

SEQ ID NO: 1624815 - DNA, 15 bp, Homo sapiens
tgtggggatgaagtg

SEQ ID NO: 1624816 - DNA, 15 bp, Homo sapiens
atgtggggatgaagt

SEQ ID NO: 1624817 - DNA, 15 bp, Homo sapiens
aatgtggggatgaag

SEQ ID NO: 1624818 - DNA, 15 bp, Homo sapiens
caatgtggggatgaa

SEQ ID NO: 1624819 - DNA, 15 bp, Homo sapiens
gcaatgtggggatga

SEQ ID NO: 1624820 - DNA, 15 bp, Homo sapiens
ggcaatgtggggatg

SEQ ID NO: 1624821 - DNA, 15 bp, Homo sapiens
aggcaatgtggggat

SEQ ID NO: 1624822 - DNA, 15 bp, Homo sapiens
aaggcaatgtgggga

SEQ ID NO: 1624823 - DNA, 15 bp, Homo sapiens
aaaggcaatgtgggg

SEQ ID NO: 1624824 - DNA, 15 bp, Homo sapiens
gaaaggcaatgtggg

SEQ ID NO: 1624825 - DNA, 15 bp, Homo sapiens
tgaaaggcaatgtgg

SEQ ID NO: 1624826 - DNA, 15 bp, Homo sapiens
gtgaaaggcaatgtg

SEQ ID NO: 1624827 - DNA, 15 bp, Homo sapiens
agtgaaaggcaatgt

SEQ ID NO: 1624828 - DNA, 15 bp, Homo sapiens
cagtgaaaggcaatg

SEQ ID NO: 1624829 - DNA, 15 bp, Homo sapiens
acagtgaaaggcaat

SEQ ID NO: 1624830 - DNA, 15 bp, Homo sapiens
gacagtgaaaggcaa

SEQ ID NO: 1624831 - DNA, 15 bp, Homo sapiens
agacagtgaaaggca

SEQ ID NO: 1624832 - DNA, 15 bp, Homo sapiens
gagacagtgaaaggc

SEQ ID NO: 1624833 - DNA, 15 bp, Homo sapiens
agagacagtgaaagg

SEQ ID NO: 1624834 - DNA, 15 bp, Homo sapiens
cagagacagtgaaag

SEQ ID NO: 1624835 - DNA, 15 bp, Homo sapiens
ccagagacagtgaaa

SEQ ID NO: 1624836 - DNA, 15 bp, Homo sapiens
gccagagacagtgaa

SEQ ID NO: 1624837 - DNA, 15 bp, Homo sapiens
agccagagacagtga

SEQ ID NO: 1624838 - DNA, 15 bp, Homo sapiens
cagccagagacagtg

SEQ ID NO: 1624839 - DNA, 15 bp, Homo sapiens
acagccagagacagt

SEQ ID NO: 1624840 - DNA, 15 bp, Homo sapiens
aacagccagagacag

SEQ ID NO: 1624841 - DNA, 15 bp, Homo sapiens
taacagccagagaca

SEQ ID NO: 1624842 - DNA, 15 bp, Homo sapiens
gtaacagccagagac

SEQ ID NO: 1624843 - DNA, 15 bp, Homo sapiens
tgtaacagccagaga

SEQ ID NO: 1624844 - DNA, 15 bp, Homo sapiens
ctgtaacagccagag

SEQ ID NO: 1624845 - DNA, 15 bp, Homo sapiens
actgtaacagccaga

SEQ ID NO: 1624846 - DNA, 15 bp, Homo sapiens
tactgtaacagccag

SEQ ID NO: 1624847 - DNA, 15 bp, Homo sapiens
atactgtaacagcca

SEQ ID NO: 1624848 - DNA, 15 bp, Homo sapiens
aatactgtaacagcc

SEQ ID NO: 1624849 - DNA, 15 bp, Homo sapiens
taatactgtaacagc

SEQ ID NO: 1624850 - DNA, 15 bp, Homo sapiens
ctaatactgtaacag

SEQ ID NO: 1624851 - DNA, 15 bp, Homo sapiens
tctaatactgtaaca

SEQ ID NO: 1624852 - DNA, 15 bp, Homo sapiens
ctctaatactgtaac

SEQ ID NO: 1624853 - DNA, 15 bp, Homo sapiens
tctctaatactgtaa

SEQ ID NO: 1624854 - DNA, 15 bp, Homo sapiens
atctctaatactgta

SEQ ID NO: 1624855 - DNA, 15 bp, Homo sapiens
aatctctaatactgt

SEQ ID NO: 1624856 - DNA, 15 bp, Homo sapiens
taatctctaatactg

SEQ ID NO: 1624857 - DNA, 15 bp, Homo sapiens
ataatctctaatact

SEQ ID NO: 1624858 - DNA, 15 bp, Homo sapiens
aataatctctaatac

SEQ ID NO: 1624859 - DNA, 15 bp, Homo sapiens
aaataatctctaata

SEQ ID NO: 1624860 - DNA, 15 bp, Homo sapiens
aaaataatctctaat

SEQ ID NO: 1624861 - DNA, 15 bp, Homo sapiens
caaaataatctctaa

SEQ ID NO: 1624862 - DNA, 15 bp, Homo sapiens
acaaaataatctcta

SEQ ID NO: 1624863 - DNA, 15 bp, Homo sapiens
aacaaaataatctct

SEQ ID NO: 1624864 - DNA, 15 bp, Homo sapiens
aaacaaaataatctc

SEQ ID NO: 1624865 - DNA, 15 bp, Homo sapiens
caaacaaaataatct

SEQ ID NO: 1624866 - DNA, 15 bp, Homo sapiens
ccaaacaaaataatc

SEQ ID NO: 1624867 - DNA, 15 bp, Homo sapiens
gccaaacaaaataat

SEQ ID NO: 1624868 - DNA, 15 bp, Homo sapiens
agccaaacaaaataa

SEQ ID NO: 1624869 - DNA, 15 bp, Homo sapiens
cagccaaacaaaata

SEQ ID NO: 1624870 - DNA, 15 bp, Homo sapiens
tcagccaaacaaaat

SEQ ID NO: 1624871 - DNA, 15 bp, Homo sapiens
gtcagccaaacaaaa

SEQ ID NO: 1624872 - DNA, 15 bp, Homo sapiens
agtcagccaaacaaa

SEQ ID NO: 1624873 - DNA, 15 bp, Homo sapiens
tagtcagccaaacaa

SEQ ID NO: 1624874 - DNA, 15 bp, Homo sapiens
atagtcagccaaaca

SEQ ID NO: 1624875 - DNA, 15 bp, Homo sapiens
aatagtcagccaaac

SEQ ID NO: 1624876 - DNA, 15 bp, Homo sapiens
gaatagtcagccaaa

SEQ ID NO: 1624877 - DNA, 15 bp, Homo sapiens
agaatagtcagccaa

SEQ ID NO: 1624878 - DNA, 15 bp, Homo sapiens
cagaatagtcagcca

SEQ ID NO: 1624879 - DNA, 15 bp, Homo sapiens
acagaatagtcagcc

SEQ ID NO: 1624880 - DNA, 15 bp, Homo sapiens
aacagaatagtcagc

SEQ ID NO: 1624881 - DNA, 15 bp, Homo sapiens
aaacagaatagtcag

SEQ ID NO: 1624882 - DNA, 15 bp, Homo sapiens
taaacagaatagtca

SEQ ID NO: 1624883 - DNA, 15 bp, Homo sapiens
gtaaacagaatagtc

SEQ ID NO: 1624884 - DNA, 15 bp, Homo sapiens
ggtaaacagaatagt

SEQ ID NO: 1624885 - DNA, 15 bp, Homo sapiens
tggtaaacagaatag

SEQ ID NO: 1624886 - DNA, 15 bp, Homo sapiens
ttggtaaacagaata

SEQ ID NO: 1624887 - DNA, 15 bp, Homo sapiens
cttggtaaacagaat

SEQ ID NO: 1624888 - DNA, 15 bp, Homo sapiens
ccttggtaaacagaa

SEQ ID NO: 1624889 - DNA, 15 bp, Homo sapiens
gccttggtaaacaga

SEQ ID NO: 1624890 - DNA, 15 bp, Homo sapiens
ggccttggtaaacag

SEQ ID NO: 1624891 - DNA, 15 bp, Homo sapiens
aggccttggtaaaca

SEQ ID NO: 1624892 - DNA, 15 bp, Homo sapiens
gaggccttggtaaac

SEQ ID NO: 1624893 - DNA, 15 bp, Homo sapiens
agaggccttggtaaa

SEQ ID NO: 1624894 - DNA, 15 bp, Homo sapiens
aagaggccttggtaa

SEQ ID NO: 1624895 - DNA, 15 bp, Homo sapiens
caagaggccttggta

SEQ ID NO: 1624896 - DNA, 15 bp, Homo sapiens
tcaagaggccttggt

SEQ ID NO: 1624897 - DNA, 15 bp, Homo sapiens
ctcaagaggccttgg

SEQ ID NO: 1624898 - DNA, 15 bp, Homo sapiens
cctcaagaggccttg

SEQ ID NO: 1624899 - DNA, 15 bp, Homo sapiens
tcctcaagaggcctt

SEQ ID NO: 1624900 - DNA, 15 bp, Homo sapiens
ctcctcaagaggcct

SEQ ID NO: 1624901 - DNA, 15 bp, Homo sapiens
cctcctcaagaggcc

SEQ ID NO: 1624902 - DNA, 15 bp, Homo sapiens
acctcctcaagaggc

SEQ ID NO: 1624903 - DNA, 15 bp, Homo sapiens
tacctcctcaagagg

SEQ ID NO: 1624904 - DNA, 15 bp, Homo sapiens
ctacctcctcaagag

SEQ ID NO: 1624905 - DNA, 15 bp, Homo sapiens
actacctcctcaaga

SEQ ID NO: 1624906 - DNA, 15 bp, Homo sapiens
tactacctcctcaag

SEQ ID NO: 1624907 - DNA, 15 bp, Homo sapiens
ctactacctcctcaa

SEQ ID NO: 1624908 - DNA, 15 bp, Homo sapiens
gctactacctcctca

SEQ ID NO: 1624909 - DNA, 15 bp, Homo sapiens
agctactacctcctc

SEQ ID NO: 1624910 - DNA, 15 bp, Homo sapiens
aagctactacctcct

SEQ ID NO: 1624911 - DNA, 15 bp, Homo sapiens
taagctactacctcc

SEQ ID NO: 1624912 - DNA, 15 bp, Homo sapiens
gtaagctactacctc

SEQ ID NO: 1624913 - DNA, 15 bp, Homo sapiens
ggtaagctactacct

SEQ ID NO: 1624914 - DNA, 15 bp, Homo sapiens
tggtaagctactacc

SEQ ID NO: 1624915 - DNA, 15 bp, Homo sapiens
ctggtaagctactac

SEQ ID NO: 1624916 - DNA, 15 bp, Homo sapiens
gctggtaagctacta

SEQ ID NO: 1624917 - DNA, 15 bp, Homo sapiens
agctggtaagctact

SEQ ID NO: 1624918 - DNA, 15 bp, Homo sapiens
cagctggtaagctac

SEQ ID NO: 1624919 - DNA, 15 bp, Homo sapiens
acagctggtaagcta

SEQ ID NO: 1624920 - DNA, 15 bp, Homo sapiens
aacagctggtaagct

SEQ ID NO: 1624921 - DNA, 15 bp, Homo sapiens
aaacagctggtaagc

SEQ ID NO: 1624922 - DNA, 15 bp, Homo sapiens
taaacagctggtaag

SEQ ID NO: 1624923 - DNA, 15 bp, Homo sapiens
ataaacagctggtaa

SEQ ID NO: 1624924 - DNA, 15 bp, Homo sapiens
aataaacagctggta

SEQ ID NO: 1624925 - DNA, 15 bp, Homo sapiens
taataaacagctggt

SEQ ID NO: 1624926 - DNA, 15 bp, Homo sapiens
ataataaacagctgg

SEQ ID NO: 1624927 - DNA, 15 bp, Homo sapiens
cataataaacagctg

SEQ ID NO: 1624928 - DNA, 15 bp, Homo sapiens
acataataaacagct

SEQ ID NO: 1624929 - DNA, 15 bp, Homo sapiens
tacataataaacagc

SEQ ID NO: 1624930 - DNA, 15 bp, Homo sapiens
atacataataaacag

SEQ ID NO: 1624931 - DNA, 15 bp, Homo sapiens
catacataataaaca

SEQ ID NO: 1624932 - DNA, 15 bp, Homo sapiens
acatacataataaac

SEQ ID NO: 1624933 - DNA, 15 bp, Homo sapiens
tacatacataataaa

SEQ ID NO: 1624934 - DNA, 15 bp, Homo sapiens
atacatacataataa

SEQ ID NO: 1624935 - DNA, 15 bp, Homo sapiens
aatacatacataata

SEQ ID NO: 1624936 - DNA, 15 bp, Homo sapiens
aaatacatacataat

SEQ ID NO: 1624937 - DNA, 15 bp, Homo sapiens
taaatacatacataa

SEQ ID NO: 1624938 - DNA, 15 bp, Homo sapiens
gtaaatacatacata

SEQ ID NO: 1624939 - DNA, 15 bp, Homo sapiens
agtaaatacatacat

SEQ ID NO: 1624940 - DNA, 15 bp, Homo sapiens
aagtaaatacataca

SEQ ID NO: 1624941 - DNA, 15 bp, Homo sapiens
taagtaaatacatac

SEQ ID NO: 1624942 - DNA, 15 bp, Homo sapiens
ataagtaaatacata

SEQ ID NO: 1624943 - DNA, 15 bp, Homo sapiens
tataagtaaatacat

SEQ ID NO: 1624944 - DNA, 15 bp, Homo sapiens
atataagtaaataca

SEQ ID NO: 1624945 - DNA, 15 bp, Homo sapiens
aatataagtaaatac

SEQ ID NO: 1624946 - DNA, 15 bp, Homo sapiens
aaatataagtaaata

SEQ ID NO: 1624947 - DNA, 15 bp, Homo sapiens
taaatataagtaaat

SEQ ID NO: 1624948 - DNA, 15 bp, Homo sapiens
gtaaatataagtaaa

SEQ ID NO: 1624949 - DNA, 15 bp, Homo sapiens
agtaaatataagtaa

SEQ ID NO: 1624950 - DNA, 15 bp, Homo sapiens
aagtaaatataagta

SEQ ID NO: 1624951 - DNA, 15 bp, Homo sapiens
taagtaaatataagt

SEQ ID NO: 1624952 - DNA, 15 bp, Homo sapiens
gtaagtaaatataag

SEQ ID NO: 1624953 - DNA, 15 bp, Homo sapiens
ggtaagtaaatataa

SEQ ID NO: 1624954 - DNA, 15 bp, Homo sapiens
aggtaagtaaatata

SEQ ID NO: 1624955 - DNA, 15 bp, Homo sapiens
taggtaagtaaatat

SEQ ID NO: 1624956 - DNA, 15 bp, Homo sapiens
ataggtaagtaaata

SEQ ID NO: 1624957 - DNA, 15 bp, Homo sapiens
aataggtaagtaaat

SEQ ID NO: 1624958 - DNA, 15 bp, Homo sapiens
aaataggtaagtaaa

SEQ ID NO: 1624959 - DNA, 15 bp, Homo sapiens
taaataggtaagtaa

SEQ ID NO: 1624960 - DNA, 15 bp, Homo sapiens
ataaataggtaagta

SEQ ID NO: 1624961 - DNA, 15 bp, Homo sapiens
aataaataggtaagt

SEQ ID NO: 1624962 - DNA, 15 bp, Homo sapiens
aaataaataggtaag

SEQ ID NO: 1624963 - DNA, 15 bp, Homo sapiens
aaaataaataggtaa

SEQ ID NO: 1624964 - DNA, 15 bp, Homo sapiens
caaaataaataggta

SEQ ID NO: 1624965 - DNA, 15 bp, Homo sapiens
tcaaaataaataggt

SEQ ID NO: 1624966 - DNA, 15 bp, Homo sapiens
ctcaaaataaatagg

SEQ ID NO: 1624967 - DNA, 15 bp, Homo sapiens
tctcaaaataaatag

SEQ ID NO: 1624968 - DNA, 15 bp, Homo sapiens
gtctcaaaataaata

SEQ ID NO: 1624969 - DNA, 15 bp, Homo sapiens
cgtctcaaaataaat

SEQ ID NO: 1624970 - DNA, 15 bp, Homo sapiens
ccgtctcaaaataaa

SEQ ID NO: 1624971 - DNA, 15 bp, Homo sapiens
tccgtctcaaaataa

SEQ ID NO: 1624972 - DNA, 15 bp, Homo sapiens
ctccgtctcaaaata

SEQ ID NO: 1624973 - DNA, 15 bp, Homo sapiens
actccgtctcaaaat

SEQ ID NO: 1624974 - DNA, 15 bp, Homo sapiens
agaaactccgtctca

SEQ ID NO: 1624975 - DNA, 15 bp, Homo sapiens
gagaaactccgtctc

SEQ ID NO: 1624976 - DNA, 15 bp, Homo sapiens
agagaaactccgtct

SEQ ID NO: 1624977 - DNA, 15 bp, Homo sapiens
gagagaaactccgtc

SEQ ID NO: 1624978 - DNA, 15 bp, Homo sapiens
agagagaaactccgt

SEQ ID NO: 1624979 - DNA, 15 bp, Homo sapiens
aagagagaaactccg

SEQ ID NO: 1624980 - DNA, 15 bp, Homo sapiens
caagagagaaactcc

SEQ ID NO: 1624981 - DNA, 15 bp, Homo sapiens
acaagagagaaactc

SEQ ID NO: 1624982 - DNA, 15 bp, Homo sapiens
aacaagagagaaact

SEQ ID NO: 1624983 - DNA, 15 bp, Homo sapiens
caacaagagagaaac

SEQ ID NO: 1624984 - DNA, 15 bp, Homo sapiens
gcaacaagagagaaa

SEQ ID NO: 1624985 - DNA, 15 bp, Homo sapiens
ggcaacaagagagaa

SEQ ID NO: 1624986 - DNA, 15 bp, Homo sapiens
gggcaacaagagaga

SEQ ID NO: 1624987 - DNA, 15 bp, Homo sapiens
tgggcaacaagagag

SEQ ID NO: 1624988 - DNA, 15 bp, Homo sapiens
ctgggcaacaagaga

SEQ ID NO: 1624989 - DNA, 15 bp, Homo sapiens
aaggttgcggtgagc

SEQ ID NO: 1624990 - DNA, 15 bp, Homo sapiens
aaaggttgcggtgag

SEQ ID NO: 1624991 - DNA, 15 bp, Homo sapiens
caaaggttgcggtga

SEQ ID NO: 1624992 - DNA, 15 bp, Homo sapiens
gcaaaggttgcggtg

SEQ ID NO: 1624993 - DNA, 15 bp, Homo sapiens
ggcaaaggttgcggt

SEQ ID NO: 1624994 - DNA, 15 bp, Homo sapiens
aggcaaaggttgcgg

SEQ ID NO: 1624995 - DNA, 15 bp, Homo sapiens
gaggcaaaggttgcg

SEQ ID NO: 1624996 - DNA, 15 bp, Homo sapiens
ggaggcaaaggttgc

SEQ ID NO: 1624997 - DNA, 15 bp, Homo sapiens
gggaggcaaaggttg

SEQ ID NO: 1624998 - DNA, 15 bp, Homo sapiens
tgggaggcaaaggtt

SEQ ID NO: 1624999 - DNA, 15 bp, Homo sapiens
ctgggaggcaaaggt

SEQ ID NO: 1625000 - DNA, 15 bp, Homo sapiens
cctgggaggcaaagg

SEQ ID NO: 1625001 - DNA, 15 bp, Homo sapiens
acctgggaggcaaag

SEQ ID NO: 1625002 - DNA, 15 bp, Homo sapiens
aacctgggaggcaaa

SEQ ID NO: 1625003 - DNA, 15 bp, Homo sapiens
agagaatcgcttgaa

SEQ ID NO: 1625004 - DNA, 15 bp, Homo sapiens
gagagaatcgcttga

SEQ ID NO: 1625005 - DNA, 15 bp, Homo sapiens
tgagagaatcgcttg

SEQ ID NO: 1625006 - DNA, 15 bp, Homo sapiens
gtgagagaatcgctt

SEQ ID NO: 1625007 - DNA, 15 bp, Homo sapiens
ggtgagagaatcgct

SEQ ID NO: 1625008 - DNA, 15 bp, Homo sapiens
aggtgagagaatcgc

SEQ ID NO: 1625009 - DNA, 15 bp, Homo sapiens
gaggtgagagaatcg

SEQ ID NO: 1625010 - DNA, 15 bp, Homo sapiens
tgaggtgagagaatc

SEQ ID NO: 1625011 - DNA, 15 bp, Homo sapiens
ctgaggtgagagaat

SEQ ID NO: 1625012 - DNA, 15 bp, Homo sapiens
gctgaggtgagagaa

SEQ ID NO: 1625013 - DNA, 15 bp, Homo sapiens
ggctgaggtgagaga

SEQ ID NO: 1625014 - DNA, 15 bp, Homo sapiens
cagcctgtaatccca

SEQ ID NO: 1625015 - DNA, 15 bp, Homo sapiens
gcagcctgtaatccc

SEQ ID NO: 1625016 - DNA, 15 bp, Homo sapiens
cgcagcctgtaatcc

SEQ ID NO: 1625017 - DNA, 15 bp, Homo sapiens
gcgcagcctgtaatc

SEQ ID NO: 1625018 - DNA, 15 bp, Homo sapiens
ggcgcagcctgtaat

SEQ ID NO: 1625019 - DNA, 15 bp, Homo sapiens
tggcgcagcctgtaa

SEQ ID NO: 1625020 - DNA, 15 bp, Homo sapiens
gtggcgcagcctgta

SEQ ID NO: 1625021 - DNA, 15 bp, Homo sapiens
agtggcgcagcctgt

SEQ ID NO: 1625022 - DNA, 15 bp, Homo sapiens
cagtggcgcagcctg

SEQ ID NO: 1625023 - DNA, 15 bp, Homo sapiens
acagtggcgcagcct

SEQ ID NO: 1625024 - DNA, 15 bp, Homo sapiens
cacagtggcgcagcc

SEQ ID NO: 1625025 - DNA, 15 bp, Homo sapiens
gcacagtggcgcagc

SEQ ID NO: 1625026 - DNA, 15 bp, Homo sapiens
ggcacagtggcgcag

SEQ ID NO: 1625027 - DNA, 15 bp, Homo sapiens
gggcacagtggcgca

SEQ ID NO: 1625028 - DNA, 15 bp, Homo sapiens
tgggcacagtggcgc

SEQ ID NO: 1625029 - DNA, 15 bp, Homo sapiens
ctgggcacagtggcg

SEQ ID NO: 1625030 - DNA, 15 bp, Homo sapiens
agctgggcacagtgg

SEQ ID NO: 1625031 - DNA, 15 bp, Homo sapiens
tagctgggcacagtg

SEQ ID NO: 1625032 - DNA, 15 bp, Homo sapiens
caaaattagctgggc

SEQ ID NO: 1625033 - DNA, 15 bp, Homo sapiens
acaaaattagctggg

SEQ ID NO: 1625034 - DNA, 15 bp, Homo sapiens
tacaaaattagctgg

SEQ ID NO: 1625035 - DNA, 15 bp, Homo sapiens
atacaaaattagctg

SEQ ID NO: 1625036 - DNA, 15 bp, Homo sapiens
aatacaaaattagct

SEQ ID NO: 1625037 - DNA, 15 bp, Homo sapiens
agaaaccctgtctct

SEQ ID NO: 1625038 - DNA, 15 bp, Homo sapiens
gagaaaccctgtctc

SEQ ID NO: 1625039 - DNA, 15 bp, Homo sapiens
ggagaaaccctgtct

SEQ ID NO: 1625040 - DNA, 15 bp, Homo sapiens
tggagaaaccctgtc

SEQ ID NO: 1625041 - DNA, 15 bp, Homo sapiens
atggagaaaccctgt

SEQ ID NO: 1625042 - DNA, 15 bp, Homo sapiens
catggagaaaccctg

SEQ ID NO: 1625043 - DNA, 15 bp, Homo sapiens
acatggagaaaccct

SEQ ID NO: 1625044 - DNA, 15 bp, Homo sapiens
cgaggtgggcggatc

SEQ ID NO: 1625045 - DNA, 15 bp, Homo sapiens
tcgaggtgggcggat

SEQ ID NO: 1625046 - DNA, 15 bp, Homo sapiens
gtcgaggtgggcgga

SEQ ID NO: 1625047 - DNA, 15 bp, Homo sapiens
ggtcgaggtgggcgg

SEQ ID NO: 1625048 - DNA, 15 bp, Homo sapiens
aggtcgaggtgggcg

SEQ ID NO: 1625049 - DNA, 15 bp, Homo sapiens
gaggtcgaggtgggc

SEQ ID NO: 1625050 - DNA, 15 bp, Homo sapiens
ggaggtcgaggtggg

SEQ ID NO: 1625051 - DNA, 15 bp, Homo sapiens
gggaggtcgaggtgg

SEQ ID NO: 1625052 - DNA, 15 bp, Homo sapiens
tgggaggtcgaggtg

SEQ ID NO: 1625053 - DNA, 15 bp, Homo sapiens
ttgggaggtcgaggt

SEQ ID NO: 1625054 - DNA, 15 bp, Homo sapiens
cgtggctcacacctg

SEQ ID NO: 1625055 - DNA, 15 bp, Homo sapiens
tcgtggctcacacct

SEQ ID NO: 1625056 - DNA, 15 bp, Homo sapiens
ttcgtggctcacacc

SEQ ID NO: 1625057 - DNA, 15 bp, Homo sapiens
cttcgtggctcacac

SEQ ID NO: 1625058 - DNA, 15 bp, Homo sapiens
gcttcgtggctcaca

SEQ ID NO: 1625059 - DNA, 15 bp, Homo sapiens
ggcttcgtggctcac

SEQ ID NO: 1625060 - DNA, 15 bp, Homo sapiens
gggcttcgtggctca

SEQ ID NO: 1625061 - DNA, 15 bp, Homo sapiens
cgggcttcgtggctc

SEQ ID NO: 1625062 - DNA, 15 bp, Homo sapiens
ccgggcttcgtggct

SEQ ID NO: 1625063 - DNA, 15 bp, Homo sapiens
gccgggcttcgtggc

SEQ ID NO: 1625064 - DNA, 15 bp, Homo sapiens
ggccgggcttcgtgg

SEQ ID NO: 1625065 - DNA, 15 bp, Homo sapiens
aggccgggcttcgtg

SEQ ID NO: 1625066 - DNA, 15 bp, Homo sapiens
taggccgggcttcgt

SEQ ID NO: 1625067 - DNA, 15 bp, Homo sapiens
ataggccgggcttcg

SEQ ID NO: 1625068 - DNA, 15 bp, Homo sapiens
aataggccgggcttc

SEQ ID NO: 1625069 - DNA, 15 bp, Homo sapiens
aaataggccgggctt

SEQ ID NO: 1625070 - DNA, 15 bp, Homo sapiens
taaataggccgggct

SEQ ID NO: 1625071 - DNA, 15 bp, Homo sapiens
ataaataggccgggc

SEQ ID NO: 1625072 - DNA, 15 bp, Homo sapiens
aataaataggccggg

SEQ ID NO: 1625073 - DNA, 15 bp, Homo sapiens
aaataaataggccgg

SEQ ID NO: 1625074 - DNA, 15 bp, Homo sapiens
taaataaataggccg

SEQ ID NO: 1625075 - DNA, 15 bp, Homo sapiens
ataaataaataggcc

SEQ ID NO: 1625076 - DNA, 15 bp, Homo sapiens
aataaataaataggc

SEQ ID NO: 1625077 - DNA, 15 bp, Homo sapiens
aaataaataaatagg

SEQ ID NO: 1625078 - DNA, 15 bp, Homo sapiens
aaaataaataaatag

SEQ ID NO: 1625079 - DNA, 15 bp, Homo sapiens
caaaaaaataaataa

SEQ ID NO: 1625080 - DNA, 15 bp, Homo sapiens
tcaaaaaaataaata

SEQ ID NO: 1625081 - DNA, 15 bp, Homo sapiens
ctcaaaaaaataaat

SEQ ID NO: 1625082 - DNA, 15 bp, Homo sapiens
gtctcaaaaaaataa

SEQ ID NO: 1625083 - DNA, 15 bp, Homo sapiens
tgtctcaaaaaaata

SEQ ID NO: 1625084 - DNA, 15 bp, Homo sapiens
atgtctcaaaaaaat

SEQ ID NO: 1625085 - DNA, 15 bp, Homo sapiens
catgtctcaaaaaaa

SEQ ID NO: 1625086 - DNA, 15 bp, Homo sapiens
ccatgtctcaaaaaa

SEQ ID NO: 1625087 - DNA, 15 bp, Homo sapiens
accatgtctcaaaaa

SEQ ID NO: 1625088 - DNA, 15 bp, Homo sapiens
gaccatgtctcaaaa

SEQ ID NO: 1625089 - DNA, 15 bp, Homo sapiens
agaccatgtctcaaa

SEQ ID NO: 1625090 - DNA, 15 bp, Homo sapiens
gagaccatgtctcaa

SEQ ID NO: 1625091 - DNA, 15 bp, Homo sapiens
tgagaccatgtctca

SEQ ID NO: 1625092 - DNA, 15 bp, Homo sapiens
ctgagaccatgtctc

SEQ ID NO: 1625093 - DNA, 15 bp, Homo sapiens
actgagaccatgtct

SEQ ID NO: 1625094 - DNA, 15 bp, Homo sapiens
gactgagaccatgtc

SEQ ID NO: 1625095 - DNA, 15 bp, Homo sapiens
agactgagaccatgt

SEQ ID NO: 1625096 - DNA, 15 bp, Homo sapiens
cagactgagaccatg

SEQ ID NO: 1625097 - DNA, 15 bp, Homo sapiens
acagactgagaccat

SEQ ID NO: 1625098 - DNA, 15 bp, Homo sapiens
gacagactgagacca

SEQ ID NO: 1625099 - DNA, 15 bp, Homo sapiens
cgacagactgagacc

SEQ ID NO: 1625100 - DNA, 15 bp, Homo sapiens
gcgacagactgagac

SEQ ID NO: 1625101 - DNA, 15 bp, Homo sapiens
ggcgacagactgaga

SEQ ID NO: 1625102 - DNA, 15 bp, Homo sapiens
gggcgacagactgag

SEQ ID NO: 1625103 - DNA, 15 bp, Homo sapiens
cgggcgacagactga

SEQ ID NO: 1625104 - DNA, 15 bp, Homo sapiens
ccgggcgacagactg

SEQ ID NO: 1625105 - DNA, 15 bp, Homo sapiens
cccgggcgacagact

SEQ ID NO: 1625106 - DNA, 15 bp, Homo sapiens
gcccgggcgacagac

SEQ ID NO: 1625107 - DNA, 15 bp, Homo sapiens
agcccgggcgacaga

SEQ ID NO: 1625108 - DNA, 15 bp, Homo sapiens
cagcccgggcgacag

SEQ ID NO: 1625109 - DNA, 15 bp, Homo sapiens
ccagcccgggcgaca

SEQ ID NO: 1625110 - DNA, 15 bp, Homo sapiens
tccagcccgggcgac

SEQ ID NO: 1625111 - DNA, 15 bp, Homo sapiens
ctccagcccgggcga

SEQ ID NO: 1625112 - DNA, 15 bp, Homo sapiens
actccagcccgggcg

SEQ ID NO: 1625113 - DNA, 15 bp, Homo sapiens
cactccagcccgggc

SEQ ID NO: 1625114 - DNA, 15 bp, Homo sapiens
gcactccagcccggg

SEQ ID NO: 1625115 - DNA, 15 bp, Homo sapiens
tgcactccagcccgg

SEQ ID NO: 1625116 - DNA, 15 bp, Homo sapiens
ctgcactccagcccg

SEQ ID NO: 1625117 - DNA, 15 bp, Homo sapiens
acttgaacccgggag

SEQ ID NO: 1625118 - DNA, 15 bp, Homo sapiens
cacttgaacccggga

SEQ ID NO: 1625119 - DNA, 15 bp, Homo sapiens
tcacttgaacccggg

SEQ ID NO: 1625120 - DNA, 15 bp, Homo sapiens
tgggcacctgtaatc

SEQ ID NO: 1625121 - DNA, 15 bp, Homo sapiens
gtgggcacctgtaat

SEQ ID NO: 1625122 - DNA, 15 bp, Homo sapiens
ggtgggcacctgtaa

SEQ ID NO: 1625123 - DNA, 15 bp, Homo sapiens
tggtgggcacctgta

SEQ ID NO: 1625124 - DNA, 15 bp, Homo sapiens
agtggtgggcacctg

SEQ ID NO: 1625125 - DNA, 15 bp, Homo sapiens
tagtggtgggcacct

SEQ ID NO: 1625126 - DNA, 15 bp, Homo sapiens
gtagtggtgggcacc

SEQ ID NO: 1625127 - DNA, 15 bp, Homo sapiens
tgtagtggtgggcac

SEQ ID NO: 1625128 - DNA, 15 bp, Homo sapiens
gtgtagtggtgggca

SEQ ID NO: 1625129 - DNA, 15 bp, Homo sapiens
ggtgtagtggtgggc

SEQ ID NO: 1625130 - DNA, 15 bp, Homo sapiens
gggtgtagtggtggg

SEQ ID NO: 1625131 - DNA, 15 bp, Homo sapiens
cgggtgtagtggtgg

SEQ ID NO: 1625132 - DNA, 15 bp, Homo sapiens
ccgggtgtagtggtg

SEQ ID NO: 1625133 - DNA, 15 bp, Homo sapiens
gccgggtgtagtggt

SEQ ID NO: 1625134 - DNA, 15 bp, Homo sapiens
agccgggtgtagtgg

SEQ ID NO: 1625135 - DNA, 15 bp, Homo sapiens
tagccgggtgtagtg

SEQ ID NO: 1625136 - DNA, 15 bp, Homo sapiens
ttagccgggtgtagt

SEQ ID NO: 1625137 - DNA, 15 bp, Homo sapiens
attagccgggtgtag

SEQ ID NO: 1625138 - DNA, 15 bp, Homo sapiens
aattagccgggtgta

SEQ ID NO: 1625139 - DNA, 15 bp, Homo sapiens
tcgcctctactaaaa

SEQ ID NO: 1625140 - DNA, 15 bp, Homo sapiens
ctcgcctctactaaa

SEQ ID NO: 1625141 - DNA, 15 bp, Homo sapiens
cctcgcctctactaa

SEQ ID NO: 1625142 - DNA, 15 bp, Homo sapiens
acctcgcctctacta

SEQ ID NO: 1625143 - DNA, 15 bp, Homo sapiens
aacctcgcctctact

SEQ ID NO: 1625144 - DNA, 15 bp, Homo sapiens
aaacctcgcctctac

SEQ ID NO: 1625145 - DNA, 15 bp, Homo sapiens
gaaacctcgcctcta

SEQ ID NO: 1625146 - DNA, 15 bp, Homo sapiens
tgaaacctcgcctct

SEQ ID NO: 1625147 - DNA, 15 bp, Homo sapiens
gtgaaacctcgcctc

SEQ ID NO: 1625148 - DNA, 15 bp, Homo sapiens
ggtgaaacctcgcct

SEQ ID NO: 1625149 - DNA, 15 bp, Homo sapiens
tggtgaaacctcgcc

SEQ ID NO: 1625150 - DNA, 15 bp, Homo sapiens
ctggtgaaacctcgc

SEQ ID NO: 1625151 - DNA, 15 bp, Homo sapiens
cctggtgaaacctcg

SEQ ID NO: 1625152 - DNA, 15 bp, Homo sapiens
acctggtgaaacctc

SEQ ID NO: 1625153 - DNA, 15 bp, Homo sapiens
aacctggtgaaacct

SEQ ID NO: 1625154 - DNA, 15 bp, Homo sapiens
caacctggtgaaacc

SEQ ID NO: 1625155 - DNA, 15 bp, Homo sapiens
ccaacctggtgaaac

SEQ ID NO: 1625156 - DNA, 15 bp, Homo sapiens
tgcccccttcctcca

SEQ ID NO: 1625157 - DNA, 15 bp, Homo sapiens
atgcccccttcctcc

SEQ ID NO: 1625158 - DNA, 15 bp, Homo sapiens
catgcccccttcctc

SEQ ID NO: 1625159 - DNA, 15 bp, Homo sapiens
ccatgcccccttcct

SEQ ID NO: 1625160 - DNA, 15 bp, Homo sapiens
gccatgcccccttcc

SEQ ID NO: 1625161 - DNA, 15 bp, Homo sapiens
agccatgcccccttc

SEQ ID NO: 1625162 - DNA, 15 bp, Homo sapiens
cagccatgccccctt

SEQ ID NO: 1625163 - DNA, 15 bp, Homo sapiens
gcagccatgccccct

SEQ ID NO: 1625164 - DNA, 15 bp, Homo sapiens
agcagccatgccccc

SEQ ID NO: 1625165 - DNA, 15 bp, Homo sapiens
cagcagccatgcccc

SEQ ID NO: 1625166 - DNA, 15 bp, Homo sapiens
ccagcagccatgccc

SEQ ID NO: 1625167 - DNA, 15 bp, Homo sapiens
cccagcagccatgcc

SEQ ID NO: 1625168 - DNA, 15 bp, Homo sapiens
ccccagcagccatgc

SEQ ID NO: 1625169 - DNA, 15 bp, Homo sapiens
tccccagcagccatg

SEQ ID NO: 1625170 - DNA, 15 bp, Homo sapiens
ctccccagcagccat

SEQ ID NO: 1625171 - DNA, 15 bp, Homo sapiens
actccccagcagcca

SEQ ID NO: 1625172 - DNA, 15 bp, Homo sapiens
tactccccagcagcc

SEQ ID NO: 1625173 - DNA, 15 bp, Homo sapiens
ttactccccagcagc

SEQ ID NO: 1625174 - DNA, 15 bp, Homo sapiens
attactccccagcag

SEQ ID NO: 1625175 - DNA, 15 bp, Homo sapiens
tattactccccagca

SEQ ID NO: 1625176 - DNA, 15 bp, Homo sapiens
atattactccccagc

SEQ ID NO: 1625177 - DNA, 15 bp, Homo sapiens
gatattactccccag

SEQ ID NO: 1625178 - DNA, 15 bp, Homo sapiens
tgatattactcccca

SEQ ID NO: 1625179 - DNA, 15 bp, Homo sapiens
gtgatattactcccc

SEQ ID NO: 1625180 - DNA, 15 bp, Homo sapiens
tgtgatattactccc

SEQ ID NO: 1625181 - DNA, 15 bp, Homo sapiens
ttgtgatattactcc

SEQ ID NO: 1625182 - DNA, 15 bp, Homo sapiens
cttgtgatattactc

SEQ ID NO: 1625183 - DNA, 15 bp, Homo sapiens
gcttgtgatattact

SEQ ID NO: 1625184 - DNA, 15 bp, Homo sapiens
agcttgtgatattac

SEQ ID NO: 1625185 - DNA, 15 bp, Homo sapiens
cagcttgtgatatta

SEQ ID NO: 1625186 - DNA, 15 bp, Homo sapiens
tcagcttgtgatatt

SEQ ID NO: 1625187 - DNA, 15 bp, Homo sapiens
gtcagcttgtgatat

SEQ ID NO: 1625188 - DNA, 15 bp, Homo sapiens
agtcagcttgtgata

SEQ ID NO: 1625189 - DNA, 15 bp, Homo sapiens
gagtcagcttgtgat

SEQ ID NO: 1625190 - DNA, 15 bp, Homo sapiens
agagtcagcttgtga

SEQ ID NO: 1625191 - DNA, 15 bp, Homo sapiens
aagagtcagcttgtg

SEQ ID NO: 1625192 - DNA, 15 bp, Homo sapiens
taagagtcagcttgt

SEQ ID NO: 1625193 - DNA, 15 bp, Homo sapiens
ttaagagtcagcttg

SEQ ID NO: 1625194 - DNA, 15 bp, Homo sapiens
attaagagtcagctt

SEQ ID NO: 1625195 - DNA, 15 bp, Homo sapiens
gattaagagtcagct

SEQ ID NO: 1625196 - DNA, 15 bp, Homo sapiens
agattaagagtcagc

SEQ ID NO: 1625197 - DNA, 15 bp, Homo sapiens
aagattaagagtcag

SEQ ID NO: 1625198 - DNA, 15 bp, Homo sapiens
caagattaagagtca

SEQ ID NO: 1625199 - DNA, 15 bp, Homo sapiens
tcaagattaagagtc

SEQ ID NO: 1625200 - DNA, 15 bp, Homo sapiens
gtcaagattaagagt

SEQ ID NO: 1625201 - DNA, 15 bp, Homo sapiens
agtcaagattaagag

SEQ ID NO: 1625202 - DNA, 15 bp, Homo sapiens
gagtcaagattaaga

SEQ ID NO: 1625203 - DNA, 15 bp, Homo sapiens
agagtcaagattaag

SEQ ID NO: 1625204 - DNA, 15 bp, Homo sapiens
aagagtcaagattaa

SEQ ID NO: 1625205 - DNA, 15 bp, Homo sapiens
caagagtcaagatta

SEQ ID NO: 1625206 - DNA, 15 bp, Homo sapiens
ccaagagtcaagatt

SEQ ID NO: 1625207 - DNA, 15 bp, Homo sapiens
gccaagagtcaagat

SEQ ID NO: 1625208 - DNA, 15 bp, Homo sapiens
tgccaagagtcaaga

SEQ ID NO: 1625209 - DNA, 15 bp, Homo sapiens
ttgccaagagtcaag

SEQ ID NO: 1625210 - DNA, 15 bp, Homo sapiens
gttgccaagagtcaa

SEQ ID NO: 1625211 - DNA, 15 bp, Homo sapiens
ggttgccaagagtca

SEQ ID NO: 1625212 - DNA, 15 bp, Homo sapiens
aggttgccaagagtc

SEQ ID NO: 1625213 - DNA, 15 bp, Homo sapiens
caggttgccaagagt

SEQ ID NO: 1625214 - DNA, 15 bp, Homo sapiens
ccaggttgccaagag

SEQ ID NO: 1625215 - DNA, 15 bp, Homo sapiens
accaggttgccaaga

SEQ ID NO: 1625216 - DNA, 15 bp, Homo sapiens
taccaggttgccaag

SEQ ID NO: 1625217 - DNA, 15 bp, Homo sapiens
ctaccaggttgccaa

SEQ ID NO: 1625218 - DNA, 15 bp, Homo sapiens
cctaccaggttgcca

SEQ ID NO: 1625219 - DNA, 15 bp, Homo sapiens
ccctaccaggttgcc

SEQ ID NO: 1625220 - DNA, 15 bp, Homo sapiens
accctaccaggttgc

SEQ ID NO: 1625221 - DNA, 15 bp, Homo sapiens
gaccctaccaggttg

SEQ ID NO: 1625222 - DNA, 15 bp, Homo sapiens
tgaccctaccaggtt

SEQ ID NO: 1625223 - DNA, 15 bp, Homo sapiens
gtgaccctaccaggt

SEQ ID NO: 1625224 - DNA, 15 bp, Homo sapiens
agtgaccctaccagg

SEQ ID NO: 1625225 - DNA, 15 bp, Homo sapiens
cagtgaccctaccag

SEQ ID NO: 1625226 - DNA, 15 bp, Homo sapiens
tcagtgaccctacca

SEQ ID NO: 1625227 - DNA, 15 bp, Homo sapiens
gtcagtgaccctacc

SEQ ID NO: 1625228 - DNA, 15 bp, Homo sapiens
agtcagtgaccctac

SEQ ID NO: 1625229 - DNA, 15 bp, Homo sapiens
cagtcagtgacccta

SEQ ID NO: 1625230 - DNA, 15 bp, Homo sapiens
ccagtcagtgaccct

SEQ ID NO: 1625231 - DNA, 15 bp, Homo sapiens
cccagtcagtgaccc

SEQ ID NO: 1625232 - DNA, 15 bp, Homo sapiens
gcccagtcagtgacc

SEQ ID NO: 1625233 - DNA, 15 bp, Homo sapiens
agcccagtcagtgac

SEQ ID NO: 1625234 - DNA, 15 bp, Homo sapiens
aagcccagtcagtga

SEQ ID NO: 1625235 - DNA, 15 bp, Homo sapiens
gaagcccagtcagtg

SEQ ID NO: 1625236 - DNA, 15 bp, Homo sapiens
cgaagcccagtcagt

SEQ ID NO: 1625237 - DNA, 15 bp, Homo sapiens
ccgaagcccagtcag

SEQ ID NO: 1625238 - DNA, 15 bp, Homo sapiens
tccgaagcccagtca

SEQ ID NO: 1625239 - DNA, 15 bp, Homo sapiens
ctccgaagcccagtc

SEQ ID NO: 1625240 - DNA, 15 bp, Homo sapiens
gctccgaagcccagt

SEQ ID NO: 1625241 - DNA, 15 bp, Homo sapiens
ggctccgaagcccag

SEQ ID NO: 1625242 - DNA, 15 bp, Homo sapiens
tggctccgaagccca

SEQ ID NO: 1625243 - DNA, 15 bp, Homo sapiens
ttggctccgaagccc

SEQ ID NO: 1625244 - DNA, 15 bp, Homo sapiens
gttggctccgaagcc

SEQ ID NO: 1625245 - DNA, 15 bp, Homo sapiens
tgttggctccgaagc

SEQ ID NO: 1625246 - DNA, 15 bp, Homo sapiens
atgttggctccgaag

SEQ ID NO: 1625247 - DNA, 15 bp, Homo sapiens
gatgttggctccgaa

SEQ ID NO: 1625248 - DNA, 15 bp, Homo sapiens
agatgttggctccga

SEQ ID NO: 1625249 - DNA, 15 bp, Homo sapiens
gagatgttggctccg

SEQ ID NO: 1625250 - DNA, 15 bp, Homo sapiens
cgagatgttggctcc

SEQ ID NO: 1625251 - DNA, 15 bp, Homo sapiens
acgagatgttggctc

SEQ ID NO: 1625252 - DNA, 15 bp, Homo sapiens
gacgagatgttggct

SEQ ID NO: 1625253 - DNA, 15 bp, Homo sapiens
ggacgagatgttggc

SEQ ID NO: 1625254 - DNA, 15 bp, Homo sapiens
tggacgagatgttgg

SEQ ID NO: 1625255 - DNA, 15 bp, Homo sapiens
atggacgagatgttg

SEQ ID NO: 1625256 - DNA, 15 bp, Homo sapiens
catggacgagatgtt

SEQ ID NO: 1625257 - DNA, 15 bp, Homo sapiens
ccatggacgagatgt

SEQ ID NO: 1625258 - DNA, 15 bp, Homo sapiens
tccatggacgagatg

SEQ ID NO: 1625259 - DNA, 15 bp, Homo sapiens
ctccatggacgagat

SEQ ID NO: 1625260 - DNA, 15 bp, Homo sapiens
cctccatggacgaga

SEQ ID NO: 1625261 - DNA, 15 bp, Homo sapiens
ccctccatggacgag

SEQ ID NO: 1625262 - DNA, 15 bp, Homo sapiens
accctccatggacga

SEQ ID NO: 1625263 - DNA, 15 bp, Homo sapiens
gaccctccatggacg

SEQ ID NO: 1625264 - DNA, 15 bp, Homo sapiens
agaccctccatggac

SEQ ID NO: 1625265 - DNA, 15 bp, Homo sapiens
cagaccctccatgga

SEQ ID NO: 1625266 - DNA, 15 bp, Homo sapiens
tcagaccctccatgg

SEQ ID NO: 1625267 - DNA, 15 bp, Homo sapiens
gtcagaccctccatg

SEQ ID NO: 1625268 - DNA, 15 bp, Homo sapiens
ggtcagaccctccat

SEQ ID NO: 1625269 - DNA, 15 bp, Homo sapiens
gggtcagaccctcca

SEQ ID NO: 1625270 - DNA, 15 bp, Homo sapiens
agggtcagaccctcc

SEQ ID NO: 1625271 - DNA, 15 bp, Homo sapiens
cagggtcagaccctc

SEQ ID NO: 1625272 - DNA, 15 bp, Homo sapiens
tcagggtcagaccct

SEQ ID NO: 1625273 - DNA, 15 bp, Homo sapiens
gtcagggtcagaccc

SEQ ID NO: 1625274 - DNA, 15 bp, Homo sapiens
ggtcagggtcagacc

SEQ ID NO: 1625275 - DNA, 15 bp, Homo sapiens
aggtcagggtcagac

SEQ ID NO: 1625276 - DNA, 15 bp, Homo sapiens
aaggtcagggtcaga

SEQ ID NO: 1625277 - DNA, 15 bp, Homo sapiens
caaggtcagggtcag

SEQ ID NO: 1625278 - DNA, 15 bp, Homo sapiens
ccaaggtcagggtca

SEQ ID NO: 1625279 - DNA, 15 bp, Homo sapiens
gccaaggtcagggtc

SEQ ID NO: 1625280 - DNA, 15 bp, Homo sapiens
agccaaggtcagggt

SEQ ID NO: 1625281 - DNA, 15 bp, Homo sapiens
gagccaaggtcaggg

SEQ ID NO: 1625282 - DNA, 15 bp, Homo sapiens
ggagccaaggtcagg

SEQ ID NO: 1625283 - DNA, 15 bp, Homo sapiens
gggagccaaggtcag

SEQ ID NO: 1625284 - DNA, 15 bp, Homo sapiens
agggagccaaggtca

SEQ ID NO: 1625285 - DNA, 15 bp, Homo sapiens
gagggagccaaggtc

SEQ ID NO: 1625286 - DNA, 15 bp, Homo sapiens
tgagggagccaaggt

SEQ ID NO: 1625287 - DNA, 15 bp, Homo sapiens
gtgagggagccaagg

SEQ ID NO: 1625288 - DNA, 15 bp, Homo sapiens
ggtgagggagccaag

SEQ ID NO: 1625289 - DNA, 15 bp, Homo sapiens
cggtgagggagccaa

SEQ ID NO: 1625290 - DNA, 15 bp, Homo sapiens
gcggtgagggagcca

SEQ ID NO: 1625291 - DNA, 15 bp, Homo sapiens
tgcggtgagggagcc

SEQ ID NO: 1625292 - DNA, 15 bp, Homo sapiens
ctgcggtgagggagc

SEQ ID NO: 1625293 - DNA, 15 bp, Homo sapiens
cctgcggtgagggag

SEQ ID NO: 1625294 - DNA, 15 bp, Homo sapiens
acctgcggtgaggga

SEQ ID NO: 1625295 - DNA, 15 bp, Homo sapiens
aacctgcggtgaggg

SEQ ID NO: 1625296 - DNA, 15 bp, Homo sapiens
aaacctgcggtgagg

SEQ ID NO: 1625297 - DNA, 15 bp, Homo sapiens
gaaacctgcggtgag

SEQ ID NO: 1625298 - DNA, 15 bp, Homo sapiens
tgaaacctgcggtga

SEQ ID NO: 1625299 - DNA, 15 bp, Homo sapiens
gtgaaacctgcggtg

SEQ ID NO: 1625300 - DNA, 15 bp, Homo sapiens
agtgaaacctgcggt

SEQ ID NO: 1625301 - DNA, 15 bp, Homo sapiens
cagtgaaacctgcgg

SEQ ID NO: 1625302 - DNA, 15 bp, Homo sapiens
tcagtgaaacctgcg

SEQ ID NO: 1625303 - DNA, 15 bp, Homo sapiens
ctcagtgaaacctgc

SEQ ID NO: 1625304 - DNA, 15 bp, Homo sapiens
actcagtgaaacctg

SEQ ID NO: 1625305 - DNA, 15 bp, Homo sapiens
gactcagtgaaacct

SEQ ID NO: 1625306 - DNA, 15 bp, Homo sapiens
ggactcagtgaaacc

SEQ ID NO: 1625307 - DNA, 15 bp, Homo sapiens
aggactcagtgaaac

SEQ ID NO: 1625308 - DNA, 15 bp, Homo sapiens
aaggactcagtgaaa

SEQ ID NO: 1625309 - DNA, 15 bp, Homo sapiens
caaggactcagtgaa

SEQ ID NO: 1625310 - DNA, 15 bp, Homo sapiens
ccaaggactcagtga

SEQ ID NO: 1625311 - DNA, 15 bp, Homo sapiens
cccaaggactcagtg

SEQ ID NO: 1625312 - DNA, 15 bp, Homo sapiens
tcccaaggactcagt

SEQ ID NO: 1625313 - DNA, 15 bp, Homo sapiens
gtcccaaggactcag

SEQ ID NO: 1625314 - DNA, 15 bp, Homo sapiens
agtcccaaggactca

SEQ ID NO: 1625315 - DNA, 15 bp, Homo sapiens
cagtcccaaggactc

SEQ ID NO: 1625316 - DNA, 15 bp, Homo sapiens
gcagtcccaaggact

SEQ ID NO: 1625317 - DNA, 15 bp, Homo sapiens
agcagtcccaaggac

SEQ ID NO: 1625318 - DNA, 15 bp, Homo sapiens
gagcagtcccaagga

SEQ ID NO: 1625319 - DNA, 15 bp, Homo sapiens
ggagcagtcccaagg

SEQ ID NO: 1625320 - DNA, 15 bp, Homo sapiens
tggagcagtcccaag

SEQ ID NO: 1625321 - DNA, 15 bp, Homo sapiens
ctggagcagtcccaa

SEQ ID NO: 1625322 - DNA, 15 bp, Homo sapiens
gctggagcagtccca

SEQ ID NO: 1625323 - DNA, 15 bp, Homo sapiens
ggctggagcagtccc

SEQ ID NO: 1625324 - DNA, 15 bp, Homo sapiens
aggctggagcagtcc

SEQ ID NO: 1625325 - DNA, 15 bp, Homo sapiens
gaggctggagcagtc

SEQ ID NO: 1625326 - DNA, 15 bp, Homo sapiens
tgaggctggagcagt

SEQ ID NO: 1625327 - DNA, 15 bp, Homo sapiens
ctgaggctggagcag

SEQ ID NO: 1625328 - DNA, 15 bp, Homo sapiens
gctgaggctggagca

SEQ ID NO: 1625329 - DNA, 15 bp, Homo sapiens
ggctgaggctggagc

SEQ ID NO: 1625330 - DNA, 15 bp, Homo sapiens
tggctgaggctggag

SEQ ID NO: 1625331 - DNA, 15 bp, Homo sapiens
atggctgaggctgga

SEQ ID NO: 1625332 - DNA, 15 bp, Homo sapiens
gatggctgaggctgg

SEQ ID NO: 1625333 - DNA, 15 bp, Homo sapiens
agatggctgaggctg

SEQ ID NO: 1625334 - DNA, 15 bp, Homo sapiens
gagatggctgaggct

SEQ ID NO: 1625335 - DNA, 15 bp, Homo sapiens
agagatggctgaggc

SEQ ID NO: 1625336 - DNA, 15 bp, Homo sapiens
aagagatggctgagg

SEQ ID NO: 1625337 - DNA, 15 bp, Homo sapiens
aaagagatggctgag

SEQ ID NO: 1625338 - DNA, 15 bp, Homo sapiens
caaagagatggctga

SEQ ID NO: 1625339 - DNA, 15 bp, Homo sapiens
ccaaagagatggctg

SEQ ID NO: 1625340 - DNA, 15 bp, Homo sapiens
accaaagagatggct

SEQ ID NO: 1625341 - DNA, 15 bp, Homo sapiens
gaccaaagagatggc

SEQ ID NO: 1625342 - DNA, 15 bp, Homo sapiens
agaccaaagagatgg

SEQ ID NO: 1625343 - DNA, 15 bp, Homo sapiens
gagaccaaagagatg

SEQ ID NO: 1625344 - DNA, 15 bp, Homo sapiens
agagaccaaagagat

SEQ ID NO: 1625345 - DNA, 15 bp, Homo sapiens
cagagaccaaagaga

SEQ ID NO: 1625346 - DNA, 15 bp, Homo sapiens
gcagagaccaaagag

SEQ ID NO: 1625347 - DNA, 15 bp, Homo sapiens
agcagagaccaaaga

SEQ ID NO: 1625348 - DNA, 15 bp, Homo sapiens
cagcagagaccaaag

SEQ ID NO: 1625349 - DNA, 15 bp, Homo sapiens
tcagcagagaccaaa

SEQ ID NO: 1625350 - DNA, 15 bp, Homo sapiens
atcagcagagaccaa

SEQ ID NO: 1625351 - DNA, 15 bp, Homo sapiens
gatcagcagagacca

SEQ ID NO: 1625352 - DNA, 15 bp, Homo sapiens
tgatcagcagagacc

SEQ ID NO: 1625353 - DNA, 15 bp, Homo sapiens
ctgatcagcagagac

SEQ ID NO: 1625354 - DNA, 15 bp, Homo sapiens
cctgatcagcagaga

SEQ ID NO: 1625355 - DNA, 15 bp, Homo sapiens
ccctgatcagcagag

SEQ ID NO: 1625356 - DNA, 15 bp, Homo sapiens
accctgatcagcaga

SEQ ID NO: 1625357 - DNA, 15 bp, Homo sapiens
taccctgatcagcag

SEQ ID NO: 1625358 - DNA, 15 bp, Homo sapiens
ctaccctgatcagca

SEQ ID NO: 1625359 - DNA, 15 bp, Homo sapiens
tctaccctgatcagc

SEQ ID NO: 1625360 - DNA, 15 bp, Homo sapiens
ctctaccctgatcag

SEQ ID NO: 1625361 - DNA, 15 bp, Homo sapiens
actctaccctgatca

SEQ ID NO: 1625362 - DNA, 15 bp, Homo sapiens
cactctaccctgatc

SEQ ID NO: 1625363 - DNA, 15 bp, Homo sapiens
gcactctaccctgat

SEQ ID NO: 1625364 - DNA, 15 bp, Homo sapiens
agcactctaccctga

SEQ ID NO: 1625365 - DNA, 15 bp, Homo sapiens
cagcactctaccctg

SEQ ID NO: 1625366 - DNA, 15 bp, Homo sapiens
ccagcactctaccct

SEQ ID NO: 1625367 - DNA, 15 bp, Homo sapiens
cccagcactctaccc

SEQ ID NO: 1625368 - DNA, 15 bp, Homo sapiens
ccccagcactctacc

SEQ ID NO: 1625369 - DNA, 15 bp, Homo sapiens
cccccagcactctac

SEQ ID NO: 1625370 - DNA, 15 bp, Homo sapiens
ccccccagcactcta

SEQ ID NO: 1625371 - DNA, 15 bp, Homo sapiens
cccccccagcactct

SEQ ID NO: 1625372 - DNA, 15 bp, Homo sapiens
tcccccccagcactc

SEQ ID NO: 1625373 - DNA, 15 bp, Homo sapiens
atcccccccagcact

SEQ ID NO: 1625374 - DNA, 15 bp, Homo sapiens
tatcccccccagcac

SEQ ID NO: 1625375 - DNA, 15 bp, Homo sapiens
atatcccccccagca

SEQ ID NO: 1625376 - DNA, 15 bp, Homo sapiens
gatatcccccccagc

SEQ ID NO: 1625377 - DNA, 15 bp, Homo sapiens
cgatatcccccccag

SEQ ID NO: 1625378 - DNA, 15 bp, Homo sapiens
acgatatccccccca

SEQ ID NO: 1625379 - DNA, 15 bp, Homo sapiens
cacgatatccccccc

SEQ ID NO: 1625380 - DNA, 15 bp, Homo sapiens
ccacgatatcccccc

SEQ ID NO: 1625381 - DNA, 15 bp, Homo sapiens
accacgatatccccc

SEQ ID NO: 1625382 - DNA, 15 bp, Homo sapiens
caccacgatatcccc

SEQ ID NO: 1625383 - DNA, 15 bp, Homo sapiens
gcaccacgatatccc

SEQ ID NO: 1625384 - DNA, 15 bp, Homo sapiens
agcaccacgatatcc

SEQ ID NO: 1625385 - DNA, 15 bp, Homo sapiens
cagcaccacgatatc

SEQ ID NO: 1625386 - DNA, 15 bp, Homo sapiens
gcagcaccacgatat

SEQ ID NO: 1625387 - DNA, 15 bp, Homo sapiens
cgcagcaccacgata

SEQ ID NO: 1625388 - DNA, 15 bp, Homo sapiens
acgcagcaccacgat

SEQ ID NO: 1625389 - DNA, 15 bp, Homo sapiens
cacgcagcaccacga

SEQ ID NO: 1625390 - DNA, 15 bp, Homo sapiens
acacgcagcaccacg

SEQ ID NO: 1625391 - DNA, 15 bp, Homo sapiens
cacacgcagcaccac

SEQ ID NO: 1625392 - DNA, 15 bp, Homo sapiens
tcacacgcagcacca

SEQ ID NO: 1625393 - DNA, 15 bp, Homo sapiens
atcacacgcagcacc

SEQ ID NO: 1625394 - DNA, 15 bp, Homo sapiens
tatcacacgcagcac

SEQ ID NO: 1625395 - DNA, 15 bp, Homo sapiens
ctatcacacgcagca

SEQ ID NO: 1625396 - DNA, 15 bp, Homo sapiens
tctatcacacgcagc

SEQ ID NO: 1625397 - DNA, 15 bp, Homo sapiens
atctatcacacgcag

SEQ ID NO: 1625398 - DNA, 15 bp, Homo sapiens
tatctatcacacgca

SEQ ID NO: 1625399 - DNA, 15 bp, Homo sapiens
gtatctatcacacgc

SEQ ID NO: 1625400 - DNA, 15 bp, Homo sapiens
agtatctatcacacg

SEQ ID NO: 1625401 - DNA, 15 bp, Homo sapiens
gagtatctatcacac

SEQ ID NO: 1625402 - DNA, 15 bp, Homo sapiens
tgagtatctatcaca

SEQ ID NO: 1625403 - DNA, 15 bp, Homo sapiens
ctgagtatctatcac

SEQ ID NO: 1625404 - DNA, 15 bp, Homo sapiens
actgagtatctatca

SEQ ID NO: 1625405 - DNA, 15 bp, Homo sapiens
tactgagtatctatc

SEQ ID NO: 1625406 - DNA, 15 bp, Homo sapiens
gtactgagtatctat

SEQ ID NO: 1625407 - DNA, 15 bp, Homo sapiens
cgtactgagtatcta

SEQ ID NO: 1625408 - DNA, 15 bp, Homo sapiens
acgtactgagtatct

SEQ ID NO: 1625409 - DNA, 15 bp, Homo sapiens
aacgtactgagtatc

SEQ ID NO: 1625410 - DNA, 15 bp, Homo sapiens
aaacgtactgagtat

SEQ ID NO: 1625411 - DNA, 15 bp, Homo sapiens
aaaacgtactgagta

SEQ ID NO: 1625412 - DNA, 15 bp, Homo sapiens
aaaaacgtactgagt

SEQ ID NO: 1625413 - DNA, 15 bp, Homo sapiens
caaaaacgtactgag

SEQ ID NO: 1625414 - DNA, 15 bp, Homo sapiens
acaaaaacgtactga

SEQ ID NO: 1625415 - DNA, 15 bp, Homo sapiens
gacaaaaacgtactg

SEQ ID NO: 1625416 - DNA, 15 bp, Homo sapiens
tgacaaaaacgtact

SEQ ID NO: 1625417 - DNA, 15 bp, Homo sapiens
ttgacaaaaacgtac

SEQ ID NO: 1625418 - DNA, 15 bp, Homo sapiens
cttgacaaaaacgta

SEQ ID NO: 1625419 - DNA, 15 bp, Homo sapiens
ccttgacaaaaacgt

SEQ ID NO: 1625420 - DNA, 15 bp, Homo sapiens
cccttgacaaaaacg

SEQ ID NO: 1625421 - DNA, 15 bp, Homo sapiens
acccttgacaaaaac

SEQ ID NO: 1625422 - DNA, 15 bp, Homo sapiens
cacccttgacaaaaa

SEQ ID NO: 1625423 - DNA, 15 bp, Homo sapiens
tcacccttgacaaaa

SEQ ID NO: 1625424 - DNA, 15 bp, Homo sapiens
gtcacccttgacaaa

SEQ ID NO: 1625425 - DNA, 15 bp, Homo sapiens
cgtcacccttgacaa

SEQ ID NO: 1625426 - DNA, 15 bp, Homo sapiens
ccgtcacccttgaca

SEQ ID NO: 1625427 - DNA, 15 bp, Homo sapiens
cccgtcacccttgac

SEQ ID NO: 1625428 - DNA, 15 bp, Homo sapiens
gcccgtcacccttga

SEQ ID NO: 1625429 - DNA, 15 bp, Homo sapiens
agcccgtcacccttg

SEQ ID NO: 1625430 - DNA, 15 bp, Homo sapiens
gagcccgtcaccctt

SEQ ID NO: 1625431 - DNA, 15 bp, Homo sapiens
ggagcccgtcaccct

SEQ ID NO: 1625432 - DNA, 15 bp, Homo sapiens
aggagcccgtcaccc

SEQ ID NO: 1625433 - DNA, 15 bp, Homo sapiens
caggagcccgtcacc

SEQ ID NO: 1625434 - DNA, 15 bp, Homo sapiens
acaggagcccgtcac

SEQ ID NO: 1625435 - DNA, 15 bp, Homo sapiens
gacaggagcccgtca

SEQ ID NO: 1625436 - DNA, 15 bp, Homo sapiens
cgacaggagcccgtc

SEQ ID NO: 1625437 - DNA, 15 bp, Homo sapiens
acgacaggagcccgt

SEQ ID NO: 1625438 - DNA, 15 bp, Homo sapiens
cacgacaggagcccg

SEQ ID NO: 1625439 - DNA, 15 bp, Homo sapiens
acacgacaggagccc

SEQ ID NO: 1625440 - DNA, 15 bp, Homo sapiens
cacacgacaggagcc

SEQ ID NO: 1625441 - DNA, 15 bp, Homo sapiens
ccacacgacaggagc

SEQ ID NO: 1625442 - DNA, 15 bp, Homo sapiens
cccacacgacaggag

SEQ ID NO: 1625443 - DNA, 15 bp, Homo sapiens
acccacacgacagga

SEQ ID NO: 1625444 - DNA, 15 bp, Homo sapiens
tacccacacgacagg

SEQ ID NO: 1625445 - DNA, 15 bp, Homo sapiens
ttacccacacgacag

SEQ ID NO: 1625446 - DNA, 15 bp, Homo sapiens
tttacccacacgaca

SEQ ID NO: 1625447 - DNA, 15 bp, Homo sapiens
atttacccacacgac

SEQ ID NO: 1625448 - DNA, 15 bp, Homo sapiens
catttacccacacga

SEQ ID NO: 1625449 - DNA, 15 bp, Homo sapiens
tcatttacccacacg

SEQ ID NO: 1625450 - DNA, 15 bp, Homo sapiens
ctcatttacccacac

SEQ ID NO: 1625451 - DNA, 15 bp, Homo sapiens
gctcatttacccaca

SEQ ID NO: 1625452 - DNA, 15 bp, Homo sapiens
tgctcatttacccac

SEQ ID NO: 1625453 - DNA, 15 bp, Homo sapiens
ttgctcatttaccca

SEQ ID NO: 1625454 - DNA, 15 bp, Homo sapiens
cttgctcatttaccc

SEQ ID NO: 1625455 - DNA, 15 bp, Homo sapiens
acttgctcatttacc

SEQ ID NO: 1625456 - DNA, 15 bp, Homo sapiens
aacttgctcatttac

SEQ ID NO: 1625457 - DNA, 15 bp, Homo sapiens
aaacttgctcattta

SEQ ID NO: 1625458 - DNA, 15 bp, Homo sapiens
caaacttgctcattt

SEQ ID NO: 1625459 - DNA, 15 bp, Homo sapiens
ccaaacttgctcatt

SEQ ID NO: 1625460 - DNA, 15 bp, Homo sapiens
cccaaacttgctcat

SEQ ID NO: 1625461 - DNA, 15 bp, Homo sapiens
gcccaaacttgctca

SEQ ID NO: 1625462 - DNA, 15 bp, Homo sapiens
agcccaaacttgctc

SEQ ID NO: 1625463 - DNA, 15 bp, Homo sapiens
tagcccaaacttgct

SEQ ID NO: 1625464 - DNA, 15 bp, Homo sapiens
ttagcccaaacttgc

SEQ ID NO: 1625465 - DNA, 15 bp, Homo sapiens
cttagcccaaacttg

SEQ ID NO: 1625466 - DNA, 15 bp, Homo sapiens
acttagcccaaactt

SEQ ID NO: 1625467 - DNA, 15 bp, Homo sapiens
cacttagcccaaact

SEQ ID NO: 1625468 - DNA, 15 bp, Homo sapiens
ccacttagcccaaac

SEQ ID NO: 1625469 - DNA, 15 bp, Homo sapiens
gccacttagcccaaa

SEQ ID NO: 1625470 - DNA, 15 bp, Homo sapiens
tgccacttagcccaa

SEQ ID NO: 1625471 - DNA, 15 bp, Homo sapiens
atgccacttagccca

SEQ ID NO: 1625472 - DNA, 15 bp, Homo sapiens
catgccacttagccc

SEQ ID NO: 1625473 - DNA, 15 bp, Homo sapiens
tcatgccacttagcc

SEQ ID NO: 1625474 - DNA, 15 bp, Homo sapiens
atcatgccacttagc

SEQ ID NO: 1625475 - DNA, 15 bp, Homo sapiens
catcatgccacttag

SEQ ID NO: 1625476 - DNA, 15 bp, Homo sapiens
gcatcatgccactta

SEQ ID NO: 1625477 - DNA, 15 bp, Homo sapiens
agcatcatgccactt

SEQ ID NO: 1625478 - DNA, 15 bp, Homo sapiens
cagcatcatgccact

SEQ ID NO: 1625479 - DNA, 15 bp, Homo sapiens
acagcatcatgccac

SEQ ID NO: 1625480 - DNA, 15 bp, Homo sapiens
tacagcatcatgcca

SEQ ID NO: 1625481 - DNA, 15 bp, Homo sapiens
ttacagcatcatgcc

SEQ ID NO: 1625482 - DNA, 15 bp, Homo sapiens
tttacagcatcatgc

SEQ ID NO: 1625483 - DNA, 15 bp, Homo sapiens
ctttacagcatcatg

SEQ ID NO: 1625484 - DNA, 15 bp, Homo sapiens
cctttacagcatcat

SEQ ID NO: 1625485 - DNA, 15 bp, Homo sapiens
gcctttacagcatca

SEQ ID NO: 1625486 - DNA, 15 bp, Homo sapiens
tgcctttacagcatc

SEQ ID NO: 1625487 - DNA, 15 bp, Homo sapiens
atgcctttacagcat

SEQ ID NO: 1625488 - DNA, 15 bp, Homo sapiens
gatgcctttacagca

SEQ ID NO: 1625489 - DNA, 15 bp, Homo sapiens
agatgcctttacagc

SEQ ID NO: 1625490 - DNA, 15 bp, Homo sapiens
aagatgcctttacag

SEQ ID NO: 1625491 - DNA, 15 bp, Homo sapiens
caagatgcctttaca

SEQ ID NO: 1625492 - DNA, 15 bp, Homo sapiens
acaagatgcctttac

SEQ ID NO: 1625493 - DNA, 15 bp, Homo sapiens
tacaagatgccttta

SEQ ID NO: 1625494 - DNA, 15 bp, Homo sapiens
ttacaagatgccttt

SEQ ID NO: 1625495 - DNA, 15 bp, Homo sapiens
tttacaagatgcctt

SEQ ID NO: 1625496 - DNA, 15 bp, Homo sapiens
atttacaagatgcct

SEQ ID NO: 1625497 - DNA, 15 bp, Homo sapiens
gatttacaagatgcc

SEQ ID NO: 1625498 - DNA, 15 bp, Homo sapiens
ggatttacaagatgc

SEQ ID NO: 1625499 - DNA, 15 bp, Homo sapiens
aggatttacaagatg

SEQ ID NO: 1625500 - DNA, 15 bp, Homo sapiens
caggatttacaagat

SEQ ID NO: 1625501 - DNA, 15 bp, Homo sapiens
tcaggatttacaaga

SEQ ID NO: 1625502 - DNA, 15 bp, Homo sapiens
ttcaggatttacaag

SEQ ID NO: 1625503 - DNA, 15 bp, Homo sapiens
cttcaggatttacaa

SEQ ID NO: 1625504 - DNA, 15 bp, Homo sapiens
acttcaggatttaca

SEQ ID NO: 1625505 - DNA, 15 bp, Homo sapiens
cacttcaggatttac

SEQ ID NO: 1625506 - DNA, 15 bp, Homo sapiens
gcacttcaggattta

SEQ ID NO: 1625507 - DNA, 15 bp, Homo sapiens
agcacttcaggattt

SEQ ID NO: 1625508 - DNA, 15 bp, Homo sapiens
aagcacttcaggatt

SEQ ID NO: 1625509 - DNA, 15 bp, Homo sapiens
aaagcacttcaggat

SEQ ID NO: 1625510 - DNA, 15 bp, Homo sapiens
caaagcacttcagga

SEQ ID NO: 1625511 - DNA, 15 bp, Homo sapiens
gcaaagcacttcagg

SEQ ID NO: 1625512 - DNA, 15 bp, Homo sapiens
tgcaaagcacttcag

SEQ ID NO: 1625513 - DNA, 15 bp, Homo sapiens
ttgcaaagcacttca

SEQ ID NO: 1625514 - DNA, 15 bp, Homo sapiens
tttgcaaagcacttc

SEQ ID NO: 1625515 - DNA, 15 bp, Homo sapiens
atttgcaaagcactt

SEQ ID NO: 1625516 - DNA, 15 bp, Homo sapiens
catttgcaaagcact

SEQ ID NO: 1625517 - DNA, 15 bp, Homo sapiens
tcatttgcaaagcac

SEQ ID NO: 1625518 - DNA, 15 bp, Homo sapiens
ttcatttgcaaagca

SEQ ID NO: 1625519 - DNA, 15 bp, Homo sapiens
tttcatttgcaaagc

SEQ ID NO: 1625520 - DNA, 15 bp, Homo sapiens
ctttcatttgcaaag

SEQ ID NO: 1625521 - DNA, 15 bp, Homo sapiens
actttcatttgcaaa

SEQ ID NO: 1625522 - DNA, 15 bp, Homo sapiens
aactttcatttgcaa

SEQ ID NO: 1625523 - DNA, 15 bp, Homo sapiens
taactttcatttgca

SEQ ID NO: 1625524 - DNA, 15 bp, Homo sapiens
ataactttcatttgc

SEQ ID NO: 1625525 - DNA, 15 bp, Homo sapiens
aataactttcatttg

SEQ ID NO: 1625526 - DNA, 15 bp, Homo sapiens
taataactttcattt

SEQ ID NO: 1625527 - DNA, 15 bp, Homo sapiens
gtaataactttcatt

SEQ ID NO: 1625528 - DNA, 15 bp, Homo sapiens
tgtaataactttcat

SEQ ID NO: 1625529 - DNA, 15 bp, Homo sapiens
ttgtaataactttca

SEQ ID NO: 1625530 - DNA, 15 bp, Homo sapiens
tttgtaataactttc

SEQ ID NO: 1625531 - DNA, 15 bp, Homo sapiens
ctttgtaataacttt

SEQ ID NO: 1625532 - DNA, 15 bp, Homo sapiens
actttgtaataactt

SEQ ID NO: 1625533 - DNA, 15 bp, Homo sapiens
gactttgtaataact

SEQ ID NO: 1625534 - DNA, 15 bp, Homo sapiens
ggactttgtaataac

SEQ ID NO: 1625535 - DNA, 15 bp, Homo sapiens
gggactttgtaataa

SEQ ID NO: 1625536 - DNA, 15 bp, Homo sapiens
agggactttgtaata

SEQ ID NO: 1625537 - DNA, 15 bp, Homo sapiens
tagggactttgtaat

SEQ ID NO: 1625538 - DNA, 15 bp, Homo sapiens
ctagggactttgtaa

SEQ ID NO: 1625539 - DNA, 15 bp, Homo sapiens
actagggactttgta

SEQ ID NO: 1625540 - DNA, 15 bp, Homo sapiens
aactagggactttgt

SEQ ID NO: 1625541 - DNA, 15 bp, Homo sapiens
aaactagggactttg

SEQ ID NO: 1625542 - DNA, 15 bp, Homo sapiens
taaactagggacttt

SEQ ID NO: 1625543 - DNA, 15 bp, Homo sapiens
ctaaactagggactt

SEQ ID NO: 1625544 - DNA, 15 bp, Homo sapiens
actaaactagggact

SEQ ID NO: 1625545 - DNA, 15 bp, Homo sapiens
tactaaactagggac

SEQ ID NO: 1625546 - DNA, 15 bp, Homo sapiens
atactaaactaggga

SEQ ID NO: 1625547 - DNA, 15 bp, Homo sapiens
tatactaaactaggg

SEQ ID NO: 1625548 - DNA, 15 bp, Homo sapiens
ttatactaaactagg

SEQ ID NO: 1625549 - DNA, 15 bp, Homo sapiens
attatactaaactag

SEQ ID NO: 1625550 - DNA, 15 bp, Homo sapiens
gattatactaaacta

SEQ ID NO: 1625551 - DNA, 15 bp, Homo sapiens
agattatactaaact

SEQ ID NO: 1625552 - DNA, 15 bp, Homo sapiens
tagattatactaaac

SEQ ID NO: 1625553 - DNA, 15 bp, Homo sapiens
gtagattatactaaa

SEQ ID NO: 1625554 - DNA, 15 bp, Homo sapiens
cgtagattatactaa

SEQ ID NO: 1625555 - DNA, 15 bp, Homo sapiens
acgtagattatacta

SEQ ID NO: 1625556 - DNA, 15 bp, Homo sapiens
aacgtagattatact

SEQ ID NO: 1625557 - DNA, 15 bp, Homo sapiens
aaacgtagattatac

SEQ ID NO: 1625558 - DNA, 15 bp, Homo sapiens
caaacgtagattata

SEQ ID NO: 1625559 - DNA, 15 bp, Homo sapiens
tcaaacgtagattat

SEQ ID NO: 1625560 - DNA, 15 bp, Homo sapiens
gtcaaacgtagatta

SEQ ID NO: 1625561 - DNA, 15 bp, Homo sapiens
agtcaaacgtagatt

SEQ ID NO: 1625562 - DNA, 15 bp, Homo sapiens
cagtcaaacgtagat

SEQ ID NO: 1625563 - DNA, 15 bp, Homo sapiens
gcagtcaaacgtaga

SEQ ID NO: 1625564 - DNA, 15 bp, Homo sapiens
tgcagtcaaacgtag

SEQ ID NO: 1625565 - DNA, 15 bp, Homo sapiens
atgcagtcaaacgta

SEQ ID NO: 1625566 - DNA, 15 bp, Homo sapiens
tatgcagtcaaacgt

SEQ ID NO: 1625567 - DNA, 15 bp, Homo sapiens
atatgcagtcaaacg

SEQ ID NO: 1625568 - DNA, 15 bp, Homo sapiens
tatatgcagtcaaac

SEQ ID NO: 1625569 - DNA, 15 bp, Homo sapiens
ttatatgcagtcaaa

SEQ ID NO: 1625570 - DNA, 15 bp, Homo sapiens
attatatgcagtcaa

SEQ ID NO: 1625571 - DNA, 15 bp, Homo sapiens
cattatatgcagtca

SEQ ID NO: 1625572 - DNA, 15 bp, Homo sapiens
tcattatatgcagtc

SEQ ID NO: 1625573 - DNA, 15 bp, Homo sapiens
ttcattatatgcagt

SEQ ID NO: 1625574 - DNA, 15 bp, Homo sapiens
tttcattatatgcag

SEQ ID NO: 1625575 - DNA, 15 bp, Homo sapiens
ttttcattatatgca

SEQ ID NO: 1625576 - DNA, 15 bp, Homo sapiens
gttttcattatatgc

SEQ ID NO: 1625577 - DNA, 15 bp, Homo sapiens
ggttttcattatatg

SEQ ID NO: 1625578 - DNA, 15 bp, Homo sapiens
aggttttcattatat

SEQ ID NO: 1625579 - DNA, 15 bp, Homo sapiens
gaggttttcattata

SEQ ID NO: 1625580 - DNA, 15 bp, Homo sapiens
tgaggttttcattat

SEQ ID NO: 1625581 - DNA, 15 bp, Homo sapiens
gtgaggttttcatta

SEQ ID NO: 1625582 - DNA, 15 bp, Homo sapiens
tgtgaggttttcatt

SEQ ID NO: 1625583 - DNA, 15 bp, Homo sapiens
ttgtgaggttttcat

SEQ ID NO: 1625584 - DNA, 15 bp, Homo sapiens
cttgtgaggttttca

SEQ ID NO: 1625585 - DNA, 15 bp, Homo sapiens
tcttgtgaggttttc

SEQ ID NO: 1625586 - DNA, 15 bp, Homo sapiens
ttcttgtgaggtttt

SEQ ID NO: 1625587 - DNA, 15 bp, Homo sapiens
tttcttgtgaggttt

SEQ ID NO: 1625588 - DNA, 15 bp, Homo sapiens
ttttcttgtgaggtt

SEQ ID NO: 1625589 - DNA, 15 bp, Homo sapiens
cttttcttgtgaggt

SEQ ID NO: 1625590 - DNA, 15 bp, Homo sapiens
acttttcttgtgagg

SEQ ID NO: 1625591 - DNA, 15 bp, Homo sapiens
gacttttcttgtgag

SEQ ID NO: 1625592 - DNA, 15 bp, Homo sapiens
agacttttcttgtga

SEQ ID NO: 1625593 - DNA, 15 bp, Homo sapiens
tagacttttcttgtg

SEQ ID NO: 1625594 - DNA, 15 bp, Homo sapiens
ctagacttttcttgt

SEQ ID NO: 1625595 - DNA, 15 bp, Homo sapiens
gctagacttttcttg

SEQ ID NO: 1625596 - DNA, 15 bp, Homo sapiens
cgctagacttttctt

SEQ ID NO: 1625597 - DNA, 15 bp, Homo sapiens
ccgctagacttttct

SEQ ID NO: 1625598 - DNA, 15 bp, Homo sapiens
accgctagacttttc

SEQ ID NO: 1625599 - DNA, 15 bp, Homo sapiens
taccgctagactttt

SEQ ID NO: 1625600 - DNA, 15 bp, Homo sapiens
ctaccgctagacttt

SEQ ID NO: 1625601 - DNA, 15 bp, Homo sapiens
cctaccgctagactt

SEQ ID NO: 1625602 - DNA, 15 bp, Homo sapiens
gcctaccgctagact

SEQ ID NO: 1625603 - DNA, 15 bp, Homo sapiens
agcctaccgctagac

SEQ ID NO: 1625604 - DNA, 15 bp, Homo sapiens
cagcctaccgctaga

SEQ ID NO: 1625605 - DNA, 15 bp, Homo sapiens
acagcctaccgctag

SEQ ID NO: 1625606 - DNA, 15 bp, Homo sapiens
aacagcctaccgcta

SEQ ID NO: 1625607 - DNA, 15 bp, Homo sapiens
gaacagcctaccgct

SEQ ID NO: 1625608 - DNA, 15 bp, Homo sapiens
tgaacagcctaccgc

SEQ ID NO: 1625609 - DNA, 15 bp, Homo sapiens
ctgaacagcctaccg

SEQ ID NO: 1625610 - DNA, 15 bp, Homo sapiens
actgaacagcctacc

SEQ ID NO: 1625611 - DNA, 15 bp, Homo sapiens
cactgaacagcctac

SEQ ID NO: 1625612 - DNA, 15 bp, Homo sapiens
acactgaacagccta

SEQ ID NO: 1625613 - DNA, 15 bp, Homo sapiens
aacactgaacagcct

SEQ ID NO: 1625614 - DNA, 15 bp, Homo sapiens
caacactgaacagcc

SEQ ID NO: 1625615 - DNA, 15 bp, Homo sapiens
ccaacactgaacagc

SEQ ID NO: 1625616 - DNA, 15 bp, Homo sapiens
accaacactgaacag

SEQ ID NO: 1625617 - DNA, 15 bp, Homo sapiens
caccaacactgaaca

SEQ ID NO: 1625618 - DNA, 15 bp, Homo sapiens
acaccaacactgaac

SEQ ID NO: 1625619 - DNA, 15 bp, Homo sapiens
cacaccaacactgaa

SEQ ID NO: 1625620 - DNA, 15 bp, Homo sapiens
ccacaccaacactga

SEQ ID NO: 1625621 - DNA, 15 bp, Homo sapiens
accacaccaacactg

SEQ ID NO: 1625622 - DNA, 15 bp, Homo sapiens
caccacaccaacact

SEQ ID NO: 1625623 - DNA, 15 bp, Homo sapiens
ccaccacaccaacac

SEQ ID NO: 1625624 - DNA, 15 bp, Homo sapiens
gccaccacaccaaca

SEQ ID NO: 1625625 - DNA, 15 bp, Homo sapiens
agccaccacaccaac

SEQ ID NO: 1625626 - DNA, 15 bp, Homo sapiens
aagccaccacaccaa

SEQ ID NO: 1625627 - DNA, 15 bp, Homo sapiens
gaagccaccacacca

SEQ ID NO: 1625628 - DNA, 15 bp, Homo sapiens
tgaagccaccacacc

SEQ ID NO: 1625629 - DNA, 15 bp, Homo sapiens
atgaagccaccacac

SEQ ID NO: 1625630 - DNA, 15 bp, Homo sapiens
catgaagccaccaca

SEQ ID NO: 1625631 - DNA, 15 bp, Homo sapiens
ccatgaagccaccac

SEQ ID NO: 1625632 - DNA, 15 bp, Homo sapiens
accatgaagccacca

SEQ ID NO: 1625633 - DNA, 15 bp, Homo sapiens
gaccatgaagccacc

SEQ ID NO: 1625634 - DNA, 15 bp, Homo sapiens
agaccatgaagccac

SEQ ID NO: 1625635 - DNA, 15 bp, Homo sapiens
aagaccatgaagcca

SEQ ID NO: 1625636 - DNA, 15 bp, Homo sapiens
taagaccatgaagcc

SEQ ID NO: 1625637 - DNA, 15 bp, Homo sapiens
ttaagaccatgaagc

SEQ ID NO: 1625638 - DNA, 15 bp, Homo sapiens
cttaagaccatgaag

SEQ ID NO: 1625639 - DNA, 15 bp, Homo sapiens
acttaagaccatgaa

SEQ ID NO: 1625640 - DNA, 15 bp, Homo sapiens
cacttaagaccatga

SEQ ID NO: 1625641 - DNA, 15 bp, Homo sapiens
tcacttaagaccatg

SEQ ID NO: 1625642 - DNA, 15 bp, Homo sapiens
atcacttaagaccat

SEQ ID NO: 1625643 - DNA, 15 bp, Homo sapiens
gatcacttaagacca

SEQ ID NO: 1625644 - DNA, 15 bp, Homo sapiens
agatcacttaagacc

SEQ ID NO: 1625645 - DNA, 15 bp, Homo sapiens
cagatcacttaagac

SEQ ID NO: 1625646 - DNA, 15 bp, Homo sapiens
ccagatcacttaaga

SEQ ID NO: 1625647 - DNA, 15 bp, Homo sapiens
tccagatcacttaag

SEQ ID NO: 1625648 - DNA, 15 bp, Homo sapiens
ttccagatcacttaa

SEQ ID NO: 1625649 - DNA, 15 bp, Homo sapiens
cttccagatcactta

SEQ ID NO: 1625650 - DNA, 15 bp, Homo sapiens
gcttccagatcactt

SEQ ID NO: 1625651 - DNA, 15 bp, Homo sapiens
ggcttccagatcact

SEQ ID NO: 1625652 - DNA, 15 bp, Homo sapiens
aggcttccagatcac

SEQ ID NO: 1625653 - DNA, 15 bp, Homo sapiens
aaggcttccagatca

SEQ ID NO: 1625654 - DNA, 15 bp, Homo sapiens
gaaggcttccagatc

SEQ ID NO: 1625655 - DNA, 15 bp, Homo sapiens
agaaggcttccagat

SEQ ID NO: 1625656 - DNA, 15 bp, Homo sapiens
tagaaggcttccaga

SEQ ID NO: 1625657 - DNA, 15 bp, Homo sapiens
gtagaaggcttccag

SEQ ID NO: 1625658 - DNA, 15 bp, Homo sapiens
agtagaaggcttcca

SEQ ID NO: 1625659 - DNA, 15 bp, Homo sapiens
tagtagaaggcttcc

SEQ ID NO: 1625660 - DNA, 15 bp, Homo sapiens
gtagtagaaggcttc

SEQ ID NO: 1625661 - DNA, 15 bp, Homo sapiens
agtagtagaaggctt

SEQ ID NO: 1625662 - DNA, 15 bp, Homo sapiens
cagtagtagaaggct

SEQ ID NO: 1625663 - DNA, 15 bp, Homo sapiens
acagtagtagaaggc

SEQ ID NO: 1625664 - DNA, 15 bp, Homo sapiens
cacagtagtagaagg

SEQ ID NO: 1625665 - DNA, 15 bp, Homo sapiens
gcacagtagtagaag

SEQ ID NO: 1625666 - DNA, 15 bp, Homo sapiens
agcacagtagtagaa

SEQ ID NO: 1625667 - DNA, 15 bp, Homo sapiens
gagcacagtagtaga

SEQ ID NO: 1625668 - DNA, 15 bp, Homo sapiens
agagcacagtagtag

SEQ ID NO: 1625669 - DNA, 15 bp, Homo sapiens
cagagcacagtagta

SEQ ID NO: 1625670 - DNA, 15 bp, Homo sapiens
gcagagcacagtagt

SEQ ID NO: 1625671 - DNA, 15 bp, Homo sapiens
ggcagagcacagtag

SEQ ID NO: 1625672 - DNA, 15 bp, Homo sapiens
tggcagagcacagta

SEQ ID NO: 1625673 - DNA, 15 bp, Homo sapiens
atggcagagcacagt

SEQ ID NO: 1625674 - DNA, 15 bp, Homo sapiens
gatggcagagcacag

SEQ ID NO: 1625675 - DNA, 15 bp, Homo sapiens
ggatggcagagcaca

SEQ ID NO: 1625676 - DNA, 15 bp, Homo sapiens
aggatggcagagcac

SEQ ID NO: 1625677 - DNA, 15 bp, Homo sapiens
aaggatggcagagca

SEQ ID NO: 1625678 - DNA, 15 bp, Homo sapiens
caaggatggcagagc

SEQ ID NO: 1625679 - DNA, 15 bp, Homo sapiens
ccaaggatggcagag

SEQ ID NO: 1625680 - DNA, 15 bp, Homo sapiens
gccaaggatggcaga

SEQ ID NO: 1625681 - DNA, 15 bp, Homo sapiens
tgccaaggatggcag

SEQ ID NO: 1625682 - DNA, 15 bp, Homo sapiens
atgccaaggatggca

SEQ ID NO: 1625683 - DNA, 15 bp, Homo sapiens
catgccaaggatggc

SEQ ID NO: 1625684 - DNA, 15 bp, Homo sapiens
acatgccaaggatgg

SEQ ID NO: 1625685 - DNA, 15 bp, Homo sapiens
cacatgccaaggatg

SEQ ID NO: 1625686 - DNA, 15 bp, Homo sapiens
ccacatgccaaggat

SEQ ID NO: 1625687 - DNA, 15 bp, Homo sapiens
accacatgccaagga

SEQ ID NO: 1625688 - DNA, 15 bp, Homo sapiens
aaccacatgccaagg

SEQ ID NO: 1625689 - DNA, 15 bp, Homo sapiens
aaaccacatgccaag

SEQ ID NO: 1625690 - DNA, 15 bp, Homo sapiens
aaaaccacatgccaa

SEQ ID NO: 1625691 - DNA, 15 bp, Homo sapiens
gaaaaccacatgcca

SEQ ID NO: 1625692 - DNA, 15 bp, Homo sapiens
tgaaaaccacatgcc

SEQ ID NO: 1625693 - DNA, 15 bp, Homo sapiens
atgaaaaccacatgc

SEQ ID NO: 1625694 - DNA, 15 bp, Homo sapiens
gatgaaaaccacatg

SEQ ID NO: 1625695 - DNA, 15 bp, Homo sapiens
ggatgaaaaccacat

SEQ ID NO: 1625696 - DNA, 15 bp, Homo sapiens
aggatgaaaaccaca

SEQ ID NO: 1625697 - DNA, 15 bp, Homo sapiens
gaggatgaaaaccac

SEQ ID NO: 1625698 - DNA, 15 bp, Homo sapiens
tgaggatgaaaacca

SEQ ID NO: 1625699 - DNA, 15 bp, Homo sapiens
ttgaggatgaaaacc

SEQ ID NO: 1625700 - DNA, 15 bp, Homo sapiens
cttgaggatgaaaac

SEQ ID NO: 1625701 - DNA, 15 bp, Homo sapiens
tcttgaggatgaaaa

SEQ ID NO: 1625702 - DNA, 15 bp, Homo sapiens
atcttgaggatgaaa

SEQ ID NO: 1625703 - DNA, 15 bp, Homo sapiens
tatcttgaggatgaa

SEQ ID NO: 1625704 - DNA, 15 bp, Homo sapiens
ttatcttgaggatga

SEQ ID NO: 1625705 - DNA, 15 bp, Homo sapiens
gttatcttgaggatg

SEQ ID NO: 1625706 - DNA, 15 bp, Homo sapiens
ggttatcttgaggat

SEQ ID NO: 1625707 - DNA, 15 bp, Homo sapiens
aggttatcttgagga

SEQ ID NO: 1625708 - DNA, 15 bp, Homo sapiens
gaggttatcttgagg

SEQ ID NO: 1625709 - DNA, 15 bp, Homo sapiens
tgaggttatcttgag

SEQ ID NO: 1625710 - DNA, 15 bp, Homo sapiens
atgaggttatcttga

SEQ ID NO: 1625711 - DNA, 15 bp, Homo sapiens
aatgaggttatcttg

SEQ ID NO: 1625712 - DNA, 15 bp, Homo sapiens
caatgaggttatctt

SEQ ID NO: 1625713 - DNA, 15 bp, Homo sapiens
acaatgaggttatct

SEQ ID NO: 1625714 - DNA, 15 bp, Homo sapiens
gacaatgaggttatc

SEQ ID NO: 1625715 - DNA, 15 bp, Homo sapiens
ggacaatgaggttat

SEQ ID NO: 1625716 - DNA, 15 bp, Homo sapiens
tggacaatgaggtta

SEQ ID NO: 1625717 - DNA, 15 bp, Homo sapiens
ttggacaatgaggtt

SEQ ID NO: 1625718 - DNA, 15 bp, Homo sapiens
cttggacaatgaggt

SEQ ID NO: 1625719 - DNA, 15 bp, Homo sapiens
acttggacaatgagg

SEQ ID NO: 1625720 - DNA, 15 bp, Homo sapiens
aacttggacaatgag

SEQ ID NO: 1625721 - DNA, 15 bp, Homo sapiens
caacttggacaatga

SEQ ID NO: 1625722 - DNA, 15 bp, Homo sapiens
ccaacttggacaatg

SEQ ID NO: 1625723 - DNA, 15 bp, Homo sapiens
gccaacttggacaat

SEQ ID NO: 1625724 - DNA, 15 bp, Homo sapiens
agccaacttggacaa

SEQ ID NO: 1625725 - DNA, 15 bp, Homo sapiens
cagccaacttggaca

SEQ ID NO: 1625726 - DNA, 15 bp, Homo sapiens
gcagccaacttggac

SEQ ID NO: 1625727 - DNA, 15 bp, Homo sapiens
agcagccaacttgga

SEQ ID NO: 1625728 - DNA, 15 bp, Homo sapiens
tagcagccaacttgg

SEQ ID NO: 1625729 - DNA, 15 bp, Homo sapiens
ctagcagccaacttg

SEQ ID NO: 1625730 - DNA, 15 bp, Homo sapiens
tctagcagccaactt

SEQ ID NO: 1625731 - DNA, 15 bp, Homo sapiens
ctctagcagccaact

SEQ ID NO: 1625732 - DNA, 15 bp, Homo sapiens
actctagcagccaac

SEQ ID NO: 1625733 - DNA, 15 bp, Homo sapiens
cactctagcagccaa

SEQ ID NO: 1625734 - DNA, 15 bp, Homo sapiens
acactctagcagcca

SEQ ID NO: 1625735 - DNA, 15 bp, Homo sapiens
gacactctagcagcc

SEQ ID NO: 1625736 - DNA, 15 bp, Homo sapiens
tgacactctagcagc

SEQ ID NO: 1625737 - DNA, 15 bp, Homo sapiens
ctgacactctagcag

SEQ ID NO: 1625738 - DNA, 15 bp, Homo sapiens
gctgacactctagca

SEQ ID NO: 1625739 - DNA, 15 bp, Homo sapiens
tgctgacactctagc

SEQ ID NO: 1625740 - DNA, 15 bp, Homo sapiens
ttgctgacactctag

SEQ ID NO: 1625741 - DNA, 15 bp, Homo sapiens
attgctgacactcta

SEQ ID NO: 1625742 - DNA, 15 bp, Homo sapiens
gattgctgacactct

SEQ ID NO: 1625743 - DNA, 15 bp, Homo sapiens
tgattgctgacactc

SEQ ID NO: 1625744 - DNA, 15 bp, Homo sapiens
gtgattgctgacact

SEQ ID NO: 1625745 - DNA, 15 bp, Homo sapiens
tgtgattgctgacac

SEQ ID NO: 1625746 - DNA, 15 bp, Homo sapiens
atgtgattgctgaca

SEQ ID NO: 1625747 - DNA, 15 bp, Homo sapiens
gatgtgattgctgac

SEQ ID NO: 1625748 - DNA, 15 bp, Homo sapiens
tgatgtgattgctga

SEQ ID NO: 1625749 - DNA, 15 bp, Homo sapiens
gtgatgtgattgctg

SEQ ID NO: 1625750 - DNA, 15 bp, Homo sapiens
tgtgatgtgattgct

SEQ ID NO: 1625751 - DNA, 15 bp, Homo sapiens
atgtgatgtgattgc

SEQ ID NO: 1625752 - DNA, 15 bp, Homo sapiens
aatgtgatgtgattg

SEQ ID NO: 1625753 - DNA, 15 bp, Homo sapiens
gaatgtgatgtgatt

SEQ ID NO: 1625754 - DNA, 15 bp, Homo sapiens
ggaatgtgatgtgat

SEQ ID NO: 1625755 - DNA, 15 bp, Homo sapiens
tggaatgtgatgtga

SEQ ID NO: 1625756 - DNA, 15 bp, Homo sapiens
ctggaatgtgatgtg

SEQ ID NO: 1625757 - DNA, 15 bp, Homo sapiens
cctggaatgtgatgt

SEQ ID NO: 1625758 - DNA, 15 bp, Homo sapiens
gcctggaatgtgatg

SEQ ID NO: 1625759 - DNA, 15 bp, Homo sapiens
tgcctggaatgtgat

SEQ ID NO: 1625760 - DNA, 15 bp, Homo sapiens
ctgcctggaatgtga

SEQ ID NO: 1625761 - DNA, 15 bp, Homo sapiens
gctgcctggaatgtg

SEQ ID NO: 1625762 - DNA, 15 bp, Homo sapiens
tgctgcctggaatgt

SEQ ID NO: 1625763 - DNA, 15 bp, Homo sapiens
gtgctgcctggaatg

SEQ ID NO: 1625764 - DNA, 15 bp, Homo sapiens
tgtgctgcctggaat

SEQ ID NO: 1625765 - DNA, 15 bp, Homo sapiens
ctgtgctgcctggaa

SEQ ID NO: 1625766 - DNA, 15 bp, Homo sapiens
gctgtgctgcctgga

SEQ ID NO: 1625767 - DNA, 15 bp, Homo sapiens
tgctgtgctgcctgg

SEQ ID NO: 1625768 - DNA, 15 bp, Homo sapiens
ttgctgtgctgcctg

SEQ ID NO: 1625769 - DNA, 15 bp, Homo sapiens
cttgctgtgctgcct

SEQ ID NO: 1625770 - DNA, 15 bp, Homo sapiens
tcttgctgtgctgcc

SEQ ID NO: 1625771 - DNA, 15 bp, Homo sapiens
ttcttgctgtgctgc

SEQ ID NO: 1625772 - DNA, 15 bp, Homo sapiens
cttcttgctgtgctg

SEQ ID NO: 1625773 - DNA, 15 bp, Homo sapiens
ccttcttgctgtgct

SEQ ID NO: 1625774 - DNA, 15 bp, Homo sapiens
tccttcttgctgtgc

SEQ ID NO: 1625775 - DNA, 15 bp, Homo sapiens
ttccttcttgctgtg

SEQ ID NO: 1625776 - DNA, 15 bp, Homo sapiens
tttccttcttgctgt

SEQ ID NO: 1625777 - DNA, 15 bp, Homo sapiens
ttttccttcttgctg

SEQ ID NO: 1625778 - DNA, 15 bp, Homo sapiens
tttttccttcttgct

SEQ ID NO: 1625779 - DNA, 15 bp, Homo sapiens
ttttttccttcttgc

SEQ ID NO: 1625780 - DNA, 15 bp, Homo sapiens
attttttccttcttg

SEQ ID NO: 1625781 - DNA, 15 bp, Homo sapiens
cattttttccttctt

SEQ ID NO: 1625782 - DNA, 15 bp, Homo sapiens
ccattttttccttct

SEQ ID NO: 1625783 - DNA, 15 bp, Homo sapiens
accattttttccttc

SEQ ID NO: 1625784 - DNA, 15 bp, Homo sapiens
caccattttttcctt

SEQ ID NO: 1625785 - DNA, 15 bp, Homo sapiens
ccaccattttttcct

SEQ ID NO: 1625786 - DNA, 15 bp, Homo sapiens
cccaccattttttcc

SEQ ID NO: 1625787 - DNA, 15 bp, Homo sapiens
ccccaccattttttc

SEQ ID NO: 1625788 - DNA, 15 bp, Homo sapiens
gccccaccatttttt

SEQ ID NO: 1625789 - DNA, 15 bp, Homo sapiens
agccccaccattttt

SEQ ID NO: 1625790 - DNA, 15 bp, Homo sapiens
aagccccaccatttt

SEQ ID NO: 1625791 - DNA, 15 bp, Homo sapiens
aaagccccaccattt

SEQ ID NO: 1625792 - DNA, 15 bp, Homo sapiens
caaagccccaccatt

SEQ ID NO: 1625793 - DNA, 15 bp, Homo sapiens
ccaaagccccaccat

SEQ ID NO: 1625794 - DNA, 15 bp, Homo sapiens
cccaaagccccacca

SEQ ID NO: 1625795 - DNA, 15 bp, Homo sapiens
ccccaaagccccacc

SEQ ID NO: 1625796 - DNA, 15 bp, Homo sapiens
tccccaaagccccac

SEQ ID NO: 1625797 - DNA, 15 bp, Homo sapiens
ctccccaaagcccca

SEQ ID NO: 1625798 - DNA, 15 bp, Homo sapiens
gctccccaaagcccc

SEQ ID NO: 1625799 - DNA, 15 bp, Homo sapiens
tgctccccaaagccc

SEQ ID NO: 1625800 - DNA, 15 bp, Homo sapiens
ctgctccccaaagcc

SEQ ID NO: 1625801 - DNA, 15 bp, Homo sapiens
tctgctccccaaagc

SEQ ID NO: 1625802 - DNA, 15 bp, Homo sapiens
atctgctccccaaag

SEQ ID NO: 1625803 - DNA, 15 bp, Homo sapiens
catctgctccccaaa

SEQ ID NO: 1625804 - DNA, 15 bp, Homo sapiens
ccatctgctccccaa

SEQ ID NO: 1625805 - DNA, 15 bp, Homo sapiens
tccatctgctcccca

SEQ ID NO: 1625806 - DNA, 15 bp, Homo sapiens
ctccatctgctcccc

SEQ ID NO: 1625807 - DNA, 15 bp, Homo sapiens
cctccatctgctccc

SEQ ID NO: 1625808 - DNA, 15 bp, Homo sapiens
tcctccatctgctcc

SEQ ID NO: 1625809 - DNA, 15 bp, Homo sapiens
ttcctccatctgctc

SEQ ID NO: 1625810 - DNA, 15 bp, Homo sapiens
gttcctccatctgct

SEQ ID NO: 1625811 - DNA, 15 bp, Homo sapiens
agttcctccatctgc

SEQ ID NO: 1625812 - DNA, 15 bp, Homo sapiens
cagttcctccatctg

SEQ ID NO: 1625813 - DNA, 15 bp, Homo sapiens
ccagttcctccatct

SEQ ID NO: 1625814 - DNA, 15 bp, Homo sapiens
cccagttcctccatc

SEQ ID NO: 1625815 - DNA, 15 bp, Homo sapiens
ccccagttcctccat

SEQ ID NO: 1625816 - DNA, 15 bp, Homo sapiens
cccccagttcctcca

SEQ ID NO: 1625817 - DNA, 15 bp, Homo sapiens
acccccagttcctcc

SEQ ID NO: 1625818 - DNA, 15 bp, Homo sapiens
tacccccagttcctc

SEQ ID NO: 1625819 - DNA, 15 bp, Homo sapiens
ttacccccagttcct

SEQ ID NO: 1625820 - DNA, 15 bp, Homo sapiens
tttacccccagttcc

SEQ ID NO: 1625821 - DNA, 15 bp, Homo sapiens
ttttacccccagttc

SEQ ID NO: 1625822 - DNA, 15 bp, Homo sapiens
gttttacccccagtt

SEQ ID NO: 1625823 - DNA, 15 bp, Homo sapiens
tgttttacccccagt

SEQ ID NO: 1625824 - DNA, 15 bp, Homo sapiens
ctgttttacccccag

SEQ ID NO: 1625825 - DNA, 15 bp, Homo sapiens
gctgttttaccccca

SEQ ID NO: 1625826 - DNA, 15 bp, Homo sapiens
cgctgttttaccccc

SEQ ID NO: 1625827 - DNA, 15 bp, Homo sapiens
acgctgttttacccc

SEQ ID NO: 1625828 - DNA, 15 bp, Homo sapiens
cacgctgttttaccc

SEQ ID NO: 1625829 - DNA, 15 bp, Homo sapiens
acacgctgttttacc

SEQ ID NO: 1625830 - DNA, 15 bp, Homo sapiens
aacacgctgttttac

SEQ ID NO: 1625831 - DNA, 15 bp, Homo sapiens
gaacacgctgtttta

SEQ ID NO: 1625832 - DNA, 15 bp, Homo sapiens
ggaacacgctgtttt

SEQ ID NO: 1625833 - DNA, 15 bp, Homo sapiens
tggaacacgctgttt

SEQ ID NO: 1625834 - DNA, 15 bp, Homo sapiens
ctggaacacgctgtt

SEQ ID NO: 1625835 - DNA, 15 bp, Homo sapiens
actggaacacgctgt

SEQ ID NO: 1625836 - DNA, 15 bp, Homo sapiens
aactggaacacgctg

SEQ ID NO: 1625837 - DNA, 15 bp, Homo sapiens
aaactggaacacgct

SEQ ID NO: 1625838 - DNA, 15 bp, Homo sapiens
gaaactggaacacgc

SEQ ID NO: 1625839 - DNA, 15 bp, Homo sapiens
ggaaactggaacacg

SEQ ID NO: 1625840 - DNA, 15 bp, Homo sapiens
aggaaactggaacac

SEQ ID NO: 1625841 - DNA, 15 bp, Homo sapiens
gaggaaactggaaca

SEQ ID NO: 1625842 - DNA, 15 bp, Homo sapiens
ggaggaaactggaac

SEQ ID NO: 1625843 - DNA, 15 bp, Homo sapiens
gggaggaaactggaa

SEQ ID NO: 1625844 - DNA, 15 bp, Homo sapiens
agggaggaaactgga

SEQ ID NO: 1625845 - DNA, 15 bp, Homo sapiens
gagggaggaaactgg

SEQ ID NO: 1625846 - DNA, 15 bp, Homo sapiens
agagggaggaaactg

SEQ ID NO: 1625847 - DNA, 15 bp, Homo sapiens
aagagggaggaaact

SEQ ID NO: 1625848 - DNA, 15 bp, Homo sapiens
taagagggaggaaac

SEQ ID NO: 1625849 - DNA, 15 bp, Homo sapiens
ctaagagggaggaaa

SEQ ID NO: 1625850 - DNA, 15 bp, Homo sapiens
cctaagagggaggaa

SEQ ID NO: 1625851 - DNA, 15 bp, Homo sapiens
ccctaagagggagga

SEQ ID NO: 1625852 - DNA, 15 bp, Homo sapiens
tccctaagagggagg

SEQ ID NO: 1625853 - DNA, 15 bp, Homo sapiens
ctccctaagagggag

SEQ ID NO: 1625854 - DNA, 15 bp, Homo sapiens
cctccctaagaggga

SEQ ID NO: 1625855 - DNA, 15 bp, Homo sapiens
tcctccctaagaggg

SEQ ID NO: 1625856 - DNA, 15 bp, Homo sapiens
ttcctccctaagagg

SEQ ID NO: 1625857 - DNA, 15 bp, Homo sapiens
cttcctccctaagag

SEQ ID NO: 1625858 - DNA, 15 bp, Homo sapiens
tcttcctccctaaga

SEQ ID NO: 1625859 - DNA, 15 bp, Homo sapiens
ttcttcctccctaag

SEQ ID NO: 1625860 - DNA, 15 bp, Homo sapiens
tttcttcctccctaa

SEQ ID NO: 1625861 - DNA, 15 bp, Homo sapiens
ttttcttcctcccta

SEQ ID NO: 1625862 - DNA, 15 bp, Homo sapiens
gttttcttcctccct

SEQ ID NO: 1625863 - DNA, 15 bp, Homo sapiens
ggttttcttcctccc

SEQ ID NO: 1625864 - DNA, 15 bp, Homo sapiens
tggttttcttcctcc

SEQ ID NO: 1625865 - DNA, 15 bp, Homo sapiens
ttggttttcttcctc

SEQ ID NO: 1625866 - DNA, 15 bp, Homo sapiens
attggttttcttcct

SEQ ID NO: 1625867 - DNA, 15 bp, Homo sapiens
cattggttttcttcc

SEQ ID NO: 1625868 - DNA, 15 bp, Homo sapiens
acattggttttcttc

SEQ ID NO: 1625869 - DNA, 15 bp, Homo sapiens
gacattggttttctt

SEQ ID NO: 1625870 - DNA, 15 bp, Homo sapiens
ggacattggttttct

SEQ ID NO: 1625871 - DNA, 15 bp, Homo sapiens
tggacattggttttc

SEQ ID NO: 1625872 - DNA, 15 bp, Homo sapiens
gtggacattggtttt

SEQ ID NO: 1625873 - DNA, 15 bp, Homo sapiens
agtggacattggttt

SEQ ID NO: 1625874 - DNA, 15 bp, Homo sapiens
aagtggacattggtt

SEQ ID NO: 1625875 - DNA, 15 bp, Homo sapiens
gaagtggacattggt

SEQ ID NO: 1625876 - DNA, 15 bp, Homo sapiens
ggaagtggacattgg

SEQ ID NO: 1625877 - DNA, 15 bp, Homo sapiens
aggaagtggacattg

SEQ ID NO: 1625878 - DNA, 15 bp, Homo sapiens
aaggaagtggacatt

SEQ ID NO: 1625879 - DNA, 15 bp, Homo sapiens
aaaggaagtggacat

SEQ ID NO: 1625880 - DNA, 15 bp, Homo sapiens
gaaaggaagtggaca

SEQ ID NO: 1625881 - DNA, 15 bp, Homo sapiens
agaaaggaagtggac

SEQ ID NO: 1625882 - DNA, 15 bp, Homo sapiens
tagaaaggaagtgga

SEQ ID NO: 1625883 - DNA, 15 bp, Homo sapiens
atagaaaggaagtgg

SEQ ID NO: 1625884 - DNA, 15 bp, Homo sapiens
aatagaaaggaagtg

SEQ ID NO: 1625885 - DNA, 15 bp, Homo sapiens
caatagaaaggaagt

SEQ ID NO: 1625886 - DNA, 15 bp, Homo sapiens
ccaatagaaaggaag

SEQ ID NO: 1625887 - DNA, 15 bp, Homo sapiens
gccaatagaaaggaa

SEQ ID NO: 1625888 - DNA, 15 bp, Homo sapiens
ggccaatagaaagga

SEQ ID NO: 1625889 - DNA, 15 bp, Homo sapiens
tggccaatagaaagg

SEQ ID NO: 1625890 - DNA, 15 bp, Homo sapiens
ctggccaatagaaag

SEQ ID NO: 1625891 - DNA, 15 bp, Homo sapiens
tctggccaatagaaa

SEQ ID NO: 1625892 - DNA, 15 bp, Homo sapiens
ttctggccaatagaa

SEQ ID NO: 1625893 - DNA, 15 bp, Homo sapiens
gttctggccaataga

SEQ ID NO: 1625894 - DNA, 15 bp, Homo sapiens
agttctggccaatag

SEQ ID NO: 1625895 - DNA, 15 bp, Homo sapiens
cagttctggccaata

SEQ ID NO: 1625896 - DNA, 15 bp, Homo sapiens
tcagttctggccaat

SEQ ID NO: 1625897 - DNA, 15 bp, Homo sapiens
ctcagttctggccaa

SEQ ID NO: 1625898 - DNA, 15 bp, Homo sapiens
actcagttctggcca

SEQ ID NO: 1625899 - DNA, 15 bp, Homo sapiens
gactcagttctggcc

SEQ ID NO: 1625900 - DNA, 15 bp, Homo sapiens
tgactcagttctggc

SEQ ID NO: 1625901 - DNA, 15 bp, Homo sapiens
gtgactcagttctgg

SEQ ID NO: 1625902 - DNA, 15 bp, Homo sapiens
tgtgactcagttctg

SEQ ID NO: 1625903 - DNA, 15 bp, Homo sapiens
atgtgactcagttct

SEQ ID NO: 1625904 - DNA, 15 bp, Homo sapiens
catgtgactcagttc

SEQ ID NO: 1625905 - DNA, 15 bp, Homo sapiens
ccatgtgactcagtt

SEQ ID NO: 1625906 - DNA, 15 bp, Homo sapiens
gccatgtgactcagt

SEQ ID NO: 1625907 - DNA, 15 bp, Homo sapiens
ggccatgtgactcag

SEQ ID NO: 1625908 - DNA, 15 bp, Homo sapiens
tggccatgtgactca

SEQ ID NO: 1625909 - DNA, 15 bp, Homo sapiens
gtggccatgtgactc

SEQ ID NO: 1625910 - DNA, 15 bp, Homo sapiens
tgtggccatgtgact

SEQ ID NO: 1625911 - DNA, 15 bp, Homo sapiens
gtgtggccatgtgac

SEQ ID NO: 1625912 - DNA, 15 bp, Homo sapiens
ggtgtggccatgtga

SEQ ID NO: 1625913 - DNA, 15 bp, Homo sapiens
aggtgtggccatgtg

SEQ ID NO: 1625914 - DNA, 15 bp, Homo sapiens
taggtgtggccatgt

SEQ ID NO: 1625915 - DNA, 15 bp, Homo sapiens
ctaggtgtggccatg

SEQ ID NO: 1625916 - DNA, 15 bp, Homo sapiens
gctaggtgtggccat

SEQ ID NO: 1625917 - DNA, 15 bp, Homo sapiens
agctaggtgtggcca

SEQ ID NO: 1625918 - DNA, 15 bp, Homo sapiens
gagctaggtgtggcc

SEQ ID NO: 1625919 - DNA, 15 bp, Homo sapiens
ggagctaggtgtggc

SEQ ID NO: 1625920 - DNA, 15 bp, Homo sapiens
tggagctaggtgtgg

SEQ ID NO: 1625921 - DNA, 15 bp, Homo sapiens
ctggagctaggtgtg

SEQ ID NO: 1625922 - DNA, 15 bp, Homo sapiens
cctggagctaggtgt

SEQ ID NO: 1625923 - DNA, 15 bp, Homo sapiens
ccctggagctaggtg

SEQ ID NO: 1625924 - DNA, 15 bp, Homo sapiens
cccctggagctaggt

SEQ ID NO: 1625925 - DNA, 15 bp, Homo sapiens
tcccctggagctagg

SEQ ID NO: 1625926 - DNA, 15 bp, Homo sapiens
ttcccctggagctag

SEQ ID NO: 1625927 - DNA, 15 bp, Homo sapiens
cttcccctggagcta

SEQ ID NO: 1625928 - DNA, 15 bp, Homo sapiens
gcttcccctggagct

SEQ ID NO: 1625929 - DNA, 15 bp, Homo sapiens
agcttcccctggagc

SEQ ID NO: 1625930 - DNA, 15 bp, Homo sapiens
cagcttcccctggag

SEQ ID NO: 1625931 - DNA, 15 bp, Homo sapiens
ccagcttcccctgga

SEQ ID NO: 1625932 - DNA, 15 bp, Homo sapiens
tccagcttcccctgg

SEQ ID NO: 1625933 - DNA, 15 bp, Homo sapiens
ttccagcttcccctg

SEQ ID NO: 1625934 - DNA, 15 bp, Homo sapiens
tttccagcttcccct

SEQ ID NO: 1625935 - DNA, 15 bp, Homo sapiens
ctttccagcttcccc

SEQ ID NO: 1625936 - DNA, 15 bp, Homo sapiens
cctttccagcttccc

SEQ ID NO: 1625937 - DNA, 15 bp, Homo sapiens
acctttccagcttcc

SEQ ID NO: 1625938 - DNA, 15 bp, Homo sapiens
tacctttccagcttc

SEQ ID NO: 1625939 - DNA, 15 bp, Homo sapiens
ctacctttccagctt

SEQ ID NO: 1625940 - DNA, 15 bp, Homo sapiens
gctacctttccagct

SEQ ID NO: 1625941 - DNA, 15 bp, Homo sapiens
ggctacctttccagc

SEQ ID NO: 1625942 - DNA, 15 bp, Homo sapiens
aggctacctttccag

SEQ ID NO: 1625943 - DNA, 15 bp, Homo sapiens
aaggctacctttcca

SEQ ID NO: 1625944 - DNA, 15 bp, Homo sapiens
aaaggctacctttcc

SEQ ID NO: 1625945 - DNA, 15 bp, Homo sapiens
aaaaggctacctttc

SEQ ID NO: 1625946 - DNA, 15 bp, Homo sapiens
taaaaggctaccttt

SEQ ID NO: 1625947 - DNA, 15 bp, Homo sapiens
ctaaaaggctacctt

SEQ ID NO: 1625948 - DNA, 15 bp, Homo sapiens
gctaaaaggctacct

SEQ ID NO: 1625949 - DNA, 15 bp, Homo sapiens
agctaaaaggctacc

SEQ ID NO: 1625950 - DNA, 15 bp, Homo sapiens
cagctaaaaggctac

SEQ ID NO: 1625951 - DNA, 15 bp, Homo sapiens
ccagctaaaaggcta

SEQ ID NO: 1625952 - DNA, 15 bp, Homo sapiens
cccagctaaaaggct

SEQ ID NO: 1625953 - DNA, 15 bp, Homo sapiens
acccagctaaaaggc

SEQ ID NO: 1625954 - DNA, 15 bp, Homo sapiens
cacccagctaaaagg

SEQ ID NO: 1625955 - DNA, 15 bp, Homo sapiens
acacccagctaaaag

SEQ ID NO: 1625956 - DNA, 15 bp, Homo sapiens
cacacccagctaaaa

SEQ ID NO: 1625957 - DNA, 15 bp, Homo sapiens
gcacacccagctaaa

SEQ ID NO: 1625958 - DNA, 15 bp, Homo sapiens
agcacacccagctaa

SEQ ID NO: 1625959 - DNA, 15 bp, Homo sapiens
cagcacacccagcta

SEQ ID NO: 1625960 - DNA, 15 bp, Homo sapiens
tcagcacacccagct

SEQ ID NO: 1625961 - DNA, 15 bp, Homo sapiens
atcagcacacccagc

SEQ ID NO: 1625962 - DNA, 15 bp, Homo sapiens
catcagcacacccag

SEQ ID NO: 1625963 - DNA, 15 bp, Homo sapiens
gcatcagcacaccca

SEQ ID NO: 1625964 - DNA, 15 bp, Homo sapiens
agcatcagcacaccc

SEQ ID NO: 1625965 - DNA, 15 bp, Homo sapiens
gagcatcagcacacc

SEQ ID NO: 1625966 - DNA, 15 bp, Homo sapiens
agagcatcagcacac

SEQ ID NO: 1625967 - DNA, 15 bp, Homo sapiens
cagagcatcagcaca

SEQ ID NO: 1625968 - DNA, 15 bp, Homo sapiens
tcagagcatcagcac

SEQ ID NO: 1625969 - DNA, 15 bp, Homo sapiens
ctcagagcatcagca

SEQ ID NO: 1625970 - DNA, 15 bp, Homo sapiens
actcagagcatcagc

SEQ ID NO: 1625971 - DNA, 15 bp, Homo sapiens
tactcagagcatcag

SEQ ID NO: 1625972 - DNA, 15 bp, Homo sapiens
atactcagagcatca

SEQ ID NO: 1625973 - DNA, 15 bp, Homo sapiens
catactcagagcatc

SEQ ID NO: 1625974 - DNA, 15 bp, Homo sapiens
ccatactcagagcat

SEQ ID NO: 1625975 - DNA, 15 bp, Homo sapiens
accatactcagagca

SEQ ID NO: 1625976 - DNA, 15 bp, Homo sapiens
aaccatactcagagc

SEQ ID NO: 1625977 - DNA, 15 bp, Homo sapiens
aaaccatactcagag

SEQ ID NO: 1625978 - DNA, 15 bp, Homo sapiens
caaaccatactcaga

SEQ ID NO: 1625979 - DNA, 15 bp, Homo sapiens
ccaaaccatactcag

SEQ ID NO: 1625980 - DNA, 15 bp, Homo sapiens
cccaaaccatactca

SEQ ID NO: 1625981 - DNA, 15 bp, Homo sapiens
acccaaaccatactc

SEQ ID NO: 1625982 - DNA, 15 bp, Homo sapiens
aacccaaaccatact

SEQ ID NO: 1625983 - DNA, 15 bp, Homo sapiens
aaacccaaaccatac

SEQ ID NO: 1625984 - DNA, 15 bp, Homo sapiens
aaaacccaaaccata

SEQ ID NO: 1625985 - DNA, 15 bp, Homo sapiens
caaaacccaaaccat

SEQ ID NO: 1625986 - DNA, 15 bp, Homo sapiens
acaaaacccaaacca

SEQ ID NO: 1625987 - DNA, 15 bp, Homo sapiens
tacaaaacccaaacc

SEQ ID NO: 1625988 - DNA, 15 bp, Homo sapiens
atacaaaacccaaac

SEQ ID NO: 1625989 - DNA, 15 bp, Homo sapiens
catacaaaacccaaa

SEQ ID NO: 1625990 - DNA, 15 bp, Homo sapiens
tcatacaaaacccaa

SEQ ID NO: 1625991 - DNA, 15 bp, Homo sapiens
ttcatacaaaaccca

SEQ ID NO: 1625992 - DNA, 15 bp, Homo sapiens
tttcatacaaaaccc

SEQ ID NO: 1625993 - DNA, 15 bp, Homo sapiens
ctttcatacaaaacc

SEQ ID NO: 1625994 - DNA, 15 bp, Homo sapiens
tctttcatacaaaac

SEQ ID NO: 1625995 - DNA, 15 bp, Homo sapiens
ctctttcatacaaaa

SEQ ID NO: 1625996 - DNA, 15 bp, Homo sapiens
actctttcatacaaa

SEQ ID NO: 1625997 - DNA, 15 bp, Homo sapiens
tactctttcatacaa

SEQ ID NO: 1625998 - DNA, 15 bp, Homo sapiens
ttactctttcataca

SEQ ID NO: 1625999 - DNA, 15 bp, Homo sapiens
cttactctttcatac

SEQ ID NO: 1626000 - DNA, 15 bp, Homo sapiens
ccttactctttcata

SEQ ID NO: 1626001 - DNA, 15 bp, Homo sapiens
tccttactctttcat

SEQ ID NO: 1626002 - DNA, 15 bp, Homo sapiens
ctccttactctttca

SEQ ID NO: 1626003 - DNA, 15 bp, Homo sapiens
tctccttactctttc

SEQ ID NO: 1626004 - DNA, 15 bp, Homo sapiens
ctctccttactcttt

SEQ ID NO: 1626005 - DNA, 15 bp, Homo sapiens
tctctccttactctt

SEQ ID NO: 1626006 - DNA, 15 bp, Homo sapiens
atctctccttactct

SEQ ID NO: 1626007 - DNA, 15 bp, Homo sapiens
aatctctccttactc

SEQ ID NO: 1626008 - DNA, 15 bp, Homo sapiens
caatctctccttact

SEQ ID NO: 1626009 - DNA, 15 bp, Homo sapiens
ccaatctctccttac

SEQ ID NO: 1626010 - DNA, 15 bp, Homo sapiens
cccaatctctcctta

SEQ ID NO: 1626011 - DNA, 15 bp, Homo sapiens
gcccaatctctcctt

SEQ ID NO: 1626012 - DNA, 15 bp, Homo sapiens
agcccaatctctcct

SEQ ID NO: 1626013 - DNA, 15 bp, Homo sapiens
aagcccaatctctcc

SEQ ID NO: 1626014 - DNA, 15 bp, Homo sapiens
aaagcccaatctctc

SEQ ID NO: 1626015 - DNA, 15 bp, Homo sapiens
caaagcccaatctct

SEQ ID NO: 1626016 - DNA, 15 bp, Homo sapiens
ccaaagcccaatctc

SEQ ID NO: 1626017 - DNA, 15 bp, Homo sapiens
cccaaagcccaatct

SEQ ID NO: 1626018 - DNA, 15 bp, Homo sapiens
acccaaagcccaatc

SEQ ID NO: 1626019 - DNA, 15 bp, Homo sapiens
tacccaaagcccaat

SEQ ID NO: 1626020 - DNA, 15 bp, Homo sapiens
ctacccaaagcccaa

SEQ ID NO: 1626021 - DNA, 15 bp, Homo sapiens
actacccaaagccca

SEQ ID NO: 1626022 - DNA, 15 bp, Homo sapiens
tactacccaaagccc

SEQ ID NO: 1626023 - DNA, 15 bp, Homo sapiens
ttactacccaaagcc

SEQ ID NO: 1626024 - DNA, 15 bp, Homo sapiens
gttactacccaaagc

SEQ ID NO: 1626025 - DNA, 15 bp, Homo sapiens
agttactacccaaag

SEQ ID NO: 1626026 - DNA, 15 bp, Homo sapiens
cagttactacccaaa

SEQ ID NO: 1626027 - DNA, 15 bp, Homo sapiens
ccagttactacccaa

SEQ ID NO: 1626028 - DNA, 15 bp, Homo sapiens
gccagttactaccca

SEQ ID NO: 1626029 - DNA, 15 bp, Homo sapiens
tgccagttactaccc

SEQ ID NO: 1626030 - DNA, 15 bp, Homo sapiens
ctgccagttactacc

SEQ ID NO: 1626031 - DNA, 15 bp, Homo sapiens
actgccagttactac

SEQ ID NO: 1626032 - DNA, 15 bp, Homo sapiens
aactgccagttacta

SEQ ID NO: 1626033 - DNA, 15 bp, Homo sapiens
aaactgccagttact

SEQ ID NO: 1626034 - DNA, 15 bp, Homo sapiens
gaaactgccagttac

SEQ ID NO: 1626035 - DNA, 15 bp, Homo sapiens
agaaactgccagtta

SEQ ID NO: 1626036 - DNA, 15 bp, Homo sapiens
cagaaactgccagtt

SEQ ID NO: 1626037 - DNA, 15 bp, Homo sapiens
tcagaaactgccagt

SEQ ID NO: 1626038 - DNA, 15 bp, Homo sapiens
atcagaaactgccag

SEQ ID NO: 1626039 - DNA, 15 bp, Homo sapiens
catcagaaactgcca

SEQ ID NO: 1626040 - DNA, 15 bp, Homo sapiens
gcatcagaaactgcc

SEQ ID NO: 1626041 - DNA, 15 bp, Homo sapiens
agcatcagaaactgc

SEQ ID NO: 1626042 - DNA, 15 bp, Homo sapiens
gagcatcagaaactg

SEQ ID NO: 1626043 - DNA, 15 bp, Homo sapiens
agagcatcagaaact

SEQ ID NO: 1626044 - DNA, 15 bp, Homo sapiens
gagagcatcagaaac

SEQ ID NO: 1626045 - DNA, 15 bp, Homo sapiens
ggagagcatcagaaa

SEQ ID NO: 1626046 - DNA, 15 bp, Homo sapiens
cggagagcatcagaa

SEQ ID NO: 1626047 - DNA, 15 bp, Homo sapiens
acggagagcatcaga

SEQ ID NO: 1626048 - DNA, 15 bp, Homo sapiens
gacggagagcatcag

SEQ ID NO: 1626049 - DNA, 15 bp, Homo sapiens
ggacggagagcatca

SEQ ID NO: 1626050 - DNA, 15 bp, Homo sapiens
tggacggagagcatc

SEQ ID NO: 1626051 - DNA, 15 bp, Homo sapiens
atggacggagagcat

SEQ ID NO: 1626052 - DNA, 15 bp, Homo sapiens
aatggacggagagca

SEQ ID NO: 1626053 - DNA, 15 bp, Homo sapiens
taatggacggagagc

SEQ ID NO: 1626054 - DNA, 15 bp, Homo sapiens
ataatggacggagag

SEQ ID NO: 1626055 - DNA, 15 bp, Homo sapiens
tataatggacggaga

SEQ ID NO: 1626056 - DNA, 15 bp, Homo sapiens
ttataatggacggag

SEQ ID NO: 1626057 - DNA, 15 bp, Homo sapiens
attataatggacgga

SEQ ID NO: 1626058 - DNA, 15 bp, Homo sapiens
cattataatggacgg

SEQ ID NO: 1626059 - DNA, 15 bp, Homo sapiens
tcattataatggacg

SEQ ID NO: 1626060 - DNA, 15 bp, Homo sapiens
atcattataatggac

SEQ ID NO: 1626061 - DNA, 15 bp, Homo sapiens
gatcattataatgga

SEQ ID NO: 1626062 - DNA, 15 bp, Homo sapiens
tgatcattataatgg

SEQ ID NO: 1626063 - DNA, 15 bp, Homo sapiens
atgatcattataatg

SEQ ID NO: 1626064 - DNA, 15 bp, Homo sapiens
aatgatcattataat

SEQ ID NO: 1626065 - DNA, 15 bp, Homo sapiens
aaatgatcattataa

SEQ ID NO: 1626066 - DNA, 15 bp, Homo sapiens
taaatgatcattata

SEQ ID NO: 1626067 - DNA, 15 bp, Homo sapiens
ttaaatgatcattat

SEQ ID NO: 1626068 - DNA, 15 bp, Homo sapiens
cttaaatgatcatta

SEQ ID NO: 1626069 - DNA, 15 bp, Homo sapiens
acttaaatgatcatt

SEQ ID NO: 1626070 - DNA, 15 bp, Homo sapiens
tacttaaatgatcat

SEQ ID NO: 1626071 - DNA, 15 bp, Homo sapiens
atacttaaatgatca

SEQ ID NO: 1626072 - DNA, 15 bp, Homo sapiens
gatacttaaatgatc

SEQ ID NO: 1626073 - DNA, 15 bp, Homo sapiens
ggatacttaaatgat

SEQ ID NO: 1626074 - DNA, 15 bp, Homo sapiens
aggatacttaaatga

SEQ ID NO: 1626075 - DNA, 15 bp, Homo sapiens
taggatacttaaatg

SEQ ID NO: 1626076 - DNA, 15 bp, Homo sapiens
ataggatacttaaat

SEQ ID NO: 1626077 - DNA, 15 bp, Homo sapiens
aataggatacttaaa

SEQ ID NO: 1626078 - DNA, 15 bp, Homo sapiens
caataggatacttaa

SEQ ID NO: 1626079 - DNA, 15 bp, Homo sapiens
ccaataggatactta

SEQ ID NO: 1626080 - DNA, 15 bp, Homo sapiens
cccaataggatactt

SEQ ID NO: 1626081 - DNA, 15 bp, Homo sapiens
acccaataggatact

SEQ ID NO: 1626082 - DNA, 15 bp, Homo sapiens
cacccaataggatac

SEQ ID NO: 1626083 - DNA, 15 bp, Homo sapiens
tcacccaataggata

SEQ ID NO: 1626084 - DNA, 15 bp, Homo sapiens
ctcacccaataggat

SEQ ID NO: 1626085 - DNA, 15 bp, Homo sapiens
gctcacccaatagga

SEQ ID NO: 1626086 - DNA, 15 bp, Homo sapiens
tgctcacccaatagg

SEQ ID NO: 1626087 - DNA, 15 bp, Homo sapiens
atgctcacccaatag

SEQ ID NO: 1626088 - DNA, 15 bp, Homo sapiens
aatgctcacccaata

SEQ ID NO: 1626089 - DNA, 15 bp, Homo sapiens
aaatgctcacccaat

SEQ ID NO: 1626090 - DNA, 15 bp, Homo sapiens
taaatgctcacccaa

SEQ ID NO: 1626091 - DNA, 15 bp, Homo sapiens
ataaatgctcaccca

SEQ ID NO: 1626092 - DNA, 15 bp, Homo sapiens
aataaatgctcaccc

SEQ ID NO: 1626093 - DNA, 15 bp, Homo sapiens
taataaatgctcacc

SEQ ID NO: 1626094 - DNA, 15 bp, Homo sapiens
ttaataaatgctcac

SEQ ID NO: 1626095 - DNA, 15 bp, Homo sapiens
attaataaatgctca

SEQ ID NO: 1626096 - DNA, 15 bp, Homo sapiens
tattaataaatgctc

SEQ ID NO: 1626097 - DNA, 15 bp, Homo sapiens
ttattaataaatgct

SEQ ID NO: 1626098 - DNA, 15 bp, Homo sapiens
attattaataaatgc

SEQ ID NO: 1626099 - DNA, 15 bp, Homo sapiens
tattattaataaatg

SEQ ID NO: 1626100 - DNA, 15 bp, Homo sapiens
ttattattaataaat

SEQ ID NO: 1626101 - DNA, 15 bp, Homo sapiens
gttattattaataaa

SEQ ID NO: 1626102 - DNA, 15 bp, Homo sapiens
tgttattattaataa

SEQ ID NO: 1626103 - DNA, 15 bp, Homo sapiens
ttgttattattaata

SEQ ID NO: 1626104 - DNA, 15 bp, Homo sapiens
attgttattattaat

SEQ ID NO: 1626105 - DNA, 15 bp, Homo sapiens
tattgttattattaa

SEQ ID NO: 1626106 - DNA, 15 bp, Homo sapiens
ttattgttattatta

SEQ ID NO: 1626107 - DNA, 15 bp, Homo sapiens
attattgttattatt

SEQ ID NO: 1626108 - DNA, 15 bp, Homo sapiens
tattattgttattat

SEQ ID NO: 1626109 - DNA, 15 bp, Homo sapiens
ttattattgttatta

SEQ ID NO: 1626110 - DNA, 15 bp, Homo sapiens
cattattattgttat

SEQ ID NO: 1626111 - DNA, 15 bp, Homo sapiens
tcattattattgtta

SEQ ID NO: 1626112 - DNA, 15 bp, Homo sapiens
ttcattattattgtt

SEQ ID NO: 1626113 - DNA, 15 bp, Homo sapiens
tttcattattattgt

SEQ ID NO: 1626114 - DNA, 15 bp, Homo sapiens
ttttcattattattg

SEQ ID NO: 1626115 - DNA, 15 bp, Homo sapiens
attttcattattatt

SEQ ID NO: 1626116 - DNA, 15 bp, Homo sapiens
tattttcattattat

SEQ ID NO: 1626117 - DNA, 15 bp, Homo sapiens
ttattttcattatta

SEQ ID NO: 1626118 - DNA, 15 bp, Homo sapiens
tttattttcattatt

SEQ ID NO: 1626119 - DNA, 15 bp, Homo sapiens
ctttattttcattat

SEQ ID NO: 1626120 - DNA, 15 bp, Homo sapiens
tctttattttcatta

SEQ ID NO: 1626121 - DNA, 15 bp, Homo sapiens
gtctttattttcatt

SEQ ID NO: 1626122 - DNA, 15 bp, Homo sapiens
agtctttattttcat

SEQ ID NO: 1626123 - DNA, 15 bp, Homo sapiens
tagtctttattttca

SEQ ID NO: 1626124 - DNA, 15 bp, Homo sapiens
atagtctttattttc

SEQ ID NO: 1626125 - DNA, 15 bp, Homo sapiens
gatagtctttatttt

SEQ ID NO: 1626126 - DNA, 15 bp, Homo sapiens
tgatagtctttattt

SEQ ID NO: 1626127 - DNA, 15 bp, Homo sapiens
atgatagtctttatt

SEQ ID NO: 1626128 - DNA, 15 bp, Homo sapiens
aatgatagtctttat

SEQ ID NO: 1626129 - DNA, 15 bp, Homo sapiens
aaatgatagtcttta

SEQ ID NO: 1626130 - DNA, 15 bp, Homo sapiens
aaaatgatagtcttt

SEQ ID NO: 1626131 - DNA, 15 bp, Homo sapiens
caaaatgatagtctt

SEQ ID NO: 1626132 - DNA, 15 bp, Homo sapiens
tcaaaatgatagtct

SEQ ID NO: 1626133 - DNA, 15 bp, Homo sapiens
ctcaaaatgatagtc

SEQ ID NO: 1626134 - DNA, 15 bp, Homo sapiens
gctcaaaatgatagt

SEQ ID NO: 1626135 - DNA, 15 bp, Homo sapiens
agctcaaaatgatag

SEQ ID NO: 1626136 - DNA, 15 bp, Homo sapiens
gagctcaaaatgata

SEQ ID NO: 1626137 - DNA, 15 bp, Homo sapiens
agagctcaaaatgat

SEQ ID NO: 1626138 - DNA, 15 bp, Homo sapiens
aagagctcaaaatga

SEQ ID NO: 1626139 - DNA, 15 bp, Homo sapiens
taagagctcaaaatg

SEQ ID NO: 1626140 - DNA, 15 bp, Homo sapiens
gtaagagctcaaaat

SEQ ID NO: 1626141 - DNA, 15 bp, Homo sapiens
agtaagagctcaaaa

SEQ ID NO: 1626142 - DNA, 15 bp, Homo sapiens
cagtaagagctcaaa

SEQ ID NO: 1626143 - DNA, 15 bp, Homo sapiens
acagtaagagctcaa

SEQ ID NO: 1626144 - DNA, 15 bp, Homo sapiens
cacagtaagagctca

SEQ ID NO: 1626145 - DNA, 15 bp, Homo sapiens
acacagtaagagctc

SEQ ID NO: 1626146 - DNA, 15 bp, Homo sapiens
gacacagtaagagct

SEQ ID NO: 1626147 - DNA, 15 bp, Homo sapiens
ggacacagtaagagc

SEQ ID NO: 1626148 - DNA, 15 bp, Homo sapiens
cggacacagtaagag

SEQ ID NO: 1626149 - DNA, 15 bp, Homo sapiens
ccggacacagtaaga

SEQ ID NO: 1626150 - DNA, 15 bp, Homo sapiens
accggacacagtaag

SEQ ID NO: 1626151 - DNA, 15 bp, Homo sapiens
caccggacacagtaa

SEQ ID NO: 1626152 - DNA, 15 bp, Homo sapiens
gcaccggacacagta

SEQ ID NO: 1626153 - DNA, 15 bp, Homo sapiens
tgcaccggacacagt

SEQ ID NO: 1626154 - DNA, 15 bp, Homo sapiens
gtgcaccggacacag

SEQ ID NO: 1626155 - DNA, 15 bp, Homo sapiens
agtgcaccggacaca

SEQ ID NO: 1626156 - DNA, 15 bp, Homo sapiens
cagtgcaccggacac

SEQ ID NO: 1626157 - DNA, 15 bp, Homo sapiens
acagtgcaccggaca

SEQ ID NO: 1626158 - DNA, 15 bp, Homo sapiens
tacagtgcaccggac

SEQ ID NO: 1626159 - DNA, 15 bp, Homo sapiens
gtacagtgcaccgga

SEQ ID NO: 1626160 - DNA, 15 bp, Homo sapiens
ggtacagtgcaccgg

SEQ ID NO: 1626161 - DNA, 15 bp, Homo sapiens
aggtacagtgcaccg

SEQ ID NO: 1626162 - DNA, 15 bp, Homo sapiens
caggtacagtgcacc

SEQ ID NO: 1626163 - DNA, 15 bp, Homo sapiens
ccaggtacagtgcac

SEQ ID NO: 1626164 - DNA, 15 bp, Homo sapiens
gccaggtacagtgca

SEQ ID NO: 1626165 - DNA, 15 bp, Homo sapiens
ggccaggtacagtgc

SEQ ID NO: 1626166 - DNA, 15 bp, Homo sapiens
cggccaggtacagtg

SEQ ID NO: 1626167 - DNA, 15 bp, Homo sapiens
acggccaggtacagt

SEQ ID NO: 1626168 - DNA, 15 bp, Homo sapiens
aacggccaggtacag

SEQ ID NO: 1626169 - DNA, 15 bp, Homo sapiens
aaacggccaggtaca

SEQ ID NO: 1626170 - DNA, 15 bp, Homo sapiens
aaaacggccaggtac

SEQ ID NO: 1626171 - DNA, 15 bp, Homo sapiens
aaaaacggccaggta

SEQ ID NO: 1626172 - DNA, 15 bp, Homo sapiens
caaaaacggccaggt

SEQ ID NO: 1626173 - DNA, 15 bp, Homo sapiens
gcaaaaacggccagg

SEQ ID NO: 1626174 - DNA, 15 bp, Homo sapiens
tgcaaaaacggccag

SEQ ID NO: 1626175 - DNA, 15 bp, Homo sapiens
gtgcaaaaacggcca

SEQ ID NO: 1626176 - DNA, 15 bp, Homo sapiens
tgtgcaaaaacggcc

SEQ ID NO: 1626177 - DNA, 15 bp, Homo sapiens
atgtgcaaaaacggc

SEQ ID NO: 1626178 - DNA, 15 bp, Homo sapiens
catgtgcaaaaacgg

SEQ ID NO: 1626179 - DNA, 15 bp, Homo sapiens
tcatgtgcaaaaacg

SEQ ID NO: 1626180 - DNA, 15 bp, Homo sapiens
ctcatgtgcaaaaac

SEQ ID NO: 1626181 - DNA, 15 bp, Homo sapiens
actcatgtgcaaaaa

SEQ ID NO: 1626182 - DNA, 15 bp, Homo sapiens
gactcatgtgcaaaa

SEQ ID NO: 1626183 - DNA, 15 bp, Homo sapiens
ggactcatgtgcaaa

SEQ ID NO: 1626184 - DNA, 15 bp, Homo sapiens
gggactcatgtgcaa

SEQ ID NO: 1626185 - DNA, 15 bp, Homo sapiens
agggactcatgtgca

SEQ ID NO: 1626186 - DNA, 15 bp, Homo sapiens
aagggactcatgtgc

SEQ ID NO: 1626187 - DNA, 15 bp, Homo sapiens
aaagggactcatgtg

SEQ ID NO: 1626188 - DNA, 15 bp, Homo sapiens
taaagggactcatgt

SEQ ID NO: 1626189 - DNA, 15 bp, Homo sapiens
ttaaagggactcatg

SEQ ID NO: 1626190 - DNA, 15 bp, Homo sapiens
attaaagggactcat

SEQ ID NO: 1626191 - DNA, 15 bp, Homo sapiens
cattaaagggactca

SEQ ID NO: 1626192 - DNA, 15 bp, Homo sapiens
gcattaaagggactc

SEQ ID NO: 1626193 - DNA, 15 bp, Homo sapiens
agcattaaagggact

SEQ ID NO: 1626194 - DNA, 15 bp, Homo sapiens
gagcattaaagggac

SEQ ID NO: 1626195 - DNA, 15 bp, Homo sapiens
ggagcattaaaggga

SEQ ID NO: 1626196 - DNA, 15 bp, Homo sapiens
gggagcattaaaggg

SEQ ID NO: 1626197 - DNA, 15 bp, Homo sapiens
ggggagcattaaagg

SEQ ID NO: 1626198 - DNA, 15 bp, Homo sapiens
aggggagcattaaag

SEQ ID NO: 1626199 - DNA, 15 bp, Homo sapiens
aaggggagcattaaa

SEQ ID NO: 1626200 - DNA, 15 bp, Homo sapiens
aaaggggagcattaa

SEQ ID NO: 1626201 - DNA, 15 bp, Homo sapiens
caaaggggagcatta

SEQ ID NO: 1626202 - DNA, 15 bp, Homo sapiens
acaaaggggagcatt

SEQ ID NO: 1626203 - DNA, 15 bp, Homo sapiens
tacaaaggggagcat

SEQ ID NO: 1626204 - DNA, 15 bp, Homo sapiens
ctacaaaggggagca

SEQ ID NO: 1626205 - DNA, 15 bp, Homo sapiens
actacaaaggggagc

SEQ ID NO: 1626206 - DNA, 15 bp, Homo sapiens
cactacaaaggggag

SEQ ID NO: 1626207 - DNA, 15 bp, Homo sapiens
ccactacaaagggga

SEQ ID NO: 1626208 - DNA, 15 bp, Homo sapiens
gccactacaaagggg

SEQ ID NO: 1626209 - DNA, 15 bp, Homo sapiens
agccactacaaaggg

SEQ ID NO: 1626210 - DNA, 15 bp, Homo sapiens
gagccactacaaagg

SEQ ID NO: 1626211 - DNA, 15 bp, Homo sapiens
agagccactacaaag

SEQ ID NO: 1626212 - DNA, 15 bp, Homo sapiens
cagagccactacaaa

SEQ ID NO: 1626213 - DNA, 15 bp, Homo sapiens
ccagagccactacaa

SEQ ID NO: 1626214 - DNA, 15 bp, Homo sapiens
accagagccactaca

SEQ ID NO: 1626215 - DNA, 15 bp, Homo sapiens
aaccagagccactac

SEQ ID NO: 1626216 - DNA, 15 bp, Homo sapiens
taaccagagccacta

SEQ ID NO: 1626217 - DNA, 15 bp, Homo sapiens
ataaccagagccact

SEQ ID NO: 1626218 - DNA, 15 bp, Homo sapiens
aataaccagagccac

SEQ ID NO: 1626219 - DNA, 15 bp, Homo sapiens
gaataaccagagcca

SEQ ID NO: 1626220 - DNA, 15 bp, Homo sapiens
agaataaccagagcc

SEQ ID NO: 1626221 - DNA, 15 bp, Homo sapiens
aagaataaccagagc

SEQ ID NO: 1626222 - DNA, 15 bp, Homo sapiens
caagaataaccagag

SEQ ID NO: 1626223 - DNA, 15 bp, Homo sapiens
ccaagaataaccaga

SEQ ID NO: 1626224 - DNA, 15 bp, Homo sapiens
gccaagaataaccag

SEQ ID NO: 1626225 - DNA, 15 bp, Homo sapiens
agccaagaataacca

SEQ ID NO: 1626226 - DNA, 15 bp, Homo sapiens
gagccaagaataacc

SEQ ID NO: 1626227 - DNA, 15 bp, Homo sapiens
ggagccaagaataac

SEQ ID NO: 1626228 - DNA, 15 bp, Homo sapiens
tggagccaagaataa

SEQ ID NO: 1626229 - DNA, 15 bp, Homo sapiens
gtggagccaagaata

SEQ ID NO: 1626230 - DNA, 15 bp, Homo sapiens
tgtggagccaagaat

SEQ ID NO: 1626231 - DNA, 15 bp, Homo sapiens
atgtggagccaagaa

SEQ ID NO: 1626232 - DNA, 15 bp, Homo sapiens
catgtggagccaaga

SEQ ID NO: 1626233 - DNA, 15 bp, Homo sapiens
ccatgtggagccaag

SEQ ID NO: 1626234 - DNA, 15 bp, Homo sapiens
cccatgtggagccaa

SEQ ID NO: 1626235 - DNA, 15 bp, Homo sapiens
gcccatgtggagcca

SEQ ID NO: 1626236 - DNA, 15 bp, Homo sapiens
tgcccatgtggagcc

SEQ ID NO: 1626237 - DNA, 15 bp, Homo sapiens
gtgcccatgtggagc

SEQ ID NO: 1626238 - DNA, 15 bp, Homo sapiens
cgtgcccatgtggag

SEQ ID NO: 1626239 - DNA, 15 bp, Homo sapiens
acgtgcccatgtgga

SEQ ID NO: 1626240 - DNA, 15 bp, Homo sapiens
cacgtgcccatgtgg

SEQ ID NO: 1626241 - DNA, 15 bp, Homo sapiens
tcacgtgcccatgtg

SEQ ID NO: 1626242 - DNA, 15 bp, Homo sapiens
gtcacgtgcccatgt

SEQ ID NO: 1626243 - DNA, 15 bp, Homo sapiens
tgtcacgtgcccatg

SEQ ID NO: 1626244 - DNA, 15 bp, Homo sapiens
ctgtcacgtgcccat

SEQ ID NO: 1626245 - DNA, 15 bp, Homo sapiens
tctgtcacgtgccca

SEQ ID NO: 1626246 - DNA, 15 bp, Homo sapiens
gtctgtcacgtgccc

SEQ ID NO: 1626247 - DNA, 15 bp, Homo sapiens
tgtctgtcacgtgcc

SEQ ID NO: 1626248 - DNA, 15 bp, Homo sapiens
gtgtctgtcacgtgc

SEQ ID NO: 1626249 - DNA, 15 bp, Homo sapiens
tgtgtctgtcacgtg

SEQ ID NO: 1626250 - DNA, 15 bp, Homo sapiens
gtgtgtctgtcacgt

SEQ ID NO: 1626251 - DNA, 15 bp, Homo sapiens
ggtgtgtctgtcacg

SEQ ID NO: 1626252 - DNA, 15 bp, Homo sapiens
cgggtgtgtctgtca

SEQ ID NO: 1626253 - DNA, 15 bp, Homo sapiens
ccgggtgtgtctgtc

SEQ ID NO: 1626254 - DNA, 15 bp, Homo sapiens
cccgggtgtgtctgt

SEQ ID NO: 1626255 - DNA, 15 bp, Homo sapiens
tcccgggtgtgtctg

SEQ ID NO: 1626256 - DNA, 15 bp, Homo sapiens
atcccgggtgtgtct

SEQ ID NO: 1626257 - DNA, 15 bp, Homo sapiens
catcccgggtgtgtc

SEQ ID NO: 1626258 - DNA, 15 bp, Homo sapiens
gcatcccgggtgtgt

SEQ ID NO: 1626259 - DNA, 15 bp, Homo sapiens
agcatcccgggtgtg

SEQ ID NO: 1626260 - DNA, 15 bp, Homo sapiens
cagcatcccgggtgt

SEQ ID NO: 1626261 - DNA, 15 bp, Homo sapiens
ccagcatcccgggtg

SEQ ID NO: 1626262 - DNA, 15 bp, Homo sapiens
cccagcatcccgggt

SEQ ID NO: 1626263 - DNA, 15 bp, Homo sapiens
gcccagcatcccggg

SEQ ID NO: 1626264 - DNA, 15 bp, Homo sapiens
agcccagcatcccgg

SEQ ID NO: 1626265 - DNA, 15 bp, Homo sapiens
cagcccagcatcccg

SEQ ID NO: 1626266 - DNA, 15 bp, Homo sapiens
ccagcccagcatccc

SEQ ID NO: 1626267 - DNA, 15 bp, Homo sapiens
cccagcccagcatcc

SEQ ID NO: 1626268 - DNA, 15 bp, Homo sapiens
ccccagcccagcatc

SEQ ID NO: 1626269 - DNA, 15 bp, Homo sapiens
gccccagcccagcat

SEQ ID NO: 1626270 - DNA, 15 bp, Homo sapiens
ggccccagcccagca

SEQ ID NO: 1626271 - DNA, 15 bp, Homo sapiens
aggccccagcccagc

SEQ ID NO: 1626272 - DNA, 15 bp, Homo sapiens
aaggccccagcccag

SEQ ID NO: 1626273 - DNA, 15 bp, Homo sapiens
caaggccccagccca

SEQ ID NO: 1626274 - DNA, 15 bp, Homo sapiens
acaaggccccagccc

SEQ ID NO: 1626275 - DNA, 15 bp, Homo sapiens
cacaaggccccagcc

SEQ ID NO: 1626276 - DNA, 15 bp, Homo sapiens
gcacaaggccccagc

SEQ ID NO: 1626277 - DNA, 15 bp, Homo sapiens
agcacaaggccccag

SEQ ID NO: 1626278 - DNA, 15 bp, Homo sapiens
cagcacaaggcccca

SEQ ID NO: 1626279 - DNA, 15 bp, Homo sapiens
ccagcacaaggcccc

SEQ ID NO: 1626280 - DNA, 15 bp, Homo sapiens
cccagcacaaggccc

SEQ ID NO: 1626281 - DNA, 15 bp, Homo sapiens
acccagcacaaggcc

SEQ ID NO: 1626282 - DNA, 15 bp, Homo sapiens
gacccagcacaaggc

SEQ ID NO: 1626283 - DNA, 15 bp, Homo sapiens
ggacccagcacaagg

SEQ ID NO: 1626284 - DNA, 15 bp, Homo sapiens
aggacccagcacaag

SEQ ID NO: 1626285 - DNA, 15 bp, Homo sapiens
caggacccagcacaa

SEQ ID NO: 1626286 - DNA, 15 bp, Homo sapiens
gcaggacccagcaca

SEQ ID NO: 1626287 - DNA, 15 bp, Homo sapiens
agcaggacccagcac

SEQ ID NO: 1626288 - DNA, 15 bp, Homo sapiens
gagcaggacccagca

SEQ ID NO: 1626289 - DNA, 15 bp, Homo sapiens
agagcaggacccagc

SEQ ID NO: 1626290 - DNA, 15 bp, Homo sapiens
cagagcaggacccag

SEQ ID NO: 1626291 - DNA, 15 bp, Homo sapiens
ccagagcaggaccca

SEQ ID NO: 1626292 - DNA, 15 bp, Homo sapiens
tccagagcaggaccc

SEQ ID NO: 1626293 - DNA, 15 bp, Homo sapiens
ctccagagcaggacc

SEQ ID NO: 1626294 - DNA, 15 bp, Homo sapiens
cctccagagcaggac

SEQ ID NO: 1626295 - DNA, 15 bp, Homo sapiens
acctccagagcagga

SEQ ID NO: 1626296 - DNA, 15 bp, Homo sapiens
gacctccagagcagg

SEQ ID NO: 1626297 - DNA, 15 bp, Homo sapiens
agacctccagagcag

SEQ ID NO: 1626298 - DNA, 15 bp, Homo sapiens
cagacctccagagca

SEQ ID NO: 1626299 - DNA, 15 bp, Homo sapiens
acagacctccagagc

SEQ ID NO: 1626300 - DNA, 15 bp, Homo sapiens
cacagacctccagag

SEQ ID NO: 1626301 - DNA, 15 bp, Homo sapiens
tcacagacctccaga

SEQ ID NO: 1626302 - DNA, 15 bp, Homo sapiens
atcacagacctccag

SEQ ID NO: 1626303 - DNA, 15 bp, Homo sapiens
catcacagacctcca

SEQ ID NO: 1626304 - DNA, 15 bp, Homo sapiens
ccatcacagacctcc

SEQ ID NO: 1626305 - DNA, 15 bp, Homo sapiens
cccatcacagacctc

SEQ ID NO: 1626306 - DNA, 15 bp, Homo sapiens
acccatcacagacct

SEQ ID NO: 1626307 - DNA, 15 bp, Homo sapiens
cacccatcacagacc

SEQ ID NO: 1626308 - DNA, 15 bp, Homo sapiens
gcacccatcacagac

SEQ ID NO: 1626309 - DNA, 15 bp, Homo sapiens
tgcacccatcacaga

SEQ ID NO: 1626310 - DNA, 15 bp, Homo sapiens
ctgcacccatcacag

SEQ ID NO: 1626311 - DNA, 15 bp, Homo sapiens
actgcacccatcaca

SEQ ID NO: 1626312 - DNA, 15 bp, Homo sapiens
gactgcacccatcac

SEQ ID NO: 1626313 - DNA, 15 bp, Homo sapiens
tgactgcacccatca

SEQ ID NO: 1626314 - DNA, 15 bp, Homo sapiens
gtgactgcacccatc

SEQ ID NO: 1626315 - DNA, 15 bp, Homo sapiens
agtgactgcacccat

SEQ ID NO: 1626316 - DNA, 15 bp, Homo sapiens
gagtgactgcaccca

SEQ ID NO: 1626317 - DNA, 15 bp, Homo sapiens
tgagtgactgcaccc

SEQ ID NO: 1626318 - DNA, 15 bp, Homo sapiens
ctgagtgactgcacc

SEQ ID NO: 1626319 - DNA, 15 bp, Homo sapiens
gctgagtgactgcac

SEQ ID NO: 1626320 - DNA, 15 bp, Homo sapiens
ggctgagtgactgca

SEQ ID NO: 1626321 - DNA, 15 bp, Homo sapiens
cggctgagtgactgc

SEQ ID NO: 1626322 - DNA, 15 bp, Homo sapiens
ccggctgagtgactg

SEQ ID NO: 1626323 - DNA, 15 bp, Homo sapiens
cccggctgagtgact

SEQ ID NO: 1626324 - DNA, 15 bp, Homo sapiens
gcccggctgagtgac

SEQ ID NO: 1626325 - DNA, 15 bp, Homo sapiens
tgcccggctgagtga

SEQ ID NO: 1626326 - DNA, 15 bp, Homo sapiens
ttgcccggctgagtg

SEQ ID NO: 1626327 - DNA, 15 bp, Homo sapiens
gttgcccggctgagt

SEQ ID NO: 1626328 - DNA, 15 bp, Homo sapiens
ggttgcccggctgag

SEQ ID NO: 1626329 - DNA, 15 bp, Homo sapiens
aggttgcccggctga

SEQ ID NO: 1626330 - DNA, 15 bp, Homo sapiens
aaggttgcccggctg

SEQ ID NO: 1626331 - DNA, 15 bp, Homo sapiens
caaggttgcccggct

SEQ ID NO: 1626332 - DNA, 15 bp, Homo sapiens
ccaaggttgcccggc

SEQ ID NO: 1626333 - DNA, 15 bp, Homo sapiens
tccaaggttgcccgg

SEQ ID NO: 1626334 - DNA, 15 bp, Homo sapiens
ctccaaggttgcccg

SEQ ID NO: 1626335 - DNA, 15 bp, Homo sapiens
gctccaaggttgccc

SEQ ID NO: 1626336 - DNA, 15 bp, Homo sapiens
agctccaaggttgcc

SEQ ID NO: 1626337 - DNA, 15 bp, Homo sapiens
gagctccaaggttgc

SEQ ID NO: 1626338 - DNA, 15 bp, Homo sapiens
ggagctccaaggttg

SEQ ID NO: 1626339 - DNA, 15 bp, Homo sapiens
aggagctccaaggtt

SEQ ID NO: 1626340 - DNA, 15 bp, Homo sapiens
gaggagctccaaggt

SEQ ID NO: 1626341 - DNA, 15 bp, Homo sapiens
tgaggagctccaagg

SEQ ID NO: 1626342 - DNA, 15 bp, Homo sapiens
ctgaggagctccaag

SEQ ID NO: 1626343 - DNA, 15 bp, Homo sapiens
actgaggagctccaa

SEQ ID NO: 1626344 - DNA, 15 bp, Homo sapiens
cactgaggagctcca

SEQ ID NO: 1626345 - DNA, 15 bp, Homo sapiens
acactgaggagctcc

SEQ ID NO: 1626346 - DNA, 15 bp, Homo sapiens
cacactgaggagctc

SEQ ID NO: 1626347 - DNA, 15 bp, Homo sapiens
gcacactgaggagct

SEQ ID NO: 1626348 - DNA, 15 bp, Homo sapiens
agcacactgaggagc

SEQ ID NO: 1626349 - DNA, 15 bp, Homo sapiens
gagcacactgaggag

SEQ ID NO: 1626350 - DNA, 15 bp, Homo sapiens
ggagcacactgagga

SEQ ID NO: 1626351 - DNA, 15 bp, Homo sapiens
tggagcacactgagg

SEQ ID NO: 1626352 - DNA, 15 bp, Homo sapiens
gtggagcacactgag

SEQ ID NO: 1626353 - DNA, 15 bp, Homo sapiens
ggtggagcacactga

SEQ ID NO: 1626354 - DNA, 15 bp, Homo sapiens
gggtggagcacactg

SEQ ID NO: 1626355 - DNA, 15 bp, Homo sapiens
agggtggagcacact

SEQ ID NO: 1626356 - DNA, 15 bp, Homo sapiens
cagggtggagcacac

SEQ ID NO: 1626357 - DNA, 15 bp, Homo sapiens
gcagggtggagcaca

SEQ ID NO: 1626358 - DNA, 15 bp, Homo sapiens
tgcagggtggagcac

SEQ ID NO: 1626359 - DNA, 15 bp, Homo sapiens
ttgcagggtggagca

SEQ ID NO: 1626360 - DNA, 15 bp, Homo sapiens
tttgcagggtggagc

SEQ ID NO: 1626361 - DNA, 15 bp, Homo sapiens
ctttgcagggtggag

SEQ ID NO: 1626362 - DNA, 15 bp, Homo sapiens
gctttgcagggtgga

SEQ ID NO: 1626363 - DNA, 15 bp, Homo sapiens
tgctttgcagggtgg

SEQ ID NO: 1626364 - DNA, 15 bp, Homo sapiens
gtgctttgcagggtg

SEQ ID NO: 1626365 - DNA, 15 bp, Homo sapiens
agtgctttgcagggt

SEQ ID NO: 1626366 - DNA, 15 bp, Homo sapiens
aagtgctttgcaggg

SEQ ID NO: 1626367 - DNA, 15 bp, Homo sapiens
gaagtgctttgcagg

SEQ ID NO: 1626368 - DNA, 15 bp, Homo sapiens
agaagtgctttgcag

SEQ ID NO: 1626369 - DNA, 15 bp, Homo sapiens
tagaagtgctttgca

SEQ ID NO: 1626370 - DNA, 15 bp, Homo sapiens
ctagaagtgctttgc

SEQ ID NO: 1626371 - DNA, 15 bp, Homo sapiens
tctagaagtgctttg

SEQ ID NO: 1626372 - DNA, 15 bp, Homo sapiens
atctagaagtgcttt

SEQ ID NO: 1626373 - DNA, 15 bp, Homo sapiens
tatctagaagtgctt

SEQ ID NO: 1626374 - DNA, 15 bp, Homo sapiens
atatctagaagtgct

SEQ ID NO: 1626375 - DNA, 15 bp, Homo sapiens
aatatctagaagtgc

SEQ ID NO: 1626376 - DNA, 15 bp, Homo sapiens
aaatatctagaagtg

SEQ ID NO: 1626377 - DNA, 15 bp, Homo sapiens
gaaatatctagaagt

SEQ ID NO: 1626378 - DNA, 15 bp, Homo sapiens
ggaaatatctagaag

SEQ ID NO: 1626379 - DNA, 15 bp, Homo sapiens
aggaaatatctagaa

SEQ ID NO: 1626380 - DNA, 15 bp, Homo sapiens
aaggaaatatctaga

SEQ ID NO: 1626381 - DNA, 15 bp, Homo sapiens
gaaggaaatatctag

SEQ ID NO: 1626382 - DNA, 15 bp, Homo sapiens
tgaaggaaatatcta

SEQ ID NO: 1626383 - DNA, 15 bp, Homo sapiens
ctgaaggaaatatct

SEQ ID NO: 1626384 - DNA, 15 bp, Homo sapiens
actgaaggaaatatc

SEQ ID NO: 1626385 - DNA, 15 bp, Homo sapiens
gactgaaggaaatat

SEQ ID NO: 1626386 - DNA, 15 bp, Homo sapiens
tgactgaaggaaata

SEQ ID NO: 1626387 - DNA, 15 bp, Homo sapiens
gtgactgaaggaaat

SEQ ID NO: 1626388 - DNA, 15 bp, Homo sapiens
agtgactgaaggaaa

SEQ ID NO: 1626389 - DNA, 15 bp, Homo sapiens
gagtgactgaaggaa

SEQ ID NO: 1626390 - DNA, 15 bp, Homo sapiens
tgagtgactgaagga

SEQ ID NO: 1626391 - DNA, 15 bp, Homo sapiens
atgagtgactgaagg

SEQ ID NO: 1626392 - DNA, 15 bp, Homo sapiens
tatgagtgactgaag

SEQ ID NO: 1626393 - DNA, 15 bp, Homo sapiens
gtatgagtgactgaa

SEQ ID NO: 1626394 - DNA, 15 bp, Homo sapiens
ggtatgagtgactga

SEQ ID NO: 1626395 - DNA, 15 bp, Homo sapiens
tggtatgagtgactg

SEQ ID NO: 1626396 - DNA, 15 bp, Homo sapiens
gtggtatgagtgact

SEQ ID NO: 1626397 - DNA, 15 bp, Homo sapiens
agtggtatgagtgac

SEQ ID NO: 1626398 - DNA, 15 bp, Homo sapiens
aagtggtatgagtga

SEQ ID NO: 1626399 - DNA, 15 bp, Homo sapiens
aaagtggtatgagtg

SEQ ID NO: 1626400 - DNA, 15 bp, Homo sapiens
caaagtggtatgagt

SEQ ID NO: 1626401 - DNA, 15 bp, Homo sapiens
acaaagtggtatgag

SEQ ID NO: 1626402 - DNA, 15 bp, Homo sapiens
cacaaagtggtatga

SEQ ID NO: 1626403 - DNA, 15 bp, Homo sapiens
gcacaaagtggtatg

SEQ ID NO: 1626404 - DNA, 15 bp, Homo sapiens
agcacaaagtggtat

SEQ ID NO: 1626405 - DNA, 15 bp, Homo sapiens
aagcacaaagtggta

SEQ ID NO: 1626406 - DNA, 15 bp, Homo sapiens
aaagcacaaagtggt

SEQ ID NO: 1626407 - DNA, 15 bp, Homo sapiens
caaagcacaaagtgg

SEQ ID NO: 1626408 - DNA, 15 bp, Homo sapiens
gcaaagcacaaagtg

SEQ ID NO: 1626409 - DNA, 15 bp, Homo sapiens
tgcaaagcacaaagt

SEQ ID NO: 1626410 - DNA, 15 bp, Homo sapiens
atgcaaagcacaaag

SEQ ID NO: 1626411 - DNA, 15 bp, Homo sapiens
catgcaaagcacaaa

SEQ ID NO: 1626412 - DNA, 15 bp, Homo sapiens
acatgcaaagcacaa

SEQ ID NO: 1626413 - DNA, 15 bp, Homo sapiens
gacatgcaaagcaca

SEQ ID NO: 1626414 - DNA, 15 bp, Homo sapiens
agacatgcaaagcac

SEQ ID NO: 1626415 - DNA, 15 bp, Homo sapiens
aagacatgcaaagca

SEQ ID NO: 1626416 - DNA, 15 bp, Homo sapiens
aaagacatgcaaagc

SEQ ID NO: 1626417 - DNA, 15 bp, Homo sapiens
caaagacatgcaaag

SEQ ID NO: 1626418 - DNA, 15 bp, Homo sapiens
ccaaagacatgcaaa

SEQ ID NO: 1626419 - DNA, 15 bp, Homo sapiens
cccaaagacatgcaa

SEQ ID NO: 1626420 - DNA, 15 bp, Homo sapiens
tcccaaagacatgca

SEQ ID NO: 1626421 - DNA, 15 bp, Homo sapiens
atcccaaagacatgc

SEQ ID NO: 1626422 - DNA, 15 bp, Homo sapiens
aatcccaaagacatg

SEQ ID NO: 1626423 - DNA, 15 bp, Homo sapiens
taatcccaaagacat

SEQ ID NO: 1626424 - DNA, 15 bp, Homo sapiens
ctaatcccaaagaca

SEQ ID NO: 1626425 - DNA, 15 bp, Homo sapiens
tctaatcccaaagac

SEQ ID NO: 1626426 - DNA, 15 bp, Homo sapiens
ttctaatcccaaaga

SEQ ID NO: 1626427 - DNA, 15 bp, Homo sapiens
tttctaatcccaaag

SEQ ID NO: 1626428 - DNA, 15 bp, Homo sapiens
gtttctaatcccaaa

SEQ ID NO: 1626429 - DNA, 15 bp, Homo sapiens
ggtttctaatcccaa

SEQ ID NO: 1626430 - DNA, 15 bp, Homo sapiens
tggtttctaatccca

SEQ ID NO: 1626431 - DNA, 15 bp, Homo sapiens
ctggtttctaatccc

SEQ ID NO: 1626432 - DNA, 15 bp, Homo sapiens
gctggtttctaatcc

SEQ ID NO: 1626433 - DNA, 15 bp, Homo sapiens
agctggtttctaatc

SEQ ID NO: 1626434 - DNA, 15 bp, Homo sapiens
aagctggtttctaat

SEQ ID NO: 1626435 - DNA, 15 bp, Homo sapiens
gaagctggtttctaa

SEQ ID NO: 1626436 - DNA, 15 bp, Homo sapiens
agaagctggtttcta

SEQ ID NO: 1626437 - DNA, 15 bp, Homo sapiens
cagaagctggtttct

SEQ ID NO: 1626438 - DNA, 15 bp, Homo sapiens
ccagaagctggtttc

SEQ ID NO: 1626439 - DNA, 15 bp, Homo sapiens
cccagaagctggttt

SEQ ID NO: 1626440 - DNA, 15 bp, Homo sapiens
tcccagaagctggtt

SEQ ID NO: 1626441 - DNA, 15 bp, Homo sapiens
ttcccagaagctggt

SEQ ID NO: 1626442 - DNA, 15 bp, Homo sapiens
tttcccagaagctgg

SEQ ID NO: 1626443 - DNA, 15 bp, Homo sapiens
atttcccagaagctg

SEQ ID NO: 1626444 - DNA, 15 bp, Homo sapiens
catttcccagaagct

SEQ ID NO: 1626445 - DNA, 15 bp, Homo sapiens
gcatttcccagaagc

SEQ ID NO: 1626446 - DNA, 15 bp, Homo sapiens
agcatttcccagaag

SEQ ID NO: 1626447 - DNA, 15 bp, Homo sapiens
gagcatttcccagaa

SEQ ID NO: 1626448 - DNA, 15 bp, Homo sapiens
agagcatttcccaga

SEQ ID NO: 1626449 - DNA, 15 bp, Homo sapiens
gagagcatttcccag

SEQ ID NO: 1626450 - DNA, 15 bp, Homo sapiens
cgagagcatttccca

SEQ ID NO: 1626451 - DNA, 15 bp, Homo sapiens
ccgagagcatttccc

SEQ ID NO: 1626452 - DNA, 15 bp, Homo sapiens
tccgagagcatttcc

SEQ ID NO: 1626453 - DNA, 15 bp, Homo sapiens
ctccgagagcatttc

SEQ ID NO: 1626454 - DNA, 15 bp, Homo sapiens
gctccgagagcattt

SEQ ID NO: 1626455 - DNA, 15 bp, Homo sapiens
tgctccgagagcatt

SEQ ID NO: 1626456 - DNA, 15 bp, Homo sapiens
gtgctccgagagcat

SEQ ID NO: 1626457 - DNA, 15 bp, Homo sapiens
ggtgctccgagagca

SEQ ID NO: 1626458 - DNA, 15 bp, Homo sapiens
tggtgctccgagagc

SEQ ID NO: 1626459 - DNA, 15 bp, Homo sapiens
ttggtgctccgagag

SEQ ID NO: 1626460 - DNA, 15 bp, Homo sapiens
tttggtgctccgaga

SEQ ID NO: 1626461 - DNA, 15 bp, Homo sapiens
ctttggtgctccgag

SEQ ID NO: 1626462 - DNA, 15 bp, Homo sapiens
gctttggtgctccga

SEQ ID NO: 1626463 - DNA, 15 bp, Homo sapiens
ggctttggtgctccg

SEQ ID NO: 1626464 - DNA, 15 bp, Homo sapiens
aggctttggtgctcc

SEQ ID NO: 1626465 - DNA, 15 bp, Homo sapiens
caggctttggtgctc

SEQ ID NO: 1626466 - DNA, 15 bp, Homo sapiens
ccaggctttggtgct

SEQ ID NO: 1626467 - DNA, 15 bp, Homo sapiens
cccaggctttggtgc

SEQ ID NO: 1626468 - DNA, 15 bp, Homo sapiens
gcccaggctttggtg

SEQ ID NO: 1626469 - DNA, 15 bp, Homo sapiens
ggcccaggctttggt

SEQ ID NO: 1626470 - DNA, 15 bp, Homo sapiens
gggcccaggctttgg

SEQ ID NO: 1626471 - DNA, 15 bp, Homo sapiens
ggggcccaggctttg

SEQ ID NO: 1626472 - DNA, 15 bp, Homo sapiens
tggggcccaggcttt

SEQ ID NO: 1626473 - DNA, 15 bp, Homo sapiens
gtggggcccaggctt

SEQ ID NO: 1626474 - DNA, 15 bp, Homo sapiens
agtggggcccaggct

SEQ ID NO: 1626475 - DNA, 15 bp, Homo sapiens
tagtggggcccaggc

SEQ ID NO: 1626476 - DNA, 15 bp, Homo sapiens
atagtggggcccagg

SEQ ID NO: 1626477 - DNA, 15 bp, Homo sapiens
gatagtggggcccag

SEQ ID NO: 1626478 - DNA, 15 bp, Homo sapiens
tgatagtggggccca

SEQ ID NO: 1626479 - DNA, 15 bp, Homo sapiens
ttgatagtggggccc

SEQ ID NO: 1626480 - DNA, 15 bp, Homo sapiens
cttgatagtggggcc

SEQ ID NO: 1626481 - DNA, 15 bp, Homo sapiens
tcttgatagtggggc

SEQ ID NO: 1626482 - DNA, 15 bp, Homo sapiens
ttcttgatagtgggg

SEQ ID NO: 1626483 - DNA, 15 bp, Homo sapiens
gttcttgatagtggg

SEQ ID NO: 1626484 - DNA, 15 bp, Homo sapiens
ggttcttgatagtgg

SEQ ID NO: 1626485 - DNA, 15 bp, Homo sapiens
aggttcttgatagtg

SEQ ID NO: 1626486 - DNA, 15 bp, Homo sapiens
gaggttcttgatagt

SEQ ID NO: 1626487 - DNA, 15 bp, Homo sapiens
cgaggttcttgatag

SEQ ID NO: 1626488 - DNA, 15 bp, Homo sapiens
tcgaggttcttgata

SEQ ID NO: 1626489 - DNA, 15 bp, Homo sapiens
atcgaggttcttgat

SEQ ID NO: 1626490 - DNA, 15 bp, Homo sapiens
catcgaggttcttga

SEQ ID NO: 1626491 - DNA, 15 bp, Homo sapiens
ccatcgaggttcttg

SEQ ID NO: 1626492 - DNA, 15 bp, Homo sapiens
cccatcgaggttctt

SEQ ID NO: 1626493 - DNA, 15 bp, Homo sapiens
acccatcgaggttct

SEQ ID NO: 1626494 - DNA, 15 bp, Homo sapiens
aacccatcgaggttc

SEQ ID NO: 1626495 - DNA, 15 bp, Homo sapiens
taacccatcgaggtt

SEQ ID NO: 1626496 - DNA, 15 bp, Homo sapiens
ctaacccatcgaggt

SEQ ID NO: 1626497 - DNA, 15 bp, Homo sapiens
cctaacccatcgagg

SEQ ID NO: 1626498 - DNA, 15 bp, Homo sapiens
tcctaacccatcgag

SEQ ID NO: 1626499 - DNA, 15 bp, Homo sapiens
gtcctaacccatcga

SEQ ID NO: 1626500 - DNA, 15 bp, Homo sapiens
tgtcctaacccatcg

SEQ ID NO: 1626501 - DNA, 15 bp, Homo sapiens
ctgtcctaacccatc

SEQ ID NO: 1626502 - DNA, 15 bp, Homo sapiens
cctgtcctaacccat

SEQ ID NO: 1626503 - DNA, 15 bp, Homo sapiens
gcctgtcctaaccca

SEQ ID NO: 1626504 - DNA, 15 bp, Homo sapiens
ggcctgtcctaaccc

SEQ ID NO: 1626505 - DNA, 15 bp, Homo sapiens
tggcctgtcctaacc

SEQ ID NO: 1626506 - DNA, 15 bp, Homo sapiens
ctggcctgtcctaac

SEQ ID NO: 1626507 - DNA, 15 bp, Homo sapiens
cctggcctgtcctaa

SEQ ID NO: 1626508 - DNA, 15 bp, Homo sapiens
acctggcctgtccta

SEQ ID NO: 1626509 - DNA, 15 bp, Homo sapiens
aacctggcctgtcct

SEQ ID NO: 1626510 - DNA, 15 bp, Homo sapiens
aaacctggcctgtcc

SEQ ID NO: 1626511 - DNA, 15 bp, Homo sapiens
aaaacctggcctgtc

SEQ ID NO: 1626512 - DNA, 15 bp, Homo sapiens
caaaacctggcctgt

SEQ ID NO: 1626513 - DNA, 15 bp, Homo sapiens
gcaaaacctggcctg

SEQ ID NO: 1626514 - DNA, 15 bp, Homo sapiens
agcaaaacctggcct

SEQ ID NO: 1626515 - DNA, 15 bp, Homo sapiens
cagcaaaacctggcc

SEQ ID NO: 1626516 - DNA, 15 bp, Homo sapiens
gcagcaaaacctggc

SEQ ID NO: 1626517 - DNA, 15 bp, Homo sapiens
agcagcaaaacctgg

SEQ ID NO: 1626518 - DNA, 15 bp, Homo sapiens
cagcagcaaaacctg

SEQ ID NO: 1626519 - DNA, 15 bp, Homo sapiens
acagcagcaaaacct

SEQ ID NO: 1626520 - DNA, 15 bp, Homo sapiens
cacagcagcaaaacc

SEQ ID NO: 1626521 - DNA, 15 bp, Homo sapiens
tcacagcagcaaaac

SEQ ID NO: 1626522 - DNA, 15 bp, Homo sapiens
gtcacagcagcaaaa

SEQ ID NO: 1626523 - DNA, 15 bp, Homo sapiens
tgtcacagcagcaaa

SEQ ID NO: 1626524 - DNA, 15 bp, Homo sapiens
ttgtcacagcagcaa

SEQ ID NO: 1626525 - DNA, 15 bp, Homo sapiens
cttgtcacagcagca

SEQ ID NO: 1626526 - DNA, 15 bp, Homo sapiens
gcttgtcacagcagc

SEQ ID NO: 1626527 - DNA, 15 bp, Homo sapiens
tgcttgtcacagcag

SEQ ID NO: 1626528 - DNA, 15 bp, Homo sapiens
ctgcttgtcacagca

SEQ ID NO: 1626529 - DNA, 15 bp, Homo sapiens
gctgcttgtcacagc

SEQ ID NO: 1626530 - DNA, 15 bp, Homo sapiens
ggctgcttgtcacag

SEQ ID NO: 1626531 - DNA, 15 bp, Homo sapiens
gggctgcttgtcaca

SEQ ID NO: 1626532 - DNA, 15 bp, Homo sapiens
ggggctgcttgtcac

SEQ ID NO: 1626533 - DNA, 15 bp, Homo sapiens
cggggctgcttgtca

SEQ ID NO: 1626534 - DNA, 15 bp, Homo sapiens
ccggggctgcttgtc

SEQ ID NO: 1626535 - DNA, 15 bp, Homo sapiens
tccggggctgcttgt

SEQ ID NO: 1626536 - DNA, 15 bp, Homo sapiens
ttccggggctgcttg

SEQ ID NO: 1626537 - DNA, 15 bp, Homo sapiens
attccggggctgctt

SEQ ID NO: 1626538 - DNA, 15 bp, Homo sapiens
gattccggggctgct

SEQ ID NO: 1626539 - DNA, 15 bp, Homo sapiens
agattccggggctgc

SEQ ID NO: 1626540 - DNA, 15 bp, Homo sapiens
gagattccggggctg

SEQ ID NO: 1626541 - DNA, 15 bp, Homo sapiens
ggagattccggggct

SEQ ID NO: 1626542 - DNA, 15 bp, Homo sapiens
tggagattccggggc

SEQ ID NO: 1626543 - DNA, 15 bp, Homo sapiens
atggagattccgggg

SEQ ID NO: 1626544 - DNA, 15 bp, Homo sapiens
catggagattccggg

SEQ ID NO: 1626545 - DNA, 15 bp, Homo sapiens
ccatggagattccgg

SEQ ID NO: 1626546 - DNA, 15 bp, Homo sapiens
gccatggagattccg

SEQ ID NO: 1626547 - DNA, 15 bp, Homo sapiens
agccatggagattcc

SEQ ID NO: 1626548 - DNA, 15 bp, Homo sapiens
aagccatggagattc

SEQ ID NO: 1626549 - DNA, 15 bp, Homo sapiens
taagccatggagatt

SEQ ID NO: 1626550 - DNA, 15 bp, Homo sapiens
ctaagccatggagat

SEQ ID NO: 1626551 - DNA, 15 bp, Homo sapiens
tctaagccatggaga

SEQ ID NO: 1626552 - DNA, 15 bp, Homo sapiens
ttctaagccatggag

SEQ ID NO: 1626553 - DNA, 15 bp, Homo sapiens
gttctaagccatgga

SEQ ID NO: 1626554 - DNA, 15 bp, Homo sapiens
tgttctaagccatgg

SEQ ID NO: 1626555 - DNA, 15 bp, Homo sapiens
ttgttctaagccatg

SEQ ID NO: 1626556 - DNA, 15 bp, Homo sapiens
gttgttctaagccat

SEQ ID NO: 1626557 - DNA, 15 bp, Homo sapiens
ggttgttctaagcca

SEQ ID NO: 1626558 - DNA, 15 bp, Homo sapiens
tggttgttctaagcc

SEQ ID NO: 1626559 - DNA, 15 bp, Homo sapiens
ttggttgttctaagc

SEQ ID NO: 1626560 - DNA, 15 bp, Homo sapiens
cttggttgttctaag

SEQ ID NO: 1626561 - DNA, 15 bp, Homo sapiens
tcttggttgttctaa

SEQ ID NO: 1626562 - DNA, 15 bp, Homo sapiens
gtcttggttgttcta

SEQ ID NO: 1626563 - DNA, 15 bp, Homo sapiens
agtcttggttgttct

SEQ ID NO: 1626564 - DNA, 15 bp, Homo sapiens
aagtcttggttgttc

SEQ ID NO: 1626565 - DNA, 15 bp, Homo sapiens
taagtcttggttgtt

SEQ ID NO: 1626566 - DNA, 15 bp, Homo sapiens
ataagtcttggttgt

SEQ ID NO: 1626567 - DNA, 15 bp, Homo sapiens
aataagtcttggttg

SEQ ID NO: 1626568 - DNA, 15 bp, Homo sapiens
gaataagtcttggtt

SEQ ID NO: 1626569 - DNA, 15 bp, Homo sapiens
ggaataagtcttggt

SEQ ID NO: 1626570 - DNA, 15 bp, Homo sapiens
aggaataagtcttgg

SEQ ID NO: 1626571 - DNA, 15 bp, Homo sapiens
aaggaataagtcttg

SEQ ID NO: 1626572 - DNA, 15 bp, Homo sapiens
aaaggaataagtctt

SEQ ID NO: 1626573 - DNA, 15 bp, Homo sapiens
caaaggaataagtct

SEQ ID NO: 1626574 - DNA, 15 bp, Homo sapiens
gcaaaggaataagtc

SEQ ID NO: 1626575 - DNA, 15 bp, Homo sapiens
agcaaaggaataagt

SEQ ID NO: 1626576 - DNA, 15 bp, Homo sapiens
aagcaaaggaataag

SEQ ID NO: 1626577 - DNA, 15 bp, Homo sapiens
caagcaaaggaataa

SEQ ID NO: 1626578 - DNA, 15 bp, Homo sapiens
gcaagcaaaggaata

SEQ ID NO: 1626579 - DNA, 15 bp, Homo sapiens
tgcaagcaaaggaat

SEQ ID NO: 1626580 - DNA, 15 bp, Homo sapiens
gtgcaagcaaaggaa

SEQ ID NO: 1626581 - DNA, 15 bp, Homo sapiens
agtgcaagcaaagga

SEQ ID NO: 1626582 - DNA, 15 bp, Homo sapiens
gagtgcaagcaaagg

SEQ ID NO: 1626583 - DNA, 15 bp, Homo sapiens
ggagtgcaagcaaag

SEQ ID NO: 1626584 - DNA, 15 bp, Homo sapiens
tggagtgcaagcaaa

SEQ ID NO: 1626585 - DNA, 15 bp, Homo sapiens
gtggagtgcaagcaa

SEQ ID NO: 1626586 - DNA, 15 bp, Homo sapiens
cgtggagtgcaagca

SEQ ID NO: 1626587 - DNA, 15 bp, Homo sapiens
acgtggagtgcaagc

SEQ ID NO: 1626588 - DNA, 15 bp, Homo sapiens
gacgtggagtgcaag

SEQ ID NO: 1626589 - DNA, 15 bp, Homo sapiens
ggacgtggagtgcaa

SEQ ID NO: 1626590 - DNA, 15 bp, Homo sapiens
tggacgtggagtgca

SEQ ID NO: 1626591 - DNA, 15 bp, Homo sapiens
ctggacgtggagtgc

SEQ ID NO: 1626592 - DNA, 15 bp, Homo sapiens
actggacgtggagtg

SEQ ID NO: 1626593 - DNA, 15 bp, Homo sapiens
cactggacgtggagt

SEQ ID NO: 1626594 - DNA, 15 bp, Homo sapiens
acactggacgtggag

SEQ ID NO: 1626595 - DNA, 15 bp, Homo sapiens
cacactggacgtgga

SEQ ID NO: 1626596 - DNA, 15 bp, Homo sapiens
ccacactggacgtgg

SEQ ID NO: 1626597 - DNA, 15 bp, Homo sapiens
cccacactggacgtg

SEQ ID NO: 1626598 - DNA, 15 bp, Homo sapiens
acccacactggacgt

SEQ ID NO: 1626599 - DNA, 15 bp, Homo sapiens
cacccacactggacg

SEQ ID NO: 1626600 - DNA, 15 bp, Homo sapiens
tcacccacactggac

SEQ ID NO: 1626601 - DNA, 15 bp, Homo sapiens
gtcacccacactgga

SEQ ID NO: 1626602 - DNA, 15 bp, Homo sapiens
agtcacccacactgg

SEQ ID NO: 1626603 - DNA, 15 bp, Homo sapiens
cagtcacccacactg

SEQ ID NO: 1626604 - DNA, 15 bp, Homo sapiens
ccagtcacccacact

SEQ ID NO: 1626605 - DNA, 15 bp, Homo sapiens
cccagtcacccacac

SEQ ID NO: 1626606 - DNA, 15 bp, Homo sapiens
ccccagtcacccaca

SEQ ID NO: 1626607 - DNA, 15 bp, Homo sapiens
gccccagtcacccac

SEQ ID NO: 1626608 - DNA, 15 bp, Homo sapiens
tgccccagtcaccca

SEQ ID NO: 1626609 - DNA, 15 bp, Homo sapiens
gtgccccagtcaccc

SEQ ID NO: 1626610 - DNA, 15 bp, Homo sapiens
ggtgccccagtcacc

SEQ ID NO: 1626611 - DNA, 15 bp, Homo sapiens
gggtgccccagtcac

SEQ ID NO: 1626612 - DNA, 15 bp, Homo sapiens
cgggtgccccagtca

SEQ ID NO: 1626613 - DNA, 15 bp, Homo sapiens
gcgggtgccccagtc

SEQ ID NO: 1626614 - DNA, 15 bp, Homo sapiens
cgcgggtgccccagt

SEQ ID NO: 1626615 - DNA, 15 bp, Homo sapiens
gcgcgggtgccccag

SEQ ID NO: 1626616 - DNA, 15 bp, Homo sapiens
agcgcgggtgcccca

SEQ ID NO: 1626617 - DNA, 15 bp, Homo sapiens
aagcgcgggtgcccc

SEQ ID NO: 1626618 - DNA, 15 bp, Homo sapiens
caagcgcgggtgccc

SEQ ID NO: 1626619 - DNA, 15 bp, Homo sapiens
acaagcgcgggtgcc

SEQ ID NO: 1626620 - DNA, 15 bp, Homo sapiens
cacaagcgcgggtgc

SEQ ID NO: 1626621 - DNA, 15 bp, Homo sapiens
ccacaagcgcgggtg

SEQ ID NO: 1626622 - DNA, 15 bp, Homo sapiens
accacaagcgcgggt

SEQ ID NO: 1626623 - DNA, 15 bp, Homo sapiens
caccacaagcgcggg

SEQ ID NO: 1626624 - DNA, 15 bp, Homo sapiens
ccaccacaagcgcgg

SEQ ID NO: 1626625 - DNA, 15 bp, Homo sapiens
accaccacaagcgcg

SEQ ID NO: 1626626 - DNA, 15 bp, Homo sapiens
gaccaccacaagcgc

SEQ ID NO: 1626627 - DNA, 15 bp, Homo sapiens
tgaccaccacaagcg

SEQ ID NO: 1626628 - DNA, 15 bp, Homo sapiens
gtgaccaccacaagc

SEQ ID NO: 1626629 - DNA, 15 bp, Homo sapiens
agtgaccaccacaag

SEQ ID NO: 1626630 - DNA, 15 bp, Homo sapiens
aagtgaccaccacaa

SEQ ID NO: 1626631 - DNA, 15 bp, Homo sapiens
caagtgaccaccaca

SEQ ID NO: 1626632 - DNA, 15 bp, Homo sapiens
ccaagtgaccaccac

SEQ ID NO: 1626633 - DNA, 15 bp, Homo sapiens
cccaagtgaccacca

SEQ ID NO: 1626634 - DNA, 15 bp, Homo sapiens
ccccaagtgaccacc

SEQ ID NO: 1626635 - DNA, 15 bp, Homo sapiens
tccccaagtgaccac

SEQ ID NO: 1626636 - DNA, 15 bp, Homo sapiens
atccccaagtgacca

SEQ ID NO: 1626637 - DNA, 15 bp, Homo sapiens
gatccccaagtgacc

SEQ ID NO: 1626638 - DNA, 15 bp, Homo sapiens
ggatccccaagtgac

SEQ ID NO: 1626639 - DNA, 15 bp, Homo sapiens
tggatccccaagtga

SEQ ID NO: 1626640 - DNA, 15 bp, Homo sapiens
ctggatccccaagtg

SEQ ID NO: 1626641 - DNA, 15 bp, Homo sapiens
cctggatccccaagt

SEQ ID NO: 1626642 - DNA, 15 bp, Homo sapiens
gcctggatccccaag

SEQ ID NO: 1626643 - DNA, 15 bp, Homo sapiens
agcctggatccccaa

SEQ ID NO: 1626644 - DNA, 15 bp, Homo sapiens
cagcctggatcccca

SEQ ID NO: 1626645 - DNA, 15 bp, Homo sapiens
tcagcctggatcccc

SEQ ID NO: 1626646 - DNA, 15 bp, Homo sapiens
ctcagcctggatccc

SEQ ID NO: 1626647 - DNA, 15 bp, Homo sapiens
cctcagcctggatcc

SEQ ID NO: 1626648 - DNA, 15 bp, Homo sapiens
ccctcagcctggatc

SEQ ID NO: 1626649 - DNA, 15 bp, Homo sapiens
tccctcagcctggat

SEQ ID NO: 1626650 - DNA, 15 bp, Homo sapiens
ctccctcagcctgga

SEQ ID NO: 1626651 - DNA, 15 bp, Homo sapiens
cctccctcagcctgg

SEQ ID NO: 1626652 - DNA, 15 bp, Homo sapiens
gcctccctcagcctg

SEQ ID NO: 1626653 - DNA, 15 bp, Homo sapiens
agcctccctcagcct

SEQ ID NO: 1626654 - DNA, 15 bp, Homo sapiens
gagcctccctcagcc

SEQ ID NO: 1626655 - DNA, 15 bp, Homo sapiens
agagcctccctcagc

SEQ ID NO: 1626656 - DNA, 15 bp, Homo sapiens
cagagcctccctcag

SEQ ID NO: 1626657 - DNA, 15 bp, Homo sapiens
acagagcctccctca

SEQ ID NO: 1626658 - DNA, 15 bp, Homo sapiens
gacagagcctccctc

SEQ ID NO: 1626659 - DNA, 15 bp, Homo sapiens
agacagagcctccct

SEQ ID NO: 1626660 - DNA, 15 bp, Homo sapiens
aagacagagcctccc

SEQ ID NO: 1626661 - DNA, 15 bp, Homo sapiens
caagacagagcctcc

SEQ ID NO: 1626662 - DNA, 15 bp, Homo sapiens
tcaagacagagcctc

SEQ ID NO: 1626663 - DNA, 15 bp, Homo sapiens
gtcaagacagagcct

SEQ ID NO: 1626664 - DNA, 15 bp, Homo sapiens
tgtcaagacagagcc

SEQ ID NO: 1626665 - DNA, 15 bp, Homo sapiens
gtgtcaagacagagc

SEQ ID NO: 1626666 - DNA, 15 bp, Homo sapiens
tgtgtcaagacagag

SEQ ID NO: 1626667 - DNA, 15 bp, Homo sapiens
atgtgtcaagacaga

SEQ ID NO: 1626668 - DNA, 15 bp, Homo sapiens
ggtatgtgtcaagac

SEQ ID NO: 1626669 - DNA, 15 bp, Homo sapiens
aggtatgtgtcaaga

SEQ ID NO: 1626670 - DNA, 15 bp, Homo sapiens
gaggtatgtgtcaag

SEQ ID NO: 1626671 - DNA, 15 bp, Homo sapiens
ggaggtatgtgtcaa

SEQ ID NO: 1626672 - DNA, 15 bp, Homo sapiens
aggaggtatgtgtca

SEQ ID NO: 1626673 - DNA, 15 bp, Homo sapiens
aaggaggtatgtgtc

SEQ ID NO: 1626674 - DNA, 15 bp, Homo sapiens
caaggaggtatgtgt

SEQ ID NO: 1626675 - DNA, 15 bp, Homo sapiens
ccaaggaggtatgtg

SEQ ID NO: 1626676 - DNA, 15 bp, Homo sapiens
gccaaggaggtatgt

SEQ ID NO: 1626677 - DNA, 15 bp, Homo sapiens
agccaaggaggtatg

SEQ ID NO: 1626678 - DNA, 15 bp, Homo sapiens
cagccaaggaggtat

SEQ ID NO: 1626679 - DNA, 15 bp, Homo sapiens
gcagccaaggaggta

SEQ ID NO: 1626680 - DNA, 15 bp, Homo sapiens
agcagccaaggaggt

SEQ ID NO: 1626681 - DNA, 15 bp, Homo sapiens
tagcagccaaggagg

SEQ ID NO: 1626682 - DNA, 15 bp, Homo sapiens
atagcagccaaggag

SEQ ID NO: 1626683 - DNA, 15 bp, Homo sapiens
tatagcagccaagga

SEQ ID NO: 1626684 - DNA, 15 bp, Homo sapiens
ctatagcagccaagg

SEQ ID NO: 1626685 - DNA, 15 bp, Homo sapiens
gctatagcagccaag

SEQ ID NO: 1626686 - DNA, 15 bp, Homo sapiens
tgctatagcagccaa

SEQ ID NO: 1626687 - DNA, 15 bp, Homo sapiens
ctgctatagcagcca

SEQ ID NO: 1626688 - DNA, 15 bp, Homo sapiens
gctgctatagcagcc

SEQ ID NO: 1626689 - DNA, 15 bp, Homo sapiens
cgctgctatagcagc

SEQ ID NO: 1626690 - DNA, 15 bp, Homo sapiens
ccgctgctatagcag

SEQ ID NO: 1626691 - DNA, 15 bp, Homo sapiens
gccgctgctatagca

SEQ ID NO: 1626692 - DNA, 15 bp, Homo sapiens
tgccgctgctatagc

SEQ ID NO: 1626693 - DNA, 15 bp, Homo sapiens
ctgccgctgctatag

SEQ ID NO: 1626694 - DNA, 15 bp, Homo sapiens
tctgccgctgctata

SEQ ID NO: 1626695 - DNA, 15 bp, Homo sapiens
ctctgccgctgctat

SEQ ID NO: 1626696 - DNA, 15 bp, Homo sapiens
tctctgccgctgcta

SEQ ID NO: 1626697 - DNA, 15 bp, Homo sapiens
ctctctgccgctgct

SEQ ID NO: 1626698 - DNA, 15 bp, Homo sapiens
gctctctgccgctgc

SEQ ID NO: 1626699 - DNA, 15 bp, Homo sapiens
ggctctctgccgctg

SEQ ID NO: 1626700 - DNA, 15 bp, Homo sapiens
gggctctctgccgct

SEQ ID NO: 1626701 - DNA, 15 bp, Homo sapiens
cgggctctctgccgc

SEQ ID NO: 1626702 - DNA, 15 bp, Homo sapiens
ccgggctctctgccg

SEQ ID NO: 1626703 - DNA, 15 bp, Homo sapiens
accgggctctctgcc

SEQ ID NO: 1626704 - DNA, 15 bp, Homo sapiens
caccgggctctctgc

SEQ ID NO: 1626705 - DNA, 15 bp, Homo sapiens
tcaccgggctctctg

SEQ ID NO: 1626706 - DNA, 15 bp, Homo sapiens
ttcaccgggctctct

SEQ ID NO: 1626707 - DNA, 15 bp, Homo sapiens
tttcaccgggctctc

SEQ ID NO: 1626708 - DNA, 15 bp, Homo sapiens
ctttcaccgggctct

SEQ ID NO: 1626709 - DNA, 15 bp, Homo sapiens
cctttcaccgggctc

SEQ ID NO: 1626710 - DNA, 15 bp, Homo sapiens
gcctttcaccgggct

SEQ ID NO: 1626711 - DNA, 15 bp, Homo sapiens
cgcctttcaccgggc

SEQ ID NO: 1626712 - DNA, 15 bp, Homo sapiens
acgcctttcaccggg

SEQ ID NO: 1626713 - DNA, 15 bp, Homo sapiens
cacgcctttcaccgg

SEQ ID NO: 1626714 - DNA, 15 bp, Homo sapiens
acacgcctttcaccg

SEQ ID NO: 1626715 - DNA, 15 bp, Homo sapiens
cacacgcctttcacc

SEQ ID NO: 1626716 - DNA, 15 bp, Homo sapiens
gcacacgcctttcac

SEQ ID NO: 1626717 - DNA, 15 bp, Homo sapiens
tgcacacgcctttca

SEQ ID NO: 1626718 - DNA, 15 bp, Homo sapiens
gtgcacacgcctttc

SEQ ID NO: 1626719 - DNA, 15 bp, Homo sapiens
tgtgcacacgccttt

SEQ ID NO: 1626720 - DNA, 15 bp, Homo sapiens
ctgtgcacacgcctt

SEQ ID NO: 1626721 - DNA, 15 bp, Homo sapiens
actgtgcacacgcct

SEQ ID NO: 1626722 - DNA, 15 bp, Homo sapiens
gactgtgcacacgcc

SEQ ID NO: 1626723 - DNA, 15 bp, Homo sapiens
ggactgtgcacacgc

SEQ ID NO: 1626724 - DNA, 15 bp, Homo sapiens
aggactgtgcacacg

SEQ ID NO: 1626725 - DNA, 15 bp, Homo sapiens
aaggactgtgcacac

SEQ ID NO: 1626726 - DNA, 15 bp, Homo sapiens
taaggactgtgcaca

SEQ ID NO: 1626727 - DNA, 15 bp, Homo sapiens
ttaaggactgtgcac

SEQ ID NO: 1626728 - DNA, 15 bp, Homo sapiens
tttaaggactgtgca

SEQ ID NO: 1626729 - DNA, 15 bp, Homo sapiens
ctttaaggactgtgc

SEQ ID NO: 1626730 - DNA, 15 bp, Homo sapiens
gctttaaggactgtg

SEQ ID NO: 1626731 - DNA, 15 bp, Homo sapiens
tgctttaaggactgt

SEQ ID NO: 1626732 - DNA, 15 bp, Homo sapiens
atgctttaaggactg

SEQ ID NO: 1626733 - DNA, 15 bp, Homo sapiens
gatgctttaaggact

SEQ ID NO: 1626734 - DNA, 15 bp, Homo sapiens
ggatgctttaaggac

SEQ ID NO: 1626735 - DNA, 15 bp, Homo sapiens
gggatgctttaagga

SEQ ID NO: 1626736 - DNA, 15 bp, Homo sapiens
ggggatgctttaagg

SEQ ID NO: 1626737 - DNA, 15 bp, Homo sapiens
gggggatgctttaag

SEQ ID NO: 1626738 - DNA, 15 bp, Homo sapiens
ggggggatgctttaa

SEQ ID NO: 1626739 - DNA, 15 bp, Homo sapiens
tggggggatgcttta

SEQ ID NO: 1626740 - DNA, 15 bp, Homo sapiens
ttggggggatgcttt

SEQ ID NO: 1626741 - DNA, 15 bp, Homo sapiens
cttggggggatgctt

SEQ ID NO: 1626742 - DNA, 15 bp, Homo sapiens
acttggggggatgct

SEQ ID NO: 1626743 - DNA, 15 bp, Homo sapiens
cacttggggggatgc

SEQ ID NO: 1626744 - DNA, 15 bp, Homo sapiens
tcacttggggggatg

SEQ ID NO: 1626745 - DNA, 15 bp, Homo sapiens
gtcacttggggggat

SEQ ID NO: 1626746 - DNA, 15 bp, Homo sapiens
tgtcacttgggggga

SEQ ID NO: 1626747 - DNA, 15 bp, Homo sapiens
atgtcacttgggggg

SEQ ID NO: 1626748 - DNA, 15 bp, Homo sapiens
catgtcacttggggg

SEQ ID NO: 1626749 - DNA, 15 bp, Homo sapiens
gcatgtcacttgggg

SEQ ID NO: 1626750 - DNA, 15 bp, Homo sapiens
ggcatgtcacttggg

SEQ ID NO: 1626751 - DNA, 15 bp, Homo sapiens
tggcatgtcacttgg

SEQ ID NO: 1626752 - DNA, 15 bp, Homo sapiens
gtggcatgtcacttg

SEQ ID NO: 1626753 - DNA, 15 bp, Homo sapiens
agtggcatgtcactt

SEQ ID NO: 1626754 - DNA, 15 bp, Homo sapiens
aagtggcatgtcact

SEQ ID NO: 1626755 - DNA, 15 bp, Homo sapiens
gaagtggcatgtcac

SEQ ID NO: 1626756 - DNA, 15 bp, Homo sapiens
agaagtggcatgtca

SEQ ID NO: 1626757 - DNA, 15 bp, Homo sapiens
gagaagtggcatgtc

SEQ ID NO: 1626758 - DNA, 15 bp, Homo sapiens
ggagaagtggcatgt

SEQ ID NO: 1626759 - DNA, 15 bp, Homo sapiens
aggagaagtggcatg

SEQ ID NO: 1626760 - DNA, 15 bp, Homo sapiens
aaggagaagtggcat

SEQ ID NO: 1626761 - DNA, 15 bp, Homo sapiens
aaaggagaagtggca

SEQ ID NO: 1626762 - DNA, 15 bp, Homo sapiens
aaaaggagaagtggc

SEQ ID NO: 1626763 - DNA, 15 bp, Homo sapiens
aaaaaggagaagtgg

SEQ ID NO: 1626764 - DNA, 15 bp, Homo sapiens
gaaaaaggagaagtg

SEQ ID NO: 1626765 - DNA, 15 bp, Homo sapiens
tgaaaaaggagaagt

SEQ ID NO: 1626766 - DNA, 15 bp, Homo sapiens
atgaaaaaggagaag

SEQ ID NO: 1626767 - DNA, 15 bp, Homo sapiens
aatgaaaaaggagaa

SEQ ID NO: 1626768 - DNA, 15 bp, Homo sapiens
caatgaaaaaggaga

SEQ ID NO: 1626769 - DNA, 15 bp, Homo sapiens
gcaatgaaaaaggag

SEQ ID NO: 1626770 - DNA, 15 bp, Homo sapiens
agcaatgaaaaagga

SEQ ID NO: 1626771 - DNA, 15 bp, Homo sapiens
gagcaatgaaaaagg

SEQ ID NO: 1626772 - DNA, 15 bp, Homo sapiens
tgagcaatgaaaaag

SEQ ID NO: 1626773 - DNA, 15 bp, Homo sapiens
ctgagcaatgaaaaa

SEQ ID NO: 1626774 - DNA, 15 bp, Homo sapiens
cctgagcaatgaaaa

SEQ ID NO: 1626775 - DNA, 15 bp, Homo sapiens
ccctgagcaatgaaa

SEQ ID NO: 1626776 - DNA, 15 bp, Homo sapiens
tccctgagcaatgaa

SEQ ID NO: 1626777 - DNA, 15 bp, Homo sapiens
ctccctgagcaatga

SEQ ID NO: 1626778 - DNA, 15 bp, Homo sapiens
gctccctgagcaatg

SEQ ID NO: 1626779 - DNA, 15 bp, Homo sapiens
agctccctgagcaat

SEQ ID NO: 1626780 - DNA, 15 bp, Homo sapiens
cagctccctgagcaa

SEQ ID NO: 1626781 - DNA, 15 bp, Homo sapiens
tcagctccctgagca

SEQ ID NO: 1626782 - DNA, 15 bp, Homo sapiens
gtcagctccctgagc

SEQ ID NO: 1626783 - DNA, 15 bp, Homo sapiens
ggtcagctccctgag

SEQ ID NO: 1626784 - DNA, 15 bp, Homo sapiens
aggtcagctccctga

SEQ ID NO: 1626785 - DNA, 15 bp, Homo sapiens
caggtcagctccctg

SEQ ID NO: 1626786 - DNA, 15 bp, Homo sapiens
ccaggtcagctccct

SEQ ID NO: 1626787 - DNA, 15 bp, Homo sapiens
gccaggtcagctccc

SEQ ID NO: 1626788 - DNA, 15 bp, Homo sapiens
ggccaggtcagctcc

SEQ ID NO: 1626789 - DNA, 15 bp, Homo sapiens
tggccaggtcagctc

SEQ ID NO: 1626790 - DNA, 15 bp, Homo sapiens
atggccaggtcagct

SEQ ID NO: 1626791 - DNA, 15 bp, Homo sapiens
catggccaggtcagc

SEQ ID NO: 1626792 - DNA, 15 bp, Homo sapiens
gcatggccaggtcag

SEQ ID NO: 1626793 - DNA, 15 bp, Homo sapiens
agcatggccaggtca

SEQ ID NO: 1626794 - DNA, 15 bp, Homo sapiens
aagcatggccaggtc

SEQ ID NO: 1626795 - DNA, 15 bp, Homo sapiens
aaagcatggccaggt

SEQ ID NO: 1626796 - DNA, 15 bp, Homo sapiens
taaagcatggccagg

SEQ ID NO: 1626797 - DNA, 15 bp, Homo sapiens
ataaagcatggccag

SEQ ID NO: 1626798 - DNA, 15 bp, Homo sapiens
aataaagcatggcca

SEQ ID NO: 1626799 - DNA, 15 bp, Homo sapiens
aaataaagcatggcc

SEQ ID NO: 1626800 - DNA, 15 bp, Homo sapiens
aaaataaagcatggc

SEQ ID NO: 1626801 - DNA, 15 bp, Homo sapiens
taaaataaagcatgg

SEQ ID NO: 1626802 - DNA, 15 bp, Homo sapiens
ataaaataaagcatg

SEQ ID NO: 1626803 - DNA, 15 bp, Homo sapiens
cataaaataaagcat

SEQ ID NO: 1626804 - DNA, 15 bp, Homo sapiens
gcataaaataaagca

SEQ ID NO: 1626805 - DNA, 15 bp, Homo sapiens
agcataaaataaagc

SEQ ID NO: 1626806 - DNA, 15 bp, Homo sapiens
cagcataaaataaag

SEQ ID NO: 1626807 - DNA, 15 bp, Homo sapiens
ccagcataaaataaa

SEQ ID NO: 1626808 - DNA, 15 bp, Homo sapiens
tccagcataaaataa

SEQ ID NO: 1626809 - DNA, 15 bp, Homo sapiens
ctccagcataaaata

SEQ ID NO: 1626810 - DNA, 15 bp, Homo sapiens
actccagcataaaat

SEQ ID NO: 1626811 - DNA, 15 bp, Homo sapiens
tactccagcataaaa

SEQ ID NO: 1626812 - DNA, 15 bp, Homo sapiens
ctactccagcataaa

SEQ ID NO: 1626813 - DNA, 15 bp, Homo sapiens
cctactccagcataa

SEQ ID NO: 1626814 - DNA, 15 bp, Homo sapiens
ccctactccagcata

SEQ ID NO: 1626815 - DNA, 15 bp, Homo sapiens
accctactccagcat

SEQ ID NO: 1626816 - DNA, 15 bp, Homo sapiens
caccctactccagca

SEQ ID NO: 1626817 - DNA, 15 bp, Homo sapiens
acaccctactccagc

SEQ ID NO: 1626818 - DNA, 15 bp, Homo sapiens
cacaccctactccag

SEQ ID NO: 1626819 - DNA, 15 bp, Homo sapiens
ccacaccctactcca

SEQ ID NO: 1626820 - DNA, 15 bp, Homo sapiens
accacaccctactcc

SEQ ID NO: 1626821 - DNA, 15 bp, Homo sapiens
caccacaccctactc

SEQ ID NO: 1626822 - DNA, 15 bp, Homo sapiens
ccaccacaccctact

SEQ ID NO: 1626823 - DNA, 15 bp, Homo sapiens
cccaccacaccctac

SEQ ID NO: 1626824 - DNA, 15 bp, Homo sapiens
ccccaccacacccta

SEQ ID NO: 1626825 - DNA, 15 bp, Homo sapiens
cccccaccacaccct

SEQ ID NO: 1626826 - DNA, 15 bp, Homo sapiens
acccccaccacaccc

SEQ ID NO: 1626827 - DNA, 15 bp, Homo sapiens
cacccccaccacacc

SEQ ID NO: 1626828 - DNA, 15 bp, Homo sapiens
tcacccccaccacac

SEQ ID NO: 1626829 - DNA, 15 bp, Homo sapiens
atcacccccaccaca

SEQ ID NO: 1626830 - DNA, 15 bp, Homo sapiens
gatcacccccaccac

SEQ ID NO: 1626831 - DNA, 15 bp, Homo sapiens
agatcacccccacca

SEQ ID NO: 1626832 - DNA, 15 bp, Homo sapiens
cagatcacccccacc

SEQ ID NO: 1626833 - DNA, 15 bp, Homo sapiens
gcagatcacccccac

SEQ ID NO: 1626834 - DNA, 15 bp, Homo sapiens
ggcagatcaccccca

SEQ ID NO: 1626835 - DNA, 15 bp, Homo sapiens
tggcagatcaccccc

SEQ ID NO: 1626836 - DNA, 15 bp, Homo sapiens
atggcagatcacccc

SEQ ID NO: 1626837 - DNA, 15 bp, Homo sapiens
aatggcagatcaccc

SEQ ID NO: 1626838 - DNA, 15 bp, Homo sapiens
aaatggcagatcacc

SEQ ID NO: 1626839 - DNA, 15 bp, Homo sapiens
taaatggcagatcac

SEQ ID NO: 1626840 - DNA, 15 bp, Homo sapiens
gtaaatggcagatca

SEQ ID NO: 1626841 - DNA, 15 bp, Homo sapiens
ggtaaatggcagatc

SEQ ID NO: 1626842 - DNA, 15 bp, Homo sapiens
aggtaaatggcagat

SEQ ID NO: 1626843 - DNA, 15 bp, Homo sapiens
caggtaaatggcaga

SEQ ID NO: 1626844 - DNA, 15 bp, Homo sapiens
ccaggtaaatggcag

SEQ ID NO: 1626845 - DNA, 15 bp, Homo sapiens
cccaggtaaatggca

SEQ ID NO: 1626846 - DNA, 15 bp, Homo sapiens
tcccaggtaaatggc

SEQ ID NO: 1626847 - DNA, 15 bp, Homo sapiens
ctcccaggtaaatgg

SEQ ID NO: 1626848 - DNA, 15 bp, Homo sapiens
cctcccaggtaaatg

SEQ ID NO: 1626849 - DNA, 15 bp, Homo sapiens
tcctcccaggtaaat

SEQ ID NO: 1626850 - DNA, 15 bp, Homo sapiens
ttcctcccaggtaaa

SEQ ID NO: 1626851 - DNA, 15 bp, Homo sapiens
tttcctcccaggtaa

SEQ ID NO: 1626852 - DNA, 15 bp, Homo sapiens
ctttcctcccaggta

SEQ ID NO: 1626853 - DNA, 15 bp, Homo sapiens
gctttcctcccaggt

SEQ ID NO: 1626854 - DNA, 15 bp, Homo sapiens
ggctttcctcccagg

SEQ ID NO: 1626855 - DNA, 15 bp, Homo sapiens
tggctttcctcccag

SEQ ID NO: 1626856 - DNA, 15 bp, Homo sapiens
ctggctttcctccca

SEQ ID NO: 1626857 - DNA, 15 bp, Homo sapiens
tctggctttcctccc

SEQ ID NO: 1626858 - DNA, 15 bp, Homo sapiens
gtctggctttcctcc

SEQ ID NO: 1626859 - DNA, 15 bp, Homo sapiens
agtctggctttcctc

SEQ ID NO: 1626860 - DNA, 15 bp, Homo sapiens
gagtctggctttcct

SEQ ID NO: 1626861 - DNA, 15 bp, Homo sapiens
agagtctggctttcc

SEQ ID NO: 1626862 - DNA, 15 bp, Homo sapiens
gagagtctggctttc

SEQ ID NO: 1626863 - DNA, 15 bp, Homo sapiens
ggagagtctggcttt

SEQ ID NO: 1626864 - DNA, 15 bp, Homo sapiens
aggagagtctggctt

SEQ ID NO: 1626865 - DNA, 15 bp, Homo sapiens
caggagagtctggct

SEQ ID NO: 1626866 - DNA, 15 bp, Homo sapiens
ccaggagagtctggc

SEQ ID NO: 1626867 - DNA, 15 bp, Homo sapiens
tccaggagagtctgg

SEQ ID NO: 1626868 - DNA, 15 bp, Homo sapiens
ctccaggagagtctg

SEQ ID NO: 1626869 - DNA, 15 bp, Homo sapiens
actccaggagagtct

SEQ ID NO: 1626870 - DNA, 15 bp, Homo sapiens
aactccaggagagtc

SEQ ID NO: 1626871 - DNA, 15 bp, Homo sapiens
taactccaggagagt

SEQ ID NO: 1626872 - DNA, 15 bp, Homo sapiens
ctaactccaggagag

SEQ ID NO: 1626873 - DNA, 15 bp, Homo sapiens
cctaactccaggaga

SEQ ID NO: 1626874 - DNA, 15 bp, Homo sapiens
tcctaactccaggag

SEQ ID NO: 1626875 - DNA, 15 bp, Homo sapiens
ttcctaactccagga

SEQ ID NO: 1626876 - DNA, 15 bp, Homo sapiens
cttcctaactccagg

SEQ ID NO: 1626877 - DNA, 15 bp, Homo sapiens
ccttcctaactccag

SEQ ID NO: 1626878 - DNA, 15 bp, Homo sapiens
cccttcctaactcca

SEQ ID NO: 1626879 - DNA, 15 bp, Homo sapiens
tcccttcctaactcc

SEQ ID NO: 1626880 - DNA, 15 bp, Homo sapiens
ctcccttcctaactc

SEQ ID NO: 1626881 - DNA, 15 bp, Homo sapiens
cctcccttcctaact

SEQ ID NO: 1626882 - DNA, 15 bp, Homo sapiens
ccctcccttcctaac

SEQ ID NO: 1626883 - DNA, 15 bp, Homo sapiens
accctcccttcctaa

SEQ ID NO: 1626884 - DNA, 15 bp, Homo sapiens
caccctcccttccta

SEQ ID NO: 1626885 - DNA, 15 bp, Homo sapiens
ccaccctcccttcct

SEQ ID NO: 1626886 - DNA, 15 bp, Homo sapiens
tccaccctcccttcc

SEQ ID NO: 1626887 - DNA, 15 bp, Homo sapiens
ttccaccctcccttc

SEQ ID NO: 1626888 - DNA, 15 bp, Homo sapiens
gttccaccctccctt

SEQ ID NO: 1626889 - DNA, 15 bp, Homo sapiens
tgttccaccctccct

SEQ ID NO: 1626890 - DNA, 15 bp, Homo sapiens
gtgttccaccctccc

SEQ ID NO: 1626891 - DNA, 15 bp, Homo sapiens
agtgttccaccctcc

SEQ ID NO: 1626892 - DNA, 15 bp, Homo sapiens
cagtgttccaccctc

SEQ ID NO: 1626893 - DNA, 15 bp, Homo sapiens
gcagtgttccaccct

SEQ ID NO: 1626894 - DNA, 15 bp, Homo sapiens
tgcagtgttccaccc

SEQ ID NO: 1626895 - DNA, 15 bp, Homo sapiens
ctgcagtgttccacc

SEQ ID NO: 1626896 - DNA, 15 bp, Homo sapiens
gctgcagtgttccac

SEQ ID NO: 1626897 - DNA, 15 bp, Homo sapiens
ggctgcagtgttcca

SEQ ID NO: 1626898 - DNA, 15 bp, Homo sapiens
tggctgcagtgttcc

SEQ ID NO: 1626899 - DNA, 15 bp, Homo sapiens
gtggctgcagtgttc

SEQ ID NO: 1626900 - DNA, 15 bp, Homo sapiens
tgtggctgcagtgtt

SEQ ID NO: 1626901 - DNA, 15 bp, Homo sapiens
ctgtggctgcagtgt

SEQ ID NO: 1626902 - DNA, 15 bp, Homo sapiens
tctgtggctgcagtg

SEQ ID NO: 1626903 - DNA, 15 bp, Homo sapiens
ttctgtggctgcagt

SEQ ID NO: 1626904 - DNA, 15 bp, Homo sapiens
gttctgtggctgcag

SEQ ID NO: 1626905 - DNA, 15 bp, Homo sapiens
ggttctgtggctgca

SEQ ID NO: 1626906 - DNA, 15 bp, Homo sapiens
gggttctgtggctgc

SEQ ID NO: 1626907 - DNA, 15 bp, Homo sapiens
cgggttctgtggctg

SEQ ID NO: 1626908 - DNA, 15 bp, Homo sapiens
ccgggttctgtggct

SEQ ID NO: 1626909 - DNA, 15 bp, Homo sapiens
cccgggttctgtggc

SEQ ID NO: 1626910 - DNA, 15 bp, Homo sapiens
tcccgggttctgtgg

SEQ ID NO: 1626911 - DNA, 15 bp, Homo sapiens
gtcccgggttctgtg

SEQ ID NO: 1626912 - DNA, 15 bp, Homo sapiens
ggtcccgggttctgt

SEQ ID NO: 1626913 - DNA, 15 bp, Homo sapiens
tggtcccgggttctg

SEQ ID NO: 1626914 - DNA, 15 bp, Homo sapiens
atggtcccgggttct

SEQ ID NO: 1626915 - DNA, 15 bp, Homo sapiens
aatggtcccgggttc

SEQ ID NO: 1626916 - DNA, 15 bp, Homo sapiens
gaatggtcccgggtt

SEQ ID NO: 1626917 - DNA, 15 bp, Homo sapiens
ggaatggtcccgggt

SEQ ID NO: 1626918 - DNA, 15 bp, Homo sapiens
aggaatggtcccggg

SEQ ID NO: 1626919 - DNA, 15 bp, Homo sapiens
gaggaatggtcccgg

SEQ ID NO: 1626920 - DNA, 15 bp, Homo sapiens
ggaggaatggtcccg

SEQ ID NO: 1626921 - DNA, 15 bp, Homo sapiens
aggaggaatggtccc

SEQ ID NO: 1626922 - DNA, 15 bp, Homo sapiens
taggaggaatggtcc

SEQ ID NO: 1626923 - DNA, 15 bp, Homo sapiens
ctaggaggaatggtc

SEQ ID NO: 1626924 - DNA, 15 bp, Homo sapiens
tctaggaggaatggt

SEQ ID NO: 1626925 - DNA, 15 bp, Homo sapiens
ttctaggaggaatgg

SEQ ID NO: 1626926 - DNA, 15 bp, Homo sapiens
tttctaggaggaatg

SEQ ID NO: 1626927 - DNA, 15 bp, Homo sapiens
ctttctaggaggaat

SEQ ID NO: 1626928 - DNA, 15 bp, Homo sapiens
gctttctaggaggaa

SEQ ID NO: 1626929 - DNA, 15 bp, Homo sapiens
agctttctaggagga

SEQ ID NO: 1626930 - DNA, 15 bp, Homo sapiens
gagctttctaggagg

SEQ ID NO: 1626931 - DNA, 15 bp, Homo sapiens
ggagctttctaggag

SEQ ID NO: 1626932 - DNA, 15 bp, Homo sapiens
gggagctttctagga

SEQ ID NO: 1626933 - DNA, 15 bp, Homo sapiens
tgggagctttctagg

SEQ ID NO: 1626934 - DNA, 15 bp, Homo sapiens
ttgggagctttctag

SEQ ID NO: 1626935 - DNA, 15 bp, Homo sapiens
cttgggagctttcta

SEQ ID NO: 1626936 - DNA, 15 bp, Homo sapiens
gcttgggagctttct

SEQ ID NO: 1626937 - DNA, 15 bp, Homo sapiens
ggcttgggagctttc

SEQ ID NO: 1626938 - DNA, 15 bp, Homo sapiens
aggcttgggagcttt

SEQ ID NO: 1626939 - DNA, 15 bp, Homo sapiens
gaggcttgggagctt

SEQ ID NO: 1626940 - DNA, 15 bp, Homo sapiens
ggaggcttgggagct

SEQ ID NO: 1626941 - DNA, 15 bp, Homo sapiens
aggaggcttgggagc

SEQ ID NO: 1626942 - DNA, 15 bp, Homo sapiens
gaggaggcttgggag

SEQ ID NO: 1626943 - DNA, 15 bp, Homo sapiens
agaggaggcttggga

SEQ ID NO: 1626944 - DNA, 15 bp, Homo sapiens
gagaggaggcttggg

SEQ ID NO: 1626945 - DNA, 15 bp, Homo sapiens
cgagaggaggcttgg

SEQ ID NO: 1626946 - DNA, 15 bp, Homo sapiens
ccgagaggaggcttg

SEQ ID NO: 1626947 - DNA, 15 bp, Homo sapiens
accgagaggaggctt

SEQ ID NO: 1626948 - DNA, 15 bp, Homo sapiens
gaccgagaggaggct

SEQ ID NO: 1626949 - DNA, 15 bp, Homo sapiens
ggaccgagaggaggc

SEQ ID NO: 1626950 - DNA, 15 bp, Homo sapiens
gggaccgagaggagg

SEQ ID NO: 1626951 - DNA, 15 bp, Homo sapiens
ggggaccgagaggag

SEQ ID NO: 1626952 - DNA, 15 bp, Homo sapiens
tggggaccgagagga

SEQ ID NO: 1626953 - DNA, 15 bp, Homo sapiens
ctggggaccgagagg

SEQ ID NO: 1626954 - DNA, 15 bp, Homo sapiens
tctggggaccgagag

SEQ ID NO: 1626955 - DNA, 15 bp, Homo sapiens
gtctggggaccgaga

SEQ ID NO: 1626956 - DNA, 15 bp, Homo sapiens
tgtctggggaccgag

SEQ ID NO: 1626957 - DNA, 15 bp, Homo sapiens
gtgtctggggaccga

SEQ ID NO: 1626958 - DNA, 15 bp, Homo sapiens
agtgtctggggaccg

SEQ ID NO: 1626959 - DNA, 15 bp, Homo sapiens
cagtgtctggggacc

SEQ ID NO: 1626960 - DNA, 15 bp, Homo sapiens
cccagtgtctgggga

SEQ ID NO: 1626961 - DNA, 15 bp, Homo sapiens
gcccagtgtctgggg

SEQ ID NO: 1626962 - DNA, 15 bp, Homo sapiens
tgcccagtgtctggg

SEQ ID NO: 1626963 - DNA, 15 bp, Homo sapiens
atgcccagtgtctgg

SEQ ID NO: 1626964 - DNA, 15 bp, Homo sapiens
aatgcccagtgtctg

SEQ ID NO: 1626965 - DNA, 15 bp, Homo sapiens
aaatgcccagtgtct

SEQ ID NO: 1626966 - DNA, 15 bp, Homo sapiens
caaatgcccagtgtc

SEQ ID NO: 1626967 - DNA, 15 bp, Homo sapiens
ccaaatgcccagtgt

SEQ ID NO: 1626968 - DNA, 15 bp, Homo sapiens
gccaaatgcccagtg

SEQ ID NO: 1626969 - DNA, 15 bp, Homo sapiens
tgccaaatgcccagt

SEQ ID NO: 1626970 - DNA, 15 bp, Homo sapiens
ctgccaaatgcccag

SEQ ID NO: 1626971 - DNA, 15 bp, Homo sapiens
actgccaaatgccca

SEQ ID NO: 1626972 - DNA, 15 bp, Homo sapiens
cactgccaaatgccc

SEQ ID NO: 1626973 - DNA, 15 bp, Homo sapiens
tcactgccaaatgcc

SEQ ID NO: 1626974 - DNA, 15 bp, Homo sapiens
ttcactgccaaatgc

SEQ ID NO: 1626975 - DNA, 15 bp, Homo sapiens
gttcactgccaaatg

SEQ ID NO: 1626976 - DNA, 15 bp, Homo sapiens
ggttcactgccaaat

SEQ ID NO: 1626977 - DNA, 15 bp, Homo sapiens
tggttcactgccaaa

SEQ ID NO: 1626978 - DNA, 15 bp, Homo sapiens
ctggttcactgccaa

SEQ ID NO: 1626979 - DNA, 15 bp, Homo sapiens
tctggttcactgcca

SEQ ID NO: 1626980 - DNA, 15 bp, Homo sapiens
atctggttcactgcc

SEQ ID NO: 1626981 - DNA, 15 bp, Homo sapiens
catctggttcactgc

SEQ ID NO: 1626982 - DNA, 15 bp, Homo sapiens
gcatctggttcactg

SEQ ID NO: 1626983 - DNA, 15 bp, Homo sapiens
agcatctggttcact

SEQ ID NO: 1626984 - DNA, 15 bp, Homo sapiens
cagcatctggttcac

SEQ ID NO: 1626985 - DNA, 15 bp, Homo sapiens
ccagcatctggttca

SEQ ID NO: 1626986 - DNA, 15 bp, Homo sapiens
cccagcatctggttc

SEQ ID NO: 1626987 - DNA, 15 bp, Homo sapiens
ccccagcatctggtt

SEQ ID NO: 1626988 - DNA, 15 bp, Homo sapiens
cccccagcatctggt

SEQ ID NO: 1626989 - DNA, 15 bp, Homo sapiens
gcccccagcatctgg

SEQ ID NO: 1626990 - DNA, 15 bp, Homo sapiens
ggcccccagcatctg

SEQ ID NO: 1626991 - DNA, 15 bp, Homo sapiens
gggcccccagcatct

SEQ ID NO: 1626992 - DNA, 15 bp, Homo sapiens
agggcccccagcatc

SEQ ID NO: 1626993 - DNA, 15 bp, Homo sapiens
cagggcccccagcat

SEQ ID NO: 1626994 - DNA, 15 bp, Homo sapiens
acagggcccccagca

SEQ ID NO: 1626995 - DNA, 15 bp, Homo sapiens
gacagggcccccagc

SEQ ID NO: 1626996 - DNA, 15 bp, Homo sapiens
ggacagggcccccag

SEQ ID NO: 1626997 - DNA, 15 bp, Homo sapiens
aaggacagggccccc

SEQ ID NO: 1626998 - DNA, 15 bp, Homo sapiens
gaaggacagggcccc

SEQ ID NO: 1626999 - DNA, 15 bp, Homo sapiens
agaaggacagggccc

SEQ ID NO: 1627000 - DNA, 15 bp, Homo sapiens
cagaaggacagggcc

SEQ ID NO: 1627001 - DNA, 15 bp, Homo sapiens
ccagaaggacagggc

SEQ ID NO: 1627002 - DNA, 15 bp, Homo sapiens
accagaaggacaggg

SEQ ID NO: 1627003 - DNA, 15 bp, Homo sapiens
caccagaaggacagg

SEQ ID NO: 1627004 - DNA, 15 bp, Homo sapiens
ccaccagaaggacag

SEQ ID NO: 1627005 - DNA, 15 bp, Homo sapiens
tccaccagaaggaca

SEQ ID NO: 1627006 - DNA, 15 bp, Homo sapiens
ctccaccagaaggac

SEQ ID NO: 1627007 - DNA, 15 bp, Homo sapiens
cctccaccagaagga

SEQ ID NO: 1627008 - DNA, 15 bp, Homo sapiens
ccctccaccagaagg

SEQ ID NO: 1627009 - DNA, 15 bp, Homo sapiens
cccctccaccagaag

SEQ ID NO: 1627010 - DNA, 15 bp, Homo sapiens
ccccctccaccagaa

SEQ ID NO: 1627011 - DNA, 15 bp, Homo sapiens
tccccctccaccaga

SEQ ID NO: 1627012 - DNA, 15 bp, Homo sapiens
ctccccctccaccag

SEQ ID NO: 1627013 - DNA, 15 bp, Homo sapiens
cctccccctccacca

SEQ ID NO: 1627014 - DNA, 15 bp, Homo sapiens
tcctccccctccacc

SEQ ID NO: 1627015 - DNA, 15 bp, Homo sapiens
ctcctccccctccac

SEQ ID NO: 1627016 - DNA, 15 bp, Homo sapiens
cctcctccccctcca

SEQ ID NO: 1627017 - DNA, 15 bp, Homo sapiens
ccctcctccccctcc

SEQ ID NO: 1627018 - DNA, 15 bp, Homo sapiens
gccctcctccccctc

SEQ ID NO: 1627019 - DNA, 15 bp, Homo sapiens
agccctcctccccct

SEQ ID NO: 1627020 - DNA, 15 bp, Homo sapiens
gagccctcctccccc

SEQ ID NO: 1627021 - DNA, 15 bp, Homo sapiens
tgagccctcctcccc

SEQ ID NO: 1627022 - DNA, 15 bp, Homo sapiens
ctgagccctcctccc

SEQ ID NO: 1627023 - DNA, 15 bp, Homo sapiens
gctgagccctcctcc

SEQ ID NO: 1627024 - DNA, 15 bp, Homo sapiens
ggctgagccctcctc

SEQ ID NO: 1627025 - DNA, 15 bp, Homo sapiens
gggctgagccctcct

SEQ ID NO: 1627026 - DNA, 15 bp, Homo sapiens
tgggctgagccctcc

SEQ ID NO: 1627027 - DNA, 15 bp, Homo sapiens
ctgggctgagccctc

SEQ ID NO: 1627028 - DNA, 15 bp, Homo sapiens
tctgggctgagccct

SEQ ID NO: 1627029 - DNA, 15 bp, Homo sapiens
ttctgggctgagccc

SEQ ID NO: 1627030 - DNA, 15 bp, Homo sapiens
attctgggctgagcc

SEQ ID NO: 1627031 - DNA, 15 bp, Homo sapiens
cattctgggctgagc

SEQ ID NO: 1627032 - DNA, 15 bp, Homo sapiens
acattctgggctgag

SEQ ID NO: 1627033 - DNA, 15 bp, Homo sapiens
aacattctgggctga

SEQ ID NO: 1627034 - DNA, 15 bp, Homo sapiens
gaacattctgggctg

SEQ ID NO: 1627035 - DNA, 15 bp, Homo sapiens
tgaacattctgggct

SEQ ID NO: 1627036 - DNA, 15 bp, Homo sapiens
ctgaacattctgggc

SEQ ID NO: 1627037 - DNA, 15 bp, Homo sapiens
tctgaacattctggg

SEQ ID NO: 1627038 - DNA, 15 bp, Homo sapiens
gtctgaacattctgg

SEQ ID NO: 1627039 - DNA, 15 bp, Homo sapiens
ggtctgaacattctg

SEQ ID NO: 1627040 - DNA, 15 bp, Homo sapiens
tggtctgaacattct

SEQ ID NO: 1627041 - DNA, 15 bp, Homo sapiens
ctggtctgaacattc

SEQ ID NO: 1627042 - DNA, 15 bp, Homo sapiens
cctggtctgaacatt

SEQ ID NO: 1627043 - DNA, 15 bp, Homo sapiens
gcctggtctgaacat

SEQ ID NO: 1627044 - DNA, 15 bp, Homo sapiens
ggcctggtctgaaca

SEQ ID NO: 1627045 - DNA, 15 bp, Homo sapiens
cggcctggtctgaac

SEQ ID NO: 1627046 - DNA, 15 bp, Homo sapiens
ccggcctggtctgaa

SEQ ID NO: 1627047 - DNA, 15 bp, Homo sapiens
gccggcctggtctga

SEQ ID NO: 1627048 - DNA, 15 bp, Homo sapiens
agccggcctggtctg

SEQ ID NO: 1627049 - DNA, 15 bp, Homo sapiens
gagccggcctggtct

SEQ ID NO: 1627050 - DNA, 15 bp, Homo sapiens
tgagccggcctggtc

SEQ ID NO: 1627051 - DNA, 15 bp, Homo sapiens
ttgagccggcctggt

SEQ ID NO: 1627052 - DNA, 15 bp, Homo sapiens
attgagccggcctgg

SEQ ID NO: 1627053 - DNA, 15 bp, Homo sapiens
cattgagccggcctg

SEQ ID NO: 1627054 - DNA, 15 bp, Homo sapiens
ccattgagccggcct

SEQ ID NO: 1627055 - DNA, 15 bp, Homo sapiens
gccattgagccggcc

SEQ ID NO: 1627056 - DNA, 15 bp, Homo sapiens
tgccattgagccggc

SEQ ID NO: 1627057 - DNA, 15 bp, Homo sapiens
ctgccattgagccgg

SEQ ID NO: 1627058 - DNA, 15 bp, Homo sapiens
cctgccattgagccg

SEQ ID NO: 1627059 - DNA, 15 bp, Homo sapiens
gcctgccattgagcc

SEQ ID NO: 1627060 - DNA, 15 bp, Homo sapiens
ggcctgccattgagc

SEQ ID NO: 1627061 - DNA, 15 bp, Homo sapiens
aggcctgccattgag

SEQ ID NO: 1627062 - DNA, 15 bp, Homo sapiens
taggcctgccattga

SEQ ID NO: 1627063 - DNA, 15 bp, Homo sapiens
ttaggcctgccattg

SEQ ID NO: 1627064 - DNA, 15 bp, Homo sapiens
cttaggcctgccatt

SEQ ID NO: 1627065 - DNA, 15 bp, Homo sapiens
gcttaggcctgccat

SEQ ID NO: 1627066 - DNA, 15 bp, Homo sapiens
ggcttaggcctgcca

SEQ ID NO: 1627067 - DNA, 15 bp, Homo sapiens
aggcttaggcctgcc

SEQ ID NO: 1627068 - DNA, 15 bp, Homo sapiens
aaggcttaggcctgc

SEQ ID NO: 1627069 - DNA, 15 bp, Homo sapiens
taaggcttaggcctg

SEQ ID NO: 1627070 - DNA, 15 bp, Homo sapiens
gtaaggcttaggcct

SEQ ID NO: 1627071 - DNA, 15 bp, Homo sapiens
cgtaaggcttaggcc

SEQ ID NO: 1627072 - DNA, 15 bp, Homo sapiens
tcgtaaggcttaggc

SEQ ID NO: 1627073 - DNA, 15 bp, Homo sapiens
atcgtaaggcttagg

SEQ ID NO: 1627074 - DNA, 15 bp, Homo sapiens
catcgtaaggcttag

SEQ ID NO: 1627075 - DNA, 15 bp, Homo sapiens
gcatcgtaaggctta

SEQ ID NO: 1627076 - DNA, 15 bp, Homo sapiens
agcatcgtaaggctt

SEQ ID NO: 1627077 - DNA, 15 bp, Homo sapiens
cagcatcgtaaggct

SEQ ID NO: 1627078 - DNA, 15 bp, Homo sapiens
acagcatcgtaaggc

SEQ ID NO: 1627079 - DNA, 15 bp, Homo sapiens
aacagcatcgtaagg

SEQ ID NO: 1627080 - DNA, 15 bp, Homo sapiens
gaacagcatcgtaag

SEQ ID NO: 1627081 - DNA, 15 bp, Homo sapiens
ggaacagcatcgtaa

SEQ ID NO: 1627082 - DNA, 15 bp, Homo sapiens
gggaacagcatcgta

SEQ ID NO: 1627083 - DNA, 15 bp, Homo sapiens
agggaacagcatcgt

SEQ ID NO: 1627084 - DNA, 15 bp, Homo sapiens
cagggaacagcatcg

SEQ ID NO: 1627085 - DNA, 15 bp, Homo sapiens
gcagggaacagcatc

SEQ ID NO: 1627086 - DNA, 15 bp, Homo sapiens
agcagggaacagcat

SEQ ID NO: 1627087 - DNA, 15 bp, Homo sapiens
cagcagggaacagca

SEQ ID NO: 1627088 - DNA, 15 bp, Homo sapiens
acagcagggaacagc

SEQ ID NO: 1627089 - DNA, 15 bp, Homo sapiens
cacagcagggaacag

SEQ ID NO: 1627090 - DNA, 15 bp, Homo sapiens
acacagcagggaaca

SEQ ID NO: 1627091 - DNA, 15 bp, Homo sapiens
gacacagcagggaac

SEQ ID NO: 1627092 - DNA, 15 bp, Homo sapiens
agacacagcagggaa

SEQ ID NO: 1627093 - DNA, 15 bp, Homo sapiens
cagacacagcaggga

SEQ ID NO: 1627094 - DNA, 15 bp, Homo sapiens
acagacacagcaggg

SEQ ID NO: 1627095 - DNA, 15 bp, Homo sapiens
tacagacacagcagg

SEQ ID NO: 1627096 - DNA, 15 bp, Homo sapiens
ctacagacacagcag

SEQ ID NO: 1627097 - DNA, 15 bp, Homo sapiens
gctacagacacagca

SEQ ID NO: 1627098 - DNA, 15 bp, Homo sapiens
agctacagacacagc

SEQ ID NO: 1627099 - DNA, 15 bp, Homo sapiens
gagctacagacacag

SEQ ID NO: 1627100 - DNA, 15 bp, Homo sapiens
tgagctacagacaca

SEQ ID NO: 1627101 - DNA, 15 bp, Homo sapiens
ttgagctacagacac

SEQ ID NO: 1627102 - DNA, 15 bp, Homo sapiens
gttgagctacagaca

SEQ ID NO: 1627103 - DNA, 15 bp, Homo sapiens
tgttgagctacagac

SEQ ID NO: 1627104 - DNA, 15 bp, Homo sapiens
ttgttgagctacaga

SEQ ID NO: 1627105 - DNA, 15 bp, Homo sapiens
gttgttgagctacag

SEQ ID NO: 1627106 - DNA, 15 bp, Homo sapiens
agttgttgagctaca

SEQ ID NO: 1627107 - DNA, 15 bp, Homo sapiens
gagttgttgagctac

SEQ ID NO: 1627108 - DNA, 15 bp, Homo sapiens
ggagttgttgagcta

SEQ ID NO: 1627109 - DNA, 15 bp, Homo sapiens
cggagttgttgagct

SEQ ID NO: 1627110 - DNA, 15 bp, Homo sapiens
tcggagttgttgagc

SEQ ID NO: 1627111 - DNA, 15 bp, Homo sapiens
gtcggagttgttgag

SEQ ID NO: 1627112 - DNA, 15 bp, Homo sapiens
agtcggagttgttga

SEQ ID NO: 1627113 - DNA, 15 bp, Homo sapiens
gagtcggagttgttg

SEQ ID NO: 1627114 - DNA, 15 bp, Homo sapiens
agagtcggagttgtt

SEQ ID NO: 1627115 - DNA, 15 bp, Homo sapiens
cagagtcggagttgt

SEQ ID NO: 1627116 - DNA, 15 bp, Homo sapiens
ccagagtcggagttg

SEQ ID NO: 1627117 - DNA, 15 bp, Homo sapiens
cccagagtcggagtt

SEQ ID NO: 1627118 - DNA, 15 bp, Homo sapiens
gcccagagtcggagt

SEQ ID NO: 1627119 - DNA, 15 bp, Homo sapiens
agcccagagtcggag

SEQ ID NO: 1627120 - DNA, 15 bp, Homo sapiens
gagcccagagtcgga

SEQ ID NO: 1627121 - DNA, 15 bp, Homo sapiens
agagcccagagtcgg

SEQ ID NO: 1627122 - DNA, 15 bp, Homo sapiens
aagagcccagagtcg

SEQ ID NO: 1627123 - DNA, 15 bp, Homo sapiens
gaagagcccagagtc

SEQ ID NO: 1627124 - DNA, 15 bp, Homo sapiens
tgaagagcccagagt

SEQ ID NO: 1627125 - DNA, 15 bp, Homo sapiens
gtgaagagcccagag

SEQ ID NO: 1627126 - DNA, 15 bp, Homo sapiens
cgtgaagagcccaga

SEQ ID NO: 1627127 - DNA, 15 bp, Homo sapiens
ccgtgaagagcccag

SEQ ID NO: 1627128 - DNA, 15 bp, Homo sapiens
accgtgaagagccca

SEQ ID NO: 1627129 - DNA, 15 bp, Homo sapiens
caccgtgaagagccc

SEQ ID NO: 1627130 - DNA, 15 bp, Homo sapiens
acaccgtgaagagcc

SEQ ID NO: 1627131 - DNA, 15 bp, Homo sapiens
aacaccgtgaagagc

SEQ ID NO: 1627132 - DNA, 15 bp, Homo sapiens
gaacaccgtgaagag

SEQ ID NO: 1627133 - DNA, 15 bp, Homo sapiens
tgaacaccgtgaaga

SEQ ID NO: 1627134 - DNA, 15 bp, Homo sapiens
gtgaacaccgtgaag

SEQ ID NO: 1627135 - DNA, 15 bp, Homo sapiens
cgtgaacaccgtgaa

SEQ ID NO: 1627136 - DNA, 15 bp, Homo sapiens
ccgtgaacaccgtga

SEQ ID NO: 1627137 - DNA, 15 bp, Homo sapiens
cccgtgaacaccgtg

SEQ ID NO: 1627138 - DNA, 15 bp, Homo sapiens
ccccgtgaacaccgt

SEQ ID NO: 1627139 - DNA, 15 bp, Homo sapiens
cccccgtgaacaccg

SEQ ID NO: 1627140 - DNA, 15 bp, Homo sapiens
acccccgtgaacacc

SEQ ID NO: 1627141 - DNA, 15 bp, Homo sapiens
gacccccgtgaacac

SEQ ID NO: 1627142 - DNA, 15 bp, Homo sapiens
ggacccccgtgaaca

SEQ ID NO: 1627143 - DNA, 15 bp, Homo sapiens
tggacccccgtgaac

SEQ ID NO: 1627144 - DNA, 15 bp, Homo sapiens
ctggacccccgtgaa

SEQ ID NO: 1627145 - DNA, 15 bp, Homo sapiens
tctggacccccgtga

SEQ ID NO: 1627146 - DNA, 15 bp, Homo sapiens
ttctggacccccgtg

SEQ ID NO: 1627147 - DNA, 15 bp, Homo sapiens
gttctggacccccgt

SEQ ID NO: 1627148 - DNA, 15 bp, Homo sapiens
tgttctggacccccg

SEQ ID NO: 1627149 - DNA, 15 bp, Homo sapiens
atgttctggaccccc

SEQ ID NO: 1627150 - DNA, 15 bp, Homo sapiens
gatgttctggacccc

SEQ ID NO: 1627151 - DNA, 15 bp, Homo sapiens
tgatgttctggaccc

SEQ ID NO: 1627152 - DNA, 15 bp, Homo sapiens
ctgatgttctggacc

SEQ ID NO: 1627153 - DNA, 15 bp, Homo sapiens
gctgatgttctggac

SEQ ID NO: 1627154 - DNA, 15 bp, Homo sapiens
tgctgatgttctgga

SEQ ID NO: 1627155 - DNA, 15 bp, Homo sapiens
ctgctgatgttctgg

SEQ ID NO: 1627156 - DNA, 15 bp, Homo sapiens
cctgctgatgttctg

SEQ ID NO: 1627157 - DNA, 15 bp, Homo sapiens
tcctgctgatgttct

SEQ ID NO: 1627158 - DNA, 15 bp, Homo sapiens
atcctgctgatgttc

SEQ ID NO: 1627159 - DNA, 15 bp, Homo sapiens
gatcctgctgatgtt

SEQ ID NO: 1627160 - DNA, 15 bp, Homo sapiens
ggatcctgctgatgt

SEQ ID NO: 1627161 - DNA, 15 bp, Homo sapiens
tggatcctgctgatg

SEQ ID NO: 1627162 - DNA, 15 bp, Homo sapiens
aacttgcctaaaggc

SEQ ID NO: 1627163 - DNA, 15 bp, Homo sapiens
taacttgcctaaagg

SEQ ID NO: 1627164 - DNA, 15 bp, Homo sapiens
gtaacttgcctaaag

SEQ ID NO: 1627165 - DNA, 15 bp, Homo sapiens
agtaacttgcctaaa

SEQ ID NO: 1627166 - DNA, 15 bp, Homo sapiens
tagtaacttgcctaa

SEQ ID NO: 1627167 - DNA, 15 bp, Homo sapiens
gtagtaacttgccta

SEQ ID NO: 1627168 - DNA, 15 bp, Homo sapiens
tgtagtaacttgcct

SEQ ID NO: 1627169 - DNA, 15 bp, Homo sapiens
ctgtagtaacttgcc

SEQ ID NO: 1627170 - DNA, 15 bp, Homo sapiens
actgtagtaacttgc

SEQ ID NO: 1627171 - DNA, 15 bp, Homo sapiens
gactgtagtaacttg

SEQ ID NO: 1627172 - DNA, 15 bp, Homo sapiens
tgactgtagtaactt

SEQ ID NO: 1627173 - DNA, 15 bp, Homo sapiens
gtgactgtagtaact

SEQ ID NO: 1627174 - DNA, 15 bp, Homo sapiens
tgtgactgtagtaac

SEQ ID NO: 1627175 - DNA, 15 bp, Homo sapiens
gtgtgactgtagtaa

SEQ ID NO: 1627176 - DNA, 15 bp, Homo sapiens
cgtgtgactgtagta

SEQ ID NO: 1627177 - DNA, 15 bp, Homo sapiens
tcgtgtgactgtagt

SEQ ID NO: 1627178 - DNA, 15 bp, Homo sapiens
ttcgtgtgactgtag

SEQ ID NO: 1627179 - DNA, 15 bp, Homo sapiens
cttcgtgtgactgta

SEQ ID NO: 1627180 - DNA, 15 bp, Homo sapiens
ccttcgtgtgactgt

SEQ ID NO: 1627181 - DNA, 15 bp, Homo sapiens
tccttcgtgtgactg

SEQ ID NO: 1627182 - DNA, 15 bp, Homo sapiens
gtccttcgtgtgact

SEQ ID NO: 1627183 - DNA, 15 bp, Homo sapiens
tgtccttcgtgtgac

SEQ ID NO: 1627184 - DNA, 15 bp, Homo sapiens
ctgtccttcgtgtga

SEQ ID NO: 1627185 - DNA, 15 bp, Homo sapiens
cctgtccttcgtgtg

SEQ ID NO: 1627186 - DNA, 15 bp, Homo sapiens
tcctgtccttcgtgt

SEQ ID NO: 1627187 - DNA, 15 bp, Homo sapiens
ctcctgtccttcgtg

SEQ ID NO: 1627188 - DNA, 15 bp, Homo sapiens
tctcctgtccttcgt

SEQ ID NO: 1627189 - DNA, 15 bp, Homo sapiens
ctctcctgtccttcg

SEQ ID NO: 1627190 - DNA, 15 bp, Homo sapiens
gctctcctgtccttc

SEQ ID NO: 1627191 - DNA, 15 bp, Homo sapiens
agctctcctgtcctt

SEQ ID NO: 1627192 - DNA, 15 bp, Homo sapiens
cagctctcctgtcct

SEQ ID NO: 1627193 - DNA, 15 bp, Homo sapiens
acagctctcctgtcc

SEQ ID NO: 1627194 - DNA, 15 bp, Homo sapiens
cacagctctcctgtc

SEQ ID NO: 1627195 - DNA, 15 bp, Homo sapiens
tcacagctctcctgt

SEQ ID NO: 1627196 - DNA, 15 bp, Homo sapiens
atcacagctctcctg

SEQ ID NO: 1627197 - DNA, 15 bp, Homo sapiens
gatcacagctctcct

SEQ ID NO: 1627198 - DNA, 15 bp, Homo sapiens
tgatcacagctctcc

SEQ ID NO: 1627199 - DNA, 15 bp, Homo sapiens
gtgatcacagctctc

SEQ ID NO: 1627200 - DNA, 15 bp, Homo sapiens
tgtgatcacagctct

SEQ ID NO: 1627201 - DNA, 15 bp, Homo sapiens
ctgtgatcacagctc

SEQ ID NO: 1627202 - DNA, 15 bp, Homo sapiens
tctgtgatcacagct

SEQ ID NO: 1627203 - DNA, 15 bp, Homo sapiens
ctctgtgatcacagc

SEQ ID NO: 1627204 - DNA, 15 bp, Homo sapiens
gctctgtgatcacag

SEQ ID NO: 1627205 - DNA, 15 bp, Homo sapiens
agctctgtgatcaca

SEQ ID NO: 1627206 - DNA, 15 bp, Homo sapiens
gagctctgtgatcac

SEQ ID NO: 1627207 - DNA, 15 bp, Homo sapiens
tgagctctgtgatca

SEQ ID NO: 1627208 - DNA, 15 bp, Homo sapiens
ttgagctctgtgatc

SEQ ID NO: 1627209 - DNA, 15 bp, Homo sapiens
cttgagctctgtgat

SEQ ID NO: 1627210 - DNA, 15 bp, Homo sapiens
ccttgagctctgtga

SEQ ID NO: 1627211 - DNA, 15 bp, Homo sapiens
cccttgagctctgtg

SEQ ID NO: 1627212 - DNA, 15 bp, Homo sapiens
ccccttgagctctgt

SEQ ID NO: 1627213 - DNA, 15 bp, Homo sapiens
gccccttgagctctg

SEQ ID NO: 1627214 - DNA, 15 bp, Homo sapiens
tgccccttgagctct

SEQ ID NO: 1627215 - DNA, 15 bp, Homo sapiens
ctgccccttgagctc

SEQ ID NO: 1627216 - DNA, 15 bp, Homo sapiens
actgccccttgagct

SEQ ID NO: 1627217 - DNA, 15 bp, Homo sapiens
cactgccccttgagc

SEQ ID NO: 1627218 - DNA, 15 bp, Homo sapiens
ccactgccccttgag

SEQ ID NO: 1627219 - DNA, 15 bp, Homo sapiens
tccactgccccttga

SEQ ID NO: 1627220 - DNA, 15 bp, Homo sapiens
ctccactgccccttg

SEQ ID NO: 1627221 - DNA, 15 bp, Homo sapiens
tctccactgcccctt

SEQ ID NO: 1627222 - DNA, 15 bp, Homo sapiens
atctccactgcccct

SEQ ID NO: 1627223 - DNA, 15 bp, Homo sapiens
catctccactgcccc

SEQ ID NO: 1627224 - DNA, 15 bp, Homo sapiens
ccatctccactgccc

SEQ ID NO: 1627225 - DNA, 15 bp, Homo sapiens
cccatctccactgcc

SEQ ID NO: 1627226 - DNA, 15 bp, Homo sapiens
gcccatctccactgc

SEQ ID NO: 1627227 - DNA, 15 bp, Homo sapiens
cgcccatctccactg

SEQ ID NO: 1627228 - DNA, 15 bp, Homo sapiens
tcgcccatctccact

SEQ ID NO: 1627229 - DNA, 15 bp, Homo sapiens
ctcgcccatctccac

SEQ ID NO: 1627230 - DNA, 15 bp, Homo sapiens
actcgcccatctcca

SEQ ID NO: 1627231 - DNA, 15 bp, Homo sapiens
cactcgcccatctcc

SEQ ID NO: 1627232 - DNA, 15 bp, Homo sapiens
ccactcgcccatctc

SEQ ID NO: 1627233 - DNA, 15 bp, Homo sapiens
gccactcgcccatct

SEQ ID NO: 1627234 - DNA, 15 bp, Homo sapiens
agccactcgcccatc

SEQ ID NO: 1627235 - DNA, 15 bp, Homo sapiens
cagccactcgcccat

SEQ ID NO: 1627236 - DNA, 15 bp, Homo sapiens
gcagccactcgccca

SEQ ID NO: 1627237 - DNA, 15 bp, Homo sapiens
ggcagccactcgccc

SEQ ID NO: 1627238 - DNA, 15 bp, Homo sapiens
tggcagccactcgcc

SEQ ID NO: 1627239 - DNA, 15 bp, Homo sapiens
atggcagccactcgc

SEQ ID NO: 1627240 - DNA, 15 bp, Homo sapiens
catggcagccactcg

SEQ ID NO: 1627241 - DNA, 15 bp, Homo sapiens
ccatggcagccactc

SEQ ID NO: 1627242 - DNA, 15 bp, Homo sapiens
gccatggcagccact

SEQ ID NO: 1627243 - DNA, 15 bp, Homo sapiens
tgccatggcagccac

SEQ ID NO: 1627244 - DNA, 15 bp, Homo sapiens
ctgccatggcagcca

SEQ ID NO: 1627245 - DNA, 15 bp, Homo sapiens
cctgccatggcagcc

SEQ ID NO: 1627246 - DNA, 15 bp, Homo sapiens
ccctgccatggcagc

SEQ ID NO: 1627247 - DNA, 15 bp, Homo sapiens
cccctgccatggcag

SEQ ID NO: 1627248 - DNA, 15 bp, Homo sapiens
tcccctgccatggca

SEQ ID NO: 1627249 - DNA, 15 bp, Homo sapiens
ttcccctgccatggc

SEQ ID NO: 1627250 - DNA, 15 bp, Homo sapiens
cttcccctgccatgg

SEQ ID NO: 1627251 - DNA, 15 bp, Homo sapiens
ccttcccctgccatg

SEQ ID NO: 1627252 - DNA, 15 bp, Homo sapiens
cccttcccctgccat

SEQ ID NO: 1627253 - DNA, 15 bp, Homo sapiens
tcccttcccctgcca

SEQ ID NO: 1627254 - DNA, 15 bp, Homo sapiens
atcccttcccctgcc

SEQ ID NO: 1627255 - DNA, 15 bp, Homo sapiens
catcccttcccctgc

SEQ ID NO: 1627256 - DNA, 15 bp, Homo sapiens
gcatcccttcccctg

SEQ ID NO: 1627257 - DNA, 15 bp, Homo sapiens
agcatcccttcccct

SEQ ID NO: 1627258 - DNA, 15 bp, Homo sapiens
cagcatcccttcccc

SEQ ID NO: 1627259 - DNA, 15 bp, Homo sapiens
gcagcatcccttccc

SEQ ID NO: 1627260 - DNA, 15 bp, Homo sapiens
ggcagcatcccttcc

SEQ ID NO: 1627261 - DNA, 15 bp, Homo sapiens
gggcagcatcccttc

SEQ ID NO: 1627262 - DNA, 15 bp, Homo sapiens
tgggcagcatccctt

SEQ ID NO: 1627263 - DNA, 15 bp, Homo sapiens
gtgggcagcatccct

SEQ ID NO: 1627264 - DNA, 15 bp, Homo sapiens
agtgggcagcatccc

SEQ ID NO: 1627265 - DNA, 15 bp, Homo sapiens
cagtgggcagcatcc

SEQ ID NO: 1627266 - DNA, 15 bp, Homo sapiens
ccagtgggcagcatc

SEQ ID NO: 1627267 - DNA, 15 bp, Homo sapiens
gccagtgggcagcat

SEQ ID NO: 1627268 - DNA, 15 bp, Homo sapiens
tgccagtgggcagca

SEQ ID NO: 1627269 - DNA, 15 bp, Homo sapiens
ctgccagtgggcagc

SEQ ID NO: 1627270 - DNA, 15 bp, Homo sapiens
cctgccagtgggcag

SEQ ID NO: 1627271 - DNA, 15 bp, Homo sapiens
acctgccagtgggca

SEQ ID NO: 1627272 - DNA, 15 bp, Homo sapiens
gacctgccagtgggc

SEQ ID NO: 1627273 - DNA, 15 bp, Homo sapiens
tgacctgccagtggg

SEQ ID NO: 1627274 - DNA, 15 bp, Homo sapiens
atgacctgccagtgg

SEQ ID NO: 1627275 - DNA, 15 bp, Homo sapiens
gatgacctgccagtg

SEQ ID NO: 1627276 - DNA, 15 bp, Homo sapiens
tgatgacctgccagt

SEQ ID NO: 1627277 - DNA, 15 bp, Homo sapiens
ctgatgacctgccag

SEQ ID NO: 1627278 - DNA, 15 bp, Homo sapiens
cctgatgacctgcca

SEQ ID NO: 1627279 - DNA, 15 bp, Homo sapiens
tcctgatgacctgcc

SEQ ID NO: 1627280 - DNA, 15 bp, Homo sapiens
ttcctgatgacctgc

SEQ ID NO: 1627281 - DNA, 15 bp, Homo sapiens
tttcctgatgacctg

SEQ ID NO: 1627282 - DNA, 15 bp, Homo sapiens
ctttcctgatgacct

SEQ ID NO: 1627283 - DNA, 15 bp, Homo sapiens
cctttcctgatgacc

SEQ ID NO: 1627284 - DNA, 15 bp, Homo sapiens
gcctttcctgatgac

SEQ ID NO: 1627285 - DNA, 15 bp, Homo sapiens
agcctttcctgatga

SEQ ID NO: 1627286 - DNA, 15 bp, Homo sapiens
cagcctttcctgatg

SEQ ID NO: 1627287 - DNA, 15 bp, Homo sapiens
acagcctttcctgat

SEQ ID NO: 1627288 - DNA, 15 bp, Homo sapiens
aacagcctttcctga

SEQ ID NO: 1627289 - DNA, 15 bp, Homo sapiens
aaacagcctttcctg

SEQ ID NO: 1627290 - DNA, 15 bp, Homo sapiens
aaaacagcctttcct

SEQ ID NO: 1627291 - DNA, 15 bp, Homo sapiens
aaaaacagcctttcc

SEQ ID NO: 1627292 - DNA, 15 bp, Homo sapiens
caaaaacagcctttc

SEQ ID NO: 1627293 - DNA, 15 bp, Homo sapiens
ccaaaaacagccttt

SEQ ID NO: 1627294 - DNA, 15 bp, Homo sapiens
tccaaaaacagcctt

SEQ ID NO: 1627295 - DNA, 15 bp, Homo sapiens
atccaaaaacagcct

SEQ ID NO: 1627296 - DNA, 15 bp, Homo sapiens
catccaaaaacagcc

SEQ ID NO: 1627297 - DNA, 15 bp, Homo sapiens
gcatccaaaaacagc

SEQ ID NO: 1627298 - DNA, 15 bp, Homo sapiens
tgcatccaaaaacag

SEQ ID NO: 1627299 - DNA, 15 bp, Homo sapiens
atgcatccaaaaaca

SEQ ID NO: 1627300 - DNA, 15 bp, Homo sapiens
catgcatccaaaaac

SEQ ID NO: 1627301 - DNA, 15 bp, Homo sapiens
ccatgcatccaaaaa

SEQ ID NO: 1627302 - DNA, 15 bp, Homo sapiens
tccatgcatccaaaa

SEQ ID NO: 1627303 - DNA, 15 bp, Homo sapiens
gtccatgcatccaaa

SEQ ID NO: 1627304 - DNA, 15 bp, Homo sapiens
ggtccatgcatccaa

SEQ ID NO: 1627305 - DNA, 15 bp, Homo sapiens
tggtccatgcatcca

SEQ ID NO: 1627306 - DNA, 15 bp, Homo sapiens
ctggtccatgcatcc

SEQ ID NO: 1627307 - DNA, 15 bp, Homo sapiens
tctggtccatgcatc

SEQ ID NO: 1627308 - DNA, 15 bp, Homo sapiens
ttctggtccatgcat

SEQ ID NO: 1627309 - DNA, 15 bp, Homo sapiens
tttctggtccatgca

SEQ ID NO: 1627310 - DNA, 15 bp, Homo sapiens
ctttctggtccatgc

SEQ ID NO: 1627311 - DNA, 15 bp, Homo sapiens
gctttctggtccatg

SEQ ID NO: 1627312 - DNA, 15 bp, Homo sapiens
ggctttctggtccat

SEQ ID NO: 1627313 - DNA, 15 bp, Homo sapiens
tggctttctggtcca

SEQ ID NO: 1627314 - DNA, 15 bp, Homo sapiens
gtggctttctggtcc

SEQ ID NO: 1627315 - DNA, 15 bp, Homo sapiens
agtggctttctggtc

SEQ ID NO: 1627316 - DNA, 15 bp, Homo sapiens
gagtggctttctggt

SEQ ID NO: 1627317 - DNA, 15 bp, Homo sapiens
agagtggctttctgg

SEQ ID NO: 1627318 - DNA, 15 bp, Homo sapiens
gagagtggctttctg

SEQ ID NO: 1627319 - DNA, 15 bp, Homo sapiens
agagagtggctttct

SEQ ID NO: 1627320 - DNA, 15 bp, Homo sapiens
cagagagtggctttc

SEQ ID NO: 1627321 - DNA, 15 bp, Homo sapiens
tcagagagtggcttt

SEQ ID NO: 1627322 - DNA, 15 bp, Homo sapiens
ctcagagagtggctt

SEQ ID NO: 1627323 - DNA, 15 bp, Homo sapiens
cctcagagagtggct

SEQ ID NO: 1627324 - DNA, 15 bp, Homo sapiens
acctcagagagtggc

SEQ ID NO: 1627325 - DNA, 15 bp, Homo sapiens
cacctcagagagtgg

SEQ ID NO: 1627326 - DNA, 15 bp, Homo sapiens
ccacctcagagagtg

SEQ ID NO: 1627327 - DNA, 15 bp, Homo sapiens
gccacctcagagagt

SEQ ID NO: 1627328 - DNA, 15 bp, Homo sapiens
ggccacctcagagag

SEQ ID NO: 1627329 - DNA, 15 bp, Homo sapiens
gggccacctcagaga

SEQ ID NO: 1627330 - DNA, 15 bp, Homo sapiens
ggggccacctcagag

SEQ ID NO: 1627331 - DNA, 15 bp, Homo sapiens
gggggccacctcaga

SEQ ID NO: 1627332 - DNA, 15 bp, Homo sapiens
tgggggccacctcag

SEQ ID NO: 1627333 - DNA, 15 bp, Homo sapiens
gtgggggccacctca

SEQ ID NO: 1627334 - DNA, 15 bp, Homo sapiens
ggtgggggccacctc

SEQ ID NO: 1627335 - DNA, 15 bp, Homo sapiens
aggtgggggccacct

SEQ ID NO: 1627336 - DNA, 15 bp, Homo sapiens
caggtgggggccacc

SEQ ID NO: 1627337 - DNA, 15 bp, Homo sapiens
gcaggtgggggccac

SEQ ID NO: 1627338 - DNA, 15 bp, Homo sapiens
tgcaggtgggggcca

SEQ ID NO: 1627339 - DNA, 15 bp, Homo sapiens
atgcaggtgggggcc

SEQ ID NO: 1627340 - DNA, 15 bp, Homo sapiens
gatgcaggtgggggc

SEQ ID NO: 1627341 - DNA, 15 bp, Homo sapiens
tgatgcaggtggggg

SEQ ID NO: 1627342 - DNA, 15 bp, Homo sapiens
atgatgcaggtgggg

SEQ ID NO: 1627343 - DNA, 15 bp, Homo sapiens
gatgatgcaggtggg

SEQ ID NO: 1627344 - DNA, 15 bp, Homo sapiens
ggatgatgcaggtgg

SEQ ID NO: 1627345 - DNA, 15 bp, Homo sapiens
aggatgatgcaggtg

SEQ ID NO: 1627346 - DNA, 15 bp, Homo sapiens
taggatgatgcaggt

SEQ ID NO: 1627347 - DNA, 15 bp, Homo sapiens
ctaggatgatgcagg

SEQ ID NO: 1627348 - DNA, 15 bp, Homo sapiens
cctaggatgatgcag

SEQ ID NO: 1627349 - DNA, 15 bp, Homo sapiens
ccctaggatgatgca

SEQ ID NO: 1627350 - DNA, 15 bp, Homo sapiens
gccctaggatgatgc

SEQ ID NO: 1627351 - DNA, 15 bp, Homo sapiens
ggccctaggatgatg

SEQ ID NO: 1627352 - DNA, 15 bp, Homo sapiens
tggccctaggatgat

SEQ ID NO: 1627353 - DNA, 15 bp, Homo sapiens
gtggccctaggatga

SEQ ID NO: 1627354 - DNA, 15 bp, Homo sapiens
tgtggccctaggatg

SEQ ID NO: 1627355 - DNA, 15 bp, Homo sapiens
ctgtggccctaggat

SEQ ID NO: 1627356 - DNA, 15 bp, Homo sapiens
cctgtggccctagga

SEQ ID NO: 1627357 - DNA, 15 bp, Homo sapiens
gcctgtggccctagg

SEQ ID NO: 1627358 - DNA, 15 bp, Homo sapiens
ggcctgtggccctag

SEQ ID NO: 1627359 - DNA, 15 bp, Homo sapiens
cggcctgtggcccta

SEQ ID NO: 1627360 - DNA, 15 bp, Homo sapiens
tcggcctgtggccct

SEQ ID NO: 1627361 - DNA, 15 bp, Homo sapiens
ctcggcctgtggccc

SEQ ID NO: 1627362 - DNA, 15 bp, Homo sapiens
cctcggcctgtggcc

SEQ ID NO: 1627363 - DNA, 15 bp, Homo sapiens
gcctcggcctgtggc

SEQ ID NO: 1627364 - DNA, 15 bp, Homo sapiens
ggcctcggcctgtgg

SEQ ID NO: 1627365 - DNA, 15 bp, Homo sapiens
aggcctcggcctgtg

SEQ ID NO: 1627366 - DNA, 15 bp, Homo sapiens
aaggcctcggcctgt

SEQ ID NO: 1627367 - DNA, 15 bp, Homo sapiens
agaaggcctcggcct

SEQ ID NO: 1627368 - DNA, 15 bp, Homo sapiens
cagaaggcctcggcc

SEQ ID NO: 1627369 - DNA, 15 bp, Homo sapiens
tcagaaggcctcggc

SEQ ID NO: 1627370 - DNA, 15 bp, Homo sapiens
ctcagaaggcctcgg

SEQ ID NO: 1627371 - DNA, 15 bp, Homo sapiens
cctcagaaggcctcg

SEQ ID NO: 1627372 - DNA, 15 bp, Homo sapiens
ccctcagaaggcctc

SEQ ID NO: 1627373 - DNA, 15 bp, Homo sapiens
cccctcagaaggcct

SEQ ID NO: 1627374 - DNA, 15 bp, Homo sapiens
gcccctcagaaggcc

SEQ ID NO: 1627375 - DNA, 15 bp, Homo sapiens
ggcccctcagaaggc

SEQ ID NO: 1627376 - DNA, 15 bp, Homo sapiens
aggcccctcagaagg

SEQ ID NO: 1627377 - DNA, 15 bp, Homo sapiens
aaggcccctcagaag

SEQ ID NO: 1627378 - DNA, 15 bp, Homo sapiens
caaggcccctcagaa

SEQ ID NO: 1627379 - DNA, 15 bp, Homo sapiens
ccaaggcccctcaga

SEQ ID NO: 1627380 - DNA, 15 bp, Homo sapiens
cccaaggcccctcag

SEQ ID NO: 1627381 - DNA, 15 bp, Homo sapiens
ccccaaggcccctca

SEQ ID NO: 1627382 - DNA, 15 bp, Homo sapiens
gccccaaggcccctc

SEQ ID NO: 1627383 - DNA, 15 bp, Homo sapiens
agccccaaggcccct

SEQ ID NO: 1627384 - DNA, 15 bp, Homo sapiens
cagccccaaggcccc

SEQ ID NO: 1627385 - DNA, 15 bp, Homo sapiens
gcagccccaaggccc

SEQ ID NO: 1627386 - DNA, 15 bp, Homo sapiens
ggcagccccaaggcc

SEQ ID NO: 1627387 - DNA, 15 bp, Homo sapiens
gggcagccccaaggc

SEQ ID NO: 1627388 - DNA, 15 bp, Homo sapiens
ggggcagccccaagg

SEQ ID NO: 1627389 - DNA, 15 bp, Homo sapiens
cggggcagccccaag

SEQ ID NO: 1627390 - DNA, 15 bp, Homo sapiens
gcggggcagccccaa

SEQ ID NO: 1627391 - DNA, 15 bp, Homo sapiens
agcggggcagcccca

SEQ ID NO: 1627392 - DNA, 15 bp, Homo sapiens
cagcggggcagcccc

SEQ ID NO: 1627393 - DNA, 15 bp, Homo sapiens
gcagcggggcagccc

SEQ ID NO: 1627394 - DNA, 15 bp, Homo sapiens
agcagcggggcagcc

SEQ ID NO: 1627395 - DNA, 15 bp, Homo sapiens
gagcagcggggcagc

SEQ ID NO: 1627396 - DNA, 15 bp, Homo sapiens
agagcagcggggcag

SEQ ID NO: 1627397 - DNA, 15 bp, Homo sapiens
cagagcagcggggca

SEQ ID NO: 1627398 - DNA, 15 bp, Homo sapiens
gcagagcagcggggc

SEQ ID NO: 1627399 - DNA, 15 bp, Homo sapiens
agcagagcagcgggg

SEQ ID NO: 1627400 - DNA, 15 bp, Homo sapiens
cagcagagcagcggg

SEQ ID NO: 1627401 - DNA, 15 bp, Homo sapiens
ccagcagagcagcgg

SEQ ID NO: 1627402 - DNA, 15 bp, Homo sapiens
accagcagagcagcg

SEQ ID NO: 1627403 - DNA, 15 bp, Homo sapiens
gaccagcagagcagc

SEQ ID NO: 1627404 - DNA, 15 bp, Homo sapiens
agaccagcagagcag

SEQ ID NO: 1627405 - DNA, 15 bp, Homo sapiens
aagaccagcagagca

SEQ ID NO: 1627406 - DNA, 15 bp, Homo sapiens
caagaccagcagagc

SEQ ID NO: 1627407 - DNA, 15 bp, Homo sapiens
ccaagaccagcagag

SEQ ID NO: 1627408 - DNA, 15 bp, Homo sapiens
gccaagaccagcaga

SEQ ID NO: 1627409 - DNA, 15 bp, Homo sapiens
agccaagaccagcag

SEQ ID NO: 1627410 - DNA, 15 bp, Homo sapiens
gagccaagaccagca

SEQ ID NO: 1627411 - DNA, 15 bp, Homo sapiens
ggagccaagaccagc

SEQ ID NO: 1627412 - DNA, 15 bp, Homo sapiens
aggagccaagaccag

SEQ ID NO: 1627413 - DNA, 15 bp, Homo sapiens
gaggagccaagacca

SEQ ID NO: 1627414 - DNA, 15 bp, Homo sapiens
agaggagccaagacc

SEQ ID NO: 1627415 - DNA, 15 bp, Homo sapiens
cagaggagccaagac

SEQ ID NO: 1627416 - DNA, 15 bp, Homo sapiens
gcagaggagccaaga

SEQ ID NO: 1627417 - DNA, 15 bp, Homo sapiens
ctgcagaggagccaa

SEQ ID NO: 1627418 - DNA, 15 bp, Homo sapiens
gctgcagaggagcca

SEQ ID NO: 1627419 - DNA, 15 bp, Homo sapiens
tgctgcagaggagcc

SEQ ID NO: 1627420 - DNA, 15 bp, Homo sapiens
gtgctgcagaggagc

SEQ ID NO: 1627421 - DNA, 15 bp, Homo sapiens
ggtgctgcagaggag

SEQ ID NO: 1627422 - DNA, 15 bp, Homo sapiens
aggtgctgcagagga

SEQ ID NO: 1627423 - DNA, 15 bp, Homo sapiens
caggtgctgcagagg

SEQ ID NO: 1627424 - DNA, 15 bp, Homo sapiens
gcaggtgctgcagag

SEQ ID NO: 1627425 - DNA, 15 bp, Homo sapiens
agcaggtgctgcaga

SEQ ID NO: 1627426 - DNA, 15 bp, Homo sapiens
aagcaggtgctgcag

SEQ ID NO: 1627427 - DNA, 15 bp, Homo sapiens
gaagcaggtgctgca

SEQ ID NO: 1627428 - DNA, 15 bp, Homo sapiens
tccgggagaagcggg

SEQ ID NO: 1627429 - DNA, 15 bp, Homo sapiens
gtccgggagaagcgg

SEQ ID NO: 1627430 - DNA, 15 bp, Homo sapiens
agtccgggagaagcg

SEQ ID NO: 1627431 - DNA, 15 bp, Homo sapiens
gagtccgggagaagc

SEQ ID NO: 1627432 - DNA, 15 bp, Homo sapiens
agagtccgggagaag

SEQ ID NO: 1627433 - DNA, 15 bp, Homo sapiens
gagagtccgggagaa

SEQ ID NO: 1627434 - DNA, 15 bp, Homo sapiens
ggagagtccgggaga

SEQ ID NO: 1627435 - DNA, 15 bp, Homo sapiens
gggagagtccgggag

SEQ ID NO: 1627436 - DNA, 15 bp, Homo sapiens
tgggagagtccggga

SEQ ID NO: 1627437 - DNA, 15 bp, Homo sapiens
ctgggagagtccggg

SEQ ID NO: 1627438 - DNA, 15 bp, Homo sapiens
gctgggagagtccgg

SEQ ID NO: 1627439 - DNA, 15 bp, Homo sapiens
cgctgggagagtccg

SEQ ID NO: 1627440 - DNA, 15 bp, Homo sapiens
ccgctgggagagtcc

SEQ ID NO: 1627441 - DNA, 15 bp, Homo sapiens
tccgctgggagagtc

SEQ ID NO: 1627442 - DNA, 15 bp, Homo sapiens
gtccgctgggagagt

SEQ ID NO: 1627443 - DNA, 15 bp, Homo sapiens
tgtccgctgggagag

SEQ ID NO: 1627444 - DNA, 15 bp, Homo sapiens
ctgtccgctgggaga

SEQ ID NO: 1627445 - DNA, 15 bp, Homo sapiens
gctgtccgctgggag

SEQ ID NO: 1627446 - DNA, 15 bp, Homo sapiens
ggctgtccgctggga

SEQ ID NO: 1627447 - DNA, 15 bp, Homo sapiens
gggctgtccgctggg

SEQ ID NO: 1627448 - DNA, 15 bp, Homo sapiens
ggggctgtccgctgg

SEQ ID NO: 1627449 - DNA, 15 bp, Homo sapiens
gggggctgtccgctg

SEQ ID NO: 1627450 - DNA, 15 bp, Homo sapiens
ggggggctgtccgct

SEQ ID NO: 1627451 - DNA, 15 bp, Homo sapiens
tggggggctgtccgc

SEQ ID NO: 1627452 - DNA, 15 bp, Homo sapiens
ctggggggctgtccg

SEQ ID NO: 1627453 - DNA, 15 bp, Homo sapiens
gctggggggctgtcc

SEQ ID NO: 1627454 - DNA, 15 bp, Homo sapiens
ggctggggggctgtc

SEQ ID NO: 1627455 - DNA, 15 bp, Homo sapiens
gggctggggggctgt

SEQ ID NO: 1627456 - DNA, 15 bp, Homo sapiens
ggggctggggggctg

SEQ ID NO: 1627457 - DNA, 15 bp, Homo sapiens
tggggctggggggct

SEQ ID NO: 1627458 - DNA, 15 bp, Homo sapiens
gtggggctggggggc

SEQ ID NO: 1627459 - DNA, 15 bp, Homo sapiens
tgtggggctgggggg

SEQ ID NO: 1627460 - DNA, 15 bp, Homo sapiens
ctgtggggctggggg

SEQ ID NO: 1627461 - DNA, 15 bp, Homo sapiens
gctgtggggctgggg

SEQ ID NO: 1627462 - DNA, 15 bp, Homo sapiens
ggctgtggggctggg

SEQ ID NO: 1627463 - DNA, 15 bp, Homo sapiens
aggctgtggggctgg

SEQ ID NO: 1627464 - DNA, 15 bp, Homo sapiens
caggctgtggggctg

SEQ ID NO: 1627465 - DNA, 15 bp, Homo sapiens
tcaggctgtggggct

SEQ ID NO: 1627466 - DNA, 15 bp, Homo sapiens
ctcaggctgtggggc

SEQ ID NO: 1627467 - DNA, 15 bp, Homo sapiens
gctcaggctgtgggg

SEQ ID NO: 1627468 - DNA, 15 bp, Homo sapiens
ggctcaggctgtggg

SEQ ID NO: 1627469 - DNA, 15 bp, Homo sapiens
aggctcaggctgtgg

SEQ ID NO: 1627470 - DNA, 15 bp, Homo sapiens
gaggctcaggctgtg

SEQ ID NO: 1627471 - DNA, 15 bp, Homo sapiens
ggaggctcaggctgt

SEQ ID NO: 1627472 - DNA, 15 bp, Homo sapiens
gggaggctcaggctg

SEQ ID NO: 1627473 - DNA, 15 bp, Homo sapiens
tgggaggctcaggct

SEQ ID NO: 1627474 - DNA, 15 bp, Homo sapiens
ctgggaggctcaggc

SEQ ID NO: 1627475 - DNA, 15 bp, Homo sapiens
gctgggaggctcagg

SEQ ID NO: 1627476 - DNA, 15 bp, Homo sapiens
agctgggaggctcag

SEQ ID NO: 1627477 - DNA, 15 bp, Homo sapiens
cagctgggaggctca

SEQ ID NO: 1627478 - DNA, 15 bp, Homo sapiens
gcagctgggaggctc

SEQ ID NO: 1627479 - DNA, 15 bp, Homo sapiens
ggcagctgggaggct

SEQ ID NO: 1627480 - DNA, 15 bp, Homo sapiens
tggcagctgggaggc

SEQ ID NO: 1627481 - DNA, 15 bp, Homo sapiens
atggcagctgggagg

SEQ ID NO: 1627482 - DNA, 15 bp, Homo sapiens
catggcagctgggag

SEQ ID NO: 1627483 - DNA, 15 bp, Homo sapiens
acatggcagctggga

SEQ ID NO: 1627484 - DNA, 15 bp, Homo sapiens
cacatggcagctggg

SEQ ID NO: 1627485 - DNA, 15 bp, Homo sapiens
gcacatggcagctgg

SEQ ID NO: 1627486 - DNA, 15 bp, Homo sapiens
ggcacatggcagctg

SEQ ID NO: 1627487 - DNA, 15 bp, Homo sapiens
aggcacatggcagct

SEQ ID NO: 1627488 - DNA, 15 bp, Homo sapiens
caggcacatggcagc

SEQ ID NO: 1627489 - DNA, 15 bp, Homo sapiens
acaggcacatggcag

SEQ ID NO: 1627490 - DNA, 15 bp, Homo sapiens
aacaggcacatggca

SEQ ID NO: 1627491 - DNA, 15 bp, Homo sapiens
caacaggcacatggc

SEQ ID NO: 1627492 - DNA, 15 bp, Homo sapiens
gcaacaggcacatgg

SEQ ID NO: 1627493 - DNA, 15 bp, Homo sapiens
tgcaacaggcacatg

SEQ ID NO: 1627494 - DNA, 15 bp, Homo sapiens
gtgcaacaggcacat

SEQ ID NO: 1627495 - DNA, 15 bp, Homo sapiens
tgtgcaacaggcaca

SEQ ID NO: 1627496 - DNA, 15 bp, Homo sapiens
gtgtgcaacaggcac

SEQ ID NO: 1627497 - DNA, 15 bp, Homo sapiens
ggtgtgcaacaggca

SEQ ID NO: 1627498 - DNA, 15 bp, Homo sapiens
aggtgtgcaacaggc

SEQ ID NO: 1627499 - DNA, 15 bp, Homo sapiens
caggtgtgcaacagg

SEQ ID NO: 1627500 - DNA, 15 bp, Homo sapiens
gcaggtgtgcaacag

SEQ ID NO: 1627501 - DNA, 15 bp, Homo sapiens
tgcaggtgtgcaaca

SEQ ID NO: 1627502 - DNA, 15 bp, Homo sapiens
gtgcaggtgtgcaac

SEQ ID NO: 1627503 - DNA, 15 bp, Homo sapiens
tgtgcaggtgtgcaa

SEQ ID NO: 1627504 - DNA, 15 bp, Homo sapiens
gtgtgcaggtgtgca

SEQ ID NO: 1627505 - DNA, 15 bp, Homo sapiens
tgtgtgcaggtgtgc

SEQ ID NO: 1627506 - DNA, 15 bp, Homo sapiens
gtgtgtgcaggtgtg

SEQ ID NO: 1627507 - DNA, 15 bp, Homo sapiens
cgtgtgtgcaggtgt

SEQ ID NO: 1627508 - DNA, 15 bp, Homo sapiens
gcgtgtgtgcaggtg

SEQ ID NO: 1627509 - DNA, 15 bp, Homo sapiens
ggcgtgtgtgcaggt

SEQ ID NO: 1627510 - DNA, 15 bp, Homo sapiens
gggcgtgtgtgcagg

SEQ ID NO: 1627511 - DNA, 15 bp, Homo sapiens
agggcgtgtgtgcag

SEQ ID NO: 1627512 - DNA, 15 bp, Homo sapiens
cagggcgtgtgtgca

SEQ ID NO: 1627513 - DNA, 15 bp, Homo sapiens
ccagggcgtgtgtgc

SEQ ID NO: 1627514 - DNA, 15 bp, Homo sapiens
gccagggcgtgtgtg

SEQ ID NO: 1627515 - DNA, 15 bp, Homo sapiens
tgccagggcgtgtgt

SEQ ID NO: 1627516 - DNA, 15 bp, Homo sapiens
gtgccagggcgtgtg

SEQ ID NO: 1627517 - DNA, 15 bp, Homo sapiens
tgtgccagggcgtgt

SEQ ID NO: 1627518 - DNA, 15 bp, Homo sapiens
gtgtgccagggcgtg

SEQ ID NO: 1627519 - DNA, 15 bp, Homo sapiens
tgtgtgccagggcgt

SEQ ID NO: 1627520 - DNA, 15 bp, Homo sapiens
atgtgtgccagggcg

SEQ ID NO: 1627521 - DNA, 15 bp, Homo sapiens
tatgtgtgccagggc

SEQ ID NO: 1627522 - DNA, 15 bp, Homo sapiens
gtatgtgtgccaggg

SEQ ID NO: 1627523 - DNA, 15 bp, Homo sapiens
tgtatgtgtgccagg

SEQ ID NO: 1627524 - DNA, 15 bp, Homo sapiens
gtgtatgtgtgccag

SEQ ID NO: 1627525 - DNA, 15 bp, Homo sapiens
tgtgtatgtgtgcca

SEQ ID NO: 1627526 - DNA, 15 bp, Homo sapiens
gtgtgtatgtgtgcc

SEQ ID NO: 1627527 - DNA, 15 bp, Homo sapiens
atgtgtgtatgtgtg

SEQ ID NO: 1627528 - DNA, 15 bp, Homo sapiens
catgtgtgtatgtgt

SEQ ID NO: 1627529 - DNA, 15 bp, Homo sapiens
gcatgtgtgtatgtg

SEQ ID NO: 1627530 - DNA, 15 bp, Homo sapiens
cgcatgtgtgtatgt

SEQ ID NO: 1627531 - DNA, 15 bp, Homo sapiens
acgcatgtgtgtatg

SEQ ID NO: 1627532 - DNA, 15 bp, Homo sapiens
cacgcatgtgtgtat

SEQ ID NO: 1627533 - DNA, 15 bp, Homo sapiens
gcacgcatgtgtgta

SEQ ID NO: 1627534 - DNA, 15 bp, Homo sapiens
tgcacgcatgtgtgt

SEQ ID NO: 1627535 - DNA, 15 bp, Homo sapiens
ctgcacgcatgtgtg

SEQ ID NO: 1627536 - DNA, 15 bp, Homo sapiens
cctgcacgcatgtgt

SEQ ID NO: 1627537 - DNA, 15 bp, Homo sapiens
gcctgcacgcatgtg

SEQ ID NO: 1627538 - DNA, 15 bp, Homo sapiens
agcctgcacgcatgt

SEQ ID NO: 1627539 - DNA, 15 bp, Homo sapiens
aagcctgcacgcatg

SEQ ID NO: 1627540 - DNA, 15 bp, Homo sapiens
caagcctgcacgcat

SEQ ID NO: 1627541 - DNA, 15 bp, Homo sapiens
acaagcctgcacgca

SEQ ID NO: 1627542 - DNA, 15 bp, Homo sapiens
cacaagcctgcacgc

SEQ ID NO: 1627543 - DNA, 15 bp, Homo sapiens
gcacaagcctgcacg

SEQ ID NO: 1627544 - DNA, 15 bp, Homo sapiens
tgcacaagcctgcac

SEQ ID NO: 1627545 - DNA, 15 bp, Homo sapiens
ctgcacaagcctgca

SEQ ID NO: 1627546 - DNA, 15 bp, Homo sapiens
tctgcacaagcctgc

SEQ ID NO: 1627547 - DNA, 15 bp, Homo sapiens
gtctgcacaagcctg

SEQ ID NO: 1627548 - DNA, 15 bp, Homo sapiens
tgtctgcacaagcct

SEQ ID NO: 1627549 - DNA, 15 bp, Homo sapiens
gtgtctgcacaagcc

SEQ ID NO: 1627550 - DNA, 15 bp, Homo sapiens
agtgtctgcacaagc

SEQ ID NO: 1627551 - DNA, 15 bp, Homo sapiens
gagtgtctgcacaag

SEQ ID NO: 1627552 - DNA, 15 bp, Homo sapiens
tgagtgtctgcacaa

SEQ ID NO: 1627553 - DNA, 15 bp, Homo sapiens
ctgagtgtctgcaca

SEQ ID NO: 1627554 - DNA, 15 bp, Homo sapiens
cctgagtgtctgcac

SEQ ID NO: 1627555 - DNA, 15 bp, Homo sapiens
ccctgagtgtctgca

SEQ ID NO: 1627556 - DNA, 15 bp, Homo sapiens
atccctgagtgtctg

SEQ ID NO: 1627557 - DNA, 15 bp, Homo sapiens
catccctgagtgtct

SEQ ID NO: 1627558 - DNA, 15 bp, Homo sapiens
ccatccctgagtgtc

SEQ ID NO: 1627559 - DNA, 15 bp, Homo sapiens
tccatccctgagtgt

SEQ ID NO: 1627560 - DNA, 15 bp, Homo sapiens
ctccatccctgagtg

SEQ ID NO: 1627561 - DNA, 15 bp, Homo sapiens
gctccatccctgagt

SEQ ID NO: 1627562 - DNA, 15 bp, Homo sapiens
agctccatccctgag

SEQ ID NO: 1627563 - DNA, 15 bp, Homo sapiens
cagctccatccctga

SEQ ID NO: 1627564 - DNA, 15 bp, Homo sapiens
gcagctccatccctg

SEQ ID NO: 1627565 - DNA, 15 bp, Homo sapiens
agcagctccatccct

SEQ ID NO: 1627566 - DNA, 15 bp, Homo sapiens
cagcagctccatccc

SEQ ID NO: 1627567 - DNA, 15 bp, Homo sapiens
gcagcagctccatcc

SEQ ID NO: 1627568 - DNA, 15 bp, Homo sapiens
agcagcagctccatc

SEQ ID NO: 1627569 - DNA, 15 bp, Homo sapiens
cagcagcagctccat

SEQ ID NO: 1627570 - DNA, 15 bp, Homo sapiens
tcagcagcagctcca

SEQ ID NO: 1627571 - DNA, 15 bp, Homo sapiens
ttcagcagcagctcc

SEQ ID NO: 1627572 - DNA, 15 bp, Homo sapiens
cttcagcagcagctc

SEQ ID NO: 1627573 - DNA, 15 bp, Homo sapiens
ccttcagcagcagct

SEQ ID NO: 1627574 - DNA, 15 bp, Homo sapiens
cccttcagcagcagc

SEQ ID NO: 1627575 - DNA, 15 bp, Homo sapiens
tcccttcagcagcag

SEQ ID NO: 1627576 - DNA, 15 bp, Homo sapiens
gtcccttcagcagca

SEQ ID NO: 1627577 - DNA, 15 bp, Homo sapiens
agtcccttcagcagc

SEQ ID NO: 1627578 - DNA, 15 bp, Homo sapiens
aagtcccttcagcag

SEQ ID NO: 1627579 - DNA, 15 bp, Homo sapiens
caagtcccttcagca

SEQ ID NO: 1627580 - DNA, 15 bp, Homo sapiens
acaagtcccttcagc

SEQ ID NO: 1627581 - DNA, 15 bp, Homo sapiens
tacaagtcccttcag

SEQ ID NO: 1627582 - DNA, 15 bp, Homo sapiens
ctacaagtcccttca

SEQ ID NO: 1627583 - DNA, 15 bp, Homo sapiens
cctacaagtcccttc

SEQ ID NO: 1627584 - DNA, 15 bp, Homo sapiens
ccctacaagtccctt

SEQ ID NO: 1627585 - DNA, 15 bp, Homo sapiens
tccctacaagtccct

SEQ ID NO: 1627586 - DNA, 15 bp, Homo sapiens
ctccctacaagtccc

SEQ ID NO: 1627587 - DNA, 15 bp, Homo sapiens
tctccctacaagtcc

SEQ ID NO: 1627588 - DNA, 15 bp, Homo sapiens
ctctccctacaagtc

SEQ ID NO: 1627589 - DNA, 15 bp, Homo sapiens
cctctccctacaagt

SEQ ID NO: 1627590 - DNA, 15 bp, Homo sapiens
gcctctccctacaag

SEQ ID NO: 1627591 - DNA, 15 bp, Homo sapiens
agcctctccctacaa

SEQ ID NO: 1627592 - DNA, 15 bp, Homo sapiens
gagcctctccctaca

SEQ ID NO: 1627593 - DNA, 15 bp, Homo sapiens
cgagcctctccctac

SEQ ID NO: 1627594 - DNA, 15 bp, Homo sapiens
acgagcctctcccta

SEQ ID NO: 1627595 - DNA, 15 bp, Homo sapiens
gacgagcctctccct

SEQ ID NO: 1627596 - DNA, 15 bp, Homo sapiens
tgacgagcctctccc

SEQ ID NO: 1627597 - DNA, 15 bp, Homo sapiens
ttgacgagcctctcc

SEQ ID NO: 1627598 - DNA, 15 bp, Homo sapiens
gttgacgagcctctc

SEQ ID NO: 1627599 - DNA, 15 bp, Homo sapiens
tgttgacgagcctct

SEQ ID NO: 1627600 - DNA, 15 bp, Homo sapiens
ttgttgacgagcctc

SEQ ID NO: 1627601 - DNA, 15 bp, Homo sapiens
cttgttgacgagcct

SEQ ID NO: 1627602 - DNA, 15 bp, Homo sapiens
gcttgttgacgagcc

SEQ ID NO: 1627603 - DNA, 15 bp, Homo sapiens
tgcttgttgacgagc

SEQ ID NO: 1627604 - DNA, 15 bp, Homo sapiens
gtgcttgttgacgag

SEQ ID NO: 1627605 - DNA, 15 bp, Homo sapiens
agtgcttgttgacga

SEQ ID NO: 1627606 - DNA, 15 bp, Homo sapiens
cagtgcttgttgacg

SEQ ID NO: 1627607 - DNA, 15 bp, Homo sapiens
acagtgcttgttgac

SEQ ID NO: 1627608 - DNA, 15 bp, Homo sapiens
aacagtgcttgttga

SEQ ID NO: 1627609 - DNA, 15 bp, Homo sapiens
gaacagtgcttgttg

SEQ ID NO: 1627610 - DNA, 15 bp, Homo sapiens
agaacagtgcttgtt

SEQ ID NO: 1627611 - DNA, 15 bp, Homo sapiens
cagaacagtgcttgt

SEQ ID NO: 1627612 - DNA, 15 bp, Homo sapiens
ccagaacagtgcttg

SEQ ID NO: 1627613 - DNA, 15 bp, Homo sapiens
tccagaacagtgctt

SEQ ID NO: 1627614 - DNA, 15 bp, Homo sapiens
ttccagaacagtgct

SEQ ID NO: 1627615 - DNA, 15 bp, Homo sapiens
gttccagaacagtgc

SEQ ID NO: 1627616 - DNA, 15 bp, Homo sapiens
ggttccagaacagtg

SEQ ID NO: 1627617 - DNA, 15 bp, Homo sapiens
aggttccagaacagt

SEQ ID NO: 1627618 - DNA, 15 bp, Homo sapiens
aaggttccagaacag

SEQ ID NO: 1627619 - DNA, 15 bp, Homo sapiens
gaaggttccagaaca

SEQ ID NO: 1627620 - DNA, 15 bp, Homo sapiens
agaaggttccagaac

SEQ ID NO: 1627621 - DNA, 15 bp, Homo sapiens
gagaaggttccagaa

SEQ ID NO: 1627622 - DNA, 15 bp, Homo sapiens
agagaaggttccaga

SEQ ID NO: 1627623 - DNA, 15 bp, Homo sapiens
gagagaaggttccag

SEQ ID NO: 1627624 - DNA, 15 bp, Homo sapiens
ggagagaaggttcca

SEQ ID NO: 1627625 - DNA, 15 bp, Homo sapiens
tggagagaaggttcc

SEQ ID NO: 1627626 - DNA, 15 bp, Homo sapiens
gtggagagaaggttc

SEQ ID NO: 1627627 - DNA, 15 bp, Homo sapiens
cgtggagagaaggtt

SEQ ID NO: 1627628 - DNA, 15 bp, Homo sapiens
acgtggagagaaggt

SEQ ID NO: 1627629 - DNA, 15 bp, Homo sapiens
cacgtggagagaagg

SEQ ID NO: 1627630 - DNA, 15 bp, Homo sapiens
ccacgtggagagaag

SEQ ID NO: 1627631 - DNA, 15 bp, Homo sapiens
gccacgtggagagaa

SEQ ID NO: 1627632 - DNA, 15 bp, Homo sapiens
ggccacgtggagaga

SEQ ID NO: 1627633 - DNA, 15 bp, Homo sapiens
gggccacgtggagag

SEQ ID NO: 1627634 - DNA, 15 bp, Homo sapiens
tgggccacgtggaga

SEQ ID NO: 1627635 - DNA, 15 bp, Homo sapiens
gtgggccacgtggag

SEQ ID NO: 1627636 - DNA, 15 bp, Homo sapiens
tgtgggccacgtgga

SEQ ID NO: 1627637 - DNA, 15 bp, Homo sapiens
ctgtgggccacgtgg

SEQ ID NO: 1627638 - DNA, 15 bp, Homo sapiens
cctgtgggccacgtg

SEQ ID NO: 1627639 - DNA, 15 bp, Homo sapiens
gcctgtgggccacgt

SEQ ID NO: 1627640 - DNA, 15 bp, Homo sapiens
ggcctgtgggccacg

SEQ ID NO: 1627641 - DNA, 15 bp, Homo sapiens
aggcctgtgggccac

SEQ ID NO: 1627642 - DNA, 15 bp, Homo sapiens
caggcctgtgggcca

SEQ ID NO: 1627643 - DNA, 15 bp, Homo sapiens
tcaggcctgtgggcc

SEQ ID NO: 1627644 - DNA, 15 bp, Homo sapiens
gtcaggcctgtgggc

SEQ ID NO: 1627645 - DNA, 15 bp, Homo sapiens
ggtcaggcctgtggg

SEQ ID NO: 1627646 - DNA, 15 bp, Homo sapiens
tggtcaggcctgtgg

SEQ ID NO: 1627647 - DNA, 15 bp, Homo sapiens
gtggtcaggcctgtg

SEQ ID NO: 1627648 - DNA, 15 bp, Homo sapiens
tgtggtcaggcctgt

SEQ ID NO: 1627649 - DNA, 15 bp, Homo sapiens
ctgtggtcaggcctg

SEQ ID NO: 1627650 - DNA, 15 bp, Homo sapiens
cctgtggtcaggcct

SEQ ID NO: 1627651 - DNA, 15 bp, Homo sapiens
ccctgtggtcaggcc

SEQ ID NO: 1627652 - DNA, 15 bp, Homo sapiens
cccctgtggtcaggc

SEQ ID NO: 1627653 - DNA, 15 bp, Homo sapiens
gcccctgtggtcagg

SEQ ID NO: 1627654 - DNA, 15 bp, Homo sapiens
agcccctgtggtcag

SEQ ID NO: 1627655 - DNA, 15 bp, Homo sapiens
cagcccctgtggtca

SEQ ID NO: 1627656 - DNA, 15 bp, Homo sapiens
acagcccctgtggtc

SEQ ID NO: 1627657 - DNA, 15 bp, Homo sapiens
cacagcccctgtggt

SEQ ID NO: 1627658 - DNA, 15 bp, Homo sapiens
ccacagcccctgtgg

SEQ ID NO: 1627659 - DNA, 15 bp, Homo sapiens
cccacagcccctgtg

SEQ ID NO: 1627660 - DNA, 15 bp, Homo sapiens
acccacagcccctgt

SEQ ID NO: 1627661 - DNA, 15 bp, Homo sapiens
gacccacagcccctg

SEQ ID NO: 1627662 - DNA, 15 bp, Homo sapiens
ggacccacagcccct

SEQ ID NO: 1627663 - DNA, 15 bp, Homo sapiens
aggacccacagcccc

SEQ ID NO: 1627664 - DNA, 15 bp, Homo sapiens
caggacccacagccc

SEQ ID NO: 1627665 - DNA, 15 bp, Homo sapiens
gcaggacccacagcc

SEQ ID NO: 1627666 - DNA, 15 bp, Homo sapiens
cgcaggacccacagc

SEQ ID NO: 1627667 - DNA, 15 bp, Homo sapiens
acgcaggacccacag

SEQ ID NO: 1627668 - DNA, 15 bp, Homo sapiens
gacgcaggacccaca

SEQ ID NO: 1627669 - DNA, 15 bp, Homo sapiens
ggacgcaggacccac

SEQ ID NO: 1627670 - DNA, 15 bp, Homo sapiens
gggacgcaggaccca

SEQ ID NO: 1627671 - DNA, 15 bp, Homo sapiens
ggggacgcaggaccc

SEQ ID NO: 1627672 - DNA, 15 bp, Homo sapiens
aggggacgcaggacc

SEQ ID NO: 1627673 - DNA, 15 bp, Homo sapiens
aaggggacgcaggac

SEQ ID NO: 1627674 - DNA, 15 bp, Homo sapiens
gaaggggacgcagga

SEQ ID NO: 1627675 - DNA, 15 bp, Homo sapiens
ggaaggggacgcagg

SEQ ID NO: 1627676 - DNA, 15 bp, Homo sapiens
aggaaggggacgcag

SEQ ID NO: 1627677 - DNA, 15 bp, Homo sapiens
gaggaaggggacgca

SEQ ID NO: 1627678 - DNA, 15 bp, Homo sapiens
cgaggaaggggacgc

SEQ ID NO: 1627679 - DNA, 15 bp, Homo sapiens
ccgaggaaggggacg

SEQ ID NO: 1627680 - DNA, 15 bp, Homo sapiens
cccgaggaaggggac

SEQ ID NO: 1627681 - DNA, 15 bp, Homo sapiens
acccgaggaagggga

SEQ ID NO: 1627682 - DNA, 15 bp, Homo sapiens
cacccgaggaagggg

SEQ ID NO: 1627683 - DNA, 15 bp, Homo sapiens
tcacccgaggaaggg

SEQ ID NO: 1627684 - DNA, 15 bp, Homo sapiens
ctcacccgaggaagg

SEQ ID NO: 1627685 - DNA, 15 bp, Homo sapiens
gctcacccgaggaag

SEQ ID NO: 1627686 - DNA, 15 bp, Homo sapiens
ggctcacccgaggaa

SEQ ID NO: 1627687 - DNA, 15 bp, Homo sapiens
aggctcacccgagga

SEQ ID NO: 1627688 - DNA, 15 bp, Homo sapiens
caggctcacccgagg

SEQ ID NO: 1627689 - DNA, 15 bp, Homo sapiens
ccaggctcacccgag

SEQ ID NO: 1627690 - DNA, 15 bp, Homo sapiens
gccaggctcacccga

SEQ ID NO: 1627691 - DNA, 15 bp, Homo sapiens
ggccaggctcacccg

SEQ ID NO: 1627692 - DNA, 15 bp, Homo sapiens
aggccaggctcaccc

SEQ ID NO: 1627693 - DNA, 15 bp, Homo sapiens
caggccaggctcacc

SEQ ID NO: 1627694 - DNA, 15 bp, Homo sapiens
acaggccaggctcac

SEQ ID NO: 1627695 - DNA, 15 bp, Homo sapiens
gacaggccaggctca

SEQ ID NO: 1627696 - DNA, 15 bp, Homo sapiens
ggacaggccaggctc

SEQ ID NO: 1627697 - DNA, 15 bp, Homo sapiens
gggacaggccaggct

SEQ ID NO: 1627698 - DNA, 15 bp, Homo sapiens
cgggacaggccaggc

SEQ ID NO: 1627699 - DNA, 15 bp, Homo sapiens
acgggacaggccagg

SEQ ID NO: 1627700 - DNA, 15 bp, Homo sapiens
aacgggacaggccag

SEQ ID NO: 1627701 - DNA, 15 bp, Homo sapiens
gaacgggacaggcca

SEQ ID NO: 1627702 - DNA, 15 bp, Homo sapiens
tgaacgggacaggcc

SEQ ID NO: 1627703 - DNA, 15 bp, Homo sapiens
ctgaacgggacaggc

SEQ ID NO: 1627704 - DNA, 15 bp, Homo sapiens
gctgaacgggacagg

SEQ ID NO: 1627705 - DNA, 15 bp, Homo sapiens
ggctgaacgggacag

SEQ ID NO: 1627706 - DNA, 15 bp, Homo sapiens
cggctgaacgggaca

SEQ ID NO: 1627707 - DNA, 15 bp, Homo sapiens
acggctgaacgggac

SEQ ID NO: 1627708 - DNA, 15 bp, Homo sapiens
aacggctgaacggga

SEQ ID NO: 1627709 - DNA, 15 bp, Homo sapiens
caacggctgaacggg

SEQ ID NO: 1627710 - DNA, 15 bp, Homo sapiens
ccaacggctgaacgg

SEQ ID NO: 1627711 - DNA, 15 bp, Homo sapiens
cccaacggctgaacg

SEQ ID NO: 1627712 - DNA, 15 bp, Homo sapiens
gcccaacggctgaac

SEQ ID NO: 1627713 - DNA, 15 bp, Homo sapiens
ggcccaacggctgaa

SEQ ID NO: 1627714 - DNA, 15 bp, Homo sapiens
gggcccaacggctga

SEQ ID NO: 1627715 - DNA, 15 bp, Homo sapiens
tgggcccaacggctg

SEQ ID NO: 1627716 - DNA, 15 bp, Homo sapiens
ctgggcccaacggct

SEQ ID NO: 1627717 - DNA, 15 bp, Homo sapiens
cctgggcccaacggc

SEQ ID NO: 1627718 - DNA, 15 bp, Homo sapiens
gcctgggcccaacgg

SEQ ID NO: 1627719 - DNA, 15 bp, Homo sapiens
agcctgggcccaacg

SEQ ID NO: 1627720 - DNA, 15 bp, Homo sapiens
aagcctgggcccaac

SEQ ID NO: 1627721 - DNA, 15 bp, Homo sapiens
gaagcctgggcccaa

SEQ ID NO: 1627722 - DNA, 15 bp, Homo sapiens
aggaagcctgggccc

SEQ ID NO: 1627723 - DNA, 15 bp, Homo sapiens
gaggaagcctgggcc

SEQ ID NO: 1627724 - DNA, 15 bp, Homo sapiens
ggaggaagcctgggc

SEQ ID NO: 1627725 - DNA, 15 bp, Homo sapiens
gggaggaagcctggg

SEQ ID NO: 1627726 - DNA, 15 bp, Homo sapiens
ggggaggaagcctgg

SEQ ID NO: 1627727 - DNA, 15 bp, Homo sapiens
aggggaggaagcctg

SEQ ID NO: 1627728 - DNA, 15 bp, Homo sapiens
gaggggaggaagcct

SEQ ID NO: 1627729 - DNA, 15 bp, Homo sapiens
ggaggggaggaagcc

SEQ ID NO: 1627730 - DNA, 15 bp, Homo sapiens
tggaggggaggaagc

SEQ ID NO: 1627731 - DNA, 15 bp, Homo sapiens
ttggaggggaggaag

SEQ ID NO: 1627732 - DNA, 15 bp, Homo sapiens
cttggaggggaggaa

SEQ ID NO: 1627733 - DNA, 15 bp, Homo sapiens
ccttggaggggagga

SEQ ID NO: 1627734 - DNA, 15 bp, Homo sapiens
accttggaggggagg

SEQ ID NO: 1627735 - DNA, 15 bp, Homo sapiens
caccttggaggggag

SEQ ID NO: 1627736 - DNA, 15 bp, Homo sapiens
tcaccttggagggga

SEQ ID NO: 1627737 - DNA, 15 bp, Homo sapiens
ttcaccttggagggg

SEQ ID NO: 1627738 - DNA, 15 bp, Homo sapiens
tttcaccttggaggg

SEQ ID NO: 1627739 - DNA, 15 bp, Homo sapiens
gtttcaccttggagg

SEQ ID NO: 1627740 - DNA, 15 bp, Homo sapiens
tgtttcaccttggag

SEQ ID NO: 1627741 - DNA, 15 bp, Homo sapiens
gtgtttcaccttgga

SEQ ID NO: 1627742 - DNA, 15 bp, Homo sapiens
agtgtttcaccttgg

SEQ ID NO: 1627743 - DNA, 15 bp, Homo sapiens
cagtgtttcaccttg

SEQ ID NO: 1627744 - DNA, 15 bp, Homo sapiens
gcagtgtttcacctt

SEQ ID NO: 1627745 - DNA, 15 bp, Homo sapiens
tgcagtgtttcacct

SEQ ID NO: 1627746 - DNA, 15 bp, Homo sapiens
ctgcagtgtttcacc

SEQ ID NO: 1627747 - DNA, 15 bp, Homo sapiens
actgcagtgtttcac

SEQ ID NO: 1627748 - DNA, 15 bp, Homo sapiens
gactgcagtgtttca

SEQ ID NO: 1627749 - DNA, 15 bp, Homo sapiens
ggactgcagtgtttc

SEQ ID NO: 1627750 - DNA, 15 bp, Homo sapiens
gggactgcagtgttt

SEQ ID NO: 1627751 - DNA, 15 bp, Homo sapiens
cgggactgcagtgtt

SEQ ID NO: 1627752 - DNA, 15 bp, Homo sapiens
ccgggactgcagtgt

SEQ ID NO: 1627753 - DNA, 15 bp, Homo sapiens
accgggactgcagtg

SEQ ID NO: 1627754 - DNA, 15 bp, Homo sapiens
caccgggactgcagt

SEQ ID NO: 1627755 - DNA, 15 bp, Homo sapiens
acaccgggactgcag

SEQ ID NO: 1627756 - DNA, 15 bp, Homo sapiens
cacaccgggactgca

SEQ ID NO: 1627757 - DNA, 15 bp, Homo sapiens
ccacaccgggactgc

SEQ ID NO: 1627758 - DNA, 15 bp, Homo sapiens
accacaccgggactg

SEQ ID NO: 1627759 - DNA, 15 bp, Homo sapiens
caccacaccgggact

SEQ ID NO: 1627760 - DNA, 15 bp, Homo sapiens
ccaccacaccgggac

SEQ ID NO: 1627761 - DNA, 15 bp, Homo sapiens
gccaccacaccggga

SEQ ID NO: 1627762 - DNA, 15 bp, Homo sapiens
agccaccacaccggg

SEQ ID NO: 1627763 - DNA, 15 bp, Homo sapiens
gagccaccacaccgg

SEQ ID NO: 1627764 - DNA, 15 bp, Homo sapiens
ggagccaccacaccg

SEQ ID NO: 1627765 - DNA, 15 bp, Homo sapiens
gggagccaccacacc

SEQ ID NO: 1627766 - DNA, 15 bp, Homo sapiens
ggggagccaccacac

SEQ ID NO: 1627767 - DNA, 15 bp, Homo sapiens
tggggagccaccaca

SEQ ID NO: 1627768 - DNA, 15 bp, Homo sapiens
atggggagccaccac

SEQ ID NO: 1627769 - DNA, 15 bp, Homo sapiens
catggggagccacca

SEQ ID NO: 1627770 - DNA, 15 bp, Homo sapiens
gcatggggagccacc

SEQ ID NO: 1627771 - DNA, 15 bp, Homo sapiens
tgcatggggagccac

SEQ ID NO: 1627772 - DNA, 15 bp, Homo sapiens
ctgcatggggagcca

SEQ ID NO: 1627773 - DNA, 15 bp, Homo sapiens
cctgcatggggagcc

SEQ ID NO: 1627774 - DNA, 15 bp, Homo sapiens
tcctgcatggggagc

SEQ ID NO: 1627775 - DNA, 15 bp, Homo sapiens
gtcctgcatggggag

SEQ ID NO: 1627776 - DNA, 15 bp, Homo sapiens
cgtcctgcatgggga

SEQ ID NO: 1627777 - DNA, 15 bp, Homo sapiens
ccgtcctgcatgggg

SEQ ID NO: 1627778 - DNA, 15 bp, Homo sapiens
cccgtcctgcatggg

SEQ ID NO: 1627779 - DNA, 15 bp, Homo sapiens
gcccgtcctgcatgg

SEQ ID NO: 1627780 - DNA, 15 bp, Homo sapiens
ggcccgtcctgcatg

SEQ ID NO: 1627781 - DNA, 15 bp, Homo sapiens
tggcccgtcctgcat

SEQ ID NO: 1627782 - DNA, 15 bp, Homo sapiens
ctggcccgtcctgca

SEQ ID NO: 1627783 - DNA, 15 bp, Homo sapiens
cctggcccgtcctgc

SEQ ID NO: 1627784 - DNA, 15 bp, Homo sapiens
gcctggcccgtcctg

SEQ ID NO: 1627785 - DNA, 15 bp, Homo sapiens
agcctggcccgtcct

SEQ ID NO: 1627786 - DNA, 15 bp, Homo sapiens
cagcctggcccgtcc

SEQ ID NO: 1627787 - DNA, 15 bp, Homo sapiens
ccagcctggcccgtc

SEQ ID NO: 1627788 - DNA, 15 bp, Homo sapiens
cccagcctggcccgt

SEQ ID NO: 1627789 - DNA, 15 bp, Homo sapiens
tcccagcctggcccg

SEQ ID NO: 1627790 - DNA, 15 bp, Homo sapiens
ctcccagcctggccc

SEQ ID NO: 1627791 - DNA, 15 bp, Homo sapiens
actcccagcctggcc

SEQ ID NO: 1627792 - DNA, 15 bp, Homo sapiens
cactcccagcctggc

SEQ ID NO: 1627793 - DNA, 15 bp, Homo sapiens
gcactcccagcctgg

SEQ ID NO: 1627794 - DNA, 15 bp, Homo sapiens
ggcactcccagcctg

SEQ ID NO: 1627795 - DNA, 15 bp, Homo sapiens
cggcactcccagcct

SEQ ID NO: 1627796 - DNA, 15 bp, Homo sapiens
gcggcactcccagcc

SEQ ID NO: 1627797 - DNA, 15 bp, Homo sapiens
ggcggcactcccagc

SEQ ID NO: 1627798 - DNA, 15 bp, Homo sapiens
aggcggcactcccag

SEQ ID NO: 1627799 - DNA, 15 bp, Homo sapiens
aaggcggcactccca

SEQ ID NO: 1627800 - DNA, 15 bp, Homo sapiens
gaaggcggcactccc

SEQ ID NO: 1627801 - DNA, 15 bp, Homo sapiens
ggaaggcggcactcc

SEQ ID NO: 1627802 - DNA, 15 bp, Homo sapiens
aggaaggcggcactc

SEQ ID NO: 1627803 - DNA, 15 bp, Homo sapiens
caggaaggcggcact

SEQ ID NO: 1627804 - DNA, 15 bp, Homo sapiens
acaggaaggcggcac

SEQ ID NO: 1627805 - DNA, 15 bp, Homo sapiens
cacaggaaggcggca

SEQ ID NO: 1627806 - DNA, 15 bp, Homo sapiens
gcacaggaaggcggc

SEQ ID NO: 1627807 - DNA, 15 bp, Homo sapiens
ggcacaggaaggcgg

SEQ ID NO: 1627808 - DNA, 15 bp, Homo sapiens
tggcacaggaaggcg

SEQ ID NO: 1627809 - DNA, 15 bp, Homo sapiens
ttggcacaggaaggc

SEQ ID NO: 1627810 - DNA, 15 bp, Homo sapiens
tttggcacaggaagg

SEQ ID NO: 1627811 - DNA, 15 bp, Homo sapiens
atttggcacaggaag

SEQ ID NO: 1627812 - DNA, 15 bp, Homo sapiens
aatttggcacaggaa

SEQ ID NO: 1627813 - DNA, 15 bp, Homo sapiens
gaatttggcacagga

SEQ ID NO: 1627814 - DNA, 15 bp, Homo sapiens
tgaatttggcacagg

SEQ ID NO: 1627815 - DNA, 15 bp, Homo sapiens
ctgaatttggcacag

SEQ ID NO: 1627816 - DNA, 15 bp, Homo sapiens
actgaatttggcaca

SEQ ID NO: 1627817 - DNA, 15 bp, Homo sapiens
cactgaatttggcac

SEQ ID NO: 1627818 - DNA, 15 bp, Homo sapiens
ccactgaatttggca

SEQ ID NO: 1627819 - DNA, 15 bp, Homo sapiens
cccactgaatttggc

SEQ ID NO: 1627820 - DNA, 15 bp, Homo sapiens
ccccactgaatttgg

SEQ ID NO: 1627821 - DNA, 15 bp, Homo sapiens
tccccactgaatttg

SEQ ID NO: 1627822 - DNA, 15 bp, Homo sapiens
gtccccactgaattt

SEQ ID NO: 1627823 - DNA, 15 bp, Homo sapiens
agtccccactgaatt

SEQ ID NO: 1627824 - DNA, 15 bp, Homo sapiens
gagtccccactgaat

SEQ ID NO: 1627825 - DNA, 15 bp, Homo sapiens
tgagtccccactgaa

SEQ ID NO: 1627826 - DNA, 15 bp, Homo sapiens
ctgagtccccactga

SEQ ID NO: 1627827 - DNA, 15 bp, Homo sapiens
actgagtccccactg

SEQ ID NO: 1627828 - DNA, 15 bp, Homo sapiens
cactgagtccccact

SEQ ID NO: 1627829 - DNA, 15 bp, Homo sapiens
gcactgagtccccac

SEQ ID NO: 1627830 - DNA, 15 bp, Homo sapiens
ggcactgagtcccca

SEQ ID NO: 1627831 - DNA, 15 bp, Homo sapiens
gggcactgagtcccc

SEQ ID NO: 1627832 - DNA, 15 bp, Homo sapiens
tgggcactgagtccc

SEQ ID NO: 1627833 - DNA, 15 bp, Homo sapiens
ctgggcactgagtcc

SEQ ID NO: 1627834 - DNA, 15 bp, Homo sapiens
cctgggcactgagtc

SEQ ID NO: 1627835 - DNA, 15 bp, Homo sapiens
gcctgggcactgagt

SEQ ID NO: 1627836 - DNA, 15 bp, Homo sapiens
ggcctgggcactgag

SEQ ID NO: 1627837 - DNA, 15 bp, Homo sapiens
gggcctgggcactga

SEQ ID NO: 1627838 - DNA, 15 bp, Homo sapiens
gccagggcctgggca

SEQ ID NO: 1627839 - DNA, 15 bp, Homo sapiens
ggccagggcctgggc

SEQ ID NO: 1627840 - DNA, 15 bp, Homo sapiens
tggccagggcctggg

SEQ ID NO: 1627841 - DNA, 15 bp, Homo sapiens
gtggccagggcctgg

SEQ ID NO: 1627842 - DNA, 15 bp, Homo sapiens
cgtggccagggcctg

SEQ ID NO: 1627843 - DNA, 15 bp, Homo sapiens
tcgtggccagggcct

SEQ ID NO: 1627844 - DNA, 15 bp, Homo sapiens
ctcgtggccagggcc

SEQ ID NO: 1627845 - DNA, 15 bp, Homo sapiens
gctcgtggccagggc

SEQ ID NO: 1627846 - DNA, 15 bp, Homo sapiens
agctcgtggccaggg

SEQ ID NO: 1627847 - DNA, 15 bp, Homo sapiens
aagctcgtggccagg

SEQ ID NO: 1627848 - DNA, 15 bp, Homo sapiens
aaagctcgtggccag

SEQ ID NO: 1627849 - DNA, 15 bp, Homo sapiens
caaagctcgtggcca

SEQ ID NO: 1627850 - DNA, 15 bp, Homo sapiens
ccaaagctcgtggcc

SEQ ID NO: 1627851 - DNA, 15 bp, Homo sapiens
gccaaagctcgtggc

SEQ ID NO: 1627852 - DNA, 15 bp, Homo sapiens
ggccaaagctcgtgg

SEQ ID NO: 1627853 - DNA, 15 bp, Homo sapiens
aggccaaagctcgtg

SEQ ID NO: 1627854 - DNA, 15 bp, Homo sapiens
aaggccaaagctcgt

SEQ ID NO: 1627855 - DNA, 15 bp, Homo sapiens
caaggccaaagctcg

SEQ ID NO: 1627856 - DNA, 15 bp, Homo sapiens
ccaaggccaaagctc

SEQ ID NO: 1627857 - DNA, 15 bp, Homo sapiens
accaaggccaaagct

SEQ ID NO: 1627858 - DNA, 15 bp, Homo sapiens
gaccaaggccaaagc

SEQ ID NO: 1627859 - DNA, 15 bp, Homo sapiens
agaccaaggccaaag

SEQ ID NO: 1627860 - DNA, 15 bp, Homo sapiens
tagaccaaggccaaa

SEQ ID NO: 1627861 - DNA, 15 bp, Homo sapiens
gtagaccaaggccaa

SEQ ID NO: 1627862 - DNA, 15 bp, Homo sapiens
ggtagaccaaggcca

SEQ ID NO: 1627863 - DNA, 15 bp, Homo sapiens
aggtagaccaaggcc

SEQ ID NO: 1627864 - DNA, 15 bp, Homo sapiens
caggtagaccaaggc

SEQ ID NO: 1627865 - DNA, 15 bp, Homo sapiens
gcaggtagaccaagg

SEQ ID NO: 1627866 - DNA, 15 bp, Homo sapiens
ggcaggtagaccaag

SEQ ID NO: 1627867 - DNA, 15 bp, Homo sapiens
tggcaggtagaccaa

SEQ ID NO: 1627868 - DNA, 15 bp, Homo sapiens
ctggcaggtagacca

SEQ ID NO: 1627869 - DNA, 15 bp, Homo sapiens
cctggcaggtagacc

SEQ ID NO: 1627870 - DNA, 15 bp, Homo sapiens
gcctggcaggtagac
